(19) United States
(12) Patent Application Publication
(10) Pub. No.: US 2025/0228976 A1
(43) Pub. Date: Jul. 17, 2025

(54) AAV CAPSIDS THAT ENABLE CNS-WIDE GENE DELIVERY THROUGH INTERACTIONS WITH THE TRANSFERRIN RECEPTOR

(71) Applicant: The Broad Institute, Inc., Cambridge, MA (US)

(72) Inventors: Benjamin Deverman, Cambridge, MA (US); Qin Huang, Cambridge, MA (US); Ken Chan, Cambridge, MA (US); Andrew Barry, Cambridge, MA (US); Fatmaelzahraa Sobhy Abdelmouty Eid, Cambridge, MA (US)

(21) Appl. No.: 19/020,432

(22) Filed: Jan. 14, 2025

Related U.S. Application Data
(63) Continuation of application No. PCT/US2023/070285, filed on Jul. 14, 2023.
(60) Provisional application No. 63/368,470, filed on Jul. 14, 2022.
(60) Provisional application No. 63/432,336, filed on Dec. 13, 2022.

(51) Int. Cl. A61K 48/00; C07K 14/005; C12N 15/10; C12N 15/86

(52) U.S. Cl. CPC A61K 48/0058; C07K 14/005; C12N 15/1082; C12N 15/86; C12N 2750/14122; C12N 2750/14143; C12N 2750/14145

(57) ABSTRACT

An engineered AAV capsid is provided, in which at least one protein on the capsid is modified to include a n-mer motif, which promotes transduction of the capsid into the central nervous system (CNS) through interaction with the Transferrin receptor. Further embodiments provide a vector system comprising one or more vectors encoding AAV capsids and a method of delivering cargo to the CNS. The method comprises administering, in vivo or in vitro, a AAV capsid according to embodiments described herein and the AVV capsid comprises one or more cargo molecules.

### CROSS-REFERENCE TO RELATED APPLICATIONS

[0001] This application is a continuation application of PCT/US2023/070285, filed Jul. 14, 2023, which claims the benefit of U.S. Provisional Application No. 63/432,336, filed Dec. 13, 2022 and U.S. Provisional Application No. 63/368,470 filed Jul. 14, 2022. The entire contents of the above-identified applications are hereby fully incorporated herein by reference.

### STATEMENT REGARDING FEDERALLY SPONSORED RESEARCH

[0002] This invention was made with government support under Grant Nos. NS111689 and MH120096 awarded by the National Institutes of Health. The government has certain rights in the invention.

### REFERENCE TO AN ELECTRONIC SEQUENCE LISTING

[0003] Reference is made to the electronic sequence listing (“BROD-5515US_ST26.xml”; Size is 51,570,009 bytes, created on Feb. 19, 2025) is herein incorporated by reference in its entirety.

### REFERENCE TO ELECTRONIC TABLES

[0004] Reference is made to electronic Tables 1-20 and 22 filed herewith in the United States Patent and Trademark Office. Reference is also made to Tables 1-13 filed on Jul. 14, 2022, in the United States Patent and Trademark Office, and assigned Ser. No. 63/368,470. The Table are herein incorporated by reference in their entirety.

LENGTHY TABLES
The patent application contains a lengthy table section. A copy of the table is available in electronic form from the USPTO web site (https://seqdata.uspto.gov/?pageRequest=docDetail&DocID=US20250228976A1). An electronic copy of the table will also be available from the USPTO upon request and payment of the fee set forth in 37 CFR 1.19(b)(3).

### TECHNICAL FIELD

[0005] The subject matter disclosed herein relates generally to enhancing transduction of an engineered AA capsid into the central nervous system (CNS) through interaction with the Transferrin receptor. In particular examples described herein, at least one protein on the capsid is modified to include an n-mer motif. Particular examples relate to a vector system having one or more vectors encoding AAV capsids and a method of delivering cargo to the CNS, in which an AAV capsid according to the examples described herein is administered in vivo or in vitro, and the AAV capsid comprises one or more cargo molecules.

### BACKGROUND

[0006] The development of gene therapies for neurodevelopmental and neurological disorders has been constrained by the inability to efficiently deliver genes throughout the CNS. Several studies have reported engineered AAV9 capsids, most notably the AAV-PHP.B family, that are capable of highly effective gene transfer throughout the CNS after intravenous administration in adult mice. To date however, none of the engineered AAV capsids that cross the blood-brain barrier (BBB) and transduce the mouse brain with high efficiency have been shown to exhibit their enhanced CNS tropism in primates. In this work, Applicants take a mechanism-first approach and engineer AAV capsids that interact with the Transferrin Receptor (TFRC).

[0007] Citation or identification of any document in this application is not an admission that such a document is available as prior art to the present invention.

### SUMMARY

[0008] In one aspect, provided herein is a composition comprises a targeting moiety effective to increase transduction of central nervous system tissues (CNS) via binding to a transferrin receptor (TFRC), optionally further comprising a cargo coupled to or otherwise associated with the targeting moiety. In addition, one aspect provided herein is of a vector system comprising one or more vectors encoding a targeting moiety effective to increase transduction of central nervous system tissues (CNS). Additional embodiments provided herein comprise polypeptides or particles encoded or produced by a vector system herein or a cell comprising the composition, vector, polynucleotide or particle provided herein. In one aspect, provided herein is a method of delivering one or more cargos to the CNS by administering a composition provided herein.

[0009] In an example embodiment, the targeting moiety binds to the extracellular domain of TFRC. In an example embodiment, the targeting moiety binds to one or more of the apical, helical, and/or protease-like domain of the extracellular domain. In an example embodiment, the targeting moiety binds to the apical domain.

[0010] In an example embodiment, the targeting moiety comprises a n-mer motif, the n-mer motif comprising or consisting of an amino acid sequence of X₁-X₂-X₃-X₄-X₅-X₆-X₇ wherein: X₁ comprises of Y, M, F, and L; X₂ comprises of S, H, T, and A; X₃ comprises of K and R; X₄ comprises of A, G, I, L, M, N, Q, S, T, V and H; X₅ comprises of N, G, A, L, M, Q, S, and T; X₆ comprises of A, T, H, N, F, I, P, L, Y, G, S, V, D, E, M, and Q; and X₇ comprises of D and N. In an example embodiment, X₁ comprises of Y, M, and L; X₂ comprises of S, H, T, and A; X₃ comprises of K and R; X₄ comprises of A, G, I, L, M, N, Q, S, T, and V; X₅ comprises N; X₆ comprises of A, T, H, N, F, I, P, L, and Y; and X₇ comprises of D and N; or X₁ comprises of Y, M, and L; X₂ comprises of S, H, T, and A; X₃ comprises of K and R; X₄ comprises of A, G, I, L, M, N, Q, S, T, and V; X₅ comprises G; X₆ comprises of A, G, F, H, I, L, N, P, S, T, V, and Y; and X₇ comprises of D and N; or X₁ comprises of L and Y; X₂ comprises of A, H, and S; X₃ comprises of K and R; X₄ comprises of A, G, H, I, L, M, N, Q, S, T, and V; X₅ comprises G; X₆ comprises P; and X₇ comprises D; or X₁ comprises of L and Y; X₂ comprises of A, H, and S; X₃ comprises of K and R; X₄ comprises of A, G, H, I, L, M, N, Q, S, T, and V; X₅ comprises G; X₆ comprises P; and X₇ comprises N; or X₁ comprises Y; X₂ comprises S; X₃ comprises K; X₄ comprises of A, I, L, M, N, Q, S, T, and V; X₅ comprises G; X₆ comprises of X; and X₇ comprises Y, P, T, Q, V, F, L, H, S, A, E, D, I, and M; or X₁ comprises of L and Y; X₂ comprises S; X₃ comprises of R and K; X₄ comprises of V, I, T, L, and A; X₅ comprises of S and A; X₆ comprises of P, R, Y, F, H, I, K, and W; and X₇ comprises D; or X₁ comprises of F, L, M, and Y; X₂ comprises H; X₃ comprises of K and R; X₄ comprises of A, L, and M; X₅ comprises of A, G, L, M, N, Q, S, and T; X₆ comprises of A, D, E, F, H, I, L, M, N, Q, P, S, T, V, and Y; and X₇ comprises of D and N; or X₁ comprises of L, M, and Y; X₂ comprises H; X₃ comprises of K and R; X₄ comprises of A, L, and M; X₅ comprises of A, G, L, M, N, Q, S, and T; X₆ comprises of A, D, E, F, H, I, L, M, N, Q, P, S, T, V, and Y; and X₇ comprises N; or X₁ comprises of L, M, and Y; X₂ comprises H; X₃ comprises of K and R; X₄ comprises of A, L, and M; X₅ comprises of A, G, L, M, N, Q, S, and T; X₆ comprises of A, D, E, F, H, I, L, M, N, Q, P, S, T, V, and Y; and X₇ comprises D; or X₁ comprises of L, M, and Y; X₂ comprises H; X₃ comprises of K and R; X₄ comprises L; X₅ comprises of S, Q, G, T, N, and L; X₆ comprises of P, T, V, I, Q, L, and A; and X₇ comprises D; or X₁ comprises F; X₂ comprises S; X₃ comprises R; X₄ comprises L; X₅ comprises G; X₆ comprises of A, H, N, L, V, S, P, and T; and X₇ comprises N; or X₁ comprises F; X₂ comprises A; X₃ comprises R; X₄ comprises of T, S, and N; X₅ comprises G; X₆ comprises of Y, F, H, P, and A; and X₇ comprises N; or X₁ comprises F; X₂ comprises H; X₃ comprises of K and R; X₄ comprises L; X₅ comprises G; X₆ comprises of I, P, and S; and X₇ comprises of N and D. In an example embodiment, the n-mer motif is selected from the group consisting of LHRLGPN (SEQ ID NO: 36834), YSRIGPN (SEQ ID NO: 14632), LHRLGPN (SEQ ID NO: 36834), LHRLGPD (SEQ ID NO: 36413), LHRAGPD (SEQ ID NO: 36894), YSRIGPD (SEQ ID NO: 38223), LSRIGPD (SEQ ID NO: 36274), LARSGPD (SEQ ID NO: 18035), YSRNSDN (SEQ ID NO: 16626), LHKAGPN (SEQ ID NO: 36305), LSRIGPN (SEQ ID NO: 36347), LAKSGPN (SEQ ID NO: 36287), YARNGPN (SEQ ID NO: 14048) and YSRNSDN (SEQ ID NO: 16626). In an example embodiment, the n-mer motif is YSRIGPN (SEQ ID NO: 14632).

[0011] In an example embodiment, the targeting moiety comprises a n-mer motif, the n-mer motif comprising or consisting of an amino acid sequence of X₁-X₂-X₃-X₄-X₅-X₆-X₇ wherein: X₁ comprises of Y or L; X₂ comprises H; X₃ comprises A; X₄ comprises of K, R, N, and A; X₅ comprises of G, Q, L, and S; X₆ comprises of P, L, I, N, D, and T; and X₇ comprises N. In the example embodiment, the targeting moiety comprises a n-mer motif, the n-mer motif comprising or consisting of an amino acid sequence of X₁-X₂-X₃-X₄-X₅-X₆-X₇ wherein: X₁ comprises of A, F, H, I, L, N, P, R, S, T, V, and Y; X₂ comprises of A, D, E, F, G, H, I, K, L, M, N, Q, R, S, T, W, and Y; X₃ comprises S; X₄ comprises of S and T; X₅ comprises N; X₆ comprises G; and X₇ comprises of I, R, and V. In an example embodiment, X₁ comprises of F, L, and Y; X₂ comprises of D, E, H, N, Q, S, and T; X₃ comprises S; X₄ comprises of S and T; X₅ comprises N; X₆ comprises G; and X₇ comprises of I and V; or X₁ comprises of V, P, I, S, T, H, and A; X₂ comprises of A, D, E, F, G, H, I, K, L, M, N, Q, R, S, T, and Y; X₃ comprises of S; X₄ comprises of S and T; X₅ comprises N; X₆ comprises G; and X₇ comprises of I and V; or X₁ comprises of A, F, I, L, P, S, T, V, and Y; X₂ comprises of D, E, N, Q, S, and T; X₃ comprises S; X₄ comprises of T and S; X₅ comprises N; X₆ comprises G; and X₇ comprises R; or X₁ comprises R; X₂ comprises of E, D, Q, and T; X₃ comprises S; X₄ comprises of S and T; X₅ comprises N; X₆ comprises G; and X₇ comprises of I and V. In an example embodiment, the n-mer motif is selected from the group consisting of FRSTNGV (SEQ ID NO: 16070), VESTNGR (SEQ ID NO: 36431), VDSTNGV (SEQ ID NO: 12206), VQSTNGV (SEQ ID NO: 36423), VSSTNGV (SEQ ID NO: 12333), TESTNGR (SEQ ID NO: 17558), VQSTNGI (SEQ ID NO: 11292) and FVSTNGV (SEQ ID NO: 11162).

[0012] In an example embodiment, the wherein the targeting moiety comprises a n-mer motif, the n-mer motif comprising or consisting of an amino acid sequence of X₁-X₂-X₃-X₄-X₅-X₆-X₇ wherein: X₁ comprises of R and T; X₂ comprises of T, L, M, S, G, D, N, E, R, K, Y, and W; X₃ comprises of G, E, D, I, F, H, S, A, M, P, V, Y, W, Q, and T; X₄ comprises of D, T, E, H, N, and G; X₅ comprises of A, V, S, T, and D; X₆ comprises of Y, F, P and A; and X₇ comprises of A and P. In an example embodiment, X₁ comprises R; X₂ comprises of T, M, L, and S; X₃ comprises of Y, S, A, M, I, F, and P; X₄ comprises D; X₅ comprises of A, V, S, and T; X₆ comprises of Y and F; and X₇ comprises P; or X₁ comprises R; X₂ comprises of T, M, L, and S; X₃ comprises of Y, S, A, M, I, F, and P; X₄ comprises D; X₅ comprises of A, V, S, and T; X₆ comprises of Y and F; and X₇ comprises A; or X₁ comprises R; X₂ comprises of G, T, D, S, N, and E; X₃ comprises of E, D, P, S, and G; X₄ comprises of D, T, E, H, and N; X₅ comprises of V, A, and T; X₆ comprises of Y and F; and X₇ comprises P; or X₁ comprises R; X₂ comprises of G, L, T, D, and S; X₃ comprises of D, P, S, and G; X₄ comprises of D, E, H, and N; X₅ comprises of V and T; X₆ comprises of Y and F; and X₇ comprises P; or X₁ comprises T; X₂ comprises of R, K, Y, and W; X₃ comprises of E, W, Y, Q, S, and T; X₄ comprises G; X₅ comprises D; X₆ comprises of P and A; and X₇ comprises of A and P. In an example embodiment, the n-mer motif is selected from the group consisting of RGEDVYP (SEQ ID NO: 36864), RLEDVFP (SEQ ID NO: 36264), RTYDSYP (SEQ ID NO: 37938), RTYDAYP (SEQ ID NO: 38571), RTYDSFP (SEQ ID NO: 37806), RTETVYP (SEQ ID NO: 36486), RTETVFP (SEQ ID NO: 36389), and RTEHVFP (SEQ ID NO: 36603).

[0013] In an example embodiment, the targeting moiety comprises a n-mer motif, the n-mer motif comprising or consisting of an amino acid sequence of X₁-X₂-X₃-X₄-X₅-X₆-X₇ wherein: X₁ comprises L; X₂ comprises C; X₃ comprises of K and R; X₄ comprises P; X₅ comprises C; X₆ comprises of L, S, D, A, N, Q, H, P, and V; and X₇ comprises of E, T, G, A, D, N, and S. In an example embodiment, the n-mer motif is LCKPCLD (SEQ ID NO: 36437) or LCKPCPT (SEQ ID NO: 36438). In an example embodiment, the targeting moiety comprises a n-mer motif, the n-mer motif comprising or consisting of an amino acid sequence of X₁-X₂-X₃-X₄-X₅-X₆-X₇ wherein: X₁ comprises of Y, and F; X₂ comprises of W, F, and Y; X₃ comprises of S, T, H, A and Q; X₄ comprises G; X₅ comprises of I, T, V, Q, M, H, K, and R; X₆ comprises of I, P, H, L, M, A, Q, T, V, K, and R; and X₇ comprises of A, S, D, E, and N. In an example embodiment, X₁ comprises of Y and F; X₂ comprises of W, F, and Y; X₃ comprises of T and S; X₄ comprises G; X₅ comprises of I, T, V, Q, M, and H; X₆ comprises of I, P, H, L, M, A, Q, T, and V; and X₇ comprises of A, S, D, and E; or X₁ comprises of Y and F; X₂ comprises of W, F, and Y; X₃ comprises of T and S; X₄ comprises G; X₅ comprises of I, T, V, Q, M, and H; X₆ comprises of K and R; and X₇ comprises of A, S, D, and E; or X₁ comprises of Y and F; X₂ comprises of W, F, and Y; X₃ comprises of T and S; X₄ comprises G; X₅ comprises of K and R; X₆ comprises of I, P, H, L, M, A, Q, T, and V; and X₇ comprises of A, S, D, and E; or X₁ comprises Y; X₂ comprises F; X₃ comprises T; X₄ comprises G; X₅ comprises of K, R, Q, M, H, and I; X₆ comprises of T, R, H, K, V, and L; and X₇ comprises E; or X₁ comprises Y; X₂ comprises F; X₃ comprises of T, S, H, and A; X₄ comprises G; X₅ comprises of K, R, and T; X₆ comprises of I, P, H, L, M, A, Q, and T; and X₇ comprises of D and N; or X₁ comprises Y; X₂ comprises W; X₃ comprises T; X₄ comprises G; X₅ comprises of K, M, V, and T; X₆ comprises of P, V, I, H, Q, T, M, and L; and X₇ comprises of E and D; or X₁ comprises of Y and F; X₂ comprises F; X₃ comprises of S, H, A, and Q; X₄ comprises G; X₅ comprises of K, Q, and R; X₆ comprises of I, V, L, K, H, R, Q, and M; and X₇ comprises E;

[0014] In the example embodiment, the targeting moiety comprises a n-mer motif, the n-mer motif comprising or consisting of an amino acid sequence of X₁-X₂-X₃-X₄-X₅-X₆-X₇ wherein: X₁ comprises of K, R, S, G, N, T, M, Q, V, D, I, and E; X₂ comprises of D, S, N, M, L, G, P, E, and A; X₃ comprises of E, D, G, S, A, R, Q, T, P, and N; X₄ comprises of F, Y, T, V, S, N, A, G, and H; X₅ comprises of T, K, S, R, V, and H; X₆ comprises of T, S, G, V, A, K, R, N, D, E, and H; and X₇ comprises of F, W, and Y. In an example embodiment, X₁ comprises of K and R; X₂ comprises of D, S, and N; X₃ comprises E; X₄ comprises F; X₅ comprises of T, K, S, R, and V; X₆ comprises of T, S, G, and V; and X₇ comprises of F, W, and Y; or X₁ comprises of K and R; X₂ comprises D; X₃ comprises D; X₄ comprises of F and Y; X₅ comprises of T, S, V, and H; X₆ comprises of T, S, G, V, and A; and X₇ comprises of F, W, and Y; or X₁ comprises of S, R, G, N, T, M, and Q; X₂ comprises D; X₃ comprises G; X₄ comprises of T, V, S, N, and Y; X₅ comprises S; X₆ comprises of K and R; and X₇ comprises W; or X₁ comprises of R, V, D, I, Q, and K; X₂ comprises of M, L, and G; X₃ comprises of S, E, A, R, and Q; X₄ comprises D; X₅ comprises R; X₆ comprises of T, A, S, G, K, and N; and X₇ comprises W; or X₁ comprises of D, I, E, Q, V, S, and K; X₂ comprises of L, M, G, and P; X₃ comprises of E, A, S, D, Q, and T; X₄ comprises of S and A; X₅ comprises R; X₆ comprises of D, S, E, T, G, and A; and X₇ comprises W; or X₁ comprises G; X₂ comprises of E, S, P, G, and A; X₃ comprises of D, E, P, and N; X₄ comprises of G, H, T, S, and N; X₅ comprises V; X₆ comprises of R, K, and S; and X₇ comprises of W and Y; or X₁ comprises R; X₂ comprises E; X₃ comprises of D, E, P, and N; X₄ comprises of G, H, T, S, and N; X₅ comprises V; X₆ comprises of R, K, and S; and X₇ comprises of W and Y; or X₁ comprises G; X₂ comprises of G and S; X₃ comprises of G, E, S, A, P, and D; X₄ comprises of T, G, and S; X₅ comprises S; X₆ comprises of S, T, H, K, R, A, and N; and X₇ comprises W. In an example embodiment, the n-mer motif is selected from the group consisting of KDEFTTF (SEQ ID NO: 36308), KDDFTTY (SEQ ID NO: 36336), RDEFTTY (SEQ ID NO: 36615), KDEFSTY (SEQ ID NO: 36390), RDEFTSF (SEQ ID NO: 36701), and REDHVSW (SEQ ID NO: 37067).

[0015] In an example embodiment, the targeting moiety comprises a n-mer motif, the n-mer motif comprising or consisting of an amino acid sequence of X₁-X₂-X₃-X₄-X₅-X₆-X₇ wherein: X₁ comprises of V, I, R, N and D; X₂ comprises of A, G, and S; X₃ comprises of L, T, S, H, and G; X₄ comprises of K, R, and E; X₅ comprises G; X₆ comprises of W, R, A, and I; and X₇ comprises of D and G. In an example embodiment the n-mer motif is selected from the group consisting of IALKGWD (SEQ ID NO: 36248), NALEGRD (SEQ ID NO: 36407), VALEGRD (SEQ ID NO: 36604), and VALKGWD (SEQ ID NO: 17701). In an example embodiment the targeting moiety comprises a n-mer motif, the n-mer motif comprising or consisting of an amino acid sequence of X₁-X₂-X₃-X₄-X₅-X₆-X₇ wherein: X₁ comprises of L, M, and W; X₂ comprises of F, R, W, K, T, and Y; X₃ comprises of D and S; X₄ comprises G; X₅ comprises T; X₆ comprises of P, G, S, N, A, and R; and X₇ comprises of A, P, S, and Y.

[0016] In an example embodiment, the targeting moiety comprises a n-mer motif, the n-mer motif comprising or consisting of an amino acid sequence of X₁-X₂-X₃-X₄-X₅-X₆-X₇ wherein: X₁ comprises of P, N, and K; X₂ comprises of Y and F; X₃ comprises of A; X₄ comprises of R and K; X₅ comprises of S; X₆ comprises of P, V, A, R, I, L, S, E; and X₇ comprises of E, D, M, and L.

[0017] In an example embodiment, a composition comprising a targeting moiety effective to increase transduction of CNS tissues comprises a n-mer motif, the n-mer motif comprising or consisting of an amino acid sequence of Z₁-X₁-Z₂-X₂-X₃-X₄-X₅ wherein Z₁ comprises Y, F, or L, Z₂ comprises S, R, or K, X₁-X₅ are independently selected amino acids. In an example embodiment, X₁ optionally comprises of A, S, or H; X₂ optionally comprises of S, T, L, or I; X₃ optionally comprises N or G; X₄ optionally comprises G; X₅ optionally comprises of N, D, I, V, or R. In an example embodiment, the n-mer motif is selected from the group consisting of YSRIGPN (SEQ ID NO: 14632), YSRLNMN (SEQ ID NO: 14301), YSRLNKD (SEQ ID NO: 16577), and YHRLSNN (SEQ ID NO: 16636). In an example embodiment, the targeting moiety comprises a n-mer motif, the n-mer motif comprising or consisting of an amino acid sequence of is X₁-H-X₂-L-X₃-X₄-X₅ wherein X₁-X₅ are independently selected amino acids. In an example embodiment, the n-mer motif is VHRLQDK (SEQ ID NO: 16602) or LHALSHN (SEQ ID NO: 16608).

[0018] In an example embodiment, the n-mer motif is PSATNGV (SEQ ID NO: 20486), QVSTNGI (SEQ ID NO: 16021), SYSSNGV (SEQ ID NO: 16234), HQSSNGV (SEQ ID NO: 15978), VGSINGI (SEQ ID NO: 16200), AMSTNGR (SEQ ID NO: 16000), SASTNGV (SEQ ID NO: 16127), YMSTNGV (SEQ ID NO: 16042), YYSSNGV (SEQ ID NO: 16206), VHSTNGI (SEQ ID NO: 16134), PLSTNGV (SEQ ID NO: 16233), VYSTNGI (SEQ ID NO: 16059), IISTNGV (SEQ ID NO: 16054), RSVSSNGV (SEQ ID NO: 20502), YKSSNGV (SEQ ID NO: 16123), FRSTNGV (SEQ ID NO: 16070, and/or FVSTNGV (SEQ ID NO: 11162). In an example embodiment, the n-mer is selected from any one of the amino acid sequences of Tables 1-22, or any combination thereof. In an example embodiment, the n-mer motif is selected from the amino acid sequences of SEQ ID NO: 10952-20481 and 36241-42428. In an example embodiment, the targeting moiety is part of a viral capsid protein, including an AAV capsid.

[0019] In an example embodiment, the targeting moiety is inserted or substituted in loop IV, loop VIII, or both of an AAV capsid protein. In an example embodiment, the targeting moiety is IPFSRVNPDT (SEQ ID NO: 20285), LGFARTGAAD (SEQ ID NO: 20274), LGFTKSSGSD (SEQ ID NO: 20270), LRYSKTQGES (SEQ ID NO: 20266), SPYARSSAGV (SEQ ID NO: 20271), VGWSRLDLTT (SEQ ID NO: 20262). In an example embodiment, the n-mer is inserted between two amino acids of the one or more capsid proteins such that the n-mer is external to the AAV capsid when the protein comprising the n-mer is incorporated into the AAV capsid. In an example embodiment, the viral capsid protein is an AAV viral capsid protein. In an example embodiment, the n-mer is inserted between amino acids 588 and 589 of a capsid protein of AAV9, or in an analogous position of a capsid protein from AAV1, AAV2, AAV3, AAV4, AAV5, AAV6, AAV7, AAV8, AAVrh8, AAV rh.74, or AAV rh. 10. In an example embodiment, the targeting moiety is inserted between two consecutive amino acids within amino acids 451-460 of a capsid protein of AAV9, or in an analogous position of a capsid protein from AAV1, AAV2, AAV3, AAV4, AAV5, AAV6, AAV7, AAV8, AAVrh8, AAV rh.74, or AAV rh. 10. In an example embodiment, the capsid protein is VP1, VP2, VP3, or a combination thereof.

[0020] In an example embodiment, the cargo is a polynucleotide, one or more polypeptides, a ribonucleoprotein complex. In an example embodiment, the polynucleotide encodes one or more polypeptides and/or a RNAi oligonucleotide. In an example embodiment, the polynucleotide encodes one or more polypeptides. In an example embodiment, the one or more polypeptides comprise an enzyme or an antibody, including therapeutically useful enzyme or antibody (or antigen-binding form thereof). In an example embodiment, the polynucleotide encodes a CRISPR-Cas system. In an exemplary embodiment, the cargo is a recombinant AAV genome that is incorporated into a capsid comprising the n-mer and the recombinant AAV genome encodes a therapeutic protein or nucleic acid, including being operably linked to an appropriate regulatory sequence that directs expression of the protein or nucleic acid in the target tissue. In an example embodiment, the polynucleotide is operably linked to a regulatory sequences that promotes expression in the CNS.

[0021] In one aspect, A viral capsid or viral particle, comprising any composition as described herein. In an example embodiment, the viral capsid or viral particle further comprises a recombinant viral genome, wherein the recombinant viral genome encodes a therapeutic protein or nucleic acid, control polypeptide or nucleic acid, and/or selectable marker polypeptide or nucleic acid. In an example embodiment, the therapeutic protein or nucleic acid, control polypeptide or nucleic acid, and/or selectable marker polypeptide or nucleic acid is operably linked to a regulatory sequence that promotes expression in the CNS. In an example embodiment, the viral capsid or viral particle is an AAV viral capsid or AAV viral particle. In an example embodiment, the recombinant viral genome is a recombinant AAV viral genome. In an example embodiment, the targeting moiety is inserted between amino acids of 588 and 589 of a capsid protein of AAV9, or in an analogous position of a capsid protein from AAV1, AAV2, AAV3, AAV4, AAV5, AAV6, AAV7, AAV8, AAVrh8, AAV rh.74, or AAV rh. 10.

[0022] In one aspect, provided herein is a composition comprising one or more vectors encoding a targeting moiety effective to increase transduction of central nervous system tissues (CNS). In an example embodiment, a vector system comprising one or more vectors, wherein at least one of the one or more vectors encodes a targeting moiety effective to increase transduction of central nervous system tissues (CNS) via binding to a transferrin receptor (TFRC), and optionally wherein at least one of the one or more vectors encodes a recombinant AAV genome comprising a transgene encoding a protein or a polypeptide Also provided is a composition comprising a polypeptide or viral capsid comprising the targeting moiety, e.g., the n-mer that is effective to increase transduction of CNS tissues as described herein optionally further comprising a cargo, such as a recombinant AAV genome encoding a therapeutic protein or nucleic acid incorporated within, coupled to or otherwise associated with the targeting moiety containing polypeptide. In an example embodiment, the targeting moiety binds to the extracellular domain of TFRC. In an example embodiment, the targeting moiety binds to one or more of the apical, helical, and/or protease-like domain of the extracellular domain. In an example embodiment, the targeting moiety binds the apical domain. In an example embodiment, the targeting moiety comprises any n-mer motif described herein. In an example embodiment, the targeting moiety comprises a n-mer motif, the n-mer motif comprising or consisting of an amino acid sequence of Z₁-X₁-Z₂-X₂-X₃-X₄-X₅ wherein Z₁ comprises of Y, F, and L, Z₂ comprises of S, R, and K, X₁-X₅ are independently selected amino acids. In an example embodiment, X₁ optionally comprises of A, S, or H; X₂ optionally comprises of S, T, L, or I; X₃ optionally comprises N or G; X₄ optionally comprises G; X₅ optionally comprises of N, D, I, V, or R. In an example embodiment, the n-mer motif is selected from the group consisting of YSRIGPN (SEQ ID NO: 14632), YSRLNMN (SEQ ID NO: 14301), YSRLNKD (SEQ ID NO: 16577), and YHRLSNN (SEQ ID NO: 16636).

[0023] In an example embodiment, the targeting moiety encoded by a vector system or incorporated into a viral vector, including an AAV capsid, comprises a n-mer motif, the n-mer motif comprising or consisting of an amino acid sequence of is X₁-H-X₂-L-X₃-X₄-X₅ wherein X₁-X₅ are independently selected amino acids. In an example embodiment, the n-mer motif is VHRLQDK (SEQ ID NO: 16602) or LHALSHN (SEQ ID NO: 16608). In an example embodiment, the n-mer motif is comprises PSATNGV (SEQ ID NO: 20486), QVSTNGI (SEQ ID NO: 16021), SYSSNGV (SEQ ID NO: 16234), HQSSNGV (SEQ ID NO: 15978), VGSINGI (SEQ ID NO: 16199), AMSTNGR (SEQ ID NO: 16000), SASTNGV (SEQ ID NO: 16127), YMSTNGV (SEQ ID NO: 16042), YYSSNGV (SEQ ID NO: 16206), VHSTNGI (SEQ ID NO: 16134), PLSTNGV (SEQ ID NO: 16233), VYSTNGI (SEQ ID NO: 16059), IISTNGV (SEQ ID NO: 16054), RSVSSNGV (SEQ ID NO: 20502), YKSSNGV (SEQ ID NO: 16123), FRSTNGV (SEQ ID NO: 16070), and/or FVSTNGV (SEQ ID NO: 11162). In an example embodiment, provided herein are vectors or recombinant polypeptides, including, engineered AAV capsids wherein the n-mer is selected from any one as listed in any of Tables 1-22, or any combination thereof. In an example embodiment, provided herein are vectors wherein the n-mer motif is selected from SEQ ID NOS: 10952-20481 and 36241-42428. In an example embodiment, provided herein are vectors which encode the targeting moiety is part of a viral capsid protein.

[0024] In an example embodiment, the targeting moiety is inserted or substituted in loop IV and/or loop VIII of an AAV capsid protein. In an example embodiment, the targeting moiety is IPFSRVNPDT (SEQ ID NO: 20285), LGFARTGAAD (SEQ ID NO: 20274), LGFTKSSGSD (SEQ ID NO: 20270), LRYSKTQGES (SEQ ID NO: 20266), SPYARSSAGV (SEQ ID NO: 20271), VGWSRLDLTT (SEQ ID NO: 20262). In an example embodiment, provided herein are vectors wherein the n-mer is inserted between two amino acids of the one or more capsid proteins such that the n-mer is external to the AAV capsid. In an example embodiment, provided herein are vectors wherein the viral capsid protein is an AAV viral capsid protein. In an example embodiment, provided herein are vectors wherein the n-mer is inserted between amino acids 588 and 589 of a capsid protein of AAV9, or in an analogous position of a capsid protein from AAV1, AAV2, AAV3, AAV4, AAV5, AAV6, AAV7, AAV8, AAVrh8, AAV rh.74, or AAV rh. 10. In an example embodiment, the targeting moiety is inserted between two amino acids within amino acids 451-460 of a capsid protein of AAV9, or in an analogous position of a capsid protein from AAV1, AAV2, AAV3, AAV4, AAV5, AAV6, AAV7, AAV8, AAVrh8, AAV rh. 74, or AAV rh. 10. In an example embodiment, provided herein are vectors wherein the capsid protein is VP1, VP2, VP3, or a combination thereof.

[0025] In an example embodiment, provided herein are vectors wherein the cargo is a polynucleotide, one or more polypeptides, a ribonucleoprotein complex. In an example embodiment, provided herein are vectors wherein the polynucleotide encodes one or more polypeptides and/or a RNAi oligonucleotide. In an example embodiment, provided herein are vectors wherein the polynucleotide encodes one or more polypeptides. In an example embodiment, provided herein are vectors wherein the one or more polypeptides comprise enzymes or antibodies. In an example embodiment, the polynucleotide encodes a CRISPR-Cas system. In an example embodiment, the polynucleotide is operably linked to a regulatory sequence that promotes expression in the CNS.

[0026] In one aspect, provided herein is a composition comprising a polypeptide encoded or produced by the vector systems described herein. In an example embodiment, the polypide is a capsid protein, optionally an AAV capsid polypeptide. In one aspect, provided herein is a composition comprising a particle produced by the vector systems described herein. In an example embodiment, the particle is a viral particle, optionally an AAV particle. In one aspect, provided herein is a composition comprising a cell comprising the composition, vector, polypeptide, or particle described herein.

[0027] In one aspect, provided herein is a method of delivering one or more cargos to the CNS, comprising: administering, in vivo or in vitro, the engineered AAV capsid as described herein, or the vector as described herein. In an example embodiment, provided herein a method of delivery wherein the cargo is a recombinant AAV genome which encodes an RNAi oligonucleotide, a polynucleotide encoding a polypeptide, or a polypeptide, optionally operably linked to regulatory sequences that promote expression in the target tissue (such as the CNS). In an example embodiment, provided herein a method of delivery wherein the polypeptide includes an enzyme or antibody. In an example embodiment, provided herein a method of delivery wherein the cargo encodes a Cas polypeptide, a guide molecule, or both. In an example embodiment, provided herein a method of delivery wherein the cargo encodes a nuclease or a nucleic acid component of a RNA-guided nuclease. In an example embodiment, provided herein a method of delivery wherein the cargo is one or more polynucleotides encoding the nuclease and nucleic acid component of a RNA-guided nuclease.

[0028] In one aspect, a method of creating humanized transgenic non-human animals comprising: delivering to one or more cells of a non-human animal a vector system or a recombinant viral particle comprising a recombinant viral genome, wherein the vector system or recombinant viral genome encodes a human transferrin polypeptide, wherein the encoded human transferrin polypeptide is under the control of a tissue-specific promoter or miRNA binding element that has selective activity in the desired cell, tissue, or organ.

[0029] In example embodiments, the one or more cells are endothelial cells. In an example embodiment, the one or more cells are CNS cells. In example embodiments, the one or more cells are of the CNS vasculature, lungs, kidneys, liver, or any combination thereof. In example embodiments, the endothelial cells are of the CNS vasculature. In an example embodiment, the recombinant viral particle, optionally an AAV viral particle, comprises a capsid polypeptide, optionally an AAV capsid polypeptide, wherein the capsid polypeptide comprises a CNS specific n-mer motif. In an example embodiment, the CNS-specific n-mer motif comprises X1-N-X3-X4-X5-X6-X7, wherein X5 is independently selected from K or R, and X1, X3, X4, X6 and X7 are independently selected from any amino acid, optionally wherein the overall charge of the n-mer motif at neutral pH is between 0 and +2. In an example embodiment, the CNS-specific n-mer motif comprises or consists of NNSTRGG (SEQ ID NO: 42429), GNSARNI (SEQ ID NO: 42430), and GNSVRDF (SEQ ID NO: 42431). In an example embodiment, the transgenic non-human animal is a rodent, optionally a mouse.

[0030] In one aspect, provided herein is a humanized transgenic non-human animal comprising: one or more cells expressing a human transferrin polypeptide, optionally wherein the one or more cells are CNS cells. In an example embodiment, the transgenic non-human animal is a rodent, optionally a mouse. A humanized transgenic non-human animal produced by any method described herein. In an example embodiment, the humanized non-human animal has a suppressed immune system.

[0031] In one aspect, provided herein is a method of screening n-mer motifs capable of conferring transduction of central nervous system (CNS) tissues via binding to a transferrin receptor (TFRC) in humanized transgenic non-human animals comprising: introducing one or more compositions comprising a candidate n-mer motif to humanized non-human transgenic animal described herein; and detecting binding of the compositions that bind to a transferrin receptor (TFRC) and/or detecting transduction or uptake by one or more CNS cells of the humanized transgenic non-human animal. In an example embodiment, the candidate n-mer motif comprises or consists of X1-N-X3-X4-X5-X6-X7, wherein X5 is independently selected from K or R, and X1, X3, X4, X6 and X7 are independently selected from any amino acid, optionally wherein the overall charge of the n-mer motif at neutral pH is between 0 and +2. In an example embodiment, the composition is a viral particle comprising one or more capsid proteins each comprising the candidate n-mer motif.

[0032] In an example embodiment, the viral particle is an AAV viral particle and the one or more capsid proteins is an AAV capsid protein, optionally wherein the candidate n-mer motif is inserted in between amino acids 588-589 of an AAV9 capsid polypeptide or in an analogous position of a capsid protein from AAV1, AAV2, AAV3, AAV4, AAV5, AAV6, AAV7, AAV8, AAVrh8, AAV rh.74, or AAV rh. 10. In an example embodiment, at least one of the one or more compositions furthers comprises a cargo. In an example embodiment, the cargo is or encodes a therapeutic nucleic acid or polypeptide, a selectable marker, or a control polypeptide or nucleic acid.

[0033] In one aspect, a method of in vivo modeling comprising introducing a second vector system capable of targeting a transgenic polypeptide in a transgenic non-human animal as described herein. In example embodiments, the non-human animal has a suppressed immune system.

[0034] The method of screening vector systems capable of transduction of central nervous system (CNS) tissues via binding to a transferrin receptor (TFRC) in humanized transgenic non-human animals comprising: (a) introducing a plurality of vector systems to one or more humanized transgenic non-human animal and (b) detecting the vector systems that bind to a transferrin receptor (TFRC).

[0035] These and other aspects, objects, features, and advantages of the example embodiments will become apparent to those having ordinary skill in the art upon consideration of the following detailed description of example embodiments.

### BRIEF DESCRIPTION OF THE DRAWINGS

[0036] An understanding of the features and advantages of the present invention will be obtained by reference to the following detailed description that sets forth illustrative embodiments, in which the principles of the invention may be utilized, and the accompanying drawings of which:

[0037] FIG. 1—Structural model of AAV9 highlighting the regions modified. The model highlights the loop IV residues where substitution mutagenesis was performed in some examples (black) and the residues (AA588-589) between which loop VIII insertions were made (dark gray) in other examples. The K449R mutation is shown in green.

[0038] FIG. 2A-2B—Capsids that bind human TFRC are capable of dramatically enhanced binding and transduction of CHO cells expressing human TFRC. The indicated AAVs packaging an AAV-CAG-GFP-2A-Luciferase-WPRE-pA genome were administered to control CHO cells or CHO cells expressing human TFRC (hTFRC) at 10K vg/cell. (A). The graph shows binding to the indicated CHO cells with the indicated AAV. (B) The graph shows the transduction efficiency normalized to AAV for the indicated AAV. Transduction was measured 24 hours after virus administration with a luciferase reporter assay.

[0039] FIG. 3—Surface human TFRC protein levels on hCMEC/D3 cells with a lentivirus expressing TFRC. Cells transduced with the indicated MOI of VSV-G pseudotyped lentivirus expressing human TFRC were incubated at 4C with an antibody that binds TFRC. The cells were then fixed without membrane permeabilization and immunostained with anti-TFRC (ThermoFisher, cat #14-0719-82) to assess the levels of cell surface exposed TFRC. Images show immunostaining and cell nuclei.

[0040] FIG. 4—TFRC binding capsids more efficiently transduce hCMEC/D3 cells, and binding and transduction of hCMEC/D3 cells are further increased by elevating TFRC expression by lentiviral delivery of TFRC. The indicated AAVs were administered to both control and human TFRC expressing hCMEC/D3 cells at 5,000 vg/cell. Binding and transduction were assessed as described in FIG. 2.

[0041] FIG. 5A-5B—The enhanced transduction of hCMEC/D3 cells by AAV-BI19 relative to AAV9 is blocked by a human TFRC antibody. The AAV9 or AAV-BI19 were used to package AAV-CAG-GFP-2A-Luciferase-WPRE-pA genome. The indicated AAVs were administered to hCMEC/D3 cells at 2,000K vg/cell in the absence or presence of the indicated concentration of monoclonal anti-TFRC antibody. Transduction (A) was assessed 24 hours after virus administration, and binding (B) was assessed at 1 hour.

[0042] FIG. 6—Expression of human TFRC in mouse brain endothelial cells in vivo increases CNS transduction by AAV-BI19. (Left) The schematic shows the experimental design. In the 2-step transduction assay, step one is the delivery of the target receptor gene to brain endothelial cells in NSG mice using intravenous administration of AAV-BI30 (Krolak et al. Nature Cardiovascular Research 2022). In this experiment, the target receptor is human TFRC or mouse LY6A, which is used as a positive control (LY6A is required for efficient entry of AAV-PHP.eB to the CNS and is deficient in NSG mice. 7 Days later, the second virus (either AAV-BI19:CAG-mScarlet, which binds hTFRC, or AAV-PHP.eB:CAG-mScarlet, which binds LY6A) or is delivered. Delivering AAV-BI19 to animals that received the non-target receptor, AAV-BI30:LY6A (upper right), and AAV-PHP.eB to animals that received hTFRC serve as negative controls (lower left). CNS transduction by AAV-BI19 is enhanced in animals that previously received the AAV-BI19 receptor hTFRC (lower right). Images show transduction in the brains of mice 3 weeks after delivery of the second virus. All AAVs were delivered at 1e11 vg/animal.

[0043] FIG. 7—Representative SDS-PAGE showing Fc-control (Fc-ctrl), human TFRC-Fc (hTFRC), mouse TFRC-Fc (mTFRC), and marmoset TFRC-Fc (marTFRC). The indicated proteins were produced in HEK293 cells and pulled down with ProA-magnetic beads. The proteins were then separated by SDS-PAGE and stained for total protein using SyPro Ruby.

[0044] FIG. 8A-8B—Clustering analysis of 7-mer sequences that bind human TFRC. AAV 7-mer insertions found to interact with human TFRC were found to form distinct sequence clusters. (A) Sequences were one-hot encoded, projected with UMAP, and clustered with a Gaussian mixture model (k=30). (B) Cluster sequence logos show the AA frequency in each cluster, the cluster number (k) and the number (n) of sequences per cluster. A list of sequences in each cluster is provided in Table 12.

[0045] FIG. 9—Individual binding to CHO cells stably expressing TFRC.

[0046] FIG. 10—The enhanced transduction of hCMEC/D3 cells by BI-19 relative to AAV9 is blocked by an anti-human TFRC antibody.

[0047] FIG. 11—Overexpression of TFRC on mouse brain vasculature in vivo increases BI-19 transduction in the CNS.

[0048] FIG. 12A-12B—BI19 is actively transported across a human brain vascular layer in vitro. hCMEC cells were cultured until confluent on a Transwell insert. A pool of viruses was added to the top chamber, and the fraction of the vector found in the bottom chamber was assessed at the indicated time by qPCR. Virus was added to cells at 37 C or at 4 C. The 4 C control demonstrates the amount of the viral particles that enter the bottom chamber without being actively transported. (B) The graphs provide the fraction of AAV genomes found in the bottom chamber at 37C divided by the fraction of the AAV genomes found in the bottom chamber at 4 C.

[0049] FIG. 13A-13C—Expression of human TFRC in mouse brain endothelial cells in vivo increases CNS transduction by AAV-BI19. (A) The schematic shows the experimental design. In the 2-step transduction assay, step one is the delivery of the target receptor gene to brain endothelial cells in NSG mice using intravenous administration of AAV-BI30 (Krolak et al. Nature Cardiovascular Research 2022). In this experiment, the target receptor is human TFRC or mouse LY6A, which is used as a positive control (LY6A is required for efficient entry of AAV-PHP.eB to the CNS and is deficient in NSG mice). (B) Images show sagittal sections of the mouse brain transduced by AAV-PHP.eB (left) or AAV-BI19 (right) in mice made to express mouse LY6A or human TFRC through delivery of the genes encoding these proteins by AAV-BI30. AAV-BI30:CAG-human TFRC or AAV-BI30:CAG-mouse LY6A vectors were administered intravenously to adult NSG mice at 1e11 vg/animal. 28 days later, the second virus, either AAV-BI19, which binds hTFRC or AAV-PHP.eB, which binds mouse LY6A, was delivered at a dose of 5e11 vg/animal. Both vectors packaged the same AAV genome (AAV-CAG-NLS-mScarlet-2A-Luciferase-pA). CNS transduction by AAV-BI19 is enhanced in animals that previously received the AAV-BI19 receptor hTFRC (lower right). Delivering AAV-BI19 to animals that received the non-target receptor, AAV-BI30: LY6A (upper right), and AAV-PHP.eB to animals that received hTFRC serve as negative controls (lower left). Images show transduction (assessed by imaging native mScarlet fluorescence) in the brains of mice three weeks after delivery of AAV-PHP.eB or AAV-BI19.

[0050] FIG. 14A-14D—AAV-BI19 more efficiently crosses the BBB and transduces neurons throughout the brain in mice where the extracellular domain of human TFRC was knocked into the mouse Tfrc gene. (A-B) 8e11 vg/mouse of AAV-BI19 or AAV9 packaging CAG-NLS-mScarlet-2A-Luciferase-pA was systemically administered (injection into the retro-orbital sinus) to adult huTFRC KI mice (B-hTFRC, CytoBiogen). Expression was assessed seven days after AAV administration. (A-B) The images show matched exposures of native nuclear mScarlet expression in whole sagittal brain sections from homozygous B-hTFRC mice after transduction with AAV-BI19 (A) or AAV9 (B). (C-D) AAV-BI19 (C) or AAV9 (D) transduction of neurons (NeuN immunostaining) in the brain of huTFRC KI mice. The mScarlet exposures in C and D were not matched. The mScarlet exposures in D were longer in order to show transduction by AAV9.

[0051] FIG. 15—AAV-BI19 transduces human brain endothelial cells in the presence of human holo-Transferrin. Cells from the hCMEC human brain endothelial cell line were preincubated with or without human Transferrin at the indicated concentration and then transduced by AAV-BI19 or AAV9 packaging CAG-GFP-2A-Luciferase (5000 vg/cell) and assessed for transduction 24 hours later by measuring Luciferase activity. The graph shows transduction normalized relative to AAV9 in the absence of human Transferrin.

[0052] FIG. 16A-16E—AAV9 can be reprogrammed to bind human TfR1. (16A) AAV9-based 7-mer NNK capsid libraries (random 7-mer insertion between residues 588-589 in VP1) were screened for selective binding of huTfR1 as an Fc fusion protein or when transiently overexpressed on HEK293 and CHO cells. (16B) (SEQ ID NOS: 42456-42459) Four huTfR1-binding variants that shared a common motif were identified. Each variant was individually produced to carry a CAG-NLS-mScarlet-p2A-Luc-WPRE construct. They exhibited enhanced species-specific binding (16C) and transduction (16D) of CHO cells stably expressing TFRC from human but not macaque, marmoset, or mouse. For the binding assay, each cell line was seeded at 30,000 cells per well and, 24 hours later, each well was subjected to a media change with the fresh media that contained each AAV9 variant carrying CAG-NLS-mScarlet-P2A-Luciferase-SV40-WPRE at 3,000 vg/cell. The cells were maintained at 4° C. with gentle rocking for one hour and washes with PBS. Then, DNA was extracted and subjected to qPCR targeting mScarlet. For the transduction assay, each cell line was seeded at 100,000 cells per well and, 24 hours later, each well was subjected to a media change with the fresh media that contained each AAV9 variant carrying CAG-NLS-mScarlet-P2A-Luciferase-SV40-WPRE at 3,000 vg/cell. The cells were maintained at 37° C. with 5% CO₂ for 24 hours. Then, transduction was measured using the britelite Plus reporter gene assay system. A one-way ANOVA test was performed to assess significant differences; **** indicates P<0.0001. (16E) Characterization of the binding kinetics between AAV-BI19 and TfR1 in the presence or absence of Holo-Tf. Fitting of Bio-Layer Interferometry (BLI) traces of immobilized AAV-BI19 capsids incubated at 30° C. with 6.25-200 nM of Peptidisc-reconstituted huTfR1 showed a strong binding between the variant and the receptor (top left), whereas AAV9 capsids demonstrated no significant association with huTfR1 (top right). The effect of Holo-Transferrin (Holo-Tf) on AAV-BI19 binding was tested by incubation of AAV-BI19 capsids with 6.25-200 nM of Peptidisc-reconstituted huTfR1 in the presence of a molar excess of 200 nM Holo-Tf (bottom left). AAV-BI19 binds to huTfR1-in the presence of Holo-Tf. AAV9 showed no significant binding to huTfR1 regardless of the presence of Holo-Tf (bottom right).

[0053] FIG. 17A-17B—TfR1 expression in CHO cells. Applicants established stable CHO cell lines expressing human, macaque, marmoset, or mouse TFRC via random lentiviral integration of each exogenous construct under the control of an EF-1 alpha promoter. (17A) RNA was extracted from each cell line, reverse transcribed, and the cDNA was subjected to qPCR using species-specific primers (Table 23). (17B) Each cell line was immunostained with anti-TfR1 antibodies: abcam ab84036, polyclonal, targeting the N-terminal (mostly intracellular) domain of huTfR1, or OKT9, monoclonal, targeting the apical domain of huTfR1.

[0054] FIG. 18A-18D—TfR1-targeted capsids transduce human brain endothelial cells via interactions with huTfR1. The TfR1-targeted variants exhibited enhanced binding (18A) and transduction (18B) of human brain microvascular endothelial cells (hBMVEC) and hCMEC/D3 cells. For the binding assay, hBMVEC or hCMEC/D3 cells were seeded at 15,000 or 30,000 cells per well, respectively, and, 24 hours later, each well was subjected to a media change with the fresh media that contained each AAV9 variant carrying CAG-NLS-mScarlet-P2A-Luciferase-SV40-WPRE at 12,000 or 6,000 vg/cell for hBMVEC or hCMEC/D3 cells, respectively. The cells were maintained at 4° C. with gentle rocking for one hour. Then, DNA was extracted and subjected to qPCR targeting mScarlet. For the transduction assay, hBMVEC or hCMEC/D3 cells were seeded at 5,000 or 10,000 cells per well, respectively, and, 24 hours later, each well was subjected to a media change with the fresh media that contained each AAV9 variant carrying CAG-NLS-mScarlet-P2A-Luciferase-SV40-WPRE at 12,000 or 6,000 vg/cell for hBMVEC or hCMEC/D3 cells, respectively. Transduction was measured using the britelite Plus reporter gene assay system 24 hours after AAV addition. A two-tailed t-test was performed to assess significant differences; ****, ***, **, and * indicate P<0.0001, <0.001, <0.01, and <0.05 respectively. (18C) AAV-BI19 transduction of hCMEC/D3 cells was inhibited by the OKT9 antibody that targets the huTfR1 apical domain but not an antibody that targets the Transferrin binding domain of huTfR1. The hCMEC/D3 cells were seeded at 7,500 cells per well. Two days later, 100 μL of media with 3e8 vg/mL of the indicated AAV and the specified concentration of OKT9 or R&D AF2474 antibody was transferred to each well. Transduction was measured 24 hours later using the britelite Plus reporter gene assay system. A two-way ANOVA test was performed to assess significant differences; **** indicates P<0.0001. (18D) AAV-BI19 is actively transported across an endothelial cell barrier. Transwell inserts were seeded with hCMEC cells and grown to confluence. Barcoded AAV-BI19, AAV9, and AAV2 were pooled and applied to the upper chamber of the transwell at 25,000 vg/cell/AAV in media heated to 37° C. or chilled to 4° C. as indicated. The amount of virus transported across the transwell at three hours at the indicated temperatures was quantified by qPCR and normalized to the corresponding starting titer. Data is represented as four replicates±SEM. An unpaired t-test was performed to assess significant differences; * indicates P<0.05 and ns indicates no statistical difference. A dashed line is drawn at 10,000 vg, below which there is reduced ability to accurately quantify the amount of virus.

[0055] FIG. 19A-19D—AAV-BI19 binding to the TfR1 apical domain depends on Y247 and T248 residues present in the human protein but not macaque or mouse. (19A) (SEQ ID NOS: 42460-42462) Alignment of the human, macaque, and marmoset TfR1 apical domain amino acid sequences from residue 200-380. The differences from the human sequence are highlighted in gray. Amino acid differences between human and macaque proteins are highlighted in four groups (colored outlines, 19A) and on Alphafold2 structural models (19B). (19C) CHO cells were transiently transfected to express the wild type human TfR1 (huTfR1) or variants with the indicated substitutions where the human residue was replaced by the corresponding macaque residue or (19D) the wild type macaque TfR1 (macTfR1) or a variant with D247Y and S248T substitutions (n=4 replicate transfections per plasmid±SEM shown). Cells were maintained at 37° C. with 5% CO₂. At 24 hours post-transfection, AAV-BI19 or AAV9 encoding ssCAG-NLS-mScarlet-P2A-Lucierase-pA was applied at 10,000 vg/cell. After 24 hours, viral transduction was measured using the britelite Plus reporter gene assay system. For (19C), a one-way ANOVA was performed to determine significant differences in transduction among the groups using the wild type huTfR1 as the control. To account for multiple comparisons, a Dunnett's correction was applied. Only those comparisons with a P≤0.05 are reported with an asterisk (* or **** indicate P≤0.05 or ≤0.0001, respectively). For (19D), an unpaired two-tailed t-test was performed between the two groups (** indicates P≤0.01).

[0056] FIG. 20—TfR1 expression in B-hTFR1 mice. RNA was extracted from the cortex and spinal cord regions of C57BL/6J or B-hTFR1 mice that had been treated with either AAV9 or AAV-BI19. The RNA was reversed transcribed and the cDNA was subjected to qPCR using primers spanning exon 1 and exon 2 of the mouse Tfrc gene (Table 23). Note that, in B-hTFR1 mice, exons 4-19 of the mouse Tfrc gene that encode the extracellular region have been replaced by the corresponding human exons. TfR1 expression was not found to be significantly different between C57BL/6J and B-hTFR1 mice (two-way ANOVA).

[0057] FIG. 21A-21I—AAV-BI19 efficiently delivers genes to the CNS in knock-in mice expressing the huTfR1 extracellular domain. AAV-BI19 or AAV9 encoding ssCAG-NLS-mScarlet-P2A-Luciferase-pA was intravenously injected into adult female C57BL/6J or C57BL/6-Tfr1tm1TFR1/Bcgen (B-hTFR1) mice at 5×10¹¹ vg/mouse. After three weeks, the (21A) biodistribution of vector genomes per mouse genome, (21B) mScarlet transcript levels relative to AAV9 in C57BL/6J mice, and (21C) luciferase activity relative to AAV9 in C57BL/6J were measured within different organs. For AAV9 in C57BL/6J and AAV-BI19 in B-hTFR1, n=4 mice per group, ±SEM shown. For AAV9 in B-hTFR1 and AAV-BI19 in C57BL/6J n=3 mice per group, ±SEM shown. A two-way ANOVA was performed to determine significant differences within organs among the four groups of mice with AAV-BI19 in B-hTFR1 as the main comparison group and using a Bonferroni multiple comparison correction; ****, ***, **, and * indicate P≤0.0001, P≤0.001, P≤0.01, and P≤0.05, respectively, between AAV-BI19 in B-hTFR1 and each of the other groups of mice. Representative (21D) whole brain and (21E) spinal cord images of the C57BL/6J and B-hTFR1 mice treated with AAV-BI19 or AAV9 encoding ssCAG-NLS-mScarlet-P2A-Luciferase-pA are shown at a dose of 5e11 vg per mouse. Native mScarlet fluorescence was assessed three weeks post injection. Images show the cells transduced by AAV-BI19 overlaid with (21F) NeuN⁺ neurons or (21G) SOX9⁺ stained cells in the cortex, thalamus, and striatum of B-hTFR1 mice. The percentage of (21H) NeuN⁺ neurons or (21I) SOX9⁺ astrocytes that expressed mScarlet in the cortex, striatum, and thalamus were assessed (n=3 mice for AAV9 in B-hTFR1 and AAV-BI19 in C57BL/6J mice, n=4 mice for AAV9 in C57BL/6J and AAV-BI19 in B-hTFR1 mice; error bars indicate±SEM). A two-way ANOVA was performed to determine significant differences in transduction within specific brain regions among the four groups of mice across the two capsids with AAV-BI19 in B-hTFR1 as the main comparison group and using a Bonferroni multiple comparison correction. The **** indicates P≤0.0001 between AAV-BI19 in B-hTFR1 and each of the three other groups of mice (AAV9 in C57BL/6J, AAV9 in B-hTFR1, and AAV-BI19 in C57BL/6J).

[0058] FIG. 22A-22B—AAV-BI19 exhibits similar transduction to AAV9 in the liver and dorsal root ganglion in B-hTFR1 mice. ssAAV-BI19:CAG-NLS-mScarlet-P2A-Lucierase-pA or ssAAV9:CAG-NLS-mScarlet-P2A-Luciferase-pA was intravenously injected into adult female C57BL/6J or B-hTFR1 mice at a dose of 5×10¹¹ vg/mouse. At three weeks post-injection, native fluorescence was assessed in the (22A) liver and (22B) dorsal root ganglion.

[0059] FIG. 23—Expression of huTfR1 in mouse brain endothelial cells in vivo increases CNS transduction by AAV-BI19. In the 2-step transduction assay, step one is the delivery of the target receptor gene to brain endothelial cells in NSG mice using intravenous administration of AAV-BI30 (Krolak, T., et al. (2022). A high-efficiency AAV for endothelial cell transduction throughout the central nervous system. Nature Cardiovascular Research 1, 389-400). In this experiment, the target receptors were human TfR1 (huTfR1, encoded by the TFRC gene) or mouse LY6A, which was used as a positive control as LY6A is required for the efficient entry of AAV-PHP.eB into the CNS and is deficient in NSG mice. AAV-BI30 was systemically administered at 1e11 vg/mouse to deliver AAV-CAG-hTFRC-WPRE-3x-miR122-pA (top) or AAV-CAG-LY6A-WPRE-3x-miR122-pA (bottom). At 28 days post-injection, the second virus (5e11 vg/mL of either AAV-BI19:CAG-mScarlet, which binds huTfR1 (left), or AAV-PHP.eB:CAG-mScarlet, which binds LY6A (right) was systemically administered. This experiment was performed with three mice per condition. Representative images show the AAV transduction in sagittal mouse brain sections of mice three weeks after the delivery of the second virus. CNS transduction by AAV-PHP.eB and AAV-BI19 was enhanced in the animals that were previously treated with AAV-BI30: LY6A (bottom right) or AAV-BI30: hTFRC (top left), respectively. AAV-BI19 did not exhibit enhanced CNS transduction in the animals that had received the non-target receptor, AAV-BI30: LY6A (bottom left). As a negative control, AAV-PHP.eB also did not exhibit enhanced CNS transduction in the animals that had received AAV-BI30: hTFRC (top right).

[0060] FIG. 24—The vast majority of capsids with 7-mer sequences conforming to the motif families and genera defined in Table 21 bind human TFR1-Fc fusion proteins. For each family/genus, the percentage of sequences contained within the motif that were measured in the library is provided within the x-axis label.

[0061] FIG. 25—Extensive functional characterization of capsids that bind human TFR1. Capsids were selected based on human TFR1-Fc binding and enhanced transduction activity in one or more of the following in vivo assays: transduction of the B-hTFR1 KI mouse brain or spinal cord transduction or the 2-step assay with BI30:CAG-humanTFRC. The capsids with enhanced in vivo tropisms in human TFRC expressing mice, were then assessed for additional functions relevant to the selection of top capsid candidates. Note the vast majority of selected sequences showed elevated enrichment relative to AAV9 for the following assays: B-hTFR1 KI (brain and spinal cord), 2-step hTFRC brain, human TFR1-Fc binding, binding to CHO cells expressing human TFRC (CHO-hTFRC), and binding to hCMEC and hCMEC-hTFRC cells. In contrast these capsids were not positively enriched for transduction of control mice (2-step mice transduced with AAV-BI30-CAG-LY6A). Left, AAV was encoded into the library with 5 nucleotide sequences at 1×, 10×, 100× copies relative to other capsid sequences in the library to facilitate accurate comparisons in assays where AAV9 at 1× performs poorly, e.g., in vivo CNS transduction.

[0062] The figures herein are for illustrative purposes only and are not necessarily drawn to scale.

### DETAILED DESCRIPTION OF THE EXAMPLE EMBODIMENTS

### General Definitions

[0063] Unless defined otherwise, technical and scientific terms used herein have the same meaning as commonly understood by one of ordinary skill in the art to which this disclosure pertains. Definitions of common terms and techniques in molecular biology may be found in Molecular Cloning: A Laboratory Manual, 2^{nd} edition (1989) (Sambrook, Fritsch, and Maniatis); Molecular Cloning: A Laboratory Manual, 4^{th} edition (2012) (Green and Sambrook); Current Protocols in Molecular Biology (1987) (F. M. Ausubel et al. eds.); the series Methods in Enzymology (Academic Press, Inc.): PCR 2: A Practical Approach (1995) (M. J. MacPherson, B. D. Hames, and G. R. Taylor eds.): Antibodies, A Laboratory Manual (1988) (Harlow and Lane, eds.): Antibodies A Laboratory Manual, 2nd edition 2013 (E. A. Greenfield ed.); Animal Cell Culture (1987) (R. I. Freshney, ed.); Benjamin Lewin, Genes IX, published by Jones and Bartlet, 2008 (ISBN 0763752223); Kendrew et al. (eds.), The Encyclopedia of Molecular Biology, published by Blackwell Science Ltd., 1994 (ISBN 0632021829); Robert A. Meyers (ed.), Molecular Biology and Biotechnology: a Comprehensive Desk Reference, published by VCH Publishers, Inc., 1995 (ISBN 9780471185710); Singleton et al., Dictionary of Microbiology and Molecular Biology 2nd ed., J. Wiley & Sons (New York, N.Y. 1994), March, Advanced Organic Chemistry Reactions, Mechanisms and Structure 4th ed., John Wiley & Sons (New York, N.Y. 1992); and Marten H. Hofker and Jan van Deursen, Transgenic Mouse Methods and Protocols, 2nd edition (2011).

[0064] As used herein, the singular forms “a”, “an”, and “the” include both singular and plural referents unless the context clearly dictates otherwise.

[0065] The term “optional” or “optionally” means that the subsequent described event, circumstance or substituent may or may not occur, and that the description includes instances where the event or circumstance occurs and instances where it does not.

[0066] The recitation of numerical ranges by endpoints includes all numbers and fractions subsumed within the respective ranges, as well as the recited endpoints.

[0067] The terms “about” or “approximately” as used herein when referring to a measurable value such as a parameter, an amount, a temporal duration, and the like, are meant to encompass variations of and from the specified value, such as variations of +/−10% or less, +/−5% or less, +/−1% or less, and +/−0.1% or less of and from the specified value, insofar such variations are appropriate to perform in the disclosed invention. It is to be understood that the value to which the modifier “about” or “approximately” refers is itself also specifically, and preferably, disclosed.

[0068] As used herein, a “biological sample” may contain whole cells and/or live cells and/or cell debris. The biological sample may contain (or be derived from) a “bodily fluid”. The present invention encompasses embodiments wherein the bodily fluid is selected from amniotic fluid, aqueous humour, vitreous humour, bile, blood serum, breast milk, cerebrospinal fluid, cerumen (earwax), chyle, chyme, endolymph, perilymph, exudates, feces, female ejaculate, gastric acid, gastric juice, lymph, mucus (including nasal drainage and phlegm), pericardial fluid, peritoneal fluid, pleural fluid, pus, rheum, saliva, sebum (skin oil), semen, sputum, synovial fluid, sweat, tears, urine, vaginal secretion, vomit and mixtures of one or more thereof. Biological samples include cell cultures, bodily fluids, cell cultures from bodily fluids. Bodily fluids may be obtained from a mammal organism, for example by puncture, or other collecting or sampling procedures.

[0069] The terms “subject,” “individual,” and “patient” are used interchangeably herein to refer to a vertebrate, preferably a mammal, more preferably a human. Mammals include, but are not limited to, murines, simians, humans, farm animals, sport animals, and pets. Tissues, cells and their progeny of a biological entity obtained in vivo or cultured in vitro are also encompassed.

[0070] Various embodiments are described hereinafter. It should be noted that the specific embodiments are not intended as an exhaustive description or as a limitation to the broader aspects discussed herein. One aspect described in conjunction with a particular embodiment is not necessarily limited to that embodiment and can be practiced with any other embodiment(s). Reference throughout this specification to “one embodiment”, “an embodiment”, “an example embodiment,” means that a particular feature, structure or characteristic described in connection with the embodiment is included in at least one embodiment of the present invention. Thus, appearances of the phrases “in one embodiment,” “in an embodiment,” or “an example embodiment” in various places throughout this specification are not necessarily all referring to the same embodiment, but may. Furthermore, the particular features, structures or characteristics may be combined in any suitable manner, as would be apparent to a person skilled in the art from this disclosure, in one or more embodiments. Furthermore, while some embodiments described herein include some but not other features included in other embodiments, combinations of features of different embodiments are meant to be within the scope of the invention. For example, in the appended claims, any of the claimed embodiments can be used in any combination.

[0071] All publications, published patent documents, and patent applications cited herein are hereby incorporated by reference to the same extent as though each individual publication, published patent document, or patent application was specifically and individually indicated as being incorporated by reference.

### Overview

[0072] Embodiments disclosed herein provide targeting moieties which promote transduction into the CNS through interaction with the Transferrin receptor. These targeting moieties may be incorporated into particles, such as viral capsid delivery particles, to confer tropism on the delivery particles and promote transduction of CNS. Example CNS tissue include brain and spinal cord tissue. Example CNS cell types include neurons and glial cells. Further embodiments disclosed herein provide a vector system comprising one or more vectors encoding AAV capsids according to embodiments described herein. Accordingly, embodiments disclosed herein provide compositions capable of delivering cargos with enhanced selectivity and efficiency to the CNS vasculature. Embodiments disclosed herein also provide vector systems for the generation and loading of such delivery particles with a cargo. Likewise, embodiments disclosed herein provide methods for use of such compositions to target CNS endothelial cells, in vitro and in vivo, with implications for both therapeutic and research purposes.

[0073] Additional feature and advantages of the aforementioned embodiments are further described below.

### Targeting Moieties and Compositions Thereof

[0074] In example embodiments, compositions are provided herein comprising a targeting moiety with an enhanced tropism for endothelial cells of the CNS. A target moiety with an enhanced tropism for endothelial cells of the CNS promotes, increases, or otherwise improves binding to, and in some cases, transduction of the CNS as compared to a natural or wild-type target moiety. This targeting moiety may be coupled directly to a cargo to be delivered such as an oligonucleotide or polypeptide. Alternatively, the targeting molecule may be incorporated into a delivery particle to confer tropism for endothelial cells of the CNS on the delivery particle. A non-limiting example of delivery particle is a viral capsid particle. In such embodiments, the targeting moiety may be incorporated into a viral capsid polypeptide such that the targeting moiety is incorporated into the assembled viral capsid. However, other particle delivery systems where the targeting moiety may be incorporated or attached, for example on exosomes or liposomes, are also envisioned and encompassed as alternative embodiments herein.

[0075] In a preferred embodiment, provided herein is a composition comprising a targeting moiety effective to increase transduction of central nervous system (CNS) tissues via binding to a transferrin receptor (TFRC), optionally further comprising a cargo coupled to or otherwise associated with the targeting moiety. A target moiety with an increased transduction promotes, enhances, or otherwise improves binding to, and in some cases, transduction of the CNS as compared to a natural or wild-type target moiety. In an example embodiment, the targeting moiety binds to the extracellular domain of TFRC. In an example embodiment, the targeting moiety binds to one or more of the apical, helical, and/or protease-like domain of the extracellular domain. In an example embodiment, the targeting moiety binds to the apical domain. In an example embodiment, the n-mer is an animo acid sequence of length n. The length of the n-mer may be any necessary length to transduce the CNS. In example embodiments, the n-mer is 1, 2, 3, 4, 5, 6, 7, 8, 9, 10, 11, or 12 amino acids in length. In an example embodiment, the n-mer motif has a length of at least 7 amino acids. In an example embodiment, a composition comprising a targeting moiety effective to increase transduction of CNS tissues comprises a n-mer motif, the n-mer motif comprising or consisting of an amino acid sequence of Z₁-X₁-Z₂-X₂-X₃-X₄-X₅ wherein Z₁ is Y, F, or L, Z₂ is S, R, or K, X₁-X₅ are independently selected amino acids. In an example embodiment, X₁ optionally comprises of A, S, or H; X₂ optionally comprises of S, T, L, or I; X₃ optionally comprises N or G; X₄ optionally comprises G; X₅ optionally comprises of N, D, I, V, or R. In an example embodiment, the targeting moiety comprises a n-mer motif, the n-mer motif comprising or consisting of an amino acid sequence of is X₁-H-X₂-L-X₃-X₄-X₅ wherein X₁-X₅ are independently selected amino acids.

[0076] In example embodiments, the n-mer can be used to increase transduction in target cells i.e., CNS cells and tissues. The increase in transduction efficiency (which may correspond to the tropism efficiency) of the n-mer to a cell may be compared to a composition that does not contain the targeting moiety for example inclusion of one or more targeting moieties in a composition can result in an increase in transduction and or transduction efficiency by 10%, 20%, 30%, 40%, 50%, 60% 70% 80% 90% a 100% or more. In an exemplary embodiment the increase in transduction and or transduction efficiency is one and a half fold, two-fold, three-fold, four-fold, five-fold, six-fold, seven-fold, eight-fold, nine-fold, ten-fold, 20-fold, 30-fold, 40-fold, 50-fold, 60-fold, 70-fold, 80-fold or more relative to a composition lacking the n-mer. In one embodiment the transduction and/or transduction efficiency is increased or enhanced in endothelial cells, in one embodiment increase in endothelial cells of the vasculature, for example, the central nervous system vasculature. In embodiments, the transduction and/or transduction efficiency is increased or enhanced in cells of the central nervous system. In embodiments, the transduction and/or transduction efficiency is increased or enhanced in neurons and glial cells. In an embodiment, the composition comprising a n-mer is selective to a target cell as compared to other cell types and/or other virus particles. As used herein, ‘selective’ and ‘cell-selective’ refers to preferential targeting for cells as compared to other cell types. Preferably, the targeting moiety is selective for a desired target (e.g. cell, organ, system e.g. CNS tissues) or set of targets by at least 2:1, 3:1, 4:1, 5:1, 6:1 7:1, 8:1, 9:1. 10:1 or more; or 10%, 20%, 30%, 40%, 50%, 60%, 70%, 75% 80%, 85% 90% or more, relative to other targets or cells (e.g. CNS). In an example embodiment, the composition comprising a targeting moiety described herein can have an increased uptake, delivery rate, transduction rate, efficiency, amount, or a combination thereof in a target cell (e.g., endothelial cells across the CNS e.g., brain endothelium, arterio-venous axis in brain, retina, and spinal cord vasculature) as compared to other cells types (e.g. muscle cells) and/or other virus particles (e.g., AAVs not containing the targeting moiety) and other compositions that do not contain the cell-selective n-mer motif of the present invention.

[0077] In an example embodiment, the n-mer motif is selected from the group consisting of YSRIGPN (SEQ ID NO: 14632), YSRLNMN (SEQ ID NO: 14301), YSRLNKD (SEQ ID NO: 16577), and YHRLSNN (SEQ ID NO: 16636). In an example embodiment, the n-mer motif is VHRLQDK (SEQ ID NO: 16602) or LHALSHN (SEQ ID NO: 16608). In an example embodiment, the n-mer motif is comprises PSATNGV (SEQ ID NO: 20486), QVSTNGI (SEQ ID NO: 16021), SYSSNGV (SEQ ID NO: 16234), HQSSNGV (SEQ ID NO: 15978), VGSINGI (SEQ ID NO: 16199), AMSTNGR (SEQ ID NO: 16000), SASTNGV (SEQ ID NO: 16127), YMSTNGV (SEQ ID NO: 16042), YYSSNGV (SEQ ID NO: 16206), VHSTNGI (SEQ ID NO: 16134), PLSTNGV (SEQ ID NO: 16233), VYSTNGI (SEQ ID NO: 16059), IISTNGV (SEQ ID NO: 16054), RSVSSNGV (SEQ ID NO: 20502), YKSSNGV (SEQ ID NO: 16123), FRSTNGV (SEQ ID NO: 16070, and/or FVSTNGV (SEQ ID NO: 11162). In an example embodiment, the n-mer is selected from any of the amino acid sequences in Tables 1-13, or any combination thereof. In an example embodiment, the n-mer motif is selected from a peptide having an amino acid sequence of one of SEQ ID NO:10952-20481. In an example embodiment, the targeting moiety is part of (e.g., inserted between consecutive amino acids of) a viral capsid protein, including an AAV capsid protein.

### Transferrin Receptor (TFRC) Binding

[0078] In a preferred embodiment, the targeting moiety binds to a Transferrin receptor. The TFRC (i.e., TfR1 protein encoded by the TFRC gene, or CD71) comprises of two types of receptors: TFRC1 (or cluster of differentiation 71 (CD71)) and TFRC2. TFRC2 is less common than TFRC1 and is predominantly expressed in hepatocytes. TFRC1 binds transferrin (TF) with high affinity and is commonly expressed. TFRC1 is a type II transmembrane glycoprotein of around 90 kDa and comprises of around 760 amino acids. TFRC1 is typically found as a dimer linked by disulfide bonds on the cell surface, see FIG. 4.

[0079] The TFRC1 domain contains an extracellular C-terminal domain (around 671 amino acids) and comprises of the TF binding site. The extracellular C-terminal domain comprises of three subdomains: apical, helical, and protease-like domain, see FIG. 4. Furthermore, the extracellular C-terminal domain comprises of three N-linked glycosylation sites at asparagine residues 251, 317, and 727 and one O-linked glycosylation site at threonine 104, which contribute to adequate function of the receptor. TFRC1 additionally comprises of a transmembrane domain (around 29 amino acids), and an intracellular N-terminal domain (around 61 amino acids). Alternative to the delivery of iron through TF with TFRC1, uptake of iron can also occur through H-ferritin binding through the apical domain. See also Candelaria, P. V.; et al. Antibodies Targeting the Transferrin Receptor 1 (TfR1) as Direct Anti-Cancer Agents. Frontiers in Immunology, 2021, 12, hereby incorporated by reference.

[0080] In an example embodiment, the targeting moiety binds to the extracellular domain of TFRC. In an example embodiment, the targeting moiety binds to one or more of the apical, helical, and/or protease-like domain. In an example embodiment, the targeting moiety binds to the apical domain.

### Engineered Viral Capsids

[0081] Described herein are various embodiments of engineered viral capsids, such as adeno-associated virus (AAV) capsids, that can be engineered to confer cell-selective tropism, such as CNS tissue- and cell-specific tropism, to an engineered viral particle. Engineered viral capsids can be lentiviral, retroviral, adenoviral, or AAV capsids. The engineered capsids can be included in an engineered virus particle (e.g., an engineered lentiviral, retroviral, adenoviral, or AAV virus particle), and can confer cell-selective tropism to the engineered viral particle. The engineered viral capsids described herein can include one or more engineered viral capsid proteins described herein. The engineered viral capsids described herein can include one or more engineered viral capsid proteins described herein that can contain one or more target moiety as described elsewhere herein.

[0082] The engineered viral capsids can be variants of wild-type viral capsid. For example, in some embodiments, the engineered AAV capsids can be variants of wild-type AAV capsids. In some embodiments, the wild-type AAV capsids can be composed of VP1, VP2, VP3 capsid proteins or a combination thereof. In other words, the engineered AAV capsids can include one or more variants of a wild-type VP1, wild-type VP2, and/or wild-type VP3 capsid proteins. In some embodiments, the serotype of the reference wild-type AAV capsid can be AAV-1, AAV-2, AAV-3, AAV-4, AAV-5, AAV-6, AAV-8, AAV-9 or any combination thereof. In some embodiments, the serotype of the wild-type AAV capsid can be AAV-9. The engineered AAV capsids can have a different tropism than that of the reference wild-type AAV capsid.

[0083] In some embodiments, the target moiety is incorporated into a viral protein, such as a capsid protein, including but not limited to lentiviral, adenoviral, AAV, bacteriophage, retroviral proteins. In some embodiments, the target moiety is located between two amino acids of the viral protein such that the target moiety is external (i.e., is presented on the surface of) to a viral capsid. In an example embodiment, the target moiety disclosed herein can be inserted between two consecutive amino acids in the wild-type viral protein (VP) (or capsid protein), including in regions that are surface exposed when incorporated into a viral capsid. In some embodiments, the target moiety can be inserted between two consecutive amino acids in a variable amino acid region in a viral capsid protein.

[0084] In some embodiments, the target moiety can be inserted between two consecutive amino acids in a variable amino acid region in an AAV capsid protein. The core of each wild-type AAV viral protein contains an eight-stranded beta-barrel motif (betaB to betaI) and an alpha-helix (alphaA) that are conserved in autonomous parvovirus capsids (see e.g., DiMattia et al. 2012. J. Virol. 86 (12): 6947-6958). Structural variable regions (VRs), also referred to as “loops”, occur in the surface loops that connect the beta-strands, which cluster to produce local variations in the capsid surface. AAVs have 12 variable regions (also referred to as hypervariable regions) (see e.g., Weitzman and Linden. 2011. “Adeno-Associated Virus Biology.” In Snyder, R. O., Moullier, P. (eds.) Totowa, NJ: Humana Press). In one example embodiment, one or more target moiety can be inserted between two amino acids in one or more of the 12 variable regions in the wild-type AVV capsid proteins. In one example embodiment, the one or more target moieties can be each be inserted between two amino acids in VR-I, VR-II, VR-III, VR-IV, VR-V, VR-VI, VR-VII, VR-III, VR-IX, VR-X, VR-XI, VR-XII, or a combination thereof. In an example embodiment, the targeting moiety is inserted or substituted in loop IV and/or loop VIII. In an example embodiment, the targeting moiety is IPFSRVNPDT (SEQ ID NO: 20285), LGFARTGAAD (SEQ ID NO: 20274), LGFTKSSGSD (SEQ ID NO: 20270), LRYSKTQGES (SEQ ID NO: 20266), SPYARSSAGV (SEQ ID NO: 20271), VGWSRLDLTT (SEQ ID NO: 20262).

[0085] In one example embodiment, the engineered capsid is a modified AAV1 capsid and can have a target moiety motif inserted after or a neighbor of amino acid 590 (i.e., between amino acid 590 and 591). In one example embodiment, the engineered capsid is a modified AAV3 capsid and can have a target moiety motif inserted after or a neighbor of amino acid 586. In one example embodiment, the engineered capsid is a modified AAV4 capsid and can have a target moiety motif inserted after or a neighbor of amino acid 586. In one example embodiment, the engineered capsid is a modified AAV5 capsid and can have a target moiety motif inserted after or a neighbor of amino acid 575. In one example embodiment, the engineered capsid is a modified AAV6 capsid and can have a target moiety inserted at or a neighbor of amino acid 585 and optionally Y705-731, T492V, K531E. In one example embodiment, the engineered capsid is a modified AAV8 capsid and can have a target moiety inserted after or a neighbor of amino acid 585 and 590. In one example embodiment, the engineered capsid is a modified AAV9 capsid and can have a target moiety inserted in between amino acid 588 and 589. (Büning, H.; Srivastava, A. Capsid Modifications for Targeting and Improving the Efficacy of AAV Vectors. Molecular Therapy-Methods & Clinical Development 2019, 12, 248-265). In one example embodiment, the engineered capsid can have a 7-mer motif inserted between amino acids 588 and 589 of an AAV9 viral protein. SEQ ID NO: 20506 is a reference AAV9 capsid sequence for at least referencing the insertion sites discussed above. In an example embodiment, the engineered capsid can have a 7-mer motif inserted between two consecutive amino acids within amino acids 451-460 of a capsid protein of AAV9 viral protein. SEQ ID NO: 20506 is a reference AAV9 capsid sequence for at least referencing the insertion sites discussed above. It will be appreciated that target moieties can be inserted in analogous positions in AAV viral proteins of other serotypes, such as but not limited to, AAV1, AAV2, AAV3, AAV4, AAV5, AAV6, AAV7, AAV8, AAV9, AAV rh.74, AAV rh. 10 capsid polypeptide. In some embodiments as previously discussed, the target moiety(s) can be inserted between any two contiguous amino acids within the AAV viral protein and in some embodiments the insertion is made in a variable region.

[0086] In one example embodiment, the first 1, 2, 3, or 4 amino acids of a target moiety can replace 1, 2, 3, or 4 amino acids of a polypeptide into which it is inserted and preceding the insertion site. Using an AAV as another non-limiting example, one or more of the target moieties can be inserted into e.g., an AAV9 capsid polypeptide between amino acids 588 and 589 and the insert can replace amino acids 586, 587, and 588 such that the amino acid immediately preceding the target moiety after insertion is residue 585. It will be appreciated that this principle can apply in any other insertion context and is not necessarily limited to insertion between residues 588 and 589 of an AAV9 capsid or equivalent position in another AAV capsid. It will further be appreciated that in some embodiments, no amino acids in the polypeptide into which the target moiety is inserted are replaced by the target moiety. In an example embodiment, the AAV capsid protein is selected from SEQ ID NO: 20506.

[0087] In some embodiments, in addition to the n-mer motif(s) the targeting moiety can include a polypeptide, a polynucleotide, a lipid, a polymer, a sugar, or a combination thereof.

[0088] The engineered viral capsid and/or capsid proteins can be encoded by one or more engineered viral capsid polynucleotides. In some embodiments, the engineered viral capsid polynucleotide is an engineered AAV capsid polynucleotide, engineered lentiviral capsid polynucleotide, engineered retroviral capsid polynucleotide, or engineered adenovirus capsid polynucleotide. In some embodiments, an engineered viral capsid polynucleotide (e.g., an engineered AAV capsid polynucleotide, engineered lentiviral capsid polynucleotide, engineered retroviral capsid polynucleotide, or engineered adenovirus capsid polynucleotide) can include a 3′ polyadenylation signal. The polyadenylation signal can be an SV40 polyadenylation signal.

[0089] In some embodiments, the engineered polynucleotide can be included in a polynucleotide that is configured to express the engineered capsid in a host cell system for production of viral particles. The host cell system may also include a construct that expresses a recombinant viral genome that comprises a transgene encoding a polypeptide or nucleic acid operably linked to one or more regulatory sequences that promote expression of the transgene in a target cell, including a recombinant AAV genome where the transgene and regulatory sequences are flanked by AAV ITR sequences.

[0090] In some embodiments, the engineered AAV capsid encoding polynucleotide can be included in a polynucleotide that is configured to be an express the engineered capsid in a host cell system for production of AAV viral particles. The host cell system may also include a construct that expresses a recombinant AAV viral genome that comprises a transgene encoding a polypeptide or nucleic acid operably linked to one or more regulatory sequences that promote expression of the transgene in a target cell, including a recombinant AAV genome where the transgene and regulatory sequences are flanked by AAV ITR sequences. In some embodiments, the engineered AAV capsid encoding polynucleotide can be operably coupled to a poly adenylation tail. In some embodiments, the poly adenylation tail can be an SV40 poly adenylation tail. In some embodiments, the AAV capsid encoding polynucleotide can be operably coupled to a promoter. In some embodiments, the regulatory sequence that regulates expression of the transgene is a promoter and can be a tissue specific promoter. In some embodiments, the tissue specific promoter is specific for muscle (e.g., cardiac, skeletal, and/or smooth muscle), neurons and supporting cells (e.g., astrocytes, glial cells, Schwann cells, etc.), fat, spleen, liver, kidney, immune cells, spinal fluid cells, synovial fluid cells, skin cells, cartilage, tendons, connective tissue, bone, pancreas, adrenal gland, blood cell, bone marrow cells, placenta, endothelial cells, and combinations thereof. In some embodiments, the promoter can be a constitutive promoter. Suitable tissue specific promoters and constitutive promoters are discussed elsewhere herein and are generally known in the art and can be commercially available. Suitable neuronal tissue/cell specific promoters include, but are not limited to, GFAP promoter (astrocytes), SYN1 promoter (neurons), and NSE/RU5′ (mature neurons).

### Further Capsid Modifications

[0091] In one example embodiment, the viral capsid protein may comprise one or more mutations relative to wild type. In an example embodiment, the one or more mutations comprise a K449R substitution in a capsid polypeptide of AAV 9 20507, or a substitution in an analogous position of a capsid polypeptide from AAV1, AAV2, AAV3, AAV4, AAV5, AAV6, AAV7, AAV8, AAVrh8, AAV rh.74, or AAV rh. 10. In an example embodiment, the K449R substituted AAV capsid is selected from SEQ ID NO: 20507.

[0092] In example embodiments, the viral capsid protein may comprise additional targeting motifs that are in addition to the n-mer motifs of the present disclosure. Without being bound by theory the additional targeting moieties can be antibodies or fragments thereof. In some embodiments, the additional targeting moiety can be any molecule or composition capable of recognizing, binding, attaching to, or otherwise interacting with a binding partner that can be present on the surface of a target cell. Binding partners include, but are not limited to nucleic acids, proteins, peptides, sugars, fats, or any combination thereof or any other molecule or molecules that are present on the surface of a target cell. In some embodiments, the binding partner is unique to a cell type or cell state or a to a group of related cell types or cell states. In some embodiments, the binding partner is a receptor, channel, or other complex present on the surface of a target cell. These additional targeting moieties can be used to target, e.g., specific cell types or cell states within those the set of target cells targeted by the n-mer motif. As used herein, “cell state” is used to describe transient elements of a cell's identity. Cell state can be thought of as the transient characteristic profile or phenotype of a cell. Cell states arise transiently during time-dependent processes, either in a temporal progression that is unidirectional (e.g., during differentiation, or following an environmental stimulus) or in a state vacillation that is not necessarily unidirectional and in which the cell may return to the origin state. Vacillating processes can be oscillatory (e.g., cell-cycle or circadian rhythm) or can transition between states with no predefined order (e.g., due to stochastic, or environmentally controlled, molecular events). These time-dependent processes may occur transiently within a stable cell type (as in a transient environmental response), or may lead to a new, distinct type (as in differentiation). See e.g., Wagner et al., 2016. Nat Biotechnol. 34 (11): 1145-1160.

[0093] In some embodiments, the additional targeting moiety is or includes a peptide or a polypeptide. In some embodiments, the additional targeting moiety is or includes an antibody or fragment thereof. Exemplary antibodies and fragments thereof are described in greater detail elsewhere herein, see e.g., discussion on exemplary cargos. In some embodiments, the additional targeting moiety is or includes an aptamer. In some embodiments, the additional targeting moiety is or includes a small molecule. In some embodiments, the additional targeting moiety is or includes a nucleic acid (e.g., DNA or RNA). In some embodiments, the additional targeting moiety is or includes a receptor. In some embodiments, the additional targeting moiety is or includes a receptor ligand. In some embodiments, the additional targeting moiety is or includes a carbohydrate (e.g., a sugar). In some embodiments, the additional targeting moiety is or includes a lipid. In some embodiments, the additional targeting moiety is an engineered protein scaffold. In some embodiments, the additional targeting moiety is an affibody. In some embodiments, the additional targeting moiety is an antibody mimetic. In some embodiments, the additional targeting moiety is an engineered binding protein, such as a designed ankyrin repeat proteins (DARPins) (see e.g., Plückthun et al., Annu. Rev. Pharmacol. Toxicol. (2015) 55 (1): 489-511), avimers (Silverman et al., Nat. Biotechnol. (2005) 23 (12): 1556-1561 and Jeong et al. Nat. Biotechnol. (2005) 23 (12): 1493-1494), or affibodies (see e.g., Nord et al., Nat. Biotechnol. (1997) 15 (8): 772-777). In example embodiments, the additional targeting moiety is a receptor ligand or binding protein. In some embodiments, the additional targeting moiety is attached or otherwise coupled to the capsid surface. In some embodiments, the additional targeting moiety is encoded by a vector that produces a capsid of the present invention described herein.

### Engineered Vectors and Vector Systems

[0094] Also provided herein are vectors and vector systems that can contain one or more of the engineered polynucleotides described herein that can encode one or more of the target moieties of the present invention, including but not limited to engineered viral polynucleotides (e.g., polynucleotides encoding engineered AAV capsid proteins). In a preferred embodiment, provided herein is a vector system comprising one or more vectors encoding a targeting moiety effective to increase transduction of central nervous system tissues (CNS), optionally further comprising a cargo coupled to or otherwise associated with the targeting moiety or further comprising a construct which encodes the cargo, including a recombinant viral genome comprising a transgene. In preferred embodiment, the targeting moiety encoded in the vector system binds to Transferrin Receptor (TFRC). As used in this context, engineered viral capsid polynucleotides refers to any one or more of the polynucleotides described herein capable of encoding an engineered viral capsid as described elsewhere herein and/or polynucleotide(s) capable of encoding one or more engineered viral capsid proteins described elsewhere herein. Further, where the vector includes an engineered viral capsid polynucleotide described herein, the vector can also be referred to and considered an engineered vector or system thereof although not specifically noted as such. In embodiments, the vector can contain one or more polynucleotides encoding one or more elements of an engineered viral capsid described herein. The vectors and systems thereof can be useful in producing bacterial, fungal, yeast, plant cells, animal cells, and transgenic animals that can express one or more components of the engineered viral capsid, particle, or other compositions described herein. Within the scope of this disclosure are vectors containing one or more of the polynucleotide sequences described herein. One or more of the polynucleotides that are part of the engineered viral capsid and system thereof described herein can be included in a vector or vector system.

[0095] In example embodiments, a vector used in the production of the rAAVs disclosed herein comprises a rep gene and cap gene). The rep gene typically encodes Rep78, Rep68, Rep52 and Rep40 from a single ORF. These replication factors aid AAV genome replication and virion assembly. The cap gene typically encodes the three capsid proteins (i.e., virion protein 1 (VP1), VP2 and VP3) from a single ORF as well. In addition, the three capsid proteins are regulated by transcription from a start codon (ACG) and alternative splicing. The cap gene also encodes, from an in-frameshifted ORF, an assembly-activating protein (AAP). The AAP is essential for capsid assembly.

[0096] In some embodiments, the vector can include an engineered viral (e.g., AAV) capsid polynucleotide having a 3′ polyadenylation signal. In some embodiments, 3′ polyadenylation is an SV40 polyadenylation signal. In some embodiments the vector does not have splice regulatory elements. In some embodiments, the vector includes one or more minimal splice regulatory elements. In some embodiments, the vector can further include a modified splice regulatory element, wherein the modification inactivates the splice regulatory element. In some embodiments, the modified splice regulatory element is a polynucleotide sequence sufficient to induce splicing, between a rep protein polynucleotide and the engineered viral (e.g., AAV) capsid protein variant polynucleotide. In some embodiments, the polynucleotide sequence can be sufficient to induce splicing is a splice acceptor or a splice donor. In some embodiments, the viral (e.g., AAV) capsid polynucleotide is an engineered viral (e.g., AAV) capsid polynucleotide as described elsewhere herein. It some embodiments, the vector does not include one or more minimal splice regulatory elements, modified splice regulatory agent, splice acceptor, and/or splice donor.

[0097] The vectors and/or vector systems can be used, for example, to express one or more of the engineered viral (e.g., AAV) capsid and/or other polynucleotides in a cell, such as a producer cell, to produce engineered viral (e.g., AAV) particles and/or other compositions (e.g., polypeptides, particles, etc.) containing an engineered viral (e.g., AAV) capsid or other composition containing an n-mer motif of the present invention described elsewhere herein. Other uses for the vectors and vector systems described herein are also within the scope of this disclosure. In general, and throughout this specification, the term is a tool that allows or facilitates the transfer of an entity from one environment to another. In some contexts which will be appreciated by those of ordinary skill in the art, “vector” can be a term of art to refer to a nucleic acid molecule capable of transporting another nucleic acid to which it has been linked. A vector can be a replicon, such as a plasmid, phage, or cosmid, into which another DNA segment may be inserted so as to bring about the replication of the inserted segment. Generally, a vector is capable of replication when associated with the proper control elements.

[0098] Vectors include, but are not limited to, nucleic acid molecules that are single-stranded, double-stranded, or partially double-stranded; nucleic acid molecules that comprise one or more free ends, no free ends (e.g., circular); nucleic acid molecules that comprise DNA, RNA, or both; and other varieties of polynucleotides known in the art. One type of vector is a “plasmid,” which refers to a circular double stranded DNA loop into which additional DNA segments can be inserted, such as by standard molecular cloning techniques. Another type of vector is a viral vector, wherein virally derived DNA or RNA sequences are present in the vector for packaging into a virus (e.g., retroviruses, replication defective retroviruses, adenoviruses, replication defective adenoviruses, and adeno-associated viruses (AAVs)). Viral vectors also include polynucleotides carried by a virus for transfection into a host cell. Certain vectors are capable of autonomous replication in a host cell into which they are introduced (e.g., bacterial vectors having a bacterial origin of replication and episomal mammalian vectors). Other vectors (e.g., non-episomal mammalian vectors) are integrated into the genome of a host cell upon introduction into the host cell, and thereby are replicated along with the host genome. Moreover, certain vectors are capable of directing the expression of genes to which they are operatively linked. Such vectors are referred to herein as “expression vectors.” Common expression vectors of utility in recombinant DNA techniques are often in the form of plasmids.

[0099] Recombinant expression vectors can be composed of a nucleic acid (e.g., a polynucleotide) of the invention in a form suitable for expression of the nucleic acid in a host cell, which means that the recombinant expression vectors include one or more regulatory elements, which can be selected on the basis of the host cells to be used for expression, that is operatively-linked to the nucleic acid sequence to be expressed. Within a recombinant expression vector, “operably linked” and “operatively-linked” are used interchangeably herein and further defined elsewhere herein. In the context of a vector, the term “operably linked” is intended to mean that the nucleotide sequence of interest is linked to the regulatory element(s) in a manner that allows for expression of the nucleotide sequence (e.g., in an in vitro transcription/translation system or in a host cell when the vector is introduced into the host cell).

[0100] In some embodiments, the vector can be a bicistronic vector. In some embodiments, a bicistronic vector can be used for one or more elements of the engineered viral (e.g., AAV) capsid system described herein. In some embodiments, expression of elements of the engineered viral (e.g., AAV) capsid system described herein can be driven by a suitable constitutive or tissue specific promoter. Where the element of the engineered viral (e.g., AAV) capsid system is an RNA, its expression can be driven by a Pol III promoter, such as a U6 promoter. In some embodiments, the two are combined.

### Cell-Based Vector Amplification and Expression

[0101] Vectors can be designed for expression of one or more elements of the engineered viral (e.g., AAV) capsid system or other compositions containing an n-mer motif of the present invention described herein (e.g., nucleic acid transcripts, proteins, enzymes, and combinations thereof) in a suitable host cell. In an example embodiment, a composition comprising a targeting moiety effective to increase transduction of CNS tissues comprises a n-mer motif, the n-mer motif comprising or consisting of an amino acid sequence of Z₁-X₁-Z₂-X₂-X₃-X₄-X₅ wherein Z₁ is Y, F, or L, Z₂ is S, R, or K, X₁-X₅ are independently selected amino acids. In an example embodiment, X₁ optionally comprises of A, S, or H; X₂ optionally comprises of S, T, L, or I; X₃ optionally comprises N or G; X₄ optionally comprises G; X₅ optionally comprises of N, D, I, V, or R. The n-mer motif may be selected from the group consisting of YSRIGPN (SEQ ID NO: 14632), YSRLNMN (SEQ ID NO: 14301), YSRLNKD (SEQ ID NO: 16577), and YHRLSNN (SEQ ID NO: 16636). In an example embodiment, the targeting moiety comprises a n-mer motif, the n-mer motif comprising or consisting of an amino acid sequence of is X₁-H-X₂-L-X₃-X₄-X₅ wherein X₁-X₅ are independently selected amino acids. In an example embodiment, the n-mer motif is VHRLQDK (SEQ ID NO: 16602) or LHALSHN (SEQ ID NO: 16608). In an example embodiment, the n-mer motif is comprises PSATNGV (SEQ ID NO: 20486), QVSTNGI (SEQ ID NO: 16021), SYSSNGV (SEQ ID NO: 16234), HQSSNGV (SEQ ID NO: 15978), VGSINGI (SEQ ID NO: 16200), AMSTNGR (SEQ ID NO: 16000), SASTNGV (SEQ ID NO: 16127), YMSTNGV (SEQ ID NO: 16042), YYSSNGV (SEQ ID NO: 16206), VHSTNGI (SEQ ID NO: 16134), PLSTNGV (SEQ ID NO: 16233), VYSTNGI (SEQ ID NO: 16059), IISTNGV (SEQ ID NO: 16054), RSVSSNGV (SEQ ID NO: 20502), YKSSNGV (SEQ ID NO: 16123), FRSTNGV (SEQ ID NO: 16070, and/or FVSTNGV (SEQ ID NO: 11162).

[0102] In some embodiments, the suitable host cell is a prokaryotic cell. Suitable host cells include, but are not limited to, bacterial cells, yeast cells, insect cells, and mammalian cells. The vectors can be viral-based or non-viral based. In some embodiments, the suitable host cell is a eukaryotic cell. In some embodiments, the suitable host cell is a suitable bacterial cell. Suitable bacterial cells include, but are not limited to, bacterial cells from the bacteria of the species Escherichia coli. Many suitable strains of E. coli are known in the art for expression of vectors. These include, but are not limited to Pir1, Stb12, Stb13, Stb14, TOP10, XL1 Blue, and XL10 Gold. In some embodiments, the host cell is a suitable insect cell. Suitable insect cells include those from Spodoptera frugiperda. Suitable strains of S. frugiperda cells include, but are not limited to, Sf9 and Sf21. In some embodiments, the host cell is a suitable yeast cell. In some embodiments, the yeast cell can be from Saccharomyces cerevisiae. In some embodiments, the host cell is a suitable mammalian cell. Many types of mammalian cells have been developed to express vectors. Suitable mammalian cells include, but are not limited to, HEK293, Chinese Hamster Ovary Cells (CHOs), mouse myeloma cells, HeLa, U2OS, A549, HT1080, CAD, P19, NIH 3T3, L929, N2a, MCF-7, Y79, SO-Rb50, HepG G2, DIKX-X11, J558L, Baby hamster kidney cells (BHK), and chicken embryo fibroblasts (CEFs). Suitable host cells are discussed further in Goeddel, GENE EXPRESSION TECHNOLOGY: METHODS IN ENZYMOLOGY 185, Academic Press, San Diego, Calif. (1990).

[0103] In some embodiments, the vector can be a yeast expression vector. Examples of vectors for expression in yeast Saccharomyces cerevisiae include pYepSec1 (Baldari, et al., 1987. EMBO J. 6:229-234), pMFa (Kuijan and Herskowitz, 1982. Cell 30: 933-943), pJRY88 (Schultz et al., 1987. Gene 54: 113-123), pYES2 (Invitrogen Corporation, San Diego, Calif.), and picZ (In Vitrogen Corp, San Diego, Calif.). As used herein, a “yeast expression vector” refers to a nucleic acid that contains one or more sequences encoding an RNA and/or polypeptide and may further contain any desired elements that control the expression of the nucleic acid(s), as well as any elements that enable the replication and maintenance of the expression vector inside the yeast cell. Many suitable yeast expression vectors and features thereof are known in the art; for example, various vectors and techniques are illustrated in in Yeast Protocols, 2nd edition, Xiao, W., ed. (Humana Press, New York, 2007) and Buckholz, R. G. and Gleeson, M. A. (1991) Biotechnology (NY) 9 (11): 1067-72. Yeast vectors can contain, without limitation, a centromeric (CEN) sequence, an autonomous replication sequence (ARS), a promoter, such as an RNA Polymerase III promoter, operably linked to a sequence or gene of interest, a terminator such as an RNA polymerase III terminator, an origin of replication, and a marker gene (e.g., auxotrophic, antibiotic, or other selectable markers). Examples of expression vectors for use in yeast may include plasmids, yeast artificial chromosomes, 2μ plasmids, yeast integrative plasmids, yeast replicative plasmids, shuttle vectors, and episomal plasmids.

[0104] In some embodiments, the vector is a baculovirus vector or expression vector and can be suitable for expression of polynucleotides and/or proteins in insect cells. Baculovirus vectors available for expression of proteins in cultured insect cells (e.g., SF9 cells) include the pAc series (Smith, et al., 1983. Mol. Cell. Biol. 3:2156-2165) and the pVL series (Lucklow and Summers, 1989. Virology 170: 31-39). rAAV (recombinant Adeno-associated viral) vectors are preferably produced in insect cells, e.g., Spodoptera frugiperda Sf9 insect cells, grown in serum-free suspension culture. Serum-free insect cells can be purchased from commercial vendors, e.g., Sigma Aldrich (EX-CELL 405).

[0105] In some embodiments, the vector is a mammalian expression vector. In some embodiments, the mammalian expression vector is capable of expressing one or more polynucleotides and/or polypeptides in a mammalian cell. Examples of mammalian expression vectors include, but are not limited to, pCDM8 (Seed, 1987. Nature 329:840) and pMT2PC (Kaufman, et al., 1987. EMBO J. 6:187-195). The mammalian expression vector can include one or more suitable regulatory elements capable of controlling expression of the one or more polynucleotides and/or proteins in the mammalian cell. For example, commonly used promoters are derived from polyoma, adenovirus 2, cytomegalovirus, simian virus 40, and others disclosed herein and known in the art. More detail on suitable regulatory elements are described elsewhere herein.

[0106] For other suitable expression vectors and vector systems for both prokaryotic and eukaryotic cells see, e.g., Chapters 16 and 17 of Sambrook, et al., MOLECULAR CLONING: A LABORATORY MANUAL. 2nd ed., Cold Spring Harbor Laboratory, Cold Spring Harbor Laboratory Press, Cold Spring Harbor, N.Y., 1989.

[0107] In some embodiments, the recombinant mammalian expression vector is capable of directing expression of the nucleic acid preferentially in a particular cell type (e.g., tissue-specific regulatory elements are used to express the nucleic acid). Tissue-specific regulatory elements are known in the art. Non-limiting examples of suitable tissue-specific promoters include the albumin promoter (liver-specific; Pinkert, et al., 1987. Genes Dev. 1: 268-277), lymphoid-specific promoters (Calame and Eaton, 1988. Adv. Immunol. 43:235-275), in particular promoters of T cell receptors (Winoto and Baltimore, 1989. EMBO J. 8:729-733) and immunoglobulins (Baneiji, et al., 1983. Cell 33: 729-740; Queen and Baltimore, 1983. Cell 33: 741-748), neuron-specific promoters (e.g., the neurofilament promoter; Byrne and Ruddle, 1989. Proc. Natl. Acad. Sci. USA 86: 5473-5477), pancreas-specific promoters (Edlund, et al., 1985. Science 230: 912-916), and mammary gland-specific promoters (e.g., milk whey promoter; U.S. Pat. No. 4,873,316 and European Application Publication No. 264,166). Developmentally-regulated promoters are also encompassed, e.g., the murine hox promoters (Kessel and Gruss, 1990. Science 249: 374-379) and the α-fetoprotein promoter (Campes and Tilghman, 1989. Genes Dev. 3: 537-546). With regards to these prokaryotic and eukaryotic vectors, mention is made of U.S. Pat. No. 6,750,059, the contents of which are incorporated by reference herein in their entirety. Other embodiments can utilize viral vectors, with regards to which mention is made of U.S. patent application Ser. No. 13/092,085, the contents of which are incorporated by reference herein in their entirety. Tissue-specific regulatory elements are known in the art and in this regard, mention is made of U.S. Pat. No. 7,776,321, the contents of which are incorporated by reference herein in their entirety. In some embodiments, a regulatory element can be operably linked to a transgene in a recombinant genome packaged by the engineered AAV capsid system so as to drive expression of the one or more elements of the transgene delivered by the viral vector as described herein in a tissue specific manner.

[0108] Vectors may be introduced and propagated in a prokaryote or prokaryotic cell. In some embodiments, a prokaryote is used to amplify copies of a vector to be introduced into a eukaryotic cell or as an intermediate vector in the production of a vector to be introduced into a eukaryotic cell (e.g., amplifying a plasmid as part of a viral vector packaging system). In some embodiments, a prokaryote is used to amplify copies of a vector and express one or more nucleic acids, such as to provide a source of one or more proteins for delivery to a host cell or host organism.

[0109] In some embodiments, the vector can be a fusion vector or fusion expression vector. In some embodiments, fusion vectors add a number of amino acids to a protein encoded therein, such as to the amino terminus, carboxy terminus, or both of a recombinant protein. Such fusion vectors can serve one or more purposes, such as: (i) to increase expression of recombinant protein; (ii) to increase the solubility of the recombinant protein; and (iii) to aid in the purification of the recombinant protein by acting as a ligand in affinity purification. In some embodiments, expression of polynucleotides (such as non-coding polynucleotides) and proteins in prokaryotes can be carried out in Escherichia coli with vectors containing constitutive or inducible promoters directing the expression of either fusion or non-fusion polynucleotides and/or proteins. In some embodiments, the fusion expression vector can include a proteolytic cleavage site, which can be introduced at the junction of the fusion vector backbone or other fusion moiety and the recombinant polynucleotide or protein to enable separation of the recombinant polynucleotide or protein from the fusion vector backbone or other fusion moiety subsequent to purification of the fusion polynucleotide or protein. Such enzymes, and their cognate recognition sequences, include Factor Xa, thrombin and enterokinase. Example fusion expression vectors include pGEX (Pharmacia Biotech Inc; Smith and Johnson, 1988. Gene 67: 31-40), pMAL (New England Biolabs, Beverly, Mass.) and pRIT5 (Pharmacia, Piscataway, N.J.) that fuse glutathione S-transferase (GST), maltose E binding protein, or protein A, respectively, to the target recombinant protein. Examples of suitable inducible non-fusion E. coli expression vectors include pTrc (Amrann et al., (1988) Gene 69: 301-315) and pET 11d (Studier et al., GENE EXPRESSION TECHNOLOGY: METHODS IN ENZYMOLOGY 185, Academic Press, San Diego, Calif. (1990) 60-89).

[0110] In some embodiments, one or more vectors driving expression of one or more elements of an engineered viral (e.g., AAV) capsid system or other composition containing an n-mer motif described herein are introduced into a host cell such that expression of the elements of the engineered delivery system described herein direct formation of an engineered viral (e.g., AAV) capsid system or other composition containing an n-mer motif described herein (including but not limited to an engineered gene transfer agent particle, which is described in greater detail elsewhere herein). For example, different elements of the engineered viral (e.g., AAV) capsid system or other composition containing an n-mer motif described herein can each be operably linked to separate regulatory elements on separate vectors. RNA(s) of different elements of the engineered delivery system described herein can be delivered to an animal or mammal or cell thereof to produce an animal or mammal or cell thereof that constitutively or inducibly or conditionally expresses different elements of the engineered viral (e.g., AAV) capsid system or other composition containing an n-mer motif described herein that incorporates one or more elements of the engineered viral (e.g., AAV) capsid system or other composition containing an n-mer motif described herein or contains one or more cells that incorporates and/or expresses one or more elements of the engineered viral (e.g., AAV) capsid system or other composition containing an n-mer motif described herein.

[0111] In some embodiments, two or more of the elements expressed from the same or different regulatory element(s) can be combined in a single vector, with one or more additional vectors providing any components of the system not included in the first vector. Engineered polynucleotides of the present invention that are combined in a single vector may be arranged in any suitable orientation, such as one element located 5′ with respect to (“upstream” of) or 3′ with respect to (“downstream” of) a second element. The coding sequence of one element may be located on the same or opposite strand of the coding sequence of a second element, and oriented in the same or opposite direction. In some embodiments, a single promoter drives expression of a transcript encoding one or more engineered viral (e.g., AAV) capsid proteins or other composition containing an n-mer motif described herein, embedded within one or more intron sequences (e.g., each in a different intron, two or more in at least one intron, or all in a single intron). In some embodiments, the engineered polynucleotides of the present invention (including but not limited to engineered viral polynucleotides) can be operably linked to and expressed from the same promoter.

### Vector Features

[0112] The vectors can include additional features that can confer one or more functionalities to the vector, the polynucleotide to be delivered, a virus particle produced there from, or polypeptide expressed thereof. Such features include, but are not limited to, regulatory elements, selectable markers, molecular identifiers (e.g., molecular barcodes), stabilizing elements, and the like. It will be appreciated by those skilled in the art that the design of the expression vector and additional features included can depend on such factors as the choice of the host cell to be transformed, the level of expression desired, etc.

### Regulatory Elements

[0113] In embodiments, the polynucleotides and/or vectors thereof described herein (including, but not limited to, the engineered AAV capsid polynucleotides of the present invention) can include one or more regulatory elements that can be operatively linked to the polynucleotide. The term “regulatory element” is intended to include promoters, enhancers, internal ribosomal entry sites (IRES), and other expression control elements (e.g., transcription termination signals, such as polyadenylation signals and poly-U sequences). Such regulatory elements are described, for example, in Goeddel, GENE EXPRESSION TECHNOLOGY: METHODS IN ENZYMOLOGY 185, Academic Press, San Diego, Calif. (1990). Regulatory elements include those that direct constitutive expression of a nucleotide sequence in many types of host cell and those that direct expression of the nucleotide sequence only in certain host cells (e.g., tissue-specific regulatory sequences). A tissue-specific promoter can direct expression primarily in a desired tissue of interest, such as muscle, neuron, bone, skin, blood, specific organs (e.g., liver, brain), or particular cell types (e.g., lymphocytes). Regulatory elements may also direct expression in a temporal-dependent manner, such as in a cell-cycle dependent or developmental stage-dependent manner, which may or may not also be tissue or cell-type specific. In some embodiments, a vector comprises one or more pol III promoter (e.g., 1, 2, 3, 4, 5, or more pol III promoters), one or more pol II promoters (e.g., 1, 2, 3, 4, 5, or more pol II promoters), one or more pol I promoters (e.g., 1, 2, 3, 4, 5, or more pol I promoters), or combinations thereof. Examples of pol III promoters include, but are not limited to, U6 and H1 promoters. Examples of pol II promoters include, but are not limited to, the retroviral Rous sarcoma virus (RSV) LTR promoter (optionally with the RSV enhancer), the cytomegalovirus (CMV) promoter (optionally with the CMV enhancer) (see, e.g., Boshart et al, Cell, 41:521-530 (1985)), the SV40 promoter, the dihydrofolate reductase promoter, the β-actin promoter, the phosphoglycerol kinase (PGK) promoter, and the EF1α promoter. Also encompassed by the term “regulatory element” are enhancer elements, such as WPRE; CMV enhancers; the R-U5′ segment in LTR of HTLV-I (Mol. Cell. Biol., Vol. 8 (1), p. 466-472, 1988); SV40 enhancer; and the intron sequence between exons 2 and 3 of rabbit β-globin (Proc. Natl. Acad. Sci. USA., Vol. 78 (3), p. 1527-31, 1981).

[0114] In some embodiments, the regulatory sequence can be a regulatory sequence described in U.S. Pat. No. 7,776,321, U.S. Pat. Pub. No. 2011/0027239, and PCT publication WO 2011/028929, the contents of which are incorporated by reference herein in their entirety. In some embodiments, the vector can contain a minimal promoter. In some embodiments, the minimal promoter is the Mecp2 promoter, tRNA promoter, or U6. In a further embodiment, the minimal promoter is tissue specific. In some embodiments, the length of the vector polynucleotide the minimal promoters and polynucleotide sequences is less than 4.4 Kb.

[0115] To express a polynucleotide, the vector can include one or more transcriptional and/or translational initiation regulatory sequences, e.g., promoters, that direct the transcription of the gene and/or translation of the encoded protein in a cell. In some embodiments a constitutive promoter may be employed. Suitable constitutive promoters for mammalian cells are generally known in the art and include, but are not limited to SV40, CAG, CMV, EF-1α, β-actin, RSV, and PGK. Suitable constitutive promoters for bacterial cells, yeast cells, and fungal cells are generally known in the art, such as a T-7 promoter for bacterial expression and an alcohol dehydrogenase promoter for expression in yeast.

[0116] In some embodiments, the regulatory element can be a regulated promoter. “Regulated promoter” refers to promoters that direct gene expression not constitutively, but in a temporally-and/or spatially-regulated manner, and includes tissue-specific, tissue-preferred and inducible promoters. In some embodiments, the regulated promoter is a tissue specific promoter as previously discussed elsewhere herein. Regulated promoters include conditional promoters and inducible promoters. In some embodiments, conditional promoters can be employed to direct expression of a polynucleotide in a specific cell type, under certain environmental conditions, and/or during a specific state of development. Suitable tissue specific promoters can include, but are not limited to, liver specific promoters (e.g. APOA2, SERPIN A1 (hAAT), CYP3A4, and MIR122), pancreatic cell promoters (e.g. INS, IRS2, Pdx1, Alx3, Ppy), cardiac specific promoters (e.g. Myh6 (alpha MHC), MYL2 (MLC-2v), TNI3 (cTn1), NPPA (ANF), Slc8a1 (Ncx1)), central nervous system cell promoters (SYN1, GFAP, INA, NES, MOBP, MBP, TH, FOXA2 (HNF3 beta)), skin cell specific promoters (e.g. FLG, K14, TGM3), immune cell specific promoters, (e.g. ITGAM, CD43 promoter, CD14 promoter, CD45 promoter, CD68 promoter), urogenital cell specific promoters (e.g. Pbsn, Upk2, Sbp, Fer114), endothelial cell specific promoters (e.g. ENG), pluripotent and embryonic germ layer cell specific promoters (e.g. Oct4, NANOG, Synthetic Oct4, T brachyury, NES, SOX17, FOXA2, MIR122), and muscle cell specific promoter (e.g. Desmin). Other tissue and/or cell specific promoters are discussed elsewhere herein and can be generally known in the art and are within the scope of this disclosure.

[0117] Inducible/conditional promoters can be positively inducible/conditional promoters (e.g. a promoter that activates transcription of the polynucleotide upon appropriate interaction with an activated activator, or an inducer (compound, environmental condition, or other stimulus) or a negative/conditional inducible promoter (e.g. a promoter that is repressed (e.g. bound by a repressor) until the repressor condition of the promotor is removed (e.g. inducer binds a repressor bound to the promoter stimulating release of the promoter by the repressor or removal of a chemical repressor from the promoter environment). The inducer can be a compound, environmental condition, or other stimulus. Thus, inducible/conditional promoters can be responsive to any suitable stimuli such as chemical, biological, or other molecular agents, temperature, light, and/or pH. Suitable inducible/conditional promoters include, but are not limited to, Tet-On, Tet-Off, Lac promoter, pBad, AlcA, LexA, Hsp70 promoter, Hsp90 promoter, pDawn, XVE/OlexA, GVG, and pOp/LhGR.

[0118] In some embodiments, the vector or system thereof can include one or more elements capable of translocating and/or expressing an engineered polynucleotide of the present invention (e.g., an engineered viral (e.g., AAV) capsid polynucleotide) to/in a specific cell component or organelle. Such organelles can include, but are not limited to, nucleus, ribosome, endoplasmic reticulum, Golgi apparatus, chloroplast, mitochondria, vacuole, lysosome, cytoskeleton, plasma membrane, cell wall, peroxisome, centrioles, etc.

### Selectable Markers and Tags

[0119] One or more of the engineered polynucleotides of the present invention (e.g., an engineered viral (e.g., AAV) capsid polynucleotide) can be operably linked, fused to, or otherwise modified to include a polynucleotide that encodes or is a selectable marker or tag, which can be a polynucleotide or polypeptide. In some embodiments, the polypeptide encoding a polypeptide selectable marker can be incorporated in the engineered polynucleotide of the present invention (e.g., an engineered viral (e.g., AAV) capsid polynucleotide) such that the selectable marker polypeptide, when translated, is inserted between two amino acids between the N- and C-terminus of an engineered polypeptide (e.g., the engineered AAV capsid polypeptide) or at the N- and/or C-terminus of the engineered polypeptide (e.g., an engineered AAV capsid polypeptide). In some embodiments, the selectable marker or tag is a polynucleotide barcode or unique molecular identifier (UMI).

[0120] It will be appreciated that the polynucleotide encoding such selectable markers or tags can be incorporated into a polynucleotide encoding one or more components of the engineered AAV capsid system described herein in an appropriate manner to allow expression of the selectable marker or tag. Such techniques and methods are described elsewhere herein and will be instantly appreciated by one of ordinary skill in the art in view of this disclosure. Many such selectable markers and tags are generally known in the art and are intended to be within the scope of this disclosure.

[0121] Suitable selectable markers and tags include, but are not limited to, affinity tags, such as chitin binding protein (CBP), maltose binding protein (MBP), glutathione-S-transferase (GST), poly(His) tag; solubilization tags such as thioredoxin (TRX) and poly (NANP), MBP, and GST; chromatography tags such as those consisting of polyanionic amino acids, such as FLAG-tag; epitope tags such as V5-tag, Myc-tag, HA-tag and NE-tag; protein tags that can allow specific enzymatic modification (such as biotinylation by biotin ligase) or chemical modification (such as reaction with FLASH-EDT2 for fluorescence imaging), DNA and/or RNA segments that contain restriction enzyme or other enzyme cleavage sites; DNA segments that encode products that provide resistance against otherwise toxic compounds including antibiotics, such as, spectinomycin, ampicillin, kanamycin, tetracycline, Basta, neomycin phosphotransferase II (NEO), hygromycin phosphotransferase (HPT)) and the like; DNA and/or RNA segments that encode products that are otherwise lacking in the recipient cell (e.g., tRNA genes, auxotrophic markers); DNA and/or RNA segments that encode products which can be readily identified (e.g., phenotypic markers such as β-galactosidase, GUS; fluorescent proteins such as green fluorescent protein (GFP), cyan (CFP), yellow (YFP), red (RFP), luciferase, and cell surface proteins); polynucleotides that can generate one or more new primer sites for PCR (e.g., the juxtaposition of two DNA sequences not previously juxtaposed), DNA sequences not acted upon or acted upon by a restriction endonuclease or other DNA modifying enzyme, chemical, etc.; epitope tags (e.g. GFP, FLAG- and His-tags), and, DNA sequences that make a molecular barcode or unique molecular identifier (UMI), DNA sequences required for a specific modification (e.g., methylation) that allows its identification. Other suitable markers will be appreciated by those of skill in the art.

[0122] Selectable markers and tags can be operably linked to one or more components of the engineered AAV capsid system or other compositions and/or systems described herein via suitable linker, such as a glycine or glycine serine linkers as short as GS or GG up to (GGGGG) 3 (SEQ ID NO: 20482) or (GGGGS) 3 (SEQ ID NO: 20483). Other suitable linkers are described elsewhere herein.

[0123] The vector or vector system can include one or more polynucleotides encoding one or more n-mers. In some embodiments, the n-mer encoding polynucleotides can be included in the vector or vector system, such as a viral vector system, such that they are expressed within and/or on the virus particle(s) produced such that the virus particles can be targeted to specific cells, tissues, organs, etc. In some embodiments, the n-mer encoding polynucleotides can be included in the vector or vector system such that the engineered polynucleotide(s) of the present invention (e.g., an engineered viral (e.g., AAV) capsid polynucleotide(s)) and/or products expressed therefrom include the n-mer and can be targeted to specific cells, tissues, organs, etc. In some embodiments, such as non-viral carriers, the n-mer can be attached to the carrier (e.g., polymer, lipid, inorganic molecule etc.) and can be capable of targeting the carrier and any attached or associated engineered polynucleotide(s) of the present invention, the engineered polypeptides, or other compositions of the present invention described herein, to specific cells, tissues, organs, etc. In some embodiments, the specific cells are CNS cells.

### Cell-Free Vector and Polynucleotide Expression

[0124] In some embodiments, the polynucleotide(s) encoding an n-mer motif of the present invention can be expressed from a vector or suitable polynucleotide in a cell-free in vitro system. In some embodiments, the polynucleotide encoding one or more features of the engineered AAV capsid system can be expressed from a vector or suitable polynucleotide in a cell-free in vitro system. In other words, the polynucleotide can be transcribed and optionally translated in vitro. In vitro transcription/translation systems and appropriate vectors are generally known in the art and commercially available. Generally, in vitro transcription and in vitro translation systems replicate the processes of RNA and protein synthesis, respectively, outside of the cellular environment. Vectors and suitable polynucleotides for in vitro transcription can include T7, SP6, T3, promoter regulatory sequences that can be recognized and acted upon by an appropriate polymerase to transcribe the polynucleotide or vector.

[0125] In vitro translation can be stand-alone (e.g., translation of a purified polyribonucleotide) or linked/coupled to transcription. In some embodiments, the cell-free (or in vitro) translation system can include extracts from rabbit reticulocytes, wheat germ, and/or E. coli. The extracts can include various macromolecular components that are needed for translation of exogenous RNA (e.g., 70S or 80S ribosomes, tRNAs, aminoacyl-tRNA, synthetases, initiation, elongation factors, termination factors, etc.). Other components can be included or added during the translation reaction, including but not limited to, amino acids, energy sources (ATP, GTP), energy regenerating systems (creatine phosphate and creatine phosphokinase (eukaryotic systems)) (phosphoenol pyruvate and pyruvate kinase for bacterial systems), and other co-factors (Mg2+, K+, etc.). As previously mentioned, in vitro translation can be based on RNA or DNA starting material. Some translation systems can utilize an RNA template as starting material (e.g., reticulocyte lysates and wheat germ extracts). Some translation systems can utilize a DNA template as a starting material (e.g., E coli-based systems). In these systems transcription and translation are coupled and DNA is first transcribed into RNA, which is subsequently translated. Suitable standard and coupled cell-free translation systems are generally known in the art and are commercially available.

### Codon Optimization of Vector Polynucleotides

[0126] As described elsewhere herein, the polynucleotide encoding an n-mer motif of the present invention and/or other polynucleotides described herein or the transgene contained within the recombinant AAV genome can be codon optimized. In some embodiments, polynucleotides of the engineered AAV capsid system described herein can be codon optimized. In some embodiments, one or more polynucleotides contained in a vector (“vector polynucleotides”) described herein that are in addition to an optionally codon optimized polynucleotide encoding an n-mer motif, including but not limited to, embodiments of the engineered AAV capsid system described herein, can be codon optimized. In general, codon optimization refers to a process of modifying a nucleic acid sequence for enhanced expression in the host cells of interest by replacing at least one codon (e.g., about or more than about 1, 2, 3, 4, 5, 10, 15, 20, 25, 50, or more codons) of the native sequence with codons that are more frequently or most frequently used in the genes of that host cell while maintaining the native amino acid sequence. Various species exhibit particular bias for certain codons of a particular amino acid. Codon bias (differences in codon usage between organisms) often correlates with the efficiency of translation of messenger RNA (mRNA), which is in turn believed to be dependent on, among other things, the properties of the codons being translated and the availability of particular transfer RNA (tRNA) molecules. The predominance of selected tRNAs in a cell is generally a reflection of the codons used most frequently in peptide synthesis. Accordingly, genes can be tailored for optimal gene expression in a given organism based on codon optimization. Codon usage tables are readily available, for example, at the “Codon Usage Database” available at www.kazusa.or.jp/codon/and these tables can be adapted in a number of ways. See Nakamura, Y., et al. “Codon usage tabulated from the international DNA sequence databases: status for the year 2000” Nucl. Acids Res. 28:292 (2000). Computer algorithms for codon optimizing a particular sequence for expression in a particular host cell are also available, such as Gene Forge (Aptagen; Jacobus, PA), are also available. In some embodiments, one or more codons (e.g., 1, 2, 3, 4, 5, 10, 15, 20, 25, 50, or more, or all codons) in a sequence encoding a DNA/RNA-targeting Cas protein corresponds to the most frequently used codon for a particular amino acid. As to codon usage in yeast, reference is made to the online Yeast Genome database available at www.yeastgenome.org/community/codon_usage.shtml, or Codon selection in yeast, Bennetzen and Hall, J Biol Chem. 1982 Mar. 25; 257(6): 3026-31. As to codon usage in plants including algae, reference is made to Codon usage in higher plants, green algae, and cyanobacteria, Campbell and Gowri, Plant Physiol. 1990 January; 92 (1): 1-11.; as well as Codon usage in plant genes, Murray et al, Nucleic Acids Res. 1989 Jan. 25; 17(2):477-98; or Selection on the codon bias of chloroplast and cyanelle genes in different plant and algal lineages, Morton B R, J Mol Evol. 1998 April; 46 (4): 449-59.

[0127] The vector polynucleotide can be codon optimized for expression in a specific cell-type, tissue type, organ type, and/or subject type. In some embodiments, a codon optimized sequence is a sequence optimized for expression in a eukaryote, e.g., humans (i.e., being optimized for expression in a human or human cell), or for another eukaryote, such as another animal (e.g., a mammal or avian) as is described elsewhere herein. Such codon optimized sequences are within the ambit of the ordinary skilled artisan in view of the description herein. In some embodiments, the polynucleotide is codon optimized for a specific cell type. Such cell types can include, but are not limited to, epithelial cells (including skin cells, cells lining the gastrointestinal tract, cells lining other hollow organs), nerve cells (nerves, brain cells, spinal column cells, nerve support cells (e.g., astrocytes, glial cells, Schwann cells etc.), muscle cells (e.g., cardiac muscle, smooth muscle cells, and skeletal muscle cells), connective tissue cells (fat and other soft tissue padding cells, bone cells, tendon cells, cartilage cells), blood cells, stem cells and other progenitor cells, immune system cells, germ cells, and combinations thereof. Such codon optimized sequences are within the ambit of the ordinary skilled artisan in view of the description herein. In some embodiments, the polynucleotide is codon optimized for a specific tissue type. Such tissue types can include, but are not limited to, muscle tissue, connective tissue, nervous tissue, and epithelial tissue. Such codon optimized sequences are within the ambit of the ordinary skilled artisan in view of the description herein. In some embodiments, the polynucleotide is codon optimized for a specific organ. Such organs include, but are not limited to, muscles, skin, intestines, liver, spleen, brain, lungs, stomach, heart, kidneys, gallbladder, pancreas, bladder, thyroid, bone, blood vessels, blood, and combinations thereof. Such codon optimized sequences are within the ambit of the ordinary skilled artisan in view of the description herein.

[0128] In some embodiments, a vector polynucleotide is codon optimized for expression in particular cells, such as prokaryotic or eukaryotic cells. The eukaryotic cells may be those of or derived from a particular organism, such as a plant or a mammal, including but not limited to human, or non-human eukaryote or animal or mammal as discussed herein, e.g., mouse, rat, rabbit, dog, livestock, or non-human mammal or primate.

### Non-Viral Vectors and Carriers

[0129] In some embodiments, the vector is a non-viral vector or carrier. In some embodiments, non-viral vectors can have the advantage(s) of reduced toxicity and/or immunogenicity and/or increased bio-safety as compared to viral vectors The terms of art “Non-viral vectors and carriers” and as used herein in this context refers to molecules and/or compositions that are not based on one or more component of a virus or virus genome (excluding any nucleotide to be delivered and/or expressed by the non-viral vector) that can be capable of attaching to, incorporating, coupling, and/or otherwise interacting with an engineered capsid polynucleotide (e.g., an engineered AAV capsid polynucleotide) or other composition of the present invention described herein and can be capable of ferrying the polynucleotide to a cell and/or expressing the polynucleotide. It will be appreciated that this does not exclude the inclusion of a virus-based polynucleotide that is to be delivered. For example, if a gRNA to be delivered is directed against a virus component and it is inserted or otherwise coupled to an otherwise non-viral vector or carrier, this would not make said vector a “viral vector”. Non-viral vectors and carriers include naked polynucleotides, chemical-based carriers, polynucleotide (non-viral) based vectors, and particle-based carriers. It will be appreciated that the term “vector” as used in the context of non-viral vectors and carriers refers to polynucleotide vectors and “carriers” used in this context refers to a non-nucleic acid or polynucleotide molecule or composition that be attached to or otherwise interact with a polynucleotide to be delivered, such as an engineered AAV capsid polynucleotide of the present invention.

### Naked Polynucleotides

[0130] In some embodiments one or more engineered AAV capsid polynucleotides or other polynucleotides of the present invention described elsewhere herein can be included in a naked polynucleotide. The term of art “naked polynucleotide” as used herein refers to polynucleotides that are not associated with another molecule (e.g., proteins, lipids, and/or other molecules) that can often help protect it from environmental factors and/or degradation. As used herein, associated with includes, but is not limited to, linked to, adhered to, adsorbed to, enclosed in, enclosed in or within, mixed with, and the like. Naked polynucleotides that include one or more of the engineered AAV capsid polynucleotides or other polynucleotides of the present invention described herein can be delivered directly to a host cell and optionally expressed therein. The naked polynucleotides can have any suitable two- and three-dimensional configurations. By way of non-limiting examples, naked polynucleotides can be single-stranded molecules, double stranded molecules, circular molecules (e.g., plasmids and artificial chromosomes), molecules that contain portions that are single stranded and portions that are double stranded (e.g., ribozymes), and the like. In some embodiments, the naked polynucleotide contains only the engineered AAV capsid polynucleotide(s) or other polynucleotides of the present invention. In some embodiments, the naked polynucleotide can contain other nucleic acids and/or polynucleotides in addition to the engineered AAV capsid polynucleotide(s) or other polynucleotides of the present invention described elsewhere herein. The naked polynucleotides can include one or more elements of a transposon system. Transposons and system thereof are described in greater detail elsewhere herein.

### Non-Viral Polynucleotide Vectors

[0131] In some embodiments, one or more of the engineered AAV capsid polynucleotides or other polynucleotides of the present invention can be included in a non-viral polynucleotide vector. Suitable non-viral polynucleotide vectors include, but are not limited to, transposon vectors and vector systems, plasmids, bacterial artificial chromosomes, yeast artificial chromosomes, AR (antibiotic resistance)-free plasmids and miniplasmids, circular covalently closed vectors (e.g., minicircles, minivectors, miniknots), linear covalently closed vectors (“dumbbell shaped”), MIDGE (minimalistic immunologically defined gene expression) vectors, MiLV (micro-linear vector) vectors, Ministrings, mini-intronic plasmids, PSK systems (post-segregationally killing systems), ORT (operator repressor titration) plasmids, and the like. See e.g., Hardee et al. 2017. Genes. 8(2):65.

[0132] In some embodiments, the non-viral polynucleotide vector can have a conditional origin of replication. In some embodiments, the non-viral polynucleotide vector can be an ORT plasmid. In some embodiments, the non-viral polynucleotide vector can have a minimalistic immunologically defined gene expression. In some embodiments, the non-viral polynucleotide vector can have one or more post-segregationally killing system genes. In some embodiments, the non-viral polynucleotide vector is AR-free. In some embodiments, the non-viral polynucleotide vector is a minivector. In some embodiments, the non-viral polynucleotide vector includes a nuclear localization signal. In some embodiments, the non-viral polynucleotide vector can include one or more CpG motifs. In some embodiments, the non-viral polynucleotide vectors can include one or more scaffold/matrix attachment regions (S/MARs). See e.g., Mirkovitch et al. 1984. Cell. 39:223-232, Wong et al. 2015. Adv. Genet. 89:113-152, whose techniques and vectors can be adapted for use in the present invention. S/MARs are AT-rich sequences that play a role in the spatial organization of chromosomes through DNA loop base attachment to the nuclear matrix. S/MARs are often found close to regulatory elements such as promoters, enhancers, and origins of DNA replication. Inclusion of one or S/MARs can facilitate a once-per-cell-cycle replication to maintain the non-viral polynucleotide vector as an episome in daughter cells. In embodiments, the S/MAR sequence is located downstream of an actively transcribed polynucleotide (e.g., one or more engineered AAV capsid polynucleotides or other polynucleotides or molecules of the present invention) included in the non-viral polynucleotide vector. In some embodiments, the S/MAR can be a S/MAR from the beta-interferon gene cluster. See e.g., Verghese et al. 2014. Nucleic Acid Res. 42: e53; Xu et al. 2016. Sci. China Life Sci. 59:1024-1033; Jin et al. 2016. 8:702-711; Koirala et al. 2014. Adv. Exp. Med. Biol. 801:703-709; and Nehlsen et al. 2006. Gene Ther. Mol. Biol. 10:233-244, whose techniques and vectors can be adapted for use in the present invention.

[0133] In some embodiments, the non-viral vector is a transposon vector or system thereof. As used herein, “transposon” (also referred to as transposable element) refers to a polynucleotide sequence that is capable of moving form location in a genome to another. There are several classes of transposons. Transposons include retrotransposons and DNA transposons. Retrotransposons require the transcription of the polynucleotide that is moved (or transposed) in order to transpose the polynucleotide to a new genome or polynucleotide. DNA transposons are those that do not require reverse transcription of the polynucleotide that is moved (or transposed) in order to transpose the polynucleotide to a new genome or polynucleotide. In some embodiments, the non-viral polynucleotide vector can be a retrotransposon vector. In some embodiments, the retrotransposon vector includes long terminal repeats. In some embodiments, the retrotransposon vector does not include long terminal repeats. In some embodiments, the non-viral polynucleotide vector can be a DNA transposon vector. DNA transposon vectors can include a polynucleotide sequence encoding a transposase. In some embodiments, the transposon vector is configured as a non-autonomous transposon vector, meaning that the transposition does not occur spontaneously on its own. In some of these embodiments, the transposon vector lacks one or more polynucleotide sequences encoding proteins required for transposition. In some embodiments, the non-autonomous transposon vectors lack one or more Ac elements.

[0134] In some embodiments, a non-viral polynucleotide transposon vector system can include a first polynucleotide vector that contains the engineered AAV capsid polynucleotide(s) or other polynucleotides, or molecules of the present invention described herein flanked on 5′ and 3′ ends by transposon terminal inverted repeats (TIRs) and a second polynucleotide vector that includes a polynucleotide capable of encoding a transposase coupled to a promoter to drive expression of the transposase. When both are expressed in the same cell the transposase can be expressed from the second vector and can transpose the material between the TIRs on the first vector (e.g., the engineered AAV capsid polynucleotide(s) or other polynucleotides or molecules of the present invention) and integrate it into one or more positions in the host cell's genome. In some embodiments the transposon vector or system thereof can be configured as a gene trap. In some embodiments, the TIRs can be configured to flank a strong splice acceptor site followed by a reporter and/or other gene (e.g., one or more of the engineered AAV capsid polynucleotide(s) or other polynucleotides or molecules of the present invention) and a strong poly A tail. When transposition occurs while using this vector or system thereof, the transposon can insert into an intron of a gene and the inserted reporter or other gene can provoke a mis-splicing process and as a result it in activates the trapped gene.

[0135] Any suitable transposon system can be used. Suitable transposon and systems thereof can include Sleeping Beauty transposon system (Tc1/mariner superfamily) (see e.g., Ivics et al. 1997. Cell. 91 (4): 501-510), piggyBac (piggyBac superfamily) (see e.g., Li et al. 2013 110(25): E2279-E2287 and Yusa et al. 2011. PNAS. 108 (4): 1531-1536), Tol2 (superfamily hAT), Frog Prince (Tc1/mariner superfamily) (see e.g., Miskey et al. 2003 Nucleic Acid Res. 31 (23): 6873-6881) and variants thereof.

### Chemical Carriers

[0136] In some embodiments, the engineered AAV capsid polynucleotide(s) or other polynucleotides or other molecules of the present invention described herein can be coupled to a chemical carrier. Chemical carriers that can be suitable for delivery of polynucleotides can be broadly classified into the following classes: (i) inorganic particles, (ii) lipid-based, (iii) polymer-based, and (iv) peptide based. They can be categorized as (1) those that can form condensed complexes with a polynucleotide (such as the engineered AAV capsid polynucleotide(s) of the present invention), (2) those capable of targeting specific cells, (3) those capable of increasing delivery of the polynucleotide or other molecules (such as the engineered AAV capsid polynucleotide(s)) of the present invention to the nucleus or cytosol of a host cell, (4) those capable of disintegrating from DNA/RNA in the cytosol of a host cell, and (5) those capable of sustained or controlled release. It will be appreciated that any one given chemical carrier can include features from multiple categories. The term “particle” as used herein, refers to any suitable sized particles for delivery of the compositions (including particles, polypeptides, polynucleotides, and other compositions described herein) present invention described herein. Suitable sizes include macro-, micro-, and nano-sized particles.

[0137] In some embodiments, the non-viral carrier can be an inorganic particle. In some embodiments, the inorganic particle, can be a nanoparticle. The inorganic particles can be configured and optimized by varying size, shape, and/or porosity. In some embodiments, the inorganic particles are optimized to escape from the reticulo endothelial system. In some embodiments, the inorganic particles can be optimized to protect an entrapped molecule from degradation. The suitable inorganic particles that can be used as non-viral carriers in this context can include, but are not limited to, calcium phosphate, silica, metals (e.g., gold, platinum, silver, palladium, rhodium, osmium, iridium, ruthenium, mercury, copper, rhenium, titanium, niobium, tantalum, and combinations thereof), magnetic compounds, particles, and materials, (e.g., super-magnetic iron oxide and magnetite), quantum dots, fullerenes (e.g., carbon nanoparticles, nanotubes, nanostrings, and the like), and combinations thereof. Other suitable inorganic non-viral carriers are discussed elsewhere herein.

[0138] In some embodiments, the non-viral carrier can be lipid-based. Suitable lipid-based carriers are also described in greater detail herein. In some embodiments, the lipid-based carrier includes a cationic lipid or an amphiphilic lipid that is capable of binding or otherwise interacting with a negative charge on the polynucleotide to be delivered (e.g., such as an engineered AAV capsid polynucleotide of the present invention). In some embodiments, chemical non-viral carrier systems can include a polynucleotide (such as the engineered AAV capsid polynucleotide(s)) or other composition or molecule of the present invention) and a lipid (such as a cationic lipid). These are also referred to in the art as lipoplexes. Other embodiments of lipoplexes are described elsewhere herein. In some embodiments, the non-viral lipid-based carrier can be a lipid nano emulsion. Lipid nano emulsions can be formed by the dispersion of an immiscible liquid in another stabilized emulsifying agent and can have particles of about 200 nm that are composed of the lipid, water, and surfactant that can contain the polynucleotide to be delivered (e.g., the engineered AAV capsid polynucleotide(s) of the present invention). In some embodiments, the lipid-based non-viral carrier can be a solid lipid particle or nanoparticle.

[0139] In some embodiments, the non-viral carrier can be peptide-based. In some embodiments, the peptide-based non-viral carrier can include one or more cationic amino acids. In some embodiments, 35 to 40, 45, 50, 55, 60, 65, 70, 75, 80, 85, 90, 95, 99 or 100% of the amino acids are cationic. In some embodiments, peptide carriers can be used in conjunction with other types of carriers (e.g., polymer-based carriers and lipid-based carriers to functionalize these carriers). In some embodiments, the functionalization is targeting a host cell. Suitable polymers that can be included in the polymer-based non-viral carrier can include, but are not limited to, polyethylenimine (PEI), chitosan, poly (DL-lactide) (PLA), poly (DL-Lactide-co-glycoside) (PLGA), dendrimers (see e.g., US Pat. Pub. 2017/0079916 whose techniques and compositions can be adapted for use with the engineered AAV capsid polynucleotides of the present invention), polymethacrylate, and combinations thereof.

[0140] In some embodiments, the non-viral carrier can be configured to release an engineered delivery system polynucleotide that is associated with or attached to the non-viral carrier in response to an external stimulus, such as pH, temperature, osmolarity, concentration of a specific molecule or composition (e.g., calcium, NaCl, and the like), pressure and the like. In some embodiments, the non-viral carrier can be a particle that is configured includes one or more of the engineered AAV capsid polynucleotides or other compositions of the present invention describe herein and an environmental triggering agent response element, and optionally a triggering agent. In some embodiments, the particle can include a polymer that can be selected from the group of polymethacrylates and polyacrylates. In some embodiments, the non-viral particle can include one or more embodiments of the compositions microparticles described in US Pat. Pubs. 20150232883 and 20050123596, whose techniques and compositions can be adapted for use in the present invention.

[0141] In some embodiments, the non-viral carrier can be a polymer-based carrier. In some embodiments, the polymer is cationic or is predominantly cationic such that it can interact in a charge-dependent manner with the negatively charged polynucleotide to be delivered (such as the engineered AAV capsid polynucleotide(s) of the present invention). Polymer-based systems are described in greater detail elsewhere herein.

### Viral Vectors

[0142] In some embodiments, the vector is a viral vector. The term of art “viral vector” and as used herein in this context refers to polynucleotide based vectors that contain one or more elements from or based upon one or more elements of a virus that can be capable of expressing and packaging a polynucleotide, such as an engineered AAV capsid polynucleotide, cargo, or other composition or molecule of the present invention, into a virus particle and producing said virus particle when used alone or with one or more other viral vectors (such as in a viral vector system). Viral vectors and systems thereof can be used for producing viral particles for delivery of and/or expression and/or generation of one or more compositions of the present invention described herein (including, but not limited to, any viral particle and associated cargo). The viral vector can be part of a viral vector system involving multiple vectors. In some embodiments, systems incorporating multiple viral vectors can increase the safety of these systems. Suitable viral vectors can include adenoviral-based vectors, adeno associated vectors, helper-dependent adenoviral (HdAd) vectors, hybrid adenoviral vectors, and the like. Other embodiments of viral vectors and viral particles produce therefrom are described elsewhere herein. In some embodiments, the viral vectors are configured to produce replication incompetent viral particles for improved safety of these systems.

### Adenoviral Vectors, Helper-Dependent Adenoviral Vectors, and Hybrid Adenoviral Vectors

[0143] In some embodiments, the vector can be an adenoviral vector. In some embodiments, the adenoviral vector can include elements such that the virus particle produced using the vector or system thereof can be serotype 2, 5, or 9. In some embodiments, the polynucleotide to be delivered via the adenoviral particle can be up to about 8 kb. Thus, in some embodiments, an adenoviral vector can include a DNA polynucleotide to be delivered that can range in size from about 0.001 kb to about 8 kb. Adenoviral vectors have been used successfully in several contexts (see e.g., Teramato et al. 2000. Lancet. 355: 1911-1912; Lai et al. 2002. DNA Cell. Biol. 21:895-913; Flotte et al., 1996. Hum. Gene. Ther. 7: 1145-1159; and Kay et al. 2000. Nat. Genet. 24: 257-261. The vector can encode the engineered AAV capsids, said capsids forming adenoviral particles.

[0144] In some embodiments the vector can be a helper-dependent adenoviral vector or system thereof. These are also referred to in the field as “gutless” or “gutted” vectors and are a modified generation of adenoviral vectors (see e.g., Thrasher et al. 2006. Nature. 443:E5-7). In embodiments of the helper-dependent adenoviral vector system one vector (the helper) can contain all the viral genes required for replication but contains a conditional gene defect in the packaging domain. The second vector of the system can contain only the ends of the viral genome, one or more engineered AAV capsid polynucleotides, and the native packaging recognition signal, which can allow selective packaged release from the cells (see e.g., Cideciyan et al. 2009. N Engl J Med. 361:725-727). Helper-dependent Adenoviral vector systems have been successful for gene delivery in several contexts (see e.g., Simonelli et al. 2010. J Am Soc Gene Ther. 18:643-650; Cideciyan et al. 2009. N Engl J Med. 361:725-727; Crane et al. 2012. Gene Ther. 19 (4): 443-452; Alba et al. 2005. Gene Ther. 12:18-S27; Croyle et al. 2005. Gene Ther. 12: 579-587; Amalfitano et al. 1998. J. Virol. 72:926-933; and Morral et al. 1999. PNAS. 96:12816-12821). The techniques and vectors described in these publications can be adapted for inclusion and delivery of the engineered AAV capsid polynucleotides described herein. In some embodiments, the polynucleotide to be delivered via the viral particle produced from a helper-dependent adenoviral vector or system thereof can be up to about 38 kb. Thus, in some embodiments, a adenoviral vector can include a DNA polynucleotide to be delivered that can range in size from about 0.001 kb to about 37 kb (see e.g., Rosewell et al. 2011. J. Genet. Syndr. Gene Ther. Suppl. 5:001).

[0145] In some embodiments, the vector is a hybrid-adenoviral vector or system thereof. Hybrid adenoviral vectors are composed of the high transduction efficiency of a gene-deleted adenoviral vector and the long-term genome-integrating potential of adeno-associated, retroviruses, lentivirus, and transposon based-gene transfer. In some embodiments, such hybrid vector systems can result in stable transduction and limited integration site. See e.g., Balague et al. 2000. Blood. 95: 820-828; Morral et al. 1998. Hum. Gene Ther. 9: 2709-2716; Kubo and Mitani. 2003. J. Virol. 77 (5): 2964-2971; Zhang et al. 2013. PloS One. 8(10) e76771; and Cooney et al. 2015. Mol. Ther. 23 (4): 667-674), whose techniques and vectors described therein can be modified and adapted for use in the engineered AAV capsid system of the present invention. In some embodiments, a hybrid-adenoviral vector can include one or more features of a retrovirus and/or an adeno-associated virus. In some embodiments the hybrid-adenoviral vector can include one or more features of a spuma retrovirus or foamy virus (FV). See e.g., Ehrhardt et al. 2007. Mol. Ther. 15:146-156 and Liu et al. 2007. Mol. Ther. 15:1834-1841, whose techniques and vectors described therein can be modified and adapted for use in the engineered AAV capsid system of the present invention. Advantages of using one or more features from the FVs in the hybrid-adenoviral vector or system thereof can include the ability of the viral particles produced therefrom to infect a broad range of cells, a large packaging capacity as compared to other retroviruses, and the ability to persist in quiescent (non-dividing) cells. See also e.g., Ehrhardt et al. 2007. Mol. Ther. 156:146-156 and Shuji et al. 2011. Mol. Ther. 19:76-82, whose techniques and vectors described therein can be modified and adapted for use in the engineered AAV capsid system of the present invention.

### Adeno Associated Vectors

[0146] In an embodiment, the engineered vector or system thereof can be an adeno-associated vector (AAV). See, e.g., West et al., Virology 160:38-47 (1987); U.S. Pat. No. 4,797,368; WO 93/24641; Kotin, Human Gene Therapy 5:793-801 (1994); and Muzyczka, J. Clin. Invest. 94:1351 (1994). Although similar to adenoviral vectors in some of their features, AAVs have some deficiency in their replication and/or pathogenicity and thus can be safer than adenoviral vectors. In some embodiments the AAV can integrate into a specific site on chromosome 19 of a human cell with no observable side effects. In some embodiments, the capacity of the AAV vector, system thereof, and/or AAV particles can be up to about 4.7 kb. The AAV vector or system thereof can include one or more engineered capsid polynucleotides described herein.

[0147] The AAV vector or system thereof can be operably linked to a regulatory sequence, said regulatory sequence encoding one or more regulatory molecules. In some embodiments the regulatory molecules can be promoters, enhancers, repressors and the like, which are described in greater detail elsewhere herein. In some embodiments, the AAV vector or system thereof can include one or more polynucleotides that can encode one or more regulatory proteins. In some embodiments, the promoter can be a tissue specific promoter as previously discussed. In some embodiments, the tissue specific promoter can drive expression of an engineered capsid AAV capsid polynucleotide described herein.

[0148] The AAV vector or system thereof can include one or more polynucleotides that can encode one or more capsid proteins, such as the engineered AAV capsid proteins described elsewhere herein. The engineered capsid proteins can be capable of assembling into a protein shell (an engineered capsid) of the AAV virus particle. The engineered capsid can have a cell-, tissue-, and/or organ-specific tropism.

[0149] In some embodiments, the AAV vector or system thereof can include one or more adenovirus helper factors or polynucleotides that can encode one or more adenovirus helper factors. Such adenovirus helper factors can include, but are not limited, E1A, E1B, E2A, E4ORF6, and VA RNAs. In some embodiments, a producing host cell line expresses one or more of the adenovirus helper factors.

[0150] The AAV vector or system thereof can be configured to produce AAV particles having a specific serotype. In some embodiments, the serotype can be AAV-1, AAV-2, AAV-3, AAV-4, AAV-5, AAV-6, AAV-8, AAV-9 or any combinations thereof. In some embodiments, the AAV can be AAV1, AAV-2, AAV-5, AAV-9 or any combination thereof. One can select the AAV of the AAV with regard to the cells to be targeted; e.g., one can select AAV serotypes 1, 2, 5, 9 or a hybrid capsid AAV-1, AAV-2, AAV-5, AAV-9 or any combination thereof for targeting brain and/or neuronal cells; and one can select AAV-4 for targeting cardiac tissue; and one can select AAV-8 for delivery to the liver. Thus, in some embodiments, an AAV vector or system thereof capable of producing AAV particles capable of targeting the brain and/or neuronal cells can be configured to generate AAV particles having serotypes 1, 2, 5 or a hybrid capsid AAV-1, AAV-2, AAV-5 or any combination thereof. In some embodiments, an AAV vector or system thereof capable of producing AAV particles capable of targeting cardiac tissue can be configured to generate an AAV particle having an AAV-4 serotype. In some embodiments, an AAV vector or system thereof capable of producing AAV particles capable of targeting the liver can be configured to generate an AAV having an AAV-8 serotype. See also Srivastava. 2017. Curr. Opin. Virol. 21:75-80.

[0151] It will be appreciated that while the different serotypes can provide some level of cell, tissue, and/or organ specificity, each serotype still is multi-tropic and thus can result in tissue-toxicity if using that serotype to target a tissue that the serotype is less efficient in transducing. Thus, in addition to achieving some tissue targeting capacity via selecting an AAV of a particular serotype, it will be appreciated that the tropism of the AAV serotype can be modified by an engineered AAV capsid described herein. As described elsewhere herein, variants of wild-type AAV of any serotype can be generated via a method described herein and determined to have a particular cell-specific tropism, which can be the same or different as that of the reference wild-type AAV serotype. In some embodiments, the cell, tissue, and/or specificity of the wild-type serotype can be enhanced (e.g., made more selective or specific for a particular cell type that the serotype is already biased towards). For example, wild-type AAV-9 is biased towards muscle and brain in humans (see e.g., Srivastava. 2017. Curr. Opin. Virol. 21:75-80.) By including an engineered AAV capsid and/or capsid protein variant of wild-type AAV-9 as described herein, the bias for e.g., brain can be reduced or eliminated and/or the septicity increased such that the brain specificity appears reduced in comparison, thus enhancing the specificity for the muscle as compared to the wild-type AAV-9. As previously mentioned, inclusion of an engineered capsid and/or capsid protein variant of a wild-type AAV serotype can have a different tropism than the wild-type reference AAV serotype. For example, an engineered AAV capsid and/or capsid protein variant of AAV-9 can have specificity for a tissue other than muscle or brain in humans.

[0152] In some embodiments, the AAV vector is a hybrid AAV vector or system thereof. Hybrid AAVs are AAVs that include genomes with elements from one serotype that are packaged into a capsid derived from at least one different serotype. For example, if it is the rAAV2/5 that is to be produced, and if the production method is based on the helper-free, transient transfection method discussed below, the 1st plasmid and the 3rd plasmid (the adeno helper plasmid) will be the same as discussed for rAAV2 production. However, the 2nd plasmid, the pRepCap will be different. In this plasmid, called pRep2/Cap5, the Rep gene is still derived from AAV2, while the Cap gene is derived from AAV5. The production scheme is the same as the above-mentioned approach for AAV2 production. The resulting rAAV is called rAAV2/5, in which the genome is based on recombinant AAV2, while the capsid is based on AAV5. It is assumed the cell or tissue-tropism displayed by this AAV2/5 hybrid virus should be the same as that of AAV5. It will be appreciated that wild-type hybrid AAV particles suffer the same specificity issues as with the non-hybrid wild-type serotypes previously discussed.

[0153] Advantages achieved by the wild-type based hybrid AAV systems can be combined with the increased and customizable cell-specificity that can be achieved with the engineered AAV capsids can be combined by generating a hybrid AAV that can include an engineered AAV capsid described elsewhere herein. It will be appreciated that hybrid AAVs can contain an engineered AAV capsid containing a genome with elements from a different serotype than the reference wild-type serotype that the engineered AAV capsid is a variant of. For example, a hybrid AAV can be produced that includes an engineered AAV capsid that is a variant of an AAV-9 serotype that is used to package a genome that contains components (e.g., AAV2 ITRs) from an AAV-2 serotype. As with wild-type based hybrid AAVs previously discussed, the tropism of the resulting AAV particle will be that of the engineered AAV capsid.

[0154] A tabulation of certain wild-type AAV serotypes as to these cells can be found in Grimm, D. et al, J. Virol. 82:5887-5911 (2008) reproduced below as Table A. Further tropism details can be found in Srivastava. 2017. Curr. Opin. Virol. 21:75-80 as previously discussed.

TABLE A

| Cell Line | AAV-1 | AAV-2 | AAV-3 | AAV-4 | AAV-5 | AAV-6 | AAV-8 | AAV-9 |
|---|---|---|---|---|---|---|---|---|
| Huh-7 | 13 | 100 | 2.5 | 0.0 | 0.1 | 10 | 0.7 | 0.0 |
| HEK293 | 25 | 100 | 2.5 | 0.1 | 0.1 | 5 | 0.7 | 0.1 |
| HeLa | 3 | 100 | 2.0 | 0.1 | 6.7 | 1 | 0.2 | 0.1 |
| HepG2 | 3 | 100 | 16.7 | 0.3 | 1.7 | 5 | 0.3 | ND |
| Hep1A | 20 | 100 | 0.2 | 1.0 | 0.1 | 1 | 0.2 | 0.0 |
| 911 | 17 | 100 | 11 | 0.2 | 0.1 | 17 | 0.1 | ND |
| CHO | 100 | 100 | 14 | 1.4 | 333 | 50 | 10 | 1.0 |
| COS | 33 | 100 | 33 | 3.3 | 5.0 | 14 | 2.0 | 0.5 |
| MeWo | 10 | 100 | 20 | 0.3 | 6.7 | 10 | 1.0 | 0.2 |
| NIH3T3 | 10 | 100 | 2.9 | 2.9 | 0.3 | 10 | 0.3 | ND |
| A549 | 14 | 100 | 20 | ND | 0.5 | 10 | 0.5 | 0.1 |
| HT1180 | 20 | 100 | 10 | 0.1 | 0.3 | 33 | 0.5 | 0.1 |
| Monocytes | 1111 | 100 | ND | ND | 125 | 1429 | ND | ND |
| Immature DC | 2500 | 100 | ND | ND | 222 | 2857 | ND | ND |
| Mature DC | 2222 | 100 | ND | ND | 333 | 3333 | ND | ND |

[0155] In example embodiments, the AAV vector or system thereof is AAV rh.74 or AAV rh.10.

[0156] In example embodiments, the AAV vector or system thereof is configured as a “gutless” vector, similar to that described in connection with a retroviral vector. In some embodiments, the “gutless” AAV vector or system thereof can have the cis-acting viral DNA elements involved in genome amplification and packaging in linkage with the heterologous sequences of interest (e.g., a transgene encoding a therapeutic protein or nucleic acid of interest)).

### Vectors Encoding the Transgene

[0157] In one example embodiment, the vector encoding the transgene (also referred to as “an artificial genome”) comprises the transgene to be delivered flanked on either side by AAV ITRs. Only ˜145 bp AAV ITRs are required for recombinant AAV (rAAV) propagation because they participate in vector production, induce transgene expression, and ensure continual cell transduction. Accordingly, ˜96% of the AAV genome can be removed for gene therapy. For example, the rep and cap genes can be substituted for the expression cassette containing a promoter (such as those described herein), a therapeutic transgene (for example, IDS) and a poly(A) tail forms the essence of all AAV vectors.

[0158] In example embodiments, additional modifications may be implemented to further increase the efficacy of the AAV. For example, the AAV ITRs may be modified to increase the expression of the rAAV vector upon transduction, which may allow the transgene to be expressed without second-strand DNA synthesis; the promoter may be modified to increase transcription; and the codons in the transgene may be engineered to modify mRNA production and/or translation.

[0159] In example embodiments, the ITRs are modified to overcome second-strand synthesis after infection. The AAV transduction rate is restricted by the synthesis of dsDNA from the single-stranded AAV genome. ITRs initiate second-strand synthesis. In an example embodiment, modified ITRs are no longer suitable substrates for the Rep68 and Rep78 proteins. As a result, the terminal resolution of replication is obviated and specific self-complementary AAV (scAAV) replication intermediates are produced. The scAAV intermediates comprise plus and minus strands of DNA fused by the modified ITRs encapsulated into the virion shell. Wild-type AAVs package either a single plus-strand or minus-strand DNA. The modified scAAV intermediates are delivered to the nucleus, these plus and minus strands instantaneously anneal to form dsDNA.

[0160] In example embodiments, the cis-elements are optimized for targeted delivery. The cis-elements are optimized because the packaging capacity of AAVs is restricted. In an example embodiment, small cis-elements replace long promoter sequences for the delivery of large therapeutic transgenes (e.g., 4.4-4.5 kbs).

[0161] In example embodiments, several strategies may be used to deliver transgenes using AAV vectors. Example approach 1 takes advantage of an AAV genome concatemerized via the homologous recombination of ITR sequences. In this approach, transgene cassettes may be split into two or more vectors, which are then delivered to the same cells. After the virus is uncoated, an intact transgene is formed by the homologous recombination between the two or more fragments.

[0162] In example approach 2, truncated transgene fragments of different lengths are packaged into different AAV virions at undefined locations on the vector genome. Either homologous recombination of the overlapping regions of the different AAV vector genomes or annealing of different AAV vector genomes at complementary regions via single-stranded templates produces the transgene cassette. In example embodiments, overlapping fragments may be added to the end of the individual AAV vectors to encourage homologous recombination.

[0163] In example approach 3, a hybrid dual-vector incorporates an overlapping region with intron splice sites in the split vector transgenes. Approach 3 uses concatemerization activity of AAV genomes to bring independent AAV vector genomes together. Recombination (for example, the starting vectors are segregated into two halves each carrying 5′ and 3′ splicing elements, respectively), and splicing provide the appropriate transgene protein. This strategy may increase the expression of full functional protein.

[0164] In example approach 4, an AAV genome is cross-packaged into the capsids of other parvoviruses thus creating chimeric vectors. In example approach 5, intein-mediated protein trans-splicing is used. Intein catalyzes protein splicing thereby causing the ligation of two polypeptides via trans-splicing (this approach is similar to intron-mediated RNA splicing). Multiple AAV vectors are delivered to the same cells. Each of the AAV vectors encode one of the fragments of target proteins, the fragments are flanked by short split inteins. The full-length protein forms after protein trans-splicing. See e.g., Li, C., Samulski, R. J. Engineering adeno-associated virus vectors for gene therapy. Nat Rev Genet 21, 255-272 (2020), herein incorporated by reference.

### Vector Construction

[0165] The vectors described herein can be constructed using any suitable process or technique. In some embodiments, one or more suitable recombination and/or cloning methods or techniques can be used to the vector(s) described herein. Suitable recombination and/or cloning techniques and/or methods can include, but not limited to, those described in U.S. Application publication No. US 2004-0171156 A1. Other suitable methods and techniques are described elsewhere herein.

[0166] Construction of recombinant AAV vectors is described in a number of publications, including U.S. Pat. No. 5,173,414; Tratschin et al., Mol. Cell. Biol. 5:3251-3260 (1985); Tratschin, et al., Mol. Cell. Biol. 4:2072-2081 (1984); Hermonat & Muzyczka, PNAS 81:6466-6470 (1984); and Samulski et al., J. Virol. 63:03822-3828 (1989). Any of the techniques and/or methods can be used and/or adapted for constructing an AAV or other vectors described herein. AAV vectors are discussed elsewhere herein.

[0167] In some embodiments, the vector can have one or more insertion sites, such as a restriction endonuclease recognition sequence (also referred to as a “cloning site”). In some embodiments, one or more insertion sites (e.g., about or more than about 1, 2, 3, 4, 5, 6, 7, 8, 9, 10, or more insertion sites) are located upstream and/or downstream of one or more sequence elements of one or more vectors.

[0168] Delivery vehicles, vectors, particles, nanoparticles, formulations and components thereof for expression of one or more elements of an engineered AAV capsid system described herein are as used in the foregoing documents, such as International Patent Application Publication WO 2014/093622 (PCT/US2013/074667) and are discussed in greater detail herein.

Virus Particle Production from Viral Vectors

### AAV Particle Production

[0169] There are two main strategies for producing AAV particles from AAV vectors and systems thereof, such as those described herein, which depend on how the adenovirus helper factors are provided (helper v. helper free). In some embodiments, a method of producing AAV particles from AAV vectors and systems thereof can include adenovirus infection into cell lines that stably harbor AAV replication and capsid encoding polynucleotides along with AAV vector containing the polynucleotide to be packaged and delivered by the resulting AAV particle (e.g., the engineered AAV capsid polynucleotide(s)). In some embodiments, a method of producing AAV particles from AAV vectors and systems thereof can be a “helper free” method, which includes co-transfection of an appropriate producing cell line with three vectors (e.g., plasmid vectors): (1) an AAV vector that contains a polynucleotide of interest (e.g., a transgene encoding a therapeutic protein or nucleic acid operably linked to a regulatory element that promotes expression in the target tissue) between 2 ITRs; (2) a vector that carries the AAV Rep-Cap encoding polynucleotide, including the engineered capsid protein described herein; and helper polynucleotides. One of skill in the art will appreciate various methods and variations thereof that are both helper and -helper free and as well as the different advantages of each system.

[0170] The engineered AAV vectors and systems thereof described herein can be produced by any of these methods.

### Vector and Virus Particle Delivery

[0171] A vector (including non-viral carriers) described herein can be introduced into host cells to thereby produce transcripts, proteins, or peptides, including fusion proteins or peptides encoded by nucleic acids as described herein (e.g., engineered AAV capsid system transcripts, proteins, enzymes, mutant forms thereof, fusion proteins thereof, etc.), and virus particles (such as from viral vectors and systems thereof).

[0172] AAV capsids prepared from one or more engineered AAV capsid polynucleotides can be used to deliver a recombinant AAV genome encoding a therapeutic protein or nucleic acid of interest. Alternatively, adenovirus or other plasmid or viral vector types as previously described, can be used, in particular, using formulations and doses from, for example, U.S. Pat. No. 8,454,972 (formulations, doses for adenovirus), U.S. Pat. No. 8,404,658 (formulations, doses for AAV) and U.S. Pat. No. 5,846,946 (formulations, doses for DNA plasmids) and from clinical trials and publications regarding the clinical trials involving lentivirus, AAV and adenovirus. For examples, for AAV, the route of administration, formulation and dose can be as in U.S. Pat. No. 8,454,972 and as in clinical trials involving AAV. For Adenovirus, the route of administration, formulation and dose can be as in U.S. Pat. No. 8,404,658 and as in clinical trials involving adenovirus.

[0173] For plasmid delivery, the route of administration, formulation and dose can be as in U.S. Pat. No. 5,846,946 and as in clinical studies involving plasmids. In some embodiments, doses can be based on or extrapolated to an average 70 kg individual (e.g., a male adult human), and can be adjusted for patients, subjects, mammals of different weight and species. Frequency of administration is within the ambit of the medical or veterinary practitioner (e.g., physician, veterinarian), depending on usual factors including the age, sex, general health, other conditions of the patient or subject and the particular condition or symptoms being addressed. The viral vectors can be injected into or otherwise delivered to the tissue or cell of interest.

[0174] In terms of in vivo delivery, AAV is advantageous over other viral vectors for a couple of reasons such as low toxicity (this may be due to the purification method not requiring ultra-centrifugation of cell particles that can activate the immune response) and a low probability of causing insertional mutagenesis because it does not integrate into the host genome.

[0175] The vector(s) and virus particles described herein can be delivered into a host cell in vitro, in vivo, and or ex vivo. Delivery can occur by any suitable method including, but not limited to, physical methods, chemical methods, and biological methods. Physical delivery methods are those methods that employ physical force to counteract the membrane barrier of the cells to facilitate intracellular delivery of the vector. Suitable physical methods include, but are not limited to, needles (e.g., injections), ballistic polynucleotides (e.g., particle bombardment, micro projectile gene transfer, and gene gun), electroporation, sonoporation, photoporation, magnetofection, hydroporation, and mechanical massage. Chemical methods are those methods that employ a chemical to elicit a change in the cells membrane permeability or other characteristic(s) to facilitate entry of the vector into the cell. For example, the environmental pH can be altered which can elicit a change in the permeability of the cell membrane. Biological methods are those that rely and capitalize on the host cell's biological processes or biological characteristics to facilitate transport of the vector (with or without a carrier) into a cell. For example, the vector and/or its carrier can stimulate an endocytosis or similar process in the cell to facilitate uptake of the vector into the cell.

[0176] Delivery of engineered AAV capsid system components (e.g., polynucleotides encoding engineered AAV capsid and/or capsid proteins) to cells via particles. The term “particle” as used herein, refers to any suitable sized particles for delivery of the engineered AAV capsid system components described herein. Suitable sizes include macro-, micro-, and nano-sized particles. In some embodiments, any of the of the engineered AAV capsid system components (e.g., polypeptides, polynucleotides, vectors, and combinations thereof described herein) can be attached to, coupled to, integrated with, otherwise associated with one or more particles or component thereof as described herein. The particles described herein can then be administered to a cell or organism by an appropriate route and/or technique. In some embodiments, particle delivery can be selected and be advantageous for delivery of the polynucleotide or vector components. It will be appreciated that in embodiments, particle delivery can also be advantageous for other engineered capsid system molecules and formulations described elsewhere herein.

### Engineered Virus Particles Including an Engineered Viral (e.g., AAV) Capsid

[0177] Also described herein are engineered virus particles (also referred to here and elsewhere herein as “engineered viral particles” that can contain an engineered viral capsid (e.g., AAV capsid, referred to as “engineered AAV particles”) as described in detail elsewhere herein. It will be appreciated that the engineered AAV particles can be adenovirus-based particles, helper adenovirus-based particles, AAV-based particles, or hybrid adenovirus-based particles that contain at least one engineered AAV capsid proteins as previously described. An engineered AAV capsid is one that that contains one or more engineered AAV capsid proteins as are described elsewhere herein. In some embodiments, the engineered AAV particles can include 1-60 engineered AAV capsid proteins described herein. In some embodiments, the engineered AAV particles can contain 1, 2, 3, 4, 5, 6, 7, 8, 9, 10, 11, 12, 13, 14, 15, 16, 17, 18, 19, 20, 21, 22, 23, 24, 25, 26, 27, 28, 29, 30, 31, 32, 33, 34, 35, 36, 37, 38, 39, 40, 41, 42, 43, 44, 45, 46, 47, 48, 49, 50, 51, 52, 53, 54, 55, 56, 57, 58, 59, or 60 engineered capsid proteins. In some embodiments, the engineered AAV particles can contain 0-59 wild-type AAV capsid proteins. In some embodiments, the engineered AAV particles can contain 0, 1, 2, 3, 4, 5, 6, 7, 8, 9, 10, 11, 12, 13, 14, 15, 16, 17, 18, 19, 20, 21, 22, 23, 24, 25, 26, 27, 28, 29, 30, 31, 32, 33, 34, 35, 36, 37, 38, 39, 40, 41, 42, 43, 44, 45, 46, 47, 48, 49, 50, 51, 52, 53, 54, 55, 56, 57, 58, or 59 wild-type AAV capsid proteins. The engineered AAV particles can thus include one or more n-mer motifs as is previously described.

[0178] The engineered AAV particle can include one or more cargo polynucleotides. Cargo polynucleotides are discussed in greater detail elsewhere herein. Methods of making the engineered AAV particles from viral and non-viral vectors are described elsewhere herein. Formulations containing the engineered virus particles are described elsewhere herein.

### Example Cargos

[0179] The n-mers can be coupled to or otherwise associated with a cargo. Cargos can include any molecule that is capable of being coupled to or associated with the n-mers described herein. Cargos can include, without limitation, nucleotides, oligonucleotides, polynucleotides, amino acids, peptides, polypeptides, riboproteins, lipids, sugars, pharmaceutically active agents (e.g., drugs, imaging and other diagnostic agents, and the like), chemical compounds, and combinations thereof. In some embodiments, the cargo is DNA, RNA, amino acids, peptides, polypeptides, antibodies, aptamers, ribozymes, guide sequences for ribozymes that inhibit translation or transcription of essential tumor proteins and genes, hormones, immunomodulators, antipyretics, anxiolytics, antipsychotics, analgesics, antispasmodics, anti-inflammatoires, anti-histamines, anti-infectives, radiation sensitizers, chemotherapeutics, radioactive compounds, imaging agents, and combinations thereof. In embodiments, the cargo is a recombinant AAV genome comprising a transgene, for example, encoding a therapeutic protein or nucleic acid, operably linked to regulatory sequences that direct expression of the therapeutic protein or nucleic acid in a target tissue, flanked by AAV ITR sequences.

[0180] In some embodiments, the cargo is capable of treating or preventing a neurological disease or disorder, details of which are described herein.

[0181] In some embodiments, the cargo is a morpholino, a peptide-linked morpholino, an antisense oligonucleotide, a PMO, a therapeutic transgene, a polynucleotide encoding a therapeutic polypeptide or peptide, a PPMO, one or more peptides, one or more polynucleotides encoding a CRISPR-Cas protein, a guide RNA, or both, a ribonucleoprotein, wherein the ribonucleoprotein comprises a CRISPR-Cas system molecule, a therapeutic transgene RNA, or other gene modifying or therapeutic RNA and/or protein, or any combination thereof.

[0182] In some embodiments, one or more n-mers described herein is directly attached to the cargo. In some embodiments, one or more n-mers described herein is indirectly coupled to the cargo, such as via a linker molecule. In some embodiments, one or more one or more n-mers described herein is coupled to associated with a polypeptide or other particle that is coupled to, attached to, encapsulates, and/or contains a cargo.

[0183] Exemplary particles include, without limitation, viral particles (e.g., viral capsids, which is inclusive of bacteriophage capsids), polysomes, liposomes, nanoparticles, microparticles, exosomes, micelles, and the like. The term “nanoparticle” as used herein includes a nanoscale deposit of a homogenous or heterogeneous material. Nanoparticles may be regular or irregular in shape and may be formed from a plurality of co-deposited particles that form a composite nanoscale particle. Nanoparticles may be generally spherical in shape or have a composite shape formed from a plurality of co-deposited generally spherical particles. Exemplary shapes for the nanoparticles include, but are not limited to, spherical, rod, elliptical, cylindrical, disc, and the like. In some embodiments, the nanoparticles have a substantially spherical shape.

### Cargo Polynucleotides

[0184] Cargos are also described elsewhere herein. In some embodiments, the cargo is a cargo polynucleotide that can be packaged into an engineered viral particle and subsequently delivered to a cell. In some embodiments, delivery is cell selective, e.g., neurons and glial cells of the central nervous system. In some embodiments, the one or more cargo polynucleotides are part of the engineered viral (e.g., AAV) genome of the viral (e.g., AAV) system and packaged within the engineered capsid containing a targeting moiety of the present invention. The cargo polynucleotides can be packaged into an engineered viral (e.g., AAV) particle, which can be delivered to, e.g., a cell. In some embodiments, the cargo polynucleotide can be capable of modifying a polynucleotide (e.g., gene or transcript) of a cell to which it is delivered. As used herein, “gene” can refer to a hereditary unit corresponding to a sequence of DNA that occupies a specific location on a chromosome and that contains the genetic instruction for a characteristic(s) or trait(s) in an organism. The term gene can refer to translated and/or untranslated regions of a genome. “Gene” can refer to the specific sequence of DNA that is transcribed into an RNA transcript that can be translated into a polypeptide or be a catalytic RNA molecule, including but not limited to, tRNA, siRNA, piRNA, miRNA, long-non-coding RNA and shRNA. Polynucleotide, gene, transcript, etc. modification includes all genetic engineering techniques including, but not limited to, gene editing as well as conventional recombinational gene modification techniques (e.g., whole or partial gene insertion, deletion, and mutagenesis (e.g., insertional and deletional mutagenesis) techniques.

[0185] In example embodiments, the cargo molecule is a polynucleotide that is or can encode a vaccine. In example embodiments, the cargo molecule is a polynucleotide encoding an antibody.

### Interference RNAs

[0186] In certain example embodiments, the one or more polynucleotides may encode one or more interference RNAs. Interference RNAs are RNA molecules capable of suppressing gene expressions. Example types of interference RNAs include small interfering RNA (siRNA), microRNA (miRNA), and short hairpin RNA (shRNA).

[0187] In certain example embodiments, the interference RNA may be a siRNAs. Small interfering RNA (siRNA) molecules are capable of inhibiting target gene expression by interfering RNA. siRNAs may be chemically synthesized, or may be obtained by in vitro transcription, or may be synthesized in vivo in target cell. siRNAs may comprise double-stranded RNA from 15 to 40 nucleotides in length and can contain a protuberant region 3′ and/or 5′ from 1 to 6 nucleotides in length. Length of protuberant region is independent from total length of siRNA molecule. siRNAs may act by post-transcriptional degradation or silencing of target messenger. In some cases, the exogenous polynucleotides encode shRNAs. In shRNAs, the antiparallel strands that form siRNA are connected by a loop or hairpin region.

[0188] The interference RNA (e.g., siRNA) may suppress expression of genes to promote long term survival and functionality of cells after transplanted to a subject. In some examples, the interference RNAs suppress genes in TGFβ pathway, e.g., TGFβ, TGFβ receptors, and SMAD proteins. In some examples, the interference RNAs suppress genes in colony-stimulating factor 1 (CSF1) pathway, e.g., CSF1 and CSF1 receptors. In certain embodiments, the one or more interference RNAs suppress genes in both the CSF1 pathway and the TGFβ pathway. TGFβ pathway genes may comprise one or more of ACVR1, ACVR1C, ACVR2A, ACVR2B, ACVRL1, AMH, AMHR2, BMP2, BMP4, BMP5, BMP6, BMP7, BMP8A, BMP8B, BMPR1A, BMPR1B, BMPR2, CDKN2B, CHRD, COMP, CREBBP, CUL1, DCN, E2F4, E2F5, EP300, FST, GDF5, GDF6, GDF7, ID1, ID2, ID3, ID4, IFNG, INHBA, INHBB, INHBC, INHBE, LEFTY1, LEFTY2, LOC728622, LTBP1, MAPK1, MAPK3, MYC, NODAL, NOG, PITX2, PPP2CA, PPP2CB, PPP2R1A, PPP2RIB, RBL1, RBL2, RBX1, RHOA, ROCK1, ROCK2, RPS6KB1, RPS6KB2, SKP1, SMAD1, SMAD2, SMAD3, SMAD4, SMAD5, SMAD6, SMAD7, SMAD9, SMURF1, SMURF2, SP1, TFDP1, TGFB1, TGFB2, TGFB3, TGFBR1, TGFBR2, THBS1, THBS2, THBS3, THBS4, TNF, ZFYVE16, and/or ZFYVE9.

[0189] In some embodiments, the cargo polynucleotide is an RNAi molecule, antisense molecule, and/or a gene silencing oligonucleotide or a polynucleotide that encodes an RNAi molecule, antisense molecule, and/or gene silencing oligonucleotide.

[0190] As used herein, “gene silencing oligonucleotide” refers to any oligonucleotide that can alone or with other gene silencing oligonucleotides utilize a cell's endogenous mechanisms, molecules, proteins, enzymes, and/or other cell machinery or exogenous molecule, agent, protein, enzyme, and/or polynucleotide to cause a global or specific reduction or elimination in gene expression, RNA level(s), RNA translation, RNA transcription, that can lead to a reduction or effective loss of a protein expression and/or function of a non-coding RNA as compared to wild-type or a suitable control. This is synonymous with the phrase “gene knockdown” Reduction in gene expression, RNA level(s), RNA translation, RNA transcription, and/or protein expression can range from about 100, 99, 98, 97, 96, 95, 94, 93, 92, 91, 90, 89, 88, 87, 86, 85, 84, 83, 82, 81, 80, 79, 78, 77, 76, 75, 74, 73, 72, 71, 70, 69, 68, 67, 66, 65, 64, 63, 62, 61, 60, 59, 58, 57, 56, 55, 54, 53, 52, 51, 50, 49, 48, 47, 46, 45, 44, 43, 42 41, 40, 39, 38, 37, 36, 35, 34, 33, 32, 31, 30, 29, 28, 27, 26, 25, 24, 23, 22, 21, 20, 19, 18, 17, 16, 15, 14, 13, 12, 11, 10, 9, 8, 7, 6, 5, 4, 3, 2, to 1% or less reduction. “Gene silencing oligonucleotides” include, but are not limited to, any antisense oligonucleotide, ribozyme, any oligonucleotide (single or double stranded) used to stimulate the RNA interference (RNAi) pathway in a cell (collectively RNAi oligonucleotides), small interfering RNA (siRNA), microRNA, and short-hairpin RNA (shRNA). Commercially available programs and tools are available to design the nucleotide sequence of gene silencing oligonucleotides for a desired gene, based on the gene sequence and other information available to one of ordinary skill in the art.

[0191] In some embodiments, a cargo polynucleotide, such as an encoding polynucleotide, is flanked by at least a retroelement polypeptide encoding polynucleotide 3′ UTR or portion thereof, such as the proximal region of about 500 base pairs of 3′ UTR. In some embodiments a cargo polynucleotide, such as an encoding polynucleotide, is flanked by a (e.g., endogenous or engineered) retroelement polypeptide (such as a retroviral gag protein or gag homolog) 5′ UTR. In some embodiments a cargo polynucleotide, such as an encoding polynucleotide, is flanked by an (e.g., endogenous or engineered) retroelement polypeptide encoding polynucleotide 5′ and 3′ UTR. In some embodiments, the flanking retroelement polypeptide encoding polynucleotide UTR(s) are from PNMA, Arc, PEG10 or other Sushi Class polypeptide. In some embodiments, the inclusion of 3′ UTR, 5′UTR, or both can increase packaging and/or delivery of the cargo that they flank. These and other packaging elements are described in greater detail elsewhere herein.

### Gene Modification Cargo Polynucleotides

[0192] In some embodiments, the cargo molecule can be a polynucleotide or polypeptide or polynucleotide encoding a polypeptide that can alone or when delivered as part of a system, whether or not delivered with other components of the system, operate to modify the genome, epigenome, and/or transcriptome of a cell to which it is delivered. Such systems include, but are not limited to, CRISPR-Cas systems. Other gene modification systems, e.g., TALENs, Zinc Finger nucleases, Cre-Lox, morpholinos, etc. are other non-limiting examples of gene modification systems whose one or more components can be delivered by the engineered viral (e.g., AAV) particles described herein.

[0193] In some embodiments, the cargo molecule is or encodes a gene editing system or component thereof. In some embodiments, the cargo molecule is or encodes a CRISPR-Cas system molecule or a component thereof. In some embodiments, the cargo molecule is a polynucleotide that encodes one or more components of a gene modification system (such as a CRISPR-Cas system). In some embodiments the cargo molecule is or encodes a gRNA. CRISPR-Cas system as used herein is intended to encompass by Class 1 and Class 2 CRISPR-Cas systems and derivatives of CRISPR-Cas systems such as base editors, prime editors, and CRISPR-associated transposases (CAST) systems.

[0194] In some embodiments, the cargo molecule can be a polynucleotide or polypeptide or polynucleotide encoding a polypeptide that can alone or when delivered as part of a system, whether or not delivered with other components of the system, operate to modify the genome, epigenome, and/or transcriptome of a cell to which it is delivered, is such that it treats or prevents a disease, a disorder, or a symptom thereof of a neurologic disease or disorder, and/or viruses (such as single stranded RNA viruses). In some embodiments, the cargo molecule, whether or not delivered with other components of the system, operates to modify the genome, epigenome, and/or transcriptome of a cell to which it is delivered, is such that it treats or prevents a neurological disease or disorder described further herein.

[0195] In some embodiments, the cargo molecule, whether or not delivered with other components of the system, operates to modify the genome, epigenome, and/or transcriptome of a cell to which it is delivered, is such that can modify the GAA gene, such as any of those described in US Pat. App. Pub. 20190284555, the contents of which are incorporated by reference as if expressed in their entirety herein and can be adapted for use with the present invention.

[0196] In some embodiments, the cargo molecule is or encodes an antisense oligomer or RNA molecule, such as those described in U.S. Pat. App. Pub. US20160251398, US20150267202, and US20180216111, the contents of which are incorporated by reference as if expressed in their entirety herein and can be adapted for use with the present invention.

[0197] In some embodiments, the cargo molecule can be a peptide-oligomer, conjugate as described in e.g., International Patent Application Publication WO2017106304A1, the contents of which are incorporated by reference as if expressed in their entirety herein and can be adapted for use with the present invention.

[0198] An embodiment of the invention encompasses methods of modifying a genomic locus of interest to change gene expression in a cell by introducing into the cell any of the compositions described herein.

[0199] An embodiment of the invention is that the above elements are comprised in a single composition or comprised in individual compositions. These compositions may advantageously be applied to a host to elicit a functional effect on the genomic level.

### Polypeptides

[0200] In certain example embodiments, the cargo molecule may one or more polypeptides or may be a nucleic acid encoding a polypeptide. The polypeptide may be a full-length protein or a functional fragment or functional domain thereof, that is a fragment or domain that maintains the desired functionality of the full-length protein. As used within this section “protein” is meant to refer to full-length proteins and functional fragments and domains thereof. A wide array of polypeptides may be delivered using the engineered delivery vesicles described herein, including but not limited to, secretory proteins, immunomodulatory proteins, anti-fibrotic proteins, proteins that promote tissue regeneration and/or transplant survival functions, hormones, anti-microbial proteins, anti-fibrillating polypeptides, and antibodies. The one or more polypeptides may also comprise combinations of the aforementioned example classes of polypeptides. It will be appreciated that any of the polypeptides described herein can also be delivered via the engineered delivery vesicles and systems described herein via delivery of the corresponding encoding polynucleotide.

### Antibodies

[0201] In certain embodiments, the one or more polypeptides may comprise one or more antibodies. The term “antibody” is used interchangeably with the term “immunoglobulin” herein, and includes intact antibodies, fragments of antibodies, e.g., Fab, F(ab′)2 fragments, scFva, and intact antibodies and fragments that have been mutated either in their constant and/or variable region (e.g., mutations to produce chimeric, partially humanized, or fully humanized antibodies, as well as to produce antibodies with a desired trait, e.g., enhanced binding and/or reduced FcR binding). The term “fragment” refers to a part or portion of an antibody or antibody chain comprising fewer amino acid residues than an intact or complete antibody or antibody chain. Fragments can be obtained via chemical or enzymatic′ treatment of an intact or complete antibody or antibody chain. Fragments can also be obtained by recombinant means. Exemplary fragments include Fab, Fab′, F(ab′)2, Fabc, Fd, dAb, V_{HH} and scF and/or Fv fragments. As used herein, a preparation of antibody protein “having less than about 50% of non-antibody protein (also referred to herein as a “contaminating protein”), or of chemical precursors, is considered to be “substantially free.” 40%, 30%, 20%, 10% and more preferably 5% (by dry weight), of non-antibody protein, or of chemical precursors is considered to be substantially free. When the antibody protein or biologically active portion thereof is recombinantly produced, it is also preferably substantially free of culture medium, i.e., culture medium represents less than about 30%, preferably less than about 20%, more preferably less than about 10%, and most preferably less than about 5% of the volume or mass of the protein preparation.

[0202] In example embodiments, the antibody is a fragment or portion thereof. In an example embodiment, the antibody is an epitope binding protein or portion thereof. The term “binding portion” of an antibody (or “antibody portion”) includes one or more complete domains, e.g., a pair of complete domains, as well as fragments of an antibody that retain the ability to specifically bind to a target molecule. It has been shown that the binding function of an antibody can be performed by fragments of a full-length antibody. Binding fragments are produced by recombinant DNA techniques, or by enzymatic or chemical cleavage of intact immunoglobulins. Binding fragments include Fab, Fab′, F(ab′)2, Fabc, Fd, dAb, Fv, single chains, single-chain antibodies, e.g., scFv, and single domain antibodies.

[0203] In some embodiments, the cargo or antibody is an antibody fragment or portion. In some embodiments, the cargo is an epitope binding protein. Examples of portions of antibodies or epitope-binding proteins encompassed by the present definition include: (i) the Fab fragment, having V_{L}, C_{L}, V_{H} and C_{H}1 domains; (ii) the Fab′ fragment, which′ is a Fab fragment having one or more cysteine residues at the C-terminus of the C_{H}1 domain; (iii) the Fd fragment having V_{H} and C_{H}1 domains; (iv) the Fd′ fragment having V_{H} and C_{H}1 domains and one or more cysteine residues at the C-terminus of the C_{H}1 domain; (v) the Fv fragment having the V_{L} and V_{H} domains of a single arm of an antibody; (vi) the dAb fragment (Ward et al., 341 Nature 544 (1989)) which consists of a V_{H} domain or a V_{L} domain that binds antigen; (vii)′isolated CDR regions or isolated CDR regions presented in a functional framework; (viii) F(ab′)₂ fragments which are bivalent fragments including two Fab′ fragments linked by a disulphide bridge at the hinge region; (ix) single chain antibody molecules (e.g., single chain Fv; scFv) (Bird et al., 242 Science 423 (1988); and Huston et al., 85 PNAS 5879 (1988)); (x) “diabodies” with two antigen binding sites, comprising a heavy chain variable domain (V_{H}) connected to a light chain variable domain (V_{L}) in the same polypeptide chain (see, e.g., EP 404,097; WO 93/11161; Hollinger et al., 90 PNAS 6444 (1993)); (xi) “linear antibodies” comprising a pair of tandem Fd segments (V_{H}-Cₕ1-V_{H}-Cₕ1) which, together with complementary light chain oligopeptides, form a pair of “antigen binding regions” (Zapata et al., Protein Eng. 8(10):1057-62 (1995); and U.S. Pat. No. 5,641,870).

[0204] The term “antigen-binding fragment” refers to a polypeptide fragment of an immunoglobulin or antibody that binds antigen or competes with intact antibody (i.e., with the intact antibody from which they were derived) for antigen binding (i.e., specific binding). As such these antibodies or fragments thereof are included in the scope of the invention, provided that the antibody or fragment binds specifically to a target molecule.

[0205] In some embodiments, the antibody is a single-chain antibody (scFvs). The term “single-chain variable fragment”, as used herein refers to a fusion protein containing the variable region(s) of the heavy (V_{H}) and light (V_{L}) of an immunoglobulin that are connected via a linker peptide. The linker peptide typically ranges from about 10 to about 25 amino acids. The linker can be flexible and can contain one or more glycine residues for flexibility. The linker can contain one or more serine or threonine residues to increase or modify solubility. The V_{H} and light (V_{L}) can be linked via the linker in any order. In some embodiments, N terminus of the V_{H} and is coupled, via a linker, C terminus of the (V_{L}). In some embodiments, C terminus of the V_{H} and is coupled, via a linker, N terminus of the (V_{L}). In some embodiments, the scFV is a bivalent or trivalent scFvs. In some embodiments bitrivalent or trivalent scFvs are bi or trispecific, menaing that they can target 2 or 3, respectively, different epitopes. See also e.g., Hollinger, Philipp; Prospero, T; Winter, G (July 1993). “Diabodies”: small bivalent and bispecific antibody fragments”. Proceedings of the National Academy of Sciences of the United States of America. 90 (14): 6444-8; incq, S; Bosman, F; Buyse, M A; Degrieck, R; Celis, L; De Boer, M; Van Doorsselaere, V; Sablon, E (2001). “Expression and purification of monospecific and bispecific recombinant antibody fragments derived from antibodies that block the CD80/CD86-CD28 costimulatory pathway”. Protein Expression and Purification. 22 (1): 11-24. doi: 10.1006/prep.2001.1417; Le Gall, F.; Kipriyanov, SM; Moldenhauer, G; Little, M (1999). “Di-, tri- and tetrameric single chain Fv antibody fragments against human CD19: effect of valency on cell binding”. FEBS Letters. 453 (1): 164-168. doi: 10.1016/S0014-5793(99)00713-9; Huston, J. S.; Levinson, D.; Mudgett-Hunter, M.; Tai, M. S.; Novotný, J.; Margolies, M. N.; Crea, R. (1988). “Protein engineering of antibody binding sites: recovery of specific activity in an anti-digoxin single-chain Fv analogue produced in Escherichia coli”. Proceedings of the National Academy of Sciences of the United States of America. 85 (16): 5879-5883; de Graaf et al., Methods Mol Biol. 2002; 178:379-87. doi: 10.1385/1-59259-240-6:379; Zhou, H. X., J Mol Biol. 2003 May 23; 329(1):1-8. doi: 10.1016/s0022-2836(03)00372-3; Bird and Walker. Trends Biotechnol. 1991 April; 9 (4): 132-7. doi: 10.1016/0167-7799(91)90044-I; Wörn et al., J Mol Biol. 2001 Feb. 2; 305(5):989-1010. doi: 10.1006/jmbi.2000.4265.

[0206] As used herein, “heavy chain antibody,” “V_{HH}” or “single-domain antibodies” (sdAbs) refers to an antibody which is composed only of two heavy chains and lacks the two light chains usually found in antibodies (see, e.g., Henry and Mackenzie, Antigen recognition by single-domain antibodies: structural latitudes and constraints. MAbs. 2018 August-September; 10 (6): 815-826). VHH can refer to an antibody or VHH domain. Single-domain antibodies (sdAb) are also referred to as a “nanobody”, which is defined herein as an antibody fragment composed of a single monomeric variable antibody domain. As used herein “VHH” is used interchangeably with “nanobody.” The ˜12-15 kDa variable domains of these antibodies (VHHs and VNARs) can be produced recombinantly and can recognize antigen in the absence of the remainder of the antibody heavy chain. In common antibodies, the antigen binding region consists of the variable domains of the heavy and light chains (VH and VL). Heavy-chain antibodies can bind antigens despite having only VH domains. In certain embodiments, the heavy chain antibody is an antibody derived from cartilaginous fishes (immunoglobulin new antigen receptor (IgNAR)) or camelid ungulates. Non-limiting examples of camelids include dromedaries, camels, llamas and alpacas.

[0207] It is intended that the term “antibody” encompass any Ig class or any Ig subclass (e.g., the IgG1, IgG2, IgG3, and IgG4 subclasses of IgG) obtained from any source (e.g., humans and non-human primates, and in rodents, lagomorphs, caprines, bovines, equines, ovines, etc.).

[0208] The term “Ig class” or “immunoglobulin class”, as used herein, refers to the five classes of immunoglobulin that have been identified in humans and higher mammals, IgG, IgM, IgA, IgD, and IgE. The term “Ig subclass” refers to the two subclasses of IgM (H and L), three subclasses of IgA (IgA1, IgA2, and secretory IgA), and four subclasses of IgG (IgG1, IgG2, IgG3, and IgG4) that have been identified in humans and higher mammals. The antibodies can exist in monomeric or polymeric form; for example, 1 gM antibodies exist in pentameric f-rm, and IgA antibodies exist in monomeric, dimeric or multimeric form.

[0209] The term “IgG subclass” refers to the four subclasses of immunoglobulin class IgG-IgG1, IgG2, IgG3, and IgG4 that have “been identified in humans and higher mammals by the heavy chains of the immunoglobulins, V1-γ4, respectively. The term “single-chain immunoglobulin” or “single-chain antibody” (used interchangeably herein) refers to a protein having a two-polypeptide chain structure consisting of a heavy and a light chain, said chains being stabilized, for example, by interchain peptide linkers, which has the ability to specifically bind antigen. The term “domain” refers to a globular region of a heavy or light chain polypeptide comprising peptide loops (e.g., comprising 3 or 4 peptide loops) stabilized, for example, by β pleated sheet and/or intrachain disulfide bond. Domains are further referred to herein as “constant” or “variable”, based on the relative lack of sequence variation within the domains of various class members in the case of “constant” domain, or the significant variation within the domains of various class members in the case of a “variable” domain. Antibody or polypeptide “domains” are often referred to interchangeably in the antibody or polypeptide “regions”. The “constant” domains of an antibody light chain are referred to interchangeably as “light chain constant regions”, “light chain constant domains”, “CL” regions or “CL” domains.” The “constant” domains of an antibody heavy chain are referred to interchangeably as “heavy chain constant regions”, “heavy chain constant domains”, “CH” regions or “CH” domains.” The “variable” domains of an antibody light chain are referred to interchangeably as “light chain variable regions”, “light chain variable domains”, “VL” regions or “VL” domains.” The “variable” domains of an antibody heavy chain are referred to interchangeably as “heavy chain constant regions”, “heavy chain constant domains”, “VH” regions or “VH” domains.

[0210] The term “region” can also refer to a part or portion of an antibody chain or antibody chain domain (e.g., a part or portion of a heavy or light chain or a part or portion of a constant or variable domain, as defined herein), as well as more discrete parts or portions of said chains or domains. For example, light and heavy chains or light and heavy chain variable domains include “complementarity determining regions” or “CDRs” interspersed among “framework regions” or “FRs”, as defined herein.

[0211] The term “conformation” refers to the tertiary structure of a protein or polypeptide (e.g., an antibody, antibody chain, domain or region thereof). For example, the phrase “light (or heavy) chain conformation” refers to the tertiary structure of a light (or heavy) chain variable region, and the phrase “antibody conformation” or “antibody fragment conformation” refers to the tertiary structure of an antibody or fragment thereof.

[0212] The term “antibody-like protein scaffolds” or “engineered protein scaffolds” broadly encompasses proteinaceous non-immunoglobulin specific-binding agents, typically obtained by combinatorial engineering (such as site-directed random mutagenesis in combination with phage display or other molecular selection techniques). Usually, such scaffolds are derived from robust and small soluble monomeric proteins (such as Kunitz inhibitors or lipocalins) or from a stably folded extra-membrane domain of a cell surface receptor (such as protein A, fibronectin or the ankyrin repeat).

[0213] Such scaffolds have been extensively reviewed in Binz et al. (Engineering novel binding proteins from non-immunoglobulin domains. Nat Biotechnol 2005, 23:1257-1268), Gebauer and Skerra (Engineered protein scaffolds as next-generation antibody therapeutics. Curr Opin Chem Biol. 2009, 13:245-55), Gill and Damle (Biopharmaceutical drug discovery using novel protein scaffolds. Curr Opin Biotechnol 2006, 17:653-658), Skerra (Engineered protein scaffolds for molecular recognition. J Mol Recognit 2000, 13:167-187), and Skerra (Alternative non-antibody scaffolds for molecular recognition. Curr Opin Biotechnol 2007, 18:295-304), and include without limitation affibodies, based on the Z-domain of staphylococcal protein A, a three-helix bundle of 58 residues providing an interface on two of its alpha-helices (Nygren, Alternative binding proteins: Affibody binding proteins developed from a small three-helix bundle scaffold. FEBS J 2008, 275:2668-2676); engineered Kunitz domains based on small polypeptides of 58 residues) and robust, disulphide-crosslinked serine protease inhibitor, typically of human origin (e.g., LACI-D1), which can be engineered for different protease specificities (Nixon and Wood, Engineered protein inhibitors of proteases. Curr Opin Drug Discov Dev 2006, 9:261-268); monobodies or adnectins based on the 10th extracellular domain of human fibronectin III (10Fn3), which adopts an Ig-like beta-sandwich fold (94 residues) with 2-3 exposed loops but lacks the central disulphide bridge (Koide and Koide, Monobodies: antibody mimics based on the scaffold of the fibronectin type III domain. Methods Mol Biol 2007, 352:95-109); anticalins derived from the lipocalins, a diverse family of eight-stranded beta-barrel proteins (ca. 180 residues) that naturally form binding sites for small ligands by means of four structurally variable loops at the open end, which are abundant in humans, insects, and many other organisms (Skerra, Alternative binding proteins: Anticalins-harnessing the structural plasticity of the lipocalin ligand pocket to engineer novel binding activities. FEBS J 2008, 275:2677-2683); DARPins, designed ankyrin repeat domains (166 residues), which provide a rigid interface arising from typically three repeated beta-turns (Stumpp et al., DARPins: a new generation of protein therapeutics. Drug Discov Today 2008, 13:695-701); avimers (multimerized LDLR-A module) (Silverman et al., Multivalent avimer proteins evolved by exon shuffling of a family of human receptor domains. Nat Biotechnol 2005, 23:1556-1561); and cysteine-rich knottin peptides (Kolmar” Alternative binding proteins: biological activity and therapeutic potential of cystine-knot miniproteins. FEBS J 2008, 275:2684-2690).

[0214] “Specific binding” of an antibody means that the antibody exhibits appreciable affinity for a particular antigen or epitope and, generally, does not exhibit significant cross reactivity. “Appreciable” binding includes binding with an affinity of at least 25 μM. Antibodies with affinities greater than 1×10⁷ M⁻¹ (or a dissociation coefficient of 1 μM or less or a dissociation coefficient of 1 nm or less) typically bind with correspondingly greater specificity. Values intermediate of those set forth herein are also intended to be within the scope of the present invention and antibodies of the invention bind with a range of affinities, for example, 100 nM or less, 75 nM or less, 50 nM or less, 25 nM or less, for example 10 nM or less, 5 nM or less, 1 nM or less, or in embodiments 500 pM or less, 100 pM or less, 50 pM or less or 25 pM or less. An antibody that “does not exhibit significant cross reactivity” is one that will not appreciably bind to an entity other than its target (e.g., a different epitope or a different molecule). For example, an antibody that specifically binds to a target molecule will appreciably bind the target molecule but will not significantly react with non-target molecules or peptides. An antibody specific for a particular epitope will, for example, not significantly cross react with remote epitopes on the same protein or peptide. Specific binding can be determined according to any art-recognized means for determining such binding. Preferably, specific binding is determined according to Scatchard analysis and/or competitive binding assays.

[0215] As used herein, the term “affinity” refers to the strength of the binding of a single antigen-combining site with an antigenic determinant. Affinity depends on the closeness of stereochemical fit between antibody combining sites and antigen determinants, on the size of the area of contact between them, on the distribution of charged and hydrophobic groups, etc. Antibody affinity can be measured by equilibrium dialysis or by the kinetic BIACORE™ method. The dissociation constant, Kd, and the association constant, Ka, are quantitative measures of affinity.

[0216] As used herein, the term “monoclonal antibody” refers to an antibody derived from a clonal population of antibody-producing cells (e.g., B lymphocytes or B cells) which is homogeneous in structure and antigen specificity. The term “polyclonal antibody” refers to a plurality of antibodies originating from different clonal populations of antibody-producing cells which are heterogeneous in their structure and epitope specificity, but which recognize a common antigen. Monoclonal and polyclonal antibodies may exist within bodily fluids, as crude preparations, or may be purified, as described herein. “Humanized” forms of non-human (e.g., murine) antibodies are chimeric antibodies that contain minimal sequence derived from non-human immunoglobulin. For the most part, humanized antibodies are human immunoglobulins (recipient antibody) in which residues from a hypervariable region of the recipient are replaced by residues from a hypervariable region of a non-human species (donor antibody) such as mouse, rat, rabbit, or nonhuman primate having the desired specificity, affinity, and capacity. In some instances, FR residues of the human immunoglobulin are replaced by corresponding non-human residues. Furthermore, humanized antibodies may comprise residues that are not found in the recipient antibody or in the donor antibody. These modifications are made to further refine antibody performance. In general, the humanized antibody will comprise substantially all of at least one, and typically two, variable domains, in which all or substantially all of the hypervariable regions correspond to those of a non-human immunoglobulin and all or substantially all of the FR regions are those of a human immunoglobulin sequence. The humanized antibody optionally also will comprise at least a portion of an immunoglobulin constant region (Fc), typically that of a human immunoglobulin.

[0217] As used herein, a “blocking” antibody or an antibody “antagonist” is one which inhibits or reduces biological activity of the antigen(s) it binds. In certain embodiments, the blocking antibodies or antagonist antibodies or portions thereof described herein completely inhibit the biological activity of the antigen(s).

[0218] Antibodies may act as agonists or antagonists of the recognized polypeptides. For example, the present invention includes antibodies which disrupt receptor/ligand interactions either partially or fully. The invention features both receptor-specific antibodies and ligand-specific antibodies. The invention also features receptor-specific antibodies which do not prevent ligand binding but prevent receptor activation. Receptor activation (i.e., signaling) may be determined by techniques described herein or otherwise known in the art. For example, receptor activation can be determined by detecting the phosphorylation (e.g., tyrosine or serine/threonine) of the receptor or of one of its down-stream substrates by immunoprecipitation followed by western blot analysis. In specific embodiments, antibodies are provided that inhibit ligand activity or receptor activity by at least 95%, at least 90%, at least 85%, at least 80%, at least 75%, at least 70%, at least 60%, or at least 50% of the activity in absence of the antibody.

[0219] The invention also features receptor-specific antibodies which both prevent ligand binding and receptor activation as well as antibodies that recognize the receptor-ligand complex. Likewise, encompassed by the invention are neutralizing antibodies which bind the ligand and prevent binding of the ligand to the receptor, as well as antibodies which bind the ligand, thereby preventing receptor activation, but do not prevent the ligand from binding the receptor. Further included in the invention are antibodies which activate the receptor. These antibodies may act as receptor agonists, i.e., potentiate or activate either all or a subset of the biological activities of the ligand-mediated receptor activation, for example, by inducing dimerization of the receptor. The antibodies may be specified as agonists, antagonists or inverse agonists for biological activities comprising the specific biological activities of the peptides disclosed herein. The antibody agonists and antagonists can be made using methods known in the art. See, e.g., PCT publication WO 96/40281; U.S. Pat. No. 5,811,097; Deng et al., Blood 92 (6):1981-1988 (1998); Chen et al., Cancer Res. 58 (16):3668-3678 (1998); Harrop et al., J. Immunol. 161 (4): 1786-1794 (1998); Zhu et al., Cancer Res. 58 (15):3209-3214 (1998); Yoon et al., J. Immunol. 160 (7):3170-3179 (1998); Prat et al., J. Cell. Sci. III (Pt2):237-247 (1998); Pitard et al., J. Immunol. Methods 205 (2): 177-190 (1997); Liautard et al., Cytokine 9(4):233-241 (1997); Carlson et al., J. Biol. Chem. 272(17):11295-11301 (1997); Taryman et al., Neuron 14(4):755-762 (1995); Muller et al., Structure 6(9):1153-1167 (1998); Bartunek et al., Cytokine 8(1):14-20 (1996).

[0220] The antibodies as defined for the present invention include derivatives that are modified, i.e., by the covalent attachment of any type of molecule to the antibody such that covalent attachment does not prevent the antibody from generating an anti-idiotypic response. For example, but not by way of limitation, the antibody derivatives include antibodies that have been modified, e.g., by glycosylation, acetylation, pegylation, phosphylation, amidation, derivatization by known protecting/blocking groups, proteolytic cleavage, linkage to a cellular ligand or other protein, etc. Any of numerous chemical modifications may be carried out by known techniques, including, but not limited to specific chemical cleavage, acetylation, formylation, metabolic synthesis of tunicamycin, etc. Additionally, the derivative may contain one or more non-classical amino acids.

### Engineered Cells and Organisms Expressing Said Engineered AAV Capsids

[0221] Described herein are engineered cells that can include one or more of the engineered AAV capsid polynucleotides, polypeptides, vectors, and/or vector systems. In some embodiments, one or more of the engineered AAV capsid polynucleotides can be expressed in the engineered cells. In some embodiments, the engineered cells can be capable of producing engineered AAV capsid proteins and/or engineered AAV capsid particles that are described elsewhere herein. Also described herein are modified or engineered organisms that can include one or more engineered cells described herein. The engineered cells can be engineered to express a cargo molecule (e.g., a cargo polynucleotide) dependently or independently of an engineered AAV capsid polynucleotide as described elsewhere herein, e.g., packaged within an engineered AAV capsid as described herein.

[0222] A wide variety of animals, plants, algae, fungi, yeast, etc. and animal, plant, algae, fungus, yeast cell or tissue systems may be engineered to express one or more nucleic acid constructs of the engineered AAV capsid system described herein using various transformation methods mentioned elsewhere herein. This can produce organisms that can produce engineered AAV capsid particles, such as for production purposes, engineered AAV capsid design and/or generation, and/or model organisms. In some embodiments, the polynucleotide(s) encoding one or more components of the engineered AAV capsid system described herein can be stably or transiently incorporated into one or more cells of a plant, animal, algae, fungus, and/or yeast or tissue system. In some embodiments, one or more of engineered AAV capsid system polynucleotides are genomically incorporated into one or more cells of a plant, animal, algae, fungus, and/or yeast or tissue system. Further embodiments of the modified organisms and systems are described elsewhere herein. In some embodiments, one or more components of the engineered AAV capsid system described herein are expressed in one or more cells of the plant, animal, algae, fungus, yeast, or tissue systems.

### Engineered Cells

[0223] Described herein are various embodiments of engineered cells that can include one or more of the engineered AAV capsid system polynucleotides, polypeptides, vectors, and/or vector systems described elsewhere herein. In some embodiments, the cells can express one or more of the engineered AAV capsid polynucleotides and can produce one or more engineered AAV capsid particles, which are described in greater detail herein. Such cells are also referred to herein as “producer cells”. It will be appreciated that these engineered cells are different from “modified cells” described elsewhere herein in that the modified cells are not necessarily producer cells unless they include one or more of the engineered AAV capsid polynucleotides, engineered AAV capsid vectors or other vectors described herein that render the cells capable of producing an engineered AAV capsid particle. Modified cells can be recipient cells of an engineered AAV capsid particles and can, in some embodiments, be modified by the engineered AAV capsid particle(s) and/or a cargo polynucleotide delivered to the recipient cell. Modified cells are discussed in greater detail elsewhere herein. The term modification can be used in connection with modification of a cell that is not dependent on being a recipient cell. For example, isolated cells can be modified prior to receiving an engineered AAV capsid molecule.

[0224] In an embodiment, the invention provides a non-human eukaryotic organism; for example, a multicellular eukaryotic organism, including a eukaryotic host cell containing one or more components of an engineered delivery system described herein according to any of the described embodiments. In other embodiments, the invention provides a eukaryotic organism; preferably a multicellular eukaryotic organism, comprising a eukaryotic host cell containing one or more components of an engineered delivery system described herein according to any of the described embodiments. In some embodiments, the organism is a host of AAV.

[0225] In particular embodiments, the plants, algae, fungi, yeast, etc., cells or parts obtained are transgenic plants, comprising an exogenous DNA sequence incorporated into the genome of all or part of the cells.

[0226] The engineered cell can be a prokaryotic cell. The prokaryotic cell can be bacterial cell. The prokaryotic cell can be an archaea cell. The bacterial cell can be any suitable bacterial cell. Suitable bacterial cells can be from the genus Escherichia, Bacillus, Lactobacillus, Rhodococcus, Rodhobacter, Synechococcus, Synechoystis, Pseudomonas, Psedoaltermonas, Stenotrophamonas, and Streptomyces Suitable bacterial cells include, but are not limited to Escherichia coli cells, Caulobacter crescentus cells, Rodhobacter sphaeroides cells, Psedoaltermonas haloplanktis cells. Suitable strains of bacterial include, but are not limited to BL21(DE3), DL21(DE3)-pLysS, BL21 Star-pLysS, BL21-SI, BL21-AI, Tuner, Tuner pLysS, Origami, Origami B pLysS, Rosetta, Rosetta pLysS, Rosetta-gami-pLysS, BL21 CodonPlus, AD494, BL2trxB, HMS174, NovaBlue (DE3), BLR, C41 (DE3), C43 (DE3), Lemo21 (DE3), Shuffle T7, ArcticExpress and ArticExpress (DE3).

[0227] The engineered cell can be a eukaryotic cell. The eukaryotic cells may be those of or derived from a particular organism, such as a plant or a mammal, including but not limited to human, or non-human eukaryote or animal or mammal as herein discussed, e.g., mouse, rat, rabbit, dog, livestock, or non-human mammal or primate. In some embodiments the engineered cell can be a cell line. Examples of cell lines include, but are not limited to, C8161, CCRF-CEM, MOLT, mIMCD-3, NHDF, HeLa-S3, Huh1, Huh4, Huh7, HUVEC, HASMC, HEKn, HEKa, MiaPaCell, Panc1, PC-3, TF1, CTLL-2, CIR, Rat6, CV1, RPTE, A10, T24, J82, A375, ARH-77, Calu1, SW480, SW620, SKOV3, SK-UT, CaCo2, P388D1, SEM-K2, WEHI-231, HB56, TIB55, Jurkat, J45.01, LRMB, Bcl-1, BC-3, IC21, DLD2, Raw264.7, NRK, NRK-52E, MRC5, MEF, Hep G2, HeLa B, HeLa T4, COS, COS-1, COS-6, COS-M6A, BS-C-1 monkey kidney epithelial, BALB/3T3 mouse embryo fibroblast, 3T3 Swiss, 3T3-L1, 132-d5 human fetal fibroblasts; 10.1 mouse fibroblasts, 293-T, 3T3, 721, 9L, A2780, A2780ADR, A2780cis, A172, A20, A253, A431, A-549, ALC, B16, B35, BCP-1 cells, BEAS-2B, bEnd.3, BHK-21, BR 293, BxPC3, C3H-10T1/2, C6/36, Cal-27, CHO, CHO-7, CHO-IR, CHO-K1, CHO-K2, CHO-T, CHO Dhfr−/−, COR-L23, COR-L23/CPR, COR-L23/5010, COR-L23/R23, COS-7, COV-434, CML T1, CMT, CT26, D17, DH82, DU145, DuCaP, EL4, EM2, EM3, EMT6/AR1, EMT6/AR10.0, FM3, H1299, H69, HB54, HB55, HCA2, HEK-293, HeLa, Hepalclc7, HL-60, HMEC, HT-29, Jurkat, JY cells, K562 cells, Ku812, KCL22, KG1, KYO1, LNCap, Ma-Mel 1-48, MC-38, MCF-7, MCF-10A, MDA-MB-231, MDA-MB-468, MDA-MB-435, MDCK II, MDCK II, MOR/0.2R, MONO-MAC 6, MTD-1A, MyEnd, NCI-H69/CPR, NCI-H69/LX10, NCI-H69/LX20, NCI-H69/LX4, NIH-3T3, NALM-1, NW-145, OPCN/OPCT cell lines, Peer, PNT-1A/PNT 2, RenCa, RIN-5F, RMA/RMAS, Saos-2 cells, Sf-9, SkBr3, T2, T-47D, T84, THP1 cell line, U373, U87, U937, VCaP, Vero cells, WM39, WT-49, X63, YAC-1, YAR, and transgenic varieties thereof. Cell lines are available from a variety of sources known to those with skill in the art (see, e.g., the American Type Culture Collection (ATCC) (Manassas, Va.)).

[0228] In some embodiments, the engineered cell is a muscle cell (e.g. cardiac muscle, skeletal muscle, and/or smooth muscle), bone cell, blood cell, immune cell (including but not limited to B cells, macrophages, T-cells, CAR-T cells, and the like), kidney cells, bladder cells, lung cells, heart cells, liver cells, brain cells, neurons, skin cells, stomach cells, neuronal support cells, intestinal cells, epithelial cells, endothelial cells, stem or other progenitor cells, adrenal gland cells, cartilage cells, and combinations thereof.

[0229] In some embodiments, the engineered cell can be a fungus cell. As used herein, a “fungal cell” refers to any type of eukaryotic cell within the kingdom of fungi. Phyla within the kingdom of fungi include Ascomycota, Basidiomycota, Blastocladiomycota, Chytridiomycota, Glomeromycota, Microsporidia, and Neocallimastigomycota. Fungal cells may include yeasts, molds, and filamentous fungi. In some embodiments, the fungal cell is a yeast cell.

[0230] As used herein, the term “yeast cell” refers to any fungal cell within the phyla Ascomycota and Basidiomycota. Yeast cells may include budding yeast cells, fission yeast cells, and mold cells. Without being limited to these organisms, many types of yeast used in laboratory and industrial settings are part of the phylum Ascomycota. In some embodiments, the yeast cell is an S. cerevisiae, Kluyveromyces marxianus, or Issatchenkia orientalis cell. Other yeast cells may include without limitation Candida spp. (e.g., Candida albicans), Yarrowia spp. (e.g., Yarrowia lipolytica), Pichia spp. (e.g., Pichia pastoris), Kluyveromyces spp. (e.g., Kluyveromyces lactis and Kluyveromyces marxianus), Neurospora spp. (e.g., Neurospora crassa), Fusarium spp. (e.g., Fusarium oxysporum), and Issatchenkia spp. (e.g., Issatchenkia orientalis, a.k.a. Pichia kudriavzevii and Candida acidothermophilum). In some embodiments, the fungal cell is a filamentous fungal cell. As used herein, the term “filamentous fungal cell” refers to any type of fungal cell that grows in filaments, i.e., hyphae or mycelia. Examples of filamentous fungal cells may include without limitation Aspergillus spp. (e.g., Aspergillus niger), Trichoderma spp. (e.g., Trichoderma reesei), Rhizopus spp. (e.g., Rhizopus oryzae), and Mortierella spp. (e.g., Mortierella isabellina).

[0231] In some embodiments, the fungal cell is an industrial strain. As used herein, “industrial strain” refers to any strain of fungal cell used in or isolated from an industrial process, e.g., production of a product on a commercial or industrial scale. Industrial strain may refer to a fungal species that is typically used in an industrial process, or it may refer to an isolate of a fungal species that may be also used for non-industrial purposes (e.g., laboratory research). Examples of industrial processes may include fermentation (e.g., in production of food or beverage products), distillation, biofuel production, production of a compound, and production of a polypeptide. Examples of industrial strains can include, without limitation, JAY270 and ATCC4124.

[0232] In some embodiments, the fungal cell is a polyploid cell. As used herein, a “polyploid” cell may refer to any cell whose genome is present in more than one copy. A polyploid cell may refer to a type of cell that is naturally found in a polyploid state, or it may refer to a cell that has been induced to exist in a polyploid state (e.g., through specific regulation, alteration, inactivation, activation, or modification of meiosis, cytokinesis, or DNA replication). A polyploid cell may refer to a cell whose entire genome is polyploid, or it may refer to a cell that is polyploid in a particular genomic locus of interest.

[0233] In some embodiments, the fungal cell is a diploid cell. As used herein, a “diploid” cell may refer to any cell whose genome is present in two copies. A diploid cell may refer to a type of cell that is naturally found in a diploid state, or it may refer to a cell that has been induced to exist in a diploid state (e.g., through specific regulation, alteration, inactivation, activation, or modification of meiosis, cytokinesis, or DNA replication). For example, the S. cerevisiae strain S228C may be maintained in a haploid or diploid state. A diploid cell may refer to a cell whose entire genome is diploid, or it may refer to a cell that is diploid in a particular genomic locus of interest. In some embodiments, the fungal cell is a haploid cell. As used herein, a “haploid” cell may refer to any cell whose genome is present in one copy. A haploid cell may refer to a type of cell that is naturally found in a haploid state, or it may refer to a cell that has been induced to exist in a haploid state (e.g., through specific regulation, alteration, inactivation, activation, or modification of meiosis, cytokinesis, or DNA replication). For example, the S. cerevisiae strain S228C may be maintained in a haploid or diploid state. A haploid cell may refer to a cell whose entire genome is haploid, or it may refer to a cell that is haploid in a particular genomic locus of interest.

[0234] In some embodiments, the engineered cell is a cell obtained from a subject. In some embodiments, the subject is a healthy or non-diseased subject. In some embodiments, the subject is a subject with a desired physiological and/or biological characteristic such that when a engineered AAV capsid particle is produced it can package one or more cargo polynucleotides that can be related to the desired physiological and/or biological characteristic and/or capable of modifying the desired physiological and/or biological characteristic. Thus, the cargo polynucleotides of the produced engineered AAV capsid particle can be capable of transferring the desired characteristic to a recipient cell. In some embodiments, the cargo polynucleotides are capable of modifying a polynucleotide of the engineered cell such that the engineered cell has a desired physiological and/or biological characteristic.

[0235] In some embodiments, a cell transfected with one or more vectors described herein is used to establish a new cell line comprising one or more vector-derived sequences.

[0236] The engineered cells can be used to produce engineered viral (e.g., AAV) capsid polynucleotides, vectors, and/or particles. In some embodiments, the engineered viral (e.g., AAV) capsid polynucleotides, vectors, and/or particles are produced, harvested, and/or delivered to a subject in need thereof. In some embodiments, the engineered cells are delivered to a subject. Other uses for the engineered cells are described elsewhere herein. In some embodiments, the engineered cells can be included in formulations and/or kits described elsewhere herein.

[0237] The engineered cells can be stored short-term or long-term for use at a later time. Suitable storage methods are generally known in the art. Further, methods of restoring the stored cells for use (such as thawing, reconstitution, and otherwise stimulating metabolism in the engineered cell after storage) at a later time are also generally known in the art.

### Formulations

[0238] The compositions, polynucleotides, polypeptides, particles, cells, vector systems and combinations thereof described herein can be contained in a formulation, such as a pharmaceutical formulation. In some embodiments, the formulations can be used to generate polypeptides and other particles that include one or more CNS-specific n-mers described herein. In some embodiments, the formulations can be delivered to a subject in need thereof. In some embodiments, component(s) of the engineered AAV capsid system, engineered cells, engineered AAV capsid particles, and/or combinations thereof described herein can be included in a formulation that can be delivered to a subject or a cell. In some embodiments, the formulation is a pharmaceutical formulation. One or more of the polypeptides, polynucleotides, vectors, cells, and combinations thereof described herein can be provided to a subject in need thereof or a cell alone or as an active ingredient, such as in a pharmaceutical formulation. As such, also described herein are pharmaceutical formulations containing an amount of one or more of the polypeptides, polynucleotides, vectors, cells, or combinations thereof described herein. In some embodiments, the pharmaceutical formulation can contain an effective amount of the one or more of the polypeptides, polynucleotides, vectors, cells, and combinations thereof described herein. The pharmaceutical formulations described herein can be administered to a subject in need thereof or a cell.

[0239] In some embodiments, the amount of the one or more of the polypeptides, polynucleotides, vectors, cells, virus particles, nanoparticles, other delivery particles, and combinations thereof described herein contained in the pharmaceutical formulation can range from about 1 μg/kg to about 10 mg/kg based upon the bodyweight of the subject in need thereof or average bodyweight of the specific patient population to which the pharmaceutical formulation can be administered. The amount of the one or more of the polypeptides, polynucleotides, vectors, cells, and combinations thereof described herein in the pharmaceutical formulation can range from about 1 μg to about 10 g, from about 10 nL to about 10 ml. In embodiments where the pharmaceutical formulation contains one or more cells, the amount can range from about 1 cell to 1×10², 1×10³, 1×10⁴, 1×10⁵, 1×10⁶, 1×10⁷, 1×10⁸, 1×10⁹, 1×10¹⁰ or more cells. In embodiments where the pharmaceutical formulation contains one or more cells, the amount can range from about 1 cell to 1×10², 1×10³, 1×10⁴, 1×10⁵, 1×10⁶, 1×10⁷, 1×10⁸, 1×10⁹, 1×10¹⁰ or more cells per nL, μL, mL, or L.

[0240] In embodiments, were engineered AAV capsid particles are included in the formulation, the formulation can contain 1 to 1×10¹, 1×10², 1×10³, 1×10⁴, 1×10⁵, 1×10⁶, 1×10⁷, 1×10⁸, 1×10⁹, 1×10¹⁰, 1×10¹¹, 1×10¹², 1×10¹³, 1×10¹⁴, 1×10¹⁵, 1×10¹⁶, 1×10¹⁷, 1×10¹⁸, 1×10¹⁹, or 1×10²⁰ transducing units (TU)/mL of the engineered AAV capsid particles. In some embodiments, the formulation can be 0.1 to 100 mL in volume and can contain 1 to 1×10¹, 1×10², 1×10³, 1×10⁴, 1×10⁵, 1×10⁶, 1×10⁷, 1×10⁸, 1×10⁹, 1×10¹⁰, 1×10¹¹, 1×10¹², 1×10¹³, 1×10¹⁴, 1×10¹⁵, 1×10¹⁶, 1×10¹⁷, 1×10¹⁸, 1×10¹⁹, or 1×10²⁰ transducing units (TU)/mL of the engineered AAV capsid particles.

### Pharmaceutically Acceptable Carriers and Auxiliary Ingredients and Agents

[0241] In embodiments, the pharmaceutical formulation containing an amount of one or more of the polypeptides, polynucleotides, vectors, cells, virus particles, nanoparticles, other delivery particles, and combinations thereof described herein can further include a pharmaceutically acceptable carrier. Suitable pharmaceutically acceptable carriers include, but are not limited to, water, salt solutions, alcohols, gum arabic, vegetable oils, benzyl alcohols, polyethylene glycols, gelatin, carbohydrates such as lactose, amylose or starch, magnesium stearate, talc, silicic acid, viscous paraffin, perfume oil, fatty acid esters, hydroxy methylcellulose, and polyvinyl pyrrolidone, which do not deleteriously react with the active composition.

[0242] The pharmaceutical formulations can be sterilized, and if desired, mixed with auxiliary agents, such as lubricants, preservatives, stabilizers, wetting agents, emulsifiers, salts for influencing osmotic pressure, buffers, coloring, flavoring and/or aromatic substances, and the like which do not deleteriously react with the active composition.

[0243] In addition to an amount of one or more of the polypeptides, polynucleotides, vectors, cells, engineered AAV capsid particles, nanoparticles, other delivery particles, and combinations thereof described herein, the pharmaceutical formulation can also include an effective amount of an auxiliary active agent, including but not limited to, polynucleotides, amino acids, peptides, polypeptides, antibodies, aptamers, ribozymes, hormones, immunomodulators, antipyretics, anxiolytics, antipsychotics, analgesics, antispasmodics, anti-inflammatoires, anti-histamines, anti-infectives, chemotherapeutics, and combinations thereof.

[0244] Suitable hormones include, but are not limited to, amino-acid derived hormones (e.g., melatonin and thyroxine), small peptide hormones and protein hormones (e.g., thyrotropin-releasing hormone, vasopressin, insulin, growth hormone, luteinizing hormone, follicle-stimulating hormone, and thyroid-stimulating hormone), eicosanoids (e.g., arachidonic acid, lipoxins, and prostaglandins), and steroid hormones (e.g., estradiol, testosterone, tetrahydro testosterone Cortisol). Suitable immunomodulators include, but are not limited to, prednisone, azathioprine, 6-MP, cyclosporine, tacrolimus, methotrexate, interleukins (e.g., IL-2, IL-7, and IL-12), cytokines (e.g., interferons (e.g., IFN-α, IFN-β, IFN-ε, IFN-K, IFN-ω, and IFN-γ), granulocyte colony-stimulating factor, and imiquimod), chemokines (e.g., CCL3, CCL26 and CXCL7), cytosine phosphate-guanosine, oligodeoxynucleotides, glucans, antibodies, and aptamers).

[0245] Suitable antipyretics include, but are not limited to, non-steroidal anti-inflammatoires (e.g., ibuprofen, naproxen, ketoprofen, and nimesulide), aspirin and related salicylates (e.g., choline salicylate, magnesium salicylate, and sodium salicylate), paracetamol/acetaminophen, metamizole, nabumetone, phenazone, and quinine.

[0246] Suitable anxiolytics include, but are not limited to, benzodiazepines (e.g., alprazolam, bromazepam, chlordiazepoxide, clonazepam, clorazepate, diazepam, flurazepam, lorazepam, oxazepam, temazepam, triazolam, and tofisopam), serotonergic antidepressants (e.g., selective serotonin reuptake inhibitors, tricyclic antidepressants, and monoamine oxidase inhibitors), mebicar, fabomotizole, selank, bromantane, emoxypine, azapirones, barbiturates, hydroxyzine, pregabalin, validol, and beta blockers.

[0247] Suitable antipsychotics include, but are not limited to, benperidol, bromoperidol, droperidol, haloperidol, moperone, pipamperone, timiperone, fluspirilene, penfluridol, pimozide, acepromazine, chlorpromazine, cyamemazine, dixyrazine, fluphenazine, levomepromazine, mesoridazine, perazine, pericyazine, perphenazine, pipotiazine, prochlorperazine, promazine, promethazine, prothipendyl, thioproperazine, thioridazine, trifluoperazine, triflupromazine, chlorprothixene, clopenthixol, flupentixol, thiothixene, zuclopenthixol, clotiapine, loxapine, prothipendyl, carpipramine, clocapramine, molindone, mosapramine, sulpiride, veralipride, amisulpride, amoxapine, aripiprazole, asenapine, clozapine, blonanserin, iloperidone, lurasidone, melperone, nemonapride, olanzapine, paliperidone, perospirone, quetiapine, remoxipride, risperidone, sertindole, trimipramine, ziprasidone, zotepine, alstonie, bifeprunox, bitopertin, brexpiprazole, cannabidiol, cariprazine, pimavanserin, pomaglumetad methionil, vabicaserin, xanomeline, and zicronapine.

[0248] Suitable analgesics include, but are not limited to, paracetamol/acetaminophen, nonsteroidal anti-inflammatoires (e.g., ibuprofen, naproxen, ketoprofen, and nimesulide), COX-2 inhibitors (e.g., rofecoxib, celecoxib, and etoricoxib), opioids (e.g., morphine, codeine, oxycodone, hydrocodone, dihydromorphine, pethidine, buprenorphine), tramadol, norepinephrine, flupirtine, nefopam, orphenadrine, pregabalin, gabapentin, cyclobenzaprine, scopolamine, methadone, ketobemidone, piritramide, and aspirin and related salicylates (e.g., choline salicylate, magnesium salicylate, and sodium salicylate).

[0249] Suitable antispasmodics include, but are not limited to, mebeverine, papaverine, cyclobenzaprine, carisoprodol, orphenadrine, tizanidine, metaxalone, methocarbamol, chlorzoxazone, baclofen, dantrolene, baclofen, tizanidine, and dantrolene. Suitable anti-inflammatories include, but are not limited to, prednisone, non-steroidal anti-inflammatoires (e.g., ibuprofen, naproxen, ketoprofen, and nimesulide), COX-2 inhibitors (e.g., rofecoxib, celecoxib, and etoricoxib), and immune selective anti-inflammatory derivatives (e.g., submandibular gland peptide-T and its derivatives)

[0250] Suitable anti-histamines include, but are not limited to, H1-receptor antagonists (e.g., acrivastine, azelastine, bilastine, brompheniramine, buclizine, bromodiphenhydramine, carbinoxamine, cetirizine, cyclizine, chlorpheniramine, clemastine, cyproheptadine, desloratadine, dexbrompheniramine, dexchlorpheniramine, dimenhydrinate, dimetindene, diphenhydramine, doxylamine, ebastine, embramine, fexofenadine, hydroxyzine, levocetirizine, loratadine, meclizine, mirtazapine, olopatadine, orphenadrine, phenindamine, pheniramine, phenyltoloxamine, promethazine, pyrilamine, quetiapine, rupatadine, tripelennamine, and triprolidine), H2-receptor antagonists (e.g., cimetidine, famotidine, lafutidine, nizatidine, ranitidine, and roxatidine), tritoqualine, catechin, cromoglicate, nedocromil, and p2-adrenergic agonists.

[0251] Suitable anti-infectives include, but are not limited to, amebicides (e.g., nitazoxanide, paromomycin, metronidazole, tinidazole, chloroquine, miltefosine, amphotericin b, and iodoquinol), aminoglycosides (e.g., paromomycin, tobramycin, gentamicin, amikacin, kanamycin, and neomycin), anthelmintics (e.g., pyrantel, mebendazole, ivermectin, praziquantel, albendazole, thiabendazole, oxamniquine), antifungals (e.g., azole antifungals (e.g., itraconazole, fluconazole, parconazole, ketoconazole, clotrimazole, miconazole, and voriconazole), echinocandins (e.g., caspofungin, anidulafungin, and micafungin), griseofulvin, terbinafine, flucytosine, and polyenes (e.g., nystatin, and amphotericin b), antimalarial agents (e.g., pyrimethamine/sulfadoxine, artemether/lumefantrine, atovaquone/proguanil, quinine, hydroxychloroquine, mefloquine, chloroquine, doxycycline, pyrimethamine, and halofantrine), antituberculosis agents (e.g., aminosalicylates (e.g., aminosalicylic acid), isoniazid/rifampin, isoniazid/pyrazinamide/rifampin, bedaquiline, isoniazid, ethambutol, rifampin, rifabutin, rifapentine, capreomycin, and cycloserine), antivirals (e.g., amantadine, rimantadine, abacavir/lamivudine, emtricitabine/tenofovir, cobicistat/elvitegravir/emtricitabine/tenofovir, efavirenz/emtricitabine/tenofovir, abacavir/lamivudine/zidovudine, lamivudine/zidovudine, emtricitabine/tenofovir, emtricitabine/lopinavir/ritonavir/tenofovir, interferon alfa-2v/ribavirin, peginterferon alfa-2b, maraviroc, raltegravir, dolutegravir, enfuvirtide, foscarnet, fomivirsen, oseltamivir, zanamivir, nevirapine, efavirenz, etravirine, rilpivirine, delavirdine, nevirapine, entecavir, lamivudine, adefovir, sofosbuvir, didanosine, tenofovir, abacavir, zidovudine, stavudine, emtricitabine, zalcitabine, telbivudine, simeprevir, boceprevir, telaprevir, lopinavir/ritonavir, boceprevir, darunavir, ritonavir, tipranavir, atazanavir, nelfinavir, amprenavir, indinavir, saquinavir, ribavirin, valacyclovir, acyclovir, famciclovir, ganciclovir, and valganciclovir), carbapenems (e.g., doripenem, meropenem, ertapenem, and cilastatin/imipenem), cephalosporins (e.g., cefadroxil, cephradine, cefazolin, cephalexin, cefepime, cefazoline, loracarbef, cefotetan, cefuroxime, cefprozil, loracarbef, cefoxitin, cefaclor, ceftibuten, ceftriaxone, cefotaxime, cefpodoxime, cefdinir, cefixime, cefditoren, ceftizoxime, and ceftazidime), glycopeptide antibiotics (e.g., vancomycin, dalbavancin, oritavancin, and telavancin), glycylcyclines (e.g., tigecycline), leprostatics (e.g., clofazimine and thalidomide), lincomycin and derivatives thereof (e.g., clindamycin and lincomycin), macrolides and derivatives thereof (e.g., telithromycin, fidaxomicin, erythromycin, azithromycin, clarithromycin, dirithromycin, and troleandomycin), linezolid, sulfamethoxazole/trimethoprim, rifaximin, chloramphenicol, Fosfomycin, metronidazole, aztreonam, bacitracin, penicillin (amoxicillin, ampicillin, bacampicillin, carbenicillin, piperacillin, ticarcillin, amoxicillin/clavulanate, ampicillin/sulbactam, piperacillin/tazobactam, clavulanate/ticarcillin, penicillin, procaine penicillin, oxacillin, dicloxacillin, and nafcillin), quinolones (e.g., lomefloxacin, norfloxacin, ofloxacin, gatifloxacin, moxifloxacin, ciprofloxacin, levofloxacin, gemifloxacin, moxifloxacin, cinoxacin, nalidixic acid, enoxacin, grepafloxacin, gatifloxacin, trovafloxacin, and sparfloxacin), sulfonamides (e.g., sulfamethoxazole/trimethoprim, sulfasalazine, and sulfisoxazole), tetracyclines (e.g., doxycycline, demeclocycline, minocycline, doxycycline/salicylic acid, doxycycline/omega-3 polyunsaturated fatty acids, and tetracycline), and urinary anti-infectives (e.g., nitrofurantoin, methenamine, Fosfomycin, cinoxacin, nalidixic acid, trimethoprim, and methylene blue).

[0252] Suitable chemotherapeutics include, but are not limited to, paclitaxel, brentuximab vedotin, doxorubicin, 5-FU (fluorouracil), everolimus, pemetrexed, melphalan, pamidronate, anastrozole, exemestane, nelarabine, ofatumumab, bevacizumab, belinostat, tositumomab, carmustine, bleomycin, bosutinib, busulfan, alemtuzumab, irinotecan, vandetanib, bicalutamide, lomustine, daunorubicin, clofarabine, cabozantinib, dactinomycin, ramucirumab, cytarabine, Cytoxan, cyclophosphamide, decitabine, dexamethasone, docetaxel, hydroxyurea, dacarbazine, leuprolide, epirubicin, oxaliplatin, asparaginase, estramustine, cetuximab, vismodegib, asparaginase Erwinia chrysanthemi, amifostine, etoposide, flutamide, toremifene, fulvestrant, letrozole, degarelix, pralatrexate, methotrexate, floxuridine, obinutuzumab, gemcitabine, afatinib, imatinib mesylate, carmustine, eribulin, trastuzumab, altretamine, topotecan, ponatinib, idarubicin, ifosfamide, ibrutinib, axitinib, interferon alfa-2a, gefitinib, romidepsin, ixabepilone, ruxolitinib, cabazitaxel, ado-trastuzumab emtansine, carfilzomib, chlorambucil, sargramostim, cladribine, mitotane, vincristine, procarbazine, megestrol, trametinib, mesna, strontium-89 chloride, mechlorethamine, mitomycin, busulfan, gemtuzumab ozogamicin, vinorelbine, filgrastim, pegfilgrastim, sorafenib, nilutamide, pentostatin, tamoxifen, mitoxantrone, pegaspargase, denileukin diftitox, alitretinoin, carboplatin, pertuzumab, cisplatin, pomalidomide, prednisone, aldesleukin, mercaptopurine, zoledronic acid, lenalidomide, rituximab, octreotide, dasatinib, regorafenib, histrelin, sunitinib, siltuximab, omacetaxine, thioguanine (tioguanine), dabrafenib, erlotinib, bexarotene, temozolomide, thiotepa, thalidomide, Bacillus Calmette-Guerin (BCG), temsirolimus, bendamustine hydrochloride, triptorelin, arsenic trioxide, lapatinib, valrubicin, panitumumab, vinblastine, bortezomib, tretinoin, azacitidine, pazopanib, teniposide, leucovorin, crizotinib, capecitabine, enzalutamide, ipilimumab, goserelin, vorinostat, idelalisib, ceritinib, abiraterone, epothilone, tafluposide, azathioprine, doxifluridine, vindesine, and all-trans retinoic acid.

[0253] In embodiments where there is an auxiliary active agent contained in the pharmaceutical formulation in addition to the one or more of the polypeptides, polynucleotides, CRISPR-Cas complexes, vectors, cells, virus particles, nanoparticles, other delivery particles, and combinations thereof described herein, amount, such as an effective amount, of the auxiliary active agent will vary depending on the auxiliary active agent. In some embodiments, the amount of the auxiliary active agent ranges from 0.001 micrograms to about 1 milligram. In other embodiments, the amount of the auxiliary active agent ranges from about 0.01 IU to about 1000 IU. In further embodiments, the amount of the auxiliary active agent ranges from 0.001 mL to about 1 mL. In yet other embodiments, the amount of the auxiliary active agent ranges from about 1% w/w to about 50% w/w of the total pharmaceutical formulation. In additional embodiments, the amount of the auxiliary active agent ranges from about 1% v/v to about 50% v/v of the total pharmaceutical formulation. In still other embodiments, the amount of the auxiliary active agent ranges from about 1% w/v to about 50% w/v of the total pharmaceutical formulation.

### Dosage Forms

[0254] In some embodiments, the pharmaceutical formulations described herein may be in a dosage form. The dosage forms can be adapted for administration by any appropriate route. Appropriate routes include, but are not limited to, rectal, epidural, intracranial, intraocular, inhaled, intranasal, topical (including buccal, sublingual, or transdermal), vaginal, intraurethral, parenteral, intracranial, subcutaneous, intramuscular, intravenous, intraperitoneal, intradermal, intraosseous, intracardiac, intraarticular, intracavernous, intrathecal, intravitreal, intracerebral, gingival, subgingival, intracerebroventricular, and intradermal. Such formulations may be prepared by any method known in the art.

[0255] Dosage forms adapted for parenteral administration and/or adapted for any type of injection (e.g. intravenous, intraperitoneal, subcutaneous, intramuscular, intradermal, intraosseous, epidural, intracardiac, intraarticular, intracavernous, gingival, subgingival, intrathecal, intravitreal, intracerebral, and intracerebroventricular) can include aqueous and/or non-aqueous sterile injection solutions, which can contain anti-oxidants, buffers, bacteriostats, solutes that render the composition isotonic with the blood of the subject, and aqueous and non-aqueous sterile suspensions, which can include suspending agents and thickening agents. The dosage forms adapted for parenteral administration can be presented in a single-unit dose or multi-unit dose containers, including but not limited to sealed ampoules or vials. The doses can be lyophilized and resuspended in a sterile carrier to reconstitute the dose prior to administration. Extemporaneous injection solutions and suspensions can be prepared in some embodiments, from sterile powders, granules, and tablets. See e.g., Glascock, J. J., et al. Delivery of Therapeutic Agents Through Intracerebroventricular (ICV) and Intravenous (IV) Injection in Mice. J. Vis. Exp. (56), e2968 and Foley C P, et al. Intra-arterial delivery of AAV vectors to the mouse brain after mannitol mediated blood brain barrier disruption. J Control Release. 2014 Dec. 28; 196:71-78.

[0256] The dosage form can also be prepared to prolong or sustain the release of any ingredient. In some embodiments, the one or more of the polypeptides, polynucleotides, vectors, cells, and combinations thereof described herein can be the ingredient whose release is delayed. In other embodiments, the release of an optionally included auxiliary ingredient is delayed. Suitable methods for delaying the release of an ingredient include, but are not limited to, coating or embedding the ingredients in material in polymers, wax, gels, and the like. Delayed release dosage formulations can be prepared as described in standard references such as “Pharmaceutical dosage form tablets,” eds. Liberman et. al. (New York, Marcel Dekker, Inc., 1989), “Remington—The science and practice of pharmacy”, 20th ed., Lippincott Williams & Wilkins, Baltimore, MD, 2000, and “Pharmaceutical dosage forms and drug delivery systems”, 6th Edition, Ansel et al., (Media, PA: Williams and Wilkins, 1995).

[0257] Dosage forms adapted for topical administration can be formulated as ointments, creams, suspensions, lotions, powders, solutions, pastes, gels, sprays, aerosols, or oils. In some embodiments for treatments of the eye or other external tissues, for example the mouth or the skin, the pharmaceutical formulations are applied as a topical ointment or cream. When formulated in an ointment, the one or more of the polypeptides, polynucleotides, vectors, cells, and combinations thereof described herein can be formulated with a paraffinic or water-miscible ointment base. In some embodiments, the active ingredient can be formulated in a cream with an oil-in-water cream base or a water-in-oil base. Dosage forms adapted for topical administration in the mouth include lozenges, pastilles, and mouth washes.

[0258] Dosage forms adapted for nasal or inhalation administration include aerosols, solutions, suspension drops, gels, or dry powders. In some embodiments, the one or more of the polypeptides, polynucleotides, vectors, cells, and combinations thereof described herein is contained in a dosage form adapted for inhalation is in a particle-size-reduced form that is obtained or obtainable by micronization. In some embodiments, the particle size of the size reduced (e.g., micronized) compound or salt or solvate thereof, is defined by a D50 value of about 0.5 to about 10 microns as measured by an appropriate method known in the art. Dosage forms adapted for administration by inhalation also include particle dusts or mists. Suitable dosage forms wherein the carrier or excipient is a liquid for administration as a nasal spray or drops include aqueous or oil solutions/suspensions of an active ingredient (e.g., the one or more of the polypeptides, polynucleotides, vectors, cells, and combinations thereof described herein and/or auxiliary active agent), which may be generated by various types of metered dose pressurized aerosols, nebulizers, or insufflators.

[0259] In some embodiments, the dosage forms can be aerosol formulations suitable for administration by inhalation. In some of these embodiments, the aerosol formulation can contain a solution or fine suspension of the one or more of the polypeptides, polynucleotides, vectors, cells, and combinations thereof described herein and a pharmaceutically acceptable aqueous or non-aqueous solvent. Aerosol formulations can be presented in single or multi-dose quantities in sterile form in a sealed container. For some of these embodiments, the sealed container is a single dose or multi-dose nasal, or an aerosol dispenser fitted with a metering valve (e.g., metered dose inhaler), which is intended for disposal once the contents of the container have been exhausted.

[0260] Where the aerosol dosage form is contained in an aerosol dispenser, the dispenser contains a suitable propellant under pressure, such as compressed air, carbon dioxide, or an organic propellant, including but not limited to a hydrofluorocarbon. The aerosol formulation dosage forms in other embodiments are contained in a pump-atomizer. The pressurized aerosol formulation can also contain a solution or a suspension of one or more of the polypeptides, polynucleotides, vectors, cells, and combinations thereof described herein. In further embodiments, the aerosol formulation can also contain co-solvents and/or modifiers incorporated to improve, for example, the stability and/or taste and/or fine particle mass characteristics (amount and/or profile) of the formulation. Administration of the aerosol formulation can be once daily or several times daily, for example 2, 3, 4, or 8 times daily, in which 1, 2, or 3 doses are delivered each time.

[0261] For some dosage forms suitable and/or adapted for inhaled administration, the pharmaceutical formulation is a dry powder inhalable formulation. In addition to the one or more of the polypeptides, polynucleotides, vectors, cells, and combinations thereof described herein, an auxiliary active ingredient, and/or pharmaceutically acceptable salt thereof, such a dosage form can contain a powder base such as lactose, glucose, trehalose, mannitol, and/or starch. In some of these embodiments, the one or more of the polypeptides, polynucleotides, vectors, cells, and combinations thereof described herein is in a particle-size reduced form. In further embodiments, a performance modifier, such as L-leucine or another amino acid, cellobiose octaacetate, and/or metals salts of stearic acid, such as magnesium or calcium stearate.

[0262] In some embodiments, the aerosol dosage forms can be arranged so that each metered dose of aerosol contains a predetermined amount of an active ingredient, such as the one or more of the one or more of the polypeptides, polynucleotides, vectors, cells, and combinations thereof described herein.

[0263] Dosage forms adapted for ocular administration can include aqueous and/or nonaqueous sterile solutions that can optionally be adapted for injection, and which can optionally contain anti-oxidants, buffers, bacteriostats, solutes that render the composition isotonic with the eye or fluid contained therein or around the eye of the subject, and aqueous and nonaqueous sterile suspensions, which can include suspending agents and thickening agents.

[0264] For some embodiments, the dosage form contains a predetermined amount of the one or more of the polypeptides, polynucleotides, vectors, cells, and combinations thereof described herein per unit dose. In some embodiments, the predetermined amount of the Such unit doses may therefore be administered once or more than once a day. Such pharmaceutical formulations may be prepared by any of the methods well known in the art.

### Effective Amounts

[0265] In some embodiments, the amount of the primary active agent and/or optional secondary agent can be an effective amount, least effective amount, and/or therapeutically effective amount. As used herein, “effective amount”, “effective concentration”, and/or the like refers to the amount, concentration, etc. of the primary and/or optional secondary agent included in the pharmaceutical formulation that achieve one or more therapeutic effects or desired effect. As used herein, “least effective”, “least effective concentration”, and/or the like amount refers to the lowest amount, concentration, etc. of the primary and/or optional secondary agent that achieves the one or more therapeutic or other desired effects. As used herein, “therapeutically effective amount”, “therapeutically effective concentration” and/or the like refers to the amount, concentration, etc. of the primary and/or optional secondary agent included in the pharmaceutical formulation that achieves one or more therapeutic effects. In some embodiments, the one or more therapeutic effects comprise transducing the CNS.

[0266] In some embodiments, the amount or effective amount, particularly where an infective particle is being delivered (e.g., a virus particle having the primary or secondary agent as a cargo), the effective amount of virus particles can be expressed as a titer (plaque forming units per unit of volume) or as a MOI (multiplicity of infection). In some embodiments, the effective amount can be about 1×10¹ particles per pL, nL, μL, mL, or L to 1×10²⁰/particles per pL, nL, μL, mL, or L or more, such as about 1×10¹, 1×10², 1×10³, 1×10⁴, 1×10⁵, 1×10⁶, 1×10⁷, 1×10⁸, 1×10⁹, 1×10¹⁰, 1×10¹¹, 1×10¹², 1×10¹³, 1×10¹⁴, 1×10¹⁵, 1×10¹⁶, 1×10¹⁷, 1×10¹⁸, 1×10¹⁹, to/or about 1×10²⁰ particles per pL, nL, L, mL, or L. In some embodiments, the effective titer can be about 1×10¹ transforming units per pL, nL, μL, mL, or L to 1×10²⁰/transforming units per pL, nL, μL, mL, or L or more, such as about 1×10¹, 1×10², 1×10³, 1×10⁴, 1×10⁵, 1×10⁶, 1×10⁷, 1×10⁸, 1×10⁹, 1×10¹⁰, 1×10¹¹, 1×10¹², 1×10¹³, 1×10¹⁴, 1×10¹⁵, 1×10¹⁶, 1×10¹⁷, 1×10¹⁸, 1×10¹⁹, to/or about 1×10²⁰ transforming units per pL, nL, μL, mL, or L or any numerical value or subrange within these ranges. In some embodiments, the MOI of the pharmaceutical formulation can range from about 0.1 to 10 or more, such as 0.1, 0.2, 0.3, 0.4, 0.5, 0.6, 0.7, 0.8, 0.9, 1, 1.1, 1.2, 1.3, 1.4, 1.5, 1.6, 1.7, 1.8, 1.9, 2, 2.1, 2.2, 2.3, 2.4, 2.5, 2.6, 2.7, 2.8, 2.9, 3, 3.1, 3.2, 3.3, 3.4, 3.5, 3.6, 3.7, 3.8, 3.9, 4, 4.1, 4.2, 4.3, 4.4, 4.5, 4.6, 4.7, 4.8, 4.9, 5, 5.1, 5.2, 5.3, 5.4, 5.5, 5.6, 5.7, 5.8, 5.9, 6, 6.1, 6.2, 6.3, 6.4, 6.5, 6.6, 6.7, 6.8, 6.9, 7, 7.1, 7.2, 7.3, 7.4, 7.5, 7.6, 7.7, 7.8, 7.9, 8, 8.1, 8.2, 8.3, 8.4, 8.5, 8.6, 8.7, 8.8, 8.9, 9, 9.1, 9.2, 9.3, 9.4, 9.5, 9.6, 9.7, 9.8, 9.9, 10 or more or any numerical value or subrange within these ranges.

[0267] In some embodiments, the effective amount, least effective amount, and/or therapeutically effective amount can be an effective concentration, least effective concentration, and/or therapeutically effective concentration, which can each be any non-zero amount ranging from about 0 to 10, 20, 30, 40, 50, 60, 70, 80, 90, 100, 110, 120, 130, 140, 150, 160, 170, 180, 190, 200, 210, 220, 230, 240, 250, 260, 270, 280, 290, 300, 310, 320, 330, 340, 350, 360, 370, 380, 390, 400, 410, 420, 430, 440, 450, 460, 470, 480, 490, 500, 510, 520, 530, 540, 550, 560, 570, 580, 590, 600, 610, 620, 630, 640, 650, 660, 670, 680, 690, 700, 710, 720, 730, 740, 750, 760, 770, 780, 790, 800, 810, 820, 830, 840, 850, 860, 870, 880, 890, 900, 910, 920, 930, 940, 950, 960, 970, 980, 990, 1000 pM, nM, μM, mM, or M or be any numerical value or subrange within any of these ranges.

[0268] In some embodiments, the primary and/or the optional secondary active agent present in the pharmaceutical formulation can be any non-zero amount ranging from about 0 to 0.001, 0.002, 0.003, 0.004, 0.005, 0.006, 0.007, 0.008, 0.009, 0.01, 0.02, 0.03, 0.04, 0.05, 0.06, 0.07, 0.08, 0.09, 0.1, 0.11, 0.12, 0.13, 0.14, 0.15, 0.16, 0.17, 0.18, 0.19, 0.2, 0.21, 0.22, 0.23, 0.24, 0.25, 0.26, 0.27, 0.28, 0.29, 0.3, 0.31, 0.32, 0.33, 0.34, 0.35, 0.36, 0.37, 0.38, 0.39, 0.4, 0.41, 0.42, 0.43, 0.44, 0.45, 0.46, 0.47, 0.48, 0.49, 0.5, 0.51, 0.52, 0.53, 0.54, 0.55, 0.56, 0.57, 0.58, 0.59, 0.6, 0.61, 0.62, 0.63, 0.64, 0.65, 0.66, 0.67, 0.68, 0.69, 0.7, 0.71, 0.72, 0.73, 0.74, 0.75, 0.76, 0.77, 0.78, 0.79, 0.8, 0.81, 0.82, 0.83, 0.84, 0.85, 0.86, 0.87, 0.88, 0.89, 0.9, 0.91, 0.92, 0.93, 0.94, 0.95, 0.96, 0.97, 0.98, 0.9, to 1, 2, 3, 4, 5, 6, 7, 8, 9, 10, 11, 12, 13, 14, 15, 16, 17, 18, 19, 20, 21, 22, 23, 24, 25, 26, 27, 28, 29, 30, 31, 32, 33, 34, 35, 36, 37, 38, 39, 40, 41, 42, 43, 44, 45, 46, 47, 48, 49, 50, 51, 52, 53, 54, 55, 56, 57, 58, 59, 60, 61, 62, 63, 64, 65, 66, 67, 68, 69, 70, 71, 72, 73, 74, 75, 76, 77, 78, 79, 80, 81, 82, 83, 84, 85, 86, 87, 88, 89, 90, 91, 92, 93, 94, 95, 96, 97, 98, 99, 99.1, 99.2, 99.3, 99.4, 99.5, 99.6, 99.7, 99.8, 99.9% w/w, v/v, or w/v of the pharmaceutical formulation or be any numerical value or subrange within any of these ranges.

[0269] In some embodiments, the amount or effective amount of the one or more of the active agent(s) described herein contained in the pharmaceutical formulation can range from about 1 μg/kg to about 10 mg/kg based upon the bodyweight of the subject in need thereof or average bodyweight of the specific patient population to which the pharmaceutical formulation can be administered.

[0270] In embodiments where there is a secondary agent contained in the pharmaceutical formulation, the effective amount of the secondary active agent will vary depending on the secondary agent, the primary agent, the administration route, subject age, disease, stage of disease, among other things, which will be one of ordinary skill in the art.

[0271] When optionally present in the pharmaceutical formulation, the secondary active agent can be included in the pharmaceutical formulation or can exist as a stand-alone compound or pharmaceutical formulation that can be administered contemporaneously or sequentially with the compound, derivative thereof, or pharmaceutical formulation thereof.

[0272] In some embodiments, the effective amount of the secondary active agent, when optionally present, is any non-zero amount ranging from about 0 to 1, 2, 3, 4, 5, 6, 7, 8, 9, 10, 11, 12, 13, 14, 15, 16, 17, 18, 19, 20, 21, 22, 23, 24, 25, 26, 27, 28, 29, 30, 31, 32, 33, 34, 35, 36, 37, 38, 39, 40, 41, 42, 43, 44, 45, 46, 47, 48, 49, 50, 51, 52, 53, 54, 55, 56, 57, 58, 59, 60, 61, 62, 63, 64, 65, 66, 67, 68, 69, 70, 71, 72, 73, 74, 75, 76, 77, 78, 79, 80, 81, 82, 83, 84, 85, 86, 87, 88, 89, 90, 91, 92, 93, 94, 95, 96, 97, 98, 99, 99.1, 99.2, 99.3, 99.4, 99.5, 99.6, 99.7, 99.8, 99.9% w/w, v/v, or w/v of the total active agents present in the pharmaceutical formulation or any numerical value or subrange within these ranges. In additional embodiments, the effective amount of the secondary active agent is any non-zero amount ranging from about 0 to 1, 2, 3, 4, 5, 6, 7, 8, 9, 10, 11, 12, 13, 14, 15, 16, 17, 18, 19, 20, 21, 22, 23, 24, 25, 26, 27, 28, 29, 30, 31, 32, 33, 34, 35, 36, 37, 38, 39, 40, 41, 42, 43, 44, 45, 46, 47, 48, 49, 50, 51, 52, 53, 54, 55, 56, 57, 58, 59, 60, 61, 62, 63, 64, 65, 66, 67, 68, 69, 70, 71, 72, 73, 74, 75, 76, 77, 78, 79, 80, 81, 82, 83, 84, 85, 86, 87, 88, 89, 90, 91, 92, 93, 94, 95, 96, 97, 98, 99, 99.1, 99.2, 99.3, 99.4, 99.5, 99.6, 99.7, 99.8, 99.9% w/w, v/v, or w/v of the total pharmaceutical formulation or any numerical value or subrange within these ranges.

### Kits

[0273] Also described herein are kits that contain one or more of the one or more of the compositions, polypeptides, polynucleotides, vectors, cells, or other components described herein and combinations thereof and pharmaceutical formulations described herein. In embodiments, one or more of the polypeptides, polynucleotides, vectors, cells, and combinations thereof described herein can be presented as a combination kit. As used herein, the terms “combination kit” or “kit of parts” refers to the compounds, or formulations and additional components that are used to package, screen, test, sell, market, deliver, and/or administer the combination of elements or a single element, such as the active ingredient, contained therein. Such additional components include but are not limited to, packaging, syringes, blister packages, bottles, and the like. The combination kit can contain one or more of the components (e.g., one or more of the one or more of the polypeptides, polynucleotides, vectors, cells, and combinations thereof) or formulation thereof can be provided in a single formulation (e.g., a liquid, lyophilized powder, etc.), or in separate formulations. The separate components or formulations can be contained in a single package or in separate packages within the kit. The kit can also include instructions in a tangible medium of expression that can contain information and/or directions regarding the content of the components and/or formulations contained therein, safety information regarding the content of the components(s) and/or formulation(s) contained therein, information regarding the amounts, dosages, indications for use, screening methods, component design recommendations and/or information, recommended treatment regimen(s) for the components(s) and/or formulations contained therein. As used herein, “tangible medium of expression” refers to a medium that is physically tangible or accessible and is not a mere abstract thought or an unrecorded spoken word. “Tangible medium of expression” includes, but is not limited to, words on a cellulosic or plastic material, or data stored in a suitable computer readable memory form. The data can be stored on a unit device, such as a flash memory drive or CD-ROM or on a server that can be accessed by a user via, e.g., a web interface.

[0274] In one embodiment, the invention provides a kit comprising one or more of the components described herein. In some embodiments, the kit comprises a vector system and instructions for using the kit. In some embodiments, the vector system includes a regulatory element operably linked to one or more engineered polynucleotides, such as those containing a selective n-mer, as described elsewhere herein and, optionally, a cargo molecule, which can optionally be operably linked to a regulatory element. The one or more engineered polynucleotides such as those containing a selective n-mer, as described elsewhere herein and, can be included on the same or different vectors as the cargo molecule in embodiments containing a cargo molecule within the kit.

[0275] In some embodiments, the kit comprises a vector system and instructions for using the kit. In some embodiments, the vector system comprises (a) a first regulatory element operably linked to a direct repeat sequence and one or more insertion sites for inserting one or more guide sequences up-or downstream (whichever applicable) of the direct repeat sequence, wherein when expressed, the guide sequence directs sequence-specific binding of a Cas9 CRISPR complex to a target sequence in a eukaryotic cell, wherein the Cas9 CRISPR complex comprises a Cas9 enzyme complexed with the guide sequence that is hybridized to the target sequence; and/or (b) a second regulatory element operably linked to an enzyme-coding sequence encoding said Cas9 enzyme comprising a nuclear localization sequence. Where applicable, a tracr sequence may also be provided. In some embodiments, the kit comprises components (a) and (b) located on the same or different vectors of the system. In some embodiments, component (a) further comprises two or more guide sequences operably linked to the first regulatory element, wherein when expressed, each of the two or more guide sequences direct sequence specific binding of a CRISPR complex to a different target sequence in a eukaryotic cell. In some embodiments, the Cas9 enzyme comprises one or more nuclear localization sequences of sufficient strength to drive accumulation of said CRISPR enzyme in a detectable amount in the nucleus of a eukaryotic cell. In some embodiments, the CRISPR enzyme is a type V or VI CRISPR system enzyme. In some embodiments, the CRISPR enzyme is a Cas9 enzyme. In some embodiments, the Cas9 enzyme is derived from Francisella tularensis 1, Francisella tularensis subsp. novicida, Prevotella albensis, Lachnospiraceae bacterium MC2017 1, Butyrivibrio proteoclasticus, Peregrinibacteria bacterium GW2011_GWA2_33_10, Parcubacteria bacterium GW2011_GWC2_44_17, Smithella sp. SCADC, Acidaminococcus sp. BV3L6, Lachnospiraceae bacterium MA2020, Candidatus Methanoplasma termitum, Eubacterium eligens, Moraxella bovoculi 237, Leptospira inadai, Lachnospiraceae bacterium ND2006, Porphyromonas crevioricanis 3, Prevotella disiens, or Porphyromonas macacae Cas9 (e.g., modified to have or be associated with at least one DD), and may include further alteration or mutation of the Cas9, and can be a chimeric Cas9. In some embodiments, the DD-CRISPR enzyme is codon-optimized for expression in a eukaryotic cell. In some embodiments, the DD-CRISPR enzyme directs cleavage of one or two strands at the location of the target sequence. In some embodiments, the DD-CRISPR enzyme lacks or substantially DNA strand cleavage activity (e.g., no more than 5% nuclease activity as compared with a wild-type enzyme or enzyme not having the mutation or alteration that decreases nuclease activity). In some embodiments, the first regulatory element is a polymerase III promoter. In some embodiments, the second regulatory element is a polymerase II promoter. In some embodiments, the guide sequence is at least 16, 17, 18, 19, 20, 25 nucleotides, or between 16-30, or between 16-25, or between 16-20 nucleotides in length.

### Methods of Use for Delivery of Cargo to CNS

[0276] The compositions including one or more of the cell-selective targeting moieties, engineered AAV capsid system polynucleotides, polypeptides, vector(s), engineered cells, engineered AAV capsid particles can be used generally to package and/or deliver one or more cargos to neuron and glial cells of the CNS. In some embodiments, delivery is done in cell-selective manner based upon the selectivity of the targeting moiety. In some embodiments this is conferred by the tropism of the engineered AAV capsid, which can be influenced at least in part by the inclusion of one or n-mer motifs described elsewhere herein. In some embodiments, compositions including one or more of the CNS targeting moieties, including engineered AAV capsid particles where the capsids incorporate the targeting moiety, can be administered to a subject or a cell, tissue, and/or organ and facilitate the transfer and/or integration of the cargo to the recipient cell. In other embodiments, engineered cells capable of producing compositions, such as polypeptides and other particles (e.g., engineered AAV capsids and viral particles), containing one or more of the targeting moieties can be generated from the polynucleotides, vectors, and vector systems etc., described herein. This includes without limitation, the engineered AAV capsid system molecules (e.g., polynucleotides, vectors, and vector systems, etc.). In some embodiments, the polynucleotides, vectors, and vector systems etc., described herein capable of generating the compositions, such as polypeptides and other particles (e.g., engineered AAV capsids and viral particles), containing one or more of the targeting moieties can be delivered to a cell or tissue, in vivo, ex vivo, or in vitro. In some embodiments, when delivered to a subject, the composition can transform a subject's cell in vivo or ex vivo to produce an engineered cell that can be capable of making a composition described herein that contains one or more of the cell-selective targeting moieties described herein, including but not limited to the engineered AAV capsid particles, which can be released from the engineered cell and deliver cargo molecule(s) to a recipient cell in vivo or produce personalized engineered compositions (e.g., AAV capsid particles) for reintroduction into the subject from which the recipient cell was obtained.

[0277] In some embodiments, an engineered cell can be delivered to a subject, where it can release produced compositions of the present invention (including but not limited to engineered AAV capsid particles) such that they can then deliver a cargo (e.g., a cargo polynucleotide(s)) to a recipient cell. These general processes can be used in a variety of ways to treat and/or prevent disease or a symptom thereof in a subject, generate model cells, generate modified organisms, provide cell selection and screening assays, in bioproduction, and in other various applications.

[0278] In some embodiments, the compositions, such as polypeptides and other particles (e.g., engineered AAV capsids and viral particles), containing one or more of the targeting moieties can be delivered to neural cells of the CNS. In another example embodiment, the compositions containing one or more targeting moieties can be delivered to glial cells of the CNS.

[0279] In some embodiments, the engineered AAV capsid polynucleotides, vectors, and systems thereof can be used to generate engineered AAV capsid variant libraries that can be mined for variants with a desired cell-selectivity. The description provided herein as supported by the various Examples can demonstrate that one having a desired cell-selectivity in mind could utilize the present invention as described herein to obtain a capsid with the desired cell-selectivity.

### Methods of Treatment

[0280] Provided herein are methods for treating a disease or disorder, the method comprising administering to a subject in need thereof, a composition as disclosed herein to cells of the CNS. In an aspect, the compositions used in methods disclosed herein are capable of increasing transduction of neurons and/or glial cells of the CNS, allowing for delivery of cargo and therapeutics directly to such cell types. In embodiments, a method is disclosed wherein the cargo is one or more polypeptides.

### Diseases or Disorders

[0281] In embodiments, a method is disclosed wherein the disease or disorder is a cancer, neurological disorder, or infection.

[0282] In an embodiment, methods of treatment comprise administering a composition as detailed herein to a subject in need thereof. In an example embodiment, the cancer is a neuroepithelial cancer. In an embodiment, the cancer is a neuroepithelial tumor, for example, Astrocytic tumors, e.g., Diffuse Astrocytoma (fibrillary, protoplasmic, gemistocytic, mixed), Anaplastic (malignant) astrocytoma, Glioblastoma (giant cell, gliosarcoma variants), Pilocytic astrocytoma, Pleomorphic xanthoastrocytoma, or Subependymal giant cell astrocytoma; Oligodendroglial tumors, e.g., Oligodendroglioma, Anaplastic (malignant) Oligodendroglioma, Ependymal tumors, Ependymoma (cellular, papillary, clear cell, tanycytic), Anaplastic (malignant) ependymoma, ependymoma, Subependymoma; Mixed tumors, e.g., Oligoastrocytomaor Anaplastic (malignant) oligoastrocytoma; Choroid plexus tumors, e.g., Choroid Plexus papilloma or Choroid Plexus carcinoma; Neuronal and mixed neuronal-glial tumors, e.g., Gangliocytoma, Gangloglioma, Dysembryoplastic neuroepithelial tumor (DNET), Dysplastic gangliocytoma of the cerebellum (Lhermitte-Duclos), Desmoplastic infantile astrocytoma/ganglioglioma, Central neurocytoma, Anaplastic ganglioglioma, Cerebellar liponeurocytoma, Paraganglioma of the filum terminale; Pineal tumors, e.g., Pineocytoma, Pineoblastoma, Pineal parenchymal tumor of intermediate differentiation; Embryonal tumors, e.g., Medulloblastoma (desmoplastic, large cell, melanotic, medullomyoblastoma), Medulloepithelioma, Supratentorial primitive neuroectodermal tumors, PNETs such as Neuroblastoma, Ganglioneuroblastoma, Ependymoblastoma, or Atypical teratoid/rhabdoid tumor; Neuroblastic tumors, e.g., Olfactory (esthesioneuroblastoma), Olfactory neuroepithelioma, Neuroblastomas of the adrenal gland and sympathetic nervous system; Glial tumors of uncertain etiology, e.g., Astroblastoma, Gliomatosis cerebri, Chordoid glioma of the third ventricle.

[0283] In an embodiment, the cancer is a primary cancer metastasized to brain or other region of the central nervous system.

[0284] In an example embodiment, the neurological disorder is caused by a neurodegenerative or a neurodevelopmental disease. Example neurodegenerative diseases include, but are not limited to, Alzheimer's disease and other memory disorders, amyotrophic lateral sclerosis (ALS), ataxia, Huntington's disease, Parkinson's disease, motor neuron disease, multiple system atrophy, progressive supranuclear palsy. Examples of neurodevelopmental diseases include, but are not limited to, attention-deficit/hyperactivity disorder (ADHD), autism, learning disabilities, intellectual disability (also known as mental retardation), conduct disorders, cerebral palsy, speech and language disorders, Tourette syndrome, Schizophrenia, Fragile X syndrome, and impairments in vision and hearing.

### Non-Human Transgenic Animals

[0285] In one aspect, as provided herein a method of creating humanized transgenic non-human animals comprising: delivering to one or more cells of a non-human animal a vector system or a recombinant viral particle comprising a recombinant viral genome, wherein: the vector system or recombinant viral genome encodes a human transferrin polypeptide, wherein the encoded human transferrin polypeptide is under the control of a tissue-specific promoter or miRNA binding element that has selective activity in the desired cell, tissue, or organ. In an example embodiment, the one or more cells are endothelial cells. In an example embodiment, the one or more cells are CNS cells. In an example embodiment, the one or more cells are of the CNS vasculature, lungs, kidneys, liver, or any combination thereof. In an example embodiment, the endothelial cells are of the CNS vasculature. In an example embodiment, the recombinant viral particle, optionally an AAV viral particle, comprises a capsid polypeptide, optionally an AAV capsid polypeptide, wherein the capsid polypeptide comprises a CNS specific n-mer motif. In an example embodiment, the CNS-specific n-mer motif comprises X1-N-X3-X4-X5-X6-X7, wherein X5 is independently selected from K or R, and X1, X3, X4, X6 and X7 are independently selected from any amino acid, optionally wherein the overall charge of the n-mer motif at neutral pH is between 0 and +2. In an example embodiment, the CNS-specific n-mer motif comprises or consists of NNSTRGG (SEQ ID NO: 42429), GNSARNI (SEQ ID NO: 42430), and GNSVRDF (SEQ ID NO: 42431). In an example embodiment, the transgenic non-human animal is a rodent, optionally a mouse.

[0286] In one aspect, provided herein a humanized transgenic non-human animal comprising: one or more cells expressing a human transferrin polypeptide, optionally wherein the one or more cells are CNS cells. In an example embodiment, the transgenic non-human animal is a rodent, optionally a mouse. In one aspect, provided herein a humanized transgenic non-human animal produced by the methods described herein. In an example embodiment, the humanized non-human animal has a suppressed immune system.

[0287] It will be appreciated that in the present methods, where the non-human transgenic organism is multicellular, e.g., an animal or plant, the modification may occur ex vivo or in vitro, for instance in a cell culture and in some instances not in vivo. In other embodiments, it may occur in vivo. In an aspect, the invention provides a method of modifying an organism or a non-human organism by manipulation of a target sequence in a genomic locus of interest comprising: Delivering, e.g., via particle(s) or nanoparticle(s) or vector(s) (e.g., viral vector, e.g., AAV, adenovirus, lentivirus) a non-naturally occurring or engineered composition.

[0288] A single cell or a population of cells may preferably be modified ex vivo and then re-introduced, e.g., transplanted to make transgenic organisms that express TFRC in certain cells. The invention in some embodiments comprehends a method of modifying a eukaryote, such as a transgenic eukaryote comprising delivering, e.g., via vector(s) and/or particle(s) and/or nanoparticles a non-naturally occurring or engineered composition. The system may comprise one, two, three or four different vectors; and the system may comprise one, two, three or four different nanoparticle complex(es) delivering the component(s) of the system. Components I, II, III and IV may thus be located on one, two, three or four different vectors, and may be delivered by one, two, three or four different particle or nanoparticle complex(es) or AAVs or components I, II, III and IV can be located on same or different vector(s)/particle(s)/nanoparticle(s), with all combinations of locations envisaged. And complexes that target the CNS or CNS tissue or CNS cells are advantageous.

[0289] In some embodiments, vectors are delivered to the eukaryotic cell in a transgenic eukaryote. In some embodiments, said modifying takes place in said eukaryotic cell in a cell culture. In one aspect, the invention provides a method of generating a model eukaryotic cell or a model transgenic eukaryote comprising one or more human proteins.

[0290] In one aspect, the present invention provides a transgenic eukaryote, e.g., mouse. In one aspect, the present invention provides a constitutive transgenic eukaryote, e.g., mouse line obtained by crossing of the transgenic mouse with another mouse line. In certain embodiments, progeny (or progenies) derived from said transgenic eukaryote, e.g., mouse line, may be successfully bred over at least five generations without exhibiting increased levels of genome instability or cellular toxicity. In one aspect, the present invention provides a method for simultaneously introducing multiple mutations ex vivo in a tissue, organ or a cell line (of the CNS), or in vivo in the same. It can be appreciated that using the novel targeting moiety tools disclosed herein, may produce a transgenic non-human eukaryote, e.g., animal model with multiple mutations in any number of loci can be envisioned and are within the scope of the present invention. It will be appreciated that such a transgenic non-human eukaryote, e.g., animal model provides a valuable tool for research purposes, e.g., viral transduction, and opens the door for developing and testing new therapeutic interventions for targeting specific tissue involving mutations at multiple loci. Such uses are within the scope of the present invention.

[0291] The eukaryotic cell can comprise a constitutive promoter, or a tissue specific promoter, or an inducible promoter; and, the eukaryotic cell can be part of a non-human transgenic eukaryote, e.g., a non-human mammal, primate, rodent, mouse, rat, rabbit, canine, dog, cow, bovine, sheep, ovine, goat, pig, fowl, poultry, chicken, fish, insect or arthropod; advantageously a mouse. The isolated eukaryotic cell or the non-human transgenic eukaryote can express an additional protein or enzyme, such as TfR1; and, the expression of TfR1 can be driven by coding therefor functionally or operatively linked to a constitutive promoter, or a tissue specific promoter, or an inducible promoter.

[0292] The eukaryotic cell can be a mammalian cell, e.g., a mouse cell, such as a mouse cell that is part of a transgenic mouse having cells that express TfR1.

[0293] Transgenic non-human eukaryotic organisms, e.g., animals are also provided in an aspect of practice of the instant invention. Preferred examples include animals comprising TfR1, in terms of polynucleotides encoding TfR1 or the protein itself. In certain aspects, the invention involves a constitutive or conditional or inducible TfR1 non-human eukaryotic organism, such as an animal, e.g., a primate, rodent, e.g., mouse, rat and rabbit, are preferred; and can include a canine or dog, livestock (cow/bovine, sheep/ovine, goat or pig), fish, fowl or poultry, e.g., chicken, and an insect or arthropod, with it mentioned that it is advantageous if the animal is a model as to a human or animal protein, cell, or tissue, as use of the non-human eukaryotic organisms in condition modeling, e.g., via inducing a plurality, are preferred. To generate transgenic mice with the constructs, as exemplified herein one may inject pure, linear DNA into the pronucleus of a zygote from a pseudo pregnant female, e.g. a CB56 female. Founders may then be identified, genotyped, and backcrossed to CB57 mice. The constructs may then be cloned and optionally verified, for instance by Sanger sequencing. Knock ins are envisaged (alone or in combination

[0294] Accordingly, the invention involves a non-human eukaryote, animal, mammal, primate, rodent, etc. or cell thereof or tissue thereof that may be used as a model. For example, a method of the invention may be used to create a non-human eukaryote, e.g., an animal, mammal, primate, rodent or cell that comprises a modification in one or more nucleic acid sequences associated or correlated with a cell or tissue of such (such as the CNS). The cell may be in vivo or ex vivo in the cases of multicellular organisms. In the instance where the cell is in cultured, a cell line may be established if appropriate culturing conditions are met and preferably if the cell is suitably adapted for this purpose (for instance a stem cell). Hence, cell lines are also envisaged.

[0295] In an aspect the invention can involve cells, e.g., non-human eukaryotic, e.g., animal, such as mammal, e.g., primate, rodent, mouse, rat, rabbit, etc., or even human cells, transformed to contain TfR1, e.g., such cells as to which a vector that contains nucleic acid molecule(s) encoding a TfR1, e.g., with nucleic acid(s) encoding a promoter and at least one NLS, advantageously two or more NLSs, or such cells that have had their genome altered, e.g., through the vector being an integrating virus or through such cells being stem cells or cells that give rise to a cell line or a living organism (but wherein such an organism is advantageously non-human), that contains and expresses nucleic acid molecule(s) encoding TfR1. Such cells are then transplanted into or onto an animal suitable for expressing a cell or tissue. The cells proliferate on or in the non-human eukaryote, e.g., animal model. The non-human eukaryote, e.g., animal model, having the proliferated heterologous transplanted TfR1-containing cells, is then administered RNA(s) or vector(s), e.g., AAV, adenovirus, lentivirus containing or providing RNA(s), e.g., under the control of a promoter such as a U6 promoter and/or particle(s) and/or nanoparticle(s). The non-human eukaryote, e.g., animal model can then be used for testing, e.g., as to potential therapy and/or putative treatment via a possibly pharmaceutically active compound. The administering can be at or to or for body delivery to the proliferated heterologous transplanted TfR1-containing cells, e.g., direct injection at or near such proliferated heterologous transplanted TfR1-containing cells, or injection or other administration in such a way that the RNA(s) are delivered into the proliferated heterologous transplanted TfR1-containing cells, e.g., injection into the bloodstream whereby bodily functions transport to the proliferated heterologous transplanted TfR1-containing cells. In an aspect of the invention, barcoding techniques of WO/2013/138585 A1 can be adapted or integrated into the practice of the invention. WO/2013/138585 A1 provides methods for simultaneously determining the effect of a test condition on viability or proliferation of each of a plurality of genetically heterogeneous cell types. The number of living cells in the sample after exposure to the test condition as compared to the reference number of cells indicates the effect of the test condition on viability or proliferation of each cell type. WO/2013/138585 A1 also provides methods for simultaneously determining the effect of a test condition on viability or proliferation of each of a plurality of genetically heterogeneous cell types. Referenced patent applications are hereby incorporated by reference.

[0296] The practice of the present invention employs, unless otherwise indicated, conventional techniques for generation of genetically modified mice. See Marten H. Hofker and Jan van Deursen, TRANSGENIC MOUSE METHODS AND PROTOCOLS, 2nd edition (2011).

### Screening and Cell Selection

[0297] In one aspect, as provided herein a method of screening n-mer motifs capable of conferring transduction of central nervous system (CNS) tissues via binding to a transferrin receptor (TFRC) in humanized transgenic non-human animals comprising: introducing one or more compositions comprising a candidate n-mer motif to humanized non-human transgenic animal of any one of claims Error! Reference source not found.-Error! Reference source not found.; and detecting binding of the compositions that bind to a transferrin receptor (TFRC) and/or detecting transduction or uptake by one or more CNS cells of the humanized transgenic non-human animal. In an example embodiment, the candidate n-mer motif comprises or consists of X1-N-X3-X4-X5-X6-X7, wherein X5 is independently selected from K or R, and X1, X3, X4, X6 and X7 are independently selected from any amino acid, optionally wherein the overall charge of the n-mer motif at neutral pH is between 0 and +2. In an example embodiment, the composition is a viral particle comprising one or more capsid proteins each comprising the candidate n-mer motif. In an example embodiment, the viral particle is an AAV viral particle and the one or more capsid proteins is an AAV capsid protein, optionally wherein the candidate n-mer motif is inserted in between amino acids 588-589 of an AAV9 capsid polypeptide or in an analogous position of a capsid protein from AAV1, AAV2, AAV3, AAV4, AAV5, AAV6, AAV7, AAV8, AAVrh8, AAV rh.74, or AAV rh. 10. In an example embodiment, at least one of the one or more compositions furthers comprises a cargo. In an example embodiment, the cargo is or encodes a therapeutic nucleic acid or polypeptide, a selectable marker, or a control polypeptide or nucleic acid.

[0298] In one aspect, a method of screening targeting moieties, including incorporated within an AAV, capable of transduction of central nervous system (CNS) tissues via binding to a transferrin receptor (TFRC) in humanized transgenic non-human animals comprising: (a) introducing a plurality of vector systems to one or more humanized transgenic non-human animal that express the human TFRC and (b) detecting the targeting moiety that binds to a transferrin receptor (TFRC).

[0299] The engineered AAV capsid system vectors, engineered cells, and/or engineered AAV capsid particles described herein can be used in a screening assay and/or cell selection assay. The engineered delivery system vectors, engineered cells, and/or engineered AAV capsid particles can be delivered to a subject and/or cell. In some embodiments, the cell is a eukaryotic cell. The cell can be in vitro, ex vivo, in situ, or in vivo. The engineered AAV capsid system molecules, vectors, engineered cells, and/or engineered AAV capsid particles described herein can introduce an exogenous molecule or compound to subject or cell to which they are delivered. The presence of an exogenous molecule or compound can be detected which can allow for identification of a cell and/or attribute thereof. In some embodiments, the delivered molecules or particles can impart a gene or other nucleotide modification (e.g., mutations, gene or polynucleotide insertion and/or deletion, etc.). In some embodiments the nucleotide modification can be detected in a cell by sequencing. In some embodiments, the nucleotide modification can result in a physiological and/or biological modification to the cell that results in a detectable phenotypic change in the cell, which can allow for detection, identification, and/or selection of the cell. In some embodiments, the phenotypic change can be cell death, such as embodiments where binding of a CRISPR complex to a target polynucleotide results in cell death. Embodiments of the invention allow for selection of specific cells without requiring a selection marker or a two-step process that may include a counter-selection system. The cell(s) may be prokaryotic or eukaryotic cells.

[0300] In one embodiment the invention provides for a method of selecting one or more cell(s) by introducing one or more mutations in a gene in the one or more cell(s), the method comprising: introducing one or more vectors, which can include one or more engineered delivery system molecules or vectors described elsewhere herein, into the cell(s), wherein the one or more vectors can include a CRISPR enzyme and/or drive expression of one or more of: a guide sequence linked to a tracr mate sequence, a tracr sequence, and an editing template; or other polynucleotide to be inserted into the cell and/or genome thereof; wherein, for example that which is being expressed is within and expressed in vivo by the CRISPR enzyme and/or the editing template, when included, comprises the one or more mutations that abolish CRISPR enzyme cleavage; allowing homologous recombination of the editing template with the target polynucleotide in the cell(s) to be selected; allowing a CRISPR complex to bind to a target polynucleotide to effect cleavage of the target polynucleotide within said gene, wherein the CRISPR complex comprises the CRISPR enzyme complexed with (1) the guide sequence that is hybridized to the target sequence within the target polynucleotide, and (2) the tracr mate sequence that is hybridized to the tracr sequence, wherein binding of the CRISPR complex to the target polynucleotide induces cell death, thereby allowing one or more cell(s) in which one or more mutations have been introduced to be selected. In a preferred embodiment, the CRISPR enzyme is a Cas protein. In another embodiment of the invention the cell to be selected may be a eukaryotic cell.

[0301] The screening methods involving the engineered AAV capsid system molecules, vectors, engineered cells, and/or engineered AAV capsid particles, including but not limited to those that deliver one more CRISPR-Cas system molecules to cell, can be used in detection methods such as fluorescence in situ hybridization (FISH). In some embodiments, one or more components of an engineered CRISPR-Cas system that includes a catalytically inactive Cas protein, can be delivered by an engineered AAV capsid system molecule, engineered cell, and/or engineered AAV capsid particle described elsewhere herein to a cell and used in a FISH method. The CRISPR-Cas system can include an inactivated Cas protein (dCas) (e.g., a dCas9), which lacks the ability to produce DNA double-strand breaks may be fused with a marker, such as fluorescent protein, such as the enhanced green fluorescent protein (eEGFP) and co-expressed with small guide RNAs to target pericentric, centric and teleomeric repeats in vivo. The dCas system can be used to visualize both repetitive sequences and individual genes in the human genome. Such new applications of labelled dCas, dCas CRISPR-Cas systems, engineered AAV capsid system molecules, engineered cells, and/or engineered AAV capsid particles can be used in imaging cells and studying the functional nuclear architecture, especially in cases with a small nucleus volume or complex 3-D structures. (Chen B, Gilbert L A, Cimini B A, Schnitzbauer J, Zhang W, Li G W, Park J, Blackburn E H, Weissman J S, Qi L S, Huang B. 2013. Dynamic imaging of genomic loci in living human cells by an optimized CRISPR/Cas system. Cell 155(7):1479-91. doi: 10.1016/j.cell.2013.12.001., the teachings of which can be applied and/or adapted to the CRISPR systems described herein. A similar approach involving a polynucleotide fused to a marker (e.g., a fluorescent marker) can be delivered to a cell via an engineered AAV capsid system molecule, vector, engineered cell, and/or engineered AAV capsid particle described herein and integrated into the genome of the cell and/or otherwise interact with a region of the genome of a cell for FISH analysis.

[0302] Similar approaches for studying other cell organelles and other cell structures can be accomplished by delivering to the cell (e.g., via an engineered delivery AAV capsid molecule, engineered cell, and/or engineered AAV capsid particle described herein) one or more molecules fused to a marker (such as a fluorescent marker), wherein the molecules fused to the marker are capable of targeting one or more cell structures. By analyzing the presence of the markers, one can identify and/or image specific cell structures.

[0303] In some embodiments, the engineered AAV capsid system molecules and/or engineered AAV capsid particles can be used in a screening assay inside or outside of a cell. In some embodiments, the screening assay can include delivering a CRISPR-Cas cargo molecule(s) via an engineered AAV capsid particle.

[0304] Use of the present system in screening is also provided by the present invention, e.g., gain of function screens. Cells which are artificially forced to overexpress a gene are able to down regulate the gene over time (re-establishing equilibrium) e.g., by negative feedback loops. By the time the screen starts the unregulated gene might be reduced again. Other screening assays are discussed elsewhere herein.

[0305] In an embodiment, the invention provides a cell from or of an in vitro method of delivery, wherein the method comprises contacting the delivery system with a cell, optionally a eukaryotic cell, whereby there is delivery into the cell of constituents of the delivery system, and optionally obtaining data or results from the contacting, and transmitting the data or results.

[0306] In an embodiment, the invention provides a cell from or of an in vitro method of delivery, wherein the method comprises contacting the delivery system with a cell, optionally a eukaryotic cell, whereby there is delivery into the cell of constituents of the delivery system, and optionally obtaining data or results from the contacting, and transmitting the data or results; and wherein the cell product is altered compared to the cell not contacted with the delivery system, for example altered from that which would have been wild type of the cell but for the contacting. In an embodiment, the cell product is non-human or animal. In some embodiments, the cell product is human.

[0307] In some embodiments, a host cell is transiently or non-transiently transfected with one or more vectors described herein. In some embodiments, a cell is transfected as it naturally occurs in a subject optionally to be reintroduced therein. In some embodiments, a cell that is transfected is taken from a subject. In some embodiments, the cell obtained from or is derived from cells taken from a subject, such as a cell line. Delivery mechanisms and techniques of the engineered AAV capsid system, engineered AAV capsid particles are described elsewhere herein.

[0308] In some embodiments it is envisaged to introduce the engineered AAV capsid system molecule(s) and/or engineered AAV capsid particle(s) directly to the host cell. For instance, the engineered AAV capsid system molecule(s) can be delivered together with one or more cargo molecules to be packaged into an engineered AAV capsid particle.

[0309] The invention is further described in the following examples, which do not limit the scope of the invention described in the claims.

### EXAMPLES

### Example 1—Screening for 7-Mer Modified AAV Capsids that Bind Selectively to Cells Expressing Human TFRC (hTFRC)

[0310] A library of capsids with a 7-mer insertion between AA588 and 589 of AAV9 K449R was screened for capsids that bind to HEK293 or CHO cells transiently transfected with human TFRC (hTFRC) more efficiently than cells expressing a control protein (GFP). Sequences that bind more efficiently to cells expressing hTFRC were identified by NGS. Analysis of these sequences identified several motifs present in a subset of sequences: [YFL][AS][RK]X[NG]X[N] (SEQ ID NO: 20484) and XXS[ST]NG[IVR] (SEQ ID NO: 20485), where X=any amino acid.

[0311] Applicants generated a second round library comprising sequences identified in the cell-based screen for hTFRC binding and all of the sequences conforming to the above two motifs using oligo pool synthesis. The oligo pool was used to generate a capsid library. The second round library was screened on HEK293 cells with or without transient expression of hTFRC (5,000 vg/cell) as performed in the first round (Table 1). In addition, the second round library was screened to identify capsids that more efficiently transduced (1) hCMEC/D3 cells, which express endogenous hTFRC, (2) mouse brain microvascular endothelial cells (BMVECs) (Table 2) as well as (3) mixed culture spheroids consisting of hCMEC/D3 cells, and primary human astrocytes and pericytes (Cho et al, Nature Communications 2017).

[0312] Applicants chose several novel TFRC binding caspids for further study: AAV-BI19: YSRIGPN (SEQ ID NO: 14632); AAV-B198: YSRLNMN (SEQ ID NO: 14301); AAV-BI99: YSRLNKD (SEQ ID NO: 16577); AAV-BI100: VHRLQDK (SEQ ID NO: 16602); AAV-BI101: YHRLSNN (SEQ ID NO: 16636); and AAV-BI102: LHALSHN (SEQ ID NO: 16608). Applicants used these capsids to package a reporter transgene and transduced CHO cells or CHO cells expressing human TFRC (FIG. 2), as well as hCMEC cells or hCMEC cells overexpressing human TFRC (FIG. 3). In both cell types, each of the TFRC binding capsids showed enhanced ability to bind and transduce cells expressing human TFRC relative to AAV9. Notably, the enhanced transduction by these engineered capsids was absent in CHO cells, which lack expression of human TFRC. In contrast, the engineered AAVs each showed enhanced transduction of unmodified hCMEC cells relative to AAV9, which is fitting with the known expression of human TFRC in these cells. The role of TFRC for the enhanced hCMEC transduction of these capsid variants is supported by the finding that transduction was further enhanced in cells with greater cell surface exposed TFRC (FIGS. 3 and 4).

[0313] To assess whether the enhanced transduction of hCMEC cells by AAV-BI19 requires endogenous TFRC, Applicants attempted to block the interaction of the AAV with TFRC using several anti-TFRC antibodies: OKT9 (Thermo) and AF2474 (R&D Systems). Applicants found that OKT9, which binds to the TFRC apical domain (Ferrero et al J. of Virology https://doi.org/10.1128/JVI.01868-20) blocked transduction by AAV-BI19 in a dose-dependent manner (FIG. 5). In contrast, AF2474, which blocks binding of Transferrin to TFRC, did not inhibit transduction by AAV-BI19. Together these results suggest that the enhanced tropism of AAV-BI19 for human brain endothelial cells is mediated through binding to the human TFRC apical domain.

### Example 2—Screening for 7-Mer Modified AAV Capsids that Bind Selectively to hTFRC-Fc

[0314] In a second experiment, Applicants screened a separately produced AAV9 K499R 7-mer 588 insertion library for variants capable of selectively binding hTFRC when produced as an Fc fusion protein. To perform this assay, Applicants expressed the human or marmoset TFRC-Fc fusions in HEK293 cells and pulled down the Fc fusion proteins from the cell culture media using ProA-magentic beads (FIG. 7).

[0315] The recovered 7-mers found to bind hTFRC-Fc were synthesized as an oligo pool and used to generate a second-round library. Applicants screened the second-round library for variants that bind hTFRC using the same hTFRC-Fc assay (Table 4), variants that bind to CHO cells stably expressing hTFRC (Table 5), variants that bind and transduce CHO cells expressing hTFRC (Table 6), and variants that bind HEK293 cells overexpressing hTFRC (Table 7). A subset of sequences bound HEK293 cells expressing either human TFRC or marmoset TFRC (Table 8).

### Example 3—Multiple Regions of the AAV Capsid can be Engineered to Enable TFRC Binding

[0316] To determine whether other regions of the AAV capsid could be engineered to bind to TFRC, Applicants generated libraries where a stretch of 10 AA in loop IV of AAV9 were substituted with a random string of AAs of seven or 10 AAs in length. Applicants also repeated the screen using a new loop VIII 7-mer insertion library as a positive control. Applicants screened these libraries for capsids that gained the ability to bind selectively to human TFRC (Tabel 9 and Table 10) or human TFRC where the apical domain was replaced with the corresponding domain from mouse TFRC (Table 11). Notably, several of the 10 AA sequences recovered in the loop IV substitution library (IPFSRVNPDT (SEQ ID NO: 20285), LGFARTGAAD (SEQ ID NO: 20274), LGFTKSSGSD (SEQ ID NO: 20270), LRYSKTQGES (SEQ ID NO: 20266), SPYARSSAGV (SEQ ID NO: 20271), and VGWSRLDLTT (SEQ ID NO: 20262)) contain the partial [YWFL][AST][RK] (SEQ ID NO: 20492) motif like that observed in human TFRC binding 7-mer insertions at loop VIII, suggesting that this binding motif is functional in multiple structural contexts.

### Example 4—Toward a Systematic Mapping of the Relationship Between AAV 7-Mer Sequence and hTFRC Binding

[0317] Applicants have generated a novel type of library (Fit4Function) composed of AAV capsids that uniformly samples only the high production fitness sequence space (International Patent Application WO 2021222636 A1). When used to screen for novel functions (e.g., new receptor binding), the Fit4Function libraries can generate highly reproducible quantitative data suitable for training ML models that predict the function of previously untested sequences within the theoretical sequence space. Applicants screened a Fit4Function library for capsids that selectively bind to TFRC-Fc. Binding was measured at both pH7.4 and pH5.5 and is reported in Table 12. Notably, even within this smaller library (240K unique sequences), several examples of sequences conforming to previously identified motifs were identified (e.g., YAKGGSN (SEQ ID NO: 11535) and YSKSGPG (SEQ ID NO: 20422), [YFL][AS][RK]X[NG]X[N] (SEQ ID NO: 20484); VKSSNGV (SEQ ID NO: 11671), XXS[ST]NG[IVR] (SEQ ID NO: 20485)).

### Clustering and Motif Analyses

[0318] Applicants compiled sequences from all experiments run using human TFRC and the 588 site 7-mer libraries and performed clustering using UMAP. Sequences generated by mutagenesis of the motifs [YFL][AS][RK]X[NG]X[N] (SEQ ID NO: 20484) and XXS[ST]NG[IVR] (SEQ ID NO: 20485) were not included in the clustering analysis (FIG. 8 and Table 13) but were considered when defining core sequence motifs shown below.

### Motif Analysis

[0319] X₁X₂S[TS]NGX₃ (SEQ ID NO: 20487), where X₁ is any residue other than D, K, R; X₂ is any residue other than P; and X₃ is a V, I, or R.

[0320] X₁X₂X₃X₄X₅X₆X₇, where X₁ and X₂ are aromatic residues (F, W, or Y); X₃ is an S, T, A, H, X₄ is a G, N, H; X₄ is any residue; X₅ is any residue; X₆ is any residue; and X₇ is D, E, A, S, N, H, or P.

[0321] X₁CX₂X₃CX₄X₅, where X₁ is L,P,R,A,H,E,S,N, or W; X₂ is G,P,S,T,K,Y,R; X3 is P,K,D,E,L,G, or S; X₄ is any residue, and X5 is any residue.

[0322] FAKX₁X₂X₃X₄, where X1 is any residue, X2 is a G or an N, X3 is any residue, and X4 is preferably a N or a D.

[0323] FARX₁X₂X₃X₄ where X1 is any residue, X2 is a G or an N, X3 is any residue, and X4 is preferably a N or a D.

[0324] FSKX₁X₂X₃X₄ where X1 is any residue, X2 is a G or an N, X3 is any residue, and X4 is preferably a N or a D.

[0325] FSRX₁X₂X₃X₄ where X1 is any residue, X2 is a G or an N, X3 is any residue, and X4 is preferably a N or a D.

[0326] LAKX₁X₂X₃X₄ where X1 is any residue, X2 is a G or an N, X3 is any residue, and X4 is preferably a N or a D.

[0327] LARX₁X₂X₃X₄ where X1 is any residue, X2 is a G or an N, X3 is any residue, and X4 is preferably a N or a D.

[0328] LHKX₁X₂X₃X₄ where X1 is any residue, X2 is a G or an N, X3 is any residue, and X4 is preferably a N or a D.

[0329] LHRX₁X₂X₃X₄ where X1 is any residue, X2 is a G or an N, X3 is any residue, and X4 is preferably a N or a D.

[0330] LSKX₁X₂X₃X₄ where X1 is any residue, X2 is a G or an N, X3 is any residue, and X4 is preferably a N or a D.

[0331] LSRX₁X₂X₃X₄ where X1 is any residue, X2 is a G or an N, X3 is any residue, and X4 is preferably a N or a D.

[0332] YAKX₁X₂X₃X₄ where X1 is any residue, X2 is a G or an N, X3 is any residue, and X4 is preferably a N or a D.

[0333] YARX₁X₂X₃X₄ where X1 is any residue, X2 is a G or an N, X3 is any residue, and X4 is preferably a N or a D.

[0334] YHKX₁X₂X₃X₄ where X1 is any residue, X2 is a G or an N, X3 is any residue, and X4 is preferably a N or a D.

[0335] YHRX₁X₂X₃X₄ where X1 is any residue, X2 is a G or an N, X3 is any residue, and X4 is preferably a N or a D.

[0336] YMKX₁X₂X₃X₄ where X1 is any residue, X2 is a G or an N, X3 is any residue, and X4 is preferably a N or a D.

[0337] YMRX₁X₂X₃X₄ where X1 is any residue, X2 is a G or an N, X3 is any residue, and X4 is preferably a N or a D.

[0338] YSKX₁X₂X₃X₄ where X1 is any residue, X2 is a G or an N, X3 is any residue, and X4 is preferably a N or a D.

[0339] YVKSX₁X₂X₃ (SEQ ID NO: 20488), where X1 is a D, E, Q, N, or A; X2 is N, V, T, P, G, S, M, or A; and X3 is a C, G, I, A, N, R, K, S, or T.

[0340] YVRSX₁X₂X₃ (SEQ ID NO: 20504), where X1 is a D, E, Q, N, or A; X2 is N, V, T, P, G, S, M, or A; and X3 is a C, G, I, A, N, R, K, S, or T.

[0341] YVKTX₁X₂X₃ (SEQ ID NO: 20489), where X1 is a D, E, Q, N, or A; X2 is N, V, T, P, G, S, M, or A; and X3 is a C, G, I, A, N, R, K, S, or T.

[0342] YVRTX₁X₂X₃ (SEQ ID NO: 20490), where X1 is a D, E, Q, N, or A; X2 is N, V, T, P, G, S, M, or A; and X3 is a C, G, I, A, N, R, K, S, or T.

[0343] X₁X₂X₃X₄X₅WP, where X₁ is a R, K, F, I, L, T, Y; and X₂, X₃ and X₄ are any residue; and X₅ is D or E.

[0344] RX₁X₂X₃X₄X₅P, where X₁ and X₂ are any residue; X₃ is D; X₄ is Y, F, V, A, T, S, I, L; and X₄ is Y, F, V, or M.

[0345] RX₁X₂DX₃YP (SEQ ID NO: 20491), where X1 and X are any residues; and X3 is A, V, F, T, or S.

[0346] X₁YAKSX₂X₃ (SEQ ID NO: 20501), where X1 is an S, Y, D, N, or A; X2 is an L, Y, V, A, Q, or E; and X₃ is an L, A, P, D, N, or I.

[0347] X₁KSSX₂X₃W (SEQ ID NO: 20503), where X1 is V, P, D, S, L; X2 is N, G, V, S, H, A, or R; X3 is V, N, S, H, D, or R.

### Tables

[0348] Table 1. Capsids that demonstrate preferential binding to hTFRC expressed in HEK293 cells. The second round 7-mer 588 insertion library was screened for binding HEK293 cells transiently transfected with hTFRC (HEK-hTFRC) or control (GFP) HEK293 (HEK-Control). The table provides enrichment scores for each sequence, where enrichment is the log 2 assay reads per million (RPM)/RPM in the virus library before screening. “−”<=0; “+”>0 to <=1; “++”>1 to <=2; “+++”>2.

[0349] Table 2. Capsids that transduce hCMECs in vitro. Capsids with the indicated 21-mer NT sequences and 7-mer AA sequences inserted between AA588 and 589 of AAV9 K449R were evaluated for their ability to transduce hCMEC/D3 and mouse brain microvascular endothelial cells (mBMVEC). The table provides enrichment scores for each sequence, where enrichment is the log 2 assay reads per million (RPM)/RPM in the virus library before screening. “−”<=0; “+”>0 to <=1; “++”>1 to <=2; “+++”>2.

[0350] Table 3. Capsids that transduce multicellular BBB model cultures containing endothelial cells, astrocytes, and pericytes. The table provides enrichment scores for each sequence, where enrichment is the log 2 assay reads per million (RPM)/RPM in the virus library before screening. “−”<=0; “+”>0 to <=1; “++”>1 to <=4; “+++”>4.

[0351] Table 4. Capsids that selectively bind human TFRC-Fc fusion protein. The second round 7-mer 588 insertion library was screened for binding to hTFRC-Fc fusion proteins in a pull-down assay. The table provides enrichment scores for each sequence, where enrichment is the log 2 assay reads per million (RPM)/RPM in the virus library before screening. “−”<=0; “+”>0 to <=1; “++”>1 to <=2; “+++”>2.

[0352] Table 5. Capsids that selectively bind human TFRC-Fc fusion protein and bind CHO cells expressing TFRC. The second round 7-mer 588 insertion library was screened for capsids that bind CHO cells stably expressing human TFRC (hTFRC), untransduced control CHO cells (Untransduced), or control transduced CHO cells (Lenti-control). The table provides enrichment scores for each sequence, where enrichment is the log 2 assay reads per million (RPM)/RPM in the virus library before screening. “−”<=0; “+”>0 to <=1; “++”>1 to <=5; “+++” >5.

[0353] Table 6. Capsids that selectively bind human TFRC-Fc fusion protein and bind and transduce CHO cells expressing TFRC. The second round 7-mer 588 insertion library was screened for capsids that bind and transduce CHO cells stably expressing human TFRC (hTFRC), untransduced control CHO cells (Untransduced), or control transduced CHO cells (Lenti-control). The table provides enrichment scores for each sequence, where enrichment is the log 2 assay reads per million (RPM)/RPM in the virus library before screening. “−”<=0; “+”>0 to <=1; “++”>1 to <=5; “+++”>5.

[0354] Table 7. Capsids that selectively bind human TFRC-Fc fusion protein and bind HEK cells expressing TFRC. The second round 7-mer 588 insertion library was screened for capsids that bind HEK293 cells transiently expressing human TFRC (HEK-hTFRC) or control transduced HEK293 cells (HEK-GFP). The table provides enrichment scores for each sequence, where enrichment is the log 2 assay reads per million (RPM)/RPM in the virus library before screening. “−”<=0; “+”>0 to <=1; “+”>1 to <=2; “+”>2.

[0355] Table 8. Capsids that selectively bind human TFRC-Fc fusion protein and bind marmoset TFRC-Fc fusions. The second round 7-mer 588 insertion library was screened for capsids that bind human and marmoset TFRC-Fc fusion proteins (hTFRC and marTFRC, respectively). The capsids were also evaluated for their ability to bind HEK293 cells transiently expressing human TFRC (HEK-hTFRC) or control transduced HEK293 cells (HEK-GFP). The table provides enrichment scores for each sequence, where enrichment is the log 2 assay reads per million (RPM)/RPM in the virus library before screening. “−”<=0; “+”>0 to <=1; “++”>1 to <=23; “+++”>2.

[0356] Table 9. Capsids that selectively bind human and marmoset TFRC-Fc fusion proteins. A 7-mer 588 insertion library was screened for binding to human or marmoset TFRC-Fc fusion proteins (hTFRC and marTFRC, respectively). Binding was performed at pH7.4. Washes were performed at pH7.4 or at pH5.5, as indicated. The table provides enrichment scores for each sequence, where enrichment is the log 2 assay reads per million (RPM)/RPM in the virus library before screening. “−”<=0; “+”>0 to <=1; “++”>1 to <=5; “+++”>5.

[0357] Table 10. Capsids that selectively bind human TFRC-Fc fusion protein. A 7-mer or 10-mer loop IV substitution library was screened for binding to human TFRC-Fc fusion proteins. Binding was performed at pH7.4. Washes were performed at pH7.4 or at pH5.5, as indicated. The table provides enrichment scores for each sequence, where enrichment is the log 2 assay reads per million (RPM)/RPM in the virus library before screening. “−”<=0; “+”>0 to <=1; “++”>1 to <=3; “+++”>3.

[0358] Table 11. Capsids that selectively bind human TFRC-Fc fusion protein where the apical domain was replaced by the corresponding region of mouse TFRC. A 7-mer or 10-mer loop IV substitution library was screened for binding to human TFRC-Fc fusion proteins. Binding was performed at pH7.4. Washes were performed at pH7.4 or at pH5.5, as indicated. The table provides enrichment scores for each sequence, where enrichment is the log 2 assay reads per million (RPM)/RPM in the virus library before screening. “−”<=0; “+”>0 to <=2; “+”>2 to <=4; “+++”>4.

[0359] Table 12. Capsids that selectively bind human TFRC-Fc fusion protein. A 7-mer 588 insertion Fit4Function library was screened for binding to human TFRC-Fc fusion protein. Binding was performed at pH7.4 or pH5.5, as indicated. The table provides enrichment scores for each sequence, where enrichment is the log 2 assay reads per million (RPM)/RPM in the virus library before screening. “−”<=0; “+”>0 to <=2; “+”>2 to <=4; “+”>4.

[0360] Table 13. The table provides sequence listing of 7-mers that impart TFRC binding when inserted with AAV9 between AA 588-589 and their cluster assignment (FIG. 7). The table provides the AA SEQ ID, AA sequence, UMAP coordinates, and cluster number.

TABLE B
Individual capsid AA sequences TFRC.

| | |
|---|---|
| >AAV9 | MAADGYLPDWLEDNLSEGIREWWALKPGAPQPKANQQHQDN |
| | ARGLVLPGYKYLGPGNGLDKGEPVNAADAAALEHDKAYDQQ |
| | LKAGDNPYLKYNHADAEFQERLKEDTSFGGNLGRAVFQAKKR |
| | LLEPLGLVEEAAKTAPGKKRPVEQSPQEPDSSAGIGKSGAQPAK |
| | KRLNFGQTGDTESVPDPQPIGEPPAAPSGVGSLTMASGGGAPV |
| | ADNNEGADGVGSSSGNWHCDSQWLGDRVITTSTRTWALPTYN |
| | NHLYKQISNSTSGGSSNDNAYFGYSTPWGYFDFNRFHCHFSPR |
| | DWQRLINNNWGFRPKRLNFKLFNIQVKEVTDNNGVKTIANNLT |
| | STVQVFTDSDYQLPYVLGSAHEGCLPPFPADVFMIPQYGYLTLN |
| | DGSQAVGRSSFYCLEYFPSQMLRTGNNFQFSYEFENVPFHSSYA |
| | HSQSLDRLMNPLIDQYLYYLSKTINGSGQNQQTLKFSVAGPSN |
| | MAVQGRNYIPGPSYRQQRVSTTVTQNNNSEFAWPGASSWALN |
| | GRNSLMNPGPAMASHKEGEDRFFPLSGSLIFGKQGTGRDNVDA |
| | DKVMITNEEEIKTTNPVATESYGQVATNHQSAQAQAQTGWVQ |
| | NQGILPGMVWQDRDVYLQGPIWAKIPHTDGNFHPSPLMGGFG |
| | MKHPPPQILIKNTPVPADPPTAFNKDKLNSFITQYSTGQVSVEIE |
| | WELQKENSKRWNPEIQYTSNYYKSNNVEFAVNTEGVYSEPRPI |
| | GTRYLTRNL* (SEQ ID NO: 20506) |
| >AAV9 K449R | MAADGYLPDWLEDNLSEGIREWWALKPGAPQPKANQQHQDN |
| | ARGLVLPGYKYLGPGNGLDKGEPVNAADAAALEHDKAYDQQ |
| | LKAGDNPYLKYNHADAEFQERLKEDTSFGGNLGRAVFQAKKR |
| | LLEPLGLVEEAAKTAPGKKRPVEQSPQEPDSSAGIGKSGAQPAK |
| | KRLNFGQTGDTESVPDPQPIGEPPAAPSGVGSLTMASGGGAPV |
| | ADNNEGADGVGSSSGNWHCDSQWLGDRVITTSTRTWALPTYN |
| | NHLYKQISNSTSGGSSNDNAYFGYSTPWGYFDFNRFHCHFSPR |
| | DWQRLINNNWGFRPKRLNFKLFNIQVKEVTDNNGVKTIANNLT |
| | STVQVFTDSDYQLPYVLGSAHEGCLPPFPADVFMIPQYGYLTLN |
| | DGSQAVGRSSFYCLEYFPSQMLRTGNNFQFSYEFENVPFHSSYA |
| | HSQSLDRLMNPLIDQYLYYLSRTINGSGQNQQTLKFSVAGPSN |
| | MAVQGRNYIPGPSYRQQRVSTTVTQNNNSEFAWPGASSWALN |
| | GRNSLMNPGPAMASHKEGEDRFFPLSGSLIFGKQGTGRDNVDA |
| | DKVMITNEEEIKTTNPVATESYGQVATNHQSAQAQAQTGWVQ |
| | NQGILPGMVWQDRDVYLQGPIWAKIPHTDGNFHPSPLMGGFG |
| | MKHPPPQILIKNTPVPADPPTAFNKDKLNSFITQYSTGQVSVEIE |
| | WELQKENSKRWNPEIQYTSNYYKSNNVEFAVNTEGVYSEPRPI |
| | GTRYLTRNL* (SEQ ID NO: 20507) |
| >AAV-BI19 | MAADGYLPDWLEDNLSEGIREWWALKPGAPQPKANQQHQDN |
| | ARGLVLPGYKYLGPGNGLDKGEPVNAADAAALEHDKAYDQQ |
| | LKAGDNPYLKYNHADAEFQERLKEDTSFGGNLGRAVFQAKKR |
| | LLEPLGLVEEAAKTAPGKKRPVEQSPQEPDSSAGIGKSGAQPAK |
| | KRLNFGQTGDTESVPDPQPIGEPPAAPSGVGSLTMASGGGAPV |
| | ADNNEGADGVGSSSGNWHCDSQWLGDRVITTSTRTWALPTYN |
| | NHLYKQISNSTSGGSSNDNAYFGYSTPWGYFDFNRFHCHFSPR |
| | DWQRLINNNWGFRPKRLNFKLFNIQVKEVTDNNGVKTIANNLT |
| | STVQVFTDSDYQLPYVLGSAHEGCLPPFPADVFMIPQYGYLTLN |
| | DGSQAVGRSSFYCLEYFPSQMLRTGNNFQFSYEFENVPFHSSYA |
| | HSQSLDRLMNPLIDQYLYYLSRTINGSGQNQQTLKFSVAGPSN |
| | MAVQGRNYIPGPSYRQQRVSTTVTQNNNSEFAWPGASSWALN |
| | GRNSLMNPGPAMASHKEGEDRFFPLSGSLIFGKQGTGRDNVDA |
| | DKVMITNEEEIKTTNPVATESYGQVATNHQSAQYSRIGPNAQA |
| | QTGWVQNQGILPGMVWQDRDVYLQGPIWAKIPHTDGNFHPSP |
| | LMGGFGMKHPPPQILIKNTPVPADPPTAFNKDKLNSFITQYSTG |
| | QVSVEIEWELQKENSKRWNPEIQYTSNYYKSNNVEFAVNTEGV |
| | YSEPRPIGTRYLTRNL* (SEQ ID NO: 20508) |
| >AAV-BI98 | MAADGYLPDWLEDNLSEGIREWWALKPGAPQPKANQQHQDN |
| | ARGLVLPGYKYLGPGNGLDKGEPVNAADAAALEHDKAYDQQ |
| | LKAGDNPYLKYNHADAEFQERLKEDTSFGGNLGRAVFQAKKR |
| | LLEPLGLVEEAAKTAPGKKRPVEQSPQEPDSSAGIGKSGAQPAK |
| | KRLNFGQTGDTESVPDPQPIGEPPAAPSGVGSLTMASGGGAPV |
| | ADNNEGADGVGSSSGNWHCDSQWLGDRVITTSTRTWALPTYN |
| | NHLYKQISNSTSGGSSNDNAYFGYSTPWGYFDFNRFHCHFSPR |
| | DWQRLINNNWGFRPKRLNFKLFNIQVKEVTDNNGVKTIANNLT |
| | STVQVFTDSDYQLPYVLGSAHEGCLPPFPADVFMIPQYGYLTLN |
| | DGSQAVGRSSFYCLEYFPSQMLRTGNNFQFSYEFENVPFHSSYA |
| | HSQSLDRLMNPLIDQYLYYLSRTINGSGQNQQTLKFSVAGPSN |
| | MAVQGRNYIPGPSYRQQRVSTTVTQNNNSEFAWPGASSWALN |
| | GRNSLMNPGPAMASHKEGEDRFFPLSGSLIFGKQGTGRDNVDA |
| | DKVMITNEEEIKTTNPVATESYGQVATNHQSAQYSRLNMNAQ |
| | AQTGWVQNQGILPGMVWQDRDVYLQGPIWAKIPHTDGNFHPS |
| | PLMGGFGMKHPPPQILIKNTPVPADPPTAFNKDKLNSFITQYST |
| | GQVSVEIEWELQKENSKRWNPEIQYTSNYYKSNNVEFAVNTEG |
| | VYSEPRPIGTRYLTRNL* (SEQ ID NO: 20509) |
| >AAV-BI99 | MAADGYLPDWLEDNLSEGIREWWALKPGAPQPKANQQHQDN |
| | ARGLVLPGYKYLGPGNGLDKGEPVNAADAAALEHDKAYDQQ |
| | LKAGDNPYLKYNHADAEFQERLKEDTSFGGNLGRAVFQAKKR |
| | LLEPLGLVEEAAKTAPGKKRPVEQSPQEPDSSAGIGKSGAQPAK |
| | KRLNFGQTGDTESVPDPQPIGEPPAAPSGVGSLTMASGGGAPV |
| | ADNNEGADGVGSSSGNWHCDSQWLGDRVITTSTRTWALPTYN |
| | NHLYKQISNSTSGGSSNDNAYFGYSTPWGYFDFNRFHCHFSPR |
| | DWQRLINNNWGFRPKRLNFKLFNIQVKEVTDNNGVKTIANNLT |
| | STVQVFTDSDYQLPYVLGSAHEGCLPPFPADVFMIPQYGYLTLN |
| | DGSQAVGRSSFYCLEYFPSQMLRTGNNFQFSYEFENVPFHSSYA |
| | HSQSLDRLMNPLIDQYLYYLSRTINGSGQNQQTLKFSVAGPSN |
| | MAVQGRNYIPGPSYRQQRVSTTVTQNNNSEFAWPGASSWALN |
| | GRNSLMNPGPAMASHKEGEDRFFPLSGSLIFGKQGTGRDNVDA |
| | DKVMITNEEEIKTTNPVATESYGQVATNHQSAQYSRLNKDAQ |
| | AQTGWVQNQGILPGMVWQDRDVYLQGPIWAKIPHTDGNFHPS |
| | PLMGGFGMKHPPPQILIKNTPVPADPPTAFNKDKLNSFITQYST |
| | GQVSVEIEWELQKENSKRWNPEIQYTSNYYKSNNVEFAVNTEG |
| | VYSEPRPIGTRYLTRNL* (SEQ ID NO: 20510) |
| >AAV-BI100 | MAADGYLPDWLEDNLSEGIREWWALKPGAPQPKANQQHQDN |
| | ARGLVLPGYKYLGPGNGLDKGEPVNAADAAALEHDKAYDQQ |
| | LKAGDNPYLKYNHADAEFQERLKEDTSFGGNLGRAVFQAKKR |
| | LLEPLGLVEEAAKTAPGKKRPVEQSPQEPDSSAGIGKSGAQPAK |
| | KRLNFGQTGDTESVPDPQPIGEPPAAPSGVGSLTMASGGGAPV |
| | ADNNEGADGVGSSSGNWHCDSQWLGDRVITTSTRTWALPTYN |
| | NHLYKQISNSTSGGSSNDNAYFGYSTPWGYFDFNRFHCHFSPR |
| | DWQRLINNNWGFRPKRLNFKLFNIQVKEVTDNNGVKTIANNLT |
| | STVQVFTDSDYQLPYVLGSAHEGCLPPFPADVFMIPQYGYLTLN |
| | DGSQAVGRSSFYCLEYFPSQMLRTGNNFQFSYEFENVPFHSSYA |
| | HSQSLDRLMNPLIDQYLYYLSRTINGSGQNQQTLKFSVAGPSN |
| | MAVQGRNYIPGPSYRQQRVSTTVTQNNNSEFAWPGASSWALN |
| | GRNSLMNPGPAMASHKEGEDRFFPLSGSLIFGKQGTGRDNVDA |
| | DKVMITNEEEIKTTNPVATESYGQVATNHQSAQVHRLODKAQ |
| | AQTGWVQNQGILPGMVWQDRDVYLQGPIWAKIPHTDGNFHPS |
| | PLMGGFGMKHPPPQILIKNTPVPADPPTAFNKDKLNSFITQYST |
| | GQVSVEIEWELQKENSKRWNPEIQYTSNYYKSNNVEFAVNTEG |
| | VYSEPRPIGTRYLTRNL* (SEQ ID NO: 20511) |
| >AAV-BI101 | MAADGYLPDWLEDNLSEGIREWWALKPGAPQPKANQQHQDN |
| | ARGLVLPGYKYLGPGNGLDKGEPVNAADAAALEHDKAYDQQ |
| | LKAGDNPYLKYNHADAEFQERLKEDTSFGGNLGRAVFQAKKR |
| | LLEPLGLVEEAAKTAPGKKRPVEQSPQEPDSSAGIGKSGAQPAK |
| | KRLNFGQTGDTESVPDPQPIGEPPAAPSGVGSLTMASGGGAPV |
| | ADNNEGADGVGSSSGNWHCDSQWLGDRVITTSTRTWALPTYN |
| | NHLYKQISNSTSGGSSNDNAYFGYSTPWGYFDFNRFHCHFSPR |
| | DWQRLINNNWGFRPKRLNFKLFNIQVKEVTDNNGVKTIANNLT |
| | STVQVFTDSDYQLPYVLGSAHEGCLPPFPADVFMIPQYGYLTLN |
| | DGSQAVGRSSFYCLEYFPSQMLRTGNNFQFSYEFENVPFHSSYA |
| | HSQSLDRLMNPLIDQYLYYLSRTINGSGQNQQTLKFSVAGPSN |
| | MAVQGRNYIPGPSYRQQRVSTTVTQNNNSEFAWPGASSWALN |
| | GRNSLMNPGPAMASHKEGEDRFFPLSGSLIFGKQGTGRDNVDA |
| | DKVMITNEEEIKTTNPVATESYGQVATNHQSAQYHRLSNNAQ |
| | AQTGWVQNQGILPGMVWQDRDVYLQGPIWAKIPHTDGNFHPS |
| | PLMGGFGMKHPPPQILIKNTPVPADPPTAFNKDKLNSFITQYST |
| | GQVSVEIEWELQKENSKRWNPEIQYTSNYYKSNNVEFAVNTEG |
| | VYSEPRPIGTRYLTRNL* (SEQ ID NO: 20512) |
| >AAV-BI102 | MAADGYLPDWLEDNLSEGIREWWALKPGAPQPKANQQHQDN |
| | ARGLVLPGYKYLGPGNGLDKGEPVNAADAAALEHDKAYDQQ |
| | LKAGDNPYLKYNHADAEFQERLKEDTSFGGNLGRAVFQAKKR |
| | LLEPLGLVEEAAKTAPGKKRPVEQSPQEPDSSAGIGKSGAQPAK |
| | KRLNFGQTGDTESVPDPQPIGEPPAAPSGVGSLTMASGGGAPV |
| | ADNNEGADGVGSSSGNWHCDSQWLGDRVITTSTRTWALPTYN |
| | NHLYKQISNSTSGGSSNDNAYFGYSTPWGYFDFNRFHCHFSPR |
| | DWQRLINNNWGFRPKRLNFKLFNIQVKEVTDNNGVKTIANNLT |
| | STVQVFTDSDYQLPYVLGSAHEGCLPPFPADVFMIPQYGYLTLN |
| | DGSQAVGRSSFYCLEYFPSQMLRTGNNFQFSYEFENVPFHSSYA |
| | HSQSLDRLMNPLIDQYLYYLSRTINGSGQNQQTLKFSVAGPSN |
| | MAVQGRNYIPGPSYRQQRVSTTVTQNNNSEFAWPGASSWALN |
| | GRNSLMNPGPAMASHKEGEDRFFPLSGSLIFGKQGTGRDNVDA |
| | DKVMITNEEEIKTTNPVATESYGQVATNHQSAQLHALSHNAQ |
| | AQTGWVQNQGILPGMVWQDRDVYLQGPIWAKIPHTDGNFHPS |
| | PLMGGFGMKHPPPQILIKNTPVPADPPTAFNKDKLNSFITQYST |
| | GQVSVEIEWELQKENSKRWNPEIQYTSNYYKSNNVEFAVNTEG |
| | VYSEPRPIGTRYLTRNL* (SEQ ID NO: 20513) |

### Methods for Examples 1-4

### Plasmids

[0361] The AAV9, AAV-BI18, BI19, BI98-BI102 and AAV-BI159-165 Rep-Cap plasmids were generated by gene synthesis (GenScript). The CAG-WPRE-hGH pA backbone was obtained from Viviana Gradinaru through Addgene (#99122). GFP, GFP-2A-luciferase, and mScarlet cDNAs were synthesized as gBlocks (IDT) or synthesized and cloned (GenScript).

[0362] Full length TFRC cDNA expression and lentiviral plasmids were cloned by inserting the open reading frames of TFRC (human: NM_003234.4; mouse TFRC: NM_011638.4; marmoset TFRC: NM_001301847.1) into the lentiviral backbone pLenti-EF-FH-TAZ-ires-blast (Addgene #52083) with EcoRI/SalI sites.

[0363] For Fc fusion proteins, the coding sequence of the extracellular regions of TFRC (human: 89-760aa; mouse: 89-763aa; marmoset: 89-760aa) were amplified by PCR and inserted into pCMV6-XL4 FLAG-NGRN-Fc (Addgene #115773) with EcoRV and Xbal sites. Signal peptide H7 (ATGGAGTTTGGGCTGAGCTGGGTTTTCCTCGTTGCTCTTTTTAGAGGTGTCCAGTGT (SEQ ID NO: 20493)) was introduced to N terminal of TFRC sequences to direct protein secretion. hTFRC-mApical construct was made by replacing the human TFRC apical domain (AA188-384) by mouse TFRC apical domain (AA 190-386).

### Cell Lines and Primary Cultures

[0364] HEK293T/17 (CRL-11268), Pro5 (CRL-1781) and CHO-K1 (CCL-61) were obtained from ATCC. mBMVEC cells (C57-6023) and hBMVECs cells (H-6023) were obtained from Cell Biologics and cultured as directed by the manufacturer. hCMEC/D3 cells were from Millipore-Sigma (SCC066).

### Expression and Purification of Fc-Tagged Protein in HEK293-FT Cells

[0365] 26 million HEK293-FT cells were seated per 150 mm plate the day before transfection. The next day, complete media was changed to Pro293TMa-CDMTM media with two brief rinses with Pro293TMa-CDMTM media to remove serum. Cells were transduced with PEI and 40 ug DNA per plate a few hours after media change. The media was replaced 18 hours after transfection. At the second day post-transfection, cell supernatants containing secreted recombinant protein were passed through a 0.45-mm pore size filter and purified on Protein A-Sepharose. 200 ul Protein A-Sepharose were incubated with 100 ml cell culture supernatant overnight at 4C with shaking. The next day, the beads were collected and washed 3 times with 10 ml of PBS, and the proteins were eluted in 200 ul of 100 mM glycine (pH2.7). Then 1/10 volume of 1M Tris (pH8.8) was added to the eluted protein fractions to neutralize the pH.

### Lentivirus Production

[0366] Lentivirus was produced with a third-generation lentivirus system by cotransfection of three packaging plasmids (pMDLg-RRE, pRSV-Rev and pVSV-G) and vector plasmid encoding hTFRC at a ratio of 4:1:1:6 in HEK cells. Lentivirus was harvested 3 days after transfection, filtered with 0.45 um PES to remove the cell debris.

HEK293 and CHO stable cell line generation

[0367] CHO cells were seeded 150,000/well in 12 well plates and transduced with lentivirus containing media for 48 hrs, then transferred to 10 cm dishes for selection with 10 ug/mL blasticidin for about a week. Once all cells had died in the control plate, the selected CHO cells were maintained in media with 1 ug/mL blasticidin. The expression of hTFRC was validated with immunostaining with OKT9 antibody from ThermoFisher (Catalog #14-0719-82).

### Library Cloning

[0368] The oligo pool or NNK PCR products were assembled into the RNA expression plasmid with previously described methods in Deverman et al. Nature Biotechnology 2016. For generating the 7-mer 588 site insertion capsid libraries, the hand-mixed (IDT) primer 5′-GTATTCCTTGGTTTTGAACCCAACCGGTCTGCGCCTGTGCMNNMNNMNNMNNMNN MNNMNNTTGGGCACTCTGGTGGTTTGTG-3′ (SEQ ID NO: 20494) primer was used with forward primer 5′-CACTCATCGACCAATACTTGTACTATCTCT (SEQ ID NO: 20495) to PCR amplify a modified AAV9 template (K449R) 10 ng pUC57-wtAAV9-X/A plasmid (as in Deverman et al Nature Biotechnology 2016) using Q5 Hot Start High-Fidelity 2× Master Mix (NEB, M0494S) following the manufacturer's protocol.

[0369] To generate the loop IV libraries the forward primers (10merNNK) 5′-ATCGACCAATACTTGTACTATCTCTCTAGAACTNNKNNKNNKNNKNNKNNKNNKNN KNNKNNKCTAAAATTCAGTGTGGCCGGACC (SEQ ID NO: 20496) or (7merNNK) 5′-ATCGACCAATACTTGTACTATCTCTCTAGAACTNNKNNKNNKNNKNNKNNKNNKCT AAAATTCAGTGTGGCCGGACC (SEQ ID NO: 20497) were used with the reverse primer 5-TTGTCCTTGTTGAAGGCCGTTGGAG (SEQ ID NO: 20498) to amplify the same modified AAV9 template (K449) as described above.

[0370] To assemble an oligonucleotide Library Synthesis (OLS) Pool (Agilent) into an AAV genome, 5 pM of the OLS pool was used as an initial reverse primer along with 0.5 μM of the forward primer to amplified and extended 10 ng of DNA plasmid containing a fragment of AAV9 (pUC57-wtAAV9-X/A) for 5 cycles using Q5® High-Fidelity 2× Master Mix (NEB #M0492S) following the manufacturer's protocol. After the 5-cycle amplification and extension of the oligo pool, the reactions were spiked with 0.5 μM of primer 5′-GTATTCCTTGGTTTTGAACCCAACCG (SEQ ID NO: 20499) (588 site insertion libraries) or 5′-CACTCATCGACCAATACTTGTACTATCTCT (SEQ ID NO: 20495) (loop IV libraries) and amplified for an additional 25 cycles. The PCR product was then purified using Agencourt AMPure XP SPRI paramagnetic beads (Beckman Coulter #A63880) or column purified using a Zymo Research DNA Clean & Concentrator-5 kit (Zymo Research #D4013) following the manufacturer's protocol.

[0371] All library PCR products were cleaned up using AMPure XP beads (Beckman, A63881) following the manufacturer's protocol. The NNK PCR insert was assembled into a linearized mRNA selection vector (AAV9-CMV-Express, described below) with NEBuilder HiFi DNA Assembly Master Mix (NEB, E2621L). Afterwards, Quick CIP (NEB, M0508S) was spiked into the reaction and incubated at 37° C. for 30 min to dephosphorylate unincorporated dNTPs. Finally, T5 Exonuclease (NEB M0663S) was added to the reaction mixture and incubated at 37° C. for 30 min to remove unassembled products. The final assembled product was cleaned up using AMPure XP beads (Beckman, A63881) following the manufacturer's protocol quantified using the Qubit dsDNA HS Assay Kit (Thermo Fisher Scientific, Q32851).

### Synthetic Round 2 Library Design

[0372] The library oligo pool consisted of 7-mer insertion sequences recovered from the Round 1 binding assays. In addition, the Experiment 1, round 2 library contained all possible sequences conforming to the following 7-mer motifs [FLY][AS][KR]X[GN]XN (SEQ ID NO: 20500) and XXS[ST]NG[VIR] (SEQ ID NO: 20505), where X is any residue. In experiment 2, the round 2 library comprised only those sequences recovered through binding to Fc-target proteins including TFRC, control sequences including those containing stop codons (to aid in the assessment of cross packaging), and WT and other reference sequences. All sequences were encoded by two distinct nucleotide sequences designed to serve as biological replicates. In Experiment 4, the F4F “Hammerhead” library was generated as described in Published Patent Application US20210403946 A1.

### RNA Selection Plasmids

[0373] The mRNA selection vector (AAV9-CMV-Express) was designed to enrich for functional AAV capsid sequences by recovering capsid mRNA from transduced cells. AAV9-CMV-Express uses a ubiquitous CMV enhancer and AAV5 p41 gene regulatory elements to drive AAV9 Cap expression. The AAV9-CMV-Express plasmid was constructed by cloning the following elements into an AAV genome plasmid in the listed order: a cytomegalovirus (CMV) enhancer-promoter, a synthetic intron and the AAV5 P41 promoter along with 3′ end of the AAV2 Rep gene, which includes the splice donor sequences for the capsid RNA. The capsid gene splice donor sequence in AAV2 Rep was modified from CAGGTACCA to a consensus donor sequence CAGGTAAGT. The AAV9 capsid gene sequence was synthesized with nucleotide changes at 1,344, 1,346 and 1,347 (which introduces a K449R mutation) and at 1,782 (which is a silent mutation) to introduce restriction enzyme recognition sites for NNK library PCR insert fragment cloning. The AAV2 polyadenylation sequence was replaced with a simian virus 40 (SV40) late polyadenylation signal. A previously described cap-deficient Rep-AAP AAV helper plasmid1 was supplied in trans to generate virus with the AAV9-CMV-Express vector.

### Virus Production and Purification

[0374] Recombinant AAVs were generated following a previously published protocol (Challis et al 2019) with minor modifications as described below. HEK293T/17 cells (ATCC, CRL-11268) were seeded at 22 million cells per 15-cm plate the day before transfection and grown in DMEM with GlutaMAX (Gibco, 10569010) supplemented with 5% FBS and 1× non-essential amino acid solution (NEAA) (Gibco, 11140050). The next day, the cells were triple transfected with 39.93 ug of total plasmid DNA encoding rep-cap, pHelper and an ITR-flanked transgene at a plasmid ratio of 4:2:1, respectively, using polyethylenimine (PEI) MAX (Polyscience, 24765-1) at a DNA: PEI ratio of 1:3.5. Twenty hours after transfection, the medium was changed to fresh DMEM with GlutaMAX supplemented with 5% FBS and 1× NEAA. Seventy-two hours after transfection, cells were scraped and pelleted at 2,000 RCF for 10 min. The pellets were resuspended in 7 ml of Salt Active Nuclease (SAN) digestion buffer (500 mM NaCl, 40 mM Tris-base, 10 mM MgCl2, SAN enzyme (ArcticZymes, 70920-202) at 100 U/ml) for every ten plates and incubated at 37° C. for 1.5 h. Afterwards, the lysate was clarified at 2,000 RCF for 10 min and loaded onto a density step gradient containing OptiPrep (Cosmo Bio, AXS-1114542) at 60%, 40%, 25% and 15% at a volume of 5, 5, 6, and 6 ml, respectively in OptiSeal tubes (Beckman, 361625). The step gradients were spun in a Beckman Type 70ti rotor (Beckman, 337922) in a Sorvall WX+ ultracentrifuge (Thermo Fisher Scientific, 75000090) at 69,000 r.p.m. for 1 h at 18° C. Afterwards, 4-4.5 ml of the 40-60% interface was extracted using a 16-gauge needle, filtered through a 0.22-μm PES filter and then buffer exchanged with 100 K MWCO protein concentrators (Thermo Fisher Scientific, 88532) into PBS containing 0.001% Pluronic F-68 and concentrated down to a volume of 500 ul. The concentrated virus was then filtered through a 0.22-μm PES filter and stored at 4° C. or −80° C.

[0375] The AAV capsid library was produced similarly as above with following exceptions: each plate was triple transfected with 39.93 ug of total plasmid DNA encoding pHelper, RepStop encoding the AAV2 Rep genes, pUC19 at a ratio of 2:1:1, respectively, and with 10 ng of assembled library DNA; the media and cell lysates were harvested 60 hours post transfection and purified following the published protocol (Deverman et al. Nature Biotechnology 2016).

ddPCR Titering

[0376] Vector aliquots were treated with Turbonuclease (Cat #) at 37 C for 1 hour and then deactivated by adding 5 uL EDTA and heated at 70C for 10 minutes. Afterwards, the samples were treated with proteinase K for 2 hours and heated inactivated diluted to within the dynamic range of the ddPCR assay (1 to 104 vector genomes) per reaction.

### SDS Page

[0377] Briefly, proteins in HEK293 cell media pre-or post-pull down with ProA magnetic beads were separated on Bolt 4-12% Bis-Tris Plus gels and stained with SYPRO Ruby (Thermofisher).

### Animals

[0378] All procedures were performed as approved by the Broad Institute IACUC. BALB/cJ (000651), C57B1/6J (000664), and NSG (00557) were obtained from The Jackson Laboratory (JAX). Recombinant AAV vectors were administered intravenously via the retro-orbital sinus in young adult male or female mice. Mice were randomly assigned to groups based on predetermined sample sizes.

### Tissue Processing, Immunohistochemistry and Imaging

[0379] Mice were anesthetized with Euthasol and transcardially perfused with phosphate buffered saline (PBS) at room temperature followed by 4% paraformaldehyde (PFA) in ice cold PBS. Tissues were post-fixed overnight in 4% PFA in PBS and sectioned by vibratome. IHC was performed on floating sections with antibodies diluted in PBS containing 10% donkey serum, 0.1% Triton X-100, and 0.05% sodium azide. Primary antibodies were incubated at room temperature overnight. The sections were then washed and stained with secondary (Alexa-conjugated antibodies, 1:1000) for 4 hours or overnight.

### In Vivo Vector and Capsid Biodistribution

[0380] 5- to 6-week-old C57B1/6J mice or BALB/cJ mice were injected intravenously with 10e11 vg of AAV vector packaged into the indicated capsid. One or two hours after injection, the mice were perfused with PBS and tissues were collected and frozen at −80° C. Samples were processed for AAV genome biodistribution analysis and normalized to the number of copies of mouse genomes using qPCR for the GFP element and mouse glucagon by qPCR as previously described (2). NSG mice were used for experiments involving sequential injection of AAV-BI30 carrying human TFRC or Ly6a (1e11 vg/mouse) followed by AAV-BI19: CAG-mScarlet or AAV-PHP.eB: CAG-mScarlet (3e11 vg/mouse) 1 week after the initial injection.

### Luciferase Transduction Assay

[0381] Human, mouse, or marmoset TFRC (0.1 ug/well) was transfected into the indicated cells (HEK293/17: 4×105/well; CHO: 2.5×104/well, BMVECs: 5×103/well) in 96-well plates (PerkinElmer, 6005680) in triplicate. 48 hours later, cells were transduced with AAV-CAG-GFP-2A-Luciferase-WPRE packaged into AAV9 or the indicated AAV-BI #capsid. Luciferase assays were performed with Britelite plus Reporter Gene Assay System (PerkinElmer, 6066766). Luciferase activity was reported as relative light units (RLU) as raw data or normalized to non-transfected control wells transduced with AAV9.

### Cell Binding Assays

[0382] TFRC family members or GFP control (0.5 ug/well) were transfected into HEK293T cells (3e5/well) using PEI or into CHO cells (1.5e5/well) with lipofectamine 3000 reagent (ThermoFisher, L3000001) in 24-well plates. 48 hours later, the cells were chilled to 4° C. and the media was exchanged with fresh cold media containing the indicated recombinant AAV (1e5 copies per cell). One hour later, cells were washed with cold PBS for 3 times, then fixed with 4% PFA for IHC or lysed for genomic DNA extraction and qPCR analyses or NGS sequencing. For mouse and human BMVECs, 2e4 cells/well were seeded in 12 well plates the day before exposure to the AAVs. The assay was performed as above except AAV vectors were added at 106 copies/cell. HEK293T/17 cells were seeded at 2E7 per T75 flask 12-24 hours prior to being transfected with 20 μg of cDNA encoding eGFP, human TFRC, mouse TFRC or marmoset TFRC. At 24-48 hours post transfection, the cells were incubated with an AAV9 K449R library (7-mer insertion between amino acids 588 and 589) at 1e11 vg/T75 at 4° C. for 2 hours. Afterwards, the media was exchanged with PBS for 3 times in order to wash away unbound viruses. The AAVs that remained bound to the cells were extracted with TRIzol (Invitrogen) or with whole genomic DNA isolation reagents (DNeasy, Qiagen) to isolate their viral genomes. The viral genomes were then prepared for NGS to quantify the enrichment of peptides that conferred increased capsid ability to bind cells expressing the target protein.

### Transduction Screening In Vitro

[0383] For in vitro screening on cells in 2D culture, 1e11 vg of the AAV capsid library was added to HEK293, CHO, or confluent BMVECs or hCMEC/D3 cells and cellular mRNA was collected 60 hours after administration. BBB spheroids were obtained by co-culture of hCMEC/D3, primary human astrocytes and human pericytes as described (Bergmann et al. Nature Protocols 2018). For in vitro screening on spheroids, 1e4 vg/cell was used for binding and 2e5 vg/cell was used for transduction in human serum free media.

[0384] mRNA from in vitro assays were recovered using TRIzol (Invitrogen, 15596026) followed by RNA cleanup with RNeasy Mini kit (QIAGEN, 74104). The recovered mRNA was next converted to complementary DNA using an oligonucleotide dT primer using Maxima H Minus Reverse Transcriptase (Thermo Fisher, EP0751).

### Fc-Protein Fusion Cloning and Protein Purification

[0385] The extracellular portion together with signal peptide of protein targets are cloned into Fc-tag backbone (Addgene plasmid #115773) using Xbal/EcoRV. To generate Fc-fusion proteins the N terminal cytoplasmic and transmembrane domains were replaced with an H7 signal peptide (Haryadi et al 2015, PLOS One. 2015; 10(2): e0116878; MEFGLSWVFLVALFRGVQC (SEQ ID NO: 42463). The C terminal stop codon was replaced with the Fc tag coding sequence containing intron sequences. Also, there is a HRV 3C site and a linker sequence between TFRC and Fc. The Fc-receptor plasmid was transfected into HEK293 cells (40 ug per 150 mm dish with PEI) in complete DMEM media with 5% FBS. 12-16 hours after transfection, the transfected plate was rinsed with PBS, and 15 ml of serum free media (Lonza, BEBP12-764Q) was added. Media containing the secreted Fc-fusion proteins was collected at 48 and 96 hours, filtered (Millipore SE1M003M00) and stored at 4C until use. 35 ul protein A beads (ThermoFisher, 10001D) and Tween 20 (0.05% final concentration) were added to 30 ml of media and incubated at 4C with end to end rotation. The next day, the beads were washed 3 times with cold PBS containing 0.05% Tween-20. Expression was assessed by running a 5 ul aliquot of protein bound beads on a 4-12% protein gel; the remaining fraction was used for pulldown assay.

[0386] Protein A-conjugated beads were used to pull down the LY6A-Fc, LY6C1-Fc, or Fc-only control, which were then washed and incubated with an AAV capsid library.

### Fc-Fusion Pulldown Assay

[0387] 10 ul Fc-fusion protein bound protein A beads were mixed with 1e10 vg AAV capsid library in PBS with 0.05% Tween-20 and 1% BSA and incubated overnight at 4 C. The next day, beads were washed 3 times with PBS with 0.05% Tween-20 at the indicated pH and then treated with proteinase K to extract the viral genome for NGS preparation after purification with AMPure XP beads following the manufacturer's protocol.

### PCR Recovery of Library Sequences

[0388] The AAV genome samples (binding assays) or cDNA (transduction assays) were prepared for next-generation sequencing (NGS) with two rounds of polymerase chain reaction (PCR). In the first round of PCR (PCR1), a set of forward primers and reverse primers containing gene specific priming regions and an overhang sequence containing a portion of the Illumina Read 1 sequence (forward primers) or Illumina Read 2 sequence (reverse primers) were used to selectively amplify AAV genomes from the cDNA with Q5® High-Fidelity 2× Master Mix (NEB #M0492S), with 0.5 μM of each primer.

[0389] The forward and reverse primers contain zero or up to eight N nucleotides inserted in between the gene specific priming region and the partial Illumina Read 1 (forward primers) or Read 2 (reverse primers) overhang sequence. The forward and reverse primers were paired to produce amplicons of the same size.

[0390] The number of cycles performed in PCR1 using 1 uL of cDNA input was chosen to stop before the exponential amplification phase and was determined with qPCR using FastStart Universal SYBR Green Master (Millipore Sigma #4913850001) or Q5® High-Fidelity 2× Master Mix (NEB #M0492S) with SYBR® Green I nucleic acid stain (VWR #12001-798) diluted from 10,000× to 8× per reaction.

[0391] Following PCR1, the amplified DNA was cleaned up using Agencourt AMPure XP SPRI paramagnetic beads (Beckman Coulter #A63880) or column purified using a Zymo Research DNA Clean & Concentrator-5 kit (Zymo Research #D4013) following the manufacturer's protocol. PCR 1 samples were then barcoded for Illumina NGS with NEBNext Multiplex Oligos for Illumina Dual Index Primers Set 1 and 2 (NEB #E7600S and #E7780S) with 2 μL PCR1 input and amplified for 5 cycles to generate PCR2 products. The PCR2 products were again purified using Agencourt AMPure XP SPRI paramagnetic beads or column purified using a Zymo Research DNA Clean & Concentrator-5 kit (Zymo Research #D4013) following the manufacturer's protocol.

### Preparation of Amplified Sequences for NGS

[0392] The concentrations of purified PCR2 samples were determined using a Qubit™ dsDNA HS Assay Kit (Invitrogen™ #Q32854) then diluted and pooled according to the Illumina Nextseq System Denature and Dilute Libraries Guide or MiSeq System Denature and Dilute Libraries Guide along with 10-15% PhiX Control v3 (Illumina #FC-110-3001) spiked in. The pooled samples were quantified and checked for correct sizes using an Agilent High Sensitivity DNA Kit (Agilent #5067-4626) on an Agilent 2100 Electrophoresis Bioanalyzer.

[0393] Then samples were either sequenced on an Illumina NextSeq or Miseq machine using a NextSeq 500/550 High Output Kit v2.5 (150 Cycles) (Illumina #20024907), NextSeq 500/550 Mid Output Kit v2.5 (150 Cycles) (Illumina #20024904) or MiSeq Reagent Kit v3 (150-cycle) (Illumina #MS-102-3001) with the indexes read from both ends after 150 read cycles.

### NGS Analysis

[0394] Following NGS, sequences were aligned to an AAV9 template with 21 N nucleotides insertion between amino acid 588 and 589 to represent the 7-mer insertion using Bowtie 2. Further post processing was performed using SAMtools, Python 3, NumPy and Pandas. Briefly, the flanking regions up to the 7mer (prefix) and after the 7mer (suffix) region were clipped. The resulting sequence was checked to be 21 bp in length. The nucleotide sequences were converted to amino acid sequences and exported using Pandas. Read counts associated with each nucleotide sequence were converted to normalized read counts (reads per million) to adjust for sequencing depth differences between samples. Enrichment scores for each sequence are calculated by log 2 (normalized read count post screening/normalized read count in the initial virus library).

### Clustering Analysis

[0395] Capsid sequences were one-hot encoded into vectors of length 20×7=140, and projected with UMAP with the following parameters: n_neighbors=8, min_dist=0.01, metric=Euclidean. Capsid sequences were then clustered using their UMAP projection values (Xx1, Xx2) with the GaussianMixture model from scikit-learn with parameters n_components=30, random_state=1, n_init=10, max_iter=1000.

### References for Examples 1˜4 & Methods

[0396] Brown, T. D., Nowak, M., Bayles, A. V., Prabhakarpandian, B., Karande, P., Lahann, J., Helgeson, M. E., and Mitragotri, S. (2019). A microfluidic model of human brain (uHuB) for assessment of blood brain barrier. Bioeng Transl Med 4, e10126.
[0397] Bergmann, S. et al. Blood-brain-barrier organoids for investigating the permeability of CNS therapeutics. Nat Protoc 13, 2827-2843 (2018).
[0398] Challis, R. C. et al. Systemic AAV vectors for widespread and targeted gene delivery in rodents. Nat Protoc 14, 379-414 (2019).
[0399] Chan, K. Y., Jang, M. J., Yoo, B. B., Greenbaum, A., Ravi, N., Wu, W.-L., Sánchez-Guardado, L., Lois, C., Mazmanian, S. K., Deverman, B. E., et al. (2017). Engineered AAVs for efficient noninvasive gene delivery to the central and peripheral nervous systems. Nat. Neurosci. 20, 1172-1179.
[0400] Cho, C.-F., Wolfe, J. M., Fadzen, C. M., Calligaris, D., Hornburg, K., Chiocca, E. A., Agar, N. Y. R., Pentelute, B. L., and Lawler, S. E. (2017). Blood-brain-barrier spheroids as an in vitro screening platform for brain-penetrating agents. Nat. Commun. 8, 15623.
[0401] Dalkara, D., Byrne, L. C., Klimczak, R. R., Visel, M., Yin, L., Merigan, W. H., Flannery, J. G., and Schaffer, D. V. (2013). In vivo-directed evolution of a new adeno-associated virus for therapeutic outer retinal gene delivery from the vitreous. Sci. Transl. Med. 5, 189ra76.
[0402] Depla, J. A., Sogorb-Gonzalez, M., Mulder, L. A., Heine, V. M., Konstantinova, P., van Deventer, S., Wolthers, K. C., Pajkrt, D., Sridhar, A., and Evers, M. M. (2020). Cerebral Organoids: A Human Model for AAV Capsid Selection and Therapeutic Transgene Efficacy in the Brain. Mol Ther Methods Clin Dev 18, 167-175.
[0403] Deverman, B. E., Pravdo, P. L., Simpson, B. P., Kumar, S. R., Chan, K. Y., Banerjee, A., Wu, W.-L., Yang, B., Huber, N., Pasca, S. P., et al. (2016). Cre-dependent selection yields AAV variants for widespread gene transfer to the adult brain. Nat. Biotechnol. 34, 204-209.
[0404] Ferrero, S. et al. Antibody-Based Inhibition of Pathogenic New World Hemorrhagic Fever Mammarenaviruses by Steric Occlusion of the Human Transferrin Receptor 1 Apical Domain. J Virol 95, e01868-20 (2021).
[0405] Garita-Hernandez, M., Routet, F., Guibbal, L., Khabou, H., Toualbi, L., Riancho, L., Reichman, S., Duebel, J., Sahel, J.-A., Goureau, O., et al. (2020). AAV-Mediated Gene Delivery to 3D Retinal Organoids Derived from Human Induced Pluripotent Stem Cells. Int. J. Mol. Sci. 21.
[0406] Hordeaux, J., Wang, Q., Katz, N., Buza, E. L., Bell, P., and Wilson, J. M. (2018). The Neurotropic Properties of AAV-PHP.B Are Limited to C57BL/6J Mice. Mol. Ther. 26, 664-668.
[0407] Huang, Q., Chan, K. Y., Tobey, I. G., Chan, Y. A., Poterba, T., Boutros, C. L., Balazs, A. B., Daneman, R., Bloom, J. M., Seed, C., et al. (2019). Delivering genes across the blood-brain barrier: LY6A, a novel cellular receptor for AAV-PHP.B capsids. PLOS One 14, e0225206.
[0408] Körbelin, J., Dogbevia, G., Michelfelder, S., Ridder, D. A., Hunger, A., Wenzel, J., Seismann, H., Lampe, M., Bannach, J., Pasparakis, M., et al. (2016). A brain microvasculature endothelial cell-specific viral vector with the potential to treat neurovascular and neurological diseases. EMBO Mol. Med. 8, 609-625.
[0409] Krolak, T., Chan, K. Y., Kaplan, L., Huang, Q., Wu, J., Zheng, Q., Kozareva, V., Beddow, T., Tobey, I. G., Pacouret, S., et al. (2022). A high-efficiency AAV for endothelial cell transduction throughout the central nervous system. Nature Cardiovascular Research 1, 389-400.
[0410] Langmead, B., and Salzberg, S. L. (2012). Fast gapped-read alignment with Bowtie 2. Nat. Methods 9, 357-359.
[0411] Li, H., Handsaker, B., Wysoker, A., Fennell, T., Ruan, J., Homer, N., Marth, G., Abecasis, G., Durbin, R., and 1000 Genome Project Data Processing Subgroup (2009). The Sequence Alignment/Map format and SAMtools. Bioinformatics 25, 2078-2079.
[0412] Lisowski, L., Dane, A. P., Chu, K., Zhang, Y., Cunningham, S. C., Wilson, E. M., Nygaard, S., Grompe, M., Alexander, I. E., and Kay, M. A. (2013). Selection and evaluation of clinically relevant AAV variants in a xenograft liver model. Nature 506, 382-386.
[0413] McInnes, L., Healy, J., and Melville, J. (2018). UMAP: Uniform Manifold Approximation and Projection for Dimension Reduction.
[0414] Muik, A., Reul, J., Friedel, T., Muth, A., Hartmann, K. P., Schneider, I. C., Münch, R. C., and Buchholz, C. J. (2017). Covalent coupling of high-affinity ligands to the surface of viral vector particles by protein trans-splicing mediates cell type-specific gene transfer. Biomaterials 144, 84-94.
[0415] Münch, R. C., Janicki, H., Völker, I., Rasbach, A., Hallek, M., Büning, H., and Buchholz, C. J. (2013). Displaying high-affinity ligands on adeno-associated viral vectors enables tumor cell-specific and safe gene transfer. Mol. Ther. 21, 109-118.
[0416] Münch, R. C., Muth, A., Muik, A., Friedel, T., Schmatz, J., Dreier, B., Trkola, A., Plückthun, A., Büning, H., and Buchholz, C. J. (2015). Off-target-free gene delivery by affinity-purified receptor-targeted viral vectors. Nat. Commun. 6, 6246.
[0417] Nonnenmacher, M., Wang, W., Child, M. A., Ren, X.-Q., Huang, C., Ren, A. Z., Tocci, J., Chen, Q., Bittner, K., Tyson, K., et al. (2021). Rapid evolution of blood-brain-barrier-penetrating AAV capsids by RNA-driven biopanning. Mol Ther Methods Clin Dev 20, 366-378.
[0418] Ponnazhagan, S., Mahendra, G., Kumar, S., Thompson, J. A., and Castillas, M., Jr (2002). Conjugate-based targeting of recombinant adeno-associated virus type 2 vectors by using avidin-linked ligands. J. Virol. 76, 12900-12907.
[0419] Ravindra Kumar, S., Miles, T. F., Chen, X., Brown, D., Dobreva, T., Huang, Q., Ding, X., Luo, Y., Einarsson, P. H., Greenbaum, A., et al. (2020). Multiplexed Cre-dependent selection yields systemic AAVs for targeting distinct brain cell types. Nat. Methods 17, 541-550.
[0420] Reul, J., Muik, A., and Buchholz, C. J. (2019). Ligand Coupling to the AAV Capsid for Cell-Specific Gene Transfer. Methods Mol. Biol. 1950, 35-50.
[0421] Sherman, H., and Rossi, A. E. (2019). A Novel Three-Dimensional Glioma Blood-Brain Barrier Model for High-Throughput Testing of Tumoricidal Capability. Front. Oncol. 9, 351.
[0422] Tabebordbar, M., Lagerborg, K. A., Stanton, A., King, E. M., Ye, S., Tellez, L., Krunnfusz, A., Tavakoli, S., Widrick, J. J., Messemer, K. A., et al. (2021). Directed evolution of a family of AAV capsid variants enabling potent muscle-directed gene delivery across species. Cell 184, 4919-4938.e22.
[0423] Tervo, D. G. R., Hwang, B.-Y., Viswanathan, S., Gaj, T., Lavzin, M., Ritola, K. D., Lindo, S., Michael, S., Kuleshova, E., Ojala, D., et al. (2016). A Designer AAV Variant Permits Efficient Retrograde Access to Projection Neurons. Neuron 92, 372-382.
[0424] Zhang, Y., Chen, K., Sloan, S. A., Bennett, M. L., Scholze, A. R., O'Keeffe, S., Phatnani, H. P., Guarnieri, P., Caneda, C., Ruderisch, N., et al. (2014). An RNA-sequencing transcriptome and splicing database of glia, neurons, and vascular cells of the cerebral cortex. J. Neurosci. 34, 11929-11947.
[0425] (2021). In situ sensors for blood-brain barrier (BBB) on a chip. Sensors and Actuators Reports 3, 100031.
[0426] WO2021222636A1.
[0427] US20210403946A1.

### Example 5—Additional Examples

[0428] AAV capsids engineered to bind human TFRC transduce human brain endothelial cells more efficiently than AAV9, an effect that is further enhanced by increasing the surface expression of TFRC. Applicants also showed that transduction of human brain endothelial cells by one of the TFRC binding AAVs, BI-19, is blocked in a dose-dependent manner by an antibody against TFRC. Furthermore, in mice made to express human TFRC on the brain vasculature, Applicants observed increased targeting of BI-19 to the brain, indicating that BI-19 can target human TFRC in vivo and suggesting that the engagement of TFRC can increase both endothelial transduction and crossing of the BBB. Together, the data support further exploration of TFRC targeted AAVs as delivery vehicles for CNS gene therapy.

[0429] TFRC binding capsids and sequence space exploration by mutagenesis identifies capsids for individual evaluation.

| Capsid ID | Nucleic Acid Sequence | Amino Acid Sequence |
|---|---|---|
| BI-19 | TACTCACGCATCGGCCCCAAC | YSRIGPN |
| | (SEQ ID NO: 3681) | (SEQ ID NO: 14632) |

[0430] Individually validated human TFRC binding AAV 588 7-mer sequences identified through binding a Fc-TFRC fusion protein.

| Capsid ID | Nucleic Acid Sequence | Amino Acid Sequence |
|---|---|---|
| BI-98 | TATTCTCGCTTAAACATG | YSRLNMN (SEQ ID NO: |
| | AAT (SEQ ID NO: 5678) | 14301) |
| BI-99 | TACTCACGCCTTAATAA | YSRLNKD (SEQ ID NO: |
| | GGAT (SEQ ID NO: 6495) | 16577) |
| BI-100 | GTACATCGCCTGCAAGA | VHRLQDK (SEQ ID NO: |
| | TAAG (SEQ ID NO: 6626) | 16602) |
| BI-101 | TACCATCGTTTGTCCAAT | YHRLSNN (SEQ ID NO: |
| | AAC (SEQ ID NO: 5787) | 16636) |
| BI-102 | TTACACGCTTTGTCACAC | LHALSHN (SEQ ID NO: |
| | AAT (SEQ ID NO: 6528) | 16608) |

### Example 6—Conclusions

[0431] Antibody blocking experiments (FIG. 10) indicate that the enhanced transduction activity of BI-19 requires TFRC binding. BI-19 appears to bind TFRC through the apical domain, see FIG. 10. TFRC binding contributes minimally to BI-19 hCMEC binding. BI-19 can mediate increased transduction of brain cells following expression of human TFRC on brain vasculature, see FIG. 11.

### Example 7

[0432] Here Applicants present new evidence that AAV-BI19 can efficiently cross a human brain vascular barrier model and the mouse blood brain barrier (BBB) and transduce cells throughout the mouse CNS when the mice are made to express human TFRC. In the first experiment, Applicants evaluated the ability of BI19 to cross a brain endothelial barrier made from a human brain endothelial cell line (hCMEC-D3) grown on a transwell insert. After establishing a monolayer of hCMEC-D3 cells, which express TFRC, AAV-BI19 was added to the upper well of the chamber (which models the luminal/blood side), and the fraction of virus that crossed the endothelial barrier and entered the lower chamber (brain side) was assessed. The assay was performed at 37° C. or at 4° C., which serves as a control to distinguish passive crossing (occurs at 37° C. and 4° C.) from active transport (occurs only at 37° C.). AAV-BI19 showed temperature- and time-dependent entry into the lower chamber (FIG. 13A). In contrast, other AAV capsids including AAV9, AAV8, and AAV-BI30 were detected at similar levels in the lower chamber at 37° C. and 4° C. suggesting that the crossing detected with these AAVs occurred primarily from passive leakage through the endothelial cell barrier. Taking the ratio of the fraction detected in the lower chamber at 37° C. vs 4° C. demonstrated that the crossing of AAV-BI19 through the endothelial barrier is more temperature-dependent than the other viruses (FIG. 13B).

[0433] Next Applicants sought to assess whether AAV-BI19 could cross the BBB in vivo. Because AAV-BI19 binds to human TFR1 but not the TFRC from mouse, marmosets, or macaques, on target in vivo validation necessitates expression of human TFRC on mouse brain vasculature. Applicants therefore performed a “two-step BBB crossing experiment” where Applicants used the brain endothelial targeted capsid AAV-BI30 (Krolack et al. Nature Cardiovascular Research 2022) to express the target receptor (human TFRC or mouse Ly6a) in mice prior to delivery of the capsid to be tested (AAV-BI19 or positive control AAV-PHP.eB) (FIG. 13A). Applicants performed the experiment in adult immunocompromised NGS mice to prevent an acquired immune response from blocking transduction by the second AAV. NSG mice were injected with 1e11 vg/mouse of AAV-BI30 expressing human TFRC, or mouse Ly6a cDNA as a control. Four weeks later the mice were injected with AAV-BI19 or AAV-PHP.eB carrying an mScarlet reporter driven by the strong, ubiquitous CAG promoter. mScarlet expression was observed throughout the CNS 3 weeks after IV administration of the second AAV (FIG. 13B). Applicants found that AAV-BI19 efficiently crosses the BBB and transduces cells in the mouse brain of animals that were previously injected with AAV-BI30 carrying human TFRC but not in animals that were previously injected with AAV-BI30 carrying Ly6a. In contrast, AAV-PHP.eB efficiently transduced the brains of mice that expressed AAV-BI30 carrying mouse Ly6a. Importantly, AAV-BI19 crossed the BBB and transduced neurons (FIG. 13C). These results demonstrate that AAV-BI19 is capable of crossing the huTFRC expressing BBB in vivo.

[0434] One possible caveat to the experiment above is that transduction by AAV-BI30 may cause huTFRC to be expressed at levels that exceed the normal expression of the protein and expression by AAV-BI30 may cause ectopic huTFRC expression in other cell types where TFRC is normally low. Therefore, Applicants next evaluated AAV-BI19 transduction in mice that have had the exons encoding the extracellular domain of mouse TFRC replaced with the corresponding exons encoding the ECD of human TFRC (referred to as huTFRC KI mice). In huTFRC KI mice, TFRC is expressed under control of the mouse TFRC gene regulatory elements at levels comparable with endogenous mouse Tfrc (BioCytogen). Confirming the results with the 2-step assay, Applicants find that AAV-BI19, but not AAV9, efficiently transduces the brain of huTFRC KI mice (FIG. 14), providing strong evidence in support of the use of AAV-BI19 for gene delivery across the human BBB. As Applicants observed in the two-step assay, AAV-BI19 efficiently transduced neurons throughout the CNS (FIG. 14C). Finally, Applicants also demonstrate that AAV-BI19 is capable of enhanced transduction of hCMEC cells as compared to AAV9 even in the presence of human Transferrin (FIG. 15), although the extent of transduction relative to AAV9 is slightly reduced. These data suggest that AAV-BI19 has the potential to transduce human brain endothelial cells by engaging human TFR1 or TFR1-Transferrin complexes.

### Example 8—AAV Capsids Reprogrammed to Bind Human Transferrin Receptor Mediate Brain-Wide Gene Delivery

### Abstract

[0435] Developing the means to efficiently deliver genes throughout the human central nervous system (CNS) could provide opportunities to treat a wide range of genetic diseases. Here, Applicants reprogrammed a suite of peptide-modified AAV9 capsids to bind to the human Transferrin Receptor (TfR1) protein, which is highly expressed on the brain endothelium, and demonstrated that this approach could drive blood-brain barrier (BBB)-crossing ability in vitro and in vivo. The strategy circumvented a key limitation of traditional in vivo screens that select for enhanced CNS-wide transduction without specifying a known mechanism of action and therefore identify capsids with unpredictable species specificity and translational potential. The huTfR1-binding capsids transduced human brain endothelial cells through interactions with TfR1. Applicants chose one capsid, AAV-BI19 for further characterization in mice that express a chimeric TFRC gene with a humanized extracellular domain. Relative to AAV9, AAV-BI19 efficiently transduced neurons and astrocytes across the brain and spinal cord after intravenous delivery and mediated a 50-fold increase in reporter gene expression in the brain; this enhanced tropism of AAV-BI19 was not observed in other organs evaluated. These results support the further assessment of AAVs programmed to target TfR1 to cross the BBB for human CNS gene therapy.

### Introduction

[0436] The field of gene therapy has benefitted from a range of AAV serotypes identified from nature. Most notably, the discovery of AAV9, which can transduce motor neurons as well as neurons and glia within the neonatal CNS, led to the development of an FDA-approved gene therapy for spinal muscular atrophy type 1 (SMA1) (Foust, K. D.; et al. Intravascular AAV9 Preferentially Targets Neonatal Neurons and Adult Astrocytes. Nature Biotechnology, 2008, 27, 59-65, Waldrop, M. A.; et al. Gene Therapy for Spinal Muscular Atrophy: Safety and Early Outcomes. Pediatrics, 2020, 146). However, numerous neurodevelopmental, neurodegenerative, and metabolic monogenic CNS diseases still have no available treatments. There is an urgent need for AAV capsids that are engineered to cross the blood-brain barrier (BBB), particularly in adult patients, and more effectively deliver genes to disease-relevant cells at a lower dose. Developing capsids that can effectively deliver gene therapies across the adult BBB will significantly broaden the scope of treatable indications.

[0437] Applicants recently demonstrated that AAV capsids can be reprogrammed to deliver genes across the mouse BBB through a mechanism-focused approach that selects for interactions between capsids and receptor proteins expressed on host cells (Huang, Q.; et al. Targeting AAV Vectors to the CNS viade NovoEngineered Capsid-Receptor Interactions, 2022). This receptor-targeting approach solves a key challenge faced in conventional AAV capsid screens, which can identify rare functional capsids without an understanding of their mechanism that determines their tropism and translatability across species. In this work, Applicants extended the receptor-targeting approach to a human target protein and directly engineered a suite of capsids that cross the blood-brain barrier (BBB) by leveraging the human Transferrin Receptor (huTfR1). TfR1 was chosen as a target because of its high expression on the human BBB; its ability to mediate constitutive, ligand-independent endocytosis and transcytosis across the CNS vasculature (Ajioka, R. S.; Kaplan, J. Intracellular Pools of Transferrin Receptors Result from Constitutive Internalization of Unoccupied Receptors. Proceedings of the National Academy of Sciences, 1986, 83, 6445-6449, Maxfield, F. R.; McGraw, T. E. Endocytic Recycling. Nature Reviews Molecular Cell Biology, 2004, 5, 121-132, Moos, T.; Morgan, E. H. Cellular and Molecular Neurobiology, 2000, 20, 77-95, Pardridge, W. M.; et al. Human Blood-Brain Barrier Transferrin Receptor. Metabolism, 1987, 36, 892-895, Jefferies, W. A.; et al. Transferrin Receptor on Endothelium of Brain Capillaries. Nature, 1984, 312, 162-163); its history as a receptor for viruses including arenaviruses and canine and feline parvoviruses (Goodman, L. B.; et al. Binding Site on the Transferrin Receptor for the Parvovirus Capsid and Effects of Altered Affinity on Cell Uptake and Infection. Journal of Virology, 2010, 84, 4969-4978, Flanagan, M. L.; et al. New World Clade B Arenaviruses Can Use Transferrin Receptor 1 (TfR1)-Dependent and -Independent Entry Pathways, and Glycoproteins from Human Pathogenic Strains Are Associated with the Use of TfR1. Journal of Virology, 2008, 82, 938-948); and its track record as a target to increase the delivery of biologics into the CNS of mice, nonhuman primates (NHPs) (Kariolis, M. S.; et al. Brain Delivery of Therapeutic Proteins Using an Fc Fragment Blood-Brain Barrier Transport Vehicle in Mice and Monkeys. Science Translational Medicine, 2020, 12), and humans as an approved antibody-based therapeutic for Mucopolysaccharidosis type II (MPS II) (Okuyama, T.; et al. A Phase 2/3 Trial of Pabinafusp Alfa, IDS Fused with Anti-Human Transferrin Receptor Antibody, Targeting Neurodegeneration in MPS-II. Molecular Therapy, 2021, 29, 671-679).

[0438] Applicants first screened peptide-modified AAV9 capsid libraries for their ability to bind to huTfR1 in vitro. The top-performing capsid, AAV-BI19, was then validated and found to exhibit enhanced gene delivery to human brain endothelial cells and to the majority of neurons and glia in human TFRC knock-in mice. From in vivo biodistribution and mRNA reporter transduction data, the enhanced tropism of AAV-BI19 was found to be specific to the CNS in the huTfR1 knock-in mice. This finding is consistent with the high level of expression of TFRC on CNS vasculature relative to the vasculature in other organs (Jefferies, W. A.; et al. Transferrin Receptor on Endothelium of Brain Capillaries. Nature, 1984, 312, 162-163). These huTfR1-binding capsids represent promising vectors for CNS gene therapy applications.

### Results

[0439] Applicants screened AAV9-based 7-mer NNK capsid libraries (random 7-mer insertion between residues 588-589 in VP1) for selective binding to huTfR1 as an Fc fusion protein and for selective binding to HEK293 and CHO cells overexpressing human TFRC as previously described (Huang, Q.; et al. Targeting AAV Vectors to the CNS viade NovoEngineered Capsid-Receptor Interactions, 2022) (FIG. 16A). Based on the screen results, Applicants focused on a set of four capsids, AAV-BI19, BI98, BI99, and BI101 that share a common sequence motif (FIG. 16B). These capsids, alongside AAV9, were individually tested for their ability to bind to TfR1 from human, rhesus macaque, marmoset, or mouse when stably expressed on CHO cells (FIG. 16C,D and FIG. 17). Each capsid packaged a genome that expresses nuclear localized mScarlet and Luciferase under the control of the ubiquitous CAG promoter (AAV-CAG-NLS-mScarlet-P2A-Luciferase-SV40-WPRE). The four capsids exhibited selectively elevated binding to CHO cells expressing human TFRC but not the control cells or those expressing mouse or NHP Tfrc (FIG. 16C,D).

[0440] The four huTfR1-binding capsids exhibited enhanced binding and transduction of human brain endothelial cells (FIG. 18A,B). The best-performing capsid, AAV-BI19 was chosen for more in-depth analysis. It exhibited comparable post-purification production yields to AAV9. Its enhanced transduction of hCMEC/D3 cells was found to be inhibited by the OKT9 antibody that binds the apical domain of TfR1 but not a polyclonal antibody AF2474 that competes with Tf for binding to TfR1 (FIG. 18C). AAV-BI19 partially colocalized with huTfR1 as puncta on the surface of hCMEC/D3s following incubation at 4° C. The number of AAV-BI19 puncta and the colocalization of AAV-BI19 with huTfR1 was dramatically reduced in the presence of OKT9 (1 ug/mL) but not Transferrin (1 ug/mL) (FIG. 18D). In contrast to AAV-BI19, AAV2 puncta were not found to colocalize with huTfR1 nor were AAV2 puncta affected by OKT9 Transferrin. To assess internalization, AAV-BI19 or AAV2 were added to hCMEC/D3 cells at 25,000 vg/cell for one hour at 37° C. Immunostaining for the AAV capsid and endosomal markers showed partial overlap with both Rab5 and Rab7 proteins, which mark early and late endosomes, respectively. Minimal overlap between AAV2 capsids and Rab5 or Rab7 was observed.

[0441] TFRC is thought to be expressed in virtually all nucleated human cells. Therefore, Applicants next asked whether the introduction of binding to human TFRC rendered AAV-BI19 independent of AAVR for transduction. AAV9 or AAV-BI19 expressing a nuclear GFP was added to hCMEC/D3 or hCMEC/D3 AAVR KO cells at 20,000 vg/cell. 24 hours later the cells were fixed and stained with a pan-AAV antibody (B1). While AAV-BI19 capsids could be detected on or within the hCMEC/D3 AAVR KO cells at a level that was as high or higher than the hCMEC/D3 control cells, transduction in the AAVR KO cells was nearly undetectable for AAV-BI19. In contrast a large fraction of cells were marked with GFP+ nuclei in the control hCMEC/D3 cells. This result suggests that AAV-BI19 remains dependent on AAVR for transduction of hCMEC/D3 cells.

[0442] Applicants next assessed transport across a human endothelial cell barrier in a BBB transwell model established using the hCMEC/D3 cell line. To minimize variance between wells, Applicants mixed AAV-BI19, AAV9, and AAV2 carrying barcoded genomes that were individually identifiable by qPCR. AAV-BI19 D). Of the three capsids, only AAV-BI19 had a statistically significantly higher amount of virus that crossed the hCMEC/D3 cell barrier and transwell membrane at the biological temperature of 37° C. as compared to at 4° C., a temperature at which ATP-dependent transcytosis is suppressed, albeit passive crossing can occur (FIG. 18D). Applicants detected more AAV9 in the bottom chamber relative to AAV2, as previously reported in the literature (Merkel, S. F.; et al. Trafficking of Adeno-Associated Virus Vectors across a Model of the Blood-Brain Barrier; a Comparative Study of Transcytosis and Transduction Using Primary Human Brain Endothelial Cells. Journal of Neurochemistry, 2016, 140, 216-230, Di Pasquale, G.; Chiorini, J. A. AAV Transcytosis through Barrier Epithelia and Endothelium. Molecular Therapy, 2006, 13, 506-516, Song, R.; et al. Selection of rAAV Vectors That Cross the Human Blood-Brain Barrier and Target the Central Nervous System Using a Transwell Model. Molecular Therapy-Methods &amp; Clinical Development, 2022, 27, 73-88), although there was no statistically significant difference between the amount of virus that crossed the hCMEC/D3 cell barrier and transwell membrane at 37° C. versus 4° C. (FIG. 18D).

[0443] To determine key residues that facilitate the species-specific binding of AAV-BI19 to huTfR1, Applicants identified surface exposed residues that differ between the human versus macaque TfR1 apical domain and created four huTfR1 mutants each containing a different set of closely positioned substitutions such that macaque residues replaced the corresponding human residues at specific positions across the apical domain of huTfR1 (FIG. 19A). CHO cells were transiently transfected to express each mutant and the ability of AAV-BI19 to transduce these cells was assessed. The huTfR1 mutant carrying Y247D and T248S was no longer able to mediate the enhanced transduction phenotype by AAV-BI19 (FIG. 19A). Fitting with this finding, introducing the human amino acid substitutions D247Y and S248T into the macaque TfR1 was sufficient to mediate the enhanced transduction phenotype by AAV-BI19 (FIG. 19B).

[0444] Due to its species-specific mechanism of action, Applicants tested AAV-BI19 in a knock-in mouse model where the huTfR1 extracellular domain had replaced the endogenous mouse TfR1 extracellular domain (FIG. 4) (Liu, C.; et al. Abstract 377: Evaluating Delivery of TFR1-Targeting Therapies to the CNS in a Novel Humanized TFR1 Mouse Model. Cancer Research, 2022, 82, 377-377). Either AAV-BI19 or AAV9 carrying a CAG-NLS-mScarlet-P2A-Luciferase-pA construct was intravenously injected (5e11 vg/mouse) into adult female C57BL/6J or C57BL/6-Tfr1tm1TFR1/Bcgen (B-hTFR1) mice. At three weeks post-injection, relative to AAV9, AAV-BI19 exhibited enhanced biodistribution to and transduction of the brain and spinal cord in B-hTFR1 but not C57BL/6J mice (FIG. 21A-E). This enhancement was not observed in other organs that were assessed. Compared to the C57BL/6J mice that received AAV9, B-hTFR1 mice that received AAV-BI19 showed a 6 and 12-fold increase in viral genomes recovered in the brain and spinal cord, respectively (FIG. 21A); a 54 and 43-fold increase in viral mRNA transcript levels in the brain and spinal cord, respectively (FIG. 19B); and a 132 and 58-fold in the luciferase reporter enzymatic activity in the brain and spinal cord, respectively (FIG. 19C). In addition, relative to AAV9, AAV-BI19 transduced a significant portion of the neurons and astrocytes in the cortex, striatum, and thalamus in B-hTFR1 but not C57BL/6J mice (FIG. 21F-I). In B-hTFR1 mice, AAV-BI19 transduced 54%, 32%, and 67% of NeuN⁺ cells, a marker for neurons, in the cortex, striatum, and thalamus, respectively (FIGS. 21F and 21H). In contrast, in C57BL/6J, AAV-BI19 transduced less than 1% of NeuN⁺ cells in the cortex and striatum and only 5% of NeuN⁺ cells in the thalamus. AAV9 transduced only 1-6% of NeuN⁺ cells in these same brain regions regardless of the mouse strain. More than 80% of SOX9⁺ cells were transduced by AAV-BI19 in B-hTFR1 mice, as compared to 20% or fewer SOX9⁺ cells transduced in the cortex, striatum, and thalamus by AAV9 in C57BL/6J mice (FIGS. 21G and 21H). The mScarlet reporter expression in the liver was comparable between AAV9 and AAV-BI19 in both C57BL/6J and B-hTFR1 mice (FIG. 22A) in alignment with the biodistribution and transduction data. In C57BL/6J mice, AAV-BI19 was less efficient at transducing the CNS and cells within the dorsal root ganglion (DRG) compared to AAV9; however, DRG cell transduction was comparable between AAV9 and AAV-BI19 in B-hTFR1 mice (FIG. 22B).

[0445] Applicants next sought to determine whether the improved uptake and transport across the brain endothelium mediated by huTfR1 is sufficient to explain the enhanced tropism of AAV-BI19. To test this, Applicants established a two-step BBB-crossing experiment (FIG. 23). In this experiment, NSG mice were first intravenously injected with AAV-BI30, a capsid that targets CNS endothelial cells (Krolak, T.; et al. A High-Efficiency AAV for Endothelial Cell Transduction throughout the Central Nervous System. Nature Cardiovascular Research, 2022, 1, 389-400), carrying either human TFRC or mouse Lyba; LY6A is the receptor that mediates the enhanced CNS tropism of AAV-PHP.eB in some strains of mice (Huang Q, et al. Delivering genes across the blood-brain barrier: LY6A, a novel cellular receptor for AAV-PHP.B capsids. PLOS One. 2019 Nov. 14; 14(11):e0225206) and serves as a positive control in this experiment (NSG wild type mice have the non-permissive Ly6a allele). Next, at 28 days post-injection, the mice were either intravenously injected with AAV-BI19 or AAV-PHP.eB carrying a CAG-mScarlet reporter. As predicted, AAV-BI19 effectively transduced the CNS of mice that had received AAV-BI30:CAG-hTFRC but not AAV-BI30:CAG-LY6A, and AAV-PHP.eB effectively transduced the CNS of mice that had received AAV-BI30:CAG-LY6A but not AAV-BI30:CAG-hTFRC (FIG. 23). These results show that endothelial expression of human TFRC is sufficient to explain much if not all of the enhanced CNS tropism of AAV-BI19. This experiment does rule out the possibility that interactions with TfR1 on brain parenchymal cells in the B-hTfR1 KI mice also impact the tropism of AAV-BI19.

### Discussion

[0446] In this work, Applicants demonstrated that AAV capsids can be reprogrammed to target a human cell surface protein in order to more efficiently cross the BBB in vivo. This builds on prior work by Applicants' group that successfully yielded suites of LY6A and LY6C1-targeting AAV capsids that cross the BBB in mice. Collectively, these efforts show that it is feasible to target AAV capsids to specific host proteins, including human proteins, to generate potent gene delivery vectors with known mechanisms of action and predictable tropisms. Furthermore, this approach which begins with in vitro receptor-binding screens produces reproducible and quantitative data that enables downstream saturation mutagenesis and machine learning-guided exploration of the capsid sequence space (Huang et al 2022).

[0447] While the approach results in greater confidence that the capsids are leveraging a mechanism that exists in humans, the capsids Applicants have reprogrammed to date including those that bind LY6A, LY6C1, and TFR1 have led to species-specific tropism enhancements. Therefore, to leverage in this study, Applicants validated the huTfR1-binding capsids in a knock-in mouse model, C57BL/6-Tfr1tm1TFR1/Bcgen (B-hTFR1) mice (FIG. 21), as well as in a two-step experiment where mice were first made to express hTfR1 on their CNS endothelium (FIG. 23). Given the highly specificity binding of AAV-BI19 for human TfR1, with minimal detected binding to the TfR1 from new world or old world monkeys, it may be worthwhile to establish new standards where gene therapy vectors do not need to be validated in NHP when they have a known mechanism of action that is human-specific.

[0448] In future work, it may be possible to reprogram capsids such that they bind to the same receptor across host species. However, enforcing cross-species receptor-targeting within a single capsid will require a focus on only the most highly conserved surface proteins, which may eliminate well characterized and validated candidate receptors like TfR1 thereby constraining the impact of this receptor-focused retargeting approach. Alternatively, dual efforts to identify human protein-targeted capsids and surrogates with matched affinities and tropism characteristics in one or more pre-clinical species can be undertaken, but this requires significant additional resources. In this context, gene therapy developers will need to weigh the importance of having a capsid that is highly optimized across human-specific assays versus capsids that can be used to demonstrate preclinical.

### Methods

### Plasmids

[0449] AAV9, AAV-BI19 and BI98-BI101 Rep-Cap plasmids were generated by gene synthesis (GenScript). The CAG-WPRE-hGH pA backbone was obtained from Viviana Gradinaru through Addgene (#99122). GFP, GFP-2A-luciferase, and mScarlet cDNAs were synthesized as gBlocks (IDT) or synthesized and cloned (GenScript).

[0450] Full length TFRC cDNA expression and lentiviral plasmids were cloned by inserting the open reading frames of TFRC (human: NM_003234.4; mouse: NM_011638.4; marmoset: NM_001301847.1, macaque: NM_001257303.1) into the lentiviral backbone pLenti-EF-FH-TAZ-ires-blast (Addgene #52083) with EcoRI/SalI sites.

[0451] For Fc fusion proteins, the coding sequence of the extracellular regions of TfR1 (human, marmoset, or macaque: 89-760aa; mouse: 89-763aa) were amplified by PCR and inserted into pCMV6-XL4 FLAG-NGRN-Fc (Addgene #115773) with EcoRV and Xbal sites. Signal peptide H7 (ATGGAGTTTGGGCTGAGCTGGGTTTTCCTCGTTGCTCTTTTTAGAGGTGTCCAGTGT (SEQ ID NO: 20493)) was introduced to N terminal of TFRC sequences to direct protein secretion.

### Cell Lines and Primary Cultures

[0452] HEK293T/17 (CRL-11268), Pro5 (CRL-1781) and CHO-K1 (CCL-61) were obtained from ATCC. mBMVEC cells (C57-6023) and hBMVECs cells (H-6023) were obtained from Cell Biologics and cultured as directed by the manufacturer. hCMEC/D3 cells were from Millipore-Sigma (SCC066).

Reconstitution of Full-Length TfR1 into Peptidiscs

[0453] Peptidisc peptide with the sequence N-FAEKFKEAVKDYFAKFWDPAAEKLKEAVKDYFAKLWD-C(SEQ ID NO: 42434) was purchased from PEPTIDISC LAB (peptidisc.com) and was dissolved at 2 mg/mL in buffer containing 20 mM TrisHCI, pH-8. TfR1 was reconstituted into Peptidiscs using the ‘on-bead’ method. Briefly, HEK293 cells expressing C-terminally tagged full length huTfR1 were harvested by centrifugation at 300×g. Cells were lysed by sonication and fractionated by centrifugation at 15,000×g to remove nuclei and cell debris and at 100,000×g to pellet the cell membrane. Membrane was resuspended in TrisHCI, pH=7.5, 50 mM NaCl, 10% glycerol to 10 mg/mL and solubilized with 0.8% DDM at 4° C. with gentle agitation. Anti-FLAG M2 magnetic beads (Sigma-Aldrich) were incubated with the solubilized membrane and washed with a buffer of TrisHCI, pH=7.5, 50 mM NaCl, 10% glycerol, 0.02% DDM. Beads were incubated for five minutes at room temperature in a solution of 1 mg/mL Peptidisc peptide and then thoroughly washed in buffer without detergent. Peptidisc-TfR1 was eluted with 0.1 mg/mL 3×FLAG peptide and analyzed by SDS-PAGE.

### Bio-Layer Interferometry

[0454] For characterization of the binding dynamics between huTfR1 and AAV capsids, a GatorPrime instrument was used (Gator Bio). Purified AAV-BI19 or AAV9 capsids were diluted in Q buffer (1× PBS, 0.02% Tween 20, and 0.2% BSA) and immobilized on AAVX probes. Probes without capsids were used as a control for nonspecific binding. Peptidisc-reconstituted huTfR1 was similarly prepared in a dilution range from 200 nM to 6.125 nM in Q buffer. Alternatively, this Peptidisc-huTfR 1 dilution range was prepared with 200 nM Holo-Tf in each dilution to ensure a complex of huTfR1 with Holo-Tf. Probes were incubated in Q buffer to establish a baseline for 120 seconds, then incubated with AAV-BI19 or AAV9 capsids to reach a loading height of approximately 10 nm before reestablishing a baseline for 120 seconds. Association with Peptidisc-huTfR1 or Peptidisc-huTfR1-Holo-Tf was performed over 120 seconds and dissociation into Q buffer occurred over 180 seconds.

### Lentivirus Production

[0455] Lentivirus was produced with a third-generation lentivirus system by co-transfection of three packaging plasmids (pMDLg-RRE, pRSV-Rev, and pVSV-G) and vector plasmid encoding human TFRC at a ratio of 4:1:1:6 in HEK293T/17 cells. Lentivirus was harvested three days after transfection and filtered with 0.45 μm PES to remove the cell debris.

### Exogenous TfR1 Expression in CHO Cell Lines

[0456] CHO cell lines overexpressing human, macaque, marmoset, or mouse TfR1 were established via random lentiviral integration of exogenous constructs under the control of an EF-1 alpha promoter. Briefly, CHO cells were seeded at 150,000 cells/well in 12 well plates and transduced with lentivirus-containing media for 48 hours, then transferred to 10 cm dishes for selection with 10 ug/mL blasticidin for one week. Once all cells had died in the control plate, the selected CHO cells were maintained in media with 1 ug/mL blasticidin. For validation, RNA was extracted from cells using the Qiagen RNeasy Kit. Maxima H Minus Reverse Transcriptase (ThermoFisher, EP0753) and oligo dT were used for cDNA synthesis. Species-specific primers were used for qPCR (Table 23). The CHO cells expressing TfR1 from each species were immunostained with two anti-TfR1 antibodies: Abcam ab84036, polyclonal, or eBioscience™ OKT9, monoclonal (FIG. 17).

### AAV Production and Titering

[0457] The AAV9 variant capsids carrying CAG-NLS-mScarlet-P2A-Luciferase-SV40-WPRE were either produced in suspension followed by iodixanol purification and titered as previously described (Eid, F.-E.; et al. Systematic Multi-Trait AAV Capsid Engineering for Efficient Gene Delivery, 2022) or produced using adherent cells as previously described (Challis, R. C., et al. Systemic AAV vectors for widespread and targeted gene delivery in rodents. Nat Protoc 14, 379-414 (2019)).

### Binding Assays

[0458] CHO cells stably expressing TfR1 from human, macaque, marmoset, or mouse were seeded at 30,000 cells per well; hCMEC/D3 cells were seeded at 30,000 cells per well; and hBMVEC cells were seeded at 15,000 cells per well. At 24 hours post-seeding, each well was subjected to a media change with the fresh cold media that contained each AAV9 variant carrying CAG-NLS-mScarlet-P2A-Luciferase-SV40-WPRE at 3,000, 6,000, or 12,000 vg/cell for CHO, hCMEC/D3, or hBMVEC cells, respectively. The plate was then maintained at 4° C. with gentle rocking for one hour, followed by five phosphate buffered saline (PBS) washes. Cells were treated with Proteinase K at 56° C. for one hour, followed by deactivation at 95° C. for 10 minutes. Total DNA extraction was performed using the DNeasy kit (Qiagen). The DNA was diluted 1:20 and subjected to qPCR with the following mScarlet primers: forward primer 5′-CCGTGACCCAGGACACCTC-3′ (SEQ ID NO: 42432) and reverse primer 5′-GCCATCTTAATGTCGCCCTTCAG-3′ (SEQ ID NO: 42433).

### Transduction Assays

[0459] CHO cells stably expressing TfR1 from human, macaque, marmoset, or mouse were seeded at 100,000 cells per well; hCMEC/D3 cells were seeded at 10,000 cells per well; and hBMVEC cells were seeded at 5,000 cells per well. At 24 hours post-seeding, each well was subjected to a media change with the fresh media that contained each AAV9 variant carrying CAG-NLS-mScarlet-P2A-Luciferase-SV40-WPRE at 3,000, 6,000, or 12,000 vg/cell for CHO, hCMEC/D3, or hBMVEC cells, respectively, and the plate was maintained at 37° C. with 5% CO₂ for 24 hours. Transduction was measured using the britelite plus reporter gene assay system (PerkinElmer, 6066766). Luciferase activity was reported as relative light units (RLU) as raw data or normalized to control wells transduced with AAV9.

### Antibody Inhibition Assay

[0460] The hCMEC/D3 cells were seeded at 7,500 cells per well. Two days later, 100 μL of media with 3e8 vg/mL virus and the specified concentration of OKT9 or R&D AF2474 antibody was transferred to each well. The plate was maintained at 37° C. with 5% CO₂ for 24 hours. Transduction was measured using the britelite Plus reporter gene assay system (Revvity).

### Transwell Assay

[0461] The hCMEC/D3 cell line (Millipore Sigma, Cat. No. SCC066), under 9 passages, was maintained in EGM2-MV media (CC4147 Lonza) to reach confluency. Falcon® Permeable Support for 24-well Plate with 1.0 um Transparent PET Membrane (353104 Corning) were prepared by coating with collagen type I (08-115 Millipore) diluted 1:50 in PBS and incubated at 37° C. for two hours. On Day 0, 3e4/cm² of cells were plated on the transmembrane and grown for two days in 200 μL of EGM2-MV media with VEGF on the top of the transmembrane and 600 μL of media at the bottom of the membrane. On Day 4, the media at both the top and bottom of the transwell was changed to EGM2-MV media without VEGF. Starting from Day 4, TEER values were measured using the EVOM2 meter (World Precision Instruments). TEER values were calculated as the ohmmeter readout in wells with cells minus the ohmmeter readout in wells without cells, multiplied by the surface area in cm² units. Transwell permeabilities using this process were previously validated by measuring the permeability of Dextran FITC 4k (46944 Sigma), 40k (76221-470 biotium), and 70k (76221-460 biotium). TEER peaked on Day 6, reaching values >10 Ω/cm², which is when AAVs were added to the transwells. AAV-BI19, AAV2, and AAV9 with serotype-specific barcoded transgenes were pooled and added to the top well of the transwell at 25,000 vg/cell (each AAV). After 180 minutes of incubation at 37° C. or 4° C., 22 μL of media was extracted from the bottom of the transwell. To detect the amount of virus in the media, extracts were treated with DNAseI (M0303S NEB) for 15 minutes at room temperature, then diluted in TE buffer (5 mM EDTA) and denatured at 70° C. for 10 minutes to deactivate DNAseI. DNA extracts were then diluted in 5% Tween 20 with random DNA filler (UltraPure™ Salmon Sperm DNA Solution, ThermoFisher, Cat. No. 15632011). The amount of virus that had passed through the transwell was measured by qPCR using a standard curve of known virus quantities.

### Immunofluorescence Staining and Colocalization

[0462] For huTfR1 colocalization, AAV-BI19 and AAV2 were added to monocultured HCMEC/D3 cells in optical plates (PhenoPlate 96-well, black, optically clear flat-bottom, tissue-culture treated plates, Perkinelmer 6055302) at 25,000 vg/cell, while Transferrin-647 (Transferrin From Human Serum, Alexa Fluor™ 647 Conjugate, T23366, ThermoFisher) and purified TfR1 antibody (Purified Anti-human CD71 Antibody OKT-9, 1:200 dilution, 10713000, AAT Bioquest) were added to wells to reach a final concentration of 1 μg/mL each. Cells were incubated for one hour at 37° C. or 4° C. accordingly, followed by rinse and fixation with 4% paraformaldehyde.

[0463] To visualize AAV particles, fixed cells were blocked by endogenous biotin (Avidin/Biotin Blocking Kit, SP-2001, Vector Laboratories) and then applying Anti-AAV9 (CaptureSelect™ Biotin Anti-AAV9 Conjugate, 1:200 dilution, 7103332100, ThermoFisher) to the wells treated with AAV-BI19 or wells with no virus, or Anti-AAVX (CaptureSelect™ Biotin Anti-AAVX Conjugate, 1:200 dilution, 7103522100, ThermoFisher) to the wells treated with AAV2. After 3 PBS washes to clean away unused primary antibodies, Neutravidin 488 (NeutrAvidin Protein, DyLight™ 488, 1:500 dilution, 22832, Thermofisher) was applied for visualization of the primary antibodies.

[0464] To visualize human TfR1, fixed cells were stained with huTfR1 antibody (Purified Anti-human CD71 Antibody OKT-9, 1:200 dilution, 10713000, AAT Bioquest), followed by Alexa-anti-mouse (CyTM3 AffiniPure Goat Anti-Mouse IgG (H+L), 1:500 dilution, 115-165-003, Jackson ImmunoResearch) were used for detection.

[0465] For organelle colocalization, the following stainings were applied: golgi (RCAS1 (D2B6N) XP® Rabbit mAb, 1:200 dilution, 12290, Cell Signaling Technology), early endosome (Rab 5 Antibody (D-11), 1:100 dilution, sc-46692, Santa Cruz Biotechnology), late endosome (Recombinant Alexa Fluor® 647 Anti-RAB7 antibody [EPR7589] (ab198337), 1:400 dilution, ab198337, abcam), and endoplasmic reticulum (Recombinant Alexa Fluor® 488 Anti-KDEL antibody, 1:500 dilution, ab184819, abcam). The following secondary antibodies were used: Streptavidin-555 nm (Streptavidin, AlexaFluor 555, 1:500 dilution, S21381, ThermoFisher), Goat anti mouse 647 nm (Alexa Fluor® 647 AffiniPure Goat Anti-Mouse IgG (H+L), 1:500 dilution, 115-605-062, Jackson ImmunoResearch), Goat anti mouse 488 nm (Alexa Fluor™ 488 Goat Anti-Mouse IgG (H+L) Cross-Adsorbed Secondary Antibody, 1:500 dilution, A-11001, ThermoFisher), Goat anti rabbit 488 nm (Alexa Fluor® 488 AffiniPure Goat Anti-Rabbit IgG (H+L), 1:500 dilution, 111-545-144, Jackson ImmunoResearch).

[0466] For wells requiring additional mouse antibodies, cells were blocked for 60 minutes with mouse-on-mouse blocking reagent (ReadyProbes™ Mouse-on-Mouse IgG Blocking Reagent, 1:30 dilution, R37621, ThermoFisher).

[0467] Images were obtained with a 60× oil objective on a Nikon Ti-e inverted spinning disc confocal microscope using predetermined, optimized and fixed exposure time to allow image comparisons.

### TfR1 Substitution Transduction Assay

[0468] CHO cells were transiently transfected with Mirus TransIT-LT1 (Mirus, MIR 2300) plasmids encoding a CAG promoter that drives expression of human TfR1, macaque TfR1, or variants with the indicated amino acid substitutions. Cells were maintained at 37° C. with 5% CO₂. At 24 hours post-transfection, AAV-BI19 or AAV9 encoding ssCAG-NLS-mScarlet-P2A-Lucierase-pA was applied at 10,000 vg/cell. After 24 hours, viral transduction was measured using the britelite Plus reporter gene assay system.

### Animals

[0469] All procedures were performed as approved by the Broad Institute IACUC. C57BL/6J (000664) and NOD.Cg-Prkdcscid Il2rgtm1Wjl/SzJ (NSG) mice (005557) were obtained from The Jackson Laboratory (JAX). C57BL/6-Tfr1tm1TFR1/Bcgen (B-hTFR1, 110861) were obtained from Biocytogen. Recombinant AAV vectors were administered intravenously via the retro-orbital sinus in young adult male or female mice. Mice were randomly assigned to groups based on predetermined sample sizes. Transgenic animals were genotyped using DNeasy Blood & Tissue Kit (Qiagen, 69504) using primers listed in Table 23. Two mice were excluded from analysis in FIG. 21 and FIG. 20. The first mouse was assigned to the AAV9 in B-hTFR1 group but was determined to be negative for huTfR1 on Western blot and by genotyping. The second mouse in the AAV-BI19 in C57BL/6J group displayed no evidence of transduction in the biodistribution, transduction, or luciferase assays, and showed no fluorescent reporter signal in the liver or the brain.

[0470] Mice were anesthetized with Euthasol and transcardially perfused with PBS at room temperature followed by 4% paraformaldehyde (PFA) in ice cold PBS. Tissues were post-fixed overnight in 4% PFA in PBS and sectioned by vibratome. Immunohistochemistry (IHC) was performed on floating sections with antibodies diluted in PBS containing 5% donkey serum, 0.1% Triton X-100, and 0.05% sodium azide. Primary antibodies NeuN 1:500 (Invitrogen, MA5-33103), SOX9 1:250 (abcam, ab 185966) were incubated at room temperature overnight. The sections were then washed and stained with secondary Alexa-conjugated antibodies Alexa Fluor 647 (Invitrogen, A-31573) and Alexa Fluor 555 (Invitrogen, A-21427) at 1:1000 for four hours or overnight.

### In Vivo Capsid Biodistribution, Transduction, and Luciferase Measurement

[0471] AAV-BI19 or AAV9 encoding ssCAG-NLS-mScarlet-P2A-Luciferase-pA was intravenously injected into adult female C57BL/6J or C57BL/6-Tfr1tm1TFR1/Bcgen (B-hTFR1) mice at a dose of 5×10¹¹ vg/mouse. After three weeks, the mice were perfused with PBS. Parts of the mouse brain, liver, spinal cord, and dorsal root ganglions were dropped fixed into 4% PFA. Remaining tissues were collected and frozen at −80° C. For biodistribution, samples were processed for AAV genomes using a DNeasy 96 Blood & Tissue Kit (Qiagen, 69581) and qPCR was performed targeting mScarlet and mouse glucagon as previously described (see primer sequences in Table 23) (Deverman, B. E.; et al. Cre-Dependent Selection Yields AAV Variants for Widespread Gene Transfer to the Adult Brain. Nature Biotechnology, 2016, 34, 204-209). For the mRNA transduction assessment, RNA was isolated using TRIzol (Invitrogen, 15596026) and purified using an RNeasy 96 Kit (Qiagen, 74171); cDNA synthesis was performed using Maxima H Minus Reverse Transcriptase (Thermo Scientific, EP0753); qPCR targeting mScarlet and mouse GAPDH was performed. For the luciferase measurements, protein was extracted from the mice tissues using the lysis buffer T-Per with 1× Halt protease inhibitor (Invitrogen, 78430); 10 μg of total protein was used to assess the reporter gene using the britelite Plus reporter gene assay system (Perkin Elmer, 6066761).

[0472] For the two-step mouse BBB-crossing experiments, NSG mice were first intravenously injected with AAV-BI30 (Krolak, T.; et al. A High-Efficiency AAV for Endothelial Cell Transduction throughout the Central Nervous System. Nature Cardiovascular Research, 2022, 1, 389-400) at 1e11 vg/mouse to deliver AAV-CAG-hTFRC-WPRE-3x-miR122-pA or AAV-CAG-LY6A-WPRE-3x-miR122-pA. At 28 days post-injection, 5e11 vg of AAV-BI19: CAG-mScarlet or AAV-PHP.eB: CAG-mScarlet was systemically administered to each mouse. Transduction was assessed three weeks later.

Experiment 1: Screening for 7-Mer Modified AAV Capsids that Bind Selectively to Cells Expressing Human TFRC (hTFRC).

[0473] A library of capsids with a 7-mer insertion between AA588 and 589 of AAV9 K449R was screened for capsids that more efficiently bind to HEK293 or CHO cells transiently transfected with human TFRC (hTFRC) than cells expressing a control protein (GFP). Sequences that bind more efficiently to cells expressing hTFRC were identified by amplicon NGS. Analysis of these sequences identified several motifs present in a subset of sequences: [YFL][AS][RK]X[NG]X[N] and XXS[ST]NG[IVR], where X=any amino acid.

[0474] Applicants generated a second round library comprising sequences identified in the cell-based screen for hTFRC binding and all of the sequences conforming to the above two motifs using oligo pool synthesis. The oligo pool was used to generate a capsid library. The second round library was screened on HEK293 cells with or without transient expression of hTFRC (5,000 vg/cell) as performed in the first round (Table 1). In addition, the second round library was screened to identify capsids that more efficiently transduced (1) hCMEC/D3 cells, which express endogenous hTFRC, (2) mouse brain microvascular endothelial cells (BMVEC) s (Table 2) as well as (3) mixed culture spheroids consisting of hCMEC/D3 cells, and primary human astrocytes and pericytes (Cho et al, Nature Communications 2017).

[0475] Applicants chose several novel TFRC binding capsids for further study: AAV-BI19: YSRIGPN (SEQ ID NO: 14632); AAV-BI98: YSRLNMN (SEQ ID NO: 14301); AAV-BI99: YSRLNKD SEQ ID NO: 16577); AAV-BI100: VHRLQDK (SEQ ID NO: 16602); AAV-BI101: YHRLSNN (SEQ ID NO: 16636); and AAV-BI102: LHALSHN (SEQ ID NO: 16608). Applicants used these capsids to package a reporter transgene and transduced CHO cells or CHO cells expressing human TFRC (FIG. 2), as well as hCMEC cells or hCMEC cells overexpressing human TFRC (FIG. 3). In both cell types, each of the TFRC binding capsids showed enhanced ability to bind and transduce cells expressing human TFRC relative to AAV9. Notably, the enhanced transduction by these engineered capsids was absent in CHO cells, which lack expression of human TFRC. In contrast, the engineered AAVs each showed enhanced transduction of unmodified hCMEC cells relative to AAV9, which is fitting with the known expression of human TFRC in these cells. The role of TFRC for the enhanced hCMEC transduction of these capsid variants is supported by the finding that transduction was further enhanced in cells with greater cell surface exposed TFRC (FIGS. 3 and 4).

[0476] To assess whether the enhanced transduction of hCMEC cells by AAV-BI19 requires endogenous TFRC, applicants attempted to block the interaction of the AAV with TFRC using several anti-TFRC antibodies: OKT9 (Thermo) and AF2474 (R&D Systems). Applicants found that OKT9, which binds to the TFRC apical domain (Ferrero et al J. of Virology doi.org/10.1128/JVI.01868-20) blocked transduction by AAV-BI19 in a dose-dependent manner (FIG. 5). In contrast, AF2474, which blocks binding of Transferrin to TFRC, did not inhibit transduction by AAV-BI19. Together these results suggest that the enhanced tropism of AAV-BI19 for human brain endothelial cells is mediated through binding to the human TFRC apical domain.

Experiment 2: Screening for 7-Mer Modified AAV Capsids that Bind Selectively to hTFRC-Fc

[0477] In a second experiment, applicants screened a separately produced AAV9 K499R 7-mer 588 insertion library for variants capable of selectively binding hTFRC when produced as an Fc fusion protein. To perform this assay, applicants expressed the human or marmoset TFRC-Fc fusions in HEK293 cells, and pulled down the Fc fusion proteins from the cell culture media using ProA-magentic beads (FIG. 7).

[0478] The recovered 7-mers found to bind hTFRC-Fc were synthesized as an oligo pool and used to generate a second-round library. Applicants screened the second-round library for variants that bind hTFRC using the same hTFRC-Fc assay (Table 4), variants that bind to CHO cells stably expressing hTFRC (Table 5), variants that bind and transduce CHO cells expressing hTFRC (Table 6), and variants that bind HEK293 cells overexpressing hTFRC (Table 7). A subset of sequences bound HEK293 cells expressing either human TFRC or marmoset TFRC (Table 8).

### Experiment 3: Multiple Regions of the AAV Capsid can be Engineered to Enable TFRC Binding.

[0479] To determine whether other regions of the AAV capsid could be engineered to bind to TFRC, applicants generated libraries where a stretch of 10 AA in loop IV of AAV9 were substituted with a random string of AAs of seven or 10 AAs in length. Applicants also repeated the screen using a new loop VIII 7-mer insertion library as a positive control. Applicants screened these libraries for capsids that gained the ability to bind selectively to human TFRC (Table 9 and Table 10) or human TFRC where the apical domain was replaced with the corresponding domain from mouse TFRC (Table 11). Notably, several of the 10 AA sequences recovered in the loop IV substitution library (IPFSRVNPDT (SEQ ID NO: 20285), LGFARTGAAD (SEQ ID NO: 20274), LGFTKSSGSD (SEQ ID NO: 20270), LRYSKTQGES (SEQ ID NO: 20266), SPYARSSAGV (SEQ ID NO: 20271), and VGWSRLDLTT (SEQ ID NO: 20262)) contain the partial [YWFL][AST][RK] (SEQ ID NO: 20492) motif like that observed in human TFRC binding 7-mer insertions at loop VIII, suggesting that this binding motif is functional in multiple structural contexts.

Experiment 4: Toward a Systematic Mapping of the Relationship Between AAV 7-Mer Sequence and hTFRC Binding.

[0480] Applicants have generated a novel type of library (Fit4Function) composed of AAV capsids that uniformly samples only the high production fitness sequence space (cite WO2021222636A1). When used to screen for novel functions (e.g., new receptor binding), the Fit4Function libraries can generate highly reproducible quantitative data suitable for training ML models that predict the function of previously untested sequences within the theoretical sequence space. Applicants screened a Fit4Function library for capsids that selectively bind to TFRC-Fc. Binding was measured at both pH7.4 and pH5.5 and is reported in Table 12. Notably, even within this smaller library (240K unique sequences), several examples of sequences conforming to previously identified motifs were identified (e.g., YAKGGSN (SEQ ID NO: 11535) and YSKSGPG (SEQ ID NO: 20422), [YFL][AS][RK]X[NG]X[N] (SEQ ID NO: 20484); VKSSNGV (SEQ ID NO: 11671), XXS[ST]NG[IVR] (SEQ ID NO: 20485)).

Experiment 5: Secondary Evaluation of Recovered Variants from Previous Assays and Use of Those Sequences to Train Generative Models to Predict Additional High Performing Sequences.

[0481] To assess the function of AAV capsids discovered from Experiments 1-4 relative to each other and identify the top performing capsids across several relevant in vitro and in vivo assays, applicants generated a pooled oligo library containing loop VIII 7-mer insertion variants from Experiments 1-4 (>9K unique sequences). Applicants also used a subset of these 7-mer sequences with activity observed across multiple readouts to train a machine learning model (Wavenet that has been previously adapted for use in protein design) to generate additional sequences predicted to bind human TFR1 (>24K unique sequences). All sequences in the library were encoded by at least two unique nucleotide sequences, providing internal replicates for each 7-mer sequence. The pooled oligo library was then produced in two batches, one for in vitro studies. The library was then screened for binding to human, macaque, marmoset and mouse TFR1-Fc fusion proteins, for binding and transduction of control CHO cells or CHO cells stably expressing human, macaque, marmoset or mouse TFRC, for binding and transduction of hCMEC, for binding and transduction of hCMEC cells expressing exogenous human TFRC (hCMEC+hTFRC) in the presence or absence of holo-, total-, or apo-Transferrin (Tf), and for transduction in the brain, spinal cord, liver, muscle, kidney, and heart in mice expressing a chimeric form of TFRC where the extracellular domain of mouse Tfrc (Exons 4-19) have been replaced by the corresponding coding sequence for the extracellular domain of human TFRC (B-hTFR1 mice, Biocytogen). In addition, applicants also developed a two-step assay where AAV-BI30, a capsid that selectively transduces CNS endothelial cells (Krolak et al 2022) was first administered intravenously to immunodeficient NSG mice to express human TFRC, or mouse LY6A as a control, in the CNS vasculature. Subsequently, following expression (4 weeks) from AAV-BI30, the capsid library was administered intravenously and tissue samples were collected 4 weeks later. Capsid sequences are provided that were found to (1) bind TFR1-Fc fusion proteins with and without an additional 10 minute wash step in dPBS (pH5.5) (Table 14), (2) bind CHO cells expressing human TFRC (Table 15), (3) bind hCMEC and hCMEC+hTFRC (Table 16), (4) transduce hCMEC and hCMEC+hTFRC cells (Table 17), express Cap in the CNS of KI and/or 2-step TFRC mice (Table 18), bind hCMEC+hTFRC cells in the absence of Tf or in the presence of holo-, apo-, or total-Tf (Table 19).

Experiment 6: Screening for Capsids that Bind Human, Macaque, Marmoset TFR1-Fc Fusion Proteins

[0482] A new AAV9 K499R 7-mer 588 insertion library was screened for variants capable of selectively binding human, macaque, and mouse TFRC when produced as an Fc fusion protein. Top variants that were found to be enriched through binding human TFR1-Fc are provided (Table 20).

### Selection of Top Functional Variants Based on Convergence Across Multiple Functional Assays

[0483] To identify top candidate capsids that engage TFR1 through specific motifs, applicants grouped the recovered sequences from Experiment 5 into 10 families and genera based on common sequence elements (Table 21). The motif definitions were used to extract all of the capsid sequences within the library that conformed to each family or genus definition regardless of activity. Values are reported as the log 2 enrichment (human TFR1-Fc binding assay RPM/AAV library RPM) for all sequences within the library for each motif (FIG. 24). Data for AAV9 and a set of negative control sequences (previously determined not to bind human TFRC-Fc) were included to facilitate interpretation of the enrichment scores relative to the parental vector and non-binding capsid sequences. Individual 7-mer AA sequences were encoded by two or more nucleotide references. Note that for each family and genus definition, the vast majority of the tested sequences were found to bind human TFR1-Fc better than AAV9 or the control capsid set (FIG. 24).

[0484] Next, top candidate capsids representing many of the families described above were chosen based on several functional attributes including production fitness (manufacturability), binding enrichment at pH 7 and following a low pH wash (pH 5.5), binding and transduction of hCMEC cells, binding in the presence of Tf (the preferred states are moderate or insensitive), CNS transduction in the humanized mouse models (B-hTFR1 KI mice and 2-step TFRC mice), and liver transduction in the B-hTFR1 mice (Table 22). Exemplary choices from several families include, but are not limited to, LHRLGPN (SEQ ID NO: 36834), YSRIGPN (SEQ ID NO: 14632) or YARTGPN (SEQ ID NO: 14269) in Family 1; LHAKLPN (SEQ ID NO: 36316) in Family 2; VESTNGR (SEQ ID NO: 36431), VQSTNGV (SEQ ID NO: 36423), and TESTNGR (SEQ ID NO: 17558) in Family 3; RMEDAYP (SEQ ID NO: 36895), RGEDVYP (SEQ ID NO: 36864), and RTYDSFP (SEQ ID NO: 37806) in Family 4; LCKPCLN (SEQ ID NO: 36936) or LCKPCLD (SEQ ID NO: 36437) in Family 5; KDDFTHF (SEQ ID NO: 36464), KDDFTTY (SEQ ID NO: 36336), and REDYVKW (SEQ ID NO: 37652) in Family 7; and NALEGRD (SEQ ID NO: 36407) and IALKGWD (SEQ ID NO: 36248) in Family 8.

### Tables Cont.

[0485] Table 14. Capsid that selectively bind to TFR1-Fc fusion proteins. A second round 7-mer 588 insertion library was screened for capsids that bind human, macaque, marmoset, or mouse TFR1-Fc fusion proteins in a pull-down assay. The binding assays were performed at pH7. In some assays the pulled down fusion protein-capsid complexes were washed with pH 5.5 buffer for 10 minutes (+pH5.5 wash). The table provides an assessment of the enrichment of capsids as assessed by Illumina sequencing where the enrichment is the log 2 assay reads per million (RPM)/RPM in the virus library before screening. Enrichment scores are listed within the following ranges: “−”<=0; “+”>0 to <=2; “++”>2 to <=3; “+++”>3.

[0486] Table 15. Capsids that selectively bind human TFR1-Fc fusion protein and CHO cells expressing TFRC. A second round 7-mer 588 insertion library was screened for capsids that bind (b) and transduce (t) control CHO cells or CHO cells stabling expressing human, macaque, marmoset, or mouse TFRC. The table provides an assessment of the enrichment of capsids as assessed by Illumina sequencing where the enrichment is the log 2 assay reads per million (RPM)/RPM of each variant in the virus library. Enrichment scores are listed within the following ranges: “−”<=0; “+”>0 to <=2; “++”>2 to <=3; “+++”>3.

[0487] Table 16. Capsids that bind hCMEC/D3s. A second round 7-mer 588 insertion library was screened for capsids that bind the hCMEC/D3 human brain endothelial cell line, which endogenously expresses TFRC (hCMEC binding) or hCMEC/D3 cells made to stably express human TFRC via transduction with a human TFRC expressing lentivirus (hCMEC-hTFRC binding). The table provides an assessment of the enrichment of capsids as assessed by Illumina sequencing where the enrichment is the log 2 assay reads per million (RPM)/RPM of each variant in the virus library. Enrichment scores are listed within the following ranges: “−”<=0; “+”>0 to <=1; “++”>1 to <=2; “+++”>2.

[0488] Table 17. Capsids that transduce hCMEC/D3s. A second round 7-mer 588 insertion library was screened for capsids that transduce the hCMEC/D3 human brain endothelial cell line, which endogenously expresses TFRC (hCMEC binding) or hCMEC/D3 cells made to stably express human TFRC via transduction with a human TFRC expressing lentivirus (hCMEC-hTFRC binding). The table provides an assessment of the enrichment of capsids as assessed by RT-PCR followed by Illumina sequencing where the enrichment is the log 2 assay reads per million (RPM)/RPM of each variant in the virus library. Enrichment scores are listed within the following ranges: “−”<=0; “+”>0 to <=1; “++”>1 to <=3; “+++”>3.

[0489] Table 18. Capsids that transduced cells in vivo following intravenous administration of a second round AAV library to mice engineered to express human TFRC or Lyba as a control. A second round 7-mer 588 insertion library was screened for capsids that transduce cells in the CNS of B-hTFR1mice. The same library was also administered to NGS mice made to express human TFRC (2-step assay) via an AAV-BI30 packaging AAV-CAG-hTFRC or AAV-CMV-CBA-hTFRC. As controls, the same library was also administered to separate cohorts of mice injected with AAV-CAG-Ly6a or AAV-CMV-CBA-Ly6a. The table provides an assessment of the enrichment of capsids as assessed by RT-PCR in the indicated in vivo assays followed by Illumina sequencing. Enrichment is the log 2 assay reads per million (RPM)/RPM of each variant in the virus library. Enrichment scores are listed within the following ranges: “−”<=0; “+”>0 to <=1; “+”>1 to <=3; “+”>3.

[0490] Table 19. Capsid binding to hCMEC-hTFRC cells in the presence or absence of human Transferrin (Tf). A second round 7-mer 588 insertion library was screened for capsids that bind hCMEC/D3 human brain endothelial cells made to stably express human TFRC via transduction with a human TFRC expressing lentivirus (hCMEC-hTFRC binding) in the absence of Tf (no Tf) or in the presence of total-Tf, holo-Tf, or apo-Tf (2 ug/ul). The table provides an assessment of the enrichment of capsids as assessed by PCR followed by Illumina sequencing where the enrichment is the log 2 assay reads per million (RPM)/RPM of each variant in the virus library. Enrichment scores are listed within the following ranges: “−”<=0; “+”>0 to <=1; “++”>1 to <=3; “+++”>3.

[0491] Table 20. Capsid binding to human or macaque TFR1-Fc fusion proteins and transduction in vivo following intravenous administration to mice expressing human or macaque TFRC. A new second round 7-mer 588 insertion library was screened for capsids that bind human, macaque, or mouse TFR1-Fc fusion proteins. The same library was also administered to NGS mice made to express human TFRC (2-step assay) via AAV-BI30 packaging AAV-CAG-hTFRC or AAV-CAG-macaque-TFRC. As controls, a separate group of mice was left uninjected with a receptor encoding AAV (2-step, control). The table provides an assessment of the enrichment of capsids as assessed by RT-PCR followed by Illumina sequencing where the enrichment is the log 2 assay reads per million (RPM)/RPM of each variant in the virus library. Enrichment scores are listed within the following ranges: “−”<=0; “+”>0 to <=1; “++”>1 to <=3; “+++”>3.

[0492] Table 21. Sequence motif families. The table provides sequence motifs that define specific capsid families and genera, the total number of possible sequence species within the motif, the number of unique 7-mer sequences within each family or genus, and number and fraction of possible sequences from each motif that were tested in the library. Amino acids presented in brackets indicate amino acids acceptable at the specific position. For example, Genus 1.11 FSRLG[AHNLVSPT]N (SEQ ID NO: 42435) has the sequence F-S-R-L-G-X1-N(SEQ ID NO: 42436), where X₁ can be any amino acid with the brackets (AHNL VSPT (SEQ ID NO: 42437)).

| | | | Sequences | | |
|---|---|---|---|---|---|
| | | | with | | |
| | | Defining sequence motif | the motif | | Fraction |
| Family | Genus | (SEQ ID NOS: 42384-42428) | family/genus | Assayed | assayed |
| Family 1 | | [YMFL][SHTA][KR][AGILMNQSTV][NG] | 11520 | 1608 | 13.96% |
| | | [ATHNFIPLY][DN] | | | |
| Family 1 | Genus1.1 | [YML][SHTA]\|KR][AGILMNQSTV][N][ATHNFIPLY] | 4320 | 399 | 9.24% |
| | | [DN] | | | |
| Family 1 | Genus 1.2 | [YML][SHTA][KR][AGILMNQSTV][G] | 5760 | 825 | 14.32% |
| | | [AGFHILNPSTVY][DN] | | | |
| Family 1 | Genus 1.3 | [LY][AHS][KR][AGHILMNQSTV]GPD | 132 | 23 | 17.42% |
| Family 1 | Genus 1.4 | [LY][AHS][KR][AGHILMNQSTV]GPN | 132 | 71 | 53.79% |
| Family 1 | Genus 1.5 | YSK[AILMNQSTV]G[YPTQVFLHSAEDIM]N | 126 | 122 | 96.83% |
| Family 1 | Genus 1.6 | [LY]S[RK][VITLA][SA][PRYFHIKW]D | 320 | 42 | 13.13% |
| Family 1 | Genus1.7 | [FLMY]H[KR][ALM][AGLMNQST] | 4224 | 172 | 4.07% |
| | | [ADEFHILMNQPSTVY][DN] | | | |
| Family 1 | Genus 1.8 | [LMY]H[KR][ALM][AGLMNQST] | 1584 | 61 | 3.85% |
| | | [ADEFHILMNQPSTVY]N | | | |
| Family 1 | Genus1.9 | [LMY]H[KR][ALM][AGLMNQST] | 1584 | 87 | 5.49% |
| | | [ADEFHILMNQPSTVY]D | | | |
| Family 1 | Genus1.10 | [LMY]H[KR]L[SQGTNL][PTVIQLA]D | 252 | 38 | 15.08% |
| Family 1 | Genus1.11 | FSRLG[AHNLVSPT]N | 8 | 8 | 100.00% |
| Family 1 | Genus1.12 | FAR[TSN]G[YFHPA]N | 15 | 15 | 100.00% |
| Family 1 | Genus1.13 | FH[KR]LG[IPS][ND] | 12 | 5 | 41.67% |
| Family2 | Genus2.1 | [YL]HA[KRNA][GQLS][PLINDT]N | 192 | 17 | 8.85% |
| Family3 | | [AFHILNPRSTVY][ADEFGHIKLMNQRSTWY]S | 1224 | 657 | 53.68% |
| | | [STING]IRV] | | | |
| Family3 | Genus3.1 | [FLY][DEHNQST]S[STING[IV] | 84 | 63 | 75.00% |
| Family3 | Genus3.2 | [VPISTHA][ADEFGHIKLMNQRSTY]S[ST]NG[IV] | 448 | 315 | 70.31% |
| Family3 | Genus3.3 | [AFILPSTVY][DENQST]S[TS]NGR | 90 | 35 | 38.89% |
| Family3 | Genus3.4 | R[EDQTIS[ST]NG[IV] | 16 | 9 | 56.25% |
| Family4 | | R[TLMSGDNE][GEDIFHSAMPVY]D[AVST][YF][AP] | 1536 | 184 | 11.98% |
| Family4 | Genus4.1 | R[TMLS][YSAMIFP]D[AVST][YF]P | 224 | 69 | 30.80% |
| Family4 | Genus4.2 | R[TMLS][YSAMIFP]D[AVST][YF]A | 224 | 13 | 5.80% |
| Family4 | Genus4.3 | R[GTDSNE][EDPSG][DTEHN][VAT][YF]P | 900 | 132 | 14.67% |
| Family4 | Genus4.4 | R[GLTDS][DPSG][DEHN][VT][YF]P | 320 | 53 | 16.56% |
| Family4 | Genus4.5 | T[RKYW][EWYQST]GD[PA][AP] | 96 | 11 | 11.46% |
| Family5 | | LC[KR]PC[LSDANQHPV][ETGADNS] | 126 | 32 | 25.40% |
| Family6 | Genus6.1 | [YF][WFY][TS]G[ITVQMH][IPHLMAQTV][ASDE] | 2592 | 445 | 17.17% |
| Family6 | Genus6.2 | [YF][WFY][TS]G[ITVQMH][KR][ASDE] | 576 | 89 | 15.45% |
| Family6 | Genus6.3 | [YF][WFY][TS]G[KR][IPHLMAQTV][ASDE] | 864 | 201 | 23.26% |
| Family6 | Genus6.4 | YFTG[KRQMHI][TRHKVL]E | 36 | 27 | 75.00% |
| Family6 | Genus6.5 | YF[TSHA]G[KRT][IPHLMAQT][DN] | 192 | 58 | 30.21% |
| Family6 | Genus6.6 | YWTG[KMVT][PVIHQTML][ED] | 64 | 37 | 57.81% |
| Family6 | Genus6.7 | [YF]F[SHAQ]G[KQR][IVLKHRQM]E | 192 | 60 | 31.25% |
| Family7 | Genus7.1 | [KR][DSN]EF[TKSRV][TSGV][FWY] | 360 | 77 | 21.39% |
| Family7 | Genus7.2 | [KR]DD[FY][TSVH][TSGVA][FWY] | 240 | 68 | 28.33% |
| Family7 | Genus7.3 | [SRGNTMQ]DG[TVSNY]S[KR]W | 70 | 32 | 45.71% |
| Family7 | Genus7.4 | [RVDIQK][MLG][SEARQ]DR[TASGKN]W | 540 | 44 | 8.15% |
| Family7 | Genus7.5 | [DIEQVSK][LMGP][EASDQT][SA]R[DSETGA]W | 2016 | 194 | 9.62% |
| Family7 | Genus7.6 | G[ESPGA][DEPN][GHTSN]V[RKS][WY] | 600 | 60 | 10.00% |
| Family7 | Genus7.7 | RE[DEPN][GHTSN]V[RKS][WY] | 120 | 17 | 14.17% |
| Family7 | Genus7.8 | G[GS][GESAPD][TGS]S[STHKRAN]W | 252 | 74 | 29.37% |
| Family8 | | [VIRND][AGS][LTSHG][KRE]G[WRAI][DG] | 1800 | 50 | 2.78% |
| Family9 | | [LMW][FRWKTY][DS]GT[PGSNAR][APSY] | 864 | 56 | 6.48% |
| Family10 | | [PNK][YF]A[RK]S[PVARILSE][EDML] | 384 | 23 | 5.99% |

[0493] Table 22. Top performing capsids across multiple measures relevant to traits important for a CNS gene therapy vector. Data from a second-round library was used to identify capsid sequences with in vivo BBB crossing activity in either or both B-hTFR1 KI mice or in NSG mice made to express human TFRC in brain vascular endothelial cells using AAV-BI30: CAG-human TFRC. Production fitness was assessed as log 2 enrichment for each sequence in the AAV library AAV RPM/plasmid library DNA RPM in two separate library batches, one used for in vivo studies and one used for in vitro studies. pH sensitive binding was assessed as log 2 enrichment (Fc-hTFR1 binding and washing at pH 7) minus log 2 enrichment (Fc-hTFR1 binding pH 7 and washing at pH 7 plus a final pH 5.5 rinse (dPBS) and incubation for 10 min). Capsids were screened to assess whether they are sensitive to competition for binding to TFR1 from human Transferrin (Tf) by assessing binding to hCMEC-hTFRC expressing cells at 4C in the presence of holo-Tf or no-Tf. Insensitive, moderate, and sensitive scores were defined as log 2 (enrichment score, hCMEC-hTFR+holo-Tf) minus log 2 (enrichment score, hCMEC-hTFR noTf >−0.4, <=−0.4 to −1, and <−1, respectively).

TABLE 23
Primers used for qPCR in this study.

| Primer name | Primer sequence |
|---|---|
| huTfR1-qPCR-F | GCTATGGGACTATTGCTGTGATCGTC (SEQ ID NO: |
| | 42438) |
| huTfR1-qPCR-R | CCAATATAAGCGACGTGCTGCAG (SEQ ID NO: 42439) |
| msTfR1-qPCR-F | TGTGGAGATGAAACTGGCTGC (SEQ ID NO: 42440) |
| msTfR1-qPCR-R | AGTGCAATAGCTGCAAAGCAGAG (SEQ ID NO: 42441) |
| marTfR1-qPCR-F | AACAAGAGCGTGAAGCTCTCTG (SEQ ID NO: 42442) |
| marTfR1-qPCR-R | CTCCAGGACCCCAGGAGTC (SEQ ID NO: 42443) |
| macTfR1-qPCR-F | GGAAAACAAGAGTGTGAAGCTCACG (SEQ ID NO: |
| | 42444) |
| macTfR1-qPCR-R | GGAGAGCTGTCCCCACACTG (SEQ ID NO: 42445) |
| MSCARLET-QPCR-F | CCGTGACCCAGGACACCTC (SEQ ID NO: 42432) |
| mScarlet-qPCR-R | CTTCTTCTGCATTACGGGGC (SEQ ID NO: 42446) |
| GAPDH-qPCR-F | ACCACAGTCCATGCCATCAC (SEQ ID NO: 42447) |
| GAPDH-qPCR-R | TCCACCACCCTGTTGCTGTA (SEQ ID NO: 42448) |
| mGlucagon-qPCR-F | AAGGGACCTTTACCAGTGATGTG (SEQ ID NO: 42449) |
| mGlucagon-qPCR-R | ACTTACTCTCGCCTTCCTCGG (SEQ ID NO: 42450) |
| msTfR1-exonland2-F | CTAACTTGTTTGGTGGGGAAC (SEQ ID NO: 42451) |
| msTfR1-exonland2-R | CTTCATCTGCAGCCAGTTTCAT (SEQ ID NO: 42452) |
| genotyping-h&mTFRC-F | CTCGTGAGGCTGGATCTCAAAAAGATG (SEQ ID NO: |
| | 42453) |
| genotyping-hTFRC-R | CACCAGGTAAACAAGTCTACCGTTCTTATC (SEQ ID |
| | NO: 42454) |
| genotyping-mTFRC-R | ACTGGGTCTAAGTTACCATTTGACTGC (SEQ ID NO: |
| | 42455) |

[0494] Various modifications and variations of the described methods, pharmaceutical compositions, and kits of the invention will be apparent to those skilled in the art without departing from the scope and spirit of the invention. Although the invention has been described in connection with specific embodiments, it will be understood that it is capable of further modifications and that the invention as claimed should not be unduly limited to such specific embodiments. Indeed, various modifications of the described modes for carrying out the invention that are obvious to those skilled in the art are intended to be within the scope of the invention. This application is intended to cover any variations, uses, or adaptations of the invention following, in general, the principles of the invention and including such departures from the present disclosure come within known customary practice within the art to which the invention pertains and may be applied to the

1. A composition comprising a targeting moiety effective to increase transduction of central nervous system (CNS) tissues via binding to a transferrin receptor (TFRC), optionally further comprising a cargo coupled to or otherwise associated with the targeting moiety.

2. The composition of claim 1, wherein the targeting moiety binds to an extracellular domain of the TFRC,
optionally, wherein the targeting moiety binds to one or more of an apical, helical, and/or protease-like domain of the extracellular domain, and
optionally, wherein the targeting moiety binds to the apical domain.

3-4. (canceled)

5. The composition of claim 1,
wherein the targeting moiety comprises a n-mer motif, the n-mer motif comprising or consisting of an amino acid sequence of X₁-X₂-X₃-X₄-X₅-X₆-X₇,
wherein:
X₁ comprises an amino acid chosen from Y, M, F, and L;
X₂ comprises an amino acid chosen from S, H, T, and A;
X₃ comprises an amino acid chosen from K and R;
X₄ comprises an amino acid chosen from A, G, I, L, M, N, Q, S, T, V and H;
X₅ comprises an amino acid chosen from N, G, A, L, M, Q, S, and T;
X₆ comprises an amino acid chosen from A, T, H, N, F, I, P, L, Y, G, S, V, D, E, M, and Q; and
X₇ comprises an amino acid chosen from D and N;
or
wherein the targeting moiety comprises a n-mer motif, the n-mer motif comprising or consisting of an amino acid sequence of X₁-X₂-X₃-X₄-X₅-X₆-X₇,
wherein:
X₁ comprises an amino acid chosen from Y or L;
X₂ comprises amino acid H;
X₃ comprises amino acid A;
X₄ comprises an amino acid chosen from K, R, N, and A;
X₅ comprises an amino acid chosen from G, Q, L, and S;
X₆ comprises an amino acid chosen from P, L, I, N, D, and T; and
X₇ comprises an amino acid chosen from N,
or
wherein the targeting moiety comprises a n-mer motif, the n-mer motif comprising or consisting of an amino acid sequence of X₁-X₂-X₃-X₄-X₅-X₆-X₇,
wherein:
X₁ comprises an amino acid chosen from A, F, H, I, L, N, P, R, S, T, V, and Y;
X₂ comprises an amino acid chosen from A, D, E, F, G, H, I, K, L, M, N, Q, R, S, T, W, and Y;
X₃ comprises amino acid S;
X₄ comprises an amino acid chosen from S and T;
X₅ comprises amino acid N;
X₆ comprises amino acid G; and
X₇ comprises an amino acid chosen from I, R, and V,
or
wherein the targeting moiety comprises a n-mer motif, the n-mer motif comprising or consisting of an amino acid sequence of X₁-X₂-X₃-X₄-X₅-X₆-X₇,
wherein:
X₁ comprises an amino acid chosen from R and T;
X₂ comprises an amino acid chosen from T, L, M, S, G, D, N, E, R, K, Y, and W;
X₃ comprises an amino acid chosen from G, E, D, I, F, H, S, A, M, P, V, Y, W, Q, and T;
X₄ comprises an amino acid chosen from D, T, E, H, N, and G;
X₅ comprises an amino acid chosen from A, V, S, T, and D;
X₆ comprises an amino acid chosen from Y, F, P and A; and
X₇ comprises an amino acid chosen from A and P,
or
wherein the targeting moiety comprises a n-mer motif, the n-mer motif comprising or consisting of an amino acid sequence of X₁-X₂-X₃-X₄-X₅-X₆-X₇,
wherein:
X₁ comprises amino acid L;
X₂ comprises amino acid C;
X₃ comprises an amino acid chosen from K and R;
X₄ comprises amino acid P;
X₅ comprises amino acid C;
X₆ comprises an amino acid chosen from L, S, D, A, N, Q, H, P, and V; and
X₇ comprises an amino acid chosen from E, T, G, A, D, N, and S,
or
wherein the targeting moiety comprises a n-mer motif, the n-mer motif comprising or consisting of an amino acid sequence of X₁-X₂-X₃-X₄-X₅-X₆-X₇,
wherein:
X₁ comprises an amino acid chosen from Y, and F;
X₂ comprises an amino acid chosen from W, F, and Y;
X₃ comprises an amino acid chosen from S, T, H, A and Q;
X₄ comprises amino acid G;
X₅ comprises an amino acid chosen from I, T, V, Q, M, H, K, and R;
X₆ comprises an amino acid chosen from I, P, H, L, M, A, Q, T, V, K, and R; and
X₇ comprises an amino acid chosen from A, S, D, E, and N,
or
wherein the targeting moiety comprises a n-mer motif, the n-mer motif comprising or consisting of an amino acid sequence of X₁-X₂-X₃-X₄-X₅-X₆-X₇,
wherein:
X₁ comprises an amino acid chosen from K, R, S, G, N, T, M, Q, V, D, I, and E;
X₂ comprises an amino acid chosen from D, S, N, M, L, G, P, E, and A;
X₃ comprises an amino acid chosen from E, D, G, S, A, R, Q, T, P, and N;
X₄ comprises an amino acid chosen from F, Y, T, V, S, N, A, G, and H;
X₅ comprises an amino acid chosen from T, K, S, R, V, and H;
X₆ comprises an amino acid chosen from T, S, G, V, A, K, R, N, D, E, and H; and
X₇ comprises an amino acid chosen from F, W, and Y,
or
wherein the targeting moiety comprises a n-mer motif, the n-mer motif comprising or consisting of an amino acid sequence of X₁-X₂-X₃-X₄-X₅-X₆-X₇,
wherein:
X₁ comprises an amino acid chosen from V, I, R, N and D;
X₂ comprises an amino acid chosen from A, G, and S;
X₃ comprises an amino acid chosen from L, T, S, H, and G;
X₄ comprises an amino acid chosen from K, R, and E;
X₅ comprises amino acid G;
X₆ comprises an amino acid chosen from W, R, A, and I; and
X₇ comprises an amino acid chosen from D and G,
or
wherein the targeting moiety comprises a n-mer motif, the n-mer motif comprising or consisting of an amino acid sequence of X₁-X₂-X₃-X₄-X₅-X₆-X₇,
wherein:
X₁ comprises an amino acid chosen from L, M, and W;
X₂ comprises an amino acid chosen from F, R, W, K, T, and Y;
X₃ comprises an amino acid chosen from D and S;
X₄ comprises amino acid G;
X₅ comprises amino acid T;
X₆ comprises an amino acid chosen from P, G, S, N, A, and R; and
X₇ comprises an amino acid chosen from A, P, S, and Y,
or
wherein the targeting moiety comprises a n-mer motif, the n-mer motif comprising or consisting of an amino acid sequence of X₁-X₂-X₃-X₄-X₅-X₆-X₇,
wherein:
X₁ comprises an amino acid chosen from P, N, and K;
X₂ comprises an amino acid chosen from Y and F;
X₃ comprises amino acid A;
X₄ comprises an amino acid chosen from R and K;
X₅ comprises amino acid S;
X₆ comprises an amino acid chosen from P, V, A, R, I, L, S, E; and
X₇ comprises an amino acid chosen from E, D, M, and L,
or
wherein the targeting moiety comprises a n-mer motif, the n-mer motif comprising or consisting of an amino acid sequence of Z₁-X₁-Z₂-X₂-X₃-X₄-X₅
wherein
Z₁ is selected from the group consisting of Y, F, and L,
Z₂ is selected from the group consisting of S, R, and K, and
X₁-X₅ are independently selected amino acids, or
wherein the targeting moiety comprises a n-mer motif, the n-mer motif comprising or consisting of an amino acid sequence of X₁-H-X₂-L-X₃-X₄-X₅,
wherein
X₁-X₅ are independently selected amino acids,
or
wherein the targeting n-mer motif is a 7-mer peptide having an amino acid sequence chosen from any one of SEQ ID NOs: 10952-20481 and 36241-42428.

6. The composition of claim 0,
wherein the n-mer motif is comprising or consisting of the amino acid sequence of X₁-X₂-X₃-X₄-X₅-X₆-X₇ and:
wherein
X₁ comprises an amino acid chosen from Y, M, and L;
X₂ comprises an amino acid chosen from S, H, T, and A;
X₃ comprises an amino acid chosen from K and R;
X₄ comprises an amino acid chosen from A, G, I, L, M, N, Q, S, T, and V;
X₅ comprises amino acid N;
X₆ comprises an amino acid chosen from A, T, H, N, F, I, P, L, and Y; and
X₇ comprises an amino acid chosen from D and N;
or
X₁ comprises an amino acid chosen from Y, M, and L;
X₂ comprises an amino acid chosen from S, H, T, and A;
X₃ comprises an amino acid chosen from K and R;
X₄ comprises an amino acid chosen from A, G, I, L, M, N, Q, S, T, and V;
X₅ comprises amino acid G;
X₆ comprises an amino acid chosen from A, G, F, H, I, L, N, P, S, T, V, and Y; and
X₇ comprises an amino acid chosen from D and N;
or
X₁ comprises an amino acid chosen from L and Y;
X₂ comprises an amino acid chosen from A, H, and S;
X₃ comprises an amino acid chosen from K and R;
X₄ comprises an amino acid chosen from A, G, H, I, L, M, N, Q, S, T, and V;
X₅ comprises amino acid G;
X₆ comprises amino acid P; and
X₇ comprises amino acid D;
or
X₁ comprises an amino acid chosen from L and Y;
X₂ comprises an amino acid chosen from A, H, and S;
X₃ comprises an amino acid chosen from K and R;
X₄ comprises an amino acid chosen from A, G, H, I, L, M, N, Q, S, T, and V;
X₅ comprises amino acid G;
X₆ comprises amino acid P; and
X₇ comprises amino acid N;
or
X₁ comprises amino acid Y;
X₂ comprises amino acid S;
X₃ comprises amino acid K;
X₄ comprises an amino acid chosen from A, I, L, M, N, Q, S, T, and V;
X₅ comprises amino acid G;
X₆ comprises amino acid X; and
X₇ comprises an amino acid chosen from Y, P, T, Q, V, F, L, H, S, A, E, D, I, and M;
or
X₁ comprises an amino acid chosen from L and Y;
X₂ comprises amino acid S;
X₃ comprises an amino acid chosen from R and K;
X₄ comprises an amino acid chosen from V, I, T, L, and A;
X₅ comprises an amino acid chosen from S and A;
X₆ comprises an amino acid chosen from P, R, Y, F, H, I, K, and W; and
X₇ comprises amino acid D;
or
X₁ comprises an amino acid chosen from F, L, M, and Y;
X₂ comprises amino acid H;
X₃ comprises an amino acid chosen from K and R;
X₄ comprises an amino acid chosen from A, L, and M;
X₅ comprises an amino acid chosen from A, G, L, M, N, Q, S, and T;
X₆ comprises an amino acid chosen from A, D, E, F, H, I, L, M, N, Q, P, S, T, V, and Y; and
X₇ comprises an amino acid chosen from D and N;
or
X₁ comprises an amino acid chosen from L, M, and Y;
X₂ comprises amino acid H;
X₃ comprises an amino acid chosen from K and R;
X₄ comprises an amino acid chosen from A, L, and M;
X₅ comprises an amino acid chosen from A, G, L, M, N, Q, S, and T;
X₆ comprises an amino acid chosen from A, D, E, F, H, I, L, M, N, Q, P, S, T, V, and Y; and
X₇ comprises amino acid N;
or
X₁ comprises an amino acid chosen from L, M, and Y;
X₂ comprises amino acid H;
X₃ comprises an amino acid chosen from K and R;
X₄ comprises an amino acid chosen from A, L, and M;
X₅ comprises an amino acid chosen from A, G, L, M, N, Q, S, and T;
X₆ comprises an amino acid chosen from A, D, E, F, H, I, L, M, N, Q, P, S, T, V, and Y; and
X₇ comprises amino acid D;
or
X₁ comprises an amino acid chosen from L, M, and Y;
X₂ comprises amino acid H;
X₃ comprises an amino acid chosen from K and R;
X₄ comprises amino acid L;
X₅ comprises an amino acid chosen from S, Q, G, T, N, and L;
X₆ comprises an amino acid chosen from P, T, V, I, Q, L, and A; and
X₇ comprises amino acid D;
or
X₁ comprises amino acid F;
X₂ comprises amino acid S;
X₃ comprises amino acid R;
X₄ comprises amino acid L;
X₅ comprises amino acid G;
X₆ comprises an amino acid chosen from A, H, N, L, V, S, P, and T; and
X₇ comprises amino acid N;
or
X₁ comprises amino acid F;
X₂ comprises amino acid A;
X₃ comprises amino acid R;
X₄ comprises an amino acid chosen from T, S, and N;
X₅ comprises amino acid G;
X₆ comprises an amino acid chosen from Y, F, H, P, and A; and
X₇ comprises amino acid N;
or
X₁ comprises amino acid F;
X₂ comprises amino acid H;
X₃ comprises an amino acid chosen from K and R;
X₄ comprises amino acid L;
X₅ comprises amino acid G;
X₆ comprises an amino acid chosen from I, P, and S; and
X₇ comprises an amino acid chosen from N and D;
or
X₁ comprises an amino acid chosen from F, L, and Y;
X₂ comprises an amino acid chosen from D, E, H, N, Q, S, and T;
X₃ comprises amino acid S;
X₄ comprises an amino acid chosen from S and T;
X₅ comprises amino acid N;
X₆ comprises amino acid G; and
X₇ comprises an amino acid chosen from I and V;
or
X₁ comprises an amino acid chosen from V, P, I, S, T, H, and A;
X₂ comprises an amino acid chosen from A, D, E, F, G, H, I, K, L, M, N, Q, R, S, T, and Y;
X₃ comprises amino acid S;
X₄ comprises an amino acid chosen from S and T;
X₅ comprises amino acid N;
X₆ comprises amino acid G; and
X₇ comprises an amino acid chosen from I and V;
or
X₁ comprises an amino acid chosen from A, F, I, L, P, S, T, V, and Y;
X₂ comprises an amino acid chosen from D, E, N, Q, S, and T;
X₃ comprises amino acid S;
X₄ comprises an amino acid chosen from T and S;
X₅ comprises amino acid N;
X₆ comprises amino acid G; and
X₇ comprises amino acid R;
or
X₁ comprises amino acid R;
X₂ comprises an amino acid chosen from E, D, Q, and T;
X₃ comprises amino acid S;
X₄ comprises an amino acid chosen from S and T;
X₅ comprises amino acid N;
X₆ comprises amino acid G; and
X₇ comprises an amino acid chosen from I and V;
or
X₁ comprises amino acid R;
X₂ comprises an amino acid chosen from T, M, L, and S;
X₃ comprises an amino acid chosen from Y, S, A, M, I, F, and P;
X₄ comprises amino acid D;
X₅ comprises an amino acid chosen from A, V, S, and T;
X₆ comprises an amino acid chosen from Y and F; and
X₇ comprises amino acid P;
or
X₁ comprises amino acid R;
X₂ comprises an amino acid chosen from T, M, L, and S;
X₃ comprises an amino acid chosen from Y, S, A, M, I, F, and P;
X₄ comprises amino acid D;
X₅ comprises an amino acid chosen from A, V, S, and T;
X₆ comprises an amino acid chosen from Y and F; and
X₇ comprises amino acid A:
or X₁ comprises amino acid R;
X₂ comprises an amino acid chosen from G, T, D, S, N, and E;
X₃ comprises an amino acid chosen from E, D, P, S, and G;
X₄ comprises an amino acid chosen from D, T, E, H, and N;
X₅ comprises an amino acid chosen from V, A, and T;
X₆ comprises an amino acid chosen from Y and F; and
X₇ comprises amino acid P;
or
X₁ comprises amino acid R;
X₂ comprises an amino acid chosen from G, L, T, D, and S;
X₃ comprises an amino acid chosen from D, P, S, and G;
X₄ comprises an amino acid chosen from D, E, H, and N;
X₅ comprises an amino acid chosen from V and T;
X₆ comprises an amino acid chosen from Y and F; and
X₇ comprises amino acid P;
or
X₁ comprises amino acid T;
X₂ comprises an amino acid chosen from R, K, Y, and W;
X₃ comprises an amino acid chosen from E, W, Y, Q, S, and T;
X₄ comprises amino acid G;
X₅ comprises amino acid D;
X₆ comprises an amino acid chosen from P and A; and
X₇ comprises an amino acid chosen from A and P;
or X₁ comprises an amino acid chosen from Y and F;
X₂ comprises an amino acid chosen from W, F, and Y;
X₃ comprises an amino acid chosen from T and S;
X₄ comprises amino acid G;
X₅ comprises an amino acid chosen from I, T, V, Q, M, and H;
X₆ comprises an amino acid chosen from I, P, H, L, M, A, Q, T, and V; and
X₇ comprises an amino acid chosen from A, S, D, and E;
or
X₁ comprises an amino acid chosen from Y and F;
X₂ comprises an amino acid chosen from W, F, and Y;
X₃ comprises an amino acid chosen from T and S;
X₄ comprises amino acid G;
X₅ comprises an amino acid chosen from I, T, V, Q, M, and H;
X₆ comprises an amino acid chosen from K and R; and
X₇ comprises an amino acid chosen from A, S, D, and E;
or
X₁ comprises an amino acid chosen from Y and F;
X₂ comprises an amino acid chosen from W, F, and Y;
X₃ comprises an amino acid chosen from T and S;
X₄ comprises amino acid G;
X₅ comprises an amino acid chosen from K and R;
X₆ comprises an amino acid chosen from I, P, H, L, M, A, Q, T, and V; and
X₇ comprises an amino acid chosen from A, S, D, and E;
or
X₁ comprises amino acid Y;
X₂ comprises amino acid F;
X₃ comprises amino acid T;
X₄ comprises amino acid G;
X₅ comprises an amino acid chosen from K, R, Q, M, H, and I;
X₆ comprises an amino acid chosen from T, R, H, K, V, and L; and
X₇ comprises amino acid E;
or
X₁ comprises amino acid Y;
X₂ comprises amino acid F;
X₃ comprises an amino acid chosen from T, S, H, and A;
X₄ comprises amino acid G;
X₅ comprises an amino acid chosen from K, R, and T;
X₆ comprises an amino acid chosen from I, P, H, L, M, A, Q, and T; and
X₇ comprises an amino acid chosen from D and N;
or
X₁ comprises amino acid Y;
X₂ comprises amino acid W;
X₃ comprises amino acid T;
X₄ comprises amino acid G;
X₅ comprises an amino acid chosen from K, M, V, and T;
X₆ comprises an amino acid chosen from P, V, I, H, Q, T, M, and L; and
X₇ comprises an amino acid chosen from E and D;
or
X₁ comprises an amino acid chosen from Y and F;
X₂ comprises amino acid F;
X₃ comprises an amino acid chosen from S, H, A, and Q;
X₄ comprises amino acid G;
X₅ comprises an amino acid chosen from K, Q, and R;
X₆ comprises an amino acid chosen from I, V, L, K, H, R, Q, and M; and
X₇ comprises amino acid E
or
X₁ comprises an amino acid chosen from K and R;
X₂ comprises an amino acid chosen from D, S, and N;
X₃ comprises amino acid E;
X₄ comprises amino acid F;
X₅ comprises an amino acid chosen from T, K, S, R, and V;
X₆ comprises an amino acid chosen from T, S, G, and V; and
X₇ comprises an amino acid chosen from F, W, and Y;
or
X₁ comprises an amino acid chosen from K and R;
X₂ comprises amino acid D;
X₃ comprises amino acid D;
X₄ comprises an amino acid chosen from F and Y;
X₅ comprises an amino acid chosen from T, S, V, and H;
X₆ comprises an amino acid chosen from T, S, G, V, and A; and
X₇ comprises an amino acid chosen from F, W, and Y;
or
X₁ comprises an amino acid chosen from S, R, G, N, T, M, and Q;
X₂ comprises amino acid D;
X₃ comprises amino acid G;
X₄ comprises an amino acid chosen from T, V, S, N, and Y;
X₅ comprises amino acid S;
X₆ comprises an amino acid chosen from K and R; and
X₇ comprises amino acid W;
or
X₁ comprises an amino acid chosen from R, V, D, I, Q, and K;
X₂ comprises an amino acid chosen from M, L, and G;
X₃ comprises an amino acid chosen from S, E, A, R, and Q;
X₄ comprises amino acid D;
X₅ comprises amino acid R;
X₆ comprises an amino acid chosen from T, A, S, G, K, and N; and
X₇ comprises amino acid W;
or
X₁ comprises an amino acid chosen from D, I, E, Q, V, S, and K;
X₂ comprises an amino acid chosen from L, M, G, and P;
X₃ comprises an amino acid chosen from E, A, S, D, Q, and T;
X₄ comprises an amino acid chosen from S and A;
X₅ comprises amino acid R;
X₆ comprises an amino acid chosen from D, S, E, T, G, and A; and
X₇ comprises amino acid W;
or
X₁ comprises amino acid G;
X₂ comprises an amino acid chosen from E, S, P, G, and A;
X₃ comprises an amino acid chosen from D, E, P, and N;
X₄ comprises an amino acid chosen from G, H, T, S, and N;
X₅ comprises amino acid V;
X₆ comprises an amino acid chosen from R, K, and S; and
X₇ comprises an amino acid chosen from W and Y;
or
X₁ comprises amino acid R;
X₂ comprises amino acid E;
X₃ comprises an amino acid chosen from D, E, P, and N;
X₄ comprises an amino acid chosen from G, H, T, S, and N;
X₅ comprises amino acid V;
X₆ comprises an amino acid chosen from R, K, and S; and
X₇ comprises an amino acid chosen from W and Y;
or
X₁ comprises amino acid G;
X₂ comprises an amino acid chosen from G and S;
X₃ comprises an amino acid chosen from G, E, S, A, P, and D;
X₄ comprises an amino acid chosen from T, G, and S;
X₅ comprises amino acid S;
X₆ comprises an amino acid chosen from S, T, H, K, R, A, and N; and
X₇ comprises amino acid W,
or
wherein the n-mer motif is comprising or consisting the amino acid sequence Z₁-X₁-Z₂-X₂-X₃-X₄-X₅ and;
X₁ comprises an amino acid chosen from A, S, or H;
X₂ comprises an amino acid chosen from S, T, L, or I;
X₃ comprises an amino acid chosen from N or G;
X₄ comprises amino acid G;
X₅ comprises an amino acid chosen from N, D, I, V, or R;
or any combination thereof.

7. The composition of claim 0, wherein the n-mer motif is selected from the group consisting of LHRLGPN (SEQ ID NO: 36834), YSRIGPN (SEQ ID NO: 14632), LHRLGPN (SEQ ID NO: 36834), LHRLGPD (SEQ ID NO: 36413), LHRAGPD (SEQ ID NO: 36894), YSRIGPD (SEQ ID NO: 38223), LSRIGPD (SEQ ID NO: 36274), LARSGPD (SEQ ID NO: 18035), YSRNSDN (SEQ ID NO: 16626), LHKAGPN (SEQ ID NO: 36305), LSRIGPN (SEQ ID NO: 36347), LAKSGPN (SEQ ID NO: 36287), YARNGPN (SEQ ID NO: 14048) and YSRNSDN (SEQ ID NO: 16626).

8-11. (canceled)

12. The composition of claim 6, wherein the n-mer motif is selected from the group consisting of FRSTNGV (SEQ ID NO: 16070), VESTNGR (SEQ ID NO: 36431), VDSTNGV (SEQ ID NO: 12206), VQSTNGV (SEQ ID NO: 36423), VSSTNGV (SEQ ID NO: 12333), TESTNGR (SEQ ID NO: 17558), VQSTNGI (SEQ ID NO: 11292) and FVSTNGV (SEQ ID NO: 11162).

13-14. (canceled)

15. The composition of claim 6, wherein the n-mer motif is selected from the group consisting of RGEDVYP (SEQ ID NO: 36864), RLEDVFP (SEQ ID NO: 36264), RTYDSYP (SEQ ID NO: 37938), RTYDAYP (SEQ ID NO: 38571), RTYDSFP (SEQ ID NO: 37806), RTETVYP (SEQ ID NO: 36486), RTETVFP (SEQ ID NO: 36389), and RTEHVFP (SEQ ID NO: 36603).

16. (canceled)

17. The composition of claim 5, wherein the n-mer motif comprises of LCKPCLD (SEQ ID NO: 36437) or LCKPCPT (SEQ ID NO: 36438).

18-21. (canceled)

22. The composition of claim 6, wherein the n-mer motif is selected from the group consisting of KDEFTTF (SEQ ID NO: 36308), KDDFTTY (SEQ ID NO: 36336), RDEFTTY (SEQ ID NO: 36615), KDEFSTY (SEQ ID NO: 36390), RDEFTSF (SEQ ID NO: 36701), and REDHVSW (SEQ ID NO: 37067).

23. (canceled)

24. The composition of claim 5, wherein the n-mer motif is selected from the group consisting of IALKGWD (SEQ ID NO: 36248), NALEGRD (SEQ ID NO: 36407), VALEGRD (SEQ ID NO: 36604), and VALKGWD (SEQ ID NO: 17701).

25-32. (canceled)

33. The composition of claim 5, wherein the n-mer motif is selected from the group consisting of YSRIGPN (SEQ ID NO: 14632), YSRLNMN (SEQ ID NO: 14301), YSRLNKD (SEQ ID NO: 16577), and YHRLSNN (SEQ ID NO: 16636).

34. (canceled)

35. The composition of claim 5, wherein the n-mer motif is VHRLQDK (SEQ ID NO: 16602) or LHALSHN (SEQ ID NO: 16608).

36. The composition of claim 5, wherein the n-mer motif comprises PSATNGV (SEQ ID NO: 20486), QVSTNGI (SEQ ID NO: 16021), SYSSNGV (SEQ ID NO: 16234), HQSSNGV (SEQ ID NO: 15978), VGSINGI (SEQ ID NO: 16199), AMSTNGR (SEQ ID NO: 16000), SASTNGV (SEQ ID NO: 16127), YMSTNGV (SEQ ID NO: 16042), YYSSNGV (SEQ ID NO: 16206), VHSTNGI (SEQ ID NO: 16134), PLSTNGV (SEQ ID NO: 16233), VYSTNGI (SEQ ID NO: 16059), IISTNGV (SEQ ID NO: 16054), RSVSSNGV (SEQ ID NO: 20502), YKSSNGV (SEQ ID NO: 16123), FRSTNGV (SEQ ID NO: 16070), and/or FVSTNGV (SEQ ID NO: 11162).

37. The composition of claim 5, wherein the n-mer is selected from any one of the amino acid sequences as listed in Tables 1-22, SEQ ID NO: 10952-20481 and 36241-42428, or any combination thereof.

38. (canceled)

39. The composition of claim 1, wherein the targeting moiety is part of a viral capsid protein,
optionally, wherein the targeting moiety is inserted or substituted in loop IV, loop VIII, or both of an AAV capsid protein, and
optionally, wherein the targeting moiety is IPFSRVNPDT (SEQ ID NO: 20285), LGFARTGAAD (SEQ ID NO: 20274), LGFTKSSGSD (SEQ ID NO: 20270), LRYSKTQGES (SEQ ID NO: 20266), SPYARSSAGV (SEQ ID NO: 20271), VGWSRLDLTT (SEQ ID NO: 20262).

40. The composition of claim 5, wherein the targeting moiety is inserted or substituted in loop IV, loop VIII, or both of an AAV capsid protein, optionally wherein the targeting moiety is IPFSRVNPDT (SEQ ID NO: 20285), LGFARTGAAD (SEQ ID NO: 20274), LGFTKSSGSD (SEQ ID NO: 20270), LRYSKTQGES (SEQ ID NO: 20266), SPYARSSAGV (SEQ ID NO: 20271), VGWSRLDLTT (SEQ ID NO: 20262).

41. (canceled)

42. The composition of claim 39, wherein targeting moiety is inserted between two amino acids of one or more capsid proteins such that the targeting moiety is external to an AAV capsid.

43. The composition of claim 39, wherein the viral capsid protein is an AAV viral capsid protein, optionally wherein the capsid protein is VP1, VP2, VP3, or a combination thereof.

44. The composition of claim 1, wherein the targeting moiety is inserted between amino acids 588 and 589 of a capsid protein of AAV9, or in an analogous position of a capsid protein from AAV1, AAV2, AAV3, AAV4, AAV5, AAV6, AAV7, AAV8, AAVrh8, AAV rh.74, or AAV rh. 10 or wherein the targeting moiety is inserted between two consecutive amino acids within amino acid 451-460 of a capsid protein of AAV9, or in an analogous position of a capsid protein from AAV1, AAV2, AAV3, AAV4, AAV5, AAV6, AAV7, AAV8, AAVrh8, AAV rh.74, or AAV rh. 10.

45-46. (canceled)

47. The composition of claim 1, wherein the cargo is a polynucleotide, a recombinant AAV genome comprising a transgene, one or more polypeptides, a ribonucleoprotein complex,
optionally, wherein the polynucleotide is operably linked to a regulatory sequence that promotes expression in the CNS, and
optionally, wherein the polynucleotide encodes one or more polypeptides and/or a RNAi oligonucleotide,
optionally, wherein the one or more polypeptides comprise enzymes or antibodies, and
optionally, wherein the polynucleotide encodes a CRISPR-Cas system.

48-51. (canceled)

52. The composition of claim 47, wherein the polynucleotide is operably linked to a regulatory sequence that promotes expression in the CNS.

53. A viral capsid or viral particle, comprising the composition of claim 1,
optionally, wherein the viral capsid or viral particle is an AAV viral capsid or AAV viral particle, and
optionally, wherein the targeting moiety is inserted between amino acids of 588 and 589 of a capsid protein of AAV9, or in an analogous position of a capsid protein from AAV1, AAV2, AAV3, AAV4, AAV5, AAV6, AAV7, AAV8, AAVrh8, AAV rh.74, or AAV rh. 10.

54. The viral capsid or viral particle of claim 53, further comprising a recombinant viral genome, wherein the recombinant viral genome encodes a therapeutic protein or nucleic acid, control polypeptide or nucleic acid, and/or selectable marker polypeptide or nucleic acid,
optionally, wherein the therapeutic protein or nucleic acid, control polypeptide or nucleic acid, and/or selectable marker polypeptide or nucleic acid is operably linked to a regulatory sequence that promotes expression in the CNS, and
optionally, wherein the recombinant viral genome is a recombinant AAV viral genome.

55-58. (canceled)

59. A vector system comprising one or more vectors, wherein at least one of the one or more vectors encodes a targeting moiety effective to increase transduction of central nervous system tissues (CNS) via binding to a transferrin receptor (TFRC), and optionally wherein at least one of the one or more vectors encodes a recombinant AAV genome comprising a transgene encoding a protein or a polypeptide, optionally further comprising a cargo.

60. The vector system of claim 59, wherein the targeting moiety binds to an extracellular domain of the TFRC,
optionally, wherein the targeting moiety binds to one or more of an apical, helical, and/or protease-like domain of the extracellular domain.

61-62. (canceled)

63. The vector system of claim 59, wherein the targeting moiety comprises a n-mer motif,
wherein the targeting n-mer motif peptide is a 7-mer peptide having an amino acid sequence of X₁-X₂-X₃-X₄-X₅-X₆-X₇,
wherein:
X₁ comprises an amino acid chosen from Y, M, F, and L;
X₂ comprises an amino acid chosen from S, H, T, and A;
X₃ comprises an amino acid chosen from K and R;
X₄ comprises an amino acid chosen from A, G, I, L, M, N, Q, S, T, V and H;
X₅ comprises an amino acid chosen from N, G, A, L, M, Q, S, and T;
X₆ comprises an amino acid chosen from A, T, H, N, F, I, P, L, Y, G, S, V, D, E, M, and Q; and
X₇ comprises an amino acid chosen from D and N,
or
wherein the targeting n-mer motif peptide is a 7-mer peptide having an amino acid sequence of X₁-X₂-X₃-X₄-X₅-X₆-X₇,
wherein:
X₁ comprises an amino acid chosen from Y or L;
X₂ comprises amino acid H;
X₃ comprises amino acid A;
X₄ comprises an amino acid chosen from K, R, N, and A;
X₅ comprises an amino acid chosen from G, Q, L, and S;
X₆ comprises an amino acid chosen from P, L, I, N, D, and T; and
X₇ comprises amino acid N,
or
wherein the targeting n-mer motif peptide is a 7-mer peptide having an amino acid sequence of X₁-X₂-X₃-X₄-X₅-X₆-X₇,
wherein:
X₁ comprises an amino acid chosen from A, F, H, I, L, N, P, R, S, T, V, and Y;
X₂ comprises an amino acid chosen from A, D, E, F, G, H, I, K, L, M, N, Q, R, S, T, W, and Y;
X₃ comprises amino acid S;
X₄ comprises an amino acid chosen from S and T;
X₅ comprises amino acid N;
X₆ comprises an amino acid chosen from G; and
X₇ comprises an amino acid chosen from I, R, and V,
or
wherein the targeting n-mer motif peptide is a 7-mer peptide having an amino acid sequence of X₁-X₂-X₃-X₄-X₅-X₆-X₇,
wherein:
X₁ comprises an amino acid chosen from R and T;
X₂ comprises an amino acid chosen from T, L, M, S, G, D, N, E, R, K, Y, and W;
X₃ comprises an amino acid chosen from G, E, D, I, F, H, S, A, M, P, V, Y, W, Q, and T;
X₄ comprises an amino acid chosen from D, T, E, H, N, and G;
X₅ comprises an amino acid chosen from A, V, S, T, and D;
X₆ comprises an amino acid chosen from Y, F, P and A; and
X₇ comprises an amino acid chosen from A and P,
or
wherein the targeting n-mer motif peptide is a 7-mer peptide having an amino acid sequence of X₁-X₂-X₃-X₄-X₅-X₆-X₇,
wherein:
X₁ comprises amino acid L;
X₂ comprises amino acid C;
X₃ comprises an amino acid chosen from K and R;
X₄ comprises amino acid P;
X₅ comprises amino acid C;
X₆ comprises an amino acid chosen from L, S, D, A, N, Q, H, P, and V; and
X₇ comprises an amino acid chosen from E, T, G, A, D, N, and S,
or
wherein the targeting n-mer motif peptide is a 7-mer peptide having an amino acid sequence of X₁-X₂-X₃-X₄-X₅-X₆-X₇,
wherein:
X₁ comprises an amino acid chosen from Y, and F;
X₂ comprises an amino acid chosen from W, F, and Y;
X₃ comprises an amino acid chosen from S, T, H, A and Q;
X₄ comprises amino acid G;
X₅ comprises an amino acid chosen from I, T, V, Q, M, H, K, and R;
X₆ comprises an amino acid chosen from I, P, H, L, M, A, Q, T, V, K, and R; and
X₇ comprises an amino acid chosen from A, S, D, E, and N,
or
wherein the targeting n-mer motif peptide is a 7-mer peptide having an amino acid sequence of X₁-X₂-X₃-X₄-X₅-X₆-X₇,
wherein:
X₁ comprises an amino acid chosen from K, R, S, G, N, T, M, Q, V, D, I, and E;
X₂ comprises an amino acid chosen from D, S, N, M, L, G, P, E, and A;
X₃ comprises an amino acid chosen from E, D, G, S, A, R, Q, T, P, and N;
X₄ comprises an amino acid chosen from F, Y, T, V, S, N, A, G, and H;
X₅ comprises an amino acid chosen from T, K, S, R, V, and H;
X₆ comprises an amino acid chosen from T, S, G, V, A, K, R, N, D, E, and H; and
X₇ comprises an amino acid chosen from F, W, and Y,
or
wherein the targeting n-mer motif peptide is a 7-mer peptide having an amino acid sequence of X₁-X₂-X₃-X₄-X₅-X₆-X₇,
wherein:
X₁ comprises an amino acid chosen from V, I, R, N and D;
X₂ comprises an amino acid chosen from A, G, and S;
X₃ comprises an amino acid chosen from L, T, S, H, and G;
X₄ comprises an amino acid chosen from K, R, and E;
X₅ comprises amino acid G;
X₆ comprises an amino acid chosen from W, R, A, and I; and
X₇ comprises an amino acid chosen from D and G,
or
wherein the targeting n-mer motif peptide is a 7-mer peptide having an amino acid sequence of X₁-X₂-X₃-X₄-X₅-X₆-X₇,
wherein:
X₁ comprises an amino acid chosen from L, M, and W;
X₂ comprises an amino acid chosen from F, R, W, K, T, and Y;
X₃ comprises an amino acid chosen from D and S;
X₄ comprises amino acid G;
X₅ comprises amino acid T;
X₆ comprises an amino acid chosen from P, G, S, N, A, and R; and
X₇ comprises an amino acid chosen from A, P, S, and Y,
or
wherein the targeting n-mer motif peptide is a 7-mer peptide having an amino acid sequence of X₁-X₂-X₃-X₄-X₅-X₆-X₇,
wherein:
X₁ comprises an amino acid chosen from P, N, and K;
X₂ comprises an amino acid chosen from Y and F;
X₃ comprises amino acid A;
X₄ comprises an amino acid chosen from R and K;
X₅ comprises amino acid S;
X₆ comprises an amino acid chosen from P, V, A, R, I, L, S, E; and
X₇ comprises an amino acid chosen from E, D, M, and L, or
wherein the targeting n-mer motif peptide is a 7-mer peptide having an amino acid sequence of Z₁-X₁-Z₂-X₂-X₃-X₄-X₅
wherein
Z₁ is selected from the group consisting of Y, F, and L,
Z₂ is selected to the group consisting of S, R, and K, and
X₁-X₅ are independently selected amino acids,
or
wherein the targeting n-mer motif peptide is a 7-mer peptide having an amino acid sequence of X₁-H-X₂-L-X₃-X₄-X₅,
wherein X₁-X₅ are independently selected amino acids,
or
wherein the targeting n-mer motif peptide is a 7-mer peptide having an amino acid sequence of any one of SEQ ID NOs: 10952-20481 and 36241-42428.

64-73. (canceled)

74. The vector system of claim 63, wherein the n-mer is selected from any one as listed in Tables 1-22, or any combination thereof.

75. (canceled)

76. The vector system of claim 59, wherein the targeting moiety is part of a viral capsid protein;
optionally, wherein the viral capsid protein is an AAV viral capsid protein,
optionally, wherein the capsid protein is VP1, VP2, VP3, or a combination thereof;
optionally, wherein the targeting moiety is inserted or substituted in loop IV and/or loop VIII; and
optionally, wherein targeting moiety is inserted between two amino acids of one or more capsid proteins such that the targeting moiety is external to the AAV capsid,
optionally, wherein the targeting moiety is inserted between amino acids 588 and 589 of a capsid protein of AAV9, or in an analogous position of a capsid protein from AAV1, AAV2, AAV3, AAV4, AAV5, AAV6, AAV7, AAV8, AAVrh8, AAV rh.74, or AAV rh. 10, and
optionally, wherein the targeting moiety is inserted between amino acids 451-460 of a capsid protein of AAV9, or in an analogous position of a capsid protein from AAV1, AAV2, AAV3, AAV4, AAV5, AAV6, AAV7, AAV8, AAVrh8, AAV rh.74, or AAV rh. 10.

77. (canceled)

78. The vector system of claim 59, wherein the targeting moiety is IPFSRVNPDT (SEQ ID NO: 20285), LGFARTGAAD (SEQ ID NO: 20274), LGFTKSSGSD (SEQ ID NO: 20270), LRYSKTQGES (SEQ ID NO: 20266), SPYARSSAGV (SEQ ID NO: 20271), VGWSRLDLTT (SEQ ID NO: 20262).

79-83. (canceled)

84. The vector system of claim 59, wherein the cargo is a polynucleotide, a recombinant AAV genome comprising a transgene, one or more polypeptides, a ribonucleoprotein complex,
optionally, wherein the polynucleotide is operably linked to a regulatory sequence that promotes expression in the CNS, and
optionally, wherein the polynucleotide encodes one or more polypeptides and/or a RNAi oligonucleotide,
optionally, wherein the one or more polypeptides comprise enzymes or antibodies, and
optionally, wherein the polynucleotide encodes a CRISPR-Cas system.

85-89. (canceled)

90. A polypeptide encoded or produced by the vector system of claim 59, optionally wherein the polypeptide is a capsid protein, optionally an AAV capsid polypeptide.

91. (canceled)

92. A particle produced by the vector system of claim 59, optionally wherein the particle is a viral particle, optionally an AAV particle.

93. (canceled)

94. A cell comprising the composition of claim 1, a vector system comprising one or more vectors wherein at least one of the one or more vectors encodes the composition, a polypeptide encoded or produced by the vector system, or particle produced by the vector system.

95. A method of delivering one or more cargos to the CNS, comprising:
administering, in vivo or in vitro, the capsid and/or viral particle of claim 53;
optionally wherein the cargo is recombinant AAV genome comprising a transgene, a polynucleotide which encodes an RNAi oligonucleotide, a polynucleotide encoding a polypeptide, or a polypeptide, optionally wherein the polypeptide includes an enzyme or antibody;
optionally wherein the cargo is a Cas polypeptide, a guide molecule, or both;
optionally wherein the cargo encodes a nuclease or a nucleic acid component of a RNA-guided nuclease; and
optionally wherein the cargo is one or more polynucleotides encoding the nuclease and nucleic acid component of a RNA-guided nuclease.

96-100. (canceled)

101. A method of creating humanized transgenic non-human animals comprising:
delivering to one or more cells of a non-human animal a vector system or a recombinant viral particle comprising a recombinant viral genome, wherein;
the vector system or recombinant viral genome encodes a human transferrin polypeptide, wherein the encoded human transferrin polypeptide is under control of a tissue-specific promoter or miRNA binding element that has selective activity in a desired cell, tissue, or organ,
optionally wherein the recombinant viral particle, optionally an AAV viral particle, comprises a capsid polypeptide, optionally an AAV capsid polypeptide, wherein the capsid polypeptide comprises a CNS-specific n-mer motif,
optionally wherein the CNS-specific n-mer motif comprises X1-N-X3-X4-X5-X6-X7, wherein X5 is independently selected from K or R, and X1, X3, X4, X6 and X7 are independently selected from any amino acid, optionally wherein the overall charge of the n-mer motif at neutral pH is between 0 and +2,
optionally, wherein the CNS-specific n-mer motif comprises or consists of NNSTRGG (SEQ ID NO: 42429), GNSARNI (SEQ ID NO: 42430), and GNSVRDF (SEQ ID NO: 42431), and
optionally, wherein the transgenic non-human animal is a rodent, optionally a mouse.

102. The method of claim 0, wherein the one or more cells are endothelial cells, CNS cells, or endothelial cells are of the CNS vasculature,
optionally, wherein the one or more cells are of the CNS vasculature, lungs, kidneys, liver, or any combination thereof.

103-109. (canceled)

110. A humanized transgenic non-human animal comprising:
one or more cells expressing a human transferrin polypeptide, optionally wherein the one or more cells are CNS cells,
optionally, wherein the transgenic non-human animal is a rodent, optionally a mouse.

111. (canceled)

112. A humanized transgenic non-human animal produced by the method of claim 101,
optionally, wherein the humanized non-human animal has a suppressed immune system.

113. (canceled)

114. A method of screening n-mer motifs capable of conferring transduction of central nervous system (CNS) tissues via binding to a transferrin receptor (TFRC) in humanized transgenic non-human animals comprising:
introducing one or more compositions comprising a candidate n-mer motif to humanized non-human transgenic animal of claim 101; and
detecting binding of the compositions that bind to a transferrin receptor (TFRC) and/or detecting transduction or uptake by one or more CNS cells of the humanized transgenic non-human animal,
optionally, wherein the candidate n-mer motif comprises or consists of X1-N-X3-X4-X5-X6-X7,
wherein X5 is independently selected from K or R, and X1, X3, X4, X6 and X7 are independently selected from any amino acid, optionally, wherein the overall charge of the n-mer motif at neutral pH is between 0 and +2.

115. (canceled)

116. The method of claim 114, wherein the composition is a viral particle comprising one or more capsid proteins each comprising the candidate n-mer motif,
optionally, wherein the viral particle is an AAV viral particle, and the one or more capsid proteins is an AAV capsid protein,
optionally, wherein the candidate n-mer motif is inserted in between amino acids 588-589 of an AAV9 capsid polypeptide or in an analogous position of a capsid protein from AAV1, AAV2, AAV3, AAV4, AAV5, AAV6, AAV7, AAV8, AAVrh8, AAV rh.74, or AAV rh. 10, and
optionally, wherein at least one of the one or more compositions furthers comprises a cargo,
optionally, wherein the cargo is or encodes a therapeutic nucleic acid or polypeptide, a selectable marker, or a control polypeptide or nucleic acid.

117-119. (canceled)

120. A recombinant AAV particle comprising
(1) a recombinant capsid protein having a TFR1-targeting n-mer motif peptide inserted within the capsid protein such that the peptide is displayed on the surface when incorporated into the AAV particle; and
(2) a recombinant AAV genome comprising a transgene encoding a therapeutic polypeptide or polynucleotide operably linked to one or more regulatory sequences which promote expression of the transgene in CNS cells, flanked by AAV ITR sequences,
wherein the AAV particle has enhanced binding, transduction or transgene expression in CNS cells relative to an AAV particle having a reference capsid that does not contain the TFR1-targeting n-mer motif;
optionally, wherein the recombinant AAV particle is an AAV9 capsid protein (SEQ ID NO: 20506), an AAV9 K449R capsid protein (SEQ ID NO: 20507), or a capsid protein having at least 90%, 90% or 99% sequence identity to the AAV9 capsid protein and forms a capsid that transduces CNS cells; and
optionally, wherein the peptide is inserted between amino acids 588 and 589 of the AAV9 capsid protein or at a corresponding position of another AAV capsid protein or the peptide is inserted between two consecutive amino acids within amino acids 451-460 of the AAV9 capsid protein or at a corresponding position within another AAV capsid protein.

121. The recombinant AAV particle of claim 0,
wherein the TFR1-targeting n-mer motif peptide is a 7-mer peptide having an amino acid sequence of X₁-X₂-X₃-X₄-X₅-X₆-X₇,
wherein:
X₁ comprises an amino acid chosen from Y, M, F, and L;
X₂ comprises an amino acid chosen from S, H, T, and A;
X₃ comprises an amino acid chosen from K and R;
X₄ comprises an amino acid chosen from A, G, I, L, M, N, Q, S, T, V and H;
X₅ comprises an amino acid chosen from N, G, A, L, M, Q, S, and T;
X₆ comprises an amino acid chosen from A, T, H, N, F, I, P, L, Y, G, S, V, D, E, M, and Q; and
X₇ comprises an amino acid chosen from D and N,
or
wherein the TFR1-targeting n-mer motif peptide is a 7-mer peptide having an amino acid sequence of X₁-X₂-X₃-X₄-X₅-X₆-X₇
wherein:
X₁ comprises an amino acid chosen from Y or L;
X₂ comprises amino acid H;
X₃ comprises amino acid A;
X₄ comprises an amino acid chosen from K, R, N, and A;
X₅ comprises an amino acid chosen from G, Q, L, and S;
X₆ comprises an amino acid chosen from P, L, I, N, D, and T; and
X₇ comprises amino acid N,
or
wherein the TFR1-targeting n-mer motif peptide is a 7-mer peptide having an amino acid sequence of X₁-X₂-X₃-X₄-X₅-X₆-X₇,
wherein:
X₁ comprises an amino acid chosen from A, F, H, I, L, N, P, R, S, T, V, and Y;
X₂ comprises an amino acid chosen from A, D, E, F, G, H, I, K, L, M, N, Q, R, S, T, W, and Y;
X₃ comprises amino acid S;
X₄ comprises an amino acid chosen from S and T;
X₅ comprises amino acid N;
X₆ comprises amino acid G; and
X₇ comprises an amino acid chosen from I, R, and V,
or
wherein the TFR1-targeting n-mer motif peptide is a 7-mer peptide having an amino acid sequence of X₁-X₂-X₃-X₄-X₅-X₆-X₇
wherein:
X₁ comprises an amino acid chosen from R and T;
X₂ comprises an amino acid chosen from T, L, M, S, G, D, N, E, R, K, Y, and W;
X₃ comprises an amino acid chosen from G, E, D, I, F, H, S, A, M, P, V, Y, W, Q, and T;
X₄ comprises an amino acid chosen from D, T, E, H, N, and G;
X₅ comprises an amino acid chosen from A, V, S, T, and D;
X₆ comprises an amino acid chosen from Y, F, P and A; and
X₇ comprises an amino acid chosen from A and P,
or
wherein the TFR1-targeting n-mer motif peptide is a 7-mer peptide having an amino acid sequence of X₁-X₂-X₃-X₄-X₅-X₆-X₇,
wherein:
X₁ comprises amino acid L;
X₂ comprises amino acid C;
X₃ comprises an amino acid chosen from K and R;
X₄ comprises amino acid P;
X₅ comprises amino acid C;
X₆ comprises an amino acid chosen from L, S, D, A, N, Q, H, P, and V; and
X₇ comprises an amino acid chosen from E, T, G, A, D, N, and S,
or
wherein the TFR1-targeting n-mer motif peptide is a 7-mer peptide having an amino acid sequence of X₁-X₂-X₃-X₄-X₅-X₆-X₇,
wherein:
X₁ comprises an amino acid chosen from Y, and F;
X₂ comprises an amino acid chosen from W, F, and Y;
X₃ comprises an amino acid chosen from S, T, H, A and Q;
X₄ comprises amino acid G;
X₅ comprises an amino acid chosen from I, T, V, Q, M, H, K, and R;
X₆ comprises an amino acid chosen from I, P, H, L, M, A, Q, T, V, K, and R; and
X₇ comprises an amino acid chosen from A, S, D, E, and N,
or
wherein the TFR1-targeting n-mer motif peptide is a 7-mer peptide having an amino acid sequence of X₁-X₂-X₃-X₄-X₅-X₆-X₇,
wherein:
X₁ comprises an amino acid chosen from K, R, S, G, N, T, M, Q, V, D, I, and E;
X₂ comprises an amino acid chosen from D, S, N, M, L, G, P, E, and A;
X₃ comprises an amino acid chosen from E, D, G, S, A, R, Q, T, P, and N;
X₄ comprises an amino acid chosen from F, Y, T, V, S, N, A, G, and H;
X₅ comprises an amino acid chosen from T, K, S, R, V, and H;
X₆ comprises an amino acid chosen from T, S, G, V, A, K, R, N, D, E, and H; and
X₇ comprises an amino acid chosen from F, W, and Y,
or
wherein the TFR1-targeting n-mer motif peptide is a 7-mer peptide having an amino acid sequence of X₁-X₂-X₃-X₄-X₅-X₆-X₇,
wherein:
X₁ comprises an amino acid chosen from V, I, R, N and D;
X₂ comprises an amino acid chosen from A, G, and S;
X₃ comprises an amino acid chosen from L, T, S, H, and G;
X₄ comprises an amino acid chosen from K, R, and E;
X₅ comprises amino acid G;
X₆ comprises an amino acid chosen from W, R, A, and I; and
X₇ comprises an amino acid chosen from D and G,
or
wherein the TFR1-targeting n-mer motif peptide is a 7-mer peptide having an amino acid sequence of X₁-X₂-X₃-X₄-X₅-X₆-X₇,
wherein:
X₁ comprises an amino acid chosen from L, M, and W;
X₂ comprises an amino acid chosen from F, R, W, K, T, and Y;
X₃ comprises an amino acid chosen from D and S;
X₄ comprises amino acid G;
X₅ comprises amino acid T;
X₆ comprises an amino acid chosen from P, G, S, N, A, and R; and
X₇ comprises an amino acid chosen from A, P, S, and Y,
or
wherein the TFR1-targeting n-mer motif peptide is a 7-mer peptide having an amino acid sequence of X₁-X₂-X₃-X₄-X₅-X₆-X₇,
wherein:
X₁ comprises an amino acid chosen from P, N, and K;
X₂ comprises an amino acid chosen from Y and F;
X₃ comprises amino acid A;
X₄ comprises an amino acid chosen from R and K;
X₅ comprises amino acid S;
X₆ comprises an amino acid chosen from P, V, A, R, I, L, S, E; and
X₇ comprises an amino acid chosen from E, D, M, and L,
or
wherein the TFR1-targeting n-mer motif peptide is a 7-mer peptide having an amino acid sequence of Z₁-X₁-Z₂-X₂-X₃-X₄-X₅,
wherein
Z₁ is selected from the group consisting of Y, F, and L,
Z₂ is selected the from the group consisting of S, R, and K, and
X₁-X₅ are independently selected amino acids,
or
wherein the TFR1-targeting n-mer motif peptide is a 7-mer peptide having an amino acid sequence of X₁-H-X₂-L-X₃-X₄-X₅,
wherein X₁-X₅ are independently selected amino acids,
or
wherein the TFR1-targeting n-mer motif peptide is a 7-mer peptide having an amino an amino acid sequence of any one of SEQ ID NOs: 10952-20481 and 36241-42428.

122-126. (canceled)

127. A method of delivering a therapeutic polypeptide or polynucleotide to the CNS of a subject in need thereof, said method comprising administering to said subject the recombinant AAV particle of claim 120.

128. A recombinant engineered AAV capsid protein having a TFR1-targeting n-mer motif peptide inserted within the capsid protein such that the peptide is displayed on the surface when incorporated into the AAV capsid protein;
optionally wherein the recombinant capsid protein is an AAV9 capsid protein (SEQ ID NO: 20506), an AAV9 K449R capsid protein (SEQ ID NO: 20507), or a capsid protein having at least 90%, 90% or 99% sequence identity to the AAV9 capsid protein and forms a capsid that transduces CNS cells; and
optionally wherein the peptide is inserted between amino acids 588 and 589 of the AAV9 capsid protein or at a corresponding position of another AAV capsid protein.

129. The recombinant engineered AAV capsid protein of claim 0,
wherein the TFR1-targeting n-mer motif peptide is a 7-mer peptide having an amino acid sequence of X₁-X₂-X₃-X₄-X₅-X₆-X₇
wherein:
X₁ comprises an amino acid chosen from Y, M, F, and L;
X₂ comprises an amino acid chosen from S, H, T, and A;
X₃ comprises an amino acid chosen from K and R;
X₄ comprises an amino acid chosen from A, G, I, L, M, N, Q, S, T, V and H;
X₅ comprises an amino acid chosen from N, G, A, L, M, Q, S, and T;
X₆ comprises an amino acid chosen from A, T, H, N, F, I, P, L, Y, G, S, V, D, E, M, and Q; and
X₇ comprises an amino acid chosen from D and N,
or
wherein the TFR1-targeting n-mer motif peptide is a 7-mer peptide having an amino acid sequence of X₁-X₂-X₃-X₄-X₅-X₆-X₇,
wherein:
X₁ comprises an amino acid chosen from Y or L;
X₂ comprises amino acid H;
X₃ comprises amino acid A;
X₄ comprises an amino acid chosen from K, R, N, and A;
X₅ comprises an amino acid chosen from G, Q, L, and S;
X₆ comprises an amino acid chosen from P, L, I, N, D, and T; and
X₇ comprises amino acid N,
or
wherein the TFR1-targeting n-mer motif peptide is a 7-mer peptide having an amino acid sequence of X₁-X₂-X₃-X₄-X₅-X₆-X₇,
wherein:
X₁ comprises an amino acid chosen from A, F, H, I, L, N, P, R, S, T, V, and Y;
X₂ comprises an amino acid chosen from A, D, E, F, G, H, I, K, L, M, N, Q, R, S, T, W, and Y;
X₃ comprises amino acid S;
X₄ comprises an amino acid chosen from S and T;
X₅ comprises amino acid N;
X₆ comprises amino acid G; and
X₇ comprises an amino acid chosen from I, R, and V,
or
wherein the TFR1-targeting n-mer motif peptide is a 7-mer peptide having an amino acid sequence of X₁-X₂-X₃-X₄-X₅-X₆-X₇,
wherein:
X₁ comprises an amino acid chosen from R and T;
X₂ comprises an amino acid chosen from T, L, M, S, G, D, N, E, R, K, Y, and W;
X₃ comprises an amino acid chosen from G, E, D, I, F, H, S, A, M, P, V, Y, W, Q, and T;
X₄ comprises an amino acid chosen from D, T, E, H, N, and G;
X₅ comprises an amino acid chosen from A, V, S, T, and D;
X₆ comprises an amino acid chosen from Y, F, P and A; and
X₇ comprises an amino acid chosen from A and P,
or
wherein the TFR1-targeting n-mer motif peptide is a 7-mer peptide having an amino acid sequence of X₁-X₂-X₃-X₄-X₅-X₆-X₇,
wherein:
X₁ comprises amino acid L;
X₂ comprises amino acid C;
X₃ comprises an amino acid chosen from K and R;
X₄ comprises amino acid P;
X₅ comprises amino acid C;
X₆ comprises an amino acid chosen from L, S, D, A, N, Q, H, P, and V; and
X₇ comprises an amino acid chosen from E, T, G, A, D, N, and S,
or
wherein the TFR1-targeting n-mer motif peptide is a 7-mer peptide having an amino acid sequence of X₁-X₂-X₃-X₄-X₅-X₆-X₇,
wherein:
X₁ comprises an amino acid chosen from Y, and F;
X₂ comprises an amino acid chosen from W, F, and Y;
X₃ comprises an amino acid chosen from S, T, H, A and Q;
X₄ comprises amino acid G;
X₅ comprises an amino acid chosen from I, T, V, Q, M, H, K, and R;
X₆ comprises an amino acid chosen from I, P, H, L, M, A, Q, T, V, K, and R; and
X₇ comprises an amino acid chosen from A, S, D, E, and N,
or
wherein the TFR1-targeting n-mer motif peptide is a 7-mer peptide having an amino acid sequence of X₁-X₂-X₃-X₄-X₅-X₆-X₇,
wherein:
X₁ comprises an amino acid chosen from K, R, S, G, N, T, M, Q, V, D, I, and E;
X₂ comprises an amino acid chosen from D, S, N, M, L, G, P, E, and A;
X₃ comprises an amino acid chosen from E, D, G, S, A, R, Q, T, P, and N;
X₄ comprises an amino acid chosen from F, Y, T, V, S, N, A, G, and H;
X₅ comprises an amino acid chosen from T, K, S, R, V, and H;
X₆ comprises an amino acid chosen from T, S, G, V, A, K, R, N, D, E, and H; and
X₇ comprises an amino acid chosen from F, W, and Y,
or
wherein the TFR1-targeting n-mer motif peptide is a 7-mer peptide having an amino acid sequence of X₁-X₂-X₃-X₄-X₅-X₆-X₇,
wherein:
X₁ comprises an amino acid chosen from V, I, R, N and D;
X₂ comprises an amino acid chosen from A, G, and S;
X₃ comprises an amino acid chosen from L, T, S, H, and G;
X₄ comprises an amino acid chosen from K, R, and E;
X₅ comprises amino acid G;
X₆ comprises an amino acid chosen from W, R, A, and I; and
X₇ comprises an amino acid chosen from D and G,
or
wherein the TFR1-targeting n-mer motif peptide is a 7-mer peptide having an amino acid sequence of X₁-X₂-X₃-X₄-X₅-X₆-X₇,
wherein:
X₁ comprises an amino acid chosen from L, M, and W;
X₂ comprises an amino acid chosen from F, R, W, K, T, and Y;
X₃ comprises an amino acid chosen from D and S;
X₄ comprises amino acid G;
X₅ comprises amino acid T;
X₆ comprises an amino acid chosen from P, G, S, N, A, and R; and
X₇ comprises an amino acid chosen from A, P, S, and Y,
or
wherein the TFR1-targeting n-mer motif peptide is a 7-mer peptide having an amino acid sequence of X₁-X₂-X₃-X₄-X₅-X₆-X₇,
wherein:
X₁ comprises an amino acid chosen from P, N, and K;
X₂ comprises an amino acid chosen from Y and F;
X₃ comprises amino acid A;
X₄ comprises an amino acid chosen from R and K;
X₅ comprises amino acid S;
X₆ comprises an amino acid chosen from P, V, A, R, I, L, S, E; and
X₇ comprises an amino acid chosen from E, D, M, and L,
or
wherein the TFR1-targeting n-mer motif peptide is a 7-mer peptide having an amino acid sequence of Z₁-X₁-Z₂-X₂-X₃-X₄-X₅,
wherein
Z₁ is selected from the group consisting of Y, F, and L,
Z₂ is selected from the group consisting of S, R, and K, and
X₁-X₅ are independently selected amino acids,
or
wherein the TFR1-targeting n-mer motif peptide is a 7-mer peptide having an amino acid sequence of X₁-H-X₂-L-X₃-X₄-X₅
wherein X₁-X₅ are independently selected amino acids,
or
wherein the TFR1-targeting n-mer motif peptide is a 7-mer peptide having an amino acid sequence of any one of SEQ ID NOs: 10952-20481 and 36241-42428.

130-133. (canceled)

134. A host cell for producing the recombinant AAV particles of claim 120, said host cell comprising a first construct comprising a nucleic acid encoding the recombinant AAV capsid protein and a second construct comprising a nucleic acid encoding the recombinant AAV genome.

135. A method of producing the recombinant AAV particle of claim 120, said method comprising culturing a host cell under conditions sufficient for production of the recombinant AAV particle and harvesting of said recombinant AAV particle.

The application's sequence listing, which the Patent Office published only in electronic form, follows.

SEQUENCE LISTING (42463 sequences)

SEQ ID NO: 1 - DNA, 21 bp, synthetic construct
  source 1..21: mol_type = other DNA
tattccaaatccaataataat

SEQ ID NO: 2 - DNA, 21 bp, synthetic construct
  source 1..21: mol_type = other DNA
gatcacgggataaataaatgg

SEQ ID NO: 3 - DNA, 21 bp, synthetic construct
  source 1..21: mol_type = other DNA
tccacgggggtgaataaatgg

SEQ ID NO: 4 - DNA, 21 bp, synthetic construct
  source 1..21: mol_type = other DNA
tatgcgaaagggaatataaat

SEQ ID NO: 5 - DNA, 21 bp, synthetic construct
  source 1..21: mol_type = other DNA
ttgcacaggcagaatatagat

SEQ ID NO: 6 - DNA, 21 bp, synthetic construct
  source 1..21: mol_type = other DNA
cactccaaagtgaatataaat

SEQ ID NO: 7 - DNA, 21 bp, synthetic construct
  source 1..21: mol_type = other DNA
tatgcgaaattgaatataaat

SEQ ID NO: 8 - DNA, 21 bp, synthetic construct
  source 1..21: mol_type = other DNA
tattccaaagtgaatataaat

SEQ ID NO: 9 - DNA, 21 bp, synthetic construct
  source 1..21: mol_type = other DNA
tatgcgaaagcgaattataat

SEQ ID NO: 10 - DNA, 21 bp, synthetic construct
  source 1..21: mol_type = other DNA
ttctccaaacagaattataat

SEQ ID NO: 11 - DNA, 21 bp, synthetic construct
  source 1..21: mol_type = other DNA
tatgcgaaatccaataataat

SEQ ID NO: 12 - DNA, 21 bp, synthetic construct
  source 1..21: mol_type = other DNA
tattccaaatccaatataaat

SEQ ID NO: 13 - DNA, 21 bp, synthetic construct
  source 1..21: mol_type = other DNA
atcgacgaatggcatcatttt

SEQ ID NO: 14 - DNA, 21 bp, synthetic construct
  source 1..21: mol_type = other DNA
tatgcgaaagcgaatataaat

SEQ ID NO: 15 - DNA, 21 bp, synthetic construct
  source 1..21: mol_type = other DNA
tattccaaagcgaattgtaat

SEQ ID NO: 16 - DNA, 21 bp, synthetic construct
  source 1..21: mol_type = other DNA
ttctccaggatgaatgataat

SEQ ID NO: 17 - DNA, 21 bp, synthetic construct
  source 1..21: mol_type = other DNA
tatgcgaaaatagggtataat

SEQ ID NO: 18 - DNA, 21 bp, synthetic construct
  source 1..21: mol_type = other DNA
gggaatgattatcagtcctat

SEQ ID NO: 19 - DNA, 21 bp, synthetic construct
  source 1..21: mol_type = other DNA
tatgcgaaatccaatataaat

SEQ ID NO: 20 - DNA, 21 bp, synthetic construct
  source 1..21: mol_type = other DNA
ttctccaaagcgaatataaat

SEQ ID NO: 21 - DNA, 21 bp, synthetic construct
  source 1..21: mol_type = other DNA
tattccagggagaattataat

SEQ ID NO: 22 - DNA, 21 bp, synthetic construct
  source 1..21: mol_type = other DNA
tatgcgaggttgaatatgaat

SEQ ID NO: 23 - DNA, 21 bp, synthetic construct
  source 1..21: mol_type = other DNA
tatgcgaaagggaataataat

SEQ ID NO: 24 - DNA, 21 bp, synthetic construct
  source 1..21: mol_type = other DNA
acggaggagacgtattataaa

SEQ ID NO: 25 - DNA, 21 bp, synthetic construct
  source 1..21: mol_type = other DNA
ttcgcgaaagggaatataaat

SEQ ID NO: 26 - DNA, 21 bp, synthetic construct
  source 1..21: mol_type = other DNA
tatgcgaaacaggggaataat

SEQ ID NO: 27 - DNA, 21 bp, synthetic construct
  source 1..21: mol_type = other DNA
ttctccaaattggggtataat

SEQ ID NO: 28 - DNA, 21 bp, synthetic construct
  source 1..21: mol_type = other DNA
ttcgcgaaagcggggtataat

SEQ ID NO: 29 - DNA, 21 bp, synthetic construct
  source 1..21: mol_type = other DNA
tattccaggttcaatgataat

SEQ ID NO: 30 - DNA, 21 bp, synthetic construct
  source 1..21: mol_type = other DNA
tactcaaaggccggctgcaac

SEQ ID NO: 31 - DNA, 21 bp, synthetic construct
  source 1..21: mol_type = other DNA
tatgcgaaacagaatataaat

SEQ ID NO: 32 - DNA, 21 bp, synthetic construct
  source 1..21: mol_type = other DNA
gataatcactccaataaatgg

SEQ ID NO: 33 - DNA, 21 bp, synthetic construct
  source 1..21: mol_type = other DNA
tatgcgaaacacgggtataat

SEQ ID NO: 34 - DNA, 21 bp, synthetic construct
  source 1..21: mol_type = other DNA
gatgggttgtccaataaatgg

SEQ ID NO: 35 - DNA, 21 bp, synthetic construct
  source 1..21: mol_type = other DNA
ttcgcgaaaacggggtataat

SEQ ID NO: 36 - DNA, 21 bp, synthetic construct
  source 1..21: mol_type = other DNA
tccaatgatacggtgtatagg

SEQ ID NO: 37 - DNA, 21 bp, synthetic construct
  source 1..21: mol_type = other DNA
aatgggacgtcctattcctgg

SEQ ID NO: 38 - DNA, 21 bp, synthetic construct
  source 1..21: mol_type = other DNA
ttttcacgcatgaaccataac

SEQ ID NO: 39 - DNA, 21 bp, synthetic construct
  source 1..21: mol_type = other DNA
tattccaaacaggggataaat

SEQ ID NO: 40 - DNA, 21 bp, synthetic construct
  source 1..21: mol_type = other DNA
acgaataatacggtgtataaa

SEQ ID NO: 41 - DNA, 21 bp, synthetic construct
  source 1..21: mol_type = other DNA
gatgtgaatgggaattatgcg

SEQ ID NO: 42 - DNA, 21 bp, synthetic construct
  source 1..21: mol_type = other DNA
tattccaggcacaatgataat

SEQ ID NO: 43 - DNA, 21 bp, synthetic construct
  source 1..21: mol_type = other DNA
tacgccaaggccaactgcaac

SEQ ID NO: 44 - DNA, 21 bp, synthetic construct
  source 1..21: mol_type = other DNA
ttgtccaggacgtccgataat

SEQ ID NO: 45 - DNA, 21 bp, synthetic construct
  source 1..21: mol_type = other DNA
tactcacgctacggcgacaac

SEQ ID NO: 46 - DNA, 21 bp, synthetic construct
  source 1..21: mol_type = other DNA
tatgcgaaaccggggtataat

SEQ ID NO: 47 - DNA, 21 bp, synthetic construct
  source 1..21: mol_type = other DNA
tatgcgaaagcggggaataat

SEQ ID NO: 48 - DNA, 21 bp, synthetic construct
  source 1..21: mol_type = other DNA
tatgcgaaagcgaataataat

SEQ ID NO: 49 - DNA, 21 bp, synthetic construct
  source 1..21: mol_type = other DNA
tattccaaacagaatatgaat

SEQ ID NO: 50 - DNA, 21 bp, synthetic construct
  source 1..21: mol_type = other DNA
tatgcgaaacagaatatgaat

SEQ ID NO: 51 - DNA, 21 bp, synthetic construct
  source 1..21: mol_type = other DNA
atagtgtccacgaatggggtg

SEQ ID NO: 52 - DNA, 21 bp, synthetic construct
  source 1..21: mol_type = other DNA
ttggcgaaaacggggataaat

SEQ ID NO: 53 - DNA, 21 bp, synthetic construct
  source 1..21: mol_type = other DNA
tatgcgaaagcggggataaat

SEQ ID NO: 54 - DNA, 21 bp, synthetic construct
  source 1..21: mol_type = other DNA
ttgtccaggttgaatataata

SEQ ID NO: 55 - DNA, 21 bp, synthetic construct
  source 1..21: mol_type = other DNA
ttcgcgaaatccgggataaat

SEQ ID NO: 56 - DNA, 21 bp, synthetic construct
  source 1..21: mol_type = other DNA
gacgacgtatcacgcaagtgg

SEQ ID NO: 57 - DNA, 21 bp, synthetic construct
  source 1..21: mol_type = other DNA
tatgtgaaatccgataatggg

SEQ ID NO: 58 - DNA, 21 bp, synthetic construct
  source 1..21: mol_type = other DNA
gtggcgcacgcggggataggg

SEQ ID NO: 59 - DNA, 21 bp, synthetic construct
  source 1..21: mol_type = other DNA
ttttcaaagctgggctttaac

SEQ ID NO: 60 - DNA, 21 bp, synthetic construct
  source 1..21: mol_type = other DNA
tatgcgaaatccgggataaat

SEQ ID NO: 61 - DNA, 21 bp, synthetic construct
  source 1..21: mol_type = other DNA
tatgcgaaattggggaataat

SEQ ID NO: 62 - DNA, 21 bp, synthetic construct
  source 1..21: mol_type = other DNA
tattccaaaacgaatataaat

SEQ ID NO: 63 - DNA, 21 bp, synthetic construct
  source 1..21: mol_type = other DNA
ttctccaggttgtccgataat

SEQ ID NO: 64 - DNA, 21 bp, synthetic construct
  source 1..21: mol_type = other DNA
ttgtccaaattgaatgataat

SEQ ID NO: 65 - DNA, 21 bp, synthetic construct
  source 1..21: mol_type = other DNA
tatgcgaggacggggtcctcc

SEQ ID NO: 66 - DNA, 21 bp, synthetic construct
  source 1..21: mol_type = other DNA
tattccaaagcggggataaat

SEQ ID NO: 67 - DNA, 21 bp, synthetic construct
  source 1..21: mol_type = other DNA
ttgcacaaattgtccaatcag

SEQ ID NO: 68 - DNA, 21 bp, synthetic construct
  source 1..21: mol_type = other DNA
tatcacaaattgaatttggtg

SEQ ID NO: 69 - DNA, 21 bp, synthetic construct
  source 1..21: mol_type = other DNA
tattccaggttggatagggat

SEQ ID NO: 70 - DNA, 21 bp, synthetic construct
  source 1..21: mol_type = other DNA
tatgcgaggataggggataat

SEQ ID NO: 71 - DNA, 21 bp, synthetic construct
  source 1..21: mol_type = other DNA
gtggagtcctcctccaaatgg

SEQ ID NO: 72 - DNA, 21 bp, synthetic construct
  source 1..21: mol_type = other DNA
tatgcgaggccggggtataat

SEQ ID NO: 73 - DNA, 21 bp, synthetic construct
  source 1..21: mol_type = other DNA
ttggcgaaattggggccgaat

SEQ ID NO: 74 - DNA, 21 bp, synthetic construct
  source 1..21: mol_type = other DNA
tattccaaacacaatatgaat

SEQ ID NO: 75 - DNA, 21 bp, synthetic construct
  source 1..21: mol_type = other DNA
tatgcgaaaacggggataaat

SEQ ID NO: 76 - DNA, 21 bp, synthetic construct
  source 1..21: mol_type = other DNA
tatgcgaaaaatgggataaat

SEQ ID NO: 77 - DNA, 21 bp, synthetic construct
  source 1..21: mol_type = other DNA
ttgtccaggacgggggataat

SEQ ID NO: 78 - DNA, 21 bp, synthetic construct
  source 1..21: mol_type = other DNA
aatgatggggagtcccagtgg

SEQ ID NO: 79 - DNA, 21 bp, synthetic construct
  source 1..21: mol_type = other DNA
tatcacgcgtcctcctataat

SEQ ID NO: 80 - DNA, 21 bp, synthetic construct
  source 1..21: mol_type = other DNA
gaggcgtattccgatagggat

SEQ ID NO: 81 - DNA, 21 bp, synthetic construct
  source 1..21: mol_type = other DNA
tactcaaagaccaactgcaac

SEQ ID NO: 82 - DNA, 21 bp, synthetic construct
  source 1..21: mol_type = other DNA
tattccaaatccgggcagaat

SEQ ID NO: 83 - DNA, 21 bp, synthetic construct
  source 1..21: mol_type = other DNA
ttggcgaggggggcggataat

SEQ ID NO: 84 - DNA, 21 bp, synthetic construct
  source 1..21: mol_type = other DNA
tatgcgaggttggggcagaat

SEQ ID NO: 85 - DNA, 21 bp, synthetic construct
  source 1..21: mol_type = other DNA
tatttcgcggggaaatatgat

SEQ ID NO: 86 - DNA, 21 bp, synthetic construct
  source 1..21: mol_type = other DNA
ttgtccaaaacggggaataat

SEQ ID NO: 87 - DNA, 21 bp, synthetic construct
  source 1..21: mol_type = other DNA
ttgtccaggtcctccatagat

SEQ ID NO: 88 - DNA, 21 bp, synthetic construct
  source 1..21: mol_type = other DNA
ggccgcttttactcagacggc

SEQ ID NO: 89 - DNA, 21 bp, synthetic construct
  source 1..21: mol_type = other DNA
tactcacgccataaccataac

SEQ ID NO: 90 - DNA, 21 bp, synthetic construct
  source 1..21: mol_type = other DNA
gataaattcgataattatgcg

SEQ ID NO: 91 - DNA, 21 bp, synthetic construct
  source 1..21: mol_type = other DNA
tatgcgaaagagaataggaat

SEQ ID NO: 92 - DNA, 21 bp, synthetic construct
  source 1..21: mol_type = other DNA
ttgtccaaattgaattccaat

SEQ ID NO: 93 - DNA, 21 bp, synthetic construct
  source 1..21: mol_type = other DNA
ttggcgaaagcggggataaat

SEQ ID NO: 94 - DNA, 21 bp, synthetic construct
  source 1..21: mol_type = other DNA
ctggccaagaacggcatcaac

SEQ ID NO: 95 - DNA, 21 bp, synthetic construct
  source 1..21: mol_type = other DNA
gcctcaggctcatcatcatgg

SEQ ID NO: 96 - DNA, 21 bp, synthetic construct
  source 1..21: mol_type = other DNA
tacgcccgcctgggctcaaac

SEQ ID NO: 97 - DNA, 21 bp, synthetic construct
  source 1..21: mol_type = other DNA
ctgtcacgcatgaactttaac

SEQ ID NO: 98 - DNA, 21 bp, synthetic construct
  source 1..21: mol_type = other DNA
ttgtccaggtccggggataat

SEQ ID NO: 99 - DNA, 21 bp, synthetic construct
  source 1..21: mol_type = other DNA
atgacgaggatagagaataat

SEQ ID NO: 100 - DNA, 21 bp, synthetic construct
  source 1..21: mol_type = other DNA
cgcatcacccatccctactca

SEQ ID NO: 101 - DNA, 21 bp, synthetic construct
  source 1..21: mol_type = other DNA
acctcagactacatgtcattt

SEQ ID NO: 102 - DNA, 21 bp, synthetic construct
  source 1..21: mol_type = other DNA
tacgccaagaccggctgcaac

SEQ ID NO: 103 - DNA, 21 bp, synthetic construct
  source 1..21: mol_type = other DNA
tattccaaagtgaatatgaat

SEQ ID NO: 104 - DNA, 21 bp, synthetic construct
  source 1..21: mol_type = other DNA
gagcacgcgacgtccaattgg

SEQ ID NO: 105 - DNA, 21 bp, synthetic construct
  source 1..21: mol_type = other DNA
atgatatccacgaatgggagg

SEQ ID NO: 106 - DNA, 21 bp, synthetic construct
  source 1..21: mol_type = other DNA
ttgtccagggcgggggataat

SEQ ID NO: 107 - DNA, 21 bp, synthetic construct
  source 1..21: mol_type = other DNA
ttctccaaaataaattataat

SEQ ID NO: 108 - DNA, 21 bp, synthetic construct
  source 1..21: mol_type = other DNA
tatgcgagggtgggggataat

SEQ ID NO: 109 - DNA, 21 bp, synthetic construct
  source 1..21: mol_type = other DNA
ttctccaggataggggataat

SEQ ID NO: 110 - DNA, 21 bp, synthetic construct
  source 1..21: mol_type = other DNA
ttctccaaagcggggaataat

SEQ ID NO: 111 - DNA, 21 bp, synthetic construct
  source 1..21: mol_type = other DNA
catgaaggccattcacattgg

SEQ ID NO: 112 - DNA, 21 bp, synthetic construct
  source 1..21: mol_type = other DNA
acggtgtccacgaatgggata

SEQ ID NO: 113 - DNA, 21 bp, synthetic construct
  source 1..21: mol_type = other DNA
aggtccgatacggtgtatata

SEQ ID NO: 114 - DNA, 21 bp, synthetic construct
  source 1..21: mol_type = other DNA
tattccaaagcgaatgataat

SEQ ID NO: 115 - DNA, 21 bp, synthetic construct
  source 1..21: mol_type = other DNA
tactcaaagaacaactacaac

SEQ ID NO: 116 - DNA, 21 bp, synthetic construct
  source 1..21: mol_type = other DNA
tattccgcgaggaatgataat

SEQ ID NO: 117 - DNA, 21 bp, synthetic construct
  source 1..21: mol_type = other DNA
gtaccctcatcacaagtatgg

SEQ ID NO: 118 - DNA, 21 bp, synthetic construct
  source 1..21: mol_type = other DNA
ttcgcgtatgagaataggaat

SEQ ID NO: 119 - DNA, 21 bp, synthetic construct
  source 1..21: mol_type = other DNA
ttttcaaagctgaaccccaac

SEQ ID NO: 120 - DNA, 21 bp, synthetic construct
  source 1..21: mol_type = other DNA
tattccaggaatggggataat

SEQ ID NO: 121 - DNA, 21 bp, synthetic construct
  source 1..21: mol_type = other DNA
tattccagggcgtccgatcag

SEQ ID NO: 122 - DNA, 21 bp, synthetic construct
  source 1..21: mol_type = other DNA
tatttgaaatccacgaataat

SEQ ID NO: 123 - DNA, 21 bp, synthetic construct
  source 1..21: mol_type = other DNA
ttctccaaattgaatcagaat

SEQ ID NO: 124 - DNA, 21 bp, synthetic construct
  source 1..21: mol_type = other DNA
cagcacaaattgcagccgttg

SEQ ID NO: 125 - DNA, 21 bp, synthetic construct
  source 1..21: mol_type = other DNA
aatgcggattataataggaat

SEQ ID NO: 126 - DNA, 21 bp, synthetic construct
  source 1..21: mol_type = other DNA
ttgtccaggataggggataat

SEQ ID NO: 127 - DNA, 21 bp, synthetic construct
  source 1..21: mol_type = other DNA
tacgccaagctgggccccaac

SEQ ID NO: 128 - DNA, 21 bp, synthetic construct
  source 1..21: mol_type = other DNA
ttgtccaggttgggggataat

SEQ ID NO: 129 - DNA, 21 bp, synthetic construct
  source 1..21: mol_type = other DNA
tatgcgagggaggggtataat

SEQ ID NO: 130 - DNA, 21 bp, synthetic construct
  source 1..21: mol_type = other DNA
cacccgccggcgtattcctcc

SEQ ID NO: 131 - DNA, 21 bp, synthetic construct
  source 1..21: mol_type = other DNA
tattccaggacgaatgataat

SEQ ID NO: 132 - DNA, 21 bp, synthetic construct
  source 1..21: mol_type = other DNA
tatgcgaggttgggggataat

SEQ ID NO: 133 - DNA, 21 bp, synthetic construct
  source 1..21: mol_type = other DNA
tttgccaagtcaggctttaac

SEQ ID NO: 134 - DNA, 21 bp, synthetic construct
  source 1..21: mol_type = other DNA
tatgcgaggatggggcagaat

SEQ ID NO: 135 - DNA, 21 bp, synthetic construct
  source 1..21: mol_type = other DNA
ttcgcgaggacgtccgataat

SEQ ID NO: 136 - DNA, 21 bp, synthetic construct
  source 1..21: mol_type = other DNA
ttgtccaaaatagggttgaat

SEQ ID NO: 137 - DNA, 21 bp, synthetic construct
  source 1..21: mol_type = other DNA
ttcacgtcctccaatggggtg

SEQ ID NO: 138 - DNA, 21 bp, synthetic construct
  source 1..21: mol_type = other DNA
tatgcgagggcgaatttgaat

SEQ ID NO: 139 - DNA, 21 bp, synthetic construct
  source 1..21: mol_type = other DNA
ttgtccaaaatagggcagaat

SEQ ID NO: 140 - DNA, 21 bp, synthetic construct
  source 1..21: mol_type = other DNA
ttcgcgaggacgggggataat

SEQ ID NO: 141 - DNA, 21 bp, synthetic construct
  source 1..21: mol_type = other DNA
ttcgcgaaaacggggaataat

SEQ ID NO: 142 - DNA, 21 bp, synthetic construct
  source 1..21: mol_type = other DNA
ttctccaggataaatttgaat

SEQ ID NO: 143 - DNA, 21 bp, synthetic construct
  source 1..21: mol_type = other DNA
gcgtccgagttcatgacgttc

SEQ ID NO: 144 - DNA, 21 bp, synthetic construct
  source 1..21: mol_type = other DNA
ttctccagggcgggggataat

SEQ ID NO: 145 - DNA, 21 bp, synthetic construct
  source 1..21: mol_type = other DNA
tattccaaagcggggcagaat

SEQ ID NO: 146 - DNA, 21 bp, synthetic construct
  source 1..21: mol_type = other DNA
ttctccagggcggggttcaat

SEQ ID NO: 147 - DNA, 21 bp, synthetic construct
  source 1..21: mol_type = other DNA
ttttcacgctacggctcaaac

SEQ ID NO: 148 - DNA, 21 bp, synthetic construct
  source 1..21: mol_type = other DNA
tatgcgaggcagaatacgaat

SEQ ID NO: 149 - DNA, 21 bp, synthetic construct
  source 1..21: mol_type = other DNA
atggtgtccacgaatggggtg

SEQ ID NO: 150 - DNA, 21 bp, synthetic construct
  source 1..21: mol_type = other DNA
gccaagtcaaccaacggcatc

SEQ ID NO: 151 - DNA, 21 bp, synthetic construct
  source 1..21: mol_type = other DNA
gtaggctcagcccataactgg

SEQ ID NO: 152 - DNA, 21 bp, synthetic construct
  source 1..21: mol_type = other DNA
tattccaaacagaatacgaat

SEQ ID NO: 153 - DNA, 21 bp, synthetic construct
  source 1..21: mol_type = other DNA
ttggcgaggtccggggataat

SEQ ID NO: 154 - DNA, 21 bp, synthetic construct
  source 1..21: mol_type = other DNA
atattgtccacgaatgggata

SEQ ID NO: 155 - DNA, 21 bp, synthetic construct
  source 1..21: mol_type = other DNA
gtattttcaaccaacggcatc

SEQ ID NO: 156 - DNA, 21 bp, synthetic construct
  source 1..21: mol_type = other DNA
ttgttgtccacgaatgggagg

SEQ ID NO: 157 - DNA, 21 bp, synthetic construct
  source 1..21: mol_type = other DNA
tatgcgaggcaggggcagaat

SEQ ID NO: 158 - DNA, 21 bp, synthetic construct
  source 1..21: mol_type = other DNA
tactcacgctcaggcatcaac

SEQ ID NO: 159 - DNA, 21 bp, synthetic construct
  source 1..21: mol_type = other DNA
ttgtccaaagtgggggataat

SEQ ID NO: 160 - DNA, 21 bp, synthetic construct
  source 1..21: mol_type = other DNA
tattccaaagcgaatacgaat

SEQ ID NO: 161 - DNA, 21 bp, synthetic construct
  source 1..21: mol_type = other DNA
ggcgaatcagaccgcaagtgg

SEQ ID NO: 162 - DNA, 21 bp, synthetic construct
  source 1..21: mol_type = other DNA
ctgtcaaagatcggcgtaaac

SEQ ID NO: 163 - DNA, 21 bp, synthetic construct
  source 1..21: mol_type = other DNA
ttggcgaaatccgggcagaat

SEQ ID NO: 164 - DNA, 21 bp, synthetic construct
  source 1..21: mol_type = other DNA
tatgcgaaatccgggcagaat

SEQ ID NO: 165 - DNA, 21 bp, synthetic construct
  source 1..21: mol_type = other DNA
ttctccaaattggggcacaat

SEQ ID NO: 166 - DNA, 21 bp, synthetic construct
  source 1..21: mol_type = other DNA
tattccagggtgaatgagaat

SEQ ID NO: 167 - DNA, 21 bp, synthetic construct
  source 1..21: mol_type = other DNA
tactcaaagaacaaccataac

SEQ ID NO: 168 - DNA, 21 bp, synthetic construct
  source 1..21: mol_type = other DNA
ttgtattccacgaatgggata

SEQ ID NO: 169 - DNA, 21 bp, synthetic construct
  source 1..21: mol_type = other DNA
tatgcgaggcaggggatgaat

SEQ ID NO: 170 - DNA, 21 bp, synthetic construct
  source 1..21: mol_type = other DNA
ttgtccaaagtggggtccaat

SEQ ID NO: 171 - DNA, 21 bp, synthetic construct
  source 1..21: mol_type = other DNA
gaaatgggcggcggctcatgg

SEQ ID NO: 172 - DNA, 21 bp, synthetic construct
  source 1..21: mol_type = other DNA
ttcgcgaaatccgggcacaat

SEQ ID NO: 173 - DNA, 21 bp, synthetic construct
  source 1..21: mol_type = other DNA
tatgcgaaatccaatatgaat

SEQ ID NO: 174 - DNA, 21 bp, synthetic construct
  source 1..21: mol_type = other DNA
tatgcgaaagcgaatatgaat

SEQ ID NO: 175 - DNA, 21 bp, synthetic construct
  source 1..21: mol_type = other DNA
gacctgtcacatgccaagtgg

SEQ ID NO: 176 - DNA, 21 bp, synthetic construct
  source 1..21: mol_type = other DNA
ggggaggggatagtgaggtgg

SEQ ID NO: 177 - DNA, 21 bp, synthetic construct
  source 1..21: mol_type = other DNA
tattccaaagggaatgataat

SEQ ID NO: 178 - DNA, 21 bp, synthetic construct
  source 1..21: mol_type = other DNA
tatgcgagggtggggcagaat

SEQ ID NO: 179 - DNA, 21 bp, synthetic construct
  source 1..21: mol_type = other DNA
ttggcgaggacgggggataat

SEQ ID NO: 180 - DNA, 21 bp, synthetic construct
  source 1..21: mol_type = other DNA
ttgtccaggtccaatgataat

SEQ ID NO: 181 - DNA, 21 bp, synthetic construct
  source 1..21: mol_type = other DNA
tccgtgtccacgaatgggagg

SEQ ID NO: 182 - DNA, 21 bp, synthetic construct
  source 1..21: mol_type = other DNA
tattccaaacacaatgtgaat

SEQ ID NO: 183 - DNA, 21 bp, synthetic construct
  source 1..21: mol_type = other DNA
tatgcgagggcgaatgtgaat

SEQ ID NO: 184 - DNA, 21 bp, synthetic construct
  source 1..21: mol_type = other DNA
ttggcgaaaaatgggaataat

SEQ ID NO: 185 - DNA, 21 bp, synthetic construct
  source 1..21: mol_type = other DNA
ttgcacaaattgacggtgtcc

SEQ ID NO: 186 - DNA, 21 bp, synthetic construct
  source 1..21: mol_type = other DNA
ttggcgaaacaggggttcaat

SEQ ID NO: 187 - DNA, 21 bp, synthetic construct
  source 1..21: mol_type = other DNA
gggaatgatatgtccacgtgg

SEQ ID NO: 188 - DNA, 21 bp, synthetic construct
  source 1..21: mol_type = other DNA
tttgtatcaaccaacggcatc

SEQ ID NO: 189 - DNA, 21 bp, synthetic construct
  source 1..21: mol_type = other DNA
ttctccaggataaatgataat

SEQ ID NO: 190 - DNA, 21 bp, synthetic construct
  source 1..21: mol_type = other DNA
tttgcccgcgccggcatgaac

SEQ ID NO: 191 - DNA, 21 bp, synthetic construct
  source 1..21: mol_type = other DNA
gggtccgggatacagaattgg

SEQ ID NO: 192 - DNA, 21 bp, synthetic construct
  source 1..21: mol_type = other DNA
tatgtgtccacgaatggggtg

SEQ ID NO: 193 - DNA, 21 bp, synthetic construct
  source 1..21: mol_type = other DNA
ttgtccaaagcggggttcaat

SEQ ID NO: 194 - DNA, 21 bp, synthetic construct
  source 1..21: mol_type = other DNA
tactcaaagggcaacatgaac

SEQ ID NO: 195 - DNA, 21 bp, synthetic construct
  source 1..21: mol_type = other DNA
tatgcgaggcagggggataat

SEQ ID NO: 196 - DNA, 21 bp, synthetic construct
  source 1..21: mol_type = other DNA
tatgcgaaaacggggcagaat

SEQ ID NO: 197 - DNA, 21 bp, synthetic construct
  source 1..21: mol_type = other DNA
acgaggaatgggaatatagcg

SEQ ID NO: 198 - DNA, 21 bp, synthetic construct
  source 1..21: mol_type = other DNA
caggtgtccacgaatggggtg

SEQ ID NO: 199 - DNA, 21 bp, synthetic construct
  source 1..21: mol_type = other DNA
tttcattcaaccaacggcatc

SEQ ID NO: 200 - DNA, 21 bp, synthetic construct
  source 1..21: mol_type = other DNA
acgaggatagggaataatgcg

SEQ ID NO: 201 - DNA, 21 bp, synthetic construct
  source 1..21: mol_type = other DNA
tttgtacgctcagacatcaag

SEQ ID NO: 202 - DNA, 21 bp, synthetic construct
  source 1..21: mol_type = other DNA
ttctccaaaacggggccgaat

SEQ ID NO: 203 - DNA, 21 bp, synthetic construct
  source 1..21: mol_type = other DNA
ttgtccaaattggggccgaat

SEQ ID NO: 204 - DNA, 21 bp, synthetic construct
  source 1..21: mol_type = other DNA
gtgaaatccatgaatggggtg

SEQ ID NO: 205 - DNA, 21 bp, synthetic construct
  source 1..21: mol_type = other DNA
ttgttctccacgaatggggtg

SEQ ID NO: 206 - DNA, 21 bp, synthetic construct
  source 1..21: mol_type = other DNA
tatgcgaggtccggggataat

SEQ ID NO: 207 - DNA, 21 bp, synthetic construct
  source 1..21: mol_type = other DNA
tactcaaagcaaggctcaaac

SEQ ID NO: 208 - DNA, 21 bp, synthetic construct
  source 1..21: mol_type = other DNA
tatgcgaaattgaatttcaat

SEQ ID NO: 209 - DNA, 21 bp, synthetic construct
  source 1..21: mol_type = other DNA
atagagtccacgaatggggtg

SEQ ID NO: 210 - DNA, 21 bp, synthetic construct
  source 1..21: mol_type = other DNA
ttgcacagggcgacgtatgat

SEQ ID NO: 211 - DNA, 21 bp, synthetic construct
  source 1..21: mol_type = other DNA
ttcgtgtccacgaatggggtg

SEQ ID NO: 212 - DNA, 21 bp, synthetic construct
  source 1..21: mol_type = other DNA
tatgcgaaagataattggaat

SEQ ID NO: 213 - DNA, 21 bp, synthetic construct
  source 1..21: mol_type = other DNA
ccgcagtccacgaatggggtg

SEQ ID NO: 214 - DNA, 21 bp, synthetic construct
  source 1..21: mol_type = other DNA
tattccaaatggaatgataat

SEQ ID NO: 215 - DNA, 21 bp, synthetic construct
  source 1..21: mol_type = other DNA
ctggccaagcaaggccataac

SEQ ID NO: 216 - DNA, 21 bp, synthetic construct
  source 1..21: mol_type = other DNA
tccatatccacgaatgggagg

SEQ ID NO: 217 - DNA, 21 bp, synthetic construct
  source 1..21: mol_type = other DNA
tatgcgaaattggggttcaat

SEQ ID NO: 218 - DNA, 21 bp, synthetic construct
  source 1..21: mol_type = other DNA
ttgcacaaagcgtccccgacg

SEQ ID NO: 219 - DNA, 21 bp, synthetic construct
  source 1..21: mol_type = other DNA
tattcctccttgaatccgaaa

SEQ ID NO: 220 - DNA, 21 bp, synthetic construct
  source 1..21: mol_type = other DNA
tatgcgaggacgaatgataat

SEQ ID NO: 221 - DNA, 21 bp, synthetic construct
  source 1..21: mol_type = other DNA
ttggcgaaaaatgggttcaat

SEQ ID NO: 222 - DNA, 21 bp, synthetic construct
  source 1..21: mol_type = other DNA
ttggcgaaatccgggatgaat

SEQ ID NO: 223 - DNA, 21 bp, synthetic construct
  source 1..21: mol_type = other DNA
ttctccaaagcggggataaat

SEQ ID NO: 224 - DNA, 21 bp, synthetic construct
  source 1..21: mol_type = other DNA
ttgtccaaacaggggaataat

SEQ ID NO: 225 - DNA, 21 bp, synthetic construct
  source 1..21: mol_type = other DNA
ttctccaaaacggggttcaat

SEQ ID NO: 226 - DNA, 21 bp, synthetic construct
  source 1..21: mol_type = other DNA
tattccaaacaggggatgaat

SEQ ID NO: 227 - DNA, 21 bp, synthetic construct
  source 1..21: mol_type = other DNA
ttgtccaaaatggggccgaat

SEQ ID NO: 228 - DNA, 21 bp, synthetic construct
  source 1..21: mol_type = other DNA
tatgcgaggttgaatgataat

SEQ ID NO: 229 - DNA, 21 bp, synthetic construct
  source 1..21: mol_type = other DNA
tattccaggatgggggataat

SEQ ID NO: 230 - DNA, 21 bp, synthetic construct
  source 1..21: mol_type = other DNA
cgcaacgaaggctcatcatgg

SEQ ID NO: 231 - DNA, 21 bp, synthetic construct
  source 1..21: mol_type = other DNA
tactcaaagtcaggctacaac

SEQ ID NO: 232 - DNA, 21 bp, synthetic construct
  source 1..21: mol_type = other DNA
ttggcgaaacaggggttgaat

SEQ ID NO: 233 - DNA, 21 bp, synthetic construct
  source 1..21: mol_type = other DNA
cacaaatccacgaatgggtat

SEQ ID NO: 234 - DNA, 21 bp, synthetic construct
  source 1..21: mol_type = other DNA
ttgtccaaattggggttgaat

SEQ ID NO: 235 - DNA, 21 bp, synthetic construct
  source 1..21: mol_type = other DNA
caggatgggaattccaggtat

SEQ ID NO: 236 - DNA, 21 bp, synthetic construct
  source 1..21: mol_type = other DNA
ttgtccaggatgaatgataat

SEQ ID NO: 237 - DNA, 21 bp, synthetic construct
  source 1..21: mol_type = other DNA
ctggccaagggcggctttaac

SEQ ID NO: 238 - DNA, 21 bp, synthetic construct
  source 1..21: mol_type = other DNA
ttgtccaaatccgggccgaat

SEQ ID NO: 239 - DNA, 21 bp, synthetic construct
  source 1..21: mol_type = other DNA
ttcatgtccacgaatggggtg

SEQ ID NO: 240 - DNA, 21 bp, synthetic construct
  source 1..21: mol_type = other DNA
tatgggtccacgaatggggtg

SEQ ID NO: 241 - DNA, 21 bp, synthetic construct
  source 1..21: mol_type = other DNA
atgtccaaattgaatgcgaat

SEQ ID NO: 242 - DNA, 21 bp, synthetic construct
  source 1..21: mol_type = other DNA
aaattgccggattatgggaat

SEQ ID NO: 243 - DNA, 21 bp, synthetic construct
  source 1..21: mol_type = other DNA
tatgcgaaacaggggttcaat

SEQ ID NO: 244 - DNA, 21 bp, synthetic construct
  source 1..21: mol_type = other DNA
acgcactccgggaaatccgcg

SEQ ID NO: 245 - DNA, 21 bp, synthetic construct
  source 1..21: mol_type = other DNA
ttctccaggacgggggataat

SEQ ID NO: 246 - DNA, 21 bp, synthetic construct
  source 1..21: mol_type = other DNA
ttggcgaaatccgggttgaat

SEQ ID NO: 247 - DNA, 21 bp, synthetic construct
  source 1..21: mol_type = other DNA
tttgcccgcgccggccccaac

SEQ ID NO: 248 - DNA, 21 bp, synthetic construct
  source 1..21: mol_type = other DNA
tactcaaagatgaacaccaac

SEQ ID NO: 249 - DNA, 21 bp, synthetic construct
  source 1..21: mol_type = other DNA
ttgcagtccacgaatgggata

SEQ ID NO: 250 - DNA, 21 bp, synthetic construct
  source 1..21: mol_type = other DNA
atgacgtccacgaatggggtg

SEQ ID NO: 251 - DNA, 21 bp, synthetic construct
  source 1..21: mol_type = other DNA
tatgcgaggccggggataaat

SEQ ID NO: 252 - DNA, 21 bp, synthetic construct
  source 1..21: mol_type = other DNA
tatgcgaaaacggggttcaat

SEQ ID NO: 253 - DNA, 21 bp, synthetic construct
  source 1..21: mol_type = other DNA
tatgcgaaaaatgggcacaat

SEQ ID NO: 254 - DNA, 21 bp, synthetic construct
  source 1..21: mol_type = other DNA
ttctccaaagtggggatgaat

SEQ ID NO: 255 - DNA, 21 bp, synthetic construct
  source 1..21: mol_type = other DNA
ttggcgaaaacggggatgaat

SEQ ID NO: 256 - DNA, 21 bp, synthetic construct
  source 1..21: mol_type = other DNA
ttgtccaaaacggggccgaat

SEQ ID NO: 257 - DNA, 21 bp, synthetic construct
  source 1..21: mol_type = other DNA
atgtcctccacgaatggggtg

SEQ ID NO: 258 - DNA, 21 bp, synthetic construct
  source 1..21: mol_type = other DNA
ttgtccaggcagaatgataat

SEQ ID NO: 259 - DNA, 21 bp, synthetic construct
  source 1..21: mol_type = other DNA
tatgcgaaatccggggggaat

SEQ ID NO: 260 - DNA, 21 bp, synthetic construct
  source 1..21: mol_type = other DNA
ttggcgaaagcggggcacaat

SEQ ID NO: 261 - DNA, 21 bp, synthetic construct
  source 1..21: mol_type = other DNA
tattccaaaacggggcacaat

SEQ ID NO: 262 - DNA, 21 bp, synthetic construct
  source 1..21: mol_type = other DNA
tgggcgtccacgaatggggtg

SEQ ID NO: 263 - DNA, 21 bp, synthetic construct
  source 1..21: mol_type = other DNA
atagtgtccacgaatgggata

SEQ ID NO: 264 - DNA, 21 bp, synthetic construct
  source 1..21: mol_type = other DNA
tatgcgaaaggggggcagaat

SEQ ID NO: 265 - DNA, 21 bp, synthetic construct
  source 1..21: mol_type = other DNA
ttcgcgaaaacggggcacaat

SEQ ID NO: 266 - DNA, 21 bp, synthetic construct
  source 1..21: mol_type = other DNA
ttcgcgaaaggggggataaat

SEQ ID NO: 267 - DNA, 21 bp, synthetic construct
  source 1..21: mol_type = other DNA
tattccaaacacaatgataat

SEQ ID NO: 268 - DNA, 21 bp, synthetic construct
  source 1..21: mol_type = other DNA
ttctccaaagtgggggcgaat

SEQ ID NO: 269 - DNA, 21 bp, synthetic construct
  source 1..21: mol_type = other DNA
tacgccaagaacggctacaac

SEQ ID NO: 270 - DNA, 21 bp, synthetic construct
  source 1..21: mol_type = other DNA
ttctccaaaatagggccgaat

SEQ ID NO: 271 - DNA, 21 bp, synthetic construct
  source 1..21: mol_type = other DNA
tttgccaagtcaggcaacaac

SEQ ID NO: 272 - DNA, 21 bp, synthetic construct
  source 1..21: mol_type = other DNA
tattccaggcaggggacgaat

SEQ ID NO: 273 - DNA, 21 bp, synthetic construct
  source 1..21: mol_type = other DNA
cacatatccacgaatggggtg

SEQ ID NO: 274 - DNA, 21 bp, synthetic construct
  source 1..21: mol_type = other DNA
tatgcgagggcggggcagaat

SEQ ID NO: 275 - DNA, 21 bp, synthetic construct
  source 1..21: mol_type = other DNA
tactcaaagatgggcatgaac

SEQ ID NO: 276 - DNA, 21 bp, synthetic construct
  source 1..21: mol_type = other DNA
ttggcgaaaacggggcacaat

SEQ ID NO: 277 - DNA, 21 bp, synthetic construct
  source 1..21: mol_type = other DNA
tattccaaacagaatccgaat

SEQ ID NO: 278 - DNA, 21 bp, synthetic construct
  source 1..21: mol_type = other DNA
tacgcccgcgccggcaaggac

SEQ ID NO: 279 - DNA, 21 bp, synthetic construct
  source 1..21: mol_type = other DNA
tattccaaagtgggggataat

SEQ ID NO: 280 - DNA, 21 bp, synthetic construct
  source 1..21: mol_type = other DNA
tttatctcaaccaacggcatc

SEQ ID NO: 281 - DNA, 21 bp, synthetic construct
  source 1..21: mol_type = other DNA
ttcgcgtccacgaatgggata

SEQ ID NO: 282 - DNA, 21 bp, synthetic construct
  source 1..21: mol_type = other DNA
ttctggtccggggaggtgtcc

SEQ ID NO: 283 - DNA, 21 bp, synthetic construct
  source 1..21: mol_type = other DNA
tgctcaggccgcccccaagaa

SEQ ID NO: 284 - DNA, 21 bp, synthetic construct
  source 1..21: mol_type = other DNA
tttgcctcaaccaacggcgta

SEQ ID NO: 285 - DNA, 21 bp, synthetic construct
  source 1..21: mol_type = other DNA
ttgtccaaatcctccgtgaat

SEQ ID NO: 286 - DNA, 21 bp, synthetic construct
  source 1..21: mol_type = other DNA
tttgccaagggcggctggaac

SEQ ID NO: 287 - DNA, 21 bp, synthetic construct
  source 1..21: mol_type = other DNA
tactcaaagctgggcatcaac

SEQ ID NO: 288 - DNA, 21 bp, synthetic construct
  source 1..21: mol_type = other DNA
ttgtccaaagtggggatgaat

SEQ ID NO: 289 - DNA, 21 bp, synthetic construct
  source 1..21: mol_type = other DNA
acgtattccgggaataatgcg

SEQ ID NO: 290 - DNA, 21 bp, synthetic construct
  source 1..21: mol_type = other DNA
aggtccccggtgacgttcccg

SEQ ID NO: 291 - DNA, 21 bp, synthetic construct
  source 1..21: mol_type = other DNA
ttggcgaggccggggccgaat

SEQ ID NO: 292 - DNA, 21 bp, synthetic construct
  source 1..21: mol_type = other DNA
ctggccaagggcggcatcaac

SEQ ID NO: 293 - DNA, 21 bp, synthetic construct
  source 1..21: mol_type = other DNA
atagtgtccacgaatgggagg

SEQ ID NO: 294 - DNA, 21 bp, synthetic construct
  source 1..21: mol_type = other DNA
tgggagtccacgaatggggtg

SEQ ID NO: 295 - DNA, 21 bp, synthetic construct
  source 1..21: mol_type = other DNA
tacgccaagaacggcgtaaac

SEQ ID NO: 296 - DNA, 21 bp, synthetic construct
  source 1..21: mol_type = other DNA
ttgtccaggacgggggagaat

SEQ ID NO: 297 - DNA, 21 bp, synthetic construct
  source 1..21: mol_type = other DNA
acgaaattgggggataatgcg

SEQ ID NO: 298 - DNA, 21 bp, synthetic construct
  source 1..21: mol_type = other DNA
ttctccaaacaggggtataat

SEQ ID NO: 299 - DNA, 21 bp, synthetic construct
  source 1..21: mol_type = other DNA
ttcgattccacgaatgggata

SEQ ID NO: 300 - DNA, 21 bp, synthetic construct
  source 1..21: mol_type = other DNA
tatgcgaggaatggggataat

SEQ ID NO: 301 - DNA, 21 bp, synthetic construct
  source 1..21: mol_type = other DNA
ttgtccaaagtgggggagaat

SEQ ID NO: 302 - DNA, 21 bp, synthetic construct
  source 1..21: mol_type = other DNA
ctgtcaaagctgggcatcaac

SEQ ID NO: 303 - DNA, 21 bp, synthetic construct
  source 1..21: mol_type = other DNA
tatgcgaggcagggggagaat

SEQ ID NO: 304 - DNA, 21 bp, synthetic construct
  source 1..21: mol_type = other DNA
tacgtatcaaccaacggcatc

SEQ ID NO: 305 - DNA, 21 bp, synthetic construct
  source 1..21: mol_type = other DNA
caggagtccacgaatggggtg

SEQ ID NO: 306 - DNA, 21 bp, synthetic construct
  source 1..21: mol_type = other DNA
ttgcacgcgagggggttggat

SEQ ID NO: 307 - DNA, 21 bp, synthetic construct
  source 1..21: mol_type = other DNA
tatgcgaggttgaatgtgaat

SEQ ID NO: 308 - DNA, 21 bp, synthetic construct
  source 1..21: mol_type = other DNA
ccgtatgcggtgtccatgaaa

SEQ ID NO: 309 - DNA, 21 bp, synthetic construct
  source 1..21: mol_type = other DNA
tattccaaagtgaatttcaat

SEQ ID NO: 310 - DNA, 21 bp, synthetic construct
  source 1..21: mol_type = other DNA
ctgtcaaagaccggccataac

SEQ ID NO: 311 - DNA, 21 bp, synthetic construct
  source 1..21: mol_type = other DNA
gtgatgtccacgaatgggata

SEQ ID NO: 312 - DNA, 21 bp, synthetic construct
  source 1..21: mol_type = other DNA
ttggcgaaaacggggcagaat

SEQ ID NO: 313 - DNA, 21 bp, synthetic construct
  source 1..21: mol_type = other DNA
tatgcgaaaggggggttcaat

SEQ ID NO: 314 - DNA, 21 bp, synthetic construct
  source 1..21: mol_type = other DNA
ttgtccaaagcggggccgaat

SEQ ID NO: 315 - DNA, 21 bp, synthetic construct
  source 1..21: mol_type = other DNA
tttgccaagaccggcatgaac

SEQ ID NO: 316 - DNA, 21 bp, synthetic construct
  source 1..21: mol_type = other DNA
ttgtccaaagcggggatgaat

SEQ ID NO: 317 - DNA, 21 bp, synthetic construct
  source 1..21: mol_type = other DNA
tattccaaacagggggataat

SEQ ID NO: 318 - DNA, 21 bp, synthetic construct
  source 1..21: mol_type = other DNA
tatgcgagggatgggtataat

SEQ ID NO: 319 - DNA, 21 bp, synthetic construct
  source 1..21: mol_type = other DNA
tattccaggcaggggatgaat

SEQ ID NO: 320 - DNA, 21 bp, synthetic construct
  source 1..21: mol_type = other DNA
ttggcgaaaacggggttcaat

SEQ ID NO: 321 - DNA, 21 bp, synthetic construct
  source 1..21: mol_type = other DNA
acgttgtccacgaatgggata

SEQ ID NO: 322 - DNA, 21 bp, synthetic construct
  source 1..21: mol_type = other DNA
gcgatatccacgaatgggagg

SEQ ID NO: 323 - DNA, 21 bp, synthetic construct
  source 1..21: mol_type = other DNA
tatgcgaggaatgggcagaat

SEQ ID NO: 324 - DNA, 21 bp, synthetic construct
  source 1..21: mol_type = other DNA
tatgcgaaaccggggaataat

SEQ ID NO: 325 - DNA, 21 bp, synthetic construct
  source 1..21: mol_type = other DNA
ttctccaaattgaatacgaat

SEQ ID NO: 326 - DNA, 21 bp, synthetic construct
  source 1..21: mol_type = other DNA
ataaaatccacgaatggggtg

SEQ ID NO: 327 - DNA, 21 bp, synthetic construct
  source 1..21: mol_type = other DNA
acgttgtccgcgaatgggagg

SEQ ID NO: 328 - DNA, 21 bp, synthetic construct
  source 1..21: mol_type = other DNA
agggagtccacgaatggggtg

SEQ ID NO: 329 - DNA, 21 bp, synthetic construct
  source 1..21: mol_type = other DNA
tacgccaagcccggctttaac

SEQ ID NO: 330 - DNA, 21 bp, synthetic construct
  source 1..21: mol_type = other DNA
tacgcccgcgccggcatcaac

SEQ ID NO: 331 - DNA, 21 bp, synthetic construct
  source 1..21: mol_type = other DNA
gcgaaatccacgaatggggtg

SEQ ID NO: 332 - DNA, 21 bp, synthetic construct
  source 1..21: mol_type = other DNA
gtgaaatatgattggtccgat

SEQ ID NO: 333 - DNA, 21 bp, synthetic construct
  source 1..21: mol_type = other DNA
tatcacaaaacgtccttgaat

SEQ ID NO: 334 - DNA, 21 bp, synthetic construct
  source 1..21: mol_type = other DNA
tatgcgaaagggaatccgaat

SEQ ID NO: 335 - DNA, 21 bp, synthetic construct
  source 1..21: mol_type = other DNA
gagtggtccacgaatgggagg

SEQ ID NO: 336 - DNA, 21 bp, synthetic construct
  source 1..21: mol_type = other DNA
ttgaaatccacgaatgggata

SEQ ID NO: 337 - DNA, 21 bp, synthetic construct
  source 1..21: mol_type = other DNA
gtggggtccacgaatgggata

SEQ ID NO: 338 - DNA, 21 bp, synthetic construct
  source 1..21: mol_type = other DNA
agggatgagacgaggttgtgg

SEQ ID NO: 339 - DNA, 21 bp, synthetic construct
  source 1..21: mol_type = other DNA
ctggccaagcaaggcatcaac

SEQ ID NO: 340 - DNA, 21 bp, synthetic construct
  source 1..21: mol_type = other DNA
tattccaggatgggggagaat

SEQ ID NO: 341 - DNA, 21 bp, synthetic construct
  source 1..21: mol_type = other DNA
gtgcagtccacgaatgggata

SEQ ID NO: 342 - DNA, 21 bp, synthetic construct
  source 1..21: mol_type = other DNA
tattccaaaacggggttgaat

SEQ ID NO: 343 - DNA, 21 bp, synthetic construct
  source 1..21: mol_type = other DNA
tactcaaagcaaggcgtaaac

SEQ ID NO: 344 - DNA, 21 bp, synthetic construct
  source 1..21: mol_type = other DNA
ttctccaaattgaatttgaat

SEQ ID NO: 345 - DNA, 21 bp, synthetic construct
  source 1..21: mol_type = other DNA
tacgccaagtcaggcctgaac

SEQ ID NO: 346 - DNA, 21 bp, synthetic construct
  source 1..21: mol_type = other DNA
tcagaaacctcatcacgctgg

SEQ ID NO: 347 - DNA, 21 bp, synthetic construct
  source 1..21: mol_type = other DNA
ataccgcagacgaattatgcg

SEQ ID NO: 348 - DNA, 21 bp, synthetic construct
  source 1..21: mol_type = other DNA
ggcaacatgaaccgctacgac

SEQ ID NO: 349 - DNA, 21 bp, synthetic construct
  source 1..21: mol_type = other DNA
ttgttgtccacgaatgggata

SEQ ID NO: 350 - DNA, 21 bp, synthetic construct
  source 1..21: mol_type = other DNA
cacgggggggcgtccgcgtat

SEQ ID NO: 351 - DNA, 21 bp, synthetic construct
  source 1..21: mol_type = other DNA
gagaaatccacgaatgggagg

SEQ ID NO: 352 - DNA, 21 bp, synthetic construct
  source 1..21: mol_type = other DNA
ttgtccaggatgggggataat

SEQ ID NO: 353 - DNA, 21 bp, synthetic construct
  source 1..21: mol_type = other DNA
gggaatgatgggtccaaatat

SEQ ID NO: 354 - DNA, 21 bp, synthetic construct
  source 1..21: mol_type = other DNA
tattccaaagggaatacgaat

SEQ ID NO: 355 - DNA, 21 bp, synthetic construct
  source 1..21: mol_type = other DNA
ttcgcgaaaacggggccgaat

SEQ ID NO: 356 - DNA, 21 bp, synthetic construct
  source 1..21: mol_type = other DNA
tatgcgaggttgggggtgaat

SEQ ID NO: 357 - DNA, 21 bp, synthetic construct
  source 1..21: mol_type = other DNA
tattccaaagggaatgtgaat

SEQ ID NO: 358 - DNA, 21 bp, synthetic construct
  source 1..21: mol_type = other DNA
tacatgtcaaccaacggcatc

SEQ ID NO: 359 - DNA, 21 bp, synthetic construct
  source 1..21: mol_type = other DNA
tcctattccacgaatgggata

SEQ ID NO: 360 - DNA, 21 bp, synthetic construct
  source 1..21: mol_type = other DNA
tactcaaagtcaaacgtaaac

SEQ ID NO: 361 - DNA, 21 bp, synthetic construct
  source 1..21: mol_type = other DNA
tccttgtccacgaatgggagg

SEQ ID NO: 362 - DNA, 21 bp, synthetic construct
  source 1..21: mol_type = other DNA
tactcacgccatggcaccaac

SEQ ID NO: 363 - DNA, 21 bp, synthetic construct
  source 1..21: mol_type = other DNA
tattccaaaacgggggggaat

SEQ ID NO: 364 - DNA, 21 bp, synthetic construct
  source 1..21: mol_type = other DNA
tattccaaagcgaatgcgaat

SEQ ID NO: 365 - DNA, 21 bp, synthetic construct
  source 1..21: mol_type = other DNA
ctggccaagtcaggcatcaac

SEQ ID NO: 366 - DNA, 21 bp, synthetic construct
  source 1..21: mol_type = other DNA
ctggccaagggcggccaaaac

SEQ ID NO: 367 - DNA, 21 bp, synthetic construct
  source 1..21: mol_type = other DNA
tactcaaagggcaaccaaaac

SEQ ID NO: 368 - DNA, 21 bp, synthetic construct
  source 1..21: mol_type = other DNA
ttgtccaaagcggggcagaat

SEQ ID NO: 369 - DNA, 21 bp, synthetic construct
  source 1..21: mol_type = other DNA
tgggattcctccaatggggtg

SEQ ID NO: 370 - DNA, 21 bp, synthetic construct
  source 1..21: mol_type = other DNA
ttggcgaaatccgggtccaat

SEQ ID NO: 371 - DNA, 21 bp, synthetic construct
  source 1..21: mol_type = other DNA
tactcaaagtacggccccaac

SEQ ID NO: 372 - DNA, 21 bp, synthetic construct
  source 1..21: mol_type = other DNA
ttgtccaaagcggggcacaat

SEQ ID NO: 373 - DNA, 21 bp, synthetic construct
  source 1..21: mol_type = other DNA
ttgtccaaaatgaatttgaat

SEQ ID NO: 374 - DNA, 21 bp, synthetic construct
  source 1..21: mol_type = other DNA
ttggcgaaaggggggttgaat

SEQ ID NO: 375 - DNA, 21 bp, synthetic construct
  source 1..21: mol_type = other DNA
ctgtcaaaggtaggcctgaac

SEQ ID NO: 376 - DNA, 21 bp, synthetic construct
  source 1..21: mol_type = other DNA
tttgccaagggcggccataac

SEQ ID NO: 377 - DNA, 21 bp, synthetic construct
  source 1..21: mol_type = other DNA
gagcagtccacgaatgggagg

SEQ ID NO: 378 - DNA, 21 bp, synthetic construct
  source 1..21: mol_type = other DNA
ggggaggtgaatgtgaggtgg

SEQ ID NO: 379 - DNA, 21 bp, synthetic construct
  source 1..21: mol_type = other DNA
ccgatgtccacgaatgggagg

SEQ ID NO: 380 - DNA, 21 bp, synthetic construct
  source 1..21: mol_type = other DNA
aatgtgtccacgaatgggagg

SEQ ID NO: 381 - DNA, 21 bp, synthetic construct
  source 1..21: mol_type = other DNA
tatgcgaggttgaatgcgaat

SEQ ID NO: 382 - DNA, 21 bp, synthetic construct
  source 1..21: mol_type = other DNA
ttggcgaaaaatgggcacaat

SEQ ID NO: 383 - DNA, 21 bp, synthetic construct
  source 1..21: mol_type = other DNA
aatacgtccacgaatggggtg

SEQ ID NO: 384 - DNA, 21 bp, synthetic construct
  source 1..21: mol_type = other DNA
ttggcgaggaatggggataat

SEQ ID NO: 385 - DNA, 21 bp, synthetic construct
  source 1..21: mol_type = other DNA
tacgccaagatcggcctgaac

SEQ ID NO: 386 - DNA, 21 bp, synthetic construct
  source 1..21: mol_type = other DNA
tattccaaaacgggggataat

SEQ ID NO: 387 - DNA, 21 bp, synthetic construct
  source 1..21: mol_type = other DNA
atcacctcaaccaacggcatc

SEQ ID NO: 388 - DNA, 21 bp, synthetic construct
  source 1..21: mol_type = other DNA
tactcaaagaacaactttaac

SEQ ID NO: 389 - DNA, 21 bp, synthetic construct
  source 1..21: mol_type = other DNA
acgtattccacgaatgggata

SEQ ID NO: 390 - DNA, 21 bp, synthetic construct
  source 1..21: mol_type = other DNA
gggatggatgggaataaatat

SEQ ID NO: 391 - DNA, 21 bp, synthetic construct
  source 1..21: mol_type = other DNA
ttgatgtccacgaatgggata

SEQ ID NO: 392 - DNA, 21 bp, synthetic construct
  source 1..21: mol_type = other DNA
atgcagtccacgaatggggtg

SEQ ID NO: 393 - DNA, 21 bp, synthetic construct
  source 1..21: mol_type = other DNA
tatgcgaaagcgggggcgaat

SEQ ID NO: 394 - DNA, 21 bp, synthetic construct
  source 1..21: mol_type = other DNA
ttggcgaaaacggggtccaat

SEQ ID NO: 395 - DNA, 21 bp, synthetic construct
  source 1..21: mol_type = other DNA
ctgtcaaagatcggcatgaac

SEQ ID NO: 396 - DNA, 21 bp, synthetic construct
  source 1..21: mol_type = other DNA
ttctccaaaacggggaataat

SEQ ID NO: 397 - DNA, 21 bp, synthetic construct
  source 1..21: mol_type = other DNA
tattccaaaacgggggcgaat

SEQ ID NO: 398 - DNA, 21 bp, synthetic construct
  source 1..21: mol_type = other DNA
gcgaatgggaggtccttgtat

SEQ ID NO: 399 - DNA, 21 bp, synthetic construct
  source 1..21: mol_type = other DNA
tatgcgaaatccggggtgaat

SEQ ID NO: 400 - DNA, 21 bp, synthetic construct
  source 1..21: mol_type = other DNA
tactcacgcatcaacatcaac

SEQ ID NO: 401 - DNA, 21 bp, synthetic construct
  source 1..21: mol_type = other DNA
tattccaaaataggggagaat

SEQ ID NO: 402 - DNA, 21 bp, synthetic construct
  source 1..21: mol_type = other DNA
cacatgtccacgaatggggtg

SEQ ID NO: 403 - DNA, 21 bp, synthetic construct
  source 1..21: mol_type = other DNA
gcgcagtccacgaatggggtg

SEQ ID NO: 404 - DNA, 21 bp, synthetic construct
  source 1..21: mol_type = other DNA
ctggccaagtcaggccataac

SEQ ID NO: 405 - DNA, 21 bp, synthetic construct
  source 1..21: mol_type = other DNA
ttggcgaaaatggggttcaat

SEQ ID NO: 406 - DNA, 21 bp, synthetic construct
  source 1..21: mol_type = other DNA
aggtccgagacggtgtatcag

SEQ ID NO: 407 - DNA, 21 bp, synthetic construct
  source 1..21: mol_type = other DNA
tattccaaatccgggacgaat

SEQ ID NO: 408 - DNA, 21 bp, synthetic construct
  source 1..21: mol_type = other DNA
tactcaaagggcaacgccaac

SEQ ID NO: 409 - DNA, 21 bp, synthetic construct
  source 1..21: mol_type = other DNA
ggggggtccaattcctcctgg

SEQ ID NO: 410 - DNA, 21 bp, synthetic construct
  source 1..21: mol_type = other DNA
gcgcactccacgaatggggtg

SEQ ID NO: 411 - DNA, 21 bp, synthetic construct
  source 1..21: mol_type = other DNA
ttgtccaaagcgggggtgaat

SEQ ID NO: 412 - DNA, 21 bp, synthetic construct
  source 1..21: mol_type = other DNA
atagcgtccacgaatgggata

SEQ ID NO: 413 - DNA, 21 bp, synthetic construct
  source 1..21: mol_type = other DNA
agggagccgaatgtgcagtgg

SEQ ID NO: 414 - DNA, 21 bp, synthetic construct
  source 1..21: mol_type = other DNA
tatgcgtcctccgggtataat

SEQ ID NO: 415 - DNA, 21 bp, synthetic construct
  source 1..21: mol_type = other DNA
gtgtcctcctccaatggggtg

SEQ ID NO: 416 - DNA, 21 bp, synthetic construct
  source 1..21: mol_type = other DNA
tttgcccgctcaggcgtaaac

SEQ ID NO: 417 - DNA, 21 bp, synthetic construct
  source 1..21: mol_type = other DNA
tatgcgaaaacggggttgaat

SEQ ID NO: 418 - DNA, 21 bp, synthetic construct
  source 1..21: mol_type = other DNA
tatgcgaggtccaatgataat

SEQ ID NO: 419 - DNA, 21 bp, synthetic construct
  source 1..21: mol_type = other DNA
ttcgcgaggaatgggcagaat

SEQ ID NO: 420 - DNA, 21 bp, synthetic construct
  source 1..21: mol_type = other DNA
ttggcgaaacaggggccgaat

SEQ ID NO: 421 - DNA, 21 bp, synthetic construct
  source 1..21: mol_type = other DNA
aatcaggcggatttgaggtgg

SEQ ID NO: 422 - DNA, 21 bp, synthetic construct
  source 1..21: mol_type = other DNA
gatccgtccgataaaaggtgg

SEQ ID NO: 423 - DNA, 21 bp, synthetic construct
  source 1..21: mol_type = other DNA
ttgtcctccacgaatgggata

SEQ ID NO: 424 - DNA, 21 bp, synthetic construct
  source 1..21: mol_type = other DNA
cacaaatccacgaatgggata

SEQ ID NO: 425 - DNA, 21 bp, synthetic construct
  source 1..21: mol_type = other DNA
tatgcgaaaacgggggataat

SEQ ID NO: 426 - DNA, 21 bp, synthetic construct
  source 1..21: mol_type = other DNA
tactcaaagaacggcctgaac

SEQ ID NO: 427 - DNA, 21 bp, synthetic construct
  source 1..21: mol_type = other DNA
ttcgcgaggaatgggatgaat

SEQ ID NO: 428 - DNA, 21 bp, synthetic construct
  source 1..21: mol_type = other DNA
gaaaagtcaaccaacggcatc

SEQ ID NO: 429 - DNA, 21 bp, synthetic construct
  source 1..21: mol_type = other DNA
ataggggggacgtccaattat

SEQ ID NO: 430 - DNA, 21 bp, synthetic construct
  source 1..21: mol_type = other DNA
tactcacgcgccaacaacaac

SEQ ID NO: 431 - DNA, 21 bp, synthetic construct
  source 1..21: mol_type = other DNA
ctgtcaaagcaaggctacaac

SEQ ID NO: 432 - DNA, 21 bp, synthetic construct
  source 1..21: mol_type = other DNA
ttggcgaaaacgggggtgaat

SEQ ID NO: 433 - DNA, 21 bp, synthetic construct
  source 1..21: mol_type = other DNA
tattccaaaatagggacgaat

SEQ ID NO: 434 - DNA, 21 bp, synthetic construct
  source 1..21: mol_type = other DNA
tattccaggttggggttcaat

SEQ ID NO: 435 - DNA, 21 bp, synthetic construct
  source 1..21: mol_type = other DNA
atacactcctccaatggggtg

SEQ ID NO: 436 - DNA, 21 bp, synthetic construct
  source 1..21: mol_type = other DNA
atgtcagaatcatcacgctgg

SEQ ID NO: 437 - DNA, 21 bp, synthetic construct
  source 1..21: mol_type = other DNA
tattccaggaatgggttgaat

SEQ ID NO: 438 - DNA, 21 bp, synthetic construct
  source 1..21: mol_type = other DNA
ttggcgaaaacgggggcgaat

SEQ ID NO: 439 - DNA, 21 bp, synthetic construct
  source 1..21: mol_type = other DNA
ttggcgagggggggggataat

SEQ ID NO: 440 - DNA, 21 bp, synthetic construct
  source 1..21: mol_type = other DNA
ttttcaaagctgaacatgaac

SEQ ID NO: 441 - DNA, 21 bp, synthetic construct
  source 1..21: mol_type = other DNA
acgaggtccgggtcctccgcg

SEQ ID NO: 442 - DNA, 21 bp, synthetic construct
  source 1..21: mol_type = other DNA
tatgcgaaagcgaatttgaat

SEQ ID NO: 443 - DNA, 21 bp, synthetic construct
  source 1..21: mol_type = other DNA
tacgccaagcatggctttaac

SEQ ID NO: 444 - DNA, 21 bp, synthetic construct
  source 1..21: mol_type = other DNA
tccgtgtccacgaatgggata

SEQ ID NO: 445 - DNA, 21 bp, synthetic construct
  source 1..21: mol_type = other DNA
atagggtccacgaatgggata

SEQ ID NO: 446 - DNA, 21 bp, synthetic construct
  source 1..21: mol_type = other DNA
ttgtccaaattgaatccgaat

SEQ ID NO: 447 - DNA, 21 bp, synthetic construct
  source 1..21: mol_type = other DNA
tactcaaagaccggcaacaac

SEQ ID NO: 448 - DNA, 21 bp, synthetic construct
  source 1..21: mol_type = other DNA
tattccaaacacaattccaat

SEQ ID NO: 449 - DNA, 21 bp, synthetic construct
  source 1..21: mol_type = other DNA
ttcgtgtccacgaatgggagg

SEQ ID NO: 450 - DNA, 21 bp, synthetic construct
  source 1..21: mol_type = other DNA
tatgcgaaagcgaatgtgaat

SEQ ID NO: 451 - DNA, 21 bp, synthetic construct
  source 1..21: mol_type = other DNA
acgaattccacgcacgggata

SEQ ID NO: 452 - DNA, 21 bp, synthetic construct
  source 1..21: mol_type = other DNA
ttgtccaaatccgggttgaat

SEQ ID NO: 453 - DNA, 21 bp, synthetic construct
  source 1..21: mol_type = other DNA
agggatgagttcagggcgtat

SEQ ID NO: 454 - DNA, 21 bp, synthetic construct
  source 1..21: mol_type = other DNA
ttggggtccacgaatgggagg

SEQ ID NO: 455 - DNA, 21 bp, synthetic construct
  source 1..21: mol_type = other DNA
cagaaatccacgaatggggtg

SEQ ID NO: 456 - DNA, 21 bp, synthetic construct
  source 1..21: mol_type = other DNA
tactcaaaggccggcggcaac

SEQ ID NO: 457 - DNA, 21 bp, synthetic construct
  source 1..21: mol_type = other DNA
gtggtgtccacgaatggggtg

SEQ ID NO: 458 - DNA, 21 bp, synthetic construct
  source 1..21: mol_type = other DNA
ccgaaatccacgaatggggtg

SEQ ID NO: 459 - DNA, 21 bp, synthetic construct
  source 1..21: mol_type = other DNA
tccgattcctccaatgggagg

SEQ ID NO: 460 - DNA, 21 bp, synthetic construct
  source 1..21: mol_type = other DNA
tattccaaagcgaattccaat

SEQ ID NO: 461 - DNA, 21 bp, synthetic construct
  source 1..21: mol_type = other DNA
ctgtcaaagtcaggctttaac

SEQ ID NO: 462 - DNA, 21 bp, synthetic construct
  source 1..21: mol_type = other DNA
gcgacgtccacgaatggggtg

SEQ ID NO: 463 - DNA, 21 bp, synthetic construct
  source 1..21: mol_type = other DNA
agggaggggacgtcctattat

SEQ ID NO: 464 - DNA, 21 bp, synthetic construct
  source 1..21: mol_type = other DNA
ttctcctccacgaatgggata

SEQ ID NO: 465 - DNA, 21 bp, synthetic construct
  source 1..21: mol_type = other DNA
tatcagtccacgaatgggata

SEQ ID NO: 466 - DNA, 21 bp, synthetic construct
  source 1..21: mol_type = other DNA
tatgcgaggtccaatgagaat

SEQ ID NO: 467 - DNA, 21 bp, synthetic construct
  source 1..21: mol_type = other DNA
cacgagtccacgaatggggtg

SEQ ID NO: 468 - DNA, 21 bp, synthetic construct
  source 1..21: mol_type = other DNA
tccacgtccacgaatgggata

SEQ ID NO: 469 - DNA, 21 bp, synthetic construct
  source 1..21: mol_type = other DNA
gtgtattcctccaatggggtg

SEQ ID NO: 470 - DNA, 21 bp, synthetic construct
  source 1..21: mol_type = other DNA
gagtcctccacgaatgggagg

SEQ ID NO: 471 - DNA, 21 bp, synthetic construct
  source 1..21: mol_type = other DNA
ctggccaagatgggcatgaac

SEQ ID NO: 472 - DNA, 21 bp, synthetic construct
  source 1..21: mol_type = other DNA
acgaaatccacgaatggggtg

SEQ ID NO: 473 - DNA, 21 bp, synthetic construct
  source 1..21: mol_type = other DNA
tatgcgaaagtggggccgaat

SEQ ID NO: 474 - DNA, 21 bp, synthetic construct
  source 1..21: mol_type = other DNA
aatgcgtccacgaatgggagg

SEQ ID NO: 475 - DNA, 21 bp, synthetic construct
  source 1..21: mol_type = other DNA
tacgcccgcctgggctttaac

SEQ ID NO: 476 - DNA, 21 bp, synthetic construct
  source 1..21: mol_type = other DNA
atgtccgaggcgtccacgtgg

SEQ ID NO: 477 - DNA, 21 bp, synthetic construct
  source 1..21: mol_type = other DNA
ttggcgaaaatagggccgaat

SEQ ID NO: 478 - DNA, 21 bp, synthetic construct
  source 1..21: mol_type = other DNA
aattccgggacggcgaaatat

SEQ ID NO: 479 - DNA, 21 bp, synthetic construct
  source 1..21: mol_type = other DNA
ttctccaaagcggggccgaat

SEQ ID NO: 480 - DNA, 21 bp, synthetic construct
  source 1..21: mol_type = other DNA
tatgcgaaagggggggataat

SEQ ID NO: 481 - DNA, 21 bp, synthetic construct
  source 1..21: mol_type = other DNA
ttggcgaaatccgggacgaat

SEQ ID NO: 482 - DNA, 21 bp, synthetic construct
  source 1..21: mol_type = other DNA
ctgtcaaagatgggccataac

SEQ ID NO: 483 - DNA, 21 bp, synthetic construct
  source 1..21: mol_type = other DNA
acgacgtcccagaatgggagg

SEQ ID NO: 484 - DNA, 21 bp, synthetic construct
  source 1..21: mol_type = other DNA
tactcacgcatcaactttaac

SEQ ID NO: 485 - DNA, 21 bp, synthetic construct
  source 1..21: mol_type = other DNA
tacgccaagggcggcaacaac

SEQ ID NO: 486 - DNA, 21 bp, synthetic construct
  source 1..21: mol_type = other DNA
ttctccaggcagaatgataat

SEQ ID NO: 487 - DNA, 21 bp, synthetic construct
  source 1..21: mol_type = other DNA
acgtattccacgaatggggtg

SEQ ID NO: 488 - DNA, 21 bp, synthetic construct
  source 1..21: mol_type = other DNA
ttcgcgaaaacggggttcaat

SEQ ID NO: 489 - DNA, 21 bp, synthetic construct
  source 1..21: mol_type = other DNA
gacggcggcacctcacgctac

SEQ ID NO: 490 - DNA, 21 bp, synthetic construct
  source 1..21: mol_type = other DNA
ctgtcaaagggcaactacaac

SEQ ID NO: 491 - DNA, 21 bp, synthetic construct
  source 1..21: mol_type = other DNA
cacgattcctccaatggggtg

SEQ ID NO: 492 - DNA, 21 bp, synthetic construct
  source 1..21: mol_type = other DNA
ttgaaaaatgggcagtccgcg

SEQ ID NO: 493 - DNA, 21 bp, synthetic construct
  source 1..21: mol_type = other DNA
caggatacgtcctccaggtgg

SEQ ID NO: 494 - DNA, 21 bp, synthetic construct
  source 1..21: mol_type = other DNA
tatgcgaaagcggggttgaat

SEQ ID NO: 495 - DNA, 21 bp, synthetic construct
  source 1..21: mol_type = other DNA
ctgtcaaagcaaaacatcaac

SEQ ID NO: 496 - DNA, 21 bp, synthetic construct
  source 1..21: mol_type = other DNA
ttgcactccacgaatggggtg

SEQ ID NO: 497 - DNA, 21 bp, synthetic construct
  source 1..21: mol_type = other DNA
tatgagtcctccaatggggtg

SEQ ID NO: 498 - DNA, 21 bp, synthetic construct
  source 1..21: mol_type = other DNA
tatgcgaaatccaatttcaat

SEQ ID NO: 499 - DNA, 21 bp, synthetic construct
  source 1..21: mol_type = other DNA
acggggtccacgaatgggata

SEQ ID NO: 500 - DNA, 21 bp, synthetic construct
  source 1..21: mol_type = other DNA
acgcagtccacgaatggggtg

SEQ ID NO: 501 - DNA, 21 bp, synthetic construct
  source 1..21: mol_type = other DNA
tatgagtccacgaatgggata

SEQ ID NO: 502 - DNA, 21 bp, synthetic construct
  source 1..21: mol_type = other DNA
atgaaatccacgaatggggtg

SEQ ID NO: 503 - DNA, 21 bp, synthetic construct
  source 1..21: mol_type = other DNA
tattccaaagataattggaat

SEQ ID NO: 504 - DNA, 21 bp, synthetic construct
  source 1..21: mol_type = other DNA
cacgtgtccacgaatggggtg

SEQ ID NO: 505 - DNA, 21 bp, synthetic construct
  source 1..21: mol_type = other DNA
ttggtgtccacgaatggggtg

SEQ ID NO: 506 - DNA, 21 bp, synthetic construct
  source 1..21: mol_type = other DNA
ttctccaaagtggggacgaat

SEQ ID NO: 507 - DNA, 21 bp, synthetic construct
  source 1..21: mol_type = other DNA
tactcaaaggccggcgtaaac

SEQ ID NO: 508 - DNA, 21 bp, synthetic construct
  source 1..21: mol_type = other DNA
ttcgggtccacgaatggggtg

SEQ ID NO: 509 - DNA, 21 bp, synthetic construct
  source 1..21: mol_type = other DNA
ttggcgaaaggggggcacaat

SEQ ID NO: 510 - DNA, 21 bp, synthetic construct
  source 1..21: mol_type = other DNA
gtggcgtcctccaatggggtg

SEQ ID NO: 511 - DNA, 21 bp, synthetic construct
  source 1..21: mol_type = other DNA
atcaagtcaaccaacggcatc

SEQ ID NO: 512 - DNA, 21 bp, synthetic construct
  source 1..21: mol_type = other DNA
acgaggtccggggatatagcg

SEQ ID NO: 513 - DNA, 21 bp, synthetic construct
  source 1..21: mol_type = other DNA
tactcaaagggcaacctgaac

SEQ ID NO: 514 - DNA, 21 bp, synthetic construct
  source 1..21: mol_type = other DNA
tttgccaagcaaggctggaac

SEQ ID NO: 515 - DNA, 21 bp, synthetic construct
  source 1..21: mol_type = other DNA
ttgtccaaagcggggttgaat

SEQ ID NO: 516 - DNA, 21 bp, synthetic construct
  source 1..21: mol_type = other DNA
tcattttcaaccaacggcatc

SEQ ID NO: 517 - DNA, 21 bp, synthetic construct
  source 1..21: mol_type = other DNA
tactcacgccccggccataac

SEQ ID NO: 518 - DNA, 21 bp, synthetic construct
  source 1..21: mol_type = other DNA
acgagggatacgaatgggagg

SEQ ID NO: 519 - DNA, 21 bp, synthetic construct
  source 1..21: mol_type = other DNA
tatgcgaaaacgggggggaat

SEQ ID NO: 520 - DNA, 21 bp, synthetic construct
  source 1..21: mol_type = other DNA
tatgcgagggggaatgataat

SEQ ID NO: 521 - DNA, 21 bp, synthetic construct
  source 1..21: mol_type = other DNA
gtggcgtccacgaatgggata

SEQ ID NO: 522 - DNA, 21 bp, synthetic construct
  source 1..21: mol_type = other DNA
gcgcagtccacgaatgggata

SEQ ID NO: 523 - DNA, 21 bp, synthetic construct
  source 1..21: mol_type = other DNA
ttcgcgaaaacggggataaat

SEQ ID NO: 524 - DNA, 21 bp, synthetic construct
  source 1..21: mol_type = other DNA
agggcgtccgatgtgtatccg

SEQ ID NO: 525 - DNA, 21 bp, synthetic construct
  source 1..21: mol_type = other DNA
cgcggctcagacgtatttccc

SEQ ID NO: 526 - DNA, 21 bp, synthetic construct
  source 1..21: mol_type = other DNA
ttggcgaaaggggggccgaat

SEQ ID NO: 527 - DNA, 21 bp, synthetic construct
  source 1..21: mol_type = other DNA
ttgtccaaagcgggggcgaat

SEQ ID NO: 528 - DNA, 21 bp, synthetic construct
  source 1..21: mol_type = other DNA
tacgccaagggcaactttaac

SEQ ID NO: 529 - DNA, 21 bp, synthetic construct
  source 1..21: mol_type = other DNA
gcggattccacgaatgggagg

SEQ ID NO: 530 - DNA, 21 bp, synthetic construct
  source 1..21: mol_type = other DNA
ctggccaaggccggctacaac

SEQ ID NO: 531 - DNA, 21 bp, synthetic construct
  source 1..21: mol_type = other DNA
ctgtcaaaggtaggcgtaaac

SEQ ID NO: 532 - DNA, 21 bp, synthetic construct
  source 1..21: mol_type = other DNA
tactcaaagggcaacatcaac

SEQ ID NO: 533 - DNA, 21 bp, synthetic construct
  source 1..21: mol_type = other DNA
tggtcctcctccaatggggtg

SEQ ID NO: 534 - DNA, 21 bp, synthetic construct
  source 1..21: mol_type = other DNA
gcggtgtccacgaatgggagg

SEQ ID NO: 535 - DNA, 21 bp, synthetic construct
  source 1..21: mol_type = other DNA
ctgtcaaagatcggcaacaac

SEQ ID NO: 536 - DNA, 21 bp, synthetic construct
  source 1..21: mol_type = other DNA
atagattccacgaatggggtg

SEQ ID NO: 537 - DNA, 21 bp, synthetic construct
  source 1..21: mol_type = other DNA
tcatcagactacaagatctac

SEQ ID NO: 538 - DNA, 21 bp, synthetic construct
  source 1..21: mol_type = other DNA
ttctccaaagcggggttcaat

SEQ ID NO: 539 - DNA, 21 bp, synthetic construct
  source 1..21: mol_type = other DNA
ttcgagtccacgaatggggtg

SEQ ID NO: 540 - DNA, 21 bp, synthetic construct
  source 1..21: mol_type = other DNA
tcaaactcacgcgaaggcatc

SEQ ID NO: 541 - DNA, 21 bp, synthetic construct
  source 1..21: mol_type = other DNA
tattccaaagcgaatgtgaat

SEQ ID NO: 542 - DNA, 21 bp, synthetic construct
  source 1..21: mol_type = other DNA
tcccactccacgaatggggtg

SEQ ID NO: 543 - DNA, 21 bp, synthetic construct
  source 1..21: mol_type = other DNA
tattccagggggaatgagaat

SEQ ID NO: 544 - DNA, 21 bp, synthetic construct
  source 1..21: mol_type = other DNA
ctgtcaaagaccggcatcaac

SEQ ID NO: 545 - DNA, 21 bp, synthetic construct
  source 1..21: mol_type = other DNA
tattccaaatccaatgataat

SEQ ID NO: 546 - DNA, 21 bp, synthetic construct
  source 1..21: mol_type = other DNA
tattccaggcacgggttcaat

SEQ ID NO: 547 - DNA, 21 bp, synthetic construct
  source 1..21: mol_type = other DNA
tatgcgaggtatggggataat

SEQ ID NO: 548 - DNA, 21 bp, synthetic construct
  source 1..21: mol_type = other DNA
tattccaggcagaatgataat

SEQ ID NO: 549 - DNA, 21 bp, synthetic construct
  source 1..21: mol_type = other DNA
ttgtccaaagggaatttcaat

SEQ ID NO: 550 - DNA, 21 bp, synthetic construct
  source 1..21: mol_type = other DNA
cagaaatccacgaatgggata

SEQ ID NO: 551 - DNA, 21 bp, synthetic construct
  source 1..21: mol_type = other DNA
ttcgcgaggaatggggcgaat

SEQ ID NO: 552 - DNA, 21 bp, synthetic construct
  source 1..21: mol_type = other DNA
ttcatatccacgaatggggtg

SEQ ID NO: 553 - DNA, 21 bp, synthetic construct
  source 1..21: mol_type = other DNA
tacgccaagcaaggcctgaac

SEQ ID NO: 554 - DNA, 21 bp, synthetic construct
  source 1..21: mol_type = other DNA
gattatacggggaggatagcg

SEQ ID NO: 555 - DNA, 21 bp, synthetic construct
  source 1..21: mol_type = other DNA
acgtattcctccaatggggtg

SEQ ID NO: 556 - DNA, 21 bp, synthetic construct
  source 1..21: mol_type = other DNA
tccaggtccacgaatggggcg

SEQ ID NO: 557 - DNA, 21 bp, synthetic construct
  source 1..21: mol_type = other DNA
tactcaaagcataacgccaac

SEQ ID NO: 558 - DNA, 21 bp, synthetic construct
  source 1..21: mol_type = other DNA
ttggcgaggccggggataaat

SEQ ID NO: 559 - DNA, 21 bp, synthetic construct
  source 1..21: mol_type = other DNA
gtgccgtatacgtcctccaat

SEQ ID NO: 560 - DNA, 21 bp, synthetic construct
  source 1..21: mol_type = other DNA
tatcactcctccaatggggtg

SEQ ID NO: 561 - DNA, 21 bp, synthetic construct
  source 1..21: mol_type = other DNA
taccataagaacggctacaac

SEQ ID NO: 562 - DNA, 21 bp, synthetic construct
  source 1..21: mol_type = other DNA
atattctccacgaatggggtg

SEQ ID NO: 563 - DNA, 21 bp, synthetic construct
  source 1..21: mol_type = other DNA
ttctccaaagcgaatgtgaat

SEQ ID NO: 564 - DNA, 21 bp, synthetic construct
  source 1..21: mol_type = other DNA
tatgcgaaaaatgggtccaat

SEQ ID NO: 565 - DNA, 21 bp, synthetic construct
  source 1..21: mol_type = other DNA
gcggagtccacgaatgggagg

SEQ ID NO: 566 - DNA, 21 bp, synthetic construct
  source 1..21: mol_type = other DNA
tatgcgaaagcggggacgaat

SEQ ID NO: 567 - DNA, 21 bp, synthetic construct
  source 1..21: mol_type = other DNA
catatctcaaccaacggcatc

SEQ ID NO: 568 - DNA, 21 bp, synthetic construct
  source 1..21: mol_type = other DNA
tatgcgaaagcgggggtgaat

SEQ ID NO: 569 - DNA, 21 bp, synthetic construct
  source 1..21: mol_type = other DNA
ttttcaaagaccggctacaac

SEQ ID NO: 570 - DNA, 21 bp, synthetic construct
  source 1..21: mol_type = other DNA
tatgcgagggggggggataat

SEQ ID NO: 571 - DNA, 21 bp, synthetic construct
  source 1..21: mol_type = other DNA
gtggagtccacgaatggggtg

SEQ ID NO: 572 - DNA, 21 bp, synthetic construct
  source 1..21: mol_type = other DNA
ttccagtcctccaatggggtg

SEQ ID NO: 573 - DNA, 21 bp, synthetic construct
  source 1..21: mol_type = other DNA
tcacattcatcaaacggcgta

SEQ ID NO: 574 - DNA, 21 bp, synthetic construct
  source 1..21: mol_type = other DNA
tatgcgaaatccaatcacaat

SEQ ID NO: 575 - DNA, 21 bp, synthetic construct
  source 1..21: mol_type = other DNA
ttggcgaggttgggggataat

SEQ ID NO: 576 - DNA, 21 bp, synthetic construct
  source 1..21: mol_type = other DNA
ttgcagtccacgaatggggtg

SEQ ID NO: 577 - DNA, 21 bp, synthetic construct
  source 1..21: mol_type = other DNA
tactcaaaggccaacatcaac

SEQ ID NO: 578 - DNA, 21 bp, synthetic construct
  source 1..21: mol_type = other DNA
cacaattcctccaatggggtg

SEQ ID NO: 579 - DNA, 21 bp, synthetic construct
  source 1..21: mol_type = other DNA
ttgtccaaacaggggccgaat

SEQ ID NO: 580 - DNA, 21 bp, synthetic construct
  source 1..21: mol_type = other DNA
gtaatctcaaccaacggcatc

SEQ ID NO: 581 - DNA, 21 bp, synthetic construct
  source 1..21: mol_type = other DNA
tttgccaagtcaggcctgaac

SEQ ID NO: 582 - DNA, 21 bp, synthetic construct
  source 1..21: mol_type = other DNA
tatgcgaaagtgggggcgaat

SEQ ID NO: 583 - DNA, 21 bp, synthetic construct
  source 1..21: mol_type = other DNA
ttgtcctccacgaatggggtg

SEQ ID NO: 584 - DNA, 21 bp, synthetic construct
  source 1..21: mol_type = other DNA
tatgcgaaaggggggtccaat

SEQ ID NO: 585 - DNA, 21 bp, synthetic construct
  source 1..21: mol_type = other DNA
ttctccaaagcgaatcacaat

SEQ ID NO: 586 - DNA, 21 bp, synthetic construct
  source 1..21: mol_type = other DNA
tttatctcaaccaacggccgc

SEQ ID NO: 587 - DNA, 21 bp, synthetic construct
  source 1..21: mol_type = other DNA
ttgtccaggttgtccgagacg

SEQ ID NO: 588 - DNA, 21 bp, synthetic construct
  source 1..21: mol_type = other DNA
tggcagtcctccaatgggata

SEQ ID NO: 589 - DNA, 21 bp, synthetic construct
  source 1..21: mol_type = other DNA
tactactcaaccaacggcgta

SEQ ID NO: 590 - DNA, 21 bp, synthetic construct
  source 1..21: mol_type = other DNA
aattggtccacgaatggggtg

SEQ ID NO: 591 - DNA, 21 bp, synthetic construct
  source 1..21: mol_type = other DNA
tactcaaagaccggcatgaac

SEQ ID NO: 592 - DNA, 21 bp, synthetic construct
  source 1..21: mol_type = other DNA
ttgtccaaagtggggacgaat

SEQ ID NO: 593 - DNA, 21 bp, synthetic construct
  source 1..21: mol_type = other DNA
acgcactatgataatgggagg

SEQ ID NO: 594 - DNA, 21 bp, synthetic construct
  source 1..21: mol_type = other DNA
tataggtcctccaatggggtg

SEQ ID NO: 595 - DNA, 21 bp, synthetic construct
  source 1..21: mol_type = other DNA
agggagtccgatttgaaatgg

SEQ ID NO: 596 - DNA, 21 bp, synthetic construct
  source 1..21: mol_type = other DNA
tacgccaagtcaggctcaaac

SEQ ID NO: 597 - DNA, 21 bp, synthetic construct
  source 1..21: mol_type = other DNA
tacgccaagggcaacctgaac

SEQ ID NO: 598 - DNA, 21 bp, synthetic construct
  source 1..21: mol_type = other DNA
tatgcgaaatccgggacgaat

SEQ ID NO: 599 - DNA, 21 bp, synthetic construct
  source 1..21: mol_type = other DNA
tacatctcaaccaacggcatc

SEQ ID NO: 600 - DNA, 21 bp, synthetic construct
  source 1..21: mol_type = other DNA
gaggatgggtccccgaggtgg

SEQ ID NO: 601 - DNA, 21 bp, synthetic construct
  source 1..21: mol_type = other DNA
ttgtccaggcagggggataat

SEQ ID NO: 602 - DNA, 21 bp, synthetic construct
  source 1..21: mol_type = other DNA
ctgtcaaaggtaggcatcaac

SEQ ID NO: 603 - DNA, 21 bp, synthetic construct
  source 1..21: mol_type = other DNA
tgggggtccacgaatggggtg

SEQ ID NO: 604 - DNA, 21 bp, synthetic construct
  source 1..21: mol_type = other DNA
ctgtcaaagctgggcaacaac

SEQ ID NO: 605 - DNA, 21 bp, synthetic construct
  source 1..21: mol_type = other DNA
tatgcgtccacgaatggggtg

SEQ ID NO: 606 - DNA, 21 bp, synthetic construct
  source 1..21: mol_type = other DNA
tactcaaagatcggcgtaaac

SEQ ID NO: 607 - DNA, 21 bp, synthetic construct
  source 1..21: mol_type = other DNA
tactcacgcaacggcgtaaac

SEQ ID NO: 608 - DNA, 21 bp, synthetic construct
  source 1..21: mol_type = other DNA
tactcaaaggtaggcatcaac

SEQ ID NO: 609 - DNA, 21 bp, synthetic construct
  source 1..21: mol_type = other DNA
tactcacgcatcaacgacaac

SEQ ID NO: 610 - DNA, 21 bp, synthetic construct
  source 1..21: mol_type = other DNA
ctgtcaaagatcggcatcaac

SEQ ID NO: 611 - DNA, 21 bp, synthetic construct
  source 1..21: mol_type = other DNA
gtggggtcctccaatggggtg

SEQ ID NO: 612 - DNA, 21 bp, synthetic construct
  source 1..21: mol_type = other DNA
acgatatccacgaatgggata

SEQ ID NO: 613 - DNA, 21 bp, synthetic construct
  source 1..21: mol_type = other DNA
tactcaaagaagaacgaaaac

SEQ ID NO: 614 - DNA, 21 bp, synthetic construct
  source 1..21: mol_type = other DNA
ttggcgaggtccggggagaat

SEQ ID NO: 615 - DNA, 21 bp, synthetic construct
  source 1..21: mol_type = other DNA
gtgaggtccacgaatggggag

SEQ ID NO: 616 - DNA, 21 bp, synthetic construct
  source 1..21: mol_type = other DNA
tatgcgaaagggaatacgaat

SEQ ID NO: 617 - DNA, 21 bp, synthetic construct
  source 1..21: mol_type = other DNA
caggggtccacgaatgggagg

SEQ ID NO: 618 - DNA, 21 bp, synthetic construct
  source 1..21: mol_type = other DNA
ttctccaaagtggggttgaat

SEQ ID NO: 619 - DNA, 21 bp, synthetic construct
  source 1..21: mol_type = other DNA
ctggccaagggcggcatgaac

SEQ ID NO: 620 - DNA, 21 bp, synthetic construct
  source 1..21: mol_type = other DNA
ttggtgtccacgaatgggagg

SEQ ID NO: 621 - DNA, 21 bp, synthetic construct
  source 1..21: mol_type = other DNA
ttggcgaaatccggggtgaat

SEQ ID NO: 622 - DNA, 21 bp, synthetic construct
  source 1..21: mol_type = other DNA
tactcaaagcccggccccaac

SEQ ID NO: 623 - DNA, 21 bp, synthetic construct
  source 1..21: mol_type = other DNA
tattccaaaacggggacgaat

SEQ ID NO: 624 - DNA, 21 bp, synthetic construct
  source 1..21: mol_type = other DNA
cgcaaggacggcaccgcctca

SEQ ID NO: 625 - DNA, 21 bp, synthetic construct
  source 1..21: mol_type = other DNA
acgcagtcctccaatggggtg

SEQ ID NO: 626 - DNA, 21 bp, synthetic construct
  source 1..21: mol_type = other DNA
tactcaaagcataacaacaac

SEQ ID NO: 627 - DNA, 21 bp, synthetic construct
  source 1..21: mol_type = other DNA
tactcaaaggtaaactacaac

SEQ ID NO: 628 - DNA, 21 bp, synthetic construct
  source 1..21: mol_type = other DNA
ctgtcaaagctgaaccaaaac

SEQ ID NO: 629 - DNA, 21 bp, synthetic construct
  source 1..21: mol_type = other DNA
ctggccaagctgggcatcaac

SEQ ID NO: 630 - DNA, 21 bp, synthetic construct
  source 1..21: mol_type = other DNA
tatgcgagggtggggttcaat

SEQ ID NO: 631 - DNA, 21 bp, synthetic construct
  source 1..21: mol_type = other DNA
caaaacggccattcatcatgg

SEQ ID NO: 632 - DNA, 21 bp, synthetic construct
  source 1..21: mol_type = other DNA
tactcaaagtcaggcgtaaac

SEQ ID NO: 633 - DNA, 21 bp, synthetic construct
  source 1..21: mol_type = other DNA
ggcggcgacggcaacgcctac

SEQ ID NO: 634 - DNA, 21 bp, synthetic construct
  source 1..21: mol_type = other DNA
tatgcgagggcgaatgataat

SEQ ID NO: 635 - DNA, 21 bp, synthetic construct
  source 1..21: mol_type = other DNA
gtgttgtccacgaatggggtg

SEQ ID NO: 636 - DNA, 21 bp, synthetic construct
  source 1..21: mol_type = other DNA
acggatgagacggtgtattcc

SEQ ID NO: 637 - DNA, 21 bp, synthetic construct
  source 1..21: mol_type = other DNA
ataacgtcctccaatggggtg

SEQ ID NO: 638 - DNA, 21 bp, synthetic construct
  source 1..21: mol_type = other DNA
atgatgtccacgaatggggtg

SEQ ID NO: 639 - DNA, 21 bp, synthetic construct
  source 1..21: mol_type = other DNA
ttgtccaaaatagggacgaat

SEQ ID NO: 640 - DNA, 21 bp, synthetic construct
  source 1..21: mol_type = other DNA
aggtccgatacgtccatatgg

SEQ ID NO: 641 - DNA, 21 bp, synthetic construct
  source 1..21: mol_type = other DNA
tccttctccacgaatggggtg

SEQ ID NO: 642 - DNA, 21 bp, synthetic construct
  source 1..21: mol_type = other DNA
ttctccaaattgggggcgaat

SEQ ID NO: 643 - DNA, 21 bp, synthetic construct
  source 1..21: mol_type = other DNA
tcagaatcaaccaacggcatc

SEQ ID NO: 644 - DNA, 21 bp, synthetic construct
  source 1..21: mol_type = other DNA
tatgcgaaagcggggtccaat

SEQ ID NO: 645 - DNA, 21 bp, synthetic construct
  source 1..21: mol_type = other DNA
atcgaatcaaccaacggcatc

SEQ ID NO: 646 - DNA, 21 bp, synthetic construct
  source 1..21: mol_type = other DNA
cagtcctccacgaatggggtg

SEQ ID NO: 647 - DNA, 21 bp, synthetic construct
  source 1..21: mol_type = other DNA
ttttcatcatcaaacggcgta

SEQ ID NO: 648 - DNA, 21 bp, synthetic construct
  source 1..21: mol_type = other DNA
tatgcgaaaggggggatgaat

SEQ ID NO: 649 - DNA, 21 bp, synthetic construct
  source 1..21: mol_type = other DNA
tacgcccgcgccaacatgaac

SEQ ID NO: 650 - DNA, 21 bp, synthetic construct
  source 1..21: mol_type = other DNA
tatgcgaaagggggggcgaat

SEQ ID NO: 651 - DNA, 21 bp, synthetic construct
  source 1..21: mol_type = other DNA
tatgcgaaaaatgggcagaat

SEQ ID NO: 652 - DNA, 21 bp, synthetic construct
  source 1..21: mol_type = other DNA
gggacgtccacgaatgggagg

SEQ ID NO: 653 - DNA, 21 bp, synthetic construct
  source 1..21: mol_type = other DNA
tacgccaagaccaactacaac

SEQ ID NO: 654 - DNA, 21 bp, synthetic construct
  source 1..21: mol_type = other DNA
agggcggagtccaaaacgtgg

SEQ ID NO: 655 - DNA, 21 bp, synthetic construct
  source 1..21: mol_type = other DNA
tccacgtcccagaatgggagg

SEQ ID NO: 656 - DNA, 21 bp, synthetic construct
  source 1..21: mol_type = other DNA
ccgaattccacgaatggggtg

SEQ ID NO: 657 - DNA, 21 bp, synthetic construct
  source 1..21: mol_type = other DNA
ttcgcgaggaatgggacgaat

SEQ ID NO: 658 - DNA, 21 bp, synthetic construct
  source 1..21: mol_type = other DNA
ctgtcaaaggtaggcaacaac

SEQ ID NO: 659 - DNA, 21 bp, synthetic construct
  source 1..21: mol_type = other DNA
tttgcccgcaacggcgtaaac

SEQ ID NO: 660 - DNA, 21 bp, synthetic construct
  source 1..21: mol_type = other DNA
ttttcacgcgtaggcgacaac

SEQ ID NO: 661 - DNA, 21 bp, synthetic construct
  source 1..21: mol_type = other DNA
tatgcgaaaataggggcgaat

SEQ ID NO: 662 - DNA, 21 bp, synthetic construct
  source 1..21: mol_type = other DNA
aatgaggatttcgtgaggtat

SEQ ID NO: 663 - DNA, 21 bp, synthetic construct
  source 1..21: mol_type = other DNA
gtggatgagttcaggacgtat

SEQ ID NO: 664 - DNA, 21 bp, synthetic construct
  source 1..21: mol_type = other DNA
acggattccacgaatgggata

SEQ ID NO: 665 - DNA, 21 bp, synthetic construct
  source 1..21: mol_type = other DNA
aggcacgatcaggtgtatccg

SEQ ID NO: 666 - DNA, 21 bp, synthetic construct
  source 1..21: mol_type = other DNA
tataggtccacgaatgggtat

SEQ ID NO: 667 - DNA, 21 bp, synthetic construct
  source 1..21: mol_type = other DNA
cattcacgcctgaacgtagaa

SEQ ID NO: 668 - DNA, 21 bp, synthetic construct
  source 1..21: mol_type = other DNA
gagaggtccacgaatggggtg

SEQ ID NO: 669 - DNA, 21 bp, synthetic construct
  source 1..21: mol_type = other DNA
ctgtcaaagtcaggccataac

SEQ ID NO: 670 - DNA, 21 bp, synthetic construct
  source 1..21: mol_type = other DNA
ttttcacgcaccggcgaaaac

SEQ ID NO: 671 - DNA, 21 bp, synthetic construct
  source 1..21: mol_type = other DNA
ggctcatcaaccaacggccgc

SEQ ID NO: 672 - DNA, 21 bp, synthetic construct
  source 1..21: mol_type = other DNA
tactcacgcaacggcatgaac

SEQ ID NO: 673 - DNA, 21 bp, synthetic construct
  source 1..21: mol_type = other DNA
ttgtccaaagcgaatttcaat

SEQ ID NO: 674 - DNA, 21 bp, synthetic construct
  source 1..21: mol_type = other DNA
tgggagtcctccaatggggtg

SEQ ID NO: 675 - DNA, 21 bp, synthetic construct
  source 1..21: mol_type = other DNA
atagagtcctccaatggggtg

SEQ ID NO: 676 - DNA, 21 bp, synthetic construct
  source 1..21: mol_type = other DNA
ttcgcgaggaatgggttcaat

SEQ ID NO: 677 - DNA, 21 bp, synthetic construct
  source 1..21: mol_type = other DNA
gtgatgtcctccaatggggtg

SEQ ID NO: 678 - DNA, 21 bp, synthetic construct
  source 1..21: mol_type = other DNA
tactcaaagcataactttaac

SEQ ID NO: 679 - DNA, 21 bp, synthetic construct
  source 1..21: mol_type = other DNA
tactcaaagaacggctttaac

SEQ ID NO: 680 - DNA, 21 bp, synthetic construct
  source 1..21: mol_type = other DNA
tatgcgaaagaggggaggaat

SEQ ID NO: 681 - DNA, 21 bp, synthetic construct
  source 1..21: mol_type = other DNA
tattccaaaaatgggtccaat

SEQ ID NO: 682 - DNA, 21 bp, synthetic construct
  source 1..21: mol_type = other DNA
gcgtcctccacgaatggggtg

SEQ ID NO: 683 - DNA, 21 bp, synthetic construct
  source 1..21: mol_type = other DNA
tacgccaagctgggcatgaac

SEQ ID NO: 684 - DNA, 21 bp, synthetic construct
  source 1..21: mol_type = other DNA
tcctggtcctccaatggggtg

SEQ ID NO: 685 - DNA, 21 bp, synthetic construct
  source 1..21: mol_type = other DNA
aggaatttggatgtgacgtgg

SEQ ID NO: 686 - DNA, 21 bp, synthetic construct
  source 1..21: mol_type = other DNA
ccgcagtcctccaatggggtg

SEQ ID NO: 687 - DNA, 21 bp, synthetic construct
  source 1..21: mol_type = other DNA
tactttaccggcacctcatca

SEQ ID NO: 688 - DNA, 21 bp, synthetic construct
  source 1..21: mol_type = other DNA
ttgatgtccacgaatggggtg

SEQ ID NO: 689 - DNA, 21 bp, synthetic construct
  source 1..21: mol_type = other DNA
tactcaaagtcaggcaacaac

SEQ ID NO: 690 - DNA, 21 bp, synthetic construct
  source 1..21: mol_type = other DNA
gggtggtccacgaatggggtg

SEQ ID NO: 691 - DNA, 21 bp, synthetic construct
  source 1..21: mol_type = other DNA
acgaaatccgggatgaatgcg

SEQ ID NO: 692 - DNA, 21 bp, synthetic construct
  source 1..21: mol_type = other DNA
tactcacgccaaggcaacaac

SEQ ID NO: 693 - DNA, 21 bp, synthetic construct
  source 1..21: mol_type = other DNA
accgaatcaaccaacggcatc

SEQ ID NO: 694 - DNA, 21 bp, synthetic construct
  source 1..21: mol_type = other DNA
gtgccgtatacggggtatgat

SEQ ID NO: 695 - DNA, 21 bp, synthetic construct
  source 1..21: mol_type = other DNA
ttgtccgcgaggtccgataat

SEQ ID NO: 696 - DNA, 21 bp, synthetic construct
  source 1..21: mol_type = other DNA
caggattccacgaatgggata

SEQ ID NO: 697 - DNA, 21 bp, synthetic construct
  source 1..21: mol_type = other DNA
tactcaaagtcaggcatgaac

SEQ ID NO: 698 - DNA, 21 bp, synthetic construct
  source 1..21: mol_type = other DNA
acccaatcatcatcaggccgc

SEQ ID NO: 699 - DNA, 21 bp, synthetic construct
  source 1..21: mol_type = other DNA
ttgtccaggaataatgataat

SEQ ID NO: 700 - DNA, 21 bp, synthetic construct
  source 1..21: mol_type = other DNA
tatgcgaggtccggggagaat

SEQ ID NO: 701 - DNA, 21 bp, synthetic construct
  source 1..21: mol_type = other DNA
caggtgtccacgaatgggagg

SEQ ID NO: 702 - DNA, 21 bp, synthetic construct
  source 1..21: mol_type = other DNA
ttgtccaaattggggacgaat

SEQ ID NO: 703 - DNA, 21 bp, synthetic construct
  source 1..21: mol_type = other DNA
tactcacgcaacaacaacaac

SEQ ID NO: 704 - DNA, 21 bp, synthetic construct
  source 1..21: mol_type = other DNA
ttgtccaaagcggggtccaat

SEQ ID NO: 705 - DNA, 21 bp, synthetic construct
  source 1..21: mol_type = other DNA
ttgcacgtgcaggggccgaat

SEQ ID NO: 706 - DNA, 21 bp, synthetic construct
  source 1..21: mol_type = other DNA
cacttctcctccaatggggtg

SEQ ID NO: 707 - DNA, 21 bp, synthetic construct
  source 1..21: mol_type = other DNA
tactcaaagtcaaaccataac

SEQ ID NO: 708 - DNA, 21 bp, synthetic construct
  source 1..21: mol_type = other DNA
acgttctcctccaatggggtg

SEQ ID NO: 709 - DNA, 21 bp, synthetic construct
  source 1..21: mol_type = other DNA
tactcaaagatgggcctgaac

SEQ ID NO: 710 - DNA, 21 bp, synthetic construct
  source 1..21: mol_type = other DNA
tactcaaaggtaggcggcaac

SEQ ID NO: 711 - DNA, 21 bp, synthetic construct
  source 1..21: mol_type = other DNA
ttgtccaaaataggggataat

SEQ ID NO: 712 - DNA, 21 bp, synthetic construct
  source 1..21: mol_type = other DNA
gtggcgtccacgaatggggtg

SEQ ID NO: 713 - DNA, 21 bp, synthetic construct
  source 1..21: mol_type = other DNA
tccgattccacgaatggggtg

SEQ ID NO: 714 - DNA, 21 bp, synthetic construct
  source 1..21: mol_type = other DNA
ttgatatccacgaatggggtg

SEQ ID NO: 715 - DNA, 21 bp, synthetic construct
  source 1..21: mol_type = other DNA
tactcaaagtcaggcggcaac

SEQ ID NO: 716 - DNA, 21 bp, synthetic construct
  source 1..21: mol_type = other DNA
tactcaaagaccggctcaaac

SEQ ID NO: 717 - DNA, 21 bp, synthetic construct
  source 1..21: mol_type = other DNA
ttggcgaggaatgggtggaat

SEQ ID NO: 718 - DNA, 21 bp, synthetic construct
  source 1..21: mol_type = other DNA
atggcgtccacgaatggggtg

SEQ ID NO: 719 - DNA, 21 bp, synthetic construct
  source 1..21: mol_type = other DNA
ttctccaggcagaatgtgaat

SEQ ID NO: 720 - DNA, 21 bp, synthetic construct
  source 1..21: mol_type = other DNA
gtgaaatcctccaatggggtg

SEQ ID NO: 721 - DNA, 21 bp, synthetic construct
  source 1..21: mol_type = other DNA
tatgcgaggtccaatttcaat

SEQ ID NO: 722 - DNA, 21 bp, synthetic construct
  source 1..21: mol_type = other DNA
ttggcgaaagggggggcgaat

SEQ ID NO: 723 - DNA, 21 bp, synthetic construct
  source 1..21: mol_type = other DNA
tttgccaagaacggctacaac

SEQ ID NO: 724 - DNA, 21 bp, synthetic construct
  source 1..21: mol_type = other DNA
ttcgattccacgaatggggtg

SEQ ID NO: 725 - DNA, 21 bp, synthetic construct
  source 1..21: mol_type = other DNA
ttgtccaaatccggggcgaat

SEQ ID NO: 726 - DNA, 21 bp, synthetic construct
  source 1..21: mol_type = other DNA
tatgcgaaagcggggatgaat

SEQ ID NO: 727 - DNA, 21 bp, synthetic construct
  source 1..21: mol_type = other DNA
ttctccaaacaggggccgaat

SEQ ID NO: 728 - DNA, 21 bp, synthetic construct
  source 1..21: mol_type = other DNA
atggtgtccacgaatgggagg

SEQ ID NO: 729 - DNA, 21 bp, synthetic construct
  source 1..21: mol_type = other DNA
gtgatatcctccaatggggtg

SEQ ID NO: 730 - DNA, 21 bp, synthetic construct
  source 1..21: mol_type = other DNA
ttctccaggatgaatgagaat

SEQ ID NO: 731 - DNA, 21 bp, synthetic construct
  source 1..21: mol_type = other DNA
tatgcgaggatgggggataat

SEQ ID NO: 732 - DNA, 21 bp, synthetic construct
  source 1..21: mol_type = other DNA
tactcaaagcaaaacgccaac

SEQ ID NO: 733 - DNA, 21 bp, synthetic construct
  source 1..21: mol_type = other DNA
cgcgaatcaaccaacggcatc

SEQ ID NO: 734 - DNA, 21 bp, synthetic construct
  source 1..21: mol_type = other DNA
ttgtccaaagggaatgtgaat

SEQ ID NO: 735 - DNA, 21 bp, synthetic construct
  source 1..21: mol_type = other DNA
ttgtccaaattggggtccaat

SEQ ID NO: 736 - DNA, 21 bp, synthetic construct
  source 1..21: mol_type = other DNA
tatgcgaaattggggttgaat

SEQ ID NO: 737 - DNA, 21 bp, synthetic construct
  source 1..21: mol_type = other DNA
tactcaaagcaaaacctgaac

SEQ ID NO: 738 - DNA, 21 bp, synthetic construct
  source 1..21: mol_type = other DNA
ttgtccaaagcgaatcacaat

SEQ ID NO: 739 - DNA, 21 bp, synthetic construct
  source 1..21: mol_type = other DNA
gtactgtcaaccaacggcatc

SEQ ID NO: 740 - DNA, 21 bp, synthetic construct
  source 1..21: mol_type = other DNA
catcgctcaaccaacggccaa

SEQ ID NO: 741 - DNA, 21 bp, synthetic construct
  source 1..21: mol_type = other DNA
acgacgtccacgaatggggtg

SEQ ID NO: 742 - DNA, 21 bp, synthetic construct
  source 1..21: mol_type = other DNA
ttctccaaaatgaatgtgaat

SEQ ID NO: 743 - DNA, 21 bp, synthetic construct
  source 1..21: mol_type = other DNA
ggggcggatgggtccaggtgg

SEQ ID NO: 744 - DNA, 21 bp, synthetic construct
  source 1..21: mol_type = other DNA
gcggcgtccacgaatgggata

SEQ ID NO: 745 - DNA, 21 bp, synthetic construct
  source 1..21: mol_type = other DNA
ttggcgaaagggggggtgaat

SEQ ID NO: 746 - DNA, 21 bp, synthetic construct
  source 1..21: mol_type = other DNA
ggcatgaagaacgtaatgttt

SEQ ID NO: 747 - DNA, 21 bp, synthetic construct
  source 1..21: mol_type = other DNA
catgaatcaaccaacggcatc

SEQ ID NO: 748 - DNA, 21 bp, synthetic construct
  source 1..21: mol_type = other DNA
tactcaaagatgggctcaaac

SEQ ID NO: 749 - DNA, 21 bp, synthetic construct
  source 1..21: mol_type = other DNA
aataatggggggtccttgtgg

SEQ ID NO: 750 - DNA, 21 bp, synthetic construct
  source 1..21: mol_type = other DNA
ctgatgtcaaccaacggccgc

SEQ ID NO: 751 - DNA, 21 bp, synthetic construct
  source 1..21: mol_type = other DNA
gcggtgtccacgaatggggtg

SEQ ID NO: 752 - DNA, 21 bp, synthetic construct
  source 1..21: mol_type = other DNA
tattccaggcagaatacgaat

SEQ ID NO: 753 - DNA, 21 bp, synthetic construct
  source 1..21: mol_type = other DNA
ttctccaaagtggggcacaat

SEQ ID NO: 754 - DNA, 21 bp, synthetic construct
  source 1..21: mol_type = other DNA
tatcacaggcaggggggggat

SEQ ID NO: 755 - DNA, 21 bp, synthetic construct
  source 1..21: mol_type = other DNA
ttcgcgaggacgggggagaat

SEQ ID NO: 756 - DNA, 21 bp, synthetic construct
  source 1..21: mol_type = other DNA
agggcgttggagggggcggat

SEQ ID NO: 757 - DNA, 21 bp, synthetic construct
  source 1..21: mol_type = other DNA
tatgcgaaatccaatgataat

SEQ ID NO: 758 - DNA, 21 bp, synthetic construct
  source 1..21: mol_type = other DNA
ttgaggaatgggaattccgcg

SEQ ID NO: 759 - DNA, 21 bp, synthetic construct
  source 1..21: mol_type = other DNA
ttgttgtccacgaatggggtg

SEQ ID NO: 760 - DNA, 21 bp, synthetic construct
  source 1..21: mol_type = other DNA
ttggcgaaatccggggagaat

SEQ ID NO: 761 - DNA, 21 bp, synthetic construct
  source 1..21: mol_type = other DNA
tatgcgaaaacgaatatgaat

SEQ ID NO: 762 - DNA, 21 bp, synthetic construct
  source 1..21: mol_type = other DNA
cgccgcgacggcaccgcctac

SEQ ID NO: 763 - DNA, 21 bp, synthetic construct
  source 1..21: mol_type = other DNA
tccacgtccacgaatggggtg

SEQ ID NO: 764 - DNA, 21 bp, synthetic construct
  source 1..21: mol_type = other DNA
tactcaaagtacaacctgaac

SEQ ID NO: 765 - DNA, 21 bp, synthetic construct
  source 1..21: mol_type = other DNA
gatggggggacgtcccactat

SEQ ID NO: 766 - DNA, 21 bp, synthetic construct
  source 1..21: mol_type = other DNA
atggagtccacgaatgggagg

SEQ ID NO: 767 - DNA, 21 bp, synthetic construct
  source 1..21: mol_type = other DNA
catcaatcaaccaacggcatc

SEQ ID NO: 768 - DNA, 21 bp, synthetic construct
  source 1..21: mol_type = other DNA
ctggccaagggcggcaacaac

SEQ ID NO: 769 - DNA, 21 bp, synthetic construct
  source 1..21: mol_type = other DNA
tccgagtccacgaatgggagg

SEQ ID NO: 770 - DNA, 21 bp, synthetic construct
  source 1..21: mol_type = other DNA
tactcaaagcatggcaacaac

SEQ ID NO: 771 - DNA, 21 bp, synthetic construct
  source 1..21: mol_type = other DNA
ttgccgagggaggtgtatgcg

SEQ ID NO: 772 - DNA, 21 bp, synthetic construct
  source 1..21: mol_type = other DNA
caaatgtcaaccaacggccgc

SEQ ID NO: 773 - DNA, 21 bp, synthetic construct
  source 1..21: mol_type = other DNA
tattccaaacagaatgtgaat

SEQ ID NO: 774 - DNA, 21 bp, synthetic construct
  source 1..21: mol_type = other DNA
tatgcgagggaggggccgaat

SEQ ID NO: 775 - DNA, 21 bp, synthetic construct
  source 1..21: mol_type = other DNA
aaggacggcgaatcatcatgg

SEQ ID NO: 776 - DNA, 21 bp, synthetic construct
  source 1..21: mol_type = other DNA
tatgcgagggcgggggataat

SEQ ID NO: 777 - DNA, 21 bp, synthetic construct
  source 1..21: mol_type = other DNA
ttctccaaagtgggggataat

SEQ ID NO: 778 - DNA, 21 bp, synthetic construct
  source 1..21: mol_type = other DNA
gcggcgtccacgaatggggtg

SEQ ID NO: 779 - DNA, 21 bp, synthetic construct
  source 1..21: mol_type = other DNA
ctgtcaaagatgggctttaac

SEQ ID NO: 780 - DNA, 21 bp, synthetic construct
  source 1..21: mol_type = other DNA
caacgctacgacgcctacgaa

SEQ ID NO: 781 - DNA, 21 bp, synthetic construct
  source 1..21: mol_type = other DNA
acgatatccacgaatggggtg

SEQ ID NO: 782 - DNA, 21 bp, synthetic construct
  source 1..21: mol_type = other DNA
gaggggtccacgaatgggagg

SEQ ID NO: 783 - DNA, 21 bp, synthetic construct
  source 1..21: mol_type = other DNA
tatgcgaaatccggggagaat

SEQ ID NO: 784 - DNA, 21 bp, synthetic construct
  source 1..21: mol_type = other DNA
ctggccaagaccggcaacaac

SEQ ID NO: 785 - DNA, 21 bp, synthetic construct
  source 1..21: mol_type = other DNA
aacttttcaaccaacggcatc

SEQ ID NO: 786 - DNA, 21 bp, synthetic construct
  source 1..21: mol_type = other DNA
ctggccaaggtaggctacaac

SEQ ID NO: 787 - DNA, 21 bp, synthetic construct
  source 1..21: mol_type = other DNA
atagcgtccacgaatggggtg

SEQ ID NO: 788 - DNA, 21 bp, synthetic construct
  source 1..21: mol_type = other DNA
cgcggcgccgacgtacattgg

SEQ ID NO: 789 - DNA, 21 bp, synthetic construct
  source 1..21: mol_type = other DNA
ttttcaaagctgaacgaaaac

SEQ ID NO: 790 - DNA, 21 bp, synthetic construct
  source 1..21: mol_type = other DNA
tatttctccgggacgacggat

SEQ ID NO: 791 - DNA, 21 bp, synthetic construct
  source 1..21: mol_type = other DNA
ttggcgaaaatggggccgaat

SEQ ID NO: 792 - DNA, 21 bp, synthetic construct
  source 1..21: mol_type = other DNA
tactcaaagatcaaccataac

SEQ ID NO: 793 - DNA, 21 bp, synthetic construct
  source 1..21: mol_type = other DNA
gtggagttcgagtggtccgat

SEQ ID NO: 794 - DNA, 21 bp, synthetic construct
  source 1..21: mol_type = other DNA
tacgcccgcctgaactttaac

SEQ ID NO: 795 - DNA, 21 bp, synthetic construct
  source 1..21: mol_type = other DNA
tactcaaagcataacatcaac

SEQ ID NO: 796 - DNA, 21 bp, synthetic construct
  source 1..21: mol_type = other DNA
gcgatgtccacgaatggggtg

SEQ ID NO: 797 - DNA, 21 bp, synthetic construct
  source 1..21: mol_type = other DNA
ttggcgaaattggggttgaat

SEQ ID NO: 798 - DNA, 21 bp, synthetic construct
  source 1..21: mol_type = other DNA
ctggccaagtcaggcaacaac

SEQ ID NO: 799 - DNA, 21 bp, synthetic construct
  source 1..21: mol_type = other DNA
cacttctccacgaatgggata

SEQ ID NO: 800 - DNA, 21 bp, synthetic construct
  source 1..21: mol_type = other DNA
cacgcgtcctccaatggggtg

SEQ ID NO: 801 - DNA, 21 bp, synthetic construct
  source 1..21: mol_type = other DNA
caacaatcaaccaacggcatc

SEQ ID NO: 802 - DNA, 21 bp, synthetic construct
  source 1..21: mol_type = other DNA
tactcacgctcaaacatcaac

SEQ ID NO: 803 - DNA, 21 bp, synthetic construct
  source 1..21: mol_type = other DNA
tccaatgagtcctccacgtgg

SEQ ID NO: 804 - DNA, 21 bp, synthetic construct
  source 1..21: mol_type = other DNA
tatgcgaaacagggggcgaat

SEQ ID NO: 805 - DNA, 21 bp, synthetic construct
  source 1..21: mol_type = other DNA
ccggcgtccacgaatgggagg

SEQ ID NO: 806 - DNA, 21 bp, synthetic construct
  source 1..21: mol_type = other DNA
gtgttctccacgaatggggtg

SEQ ID NO: 807 - DNA, 21 bp, synthetic construct
  source 1..21: mol_type = other DNA
tattccaaaatgggggataat

SEQ ID NO: 808 - DNA, 21 bp, synthetic construct
  source 1..21: mol_type = other DNA
tactcaaagtggggcgccaac

SEQ ID NO: 809 - DNA, 21 bp, synthetic construct
  source 1..21: mol_type = other DNA
tactcaaagaccggcgtaaac

SEQ ID NO: 810 - DNA, 21 bp, synthetic construct
  source 1..21: mol_type = other DNA
ttggcgaaagcgggggtgaat

SEQ ID NO: 811 - DNA, 21 bp, synthetic construct
  source 1..21: mol_type = other DNA
ttgtccaggataggggagaat

SEQ ID NO: 812 - DNA, 21 bp, synthetic construct
  source 1..21: mol_type = other DNA
tactcaaagtcaaacctgaac

SEQ ID NO: 813 - DNA, 21 bp, synthetic construct
  source 1..21: mol_type = other DNA
tattccaggacgaatgagaat

SEQ ID NO: 814 - DNA, 21 bp, synthetic construct
  source 1..21: mol_type = other DNA
gtggggtccacgaatggggtg

SEQ ID NO: 815 - DNA, 21 bp, synthetic construct
  source 1..21: mol_type = other DNA
tatgcgaaaacgggggcgaat

SEQ ID NO: 816 - DNA, 21 bp, synthetic construct
  source 1..21: mol_type = other DNA
gggtccgagaggtcctcctgg

SEQ ID NO: 817 - DNA, 21 bp, synthetic construct
  source 1..21: mol_type = other DNA
ttgtccaaaatgaatgataat

SEQ ID NO: 818 - DNA, 21 bp, synthetic construct
  source 1..21: mol_type = other DNA
cagcagtccacgaatggggtg

SEQ ID NO: 819 - DNA, 21 bp, synthetic construct
  source 1..21: mol_type = other DNA
tatgcgaggcagaatgataat

SEQ ID NO: 820 - DNA, 21 bp, synthetic construct
  source 1..21: mol_type = other DNA
cacaattccacgaatgggata

SEQ ID NO: 821 - DNA, 21 bp, synthetic construct
  source 1..21: mol_type = other DNA
ttttcacgcaccggccaaaac

SEQ ID NO: 822 - DNA, 21 bp, synthetic construct
  source 1..21: mol_type = other DNA
ccgcagtccacgaatgggata

SEQ ID NO: 823 - DNA, 21 bp, synthetic construct
  source 1..21: mol_type = other DNA
tcccagtccacgaatggggtg

SEQ ID NO: 824 - DNA, 21 bp, synthetic construct
  source 1..21: mol_type = other DNA
ccgtggtcctccaatggggtg

SEQ ID NO: 825 - DNA, 21 bp, synthetic construct
  source 1..21: mol_type = other DNA
ataatgtccacgaatggggtg

SEQ ID NO: 826 - DNA, 21 bp, synthetic construct
  source 1..21: mol_type = other DNA
tccaaatccacgaatgggata

SEQ ID NO: 827 - DNA, 21 bp, synthetic construct
  source 1..21: mol_type = other DNA
tggaattcctccaatggggtg

SEQ ID NO: 828 - DNA, 21 bp, synthetic construct
  source 1..21: mol_type = other DNA
tatgcgaggataggggagaat

SEQ ID NO: 829 - DNA, 21 bp, synthetic construct
  source 1..21: mol_type = other DNA
ttgtccggggagtccaggtat

SEQ ID NO: 830 - DNA, 21 bp, synthetic construct
  source 1..21: mol_type = other DNA
tatgcgaggaatggggggaat

SEQ ID NO: 831 - DNA, 21 bp, synthetic construct
  source 1..21: mol_type = other DNA
gataatagggggaataatgcg

SEQ ID NO: 832 - DNA, 21 bp, synthetic construct
  source 1..21: mol_type = other DNA
ttggagtccacgaatgggagg

SEQ ID NO: 833 - DNA, 21 bp, synthetic construct
  source 1..21: mol_type = other DNA
ttggcgaaacaggggatgaat

SEQ ID NO: 834 - DNA, 21 bp, synthetic construct
  source 1..21: mol_type = other DNA
ttcacgtccacgaatggggtg

SEQ ID NO: 835 - DNA, 21 bp, synthetic construct
  source 1..21: mol_type = other DNA
aatgagtccacgaatggggtg

SEQ ID NO: 836 - DNA, 21 bp, synthetic construct
  source 1..21: mol_type = other DNA
acgcactccacgaatgggata

SEQ ID NO: 837 - DNA, 21 bp, synthetic construct
  source 1..21: mol_type = other DNA
tacgtacattcacaaaactac

SEQ ID NO: 838 - DNA, 21 bp, synthetic construct
  source 1..21: mol_type = other DNA
aatgatgggaggtccaattat

SEQ ID NO: 839 - DNA, 21 bp, synthetic construct
  source 1..21: mol_type = other DNA
tatgcgaaagtggggatgaat

SEQ ID NO: 840 - DNA, 21 bp, synthetic construct
  source 1..21: mol_type = other DNA
ttggcgaaatccggggcgaat

SEQ ID NO: 841 - DNA, 21 bp, synthetic construct
  source 1..21: mol_type = other DNA
tattccaggcacaatgagaat

SEQ ID NO: 842 - DNA, 21 bp, synthetic construct
  source 1..21: mol_type = other DNA
tatgcgaaagcgaatccgaat

SEQ ID NO: 843 - DNA, 21 bp, synthetic construct
  source 1..21: mol_type = other DNA
aggtccgaggcgacgtatccg

SEQ ID NO: 844 - DNA, 21 bp, synthetic construct
  source 1..21: mol_type = other DNA
ttgtccaggtccggggagaat

SEQ ID NO: 845 - DNA, 21 bp, synthetic construct
  source 1..21: mol_type = other DNA
tactcaaagatgaacctgaac

SEQ ID NO: 846 - DNA, 21 bp, synthetic construct
  source 1..21: mol_type = other DNA
tatgcgaaaaatgggatgaat

SEQ ID NO: 847 - DNA, 21 bp, synthetic construct
  source 1..21: mol_type = other DNA
ttccactcctccaatggggtg

SEQ ID NO: 848 - DNA, 21 bp, synthetic construct
  source 1..21: mol_type = other DNA
ttgtccagggcgggggagaat

SEQ ID NO: 849 - DNA, 21 bp, synthetic construct
  source 1..21: mol_type = other DNA
ttggggtccacgaatgggata

SEQ ID NO: 850 - DNA, 21 bp, synthetic construct
  source 1..21: mol_type = other DNA
tattcctcctccaatggggtg

SEQ ID NO: 851 - DNA, 21 bp, synthetic construct
  source 1..21: mol_type = other DNA
ttggcgaaacagggggtgaat

SEQ ID NO: 852 - DNA, 21 bp, synthetic construct
  source 1..21: mol_type = other DNA
ttctccaggcaggggatgaat

SEQ ID NO: 853 - DNA, 21 bp, synthetic construct
  source 1..21: mol_type = other DNA
tcagcctcaaccaacggcatc

SEQ ID NO: 854 - DNA, 21 bp, synthetic construct
  source 1..21: mol_type = other DNA
cagatgtccacgaatggggtg

SEQ ID NO: 855 - DNA, 21 bp, synthetic construct
  source 1..21: mol_type = other DNA
ttgtccaaaaataatgtgaat

SEQ ID NO: 856 - DNA, 21 bp, synthetic construct
  source 1..21: mol_type = other DNA
cacgcgtccacgaatgggata

SEQ ID NO: 857 - DNA, 21 bp, synthetic construct
  source 1..21: mol_type = other DNA
acgccggatcacgtgcagtgg

SEQ ID NO: 858 - DNA, 21 bp, synthetic construct
  source 1..21: mol_type = other DNA
aggttggagacgcacgattgg

SEQ ID NO: 859 - DNA, 21 bp, synthetic construct
  source 1..21: mol_type = other DNA
ggcacctcaaccgcctcatgg

SEQ ID NO: 860 - DNA, 21 bp, synthetic construct
  source 1..21: mol_type = other DNA
tactcaaagaacggccataac

SEQ ID NO: 861 - DNA, 21 bp, synthetic construct
  source 1..21: mol_type = other DNA
tattccaaacacaatacgaat

SEQ ID NO: 862 - DNA, 21 bp, synthetic construct
  source 1..21: mol_type = other DNA
tattccaggcacggggagaat

SEQ ID NO: 863 - DNA, 21 bp, synthetic construct
  source 1..21: mol_type = other DNA
ttggcgaggcagggggataat

SEQ ID NO: 864 - DNA, 21 bp, synthetic construct
  source 1..21: mol_type = other DNA
ttttcaaagatcggcatcaac

SEQ ID NO: 865 - DNA, 21 bp, synthetic construct
  source 1..21: mol_type = other DNA
tactcaaagctgggcgacaac

SEQ ID NO: 866 - DNA, 21 bp, synthetic construct
  source 1..21: mol_type = other DNA
tactcaaagctgaacggcaac

SEQ ID NO: 867 - DNA, 21 bp, synthetic construct
  source 1..21: mol_type = other DNA
tactcacgcaacggccaaaac

SEQ ID NO: 868 - DNA, 21 bp, synthetic construct
  source 1..21: mol_type = other DNA
atatcctccacgaatggggtg

SEQ ID NO: 869 - DNA, 21 bp, synthetic construct
  source 1..21: mol_type = other DNA
tacgccctgtcaggctttaac

SEQ ID NO: 870 - DNA, 21 bp, synthetic construct
  source 1..21: mol_type = other DNA
ccgatatccacgaatgggagg

SEQ ID NO: 871 - DNA, 21 bp, synthetic construct
  source 1..21: mol_type = other DNA
atgttttcaaccaacggcatc

SEQ ID NO: 872 - DNA, 21 bp, synthetic construct
  source 1..21: mol_type = other DNA
ctgtcaaagatgaaccataac

SEQ ID NO: 873 - DNA, 21 bp, synthetic construct
  source 1..21: mol_type = other DNA
accgacggccaatcaggctgg

SEQ ID NO: 874 - DNA, 21 bp, synthetic construct
  source 1..21: mol_type = other DNA
gcgatatccacgaatggggtg

SEQ ID NO: 875 - DNA, 21 bp, synthetic construct
  source 1..21: mol_type = other DNA
gtgacgtccacgaatgggata

SEQ ID NO: 876 - DNA, 21 bp, synthetic construct
  source 1..21: mol_type = other DNA
ttggcgaaaacgggggataat

SEQ ID NO: 877 - DNA, 21 bp, synthetic construct
  source 1..21: mol_type = other DNA
tactcaaagggcggctttaac

SEQ ID NO: 878 - DNA, 21 bp, synthetic construct
  source 1..21: mol_type = other DNA
ctgtcaaagctgaacatgaac

SEQ ID NO: 879 - DNA, 21 bp, synthetic construct
  source 1..21: mol_type = other DNA
taccaatcatcaaacggcgta

SEQ ID NO: 880 - DNA, 21 bp, synthetic construct
  source 1..21: mol_type = other DNA
ttgacgtccacgaatggggtg

SEQ ID NO: 881 - DNA, 21 bp, synthetic construct
  source 1..21: mol_type = other DNA
ctgtcaaagcaaaacgtaaac

SEQ ID NO: 882 - DNA, 21 bp, synthetic construct
  source 1..21: mol_type = other DNA
ctgtcaaagcaaggccataac

SEQ ID NO: 883 - DNA, 21 bp, synthetic construct
  source 1..21: mol_type = other DNA
gatgcgttgcacgggaggaat

SEQ ID NO: 884 - DNA, 21 bp, synthetic construct
  source 1..21: mol_type = other DNA
tattccaaagtgaattccaat

SEQ ID NO: 885 - DNA, 21 bp, synthetic construct
  source 1..21: mol_type = other DNA
ttcgagtcctccaatggggtg

SEQ ID NO: 886 - DNA, 21 bp, synthetic construct
  source 1..21: mol_type = other DNA
tattccaaagtgaatgtgaat

SEQ ID NO: 887 - DNA, 21 bp, synthetic construct
  source 1..21: mol_type = other DNA
ttctccaaagtgggggtgaat

SEQ ID NO: 888 - DNA, 21 bp, synthetic construct
  source 1..21: mol_type = other DNA
acgtccgggtcctcctcctgg

SEQ ID NO: 889 - DNA, 21 bp, synthetic construct
  source 1..21: mol_type = other DNA
acgatgtccacgaatggggtg

SEQ ID NO: 890 - DNA, 21 bp, synthetic construct
  source 1..21: mol_type = other DNA
cacaattccacgaatggggtg

SEQ ID NO: 891 - DNA, 21 bp, synthetic construct
  source 1..21: mol_type = other DNA
atgcactccacgaatgggata

SEQ ID NO: 892 - DNA, 21 bp, synthetic construct
  source 1..21: mol_type = other DNA
tatgcgaaagggaatcagaat

SEQ ID NO: 893 - DNA, 21 bp, synthetic construct
  source 1..21: mol_type = other DNA
tcaaactcaaccaacggcatc

SEQ ID NO: 894 - DNA, 21 bp, synthetic construct
  source 1..21: mol_type = other DNA
tactcaaaggccggcaccaac

SEQ ID NO: 895 - DNA, 21 bp, synthetic construct
  source 1..21: mol_type = other DNA
acggagtccacgaatggggtg

SEQ ID NO: 896 - DNA, 21 bp, synthetic construct
  source 1..21: mol_type = other DNA
aatgtggatcacgtgtcctgg

SEQ ID NO: 897 - DNA, 21 bp, synthetic construct
  source 1..21: mol_type = other DNA
acggattccacgaatggggtg

SEQ ID NO: 898 - DNA, 21 bp, synthetic construct
  source 1..21: mol_type = other DNA
ttttcaaagtcaggccataac

SEQ ID NO: 899 - DNA, 21 bp, synthetic construct
  source 1..21: mol_type = other DNA
tcaatctcaaccaacggcatc

SEQ ID NO: 900 - DNA, 21 bp, synthetic construct
  source 1..21: mol_type = other DNA
tccatgtccacgaatgggata

SEQ ID NO: 901 - DNA, 21 bp, synthetic construct
  source 1..21: mol_type = other DNA
tccatgtccacgaatggggtg

SEQ ID NO: 902 - DNA, 21 bp, synthetic construct
  source 1..21: mol_type = other DNA
caccagtccacgaatggggtg

SEQ ID NO: 903 - DNA, 21 bp, synthetic construct
  source 1..21: mol_type = other DNA
caggcgtccacgaatggggtg

SEQ ID NO: 904 - DNA, 21 bp, synthetic construct
  source 1..21: mol_type = other DNA
ccgcactccacgaatggggtg

SEQ ID NO: 905 - DNA, 21 bp, synthetic construct
  source 1..21: mol_type = other DNA
aggttgtccgagtccaattgg

SEQ ID NO: 906 - DNA, 21 bp, synthetic construct
  source 1..21: mol_type = other DNA
gagcactccacgaatgggagg

SEQ ID NO: 907 - DNA, 21 bp, synthetic construct
  source 1..21: mol_type = other DNA
atgcactccacgaatggggtg

SEQ ID NO: 908 - DNA, 21 bp, synthetic construct
  source 1..21: mol_type = other DNA
gtgacgtcctccatggggagg

SEQ ID NO: 909 - DNA, 21 bp, synthetic construct
  source 1..21: mol_type = other DNA
tactcaaagtcaggcatcaac

SEQ ID NO: 910 - DNA, 21 bp, synthetic construct
  source 1..21: mol_type = other DNA
ttttcaaaggacaactttaac

SEQ ID NO: 911 - DNA, 21 bp, synthetic construct
  source 1..21: mol_type = other DNA
tactcaaagggcaacaacaac

SEQ ID NO: 912 - DNA, 21 bp, synthetic construct
  source 1..21: mol_type = other DNA
acgaaatcctccaatggggtg

SEQ ID NO: 913 - DNA, 21 bp, synthetic construct
  source 1..21: mol_type = other DNA
acggcgtccacgaatgggata

SEQ ID NO: 914 - DNA, 21 bp, synthetic construct
  source 1..21: mol_type = other DNA
tactcaaagatcggccaaaac

SEQ ID NO: 915 - DNA, 21 bp, synthetic construct
  source 1..21: mol_type = other DNA
cacacgtccacgaatgggata

SEQ ID NO: 916 - DNA, 21 bp, synthetic construct
  source 1..21: mol_type = other DNA
tccgattccacgaatgggata

SEQ ID NO: 917 - DNA, 21 bp, synthetic construct
  source 1..21: mol_type = other DNA
ttggcgaaacacggggcgaat

SEQ ID NO: 918 - DNA, 21 bp, synthetic construct
  source 1..21: mol_type = other DNA
gcggagtccacgaatggggtg

SEQ ID NO: 919 - DNA, 21 bp, synthetic construct
  source 1..21: mol_type = other DNA
tacctgtcaaccaacggcgta

SEQ ID NO: 920 - DNA, 21 bp, synthetic construct
  source 1..21: mol_type = other DNA
ttggcgaaaatgggggtgaat

SEQ ID NO: 921 - DNA, 21 bp, synthetic construct
  source 1..21: mol_type = other DNA
tccgcgtcctccaatggggtg

SEQ ID NO: 922 - DNA, 21 bp, synthetic construct
  source 1..21: mol_type = other DNA
gtagtatcatcaaacggcgta

SEQ ID NO: 923 - DNA, 21 bp, synthetic construct
  source 1..21: mol_type = other DNA
gcgatatccacgaatgggata

SEQ ID NO: 924 - DNA, 21 bp, synthetic construct
  source 1..21: mol_type = other DNA
cacacgtccacgaatggggtg

SEQ ID NO: 925 - DNA, 21 bp, synthetic construct
  source 1..21: mol_type = other DNA
tttgccaagggcggcatgaac

SEQ ID NO: 926 - DNA, 21 bp, synthetic construct
  source 1..21: mol_type = other DNA
gggggggggacgaatgcgtgg

SEQ ID NO: 927 - DNA, 21 bp, synthetic construct
  source 1..21: mol_type = other DNA
acgaattccacgaatggggtg

SEQ ID NO: 928 - DNA, 21 bp, synthetic construct
  source 1..21: mol_type = other DNA
tatgcgaaaaatgggttgaat

SEQ ID NO: 929 - DNA, 21 bp, synthetic construct
  source 1..21: mol_type = other DNA
tactcaaaggccaaccaaaac

SEQ ID NO: 930 - DNA, 21 bp, synthetic construct
  source 1..21: mol_type = other DNA
gtggagtatgggcagaggaat

SEQ ID NO: 931 - DNA, 21 bp, synthetic construct
  source 1..21: mol_type = other DNA
gcgtcctccacgaatgggata

SEQ ID NO: 932 - DNA, 21 bp, synthetic construct
  source 1..21: mol_type = other DNA
ctgtcaaagatgggcaacaac

SEQ ID NO: 933 - DNA, 21 bp, synthetic construct
  source 1..21: mol_type = other DNA
tatgcgaaacagggggtgaat

SEQ ID NO: 934 - DNA, 21 bp, synthetic construct
  source 1..21: mol_type = other DNA
ccggagtccacgaatggggtg

SEQ ID NO: 935 - DNA, 21 bp, synthetic construct
  source 1..21: mol_type = other DNA
cattactcaaccaacggcatc

SEQ ID NO: 936 - DNA, 21 bp, synthetic construct
  source 1..21: mol_type = other DNA
ctgtcaaaggtaggccccaac

SEQ ID NO: 937 - DNA, 21 bp, synthetic construct
  source 1..21: mol_type = other DNA
acggcgtcctccaatggggtg

SEQ ID NO: 938 - DNA, 21 bp, synthetic construct
  source 1..21: mol_type = other DNA
ataaattccacgaatgggata

SEQ ID NO: 939 - DNA, 21 bp, synthetic construct
  source 1..21: mol_type = other DNA
tatgcgagggatgggccgaat

SEQ ID NO: 940 - DNA, 21 bp, synthetic construct
  source 1..21: mol_type = other DNA
tactcaaagatgaacatcaac

SEQ ID NO: 941 - DNA, 21 bp, synthetic construct
  source 1..21: mol_type = other DNA
ttgaattccacgaatggggtg

SEQ ID NO: 942 - DNA, 21 bp, synthetic construct
  source 1..21: mol_type = other DNA
tattccaaacagaatgagaat

SEQ ID NO: 943 - DNA, 21 bp, synthetic construct
  source 1..21: mol_type = other DNA
tatgcgaaagggaatcacaat

SEQ ID NO: 944 - DNA, 21 bp, synthetic construct
  source 1..21: mol_type = other DNA
gaggtgtccacgaatgggagg

SEQ ID NO: 945 - DNA, 21 bp, synthetic construct
  source 1..21: mol_type = other DNA
tatgcgaaagggaatgataat

SEQ ID NO: 946 - DNA, 21 bp, synthetic construct
  source 1..21: mol_type = other DNA
tcagacggctcatcactgtgg

SEQ ID NO: 947 - DNA, 21 bp, synthetic construct
  source 1..21: mol_type = other DNA
acgttctccacgaatggggtg

SEQ ID NO: 948 - DNA, 21 bp, synthetic construct
  source 1..21: mol_type = other DNA
ctgtcaaagaccggcgtaaac

SEQ ID NO: 949 - DNA, 21 bp, synthetic construct
  source 1..21: mol_type = other DNA
tactcacgcaacggctacaac

SEQ ID NO: 950 - DNA, 21 bp, synthetic construct
  source 1..21: mol_type = other DNA
tatgcgaggacgtccacggat

SEQ ID NO: 951 - DNA, 21 bp, synthetic construct
  source 1..21: mol_type = other DNA
ttgtccaaagcggggacgaat

SEQ ID NO: 952 - DNA, 21 bp, synthetic construct
  source 1..21: mol_type = other DNA
tattccaaacagggggagaat

SEQ ID NO: 953 - DNA, 21 bp, synthetic construct
  source 1..21: mol_type = other DNA
ttcgcgaaatccggggcgaat

SEQ ID NO: 954 - DNA, 21 bp, synthetic construct
  source 1..21: mol_type = other DNA
ttggcgaggcagggggagaat

SEQ ID NO: 955 - DNA, 21 bp, synthetic construct
  source 1..21: mol_type = other DNA
cagacgtccacgaatggggtg

SEQ ID NO: 956 - DNA, 21 bp, synthetic construct
  source 1..21: mol_type = other DNA
ttgtccaaagcgaatatgaat

SEQ ID NO: 957 - DNA, 21 bp, synthetic construct
  source 1..21: mol_type = other DNA
tatgagtccacgaatggggtg

SEQ ID NO: 958 - DNA, 21 bp, synthetic construct
  source 1..21: mol_type = other DNA
ttgtccaaagcgggggataat

SEQ ID NO: 959 - DNA, 21 bp, synthetic construct
  source 1..21: mol_type = other DNA
tactcaaagatgggcaacaac

SEQ ID NO: 960 - DNA, 21 bp, synthetic construct
  source 1..21: mol_type = other DNA
tattccagggcgaatgagaat

SEQ ID NO: 961 - DNA, 21 bp, synthetic construct
  source 1..21: mol_type = other DNA
acgaggaatggggcgaatgcg

SEQ ID NO: 962 - DNA, 21 bp, synthetic construct
  source 1..21: mol_type = other DNA
gagacgtccacgaatgggagg

SEQ ID NO: 963 - DNA, 21 bp, synthetic construct
  source 1..21: mol_type = other DNA
tggcaggagacgaatgggaaa

SEQ ID NO: 964 - DNA, 21 bp, synthetic construct
  source 1..21: mol_type = other DNA
ataacgtccacgaatggggtg

SEQ ID NO: 965 - DNA, 21 bp, synthetic construct
  source 1..21: mol_type = other DNA
tccgggtccacgaatggggtg

SEQ ID NO: 966 - DNA, 21 bp, synthetic construct
  source 1..21: mol_type = other DNA
ttcaattcctccaatggggtg

SEQ ID NO: 967 - DNA, 21 bp, synthetic construct
  source 1..21: mol_type = other DNA
ttctccagggcggggacgaat

SEQ ID NO: 968 - DNA, 21 bp, synthetic construct
  source 1..21: mol_type = other DNA
cagacgtcctccaatggggtg

SEQ ID NO: 969 - DNA, 21 bp, synthetic construct
  source 1..21: mol_type = other DNA
ccggagtccacgaatgggagg

SEQ ID NO: 970 - DNA, 21 bp, synthetic construct
  source 1..21: mol_type = other DNA
atcatgtcaaccaacggcatc

SEQ ID NO: 971 - DNA, 21 bp, synthetic construct
  source 1..21: mol_type = other DNA
gagaattccacgaatgggagg

SEQ ID NO: 972 - DNA, 21 bp, synthetic construct
  source 1..21: mol_type = other DNA
cgccccaacggccattcagcc

SEQ ID NO: 973 - DNA, 21 bp, synthetic construct
  source 1..21: mol_type = other DNA
atacactccacgaatgggata

SEQ ID NO: 974 - DNA, 21 bp, synthetic construct
  source 1..21: mol_type = other DNA
ccgaggtcctccaatggggtg

SEQ ID NO: 975 - DNA, 21 bp, synthetic construct
  source 1..21: mol_type = other DNA
ttgcagtcctccaatggggtg

SEQ ID NO: 976 - DNA, 21 bp, synthetic construct
  source 1..21: mol_type = other DNA
tactcaaaggtaggcgtaaac

SEQ ID NO: 977 - DNA, 21 bp, synthetic construct
  source 1..21: mol_type = other DNA
tactcaaagcaaaaccataac

SEQ ID NO: 978 - DNA, 21 bp, synthetic construct
  source 1..21: mol_type = other DNA
ttgtccaaaggggggccgaat

SEQ ID NO: 979 - DNA, 21 bp, synthetic construct
  source 1..21: mol_type = other DNA
atccaatcaaccaacggcatc

SEQ ID NO: 980 - DNA, 21 bp, synthetic construct
  source 1..21: mol_type = other DNA
acgaatagggtgccgcactcc

SEQ ID NO: 981 - DNA, 21 bp, synthetic construct
  source 1..21: mol_type = other DNA
catcatggcgtatcagcctac

SEQ ID NO: 982 - DNA, 21 bp, synthetic construct
  source 1..21: mol_type = other DNA
gtatggtcatcaaacggcgta

SEQ ID NO: 983 - DNA, 21 bp, synthetic construct
  source 1..21: mol_type = other DNA
tattccaaacaggggacgaat

SEQ ID NO: 984 - DNA, 21 bp, synthetic construct
  source 1..21: mol_type = other DNA
gcggattccacgaatggggtg

SEQ ID NO: 985 - DNA, 21 bp, synthetic construct
  source 1..21: mol_type = other DNA
ggggaggggtattccacgtgg

SEQ ID NO: 986 - DNA, 21 bp, synthetic construct
  source 1..21: mol_type = other DNA
ctgtcacgcatcaactttaac

SEQ ID NO: 987 - DNA, 21 bp, synthetic construct
  source 1..21: mol_type = other DNA
cacatgtccacgaatgggata

SEQ ID NO: 988 - DNA, 21 bp, synthetic construct
  source 1..21: mol_type = other DNA
tatgcgaaagcgaatgataat

SEQ ID NO: 989 - DNA, 21 bp, synthetic construct
  source 1..21: mol_type = other DNA
ataatatccacgaatgggata

SEQ ID NO: 990 - DNA, 21 bp, synthetic construct
  source 1..21: mol_type = other DNA
cactattccacgaatggggtg

SEQ ID NO: 991 - DNA, 21 bp, synthetic construct
  source 1..21: mol_type = other DNA
atcatctcaaccaacggccgc

SEQ ID NO: 992 - DNA, 21 bp, synthetic construct
  source 1..21: mol_type = other DNA
tatgcgaggtataatgataat

SEQ ID NO: 993 - DNA, 21 bp, synthetic construct
  source 1..21: mol_type = other DNA
ttgatatccacgaatgggata

SEQ ID NO: 994 - DNA, 21 bp, synthetic construct
  source 1..21: mol_type = other DNA
tactcaaagtcaggcctgaac

SEQ ID NO: 995 - DNA, 21 bp, synthetic construct
  source 1..21: mol_type = other DNA
cattggtcaaccaacggcatc

SEQ ID NO: 996 - DNA, 21 bp, synthetic construct
  source 1..21: mol_type = other DNA
ctgtcaaagctgaacctgaac

SEQ ID NO: 997 - DNA, 21 bp, synthetic construct
  source 1..21: mol_type = other DNA
tattccaaatccaatccgaat

SEQ ID NO: 998 - DNA, 21 bp, synthetic construct
  source 1..21: mol_type = other DNA
tattccaggaatgggacgaat

SEQ ID NO: 999 - DNA, 21 bp, synthetic construct
  source 1..21: mol_type = other DNA
tatgcgaaaatagggatgaat

SEQ ID NO: 1000 - DNA, 21 bp, synthetic construct
  source 1..21: mol_type = other DNA
ttgacgtccacgaatgggata

SEQ ID NO: 1001 - DNA, 21 bp, synthetic construct
  source 1..21: mol_type = other DNA
tcagtatcaaccaacggcgta

SEQ ID NO: 1002 - DNA, 21 bp, synthetic construct
  source 1..21: mol_type = other DNA
atggagtcctccaatggggtg

SEQ ID NO: 1003 - DNA, 21 bp, synthetic construct
  source 1..21: mol_type = other DNA
tccaattcctccaatggggtg

SEQ ID NO: 1004 - DNA, 21 bp, synthetic construct
  source 1..21: mol_type = other DNA
gtgtattccacgaatggggtg

SEQ ID NO: 1005 - DNA, 21 bp, synthetic construct
  source 1..21: mol_type = other DNA
tcacattcaaccaacggcatc

SEQ ID NO: 1006 - DNA, 21 bp, synthetic construct
  source 1..21: mol_type = other DNA
cagcactccacgaatggggtg

SEQ ID NO: 1007 - DNA, 21 bp, synthetic construct
  source 1..21: mol_type = other DNA
ttgtccaaaacggggatgaat

SEQ ID NO: 1008 - DNA, 21 bp, synthetic construct
  source 1..21: mol_type = other DNA
ttgtccaaacaggggatgaat

SEQ ID NO: 1009 - DNA, 21 bp, synthetic construct
  source 1..21: mol_type = other DNA
ctgtcaaagtcatcaaacaac

SEQ ID NO: 1010 - DNA, 21 bp, synthetic construct
  source 1..21: mol_type = other DNA
ttcgggtccacgaatgggata

SEQ ID NO: 1011 - DNA, 21 bp, synthetic construct
  source 1..21: mol_type = other DNA
tatgcgagggtgggggagaat

SEQ ID NO: 1012 - DNA, 21 bp, synthetic construct
  source 1..21: mol_type = other DNA
ttctccaaagcggggcagaat

SEQ ID NO: 1013 - DNA, 21 bp, synthetic construct
  source 1..21: mol_type = other DNA
cacacgtcctccaatggggtg

SEQ ID NO: 1014 - DNA, 21 bp, synthetic construct
  source 1..21: mol_type = other DNA
tattccaaaacgggggagaat

SEQ ID NO: 1015 - DNA, 21 bp, synthetic construct
  source 1..21: mol_type = other DNA
tacttttcacatgtagtagaa

SEQ ID NO: 1016 - DNA, 21 bp, synthetic construct
  source 1..21: mol_type = other DNA
ctggccaagaacggccccaac

SEQ ID NO: 1017 - DNA, 21 bp, synthetic construct
  source 1..21: mol_type = other DNA
atatccgagtcctccaggtgg

SEQ ID NO: 1018 - DNA, 21 bp, synthetic construct
  source 1..21: mol_type = other DNA
ctgtcacgctacaacgaaaac

SEQ ID NO: 1019 - DNA, 21 bp, synthetic construct
  source 1..21: mol_type = other DNA
ttgtccaggttgtccgatacg

SEQ ID NO: 1020 - DNA, 21 bp, synthetic construct
  source 1..21: mol_type = other DNA
ctggcctcaaccaacggccgc

SEQ ID NO: 1021 - DNA, 21 bp, synthetic construct
  source 1..21: mol_type = other DNA
tatgcgaaagcgggggataat

SEQ ID NO: 1022 - DNA, 21 bp, synthetic construct
  source 1..21: mol_type = other DNA
cacgggtccacgaatggggtg

SEQ ID NO: 1023 - DNA, 21 bp, synthetic construct
  source 1..21: mol_type = other DNA
gtgtcctccacgaatgggata

SEQ ID NO: 1024 - DNA, 21 bp, synthetic construct
  source 1..21: mol_type = other DNA
ttctccaaatccgggccgaat

SEQ ID NO: 1025 - DNA, 21 bp, synthetic construct
  source 1..21: mol_type = other DNA
gcgtggtccacgaatggggtg

SEQ ID NO: 1026 - DNA, 21 bp, synthetic construct
  source 1..21: mol_type = other DNA
ctgtcaaagatgggcatcaac

SEQ ID NO: 1027 - DNA, 21 bp, synthetic construct
  source 1..21: mol_type = other DNA
ttggcgaaagcggggttgaat

SEQ ID NO: 1028 - DNA, 21 bp, synthetic construct
  source 1..21: mol_type = other DNA
gtgacgtcctccaatggggtg

SEQ ID NO: 1029 - DNA, 21 bp, synthetic construct
  source 1..21: mol_type = other DNA
tattccaaagcgaatccgaat

SEQ ID NO: 1030 - DNA, 21 bp, synthetic construct
  source 1..21: mol_type = other DNA
ttgtccaaagggaatcacaat

SEQ ID NO: 1031 - DNA, 21 bp, synthetic construct
  source 1..21: mol_type = other DNA
acggcggcgcacgtgacgtgg

SEQ ID NO: 1032 - DNA, 21 bp, synthetic construct
  source 1..21: mol_type = other DNA
caggagtccacgaatgggagg

SEQ ID NO: 1033 - DNA, 21 bp, synthetic construct
  source 1..21: mol_type = other DNA
ttgtccaaaatggggttgaat

SEQ ID NO: 1034 - DNA, 21 bp, synthetic construct
  source 1..21: mol_type = other DNA
atatcctcctccaatgggatg

SEQ ID NO: 1035 - DNA, 21 bp, synthetic construct
  source 1..21: mol_type = other DNA
ctgcattcaaccaacggcatc

SEQ ID NO: 1036 - DNA, 21 bp, synthetic construct
  source 1..21: mol_type = other DNA
ttggcgaaaaatgggatgaat

SEQ ID NO: 1037 - DNA, 21 bp, synthetic construct
  source 1..21: mol_type = other DNA
tattccaaatccaatgcgaat

SEQ ID NO: 1038 - DNA, 21 bp, synthetic construct
  source 1..21: mol_type = other DNA
ttggcgaaaacggggacgaat

SEQ ID NO: 1039 - DNA, 21 bp, synthetic construct
  source 1..21: mol_type = other DNA
atgatgtccacgaatgggata

SEQ ID NO: 1040 - DNA, 21 bp, synthetic construct
  source 1..21: mol_type = other DNA
tattccagggatgggtataat

SEQ ID NO: 1041 - DNA, 21 bp, synthetic construct
  source 1..21: mol_type = other DNA
tatacgtcctccaatggggtg

SEQ ID NO: 1042 - DNA, 21 bp, synthetic construct
  source 1..21: mol_type = other DNA
gaggcgtccacgaatgggagg

SEQ ID NO: 1043 - DNA, 21 bp, synthetic construct
  source 1..21: mol_type = other DNA
aattcctccacgtccacgtgg

SEQ ID NO: 1044 - DNA, 21 bp, synthetic construct
  source 1..21: mol_type = other DNA
tactcaaaggccaacaacaac

SEQ ID NO: 1045 - DNA, 21 bp, synthetic construct
  source 1..21: mol_type = other DNA
acgtcctccacgaatggggtg

SEQ ID NO: 1046 - DNA, 21 bp, synthetic construct
  source 1..21: mol_type = other DNA
ccgtatgcggcgtccagggat

SEQ ID NO: 1047 - DNA, 21 bp, synthetic construct
  source 1..21: mol_type = other DNA
gcgaatgggtcctccaaatat

SEQ ID NO: 1048 - DNA, 21 bp, synthetic construct
  source 1..21: mol_type = other DNA
aatcactccacgaatgggagg

SEQ ID NO: 1049 - DNA, 21 bp, synthetic construct
  source 1..21: mol_type = other DNA
tattccaggcagaatccgaat

SEQ ID NO: 1050 - DNA, 21 bp, synthetic construct
  source 1..21: mol_type = other DNA
tacgccaagtcacaaatgaac

SEQ ID NO: 1051 - DNA, 21 bp, synthetic construct
  source 1..21: mol_type = other DNA
cagatatccacgaatgggata

SEQ ID NO: 1052 - DNA, 21 bp, synthetic construct
  source 1..21: mol_type = other DNA
tatcacgtgcacggggataat

SEQ ID NO: 1053 - DNA, 21 bp, synthetic construct
  source 1..21: mol_type = other DNA
tatgcgaaaccgggggcgaat

SEQ ID NO: 1054 - DNA, 21 bp, synthetic construct
  source 1..21: mol_type = other DNA
tactcaaagtcaggctcaaac

SEQ ID NO: 1055 - DNA, 21 bp, synthetic construct
  source 1..21: mol_type = other DNA
tacgccaagtcaggcgccaac

SEQ ID NO: 1056 - DNA, 21 bp, synthetic construct
  source 1..21: mol_type = other DNA
tacaactcatcaaacggcgta

SEQ ID NO: 1057 - DNA, 21 bp, synthetic construct
  source 1..21: mol_type = other DNA
taccgcaccgacggcttttca

SEQ ID NO: 1058 - DNA, 21 bp, synthetic construct
  source 1..21: mol_type = other DNA
tcctcctccacgaatgggata

SEQ ID NO: 1059 - DNA, 21 bp, synthetic construct
  source 1..21: mol_type = other DNA; mol_type = other DNA
tacgccaagatgggcctgaac

SEQ ID NO: 1060 - DNA, 21 bp, synthetic construct
  source 1..21: mol_type = other DNA; mol_type = other DNA
tactcagcctcaggccccaac

SEQ ID NO: 1061 - DNA, 21 bp, synthetic construct
  source 1..21: mol_type = other DNA; mol_type = other DNA
ctgtcaaagcaaggctttaac

SEQ ID NO: 1062 - DNA, 21 bp, synthetic construct
  source 1..21: mol_type = other DNA; mol_type = other DNA
cacgattccacgaatggggtg

SEQ ID NO: 1063 - DNA, 21 bp, synthetic construct
  source 1..21: mol_type = other DNA; mol_type = other DNA
gtgtcctcccagaatggggtg

SEQ ID NO: 1064 - DNA, 21 bp, synthetic construct
  source 1..21: mol_type = other DNA; mol_type = other DNA
tactcaaagatgggccaaaac

SEQ ID NO: 1065 - DNA, 21 bp, synthetic construct
  source 1..21: mol_type = other DNA; mol_type = other DNA
aacttttcaaccaacggccgc

SEQ ID NO: 1066 - DNA, 21 bp, synthetic construct
  source 1..21: mol_type = other DNA; mol_type = other DNA
tactcacgcggcaacgacaac

SEQ ID NO: 1067 - DNA, 21 bp, synthetic construct
  source 1..21: mol_type = other DNA; mol_type = other DNA
gcgtccgatacgaatgggagg

SEQ ID NO: 1068 - DNA, 21 bp, synthetic construct
  source 1..21: mol_type = other DNA; mol_type = other DNA
acgcagtccttgaatgggagg

SEQ ID NO: 1069 - DNA, 21 bp, synthetic construct
  source 1..21: mol_type = other DNA; mol_type = other DNA
ccgtcctccacgaatggggtg

SEQ ID NO: 1070 - DNA, 21 bp, synthetic construct
  source 1..21: mol_type = other DNA; mol_type = other DNA
aaggacggcaactcatcatgg

SEQ ID NO: 1071 - DNA, 21 bp, synthetic construct
  source 1..21: mol_type = other DNA; mol_type = other DNA
ttcgcgaaagcggggtggaat

SEQ ID NO: 1072 - DNA, 21 bp, synthetic construct
  source 1..21: mol_type = other DNA; mol_type = other DNA
tactactcaggcaagatcgac

SEQ ID NO: 1073 - DNA, 21 bp, synthetic construct
  source 1..21: mol_type = other DNA; mol_type = other DNA
ttgtccaggataaatgataat

SEQ ID NO: 1074 - DNA, 21 bp, synthetic construct
  source 1..21: mol_type = other DNA; mol_type = other DNA
acgacgtccacgaatgggata

SEQ ID NO: 1075 - DNA, 21 bp, synthetic construct
  source 1..21: mol_type = other DNA; mol_type = other DNA
gaagcctcaaccaacggcatc

SEQ ID NO: 1076 - DNA, 21 bp, synthetic construct
  source 1..21: mol_type = other DNA; mol_type = other DNA
ttctcctccacgaatggggtg

SEQ ID NO: 1077 - DNA, 21 bp, synthetic construct
  source 1..21: mol_type = other DNA; mol_type = other DNA
ttcgcgaaagcggggttcaat

SEQ ID NO: 1078 - DNA, 21 bp, synthetic construct
  source 1..21: mol_type = other DNA; mol_type = other DNA
ttggcgagggggggggagaat

SEQ ID NO: 1079 - DNA, 21 bp, synthetic construct
  source 1..21: mol_type = other DNA; mol_type = other DNA
gtggagtcctccaatggggtg

SEQ ID NO: 1080 - DNA, 21 bp, synthetic construct
  source 1..21: mol_type = other DNA; mol_type = other DNA
tatgcgaaaaatggggggaat

SEQ ID NO: 1081 - DNA, 21 bp, synthetic construct
  source 1..21: mol_type = other DNA; mol_type = other DNA
tccgggtccacgaatgggata

SEQ ID NO: 1082 - DNA, 21 bp, synthetic construct
  source 1..21: mol_type = other DNA; mol_type = other DNA
tatgcgaaaaatgggacgaat

SEQ ID NO: 1083 - DNA, 21 bp, synthetic construct
  source 1..21: mol_type = other DNA; mol_type = other DNA
ttgcacaaaaatacggagaat

SEQ ID NO: 1084 - DNA, 21 bp, synthetic construct
  source 1..21: mol_type = other DNA; mol_type = other DNA
ttcaggtcctccaatggggtg

SEQ ID NO: 1085 - DNA, 21 bp, synthetic construct
  source 1..21: mol_type = other DNA; mol_type = other DNA
aaaggggcggatcactcctgg

SEQ ID NO: 1086 - DNA, 21 bp, synthetic construct
  source 1..21: mol_type = other DNA; mol_type = other DNA
gtgaattccacgaatggggtg

SEQ ID NO: 1087 - DNA, 21 bp, synthetic construct
  source 1..21: mol_type = other DNA; mol_type = other DNA
gtaaactcaaccaacggcatc

SEQ ID NO: 1088 - DNA, 21 bp, synthetic construct
  source 1..21: mol_type = other DNA; mol_type = other DNA
aaccatgcctcacatgcctgg

SEQ ID NO: 1089 - DNA, 21 bp, synthetic construct
  source 1..21: mol_type = other DNA; mol_type = other DNA
ttggcgaaaatggggttgaat

SEQ ID NO: 1090 - DNA, 21 bp, synthetic construct
  source 1..21: mol_type = other DNA; mol_type = other DNA
tactcaaagtacaacatcaac

SEQ ID NO: 1091 - DNA, 21 bp, synthetic construct
  source 1..21: mol_type = other DNA; mol_type = other DNA
tatttcacgcaccagtccgag

SEQ ID NO: 1092 - DNA, 21 bp, synthetic construct
  source 1..21: mol_type = other DNA; mol_type = other DNA
tacgccaagaccggcaacaac

SEQ ID NO: 1093 - DNA, 21 bp, synthetic construct
  source 1..21: mol_type = other DNA; mol_type = other DNA
ttgatatccacgaatgggagg

SEQ ID NO: 1094 - DNA, 21 bp, synthetic construct
  source 1..21: mol_type = other DNA; mol_type = other DNA
tcacgctcatcaaacggcgta

SEQ ID NO: 1095 - DNA, 21 bp, synthetic construct
  source 1..21: mol_type = other DNA; mol_type = other DNA
ttggcgtccacgaatgggata

SEQ ID NO: 1096 - DNA, 21 bp, synthetic construct
  source 1..21: mol_type = other DNA; mol_type = other DNA
gcggggtccacgaatggggtg

SEQ ID NO: 1097 - DNA, 21 bp, synthetic construct
  source 1..21: mol_type = other DNA; mol_type = other DNA
aggacgtcctccaatgggcag

SEQ ID NO: 1098 - DNA, 21 bp, synthetic construct
  source 1..21: mol_type = other DNA; mol_type = other DNA
gaacgctcaaccaacggcatc

SEQ ID NO: 1099 - DNA, 21 bp, synthetic construct
  source 1..21: mol_type = other DNA; mol_type = other DNA
ccggggtccacgaatggggtg

SEQ ID NO: 1100 - DNA, 21 bp, synthetic construct
  source 1..21: mol_type = other DNA; mol_type = other DNA
ttggcgaggaatggggagaat

SEQ ID NO: 1101 - DNA, 21 bp, synthetic construct
  source 1..21: mol_type = other DNA; mol_type = other DNA
tcacaatcaaccaacggcatc

SEQ ID NO: 1102 - DNA, 21 bp, synthetic construct
  source 1..21: mol_type = other DNA; mol_type = other DNA
tatgcgaaaatggggcagaat

SEQ ID NO: 1103 - DNA, 21 bp, synthetic construct
  source 1..21: mol_type = other DNA; mol_type = other DNA
aagtttccctcacatgactgg

SEQ ID NO: 1104 - DNA, 21 bp, synthetic construct
  source 1..21: mol_type = other DNA; mol_type = other DNA
gtagaatcaaccaacggcatc

SEQ ID NO: 1105 - DNA, 21 bp, synthetic construct
  source 1..21: mol_type = other DNA; mol_type = other DNA
ctgtcaaagatgaacatcaac

SEQ ID NO: 1106 - DNA, 21 bp, synthetic construct
  source 1..21: mol_type = other DNA; mol_type = other DNA
aggaatgagggggtggcgtgg

SEQ ID NO: 1107 - DNA, 21 bp, synthetic construct
  source 1..21: mol_type = other DNA; mol_type = other DNA
tatgcgaaagggggggtgaat

SEQ ID NO: 1108 - DNA, 21 bp, synthetic construct
  source 1..21: mol_type = other DNA; mol_type = other DNA
tactcaaagatgggcggcaac

SEQ ID NO: 1109 - DNA, 21 bp, synthetic construct
  source 1..21: mol_type = other DNA; mol_type = other DNA
ttcatatcctccaatggggtg

SEQ ID NO: 1110 - DNA, 21 bp, synthetic construct
  source 1..21: mol_type = other DNA; mol_type = other DNA
tactcaaagggcaaccccaac

SEQ ID NO: 1111 - DNA, 21 bp, synthetic construct
  source 1..21: mol_type = other DNA; mol_type = other DNA
gcgttgtccacgaatgggagg

SEQ ID NO: 1112 - DNA, 21 bp, synthetic construct
  source 1..21: mol_type = other DNA; mol_type = other DNA
aaagagtcctcctatgcgtgg

SEQ ID NO: 1113 - DNA, 21 bp, synthetic construct
  source 1..21: mol_type = other DNA; mol_type = other DNA
acggggtccacgaatggggtg

SEQ ID NO: 1114 - DNA, 21 bp, synthetic construct
  source 1..21: mol_type = other DNA; mol_type = other DNA
ttgtccaaaacgggggcgaat

SEQ ID NO: 1115 - DNA, 21 bp, synthetic construct
  source 1..21: mol_type = other DNA; mol_type = other DNA
agggagtcctccaatgggtat

SEQ ID NO: 1116 - DNA, 21 bp, synthetic construct
  source 1..21: mol_type = other DNA; mol_type = other DNA
ttggcgaaaggggggtccaat

SEQ ID NO: 1117 - DNA, 21 bp, synthetic construct
  source 1..21: mol_type = other DNA; mol_type = other DNA
gggacggggaaacagcagtgg

SEQ ID NO: 1118 - DNA, 21 bp, synthetic construct
  source 1..21: mol_type = other DNA; mol_type = other DNA
tcctcctccacgaatggggtg

SEQ ID NO: 1119 - DNA, 21 bp, synthetic construct
  source 1..21: mol_type = other DNA; mol_type = other DNA
agggattccacgaatgggata

SEQ ID NO: 1120 - DNA, 21 bp, synthetic construct
  source 1..21: mol_type = other DNA; mol_type = other DNA
ttgaaagatgggacggcgtcc

SEQ ID NO: 1121 - DNA, 21 bp, synthetic construct
  source 1..21: mol_type = other DNA; mol_type = other DNA
atggattccacgaatgggagg

SEQ ID NO: 1122 - DNA, 21 bp, synthetic construct
  source 1..21: mol_type = other DNA; mol_type = other DNA
catgcctcaaccaacggcgta

SEQ ID NO: 1123 - DNA, 21 bp, synthetic construct
  source 1..21: mol_type = other DNA; mol_type = other DNA
caatgggacggctcaccctca

SEQ ID NO: 1124 - DNA, 21 bp, synthetic construct
  source 1..21: mol_type = other DNA; mol_type = other DNA
atggggtccacgaatggggtg

SEQ ID NO: 1125 - DNA, 21 bp, synthetic construct
  source 1..21: mol_type = other DNA; mol_type = other DNA
aatgattccacgaatgggagg

SEQ ID NO: 1126 - DNA, 21 bp, synthetic construct
  source 1..21: mol_type = other DNA; mol_type = other DNA
acgccggagccggtgaggtgg

SEQ ID NO: 1127 - DNA, 21 bp, synthetic construct
  source 1..21: mol_type = other DNA; mol_type = other DNA
acgacgtcctccaatggggtg

SEQ ID NO: 1128 - DNA, 21 bp, synthetic construct
  source 1..21: mol_type = other DNA; mol_type = other DNA
aatttctccacgaatggggtg

SEQ ID NO: 1129 - DNA, 21 bp, synthetic construct
  source 1..21: mol_type = other DNA; mol_type = other DNA
ctggcccgcaacggcggcaac

SEQ ID NO: 1130 - DNA, 21 bp, synthetic construct
  source 1..21: mol_type = other DNA; mol_type = other DNA
acggggtcctccaatggggtg

SEQ ID NO: 1131 - DNA, 21 bp, synthetic construct
  source 1..21: mol_type = other DNA; mol_type = other DNA
tacgccaagcccggccataac

SEQ ID NO: 1132 - DNA, 21 bp, synthetic construct
  source 1..21: mol_type = other DNA; mol_type = other DNA
tatgcgaaacacggggcgaat

SEQ ID NO: 1133 - DNA, 21 bp, synthetic construct
  source 1..21: mol_type = other DNA; mol_type = other DNA
gcccgctcatcaaacggcgta

SEQ ID NO: 1134 - DNA, 21 bp, synthetic construct
  source 1..21: mol_type = other DNA; mol_type = other DNA
tactcaaagaccaactacaac

SEQ ID NO: 1135 - DNA, 21 bp, synthetic construct
  source 1..21: mol_type = other DNA; mol_type = other DNA
tcctcctccacgaatgggttg

SEQ ID NO: 1136 - DNA, 21 bp, synthetic construct
  source 1..21: mol_type = other DNA; mol_type = other DNA
tttcaatcaaccaacggcatc

SEQ ID NO: 1137 - DNA, 21 bp, synthetic construct
  source 1..21: mol_type = other DNA; mol_type = other DNA
atagggtccacgaatggggtg

SEQ ID NO: 1138 - DNA, 21 bp, synthetic construct
  source 1..21: mol_type = other DNA; mol_type = other DNA
aatgagtccacgaatgggagg

SEQ ID NO: 1139 - DNA, 21 bp, synthetic construct
  source 1..21: mol_type = other DNA; mol_type = other DNA
ccgttgtccacgaatgggagg

SEQ ID NO: 1140 - DNA, 21 bp, synthetic construct
  source 1..21: mol_type = other DNA; mol_type = other DNA
tactcaaagggcaactcaaac

SEQ ID NO: 1141 - DNA, 21 bp, synthetic construct
  source 1..21: mol_type = other DNA; mol_type = other DNA
ttgtccaaagcgggggagaat

SEQ ID NO: 1142 - DNA, 21 bp, synthetic construct
  source 1..21: mol_type = other DNA; mol_type = other DNA
aaaaaagatgggacgaatgcg

SEQ ID NO: 1143 - DNA, 21 bp, synthetic construct
  source 1..21: mol_type = other DNA; mol_type = other DNA
tactcacgctcaggcgaaaac

SEQ ID NO: 1144 - DNA, 21 bp, synthetic construct
  source 1..21: mol_type = other DNA; mol_type = other DNA
tatgcgaggtataatccgaat

SEQ ID NO: 1145 - DNA, 21 bp, synthetic construct
  source 1..21: mol_type = other DNA; mol_type = other DNA
gtgaatgagacgaatggggtg

SEQ ID NO: 1146 - DNA, 21 bp, synthetic construct
  source 1..21: mol_type = other DNA; mol_type = other DNA
acgatgtccacgaatgggata

SEQ ID NO: 1147 - DNA, 21 bp, synthetic construct
  source 1..21: mol_type = other DNA; mol_type = other DNA
agggattccacgaatggggtg

SEQ ID NO: 1148 - DNA, 21 bp, synthetic construct
  source 1..21: mol_type = other DNA; mol_type = other DNA
tattattccacgaatgggata

SEQ ID NO: 1149 - DNA, 21 bp, synthetic construct
  source 1..21: mol_type = other DNA; mol_type = other DNA
gtacattcatcaaacggcgta

SEQ ID NO: 1150 - DNA, 21 bp, synthetic construct
  source 1..21: mol_type = other DNA; mol_type = other DNA
tactcaaagatgggcgccaac

SEQ ID NO: 1151 - DNA, 21 bp, synthetic construct
  source 1..21: mol_type = other DNA; mol_type = other DNA
ttgtccaaatccaatgtgaat

SEQ ID NO: 1152 - DNA, 21 bp, synthetic construct
  source 1..21: mol_type = other DNA; mol_type = other DNA
tacaacaacggctcacgctac

SEQ ID NO: 1153 - DNA, 21 bp, synthetic construct
  source 1..21: mol_type = other DNA; mol_type = other DNA
tggatatccacgaatggggtg

SEQ ID NO: 1154 - DNA, 21 bp, synthetic construct
  source 1..21: mol_type = other DNA; mol_type = other DNA
cacgggtccacgaatgggata

SEQ ID NO: 1155 - DNA, 21 bp, synthetic construct
  source 1..21: mol_type = other DNA; mol_type = other DNA
tacgcccgcggcggcggcaac

SEQ ID NO: 1156 - DNA, 21 bp, synthetic construct
  source 1..21: mol_type = other DNA; mol_type = other DNA
ttggattccacgaatgggata

SEQ ID NO: 1157 - DNA, 21 bp, synthetic construct
  source 1..21: mol_type = other DNA; mol_type = other DNA
tattccagggaggggccgaat

SEQ ID NO: 1158 - DNA, 21 bp, synthetic construct
  source 1..21: mol_type = other DNA
ctgtcaaagatgaactacaac

SEQ ID NO: 1159 - DNA, 21 bp, synthetic construct
  source 1..21: mol_type = other DNA
tactcacgctcaaacgaaaac

SEQ ID NO: 1160 - DNA, 21 bp, synthetic construct
  source 1..21: mol_type = other DNA; mol_type = other DNA
tatgcgaggccggggttgaat

SEQ ID NO: 1161 - DNA, 21 bp, synthetic construct
  source 1..21: mol_type = other DNA; mol_type = other DNA
ctggccaaggccggcaacaac

SEQ ID NO: 1162 - DNA, 21 bp, synthetic construct
  source 1..21: mol_type = other DNA; mol_type = other DNA
tccgattccacgaatgggagg

SEQ ID NO: 1163 - DNA, 21 bp, synthetic construct
  source 1..21: mol_type = other DNA; mol_type = other DNA
tactcaaagaccaactttaac

SEQ ID NO: 1164 - DNA, 21 bp, synthetic construct
  source 1..21: mol_type = other DNA; mol_type = other DNA
ttggcgagggcggggacgaat

SEQ ID NO: 1165 - DNA, 21 bp, synthetic construct
  source 1..21: mol_type = other DNA; mol_type = other DNA
aggtatgatgggtcctccgcg

SEQ ID NO: 1166 - DNA, 21 bp, synthetic construct
  source 1..21: mol_type = other DNA; mol_type = other DNA
acgaattcctccaatggggtg

SEQ ID NO: 1167 - DNA, 21 bp, synthetic construct
  source 1..21: mol_type = other DNA; mol_type = other DNA
cagaattccacgaatgggata

SEQ ID NO: 1168 - DNA, 21 bp, synthetic construct
  source 1..21: mol_type = other DNA; mol_type = other DNA
tactcaaagaacggcatcaac

SEQ ID NO: 1169 - DNA, 21 bp, synthetic construct
  source 1..21: mol_type = other DNA; mol_type = other DNA
ttcacgtccacgaatgggata

SEQ ID NO: 1170 - DNA, 21 bp, synthetic construct
  source 1..21: mol_type = other DNA; mol_type = other DNA
accgccgacaactacaccgta

SEQ ID NO: 1171 - DNA, 21 bp, synthetic construct
  source 1..21: mol_type = other DNA; mol_type = other DNA
tccatatccacgaatggggtg

SEQ ID NO: 1172 - DNA, 21 bp, synthetic construct
  source 1..21: mol_type = other DNA; mol_type = other DNA
gggaataatgggaatgtgtgg

SEQ ID NO: 1173 - DNA, 21 bp, synthetic construct
  source 1..21: mol_type = other DNA; mol_type = other DNA
tccttgtccacgaatggggtg

SEQ ID NO: 1174 - DNA, 21 bp, synthetic construct
  source 1..21: mol_type = other DNA; mol_type = other DNA
tattccaaatccgggtgtaat

SEQ ID NO: 1175 - DNA, 21 bp, synthetic construct
  source 1..21: mol_type = other DNA; mol_type = other DNA
gagtcctccacgaatgggata

SEQ ID NO: 1176 - DNA, 21 bp, synthetic construct
  source 1..21: mol_type = other DNA; mol_type = other DNA
ctgtcaaagggcaacatcaac

SEQ ID NO: 1177 - DNA, 21 bp, synthetic construct
  source 1..21: mol_type = other DNA; mol_type = other DNA
acctggtcaaccaacggcatc

SEQ ID NO: 1178 - DNA, 21 bp, synthetic construct
  source 1..21: mol_type = other DNA; mol_type = other DNA
cagaattccacgaatggggtg

SEQ ID NO: 1179 - DNA, 21 bp, synthetic construct
  source 1..21: mol_type = other DNA; mol_type = other DNA
gaaaactcaaccaacggcaag

SEQ ID NO: 1180 - DNA, 21 bp, synthetic construct
  source 1..21: mol_type = other DNA; mol_type = other DNA
ttggtgtccacgaatgggata

SEQ ID NO: 1181 - DNA, 21 bp, synthetic construct
  source 1..21: mol_type = other DNA; mol_type = other DNA
ttctattccacgaatggggtg

SEQ ID NO: 1182 - DNA, 21 bp, synthetic construct
  source 1..21: mol_type = other DNA; mol_type = other DNA
atgaactcaaccaacggcatc

SEQ ID NO: 1183 - DNA, 21 bp, synthetic construct
  source 1..21: mol_type = other DNA; mol_type = other DNA
ccggattccacgaatgggagg

SEQ ID NO: 1184 - DNA, 21 bp, synthetic construct
  source 1..21: mol_type = other DNA; mol_type = other DNA
tatgcgaaagcggggtgtaat

SEQ ID NO: 1185 - DNA, 21 bp, synthetic construct
  source 1..21: mol_type = other DNA; mol_type = other DNA
tattccaaacagaatcagaat

SEQ ID NO: 1186 - DNA, 21 bp, synthetic construct
  source 1..21: mol_type = other DNA; mol_type = other DNA
ttgaggtcctccaatggggtg

SEQ ID NO: 1187 - DNA, 21 bp, synthetic construct
  source 1..21: mol_type = other DNA; mol_type = other DNA
tattccaaagtgaatgataat

SEQ ID NO: 1188 - DNA, 21 bp, synthetic construct
  source 1..21: mol_type = other DNA; mol_type = other DNA
agggatgggaattccacgtat

SEQ ID NO: 1189 - DNA, 21 bp, synthetic construct
  source 1..21: mol_type = other DNA; mol_type = other DNA
tcatcaggctcatcatcatgg

SEQ ID NO: 1190 - DNA, 21 bp, synthetic construct
  source 1..21: mol_type = other DNA; mol_type = other DNA
atggaatcaaccaacggcatc

SEQ ID NO: 1191 - DNA, 21 bp, synthetic construct
  source 1..21: mol_type = other DNA; mol_type = other DNA
tactcacgccaaggcgacaac

SEQ ID NO: 1192 - DNA, 21 bp, synthetic construct
  source 1..21: mol_type = other DNA; mol_type = other DNA
tatgcgaggacgaatgagaat

SEQ ID NO: 1193 - DNA, 21 bp, synthetic construct
  source 1..21: mol_type = other DNA; mol_type = other DNA
acggcgtccacgaatggggtg

SEQ ID NO: 1194 - DNA, 21 bp, synthetic construct
  source 1..21: mol_type = other DNA; mol_type = other DNA
atcctgtcaaccaacggcgta

SEQ ID NO: 1195 - DNA, 21 bp, synthetic construct
  source 1..21: mol_type = other DNA; mol_type = other DNA
ttgtccaggttgggggagaat

SEQ ID NO: 1196 - DNA, 21 bp, synthetic construct
  source 1..21: mol_type = other DNA; mol_type = other DNA
ttggcgtccacgaatggggtg

SEQ ID NO: 1197 - DNA, 21 bp, synthetic construct
  source 1..21: mol_type = other DNA; mol_type = other DNA
tattccaaagtgggggagaat

SEQ ID NO: 1198 - DNA, 21 bp, synthetic construct
  source 1..21: mol_type = other DNA; mol_type = other DNA
tacgcccgctcaaaccaaaac

SEQ ID NO: 1199 - DNA, 21 bp, synthetic construct
  source 1..21: mol_type = other DNA; mol_type = other DNA
aaccaatcaaccaacggccgc

SEQ ID NO: 1200 - DNA, 21 bp, synthetic construct
  source 1..21: mol_type = other DNA; mol_type = other DNA
tacgcccgcggcggcgaaaac

SEQ ID NO: 1201 - DNA, 21 bp, synthetic construct
  source 1..21: mol_type = other DNA; mol_type = other DNA
tactcaaagcataacctgaac

SEQ ID NO: 1202 - DNA, 21 bp, synthetic construct
  source 1..21: mol_type = other DNA; mol_type = other DNA
cataagtcatcaaacggcgta

SEQ ID NO: 1203 - DNA, 21 bp, synthetic construct
  source 1..21: mol_type = other DNA; mol_type = other DNA
ctggccaagatgggcatcaac

SEQ ID NO: 1204 - DNA, 21 bp, synthetic construct
  source 1..21: mol_type = other DNA; mol_type = other DNA
gggcaggggaattccgcgtgg

SEQ ID NO: 1205 - DNA, 21 bp, synthetic construct
  source 1..21: mol_type = other DNA; mol_type = other DNA
tatgcgaaagatgggccgaat

SEQ ID NO: 1206 - DNA, 21 bp, synthetic construct
  source 1..21: mol_type = other DNA; mol_type = other DNA
aacaagtacggctcagacgta

SEQ ID NO: 1207 - DNA, 21 bp, synthetic construct
  source 1..21: mol_type = other DNA; mol_type = other DNA
tatgcgagggggaatgagaat

SEQ ID NO: 1208 - DNA, 21 bp, synthetic construct
  source 1..21: mol_type = other DNA; mol_type = other DNA
gggcagtccacgaatgggagg

SEQ ID NO: 1209 - DNA, 21 bp, synthetic construct
  source 1..21: mol_type = other DNA; mol_type = other DNA
cacttctccacgaatggggtg

SEQ ID NO: 1210 - DNA, 21 bp, synthetic construct
  source 1..21: mol_type = other DNA; mol_type = other DNA
aatgcgtccacgaatggggtg

SEQ ID NO: 1211 - DNA, 21 bp, synthetic construct
  source 1..21: mol_type = other DNA; mol_type = other DNA
tcagcctcaaccaacggccgc

SEQ ID NO: 1212 - DNA, 21 bp, synthetic construct
  source 1..21: mol_type = other DNA; mol_type = other DNA
agggagaataatgtgacgtgg

SEQ ID NO: 1213 - DNA, 21 bp, synthetic construct
  source 1..21: mol_type = other DNA; mol_type = other DNA
cagcactccacgaatgggata

SEQ ID NO: 1214 - DNA, 21 bp, synthetic construct
  source 1..21: mol_type = other DNA; mol_type = other DNA
ctgtcaaagatcggccccaac

SEQ ID NO: 1215 - DNA, 21 bp, synthetic construct
  source 1..21: mol_type = other DNA; mol_type = other DNA
ccgatgtccacgaatggggtg

SEQ ID NO: 1216 - DNA, 21 bp, synthetic construct
  source 1..21: mol_type = other DNA; mol_type = other DNA
ttgtccagggcgaatgagaat

SEQ ID NO: 1217 - DNA, 21 bp, synthetic construct
  source 1..21: mol_type = other DNA; mol_type = other DNA
tattccaaaataaatgataat

SEQ ID NO: 1218 - DNA, 21 bp, synthetic construct
  source 1..21: mol_type = other DNA; mol_type = other DNA
ttggcgaaaaatggggcgaat

SEQ ID NO: 1219 - DNA, 21 bp, synthetic construct
  source 1..21: mol_type = other DNA; mol_type = other DNA
tattccaaaaatggggcgaat

SEQ ID NO: 1220 - DNA, 21 bp, synthetic construct
  source 1..21: mol_type = other DNA; mol_type = other DNA
gcgtattccacgaatggggtg

SEQ ID NO: 1221 - DNA, 21 bp, synthetic construct
  source 1..21: mol_type = other DNA; mol_type = other DNA
tactcaaagcaaaacaacaac

SEQ ID NO: 1222 - DNA, 21 bp, synthetic construct
  source 1..21: mol_type = other DNA; mol_type = other DNA
tataattccacgaatgggata

SEQ ID NO: 1223 - DNA, 21 bp, synthetic construct
  source 1..21: mol_type = other DNA; mol_type = other DNA
ttggcgaaagcggggcagaat

SEQ ID NO: 1224 - DNA, 21 bp, synthetic construct
  source 1..21: mol_type = other DNA; mol_type = other DNA
ttgtccaaagagaattataat

SEQ ID NO: 1225 - DNA, 21 bp, synthetic construct
  source 1..21: mol_type = other DNA; mol_type = other DNA
acctcatcaaccaacggcatc

SEQ ID NO: 1226 - DNA, 21 bp, synthetic construct
  source 1..21: mol_type = other DNA; mol_type = other DNA
ttctccaaaatacagacggag

SEQ ID NO: 1227 - DNA, 21 bp, synthetic construct
  source 1..21: mol_type = other DNA; mol_type = other DNA
gaggattccacgaatgggagg

SEQ ID NO: 1228 - DNA, 21 bp, synthetic construct
  source 1..21: mol_type = other DNA; mol_type = other DNA
tccaattccacgaatggggtg

SEQ ID NO: 1229 - DNA, 21 bp, synthetic construct
  source 1..21: mol_type = other DNA; mol_type = other DNA
agggattccaatgtgtatccg

SEQ ID NO: 1230 - DNA, 21 bp, synthetic construct
  source 1..21: mol_type = other DNA; mol_type = other DNA
aggccggatgggacgccgtcc

SEQ ID NO: 1231 - DNA, 21 bp, synthetic construct
  source 1..21: mol_type = other DNA; mol_type = other DNA
tatgcgaaacagaatccgaat

SEQ ID NO: 1232 - DNA, 21 bp, synthetic construct
  source 1..21: mol_type = other DNA; mol_type = other DNA
ttggcgaaaggggggacgaat

SEQ ID NO: 1233 - DNA, 21 bp, synthetic construct
  source 1..21: mol_type = other DNA; mol_type = other DNA
ctgtcaaagaacaactacaac

SEQ ID NO: 1234 - DNA, 21 bp, synthetic construct
  source 1..21: mol_type = other DNA; mol_type = other DNA
ttcaattccacgaatggggtg

SEQ ID NO: 1235 - DNA, 21 bp, synthetic construct
  source 1..21: mol_type = other DNA; mol_type = other DNA
aacaactcaaccaacggcgta

SEQ ID NO: 1236 - DNA, 21 bp, synthetic construct
  source 1..21: mol_type = other DNA; mol_type = other DNA
gggtcctccacgaatggggtg

SEQ ID NO: 1237 - DNA, 21 bp, synthetic construct
  source 1..21: mol_type = other DNA; mol_type = other DNA
gaggagtccacgaatgggagg

SEQ ID NO: 1238 - DNA, 21 bp, synthetic construct
  source 1..21: mol_type = other DNA; mol_type = other DNA
tactcaaagaacggcaacaac

SEQ ID NO: 1239 - DNA, 21 bp, synthetic construct
  source 1..21: mol_type = other DNA; mol_type = other DNA
gtgacgtccacgaatggggtg

SEQ ID NO: 1240 - DNA, 21 bp, synthetic construct
  source 1..21: mol_type = other DNA; mol_type = other DNA
ttggcgaaaaatgggacgaat

SEQ ID NO: 1241 - DNA, 21 bp, synthetic construct
  source 1..21: mol_type = other DNA; mol_type = other DNA
ttgtattccacgaatggggtg

SEQ ID NO: 1242 - DNA, 21 bp, synthetic construct
  source 1..21: mol_type = other DNA; mol_type = other DNA
aattataggggggataatgcg

SEQ ID NO: 1243 - DNA, 21 bp, synthetic construct
  source 1..21: mol_type = other DNA; mol_type = other DNA
atctcatacgactacggcaac

SEQ ID NO: 1244 - DNA, 21 bp, synthetic construct
  source 1..21: mol_type = other DNA; mol_type = other DNA
ttggcgaaaaatggggtgaat

SEQ ID NO: 1245 - DNA, 21 bp, synthetic construct
  source 1..21: mol_type = other DNA; mol_type = other DNA
ttgcacgcgtcctccatgaat

SEQ ID NO: 1246 - DNA, 21 bp, synthetic construct
  source 1..21: mol_type = other DNA; mol_type = other DNA
cagatatccacgaatggggtg

SEQ ID NO: 1247 - DNA, 21 bp, synthetic construct
  source 1..21: mol_type = other DNA; mol_type = other DNA
gtgcacaaacagttgccgaat

SEQ ID NO: 1248 - DNA, 21 bp, synthetic construct
  source 1..21: mol_type = other DNA; mol_type = other DNA
tatgagtccataaatgggagg

SEQ ID NO: 1249 - DNA, 21 bp, synthetic construct
  source 1..21: mol_type = other DNA; mol_type = other DNA
ggcatgaagaacaagtttgac

SEQ ID NO: 1250 - DNA, 21 bp, synthetic construct
  source 1..21: mol_type = other DNA; mol_type = other DNA
aatcagtccacgaatggggtg

SEQ ID NO: 1251 - DNA, 21 bp, synthetic construct
  source 1..21: mol_type = other DNA; mol_type = other DNA
caggattccacgaatgggagg

SEQ ID NO: 1252 - DNA, 21 bp, synthetic construct
  source 1..21: mol_type = other DNA; mol_type = other DNA
ttttcacgccaaggcaacaac

SEQ ID NO: 1253 - DNA, 21 bp, synthetic construct
  source 1..21: mol_type = other DNA; mol_type = other DNA
ttggcgaaacagggggcgaat

SEQ ID NO: 1254 - DNA, 21 bp, synthetic construct
  source 1..21: mol_type = other DNA; mol_type = other DNA
tttcaatcaaccaacggcgta

SEQ ID NO: 1255 - DNA, 21 bp, synthetic construct
  source 1..21: mol_type = other DNA; mol_type = other DNA
gtggattccacgaatggggtg

SEQ ID NO: 1256 - DNA, 21 bp, synthetic construct
  source 1..21: mol_type = other DNA; mol_type = other DNA
ctggccaagcaaggcaacaac

SEQ ID NO: 1257 - DNA, 21 bp, synthetic construct
  source 1..21: mol_type = other DNA; mol_type = other DNA
aaggacggcgtatcagtatgg

SEQ ID NO: 1258 - DNA, 21 bp, synthetic construct
  source 1..21: mol_type = other DNA; mol_type = other DNA
ggcgaatcaaccaacggccgc

SEQ ID NO: 1259 - DNA, 21 bp, synthetic construct
  source 1..21: mol_type = other DNA; mol_type = other DNA
tgggtgtccacgaatggggtg

SEQ ID NO: 1260 - DNA, 21 bp, synthetic construct
  source 1..21: mol_type = other DNA; mol_type = other DNA
ttgtccaaatccgggcagaat

SEQ ID NO: 1261 - DNA, 21 bp, synthetic construct
  source 1..21: mol_type = other DNA; mol_type = other DNA
acggggggggagtccaggtgg

SEQ ID NO: 1262 - DNA, 21 bp, synthetic construct
  source 1..21: mol_type = other DNA; mol_type = other DNA
ttcgcgaggtccggggagaat

SEQ ID NO: 1263 - DNA, 21 bp, synthetic construct
  source 1..21: mol_type = other DNA; mol_type = other DNA
cgcctgtcaaccaacggcgta

SEQ ID NO: 1264 - DNA, 21 bp, synthetic construct
  source 1..21: mol_type = other DNA; mol_type = other DNA
acgtggtcctccaatggggtg

SEQ ID NO: 1265 - DNA, 21 bp, synthetic construct
  source 1..21: mol_type = other DNA; mol_type = other DNA
atgaactcaaccaacggcgta

SEQ ID NO: 1266 - DNA, 21 bp, synthetic construct
  source 1..21: mol_type = other DNA; mol_type = other DNA
aagacctcacgcgaaggcgta

SEQ ID NO: 1267 - DNA, 21 bp, synthetic construct
  source 1..21: mol_type = other DNA; mol_type = other DNA
atgttctccacgaatggggtg

SEQ ID NO: 1268 - DNA, 21 bp, synthetic construct
  source 1..21: mol_type = other DNA; mol_type = other DNA
ttggcgaaaccggggccgaat

SEQ ID NO: 1269 - DNA, 21 bp, synthetic construct
  source 1..21: mol_type = other DNA; mol_type = other DNA
tactcaaagctgcaagacaac

SEQ ID NO: 1270 - DNA, 21 bp, synthetic construct
  source 1..21: mol_type = other DNA; mol_type = other DNA
gacctggactcaaccaagtgg

SEQ ID NO: 1271 - DNA, 21 bp, synthetic construct
  source 1..21: mol_type = other DNA; mol_type = other DNA
catgaatcatcaaacggcgta

SEQ ID NO: 1272 - DNA, 21 bp, synthetic construct
  source 1..21: mol_type = other DNA; mol_type = other DNA
tccgggtcctccaatgggagg

SEQ ID NO: 1273 - DNA, 21 bp, synthetic construct
  source 1..21: mol_type = other DNA; mol_type = other DNA
tatgcgaaaacgggggagaat

SEQ ID NO: 1274 - DNA, 21 bp, synthetic construct
  source 1..21: mol_type = other DNA; mol_type = other DNA
tatgcgaaacaggggacgaat

SEQ ID NO: 1275 - DNA, 21 bp, synthetic construct
  source 1..21: mol_type = other DNA; mol_type = other DNA
tatacgaggtccgatacgtcc

SEQ ID NO: 1276 - DNA, 21 bp, synthetic construct
  source 1..21: mol_type = other DNA; mol_type = other DNA
ctgtcaaaggccggcatcaac

SEQ ID NO: 1277 - DNA, 21 bp, synthetic construct
  source 1..21: mol_type = other DNA; mol_type = other DNA
ccgcactccacgaatgggata

SEQ ID NO: 1278 - DNA, 21 bp, synthetic construct
  source 1..21: mol_type = other DNA; mol_type = other DNA
atctcatcaaccaacggcatc

SEQ ID NO: 1279 - DNA, 21 bp, synthetic construct
  source 1..21: mol_type = other DNA; mol_type = other DNA
aaacagtccgatttgacgtgg

SEQ ID NO: 1280 - DNA, 21 bp, synthetic construct
  source 1..21: mol_type = other DNA; mol_type = other DNA
ctgtcaaagcaaggcatcaac

SEQ ID NO: 1281 - DNA, 21 bp, synthetic construct
  source 1..21: mol_type = other DNA; mol_type = other DNA
ttggagtcctccaatggggtg

SEQ ID NO: 1282 - DNA, 21 bp, synthetic construct
  source 1..21: mol_type = other DNA; mol_type = other DNA
cattggtcatcaaacggcgta

SEQ ID NO: 1283 - DNA, 21 bp, synthetic construct
  source 1..21: mol_type = other DNA; mol_type = other DNA
agggagggggcggggtcctgg

SEQ ID NO: 1284 - DNA, 21 bp, synthetic construct
  source 1..21: mol_type = other DNA; mol_type = other DNA
aggttggattccaatgggtgg

SEQ ID NO: 1285 - DNA, 21 bp, synthetic construct
  source 1..21: mol_type = other DNA; mol_type = other DNA
tatgcgaggccggggacgaat

SEQ ID NO: 1286 - DNA, 21 bp, synthetic construct
  source 1..21: mol_type = other DNA; mol_type = other DNA
aactacaacaacgtatactca

SEQ ID NO: 1287 - DNA, 21 bp, synthetic construct
  source 1..21: mol_type = other DNA; mol_type = other DNA
ctgtcaaaggtaggcggcaac

SEQ ID NO: 1288 - DNA, 21 bp, synthetic construct
  source 1..21: mol_type = other DNA; mol_type = other DNA
cactcctccacgaatggggtg

SEQ ID NO: 1289 - DNA, 21 bp, synthetic construct
  source 1..21: mol_type = other DNA; mol_type = other DNA
ttgtccaaaatgaatacgaat

SEQ ID NO: 1290 - DNA, 21 bp, synthetic construct
  source 1..21: mol_type = other DNA; mol_type = other DNA
ttgtccaaatccgggacgaat

SEQ ID NO: 1291 - DNA, 21 bp, synthetic construct
  source 1..21: mol_type = other DNA; mol_type = other DNA
acgatatcctccaatggggtg

SEQ ID NO: 1292 - DNA, 21 bp, synthetic construct
  source 1..21: mol_type = other DNA; mol_type = other DNA
cccgtatcaaccaacggcgta

SEQ ID NO: 1293 - DNA, 21 bp, synthetic construct
  source 1..21: mol_type = other DNA; mol_type = other DNA
tactcaaagatgggcgaaaac

SEQ ID NO: 1294 - DNA, 21 bp, synthetic construct
  source 1..21: mol_type = other DNA; mol_type = other DNA
aggggggagaatcacgcgtgg

SEQ ID NO: 1295 - DNA, 21 bp, synthetic construct
  source 1..21: mol_type = other DNA; mol_type = other DNA
aattcctccacgaatggggtg

SEQ ID NO: 1296 - DNA, 21 bp, synthetic construct
  source 1..21: mol_type = other DNA; mol_type = other DNA
gtggattccagggaggggagg

SEQ ID NO: 1297 - DNA, 21 bp, synthetic construct
  source 1..21: mol_type = other DNA; mol_type = other DNA
ttctccagggcgaatgagaat

SEQ ID NO: 1298 - DNA, 21 bp, synthetic construct
  source 1..21: mol_type = other DNA; mol_type = other DNA
caaggctcaggcctgtttatc

SEQ ID NO: 1299 - DNA, 21 bp, synthetic construct
  source 1..21: mol_type = other DNA; mol_type = other DNA
ctgtcaaagtcagccaacaac

SEQ ID NO: 1300 - DNA, 21 bp, synthetic construct
  source 1..21: mol_type = other DNA; mol_type = other DNA
tggacctcatcaaacggcgta

SEQ ID NO: 1301 - DNA, 21 bp, synthetic construct
  source 1..21: mol_type = other DNA; mol_type = other DNA
ttgcactcctccaatggggtg

SEQ ID NO: 1302 - DNA, 21 bp, synthetic construct
  source 1..21: mol_type = other DNA; mol_type = other DNA
tattccaaagtgaatgagaat

SEQ ID NO: 1303 - DNA, 21 bp, synthetic construct
  source 1..21: mol_type = other DNA; mol_type = other DNA
acgatgtcctccaatggggtg

SEQ ID NO: 1304 - DNA, 21 bp, synthetic construct
  source 1..21: mol_type = other DNA; mol_type = other DNA
catgactcaaccaacggccgc

SEQ ID NO: 1305 - DNA, 21 bp, synthetic construct
  source 1..21: mol_type = other DNA; mol_type = other DNA
ttggcgaaacaggggcagaat

SEQ ID NO: 1306 - DNA, 21 bp, synthetic construct
  source 1..21: mol_type = other DNA; mol_type = other DNA
gagaaatccacgaatggggtg

SEQ ID NO: 1307 - DNA, 21 bp, synthetic construct
  source 1..21: mol_type = other DNA; mol_type = other DNA
ttgtccaggatgggggagaat

SEQ ID NO: 1308 - DNA, 21 bp, synthetic construct
  source 1..21: mol_type = other DNA; mol_type = other DNA
ttcgcgaaaatggggccgaat

SEQ ID NO: 1309 - DNA, 21 bp, synthetic construct
  source 1..21: mol_type = other DNA; mol_type = other DNA
ccgtattccacgaatggggtg

SEQ ID NO: 1310 - DNA, 21 bp, synthetic construct
  source 1..21: mol_type = other DNA; mol_type = other DNA
tggcattcatcaaacggcgta

SEQ ID NO: 1311 - DNA, 21 bp, synthetic construct
  source 1..21: mol_type = other DNA; mol_type = other DNA
aatgagtccacgaatgggata

SEQ ID NO: 1312 - DNA, 21 bp, synthetic construct
  source 1..21: mol_type = other DNA; mol_type = other DNA
tcaaacgcctcatcaaactgg

SEQ ID NO: 1313 - DNA, 21 bp, synthetic construct
  source 1..21: mol_type = other DNA; mol_type = other DNA
tactcaaagtcaaacatgaac

SEQ ID NO: 1314 - DNA, 21 bp, synthetic construct
  source 1..21: mol_type = other DNA; mol_type = other DNA
ttgcacaaaaatttgccggat

SEQ ID NO: 1315 - DNA, 21 bp, synthetic construct
  source 1..21: mol_type = other DNA; mol_type = other DNA
gcgcagtcctccaatggggtg

SEQ ID NO: 1316 - DNA, 21 bp, synthetic construct
  source 1..21: mol_type = other DNA; mol_type = other DNA
aaccattcaggccgctcagcc

SEQ ID NO: 1317 - DNA, 21 bp, synthetic construct
  source 1..21: mol_type = other DNA; mol_type = other DNA
ttttcaaagtttaaccccaac

SEQ ID NO: 1318 - DNA, 21 bp, synthetic construct
  source 1..21: mol_type = other DNA; mol_type = other DNA
aatacgtccacgaatgggata

SEQ ID NO: 1319 - DNA, 21 bp, synthetic construct
  source 1..21: mol_type = other DNA; mol_type = other DNA
aggcaggatcacgtgatgtat

SEQ ID NO: 1320 - DNA, 21 bp, synthetic construct
  source 1..21: mol_type = other DNA; mol_type = other DNA
aacaccggcaactcacattgg

SEQ ID NO: 1321 - DNA, 21 bp, synthetic construct
  source 1..21: mol_type = other DNA; mol_type = other DNA
ccgtgggagggggggccgagg

SEQ ID NO: 1322 - DNA, 21 bp, synthetic construct
  source 1..21: mol_type = other DNA; mol_type = other DNA
atacagtcctccaatggggtg

SEQ ID NO: 1323 - DNA, 21 bp, synthetic construct
  source 1..21: mol_type = other DNA; mol_type = other DNA
ttgtccaggcacaatgagaat

SEQ ID NO: 1324 - DNA, 21 bp, synthetic construct
  source 1..21: mol_type = other DNA; mol_type = other DNA
atgtcagacaacaagcattgg

SEQ ID NO: 1325 - DNA, 21 bp, synthetic construct
  source 1..21: mol_type = other DNA; mol_type = other DNA
ctgtcaaagtcaaacatcaac

SEQ ID NO: 1326 - DNA, 21 bp, synthetic construct
  source 1..21: mol_type = other DNA; mol_type = other DNA
tactcacgccaaggcgaaaac

SEQ ID NO: 1327 - DNA, 21 bp, synthetic construct
  source 1..21: mol_type = other DNA; mol_type = other DNA
tacgcccgcctgaacatcaac

SEQ ID NO: 1328 - DNA, 21 bp, synthetic construct
  source 1..21: mol_type = other DNA; mol_type = other DNA
atagatgggaattccccgtat

SEQ ID NO: 1329 - DNA, 21 bp, synthetic construct
  source 1..21: mol_type = other DNA; mol_type = other DNA
atggattccacgaatggggtg

SEQ ID NO: 1330 - DNA, 21 bp, synthetic construct
  source 1..21: mol_type = other DNA; mol_type = other DNA
ttgtccaaatccgggtccaat

SEQ ID NO: 1331 - DNA, 21 bp, synthetic construct
  source 1..21: mol_type = other DNA; mol_type = other DNA
gcgtcctcctccaatggggtg

SEQ ID NO: 1332 - DNA, 21 bp, synthetic construct
  source 1..21: mol_type = other DNA; mol_type = other DNA
atgttgtccacgaatggggtg

SEQ ID NO: 1333 - DNA, 21 bp, synthetic construct
  source 1..21: mol_type = other DNA; mol_type = other DNA
ttctccaggacgaatgtgaat

SEQ ID NO: 1334 - DNA, 21 bp, synthetic construct
  source 1..21: mol_type = other DNA; mol_type = other DNA
ttggattccacgaatggggtg

SEQ ID NO: 1335 - DNA, 21 bp, synthetic construct
  source 1..21: mol_type = other DNA; mol_type = other DNA
tactcacgcatcaacatgaac

SEQ ID NO: 1336 - DNA, 21 bp, synthetic construct
  source 1..21: mol_type = other DNA; mol_type = other DNA
ttctccaggttgggggagaat

SEQ ID NO: 1337 - DNA, 21 bp, synthetic construct
  source 1..21: mol_type = other DNA; mol_type = other DNA
tactacaccggcatcaacgac

SEQ ID NO: 1338 - DNA, 21 bp, synthetic construct
  source 1..21: mol_type = other DNA; mol_type = other DNA
cactcctccacgaatgggata

SEQ ID NO: 1339 - DNA, 21 bp, synthetic construct
  source 1..21: mol_type = other DNA; mol_type = other DNA
atgacctcaaccaacggcatc

SEQ ID NO: 1340 - DNA, 21 bp, synthetic construct
  source 1..21: mol_type = other DNA; mol_type = other DNA
cccggctcaaccaacggccgc

SEQ ID NO: 1341 - DNA, 21 bp, synthetic construct
  source 1..21: mol_type = other DNA; mol_type = other DNA
tatgcgtcctccaatggggtg

SEQ ID NO: 1342 - DNA, 21 bp, synthetic construct
  source 1..21: mol_type = other DNA; mol_type = other DNA
atggtgtccacgaatgggata

SEQ ID NO: 1343 - DNA, 21 bp, synthetic construct
  source 1..21: mol_type = other DNA; mol_type = other DNA
ctggaatcaaccaacggcatc

SEQ ID NO: 1344 - DNA, 21 bp, synthetic construct
  source 1..21: mol_type = other DNA; mol_type = other DNA
atatcctcctccaatggggtg

SEQ ID NO: 1345 - DNA, 21 bp, synthetic construct
  source 1..21: mol_type = other DNA; mol_type = other DNA
tattccaaaaatggggtgaat

SEQ ID NO: 1346 - DNA, 21 bp, synthetic construct
  source 1..21: mol_type = other DNA; mol_type = other DNA
tggcagtcctccaatggggtg

SEQ ID NO: 1347 - DNA, 21 bp, synthetic construct
  source 1..21: mol_type = other DNA; mol_type = other DNA
ttttcaaagctgggcctgaac

SEQ ID NO: 1348 - DNA, 21 bp, synthetic construct
  source 1..21: mol_type = other DNA; mol_type = other DNA
aataaatccacgaatggggtg

SEQ ID NO: 1349 - DNA, 21 bp, synthetic construct
  source 1..21: mol_type = other DNA; mol_type = other DNA
tatttcacggggacgaataat

SEQ ID NO: 1350 - DNA, 21 bp, synthetic construct
  source 1..21: mol_type = other DNA; mol_type = other DNA
ccgaaatccacgaatgggata

SEQ ID NO: 1351 - DNA, 21 bp, synthetic construct
  source 1..21: mol_type = other DNA; mol_type = other DNA
tgggcgtccacgaatgggata

SEQ ID NO: 1352 - DNA, 21 bp, synthetic construct
  source 1..21: mol_type = other DNA; mol_type = other DNA
atgggggggtcctccaattgg

SEQ ID NO: 1353 - DNA, 21 bp, synthetic construct
  source 1..21: mol_type = other DNA; mol_type = other DNA
gcgacggattatatggcgtat

SEQ ID NO: 1354 - DNA, 21 bp, synthetic construct
  source 1..21: mol_type = other DNA; mol_type = other DNA
ttctccagggcgggggagaat

SEQ ID NO: 1355 - DNA, 21 bp, synthetic construct
  source 1..21: mol_type = other DNA; mol_type = other DNA
aggaatgatgggacgtcctgg

SEQ ID NO: 1356 - DNA, 21 bp, synthetic construct
  source 1..21: mol_type = other DNA; mol_type = other DNA
ttgtccaaaacggggcagaat

SEQ ID NO: 1357 - DNA, 21 bp, synthetic construct
  source 1..21: mol_type = other DNA; mol_type = other DNA
tatgcgaaacagaatcacaat

SEQ ID NO: 1358 - DNA, 21 bp, synthetic construct
  source 1..21: mol_type = other DNA; mol_type = other DNA
ttctattccacgaatgggata

SEQ ID NO: 1359 - DNA, 21 bp, synthetic construct
  source 1..21: mol_type = other DNA; mol_type = other DNA
tgggcgtcctccaatggggtg

SEQ ID NO: 1360 - DNA, 21 bp, synthetic construct
  source 1..21: mol_type = other DNA; mol_type = other DNA
acggtgtcctccaatggggtg

SEQ ID NO: 1361 - DNA, 21 bp, synthetic construct
  source 1..21: mol_type = other DNA; mol_type = other DNA
gtggattccacgaatgggata

SEQ ID NO: 1362 - DNA, 21 bp, synthetic construct
  source 1..21: mol_type = other DNA; mol_type = other DNA
ttggcgaaaatagggttcaat

SEQ ID NO: 1363 - DNA, 21 bp, synthetic construct
  source 1..21: mol_type = other DNA; mol_type = other DNA
aggtccggggagtccgcgtgg

SEQ ID NO: 1364 - DNA, 21 bp, synthetic construct
  source 1..21: mol_type = other DNA; mol_type = other DNA
atgaggacggggatggggccg

SEQ ID NO: 1365 - DNA, 21 bp, synthetic construct
  source 1..21: mol_type = other DNA; mol_type = other DNA
tttatgtcaaccaacggcatc

SEQ ID NO: 1366 - DNA, 21 bp, synthetic construct
  source 1..21: mol_type = other DNA; mol_type = other DNA
tatgcgaaagggaattccaat

SEQ ID NO: 1367 - DNA, 21 bp, synthetic construct
  source 1..21: mol_type = other DNA; mol_type = other DNA
cacgtgtcctccaatggggtg

SEQ ID NO: 1368 - DNA, 21 bp, synthetic construct
  source 1..21: mol_type = other DNA; mol_type = other DNA
aatttgaaagggacgggggcg

SEQ ID NO: 1369 - DNA, 21 bp, synthetic construct
  source 1..21: mol_type = other DNA; mol_type = other DNA
gggcacgcggggtccacgtgg

SEQ ID NO: 1370 - DNA, 21 bp, synthetic construct
  source 1..21: mol_type = other DNA; mol_type = other DNA
gtggcggggagggggtatgat

SEQ ID NO: 1371 - DNA, 21 bp, synthetic construct
  source 1..21: mol_type = other DNA; mol_type = other DNA
aatcactccacgaatgggata

SEQ ID NO: 1372 - DNA, 21 bp, synthetic construct
  source 1..21: mol_type = other DNA; mol_type = other DNA
tactcacgctacaacgaaaac

SEQ ID NO: 1373 - DNA, 21 bp, synthetic construct
  source 1..21: mol_type = other DNA; mol_type = other DNA
aatcagtccacgaatgggata

SEQ ID NO: 1374 - DNA, 21 bp, synthetic construct
  source 1..21: mol_type = other DNA; mol_type = other DNA
acgtccgattatgagtcctat

SEQ ID NO: 1375 - DNA, 21 bp, synthetic construct
  source 1..21: mol_type = other DNA; mol_type = other DNA
tactcaaagcaaggcggcaac

SEQ ID NO: 1376 - DNA, 21 bp, synthetic construct
  source 1..21: mol_type = other DNA; mol_type = other DNA
ttggcgaaatccgggtgtaat

SEQ ID NO: 1377 - DNA, 21 bp, synthetic construct
  source 1..21: mol_type = other DNA; mol_type = other DNA
cactcctccacgcacgggcag

SEQ ID NO: 1378 - DNA, 21 bp, synthetic construct
  source 1..21: mol_type = other DNA; mol_type = other DNA
tccttctcctccaatggggtg

SEQ ID NO: 1379 - DNA, 21 bp, synthetic construct
  source 1..21: mol_type = other DNA; mol_type = other DNA
tattatacggggacgacgatg

SEQ ID NO: 1380 - DNA, 21 bp, synthetic construct
  source 1..21: mol_type = other DNA; mol_type = other DNA
gcgttctccacgaatggggtg

SEQ ID NO: 1381 - DNA, 21 bp, synthetic construct
  source 1..21: mol_type = other DNA; mol_type = other DNA
atcatctcatcaaacggcgta

SEQ ID NO: 1382 - DNA, 21 bp, synthetic construct
  source 1..21: mol_type = other DNA; mol_type = other DNA
gtatcatcaaccaacggcgta

SEQ ID NO: 1383 - DNA, 21 bp, synthetic construct
  source 1..21: mol_type = other DNA; mol_type = other DNA
ttgtccaaaatgaatgcgaat

SEQ ID NO: 1384 - DNA, 21 bp, synthetic construct
  source 1..21: mol_type = other DNA; mol_type = other DNA
agggcgaatggggataatgcg

SEQ ID NO: 1385 - DNA, 21 bp, synthetic construct
  source 1..21: mol_type = other DNA; mol_type = other DNA
tactcaaagcatggctcaaac

SEQ ID NO: 1386 - DNA, 21 bp, synthetic construct
  source 1..21: mol_type = other DNA; mol_type = other DNA
ttgtccaaacacaatgataat

SEQ ID NO: 1387 - DNA, 21 bp, synthetic construct
  source 1..21: mol_type = other DNA; mol_type = other DNA
gcggatgggatatccacgtat

SEQ ID NO: 1388 - DNA, 21 bp, synthetic construct
  source 1..21: mol_type = other DNA; mol_type = other DNA
tattccaaaaatggggataat

SEQ ID NO: 1389 - DNA, 21 bp, synthetic construct
  source 1..21: mol_type = other DNA; mol_type = other DNA
tccacgtcctccaatggggtg

SEQ ID NO: 1390 - DNA, 21 bp, synthetic construct
  source 1..21: mol_type = other DNA; mol_type = other DNA
ctggccaagggcaactacaac

SEQ ID NO: 1391 - DNA, 21 bp, synthetic construct
  source 1..21: mol_type = other DNA; mol_type = other DNA
gtaaactcatcaaacggcgta

SEQ ID NO: 1392 - DNA, 21 bp, synthetic construct
  source 1..21: mol_type = other DNA; mol_type = other DNA
atctactcaaccaacggcgta

SEQ ID NO: 1393 - DNA, 21 bp, synthetic construct
  source 1..21: mol_type = other DNA; mol_type = other DNA
tattccgatttcaatgggagg

SEQ ID NO: 1394 - DNA, 21 bp, synthetic construct
  source 1..21: mol_type = other DNA; mol_type = other DNA
cacgattccacgaatgggata

SEQ ID NO: 1395 - DNA, 21 bp, synthetic construct
  source 1..21: mol_type = other DNA; mol_type = other DNA
tatgcgaaacacgggttgaat

SEQ ID NO: 1396 - DNA, 21 bp, synthetic construct
  source 1..21: mol_type = other DNA; mol_type = other DNA
tatgcgaaattgggggtgaat

SEQ ID NO: 1397 - DNA, 21 bp, synthetic construct
  source 1..21: mol_type = other DNA; mol_type = other DNA
aagaacgacggcaacccctgg

SEQ ID NO: 1398 - DNA, 21 bp, synthetic construct
  source 1..21: mol_type = other DNA; mol_type = other DNA
ctggccaagaacggccaaaac

SEQ ID NO: 1399 - DNA, 21 bp, synthetic construct
  source 1..21: mol_type = other DNA; mol_type = other DNA
gcccattcaaccaacggcatc

SEQ ID NO: 1400 - DNA, 21 bp, synthetic construct
  source 1..21: mol_type = other DNA; mol_type = other DNA
aatacggatgggtggagggat

SEQ ID NO: 1401 - DNA, 21 bp, synthetic construct
  source 1..21: mol_type = other DNA; mol_type = other DNA
agggatggggcgtccgtgtat

SEQ ID NO: 1402 - DNA, 21 bp, synthetic construct
  source 1..21: mol_type = other DNA; mol_type = other DNA
tggatctcatcaaacggcgta

SEQ ID NO: 1403 - DNA, 21 bp, synthetic construct
  source 1..21: mol_type = other DNA; mol_type = other DNA
agggattcctccaatggggtg

SEQ ID NO: 1404 - DNA, 21 bp, synthetic construct
  source 1..21: mol_type = other DNA; mol_type = other DNA
tacgccaagcccggcgtaaac

SEQ ID NO: 1405 - DNA, 21 bp, synthetic construct
  source 1..21: mol_type = other DNA; mol_type = other DNA
tcccagtcctccaatggggtg

SEQ ID NO: 1406 - DNA, 21 bp, synthetic construct
  source 1..21: mol_type = other DNA; mol_type = other DNA
gcgtggtccacgaatgggata

SEQ ID NO: 1407 - DNA, 21 bp, synthetic construct
  source 1..21: mol_type = other DNA; mol_type = other DNA
gccaactcaaccaacggcatc

SEQ ID NO: 1408 - DNA, 21 bp, synthetic construct
  source 1..21: mol_type = other DNA; mol_type = other DNA
ccgacgtccacgaatgggata

SEQ ID NO: 1409 - DNA, 21 bp, synthetic construct
  source 1..21: mol_type = other DNA; mol_type = other DNA
atctactcaaccaacggcatc

SEQ ID NO: 1410 - DNA, 21 bp, synthetic construct
  source 1..21: mol_type = other DNA; mol_type = other DNA
tttgaatcaaccaacggccgc

SEQ ID NO: 1411 - DNA, 21 bp, synthetic construct
  source 1..21: mol_type = other DNA; mol_type = other DNA
ttgatgtcctccaatggggtg

SEQ ID NO: 1412 - DNA, 21 bp, synthetic construct
  source 1..21: mol_type = other DNA; mol_type = other DNA
caaatgtcaaccaacggcatc

SEQ ID NO: 1413 - DNA, 21 bp, synthetic construct
  source 1..21: mol_type = other DNA; mol_type = other DNA
ttctccaaaatagggcagaat

SEQ ID NO: 1414 - DNA, 21 bp, synthetic construct
  source 1..21: mol_type = other DNA; mol_type = other DNA
tactcaaagaacggccaaaac

SEQ ID NO: 1415 - DNA, 21 bp, synthetic construct
  source 1..21: mol_type = other DNA; mol_type = other DNA
tactcaaagggcggcaacaac

SEQ ID NO: 1416 - DNA, 21 bp, synthetic construct
  source 1..21: mol_type = other DNA; mol_type = other DNA
acccattcaggctttggcccc

SEQ ID NO: 1417 - DNA, 21 bp, synthetic construct
  source 1..21: mol_type = other DNA; mol_type = other DNA
aatgcgtcccaggggtgggat

SEQ ID NO: 1418 - DNA, 21 bp, synthetic construct
  source 1..21: mol_type = other DNA; mol_type = other DNA
gcggggggggcgaatgtgtgg

SEQ ID NO: 1419 - DNA, 21 bp, synthetic construct
  source 1..21: mol_type = other DNA; mol_type = other DNA
tattccaaaataaatttcaat

SEQ ID NO: 1420 - DNA, 21 bp, synthetic construct
  source 1..21: mol_type = other DNA; mol_type = other DNA
gaatggtcaaccaacggcgta

SEQ ID NO: 1421 - DNA, 21 bp, synthetic construct
  source 1..21: mol_type = other DNA; mol_type = other DNA
aatgtgtccacgaatggggtg

SEQ ID NO: 1422 - DNA, 21 bp, synthetic construct
  source 1..21: mol_type = other DNA; mol_type = other DNA
tactcacgcaacggcgaaaac

SEQ ID NO: 1423 - DNA, 21 bp, synthetic construct
  source 1..21: mol_type = other DNA; mol_type = other DNA
tgggtgtcctccaatggggtg

SEQ ID NO: 1424 - DNA, 21 bp, synthetic construct
  source 1..21: mol_type = other DNA; mol_type = other DNA
atgtacgacggcacccgctca

SEQ ID NO: 1425 - DNA, 21 bp, synthetic construct
  source 1..21: mol_type = other DNA; mol_type = other DNA
ttttcaaagggcaacatcaac

SEQ ID NO: 1426 - DNA, 21 bp, synthetic construct
  source 1..21: mol_type = other DNA; mol_type = other DNA
ggggattccacgaatgggagg

SEQ ID NO: 1427 - DNA, 21 bp, synthetic construct
  source 1..21: mol_type = other DNA; mol_type = other DNA
tactcaaagatcaacgtaaac

SEQ ID NO: 1428 - DNA, 21 bp, synthetic construct
  source 1..21: mol_type = other DNA; mol_type = other DNA
tattccaaagcgggggagaat

SEQ ID NO: 1429 - DNA, 21 bp, synthetic construct
  source 1..21: mol_type = other DNA; mol_type = other DNA
tttcattcaaccaacggcgta

SEQ ID NO: 1430 - DNA, 21 bp, synthetic construct
  source 1..21: mol_type = other DNA; mol_type = other DNA
tcagaatcaaccaacggcgta

SEQ ID NO: 1431 - DNA, 21 bp, synthetic construct
  source 1..21: mol_type = other DNA; mol_type = other DNA
ttgtccaaaaatgggcacaat

SEQ ID NO: 1432 - DNA, 21 bp, synthetic construct
  source 1..21: mol_type = other DNA; mol_type = other DNA
atggactcaaccaacggcatc

SEQ ID NO: 1433 - DNA, 21 bp, synthetic construct
  source 1..21: mol_type = other DNA; mol_type = other DNA
tatgcgaaaatggggtccaat

SEQ ID NO: 1434 - DNA, 21 bp, synthetic construct
  source 1..21: mol_type = other DNA; mol_type = other DNA
tactcacgccaaaacgaaaac

SEQ ID NO: 1435 - DNA, 21 bp, synthetic construct
  source 1..21: mol_type = other DNA; mol_type = other DNA
gattcctccacgtggagggat

SEQ ID NO: 1436 - DNA, 21 bp, synthetic construct
  source 1..21: mol_type = other DNA; mol_type = other DNA
tactcacgctcaggcgacaac

SEQ ID NO: 1437 - DNA, 21 bp, synthetic construct
  source 1..21: mol_type = other DNA; mol_type = other DNA
tgggaatcaaccaacggcatc

SEQ ID NO: 1438 - DNA, 21 bp, synthetic construct
  source 1..21: mol_type = other DNA; mol_type = other DNA
aattcctcctccaatggggtg

SEQ ID NO: 1439 - DNA, 21 bp, synthetic construct
  source 1..21: mol_type = other DNA; mol_type = other DNA
ttgtccaaacagggggtgaat

SEQ ID NO: 1440 - DNA, 21 bp, synthetic construct
  source 1..21: mol_type = other DNA; mol_type = other DNA
atagattccacgaatgggagg

SEQ ID NO: 1441 - DNA, 21 bp, synthetic construct
  source 1..21: mol_type = other DNA; mol_type = other DNA
acctcatcatcaaacggcgta

SEQ ID NO: 1442 - DNA, 21 bp, synthetic construct
  source 1..21: mol_type = other DNA; mol_type = other DNA
tgggattccacgaatgggata

SEQ ID NO: 1443 - DNA, 21 bp, synthetic construct
  source 1..21: mol_type = other DNA; mol_type = other DNA
caggagtccacgaatgggata

SEQ ID NO: 1444 - DNA, 21 bp, synthetic construct
  source 1..21: mol_type = other DNA; mol_type = other DNA
tacgccaagatgggcgtaaac

SEQ ID NO: 1445 - DNA, 21 bp, synthetic construct
  source 1..21: mol_type = other DNA; mol_type = other DNA
ctgtcatcatcaaacggcgta

SEQ ID NO: 1446 - DNA, 21 bp, synthetic construct
  source 1..21: mol_type = other DNA; mol_type = other DNA
ctgtcaaagtcaggcaacaac

SEQ ID NO: 1447 - DNA, 21 bp, synthetic construct
  source 1..21: mol_type = other DNA; mol_type = other DNA
aggacgaatacgaatgggata

SEQ ID NO: 1448 - DNA, 21 bp, synthetic construct
  source 1..21: mol_type = other DNA; mol_type = other DNA
tggaactcaaccaacggcatc

SEQ ID NO: 1449 - DNA, 21 bp, synthetic construct
  source 1..21: mol_type = other DNA; mol_type = other DNA
gatacgaatgcgatgaaatat

SEQ ID NO: 1450 - DNA, 21 bp, synthetic construct
  source 1..21: mol_type = other DNA; mol_type = other DNA
gcggtgtccacgaatgggata

SEQ ID NO: 1451 - DNA, 21 bp, synthetic construct
  source 1..21: mol_type = other DNA; mol_type = other DNA
tccgggtcctccaatccgtgg

SEQ ID NO: 1452 - DNA, 21 bp, synthetic construct
  source 1..21: mol_type = other DNA; mol_type = other DNA
atagcgtcctccaatggggtg

SEQ ID NO: 1453 - DNA, 21 bp, synthetic construct
  source 1..21: mol_type = other DNA; mol_type = other DNA
aagaacggcggctcagcctgg

SEQ ID NO: 1454 - DNA, 21 bp, synthetic construct
  source 1..21: mol_type = other DNA; mol_type = other DNA
cagtggtcctccaatggggtg

SEQ ID NO: 1455 - DNA, 21 bp, synthetic construct
  source 1..21: mol_type = other DNA; mol_type = other DNA
tactcaaagtcaggcgaaaac

SEQ ID NO: 1456 - DNA, 21 bp, synthetic construct
  source 1..21: mol_type = other DNA; mol_type = other DNA
atagtgtcctccaatggggtg

SEQ ID NO: 1457 - DNA, 21 bp, synthetic construct
  source 1..21: mol_type = other DNA; mol_type = other DNA
cacttgtccacgaatggggtg

SEQ ID NO: 1458 - DNA, 21 bp, synthetic construct
  source 1..21: mol_type = other DNA; mol_type = other DNA
ttcgcgaaaggggggttgaat

SEQ ID NO: 1459 - DNA, 21 bp, synthetic construct
  source 1..21: mol_type = other DNA; mol_type = other DNA
tactcaaagaacggcaccaac

SEQ ID NO: 1460 - DNA, 21 bp, synthetic construct
  source 1..21: mol_type = other DNA; mol_type = other DNA
caccactccacgaatgggata

SEQ ID NO: 1461 - DNA, 21 bp, synthetic construct
  source 1..21: mol_type = other DNA; mol_type = other DNA
aaattgccggagtatgggcac

SEQ ID NO: 1462 - DNA, 21 bp, synthetic construct
  source 1..21: mol_type = other DNA; mol_type = other DNA
aattccaaagggacgggggcg

SEQ ID NO: 1463 - DNA, 21 bp, synthetic construct
  source 1..21: mol_type = other DNA; mol_type = other DNA
acggattccacgtccgggagg

SEQ ID NO: 1464 - DNA, 21 bp, synthetic construct
  source 1..21: mol_type = other DNA; mol_type = other DNA
tacggctcaaccaacggcatc

SEQ ID NO: 1465 - DNA, 21 bp, synthetic construct
  source 1..21: mol_type = other DNA; mol_type = other DNA
ttggggggggcgtccttgtat

SEQ ID NO: 1466 - DNA, 21 bp, synthetic construct
  source 1..21: mol_type = other DNA; mol_type = other DNA
ctgaactcaaccaacggcatc

SEQ ID NO: 1467 - DNA, 21 bp, synthetic construct
  source 1..21: mol_type = other DNA; mol_type = other DNA
ttgtccaggcagggggagaat

SEQ ID NO: 1468 - DNA, 21 bp, synthetic construct
  source 1..21: mol_type = other DNA; mol_type = other DNA
tatgcgaaattgaatccgaat

SEQ ID NO: 1469 - DNA, 21 bp, synthetic construct
  source 1..21: mol_type = other DNA; mol_type = other DNA
caagcctcaaccaacggcatc

SEQ ID NO: 1470 - DNA, 21 bp, synthetic construct
  source 1..21: mol_type = other DNA; mol_type = other DNA
ggggtgaaagggacgatgttc

SEQ ID NO: 1471 - DNA, 21 bp, synthetic construct
  source 1..21: mol_type = other DNA; mol_type = other DNA
tatgcgaaacagaatgtgaat

SEQ ID NO: 1472 - DNA, 21 bp, synthetic construct
  source 1..21: mol_type = other DNA; mol_type = other DNA
tcctcctccacgacggggagg

SEQ ID NO: 1473 - DNA, 21 bp, synthetic construct
  source 1..21: mol_type = other DNA; mol_type = other DNA
catggcggcaactcacattac

SEQ ID NO: 1474 - DNA, 21 bp, synthetic construct
  source 1..21: mol_type = other DNA; mol_type = other DNA
agggatgagaggacgacgtat

SEQ ID NO: 1475 - DNA, 21 bp, synthetic construct
  source 1..21: mol_type = other DNA; mol_type = other DNA
aggttgtccgatgcgtatccg

SEQ ID NO: 1476 - DNA, 21 bp, synthetic construct
  source 1..21: mol_type = other DNA; mol_type = other DNA
atagcgaggacggggcacgat

SEQ ID NO: 1477 - DNA, 21 bp, synthetic construct
  source 1..21: mol_type = other DNA; mol_type = other DNA
tccgattcctccaatggggtg

SEQ ID NO: 1478 - DNA, 21 bp, synthetic construct
  source 1..21: mol_type = other DNA; mol_type = other DNA
aatgattccacgaatggggtg

SEQ ID NO: 1479 - DNA, 21 bp, synthetic construct
  source 1..21: mol_type = other DNA; mol_type = other DNA
aggtccaatgagacgttcccg

SEQ ID NO: 1480 - DNA, 21 bp, synthetic construct
  source 1..21: mol_type = other DNA; mol_type = other DNA
tcactgtcaaccaacggcatc

SEQ ID NO: 1481 - DNA, 21 bp, synthetic construct
  source 1..21: mol_type = other DNA; mol_type = other DNA
agggattccacgccgcactgg

SEQ ID NO: 1482 - DNA, 21 bp, synthetic construct
  source 1..21: mol_type = other DNA; mol_type = other DNA
gtgaatgcgacgaatggggtg

SEQ ID NO: 1483 - DNA, 21 bp, synthetic construct
  source 1..21: mol_type = other DNA; mol_type = other DNA
gtagtatcaaccaacggcatc

SEQ ID NO: 1484 - DNA, 21 bp, synthetic construct
  source 1..21: mol_type = other DNA; mol_type = other DNA
tatgcgaaaacgaatgtgaat

SEQ ID NO: 1485 - DNA, 21 bp, synthetic construct
  source 1..21: mol_type = other DNA; mol_type = other DNA
cacatatcctccaatggggtg

SEQ ID NO: 1486 - DNA, 21 bp, synthetic construct
  source 1..21: mol_type = other DNA; mol_type = other DNA
ggcaactcaaccaacggcatc

SEQ ID NO: 1487 - DNA, 21 bp, synthetic construct
  source 1..21: mol_type = other DNA; mol_type = other DNA
tatgcgaggaatggggagaat

SEQ ID NO: 1488 - DNA, 21 bp, synthetic construct
  source 1..21: mol_type = other DNA; mol_type = other DNA
tattccaaaaataatccgaat

SEQ ID NO: 1489 - DNA, 21 bp, synthetic construct
  source 1..21: mol_type = other DNA; mol_type = other DNA
aaaaatgggcagtccacgtat

SEQ ID NO: 1490 - DNA, 21 bp, synthetic construct
  source 1..21: mol_type = other DNA; mol_type = other DNA
gtagtatcaaccaacggccgc

SEQ ID NO: 1491 - DNA, 21 bp, synthetic construct
  source 1..21: mol_type = other DNA; mol_type = other DNA
ttggcgaaatccggggataat

SEQ ID NO: 1492 - DNA, 21 bp, synthetic construct
  source 1..21: mol_type = other DNA; mol_type = other DNA
ttggcgaaattgggggcgaat

SEQ ID NO: 1493 - DNA, 21 bp, synthetic construct
  source 1..21: mol_type = other DNA; mol_type = other DNA
ctgttttcaaccaacggcatc

SEQ ID NO: 1494 - DNA, 21 bp, synthetic construct
  source 1..21: mol_type = other DNA; mol_type = other DNA
gatacgtccacgaatgggagg

SEQ ID NO: 1495 - DNA, 21 bp, synthetic construct
  source 1..21: mol_type = other DNA; mol_type = other DNA
ttggggtccacgaatggggtg

SEQ ID NO: 1496 - DNA, 21 bp, synthetic construct
  source 1..21: mol_type = other DNA; mol_type = other DNA
atgatatccacgaatggggtg

SEQ ID NO: 1497 - DNA, 21 bp, synthetic construct
  source 1..21: mol_type = other DNA; mol_type = other DNA
tactcaaagaccaacaacaac

SEQ ID NO: 1498 - DNA, 21 bp, synthetic construct
  source 1..21: mol_type = other DNA; mol_type = other DNA
gagttgaatgatgtgaaatgg

SEQ ID NO: 1499 - DNA, 21 bp, synthetic construct
  source 1..21: mol_type = other DNA; mol_type = other DNA
gcggagtccacgaatgggata

SEQ ID NO: 1500 - DNA, 21 bp, synthetic construct
  source 1..21: mol_type = other DNA; mol_type = other DNA
aggggggcgacgataatgccg

SEQ ID NO: 1501 - DNA, 21 bp, synthetic construct
  source 1..21: mol_type = other DNA; mol_type = other DNA
gtgagggatacgaatgggatg

SEQ ID NO: 1502 - DNA, 21 bp, synthetic construct
  source 1..21: mol_type = other DNA; mol_type = other DNA
ctgcgctcaggcgccgccccc

SEQ ID NO: 1503 - DNA, 21 bp, synthetic construct
  source 1..21: mol_type = other DNA; mol_type = other DNA
tggaattccacgaatggggtg

SEQ ID NO: 1504 - DNA, 21 bp, synthetic construct
  source 1..21: mol_type = other DNA; mol_type = other DNA
gagtggtccacgaatgggata

SEQ ID NO: 1505 - DNA, 21 bp, synthetic construct
  source 1..21: mol_type = other DNA; mol_type = other DNA
tggcagaggggggagataaat

SEQ ID NO: 1506 - DNA, 21 bp, synthetic construct
  source 1..21: mol_type = other DNA; mol_type = other DNA
ttggcgagggggaatgtgaat

SEQ ID NO: 1507 - DNA, 21 bp, synthetic construct
  source 1..21: mol_type = other DNA; mol_type = other DNA
tcatggtcaaccaacggcgta

SEQ ID NO: 1508 - DNA, 21 bp, synthetic construct
  source 1..21: mol_type = other DNA; mol_type = other DNA
ttcatgtcctccaatggggtg

SEQ ID NO: 1509 - DNA, 21 bp, synthetic construct
  source 1..21: mol_type = other DNA; mol_type = other DNA
ccgatatccacgaatggggtg

SEQ ID NO: 1510 - DNA, 21 bp, synthetic construct
  source 1..21: mol_type = other DNA; mol_type = other DNA
tcacgctttggcgactcagcc

SEQ ID NO: 1511 - DNA, 21 bp, synthetic construct
  source 1..21: mol_type = other DNA; mol_type = other DNA
tccggggatgggtccaggtat

SEQ ID NO: 1512 - DNA, 21 bp, synthetic construct
  source 1..21: mol_type = other DNA; mol_type = other DNA
tattccaaatatggggataat

SEQ ID NO: 1513 - DNA, 21 bp, synthetic construct
  source 1..21: mol_type = other DNA; mol_type = other DNA
ttgtccaaaaatgggataaat

SEQ ID NO: 1514 - DNA, 21 bp, synthetic construct
  source 1..21: mol_type = other DNA; mol_type = other DNA
tccgggtcctccaatggggtg

SEQ ID NO: 1515 - DNA, 21 bp, synthetic construct
  source 1..21: mol_type = other DNA; mol_type = other DNA
aatatatccacgaatggggtg

SEQ ID NO: 1516 - DNA, 21 bp, synthetic construct
  source 1..21: mol_type = other DNA; mol_type = other DNA
aatgcggggacgtccaattgg

SEQ ID NO: 1517 - DNA, 21 bp, synthetic construct
  source 1..21: mol_type = other DNA; mol_type = other DNA
aggagggaggattcctattcc

SEQ ID NO: 1518 - DNA, 21 bp, synthetic construct
  source 1..21: mol_type = other DNA; mol_type = other DNA
aacaagtcaaccaacggcatc

SEQ ID NO: 1519 - DNA, 21 bp, synthetic construct
  source 1..21: mol_type = other DNA; mol_type = other DNA
ttgtccagggtgaatgagaat

SEQ ID NO: 1520 - DNA, 21 bp, synthetic construct
  source 1..21: mol_type = other DNA; mol_type = other DNA
cgcatctcatcaaacggcgta

SEQ ID NO: 1521 - DNA, 21 bp, synthetic construct
  source 1..21: mol_type = other DNA; mol_type = other DNA
acgcactcctccaatggggtg

SEQ ID NO: 1522 - DNA, 21 bp, synthetic construct
  source 1..21: mol_type = other DNA; mol_type = other DNA
tatatatccacgaatggggtg

SEQ ID NO: 1523 - DNA, 21 bp, synthetic construct
  source 1..21: mol_type = other DNA; mol_type = other DNA
ttggcgaggatgggggataat

SEQ ID NO: 1524 - DNA, 21 bp, synthetic construct
  source 1..21: mol_type = other DNA; mol_type = other DNA
acggcgtatgggcagaatgcg

SEQ ID NO: 1525 - DNA, 21 bp, synthetic construct
  source 1..21: mol_type = other DNA; mol_type = other DNA
tattccaggccggggttgaat

SEQ ID NO: 1526 - DNA, 21 bp, synthetic construct
  source 1..21: mol_type = other DNA; mol_type = other DNA
atgatctcaaccaacggcatc

SEQ ID NO: 1527 - DNA, 21 bp, synthetic construct
  source 1..21: mol_type = other DNA; mol_type = other DNA
ttttcaaagaacggccccaac

SEQ ID NO: 1528 - DNA, 21 bp, synthetic construct
  source 1..21: mol_type = other DNA; mol_type = other DNA
ttgtccaaagcgaatacgaat

SEQ ID NO: 1529 - DNA, 21 bp, synthetic construct
  source 1..21: mol_type = other DNA; mol_type = other DNA
ctggccaagggcaactttaac

SEQ ID NO: 1530 - DNA, 21 bp, synthetic construct
  source 1..21: mol_type = other DNA; mol_type = other DNA
gtacaatcatcaaacggcgta

SEQ ID NO: 1531 - DNA, 21 bp, synthetic construct
  source 1..21: mol_type = other DNA; mol_type = other DNA
tattccaaagcgaatgagaat

SEQ ID NO: 1532 - DNA, 21 bp, synthetic construct
  source 1..21: mol_type = other DNA; mol_type = other DNA
tatgcgagggcgggggagaat

SEQ ID NO: 1533 - DNA, 21 bp, synthetic construct
  source 1..21: mol_type = other DNA; mol_type = other DNA
ctgaactcatcaaacggcgta

SEQ ID NO: 1534 - DNA, 21 bp, synthetic construct
  source 1..21: mol_type = other DNA; mol_type = other DNA
tacatctcaaccaacggccgc

SEQ ID NO: 1535 - DNA, 21 bp, synthetic construct
  source 1..21: mol_type = other DNA; mol_type = other DNA
atcaactcatcaaacggcgta

SEQ ID NO: 1536 - DNA, 21 bp, synthetic construct
  source 1..21: mol_type = other DNA; mol_type = other DNA
tactcaaagaacaacaacaac

SEQ ID NO: 1537 - DNA, 21 bp, synthetic construct
  source 1..21: mol_type = other DNA; mol_type = other DNA
ggggggcacatgtccacgtat

SEQ ID NO: 1538 - DNA, 21 bp, synthetic construct
  source 1..21: mol_type = other DNA; mol_type = other DNA
ccgtggtccacgaatggggtg

SEQ ID NO: 1539 - DNA, 21 bp, synthetic construct
  source 1..21: mol_type = other DNA; mol_type = other DNA
caggagtcctccaatggggtg

SEQ ID NO: 1540 - DNA, 21 bp, synthetic construct
  source 1..21: mol_type = other DNA; mol_type = other DNA
ttgagggatgggacggggtcc

SEQ ID NO: 1541 - DNA, 21 bp, synthetic construct
  source 1..21: mol_type = other DNA; mol_type = other DNA
atcaagtcatcaaacggcgta

SEQ ID NO: 1542 - DNA, 21 bp, synthetic construct
  source 1..21: mol_type = other DNA; mol_type = other DNA
ataaaatgggagtccggggat

SEQ ID NO: 1543 - DNA, 21 bp, synthetic construct
  source 1..21: mol_type = other DNA; mol_type = other DNA
tactcaaagaacaacgccaac

SEQ ID NO: 1544 - DNA, 21 bp, synthetic construct
  source 1..21: mol_type = other DNA; mol_type = other DNA
ccgaattcctccaatggggtg

SEQ ID NO: 1545 - DNA, 21 bp, synthetic construct
  source 1..21: mol_type = other DNA; mol_type = other DNA
ttgtccaggcagaatgagaat

SEQ ID NO: 1546 - DNA, 21 bp, synthetic construct
  source 1..21: mol_type = other DNA; mol_type = other DNA
tatgcgaggatgggggggaat

SEQ ID NO: 1547 - DNA, 21 bp, synthetic construct
  source 1..21: mol_type = other DNA; mol_type = other DNA
caaaactcaaccaacggccgc

SEQ ID NO: 1548 - DNA, 21 bp, synthetic construct
  source 1..21: mol_type = other DNA; mol_type = other DNA
aaaaatgagtccacgttgtgg

SEQ ID NO: 1549 - DNA, 21 bp, synthetic construct
  source 1..21: mol_type = other DNA; mol_type = other DNA
taccataagtcagactttaac

SEQ ID NO: 1550 - DNA, 21 bp, synthetic construct
  source 1..21: mol_type = other DNA; mol_type = other DNA
atagattccacgaatgggata

SEQ ID NO: 1551 - DNA, 21 bp, synthetic construct
  source 1..21: mol_type = other DNA; mol_type = other DNA
tttgaatcaaccaacggcatc

SEQ ID NO: 1552 - DNA, 21 bp, synthetic construct
  source 1..21: mol_type = other DNA; mol_type = other DNA
tactcaaagatgaactcaaac

SEQ ID NO: 1553 - DNA, 21 bp, synthetic construct
  source 1..21: mol_type = other DNA; mol_type = other DNA
gtgccgtccacgaatgggagg

SEQ ID NO: 1554 - DNA, 21 bp, synthetic construct
  source 1..21: mol_type = other DNA; mol_type = other DNA
ttggcgaaaacgggggagaat

SEQ ID NO: 1555 - DNA, 21 bp, synthetic construct
  source 1..21: mol_type = other DNA; mol_type = other DNA
cataacaactcatcatcatgg

SEQ ID NO: 1556 - DNA, 21 bp, synthetic construct
  source 1..21: mol_type = other DNA; mol_type = other DNA
ttgacgtcctccaatggggtg

SEQ ID NO: 1557 - DNA, 21 bp, synthetic construct
  source 1..21: mol_type = other DNA; mol_type = other DNA
tacgccaagggcaactgcaac

SEQ ID NO: 1558 - DNA, 21 bp, synthetic construct
  source 1..21: mol_type = other DNA; mol_type = other DNA
gcggggggggggtccacgtat

SEQ ID NO: 1559 - DNA, 21 bp, synthetic construct
  source 1..21: mol_type = other DNA; mol_type = other DNA
ttcttgtccacgaatggggtg

SEQ ID NO: 1560 - DNA, 21 bp, synthetic construct
  source 1..21: mol_type = other DNA; mol_type = other DNA
acggagtcctccgaggggagg

SEQ ID NO: 1561 - DNA, 21 bp, synthetic construct
  source 1..21: mol_type = other DNA; mol_type = other DNA
gcgacggagacggggccgaaa

SEQ ID NO: 1562 - DNA, 21 bp, synthetic construct
  source 1..21: mol_type = other DNA; mol_type = other DNA
gtggattcctccaatggggtg

SEQ ID NO: 1563 - DNA, 21 bp, synthetic construct
  source 1..21: mol_type = other DNA; mol_type = other DNA
tatgcgagggcgaatgagaat

SEQ ID NO: 1564 - DNA, 21 bp, synthetic construct
  source 1..21: mol_type = other DNA; mol_type = other DNA
tactcacgcggcggcgacaac

SEQ ID NO: 1565 - DNA, 21 bp, synthetic construct
  source 1..21: mol_type = other DNA; mol_type = other DNA
cagtcctccacgaatgggata

SEQ ID NO: 1566 - DNA, 21 bp, synthetic construct
  source 1..21: mol_type = other DNA; mol_type = other DNA
tactcaaagatgaacgaaaac

SEQ ID NO: 1567 - DNA, 21 bp, synthetic construct
  source 1..21: mol_type = other DNA; mol_type = other DNA
tactcacgccatggccccaac

SEQ ID NO: 1568 - DNA, 21 bp, synthetic construct
  source 1..21: mol_type = other DNA; mol_type = other DNA
ccctcatcatcaaacggcgta

SEQ ID NO: 1569 - DNA, 21 bp, synthetic construct
  source 1..21: mol_type = other DNA; mol_type = other DNA
gagaattccacgaatggggtg

SEQ ID NO: 1570 - DNA, 21 bp, synthetic construct
  source 1..21: mol_type = other DNA; mol_type = other DNA
gcgaattccacgaatggggtg

SEQ ID NO: 1571 - DNA, 21 bp, synthetic construct
  source 1..21: mol_type = other DNA; mol_type = other DNA
gacaacggcctgtcaaagtac

SEQ ID NO: 1572 - DNA, 21 bp, synthetic construct
  source 1..21: mol_type = other DNA; mol_type = other DNA
catgaatcaaccaacggccgc

SEQ ID NO: 1573 - DNA, 21 bp, synthetic construct
  source 1..21: mol_type = other DNA; mol_type = other DNA
cagacgtccagggaggggata

SEQ ID NO: 1574 - DNA, 21 bp, synthetic construct
  source 1..21: mol_type = other DNA; mol_type = other DNA
ttttacaccggccatgccgac

SEQ ID NO: 1575 - DNA, 21 bp, synthetic construct
  source 1..21: mol_type = other DNA; mol_type = other DNA
cgcaacgacctgacctttccc

SEQ ID NO: 1576 - DNA, 21 bp, synthetic construct
  source 1..21: mol_type = other DNA; mol_type = other DNA
gatacggggacgtccaggtat

SEQ ID NO: 1577 - DNA, 21 bp, synthetic construct
  source 1..21: mol_type = other DNA; mol_type = other DNA
atggcctcaaccaacggcatc

SEQ ID NO: 1578 - DNA, 21 bp, synthetic construct
  source 1..21: mol_type = other DNA; mol_type = other DNA
tattccaaagtgaatccgaat

SEQ ID NO: 1579 - DNA, 21 bp, synthetic construct
  source 1..21: mol_type = other DNA; mol_type = other DNA
tattccaaagagaattataat

SEQ ID NO: 1580 - DNA, 21 bp, synthetic construct
  source 1..21: mol_type = other DNA; mol_type = other DNA
gtagcctacacctcatcagac

SEQ ID NO: 1581 - DNA, 21 bp, synthetic construct
  source 1..21: mol_type = other DNA; mol_type = other DNA
tactcaaagcatggcgacaac

SEQ ID NO: 1582 - DNA, 21 bp, synthetic construct
  source 1..21: mol_type = other DNA; mol_type = other DNA
cagacgtccacgaatgggata

SEQ ID NO: 1583 - DNA, 21 bp, synthetic construct
  source 1..21: mol_type = other DNA; mol_type = other DNA
tactcaaagcataaccaaaac

SEQ ID NO: 1584 - DNA, 21 bp, synthetic construct
  source 1..21: mol_type = other DNA; mol_type = other DNA
atccgctcatcaaacggcgta

SEQ ID NO: 1585 - DNA, 21 bp, synthetic construct
  source 1..21: mol_type = other DNA; mol_type = other DNA
tattccaaatccaatgagaat

SEQ ID NO: 1586 - DNA, 21 bp, synthetic construct
  source 1..21: mol_type = other DNA; mol_type = other DNA
agggtgacggagaattggttg

SEQ ID NO: 1587 - DNA, 21 bp, synthetic construct
  source 1..21: mol_type = other DNA; mol_type = other DNA
aaggaatcaacctcaaagtgg

SEQ ID NO: 1588 - DNA, 21 bp, synthetic construct
  source 1..21: mol_type = other DNA; mol_type = other DNA
tatgattccacgaatgggata

SEQ ID NO: 1589 - DNA, 21 bp, synthetic construct
  source 1..21: mol_type = other DNA; mol_type = other DNA
tacgccaagcatggcgtaaac

SEQ ID NO: 1590 - DNA, 21 bp, synthetic construct
  source 1..21: mol_type = other DNA; mol_type = other DNA
gtgaatgagtccgtggcgtgg

SEQ ID NO: 1591 - DNA, 21 bp, synthetic construct
  source 1..21: mol_type = other DNA; mol_type = other DNA
ttttcaaagcaaaacatcaac

SEQ ID NO: 1592 - DNA, 21 bp, synthetic construct
  source 1..21: mol_type = other DNA; mol_type = other DNA
tactcaaagcaaaacgacaac

SEQ ID NO: 1593 - DNA, 21 bp, synthetic construct
  source 1..21: mol_type = other DNA; mol_type = other DNA
atgcgctcatcaaacggcgta

SEQ ID NO: 1594 - DNA, 21 bp, synthetic construct
  source 1..21: mol_type = other DNA; mol_type = other DNA
gtgccgcacaaagggtccggg

SEQ ID NO: 1595 - DNA, 21 bp, synthetic construct
  source 1..21: mol_type = other DNA; mol_type = other DNA
accttttcaggcaccatggcc

SEQ ID NO: 1596 - DNA, 21 bp, synthetic construct
  source 1..21: mol_type = other DNA; mol_type = other DNA
tacgactcatcaaacggcgta

SEQ ID NO: 1597 - DNA, 21 bp, synthetic construct
  source 1..21: mol_type = other DNA; mol_type = other DNA
ttctccaaacaggggcacaat

SEQ ID NO: 1598 - DNA, 21 bp, synthetic construct
  source 1..21: mol_type = other DNA; mol_type = other DNA
atgaaagatgggacggcgtcc

SEQ ID NO: 1599 - DNA, 21 bp, synthetic construct
  source 1..21: mol_type = other DNA; mol_type = other DNA
gcgtggtcctccaatggggtg

SEQ ID NO: 1600 - DNA, 21 bp, synthetic construct
  source 1..21: mol_type = other DNA; mol_type = other DNA
ttgtccaaacagggggcgaat

SEQ ID NO: 1601 - DNA, 21 bp, synthetic construct
  source 1..21: mol_type = other DNA; mol_type = other DNA
tattccagggtgaatgggaat

SEQ ID NO: 1602 - DNA, 21 bp, synthetic construct
  source 1..21: mol_type = other DNA; mol_type = other DNA
ctggcccgcatgggctacaac

SEQ ID NO: 1603 - DNA, 21 bp, synthetic construct
  source 1..21: mol_type = other DNA; mol_type = other DNA
tatgtgtcctccaatggggtg

SEQ ID NO: 1604 - DNA, 21 bp, synthetic construct
  source 1..21: mol_type = other DNA; mol_type = other DNA
ttggcgaggttgggggagaat

SEQ ID NO: 1605 - DNA, 21 bp, synthetic construct
  source 1..21: mol_type = other DNA; mol_type = other DNA
ttggcgaaaatggggcagaat

SEQ ID NO: 1606 - DNA, 21 bp, synthetic construct
  source 1..21: mol_type = other DNA; mol_type = other DNA
ctgtcaaagatgaacaacaac

SEQ ID NO: 1607 - DNA, 21 bp, synthetic construct
  source 1..21: mol_type = other DNA; mol_type = other DNA
ttcgcgtcctccaatggggtg

SEQ ID NO: 1608 - DNA, 21 bp, synthetic construct
  source 1..21: mol_type = other DNA; mol_type = other DNA
ttttcacgccaaggctttaac

SEQ ID NO: 1609 - DNA, 21 bp, synthetic construct
  source 1..21: mol_type = other DNA; mol_type = other DNA
aatcagtcctccgtgacgtgg

SEQ ID NO: 1610 - DNA, 21 bp, synthetic construct
  source 1..21: mol_type = other DNA; mol_type = other DNA
gagatgtccacgaatgggagg

SEQ ID NO: 1611 - DNA, 21 bp, synthetic construct
  source 1..21: mol_type = other DNA; mol_type = other DNA
ttgatatcctccaatggggtg

SEQ ID NO: 1612 - DNA, 21 bp, synthetic construct
  source 1..21: mol_type = other DNA; mol_type = other DNA
tattccaaagtgaatcagaat

SEQ ID NO: 1613 - DNA, 21 bp, synthetic construct
  source 1..21: mol_type = other DNA; mol_type = other DNA
ttggcgaaacacgggttgaat

SEQ ID NO: 1614 - DNA, 21 bp, synthetic construct
  source 1..21: mol_type = other DNA; mol_type = other DNA
ctggccaagtcaggcggcaac

SEQ ID NO: 1615 - DNA, 21 bp, synthetic construct
  source 1..21: mol_type = other DNA; mol_type = other DNA
tatgcgaggatgaatgataat

SEQ ID NO: 1616 - DNA, 21 bp, synthetic construct
  source 1..21: mol_type = other DNA; mol_type = other DNA
tacacccatggcaccaaccat

SEQ ID NO: 1617 - DNA, 21 bp, synthetic construct
  source 1..21: mol_type = other DNA; mol_type = other DNA
gtggagaggtccgggtgggat

SEQ ID NO: 1618 - DNA, 21 bp, synthetic construct
  source 1..21: mol_type = other DNA; mol_type = other DNA
gaatcatacaacggccgcaac

SEQ ID NO: 1619 - DNA, 21 bp, synthetic construct
  source 1..21: mol_type = other DNA; mol_type = other DNA
tactcatcaaccaacggcgta

SEQ ID NO: 1620 - DNA, 21 bp, synthetic construct
  source 1..21: mol_type = other DNA; mol_type = other DNA
tactcaaagaacaacatcaac

SEQ ID NO: 1621 - DNA, 21 bp, synthetic construct
  source 1..21: mol_type = other DNA; mol_type = other DNA
ctgtcaaagaacaacatcaac

SEQ ID NO: 1622 - DNA, 21 bp, synthetic construct
  source 1..21: mol_type = other DNA
gaaatggcccataagaactgg

SEQ ID NO: 1623 - DNA, 21 bp, synthetic construct
  source 1..21: mol_type = other DNA
tatgcgaaatataatccgaat

SEQ ID NO: 1624 - DNA, 21 bp, synthetic construct
  source 1..21: mol_type = other DNA
tcatcatcatcaaacggcgta

SEQ ID NO: 1625 - DNA, 21 bp, synthetic construct
  source 1..21: mol_type = other DNA
ttcgcgaggaatggggataat

SEQ ID NO: 1626 - DNA, 21 bp, synthetic construct
  source 1..21: mol_type = other DNA
tacgactcaaccaacggcgta

SEQ ID NO: 1627 - DNA, 21 bp, synthetic construct
  source 1..21: mol_type = other DNA
acggggtcctcccacgggtgg

SEQ ID NO: 1628 - DNA, 21 bp, synthetic construct
  source 1..21: mol_type = other DNA
ttctccagggtgaatgataat

SEQ ID NO: 1629 - DNA, 21 bp, synthetic construct
  source 1..21: mol_type = other DNA
acgtattccggggatccggcg

SEQ ID NO: 1630 - DNA, 21 bp, synthetic construct
  source 1..21: mol_type = other DNA
ggcgacatggtagtacgctac

SEQ ID NO: 1631 - DNA, 21 bp, synthetic construct
  source 1..21: mol_type = other DNA
ttcgcgaaatccgggacgaat

SEQ ID NO: 1632 - DNA, 21 bp, synthetic construct
  source 1..21: mol_type = other DNA
aattccggggtgtccatatat

SEQ ID NO: 1633 - DNA, 21 bp, synthetic construct
  source 1..21: mol_type = other DNA
gatggggggcactcccactat

SEQ ID NO: 1634 - DNA, 21 bp, synthetic construct
  source 1..21: mol_type = other DNA
tggacggatacgaatggggcg

SEQ ID NO: 1635 - DNA, 21 bp, synthetic construct
  source 1..21: mol_type = other DNA
ttgtccaggtccgggaatgat

SEQ ID NO: 1636 - DNA, 21 bp, synthetic construct
  source 1..21: mol_type = other DNA
ttggcgaaacaggggacgaat

SEQ ID NO: 1637 - DNA, 21 bp, synthetic construct
  source 1..21: mol_type = other DNA
ggcgacgactttaccaagttt

SEQ ID NO: 1638 - DNA, 21 bp, synthetic construct
  source 1..21: mol_type = other DNA
ggccattcaaccaacggcatc

SEQ ID NO: 1639 - DNA, 21 bp, synthetic construct
  source 1..21: mol_type = other DNA
tactttcaaggcgtaatcaac

SEQ ID NO: 1640 - DNA, 21 bp, synthetic construct
  source 1..21: mol_type = other DNA
caggggtccacgaatgggata

SEQ ID NO: 1641 - DNA, 21 bp, synthetic construct
  source 1..21: mol_type = other DNA
gcggggtccacgaatgggata

SEQ ID NO: 1642 - DNA, 21 bp, synthetic construct
  source 1..21: mol_type = other DNA
tttgccaagggcaacgtaaac

SEQ ID NO: 1643 - DNA, 21 bp, synthetic construct
  source 1..21: mol_type = other DNA; mol_type = other DNA
ttgtccaaagggaatttgaat

SEQ ID NO: 1644 - DNA, 21 bp, synthetic construct
  source 1..21: mol_type = other DNA; mol_type = other DNA
ggcgactaccccgtaaagtac

SEQ ID NO: 1645 - DNA, 21 bp, synthetic construct
  source 1..21: mol_type = other DNA; mol_type = other DNA
atggagtccacgaatggggtg

SEQ ID NO: 1646 - DNA, 21 bp, synthetic construct
  source 1..21: mol_type = other DNA; mol_type = other DNA
atgtcatcaaccaacggcatc

SEQ ID NO: 1647 - DNA, 21 bp, synthetic construct
  source 1..21: mol_type = other DNA; mol_type = other DNA
aacctgggctcaaacacctgg

SEQ ID NO: 1648 - DNA, 21 bp, synthetic construct
  source 1..21: mol_type = other DNA; mol_type = other DNA
cactccagggcgaatacggat

SEQ ID NO: 1649 - DNA, 21 bp, synthetic construct
  source 1..21: mol_type = other DNA; mol_type = other DNA
gggaggaatgggaatccggcg

SEQ ID NO: 1650 - DNA, 21 bp, synthetic construct
  source 1..21: mol_type = other DNA; mol_type = other DNA
tactcaaagcatggccaaaac

SEQ ID NO: 1651 - DNA, 21 bp, synthetic construct
  source 1..21: mol_type = other DNA; mol_type = other DNA
tattccaaaatggggacgaat

SEQ ID NO: 1652 - DNA, 21 bp, synthetic construct
  source 1..21: mol_type = other DNA; mol_type = other DNA
ttggattccacgaatgggagg

SEQ ID NO: 1653 - DNA, 21 bp, synthetic construct
  source 1..21: mol_type = other DNA; mol_type = other DNA
gataggtatgggaggtccccg

SEQ ID NO: 1654 - DNA, 21 bp, synthetic construct
  source 1..21: mol_type = other DNA; mol_type = other DNA
aattcctccacgaatgggata

SEQ ID NO: 1655 - DNA, 21 bp, synthetic construct
  source 1..21: mol_type = other DNA
ttctccaaaatgaatacgaat

SEQ ID NO: 1656 - DNA, 21 bp, synthetic construct
  source 1..21: mol_type = other DNA
tattccaggttcaatgagaat

SEQ ID NO: 1657 - DNA, 21 bp, synthetic construct
  source 1..21: mol_type = other DNA
ggggggtccgggacgacgtgg

SEQ ID NO: 1658 - DNA, 21 bp, synthetic construct
  source 1..21: mol_type = other DNA
accgtaggctactcaacctac

SEQ ID NO: 1659 - DNA, 21 bp, synthetic construct
  source 1..21: mol_type = other DNA; mol_type = other DNA
tcagaatcatcaaacggcgta

SEQ ID NO: 1660 - DNA, 21 bp, synthetic construct
  source 1..21: mol_type = other DNA; mol_type = other DNA
cgcggccccgccgaatacccc

SEQ ID NO: 1661 - DNA, 21 bp, synthetic construct
  source 1..21: mol_type = other DNA; mol_type = other DNA
tatgcgaaaacgaatccgaat

SEQ ID NO: 1662 - DNA, 21 bp, synthetic construct
  source 1..21: mol_type = other DNA; mol_type = other DNA
aaccattcaaccaacggcgta

SEQ ID NO: 1663 - DNA, 21 bp, synthetic construct
  source 1..21: mol_type = other DNA; mol_type = other DNA
ttgtattcctccaatggggtg

SEQ ID NO: 1664 - DNA, 21 bp, synthetic construct
  source 1..21: mol_type = other DNA; mol_type = other DNA
cagaatcagtcccacacgtgg

SEQ ID NO: 1665 - DNA, 21 bp, synthetic construct
  source 1..21: mol_type = other DNA; mol_type = other DNA
tactcaaagcccggcctgaac

SEQ ID NO: 1666 - DNA, 21 bp, synthetic construct
  source 1..21: mol_type = other DNA; mol_type = other DNA
ttggcgagggcgggggataat

SEQ ID NO: 1667 - DNA, 21 bp, synthetic construct
  source 1..21: mol_type = other DNA; mol_type = other DNA
tcaaactcatcacatggctgg

SEQ ID NO: 1668 - DNA, 21 bp, synthetic construct
  source 1..21: mol_type = other DNA; mol_type = other DNA
tattccaaaacgaatgataat

SEQ ID NO: 1669 - DNA, 21 bp, synthetic construct
  source 1..21: mol_type = other DNA; mol_type = other DNA
aatatgtccacgaatgggagg

SEQ ID NO: 1670 - DNA, 21 bp, synthetic construct
  source 1..21: mol_type = other DNA; mol_type = other DNA
tatgcgaaaatagggacgaat

SEQ ID NO: 1671 - DNA, 21 bp, synthetic construct
  source 1..21: mol_type = other DNA; mol_type = other DNA
tactcaaagaccaaccataac

SEQ ID NO: 1672 - DNA, 21 bp, synthetic construct
  source 1..21: mol_type = other DNA; mol_type = other DNA
tatgcgaaattgggggataat

SEQ ID NO: 1673 - DNA, 21 bp, synthetic construct
  source 1..21: mol_type = other DNA; mol_type = other DNA
tacaccaagtcaggctcaaac

SEQ ID NO: 1674 - DNA, 21 bp, synthetic construct
  source 1..21: mol_type = other DNA; mol_type = other DNA
ttgtccaaaatgaatgagaat

SEQ ID NO: 1675 - DNA, 21 bp, synthetic construct
  source 1..21: mol_type = other DNA; mol_type = other DNA
tcatactcaaccaacggcgta

SEQ ID NO: 1676 - DNA, 21 bp, synthetic construct
  source 1..21: mol_type = other DNA; mol_type = other DNA
gattcccactcccacacgtgg

SEQ ID NO: 1677 - DNA, 21 bp, synthetic construct
  source 1..21: mol_type = other DNA; mol_type = other DNA
ttgacgaggtcctcctatgat

SEQ ID NO: 1678 - DNA, 21 bp, synthetic construct
  source 1..21: mol_type = other DNA; mol_type = other DNA
ttctccaaaacggggttgaat

SEQ ID NO: 1679 - DNA, 21 bp, synthetic construct
  source 1..21: mol_type = other DNA; mol_type = other DNA
cacgggtcctccaatggggtg

SEQ ID NO: 1680 - DNA, 21 bp, synthetic construct
  source 1..21: mol_type = other DNA; mol_type = other DNA
ctggccaagctgggcaacaac

SEQ ID NO: 1681 - DNA, 21 bp, synthetic construct
  source 1..21: mol_type = other DNA; mol_type = other DNA
tatgcgaaaacgaatcacaat

SEQ ID NO: 1682 - DNA, 21 bp, synthetic construct
  source 1..21: mol_type = other DNA; mol_type = other DNA
caggagcacacggtgtatagg

SEQ ID NO: 1683 - DNA, 21 bp, synthetic construct
  source 1..21: mol_type = other DNA; mol_type = other DNA
gcgaattcctccaatggggtg

SEQ ID NO: 1684 - DNA, 21 bp, synthetic construct
  source 1..21: mol_type = other DNA; mol_type = other DNA
tttgaatcaaaggtagcctac

SEQ ID NO: 1685 - DNA, 21 bp, synthetic construct
  source 1..21: mol_type = other DNA; mol_type = other DNA
tccgcgtcctccaatgggata

SEQ ID NO: 1686 - DNA, 21 bp, synthetic construct
  source 1..21: mol_type = other DNA; mol_type = other DNA
tattccaaagatgggccgaat

SEQ ID NO: 1687 - DNA, 21 bp, synthetic construct
  source 1..21: mol_type = other DNA; mol_type = other DNA
ggccaaggctcatcaacctgg

SEQ ID NO: 1688 - DNA, 21 bp, synthetic construct
  source 1..21: mol_type = other DNA; mol_type = other DNA
caacaatcaaccaacggccgc

SEQ ID NO: 1689 - DNA, 21 bp, synthetic construct
  source 1..21: mol_type = other DNA; mol_type = other DNA
cgcaacgactcaaacggcgta

SEQ ID NO: 1690 - DNA, 21 bp, synthetic construct
  source 1..21: mol_type = other DNA; mol_type = other DNA
tattccaggcacggggataat

SEQ ID NO: 1691 - DNA, 21 bp, synthetic construct
  source 1..21: mol_type = other DNA; mol_type = other DNA
tacttttcatcaaacggcgta

SEQ ID NO: 1692 - DNA, 21 bp, synthetic construct
  source 1..21: mol_type = other DNA; mol_type = other DNA
cacatgtcctccaatggggtg

SEQ ID NO: 1693 - DNA, 21 bp, synthetic construct
  source 1..21: mol_type = other DNA; mol_type = other DNA
ttgtccaaaatggggtccaat

SEQ ID NO: 1694 - DNA, 21 bp, synthetic construct
  source 1..21: mol_type = other DNA; mol_type = other DNA
aacaactcatcaaacggcgta

SEQ ID NO: 1695 - DNA, 21 bp, synthetic construct
  source 1..21: mol_type = other DNA; mol_type = other DNA
ttggcgtcctccaatggggtg

SEQ ID NO: 1696 - DNA, 21 bp, synthetic construct
  source 1..21: mol_type = other DNA; mol_type = other DNA
caacattcacgcgaaggcgta

SEQ ID NO: 1697 - DNA, 21 bp, synthetic construct
  source 1..21: mol_type = other DNA; mol_type = other DNA
ttgtccaaaatggggacgaat

SEQ ID NO: 1698 - DNA, 21 bp, synthetic construct
  source 1..21: mol_type = other DNA; mol_type = other DNA
tttgacggcaagtcaccctac

SEQ ID NO: 1699 - DNA, 21 bp, synthetic construct
  source 1..21: mol_type = other DNA; mol_type = other DNA
tattccgtgaaaaatacgaat

SEQ ID NO: 1700 - DNA, 21 bp, synthetic construct
  source 1..21: mol_type = other DNA; mol_type = other DNA
ttgtccaaacagaatttgaat

SEQ ID NO: 1701 - DNA, 21 bp, synthetic construct
  source 1..21: mol_type = other DNA; mol_type = other DNA
ggggcgaatcagtcctcctgg

SEQ ID NO: 1702 - DNA, 21 bp, synthetic construct
  source 1..21: mol_type = other DNA; mol_type = other DNA
ttggcgagggatgggccgaat

SEQ ID NO: 1703 - DNA, 21 bp, synthetic construct
  source 1..21: mol_type = other DNA; mol_type = other DNA
ataacgtccgataatgggagg

SEQ ID NO: 1704 - DNA, 21 bp, synthetic construct
  source 1..21: mol_type = other DNA; mol_type = other DNA
atgcactcctccaatggggtg

SEQ ID NO: 1705 - DNA, 21 bp, synthetic construct
  source 1..21: mol_type = other DNA; mol_type = other DNA
tatgcgaaacagaatttgaat

SEQ ID NO: 1706 - DNA, 21 bp, synthetic construct
  source 1..21: mol_type = other DNA; mol_type = other DNA
acgaggaatgggacgccggcg

SEQ ID NO: 1707 - DNA, 21 bp, synthetic construct
  source 1..21: mol_type = other DNA; mol_type = other DNA
tactcaaagggcggcatcaac

SEQ ID NO: 1708 - DNA, 21 bp, synthetic construct
  source 1..21: mol_type = other DNA; mol_type = other DNA
accaacgacgccgtaaagtgg

SEQ ID NO: 1709 - DNA, 21 bp, synthetic construct
  source 1..21: mol_type = other DNA; mol_type = other DNA
acgaaatccggggatttgccg

SEQ ID NO: 1710 - DNA, 21 bp, synthetic construct
  source 1..21: mol_type = other DNA; mol_type = other DNA
tactcacgcaacaaccaaaac

SEQ ID NO: 1711 - DNA, 21 bp, synthetic construct
  source 1..21: mol_type = other DNA; mol_type = other DNA
gggcagtccacgaatggggtg

SEQ ID NO: 1712 - DNA, 21 bp, synthetic construct
  source 1..21: mol_type = other DNA; mol_type = other DNA
gactcatactcaggccaagac

SEQ ID NO: 1713 - DNA, 21 bp, synthetic construct
  source 1..21: mol_type = other DNA; mol_type = other DNA
ttctccaaagcgaatacgaat

SEQ ID NO: 1714 - DNA, 21 bp, synthetic construct
  source 1..21: mol_type = other DNA; mol_type = other DNA
accctgtcatcaaacggcgta

SEQ ID NO: 1715 - DNA, 21 bp, synthetic construct
  source 1..21: mol_type = other DNA; mol_type = other DNA
tattccagggaggggttcaat

SEQ ID NO: 1716 - DNA, 21 bp, synthetic construct
  source 1..21: mol_type = other DNA; mol_type = other DNA
tacctgaagtcacaaaccgta

SEQ ID NO: 1717 - DNA, 21 bp, synthetic construct
  source 1..21: mol_type = other DNA; mol_type = other DNA
ttcgattcctccaatggggtg

SEQ ID NO: 1718 - DNA, 21 bp, synthetic construct
  source 1..21: mol_type = other DNA; mol_type = other DNA
caggagtcccagaatgggagg

SEQ ID NO: 1719 - DNA, 21 bp, synthetic construct
  source 1..21: mol_type = other DNA; mol_type = other DNA
atgacgtcctccaatggggtg

SEQ ID NO: 1720 - DNA, 21 bp, synthetic construct
  source 1..21: mol_type = other DNA; mol_type = other DNA
agggggaatgagtccgggtgg

SEQ ID NO: 1721 - DNA, 21 bp, synthetic construct
  source 1..21: mol_type = other DNA; mol_type = other DNA
tatgcgaaagaggggtataat

SEQ ID NO: 1722 - DNA, 21 bp, synthetic construct
  source 1..21: mol_type = other DNA; mol_type = other DNA
tacgccaagtcaaaccaaaac

SEQ ID NO: 1723 - DNA, 21 bp, synthetic construct
  source 1..21: mol_type = other DNA; mol_type = other DNA
gcgatgtccacgaatgggata

SEQ ID NO: 1724 - DNA, 21 bp, synthetic construct
  source 1..21: mol_type = other DNA; mol_type = other DNA
tacgcccgctacggcgaaaac

SEQ ID NO: 1725 - DNA, 21 bp, synthetic construct
  source 1..21: mol_type = other DNA
gtggcgtcctccggggcgggg

SEQ ID NO: 1726 - DNA, 21 bp, synthetic construct
  source 1..21: mol_type = other DNA; mol_type = other DNA
aacatctcaaccaacggcatc

SEQ ID NO: 1727 - DNA, 21 bp, synthetic construct
  source 1..21: mol_type = other DNA; mol_type = other DNA
ttctccagggtgaatgagaat

SEQ ID NO: 1728 - DNA, 21 bp, synthetic construct
  source 1..21: mol_type = other DNA; mol_type = other DNA
ttgtccaaattgggggagaat

SEQ ID NO: 1729 - DNA, 21 bp, synthetic construct
  source 1..21: mol_type = other DNA; mol_type = other DNA
gatcacaaagggcagatagcg

SEQ ID NO: 1730 - DNA, 21 bp, synthetic construct
  source 1..21: mol_type = other DNA; mol_type = other DNA
tatgcgaaattgaatgcgaat

SEQ ID NO: 1731 - DNA, 21 bp, synthetic construct
  source 1..21: mol_type = other DNA; mol_type = other DNA
tatgcgaaagcgaatcagaat

SEQ ID NO: 1732 - DNA, 21 bp, synthetic construct
  source 1..21: mol_type = other DNA; mol_type = other DNA
ggggagtccacgaatggggtg

SEQ ID NO: 1733 - DNA, 21 bp, synthetic construct
  source 1..21: mol_type = other DNA; mol_type = other DNA
tatgcgaaacagaatacgaat

SEQ ID NO: 1734 - DNA, 21 bp, synthetic construct
  source 1..21: mol_type = other DNA; mol_type = other DNA
tactcaaaggccaacggcaac

SEQ ID NO: 1735 - DNA, 21 bp, synthetic construct
  source 1..21: mol_type = other DNA; mol_type = other DNA
atcgactcatcaaacggcgta

SEQ ID NO: 1736 - DNA, 21 bp, synthetic construct
  source 1..21: mol_type = other DNA; mol_type = other DNA
ttcttctccacgaatgggata

SEQ ID NO: 1737 - DNA, 21 bp, synthetic construct
  source 1..21: mol_type = other DNA; mol_type = other DNA
tactcaaagatcaacaccaac

SEQ ID NO: 1738 - DNA, 21 bp, synthetic construct
  source 1..21: mol_type = other DNA; mol_type = other DNA
gataattccacgaatgggagg

SEQ ID NO: 1739 - DNA, 21 bp, synthetic construct
  source 1..21: mol_type = other DNA; mol_type = other DNA
gtggagtattccttcggggat

SEQ ID NO: 1740 - DNA, 21 bp, synthetic construct
  source 1..21: mol_type = other DNA; mol_type = other DNA
ttcgcgaaaacgggggtgaat

SEQ ID NO: 1741 - DNA, 21 bp, synthetic construct
  source 1..21: mol_type = other DNA; mol_type = other DNA
accgaatcatcaaacggcgta

SEQ ID NO: 1742 - DNA, 21 bp, synthetic construct
  source 1..21: mol_type = other DNA; mol_type = other DNA
aactactcaaccaacggcatc

SEQ ID NO: 1743 - DNA, 21 bp, synthetic construct
  source 1..21: mol_type = other DNA; mol_type = other DNA
ataatgtcctccaatggggtg

SEQ ID NO: 1744 - DNA, 21 bp, synthetic construct
  source 1..21: mol_type = other DNA; mol_type = other DNA
ctggcccgcatcggctcaaac

SEQ ID NO: 1745 - DNA, 21 bp, synthetic construct
  source 1..21: mol_type = other DNA; mol_type = other DNA
aatgattccacgaatgggata

SEQ ID NO: 1746 - DNA, 21 bp, synthetic construct
  source 1..21: mol_type = other DNA; mol_type = other DNA
ttttcaaaggtaggcgaaaac

SEQ ID NO: 1747 - DNA, 21 bp, synthetic construct
  source 1..21: mol_type = other DNA; mol_type = other DNA
ttgtccaaattgggggataat

SEQ ID NO: 1748 - DNA, 21 bp, synthetic construct
  source 1..21: mol_type = other DNA; mol_type = other DNA
gtaaccgactttaacggcaag

SEQ ID NO: 1749 - DNA, 21 bp, synthetic construct
  source 1..21: mol_type = other DNA; mol_type = other DNA
tattccaaaccgaatttcaat

SEQ ID NO: 1750 - DNA, 21 bp, synthetic construct
  source 1..21: mol_type = other DNA; mol_type = other DNA
caggggtccacgaatggggtg

SEQ ID NO: 1751 - DNA, 21 bp, synthetic construct
  source 1..21: mol_type = other DNA; mol_type = other DNA
ttttcaaagatgggccataac

SEQ ID NO: 1752 - DNA, 21 bp, synthetic construct
  source 1..21: mol_type = other DNA; mol_type = other DNA
gatttcagggggaatgatgcg

SEQ ID NO: 1753 - DNA, 21 bp, synthetic construct
  source 1..21: mol_type = other DNA; mol_type = other DNA
ttcgcgaaaaatgggttgaat

SEQ ID NO: 1754 - DNA, 21 bp, synthetic construct
  source 1..21: mol_type = other DNA; mol_type = other DNA
tactcaaagggcaacgaaaac

SEQ ID NO: 1755 - DNA, 21 bp, synthetic construct
  source 1..21: mol_type = other DNA; mol_type = other DNA
tattccaaaacgaatgtgaat

SEQ ID NO: 1756 - DNA, 21 bp, synthetic construct
  source 1..21: mol_type = other DNA; mol_type = other DNA
gtagactcaaccaacggccgc

SEQ ID NO: 1757 - DNA, 21 bp, synthetic construct
  source 1..21: mol_type = other DNA; mol_type = other DNA
cgcggcggctacgaaaccttt

SEQ ID NO: 1758 - DNA, 21 bp, synthetic construct
  source 1..21: mol_type = other DNA; mol_type = other DNA
gtaccccaacgcggcgacttt

SEQ ID NO: 1759 - DNA, 21 bp, synthetic construct
  source 1..21: mol_type = other DNA; mol_type = other DNA
ccgtggtccacgaatgggata

SEQ ID NO: 1760 - DNA, 21 bp, synthetic construct
  source 1..21: mol_type = other DNA; mol_type = other DNA
cacgcgaatacgtccaattgg

SEQ ID NO: 1761 - DNA, 21 bp, synthetic construct
  source 1..21: mol_type = other DNA; mol_type = other DNA
gcgttctccacgaatgggata

SEQ ID NO: 1762 - DNA, 21 bp, synthetic construct
  source 1..21: mol_type = other DNA; mol_type = other DNA
atgctgtcaaccaacggcatc

SEQ ID NO: 1763 - DNA, 21 bp, synthetic construct
  source 1..21: mol_type = other DNA; mol_type = other DNA
gaacaatcaaccaacggcatc

SEQ ID NO: 1764 - DNA, 21 bp, synthetic construct
  source 1..21: mol_type = other DNA; mol_type = other DNA
tcaaagtcatcaaacggcgta

SEQ ID NO: 1765 - DNA, 21 bp, synthetic construct
  source 1..21: mol_type = other DNA; mol_type = other DNA
tacgccaagctgaacaacaac

SEQ ID NO: 1766 - DNA, 21 bp, synthetic construct
  source 1..21: mol_type = other DNA; mol_type = other DNA
tactcaaagaacaacatgaac

SEQ ID NO: 1767 - DNA, 21 bp, synthetic construct
  source 1..21: mol_type = other DNA; mol_type = other DNA
tatgcgcacgcggggataggg

SEQ ID NO: 1768 - DNA, 21 bp, synthetic construct
  source 1..21: mol_type = other DNA; mol_type = other DNA
gggccgcagtcctccacgtgg

SEQ ID NO: 1769 - DNA, 21 bp, synthetic construct
  source 1..21: mol_type = other DNA; mol_type = other DNA
aaccaagactacgtaaagtac

SEQ ID NO: 1770 - DNA, 21 bp, synthetic construct
  source 1..21: mol_type = other DNA; mol_type = other DNA
tactttgacggcaaggtatca

SEQ ID NO: 1771 - DNA, 21 bp, synthetic construct
  source 1..21: mol_type = other DNA; mol_type = other DNA
ttcgcgaggttcgggccgaat

SEQ ID NO: 1772 - DNA, 21 bp, synthetic construct
  source 1..21: mol_type = other DNA; mol_type = other DNA
tccaatgggaattcctcctat

SEQ ID NO: 1773 - DNA, 21 bp, synthetic construct
  source 1..21: mol_type = other DNA; mol_type = other DNA
gggaattccacgaatggggtg

SEQ ID NO: 1774 - DNA, 21 bp, synthetic construct
  source 1..21: mol_type = other DNA; mol_type = other DNA
gataatagggggagggcggcg

SEQ ID NO: 1775 - DNA, 21 bp, synthetic construct
  source 1..21: mol_type = other DNA; mol_type = other DNA
tactcaaagtcaaactcaaac

SEQ ID NO: 1776 - DNA, 21 bp, synthetic construct
  source 1..21: mol_type = other DNA; mol_type = other DNA
ttggcgagggcggggtccaat

SEQ ID NO: 1777 - DNA, 21 bp, synthetic construct
  source 1..21: mol_type = other DNA; mol_type = other DNA
tatgcgaaattcgggttcaat

SEQ ID NO: 1778 - DNA, 21 bp, synthetic construct
  source 1..21: mol_type = other DNA; mol_type = other DNA
tatgcgaggccggggatgaat

SEQ ID NO: 1779 - DNA, 21 bp, synthetic construct
  source 1..21: mol_type = other DNA; mol_type = other DNA
tatgcgaaagcgggggggaat

SEQ ID NO: 1780 - DNA, 21 bp, synthetic construct
  source 1..21: mol_type = other DNA; mol_type = other DNA
cagaattcctccaatggggtg

SEQ ID NO: 1781 - DNA, 21 bp, synthetic construct
  source 1..21: mol_type = other DNA; mol_type = other DNA
acggattcctccaatggggtg

SEQ ID NO: 1782 - DNA, 21 bp, synthetic construct
  source 1..21: mol_type = other DNA; mol_type = other DNA
ttttcacgctcaggccaaaac

SEQ ID NO: 1783 - DNA, 21 bp, synthetic construct
  source 1..21: mol_type = other DNA; mol_type = other DNA
tatgcgaaagggaatgagaat

SEQ ID NO: 1784 - DNA, 21 bp, synthetic construct
  source 1..21: mol_type = other DNA; mol_type = other DNA
tattccagggataatttcaat

SEQ ID NO: 1785 - DNA, 21 bp, synthetic construct
  source 1..21: mol_type = other DNA; mol_type = other DNA
tattccgcggcgaatgcgaat

SEQ ID NO: 1786 - DNA, 21 bp, synthetic construct
  source 1..21: mol_type = other DNA; mol_type = other DNA
atcgaatcaaccaacggccgc

SEQ ID NO: 1787 - DNA, 21 bp, synthetic construct
  source 1..21: mol_type = other DNA; mol_type = other DNA
aatgatggggggtccgcgtgg

SEQ ID NO: 1788 - DNA, 21 bp, synthetic construct
  source 1..21: mol_type = other DNA; mol_type = other DNA
tactcaaagtacggcgaaaac

SEQ ID NO: 1789 - DNA, 21 bp, synthetic construct
  source 1..21: mol_type = other DNA; mol_type = other DNA
tacgccaagcaaggcgaaaac

SEQ ID NO: 1790 - DNA, 21 bp, synthetic construct
  source 1..21: mol_type = other DNA; mol_type = other DNA
ctgtcaaagaacggcgtaaac

SEQ ID NO: 1791 - DNA, 21 bp, synthetic construct
  source 1..21: mol_type = other DNA; mol_type = other DNA
ttggcgaaagcggggacgaat

SEQ ID NO: 1792 - DNA, 21 bp, synthetic construct
  source 1..21: mol_type = other DNA; mol_type = other DNA
aatgcgtccacgaatgggata

SEQ ID NO: 1793 - DNA, 21 bp, synthetic construct
  source 1..21: mol_type = other DNA; mol_type = other DNA
tatgcgaaaacgaatacgaat

SEQ ID NO: 1794 - DNA, 21 bp, synthetic construct
  source 1..21: mol_type = other DNA; mol_type = other DNA
ttgtccaaagcgaatcagaat

SEQ ID NO: 1795 - DNA, 21 bp, synthetic construct
  source 1..21: mol_type = other DNA; mol_type = other DNA
gaggtgtccacgaatggggtg

SEQ ID NO: 1796 - DNA, 21 bp, synthetic construct
  source 1..21: mol_type = other DNA; mol_type = other DNA
ttggcgaaagtggggccgaat

SEQ ID NO: 1797 - DNA, 21 bp, synthetic construct
  source 1..21: mol_type = other DNA; mol_type = other DNA
tcacgcgacaccaacggccgc

SEQ ID NO: 1798 - DNA, 21 bp, synthetic construct
  source 1..21: mol_type = other DNA; mol_type = other DNA
tattccaaagggggggtgaat

SEQ ID NO: 1799 - DNA, 21 bp, synthetic construct
  source 1..21: mol_type = other DNA; mol_type = other DNA
tacgccaagctgaacgtaaac

SEQ ID NO: 1800 - DNA, 21 bp, synthetic construct
  source 1..21: mol_type = other DNA; mol_type = other DNA
acgtattccggggattccgcg

SEQ ID NO: 1801 - DNA, 21 bp, synthetic construct
  source 1..21: mol_type = other DNA; mol_type = other DNA
ctgtcacgctacaacgacaac

SEQ ID NO: 1802 - DNA, 21 bp, synthetic construct
  source 1..21: mol_type = other DNA; mol_type = other DNA
ccgaatgggaggtccgcgtat

SEQ ID NO: 1803 - DNA, 21 bp, synthetic construct
  source 1..21: mol_type = other DNA; mol_type = other DNA
tattccagggagaatttcaat

SEQ ID NO: 1804 - DNA, 21 bp, synthetic construct
  source 1..21: mol_type = other DNA; mol_type = other DNA
gggtggaggggggagccgtcc

SEQ ID NO: 1805 - DNA, 21 bp, synthetic construct
  source 1..21: mol_type = other DNA
tatgcgaaatccaatgcgaat

SEQ ID NO: 1806 - DNA, 21 bp, synthetic construct
  source 1..21: mol_type = other DNA
ctgtcacgctttaacgacaac

SEQ ID NO: 1807 - DNA, 21 bp, synthetic construct
  source 1..21: mol_type = other DNA
cgcggcgaccgcacctttccc

SEQ ID NO: 1808 - DNA, 21 bp, synthetic construct
  source 1..21: mol_type = other DNA; mol_type = other DNA
gcgtattccacgaatgggata

SEQ ID NO: 1809 - DNA, 21 bp, synthetic construct
  source 1..21: mol_type = other DNA; mol_type = other DNA
tcatcaggcgcctcaacctgg

SEQ ID NO: 1810 - DNA, 21 bp, synthetic construct
  source 1..21: mol_type = other DNA; mol_type = other DNA
tatgcgaaacagaatgcgaat

SEQ ID NO: 1811 - DNA, 21 bp, synthetic construct
  source 1..21: mol_type = other DNA; mol_type = other DNA
gatgggaatgggtcccactgg

SEQ ID NO: 1812 - DNA, 21 bp, synthetic construct
  source 1..21: mol_type = other DNA; mol_type = other DNA
ttttcacgcaacggcatgaac

SEQ ID NO: 1813 - DNA, 21 bp, synthetic construct
  source 1..21: mol_type = other DNA; mol_type = other DNA
gcggattccacgaatgggata

SEQ ID NO: 1814 - DNA, 21 bp, synthetic construct
  source 1..21: mol_type = other DNA; mol_type = other DNA
gggacgggggcgaatccgtgg

SEQ ID NO: 1815 - DNA, 21 bp, synthetic construct
  source 1..21: mol_type = other DNA; mol_type = other DNA
acgaaaaatgggaattccgcg

SEQ ID NO: 1816 - DNA, 21 bp, synthetic construct
  source 1..21: mol_type = other DNA; mol_type = other DNA
ttctccaaagcgggggataat

SEQ ID NO: 1817 - DNA, 21 bp, synthetic construct
  source 1..21: mol_type = other DNA; mol_type = other DNA
gggcagaaagggataccgtat

SEQ ID NO: 1818 - DNA, 21 bp, synthetic construct
  source 1..21: mol_type = other DNA; mol_type = other DNA
gccacctcatcaaacggcgta

SEQ ID NO: 1819 - DNA, 21 bp, synthetic construct
  source 1..21: mol_type = other DNA; mol_type = other DNA
aggccggatacggtgcagtgg

SEQ ID NO: 1820 - DNA, 21 bp, synthetic construct
  source 1..21: mol_type = other DNA; mol_type = other DNA
ccggattccacgaatggggtg

SEQ ID NO: 1821 - DNA, 21 bp, synthetic construct
  source 1..21: mol_type = other DNA; mol_type = other DNA
ttggcgaggataggggagaat

SEQ ID NO: 1822 - DNA, 21 bp, synthetic construct
  source 1..21: mol_type = other DNA; mol_type = other DNA
ttggattcctccaatggggtg

SEQ ID NO: 1823 - DNA, 21 bp, synthetic construct
  source 1..21: mol_type = other DNA; mol_type = other DNA
ggctcatcaaccaacggcatc

SEQ ID NO: 1824 - DNA, 21 bp, synthetic construct
  source 1..21: mol_type = other DNA; mol_type = other DNA
tatgcgaaagggggggcgggg

SEQ ID NO: 1825 - DNA, 21 bp, synthetic construct
  source 1..21: mol_type = other DNA; mol_type = other DNA
ttctccaggtccaatgataat

SEQ ID NO: 1826 - DNA, 21 bp, synthetic construct
  source 1..21: mol_type = other DNA; mol_type = other DNA
tatgcgaaagcgggggagaat

SEQ ID NO: 1827 - DNA, 21 bp, synthetic construct
  source 1..21: mol_type = other DNA; mol_type = other DNA
tatgcgagggatgggtggaat

SEQ ID NO: 1828 - DNA, 21 bp, synthetic construct
  source 1..21: mol_type = other DNA; mol_type = other DNA
tactcaaaggtaggcggcgac

SEQ ID NO: 1829 - DNA, 21 bp, synthetic construct
  source 1..21: mol_type = other DNA; mol_type = other DNA
aatgataggaaaacgggggag

SEQ ID NO: 1830 - DNA, 21 bp, synthetic construct
  source 1..21: mol_type = other DNA; mol_type = other DNA
gccccctcaacccatacctgg

SEQ ID NO: 1831 - DNA, 21 bp, synthetic construct
  source 1..21: mol_type = other DNA; mol_type = other DNA
aacgtatcaaccaacggcatc

SEQ ID NO: 1832 - DNA, 21 bp, synthetic construct
  source 1..21: mol_type = other DNA; mol_type = other DNA
ccgacgtcctccaatggggtg

SEQ ID NO: 1833 - DNA, 21 bp, synthetic construct
  source 1..21: mol_type = other DNA; mol_type = other DNA
ttcgtgtcctccaatggggtg

SEQ ID NO: 1834 - DNA, 21 bp, synthetic construct
  source 1..21: mol_type = other DNA; mol_type = other DNA
ttttcaaagatgaacgacaac

SEQ ID NO: 1835 - DNA, 21 bp, synthetic construct
  source 1..21: mol_type = other DNA; mol_type = other DNA
cagtccgggtcctccccgtat

SEQ ID NO: 1836 - DNA, 21 bp, synthetic construct
  source 1..21: mol_type = other DNA; mol_type = other DNA
ttggcgaaagggggggagaat

SEQ ID NO: 1837 - DNA, 21 bp, synthetic construct
  source 1..21: mol_type = other DNA; mol_type = other DNA
ttcgcgagggggggggataat

SEQ ID NO: 1838 - DNA, 21 bp, synthetic construct
  source 1..21: mol_type = other DNA; mol_type = other DNA
ctggcccgcgaaggccccaac

SEQ ID NO: 1839 - DNA, 21 bp, synthetic construct
  source 1..21: mol_type = other DNA; mol_type = other DNA
gcctcaggcaactcaatgtgg

SEQ ID NO: 1840 - DNA, 21 bp, synthetic construct
  source 1..21: mol_type = other DNA; mol_type = other DNA
ggccatgccgaccaaaagtgg

SEQ ID NO: 1841 - DNA, 21 bp, synthetic construct
  source 1..21: mol_type = other DNA; mol_type = other DNA
atagattccgtgaatgggagg

SEQ ID NO: 1842 - DNA, 21 bp, synthetic construct
  source 1..21: mol_type = other DNA; mol_type = other DNA
ttggcgaaagtggggcacaat

SEQ ID NO: 1843 - DNA, 21 bp, synthetic construct
  source 1..21: mol_type = other DNA; mol_type = other DNA
ttctccaggtataatgagaat

SEQ ID NO: 1844 - DNA, 21 bp, synthetic construct
  source 1..21: mol_type = other DNA; mol_type = other DNA
tactcacgccatggctacaac

SEQ ID NO: 1845 - DNA, 21 bp, synthetic construct
  source 1..21: mol_type = other DNA; mol_type = other DNA
tttgactcaaccaacggccgc

SEQ ID NO: 1846 - DNA, 21 bp, synthetic construct
  source 1..21: mol_type = other DNA; mol_type = other DNA
ggcggctcatcaaccgtatgg

SEQ ID NO: 1847 - DNA, 21 bp, synthetic construct
  source 1..21: mol_type = other DNA; mol_type = other DNA
tacctgtcaaccaacggcatc

SEQ ID NO: 1848 - DNA, 21 bp, synthetic construct
  source 1..21: mol_type = other DNA; mol_type = other DNA
ttctccaggcagaatgagaat

SEQ ID NO: 1849 - DNA, 21 bp, synthetic construct
  source 1..21: mol_type = other DNA; mol_type = other DNA
tatgcgaggccgaatttcaat

SEQ ID NO: 1850 - DNA, 21 bp, synthetic construct
  source 1..21: mol_type = other DNA; mol_type = other DNA
tactcaaagatcaacctgaac

SEQ ID NO: 1851 - DNA, 21 bp, synthetic construct
  source 1..21: mol_type = other DNA; mol_type = other DNA
tatgcgaaagggggggagaat

SEQ ID NO: 1852 - DNA, 21 bp, synthetic construct
  source 1..21: mol_type = other DNA; mol_type = other DNA
ttggcgagggcgggggagaat

SEQ ID NO: 1853 - DNA, 21 bp, synthetic construct
  source 1..21: mol_type = other DNA; mol_type = other DNA
gtgacggatgggatgaggtat

SEQ ID NO: 1854 - DNA, 21 bp, synthetic construct
  source 1..21: mol_type = other DNA; mol_type = other DNA
caatcatcatcaaacggcgta

SEQ ID NO: 1855 - DNA, 21 bp, synthetic construct
  source 1..21: mol_type = other DNA; mol_type = other DNA
gacggcggctcagcctcatgg

SEQ ID NO: 1856 - DNA, 21 bp, synthetic construct
  source 1..21: mol_type = other DNA; mol_type = other DNA
ctggccaagatcggcatcaac

SEQ ID NO: 1857 - DNA, 21 bp, synthetic construct
  source 1..21: mol_type = other DNA; mol_type = other DNA
cagcagtcctccaatggggtg

SEQ ID NO: 1858 - DNA, 21 bp, synthetic construct
  source 1..21: mol_type = other DNA; mol_type = other DNA
gggaatgggaaatcctcctat

SEQ ID NO: 1859 - DNA, 21 bp, synthetic construct
  source 1..21: mol_type = other DNA; mol_type = other DNA
ttggcgaaagtggggataaat

SEQ ID NO: 1860 - DNA, 21 bp, synthetic construct
  source 1..21: mol_type = other DNA; mol_type = other DNA
ggcgtacccggcaccatgttt

SEQ ID NO: 1861 - DNA, 21 bp, synthetic construct
  source 1..21: mol_type = other DNA; mol_type = other DNA
ttgtccaggtcctcccaggat

SEQ ID NO: 1862 - DNA, 21 bp, synthetic construct
  source 1..21: mol_type = other DNA; mol_type = other DNA
tactcaaagatcaacgaaaac

SEQ ID NO: 1863 - DNA, 21 bp, synthetic construct
  source 1..21: mol_type = other DNA; mol_type = other DNA
ggctactcaaccaacggccgc

SEQ ID NO: 1864 - DNA, 21 bp, synthetic construct
  source 1..21: mol_type = other DNA; mol_type = other DNA
atccgctcaggctcagccggc

SEQ ID NO: 1865 - DNA, 21 bp, synthetic construct
  source 1..21: mol_type = other DNA; mol_type = other DNA
tatgcgaggcacggggagaat

SEQ ID NO: 1866 - DNA, 21 bp, synthetic construct
  source 1..21: mol_type = other DNA; mol_type = other DNA
ttgtccaggtccaatgagaat

SEQ ID NO: 1867 - DNA, 21 bp, synthetic construct
  source 1..21: mol_type = other DNA; mol_type = other DNA
acggatgcgcagtccaggtat

SEQ ID NO: 1868 - DNA, 21 bp, synthetic construct
  source 1..21: mol_type = other DNA; mol_type = other DNA
tactcaaagaacaacaccaac

SEQ ID NO: 1869 - DNA, 21 bp, synthetic construct
  source 1..21: mol_type = other DNA; mol_type = other DNA
aaaaatggggagtccaattgg

SEQ ID NO: 1870 - DNA, 21 bp, synthetic construct
  source 1..21: mol_type = other DNA; mol_type = other DNA
ttggcgaggataggggataat

SEQ ID NO: 1871 - DNA, 21 bp, synthetic construct
  source 1..21: mol_type = other DNA; mol_type = other DNA
ggccattcaaccaacggcgta

SEQ ID NO: 1872 - DNA, 21 bp, synthetic construct
  source 1..21: mol_type = other DNA; mol_type = other DNA
tactcaaagatgaacggcaac

SEQ ID NO: 1873 - DNA, 21 bp, synthetic construct
  source 1..21: mol_type = other DNA; mol_type = other DNA
ttttcaaagtcaggcctgaac

SEQ ID NO: 1874 - DNA, 21 bp, synthetic construct
  source 1..21: mol_type = other DNA; mol_type = other DNA
cgcgaaaccaacgtaggctgg

SEQ ID NO: 1875 - DNA, 21 bp, synthetic construct
  source 1..21: mol_type = other DNA; mol_type = other DNA
ggggcgtccacgaatgggagg

SEQ ID NO: 1876 - DNA, 21 bp, synthetic construct
  source 1..21: mol_type = other DNA; mol_type = other DNA
tactcaaagaccggctgcaac

SEQ ID NO: 1877 - DNA, 21 bp, synthetic construct
  source 1..21: mol_type = other DNA; mol_type = other DNA
tttgcccgcggcggcgaaaac

SEQ ID NO: 1878 - DNA, 21 bp, synthetic construct
  source 1..21: mol_type = other DNA; mol_type = other DNA
tacgccaagctgggcatcaac

SEQ ID NO: 1879 - DNA, 21 bp, synthetic construct
  source 1..21: mol_type = other DNA; mol_type = other DNA
gactcaaccggcatgaagtac

SEQ ID NO: 1880 - DNA, 21 bp, synthetic construct
  source 1..21: mol_type = other DNA; mol_type = other DNA
atgaattcctccaatggggtg

SEQ ID NO: 1881 - DNA, 21 bp, synthetic construct
  source 1..21: mol_type = other DNA; mol_type = other DNA
ttctccaaaacggggatgaat

SEQ ID NO: 1882 - DNA, 21 bp, synthetic construct
  source 1..21: mol_type = other DNA; mol_type = other DNA
ttcgcgaggaatggggagaat

SEQ ID NO: 1883 - DNA, 21 bp, synthetic construct
  source 1..21: mol_type = other DNA; mol_type = other DNA
acgtggacgggggtggggccg

SEQ ID NO: 1884 - DNA, 21 bp, synthetic construct
  source 1..21: mol_type = other DNA; mol_type = other DNA
tcacatggcgcctcaacctgg

SEQ ID NO: 1885 - DNA, 21 bp, synthetic construct
  source 1..21: mol_type = other DNA; mol_type = other DNA
tccatatcctccaatggggtg

SEQ ID NO: 1886 - DNA, 21 bp, synthetic construct
  source 1..21: mol_type = other DNA; mol_type = other DNA
aagaacgactcaatcctgtgg

SEQ ID NO: 1887 - DNA, 21 bp, synthetic construct
  source 1..21: mol_type = other DNA; mol_type = other DNA
tatgcgaaagaggggtggaat

SEQ ID NO: 1888 - DNA, 21 bp, synthetic construct
  source 1..21: mol_type = other DNA; mol_type = other DNA
aagtcatcaaccaacggcgta

SEQ ID NO: 1889 - DNA, 21 bp, synthetic construct
  source 1..21: mol_type = other DNA; mol_type = other DNA
ttcgcgaaaacggggcagaat

SEQ ID NO: 1890 - DNA, 21 bp, synthetic construct
  source 1..21: mol_type = other DNA; mol_type = other DNA
tattccaaagaggggccgaat

SEQ ID NO: 1891 - DNA, 21 bp, synthetic construct
  source 1..21: mol_type = other DNA; mol_type = other DNA
ggctggtcaaccaacggcatc

SEQ ID NO: 1892 - DNA, 21 bp, synthetic construct
  source 1..21: mol_type = other DNA; mol_type = other DNA
aacccctcatcatcagcctgg

SEQ ID NO: 1893 - DNA, 21 bp, synthetic construct
  source 1..21: mol_type = other DNA; mol_type = other DNA
gcgttgtccacgaatggggtg

SEQ ID NO: 1894 - DNA, 21 bp, synthetic construct
  source 1..21: mol_type = other DNA; mol_type = other DNA
tatttcgcgggggtgccggcg

SEQ ID NO: 1895 - DNA, 21 bp, synthetic construct
  source 1..21: mol_type = other DNA; mol_type = other DNA
tatcacgcgtccacgccgaat

SEQ ID NO: 1896 - DNA, 21 bp, synthetic construct
  source 1..21: mol_type = other DNA; mol_type = other DNA
tactcaaagaacaacgacaac

SEQ ID NO: 1897 - DNA, 21 bp, synthetic construct
  source 1..21: mol_type = other DNA; mol_type = other DNA
ttttactcatcaaacggcgta

SEQ ID NO: 1898 - DNA, 21 bp, synthetic construct
  source 1..21: mol_type = other DNA; mol_type = other DNA
tatgcgaaagaggggccgaat

SEQ ID NO: 1899 - DNA, 21 bp, synthetic construct
  source 1..21: mol_type = other DNA; mol_type = other DNA
tatttctccgggtccatgacg

SEQ ID NO: 1900 - DNA, 21 bp, synthetic construct
  source 1..21: mol_type = other DNA; mol_type = other DNA
acggaggggcagtccaaatgg

SEQ ID NO: 1901 - DNA, 21 bp, synthetic construct
  source 1..21: mol_type = other DNA; mol_type = other DNA
ctggccaagatcggcctgaac

SEQ ID NO: 1902 - DNA, 21 bp, synthetic construct
  source 1..21: mol_type = other DNA; mol_type = other DNA
ttgtccaaacagaatgcgaat

SEQ ID NO: 1903 - DNA, 21 bp, synthetic construct
  source 1..21: mol_type = other DNA; mol_type = other DNA
tttgccaagaacggcatgaac

SEQ ID NO: 1904 - DNA, 21 bp, synthetic construct
  source 1..21: mol_type = other DNA; mol_type = other DNA
gaatcatcaaccaacggcgta

SEQ ID NO: 1905 - DNA, 21 bp, synthetic construct
  source 1..21: mol_type = other DNA; mol_type = other DNA
tccaatgcgacgacggggtgg

SEQ ID NO: 1906 - DNA, 21 bp, synthetic construct
  source 1..21: mol_type = other DNA; mol_type = other DNA
ctgcgcaacggcgtaaacgcc

SEQ ID NO: 1907 - DNA, 21 bp, synthetic construct
  source 1..21: mol_type = other DNA; mol_type = other DNA
ttgtccaggacgaatgagaat

SEQ ID NO: 1908 - DNA, 21 bp, synthetic construct
  source 1..21: mol_type = other DNA; mol_type = other DNA
tggatgtcctccaatggggtg

SEQ ID NO: 1909 - DNA, 21 bp, synthetic construct
  source 1..21: mol_type = other DNA; mol_type = other DNA
ccgcactcctccaatggggtg

SEQ ID NO: 1910 - DNA, 21 bp, synthetic construct
  source 1..21: mol_type = other DNA; mol_type = other DNA
ttctccagggataattataat

SEQ ID NO: 1911 - DNA, 21 bp, synthetic construct
  source 1..21: mol_type = other DNA; mol_type = other DNA
ccgtattccacgaatgggata

SEQ ID NO: 1912 - DNA, 21 bp, synthetic construct
  source 1..21: mol_type = other DNA; mol_type = other DNA
tacgccaagggcggcggcaac

SEQ ID NO: 1913 - DNA, 21 bp, synthetic construct
  source 1..21: mol_type = other DNA; mol_type = other DNA
ttggcgttgagggggatggat

SEQ ID NO: 1914 - DNA, 21 bp, synthetic construct
  source 1..21: mol_type = other DNA; mol_type = other DNA
ctgtcaaaggccaacaacaac

SEQ ID NO: 1915 - DNA, 21 bp, synthetic construct
  source 1..21: mol_type = other DNA; mol_type = other DNA
tactcaaagatcaacatgaac

SEQ ID NO: 1916 - DNA, 21 bp, synthetic construct
  source 1..21: mol_type = other DNA; mol_type = other DNA
atggggtccacgaatgggata

SEQ ID NO: 1917 - DNA, 21 bp, synthetic construct
  source 1..21: mol_type = other DNA; mol_type = other DNA
caaacctcaaccaacggccgc

SEQ ID NO: 1918 - DNA, 21 bp, synthetic construct
  source 1..21: mol_type = other DNA; mol_type = other DNA
tatgcgaggccggggttcaat

SEQ ID NO: 1919 - DNA, 21 bp, synthetic construct
  source 1..21: mol_type = other DNA; mol_type = other DNA
gtacccccctaccatcattca

SEQ ID NO: 1920 - DNA, 21 bp, synthetic construct
  source 1..21: mol_type = other DNA; mol_type = other DNA
tatgcgaaattgaatacgaat

SEQ ID NO: 1921 - DNA, 21 bp, synthetic construct
  source 1..21: mol_type = other DNA; mol_type = other DNA
aaagattcccacgtggcgtgg

SEQ ID NO: 1922 - DNA, 21 bp, synthetic construct
  source 1..21: mol_type = other DNA; mol_type = other DNA
atgtattccacgaatgggata

SEQ ID NO: 1923 - DNA, 21 bp, synthetic construct
  source 1..21: mol_type = other DNA; mol_type = other DNA
ggcggcgccggcgtaggctgg

SEQ ID NO: 1924 - DNA, 21 bp, synthetic construct
  source 1..21: mol_type = other DNA; mol_type = other DNA
acgggggggacgtccgcgtat

SEQ ID NO: 1925 - DNA, 21 bp, synthetic construct
  source 1..21: mol_type = other DNA; mol_type = other DNA
ttctccaggtccggggataat

SEQ ID NO: 1926 - DNA, 21 bp, synthetic construct
  source 1..21: mol_type = other DNA; mol_type = other DNA
aaaaggtccggggagaatgcg

SEQ ID NO: 1927 - DNA, 21 bp, synthetic construct
  source 1..21: mol_type = other DNA; mol_type = other DNA
ttgaatgggagggggtatgat

SEQ ID NO: 1928 - DNA, 21 bp, synthetic construct
  source 1..21: mol_type = other DNA; mol_type = other DNA
gcggggtccgggaatgcgtgg

SEQ ID NO: 1929 - DNA, 21 bp, synthetic construct
  source 1..21: mol_type = other DNA; mol_type = other DNA
ccgttctccacgaatgggata

SEQ ID NO: 1930 - DNA, 21 bp, synthetic construct
  source 1..21: mol_type = other DNA; mol_type = other DNA
ctggccaagatcggcgtaaac

SEQ ID NO: 1931 - DNA, 21 bp, synthetic construct
  source 1..21: mol_type = other DNA; mol_type = other DNA
ttggcgaggcacggggagaat

SEQ ID NO: 1932 - DNA, 21 bp, synthetic construct
  source 1..21: mol_type = other DNA; mol_type = other DNA
atagggttgtccgggttcgat

SEQ ID NO: 1933 - DNA, 21 bp, synthetic construct
  source 1..21: mol_type = other DNA; mol_type = other DNA
ttgtccaaagcgaatgataat

SEQ ID NO: 1934 - DNA, 21 bp, synthetic construct
  source 1..21: mol_type = other DNA; mol_type = other DNA
ctgaagctgaaccccaactca

SEQ ID NO: 1935 - DNA, 21 bp, synthetic construct
  source 1..21: mol_type = other DNA; mol_type = other DNA
ttggcgagggtgggggagaat

SEQ ID NO: 1936 - DNA, 21 bp, synthetic construct
  source 1..21: mol_type = other DNA; mol_type = other DNA
ttcgcgaggccggggccgaat

SEQ ID NO: 1937 - DNA, 21 bp, synthetic construct
  source 1..21: mol_type = other DNA; mol_type = other DNA
tacgccaagcaaggcggcaac

SEQ ID NO: 1938 - DNA, 21 bp, synthetic construct
  source 1..21: mol_type = other DNA; mol_type = other DNA
tatgcgaaagatgggtggaat

SEQ ID NO: 1939 - DNA, 21 bp, synthetic construct
  source 1..21: mol_type = other DNA; mol_type = other DNA
tactactcaggccatgtaacc

SEQ ID NO: 1940 - DNA, 21 bp, synthetic construct
  source 1..21: mol_type = other DNA; mol_type = other DNA
atggaatcaaacgtacgctgg

SEQ ID NO: 1941 - DNA, 21 bp, synthetic construct
  source 1..21: mol_type = other DNA; mol_type = other DNA
tacgccaaggtaggccaaaac

SEQ ID NO: 1942 - DNA, 21 bp, synthetic construct
  source 1..21: mol_type = other DNA; mol_type = other DNA
ttggcgaaacacgggatgaat

SEQ ID NO: 1943 - DNA, 21 bp, synthetic construct
  source 1..21: mol_type = other DNA; mol_type = other DNA
gggacgtccacgaatggggtg

SEQ ID NO: 1944 - DNA, 21 bp, synthetic construct
  source 1..21: mol_type = other DNA; mol_type = other DNA
aataatagggggagggatgcg

SEQ ID NO: 1945 - DNA, 21 bp, synthetic construct
  source 1..21: mol_type = other DNA; mol_type = other DNA
tccacgtccacggatgggagg

SEQ ID NO: 1946 - DNA, 21 bp, synthetic construct
  source 1..21: mol_type = other DNA; mol_type = other DNA
tatgcgaaacacggggataat

SEQ ID NO: 1947 - DNA, 21 bp, synthetic construct
  source 1..21: mol_type = other DNA; mol_type = other DNA
atgtcctcctccaatggggtg

SEQ ID NO: 1948 - DNA, 21 bp, synthetic construct
  source 1..21: mol_type = other DNA; mol_type = other DNA
gagttctccacgaatgggagg

SEQ ID NO: 1949 - DNA, 21 bp, synthetic construct
  source 1..21: mol_type = other DNA; mol_type = other DNA
tccgtgtcctccaatggggtg

SEQ ID NO: 1950 - DNA, 21 bp, synthetic construct
  source 1..21: mol_type = other DNA; mol_type = other DNA
ttggcgaaaacgggggggaat

SEQ ID NO: 1951 - DNA, 21 bp, synthetic construct
  source 1..21: mol_type = other DNA; mol_type = other DNA
ccggattccacgaatgggata

SEQ ID NO: 1952 - DNA, 21 bp, synthetic construct
  source 1..21: mol_type = other DNA; mol_type = other DNA
ttcgcgaaaaatggggtgaat

SEQ ID NO: 1953 - DNA, 21 bp, synthetic construct
  source 1..21: mol_type = other DNA; mol_type = other DNA
ttggcgaggccgggggtgaat

SEQ ID NO: 1954 - DNA, 21 bp, synthetic construct
  source 1..21: mol_type = other DNA; mol_type = other DNA
gggtccgtgcaggtgaaatat

SEQ ID NO: 1955 - DNA, 21 bp, synthetic construct
  source 1..21: mol_type = other DNA; mol_type = other DNA
tattccagggaggggtggaat

SEQ ID NO: 1956 - DNA, 21 bp, synthetic construct
  source 1..21: mol_type = other DNA; mol_type = other DNA
gggaatacggtggtgtcctgg

SEQ ID NO: 1957 - DNA, 21 bp, synthetic construct
  source 1..21: mol_type = other DNA; mol_type = other DNA
gagtattccacgaatgggagg

SEQ ID NO: 1958 - DNA, 21 bp, synthetic construct
  source 1..21: mol_type = other DNA; mol_type = other DNA
ttgtccaggttcaatgagaat

SEQ ID NO: 1959 - DNA, 21 bp, synthetic construct
  source 1..21: mol_type = other DNA; mol_type = other DNA
tactggaacaacaacgaatca

SEQ ID NO: 1960 - DNA, 21 bp, synthetic construct
  source 1..21: mol_type = other DNA; mol_type = other DNA
ttttcaaagtcaggcatgaac

SEQ ID NO: 1961 - DNA, 21 bp, synthetic construct
  source 1..21: mol_type = other DNA; mol_type = other DNA
ttggcgagggaggggtataat

SEQ ID NO: 1962 - DNA, 21 bp, synthetic construct
  source 1..21: mol_type = other DNA; mol_type = other DNA
ctggaatcaaccaacggcgta

SEQ ID NO: 1963 - DNA, 21 bp, synthetic construct
  source 1..21: mol_type = other DNA; mol_type = other DNA
tactcacgccccggcatcaac

SEQ ID NO: 1964 - DNA, 21 bp, synthetic construct
  source 1..21: mol_type = other DNA; mol_type = other DNA
ttctccaggataaatgagaat

SEQ ID NO: 1965 - DNA, 21 bp, synthetic construct
  source 1..21: mol_type = other DNA; mol_type = other DNA
aacatctcaaccaacggccgc

SEQ ID NO: 1966 - DNA, 21 bp, synthetic construct
  source 1..21: mol_type = other DNA; mol_type = other DNA
ttggtgaggtccgtgaatgag

SEQ ID NO: 1967 - DNA, 21 bp, synthetic construct
  source 1..21: mol_type = other DNA; mol_type = other DNA
tactcacgctttggctcaaac

SEQ ID NO: 1968 - DNA, 21 bp, synthetic construct
  source 1..21: mol_type = other DNA; mol_type = other DNA
ttctccaggttggggtataat

SEQ ID NO: 1969 - DNA, 21 bp, synthetic construct
  source 1..21: mol_type = other DNA; mol_type = other DNA
tattccaggtatgggatgaat

SEQ ID NO: 1970 - DNA, 21 bp, synthetic construct
  source 1..21: mol_type = other DNA; mol_type = other DNA
tactcaaagtacaacgaaaac

SEQ ID NO: 1971 - DNA, 21 bp, synthetic construct
  source 1..21: mol_type = other DNA; mol_type = other DNA
ttcttctccggggagacgttg

SEQ ID NO: 1972 - DNA, 21 bp, synthetic construct
  source 1..21: mol_type = other DNA; mol_type = other DNA
ttctccaaaatggggttgaat

SEQ ID NO: 1973 - DNA, 21 bp, synthetic construct
  source 1..21: mol_type = other DNA; mol_type = other DNA
gataatcacgggaataggtat

SEQ ID NO: 1974 - DNA, 21 bp, synthetic construct
  source 1..21: mol_type = other DNA; mol_type = other DNA
tacgccaagatgggcgacaac

SEQ ID NO: 1975 - DNA, 21 bp, synthetic construct
  source 1..21: mol_type = other DNA; mol_type = other DNA
gtacccaacaagggcgacttt

SEQ ID NO: 1976 - DNA, 21 bp, synthetic construct
  source 1..21: mol_type = other DNA; mol_type = other DNA
tcaaccggctcatcaaactgg

SEQ ID NO: 1977 - DNA, 21 bp, synthetic construct
  source 1..21: mol_type = other DNA; mol_type = other DNA
tactcacgcggcggcgaaaac

SEQ ID NO: 1978 - DNA, 21 bp, synthetic construct
  source 1..21: mol_type = other DNA; mol_type = other DNA
tactcaaagaacggcgaaaac

SEQ ID NO: 1979 - DNA, 21 bp, synthetic construct
  source 1..21: mol_type = other DNA; mol_type = other DNA
ttctccaggcagggggataat

SEQ ID NO: 1980 - DNA, 21 bp, synthetic construct
  source 1..21: mol_type = other DNA; mol_type = other DNA
ttggtgtcctccaatggggtg

SEQ ID NO: 1981 - DNA, 21 bp, synthetic construct
  source 1..21: mol_type = other DNA; mol_type = other DNA
aactcatcaggccgctcagcc

SEQ ID NO: 1982 - DNA, 21 bp, synthetic construct
  source 1..21: mol_type = other DNA; mol_type = other DNA
aatccgaaagggtccggggag

SEQ ID NO: 1983 - DNA, 21 bp, synthetic construct
  source 1..21: mol_type = other DNA; mol_type = other DNA
ttcgcgaaagggggggtgaat

SEQ ID NO: 1984 - DNA, 21 bp, synthetic construct
  source 1..21: mol_type = other DNA; mol_type = other DNA
tacgccaagctgggcgaaaac

SEQ ID NO: 1985 - DNA, 21 bp, synthetic construct
  source 1..21: mol_type = other DNA; mol_type = other DNA
tactcaaagcatggcgaaaac

SEQ ID NO: 1986 - DNA, 21 bp, synthetic construct
  source 1..21: mol_type = other DNA; mol_type = other DNA
aatgagaaaaggatgtatgag

SEQ ID NO: 1987 - DNA, 21 bp, synthetic construct
  source 1..21: mol_type = other DNA; mol_type = other DNA
ttggcgaaagaggggaggaat

SEQ ID NO: 1988 - DNA, 21 bp, synthetic construct
  source 1..21: mol_type = other DNA; mol_type = other DNA
tatgagtatgggtatgggaat

SEQ ID NO: 1989 - DNA, 21 bp, synthetic construct
  source 1..21: mol_type = other DNA; mol_type = other DNA
ttggcgaggtatggggagaat

SEQ ID NO: 1990 - DNA, 21 bp, synthetic construct
  source 1..21: mol_type = other DNA; mol_type = other DNA
ttcacgaggttggatgatagg

SEQ ID NO: 1991 - DNA, 21 bp, synthetic construct
  source 1..21: mol_type = other DNA; mol_type = other DNA
tataataggttggggtatgat

SEQ ID NO: 1992 - DNA, 21 bp, synthetic construct
  source 1..21: mol_type = other DNA; mol_type = other DNA
acgagggagggggatgtgccg

SEQ ID NO: 1993 - DNA, 21 bp, synthetic construct
  source 1..21: mol_type = other DNA; mol_type = other DNA
gaggcgtccacgaatggggtg

SEQ ID NO: 1994 - DNA, 21 bp, synthetic construct
  source 1..21: mol_type = other DNA; mol_type = other DNA
cacaatgcgatgtcctcctat

SEQ ID NO: 1995 - DNA, 21 bp, synthetic construct
  source 1..21: mol_type = other DNA; mol_type = other DNA
ttgcacaaagtgttgtatgat

SEQ ID NO: 1996 - DNA, 21 bp, synthetic construct
  source 1..21: mol_type = other DNA; mol_type = other DNA
ttttcaaaggccaacaacaac

SEQ ID NO: 1997 - DNA, 21 bp, synthetic construct
  source 1..21: mol_type = other DNA; mol_type = other DNA
atgtccgagacgtccgggtgg

SEQ ID NO: 1998 - DNA, 21 bp, synthetic construct
  source 1..21: mol_type = other DNA; mol_type = other DNA
acgtggaatgggcagaatgcg

SEQ ID NO: 1999 - DNA, 21 bp, synthetic construct
  source 1..21: mol_type = other DNA; mol_type = other DNA
ctggccaagcatggctcaaac

SEQ ID NO: 2000 - DNA, 21 bp, synthetic construct
  source 1..21: mol_type = other DNA; mol_type = other DNA
ccggggtcctccaatggggtg

SEQ ID NO: 2001 - DNA, 21 bp, synthetic construct
  source 1..21: mol_type = other DNA; mol_type = other DNA
ttctccaaaacgggggcgaat

SEQ ID NO: 2002 - DNA, 21 bp, synthetic construct
  source 1..21: mol_type = other DNA; mol_type = other DNA
aatgggatgaatgggagggat

SEQ ID NO: 2003 - DNA, 21 bp, synthetic construct
  source 1..21: mol_type = other DNA; mol_type = other DNA
gatgcgaggacggataggaat

SEQ ID NO: 2004 - DNA, 21 bp, synthetic construct
  source 1..21: mol_type = other DNA; mol_type = other DNA
tcatcatcatcaaacggcatg

SEQ ID NO: 2005 - DNA, 21 bp, synthetic construct
  source 1..21: mol_type = other DNA; mol_type = other DNA
cagcactcctccaatggggtg

SEQ ID NO: 2006 - DNA, 21 bp, synthetic construct
  source 1..21: mol_type = other DNA; mol_type = other DNA
ttctccaaaataggggataat

SEQ ID NO: 2007 - DNA, 21 bp, synthetic construct
  source 1..21: mol_type = other DNA; mol_type = other DNA
ttctccaaatccggggtgaat

SEQ ID NO: 2008 - DNA, 21 bp, synthetic construct
  source 1..21: mol_type = other DNA; mol_type = other DNA
gagacgtccacgaatgggata

SEQ ID NO: 2009 - DNA, 21 bp, synthetic construct
  source 1..21: mol_type = other DNA; mol_type = other DNA
gagtcctcctccaatggggtg

SEQ ID NO: 2010 - DNA, 21 bp, synthetic construct
  source 1..21: mol_type = other DNA; mol_type = other DNA
aataaatatgggatggatacg

SEQ ID NO: 2011 - DNA, 21 bp, synthetic construct
  source 1..21: mol_type = other DNA; mol_type = other DNA
tatgcgaaaataggggataat

SEQ ID NO: 2012 - DNA, 21 bp, synthetic construct
  source 1..21: mol_type = other DNA; mol_type = other DNA
tccaatgggaggaatccgtat

SEQ ID NO: 2013 - DNA, 21 bp, synthetic construct
  source 1..21: mol_type = other DNA; mol_type = other DNA
ctggccaagggcggcgacaac

SEQ ID NO: 2014 - DNA, 21 bp, synthetic construct
  source 1..21: mol_type = other DNA; mol_type = other DNA
acgccgtccacgaatgggagg

SEQ ID NO: 2015 - DNA, 21 bp, synthetic construct
  source 1..21: mol_type = other DNA; mol_type = other DNA
ggcgaaggcatccataagtgg

SEQ ID NO: 2016 - DNA, 21 bp, synthetic construct
  source 1..21: mol_type = other DNA; mol_type = other DNA
aatcacaggttggcggagaat

SEQ ID NO: 2017 - DNA, 21 bp, synthetic construct
  source 1..21: mol_type = other DNA; mol_type = other DNA
ctgtcacgcggcaacgacaac

SEQ ID NO: 2018 - DNA, 21 bp, synthetic construct
  source 1..21: mol_type = other DNA; mol_type = other DNA
tacgtacgcaccgacacctca

SEQ ID NO: 2019 - DNA, 21 bp, synthetic construct
  source 1..21: mol_type = other DNA; mol_type = other DNA
tacgccaagtcaaactcaaac

SEQ ID NO: 2020 - DNA, 21 bp, synthetic construct
  source 1..21: mol_type = other DNA; mol_type = other DNA
ttggcgagggggtccaatgat

SEQ ID NO: 2021 - DNA, 21 bp, synthetic construct
  source 1..21: mol_type = other DNA; mol_type = other DNA
ccgttctcctccaatggggtg

SEQ ID NO: 2022 - DNA, 21 bp, synthetic construct
  source 1..21: mol_type = other DNA; mol_type = other DNA
tattccagggatgggccgaat

SEQ ID NO: 2023 - DNA, 21 bp, synthetic construct
  source 1..21: mol_type = other DNA; mol_type = other DNA
ttggcgaaagggaatccgaat

SEQ ID NO: 2024 - DNA, 21 bp, synthetic construct
  source 1..21: mol_type = other DNA; mol_type = other DNA
tacgccaaggtaggcgtaaac

SEQ ID NO: 2025 - DNA, 21 bp, synthetic construct
  source 1..21: mol_type = other DNA; mol_type = other DNA
gactcatcaaccaacggccgc

SEQ ID NO: 2026 - DNA, 21 bp, synthetic construct
  source 1..21: mol_type = other DNA; mol_type = other DNA
gcgaaatcctccaatggggtg

SEQ ID NO: 2027 - DNA, 21 bp, synthetic construct
  source 1..21: mol_type = other DNA; mol_type = other DNA
gagaaagggtataatgtgtat

SEQ ID NO: 2028 - DNA, 21 bp, synthetic construct
  source 1..21: mol_type = other DNA; mol_type = other DNA
gaggcgccggatataaggtat

SEQ ID NO: 2029 - DNA, 21 bp, synthetic construct
  source 1..21: mol_type = other DNA; mol_type = other DNA
cattcagccacctcaaagtac

SEQ ID NO: 2030 - DNA, 21 bp, synthetic construct
  source 1..21: mol_type = other DNA; mol_type = other DNA
ctgtcacgcaacggcgaaaac

SEQ ID NO: 2031 - DNA, 21 bp, synthetic construct
  source 1..21: mol_type = other DNA; mol_type = other DNA
ttcgcgaaaacgggggataat

SEQ ID NO: 2032 - DNA, 21 bp, synthetic construct
  source 1..21: mol_type = other DNA; mol_type = other DNA
gggccgacggaggtgaggtat

SEQ ID NO: 2033 - DNA, 21 bp, synthetic construct
  source 1..21: mol_type = other DNA; mol_type = other DNA
ttggcgaaattggggcagaat

SEQ ID NO: 2034 - DNA, 21 bp, synthetic construct
  source 1..21: mol_type = other DNA; mol_type = other DNA
acgcagtccacgcacgggaat

SEQ ID NO: 2035 - DNA, 21 bp, synthetic construct
  source 1..21: mol_type = other DNA; mol_type = other DNA
aatgggtccacgaatggggtg

SEQ ID NO: 2036 - DNA, 21 bp, synthetic construct
  source 1..21: mol_type = other DNA; mol_type = other DNA
ctgtcacgccatggcgacaac

SEQ ID NO: 2037 - DNA, 21 bp, synthetic construct
  source 1..21: mol_type = other DNA; mol_type = other DNA
gaaggctcaaccaacggcgta

SEQ ID NO: 2038 - DNA, 21 bp, synthetic construct
  source 1..21: mol_type = other DNA; mol_type = other DNA
gaggaggcgagggggaggttg

SEQ ID NO: 2039 - DNA, 21 bp, synthetic construct
  source 1..21: mol_type = other DNA; mol_type = other DNA
ttctccaggcacaatgataat

SEQ ID NO: 2040 - DNA, 21 bp, synthetic construct
  source 1..21: mol_type = other DNA; mol_type = other DNA
aggcagtcctccaatggggag

SEQ ID NO: 2041 - DNA, 21 bp, synthetic construct
  source 1..21: mol_type = other DNA; mol_type = other DNA
aatgcgaggacggggcacgat

SEQ ID NO: 2042 - DNA, 21 bp, synthetic construct
  source 1..21: mol_type = other DNA; mol_type = other DNA
tattccagggaggggcacaat

SEQ ID NO: 2043 - DNA, 21 bp, synthetic construct
  source 1..21: mol_type = other DNA; mol_type = other DNA
acgtcctccacggtggggagg

SEQ ID NO: 2044 - DNA, 21 bp, synthetic construct
  source 1..21: mol_type = other DNA; mol_type = other DNA
tacgccaaggaaaactggaac

SEQ ID NO: 2045 - DNA, 21 bp, synthetic construct
  source 1..21: mol_type = other DNA; mol_type = other DNA
tccacgaatgggatgtcctat

SEQ ID NO: 2046 - DNA, 21 bp, synthetic construct
  source 1..21: mol_type = other DNA; mol_type = other DNA
cccaacgccggcgtatcatgg

SEQ ID NO: 2047 - DNA, 21 bp, synthetic construct
  source 1..21: mol_type = other DNA; mol_type = other DNA
gagaatgggaaagggatgaat

SEQ ID NO: 2048 - DNA, 21 bp, synthetic construct
  source 1..21: mol_type = other DNA; mol_type = other DNA
tacgccgccgcctcactgtac

SEQ ID NO: 2049 - DNA, 21 bp, synthetic construct
  source 1..21: mol_type = other DNA; mol_type = other DNA
ggcgtatcaggctcatcatgg

SEQ ID NO: 2050 - DNA, 21 bp, synthetic construct
  source 1..21: mol_type = other DNA; mol_type = other DNA
ctgtcaaagatgggccaaaac

SEQ ID NO: 2051 - DNA, 21 bp, synthetic construct
  source 1..21: mol_type = other DNA; mol_type = other DNA
aaggaatcaaccaacggcgta

SEQ ID NO: 2052 - DNA, 21 bp, synthetic construct
  source 1..21: mol_type = other DNA; mol_type = other DNA
aatatgtccacgaatggggtg

SEQ ID NO: 2053 - DNA, 21 bp, synthetic construct
  source 1..21: mol_type = other DNA; mol_type = other DNA
ttttcaaagtcaggcgccaac

SEQ ID NO: 2054 - DNA, 21 bp, synthetic construct
  source 1..21: mol_type = other DNA; mol_type = other DNA
tactcaaagaacaaccaaaac

SEQ ID NO: 2055 - DNA, 21 bp, synthetic construct
  source 1..21: mol_type = other DNA; mol_type = other DNA
tactcaaagaacaacgaaaac

SEQ ID NO: 2056 - DNA, 21 bp, synthetic construct
  source 1..21: mol_type = other DNA; mol_type = other DNA
tacgccaagctgaacatgaac

SEQ ID NO: 2057 - DNA, 21 bp, synthetic construct
  source 1..21: mol_type = other DNA; mol_type = other DNA
tccgggacgacggggtgggat

SEQ ID NO: 2058 - DNA, 21 bp, synthetic construct
  source 1..21: mol_type = other DNA; mol_type = other DNA
cagtattccacgaatggggtg

SEQ ID NO: 2059 - DNA, 21 bp, synthetic construct
  source 1..21: mol_type = other DNA; mol_type = other DNA
ttctccaaagcgaatgataat

SEQ ID NO: 2060 - DNA, 21 bp, synthetic construct
  source 1..21: mol_type = other DNA; mol_type = other DNA
tacgcccgccataaccccaac

SEQ ID NO: 2061 - DNA, 21 bp, synthetic construct
  source 1..21: mol_type = other DNA; mol_type = other DNA
tattccaggaggggggataat

SEQ ID NO: 2062 - DNA, 21 bp, synthetic construct
  source 1..21: mol_type = other DNA; mol_type = other DNA
ctgtcaaagatgaactcaaac

SEQ ID NO: 2063 - DNA, 21 bp, synthetic construct
  source 1..21: mol_type = other DNA; mol_type = other DNA
ttctccaggacgaatgataat

SEQ ID NO: 2064 - DNA, 21 bp, synthetic construct
  source 1..21: mol_type = other DNA; mol_type = other DNA
aatcacacggggaaaatggcg

SEQ ID NO: 2065 - DNA, 21 bp, synthetic construct
  source 1..21: mol_type = other DNA; mol_type = other DNA
gtaccctacaagggcgacttt

SEQ ID NO: 2066 - DNA, 21 bp, synthetic construct
  source 1..21: mol_type = other DNA; mol_type = other DNA
ctgttttcatcaaacggcgta

SEQ ID NO: 2067 - DNA, 21 bp, synthetic construct
  source 1..21: mol_type = other DNA; mol_type = other DNA
gtaaactcaaactcatcatgg

SEQ ID NO: 2068 - DNA, 21 bp, synthetic construct
  source 1..21: mol_type = other DNA; mol_type = other DNA
ccggtgtccacgaatgggagg

SEQ ID NO: 2069 - DNA, 21 bp, synthetic construct
  source 1..21: mol_type = other DNA; mol_type = other DNA
ctgcatgcctcaaccgtaaac

SEQ ID NO: 2070 - DNA, 21 bp, synthetic construct
  source 1..21: mol_type = other DNA; mol_type = other DNA
ttgtccaggaatggggataat

SEQ ID NO: 2071 - DNA, 21 bp, synthetic construct
  source 1..21: mol_type = other DNA; mol_type = other DNA
ttctccaggatggggttcaat

SEQ ID NO: 2072 - DNA, 21 bp, synthetic construct
  source 1..21: mol_type = other DNA; mol_type = other DNA
acgtccccgaatttgtcctgg

SEQ ID NO: 2073 - DNA, 21 bp, synthetic construct
  source 1..21: mol_type = other DNA; mol_type = other DNA
gacgcctaccgcggctcagac

SEQ ID NO: 2074 - DNA, 21 bp, synthetic construct
  source 1..21: mol_type = other DNA; mol_type = other DNA
tccgggcagtccacggggtgg

SEQ ID NO: 2075 - DNA, 21 bp, synthetic construct
  source 1..21: mol_type = other DNA
ttgtccaaacaggggacgaat

SEQ ID NO: 2076 - DNA, 21 bp, synthetic construct
  source 1..21: mol_type = other DNA
tacgccaagcccggcaccaac

SEQ ID NO: 2077 - DNA, 21 bp, synthetic construct
  source 1..21: mol_type = other DNA
tcctcctcctccgcgacgtgg

SEQ ID NO: 2078 - DNA, 21 bp, synthetic construct
  source 1..21: mol_type = other DNA
cccgcctcaaccaacggcatc

SEQ ID NO: 2079 - DNA, 21 bp, synthetic construct
  source 1..21: mol_type = other DNA; mol_type = other DNA
cagttctccacgaatggggtg

SEQ ID NO: 2080 - DNA, 21 bp, synthetic construct
  source 1..21: mol_type = other DNA; mol_type = other DNA
ctgtcaaaggcctcaggcaac

SEQ ID NO: 2081 - DNA, 21 bp, synthetic construct
  source 1..21: mol_type = other DNA; mol_type = other DNA
ttggatgggaattccatgtat

SEQ ID NO: 2082 - DNA, 21 bp, synthetic construct
  source 1..21: mol_type = other DNA; mol_type = other DNA
tacgccaagatgggcgaaaac

SEQ ID NO: 2083 - DNA, 21 bp, synthetic construct
  source 1..21: mol_type = other DNA; mol_type = other DNA
tccatgtcctccaatggggtg

SEQ ID NO: 2084 - DNA, 21 bp, synthetic construct
  source 1..21: mol_type = other DNA; mol_type = other DNA
tggtcatcagcctaccccgta

SEQ ID NO: 2085 - DNA, 21 bp, synthetic construct
  source 1..21: mol_type = other DNA; mol_type = other DNA
tactcacgccataactcaaac

SEQ ID NO: 2086 - DNA, 21 bp, synthetic construct
  source 1..21: mol_type = other DNA; mol_type = other DNA
ttggcgaaaataggggcgaat

SEQ ID NO: 2087 - DNA, 21 bp, synthetic construct
  source 1..21: mol_type = other DNA; mol_type = other DNA
accggccaaaccacctcatgg

SEQ ID NO: 2088 - DNA, 21 bp, synthetic construct
  source 1..21: mol_type = other DNA; mol_type = other DNA
gatcactccacgaatgggagg

SEQ ID NO: 2089 - DNA, 21 bp, synthetic construct
  source 1..21: mol_type = other DNA; mol_type = other DNA
ggggattccacgaatggggtg

SEQ ID NO: 2090 - DNA, 21 bp, synthetic construct
  source 1..21: mol_type = other DNA; mol_type = other DNA
gagaggtcctccaatggggtg

SEQ ID NO: 2091 - DNA, 21 bp, synthetic construct
  source 1..21: mol_type = other DNA; mol_type = other DNA
tactcaaagaccaacctgaac

SEQ ID NO: 2092 - DNA, 21 bp, synthetic construct
  source 1..21: mol_type = other DNA; mol_type = other DNA
tcaaacggcgcctcatcatac

SEQ ID NO: 2093 - DNA, 21 bp, synthetic construct
  source 1..21: mol_type = other DNA; mol_type = other DNA
tacgccaagctgaacctgaac

SEQ ID NO: 2094 - DNA, 21 bp, synthetic construct
  source 1..21: mol_type = other DNA; mol_type = other DNA
ttgtccaaaaatgggttgaat

SEQ ID NO: 2095 - DNA, 21 bp, synthetic construct
  source 1..21: mol_type = other DNA; mol_type = other DNA
gaaggcggcggcggccgctac

SEQ ID NO: 2096 - DNA, 21 bp, synthetic construct
  source 1..21: mol_type = other DNA; mol_type = other DNA
tggaggtccgatgggtatgcg

SEQ ID NO: 2097 - DNA, 21 bp, synthetic construct
  source 1..21: mol_type = other DNA; mol_type = other DNA
tattccaaattcaatgagaat

SEQ ID NO: 2098 - DNA, 21 bp, synthetic construct
  source 1..21: mol_type = other DNA; mol_type = other DNA
tcatcaaccggcatgtcattt

SEQ ID NO: 2099 - DNA, 21 bp, synthetic construct
  source 1..21: mol_type = other DNA; mol_type = other DNA
atgacggatgggacgaaatat

SEQ ID NO: 2100 - DNA, 21 bp, synthetic construct
  source 1..21: mol_type = other DNA; mol_type = other DNA
gtgcaggattatgataggaat

SEQ ID NO: 2101 - DNA, 21 bp, synthetic construct
  source 1..21: mol_type = other DNA; mol_type = other DNA
aatcaggatgggtatatggtg

SEQ ID NO: 2102 - DNA, 21 bp, synthetic construct
  source 1..21: mol_type = other DNA; mol_type = other DNA
aatacggcgacgaatgggagg

SEQ ID NO: 2103 - DNA, 21 bp, synthetic construct
  source 1..21: mol_type = other DNA; mol_type = other DNA
ctgtcaaagtcaaacctgaac

SEQ ID NO: 2104 - DNA, 21 bp, synthetic construct
  source 1..21: mol_type = other DNA; mol_type = other DNA
gtgccgtccacgaatggggtg

SEQ ID NO: 2105 - DNA, 21 bp, synthetic construct
  source 1..21: mol_type = other DNA; mol_type = other DNA
aactttcaaggctacggccaa

SEQ ID NO: 2106 - DNA, 21 bp, synthetic construct
  source 1..21: mol_type = other DNA; mol_type = other DNA
aatgcgtatgaggcgaggaat

SEQ ID NO: 2107 - DNA, 21 bp, synthetic construct
  source 1..21: mol_type = other DNA; mol_type = other DNA
aaagagtcctccaatggggtg

SEQ ID NO: 2108 - DNA, 21 bp, synthetic construct
  source 1..21: mol_type = other DNA; mol_type = other DNA
gatagggggaattccacgtat

SEQ ID NO: 2109 - DNA, 21 bp, synthetic construct
  source 1..21: mol_type = other DNA; mol_type = other DNA
tatgcgaaagcgaatgagaat

SEQ ID NO: 2110 - DNA, 21 bp, synthetic construct
  source 1..21: mol_type = other DNA; mol_type = other DNA
gatttgagggggacgggggcg

SEQ ID NO: 2111 - DNA, 21 bp, synthetic construct
  source 1..21: mol_type = other DNA; mol_type = other DNA
tacgcccgccccaacgaaaac

SEQ ID NO: 2112 - DNA, 21 bp, synthetic construct
  source 1..21: mol_type = other DNA; mol_type = other DNA
tactcaaagtggggcgacaac

SEQ ID NO: 2113 - DNA, 21 bp, synthetic construct
  source 1..21: mol_type = other DNA; mol_type = other DNA
tactcacgctttaaccccaac

SEQ ID NO: 2114 - DNA, 21 bp, synthetic construct
  source 1..21: mol_type = other DNA; mol_type = other DNA
ctggccaaggccggcgaaaac

SEQ ID NO: 2115 - DNA, 21 bp, synthetic construct
  source 1..21: mol_type = other DNA; mol_type = other DNA
catctgtcaaccaacggccgc

SEQ ID NO: 2116 - DNA, 21 bp, synthetic construct
  source 1..21: mol_type = other DNA; mol_type = other DNA
aatcactcctccaatggggtg

SEQ ID NO: 2117 - DNA, 21 bp, synthetic construct
  source 1..21: mol_type = other DNA; mol_type = other DNA
ggcccccccgactttatgcgc

SEQ ID NO: 2118 - DNA, 21 bp, synthetic construct
  source 1..21: mol_type = other DNA; mol_type = other DNA
accggctcatcacatgactgg

SEQ ID NO: 2119 - DNA, 21 bp, synthetic construct
  source 1..21: mol_type = other DNA; mol_type = other DNA
gagatatccacgaatgggagg

SEQ ID NO: 2120 - DNA, 21 bp, synthetic construct
  source 1..21: mol_type = other DNA; mol_type = other DNA
ttctccaggtccggggagaat

SEQ ID NO: 2121 - DNA, 21 bp, synthetic construct
  source 1..21: mol_type = other DNA
ctgtcaaagcaaaacaccaac

SEQ ID NO: 2122 - DNA, 21 bp, synthetic construct
  source 1..21: mol_type = other DNA
tattccagggatgggcacaat

SEQ ID NO: 2123 - DNA, 21 bp, synthetic construct
  source 1..21: mol_type = other DNA
ttgtccagggggaatgagaat

SEQ ID NO: 2124 - DNA, 21 bp, synthetic construct
  source 1..21: mol_type = other DNA
gggtccggggaggtgaggtat

SEQ ID NO: 2125 - DNA, 21 bp, synthetic construct
  source 1..21: mol_type = other DNA; mol_type = other DNA
ccgtattcctccaatggggtg

SEQ ID NO: 2126 - DNA, 21 bp, synthetic construct
  source 1..21: mol_type = other DNA; mol_type = other DNA
tactcacgccccggcgtaaac

SEQ ID NO: 2127 - DNA, 21 bp, synthetic construct
  source 1..21: mol_type = other DNA; mol_type = other DNA
ggcctgggctcagtaacctgg

SEQ ID NO: 2128 - DNA, 21 bp, synthetic construct
  source 1..21: mol_type = other DNA; mol_type = other DNA
cgccaatcagactcatttgaa

SEQ ID NO: 2129 - DNA, 21 bp, synthetic construct
  source 1..21: mol_type = other DNA; mol_type = other DNA
tacttttcaggcgccaacgta

SEQ ID NO: 2130 - DNA, 21 bp, synthetic construct
  source 1..21: mol_type = other DNA; mol_type = other DNA
gattccgaggggacgaggaat

SEQ ID NO: 2131 - DNA, 21 bp, synthetic construct
  source 1..21: mol_type = other DNA; mol_type = other DNA
tcaggctcacccaaccgctac

SEQ ID NO: 2132 - DNA, 21 bp, synthetic construct
  source 1..21: mol_type = other DNA; mol_type = other DNA
cgcgaatcagtaaacggctgg

SEQ ID NO: 2133 - DNA, 21 bp, synthetic construct
  source 1..21: mol_type = other DNA; mol_type = other DNA
ttggcgaaattggggacgaat

SEQ ID NO: 2134 - DNA, 21 bp, synthetic construct
  source 1..21: mol_type = other DNA; mol_type = other DNA
atgatgtcctccaatggggtg

SEQ ID NO: 2135 - DNA, 21 bp, synthetic construct
  source 1..21: mol_type = other DNA; mol_type = other DNA
ggggggccgcaggtgttgtat

SEQ ID NO: 2136 - DNA, 21 bp, synthetic construct
  source 1..21: mol_type = other DNA; mol_type = other DNA
tatttcgcgtcccagagggag

SEQ ID NO: 2137 - DNA, 21 bp, synthetic construct
  source 1..21: mol_type = other DNA; mol_type = other DNA
gggaggggggagaatcactat

SEQ ID NO: 2138 - DNA, 21 bp, synthetic construct
  source 1..21: mol_type = other DNA; mol_type = other DNA
tactcacgcgaaggcaagaac

SEQ ID NO: 2139 - DNA, 21 bp, synthetic construct
  source 1..21: mol_type = other DNA; mol_type = other DNA
gaaggcctgatcggcaaggac

SEQ ID NO: 2140 - DNA, 21 bp, synthetic construct
  source 1..21: mol_type = other DNA; mol_type = other DNA
ctgtcaaaggccggcggcaac

SEQ ID NO: 2141 - DNA, 21 bp, synthetic construct
  source 1..21: mol_type = other DNA; mol_type = other DNA
cccgaatcaaccaacggcatc

SEQ ID NO: 2142 - DNA, 21 bp, synthetic construct
  source 1..21: mol_type = other DNA; mol_type = other DNA
tactcacgcgaaggcgccaac

SEQ ID NO: 2143 - DNA, 21 bp, synthetic construct
  source 1..21: mol_type = other DNA; mol_type = other DNA
ggcatcggcaactcagcctgg

SEQ ID NO: 2144 - DNA, 21 bp, synthetic construct
  source 1..21: mol_type = other DNA; mol_type = other DNA
tatgcgaaagtgggggataat

SEQ ID NO: 2145 - DNA, 21 bp, synthetic construct
  source 1..21: mol_type = other DNA; mol_type = other DNA
ccgatgtccacgaatgggata

SEQ ID NO: 2146 - DNA, 21 bp, synthetic construct
  source 1..21: mol_type = other DNA; mol_type = other DNA
gggaatgagatggagtcctgg

SEQ ID NO: 2147 - DNA, 21 bp, synthetic construct
  source 1..21: mol_type = other DNA; mol_type = other DNA
cccgaatcatcaaacggcgta

SEQ ID NO: 2148 - DNA, 21 bp, synthetic construct
  source 1..21: mol_type = other DNA; mol_type = other DNA
cgcacctcatcaaccggcgta

SEQ ID NO: 2149 - DNA, 21 bp, synthetic construct
  source 1..21: mol_type = other DNA; mol_type = other DNA
ataaaatatacgtcctccgat

SEQ ID NO: 2150 - DNA, 21 bp, synthetic construct
  source 1..21: mol_type = other DNA; mol_type = other DNA
acgaggtccgatccgaattcc

SEQ ID NO: 2151 - DNA, 21 bp, synthetic construct
  source 1..21: mol_type = other DNA; mol_type = other DNA
tcagacggcatctcaccctac

SEQ ID NO: 2152 - DNA, 21 bp, synthetic construct
  source 1..21: mol_type = other DNA; mol_type = other DNA
tactcacgcaccaacggcaac

SEQ ID NO: 2153 - DNA, 21 bp, synthetic construct
  source 1..21: mol_type = other DNA; mol_type = other DNA
tactcaaagaccaacatgaac

SEQ ID NO: 2154 - DNA, 21 bp, synthetic construct
  source 1..21: mol_type = other DNA; mol_type = other DNA
tgctcagtaccctcactgccc

SEQ ID NO: 2155 - DNA, 21 bp, synthetic construct
  source 1..21: mol_type = other DNA; mol_type = other DNA
tacgccaagtcaaacgaaaac

SEQ ID NO: 2156 - DNA, 21 bp, synthetic construct
  source 1..21: mol_type = other DNA; mol_type = other DNA
accggcggccattcaacctgg

SEQ ID NO: 2157 - DNA, 21 bp, synthetic construct
  source 1..21: mol_type = other DNA; mol_type = other DNA
tacggcggccataccatgtac

SEQ ID NO: 2158 - DNA, 21 bp, synthetic construct
  source 1..21: mol_type = other DNA
ttttcaaagatgaacgaaaac

SEQ ID NO: 2159 - DNA, 21 bp, synthetic construct
  source 1..21: mol_type = other DNA
ttctccaaattgggggataat

SEQ ID NO: 2160 - DNA, 21 bp, synthetic construct
  source 1..21: mol_type = other DNA; mol_type = other DNA
accccccgcggcgccgccgcc

SEQ ID NO: 2161 - DNA, 21 bp, synthetic construct
  source 1..21: mol_type = other DNA; mol_type = other DNA
catcatgaacatggcccccgc

SEQ ID NO: 2162 - DNA, 21 bp, synthetic construct
  source 1..21: mol_type = other DNA; mol_type = other DNA
tattccagggaggggatgaat

SEQ ID NO: 2163 - DNA, 21 bp, synthetic construct
  source 1..21: mol_type = other DNA; mol_type = other DNA
gactaccgcggcaccctgccc

SEQ ID NO: 2164 - DNA, 21 bp, synthetic construct
  source 1..21: mol_type = other DNA; mol_type = other DNA
tatgcgaaaccggggatgaat

SEQ ID NO: 2165 - DNA, 21 bp, synthetic construct
  source 1..21: mol_type = other DNA; mol_type = other DNA
ataggggggtcctccacgtat

SEQ ID NO: 2166 - DNA, 21 bp, synthetic construct
  source 1..21: mol_type = other DNA; mol_type = other DNA
gaccatgccaactcacgctac

SEQ ID NO: 2167 - DNA, 21 bp, synthetic construct
  source 1..21: mol_type = other DNA; mol_type = other DNA
tacgcccgcgacggcatgaac

SEQ ID NO: 2168 - DNA, 21 bp, synthetic construct
  source 1..21: mol_type = other DNA; mol_type = other DNA
tacgcccgcgaaggccataac

SEQ ID NO: 2169 - DNA, 21 bp, synthetic construct
  source 1..21: mol_type = other DNA; mol_type = other DNA
tttaacggccgcacctcatac

SEQ ID NO: 2170 - DNA, 21 bp, synthetic construct
  source 1..21: mol_type = other DNA; mol_type = other DNA
tataataggttgtccgataat

SEQ ID NO: 2171 - DNA, 21 bp, synthetic construct
  source 1..21: mol_type = other DNA; mol_type = other DNA
ttcgcgaaaggggggacgaat

SEQ ID NO: 2172 - DNA, 21 bp, synthetic construct
  source 1..21: mol_type = other DNA; mol_type = other DNA
gcctcaggcacctcaccctgg

SEQ ID NO: 2173 - DNA, 21 bp, synthetic construct
  source 1..21: mol_type = other DNA; mol_type = other DNA
ttttcacgctcaaacgaaaac

SEQ ID NO: 2174 - DNA, 21 bp, synthetic construct
  source 1..21: mol_type = other DNA; mol_type = other DNA
gggaggtccgggaatgcggcg

SEQ ID NO: 2175 - DNA, 21 bp, synthetic construct
  source 1..21: mol_type = other DNA; mol_type = other DNA
ttttcacgccatggctttaac

SEQ ID NO: 2176 - DNA, 21 bp, synthetic construct
  source 1..21: mol_type = other DNA; mol_type = other DNA
tacaactcaaccgaaggccgc

SEQ ID NO: 2177 - DNA, 21 bp, synthetic construct
  source 1..21: mol_type = other DNA; mol_type = other DNA
cagcagccgtcccacttgtgg

SEQ ID NO: 2178 - DNA, 21 bp, synthetic construct
  source 1..21: mol_type = other DNA; mol_type = other DNA
gatggggataggggggggtgg

SEQ ID NO: 2179 - DNA, 21 bp, synthetic construct
  source 1..21: mol_type = other DNA; mol_type = other DNA
ttcgcgaaatccggggataat

SEQ ID NO: 2180 - DNA, 21 bp, synthetic construct
  source 1..21: mol_type = other DNA; mol_type = other DNA
tacgccaaggaaggctgcaac

SEQ ID NO: 2181 - DNA, 21 bp, synthetic construct
  source 1..21: mol_type = other DNA; mol_type = other DNA
atgaggaatgatgggtatggg

SEQ ID NO: 2182 - DNA, 21 bp, synthetic construct
  source 1..21: mol_type = other DNA; mol_type = other DNA
gtgaatggggggtccaaatat

SEQ ID NO: 2183 - DNA, 21 bp, synthetic construct
  source 1..21: mol_type = other DNA; mol_type = other DNA
ataacggaggggttgaaatgg

SEQ ID NO: 2184 - DNA, 21 bp, synthetic construct
  source 1..21: mol_type = other DNA; mol_type = other DNA
tggttggcggggccgtccgcg

SEQ ID NO: 2185 - DNA, 21 bp, synthetic construct
  source 1..21: mol_type = other DNA; mol_type = other DNA
aatgggcaggggtccacgtgg

SEQ ID NO: 2186 - DNA, 21 bp, synthetic construct
  source 1..21: mol_type = other DNA; mol_type = other DNA
ttcgcgaggacgaatgataat

SEQ ID NO: 2187 - DNA, 21 bp, synthetic construct
  source 1..21: mol_type = other DNA; mol_type = other DNA
aggtatcacgattcctatgcg

SEQ ID NO: 2188 - DNA, 21 bp, synthetic construct
  source 1..21: mol_type = other DNA; mol_type = other DNA
aggcagtccataaatgggtat

SEQ ID NO: 2189 - DNA, 21 bp, synthetic construct
  source 1..21: mol_type = other DNA; mol_type = other DNA
caggcggagagggggtatgat

SEQ ID NO: 2190 - DNA, 21 bp, synthetic construct
  source 1..21: mol_type = other DNA; mol_type = other DNA
ttcgcgaggttcggggcgaat

SEQ ID NO: 2191 - DNA, 21 bp, synthetic construct
  source 1..21: mol_type = other DNA; mol_type = other DNA
acccgccaaggcatctcagcc

SEQ ID NO: 2192 - DNA, 21 bp, synthetic construct
  source 1..21: mol_type = other DNA; mol_type = other DNA
tatgtgaggaatgatcactcc

SEQ ID NO: 2193 - DNA, 21 bp, synthetic construct
  source 1..21: mol_type = other DNA; mol_type = other DNA
gacatgaacaacaacaagtgg

SEQ ID NO: 2194 - DNA, 21 bp, synthetic construct
  source 1..21: mol_type = other DNA; mol_type = other DNA
ttcgtgaggtccgattccaat

SEQ ID NO: 2195 - DNA, 21 bp, synthetic construct
  source 1..21: mol_type = other DNA; mol_type = other DNA
tactcacgcgacggctttaac

SEQ ID NO: 2196 - DNA, 21 bp, synthetic construct
  source 1..21: mol_type = other DNA; mol_type = other DNA
tacgcccgcgacggccataac

SEQ ID NO: 2197 - DNA, 21 bp, synthetic construct
  source 1..21: mol_type = other DNA; mol_type = other DNA
ttttcaaaggccggcgaaaac

SEQ ID NO: 2198 - DNA, 21 bp, synthetic construct
  source 1..21: mol_type = other DNA; mol_type = other DNA
gggaatgaggggtattgggat

SEQ ID NO: 2199 - DNA, 21 bp, synthetic construct
  source 1..21: mol_type = other DNA; mol_type = other DNA
aattccttggggacgggggcg

SEQ ID NO: 2200 - DNA, 21 bp, synthetic construct
  source 1..21: mol_type = other DNA; mol_type = other DNA
tacgccaagcatggcgaaaac

SEQ ID NO: 2201 - DNA, 21 bp, synthetic construct
  source 1..21: mol_type = other DNA; mol_type = other DNA
tgggggtcctcctcctcctat

SEQ ID NO: 2202 - DNA, 21 bp, synthetic construct
  source 1..21: mol_type = other DNA; mol_type = other DNA
tattccagggaggggttgaat

SEQ ID NO: 2203 - DNA, 21 bp, synthetic construct
  source 1..21: mol_type = other DNA; mol_type = other DNA
tattccagggagaattggaat

SEQ ID NO: 2204 - DNA, 21 bp, synthetic construct
  source 1..21: mol_type = other DNA; mol_type = other DNA
ttgacgtccacgcacgggatg

SEQ ID NO: 2205 - DNA, 21 bp, synthetic construct
  source 1..21: mol_type = other DNA; mol_type = other DNA
aatacggggacgtcctcctat

SEQ ID NO: 2206 - DNA, 21 bp, synthetic construct
  source 1..21: mol_type = other DNA; mol_type = other DNA
tacgccaaggacggctttaac

SEQ ID NO: 2207 - DNA, 21 bp, synthetic construct
  source 1..21: mol_type = other DNA; mol_type = other DNA
cagccgttgggggggtatgat

SEQ ID NO: 2208 - DNA, 21 bp, synthetic construct
  source 1..21: mol_type = other DNA; mol_type = other DNA
gagtatgggggggggaaatat

SEQ ID NO: 2209 - DNA, 21 bp, synthetic construct
  source 1..21: mol_type = other DNA; mol_type = other DNA
ttctccaggcagggggagaat

SEQ ID NO: 2210 - DNA, 21 bp, synthetic construct
  source 1..21: mol_type = other DNA; mol_type = other DNA
ctgtggaacgccaccgccccc

SEQ ID NO: 2211 - DNA, 21 bp, synthetic construct
  source 1..21: mol_type = other DNA; mol_type = other DNA
tatgcgaaacagaatgagaat

SEQ ID NO: 2212 - DNA, 21 bp, synthetic construct
  source 1..21: mol_type = other DNA; mol_type = other DNA
aatttctccgggcagaatgcg

SEQ ID NO: 2213 - DNA, 21 bp, synthetic construct
  source 1..21: mol_type = other DNA; mol_type = other DNA
aataatgggcacatggcgtat

SEQ ID NO: 2214 - DNA, 21 bp, synthetic construct
  source 1..21: mol_type = other DNA; mol_type = other DNA
ttctccaaaataggggagaat

SEQ ID NO: 2215 - DNA, 21 bp, synthetic construct
  source 1..21: mol_type = other DNA; mol_type = other DNA
ttttcaaagatcaaccccaac

SEQ ID NO: 2216 - DNA, 21 bp, synthetic construct
  source 1..21: mol_type = other DNA; mol_type = other DNA
gggggggggacgtccccgtat

SEQ ID NO: 2217 - DNA, 21 bp, synthetic construct
  source 1..21: mol_type = other DNA; mol_type = other DNA
ggcaacggcggcacccattgg

SEQ ID NO: 2218 - DNA, 21 bp, synthetic construct
  source 1..21: mol_type = other DNA; mol_type = other DNA
tactcacgcgacaactggaac

SEQ ID NO: 2219 - DNA, 21 bp, synthetic construct
  source 1..21: mol_type = other DNA; mol_type = other DNA
atagggtccgcgaatggggtg

SEQ ID NO: 2220 - DNA, 21 bp, synthetic construct
  source 1..21: mol_type = other DNA; mol_type = other DNA
tggtcacgcctggaaaacaac

SEQ ID NO: 2221 - DNA, 21 bp, synthetic construct
  source 1..21: mol_type = other DNA; mol_type = other DNA
gggtcctccaatgagaaatgg

SEQ ID NO: 2222 - DNA, 21 bp, synthetic construct
  source 1..21: mol_type = other DNA; mol_type = other DNA
tactcacgcgaaaaccataac

SEQ ID NO: 2223 - DNA, 21 bp, synthetic construct
  source 1..21: mol_type = other DNA; mol_type = other DNA
tatgcgaggccggggcagaat

SEQ ID NO: 2224 - DNA, 21 bp, synthetic construct
  source 1..21: mol_type = other DNA; mol_type = other DNA
aacgaaggccgcggctacgcc

SEQ ID NO: 2225 - DNA, 21 bp, synthetic construct
  source 1..21: mol_type = other DNA; mol_type = other DNA
ttgtccaaatcctccttggat

SEQ ID NO: 2226 - DNA, 21 bp, synthetic construct
  source 1..21: mol_type = other DNA
tattccaaagaggggtggaat

SEQ ID NO: 2227 - DNA, 21 bp, synthetic construct
  source 1..21: mol_type = other DNA; mol_type = other DNA
gagtcctccgggtcctcctgg

SEQ ID NO: 2228 - DNA, 21 bp, synthetic construct
  source 1..21: mol_type = other DNA; mol_type = other DNA
tacgcccgcgacggcgccaac

SEQ ID NO: 2229 - DNA, 21 bp, synthetic construct
  source 1..21: mol_type = other DNA; mol_type = other DNA
ttcgcgaaagaggggtggaat

SEQ ID NO: 2230 - DNA, 21 bp, synthetic construct
  source 1..21: mol_type = other DNA; mol_type = other DNA
tactcacgcctgggcgaaaac

SEQ ID NO: 2231 - DNA, 21 bp, synthetic construct
  source 1..21: mol_type = other DNA; mol_type = other DNA
tttgcccgcgaaggctttaac

SEQ ID NO: 2232 - DNA, 21 bp, synthetic construct
  source 1..21: mol_type = other DNA; mol_type = other DNA
ggcatctacgacaccatgccc

SEQ ID NO: 2233 - DNA, 21 bp, synthetic construct
  source 1..21: mol_type = other DNA; mol_type = other DNA
gaggcgttgtccgataggggg

SEQ ID NO: 2234 - DNA, 21 bp, synthetic construct
  source 1..21: mol_type = other DNA; mol_type = other DNA
tactttgaactgcgctcaaac

SEQ ID NO: 2235 - DNA, 21 bp, synthetic construct
  source 1..21: mol_type = other DNA; mol_type = other DNA
catggcaccggcacccatttt

SEQ ID NO: 2236 - DNA, 21 bp, synthetic construct
  source 1..21: mol_type = other DNA; mol_type = other DNA
atccaaggcaccacctacgcc

SEQ ID NO: 2237 - DNA, 21 bp, synthetic construct
  source 1..21: mol_type = other DNA; mol_type = other DNA
ttttcaaagcataacgacaac

SEQ ID NO: 2238 - DNA, 21 bp, synthetic construct
  source 1..21: mol_type = other DNA; mol_type = other DNA
ggctcagcctcaacccaatgg

SEQ ID NO: 2239 - DNA, 21 bp, synthetic construct
  source 1..21: mol_type = other DNA; mol_type = other DNA
tactcaaagaccaacgaaaac

SEQ ID NO: 2240 - DNA, 21 bp, synthetic construct
  source 1..21: mol_type = other DNA; mol_type = other DNA
atgccctcacccaactttggc

SEQ ID NO: 2241 - DNA, 21 bp, synthetic construct
  source 1..21: mol_type = other DNA; mol_type = other DNA
tataaaacggggacgatgtat

SEQ ID NO: 2242 - DNA, 21 bp, synthetic construct
  source 1..21: mol_type = other DNA; mol_type = other DNA
ttctccaaattgggggagaat

SEQ ID NO: 2243 - DNA, 21 bp, synthetic construct
  source 1..21: mol_type = other DNA
gtatcaggcacccatggcgta

SEQ ID NO: 2244 - DNA, 21 bp, synthetic construct
  source 1..21: mol_type = other DNA
tatgtgcactccaattccaat

SEQ ID NO: 2245 - DNA, 21 bp, synthetic construct
  source 1..21: mol_type = other DNA; mol_type = other DNA
tattccaggttggatgagacg

SEQ ID NO: 2246 - DNA, 21 bp, synthetic construct
  source 1..21: mol_type = other DNA; mol_type = other DNA
tatgcgaaattggggacgaat

SEQ ID NO: 2247 - DNA, 21 bp, synthetic construct
  source 1..21: mol_type = other DNA; mol_type = other DNA
aacatgaacggctacggccaa

SEQ ID NO: 2248 - DNA, 21 bp, synthetic construct
  source 1..21: mol_type = other DNA; mol_type = other DNA
tacgcccgcatgggcaccaac

SEQ ID NO: 2249 - DNA, 21 bp, synthetic construct
  source 1..21: mol_type = other DNA; mol_type = other DNA
tacgcccgcgacggcaacaac

SEQ ID NO: 2250 - DNA, 21 bp, synthetic construct
  source 1..21: mol_type = other DNA; mol_type = other DNA
ggcgaagaacgctcaaagtgg

SEQ ID NO: 2251 - DNA, 21 bp, synthetic construct
  source 1..21: mol_type = other DNA; mol_type = other DNA
atggcgaatcacgtgacgtat

SEQ ID NO: 2252 - DNA, 21 bp, synthetic construct
  source 1..21: mol_type = other DNA; mol_type = other DNA
tatgcgtccgggtccaatggg

SEQ ID NO: 2253 - DNA, 21 bp, synthetic construct
  source 1..21: mol_type = other DNA; mol_type = other DNA
agggatcacacgtccacgtat

SEQ ID NO: 2254 - DNA, 21 bp, synthetic construct
  source 1..21: mol_type = other DNA; mol_type = other DNA
gtaggcggcaactcaacctac

SEQ ID NO: 2255 - DNA, 21 bp, synthetic construct
  source 1..21: mol_type = other DNA; mol_type = other DNA
tacgcccgcgaaggcatgaac

SEQ ID NO: 2256 - DNA, 21 bp, synthetic construct
  source 1..21: mol_type = other DNA; mol_type = other DNA
aattccgggaattcctcctat

SEQ ID NO: 2257 - DNA, 21 bp, synthetic construct
  source 1..21: mol_type = other DNA; mol_type = other DNA
gtatcaaacaagtcagccggc

SEQ ID NO: 2258 - DNA, 21 bp, synthetic construct
  source 1..21: mol_type = other DNA; mol_type = other DNA
atcaacggcgtacatatggta

SEQ ID NO: 2259 - DNA, 21 bp, synthetic construct
  source 1..21: mol_type = other DNA; mol_type = other DNA
taccatggcggcgcccccgta

SEQ ID NO: 2260 - DNA, 21 bp, synthetic construct
  source 1..21: mol_type = other DNA; mol_type = other DNA
tatcacaggtccttcgatccg

SEQ ID NO: 2261 - DNA, 21 bp, synthetic construct
  source 1..21: mol_type = other DNA; mol_type = other DNA
tactacaccggcctgcaagcc

SEQ ID NO: 2262 - DNA, 21 bp, synthetic construct
  source 1..21: mol_type = other DNA; mol_type = other DNA
tttgacggcacccgcccctac

SEQ ID NO: 2263 - DNA, 21 bp, synthetic construct
  source 1..21: mol_type = other DNA; mol_type = other DNA
aaatccgagtattattccgat

SEQ ID NO: 2264 - DNA, 21 bp, synthetic construct
  source 1..21: mol_type = other DNA; mol_type = other DNA
aacgtagactacgcccgcaac

SEQ ID NO: 2265 - DNA, 21 bp, synthetic construct
  source 1..21: mol_type = other DNA; mol_type = other DNA
aacgccatcggcgtaacctgg

SEQ ID NO: 2266 - DNA, 21 bp, synthetic construct
  source 1..21: mol_type = other DNA; mol_type = other DNA
ataaatgggcactccaattat

SEQ ID NO: 2267 - DNA, 21 bp, synthetic construct
  source 1..21: mol_type = other DNA; mol_type = other DNA
atcaccggctacgcccaattt

SEQ ID NO: 2268 - DNA, 21 bp, synthetic construct
  source 1..21: mol_type = other DNA; mol_type = other DNA
ttctccaggtataatgataat

SEQ ID NO: 2269 - DNA, 21 bp, synthetic construct
  source 1..21: mol_type = other DNA; mol_type = other DNA
tttgccaagtttggcaccaac

SEQ ID NO: 2270 - DNA, 21 bp, synthetic construct
  source 1..21: mol_type = other DNA; mol_type = other DNA
tattccaggttcgggccgaat

SEQ ID NO: 2271 - DNA, 21 bp, synthetic construct
  source 1..21: mol_type = other DNA; mol_type = other DNA
tactcacgctacaaccccaac

SEQ ID NO: 2272 - DNA, 21 bp, synthetic construct
  source 1..21: mol_type = other DNA; mol_type = other DNA
tttgcccgctacggccccaac

SEQ ID NO: 2273 - DNA, 21 bp, synthetic construct
  source 1..21: mol_type = other DNA; mol_type = other DNA
tatgcgaggttcgggatgaat

SEQ ID NO: 2274 - DNA, 21 bp, synthetic construct
  source 1..21: mol_type = other DNA; mol_type = other DNA
ggctcatacaacaccacctac

SEQ ID NO: 2275 - DNA, 21 bp, synthetic construct
  source 1..21: mol_type = other DNA; mol_type = other DNA
ctggcccaatcaggccccaac

SEQ ID NO: 2276 - DNA, 21 bp, synthetic construct
  source 1..21: mol_type = other DNA; mol_type = other DNA
acgtccgggaattccacgtat

SEQ ID NO: 2277 - DNA, 21 bp, synthetic construct
  source 1..21: mol_type = other DNA; mol_type = other DNA
cgcgaaaacaacggctcatgg

SEQ ID NO: 2278 - DNA, 21 bp, synthetic construct
  source 1..21: mol_type = other DNA; mol_type = other DNA
atgcaatacgactcaggcgac

SEQ ID NO: 2279 - DNA, 21 bp, synthetic construct
  source 1..21: mol_type = other DNA; mol_type = other DNA
tacgccaagtacggcgaaaac

SEQ ID NO: 2280 - DNA, 21 bp, synthetic construct
  source 1..21: mol_type = other DNA; mol_type = other DNA
atcgacggccgcaactacgcc

SEQ ID NO: 2281 - DNA, 21 bp, synthetic construct
  source 1..21: mol_type = other DNA; mol_type = other DNA
ctgtggaacggcgaacaagcc

SEQ ID NO: 2282 - DNA, 21 bp, synthetic construct
  source 1..21: mol_type = other DNA; mol_type = other DNA
caggagggggggtccaggtat

SEQ ID NO: 2283 - DNA, 21 bp, synthetic construct
  source 1..21: mol_type = other DNA; mol_type = other DNA
tactttacccataccggcgaa

SEQ ID NO: 2284 - DNA, 21 bp, synthetic construct
  source 1..21: mol_type = other DNA; mol_type = other DNA
ttctccaggatgggggagaat

SEQ ID NO: 2285 - DNA, 21 bp, synthetic construct
  source 1..21: mol_type = other DNA; mol_type = other DNA
cacgataatcagtccaaatat

SEQ ID NO: 2286 - DNA, 21 bp, synthetic construct
  source 1..21: mol_type = other DNA; mol_type = other DNA
tacgtatcaggcaccatgaac

SEQ ID NO: 2287 - DNA, 21 bp, synthetic construct
  source 1..21: mol_type = other DNA; mol_type = other DNA
tggtacgccggcacccatgaa

SEQ ID NO: 2288 - DNA, 21 bp, synthetic construct
  source 1..21: mol_type = other DNA; mol_type = other DNA
gcggggtcctccgtggggtgg

SEQ ID NO: 2289 - DNA, 21 bp, synthetic construct
  source 1..21: mol_type = other DNA; mol_type = other DNA
ctgccccgcgccggcgacttt

SEQ ID NO: 2290 - DNA, 21 bp, synthetic construct
  source 1..21: mol_type = other DNA; mol_type = other DNA
gaagcccaaggcatgcgcaac

SEQ ID NO: 2291 - DNA, 21 bp, synthetic construct
  source 1..21: mol_type = other DNA; mol_type = other DNA
gaggggtccatgacgaaatgg

SEQ ID NO: 2292 - DNA, 21 bp, synthetic construct
  source 1..21: mol_type = other DNA; mol_type = other DNA
tacgccaagaccaacgaaaac

SEQ ID NO: 2293 - DNA, 21 bp, synthetic construct
  source 1..21: mol_type = other DNA; mol_type = other DNA
tacgcccgcgaaggcctgaac

SEQ ID NO: 2294 - DNA, 21 bp, synthetic construct
  source 1..21: mol_type = other DNA; mol_type = other DNA
tcccaggggaatacgaattgg

SEQ ID NO: 2295 - DNA, 21 bp, synthetic construct
  source 1..21: mol_type = other DNA; mol_type = other DNA
ttggattcctccgtgaggtat

SEQ ID NO: 2296 - DNA, 21 bp, synthetic construct
  source 1..21: mol_type = other DNA; mol_type = other DNA
tttgcccgcctgggctacaac

SEQ ID NO: 2297 - DNA, 21 bp, synthetic construct
  source 1..21: mol_type = other DNA; mol_type = other DNA
aatataaaatgggatccgcac

SEQ ID NO: 2298 - DNA, 21 bp, synthetic construct
  source 1..21: mol_type = other DNA; mol_type = other DNA
gaaggcaacggcacccgcaac

SEQ ID NO: 2299 - DNA, 21 bp, synthetic construct
  source 1..21: mol_type = other DNA; mol_type = other DNA
aatataccggggttgatatat

SEQ ID NO: 2300 - DNA, 21 bp, synthetic construct
  source 1..21: mol_type = other DNA; mol_type = other DNA
tacgcccgcatgaacgaaaac

SEQ ID NO: 2301 - DNA, 21 bp, synthetic construct
  source 1..21: mol_type = other DNA; mol_type = other DNA
gccgacgcctacaagacctac

SEQ ID NO: 2302 - DNA, 21 bp, synthetic construct
  source 1..21: mol_type = other DNA; mol_type = other DNA
ttctccaaaaatgggtggaat

SEQ ID NO: 2303 - DNA, 21 bp, synthetic construct
  source 1..21: mol_type = other DNA; mol_type = other DNA
ggcatctcaaccaacggccgc

SEQ ID NO: 2304 - DNA, 21 bp, synthetic construct
  source 1..21: mol_type = other DNA; mol_type = other DNA
tactcacgctttggcgacaac

SEQ ID NO: 2305 - DNA, 21 bp, synthetic construct
  source 1..21: mol_type = other DNA; mol_type = other DNA
tactcacgctttggcggcaac

SEQ ID NO: 2306 - DNA, 21 bp, synthetic construct
  source 1..21: mol_type = other DNA; mol_type = other DNA
ttttcaaagaacaactggaac

SEQ ID NO: 2307 - DNA, 21 bp, synthetic construct
  source 1..21: mol_type = other DNA; mol_type = other DNA
tattccaaattcgggtataat

SEQ ID NO: 2308 - DNA, 21 bp, synthetic construct
  source 1..21: mol_type = other DNA; mol_type = other DNA
tacgcccgctggggcgaaaac

SEQ ID NO: 2309 - DNA, 21 bp, synthetic construct
  source 1..21: mol_type = other DNA; mol_type = other DNA
tttgcccgctttggctcaaac

SEQ ID NO: 2310 - DNA, 21 bp, synthetic construct
  source 1..21: mol_type = other DNA; mol_type = other DNA
cagacggggacgtccccgtat

SEQ ID NO: 2311 - DNA, 21 bp, synthetic construct
  source 1..21: mol_type = other DNA; mol_type = other DNA
aataatatagatgtgaggtgg

SEQ ID NO: 2312 - DNA, 21 bp, synthetic construct
  source 1..21: mol_type = other DNA; mol_type = other DNA
tactcacgcgaaaacatcaac

SEQ ID NO: 2313 - DNA, 21 bp, synthetic construct
  source 1..21: mol_type = other DNA; mol_type = other DNA
cagaataatgggtccccgtat

SEQ ID NO: 2314 - DNA, 21 bp, synthetic construct
  source 1..21: mol_type = other DNA; mol_type = other DNA
ctgaactcactggccgcctac

SEQ ID NO: 2315 - DNA, 21 bp, synthetic construct
  source 1..21: mol_type = other DNA; mol_type = other DNA
tcaaacggcggcaccacctgg

SEQ ID NO: 2316 - DNA, 21 bp, synthetic construct
  source 1..21: mol_type = other DNA; mol_type = other DNA
tattccaatatagggccgaat

SEQ ID NO: 2317 - DNA, 21 bp, synthetic construct
  source 1..21: mol_type = other DNA; mol_type = other DNA
tcaggcggcaccgccctgtac

SEQ ID NO: 2318 - DNA, 21 bp, synthetic construct
  source 1..21: mol_type = other DNA; mol_type = other DNA
cgcgccggcatgcccggcgcc

SEQ ID NO: 2319 - DNA, 21 bp, synthetic construct
  source 1..21: mol_type = other DNA; mol_type = other DNA
tactcaaaggaaaactggaac

SEQ ID NO: 2320 - DNA, 21 bp, synthetic construct
  source 1..21: mol_type = other DNA; mol_type = other DNA
acccgcgccggcaacggcgcc

SEQ ID NO: 2321 - DNA, 21 bp, synthetic construct
  source 1..21: mol_type = other DNA; mol_type = other DNA
aaccaaggcaacaacacctgg

SEQ ID NO: 2322 - DNA, 21 bp, synthetic construct
  source 1..21: mol_type = other DNA; mol_type = other DNA
atagagtatcactccgggaat

SEQ ID NO: 2323 - DNA, 21 bp, synthetic construct
  source 1..21: mol_type = other DNA; mol_type = other DNA
gtatcaggctcatcagcctac

SEQ ID NO: 2324 - DNA, 21 bp, synthetic construct
  source 1..21: mol_type = other DNA; mol_type = other DNA
tacgcccgcgaaaactacaac

SEQ ID NO: 2325 - DNA, 21 bp, synthetic construct
  source 1..21: mol_type = other DNA; mol_type = other DNA
aggcaggcggatacgtatccg

SEQ ID NO: 2326 - DNA, 21 bp, synthetic construct
  source 1..21: mol_type = other DNA; mol_type = other DNA
gactcatcaggccaacgctac

SEQ ID NO: 2327 - DNA, 21 bp, synthetic construct
  source 1..21: mol_type = other DNA; mol_type = other DNA
ggcatccaaaaccaatcatgg

SEQ ID NO: 2328 - DNA, 21 bp, synthetic construct
  source 1..21: mol_type = other DNA; mol_type = other DNA
gtaggcggcaactcaggctac

SEQ ID NO: 2329 - DNA, 21 bp, synthetic construct
  source 1..21: mol_type = other DNA; mol_type = other DNA
gtggggaatgggtccttgtat

SEQ ID NO: 2330 - DNA, 21 bp, synthetic construct
  source 1..21: mol_type = other DNA; mol_type = other DNA
ggcggcggcgtagcccattac

SEQ ID NO: 2331 - DNA, 21 bp, synthetic construct
  source 1..21: mol_type = other DNA; mol_type = other DNA
accggctcatcaacctcatgg

SEQ ID NO: 2332 - DNA, 21 bp, synthetic construct
  source 1..21: mol_type = other DNA; mol_type = other DNA
tattccagggataatcacaat

SEQ ID NO: 2333 - DNA, 21 bp, synthetic construct
  source 1..21: mol_type = other DNA; mol_type = other DNA
gtgcagtatgagtccagggat

SEQ ID NO: 2334 - DNA, 21 bp, synthetic construct
  source 1..21: mol_type = other DNA; mol_type = other DNA
tccgggaatgggtccttcata

SEQ ID NO: 2335 - DNA, 21 bp, synthetic construct
  source 1..21: mol_type = other DNA; mol_type = other DNA
tacacctcaaacaccaagtac

SEQ ID NO: 2336 - DNA, 21 bp, synthetic construct
  source 1..21: mol_type = other DNA; mol_type = other DNA
tactcaaagggcggcgacaac

SEQ ID NO: 2337 - DNA, 21 bp, synthetic construct
  source 1..21: mol_type = other DNA; mol_type = other DNA
taccatgacaacggccgcaac

SEQ ID NO: 2338 - DNA, 21 bp, synthetic construct
  source 1..21: mol_type = other DNA; mol_type = other DNA
tcagccggcaactcaacctac

SEQ ID NO: 2339 - DNA, 21 bp, synthetic construct
  source 1..21: mol_type = other DNA; mol_type = other DNA
tcaggcaccggcaacggctgg

SEQ ID NO: 2340 - DNA, 21 bp, synthetic construct
  source 1..21: mol_type = other DNA; mol_type = other DNA
tactcacgccccaacgaaaac

SEQ ID NO: 2341 - DNA, 21 bp, synthetic construct
  source 1..21: mol_type = other DNA; mol_type = other DNA
accaacgaatggggcggccat

SEQ ID NO: 2342 - DNA, 21 bp, synthetic construct
  source 1..21: mol_type = other DNA; mol_type = other DNA
aggccgccggagtataattcc

SEQ ID NO: 2343 - DNA, 21 bp, synthetic construct
  source 1..21: mol_type = other DNA; mol_type = other DNA
ataacgaattatcaccacgag

SEQ ID NO: 2344 - DNA, 21 bp, synthetic construct
  source 1..21: mol_type = other DNA; mol_type = other DNA
aacggcacctcatcaggctgg

SEQ ID NO: 2345 - DNA, 21 bp, synthetic construct
  source 1..21: mol_type = other DNA; mol_type = other DNA
accatgtcaaacacctactca

SEQ ID NO: 2346 - DNA, 21 bp, synthetic construct
  source 1..21: mol_type = other DNA; mol_type = other DNA
tattccgggtcccagcactat

SEQ ID NO: 2347 - DNA, 21 bp, synthetic construct
  source 1..21: mol_type = other DNA; mol_type = other DNA
tactcacgcgaaggcatcaac

SEQ ID NO: 2348 - DNA, 21 bp, synthetic construct
  source 1..21: mol_type = other DNA; mol_type = other DNA
cgcaacgaaacctcagcctac

SEQ ID NO: 2349 - DNA, 21 bp, synthetic construct
  source 1..21: mol_type = other DNA; mol_type = other DNA
agggatgggtataatgggttc

SEQ ID NO: 2350 - DNA, 21 bp, synthetic construct
  source 1..21: mol_type = other DNA; mol_type = other DNA
tacgcccgcgaaggcatcaac

SEQ ID NO: 2351 - DNA, 21 bp, synthetic construct
  source 1..21: mol_type = other DNA; mol_type = other DNA
ggcctgggcggcaacccctac

SEQ ID NO: 2352 - DNA, 21 bp, synthetic construct
  source 1..21: mol_type = other DNA; mol_type = other DNA
gtgaatataaatacggcgtgg

SEQ ID NO: 2353 - DNA, 21 bp, synthetic construct
  source 1..21: mol_type = other DNA; mol_type = other DNA
tactgggactcaacccattca

SEQ ID NO: 2354 - DNA, 21 bp, synthetic construct
  source 1..21: mol_type = other DNA; mol_type = other DNA
tattccaaagataatatgaat

SEQ ID NO: 2355 - DNA, 21 bp, synthetic construct
  source 1..21: mol_type = other DNA; mol_type = other DNA
gacaagaacacctcaaactgg

SEQ ID NO: 2356 - DNA, 21 bp, synthetic construct
  source 1..21: mol_type = other DNA; mol_type = other DNA
ttctccaaacacaatgagaat

SEQ ID NO: 2357 - DNA, 21 bp, synthetic construct
  source 1..21: mol_type = other DNA; mol_type = other DNA
ttttcatcaaccaacggcacc

SEQ ID NO: 2358 - DNA, 21 bp, synthetic construct
  source 1..21: mol_type = other DNA; mol_type = other DNA
tacgccaaggtaggcgaaaac

SEQ ID NO: 2359 - DNA, 21 bp, synthetic construct
  source 1..21: mol_type = other DNA; mol_type = other DNA
ttttcacgcctgggcgccaac

SEQ ID NO: 2360 - DNA, 21 bp, synthetic construct
  source 1..21: mol_type = other DNA; mol_type = other DNA
tcaaccggcatctcatcatac

SEQ ID NO: 2361 - DNA, 21 bp, synthetic construct
  source 1..21: mol_type = other DNA; mol_type = other DNA
tattccaaagagaattgtaat

SEQ ID NO: 2362 - DNA, 21 bp, synthetic construct
  source 1..21: mol_type = other DNA; mol_type = other DNA
aactcaggcgccgcctcatgg

SEQ ID NO: 2363 - DNA, 21 bp, synthetic construct
  source 1..21: mol_type = other DNA; mol_type = other DNA
tacgcccgcgacggcctgaac

SEQ ID NO: 2364 - DNA, 21 bp, synthetic construct
  source 1..21: mol_type = other DNA; mol_type = other DNA
ttgttgtccaatcagacgtgg

SEQ ID NO: 2365 - DNA, 21 bp, synthetic construct
  source 1..21: mol_type = other DNA; mol_type = other DNA
tactcacgcgacggcaacaac

SEQ ID NO: 2366 - DNA, 21 bp, synthetic construct
  source 1..21: mol_type = other DNA; mol_type = other DNA
tactcaaaggaaggctttaac

SEQ ID NO: 2367 - DNA, 21 bp, synthetic construct
  source 1..21: mol_type = other DNA; mol_type = other DNA
tatgcgaaagaggggttcaat

SEQ ID NO: 2368 - DNA, 21 bp, synthetic construct
  source 1..21: mol_type = other DNA; mol_type = other DNA
tactcacgcaccaactcagac

SEQ ID NO: 2369 - DNA, 21 bp, synthetic construct
  source 1..21: mol_type = other DNA; mol_type = other DNA
gtggcgtccgatcacgggagg

SEQ ID NO: 2370 - DNA, 21 bp, synthetic construct
  source 1..21: mol_type = other DNA; mol_type = other DNA
accaacgaaggctcagcctgg

SEQ ID NO: 2371 - DNA, 21 bp, synthetic construct
  source 1..21: mol_type = other DNA; mol_type = other DNA
aatgataaagggtatgggtcc

SEQ ID NO: 2372 - DNA, 21 bp, synthetic construct
  source 1..21: mol_type = other DNA; mol_type = other DNA
aataattatgggacgccgttc

SEQ ID NO: 2373 - DNA, 21 bp, synthetic construct
  source 1..21: mol_type = other DNA; mol_type = other DNA
gagatatccagggggcacatg

SEQ ID NO: 2374 - DNA, 21 bp, synthetic construct
  source 1..21: mol_type = other DNA; mol_type = other DNA
gaagaatttggccaacgcaac

SEQ ID NO: 2375 - DNA, 21 bp, synthetic construct
  source 1..21: mol_type = other DNA; mol_type = other DNA
accatgaccggctttggcgcc

SEQ ID NO: 2376 - DNA, 21 bp, synthetic construct
  source 1..21: mol_type = other DNA; mol_type = other DNA
aacatcaacggcaccggccgc

SEQ ID NO: 2377 - DNA, 21 bp, synthetic construct
  source 1..21: mol_type = other DNA; mol_type = other DNA
ggcgccggctcatcatcatac

SEQ ID NO: 2378 - DNA, 21 bp, synthetic construct
  source 1..21: mol_type = other DNA; mol_type = other DNA
cgcaacgacgaagccaagtgg

SEQ ID NO: 2379 - DNA, 21 bp, synthetic construct
  source 1..21: mol_type = other DNA; mol_type = other DNA
ctgcatgccacccaacccaac

SEQ ID NO: 2380 - DNA, 21 bp, synthetic construct
  source 1..21: mol_type = other DNA; mol_type = other DNA
tggaacaccggcgtacattac

SEQ ID NO: 2381 - DNA, 21 bp, synthetic construct
  source 1..21: mol_type = other DNA; mol_type = other DNA
tcagccggcacctcatcatac

SEQ ID NO: 2382 - DNA, 21 bp, synthetic construct
  source 1..21: mol_type = other DNA; mol_type = other DNA
accggcgaagccccccgcaac

SEQ ID NO: 2383 - DNA, 21 bp, synthetic construct
  source 1..21: mol_type = other DNA; mol_type = other DNA
gactaccaaggcaccaacccc

SEQ ID NO: 2384 - DNA, 21 bp, synthetic construct
  source 1..21: mol_type = other DNA; mol_type = other DNA
gggatatccatgataatgccg

SEQ ID NO: 2385 - DNA, 21 bp, synthetic construct
  source 1..21: mol_type = other DNA; mol_type = other DNA
gagaaaaatacggggtgggat

SEQ ID NO: 2386 - DNA, 21 bp, synthetic construct
  source 1..21: mol_type = other DNA; mol_type = other DNA
tattccaaattcgggaataat

SEQ ID NO: 2387 - DNA, 21 bp, synthetic construct
  source 1..21: mol_type = other DNA; mol_type = other DNA
tattccagggagaatgtgaat

SEQ ID NO: 2388 - DNA, 21 bp, synthetic construct
  source 1..21: mol_type = other DNA; mol_type = other DNA
tcatcagaaggcacccgctac

SEQ ID NO: 2389 - DNA, 21 bp, synthetic construct
  source 1..21: mol_type = other DNA; mol_type = other DNA
acccccaagtcaaactacgcc

SEQ ID NO: 2390 - DNA, 21 bp, synthetic construct
  source 1..21: mol_type = other DNA; mol_type = other DNA
gataatagggggacggggtcc

SEQ ID NO: 2391 - DNA, 21 bp, synthetic construct
  source 1..21: mol_type = other DNA; mol_type = other DNA
ttggcgaattcccactgggat

SEQ ID NO: 2392 - DNA, 21 bp, synthetic construct
  source 1..21: mol_type = other DNA; mol_type = other DNA
gaaggcggcaagtcaccctac

SEQ ID NO: 2393 - DNA, 21 bp, synthetic construct
  source 1..21: mol_type = other DNA; mol_type = other DNA
catggcgaatcagccggctgg

SEQ ID NO: 2394 - DNA, 21 bp, synthetic construct
  source 1..21: mol_type = other DNA; mol_type = other DNA
atctcacaagaacgctacggc

SEQ ID NO: 2395 - DNA, 21 bp, synthetic construct
  source 1..21: mol_type = other DNA; mol_type = other DNA
tattccaaagataattataat

SEQ ID NO: 2396 - DNA, 21 bp, synthetic construct
  source 1..21: mol_type = other DNA; mol_type = other DNA
ttctccagggataatccgaat

SEQ ID NO: 2397 - DNA, 21 bp, synthetic construct
  source 1..21: mol_type = other DNA; mol_type = other DNA
tttgcccgcgacaactttaac

SEQ ID NO: 2398 - DNA, 21 bp, synthetic construct
  source 1..21: mol_type = other DNA; mol_type = other DNA
tttgccaagtttggcgccaac

SEQ ID NO: 2399 - DNA, 21 bp, synthetic construct
  source 1..21: mol_type = other DNA; mol_type = other DNA
aacatgtaccccacccccggc

SEQ ID NO: 2400 - DNA, 21 bp, synthetic construct
  source 1..21: mol_type = other DNA; mol_type = other DNA
tactcacgctttggcgccaac

SEQ ID NO: 2401 - DNA, 21 bp, synthetic construct
  source 1..21: mol_type = other DNA; mol_type = other DNA
ttctccaggttcgggaataat

SEQ ID NO: 2402 - DNA, 21 bp, synthetic construct
  source 1..21: mol_type = other DNA; mol_type = other DNA
tattccaaatgggggacgaat

SEQ ID NO: 2403 - DNA, 21 bp, synthetic construct
  source 1..21: mol_type = other DNA; mol_type = other DNA
tattccaggtggggggagaat

SEQ ID NO: 2404 - DNA, 21 bp, synthetic construct
  source 1..21: mol_type = other DNA; mol_type = other DNA
tttgccaagtggggccaaaac

SEQ ID NO: 2405 - DNA, 21 bp, synthetic construct
  source 1..21: mol_type = other DNA; mol_type = other DNA
aaccaatcacccatccccgta

SEQ ID NO: 2406 - DNA, 21 bp, synthetic construct
  source 1..21: mol_type = other DNA; mol_type = other DNA
ggcggcaacacctcaacctac

SEQ ID NO: 2407 - DNA, 21 bp, synthetic construct
  source 1..21: mol_type = other DNA; mol_type = other DNA
agggcggtggatgcgtattcc

SEQ ID NO: 2408 - DNA, 21 bp, synthetic construct
  source 1..21: mol_type = other DNA; mol_type = other DNA
accatgggcaccaacccctac

SEQ ID NO: 2409 - DNA, 21 bp, synthetic construct
  source 1..21: mol_type = other DNA; mol_type = other DNA
gacaaccgcaacgtagcctgg

SEQ ID NO: 2410 - DNA, 21 bp, synthetic construct
  source 1..21: mol_type = other DNA; mol_type = other DNA
aagtcagtagactacggctca

SEQ ID NO: 2411 - DNA, 21 bp, synthetic construct
  source 1..21: mol_type = other DNA; mol_type = other DNA
ggcaactcaggcgccaactgg

SEQ ID NO: 2412 - DNA, 21 bp, synthetic construct
  source 1..21: mol_type = other DNA; mol_type = other DNA
tacgaacaaggctggcgcgac

SEQ ID NO: 2413 - DNA, 21 bp, synthetic construct
  source 1..21: mol_type = other DNA; mol_type = other DNA
gataatgggaatgcgaggtat

SEQ ID NO: 2414 - DNA, 21 bp, synthetic construct
  source 1..21: mol_type = other DNA; mol_type = other DNA
tacatgggcggcgaaatggta

SEQ ID NO: 2415 - DNA, 21 bp, synthetic construct
  source 1..21: mol_type = other DNA; mol_type = other DNA
gactttggctcaaacggccgc

SEQ ID NO: 2416 - DNA, 21 bp, synthetic construct
  source 1..21: mol_type = other DNA; mol_type = other DNA
ggccaagactactcaacctac

SEQ ID NO: 2417 - DNA, 21 bp, synthetic construct
  source 1..21: mol_type = other DNA; mol_type = other DNA
aacgcctacggcgtaccccgc

SEQ ID NO: 2418 - DNA, 21 bp, synthetic construct
  source 1..21: mol_type = other DNA; mol_type = other DNA
tcagccgaatcataccgcaac

SEQ ID NO: 2419 - DNA, 21 bp, synthetic construct
  source 1..21: mol_type = other DNA; mol_type = other DNA
tatacgcacttcgagttcgat

SEQ ID NO: 2420 - DNA, 21 bp, synthetic construct
  source 1..21: mol_type = other DNA; mol_type = other DNA
cgctcacaagacaccgcctgg

SEQ ID NO: 2421 - DNA, 21 bp, synthetic construct
  source 1..21: mol_type = other DNA; mol_type = other DNA
atctcaggcgccaccgccggc

SEQ ID NO: 2422 - DNA, 21 bp, synthetic construct
  source 1..21: mol_type = other DNA; mol_type = other DNA
tactcacgcgacggcgccaac

SEQ ID NO: 2423 - DNA, 21 bp, synthetic construct
  source 1..21: mol_type = other DNA; mol_type = other DNA
tacgccaagtggggccaaaac

SEQ ID NO: 2424 - DNA, 21 bp, synthetic construct
  source 1..21: mol_type = other DNA; mol_type = other DNA
ggggggggggcgacggcgtat

SEQ ID NO: 2425 - DNA, 21 bp, synthetic construct
  source 1..21: mol_type = other DNA; mol_type = other DNA
ttttcacgcgaaaaccccaac

SEQ ID NO: 2426 - DNA, 21 bp, synthetic construct
  source 1..21: mol_type = other DNA; mol_type = other DNA
ctgaagtacgaacatgccgac

SEQ ID NO: 2427 - DNA, 21 bp, synthetic construct
  source 1..21: mol_type = other DNA; mol_type = other DNA
aacgtatcagaactgcgctgg

SEQ ID NO: 2428 - DNA, 21 bp, synthetic construct
  source 1..21: mol_type = other DNA; mol_type = other DNA
taccaatcaggcgaaatgaac

SEQ ID NO: 2429 - DNA, 21 bp, synthetic construct
  source 1..21: mol_type = other DNA; mol_type = other DNA
tactcacgcgaaaacgacaac

SEQ ID NO: 2430 - DNA, 21 bp, synthetic construct
  source 1..21: mol_type = other DNA; mol_type = other DNA
acccgcaccggcgacggcgcc

SEQ ID NO: 2431 - DNA, 21 bp, synthetic construct
  source 1..21: mol_type = other DNA; mol_type = other DNA
tggcgccaaggcgaaatggaa

SEQ ID NO: 2432 - DNA, 21 bp, synthetic construct
  source 1..21: mol_type = other DNA; mol_type = other DNA
gtaggcaccatcggccgcgac

SEQ ID NO: 2433 - DNA, 21 bp, synthetic construct
  source 1..21: mol_type = other DNA; mol_type = other DNA
tcatcaaccggcaacggctgg

SEQ ID NO: 2434 - DNA, 21 bp, synthetic construct
  source 1..21: mol_type = other DNA; mol_type = other DNA
cgcggcgaaacctcaacctac

SEQ ID NO: 2435 - DNA, 21 bp, synthetic construct
  source 1..21: mol_type = other DNA; mol_type = other DNA
tattccaaatggggggagaat

SEQ ID NO: 2436 - DNA, 21 bp, synthetic construct
  source 1..21: mol_type = other DNA; mol_type = other DNA
cacgatgcgaaatccatgtat

SEQ ID NO: 2437 - DNA, 21 bp, synthetic construct
  source 1..21: mol_type = other DNA; mol_type = other DNA
gacaccgaccatatgcgcttt

SEQ ID NO: 2438 - DNA, 21 bp, synthetic construct
  source 1..21: mol_type = other DNA; mol_type = other DNA
cgctcagacggcggctacggc

SEQ ID NO: 2439 - DNA, 21 bp, synthetic construct
  source 1..21: mol_type = other DNA; mol_type = other DNA
ttttcacgcgacggccccaac

SEQ ID NO: 2440 - DNA, 21 bp, synthetic construct
  source 1..21: mol_type = other DNA; mol_type = other DNA
accaccggctcaaaccccttt

SEQ ID NO: 2441 - DNA, 21 bp, synthetic construct
  source 1..21: mol_type = other DNA; mol_type = other DNA
tttgcccgcgccggcgaaaac

SEQ ID NO: 2442 - DNA, 21 bp, synthetic construct
  source 1..21: mol_type = other DNA; mol_type = other DNA
cattcaaagaacaacgacaac

SEQ ID NO: 2443 - DNA, 21 bp, synthetic construct
  source 1..21: mol_type = other DNA; mol_type = other DNA
tacatccgccatgaaacccaa

SEQ ID NO: 2444 - DNA, 21 bp, synthetic construct
  source 1..21: mol_type = other DNA; mol_type = other DNA
aacggctcacaatcatcatac

SEQ ID NO: 2445 - DNA, 21 bp, synthetic construct
  source 1..21: mol_type = other DNA; mol_type = other DNA
tactcaggcggcggcatgccc

SEQ ID NO: 2446 - DNA, 21 bp, synthetic construct
  source 1..21: mol_type = other DNA; mol_type = other DNA
atgggctcatcaaacgcctgg

SEQ ID NO: 2447 - DNA, 21 bp, synthetic construct
  source 1..21: mol_type = other DNA; mol_type = other DNA
aacctgcaagcctcatcatgg

SEQ ID NO: 2448 - DNA, 21 bp, synthetic construct
  source 1..21: mol_type = other DNA; mol_type = other DNA
ttctccaggtataatgcgaat

SEQ ID NO: 2449 - DNA, 21 bp, synthetic construct
  source 1..21: mol_type = other DNA; mol_type = other DNA
aagggcgccgacgtatacccc

SEQ ID NO: 2450 - DNA, 21 bp, synthetic construct
  source 1..21: mol_type = other DNA; mol_type = other DNA
gtagactcaacctcaggccgc

SEQ ID NO: 2451 - DNA, 21 bp, synthetic construct
  source 1..21: mol_type = other DNA; mol_type = other DNA
aacatgcatggcatccccatg

SEQ ID NO: 2452 - DNA, 21 bp, synthetic construct
  source 1..21: mol_type = other DNA; mol_type = other DNA
ttggcgacgacgacgaattgg

SEQ ID NO: 2453 - DNA, 21 bp, synthetic construct
  source 1..21: mol_type = other DNA; mol_type = other DNA
tacgtaatggaaaaccgcaac

SEQ ID NO: 2454 - DNA, 21 bp, synthetic construct
  source 1..21: mol_type = other DNA; mol_type = other DNA
tactcacgcgacggctggaac

SEQ ID NO: 2455 - DNA, 21 bp, synthetic construct
  source 1..21: mol_type = other DNA; mol_type = other DNA
tactcacgcgacggcgacaac

SEQ ID NO: 2456 - DNA, 21 bp, synthetic construct
  source 1..21: mol_type = other DNA; mol_type = other DNA
gtacatgactcaggcggccgc

SEQ ID NO: 2457 - DNA, 21 bp, synthetic construct
  source 1..21: mol_type = other DNA; mol_type = other DNA
ttcgcgagggatgggccgaat

SEQ ID NO: 2458 - DNA, 21 bp, synthetic construct
  source 1..21: mol_type = other DNA; mol_type = other DNA
ttttcacgcgaaaacatcaac

SEQ ID NO: 2459 - DNA, 21 bp, synthetic construct
  source 1..21: mol_type = other DNA; mol_type = other DNA
ggcctgaagaactaccccgcc

SEQ ID NO: 2460 - DNA, 21 bp, synthetic construct
  source 1..21: mol_type = other DNA; mol_type = other DNA
tactcacgcgaaggcaccaac

SEQ ID NO: 2461 - DNA, 21 bp, synthetic construct
  source 1..21: mol_type = other DNA; mol_type = other DNA
gtgtccccgtcctccgtgtgg

SEQ ID NO: 2462 - DNA, 21 bp, synthetic construct
  source 1..21: mol_type = other DNA; mol_type = other DNA
ggcatccccaacatcgcctac

SEQ ID NO: 2463 - DNA, 21 bp, synthetic construct
  source 1..21: mol_type = other DNA; mol_type = other DNA
gaaggccataacggccgcgac

SEQ ID NO: 2464 - DNA, 21 bp, synthetic construct
  source 1..21: mol_type = other DNA; mol_type = other DNA
gactcaacctcagtaacctgg

SEQ ID NO: 2465 - DNA, 21 bp, synthetic construct
  source 1..21: mol_type = other DNA; mol_type = other DNA
ggctcaggcctggtagcctac

SEQ ID NO: 2466 - DNA, 21 bp, synthetic construct
  source 1..21: mol_type = other DNA; mol_type = other DNA
atgtcaggccaaggcgccggc

SEQ ID NO: 2467 - DNA, 21 bp, synthetic construct
  source 1..21: mol_type = other DNA; mol_type = other DNA
atgaaaaatggggatgcgtcc

SEQ ID NO: 2468 - DNA, 21 bp, synthetic construct
  source 1..21: mol_type = other DNA; mol_type = other DNA
agggatgatgtgtccgcgtat

SEQ ID NO: 2469 - DNA, 21 bp, synthetic construct
  source 1..21: mol_type = other DNA; mol_type = other DNA
cactgggcgtccaatgggatg

SEQ ID NO: 2470 - DNA, 21 bp, synthetic construct
  source 1..21: mol_type = other DNA; mol_type = other DNA
tacgccgtatcaggcgccggc

SEQ ID NO: 2471 - DNA, 21 bp, synthetic construct
  source 1..21: mol_type = other DNA; mol_type = other DNA
ctggacggcttttcagcccgc

SEQ ID NO: 2472 - DNA, 21 bp, synthetic construct
  source 1..21: mol_type = other DNA; mol_type = other DNA
gaacaatggggcaacggcgac

SEQ ID NO: 2473 - DNA, 21 bp, synthetic construct
  source 1..21: mol_type = other DNA
tacgccaagtttggccataac

SEQ ID NO: 2474 - DNA, 21 bp, synthetic construct
  source 1..21: mol_type = other DNA
aatgtggatgggatggcgtgg

SEQ ID NO: 2475 - DNA, 21 bp, synthetic construct
  source 1..21: mol_type = other DNA
tcaaaccccggctcagtatac

SEQ ID NO: 2476 - DNA, 21 bp, synthetic construct
  source 1..21: mol_type = other DNA
tactcaaacctgtcaatgccc

SEQ ID NO: 2477 - DNA, 21 bp, synthetic construct
  source 1..21: mol_type = other DNA; mol_type = other DNA
cgccaagtagacgtatacgcc

SEQ ID NO: 2478 - DNA, 21 bp, synthetic construct
  source 1..21: mol_type = other DNA; mol_type = other DNA
atagatgggacgaatgggagg

SEQ ID NO: 2479 - DNA, 21 bp, synthetic construct
  source 1..21: mol_type = other DNA; mol_type = other DNA
ttgcacggggggccggcgccg

SEQ ID NO: 2480 - DNA, 21 bp, synthetic construct
  source 1..21: mol_type = other DNA; mol_type = other DNA
tacgccaaggacggcatgaac

SEQ ID NO: 2481 - DNA, 21 bp, synthetic construct
  source 1..21: mol_type = other DNA; mol_type = other DNA
tcctccggggagtccttgtat

SEQ ID NO: 2482 - DNA, 21 bp, synthetic construct
  source 1..21: mol_type = other DNA; mol_type = other DNA
cgcgaccccggctacgtagta

SEQ ID NO: 2483 - DNA, 21 bp, synthetic construct
  source 1..21: mol_type = other DNA; mol_type = other DNA
cagggggggacgacgtcctat

SEQ ID NO: 2484 - DNA, 21 bp, synthetic construct
  source 1..21: mol_type = other DNA; mol_type = other DNA
ttttcacgcgaaggctggaac

SEQ ID NO: 2485 - DNA, 21 bp, synthetic construct
  source 1..21: mol_type = other DNA; mol_type = other DNA
tatgcgaggttcggggcgaat

SEQ ID NO: 2486 - DNA, 21 bp, synthetic construct
  source 1..21: mol_type = other DNA; mol_type = other DNA
acctcagcctcaaacggcgta

SEQ ID NO: 2487 - DNA, 21 bp, synthetic construct
  source 1..21: mol_type = other DNA; mol_type = other DNA
acgaatccgaatgtggcgtgg

SEQ ID NO: 2488 - DNA, 21 bp, synthetic construct
  source 1..21: mol_type = other DNA; mol_type = other DNA
tacgcccgcgacaactacaac

SEQ ID NO: 2489 - DNA, 21 bp, synthetic construct
  source 1..21: mol_type = other DNA; mol_type = other DNA
ttctccaggttcgggcagaat

SEQ ID NO: 2490 - DNA, 21 bp, synthetic construct
  source 1..21: mol_type = other DNA; mol_type = other DNA
ggcgaacgcctggtaacctac

SEQ ID NO: 2491 - DNA, 21 bp, synthetic construct
  source 1..21: mol_type = other DNA; mol_type = other DNA
acgccgttgtccccgtcctgg

SEQ ID NO: 2492 - DNA, 21 bp, synthetic construct
  source 1..21: mol_type = other DNA; mol_type = other DNA
ttctccaggtatggggagaat

SEQ ID NO: 2493 - DNA, 21 bp, synthetic construct
  source 1..21: mol_type = other DNA; mol_type = other DNA
tttgcccgcctgggcgacaac

SEQ ID NO: 2494 - DNA, 21 bp, synthetic construct
  source 1..21: mol_type = other DNA; mol_type = other DNA
tattccagggagaatgagaat

SEQ ID NO: 2495 - DNA, 21 bp, synthetic construct
  source 1..21: mol_type = other DNA; mol_type = other DNA
tttgcccgcgacaacatgaac

SEQ ID NO: 2496 - DNA, 21 bp, synthetic construct
  source 1..21: mol_type = other DNA; mol_type = other DNA
gtaggcgaagccggctacttt

SEQ ID NO: 2497 - DNA, 21 bp, synthetic construct
  source 1..21: mol_type = other DNA; mol_type = other DNA
tatgcgaggttcgggcagaat

SEQ ID NO: 2498 - DNA, 21 bp, synthetic construct
  source 1..21: mol_type = other DNA; mol_type = other DNA
ttttcacgctttggcgaaaac

SEQ ID NO: 2499 - DNA, 21 bp, synthetic construct
  source 1..21: mol_type = other DNA; mol_type = other DNA
ttgaaagatgggaggtccgcg

SEQ ID NO: 2500 - DNA, 21 bp, synthetic construct
  source 1..21: mol_type = other DNA; mol_type = other DNA
atcgccacccgcggcatcgac

SEQ ID NO: 2501 - DNA, 21 bp, synthetic construct
  source 1..21: mol_type = other DNA
gcggattccgcgtcctcctgg

SEQ ID NO: 2502 - DNA, 21 bp, synthetic construct
  source 1..21: mol_type = other DNA; mol_type = other DNA
aaccaacccggctcacatatg

SEQ ID NO: 2503 - DNA, 21 bp, synthetic construct
  source 1..21: mol_type = other DNA; mol_type = other DNA
tttgcccgccccggccataac

SEQ ID NO: 2504 - DNA, 21 bp, synthetic construct
  source 1..21: mol_type = other DNA; mol_type = other DNA
ttttcacgctacggcgacaac

SEQ ID NO: 2505 - DNA, 21 bp, synthetic construct
  source 1..21: mol_type = other DNA; mol_type = other DNA
tacgcccgcgacggcggcaac

SEQ ID NO: 2506 - DNA, 21 bp, synthetic construct
  source 1..21: mol_type = other DNA; mol_type = other DNA
tcaggctcatcaaccggctac

SEQ ID NO: 2507 - DNA, 21 bp, synthetic construct
  source 1..21: mol_type = other DNA
ggcaacggcgccggctactca

SEQ ID NO: 2508 - DNA, 21 bp, synthetic construct
  source 1..21: mol_type = other DNA
aaccattcaggcgacccctca

SEQ ID NO: 2509 - DNA, 21 bp, synthetic construct
  source 1..21: mol_type = other DNA; mol_type = other DNA
gaggatgggaaaggggggtgg

SEQ ID NO: 2510 - DNA, 21 bp, synthetic construct
  source 1..21: mol_type = other DNA; mol_type = other DNA
tattccaaagataatgggaat

SEQ ID NO: 2511 - DNA, 21 bp, synthetic construct
  source 1..21: mol_type = other DNA; mol_type = other DNA
tactcacgctttggcgtaaac

SEQ ID NO: 2512 - DNA, 21 bp, synthetic construct
  source 1..21: mol_type = other DNA; mol_type = other DNA
aacacctacggcaccggcgaa

SEQ ID NO: 2513 - DNA, 21 bp, synthetic construct
  source 1..21: mol_type = other DNA; mol_type = other DNA
ttctccccgaatgtggtgttc

SEQ ID NO: 2514 - DNA, 21 bp, synthetic construct
  source 1..21: mol_type = other DNA; mol_type = other DNA
tactcaaaggaaggcatgaac

SEQ ID NO: 2515 - DNA, 21 bp, synthetic construct
  source 1..21: mol_type = other DNA; mol_type = other DNA
aacggcgaagccggccgctac

SEQ ID NO: 2516 - DNA, 21 bp, synthetic construct
  source 1..21: mol_type = other DNA; mol_type = other DNA
ttggaggggcagtatgggaat

SEQ ID NO: 2517 - DNA, 21 bp, synthetic construct
  source 1..21: mol_type = other DNA; mol_type = other DNA
ttttcaaaggaaaacggcaac

SEQ ID NO: 2518 - DNA, 21 bp, synthetic construct
  source 1..21: mol_type = other DNA; mol_type = other DNA
gcgttggaggggcactcctgg

SEQ ID NO: 2519 - DNA, 21 bp, synthetic construct
  source 1..21: mol_type = other DNA; mol_type = other DNA
tacgccaaggaaaaccccaac

SEQ ID NO: 2520 - DNA, 21 bp, synthetic construct
  source 1..21: mol_type = other DNA; mol_type = other DNA
tacgccaagtttggcgccaac

SEQ ID NO: 2521 - DNA, 21 bp, synthetic construct
  source 1..21: mol_type = other DNA; mol_type = other DNA
ttctccaaagataatgcgaat

SEQ ID NO: 2522 - DNA, 21 bp, synthetic construct
  source 1..21: mol_type = other DNA; mol_type = other DNA
gccaaccatgacgtaggctgg

SEQ ID NO: 2523 - DNA, 21 bp, synthetic construct
  source 1..21: mol_type = other DNA; mol_type = other DNA
gaacccccctcactgcgctac

SEQ ID NO: 2524 - DNA, 21 bp, synthetic construct
  source 1..21: mol_type = other DNA; mol_type = other DNA
ggctcaaacgactcacgctac

SEQ ID NO: 2525 - DNA, 21 bp, synthetic construct
  source 1..21: mol_type = other DNA; mol_type = other DNA
ttctccaaattcgggtccaat

SEQ ID NO: 2526 - DNA, 21 bp, synthetic construct
  source 1..21: mol_type = other DNA; mol_type = other DNA
ggcctgaaggactcagcctgg

SEQ ID NO: 2527 - DNA, 21 bp, synthetic construct
  source 1..21: mol_type = other DNA; mol_type = other DNA
tcaaaggaacatggctacgcc

SEQ ID NO: 2528 - DNA, 21 bp, synthetic construct
  source 1..21: mol_type = other DNA
tattccagggataatttgaat

SEQ ID NO: 2529 - DNA, 21 bp, synthetic construct
  source 1..21: mol_type = other DNA
ttttcaaagtttggcctgaac

SEQ ID NO: 2530 - DNA, 21 bp, synthetic construct
  source 1..21: mol_type = other DNA
atccaatacgaaaacggcggc

SEQ ID NO: 2531 - DNA, 21 bp, synthetic construct
  source 1..21: mol_type = other DNA; mol_type = other DNA
ggctacaactactcaggcgcc

SEQ ID NO: 2532 - DNA, 21 bp, synthetic construct
  source 1..21: mol_type = other DNA
atcatgtcagccgacgcctgg

SEQ ID NO: 2533 - DNA, 21 bp, synthetic construct
  source 1..21: mol_type = other DNA
tactcacgctttggcgaaaac

SEQ ID NO: 2534 - DNA, 21 bp, synthetic construct
  source 1..21: mol_type = other DNA; mol_type = other DNA
gatatgaaagggaatgtggcg

SEQ ID NO: 2535 - DNA, 21 bp, synthetic construct
  source 1..21: mol_type = other DNA; mol_type = other DNA
tttgccaagtttggctcaaac

SEQ ID NO: 2536 - DNA, 21 bp, synthetic construct
  source 1..21: mol_type = other DNA; mol_type = other DNA
acctcagaccgcgacggccgc

SEQ ID NO: 2537 - DNA, 21 bp, synthetic construct
  source 1..21: mol_type = other DNA; mol_type = other DNA
aaccatgccggcaacggcgcc

SEQ ID NO: 2538 - DNA, 21 bp, synthetic construct
  source 1..21: mol_type = other DNA; mol_type = other DNA
aacgaagcctcaggcggctgg

SEQ ID NO: 2539 - DNA, 21 bp, synthetic construct
  source 1..21: mol_type = other DNA; mol_type = other DNA
ttttcaaagtttggccaaaac

SEQ ID NO: 2540 - DNA, 21 bp, synthetic construct
  source 1..21: mol_type = other DNA; mol_type = other DNA
aacatgaccggcaacggcgcc

SEQ ID NO: 2541 - DNA, 21 bp, synthetic construct
  source 1..21: mol_type = other DNA; mol_type = other DNA
aacggcaccggcgccacctac

SEQ ID NO: 2542 - DNA, 21 bp, synthetic construct
  source 1..21: mol_type = other DNA; mol_type = other DNA
tattccaaattcgggacgaat

SEQ ID NO: 2543 - DNA, 21 bp, synthetic construct
  source 1..21: mol_type = other DNA; mol_type = other DNA
gcctcaatcgacggccccaag

SEQ ID NO: 2544 - DNA, 21 bp, synthetic construct
  source 1..21: mol_type = other DNA; mol_type = other DNA
tcagaccgcggctcaggcgcc

SEQ ID NO: 2545 - DNA, 21 bp, synthetic construct
  source 1..21: mol_type = other DNA; mol_type = other DNA
tattccaaattcggggagaat

SEQ ID NO: 2546 - DNA, 21 bp, synthetic construct
  source 1..21: mol_type = other DNA; mol_type = other DNA
tttatgtcatcaaacggcgcc

SEQ ID NO: 2547 - DNA, 21 bp, synthetic construct
  source 1..21: mol_type = other DNA; mol_type = other DNA
ttttcaaaggaaaactacaac

SEQ ID NO: 2548 - DNA, 21 bp, synthetic construct
  source 1..21: mol_type = other DNA; mol_type = other DNA
tacaccaactacaacggcgcc

SEQ ID NO: 2549 - DNA, 21 bp, synthetic construct
  source 1..21: mol_type = other DNA; mol_type = other DNA
tggcgcgactcaaacggcgcc

SEQ ID NO: 2550 - DNA, 21 bp, synthetic construct
  source 1..21: mol_type = other DNA; mol_type = other DNA
tacgccaagtggggcaccaac

SEQ ID NO: 2551 - DNA, 21 bp, synthetic construct
  source 1..21: mol_type = other DNA; mol_type = other DNA
tttgccaagtggggcgaaaac

SEQ ID NO: 2552 - DNA, 21 bp, synthetic construct
  source 1..21: mol_type = other DNA; mol_type = other DNA
tatttcagggatcacgcgccg

SEQ ID NO: 2553 - DNA, 21 bp, synthetic construct
  source 1..21: mol_type = other DNA; mol_type = other DNA
tacgcccgctttggcgacaac

SEQ ID NO: 2554 - DNA, 21 bp, synthetic construct
  source 1..21: mol_type = other DNA; mol_type = other DNA
accgcctacggcgacggcgcc

SEQ ID NO: 2555 - DNA, 21 bp, synthetic construct
  source 1..21: mol_type = other DNA; mol_type = other DNA
tattccaggcagaattataat

SEQ ID NO: 2556 - DNA, 21 bp, synthetic construct
  source 1..21: mol_type = other DNA; mol_type = other DNA
tatgcgaggatggggtataat

SEQ ID NO: 2557 - DNA, 21 bp, synthetic construct
  source 1..21: mol_type = other DNA; mol_type = other DNA
tatgcgagggggaattataat

SEQ ID NO: 2558 - DNA, 21 bp, synthetic construct
  source 1..21: mol_type = other DNA; mol_type = other DNA
tattccaggtccaattataat

SEQ ID NO: 2559 - DNA, 21 bp, synthetic construct
  source 1..21: mol_type = other DNA; mol_type = other DNA
tattccaggttgaattataat

SEQ ID NO: 2560 - DNA, 21 bp, synthetic construct
  source 1..21: mol_type = other DNA; mol_type = other DNA
ttctccagggtgaatataaat

SEQ ID NO: 2561 - DNA, 21 bp, synthetic construct
  source 1..21: mol_type = other DNA; mol_type = other DNA
tattccaggcacgggcagaat

SEQ ID NO: 2562 - DNA, 21 bp, synthetic construct
  source 1..21: mol_type = other DNA; mol_type = other DNA
tattccaggcaggggtataat

SEQ ID NO: 2563 - DNA, 21 bp, synthetic construct
  source 1..21: mol_type = other DNA; mol_type = other DNA
ttctccaggttggggataaat

SEQ ID NO: 2564 - DNA, 21 bp, synthetic construct
  source 1..21: mol_type = other DNA; mol_type = other DNA
tatgcgaggatgaatataaat

SEQ ID NO: 2565 - DNA, 21 bp, synthetic construct
  source 1..21: mol_type = other DNA; mol_type = other DNA
tattccagggcgaattataat

SEQ ID NO: 2566 - DNA, 21 bp, synthetic construct
  source 1..21: mol_type = other DNA; mol_type = other DNA
tattccaggttgaatataaat

SEQ ID NO: 2567 - DNA, 21 bp, synthetic construct
  source 1..21: mol_type = other DNA; mol_type = other DNA
ttcgcgaggggggggtataat

SEQ ID NO: 2568 - DNA, 21 bp, synthetic construct
  source 1..21: mol_type = other DNA; mol_type = other DNA
ttttcacgcgccaaccataac

SEQ ID NO: 2569 - DNA, 21 bp, synthetic construct
  source 1..21: mol_type = other DNA; mol_type = other DNA
ttctccagggcggggtataat

SEQ ID NO: 2570 - DNA, 21 bp, synthetic construct
  source 1..21: mol_type = other DNA; mol_type = other DNA
ttttcaaagatgaactacaac

SEQ ID NO: 2571 - DNA, 21 bp, synthetic construct
  source 1..21: mol_type = other DNA; mol_type = other DNA
ttcgcgaggttgaatataaat

SEQ ID NO: 2572 - DNA, 21 bp, synthetic construct
  source 1..21: mol_type = other DNA; mol_type = other DNA
tattccaaacagaatataaat

SEQ ID NO: 2573 - DNA, 21 bp, synthetic construct
  source 1..21: mol_type = other DNA; mol_type = other DNA
ttcgcgaggacgaattataat

SEQ ID NO: 2574 - DNA, 21 bp, synthetic construct
  source 1..21: mol_type = other DNA; mol_type = other DNA
tatgcgaggatagggtataat

SEQ ID NO: 2575 - DNA, 21 bp, synthetic construct
  source 1..21: mol_type = other DNA; mol_type = other DNA
tattccaaattgaataataat

SEQ ID NO: 2576 - DNA, 21 bp, synthetic construct
  source 1..21: mol_type = other DNA; mol_type = other DNA
tatgcgaaattcaattataat

SEQ ID NO: 2577 - DNA, 21 bp, synthetic construct
  source 1..21: mol_type = other DNA; mol_type = other DNA
tatgcgaggcagaattataat

SEQ ID NO: 2578 - DNA, 21 bp, synthetic construct
  source 1..21: mol_type = other DNA; mol_type = other DNA
ttctccagggcgaattataat

SEQ ID NO: 2579 - DNA, 21 bp, synthetic construct
  source 1..21: mol_type = other DNA; mol_type = other DNA
tatgcgaaagcggggtataat

SEQ ID NO: 2580 - DNA, 21 bp, synthetic construct
  source 1..21: mol_type = other DNA; mol_type = other DNA
tattccaggacgaatataaat

SEQ ID NO: 2581 - DNA, 21 bp, synthetic construct
  source 1..21: mol_type = other DNA; mol_type = other DNA
tattccaaaatggggtataat

SEQ ID NO: 2582 - DNA, 21 bp, synthetic construct
  source 1..21: mol_type = other DNA; mol_type = other DNA
ttctccaggataaataataat

SEQ ID NO: 2583 - DNA, 21 bp, synthetic construct
  source 1..21: mol_type = other DNA; mol_type = other DNA
ttctccagggcgaatataaat

SEQ ID NO: 2584 - DNA, 21 bp, synthetic construct
  source 1..21: mol_type = other DNA; mol_type = other DNA
tattccaggttgaataataat

SEQ ID NO: 2585 - DNA, 21 bp, synthetic construct
  source 1..21: mol_type = other DNA; mol_type = other DNA
tatgcgagggcggggaataat

SEQ ID NO: 2586 - DNA, 21 bp, synthetic construct
  source 1..21: mol_type = other DNA; mol_type = other DNA
tattccaaattgaatataaat

SEQ ID NO: 2587 - DNA, 21 bp, synthetic construct
  source 1..21: mol_type = other DNA; mol_type = other DNA
ttttcacgcctgaaccataac

SEQ ID NO: 2588 - DNA, 21 bp, synthetic construct
  source 1..21: mol_type = other DNA; mol_type = other DNA
tattccaggcagaataataat

SEQ ID NO: 2589 - DNA, 21 bp, synthetic construct
  source 1..21: mol_type = other DNA; mol_type = other DNA
ttcgcgaggatagggccgaat

SEQ ID NO: 2590 - DNA, 21 bp, synthetic construct
  source 1..21: mol_type = other DNA; mol_type = other DNA
tattccagggggaattataat

SEQ ID NO: 2591 - DNA, 21 bp, synthetic construct
  source 1..21: mol_type = other DNA; mol_type = other DNA
tacgcccgctacggcgtaaac

SEQ ID NO: 2592 - DNA, 21 bp, synthetic construct
  source 1..21: mol_type = other DNA; mol_type = other DNA
tactcacgcctgaactttaac

SEQ ID NO: 2593 - DNA, 21 bp, synthetic construct
  source 1..21: mol_type = other DNA; mol_type = other DNA
tatgcgaaatatgggtataat

SEQ ID NO: 2594 - DNA, 21 bp, synthetic construct
  source 1..21: mol_type = other DNA; mol_type = other DNA
tacgcccgcatgggctttaac

SEQ ID NO: 2595 - DNA, 21 bp, synthetic construct
  source 1..21: mol_type = other DNA; mol_type = other DNA
tattccaaagcgaatatgaat

SEQ ID NO: 2596 - DNA, 21 bp, synthetic construct
  source 1..21: mol_type = other DNA; mol_type = other DNA
ttctccaaaataaatataaat

SEQ ID NO: 2597 - DNA, 21 bp, synthetic construct
  source 1..21: mol_type = other DNA; mol_type = other DNA
tactcacgctacaacgccaac

SEQ ID NO: 2598 - DNA, 21 bp, synthetic construct
  source 1..21: mol_type = other DNA; mol_type = other DNA
tatgcgagggcggggtataat

SEQ ID NO: 2599 - DNA, 21 bp, synthetic construct
  source 1..21: mol_type = other DNA; mol_type = other DNA
ttctccagggcggggaataat

SEQ ID NO: 2600 - DNA, 21 bp, synthetic construct
  source 1..21: mol_type = other DNA; mol_type = other DNA
ttctccaaaatagggtataat

SEQ ID NO: 2601 - DNA, 21 bp, synthetic construct
  source 1..21: mol_type = other DNA; mol_type = other DNA
tattccaaacacaattataat

SEQ ID NO: 2602 - DNA, 21 bp, synthetic construct
  source 1..21: mol_type = other DNA; mol_type = other DNA
tatgcgaggacggggtataat

SEQ ID NO: 2603 - DNA, 21 bp, synthetic construct
  source 1..21: mol_type = other DNA; mol_type = other DNA
tattccaggaatgggaataat

SEQ ID NO: 2604 - DNA, 21 bp, synthetic construct
  source 1..21: mol_type = other DNA; mol_type = other DNA
tacgcccgcggcggctacaac

SEQ ID NO: 2605 - DNA, 21 bp, synthetic construct
  source 1..21: mol_type = other DNA; mol_type = other DNA
tattccagggcggggtataat

SEQ ID NO: 2606 - DNA, 21 bp, synthetic construct
  source 1..21: mol_type = other DNA; mol_type = other DNA
tatgcgaaaacggggtataat

SEQ ID NO: 2607 - DNA, 21 bp, synthetic construct
  source 1..21: mol_type = other DNA; mol_type = other DNA
tattccaaagggaattgtaat

SEQ ID NO: 2608 - DNA, 21 bp, synthetic construct
  source 1..21: mol_type = other DNA; mol_type = other DNA
tatgcgaaaatggggtataat

SEQ ID NO: 2609 - DNA, 21 bp, synthetic construct
  source 1..21: mol_type = other DNA; mol_type = other DNA
ttcgcgaggaatgggtataat

SEQ ID NO: 2610 - DNA, 21 bp, synthetic construct
  source 1..21: mol_type = other DNA; mol_type = other DNA
ttctccaggaataatatgaat

SEQ ID NO: 2611 - DNA, 21 bp, synthetic construct
  source 1..21: mol_type = other DNA; mol_type = other DNA
tattccaggcagaatatgaat

SEQ ID NO: 2612 - DNA, 21 bp, synthetic construct
  source 1..21: mol_type = other DNA; mol_type = other DNA
tattccaggaataatatgaat

SEQ ID NO: 2613 - DNA, 21 bp, synthetic construct
  source 1..21: mol_type = other DNA; mol_type = other DNA
tattccaaaaggaatgagaat

SEQ ID NO: 2614 - DNA, 21 bp, synthetic construct
  source 1..21: mol_type = other DNA; mol_type = other DNA
tattccaaagcggggtggaat

SEQ ID NO: 2615 - DNA, 21 bp, synthetic construct
  source 1..21: mol_type = other DNA; mol_type = other DNA
tatgcgaggcacaatttcaat

SEQ ID NO: 2616 - DNA, 21 bp, synthetic construct
  source 1..21: mol_type = other DNA; mol_type = other DNA
tatgcgagggcgaattataat

SEQ ID NO: 2617 - DNA, 21 bp, synthetic construct
  source 1..21: mol_type = other DNA; mol_type = other DNA
tatgcgaggtatgggccgaat

SEQ ID NO: 2618 - DNA, 21 bp, synthetic construct
  source 1..21: mol_type = other DNA; mol_type = other DNA
ttttcacgctcaggccataac

SEQ ID NO: 2619 - DNA, 21 bp, synthetic construct
  source 1..21: mol_type = other DNA; mol_type = other DNA
tacgccaaggtaggcaagaac

SEQ ID NO: 2620 - DNA, 21 bp, synthetic construct
  source 1..21: mol_type = other DNA; mol_type = other DNA
tactcacgccaaaaccataac

SEQ ID NO: 2621 - DNA, 21 bp, synthetic construct
  source 1..21: mol_type = other DNA; mol_type = other DNA
ttctccaggatgaatttgaat

SEQ ID NO: 2622 - DNA, 21 bp, synthetic construct
  source 1..21: mol_type = other DNA; mol_type = other DNA
ttcgcgaggtccgggtataat

SEQ ID NO: 2623 - DNA, 21 bp, synthetic construct
  source 1..21: mol_type = other DNA; mol_type = other DNA
tacgccaagcatggccataac

SEQ ID NO: 2624 - DNA, 21 bp, synthetic construct
  source 1..21: mol_type = other DNA; mol_type = other DNA
tatgcgaggggggggataaat

SEQ ID NO: 2625 - DNA, 21 bp, synthetic construct
  source 1..21: mol_type = other DNA; mol_type = other DNA
ttctccaaagtggggtataat

SEQ ID NO: 2626 - DNA, 21 bp, synthetic construct
  source 1..21: mol_type = other DNA; mol_type = other DNA
tatgcgaggcaggggtataat

SEQ ID NO: 2627 - DNA, 21 bp, synthetic construct
  source 1..21: mol_type = other DNA; mol_type = other DNA
tacgccaagtacggccccaac

SEQ ID NO: 2628 - DNA, 21 bp, synthetic construct
  source 1..21: mol_type = other DNA; mol_type = other DNA
tattccaggcacaatccgaat

SEQ ID NO: 2629 - DNA, 21 bp, synthetic construct
  source 1..21: mol_type = other DNA; mol_type = other DNA
tattccagggtggggataaat

SEQ ID NO: 2630 - DNA, 21 bp, synthetic construct
  source 1..21: mol_type = other DNA; mol_type = other DNA
tccgggtcctatacgaattat

SEQ ID NO: 2631 - DNA, 21 bp, synthetic construct
  source 1..21: mol_type = other DNA; mol_type = other DNA
tatgcgagggggaataataat

SEQ ID NO: 2632 - DNA, 21 bp, synthetic construct
  source 1..21: mol_type = other DNA; mol_type = other DNA
tatgcgagggtggggaataat

SEQ ID NO: 2633 - DNA, 21 bp, synthetic construct
  source 1..21: mol_type = other DNA; mol_type = other DNA
ttctccaaatccgggtataat

SEQ ID NO: 2634 - DNA, 21 bp, synthetic construct
  source 1..21: mol_type = other DNA; mol_type = other DNA
tatgcgaaagtggggtataat

SEQ ID NO: 2635 - DNA, 21 bp, synthetic construct
  source 1..21: mol_type = other DNA; mol_type = other DNA
ttctccaggttggggcacaat

SEQ ID NO: 2636 - DNA, 21 bp, synthetic construct
  source 1..21: mol_type = other DNA; mol_type = other DNA
tgtgcgccggcggggagggat

SEQ ID NO: 2637 - DNA, 21 bp, synthetic construct
  source 1..21: mol_type = other DNA; mol_type = other DNA
tattccaggtccgggttcaat

SEQ ID NO: 2638 - DNA, 21 bp, synthetic construct
  source 1..21: mol_type = other DNA; mol_type = other DNA
ttttcacgcgtaggccccaac

SEQ ID NO: 2639 - DNA, 21 bp, synthetic construct
  source 1..21: mol_type = other DNA; mol_type = other DNA
ttttcaaagtttggccccaac

SEQ ID NO: 2640 - DNA, 21 bp, synthetic construct
  source 1..21: mol_type = other DNA; mol_type = other DNA
tattccaggcacaatttcaat

SEQ ID NO: 2641 - DNA, 21 bp, synthetic construct
  source 1..21: mol_type = other DNA; mol_type = other DNA
tatgcgaggcaggggataaat

SEQ ID NO: 2642 - DNA, 21 bp, synthetic construct
  source 1..21: mol_type = other DNA; mol_type = other DNA
tattccaaaacggggtataat

SEQ ID NO: 2643 - DNA, 21 bp, synthetic construct
  source 1..21: mol_type = other DNA; mol_type = other DNA
tattccaggtccgggcacaat

SEQ ID NO: 2644 - DNA, 21 bp, synthetic construct
  source 1..21: mol_type = other DNA; mol_type = other DNA
ttctccaggatagggcacaat

SEQ ID NO: 2645 - DNA, 21 bp, synthetic construct
  source 1..21: mol_type = other DNA; mol_type = other DNA
tactcacgcaagaacgacaac

SEQ ID NO: 2646 - DNA, 21 bp, synthetic construct
  source 1..21: mol_type = other DNA; mol_type = other DNA
tatgcgaggaatgggtataat

SEQ ID NO: 2647 - DNA, 21 bp, synthetic construct
  source 1..21: mol_type = other DNA; mol_type = other DNA
aggggggatgggcactataat

SEQ ID NO: 2648 - DNA, 21 bp, synthetic construct
  source 1..21: mol_type = other DNA; mol_type = other DNA
tattccaggacggggtataat

SEQ ID NO: 2649 - DNA, 21 bp, synthetic construct
  source 1..21: mol_type = other DNA; mol_type = other DNA
tattccaggcacgggataaat

SEQ ID NO: 2650 - DNA, 21 bp, synthetic construct
  source 1..21: mol_type = other DNA; mol_type = other DNA
tattccagggcgaatccgaat

SEQ ID NO: 2651 - DNA, 21 bp, synthetic construct
  source 1..21: mol_type = other DNA; mol_type = other DNA
tattccaggacgaatatgaat

SEQ ID NO: 2652 - DNA, 21 bp, synthetic construct
  source 1..21: mol_type = other DNA; mol_type = other DNA
tatgcgaggtccgggataaat

SEQ ID NO: 2653 - DNA, 21 bp, synthetic construct
  source 1..21: mol_type = other DNA; mol_type = other DNA
ttctccaggttggggaataat

SEQ ID NO: 2654 - DNA, 21 bp, synthetic construct
  source 1..21: mol_type = other DNA; mol_type = other DNA
tatcacaggttggggatagat

SEQ ID NO: 2655 - DNA, 21 bp, synthetic construct
  source 1..21: mol_type = other DNA; mol_type = other DNA
tattccaggaatgggataaat

SEQ ID NO: 2656 - DNA, 21 bp, synthetic construct
  source 1..21: mol_type = other DNA; mol_type = other DNA
tatgcgaggttgaataataat

SEQ ID NO: 2657 - DNA, 21 bp, synthetic construct
  source 1..21: mol_type = other DNA; mol_type = other DNA
ttctccagggcgaatatgaat

SEQ ID NO: 2658 - DNA, 21 bp, synthetic construct
  source 1..21: mol_type = other DNA; mol_type = other DNA
tatgcgagggggaatatgaat

SEQ ID NO: 2659 - DNA, 21 bp, synthetic construct
  source 1..21: mol_type = other DNA; mol_type = other DNA
tacgcccgctcaaaccccaac

SEQ ID NO: 2660 - DNA, 21 bp, synthetic construct
  source 1..21: mol_type = other DNA; mol_type = other DNA
tacgcccgctacggcaacaac

SEQ ID NO: 2661 - DNA, 21 bp, synthetic construct
  source 1..21: mol_type = other DNA; mol_type = other DNA
tattccaaacacgggtataat

SEQ ID NO: 2662 - DNA, 21 bp, synthetic construct
  source 1..21: mol_type = other DNA; mol_type = other DNA
ttcgcgaggcaggggaataat

SEQ ID NO: 2663 - DNA, 21 bp, synthetic construct
  source 1..21: mol_type = other DNA; mol_type = other DNA
ctgcataagctgctggtaggc

SEQ ID NO: 2664 - DNA, 21 bp, synthetic construct
  source 1..21: mol_type = other DNA; mol_type = other DNA
ttcgcgaggacggggataaat

SEQ ID NO: 2665 - DNA, 21 bp, synthetic construct
  source 1..21: mol_type = other DNA; mol_type = other DNA
ttcgcgagggcggggtataat

SEQ ID NO: 2666 - DNA, 21 bp, synthetic construct
  source 1..21: mol_type = other DNA; mol_type = other DNA
tttgcccgccaaggccccaac

SEQ ID NO: 2667 - DNA, 21 bp, synthetic construct
  source 1..21: mol_type = other DNA; mol_type = other DNA
ttcgcgaggggggggataaat

SEQ ID NO: 2668 - DNA, 21 bp, synthetic construct
  source 1..21: mol_type = other DNA; mol_type = other DNA
ttctccaggaaaaatgagaat

SEQ ID NO: 2669 - DNA, 21 bp, synthetic construct
  source 1..21: mol_type = other DNA; mol_type = other DNA
tatgcgaggttggggaataat

SEQ ID NO: 2670 - DNA, 21 bp, synthetic construct
  source 1..21: mol_type = other DNA; mol_type = other DNA
ttcgcgaggcaggggataaat

SEQ ID NO: 2671 - DNA, 21 bp, synthetic construct
  source 1..21: mol_type = other DNA; mol_type = other DNA
tattccaaattcaataataat

SEQ ID NO: 2672 - DNA, 21 bp, synthetic construct
  source 1..21: mol_type = other DNA; mol_type = other DNA
ttctccaggatagggccgaat

SEQ ID NO: 2673 - DNA, 21 bp, synthetic construct
  source 1..21: mol_type = other DNA; mol_type = other DNA
tattccaggggggggccgaat

SEQ ID NO: 2674 - DNA, 21 bp, synthetic construct
  source 1..21: mol_type = other DNA; mol_type = other DNA
tatgcgaggttcgggccgaat

SEQ ID NO: 2675 - DNA, 21 bp, synthetic construct
  source 1..21: mol_type = other DNA; mol_type = other DNA
ttctccaaaatggggtataat

SEQ ID NO: 2676 - DNA, 21 bp, synthetic construct
  source 1..21: mol_type = other DNA; mol_type = other DNA
tattccaggtccaatcacaat

SEQ ID NO: 2677 - DNA, 21 bp, synthetic construct
  source 1..21: mol_type = other DNA; mol_type = other DNA
tatgcgaggcacaattataat

SEQ ID NO: 2678 - DNA, 21 bp, synthetic construct
  source 1..21: mol_type = other DNA; mol_type = other DNA
tattccaaacacgggccgaat

SEQ ID NO: 2679 - DNA, 21 bp, synthetic construct
  source 1..21: mol_type = other DNA; mol_type = other DNA
ttcgcgagggtggggtataat

SEQ ID NO: 2680 - DNA, 21 bp, synthetic construct
  source 1..21: mol_type = other DNA; mol_type = other DNA
tatgcgaggtatgggataaat

SEQ ID NO: 2681 - DNA, 21 bp, synthetic construct
  source 1..21: mol_type = other DNA; mol_type = other DNA
tattccaggatggggcacaat

SEQ ID NO: 2682 - DNA, 21 bp, synthetic construct
  source 1..21: mol_type = other DNA; mol_type = other DNA
tattccagggggaatgcgaat

SEQ ID NO: 2683 - DNA, 21 bp, synthetic construct
  source 1..21: mol_type = other DNA; mol_type = other DNA
tttgccaagtacggccccaac

SEQ ID NO: 2684 - DNA, 21 bp, synthetic construct
  source 1..21: mol_type = other DNA; mol_type = other DNA
tattccagggcggggataaat

SEQ ID NO: 2685 - DNA, 21 bp, synthetic construct
  source 1..21: mol_type = other DNA; mol_type = other DNA
tatgcgaggacggggataaat

SEQ ID NO: 2686 - DNA, 21 bp, synthetic construct
  source 1..21: mol_type = other DNA; mol_type = other DNA
ttttcacgcaccggctacaac

SEQ ID NO: 2687 - DNA, 21 bp, synthetic construct
  source 1..21: mol_type = other DNA; mol_type = other DNA
tactcacgcgccggctttaac

SEQ ID NO: 2688 - DNA, 21 bp, synthetic construct
  source 1..21: mol_type = other DNA; mol_type = other DNA
ttttcacgcgccaacaccaac

SEQ ID NO: 2689 - DNA, 21 bp, synthetic construct
  source 1..21: mol_type = other DNA; mol_type = other DNA
tattccaggatagggtataat

SEQ ID NO: 2690 - DNA, 21 bp, synthetic construct
  source 1..21: mol_type = other DNA; mol_type = other DNA
tatgcgaggatgaataataat

SEQ ID NO: 2691 - DNA, 21 bp, synthetic construct
  source 1..21: mol_type = other DNA; mol_type = other DNA
tattccaaaaggaatgataat

SEQ ID NO: 2692 - DNA, 21 bp, synthetic construct
  source 1..21: mol_type = other DNA; mol_type = other DNA
tatgcgaaagtggggtggaat

SEQ ID NO: 2693 - DNA, 21 bp, synthetic construct
  source 1..21: mol_type = other DNA; mol_type = other DNA
tatgcgaggaatgcgaataat

SEQ ID NO: 2694 - DNA, 21 bp, synthetic construct
  source 1..21: mol_type = other DNA; mol_type = other DNA
tacgcccgcgccggcatgaac

SEQ ID NO: 2695 - DNA, 21 bp, synthetic construct
  source 1..21: mol_type = other DNA; mol_type = other DNA
tatgcgaaattgaattataat

SEQ ID NO: 2696 - DNA, 21 bp, synthetic construct
  source 1..21: mol_type = other DNA; mol_type = other DNA
tattccaggtatgggacgaat

SEQ ID NO: 2697 - DNA, 21 bp, synthetic construct
  source 1..21: mol_type = other DNA; mol_type = other DNA
tttgcccgcggcggccataac

SEQ ID NO: 2698 - DNA, 21 bp, synthetic construct
  source 1..21: mol_type = other DNA; mol_type = other DNA
tattccagggtgaattataat

SEQ ID NO: 2699 - DNA, 21 bp, synthetic construct
  source 1..21: mol_type = other DNA; mol_type = other DNA
ttttcacgccatggctcaaac

SEQ ID NO: 2700 - DNA, 21 bp, synthetic construct
  source 1..21: mol_type = other DNA; mol_type = other DNA
tatataaaatccgataaaatg

SEQ ID NO: 2701 - DNA, 21 bp, synthetic construct
  source 1..21: mol_type = other DNA; mol_type = other DNA
ttcgcgaggtccgggaataat

SEQ ID NO: 2702 - DNA, 21 bp, synthetic construct
  source 1..21: mol_type = other DNA; mol_type = other DNA
ttcgcgaggtccgggataaat

SEQ ID NO: 2703 - DNA, 21 bp, synthetic construct
  source 1..21: mol_type = other DNA; mol_type = other DNA
tactcacgcaccaactttaac

SEQ ID NO: 2704 - DNA, 21 bp, synthetic construct
  source 1..21: mol_type = other DNA; mol_type = other DNA
tatgcgaggatagggtccaat

SEQ ID NO: 2705 - DNA, 21 bp, synthetic construct
  source 1..21: mol_type = other DNA; mol_type = other DNA
ttctccaaagggaattataat

SEQ ID NO: 2706 - DNA, 21 bp, synthetic construct
  source 1..21: mol_type = other DNA; mol_type = other DNA
tattccaaagcgggggataat

SEQ ID NO: 2707 - DNA, 21 bp, synthetic construct
  source 1..21: mol_type = other DNA; mol_type = other DNA
accgtagaccatgtaaagtgg

SEQ ID NO: 2708 - DNA, 21 bp, synthetic construct
  source 1..21: mol_type = other DNA; mol_type = other DNA
tattccaggatggggataaat

SEQ ID NO: 2709 - DNA, 21 bp, synthetic construct
  source 1..21: mol_type = other DNA; mol_type = other DNA
tattccaaaggggggtggaat

SEQ ID NO: 2710 - DNA, 21 bp, synthetic construct
  source 1..21: mol_type = other DNA; mol_type = other DNA
tatgcgaggggggcgaataat

SEQ ID NO: 2711 - DNA, 21 bp, synthetic construct
  source 1..21: mol_type = other DNA; mol_type = other DNA
tattccagggtgaatatgaat

SEQ ID NO: 2712 - DNA, 21 bp, synthetic construct
  source 1..21: mol_type = other DNA; mol_type = other DNA
tttgcccgccaaggccataac

SEQ ID NO: 2713 - DNA, 21 bp, synthetic construct
  source 1..21: mol_type = other DNA; mol_type = other DNA
tattccaggatagggataaat

SEQ ID NO: 2714 - DNA, 21 bp, synthetic construct
  source 1..21: mol_type = other DNA; mol_type = other DNA
tattccaaacacgggataaat

SEQ ID NO: 2715 - DNA, 21 bp, synthetic construct
  source 1..21: mol_type = other DNA; mol_type = other DNA
tacgcccgcggcaaccataac

SEQ ID NO: 2716 - DNA, 21 bp, synthetic construct
  source 1..21: mol_type = other DNA; mol_type = other DNA
tattccaggatgaattataat

SEQ ID NO: 2717 - DNA, 21 bp, synthetic construct
  source 1..21: mol_type = other DNA; mol_type = other DNA
tactcacgccataacatgaac

SEQ ID NO: 2718 - DNA, 21 bp, synthetic construct
  source 1..21: mol_type = other DNA; mol_type = other DNA
tatgcgaggcacgggataaat

SEQ ID NO: 2719 - DNA, 21 bp, synthetic construct
  source 1..21: mol_type = other DNA; mol_type = other DNA
tattccaggatggggtccaat

SEQ ID NO: 2720 - DNA, 21 bp, synthetic construct
  source 1..21: mol_type = other DNA; mol_type = other DNA
tattccaggataaataataat

SEQ ID NO: 2721 - DNA, 21 bp, synthetic construct
  source 1..21: mol_type = other DNA; mol_type = other DNA
ttctccaaagtggggaataat

SEQ ID NO: 2722 - DNA, 21 bp, synthetic construct
  source 1..21: mol_type = other DNA; mol_type = other DNA
tattccaaacacgggttgaat

SEQ ID NO: 2723 - DNA, 21 bp, synthetic construct
  source 1..21: mol_type = other DNA; mol_type = other DNA
tattccaggatggggttcaat

SEQ ID NO: 2724 - DNA, 21 bp, synthetic construct
  source 1..21: mol_type = other DNA; mol_type = other DNA
tattccaggaataatgtgaat

SEQ ID NO: 2725 - DNA, 21 bp, synthetic construct
  source 1..21: mol_type = other DNA; mol_type = other DNA
tattccaggaataatataaat

SEQ ID NO: 2726 - DNA, 21 bp, synthetic construct
  source 1..21: mol_type = other DNA; mol_type = other DNA
tactcacgctacggcgtaaac

SEQ ID NO: 2727 - DNA, 21 bp, synthetic construct
  source 1..21: mol_type = other DNA; mol_type = other DNA
ttcgcgaggcacaatataaat

SEQ ID NO: 2728 - DNA, 21 bp, synthetic construct
  source 1..21: mol_type = other DNA; mol_type = other DNA
tattccaggcacgggtccaat

SEQ ID NO: 2729 - DNA, 21 bp, synthetic construct
  source 1..21: mol_type = other DNA; mol_type = other DNA
ttctccaaacacaataataat

SEQ ID NO: 2730 - DNA, 21 bp, synthetic construct
  source 1..21: mol_type = other DNA; mol_type = other DNA
tatgcgaggatagggataaat

SEQ ID NO: 2731 - DNA, 21 bp, synthetic construct
  source 1..21: mol_type = other DNA; mol_type = other DNA
tacgcccgccatggccataac

SEQ ID NO: 2732 - DNA, 21 bp, synthetic construct
  source 1..21: mol_type = other DNA; mol_type = other DNA
ttctccaggcagaataataat

SEQ ID NO: 2733 - DNA, 21 bp, synthetic construct
  source 1..21: mol_type = other DNA; mol_type = other DNA
tattccaggcacaatgtgaat

SEQ ID NO: 2734 - DNA, 21 bp, synthetic construct
  source 1..21: mol_type = other DNA; mol_type = other DNA
ttcgcgagggggaataataat

SEQ ID NO: 2735 - DNA, 21 bp, synthetic construct
  source 1..21: mol_type = other DNA; mol_type = other DNA
ttcgcgaaaggggggtataat

SEQ ID NO: 2736 - DNA, 21 bp, synthetic construct
  source 1..21: mol_type = other DNA; mol_type = other DNA
ttcgcgaggcagaatataaat

SEQ ID NO: 2737 - DNA, 21 bp, synthetic construct
  source 1..21: mol_type = other DNA; mol_type = other DNA
ttctccaggttgaatgtgaat

SEQ ID NO: 2738 - DNA, 21 bp, synthetic construct
  source 1..21: mol_type = other DNA; mol_type = other DNA
tattccaggacgaatccgaat

SEQ ID NO: 2739 - DNA, 21 bp, synthetic construct
  source 1..21: mol_type = other DNA; mol_type = other DNA
ttctccagggcggggataaat

SEQ ID NO: 2740 - DNA, 21 bp, synthetic construct
  source 1..21: mol_type = other DNA; mol_type = other DNA
tattccaggataaatcacaat

SEQ ID NO: 2741 - DNA, 21 bp, synthetic construct
  source 1..21: mol_type = other DNA; mol_type = other DNA
tatgcggcgtccgggaggaat

SEQ ID NO: 2742 - DNA, 21 bp, synthetic construct
  source 1..21: mol_type = other DNA; mol_type = other DNA
ttctccaggcagaattataat

SEQ ID NO: 2743 - DNA, 21 bp, synthetic construct
  source 1..21: mol_type = other DNA; mol_type = other DNA
ttctccaggatgaatgtgaat

SEQ ID NO: 2744 - DNA, 21 bp, synthetic construct
  source 1..21: mol_type = other DNA; mol_type = other DNA
ttcgcgaggtatgggcagaat

SEQ ID NO: 2745 - DNA, 21 bp, synthetic construct
  source 1..21: mol_type = other DNA; mol_type = other DNA
ttctccaggttgaattccaat

SEQ ID NO: 2746 - DNA, 21 bp, synthetic construct
  source 1..21: mol_type = other DNA; mol_type = other DNA
tattccaaagtgaattggaat

SEQ ID NO: 2747 - DNA, 21 bp, synthetic construct
  source 1..21: mol_type = other DNA
tatgcgaaattcgggccgaat

SEQ ID NO: 2748 - DNA, 21 bp, synthetic construct
  source 1..21: mol_type = other DNA
tatgcgagggggaatttgaat

SEQ ID NO: 2749 - DNA, 21 bp, synthetic construct
  source 1..21: mol_type = other DNA
ttctccaggacgaataataat

SEQ ID NO: 2750 - DNA, 21 bp, synthetic construct
  source 1..21: mol_type = other DNA
ttttcacgctcaggctacaac

SEQ ID NO: 2751 - DNA, 21 bp, synthetic construct
  source 1..21: mol_type = other DNA
ttgcacagggcggcggggaat

SEQ ID NO: 2752 - DNA, 21 bp, synthetic construct
  source 1..21: mol_type = other DNA
ttcgcgaggcacgggccgaat

SEQ ID NO: 2753 - DNA, 21 bp, synthetic construct
  source 1..21: mol_type = other DNA
tatgcgaaattcaataataat

SEQ ID NO: 2754 - DNA, 21 bp, synthetic construct
  source 1..21: mol_type = other DNA
aacgtagccgaacgcaagtgg

SEQ ID NO: 2755 - DNA, 21 bp, synthetic construct
  source 1..21: mol_type = other DNA
ttcgcgagggcgaataataat

SEQ ID NO: 2756 - DNA, 21 bp, synthetic construct
  source 1..21: mol_type = other DNA
ttctccaaaatagggaataat

SEQ ID NO: 2757 - DNA, 21 bp, synthetic construct
  source 1..21: mol_type = other DNA
tatgcgagggcggggtccaat

SEQ ID NO: 2758 - DNA, 21 bp, synthetic construct
  source 1..21: mol_type = other DNA
tattccaggcaggggcacaat

SEQ ID NO: 2759 - DNA, 21 bp, synthetic construct
  source 1..21: mol_type = other DNA
ttttcacgcgccaactcaaac

SEQ ID NO: 2760 - DNA, 21 bp, synthetic construct
  source 1..21: mol_type = other DNA
ttcgcgaggtccgcgaataat

SEQ ID NO: 2761 - DNA, 21 bp, synthetic construct
  source 1..21: mol_type = other DNA
tattccaggcagaatttgaat

SEQ ID NO: 2762 - DNA, 21 bp, synthetic construct
  source 1..21: mol_type = other DNA
tatgcgaaaggggggataaat

SEQ ID NO: 2763 - DNA, 21 bp, synthetic construct
  source 1..21: mol_type = other DNA; mol_type = other DNA
tatgcgagggcgaatcacaat

SEQ ID NO: 2764 - DNA, 21 bp, synthetic construct
  source 1..21: mol_type = other DNA
tattccaggttgaatcacaat

SEQ ID NO: 2765 - DNA, 21 bp, synthetic construct
  source 1..21: mol_type = other DNA; mol_type = other DNA
tactcacgcgccaaccataac

SEQ ID NO: 2766 - DNA, 21 bp, synthetic construct
  source 1..21: mol_type = other DNA; mol_type = other DNA
tacgcccgccatggctcaaac

SEQ ID NO: 2767 - DNA, 21 bp, synthetic construct
  source 1..21: mol_type = other DNA; mol_type = other DNA
tacgcccgcatcggcgtaaac

SEQ ID NO: 2768 - DNA, 21 bp, synthetic construct
  source 1..21: mol_type = other DNA; mol_type = other DNA
tactcacgcgccaactttaac

SEQ ID NO: 2769 - DNA, 21 bp, synthetic construct
  source 1..21: mol_type = other DNA; mol_type = other DNA
ttttcacgcctgaacatgaac

SEQ ID NO: 2770 - DNA, 21 bp, synthetic construct
  source 1..21: mol_type = other DNA; mol_type = other DNA
tattccaggtccaatacgaat

SEQ ID NO: 2771 - DNA, 21 bp, synthetic construct
  source 1..21: mol_type = other DNA; mol_type = other DNA
tatgcgaggatagggcagaat

SEQ ID NO: 2772 - DNA, 21 bp, synthetic construct
  source 1..21: mol_type = other DNA; mol_type = other DNA
tattccaggtccgggatgaat

SEQ ID NO: 2773 - DNA, 21 bp, synthetic construct
  source 1..21: mol_type = other DNA; mol_type = other DNA
tatgcgaggcacgggtataat

SEQ ID NO: 2774 - DNA, 21 bp, synthetic construct
  source 1..21: mol_type = other DNA; mol_type = other DNA
tatgcgaaacacgggataaat

SEQ ID NO: 2775 - DNA, 21 bp, synthetic construct
  source 1..21: mol_type = other DNA; mol_type = other DNA
tatgcgaggttggggtataat

SEQ ID NO: 2776 - DNA, 21 bp, synthetic construct
  source 1..21: mol_type = other DNA; mol_type = other DNA
tttgcccgccatggctttaac

SEQ ID NO: 2777 - DNA, 21 bp, synthetic construct
  source 1..21: mol_type = other DNA; mol_type = other DNA
tattccaggtccgggcagaat

SEQ ID NO: 2778 - DNA, 21 bp, synthetic construct
  source 1..21: mol_type = other DNA; mol_type = other DNA
tattccaggaatgggcacaat

SEQ ID NO: 2779 - DNA, 21 bp, synthetic construct
  source 1..21: mol_type = other DNA; mol_type = other DNA
tattccaggatgggggtgaat

SEQ ID NO: 2780 - DNA, 21 bp, synthetic construct
  source 1..21: mol_type = other DNA; mol_type = other DNA
tacgccaagtcaggctggaac

SEQ ID NO: 2781 - DNA, 21 bp, synthetic construct
  source 1..21: mol_type = other DNA; mol_type = other DNA
ttctccagggtggggacgaat

SEQ ID NO: 2782 - DNA, 21 bp, synthetic construct
  source 1..21: mol_type = other DNA; mol_type = other DNA
ttcgcgaggttggggataaat

SEQ ID NO: 2783 - DNA, 21 bp, synthetic construct
  source 1..21: mol_type = other DNA; mol_type = other DNA
ttctccaaattggggccgaat

SEQ ID NO: 2784 - DNA, 21 bp, synthetic construct
  source 1..21: mol_type = other DNA; mol_type = other DNA
ttctccaggaataatcacaat

SEQ ID NO: 2785 - DNA, 21 bp, synthetic construct
  source 1..21: mol_type = other DNA; mol_type = other DNA
tatgcgaggaataattataat

SEQ ID NO: 2786 - DNA, 21 bp, synthetic construct
  source 1..21: mol_type = other DNA; mol_type = other DNA
ttttcacgcatcggcatcaac

SEQ ID NO: 2787 - DNA, 21 bp, synthetic construct
  source 1..21: mol_type = other DNA; mol_type = other DNA
ttttcacgcctgaaccaaaac

SEQ ID NO: 2788 - DNA, 21 bp, synthetic construct
  source 1..21: mol_type = other DNA; mol_type = other DNA
tactcacgcatcggcatgaac

SEQ ID NO: 2789 - DNA, 21 bp, synthetic construct
  source 1..21: mol_type = other DNA; mol_type = other DNA
tactcacgcaacggctttaac

SEQ ID NO: 2790 - DNA, 21 bp, synthetic construct
  source 1..21: mol_type = other DNA; mol_type = other DNA
tatgcgaggttgaatcacaat

SEQ ID NO: 2791 - DNA, 21 bp, synthetic construct
  source 1..21: mol_type = other DNA; mol_type = other DNA
tatgcgaggcaggggtccaat

SEQ ID NO: 2792 - DNA, 21 bp, synthetic construct
  source 1..21: mol_type = other DNA; mol_type = other DNA
tattccaaatggaatacgaat

SEQ ID NO: 2793 - DNA, 21 bp, synthetic construct
  source 1..21: mol_type = other DNA; mol_type = other DNA
ttcgcgaggtccaatatgaat

SEQ ID NO: 2794 - DNA, 21 bp, synthetic construct
  source 1..21: mol_type = other DNA; mol_type = other DNA
tactcacgcgtaggctacaac

SEQ ID NO: 2795 - DNA, 21 bp, synthetic construct
  source 1..21: mol_type = other DNA; mol_type = other DNA
tacgtacgctcacaaaacctg

SEQ ID NO: 2796 - DNA, 21 bp, synthetic construct
  source 1..21: mol_type = other DNA; mol_type = other DNA
ttctccaggataaatatgaat

SEQ ID NO: 2797 - DNA, 21 bp, synthetic construct
  source 1..21: mol_type = other DNA; mol_type = other DNA
tattccaaaatgaatccgaat

SEQ ID NO: 2798 - DNA, 21 bp, synthetic construct
  source 1..21: mol_type = other DNA; mol_type = other DNA
tattccagggggaatatgaat

SEQ ID NO: 2799 - DNA, 21 bp, synthetic construct
  source 1..21: mol_type = other DNA; mol_type = other DNA
ttctccaaatataatataaat

SEQ ID NO: 2800 - DNA, 21 bp, synthetic construct
  source 1..21: mol_type = other DNA; mol_type = other DNA
tattccagggtggggaataat

SEQ ID NO: 2801 - DNA, 21 bp, synthetic construct
  source 1..21: mol_type = other DNA; mol_type = other DNA
tttgccaagtcaggccccaac

SEQ ID NO: 2802 - DNA, 21 bp, synthetic construct
  source 1..21: mol_type = other DNA; mol_type = other DNA
ttcgcgaggtccgggttcaat

SEQ ID NO: 2803 - DNA, 21 bp, synthetic construct
  source 1..21: mol_type = other DNA; mol_type = other DNA
tattccaggatgaatcagaat

SEQ ID NO: 2804 - DNA, 21 bp, synthetic construct
  source 1..21: mol_type = other DNA; mol_type = other DNA
tatgcgaggatggggaataat

SEQ ID NO: 2805 - DNA, 21 bp, synthetic construct
  source 1..21: mol_type = other DNA; mol_type = other DNA
ttctccaggggggggataaat

SEQ ID NO: 2806 - DNA, 21 bp, synthetic construct
  source 1..21: mol_type = other DNA; mol_type = other DNA
tattccaggtccgggaataat

SEQ ID NO: 2807 - DNA, 21 bp, synthetic construct
  source 1..21: mol_type = other DNA; mol_type = other DNA
tattccaggtccaatgcgaat

SEQ ID NO: 2808 - DNA, 21 bp, synthetic construct
  source 1..21: mol_type = other DNA; mol_type = other DNA
tactcacgcggcaaccccaac

SEQ ID NO: 2809 - DNA, 21 bp, synthetic construct
  source 1..21: mol_type = other DNA; mol_type = other DNA
ttttcacgcgccggcctgaac

SEQ ID NO: 2810 - DNA, 21 bp, synthetic construct
  source 1..21: mol_type = other DNA; mol_type = other DNA
tacgcccgcggcggcatgaac

SEQ ID NO: 2811 - DNA, 21 bp, synthetic construct
  source 1..21: mol_type = other DNA; mol_type = other DNA
ttttcaaagctgaactacaac

SEQ ID NO: 2812 - DNA, 21 bp, synthetic construct
  source 1..21: mol_type = other DNA; mol_type = other DNA
ttttcacgcatcggccaaaac

SEQ ID NO: 2813 - DNA, 21 bp, synthetic construct
  source 1..21: mol_type = other DNA; mol_type = other DNA
tacgcccgctcaggcctgaac

SEQ ID NO: 2814 - DNA, 21 bp, synthetic construct
  source 1..21: mol_type = other DNA; mol_type = other DNA
tacgcccgccaaaaccataac

SEQ ID NO: 2815 - DNA, 21 bp, synthetic construct
  source 1..21: mol_type = other DNA; mol_type = other DNA
tactcacgcggcaaccataac

SEQ ID NO: 2816 - DNA, 21 bp, synthetic construct
  source 1..21: mol_type = other DNA; mol_type = other DNA
ttttcacgcgtaggcatcaac

SEQ ID NO: 2817 - DNA, 21 bp, synthetic construct
  source 1..21: mol_type = other DNA; mol_type = other DNA
tattccagggtgaatcacaat

SEQ ID NO: 2818 - DNA, 21 bp, synthetic construct
  source 1..21: mol_type = other DNA; mol_type = other DNA
ttctccaggatggggccgaat

SEQ ID NO: 2819 - DNA, 21 bp, synthetic construct
  source 1..21: mol_type = other DNA; mol_type = other DNA
tattccaaagtggggtggaat

SEQ ID NO: 2820 - DNA, 21 bp, synthetic construct
  source 1..21: mol_type = other DNA; mol_type = other DNA
tattccaggcaggggttcaat

SEQ ID NO: 2821 - DNA, 21 bp, synthetic construct
  source 1..21: mol_type = other DNA; mol_type = other DNA
tattccaggcaggggccgaat

SEQ ID NO: 2822 - DNA, 21 bp, synthetic construct
  source 1..21: mol_type = other DNA; mol_type = other DNA
ttctccaggttggggttgaat

SEQ ID NO: 2823 - DNA, 21 bp, synthetic construct
  source 1..21: mol_type = other DNA; mol_type = other DNA
ttctccaggacggggcacaat

SEQ ID NO: 2824 - DNA, 21 bp, synthetic construct
  source 1..21: mol_type = other DNA; mol_type = other DNA
tactcaaagtggaacgccaac

SEQ ID NO: 2825 - DNA, 21 bp, synthetic construct
  source 1..21: mol_type = other DNA; mol_type = other DNA
ttcgcgaggacggggttgaat

SEQ ID NO: 2826 - DNA, 21 bp, synthetic construct
  source 1..21: mol_type = other DNA; mol_type = other DNA
tatgcgaaaatagggccgaat

SEQ ID NO: 2827 - DNA, 21 bp, synthetic construct
  source 1..21: mol_type = other DNA; mol_type = other DNA
ttctccaggatagggttgaat

SEQ ID NO: 2828 - DNA, 21 bp, synthetic construct
  source 1..21: mol_type = other DNA; mol_type = other DNA
tatgcgaaaatagggttcaat

SEQ ID NO: 2829 - DNA, 21 bp, synthetic construct
  source 1..21: mol_type = other DNA; mol_type = other DNA
tattccaaaataggggataat

SEQ ID NO: 2830 - DNA, 21 bp, synthetic construct
  source 1..21: mol_type = other DNA; mol_type = other DNA
ttcgcgaggttcaatacgaat

SEQ ID NO: 2831 - DNA, 21 bp, synthetic construct
  source 1..21: mol_type = other DNA; mol_type = other DNA
tattccagggtgaatttcaat

SEQ ID NO: 2832 - DNA, 21 bp, synthetic construct
  source 1..21: mol_type = other DNA; mol_type = other DNA
tatgcgaggacgaatacgaat

SEQ ID NO: 2833 - DNA, 21 bp, synthetic construct
  source 1..21: mol_type = other DNA; mol_type = other DNA
tttgcccgcaacggcctgaac

SEQ ID NO: 2834 - DNA, 21 bp, synthetic construct
  source 1..21: mol_type = other DNA; mol_type = other DNA
tatgcgaaatatgggataaat

SEQ ID NO: 2835 - DNA, 21 bp, synthetic construct
  source 1..21: mol_type = other DNA; mol_type = other DNA
tatgcgaggcacgggatgaat

SEQ ID NO: 2836 - DNA, 21 bp, synthetic construct
  source 1..21: mol_type = other DNA; mol_type = other DNA
tacgcccgcggcaactttaac

SEQ ID NO: 2837 - DNA, 21 bp, synthetic construct
  source 1..21: mol_type = other DNA; mol_type = other DNA
ttctccaaattgaattccaat

SEQ ID NO: 2838 - DNA, 21 bp, synthetic construct
  source 1..21: mol_type = other DNA; mol_type = other DNA
tatgcgagggtggggcacaat

SEQ ID NO: 2839 - DNA, 21 bp, synthetic construct
  source 1..21: mol_type = other DNA; mol_type = other DNA
accaacgccacctcaaagtgg

SEQ ID NO: 2840 - DNA, 21 bp, synthetic construct
  source 1..21: mol_type = other DNA; mol_type = other DNA
tattccagggcgaatgtgaat

SEQ ID NO: 2841 - DNA, 21 bp, synthetic construct
  source 1..21: mol_type = other DNA; mol_type = other DNA
tattccagggcgggggggaat

SEQ ID NO: 2842 - DNA, 21 bp, synthetic construct
  source 1..21: mol_type = other DNA; mol_type = other DNA
tattccaggaaaggggagaat

SEQ ID NO: 2843 - DNA, 21 bp, synthetic construct
  source 1..21: mol_type = other DNA; mol_type = other DNA
ttcgcgaggttggggcacaat

SEQ ID NO: 2844 - DNA, 21 bp, synthetic construct
  source 1..21: mol_type = other DNA; mol_type = other DNA
cgcgacgactttaccgcctac

SEQ ID NO: 2845 - DNA, 21 bp, synthetic construct
  source 1..21: mol_type = other DNA; mol_type = other DNA
tttgcccgctcaggccccaac

SEQ ID NO: 2846 - DNA, 21 bp, synthetic construct
  source 1..21: mol_type = other DNA; mol_type = other DNA
ttctccaaattggggaataat

SEQ ID NO: 2847 - DNA, 21 bp, synthetic construct
  source 1..21: mol_type = other DNA; mol_type = other DNA
tacgcccgcaccaacatcaac

SEQ ID NO: 2848 - DNA, 21 bp, synthetic construct
  source 1..21: mol_type = other DNA; mol_type = other DNA
ttctccaggttgggggtgaat

SEQ ID NO: 2849 - DNA, 21 bp, synthetic construct
  source 1..21: mol_type = other DNA; mol_type = other DNA
tatgcgaaatccgggtgtaat

SEQ ID NO: 2850 - DNA, 21 bp, synthetic construct
  source 1..21: mol_type = other DNA; mol_type = other DNA
tattccaggtataatcagaat

SEQ ID NO: 2851 - DNA, 21 bp, synthetic construct
  source 1..21: mol_type = other DNA; mol_type = other DNA
tattccaggatagggcagaat

SEQ ID NO: 2852 - DNA, 21 bp, synthetic construct
  source 1..21: mol_type = other DNA
tattccaggatgaattccaat

SEQ ID NO: 2853 - DNA, 21 bp, synthetic construct
  source 1..21: mol_type = other DNA
tattccaggtccggggtgaat

SEQ ID NO: 2854 - DNA, 21 bp, synthetic construct
  source 1..21: mol_type = other DNA
tatgcgagggcgggggtgaat

SEQ ID NO: 2855 - DNA, 21 bp, synthetic construct
  source 1..21: mol_type = other DNA
ttctccaaagtggggccgaat

SEQ ID NO: 2856 - DNA, 21 bp, synthetic construct
  source 1..21: mol_type = other DNA; mol_type = other DNA
ctgtcaaagctgggccataac

SEQ ID NO: 2857 - DNA, 21 bp, synthetic construct
  source 1..21: mol_type = other DNA; mol_type = other DNA
tacgcccgccatggccaaaac

SEQ ID NO: 2858 - DNA, 21 bp, synthetic construct
  source 1..21: mol_type = other DNA
tatgcgaggacgaatttgaat

SEQ ID NO: 2859 - DNA, 21 bp, synthetic construct
  source 1..21: mol_type = other DNA; mol_type = other DNA
tattccaggcacaatacgaat

SEQ ID NO: 2860 - DNA, 21 bp, synthetic construct
  source 1..21: mol_type = other DNA; mol_type = other DNA
aggtccgggaattcctcctat

SEQ ID NO: 2861 - DNA, 21 bp, synthetic construct
  source 1..21: mol_type = other DNA; mol_type = other DNA
tatgcgaggacgaatgtgaat

SEQ ID NO: 2862 - DNA, 21 bp, synthetic construct
  source 1..21: mol_type = other DNA; mol_type = other DNA
ttcgcgaggtccgggttgaat

SEQ ID NO: 2863 - DNA, 21 bp, synthetic construct
  source 1..21: mol_type = other DNA; mol_type = other DNA
tattccaaagcgaatttcaat

SEQ ID NO: 2864 - DNA, 21 bp, synthetic construct
  source 1..21: mol_type = other DNA; mol_type = other DNA
tattccaaacacaatcacaat

SEQ ID NO: 2865 - DNA, 21 bp, synthetic construct
  source 1..21: mol_type = other DNA; mol_type = other DNA
tattccaggttgaatccgaat

SEQ ID NO: 2866 - DNA, 21 bp, synthetic construct
  source 1..21: mol_type = other DNA; mol_type = other DNA
tactcacgccaaaacgtaaac

SEQ ID NO: 2867 - DNA, 21 bp, synthetic construct
  source 1..21: mol_type = other DNA; mol_type = other DNA
tattccaggttgaatgtgaat

SEQ ID NO: 2868 - DNA, 21 bp, synthetic construct
  source 1..21: mol_type = other DNA; mol_type = other DNA
tttgcccgcgccggcgccaac

SEQ ID NO: 2869 - DNA, 21 bp, synthetic construct
  source 1..21: mol_type = other DNA; mol_type = other DNA
tattccaggacgaatcacaat

SEQ ID NO: 2870 - DNA, 21 bp, synthetic construct
  source 1..21: mol_type = other DNA; mol_type = other DNA
tatgcgaggcagaatgtgaat

SEQ ID NO: 2871 - DNA, 21 bp, synthetic construct
  source 1..21: mol_type = other DNA; mol_type = other DNA
tatgcgaggcaggggcacaat

SEQ ID NO: 2872 - DNA, 21 bp, synthetic construct
  source 1..21: mol_type = other DNA; mol_type = other DNA
tacgccaagtacaaccataac

SEQ ID NO: 2873 - DNA, 21 bp, synthetic construct
  source 1..21: mol_type = other DNA; mol_type = other DNA
ttctccagggtggggtccaat

SEQ ID NO: 2874 - DNA, 21 bp, synthetic construct
  source 1..21: mol_type = other DNA; mol_type = other DNA
tattccaggcagaatcagaat

SEQ ID NO: 2875 - DNA, 21 bp, synthetic construct
  source 1..21: mol_type = other DNA; mol_type = other DNA
tatgcgagggtggggttgaat

SEQ ID NO: 2876 - DNA, 21 bp, synthetic construct
  source 1..21: mol_type = other DNA; mol_type = other DNA
ttcgcgaggacgggggtgaat

SEQ ID NO: 2877 - DNA, 21 bp, synthetic construct
  source 1..21: mol_type = other DNA; mol_type = other DNA
tacgcccgctcaggctacaac

SEQ ID NO: 2878 - DNA, 21 bp, synthetic construct
  source 1..21: mol_type = other DNA; mol_type = other DNA
tactcaaagtacggcaacaac

SEQ ID NO: 2879 - DNA, 21 bp, synthetic construct
  source 1..21: mol_type = other DNA; mol_type = other DNA
tattccagggtggggcacaat

SEQ ID NO: 2880 - DNA, 21 bp, synthetic construct
  source 1..21: mol_type = other DNA; mol_type = other DNA
ttcgcgaaaatggggtataat

SEQ ID NO: 2881 - DNA, 21 bp, synthetic construct
  source 1..21: mol_type = other DNA; mol_type = other DNA
tacgccaagtacggccataac

SEQ ID NO: 2882 - DNA, 21 bp, synthetic construct
  source 1..21: mol_type = other DNA; mol_type = other DNA
tactcaaagtcaggccataac

SEQ ID NO: 2883 - DNA, 21 bp, synthetic construct
  source 1..21: mol_type = other DNA; mol_type = other DNA
tatgcgaggatagggatgaat

SEQ ID NO: 2884 - DNA, 21 bp, synthetic construct
  source 1..21: mol_type = other DNA; mol_type = other DNA
tactcacgcatcaacctgaac

SEQ ID NO: 2885 - DNA, 21 bp, synthetic construct
  source 1..21: mol_type = other DNA; mol_type = other DNA
tacgcccgcatgaactttaac

SEQ ID NO: 2886 - DNA, 21 bp, synthetic construct
  source 1..21: mol_type = other DNA; mol_type = other DNA
tattccaaagtggggttcaat

SEQ ID NO: 2887 - DNA, 21 bp, synthetic construct
  source 1..21: mol_type = other DNA; mol_type = other DNA
ttttcacgcatgggcaacaac

SEQ ID NO: 2888 - DNA, 21 bp, synthetic construct
  source 1..21: mol_type = other DNA; mol_type = other DNA
tattccaggaataatcacaat

SEQ ID NO: 2889 - DNA, 21 bp, synthetic construct
  source 1..21: mol_type = other DNA; mol_type = other DNA
ttctccagggggaatataaat

SEQ ID NO: 2890 - DNA, 21 bp, synthetic construct
  source 1..21: mol_type = other DNA; mol_type = other DNA
ttgcacaggatgacgccgaat

SEQ ID NO: 2891 - DNA, 21 bp, synthetic construct
  source 1..21: mol_type = other DNA; mol_type = other DNA
tattccaggtccaatcagaat

SEQ ID NO: 2892 - DNA, 21 bp, synthetic construct
  source 1..21: mol_type = other DNA; mol_type = other DNA
ctgtcaaagctgggctttaac

SEQ ID NO: 2893 - DNA, 21 bp, synthetic construct
  source 1..21: mol_type = other DNA; mol_type = other DNA
tattccaggttgaatacgaat

SEQ ID NO: 2894 - DNA, 21 bp, synthetic construct
  source 1..21: mol_type = other DNA; mol_type = other DNA
tacgcccgcggcaactcaaac

SEQ ID NO: 2895 - DNA, 21 bp, synthetic construct
  source 1..21: mol_type = other DNA; mol_type = other DNA
tatgcgagggcgaatttcaat

SEQ ID NO: 2896 - DNA, 21 bp, synthetic construct
  source 1..21: mol_type = other DNA; mol_type = other DNA
tattccaggtccaatgtgaat

SEQ ID NO: 2897 - DNA, 21 bp, synthetic construct
  source 1..21: mol_type = other DNA; mol_type = other DNA
tactcacgcctgaacctgaac

SEQ ID NO: 2898 - DNA, 21 bp, synthetic construct
  source 1..21: mol_type = other DNA; mol_type = other DNA
tacgcccgcatgggccataac

SEQ ID NO: 2899 - DNA, 21 bp, synthetic construct
  source 1..21: mol_type = other DNA; mol_type = other DNA
tattccagggcgaatgataat

SEQ ID NO: 2900 - DNA, 21 bp, synthetic construct
  source 1..21: mol_type = other DNA; mol_type = other DNA
tatgcgaggacggggttcaat

SEQ ID NO: 2901 - DNA, 21 bp, synthetic construct
  source 1..21: mol_type = other DNA; mol_type = other DNA
ttcgcgaggtccgggcagaat

SEQ ID NO: 2902 - DNA, 21 bp, synthetic construct
  source 1..21: mol_type = other DNA; mol_type = other DNA
ttctccagggcgaatgtgaat

SEQ ID NO: 2903 - DNA, 21 bp, synthetic construct
  source 1..21: mol_type = other DNA; mol_type = other DNA
tactcacgcatgaacgtaaac

SEQ ID NO: 2904 - DNA, 21 bp, synthetic construct
  source 1..21: mol_type = other DNA; mol_type = other DNA
tatgcgaaagcggggcagaat

SEQ ID NO: 2905 - DNA, 21 bp, synthetic construct
  source 1..21: mol_type = other DNA; mol_type = other DNA
tactcacgcaccggccataac

SEQ ID NO: 2906 - DNA, 21 bp, synthetic construct
  source 1..21: mol_type = other DNA; mol_type = other DNA
tatgcgaggtccgggttcaat

SEQ ID NO: 2907 - DNA, 21 bp, synthetic construct
  source 1..21: mol_type = other DNA; mol_type = other DNA
tatgcgaggacggggtccaat

SEQ ID NO: 2908 - DNA, 21 bp, synthetic construct
  source 1..21: mol_type = other DNA; mol_type = other DNA
tatgcgaaacaggggtggaat

SEQ ID NO: 2909 - DNA, 21 bp, synthetic construct
  source 1..21: mol_type = other DNA; mol_type = other DNA
ttcgcgaggacggggttcaat

SEQ ID NO: 2910 - DNA, 21 bp, synthetic construct
  source 1..21: mol_type = other DNA; mol_type = other DNA
ttctccaaagcgaatttcaat

SEQ ID NO: 2911 - DNA, 21 bp, synthetic construct
  source 1..21: mol_type = other DNA; mol_type = other DNA
tactcacgcctgaacggcaac

SEQ ID NO: 2912 - DNA, 21 bp, synthetic construct
  source 1..21: mol_type = other DNA; mol_type = other DNA
tattccaggttggggaaagat

SEQ ID NO: 2913 - DNA, 21 bp, synthetic construct
  source 1..21: mol_type = other DNA; mol_type = other DNA
tatgcgaggtccgggccgaat

SEQ ID NO: 2914 - DNA, 21 bp, synthetic construct
  source 1..21: mol_type = other DNA; mol_type = other DNA
tattccaggataaatcagaat

SEQ ID NO: 2915 - DNA, 21 bp, synthetic construct
  source 1..21: mol_type = other DNA; mol_type = other DNA
tttgccaagcaaggctacaac

SEQ ID NO: 2916 - DNA, 21 bp, synthetic construct
  source 1..21: mol_type = other DNA; mol_type = other DNA
ttctccaggacggggacgaat

SEQ ID NO: 2917 - DNA, 21 bp, synthetic construct
  source 1..21: mol_type = other DNA; mol_type = other DNA
tatgcgaaaatagggcacaat

SEQ ID NO: 2918 - DNA, 21 bp, synthetic construct
  source 1..21: mol_type = other DNA; mol_type = other DNA
ctgtcacgcatgaactacaac

SEQ ID NO: 2919 - DNA, 21 bp, synthetic construct
  source 1..21: mol_type = other DNA; mol_type = other DNA
ttttcacgcatgaacaccaac

SEQ ID NO: 2920 - DNA, 21 bp, synthetic construct
  source 1..21: mol_type = other DNA; mol_type = other DNA
tattccagggggaatcagaat

SEQ ID NO: 2921 - DNA, 21 bp, synthetic construct
  source 1..21: mol_type = other DNA; mol_type = other DNA
tactcacgcatgaaccccaac

SEQ ID NO: 2922 - DNA, 21 bp, synthetic construct
  source 1..21: mol_type = other DNA; mol_type = other DNA
tatgcgaggcagaatccgaat

SEQ ID NO: 2923 - DNA, 21 bp, synthetic construct
  source 1..21: mol_type = other DNA; mol_type = other DNA
tattccaggttggggttgaat

SEQ ID NO: 2924 - DNA, 21 bp, synthetic construct
  source 1..21: mol_type = other DNA; mol_type = other DNA
tatgcgagggcggggttgaat

SEQ ID NO: 2925 - DNA, 21 bp, synthetic construct
  source 1..21: mol_type = other DNA; mol_type = other DNA
tatgcgagggggaatcagaat

SEQ ID NO: 2926 - DNA, 21 bp, synthetic construct
  source 1..21: mol_type = other DNA; mol_type = other DNA
tactcaaagatgggctttaac

SEQ ID NO: 2927 - DNA, 21 bp, synthetic construct
  source 1..21: mol_type = other DNA; mol_type = other DNA
tacgcccgcgtaggctacaac

SEQ ID NO: 2928 - DNA, 21 bp, synthetic construct
  source 1..21: mol_type = other DNA; mol_type = other DNA
ttctccagggcggggcagaat

SEQ ID NO: 2929 - DNA, 21 bp, synthetic construct
  source 1..21: mol_type = other DNA; mol_type = other DNA
ctggccaagctgggccataac

SEQ ID NO: 2930 - DNA, 21 bp, synthetic construct
  source 1..21: mol_type = other DNA; mol_type = other DNA
ataaggtccatgaatggggtg

SEQ ID NO: 2931 - DNA, 21 bp, synthetic construct
  source 1..21: mol_type = other DNA; mol_type = other DNA
tatgcgaaagcggggccgaat

SEQ ID NO: 2932 - DNA, 21 bp, synthetic construct
  source 1..21: mol_type = other DNA; mol_type = other DNA
tactcaaagggcaactggaac

SEQ ID NO: 2933 - DNA, 21 bp, synthetic construct
  source 1..21: mol_type = other DNA; mol_type = other DNA
accaactcaaccaacggcatc

SEQ ID NO: 2934 - DNA, 21 bp, synthetic construct
  source 1..21: mol_type = other DNA; mol_type = other DNA
tattccagggtgaatacgaat

SEQ ID NO: 2935 - DNA, 21 bp, synthetic construct
  source 1..21: mol_type = other DNA; mol_type = other DNA
ttccacaaattggggtccaat

SEQ ID NO: 2936 - DNA, 21 bp, synthetic construct
  source 1..21: mol_type = other DNA; mol_type = other DNA
tattccaggacggggcagaat

SEQ ID NO: 2937 - DNA, 21 bp, synthetic construct
  source 1..21: mol_type = other DNA; mol_type = other DNA
tattccaggtccgggtccaat

SEQ ID NO: 2938 - DNA, 21 bp, synthetic construct
  source 1..21: mol_type = other DNA; mol_type = other DNA
ttctccagggcgaatttcaat

SEQ ID NO: 2939 - DNA, 21 bp, synthetic construct
  source 1..21: mol_type = other DNA; mol_type = other DNA
tatgcgaggatggggtccaat

SEQ ID NO: 2940 - DNA, 21 bp, synthetic construct
  source 1..21: mol_type = other DNA; mol_type = other DNA
tttgcccgcgtaggcatcaac

SEQ ID NO: 2941 - DNA, 21 bp, synthetic construct
  source 1..21: mol_type = other DNA; mol_type = other DNA
tacgcccgcaccggcatgaac

SEQ ID NO: 2942 - DNA, 21 bp, synthetic construct
  source 1..21: mol_type = other DNA; mol_type = other DNA
ttcgcgaggacggggcagaat

SEQ ID NO: 2943 - DNA, 21 bp, synthetic construct
  source 1..21: mol_type = other DNA; mol_type = other DNA
ttttcacgcgtaggccataac

SEQ ID NO: 2944 - DNA, 21 bp, synthetic construct
  source 1..21: mol_type = other DNA; mol_type = other DNA
tatgcgaaaatgaatataaat

SEQ ID NO: 2945 - DNA, 21 bp, synthetic construct
  source 1..21: mol_type = other DNA; mol_type = other DNA
tatgcgaggatgggggcgaat

SEQ ID NO: 2946 - DNA, 21 bp, synthetic construct
  source 1..21: mol_type = other DNA; mol_type = other DNA
tatgcgaggatagggttcaat

SEQ ID NO: 2947 - DNA, 21 bp, synthetic construct
  source 1..21: mol_type = other DNA; mol_type = other DNA
tattccaggttgaatcagaat

SEQ ID NO: 2948 - DNA, 21 bp, synthetic construct
  source 1..21: mol_type = other DNA; mol_type = other DNA
tactcaaagatgaactacaac

SEQ ID NO: 2949 - DNA, 21 bp, synthetic construct
  source 1..21: mol_type = other DNA; mol_type = other DNA
tactcacgccaaggcgccaac

SEQ ID NO: 2950 - DNA, 21 bp, synthetic construct
  source 1..21: mol_type = other DNA; mol_type = other DNA
tattccagggtggggatgaat

SEQ ID NO: 2951 - DNA, 21 bp, synthetic construct
  source 1..21: mol_type = other DNA; mol_type = other DNA
ttctccaggacggggttcaat

SEQ ID NO: 2952 - DNA, 21 bp, synthetic construct
  source 1..21: mol_type = other DNA; mol_type = other DNA
tactcacgcatgaactttaac

SEQ ID NO: 2953 - DNA, 21 bp, synthetic construct
  source 1..21: mol_type = other DNA; mol_type = other DNA
tactcaaagatcggcaacaac

SEQ ID NO: 2954 - DNA, 21 bp, synthetic construct
  source 1..21: mol_type = other DNA; mol_type = other DNA
tacgcccgcgtaggcatgaac

SEQ ID NO: 2955 - DNA, 21 bp, synthetic construct
  source 1..21: mol_type = other DNA; mol_type = other DNA
tatgcgaggaaaggggagaat

SEQ ID NO: 2956 - DNA, 21 bp, synthetic construct
  source 1..21: mol_type = other DNA; mol_type = other DNA
ttctccaggatgaattccaat

SEQ ID NO: 2957 - DNA, 21 bp, synthetic construct
  source 1..21: mol_type = other DNA; mol_type = other DNA
tattccaaatccgggtggaat

SEQ ID NO: 2958 - DNA, 21 bp, synthetic construct
  source 1..21: mol_type = other DNA; mol_type = other DNA
tacgccaagctgggctacaac

SEQ ID NO: 2959 - DNA, 21 bp, synthetic construct
  source 1..21: mol_type = other DNA; mol_type = other DNA
tttgcccgcatgggcctgaac

SEQ ID NO: 2960 - DNA, 21 bp, synthetic construct
  source 1..21: mol_type = other DNA; mol_type = other DNA
ttctccaggttggggtccaat

SEQ ID NO: 2961 - DNA, 21 bp, synthetic construct
  source 1..21: mol_type = other DNA; mol_type = other DNA
tattccagggtgaatgcgaat

SEQ ID NO: 2962 - DNA, 21 bp, synthetic construct
  source 1..21: mol_type = other DNA; mol_type = other DNA
tactcaaaggccggctttaac

SEQ ID NO: 2963 - DNA, 21 bp, synthetic construct
  source 1..21: mol_type = other DNA; mol_type = other DNA
tatgcgaggggggggtccaat

SEQ ID NO: 2964 - DNA, 21 bp, synthetic construct
  source 1..21: mol_type = other DNA; mol_type = other DNA
tatgcgaaatccaattggaat

SEQ ID NO: 2965 - DNA, 21 bp, synthetic construct
  source 1..21: mol_type = other DNA; mol_type = other DNA
tacgccaagatgggctttaac

SEQ ID NO: 2966 - DNA, 21 bp, synthetic construct
  source 1..21: mol_type = other DNA; mol_type = other DNA
ttctccaggttggggatgaat

SEQ ID NO: 2967 - DNA, 21 bp, synthetic construct
  source 1..21: mol_type = other DNA; mol_type = other DNA
tactcacgcgccaacatgaac

SEQ ID NO: 2968 - DNA, 21 bp, synthetic construct
  source 1..21: mol_type = other DNA; mol_type = other DNA
tacgccaagcaaaactacaac

SEQ ID NO: 2969 - DNA, 21 bp, synthetic construct
  source 1..21: mol_type = other DNA; mol_type = other DNA
tattccaggcaggggcagaat

SEQ ID NO: 2970 - DNA, 21 bp, synthetic construct
  source 1..21: mol_type = other DNA; mol_type = other DNA
ttcgcgaggatggggccgaat

SEQ ID NO: 2971 - DNA, 21 bp, synthetic construct
  source 1..21: mol_type = other DNA; mol_type = other DNA
tactcacgcggcaacctgaac

SEQ ID NO: 2972 - DNA, 21 bp, synthetic construct
  source 1..21: mol_type = other DNA; mol_type = other DNA
tattccaggacggggttcaat

SEQ ID NO: 2973 - DNA, 21 bp, synthetic construct
  source 1..21: mol_type = other DNA; mol_type = other DNA
tttgccaagaacggccccaac

SEQ ID NO: 2974 - DNA, 21 bp, synthetic construct
  source 1..21: mol_type = other DNA; mol_type = other DNA
ttcgcgaggcacgggtataat

SEQ ID NO: 2975 - DNA, 21 bp, synthetic construct
  source 1..21: mol_type = other DNA; mol_type = other DNA
ttcgcgaggttcaatcagaat

SEQ ID NO: 2976 - DNA, 21 bp, synthetic construct
  source 1..21: mol_type = other DNA; mol_type = other DNA
ttcgcgaggtccggggcgaat

SEQ ID NO: 2977 - DNA, 21 bp, synthetic construct
  source 1..21: mol_type = other DNA; mol_type = other DNA
tatgcgaggatagggccgaat

SEQ ID NO: 2978 - DNA, 21 bp, synthetic construct
  source 1..21: mol_type = other DNA; mol_type = other DNA
ttgtccaggcacaatgataat

SEQ ID NO: 2979 - DNA, 21 bp, synthetic construct
  source 1..21: mol_type = other DNA; mol_type = other DNA
tatgcgaggacggggttgaat

SEQ ID NO: 2980 - DNA, 21 bp, synthetic construct
  source 1..21: mol_type = other DNA; mol_type = other DNA
tactcaaagcatggccataac

SEQ ID NO: 2981 - DNA, 21 bp, synthetic construct
  source 1..21: mol_type = other DNA; mol_type = other DNA
ttttcacgccaaggctacaac

SEQ ID NO: 2982 - DNA, 21 bp, synthetic construct
  source 1..21: mol_type = other DNA; mol_type = other DNA
tatgcgaggggggggaataat

SEQ ID NO: 2983 - DNA, 21 bp, synthetic construct
  source 1..21: mol_type = other DNA; mol_type = other DNA
ttcgcgaggacggggccgaat

SEQ ID NO: 2984 - DNA, 21 bp, synthetic construct
  source 1..21: mol_type = other DNA; mol_type = other DNA
tattccagggtgaattccaat

SEQ ID NO: 2985 - DNA, 21 bp, synthetic construct
  source 1..21: mol_type = other DNA; mol_type = other DNA
ttctccaggttgaatgggaat

SEQ ID NO: 2986 - DNA, 21 bp, synthetic construct
  source 1..21: mol_type = other DNA; mol_type = other DNA
tactcacgcatgaacatcaac

SEQ ID NO: 2987 - DNA, 21 bp, synthetic construct
  source 1..21: mol_type = other DNA; mol_type = other DNA
tattccaaaatggggccgaat

SEQ ID NO: 2988 - DNA, 21 bp, synthetic construct
  source 1..21: mol_type = other DNA; mol_type = other DNA
tattccaggatagggacgaat

SEQ ID NO: 2989 - DNA, 21 bp, synthetic construct
  source 1..21: mol_type = other DNA; mol_type = other DNA
tatgcgaggatgggggtgaat

SEQ ID NO: 2990 - DNA, 21 bp, synthetic construct
  source 1..21: mol_type = other DNA; mol_type = other DNA
gtgtccgggaggtccgcgtat

SEQ ID NO: 2991 - DNA, 21 bp, synthetic construct
  source 1..21: mol_type = other DNA; mol_type = other DNA
tattccaggacgaatacgaat

SEQ ID NO: 2992 - DNA, 21 bp, synthetic construct
  source 1..21: mol_type = other DNA; mol_type = other DNA
tattccagggtggggacgaat

SEQ ID NO: 2993 - DNA, 21 bp, synthetic construct
  source 1..21: mol_type = other DNA; mol_type = other DNA
tactcacgctcaggctacaac

SEQ ID NO: 2994 - DNA, 21 bp, synthetic construct
  source 1..21: mol_type = other DNA; mol_type = other DNA
tatgcgaaagcggggtggaat

SEQ ID NO: 2995 - DNA, 21 bp, synthetic construct
  source 1..21: mol_type = other DNA; mol_type = other DNA
tactcacgcaccggcctgaac

SEQ ID NO: 2996 - DNA, 21 bp, synthetic construct
  source 1..21: mol_type = other DNA; mol_type = other DNA
ttcgcgaggacgggggcgaat

SEQ ID NO: 2997 - DNA, 21 bp, synthetic construct
  source 1..21: mol_type = other DNA; mol_type = other DNA
ttctccaggttgaatgcgaat

SEQ ID NO: 2998 - DNA, 21 bp, synthetic construct
  source 1..21: mol_type = other DNA; mol_type = other DNA
tattccaggataggggtgaat

SEQ ID NO: 2999 - DNA, 21 bp, synthetic construct
  source 1..21: mol_type = other DNA; mol_type = other DNA
ttctccaggataggggtgaat

SEQ ID NO: 3000 - DNA, 21 bp, synthetic construct
  source 1..21: mol_type = other DNA; mol_type = other DNA
tacgccaagggcggctgcaac

SEQ ID NO: 3001 - DNA, 21 bp, synthetic construct
  source 1..21: mol_type = other DNA; mol_type = other DNA
tatgcgaaatccgggatgaat

SEQ ID NO: 3002 - DNA, 21 bp, synthetic construct
  source 1..21: mol_type = other DNA; mol_type = other DNA
tatgcgaggttgaattccaat

SEQ ID NO: 3003 - DNA, 21 bp, synthetic construct
  source 1..21: mol_type = other DNA
tattccagggtgaatgtgaat

SEQ ID NO: 3004 - DNA, 21 bp, synthetic construct
  source 1..21: mol_type = other DNA; mol_type = other DNA
tattccaggaataatccgaat

SEQ ID NO: 3005 - DNA, 21 bp, synthetic construct
  source 1..21: mol_type = other DNA; mol_type = other DNA
tattccaggatgaatgcgaat

SEQ ID NO: 3006 - DNA, 21 bp, synthetic construct
  source 1..21: mol_type = other DNA; mol_type = other DNA
tatgcgaaaggggggcacaat

SEQ ID NO: 3007 - DNA, 21 bp, synthetic construct
  source 1..21: mol_type = other DNA; mol_type = other DNA
ttcgcgaggggggggtccaat

SEQ ID NO: 3008 - DNA, 21 bp, synthetic construct
  source 1..21: mol_type = other DNA; mol_type = other DNA
tactcaaagcatggctttaac

SEQ ID NO: 3009 - DNA, 21 bp, synthetic construct
  source 1..21: mol_type = other DNA; mol_type = other DNA
tatgcgaggtccgggatgaat

SEQ ID NO: 3010 - DNA, 21 bp, synthetic construct
  source 1..21: mol_type = other DNA; mol_type = other DNA
ttttcacgcgtaggccaaaac

SEQ ID NO: 3011 - DNA, 21 bp, synthetic construct
  source 1..21: mol_type = other DNA; mol_type = other DNA
ttctccagggcggggcacaat

SEQ ID NO: 3012 - DNA, 21 bp, synthetic construct
  source 1..21: mol_type = other DNA; mol_type = other DNA
tatgcgaggatgaattataat

SEQ ID NO: 3013 - DNA, 21 bp, synthetic construct
  source 1..21: mol_type = other DNA; mol_type = other DNA
tattccaggtccggggcgaat

SEQ ID NO: 3014 - DNA, 21 bp, synthetic construct
  source 1..21: mol_type = other DNA; mol_type = other DNA
tatgcgaggcagggggggaat

SEQ ID NO: 3015 - DNA, 21 bp, synthetic construct
  source 1..21: mol_type = other DNA; mol_type = other DNA
ttttcacgcatcggctcaaac

SEQ ID NO: 3016 - DNA, 21 bp, synthetic construct
  source 1..21: mol_type = other DNA; mol_type = other DNA
tactcacgcgccaacaccaac

SEQ ID NO: 3017 - DNA, 21 bp, synthetic construct
  source 1..21: mol_type = other DNA; mol_type = other DNA
tatgcgagggcggggacgaat

SEQ ID NO: 3018 - DNA, 21 bp, synthetic construct
  source 1..21: mol_type = other DNA; mol_type = other DNA
tatgcgaggatgaatcacaat

SEQ ID NO: 3019 - DNA, 21 bp, synthetic construct
  source 1..21: mol_type = other DNA; mol_type = other DNA
ttctccaggttggggcagaat

SEQ ID NO: 3020 - DNA, 21 bp, synthetic construct
  source 1..21: mol_type = other DNA; mol_type = other DNA
ttctccaaaatagggcacaat

SEQ ID NO: 3021 - DNA, 21 bp, synthetic construct
  source 1..21: mol_type = other DNA; mol_type = other DNA
tactcacgcatcggccataac

SEQ ID NO: 3022 - DNA, 21 bp, synthetic construct
  source 1..21: mol_type = other DNA; mol_type = other DNA
tatgcgaggaatgggttcaat

SEQ ID NO: 3023 - DNA, 21 bp, synthetic construct
  source 1..21: mol_type = other DNA; mol_type = other DNA
tatgcgaggttgaatacgaat

SEQ ID NO: 3024 - DNA, 21 bp, synthetic construct
  source 1..21: mol_type = other DNA; mol_type = other DNA
tatgcgaggaatgggatgaat

SEQ ID NO: 3025 - DNA, 21 bp, synthetic construct
  source 1..21: mol_type = other DNA; mol_type = other DNA
tactcacgcgccaacatcaac

SEQ ID NO: 3026 - DNA, 21 bp, synthetic construct
  source 1..21: mol_type = other DNA; mol_type = other DNA
ttcgcgagggtggggccgaat

SEQ ID NO: 3027 - DNA, 21 bp, synthetic construct
  source 1..21: mol_type = other DNA; mol_type = other DNA
ctgtcaaagctgaacgccaac

SEQ ID NO: 3028 - DNA, 21 bp, synthetic construct
  source 1..21: mol_type = other DNA; mol_type = other DNA
ctggccaagatcggctacaac

SEQ ID NO: 3029 - DNA, 21 bp, synthetic construct
  source 1..21: mol_type = other DNA; mol_type = other DNA
tattccaggataaatgcgaat

SEQ ID NO: 3030 - DNA, 21 bp, synthetic construct
  source 1..21: mol_type = other DNA; mol_type = other DNA
tactcaaagatcggcctgaac

SEQ ID NO: 3031 - DNA, 21 bp, synthetic construct
  source 1..21: mol_type = other DNA; mol_type = other DNA
ttctccaggttgaatccgaat

SEQ ID NO: 3032 - DNA, 21 bp, synthetic construct
  source 1..21: mol_type = other DNA; mol_type = other DNA
tatgcgaaaacggggcacaat

SEQ ID NO: 3033 - DNA, 21 bp, synthetic construct
  source 1..21: mol_type = other DNA; mol_type = other DNA
tactcacgcatgggcatgaac

SEQ ID NO: 3034 - DNA, 21 bp, synthetic construct
  source 1..21: mol_type = other DNA; mol_type = other DNA
tactcaaagcaaggctacaac

SEQ ID NO: 3035 - DNA, 21 bp, synthetic construct
  source 1..21: mol_type = other DNA; mol_type = other DNA
ttcgcgaaagcggggccgaat

SEQ ID NO: 3036 - DNA, 21 bp, synthetic construct
  source 1..21: mol_type = other DNA; mol_type = other DNA
tactcacgcgccaacggcaac

SEQ ID NO: 3037 - DNA, 21 bp, synthetic construct
  source 1..21: mol_type = other DNA; mol_type = other DNA
ttcgcgaaaacggggtggaat

SEQ ID NO: 3038 - DNA, 21 bp, synthetic construct
  source 1..21: mol_type = other DNA; mol_type = other DNA
tatgcgagggtgggggcgaat

SEQ ID NO: 3039 - DNA, 21 bp, synthetic construct
  source 1..21: mol_type = other DNA; mol_type = other DNA
tatgcgaggcaggggccgaat

SEQ ID NO: 3040 - DNA, 21 bp, synthetic construct
  source 1..21: mol_type = other DNA; mol_type = other DNA
tattccaaagtgggggcgaat

SEQ ID NO: 3041 - DNA, 21 bp, synthetic construct
  source 1..21: mol_type = other DNA; mol_type = other DNA
tattccagggcgggggcgaat

SEQ ID NO: 3042 - DNA, 21 bp, synthetic construct
  source 1..21: mol_type = other DNA; mol_type = other DNA
ttttcacgccatggcaacaac

SEQ ID NO: 3043 - DNA, 21 bp, synthetic construct
  source 1..21: mol_type = other DNA; mol_type = other DNA
tttgcccgctacggctcaaac

SEQ ID NO: 3044 - DNA, 21 bp, synthetic construct
  source 1..21: mol_type = other DNA; mol_type = other DNA
ttctccaggttgaatgataat

SEQ ID NO: 3045 - DNA, 21 bp, synthetic construct
  source 1..21: mol_type = other DNA; mol_type = other DNA
gtgttctcctccaatggggtg

SEQ ID NO: 3046 - DNA, 21 bp, synthetic construct
  source 1..21: mol_type = other DNA; mol_type = other DNA
tactcacgcgccaacgccaac

SEQ ID NO: 3047 - DNA, 21 bp, synthetic construct
  source 1..21: mol_type = other DNA; mol_type = other DNA
tactcaaagatgaacatgaac

SEQ ID NO: 3048 - DNA, 21 bp, synthetic construct
  source 1..21: mol_type = other DNA; mol_type = other DNA
tattccaaagggaatttcaat

SEQ ID NO: 3049 - DNA, 21 bp, synthetic construct
  source 1..21: mol_type = other DNA; mol_type = other DNA
ttttcacgcgccggctcaaac

SEQ ID NO: 3050 - DNA, 21 bp, synthetic construct
  source 1..21: mol_type = other DNA; mol_type = other DNA
tattccagggcggggcagaat

SEQ ID NO: 3051 - DNA, 21 bp, synthetic construct
  source 1..21: mol_type = other DNA; mol_type = other DNA
tattccaggtccgcgacgaat

SEQ ID NO: 3052 - DNA, 21 bp, synthetic construct
  source 1..21: mol_type = other DNA; mol_type = other DNA
tatgcgaggggggggttgaat

SEQ ID NO: 3053 - DNA, 21 bp, synthetic construct
  source 1..21: mol_type = other DNA; mol_type = other DNA
tacgccaagaccggcgtaaac

SEQ ID NO: 3054 - DNA, 21 bp, synthetic construct
  source 1..21: mol_type = other DNA; mol_type = other DNA
tattccaaattggggccgaat

SEQ ID NO: 3055 - DNA, 21 bp, synthetic construct
  source 1..21: mol_type = other DNA; mol_type = other DNA
tatgcgaggcagggggtgaat

SEQ ID NO: 3056 - DNA, 21 bp, synthetic construct
  source 1..21: mol_type = other DNA; mol_type = other DNA
tactcaaaggtaggctgcaac

SEQ ID NO: 3057 - DNA, 21 bp, synthetic construct
  source 1..21: mol_type = other DNA; mol_type = other DNA
ttgtccaggtccgggacgaat

SEQ ID NO: 3058 - DNA, 21 bp, synthetic construct
  source 1..21: mol_type = other DNA; mol_type = other DNA
tttgcccgccaaggcctgaac

SEQ ID NO: 3059 - DNA, 21 bp, synthetic construct
  source 1..21: mol_type = other DNA; mol_type = other DNA
tactcacgcgtaggcctgaac

SEQ ID NO: 3060 - DNA, 21 bp, synthetic construct
  source 1..21: mol_type = other DNA; mol_type = other DNA
tatgcgaggatggggatgaat

SEQ ID NO: 3061 - DNA, 21 bp, synthetic construct
  source 1..21: mol_type = other DNA; mol_type = other DNA
ttcgcgagggggggggtgaat

SEQ ID NO: 3062 - DNA, 21 bp, synthetic construct
  source 1..21: mol_type = other DNA; mol_type = other DNA
tacgccaaggccggctttaac

SEQ ID NO: 3063 - DNA, 21 bp, synthetic construct
  source 1..21: mol_type = other DNA; mol_type = other DNA
ttcaggtccacgaatgggata

SEQ ID NO: 3064 - DNA, 21 bp, synthetic construct
  source 1..21: mol_type = other DNA; mol_type = other DNA
ttttcacgcgccaacaacaac

SEQ ID NO: 3065 - DNA, 21 bp, synthetic construct
  source 1..21: mol_type = other DNA; mol_type = other DNA
ataaggtccacgaatgggata

SEQ ID NO: 3066 - DNA, 21 bp, synthetic construct
  source 1..21: mol_type = other DNA; mol_type = other DNA
ttctccaaaatggggaataat

SEQ ID NO: 3067 - DNA, 21 bp, synthetic construct
  source 1..21: mol_type = other DNA; mol_type = other DNA
ttttcaaagctgaacgtaaac

SEQ ID NO: 3068 - DNA, 21 bp, synthetic construct
  source 1..21: mol_type = other DNA; mol_type = other DNA
tactcacgctcaggcggcaac

SEQ ID NO: 3069 - DNA, 21 bp, synthetic construct
  source 1..21: mol_type = other DNA; mol_type = other DNA
tatgcgagggggaatccgaat

SEQ ID NO: 3070 - DNA, 21 bp, synthetic construct
  source 1..21: mol_type = other DNA; mol_type = other DNA
ttctccaggccgaataataat

SEQ ID NO: 3071 - DNA, 21 bp, synthetic construct
  source 1..21: mol_type = other DNA; mol_type = other DNA
ttcgcgaggacggggtccaat

SEQ ID NO: 3072 - DNA, 21 bp, synthetic construct
  source 1..21: mol_type = other DNA; mol_type = other DNA
tatgcgagggtggggccgaat

SEQ ID NO: 3073 - DNA, 21 bp, synthetic construct
  source 1..21: mol_type = other DNA; mol_type = other DNA
tattccaggaaaaatgagaat

SEQ ID NO: 3074 - DNA, 21 bp, synthetic construct
  source 1..21: mol_type = other DNA; mol_type = other DNA
tatgcgagggggggggcgaat

SEQ ID NO: 3075 - DNA, 21 bp, synthetic construct
  source 1..21: mol_type = other DNA; mol_type = other DNA
tactcaaagatgaactttaac

SEQ ID NO: 3076 - DNA, 21 bp, synthetic construct
  source 1..21: mol_type = other DNA; mol_type = other DNA
ctgtcaaagcaaaactttaac

SEQ ID NO: 3077 - DNA, 21 bp, synthetic construct
  source 1..21: mol_type = other DNA; mol_type = other DNA
accaagtcaaccaacggcatc

SEQ ID NO: 3078 - DNA, 21 bp, synthetic construct
  source 1..21: mol_type = other DNA; mol_type = other DNA
tactcacgccataacatcaac

SEQ ID NO: 3079 - DNA, 21 bp, synthetic construct
  source 1..21: mol_type = other DNA; mol_type = other DNA
tttgcccgcaccggctacaac

SEQ ID NO: 3080 - DNA, 21 bp, synthetic construct
  source 1..21: mol_type = other DNA; mol_type = other DNA
ttctccaggataaatgtgaat

SEQ ID NO: 3081 - DNA, 21 bp, synthetic construct
  source 1..21: mol_type = other DNA; mol_type = other DNA
tatgcgagggcggggcacaat

SEQ ID NO: 3082 - DNA, 21 bp, synthetic construct
  source 1..21: mol_type = other DNA; mol_type = other DNA
tactcacgccaaggcctgaac

SEQ ID NO: 3083 - DNA, 21 bp, synthetic construct
  source 1..21: mol_type = other DNA; mol_type = other DNA
tattccaggttggggcacaat

SEQ ID NO: 3084 - DNA, 21 bp, synthetic construct
  source 1..21: mol_type = other DNA; mol_type = other DNA
ttttcaaagctgaacaacaac

SEQ ID NO: 3085 - DNA, 21 bp, synthetic construct
  source 1..21: mol_type = other DNA; mol_type = other DNA
tattccaaattgaatccgaat

SEQ ID NO: 3086 - DNA, 21 bp, synthetic construct
  source 1..21: mol_type = other DNA; mol_type = other DNA
tattccaggacgaattccaat

SEQ ID NO: 3087 - DNA, 21 bp, synthetic construct
  source 1..21: mol_type = other DNA; mol_type = other DNA
tactcacgcgccggcaccaac

SEQ ID NO: 3088 - DNA, 21 bp, synthetic construct
  source 1..21: mol_type = other DNA; mol_type = other DNA
ataacggggatgtccaaatat

SEQ ID NO: 3089 - DNA, 21 bp, synthetic construct
  source 1..21: mol_type = other DNA; mol_type = other DNA
tattccaaagtggggccgaat

SEQ ID NO: 3090 - DNA, 21 bp, synthetic construct
  source 1..21: mol_type = other DNA; mol_type = other DNA
tatgcgagggggaatgtgaat

SEQ ID NO: 3091 - DNA, 21 bp, synthetic construct
  source 1..21: mol_type = other DNA; mol_type = other DNA
tacgcccgcaccggcggcaac

SEQ ID NO: 3092 - DNA, 21 bp, synthetic construct
  source 1..21: mol_type = other DNA; mol_type = other DNA
tattccaggatgaatcacaat

SEQ ID NO: 3093 - DNA, 21 bp, synthetic construct
  source 1..21: mol_type = other DNA; mol_type = other DNA
tttgcccgcaacggcatcaac

SEQ ID NO: 3094 - DNA, 21 bp, synthetic construct
  source 1..21: mol_type = other DNA; mol_type = other DNA
tattccaaacaggggtgtaat

SEQ ID NO: 3095 - DNA, 21 bp, synthetic construct
  source 1..21: mol_type = other DNA; mol_type = other DNA
tattccaggttggggatgaat

SEQ ID NO: 3096 - DNA, 21 bp, synthetic construct
  source 1..21: mol_type = other DNA; mol_type = other DNA
ttctccagggcggggatgaat

SEQ ID NO: 3097 - DNA, 21 bp, synthetic construct
  source 1..21: mol_type = other DNA; mol_type = other DNA
tatgcgaggaatgggccgaat

SEQ ID NO: 3098 - DNA, 21 bp, synthetic construct
  source 1..21: mol_type = other DNA; mol_type = other DNA
ttctccaggataggggggaat

SEQ ID NO: 3099 - DNA, 21 bp, synthetic construct
  source 1..21: mol_type = other DNA; mol_type = other DNA
tattccaaattgaatgcgaat

SEQ ID NO: 3100 - DNA, 21 bp, synthetic construct
  source 1..21: mol_type = other DNA; mol_type = other DNA
ttcgcgaggggggggttcaat

SEQ ID NO: 3101 - DNA, 21 bp, synthetic construct
  source 1..21: mol_type = other DNA; mol_type = other DNA
tactcaaagcatggcgccaac

SEQ ID NO: 3102 - DNA, 21 bp, synthetic construct
  source 1..21: mol_type = other DNA; mol_type = other DNA
tacgcccgctcaggccaaaac

SEQ ID NO: 3103 - DNA, 21 bp, synthetic construct
  source 1..21: mol_type = other DNA; mol_type = other DNA
ctggccaagaccggccccaac

SEQ ID NO: 3104 - DNA, 21 bp, synthetic construct
  source 1..21: mol_type = other DNA; mol_type = other DNA
tatgcgaaatatgggatgaat

SEQ ID NO: 3105 - DNA, 21 bp, synthetic construct
  source 1..21: mol_type = other DNA; mol_type = other DNA
tactcacgcatgaacaacaac

SEQ ID NO: 3106 - DNA, 21 bp, synthetic construct
  source 1..21: mol_type = other DNA; mol_type = other DNA
ttgcacaaaacgacgcacaat

SEQ ID NO: 3107 - DNA, 21 bp, synthetic construct
  source 1..21: mol_type = other DNA; mol_type = other DNA
ttctccagggtggggatgaat

SEQ ID NO: 3108 - DNA, 21 bp, synthetic construct
  source 1..21: mol_type = other DNA; mol_type = other DNA
tattccagggtggggccgaat

SEQ ID NO: 3109 - DNA, 21 bp, synthetic construct
  source 1..21: mol_type = other DNA; mol_type = other DNA
ttgcacgcggcgttgccgaat

SEQ ID NO: 3110 - DNA, 21 bp, synthetic construct
  source 1..21: mol_type = other DNA; mol_type = other DNA
tactcacgcgccggccataac

SEQ ID NO: 3111 - DNA, 21 bp, synthetic construct
  source 1..21: mol_type = other DNA; mol_type = other DNA
tatgcgaggacgaatccgaat

SEQ ID NO: 3112 - DNA, 21 bp, synthetic construct
  source 1..21: mol_type = other DNA; mol_type = other DNA
ttttcaaagatgaactttaac

SEQ ID NO: 3113 - DNA, 21 bp, synthetic construct
  source 1..21: mol_type = other DNA; mol_type = other DNA
tttgcccgcaacggccataac

SEQ ID NO: 3114 - DNA, 21 bp, synthetic construct
  source 1..21: mol_type = other DNA; mol_type = other DNA
tactcacgcatcaaccccaac

SEQ ID NO: 3115 - DNA, 21 bp, synthetic construct
  source 1..21: mol_type = other DNA; mol_type = other DNA
ttctccaaattgaatcacaat

SEQ ID NO: 3116 - DNA, 21 bp, synthetic construct
  source 1..21: mol_type = other DNA; mol_type = other DNA
tatgcgaggacgaatcagaat

SEQ ID NO: 3117 - DNA, 21 bp, synthetic construct
  source 1..21: mol_type = other DNA; mol_type = other DNA
tatgcgaggcagaatcagaat

SEQ ID NO: 3118 - DNA, 21 bp, synthetic construct
  source 1..21: mol_type = other DNA; mol_type = other DNA
tatgcgaggatagggcacaat

SEQ ID NO: 3119 - DNA, 21 bp, synthetic construct
  source 1..21: mol_type = other DNA; mol_type = other DNA
tactcacgccccaactacaac

SEQ ID NO: 3120 - DNA, 21 bp, synthetic construct
  source 1..21: mol_type = other DNA; mol_type = other DNA
tattccaaatggaataataat

SEQ ID NO: 3121 - DNA, 21 bp, synthetic construct
  source 1..21: mol_type = other DNA; mol_type = other DNA
ttcgcgagggggggggcgaat

SEQ ID NO: 3122 - DNA, 21 bp, synthetic construct
  source 1..21: mol_type = other DNA; mol_type = other DNA
ttctccaggacggggttgaat

SEQ ID NO: 3123 - DNA, 21 bp, synthetic construct
  source 1..21: mol_type = other DNA; mol_type = other DNA
tactcacgcatcggcggcaac

SEQ ID NO: 3124 - DNA, 21 bp, synthetic construct
  source 1..21: mol_type = other DNA; mol_type = other DNA
tactcaaagatcggcatcaac

SEQ ID NO: 3125 - DNA, 21 bp, synthetic construct
  source 1..21: mol_type = other DNA; mol_type = other DNA
tatgcgaggccgggggcgaat

SEQ ID NO: 3126 - DNA, 21 bp, synthetic construct
  source 1..21: mol_type = other DNA; mol_type = other DNA
ttcgcgaggacggggatgaat

SEQ ID NO: 3127 - DNA, 21 bp, synthetic construct
  source 1..21: mol_type = other DNA; mol_type = other DNA
tactcacgctcaaacatgaac

SEQ ID NO: 3128 - DNA, 21 bp, synthetic construct
  source 1..21: mol_type = other DNA; mol_type = other DNA
tactcaaagctgaaccaaaac

SEQ ID NO: 3129 - DNA, 21 bp, synthetic construct
  source 1..21: mol_type = other DNA; mol_type = other DNA
tacgccaagggcaactggaac

SEQ ID NO: 3130 - DNA, 21 bp, synthetic construct
  source 1..21: mol_type = other DNA; mol_type = other DNA
ctgtcaaagatcggccataac

SEQ ID NO: 3131 - DNA, 21 bp, synthetic construct
  source 1..21: mol_type = other DNA; mol_type = other DNA
tactcaaaggccaactacaac

SEQ ID NO: 3132 - DNA, 21 bp, synthetic construct
  source 1..21: mol_type = other DNA; mol_type = other DNA
tattccagggtgggggtgaat

SEQ ID NO: 3133 - DNA, 21 bp, synthetic construct
  source 1..21: mol_type = other DNA; mol_type = other DNA
tttgcccgcggcggccccaac

SEQ ID NO: 3134 - DNA, 21 bp, synthetic construct
  source 1..21: mol_type = other DNA; mol_type = other DNA
tactcaaaggtaggccataac

SEQ ID NO: 3135 - DNA, 21 bp, synthetic construct
  source 1..21: mol_type = other DNA; mol_type = other DNA
tatgcgaaacaggggtccaat

SEQ ID NO: 3136 - DNA, 21 bp, synthetic construct
  source 1..21: mol_type = other DNA; mol_type = other DNA
tacgcccgctcaggcaccaac

SEQ ID NO: 3137 - DNA, 21 bp, synthetic construct
  source 1..21: mol_type = other DNA; mol_type = other DNA
ttctccaggcaggggccgaat

SEQ ID NO: 3138 - DNA, 21 bp, synthetic construct
  source 1..21: mol_type = other DNA; mol_type = other DNA
tatgcgaggaatgggcacaat

SEQ ID NO: 3139 - DNA, 21 bp, synthetic construct
  source 1..21: mol_type = other DNA; mol_type = other DNA
tatgcgaggcaggggacgaat

SEQ ID NO: 3140 - DNA, 21 bp, synthetic construct
  source 1..21: mol_type = other DNA; mol_type = other DNA
tactcacgcggcggcatgaac

SEQ ID NO: 3141 - DNA, 21 bp, synthetic construct
  source 1..21: mol_type = other DNA; mol_type = other DNA
ttttcacgcgtaggcgccaac

SEQ ID NO: 3142 - DNA, 21 bp, synthetic construct
  source 1..21: mol_type = other DNA; mol_type = other DNA
tattccaaaatgggggtgaat

SEQ ID NO: 3143 - DNA, 21 bp, synthetic construct
  source 1..21: mol_type = other DNA; mol_type = other DNA
tactcaaaggtaggctcaaac

SEQ ID NO: 3144 - DNA, 21 bp, synthetic construct
  source 1..21: mol_type = other DNA; mol_type = other DNA
tacgcccgcgccaaccccaac

SEQ ID NO: 3145 - DNA, 21 bp, synthetic construct
  source 1..21: mol_type = other DNA; mol_type = other DNA
tttgcccgcggcaacatcaac

SEQ ID NO: 3146 - DNA, 21 bp, synthetic construct
  source 1..21: mol_type = other DNA; mol_type = other DNA
tattccaaattgaatcacaat

SEQ ID NO: 3147 - DNA, 21 bp, synthetic construct
  source 1..21: mol_type = other DNA; mol_type = other DNA
tactcacgcgtaggctttaac

SEQ ID NO: 3148 - DNA, 21 bp, synthetic construct
  source 1..21: mol_type = other DNA; mol_type = other DNA
tactcacgcatgaacatgaac

SEQ ID NO: 3149 - DNA, 21 bp, synthetic construct
  source 1..21: mol_type = other DNA; mol_type = other DNA
tatgcgaggcacaattccaat

SEQ ID NO: 3150 - DNA, 21 bp, synthetic construct
  source 1..21: mol_type = other DNA; mol_type = other DNA
tatgcgaggggggggacgaat

SEQ ID NO: 3151 - DNA, 21 bp, synthetic construct
  source 1..21: mol_type = other DNA; mol_type = other DNA
ttgtccaggcaggggccgaat

SEQ ID NO: 3152 - DNA, 21 bp, synthetic construct
  source 1..21: mol_type = other DNA; mol_type = other DNA
tactcacgcgccggcctgaac

SEQ ID NO: 3153 - DNA, 21 bp, synthetic construct
  source 1..21: mol_type = other DNA; mol_type = other DNA
tactcaaagaccggctttaac

SEQ ID NO: 3154 - DNA, 21 bp, synthetic construct
  source 1..21: mol_type = other DNA; mol_type = other DNA
tacgcccgctcaggcggcaac

SEQ ID NO: 3155 - DNA, 21 bp, synthetic construct
  source 1..21: mol_type = other DNA; mol_type = other DNA
tactcacgcggcaacatcaac

SEQ ID NO: 3156 - DNA, 21 bp, synthetic construct
  source 1..21: mol_type = other DNA
tacgcccgcggcggctttaac

SEQ ID NO: 3157 - DNA, 21 bp, synthetic construct
  source 1..21: mol_type = other DNA; mol_type = other DNA
ttgaggtccacgaatggggtg

SEQ ID NO: 3158 - DNA, 21 bp, synthetic construct
  source 1..21: mol_type = other DNA; mol_type = other DNA
tatgcgaggtccggggtgaat

SEQ ID NO: 3159 - DNA, 21 bp, synthetic construct
  source 1..21: mol_type = other DNA; mol_type = other DNA
tattccaggttcaatatgaat

SEQ ID NO: 3160 - DNA, 21 bp, synthetic construct
  source 1..21: mol_type = other DNA; mol_type = other DNA
tacgtaaagtcaaacaacaac

SEQ ID NO: 3161 - DNA, 21 bp, synthetic construct
  source 1..21: mol_type = other DNA; mol_type = other DNA
tacgccaagctgggccataac

SEQ ID NO: 3162 - DNA, 21 bp, synthetic construct
  source 1..21: mol_type = other DNA; mol_type = other DNA
tatgcgaggcacgggttgaat

SEQ ID NO: 3163 - DNA, 21 bp, synthetic construct
  source 1..21: mol_type = other DNA; mol_type = other DNA
tatgcgaggataggggggaat

SEQ ID NO: 3164 - DNA, 21 bp, synthetic construct
  source 1..21: mol_type = other DNA; mol_type = other DNA
tattccagggtggggtccaat

SEQ ID NO: 3165 - DNA, 21 bp, synthetic construct
  source 1..21: mol_type = other DNA; mol_type = other DNA
tattccaggcagggggtgaat

SEQ ID NO: 3166 - DNA, 21 bp, synthetic construct
  source 1..21: mol_type = other DNA; mol_type = other DNA
ttcgcgaaatataatccgaat

SEQ ID NO: 3167 - DNA, 21 bp, synthetic construct
  source 1..21: mol_type = other DNA; mol_type = other DNA
tattccaaatggaatcagaat

SEQ ID NO: 3168 - DNA, 21 bp, synthetic construct
  source 1..21: mol_type = other DNA; mol_type = other DNA
ttctccaggatgggggcgaat

SEQ ID NO: 3169 - DNA, 21 bp, synthetic construct
  source 1..21: mol_type = other DNA; mol_type = other DNA
ttctccaggtccgggttgaat

SEQ ID NO: 3170 - DNA, 21 bp, synthetic construct
  source 1..21: mol_type = other DNA; mol_type = other DNA
tattccaaatccgggttcaat

SEQ ID NO: 3171 - DNA, 21 bp, synthetic construct
  source 1..21: mol_type = other DNA; mol_type = other DNA
tatgcgaggacgggggtgaat

SEQ ID NO: 3172 - DNA, 21 bp, synthetic construct
  source 1..21: mol_type = other DNA; mol_type = other DNA
tactcaaagaacggctgcaac

SEQ ID NO: 3173 - DNA, 21 bp, synthetic construct
  source 1..21: mol_type = other DNA; mol_type = other DNA
tatgcgaaagtggggcacaat

SEQ ID NO: 3174 - DNA, 21 bp, synthetic construct
  source 1..21: mol_type = other DNA; mol_type = other DNA
atcttttcaaccaacggcatc

SEQ ID NO: 3175 - DNA, 21 bp, synthetic construct
  source 1..21: mol_type = other DNA; mol_type = other DNA
tactcacgcatcggctttaac

SEQ ID NO: 3176 - DNA, 21 bp, synthetic construct
  source 1..21: mol_type = other DNA; mol_type = other DNA
tattccaaatatgggttgaat

SEQ ID NO: 3177 - DNA, 21 bp, synthetic construct
  source 1..21: mol_type = other DNA; mol_type = other DNA
tacgccaagaccaactggaac

SEQ ID NO: 3178 - DNA, 21 bp, synthetic construct
  source 1..21: mol_type = other DNA; mol_type = other DNA
cattcacgcaccggctcaaac

SEQ ID NO: 3179 - DNA, 21 bp, synthetic construct
  source 1..21: mol_type = other DNA; mol_type = other DNA
tactcacgcatgaacctgaac

SEQ ID NO: 3180 - DNA, 21 bp, synthetic construct
  source 1..21: mol_type = other DNA; mol_type = other DNA
ttcgcgaggggggggacgaat

SEQ ID NO: 3181 - DNA, 21 bp, synthetic construct
  source 1..21: mol_type = other DNA; mol_type = other DNA
tactcacgcatcaacgtaaac

SEQ ID NO: 3182 - DNA, 21 bp, synthetic construct
  source 1..21: mol_type = other DNA; mol_type = other DNA
tatacgaggttgaatcagaat

SEQ ID NO: 3183 - DNA, 21 bp, synthetic construct
  source 1..21: mol_type = other DNA; mol_type = other DNA
ccgaggtccacgaatgggata

SEQ ID NO: 3184 - DNA, 21 bp, synthetic construct
  source 1..21: mol_type = other DNA; mol_type = other DNA
ttcgcgaggatagggaataat

SEQ ID NO: 3185 - DNA, 21 bp, synthetic construct
  source 1..21: mol_type = other DNA; mol_type = other DNA
tattccaggttgggggcgaat

SEQ ID NO: 3186 - DNA, 21 bp, synthetic construct
  source 1..21: mol_type = other DNA; mol_type = other DNA
tactcacgcgccggcgtaaac

SEQ ID NO: 3187 - DNA, 21 bp, synthetic construct
  source 1..21: mol_type = other DNA; mol_type = other DNA
ctgtcaaagctgggcgtaaac

SEQ ID NO: 3188 - DNA, 21 bp, synthetic construct
  source 1..21: mol_type = other DNA; mol_type = other DNA
tacgccaagcaaggctacaac

SEQ ID NO: 3189 - DNA, 21 bp, synthetic construct
  source 1..21: mol_type = other DNA; mol_type = other DNA
tacgcccgctcaggctcaaac

SEQ ID NO: 3190 - DNA, 21 bp, synthetic construct
  source 1..21: mol_type = other DNA; mol_type = other DNA
tattccaggacgaatgtgaat

SEQ ID NO: 3191 - DNA, 21 bp, synthetic construct
  source 1..21: mol_type = other DNA; mol_type = other DNA
tattccagggcgaattccaat

SEQ ID NO: 3192 - DNA, 21 bp, synthetic construct
  source 1..21: mol_type = other DNA; mol_type = other DNA
tactcacgcggcggctttaac

SEQ ID NO: 3193 - DNA, 21 bp, synthetic construct
  source 1..21: mol_type = other DNA; mol_type = other DNA
tactcacgcggcggctacaac

SEQ ID NO: 3194 - DNA, 21 bp, synthetic construct
  source 1..21: mol_type = other DNA; mol_type = other DNA
tatgcgaggacggggacgaat

SEQ ID NO: 3195 - DNA, 21 bp, synthetic construct
  source 1..21: mol_type = other DNA; mol_type = other DNA
tatgcgaggttggggcacaat

SEQ ID NO: 3196 - DNA, 21 bp, synthetic construct
  source 1..21: mol_type = other DNA; mol_type = other DNA
tatgcgaggacgaatgcgaat

SEQ ID NO: 3197 - DNA, 21 bp, synthetic construct
  source 1..21: mol_type = other DNA; mol_type = other DNA
tactcacgcaccaacaacaac

SEQ ID NO: 3198 - DNA, 21 bp, synthetic construct
  source 1..21: mol_type = other DNA; mol_type = other DNA
tactcacgctcaggcctgaac

SEQ ID NO: 3199 - DNA, 21 bp, synthetic construct
  source 1..21: mol_type = other DNA; mol_type = other DNA
tattccaaacaggggttcaat

SEQ ID NO: 3200 - DNA, 21 bp, synthetic construct
  source 1..21: mol_type = other DNA; mol_type = other DNA
tacgcccgcgtaggcaccaac

SEQ ID NO: 3201 - DNA, 21 bp, synthetic construct
  source 1..21: mol_type = other DNA; mol_type = other DNA
tactcacgccccaaccataac

SEQ ID NO: 3202 - DNA, 21 bp, synthetic construct
  source 1..21: mol_type = other DNA; mol_type = other DNA
ctggccaaggccggcatgaac

SEQ ID NO: 3203 - DNA, 21 bp, synthetic construct
  source 1..21: mol_type = other DNA; mol_type = other DNA
tatgcgaggcacggggataat

SEQ ID NO: 3204 - DNA, 21 bp, synthetic construct
  source 1..21: mol_type = other DNA; mol_type = other DNA
ttctccaggataaatataaat

SEQ ID NO: 3205 - DNA, 21 bp, synthetic construct
  source 1..21: mol_type = other DNA; mol_type = other DNA
tattccaggggggggaataat

SEQ ID NO: 3206 - DNA, 21 bp, synthetic construct
  source 1..21: mol_type = other DNA; mol_type = other DNA
tatgcgaggatggggttgaat

SEQ ID NO: 3207 - DNA, 21 bp, synthetic construct
  source 1..21: mol_type = other DNA; mol_type = other DNA
tacgccaagggcaacgtaaac

SEQ ID NO: 3208 - DNA, 21 bp, synthetic construct
  source 1..21: mol_type = other DNA; mol_type = other DNA
tacgccaagaccggcatgaac

SEQ ID NO: 3209 - DNA, 21 bp, synthetic construct
  source 1..21: mol_type = other DNA; mol_type = other DNA
tattccaggtggaatgagaat

SEQ ID NO: 3210 - DNA, 21 bp, synthetic construct
  source 1..21: mol_type = other DNA; mol_type = other DNA
atagatgcgtcctccaggtgg

SEQ ID NO: 3211 - DNA, 21 bp, synthetic construct
  source 1..21: mol_type = other DNA; mol_type = other DNA
tatgcgaggcagaatttgaat

SEQ ID NO: 3212 - DNA, 21 bp, synthetic construct
  source 1..21: mol_type = other DNA; mol_type = other DNA
ttcgcgaggggggggttgaat

SEQ ID NO: 3213 - DNA, 21 bp, synthetic construct
  source 1..21: mol_type = other DNA; mol_type = other DNA
ttctccaaatatgggcacaat

SEQ ID NO: 3214 - DNA, 21 bp, synthetic construct
  source 1..21: mol_type = other DNA; mol_type = other DNA
tttgccaagtacggctacaac

SEQ ID NO: 3215 - DNA, 21 bp, synthetic construct
  source 1..21: mol_type = other DNA; mol_type = other DNA
tatgcgaggtatgggtccaat

SEQ ID NO: 3216 - DNA, 21 bp, synthetic construct
  source 1..21: mol_type = other DNA; mol_type = other DNA
ttttcacgcgtaggcaacaac

SEQ ID NO: 3217 - DNA, 21 bp, synthetic construct
  source 1..21: mol_type = other DNA; mol_type = other DNA
tactcacgcgtaaacatcaac

SEQ ID NO: 3218 - DNA, 21 bp, synthetic construct
  source 1..21: mol_type = other DNA; mol_type = other DNA
ctgtcaaagatgaacgtaaac

SEQ ID NO: 3219 - DNA, 21 bp, synthetic construct
  source 1..21: mol_type = other DNA; mol_type = other DNA
tatgcgaggcaggggttcaat

SEQ ID NO: 3220 - DNA, 21 bp, synthetic construct
  source 1..21: mol_type = other DNA; mol_type = other DNA
ttctccagggcgaatcagaat

SEQ ID NO: 3221 - DNA, 21 bp, synthetic construct
  source 1..21: mol_type = other DNA; mol_type = other DNA
tatgcgaggttcaatgggaat

SEQ ID NO: 3222 - DNA, 21 bp, synthetic construct
  source 1..21: mol_type = other DNA; mol_type = other DNA
tatgcgaaaaggggggagaat

SEQ ID NO: 3223 - DNA, 21 bp, synthetic construct
  source 1..21: mol_type = other DNA; mol_type = other DNA
tattccaaattgggggcgaat

SEQ ID NO: 3224 - DNA, 21 bp, synthetic construct
  source 1..21: mol_type = other DNA; mol_type = other DNA
tactcacgcgccggcatgaac

SEQ ID NO: 3225 - DNA, 21 bp, synthetic construct
  source 1..21: mol_type = other DNA; mol_type = other DNA
tattccaaaatagggccgaat

SEQ ID NO: 3226 - DNA, 21 bp, synthetic construct
  source 1..21: mol_type = other DNA; mol_type = other DNA
tttgcccgcggcggcaacaac

SEQ ID NO: 3227 - DNA, 21 bp, synthetic construct
  source 1..21: mol_type = other DNA; mol_type = other DNA
tactcacgcatgggcctgaac

SEQ ID NO: 3228 - DNA, 21 bp, synthetic construct
  source 1..21: mol_type = other DNA; mol_type = other DNA
ttctccagggtgggggtgaat

SEQ ID NO: 3229 - DNA, 21 bp, synthetic construct
  source 1..21: mol_type = other DNA; mol_type = other DNA
tatgcgaaaatagggataaat

SEQ ID NO: 3230 - DNA, 21 bp, synthetic construct
  source 1..21: mol_type = other DNA; mol_type = other DNA
tactcaaagatgaacgtaaac

SEQ ID NO: 3231 - DNA, 21 bp, synthetic construct
  source 1..21: mol_type = other DNA; mol_type = other DNA
tatgcgaaaatggggcacaat

SEQ ID NO: 3232 - DNA, 21 bp, synthetic construct
  source 1..21: mol_type = other DNA; mol_type = other DNA
tactcacgcgccggcaacaac

SEQ ID NO: 3233 - DNA, 21 bp, synthetic construct
  source 1..21: mol_type = other DNA; mol_type = other DNA
tactcacgccccaactttaac

SEQ ID NO: 3234 - DNA, 21 bp, synthetic construct
  source 1..21: mol_type = other DNA; mol_type = other DNA
tatgcgaaaacggggtggaat

SEQ ID NO: 3235 - DNA, 21 bp, synthetic construct
  source 1..21: mol_type = other DNA; mol_type = other DNA
tatgtgaggtccggggggaat

SEQ ID NO: 3236 - DNA, 21 bp, synthetic construct
  source 1..21: mol_type = other DNA; mol_type = other DNA
tatgcgaggttgggggcgaat

SEQ ID NO: 3237 - DNA, 21 bp, synthetic construct
  source 1..21: mol_type = other DNA; mol_type = other DNA
tattccaaattcaatatgaat

SEQ ID NO: 3238 - DNA, 21 bp, synthetic construct
  source 1..21: mol_type = other DNA; mol_type = other DNA
cagggggaggagaggaaatgg

SEQ ID NO: 3239 - DNA, 21 bp, synthetic construct
  source 1..21: mol_type = other DNA; mol_type = other DNA
tattccagggcggggccgaat

SEQ ID NO: 3240 - DNA, 21 bp, synthetic construct
  source 1..21: mol_type = other DNA; mol_type = other DNA
tacgcccgcaccggccataac

SEQ ID NO: 3241 - DNA, 21 bp, synthetic construct
  source 1..21: mol_type = other DNA; mol_type = other DNA
ttttcacgcctgaacatcaac

SEQ ID NO: 3242 - DNA, 21 bp, synthetic construct
  source 1..21: mol_type = other DNA; mol_type = other DNA
tatgcgagggggaatacgaat

SEQ ID NO: 3243 - DNA, 21 bp, synthetic construct
  source 1..21: mol_type = other DNA; mol_type = other DNA
tactcacgccatggcctgaac

SEQ ID NO: 3244 - DNA, 21 bp, synthetic construct
  source 1..21: mol_type = other DNA; mol_type = other DNA
tatgcgaggttgaatcagaat

SEQ ID NO: 3245 - DNA, 21 bp, synthetic construct
  source 1..21: mol_type = other DNA; mol_type = other DNA
tattccaggatgggggcgaat

SEQ ID NO: 3246 - DNA, 21 bp, synthetic construct
  source 1..21: mol_type = other DNA; mol_type = other DNA
tacgcccgcaccaactacaac

SEQ ID NO: 3247 - DNA, 21 bp, synthetic construct
  source 1..21: mol_type = other DNA; mol_type = other DNA
tatgcgaaaaatgggccgaat

SEQ ID NO: 3248 - DNA, 21 bp, synthetic construct
  source 1..21: mol_type = other DNA; mol_type = other DNA
tacgccggccgcggccccaac

SEQ ID NO: 3249 - DNA, 21 bp, synthetic construct
  source 1..21: mol_type = other DNA; mol_type = other DNA
tactcaaagctgaactttaac

SEQ ID NO: 3250 - DNA, 21 bp, synthetic construct
  source 1..21: mol_type = other DNA; mol_type = other DNA
ttttcacgctcaggcgtaaac

SEQ ID NO: 3251 - DNA, 21 bp, synthetic construct
  source 1..21: mol_type = other DNA; mol_type = other DNA
ttctccaaaaataattataat

SEQ ID NO: 3252 - DNA, 21 bp, synthetic construct
  source 1..21: mol_type = other DNA; mol_type = other DNA
tactcacgccaaaacgccaac

SEQ ID NO: 3253 - DNA, 21 bp, synthetic construct
  source 1..21: mol_type = other DNA; mol_type = other DNA
ttctccaggatagggacgaat

SEQ ID NO: 3254 - DNA, 21 bp, synthetic construct
  source 1..21: mol_type = other DNA; mol_type = other DNA
ctggccaagctgggctttaac

SEQ ID NO: 3255 - DNA, 21 bp, synthetic construct
  source 1..21: mol_type = other DNA; mol_type = other DNA
tactcacgccaaggcatcaac

SEQ ID NO: 3256 - DNA, 21 bp, synthetic construct
  source 1..21: mol_type = other DNA; mol_type = other DNA
tattccaaattgaatacgaat

SEQ ID NO: 3257 - DNA, 21 bp, synthetic construct
  source 1..21: mol_type = other DNA; mol_type = other DNA
tactcaaagatgaacaacaac

SEQ ID NO: 3258 - DNA, 21 bp, synthetic construct
  source 1..21: mol_type = other DNA; mol_type = other DNA
ttctccaggcagaatgcgaat

SEQ ID NO: 3259 - DNA, 21 bp, synthetic construct
  source 1..21: mol_type = other DNA; mol_type = other DNA
ttcgcgaaatccgggtggaat

SEQ ID NO: 3260 - DNA, 21 bp, synthetic construct
  source 1..21: mol_type = other DNA; mol_type = other DNA
tactcacgcaccggctcaaac

SEQ ID NO: 3261 - DNA, 21 bp, synthetic construct
  source 1..21: mol_type = other DNA; mol_type = other DNA
aattggtcctccaatggggtg

SEQ ID NO: 3262 - DNA, 21 bp, synthetic construct
  source 1..21: mol_type = other DNA; mol_type = other DNA
tttgcccgcatgggcaccaac

SEQ ID NO: 3263 - DNA, 21 bp, synthetic construct
  source 1..21: mol_type = other DNA; mol_type = other DNA
ttcgcgaaacacaattataat

SEQ ID NO: 3264 - DNA, 21 bp, synthetic construct
  source 1..21: mol_type = other DNA; mol_type = other DNA
ttcgcgaggatggggcacaat

SEQ ID NO: 3265 - DNA, 21 bp, synthetic construct
  source 1..21: mol_type = other DNA; mol_type = other DNA
tatgcgaggtccggggcgaat

SEQ ID NO: 3266 - DNA, 21 bp, synthetic construct
  source 1..21: mol_type = other DNA; mol_type = other DNA
tatgcgaggggggggcacaat

SEQ ID NO: 3267 - DNA, 21 bp, synthetic construct
  source 1..21: mol_type = other DNA; mol_type = other DNA
tactcacgcaccggcatcaac

SEQ ID NO: 3268 - DNA, 21 bp, synthetic construct
  source 1..21: mol_type = other DNA; mol_type = other DNA
tatgcgaggttggggccgaat

SEQ ID NO: 3269 - DNA, 21 bp, synthetic construct
  source 1..21: mol_type = other DNA; mol_type = other DNA
atgaagtcaaccaacggcatc

SEQ ID NO: 3270 - DNA, 21 bp, synthetic construct
  source 1..21: mol_type = other DNA; mol_type = other DNA
tactcaaagtacggcgtaaac

SEQ ID NO: 3271 - DNA, 21 bp, synthetic construct
  source 1..21: mol_type = other DNA; mol_type = other DNA
tattccaaatccgggccgaat

SEQ ID NO: 3272 - DNA, 21 bp, synthetic construct
  source 1..21: mol_type = other DNA; mol_type = other DNA
ttctccaggcaggggttgaat

SEQ ID NO: 3273 - DNA, 21 bp, synthetic construct
  source 1..21: mol_type = other DNA; mol_type = other DNA
tactcaaagatcggctacaac

SEQ ID NO: 3274 - DNA, 21 bp, synthetic construct
  source 1..21: mol_type = other DNA; mol_type = other DNA
tacgcccgcatcggcaacaac

SEQ ID NO: 3275 - DNA, 21 bp, synthetic construct
  source 1..21: mol_type = other DNA; mol_type = other DNA
ttttcaaagctgaacgccaac

SEQ ID NO: 3276 - DNA, 21 bp, synthetic construct
  source 1..21: mol_type = other DNA; mol_type = other DNA
ctggccaaggccggccccaac

SEQ ID NO: 3277 - DNA, 21 bp, synthetic construct
  source 1..21: mol_type = other DNA; mol_type = other DNA
tttgccaagaacggctttaac

SEQ ID NO: 3278 - DNA, 21 bp, synthetic construct
  source 1..21: mol_type = other DNA; mol_type = other DNA
tactcaaagctgggcgtaaac

SEQ ID NO: 3279 - DNA, 21 bp, synthetic construct
  source 1..21: mol_type = other DNA; mol_type = other DNA
ctggccaagaccggcctgaac

SEQ ID NO: 3280 - DNA, 21 bp, synthetic construct
  source 1..21: mol_type = other DNA; mol_type = other DNA
ttctccaggatagggatgaat

SEQ ID NO: 3281 - DNA, 21 bp, synthetic construct
  source 1..21: mol_type = other DNA; mol_type = other DNA
tacgcccgcgccaacgccaac

SEQ ID NO: 3282 - DNA, 21 bp, synthetic construct
  source 1..21: mol_type = other DNA; mol_type = other DNA
tactcacgcggcggcatcaac

SEQ ID NO: 3283 - DNA, 21 bp, synthetic construct
  source 1..21: mol_type = other DNA; mol_type = other DNA
tactcaaagctgggcatgaac

SEQ ID NO: 3284 - DNA, 21 bp, synthetic construct
  source 1..21: mol_type = other DNA; mol_type = other DNA
ttcgcgaaatccgggatgaat

SEQ ID NO: 3285 - DNA, 21 bp, synthetic construct
  source 1..21: mol_type = other DNA; mol_type = other DNA
tacgcccgctcaaacaccaac

SEQ ID NO: 3286 - DNA, 21 bp, synthetic construct
  source 1..21: mol_type = other DNA; mol_type = other DNA
tattccaggacgaatttgaat

SEQ ID NO: 3287 - DNA, 21 bp, synthetic construct
  source 1..21: mol_type = other DNA; mol_type = other DNA
tactcaaagctgggctcaaac

SEQ ID NO: 3288 - DNA, 21 bp, synthetic construct
  source 1..21: mol_type = other DNA; mol_type = other DNA
ttcgcgagggggaatgtgaat

SEQ ID NO: 3289 - DNA, 21 bp, synthetic construct
  source 1..21: mol_type = other DNA; mol_type = other DNA
tgtggggggatagggaggtcc

SEQ ID NO: 3290 - DNA, 21 bp, synthetic construct
  source 1..21: mol_type = other DNA; mol_type = other DNA
tggatgtcaaccaacggcgta

SEQ ID NO: 3291 - DNA, 21 bp, synthetic construct
  source 1..21: mol_type = other DNA; mol_type = other DNA
tattccaaaatggggcacaat

SEQ ID NO: 3292 - DNA, 21 bp, synthetic construct
  source 1..21: mol_type = other DNA; mol_type = other DNA
tactcacgcctgaactcaaac

SEQ ID NO: 3293 - DNA, 21 bp, synthetic construct
  source 1..21: mol_type = other DNA; mol_type = other DNA
gagatggataatgtgaggtgg

SEQ ID NO: 3294 - DNA, 21 bp, synthetic construct
  source 1..21: mol_type = other DNA; mol_type = other DNA
ttctccaggcagaatttgaat

SEQ ID NO: 3295 - DNA, 21 bp, synthetic construct
  source 1..21: mol_type = other DNA; mol_type = other DNA
cagtatgggaaagtgtatata

SEQ ID NO: 3296 - DNA, 21 bp, synthetic construct
  source 1..21: mol_type = other DNA; mol_type = other DNA
tactcaaagcaaggcctgaac

SEQ ID NO: 3297 - DNA, 21 bp, synthetic construct
  source 1..21: mol_type = other DNA; mol_type = other DNA
tacgtacgctcatcacaaaac

SEQ ID NO: 3298 - DNA, 21 bp, synthetic construct
  source 1..21: mol_type = other DNA; mol_type = other DNA
tactcacgcatgaacaccaac

SEQ ID NO: 3299 - DNA, 21 bp, synthetic construct
  source 1..21: mol_type = other DNA; mol_type = other DNA
tactcacgctacggcgaaaac

SEQ ID NO: 3300 - DNA, 21 bp, synthetic construct
  source 1..21: mol_type = other DNA; mol_type = other DNA
ttctccaggatgaatcagaat

SEQ ID NO: 3301 - DNA, 21 bp, synthetic construct
  source 1..21: mol_type = other DNA; mol_type = other DNA
tattccaaatatggggcgaat

SEQ ID NO: 3302 - DNA, 21 bp, synthetic construct
  source 1..21: mol_type = other DNA; mol_type = other DNA
tattccaaaacggggtggaat

SEQ ID NO: 3303 - DNA, 21 bp, synthetic construct
  source 1..21: mol_type = other DNA; mol_type = other DNA
ttctccaggtccaattataat

SEQ ID NO: 3304 - DNA, 21 bp, synthetic construct
  source 1..21: mol_type = other DNA; mol_type = other DNA
cgcggcggctcatcaccctac

SEQ ID NO: 3305 - DNA, 21 bp, synthetic construct
  source 1..21: mol_type = other DNA; mol_type = other DNA
ctgtcaaagatgaactttaac

SEQ ID NO: 3306 - DNA, 21 bp, synthetic construct
  source 1..21: mol_type = other DNA; mol_type = other DNA
ttttcaaaggtaaactacaac

SEQ ID NO: 3307 - DNA, 21 bp, synthetic construct
  source 1..21: mol_type = other DNA; mol_type = other DNA
ttttcacgccaaaacatcaac

SEQ ID NO: 3308 - DNA, 21 bp, synthetic construct
  source 1..21: mol_type = other DNA; mol_type = other DNA
tactcaaagctgaacgtaaac

SEQ ID NO: 3309 - DNA, 21 bp, synthetic construct
  source 1..21: mol_type = other DNA; mol_type = other DNA
tattccagggtgaatcagaat

SEQ ID NO: 3310 - DNA, 21 bp, synthetic construct
  source 1..21: mol_type = other DNA; mol_type = other DNA
tattccaggtccgggacgaat

SEQ ID NO: 3311 - DNA, 21 bp, synthetic construct
  source 1..21: mol_type = other DNA; mol_type = other DNA
tactcacgcatcggcgccaac

SEQ ID NO: 3312 - DNA, 21 bp, synthetic construct
  source 1..21: mol_type = other DNA; mol_type = other DNA
tattccaggacgggggggaat

SEQ ID NO: 3313 - DNA, 21 bp, synthetic construct
  source 1..21: mol_type = other DNA; mol_type = other DNA
tatgcgaggacgggggcgaat

SEQ ID NO: 3314 - DNA, 21 bp, synthetic construct
  source 1..21: mol_type = other DNA; mol_type = other DNA
tatgcgaggtccgggcacaat

SEQ ID NO: 3315 - DNA, 21 bp, synthetic construct
  source 1..21: mol_type = other DNA; mol_type = other DNA
ctgtcaaagatgggcgtaaac

SEQ ID NO: 3316 - DNA, 21 bp, synthetic construct
  source 1..21: mol_type = other DNA; mol_type = other DNA
tattccaggacggggatgaat

SEQ ID NO: 3317 - DNA, 21 bp, synthetic construct
  source 1..21: mol_type = other DNA; mol_type = other DNA
ttttcaaagatgggccccaac

SEQ ID NO: 3318 - DNA, 21 bp, synthetic construct
  source 1..21: mol_type = other DNA; mol_type = other DNA
tatgcgaggacggggccgaat

SEQ ID NO: 3319 - DNA, 21 bp, synthetic construct
  source 1..21: mol_type = other DNA; mol_type = other DNA
tacgccaagggcggctacaac

SEQ ID NO: 3320 - DNA, 21 bp, synthetic construct
  source 1..21: mol_type = other DNA; mol_type = other DNA
ttcgcgagggcgaattataat

SEQ ID NO: 3321 - DNA, 21 bp, synthetic construct
  source 1..21: mol_type = other DNA; mol_type = other DNA
tatgcgaaaacgaatttcaat

SEQ ID NO: 3322 - DNA, 21 bp, synthetic construct
  source 1..21: mol_type = other DNA; mol_type = other DNA
tatgcgaggatggggccgaat

SEQ ID NO: 3323 - DNA, 21 bp, synthetic construct
  source 1..21: mol_type = other DNA; mol_type = other DNA
tatgcgaaaacggggccgaat

SEQ ID NO: 3324 - DNA, 21 bp, synthetic construct
  source 1..21: mol_type = other DNA; mol_type = other DNA
tacgtacgcaccggcgtaaac

SEQ ID NO: 3325 - DNA, 21 bp, synthetic construct
  source 1..21: mol_type = other DNA; mol_type = other DNA
tacgcccgcacctcaggcaac

SEQ ID NO: 3326 - DNA, 21 bp, synthetic construct
  source 1..21: mol_type = other DNA; mol_type = other DNA
tatgcgaggaaaggggataat

SEQ ID NO: 3327 - DNA, 21 bp, synthetic construct
  source 1..21: mol_type = other DNA; mol_type = other DNA
atgcacaatgggacgaatgcg

SEQ ID NO: 3328 - DNA, 21 bp, synthetic construct
  source 1..21: mol_type = other DNA; mol_type = other DNA
tatgcgagggggaatgcgaat

SEQ ID NO: 3329 - DNA, 21 bp, synthetic construct
  source 1..21: mol_type = other DNA; mol_type = other DNA
tatgcgaaaatgggggcgaat

SEQ ID NO: 3330 - DNA, 21 bp, synthetic construct
  source 1..21: mol_type = other DNA; mol_type = other DNA
ctggcccgcaccggcgaaaac

SEQ ID NO: 3331 - DNA, 21 bp, synthetic construct
  source 1..21: mol_type = other DNA; mol_type = other DNA
ttttcacgcctgaacaccaac

SEQ ID NO: 3332 - DNA, 21 bp, synthetic construct
  source 1..21: mol_type = other DNA; mol_type = other DNA
tattccaggaataattccaat

SEQ ID NO: 3333 - DNA, 21 bp, synthetic construct
  source 1..21: mol_type = other DNA; mol_type = other DNA
ctgaagtcaaccaacggcgta

SEQ ID NO: 3334 - DNA, 21 bp, synthetic construct
  source 1..21: mol_type = other DNA
tacgtacgctcaaacgtaggc

SEQ ID NO: 3335 - DNA, 21 bp, synthetic construct
  source 1..21: mol_type = other DNA; mol_type = other DNA
tacacctcaaccaacggcatc

SEQ ID NO: 3336 - DNA, 21 bp, synthetic construct
  source 1..21: mol_type = other DNA; mol_type = other DNA
tattccaaaatgaatcacaat

SEQ ID NO: 3337 - DNA, 21 bp, synthetic construct
  source 1..21: mol_type = other DNA; mol_type = other DNA
tattccaggtccaatttgaat

SEQ ID NO: 3338 - DNA, 21 bp, synthetic construct
  source 1..21: mol_type = other DNA; mol_type = other DNA
tactcaaagctgaacatgaac

SEQ ID NO: 3339 - DNA, 21 bp, synthetic construct
  source 1..21: mol_type = other DNA; mol_type = other DNA
tactcaaaggtaggctacaac

SEQ ID NO: 3340 - DNA, 21 bp, synthetic construct
  source 1..21: mol_type = other DNA; mol_type = other DNA
tactcaaagctgggcaccaac

SEQ ID NO: 3341 - DNA, 21 bp, synthetic construct
  source 1..21: mol_type = other DNA; mol_type = other DNA
tactcaaagcgcggcgacaac

SEQ ID NO: 3342 - DNA, 21 bp, synthetic construct
  source 1..21: mol_type = other DNA; mol_type = other DNA
tactcacgcaccggcaacaac

SEQ ID NO: 3343 - DNA, 21 bp, synthetic construct
  source 1..21: mol_type = other DNA; mol_type = other DNA
ttctccagggtgaatgtgaat

SEQ ID NO: 3344 - DNA, 21 bp, synthetic construct
  source 1..21: mol_type = other DNA; mol_type = other DNA
tatttcacggggaggacgtcc

SEQ ID NO: 3345 - DNA, 21 bp, synthetic construct
  source 1..21: mol_type = other DNA; mol_type = other DNA
ttcgcgaggttgaataataat

SEQ ID NO: 3346 - DNA, 21 bp, synthetic construct
  source 1..21: mol_type = other DNA; mol_type = other DNA
ttcgcgaaaatagggttcaat

SEQ ID NO: 3347 - DNA, 21 bp, synthetic construct
  source 1..21: mol_type = other DNA; mol_type = other DNA
tattccaggatagggtccaat

SEQ ID NO: 3348 - DNA, 21 bp, synthetic construct
  source 1..21: mol_type = other DNA; mol_type = other DNA
ttcgcgaggatggggaataat

SEQ ID NO: 3349 - DNA, 21 bp, synthetic construct
  source 1..21: mol_type = other DNA; mol_type = other DNA
tattccagggggaatttcaat

SEQ ID NO: 3350 - DNA, 21 bp, synthetic construct
  source 1..21: mol_type = other DNA; mol_type = other DNA
tactcacgcctgaacatgaac

SEQ ID NO: 3351 - DNA, 21 bp, synthetic construct
  source 1..21: mol_type = other DNA; mol_type = other DNA
tatacgtccgcgtatccgagg

SEQ ID NO: 3352 - DNA, 21 bp, synthetic construct
  source 1..21: mol_type = other DNA; mol_type = other DNA
tattccaggttgaatgagaat

SEQ ID NO: 3353 - DNA, 21 bp, synthetic construct
  source 1..21: mol_type = other DNA
tactcaaagatcggctcaaac

SEQ ID NO: 3354 - DNA, 21 bp, synthetic construct
  source 1..21: mol_type = other DNA
ttttcacgcgtaggctacaac

SEQ ID NO: 3355 - DNA, 21 bp, synthetic construct
  source 1..21: mol_type = other DNA
tacgcccgccatggcgtaaac

SEQ ID NO: 3356 - DNA, 21 bp, synthetic construct
  source 1..21: mol_type = other DNA
tactcacgcatcaactcaaac

SEQ ID NO: 3357 - DNA, 21 bp, synthetic construct
  source 1..21: mol_type = other DNA
tactcacgcaacggcgccaac

SEQ ID NO: 3358 - DNA, 21 bp, synthetic construct
  source 1..21: mol_type = other DNA; mol_type = other DNA
tacgcccgcaccaacatgaac

SEQ ID NO: 3359 - DNA, 21 bp, synthetic construct
  source 1..21: mol_type = other DNA; mol_type = other DNA
tactcacgccccaacgtaaac

SEQ ID NO: 3360 - DNA, 21 bp, synthetic construct
  source 1..21: mol_type = other DNA; mol_type = other DNA
ttcgcgaggcaggggatgaat

SEQ ID NO: 3361 - DNA, 21 bp, synthetic construct
  source 1..21: mol_type = other DNA; mol_type = other DNA
tactcacgcaccaacgccaac

SEQ ID NO: 3362 - DNA, 21 bp, synthetic construct
  source 1..21: mol_type = other DNA; mol_type = other DNA
tattccaaacacgggacgaat

SEQ ID NO: 3363 - DNA, 21 bp, synthetic construct
  source 1..21: mol_type = other DNA; mol_type = other DNA
ctggccaagctgggctacaac

SEQ ID NO: 3364 - DNA, 21 bp, synthetic construct
  source 1..21: mol_type = other DNA; mol_type = other DNA
ttctccagggcgaatgcgaat

SEQ ID NO: 3365 - DNA, 21 bp, synthetic construct
  source 1..21: mol_type = other DNA; mol_type = other DNA
tactcacgcatcaactacaac

SEQ ID NO: 3366 - DNA, 21 bp, synthetic construct
  source 1..21: mol_type = other DNA; mol_type = other DNA
ctggccaagatgggccataac

SEQ ID NO: 3367 - DNA, 21 bp, synthetic construct
  source 1..21: mol_type = other DNA; mol_type = other DNA
ctgtcaaagctgggcatgaac

SEQ ID NO: 3368 - DNA, 21 bp, synthetic construct
  source 1..21: mol_type = other DNA; mol_type = other DNA
ctggccaagcatggcatcaac

SEQ ID NO: 3369 - DNA, 21 bp, synthetic construct
  source 1..21: mol_type = other DNA; mol_type = other DNA
tattccaaaaaaggggataat

SEQ ID NO: 3370 - DNA, 21 bp, synthetic construct
  source 1..21: mol_type = other DNA; mol_type = other DNA
ttttcacgcctgaacaacaac

SEQ ID NO: 3371 - DNA, 21 bp, synthetic construct
  source 1..21: mol_type = other DNA; mol_type = other DNA
ttttcacgccataaccaaaac

SEQ ID NO: 3372 - DNA, 21 bp, synthetic construct
  source 1..21: mol_type = other DNA; mol_type = other DNA
ttttcacgcgtaggcggcaac

SEQ ID NO: 3373 - DNA, 21 bp, synthetic construct
  source 1..21: mol_type = other DNA; mol_type = other DNA
tactcacgcgtaaaccccaac

SEQ ID NO: 3374 - DNA, 21 bp, synthetic construct
  source 1..21: mol_type = other DNA; mol_type = other DNA
tactcacgcaccggcgtaaac

SEQ ID NO: 3375 - DNA, 21 bp, synthetic construct
  source 1..21: mol_type = other DNA; mol_type = other DNA
tcctggtccacgaatgggata

SEQ ID NO: 3376 - DNA, 21 bp, synthetic construct
  source 1..21: mol_type = other DNA; mol_type = other DNA
ctgtcacgcctgaacgacaac

SEQ ID NO: 3377 - DNA, 21 bp, synthetic construct
  source 1..21: mol_type = other DNA; mol_type = other DNA
tactcacgcatcaacaccaac

SEQ ID NO: 3378 - DNA, 21 bp, synthetic construct
  source 1..21: mol_type = other DNA; mol_type = other DNA
ttgaatacgtccgtgaaatgg

SEQ ID NO: 3379 - DNA, 21 bp, synthetic construct
  source 1..21: mol_type = other DNA; mol_type = other DNA
tactcaaagaacggctacaac

SEQ ID NO: 3380 - DNA, 21 bp, synthetic construct
  source 1..21: mol_type = other DNA; mol_type = other DNA
tacacccattcaaacaagcaa

SEQ ID NO: 3381 - DNA, 21 bp, synthetic construct
  source 1..21: mol_type = other DNA; mol_type = other DNA
ttcgcgaggtccgggatgaat

SEQ ID NO: 3382 - DNA, 21 bp, synthetic construct
  source 1..21: mol_type = other DNA; mol_type = other DNA
tactcaaagatcaactacaac

SEQ ID NO: 3383 - DNA, 21 bp, synthetic construct
  source 1..21: mol_type = other DNA; mol_type = other DNA
tttgcccgcaccggcggcaac

SEQ ID NO: 3384 - DNA, 21 bp, synthetic construct
  source 1..21: mol_type = other DNA; mol_type = other DNA
ttctccaaaatagggatgaat

SEQ ID NO: 3385 - DNA, 21 bp, synthetic construct
  source 1..21: mol_type = other DNA; mol_type = other DNA
tattccaggacgaatcagaat

SEQ ID NO: 3386 - DNA, 21 bp, synthetic construct
  source 1..21: mol_type = other DNA; mol_type = other DNA
ttctccaaagggaatttcaat

SEQ ID NO: 3387 - DNA, 21 bp, synthetic construct
  source 1..21: mol_type = other DNA; mol_type = other DNA
tatgcgaggaatgggacgaat

SEQ ID NO: 3388 - DNA, 21 bp, synthetic construct
  source 1..21: mol_type = other DNA; mol_type = other DNA
tatgcgagggaggggaggaat

SEQ ID NO: 3389 - DNA, 21 bp, synthetic construct
  source 1..21: mol_type = other DNA; mol_type = other DNA
tactcacgcaccaactacaac

SEQ ID NO: 3390 - DNA, 21 bp, synthetic construct
  source 1..21: mol_type = other DNA; mol_type = other DNA
atattgtcctccaatggggtg

SEQ ID NO: 3391 - DNA, 21 bp, synthetic construct
  source 1..21: mol_type = other DNA; mol_type = other DNA
tactcaaagctgggctacaac

SEQ ID NO: 3392 - DNA, 21 bp, synthetic construct
  source 1..21: mol_type = other DNA; mol_type = other DNA
tactcaaagctgaactcaaac

SEQ ID NO: 3393 - DNA, 21 bp, synthetic construct
  source 1..21: mol_type = other DNA; mol_type = other DNA
tactcacgcgtaggccaaaac

SEQ ID NO: 3394 - DNA, 21 bp, synthetic construct
  source 1..21: mol_type = other DNA; mol_type = other DNA
ttgtccaggcagaatttcaat

SEQ ID NO: 3395 - DNA, 21 bp, synthetic construct
  source 1..21: mol_type = other DNA; mol_type = other DNA
tattccaggacgggggcgaat

SEQ ID NO: 3396 - DNA, 21 bp, synthetic construct
  source 1..21: mol_type = other DNA; mol_type = other DNA
tactcacgcatgggcaacaac

SEQ ID NO: 3397 - DNA, 21 bp, synthetic construct
  source 1..21: mol_type = other DNA; mol_type = other DNA
cgcgaatcaggcctggcctgg

SEQ ID NO: 3398 - DNA, 21 bp, synthetic construct
  source 1..21: mol_type = other DNA; mol_type = other DNA
ttcgcgaggaatgggtccaat

SEQ ID NO: 3399 - DNA, 21 bp, synthetic construct
  source 1..21: mol_type = other DNA; mol_type = other DNA
tactcacgcctgaacgccaac

SEQ ID NO: 3400 - DNA, 21 bp, synthetic construct
  source 1..21: mol_type = other DNA; mol_type = other DNA
ttctccaaaataggggcgaat

SEQ ID NO: 3401 - DNA, 21 bp, synthetic construct
  source 1..21: mol_type = other DNA; mol_type = other DNA
ttcgcgagggggaattataat

SEQ ID NO: 3402 - DNA, 21 bp, synthetic construct
  source 1..21: mol_type = other DNA; mol_type = other DNA
tttgcccgcgtaggcctgaac

SEQ ID NO: 3403 - DNA, 21 bp, synthetic construct
  source 1..21: mol_type = other DNA; mol_type = other DNA
tattccaaacacaatccgaat

SEQ ID NO: 3404 - DNA, 21 bp, synthetic construct
  source 1..21: mol_type = other DNA; mol_type = other DNA
tacgcccgcaccaactttaac

SEQ ID NO: 3405 - DNA, 21 bp, synthetic construct
  source 1..21: mol_type = other DNA; mol_type = other DNA
ttggcgagggtggggttgaat

SEQ ID NO: 3406 - DNA, 21 bp, synthetic construct
  source 1..21: mol_type = other DNA; mol_type = other DNA
aaccaacgcggctacggcaac

SEQ ID NO: 3407 - DNA, 21 bp, synthetic construct
  source 1..21: mol_type = other DNA; mol_type = other DNA
tactcaaagtcaaacaccaac

SEQ ID NO: 3408 - DNA, 21 bp, synthetic construct
  source 1..21: mol_type = other DNA; mol_type = other DNA
tactcaaaggccggccataac

SEQ ID NO: 3409 - DNA, 21 bp, synthetic construct
  source 1..21: mol_type = other DNA; mol_type = other DNA
tactcacgccaaaacatcaac

SEQ ID NO: 3410 - DNA, 21 bp, synthetic construct
  source 1..21: mol_type = other DNA; mol_type = other DNA
cactattcctccaatggggtg

SEQ ID NO: 3411 - DNA, 21 bp, synthetic construct
  source 1..21: mol_type = other DNA; mol_type = other DNA
tatgcgagggcgggggggaat

SEQ ID NO: 3412 - DNA, 21 bp, synthetic construct
  source 1..21: mol_type = other DNA; mol_type = other DNA
tttgcccgctcaggcaccaac

SEQ ID NO: 3413 - DNA, 21 bp, synthetic construct
  source 1..21: mol_type = other DNA; mol_type = other DNA
ttcgcgaaagtggggtataat

SEQ ID NO: 3414 - DNA, 21 bp, synthetic construct
  source 1..21: mol_type = other DNA; mol_type = other DNA
tattccaggtatgggataaat

SEQ ID NO: 3415 - DNA, 21 bp, synthetic construct
  source 1..21: mol_type = other DNA; mol_type = other DNA
ttttcacgcctgaacctgaac

SEQ ID NO: 3416 - DNA, 21 bp, synthetic construct
  source 1..21: mol_type = other DNA; mol_type = other DNA
ttctccaggttggggccgaat

SEQ ID NO: 3417 - DNA, 21 bp, synthetic construct
  source 1..21: mol_type = other DNA; mol_type = other DNA
tatgcgaaaaataattggaat

SEQ ID NO: 3418 - DNA, 21 bp, synthetic construct
  source 1..21: mol_type = other DNA; mol_type = other DNA
tatttcgtggggtccagggcg

SEQ ID NO: 3419 - DNA, 21 bp, synthetic construct
  source 1..21: mol_type = other DNA; mol_type = other DNA
tactcaaagctgggctttaac

SEQ ID NO: 3420 - DNA, 21 bp, synthetic construct
  source 1..21: mol_type = other DNA; mol_type = other DNA
ttttcaaaggccggctacaac

SEQ ID NO: 3421 - DNA, 21 bp, synthetic construct
  source 1..21: mol_type = other DNA; mol_type = other DNA
tatgcgaggaaaaatgataat

SEQ ID NO: 3422 - DNA, 21 bp, synthetic construct
  source 1..21: mol_type = other DNA; mol_type = other DNA
tacgcccgctcaaacatcaac

SEQ ID NO: 3423 - DNA, 21 bp, synthetic construct
  source 1..21: mol_type = other DNA; mol_type = other DNA
tactcacgcgtaggcggcaac

SEQ ID NO: 3424 - DNA, 21 bp, synthetic construct
  source 1..21: mol_type = other DNA; mol_type = other DNA
ttttcacgcggcaacgtaaac

SEQ ID NO: 3425 - DNA, 21 bp, synthetic construct
  source 1..21: mol_type = other DNA; mol_type = other DNA
atgtgggacggcacctcaccc

SEQ ID NO: 3426 - DNA, 21 bp, synthetic construct
  source 1..21: mol_type = other DNA; mol_type = other DNA
ttttcacgccaaggcgccaac

SEQ ID NO: 3427 - DNA, 21 bp, synthetic construct
  source 1..21: mol_type = other DNA; mol_type = other DNA
tattccagggtgggggcgaat

SEQ ID NO: 3428 - DNA, 21 bp, synthetic construct
  source 1..21: mol_type = other DNA; mol_type = other DNA
tactcaaaggccggccccaac

SEQ ID NO: 3429 - DNA, 21 bp, synthetic construct
  source 1..21: mol_type = other DNA; mol_type = other DNA
tacgccaagatgggcatcaac

SEQ ID NO: 3430 - DNA, 21 bp, synthetic construct
  source 1..21: mol_type = other DNA; mol_type = other DNA
ttttcaaagatgaaccataac

SEQ ID NO: 3431 - DNA, 21 bp, synthetic construct
  source 1..21: mol_type = other DNA; mol_type = other DNA
ttttcacgcatgggcatcaac

SEQ ID NO: 3432 - DNA, 21 bp, synthetic construct
  source 1..21: mol_type = other DNA; mol_type = other DNA
tacgccaaggtaggctttaac

SEQ ID NO: 3433 - DNA, 21 bp, synthetic construct
  source 1..21: mol_type = other DNA; mol_type = other DNA
tactcacgcctgggctcaaac

SEQ ID NO: 3434 - DNA, 21 bp, synthetic construct
  source 1..21: mol_type = other DNA; mol_type = other DNA
aggtccgggtatggggcgggg

SEQ ID NO: 3435 - DNA, 21 bp, synthetic construct
  source 1..21: mol_type = other DNA; mol_type = other DNA
tacgccaagggcaacatgaac

SEQ ID NO: 3436 - DNA, 21 bp, synthetic construct
  source 1..21: mol_type = other DNA; mol_type = other DNA
tactcacgccataacgccaac

SEQ ID NO: 3437 - DNA, 21 bp, synthetic construct
  source 1..21: mol_type = other DNA; mol_type = other DNA
tactcaaagctgaacctgaac

SEQ ID NO: 3438 - DNA, 21 bp, synthetic construct
  source 1..21: mol_type = other DNA; mol_type = other DNA
ttctccaggttggggacgaat

SEQ ID NO: 3439 - DNA, 21 bp, synthetic construct
  source 1..21: mol_type = other DNA; mol_type = other DNA
ttttcacgcaccaactacaac

SEQ ID NO: 3440 - DNA, 21 bp, synthetic construct
  source 1..21: mol_type = other DNA; mol_type = other DNA
ttttcacgcgtaggcctgaac

SEQ ID NO: 3441 - DNA, 21 bp, synthetic construct
  source 1..21: mol_type = other DNA; mol_type = other DNA
atacactccacgaatggggtg

SEQ ID NO: 3442 - DNA, 21 bp, synthetic construct
  source 1..21: mol_type = other DNA; mol_type = other DNA
tactcaaagaccggccaaaac

SEQ ID NO: 3443 - DNA, 21 bp, synthetic construct
  source 1..21: mol_type = other DNA; mol_type = other DNA
ataaattccacgaatggggtg

SEQ ID NO: 3444 - DNA, 21 bp, synthetic construct
  source 1..21: mol_type = other DNA; mol_type = other DNA
tactcacgcatgaacggcaac

SEQ ID NO: 3445 - DNA, 21 bp, synthetic construct
  source 1..21: mol_type = other DNA; mol_type = other DNA
tactcacgcggcggcgccaac

SEQ ID NO: 3446 - DNA, 21 bp, synthetic construct
  source 1..21: mol_type = other DNA; mol_type = other DNA
tacgcccgccatggctttaac

SEQ ID NO: 3447 - DNA, 21 bp, synthetic construct
  source 1..21: mol_type = other DNA; mol_type = other DNA
tactcacgccataacggcaac

SEQ ID NO: 3448 - DNA, 21 bp, synthetic construct
  source 1..21: mol_type = other DNA; mol_type = other DNA
tacgcccgcaccggcaacaac

SEQ ID NO: 3449 - DNA, 21 bp, synthetic construct
  source 1..21: mol_type = other DNA; mol_type = other DNA
tactcaaagcaaaactggaac

SEQ ID NO: 3450 - DNA, 21 bp, synthetic construct
  source 1..21: mol_type = other DNA; mol_type = other DNA
tattccaggggggggttgaat

SEQ ID NO: 3451 - DNA, 21 bp, synthetic construct
  source 1..21: mol_type = other DNA; mol_type = other DNA
agggggcacgatgtgtcctgg

SEQ ID NO: 3452 - DNA, 21 bp, synthetic construct
  source 1..21: mol_type = other DNA; mol_type = other DNA
tactcacgcaacaacaccaac

SEQ ID NO: 3453 - DNA, 21 bp, synthetic construct
  source 1..21: mol_type = other DNA; mol_type = other DNA
tactcacgctcaaacaacaac

SEQ ID NO: 3454 - DNA, 21 bp, synthetic construct
  source 1..21: mol_type = other DNA; mol_type = other DNA
tacgcccgcatcggcgccaac

SEQ ID NO: 3455 - DNA, 21 bp, synthetic construct
  source 1..21: mol_type = other DNA; mol_type = other DNA
ttttcacgcaacggcctgaac

SEQ ID NO: 3456 - DNA, 21 bp, synthetic construct
  source 1..21: mol_type = other DNA; mol_type = other DNA
tactcacgcaacaactttaac

SEQ ID NO: 3457 - DNA, 21 bp, synthetic construct
  source 1..21: mol_type = other DNA; mol_type = other DNA
tactcacgcggcggccaaaac

SEQ ID NO: 3458 - DNA, 21 bp, synthetic construct
  source 1..21: mol_type = other DNA; mol_type = other DNA
tactcacgcggcaacaacaac

SEQ ID NO: 3459 - DNA, 21 bp, synthetic construct
  source 1..21: mol_type = other DNA; mol_type = other DNA
tactcacgcatgggccaaaac

SEQ ID NO: 3460 - DNA, 21 bp, synthetic construct
  source 1..21: mol_type = other DNA; mol_type = other DNA
ctgtcaaagatcggcgaaaac

SEQ ID NO: 3461 - DNA, 21 bp, synthetic construct
  source 1..21: mol_type = other DNA; mol_type = other DNA
ctgtcacgcgccaactttaac

SEQ ID NO: 3462 - DNA, 21 bp, synthetic construct
  source 1..21: mol_type = other DNA; mol_type = other DNA
tttgcccgcgtaggcgccaac

SEQ ID NO: 3463 - DNA, 21 bp, synthetic construct
  source 1..21: mol_type = other DNA; mol_type = other DNA
tactcaaagtacggccataac

SEQ ID NO: 3464 - DNA, 21 bp, synthetic construct
  source 1..21: mol_type = other DNA; mol_type = other DNA
aaagcggcgtcccacgggtgg

SEQ ID NO: 3465 - DNA, 21 bp, synthetic construct
  source 1..21: mol_type = other DNA; mol_type = other DNA
tattccaaaatagggcacaat

SEQ ID NO: 3466 - DNA, 21 bp, synthetic construct
  source 1..21: mol_type = other DNA; mol_type = other DNA
tactcacgccatggcgtaaac

SEQ ID NO: 3467 - DNA, 21 bp, synthetic construct
  source 1..21: mol_type = other DNA; mol_type = other DNA
tactcaaagcaaaactttaac

SEQ ID NO: 3468 - DNA, 21 bp, synthetic construct
  source 1..21: mol_type = other DNA; mol_type = other DNA
tatgcgagggggggggtgaat

SEQ ID NO: 3469 - DNA, 21 bp, synthetic construct
  source 1..21: mol_type = other DNA; mol_type = other DNA
ttttcacgcaccaacatcaac

SEQ ID NO: 3470 - DNA, 21 bp, synthetic construct
  source 1..21: mol_type = other DNA; mol_type = other DNA
tacgcccgccaaaacaacaac

SEQ ID NO: 3471 - DNA, 21 bp, synthetic construct
  source 1..21: mol_type = other DNA; mol_type = other DNA
tatgcgaggtatgggatgaat

SEQ ID NO: 3472 - DNA, 21 bp, synthetic construct
  source 1..21: mol_type = other DNA; mol_type = other DNA
ccgtatgcgaaatccgtggat

SEQ ID NO: 3473 - DNA, 21 bp, synthetic construct
  source 1..21: mol_type = other DNA; mol_type = other DNA
tacgcccgcgccaactcaaac

SEQ ID NO: 3474 - DNA, 21 bp, synthetic construct
  source 1..21: mol_type = other DNA; mol_type = other DNA
ttcgcgaggatgaataataat

SEQ ID NO: 3475 - DNA, 21 bp, synthetic construct
  source 1..21: mol_type = other DNA; mol_type = other DNA
tttgcccgctcaggccataac

SEQ ID NO: 3476 - DNA, 21 bp, synthetic construct
  source 1..21: mol_type = other DNA; mol_type = other DNA
tatgcgaaatgggggccgaat

SEQ ID NO: 3477 - DNA, 21 bp, synthetic construct
  source 1..21: mol_type = other DNA; mol_type = other DNA
tatacgcacacgcagaggaat

SEQ ID NO: 3478 - DNA, 21 bp, synthetic construct
  source 1..21: mol_type = other DNA; mol_type = other DNA
tatgcgaaatccaatccgaat

SEQ ID NO: 3479 - DNA, 21 bp, synthetic construct
  source 1..21: mol_type = other DNA; mol_type = other DNA
aattggtccacgaatgggata

SEQ ID NO: 3480 - DNA, 21 bp, synthetic construct
  source 1..21: mol_type = other DNA; mol_type = other DNA
tacgcccgccaaaacatgaac

SEQ ID NO: 3481 - DNA, 21 bp, synthetic construct
  source 1..21: mol_type = other DNA; mol_type = other DNA
tacgcccgccaaaacatcaac

SEQ ID NO: 3482 - DNA, 21 bp, synthetic construct
  source 1..21: mol_type = other DNA; mol_type = other DNA
tacgcccgcgccggctttaac

SEQ ID NO: 3483 - DNA, 21 bp, synthetic construct
  source 1..21: mol_type = other DNA; mol_type = other DNA
tactcaaagtacggccaaaac

SEQ ID NO: 3484 - DNA, 21 bp, synthetic construct
  source 1..21: mol_type = other DNA; mol_type = other DNA
tacgccaagatcggcaagaac

SEQ ID NO: 3485 - DNA, 21 bp, synthetic construct
  source 1..21: mol_type = other DNA; mol_type = other DNA
ttttcaaagatcggcgtaaac

SEQ ID NO: 3486 - DNA, 21 bp, synthetic construct
  source 1..21: mol_type = other DNA; mol_type = other DNA
ttgtccagggtgaatgataat

SEQ ID NO: 3487 - DNA, 21 bp, synthetic construct
  source 1..21: mol_type = other DNA; mol_type = other DNA
tttgcccgcgaaggccgcaac

SEQ ID NO: 3488 - DNA, 21 bp, synthetic construct
  source 1..21: mol_type = other DNA; mol_type = other DNA
acggcgaggggggatagggcg

SEQ ID NO: 3489 - DNA, 21 bp, synthetic construct
  source 1..21: mol_type = other DNA; mol_type = other DNA
ttttcacgcatgaacatcaac

SEQ ID NO: 3490 - DNA, 21 bp, synthetic construct
  source 1..21: mol_type = other DNA; mol_type = other DNA
tacgccaagtcaggccccaac

SEQ ID NO: 3491 - DNA, 21 bp, synthetic construct
  source 1..21: mol_type = other DNA; mol_type = other DNA
ttttcaaagctgggcatcaac

SEQ ID NO: 3492 - DNA, 21 bp, synthetic construct
  source 1..21: mol_type = other DNA; mol_type = other DNA
tactcacgcatcggcctgaac

SEQ ID NO: 3493 - DNA, 21 bp, synthetic construct
  source 1..21: mol_type = other DNA; mol_type = other DNA
tacgcccgctcaggcaacaac

SEQ ID NO: 3494 - DNA, 21 bp, synthetic construct
  source 1..21: mol_type = other DNA; mol_type = other DNA
tacgcccgcaccggccaaaac

SEQ ID NO: 3495 - DNA, 21 bp, synthetic construct
  source 1..21: mol_type = other DNA; mol_type = other DNA
gtgaggtccgggtccataggg

SEQ ID NO: 3496 - DNA, 21 bp, synthetic construct
  source 1..21: mol_type = other DNA; mol_type = other DNA
tactcacgcgccggctcaaac

SEQ ID NO: 3497 - DNA, 21 bp, synthetic construct
  source 1..21: mol_type = other DNA; mol_type = other DNA
tactcaaagtacggcaccaac

SEQ ID NO: 3498 - DNA, 21 bp, synthetic construct
  source 1..21: mol_type = other DNA; mol_type = other DNA
tatgcgaggcagaatgagaat

SEQ ID NO: 3499 - DNA, 21 bp, synthetic construct
  source 1..21: mol_type = other DNA; mol_type = other DNA
tattccaaatataatgtgaat

SEQ ID NO: 3500 - DNA, 21 bp, synthetic construct
  source 1..21: mol_type = other DNA; mol_type = other DNA
tattccaggcacaatttgaat

SEQ ID NO: 3501 - DNA, 21 bp, synthetic construct
  source 1..21: mol_type = other DNA; mol_type = other DNA
tattccaaaatagggttcaat

SEQ ID NO: 3502 - DNA, 21 bp, synthetic construct
  source 1..21: mol_type = other DNA; mol_type = other DNA
ttgtccagggtgggggcgtcc

SEQ ID NO: 3503 - DNA, 21 bp, synthetic construct
  source 1..21: mol_type = other DNA; mol_type = other DNA
ttctccaggtccaatgtgaat

SEQ ID NO: 3504 - DNA, 21 bp, synthetic construct
  source 1..21: mol_type = other DNA; mol_type = other DNA
tattccaggttcaataataat

SEQ ID NO: 3505 - DNA, 21 bp, synthetic construct
  source 1..21: mol_type = other DNA; mol_type = other DNA
tttgccaagcaaggctttaac

SEQ ID NO: 3506 - DNA, 21 bp, synthetic construct
  source 1..21: mol_type = other DNA; mol_type = other DNA
ttctccaaacacaatttcaat

SEQ ID NO: 3507 - DNA, 21 bp, synthetic construct
  source 1..21: mol_type = other DNA; mol_type = other DNA
tacgcccgccccggccataac

SEQ ID NO: 3508 - DNA, 21 bp, synthetic construct
  source 1..21: mol_type = other DNA; mol_type = other DNA
aaccgctcaaccaacggcgta

SEQ ID NO: 3509 - DNA, 21 bp, synthetic construct
  source 1..21: mol_type = other DNA; mol_type = other DNA
tggatgtccacgaatgggata

SEQ ID NO: 3510 - DNA, 21 bp, synthetic construct
  source 1..21: mol_type = other DNA; mol_type = other DNA
tactcaaagctgaactacaac

SEQ ID NO: 3511 - DNA, 21 bp, synthetic construct
  source 1..21: mol_type = other DNA; mol_type = other DNA
ttgagggggaaagggtatgat

SEQ ID NO: 3512 - DNA, 21 bp, synthetic construct
  source 1..21: mol_type = other DNA; mol_type = other DNA
tactcaaagtacggctcaaac

SEQ ID NO: 3513 - DNA, 21 bp, synthetic construct
  source 1..21: mol_type = other DNA; mol_type = other DNA
ttttcacgcgccggccccaac

SEQ ID NO: 3514 - DNA, 21 bp, synthetic construct
  source 1..21: mol_type = other DNA; mol_type = other DNA
aaggacaacaccccctactgg

SEQ ID NO: 3515 - DNA, 21 bp, synthetic construct
  source 1..21: mol_type = other DNA; mol_type = other DNA
ttcgcgagggggggggggaat

SEQ ID NO: 3516 - DNA, 21 bp, synthetic construct
  source 1..21: mol_type = other DNA; mol_type = other DNA
ctgtcaaagaccggcctgaac

SEQ ID NO: 3517 - DNA, 21 bp, synthetic construct
  source 1..21: mol_type = other DNA; mol_type = other DNA
tactcacgctcaaacgacaac

SEQ ID NO: 3518 - DNA, 21 bp, synthetic construct
  source 1..21: mol_type = other DNA; mol_type = other DNA
tactcacgccccaacatcaac

SEQ ID NO: 3519 - DNA, 21 bp, synthetic construct
  source 1..21: mol_type = other DNA; mol_type = other DNA
tacgccaagctgaaccataac

SEQ ID NO: 3520 - DNA, 21 bp, synthetic construct
  source 1..21: mol_type = other DNA; mol_type = other DNA
tatacgaggatgcaccagaat

SEQ ID NO: 3521 - DNA, 21 bp, synthetic construct
  source 1..21: mol_type = other DNA; mol_type = other DNA
ttctccaggtccgggttcaat

SEQ ID NO: 3522 - DNA, 21 bp, synthetic construct
  source 1..21: mol_type = other DNA; mol_type = other DNA
tttgcccgcaacggccccaac

SEQ ID NO: 3523 - DNA, 21 bp, synthetic construct
  source 1..21: mol_type = other DNA; mol_type = other DNA
tattccaaaaataatgtgaat

SEQ ID NO: 3524 - DNA, 21 bp, synthetic construct
  source 1..21: mol_type = other DNA; mol_type = other DNA
cgcggctcacaaacctcatac

SEQ ID NO: 3525 - DNA, 21 bp, synthetic construct
  source 1..21: mol_type = other DNA; mol_type = other DNA
tacgcccgcgtaggcggcaac

SEQ ID NO: 3526 - DNA, 21 bp, synthetic construct
  source 1..21: mol_type = other DNA; mol_type = other DNA
tattccaggataaatgggaat

SEQ ID NO: 3527 - DNA, 21 bp, synthetic construct
  source 1..21: mol_type = other DNA; mol_type = other DNA
tactcaaagtggaacgaaaac

SEQ ID NO: 3528 - DNA, 21 bp, synthetic construct
  source 1..21: mol_type = other DNA; mol_type = other DNA
tactcacgcatcggcaacaac

SEQ ID NO: 3529 - DNA, 21 bp, synthetic construct
  source 1..21: mol_type = other DNA; mol_type = other DNA
tacgccaagtacggctcaaac

SEQ ID NO: 3530 - DNA, 21 bp, synthetic construct
  source 1..21: mol_type = other DNA; mol_type = other DNA
ccgacgtccacgaatggggtg

SEQ ID NO: 3531 - DNA, 21 bp, synthetic construct
  source 1..21: mol_type = other DNA; mol_type = other DNA
ttcgcgagggcggggcacaat

SEQ ID NO: 3532 - DNA, 21 bp, synthetic construct
  source 1..21: mol_type = other DNA; mol_type = other DNA
ctgtcaaaggtaggcgccaac

SEQ ID NO: 3533 - DNA, 21 bp, synthetic construct
  source 1..21: mol_type = other DNA; mol_type = other DNA
tactcacgccccggcatgaac

SEQ ID NO: 3534 - DNA, 21 bp, synthetic construct
  source 1..21: mol_type = other DNA; mol_type = other DNA
tacgccaagcatggctcaaac

SEQ ID NO: 3535 - DNA, 21 bp, synthetic construct
  source 1..21: mol_type = other DNA; mol_type = other DNA
ttcgcgaggtataatgggaat

SEQ ID NO: 3536 - DNA, 21 bp, synthetic construct
  source 1..21: mol_type = other DNA; mol_type = other DNA
tatgcgaggataaataataat

SEQ ID NO: 3537 - DNA, 21 bp, synthetic construct
  source 1..21: mol_type = other DNA; mol_type = other DNA
aaattggataggtccaattgg

SEQ ID NO: 3538 - DNA, 21 bp, synthetic construct
  source 1..21: mol_type = other DNA; mol_type = other DNA
ttgcacagggcggggatatcc

SEQ ID NO: 3539 - DNA, 21 bp, synthetic construct
  source 1..21: mol_type = other DNA; mol_type = other DNA
ttttcacgcgccggcgtaaac

SEQ ID NO: 3540 - DNA, 21 bp, synthetic construct
  source 1..21: mol_type = other DNA; mol_type = other DNA
ttctccaggatgaatgcgaat

SEQ ID NO: 3541 - DNA, 21 bp, synthetic construct
  source 1..21: mol_type = other DNA; mol_type = other DNA
ttttcacgcatgaacatgaac

SEQ ID NO: 3542 - DNA, 21 bp, synthetic construct
  source 1..21: mol_type = other DNA; mol_type = other DNA
ttctccagggtgaatacgaat

SEQ ID NO: 3543 - DNA, 21 bp, synthetic construct
  source 1..21: mol_type = other DNA; mol_type = other DNA
tataattccacgaatggggtg

SEQ ID NO: 3544 - DNA, 21 bp, synthetic construct
  source 1..21: mol_type = other DNA; mol_type = other DNA
cgcctgtacgacgcctacgaa

SEQ ID NO: 3545 - DNA, 21 bp, synthetic construct
  source 1..21: mol_type = other DNA; mol_type = other DNA
tacgcccgcatcggcaccaac

SEQ ID NO: 3546 - DNA, 21 bp, synthetic construct
  source 1..21: mol_type = other DNA; mol_type = other DNA
tactcaaagggcggcatgaac

SEQ ID NO: 3547 - DNA, 21 bp, synthetic construct
  source 1..21: mol_type = other DNA; mol_type = other DNA
ctggccaagatgggcaacaac

SEQ ID NO: 3548 - DNA, 21 bp, synthetic construct
  source 1..21: mol_type = other DNA; mol_type = other DNA
gtgatatccacgaatggggtg

SEQ ID NO: 3549 - DNA, 21 bp, synthetic construct
  source 1..21: mol_type = other DNA; mol_type = other DNA
tatgcgaaacacgggtggaat

SEQ ID NO: 3550 - DNA, 21 bp, synthetic construct
  source 1..21: mol_type = other DNA; mol_type = other DNA
tacgcccgcggcaacatcaac

SEQ ID NO: 3551 - DNA, 21 bp, synthetic construct
  source 1..21: mol_type = other DNA; mol_type = other DNA
gtatggtcaaccaacggcatc

SEQ ID NO: 3552 - DNA, 21 bp, synthetic construct
  source 1..21: mol_type = other DNA; mol_type = other DNA
tactcaaagatcggcgccaac

SEQ ID NO: 3553 - DNA, 21 bp, synthetic construct
  source 1..21: mol_type = other DNA; mol_type = other DNA
tactcacgctcaaaccccaac

SEQ ID NO: 3554 - DNA, 21 bp, synthetic construct
  source 1..21: mol_type = other DNA; mol_type = other DNA
tactcacgccaaaactttaac

SEQ ID NO: 3555 - DNA, 21 bp, synthetic construct
  source 1..21: mol_type = other DNA; mol_type = other DNA
tggggctcaaccaacggcatc

SEQ ID NO: 3556 - DNA, 21 bp, synthetic construct
  source 1..21: mol_type = other DNA; mol_type = other DNA
tacgcccgcctgggcatgaac

SEQ ID NO: 3557 - DNA, 21 bp, synthetic construct
  source 1..21: mol_type = other DNA; mol_type = other DNA
ttctccaaagcgggggcgaat

SEQ ID NO: 3558 - DNA, 21 bp, synthetic construct
  source 1..21: mol_type = other DNA; mol_type = other DNA
ttttcaaagtcaaactggaac

SEQ ID NO: 3559 - DNA, 21 bp, synthetic construct
  source 1..21: mol_type = other DNA; mol_type = other DNA
ttgtccaaaaataatcacaat

SEQ ID NO: 3560 - DNA, 21 bp, synthetic construct
  source 1..21: mol_type = other DNA; mol_type = other DNA
tacgccaagtcaaacctgaac

SEQ ID NO: 3561 - DNA, 21 bp, synthetic construct
  source 1..21: mol_type = other DNA; mol_type = other DNA
tatgcgaggaataatccgaat

SEQ ID NO: 3562 - DNA, 21 bp, synthetic construct
  source 1..21: mol_type = other DNA; mol_type = other DNA
ttttcaaaggccggcctgaac

SEQ ID NO: 3563 - DNA, 21 bp, synthetic construct
  source 1..21: mol_type = other DNA; mol_type = other DNA
tactcacgcgtaaacaacaac

SEQ ID NO: 3564 - DNA, 21 bp, synthetic construct
  source 1..21: mol_type = other DNA; mol_type = other DNA
ttctccaggacgggggcgaat

SEQ ID NO: 3565 - DNA, 21 bp, synthetic construct
  source 1..21: mol_type = other DNA; mol_type = other DNA
ttcgcgaggacgaatatgaat

SEQ ID NO: 3566 - DNA, 21 bp, synthetic construct
  source 1..21: mol_type = other DNA; mol_type = other DNA
aatacgtccatgaatgggagg

SEQ ID NO: 3567 - DNA, 21 bp, synthetic construct
  source 1..21: mol_type = other DNA; mol_type = other DNA
tactcaaagaacggctggaac

SEQ ID NO: 3568 - DNA, 21 bp, synthetic construct
  source 1..21: mol_type = other DNA; mol_type = other DNA
ttctccaggtccaatatgaat

SEQ ID NO: 3569 - DNA, 21 bp, synthetic construct
  source 1..21: mol_type = other DNA; mol_type = other DNA
ttttcaaagtcaggctttaac

SEQ ID NO: 3570 - DNA, 21 bp, synthetic construct
  source 1..21: mol_type = other DNA; mol_type = other DNA
ttttcaaagctgaacatcaac

SEQ ID NO: 3571 - DNA, 21 bp, synthetic construct
  source 1..21: mol_type = other DNA; mol_type = other DNA
ttcgcgagggcggggttgaat

SEQ ID NO: 3572 - DNA, 21 bp, synthetic construct
  source 1..21: mol_type = other DNA; mol_type = other DNA
ctgaacgccacctcatcatgg

SEQ ID NO: 3573 - DNA, 21 bp, synthetic construct
  source 1..21: mol_type = other DNA; mol_type = other DNA
tactcaaagtacaacatgaac

SEQ ID NO: 3574 - DNA, 21 bp, synthetic construct
  source 1..21: mol_type = other DNA; mol_type = other DNA
acgcacaaattgtccgtgaat

SEQ ID NO: 3575 - DNA, 21 bp, synthetic construct
  source 1..21: mol_type = other DNA; mol_type = other DNA
tacgcccgctcaaacgtaaac

SEQ ID NO: 3576 - DNA, 21 bp, synthetic construct
  source 1..21: mol_type = other DNA; mol_type = other DNA
tacgcccgcaacggcatcaac

SEQ ID NO: 3577 - DNA, 21 bp, synthetic construct
  source 1..21: mol_type = other DNA; mol_type = other DNA
ttcgcgaaatccggggtgaat

SEQ ID NO: 3578 - DNA, 21 bp, synthetic construct
  source 1..21: mol_type = other DNA; mol_type = other DNA
tacgcccgcaacggcctgaac

SEQ ID NO: 3579 - DNA, 21 bp, synthetic construct
  source 1..21: mol_type = other DNA; mol_type = other DNA
tacgcccgccatggcgccaac

SEQ ID NO: 3580 - DNA, 21 bp, synthetic construct
  source 1..21: mol_type = other DNA; mol_type = other DNA
tattccaggaatgggccgaat

SEQ ID NO: 3581 - DNA, 21 bp, synthetic construct
  source 1..21: mol_type = other DNA; mol_type = other DNA
tacgcccgcctgaaccccaac

SEQ ID NO: 3582 - DNA, 21 bp, synthetic construct
  source 1..21: mol_type = other DNA; mol_type = other DNA
tacgccaagaacggctggaac

SEQ ID NO: 3583 - DNA, 21 bp, synthetic construct
  source 1..21: mol_type = other DNA; mol_type = other DNA
cgcggcggctcatcaaactac

SEQ ID NO: 3584 - DNA, 21 bp, synthetic construct
  source 1..21: mol_type = other DNA; mol_type = other DNA
tatgcgaaacacgggcagaat

SEQ ID NO: 3585 - DNA, 21 bp, synthetic construct
  source 1..21: mol_type = other DNA; mol_type = other DNA
tatgcgaggtatgggcagaat

SEQ ID NO: 3586 - DNA, 21 bp, synthetic construct
  source 1..21: mol_type = other DNA; mol_type = other DNA
ttctccaaacagaatttcaat

SEQ ID NO: 3587 - DNA, 21 bp, synthetic construct
  source 1..21: mol_type = other DNA; mol_type = other DNA
tttgcccgcatcggcatcaac

SEQ ID NO: 3588 - DNA, 21 bp, synthetic construct
  source 1..21: mol_type = other DNA; mol_type = other DNA
tattccaaaggggggttgaat

SEQ ID NO: 3589 - DNA, 21 bp, synthetic construct
  source 1..21: mol_type = other DNA; mol_type = other DNA
ctgtcaaagatcggcgccaac

SEQ ID NO: 3590 - DNA, 21 bp, synthetic construct
  source 1..21: mol_type = other DNA; mol_type = other DNA
tattccaaaaataattccaat

SEQ ID NO: 3591 - DNA, 21 bp, synthetic construct
  source 1..21: mol_type = other DNA; mol_type = other DNA
tacgcccgcctgggcctgaac

SEQ ID NO: 3592 - DNA, 21 bp, synthetic construct
  source 1..21: mol_type = other DNA; mol_type = other DNA
ttttcacgcgccaacctgaac

SEQ ID NO: 3593 - DNA, 21 bp, synthetic construct
  source 1..21: mol_type = other DNA; mol_type = other DNA
tatgcgaaattggggtccaat

SEQ ID NO: 3594 - DNA, 21 bp, synthetic construct
  source 1..21: mol_type = other DNA; mol_type = other DNA
tactcacgcgtatcagacacc

SEQ ID NO: 3595 - DNA, 21 bp, synthetic construct
  source 1..21: mol_type = other DNA; mol_type = other DNA
ttcacggcggggacgaggaat

SEQ ID NO: 3596 - DNA, 21 bp, synthetic construct
  source 1..21: mol_type = other DNA; mol_type = other DNA
tactcacgcaacggctcaaac

SEQ ID NO: 3597 - DNA, 21 bp, synthetic construct
  source 1..21: mol_type = other DNA; mol_type = other DNA
ttggcgaaattgggggtgaat

SEQ ID NO: 3598 - DNA, 21 bp, synthetic construct
  source 1..21: mol_type = other DNA; mol_type = other DNA
tattccaaaaaaaatgataat

SEQ ID NO: 3599 - DNA, 21 bp, synthetic construct
  source 1..21: mol_type = other DNA; mol_type = other DNA
ttctccaggacgaatacgaat

SEQ ID NO: 3600 - DNA, 21 bp, synthetic construct
  source 1..21: mol_type = other DNA; mol_type = other DNA
atgtcagcccatgtaaagtac

SEQ ID NO: 3601 - DNA, 21 bp, synthetic construct
  source 1..21: mol_type = other DNA; mol_type = other DNA
tactcaaaggccggctacaac

SEQ ID NO: 3602 - DNA, 21 bp, synthetic construct
  source 1..21: mol_type = other DNA; mol_type = other DNA
ttctccaaaaggaatgataat

SEQ ID NO: 3603 - DNA, 21 bp, synthetic construct
  source 1..21: mol_type = other DNA; mol_type = other DNA
tattccaaaaaaggggagaat

SEQ ID NO: 3604 - DNA, 21 bp, synthetic construct
  source 1..21: mol_type = other DNA; mol_type = other DNA
tttgcccgcgtaggcatgaac

SEQ ID NO: 3605 - DNA, 21 bp, synthetic construct
  source 1..21: mol_type = other DNA; mol_type = other DNA
tactcacgcctgggctacaac

SEQ ID NO: 3606 - DNA, 21 bp, synthetic construct
  source 1..21: mol_type = other DNA; mol_type = other DNA
ttctccaaaacggggtggaat

SEQ ID NO: 3607 - DNA, 21 bp, synthetic construct
  source 1..21: mol_type = other DNA; mol_type = other DNA
tactcacgctacaacgacaac

SEQ ID NO: 3608 - DNA, 21 bp, synthetic construct
  source 1..21: mol_type = other DNA; mol_type = other DNA
tttgccaagaacggcatcaac

SEQ ID NO: 3609 - DNA, 21 bp, synthetic construct
  source 1..21: mol_type = other DNA; mol_type = other DNA
ttcgcgaaacacgggccgaat

SEQ ID NO: 3610 - DNA, 21 bp, synthetic construct
  source 1..21: mol_type = other DNA; mol_type = other DNA
atcgccctgcgcggcgccggc

SEQ ID NO: 3611 - DNA, 21 bp, synthetic construct
  source 1..21: mol_type = other DNA; mol_type = other DNA
ttttcacgcggcggctacaac

SEQ ID NO: 3612 - DNA, 21 bp, synthetic construct
  source 1..21: mol_type = other DNA; mol_type = other DNA
ttctccaggatggggcacaat

SEQ ID NO: 3613 - DNA, 21 bp, synthetic construct
  source 1..21: mol_type = other DNA; mol_type = other DNA
tacgccaagaacggcgaaaac

SEQ ID NO: 3614 - DNA, 21 bp, synthetic construct
  source 1..21: mol_type = other DNA; mol_type = other DNA
tacgcccgccccggcgtaaac

SEQ ID NO: 3615 - DNA, 21 bp, synthetic construct
  source 1..21: mol_type = other DNA; mol_type = other DNA
tatgcgaggtataatgtgaat

SEQ ID NO: 3616 - DNA, 21 bp, synthetic construct
  source 1..21: mol_type = other DNA; mol_type = other DNA
tactcaaaggtaaacgccaac

SEQ ID NO: 3617 - DNA, 21 bp, synthetic construct
  source 1..21: mol_type = other DNA; mol_type = other DNA
tactcaaagtacggcatcaac

SEQ ID NO: 3618 - DNA, 21 bp, synthetic construct
  source 1..21: mol_type = other DNA; mol_type = other DNA
tattccaggggggggtccaat

SEQ ID NO: 3619 - DNA, 21 bp, synthetic construct
  source 1..21: mol_type = other DNA; mol_type = other DNA
ttctccaaatataatgcgaat

SEQ ID NO: 3620 - DNA, 21 bp, synthetic construct
  source 1..21: mol_type = other DNA; mol_type = other DNA
ttttcacgccaaggcatcaac

SEQ ID NO: 3621 - DNA, 21 bp, synthetic construct
  source 1..21: mol_type = other DNA; mol_type = other DNA
tatcacaaattgaatccggcg

SEQ ID NO: 3622 - DNA, 21 bp, synthetic construct
  source 1..21: mol_type = other DNA; mol_type = other DNA
ttggcgaggatgggggagaat

SEQ ID NO: 3623 - DNA, 21 bp, synthetic construct
  source 1..21: mol_type = other DNA; mol_type = other DNA
tattccaggttggggccgaat

SEQ ID NO: 3624 - DNA, 21 bp, synthetic construct
  source 1..21: mol_type = other DNA; mol_type = other DNA
tacgcccgcatgggcatcaac

SEQ ID NO: 3625 - DNA, 21 bp, synthetic construct
  source 1..21: mol_type = other DNA; mol_type = other DNA
tactcacgcatcggcgacaac

SEQ ID NO: 3626 - DNA, 21 bp, synthetic construct
  source 1..21: mol_type = other DNA; mol_type = other DNA
ctgtcaaagctgggcgccaac

SEQ ID NO: 3627 - DNA, 21 bp, synthetic construct
  source 1..21: mol_type = other DNA; mol_type = other DNA
tacgccaaggccaaccataac

SEQ ID NO: 3628 - DNA, 21 bp, synthetic construct
  source 1..21: mol_type = other DNA; mol_type = other DNA
ttttcaaaggtaaactttaac

SEQ ID NO: 3629 - DNA, 21 bp, synthetic construct
  source 1..21: mol_type = other DNA; mol_type = other DNA
tatgcgaggtccaatcacaat

SEQ ID NO: 3630 - DNA, 21 bp, synthetic construct
  source 1..21: mol_type = other DNA; mol_type = other DNA
tactcaaagctgaacgacaac

SEQ ID NO: 3631 - DNA, 21 bp, synthetic construct
  source 1..21: mol_type = other DNA; mol_type = other DNA
tacgccaagggcggctggaac

SEQ ID NO: 3632 - DNA, 21 bp, synthetic construct
  source 1..21: mol_type = other DNA; mol_type = other DNA
ttgtccagggcgtccgtgata

SEQ ID NO: 3633 - DNA, 21 bp, synthetic construct
  source 1..21: mol_type = other DNA; mol_type = other DNA
tttaactcaaccaacggcatc

SEQ ID NO: 3634 - DNA, 21 bp, synthetic construct
  source 1..21: mol_type = other DNA; mol_type = other DNA
tactcacgcctgggcaacaac

SEQ ID NO: 3635 - DNA, 21 bp, synthetic construct
  source 1..21: mol_type = other DNA; mol_type = other DNA
tactcaaagtacaacaccaac

SEQ ID NO: 3636 - DNA, 21 bp, synthetic construct
  source 1..21: mol_type = other DNA; mol_type = other DNA
tactcaaagatcaacgccaac

SEQ ID NO: 3637 - DNA, 21 bp, synthetic construct
  source 1..21: mol_type = other DNA; mol_type = other DNA
cactggtccacgaatggggtg

SEQ ID NO: 3638 - DNA, 21 bp, synthetic construct
  source 1..21: mol_type = other DNA; mol_type = other DNA
tactcacgcggcaactcaaac

SEQ ID NO: 3639 - DNA, 21 bp, synthetic construct
  source 1..21: mol_type = other DNA; mol_type = other DNA
ttctccaggacggggatgaat

SEQ ID NO: 3640 - DNA, 21 bp, synthetic construct
  source 1..21: mol_type = other DNA; mol_type = other DNA
gtacgctacgaatcaggcaac

SEQ ID NO: 3641 - DNA, 21 bp, synthetic construct
  source 1..21: mol_type = other DNA; mol_type = other DNA
ttcgcgaggcacgggaataat

SEQ ID NO: 3642 - DNA, 21 bp, synthetic construct
  source 1..21: mol_type = other DNA; mol_type = other DNA
tattccaggtccgggccgaat

SEQ ID NO: 3643 - DNA, 21 bp, synthetic construct
  source 1..21: mol_type = other DNA; mol_type = other DNA
ttcgcgaggataggggtgaat

SEQ ID NO: 3644 - DNA, 21 bp, synthetic construct
  source 1..21: mol_type = other DNA; mol_type = other DNA
ttttcaaaggccggcgtaaac

SEQ ID NO: 3645 - DNA, 21 bp, synthetic construct
  source 1..21: mol_type = other DNA; mol_type = other DNA
ttggcgaaaaatgggtccaat

SEQ ID NO: 3646 - DNA, 21 bp, synthetic construct
  source 1..21: mol_type = other DNA; mol_type = other DNA
ttttcacgcatgaacaacaac

SEQ ID NO: 3647 - DNA, 21 bp, synthetic construct
  source 1..21: mol_type = other DNA; mol_type = other DNA
ttctccaaagcggggtccaat

SEQ ID NO: 3648 - DNA, 21 bp, synthetic construct
  source 1..21: mol_type = other DNA; mol_type = other DNA
tactcacgcggcggcaccaac

SEQ ID NO: 3649 - DNA, 21 bp, synthetic construct
  source 1..21: mol_type = other DNA; mol_type = other DNA
atccaatcaaccaacggcgta

SEQ ID NO: 3650 - DNA, 21 bp, synthetic construct
  source 1..21: mol_type = other DNA; mol_type = other DNA
tatgcgaggtatggggcgaat

SEQ ID NO: 3651 - DNA, 21 bp, synthetic construct
  source 1..21: mol_type = other DNA; mol_type = other DNA
tacgccaagcaaggccccaac

SEQ ID NO: 3652 - DNA, 21 bp, synthetic construct
  source 1..21: mol_type = other DNA; mol_type = other DNA
tttgcccgcatgggcatgaac

SEQ ID NO: 3653 - DNA, 21 bp, synthetic construct
  source 1..21: mol_type = other DNA; mol_type = other DNA
tactcaaagatcaacaacaac

SEQ ID NO: 3654 - DNA, 21 bp, synthetic construct
  source 1..21: mol_type = other DNA; mol_type = other DNA
ttttcacgctcaggcaacaac

SEQ ID NO: 3655 - DNA, 21 bp, synthetic construct
  source 1..21: mol_type = other DNA; mol_type = other DNA
taccaacccaactcatacggc

SEQ ID NO: 3656 - DNA, 21 bp, synthetic construct
  source 1..21: mol_type = other DNA; mol_type = other DNA
tactcacgcgccggcgacaac

SEQ ID NO: 3657 - DNA, 21 bp, synthetic construct
  source 1..21: mol_type = other DNA; mol_type = other DNA
tacgcccgccgcaacgacaac

SEQ ID NO: 3658 - DNA, 21 bp, synthetic construct
  source 1..21: mol_type = other DNA; mol_type = other DNA
ttttcacgctcaggcatcaac

SEQ ID NO: 3659 - DNA, 21 bp, synthetic construct
  source 1..21: mol_type = other DNA; mol_type = other DNA
ttcgcgaggttggggtccaat

SEQ ID NO: 3660 - DNA, 21 bp, synthetic construct
  source 1..21: mol_type = other DNA; mol_type = other DNA
tttgcccgcaccaacaccaac

SEQ ID NO: 3661 - DNA, 21 bp, synthetic construct
  source 1..21: mol_type = other DNA; mol_type = other DNA
ttttcaaagatgggctttaac

SEQ ID NO: 3662 - DNA, 21 bp, synthetic construct
  source 1..21: mol_type = other DNA; mol_type = other DNA
tacatccgcacccaaatcaac

SEQ ID NO: 3663 - DNA, 21 bp, synthetic construct
  source 1..21: mol_type = other DNA; mol_type = other DNA
tactcacgcaccggcaccaac

SEQ ID NO: 3664 - DNA, 21 bp, synthetic construct
  source 1..21: mol_type = other DNA; mol_type = other DNA
ttctccaaagcggggtggaat

SEQ ID NO: 3665 - DNA, 21 bp, synthetic construct
  source 1..21: mol_type = other DNA; mol_type = other DNA
tttgcccgcgccggctttaac

SEQ ID NO: 3666 - DNA, 21 bp, synthetic construct
  source 1..21: mol_type = other DNA; mol_type = other DNA
tactcacgccatggcggcaac

SEQ ID NO: 3667 - DNA, 21 bp, synthetic construct
  source 1..21: mol_type = other DNA; mol_type = other DNA
tactcaaaggtaggcaagaac

SEQ ID NO: 3668 - DNA, 21 bp, synthetic construct
  source 1..21: mol_type = other DNA; mol_type = other DNA
tactcaaaggccggcgccaac

SEQ ID NO: 3669 - DNA, 21 bp, synthetic construct
  source 1..21: mol_type = other DNA; mol_type = other DNA
tattccaggatggggccgaat

SEQ ID NO: 3670 - DNA, 21 bp, synthetic construct
  source 1..21: mol_type = other DNA; mol_type = other DNA
ttctccaggcagaatttcaat

SEQ ID NO: 3671 - DNA, 21 bp, synthetic construct
  source 1..21: mol_type = other DNA; mol_type = other DNA
tttgcccgccaaggcgtaaac

SEQ ID NO: 3672 - DNA, 21 bp, synthetic construct
  source 1..21: mol_type = other DNA; mol_type = other DNA
tacgccaagatcggcaacaac

SEQ ID NO: 3673 - DNA, 21 bp, synthetic construct
  source 1..21: mol_type = other DNA; mol_type = other DNA
tttgcccgccaaggcgccaac

SEQ ID NO: 3674 - DNA, 21 bp, synthetic construct
  source 1..21: mol_type = other DNA; mol_type = other DNA
ttgtccaaagcgaatgcgaat

SEQ ID NO: 3675 - DNA, 21 bp, synthetic construct
  source 1..21: mol_type = other DNA; mol_type = other DNA
ccggggtccacgaatgggata

SEQ ID NO: 3676 - DNA, 21 bp, synthetic construct
  source 1..21: mol_type = other DNA; mol_type = other DNA
tatgcgaggaataatttgaat

SEQ ID NO: 3677 - DNA, 21 bp, synthetic construct
  source 1..21: mol_type = other DNA; mol_type = other DNA
tactcacgcctgaacgacaac

SEQ ID NO: 3678 - DNA, 21 bp, synthetic construct
  source 1..21: mol_type = other DNA; mol_type = other DNA
ttcgcgagggtggggcacaat

SEQ ID NO: 3679 - DNA, 21 bp, synthetic construct
  source 1..21: mol_type = other DNA; mol_type = other DNA
ttctccaaaatgaatgcgaat

SEQ ID NO: 3680 - DNA, 21 bp, synthetic construct
  source 1..21: mol_type = other DNA; mol_type = other DNA
ctgtcaaagatgggcgccaac

SEQ ID NO: 3681 - DNA, 21 bp, synthetic construct
  source 1..21: mol_type = other DNA; mol_type = other DNA
tactcacgcatcggccccaac

SEQ ID NO: 3682 - DNA, 21 bp, synthetic construct
  source 1..21: mol_type = other DNA; mol_type = other DNA
ttctccaggcagaatcagaat

SEQ ID NO: 3683 - DNA, 21 bp, synthetic construct
  source 1..21: mol_type = other DNA; mol_type = other DNA
ttttcacgctcaggctcaaac

SEQ ID NO: 3684 - DNA, 21 bp, synthetic construct
  source 1..21: mol_type = other DNA; mol_type = other DNA
tattccaggttgggggggaat

SEQ ID NO: 3685 - DNA, 21 bp, synthetic construct
  source 1..21: mol_type = other DNA; mol_type = other DNA
aggttcaatgggttgaatgcg

SEQ ID NO: 3686 - DNA, 21 bp, synthetic construct
  source 1..21: mol_type = other DNA; mol_type = other DNA
tatgcgaggtataatatgaat

SEQ ID NO: 3687 - DNA, 21 bp, synthetic construct
  source 1..21: mol_type = other DNA; mol_type = other DNA
tactcacgcaacaactacaac

SEQ ID NO: 3688 - DNA, 21 bp, synthetic construct
  source 1..21: mol_type = other DNA; mol_type = other DNA
cccttttcaaccaacggcgta

SEQ ID NO: 3689 - DNA, 21 bp, synthetic construct
  source 1..21: mol_type = other DNA; mol_type = other DNA
tgggtaaagtcatcacccggc

SEQ ID NO: 3690 - DNA, 21 bp, synthetic construct
  source 1..21: mol_type = other DNA; mol_type = other DNA
tttgccaaggaaggccgcaac

SEQ ID NO: 3691 - DNA, 21 bp, synthetic construct
  source 1..21: mol_type = other DNA; mol_type = other DNA
tactcacgctttaacgccaac

SEQ ID NO: 3692 - DNA, 21 bp, synthetic construct
  source 1..21: mol_type = other DNA; mol_type = other DNA
gaatcatacgtaggccgcaac

SEQ ID NO: 3693 - DNA, 21 bp, synthetic construct
  source 1..21: mol_type = other DNA; mol_type = other DNA
tacgccaagtacggccaaaac

SEQ ID NO: 3694 - DNA, 21 bp, synthetic construct
  source 1..21: mol_type = other DNA; mol_type = other DNA
tttgcccgcatcggcctgaac

SEQ ID NO: 3695 - DNA, 21 bp, synthetic construct
  source 1..21: mol_type = other DNA; mol_type = other DNA
ccgaattccacgaatgggata

SEQ ID NO: 3696 - DNA, 21 bp, synthetic construct
  source 1..21: mol_type = other DNA; mol_type = other DNA
tactcacgccaaaactcaaac

SEQ ID NO: 3697 - DNA, 21 bp, synthetic construct
  source 1..21: mol_type = other DNA; mol_type = other DNA
ttcgcgaaaatggggttcaat

SEQ ID NO: 3698 - DNA, 21 bp, synthetic construct
  source 1..21: mol_type = other DNA; mol_type = other DNA
ttttcacgcaacaacgccaac

SEQ ID NO: 3699 - DNA, 21 bp, synthetic construct
  source 1..21: mol_type = other DNA; mol_type = other DNA
ttctccaggcaggggcacaat

SEQ ID NO: 3700 - DNA, 21 bp, synthetic construct
  source 1..21: mol_type = other DNA; mol_type = other DNA
tggtcaaagctgcatgccaac

SEQ ID NO: 3701 - DNA, 21 bp, synthetic construct
  source 1..21: mol_type = other DNA; mol_type = other DNA
aattattccacgaatggggtg

SEQ ID NO: 3702 - DNA, 21 bp, synthetic construct
  source 1..21: mol_type = other DNA; mol_type = other DNA
tactcaaagtacaacgccaac

SEQ ID NO: 3703 - DNA, 21 bp, synthetic construct
  source 1..21: mol_type = other DNA; mol_type = other DNA
tactcacgcaacaacgccaac

SEQ ID NO: 3704 - DNA, 21 bp, synthetic construct
  source 1..21: mol_type = other DNA; mol_type = other DNA
tactcaaagcataacgaaaac

SEQ ID NO: 3705 - DNA, 21 bp, synthetic construct
  source 1..21: mol_type = other DNA; mol_type = other DNA
ttttcacgccaaaacatgaac

SEQ ID NO: 3706 - DNA, 21 bp, synthetic construct
  source 1..21: mol_type = other DNA; mol_type = other DNA
tacgccaagatcggcgtaaac

SEQ ID NO: 3707 - DNA, 21 bp, synthetic construct
  source 1..21: mol_type = other DNA; mol_type = other DNA
catcattcatcaaacggcgta

SEQ ID NO: 3708 - DNA, 21 bp, synthetic construct
  source 1..21: mol_type = other DNA; mol_type = other DNA
tactcacgctacaacgtaaac

SEQ ID NO: 3709 - DNA, 21 bp, synthetic construct
  source 1..21: mol_type = other DNA; mol_type = other DNA
ttttcacgcggcggccccaac

SEQ ID NO: 3710 - DNA, 21 bp, synthetic construct
  source 1..21: mol_type = other DNA; mol_type = other DNA
ttttcaaaggccaaccccaac

SEQ ID NO: 3711 - DNA, 21 bp, synthetic construct
  source 1..21: mol_type = other DNA; mol_type = other DNA
taccattcaaccaacggcatc

SEQ ID NO: 3712 - DNA, 21 bp, synthetic construct
  source 1..21: mol_type = other DNA
acccgcaccggcgtatcagcc

SEQ ID NO: 3713 - DNA, 21 bp, synthetic construct
  source 1..21: mol_type = other DNA; mol_type = other DNA
tactcacgctcaaactttaac

SEQ ID NO: 3714 - DNA, 21 bp, synthetic construct
  source 1..21: mol_type = other DNA; mol_type = other DNA
tattccaaacacggggggaat

SEQ ID NO: 3715 - DNA, 21 bp, synthetic construct
  source 1..21: mol_type = other DNA; mol_type = other DNA
tattccaggtatgggcagaat

SEQ ID NO: 3716 - DNA, 21 bp, synthetic construct
  source 1..21: mol_type = other DNA; mol_type = other DNA
ttcgcgaggcacgggatgaat

SEQ ID NO: 3717 - DNA, 21 bp, synthetic construct
  source 1..21: mol_type = other DNA; mol_type = other DNA
ttttcacgctcaaacatcaac

SEQ ID NO: 3718 - DNA, 21 bp, synthetic construct
  source 1..21: mol_type = other DNA; mol_type = other DNA
tttgcccgccaaggcaccaac

SEQ ID NO: 3719 - DNA, 21 bp, synthetic construct
  source 1..21: mol_type = other DNA; mol_type = other DNA
tatgcgaggttggggacgaat

SEQ ID NO: 3720 - DNA, 21 bp, synthetic construct
  source 1..21: mol_type = other DNA; mol_type = other DNA
tactcaaagaacaactggaac

SEQ ID NO: 3721 - DNA, 21 bp, synthetic construct
  source 1..21: mol_type = other DNA; mol_type = other DNA
tttgcccgcggcaacctgaac

SEQ ID NO: 3722 - DNA, 21 bp, synthetic construct
  source 1..21: mol_type = other DNA; mol_type = other DNA
ttttcaaagctgaacgacaac

SEQ ID NO: 3723 - DNA, 21 bp, synthetic construct
  source 1..21: mol_type = other DNA; mol_type = other DNA
tactcacgcatcaacgaaaac

SEQ ID NO: 3724 - DNA, 21 bp, synthetic construct
  source 1..21: mol_type = other DNA; mol_type = other DNA
ttttcacgccataacgaaaac

SEQ ID NO: 3725 - DNA, 21 bp, synthetic construct
  source 1..21: mol_type = other DNA; mol_type = other DNA
ttttcaaaggtaggccaaaac

SEQ ID NO: 3726 - DNA, 21 bp, synthetic construct
  source 1..21: mol_type = other DNA; mol_type = other DNA
ttcgcgaggcacaataataat

SEQ ID NO: 3727 - DNA, 21 bp, synthetic construct
  source 1..21: mol_type = other DNA; mol_type = other DNA
tactcacgctacaacatgaac

SEQ ID NO: 3728 - DNA, 21 bp, synthetic construct
  source 1..21: mol_type = other DNA; mol_type = other DNA
tacgccaagtacggcgccaac

SEQ ID NO: 3729 - DNA, 21 bp, synthetic construct
  source 1..21: mol_type = other DNA; mol_type = other DNA
tttgccaagcatggctacaac

SEQ ID NO: 3730 - DNA, 21 bp, synthetic construct
  source 1..21: mol_type = other DNA; mol_type = other DNA
tacgcccgcaacggcgccaac

SEQ ID NO: 3731 - DNA, 21 bp, synthetic construct
  source 1..21: mol_type = other DNA; mol_type = other DNA
ttttcaaaggccaacctgaac

SEQ ID NO: 3732 - DNA, 21 bp, synthetic construct
  source 1..21: mol_type = other DNA; mol_type = other DNA
ggcggcgcctcaaagggctgg

SEQ ID NO: 3733 - DNA, 21 bp, synthetic construct
  source 1..21: mol_type = other DNA; mol_type = other DNA
ttttcacgcgtaaaccataac

SEQ ID NO: 3734 - DNA, 21 bp, synthetic construct
  source 1..21: mol_type = other DNA; mol_type = other DNA
tacgcccgcaccaaccataac

SEQ ID NO: 3735 - DNA, 21 bp, synthetic construct
  source 1..21: mol_type = other DNA; mol_type = other DNA
tattccaggccgaatttgaat

SEQ ID NO: 3736 - DNA, 21 bp, synthetic construct
  source 1..21: mol_type = other DNA; mol_type = other DNA
ccctcatcaaccaacggcatc

SEQ ID NO: 3737 - DNA, 21 bp, synthetic construct
  source 1..21: mol_type = other DNA; mol_type = other DNA
ctggcccgcgtaggccaaaac

SEQ ID NO: 3738 - DNA, 21 bp, synthetic construct
  source 1..21: mol_type = other DNA; mol_type = other DNA
taccataagatgtcactgggc

SEQ ID NO: 3739 - DNA, 21 bp, synthetic construct
  source 1..21: mol_type = other DNA; mol_type = other DNA
ttttcacgcggcaactacaac

SEQ ID NO: 3740 - DNA, 21 bp, synthetic construct
  source 1..21: mol_type = other DNA; mol_type = other DNA
tactcacgctcaaactcaaac

SEQ ID NO: 3741 - DNA, 21 bp, synthetic construct
  source 1..21: mol_type = other DNA; mol_type = other DNA
ttgtccaggtccgggtggaat

SEQ ID NO: 3742 - DNA, 21 bp, synthetic construct
  source 1..21: mol_type = other DNA; mol_type = other DNA
tacgcccgcatgggcgaaaac

SEQ ID NO: 3743 - DNA, 21 bp, synthetic construct
  source 1..21: mol_type = other DNA; mol_type = other DNA
tactcaaagtacaaccaaaac

SEQ ID NO: 3744 - DNA, 21 bp, synthetic construct
  source 1..21: mol_type = other DNA; mol_type = other DNA
tacgcccgcctgggcatcaac

SEQ ID NO: 3745 - DNA, 21 bp, synthetic construct
  source 1..21: mol_type = other DNA; mol_type = other DNA
tactcaaagtttaacatcaac

SEQ ID NO: 3746 - DNA, 21 bp, synthetic construct
  source 1..21: mol_type = other DNA; mol_type = other DNA
tatgcgaggaataatcacaat

SEQ ID NO: 3747 - DNA, 21 bp, synthetic construct
  source 1..21: mol_type = other DNA; mol_type = other DNA
ttttcacgcgccaacgacaac

SEQ ID NO: 3748 - DNA, 21 bp, synthetic construct
  source 1..21: mol_type = other DNA; mol_type = other DNA
ttttcacgccataacatcaac

SEQ ID NO: 3749 - DNA, 21 bp, synthetic construct
  source 1..21: mol_type = other DNA; mol_type = other DNA
tacgccaagggcggcaccaac

SEQ ID NO: 3750 - DNA, 21 bp, synthetic construct
  source 1..21: mol_type = other DNA; mol_type = other DNA
tattccaggcagaatgggaat

SEQ ID NO: 3751 - DNA, 21 bp, synthetic construct
  source 1..21: mol_type = other DNA; mol_type = other DNA
gagacgtccacgaatggggtg

SEQ ID NO: 3752 - DNA, 21 bp, synthetic construct
  source 1..21: mol_type = other DNA; mol_type = other DNA
cgcgaccgctactcagccggc

SEQ ID NO: 3753 - DNA, 21 bp, synthetic construct
  source 1..21: mol_type = other DNA; mol_type = other DNA
tactcacgcctgggccaaaac

SEQ ID NO: 3754 - DNA, 21 bp, synthetic construct
  source 1..21: mol_type = other DNA; mol_type = other DNA
tacgcccgcgccaaccaaaac

SEQ ID NO: 3755 - DNA, 21 bp, synthetic construct
  source 1..21: mol_type = other DNA; mol_type = other DNA
atgcaatcatcaaacggcgta

SEQ ID NO: 3756 - DNA, 21 bp, synthetic construct
  source 1..21: mol_type = other DNA; mol_type = other DNA
ctgtcaaagcataacctgaac

SEQ ID NO: 3757 - DNA, 21 bp, synthetic construct
  source 1..21: mol_type = other DNA; mol_type = other DNA
atgtcacgcgtatcagtactg

SEQ ID NO: 3758 - DNA, 21 bp, synthetic construct
  source 1..21: mol_type = other DNA; mol_type = other DNA
ctgtcaaagcataacaccaac

SEQ ID NO: 3759 - DNA, 21 bp, synthetic construct
  source 1..21: mol_type = other DNA; mol_type = other DNA
cgcggccccaactcatacccc

SEQ ID NO: 3760 - DNA, 21 bp, synthetic construct
  source 1..21: mol_type = other DNA; mol_type = other DNA
ttcgcgaaagcggggcacaat

SEQ ID NO: 3761 - DNA, 21 bp, synthetic construct
  source 1..21: mol_type = other DNA; mol_type = other DNA
ttctccaggatggggttgaat

SEQ ID NO: 3762 - DNA, 21 bp, synthetic construct
  source 1..21: mol_type = other DNA; mol_type = other DNA
ttctccaaacacgggaataat

SEQ ID NO: 3763 - DNA, 21 bp, synthetic construct
  source 1..21: mol_type = other DNA; mol_type = other DNA
tatcacaaattgcagaatggg

SEQ ID NO: 3764 - DNA, 21 bp, synthetic construct
  source 1..21: mol_type = other DNA; mol_type = other DNA
ttctccaggtatgggacgaat

SEQ ID NO: 3765 - DNA, 21 bp, synthetic construct
  source 1..21: mol_type = other DNA; mol_type = other DNA
gataaatatgataggtatacg

SEQ ID NO: 3766 - DNA, 21 bp, synthetic construct
  source 1..21: mol_type = other DNA; mol_type = other DNA
tattccaaattcaatgtgaat

SEQ ID NO: 3767 - DNA, 21 bp, synthetic construct
  source 1..21: mol_type = other DNA; mol_type = other DNA
ctgtcaaagatgaaccaaaac

SEQ ID NO: 3768 - DNA, 21 bp, synthetic construct
  source 1..21: mol_type = other DNA; mol_type = other DNA
tactcaaagtttaactacaac

SEQ ID NO: 3769 - DNA, 21 bp, synthetic construct
  source 1..21: mol_type = other DNA; mol_type = other DNA
ttttcaaaggccaacgccaac

SEQ ID NO: 3770 - DNA, 21 bp, synthetic construct
  source 1..21: mol_type = other DNA; mol_type = other DNA
tacgcccgcgtaggcgtaaac

SEQ ID NO: 3771 - DNA, 21 bp, synthetic construct
  source 1..21: mol_type = other DNA; mol_type = other DNA
tactcacgctacaacaccaac

SEQ ID NO: 3772 - DNA, 21 bp, synthetic construct
  source 1..21: mol_type = other DNA; mol_type = other DNA
tttgcccgcgaaggctggaac

SEQ ID NO: 3773 - DNA, 21 bp, synthetic construct
  source 1..21: mol_type = other DNA; mol_type = other DNA
atgtattccacgaatggggtg

SEQ ID NO: 3774 - DNA, 21 bp, synthetic construct
  source 1..21: mol_type = other DNA; mol_type = other DNA
aactactcaaccaacggccgc

SEQ ID NO: 3775 - DNA, 21 bp, synthetic construct
  source 1..21: mol_type = other DNA
tatgcgaaagcgaatacgaat

SEQ ID NO: 3776 - DNA, 21 bp, synthetic construct
  source 1..21: mol_type = other DNA
tatgcgagggtgaattataat

SEQ ID NO: 3777 - DNA, 21 bp, synthetic construct
  source 1..21: mol_type = other DNA
tattccaaatataatcacaat

SEQ ID NO: 3778 - DNA, 21 bp, synthetic construct
  source 1..21: mol_type = other DNA
tactcacgcaacaacgacaac

SEQ ID NO: 3779 - DNA, 21 bp, synthetic construct
  source 1..21: mol_type = other DNA
caagactcaaccaacggcgta

SEQ ID NO: 3780 - DNA, 21 bp, synthetic construct
  source 1..21: mol_type = other DNA
tacgcccgcaacaacgtaaac

SEQ ID NO: 3781 - DNA, 21 bp, synthetic construct
  source 1..21: mol_type = other DNA
ttcgcgaggcacggggcgaat

SEQ ID NO: 3782 - DNA, 21 bp, synthetic construct
  source 1..21: mol_type = other DNA
ttcgtgaaatccaattccggg

SEQ ID NO: 3783 - DNA, 21 bp, synthetic construct
  source 1..21: mol_type = other DNA; mol_type = other DNA
ttttcaaagcaaaactggaac

SEQ ID NO: 3784 - DNA, 21 bp, synthetic construct
  source 1..21: mol_type = other DNA; mol_type = other DNA
tacgccaagcccaactggaac

SEQ ID NO: 3785 - DNA, 21 bp, synthetic construct
  source 1..21: mol_type = other DNA; mol_type = other DNA
ttctccaaagggaattggaat

SEQ ID NO: 3786 - DNA, 21 bp, synthetic construct
  source 1..21: mol_type = other DNA; mol_type = other DNA
tattccaggtatgggtccaat

SEQ ID NO: 3787 - DNA, 21 bp, synthetic construct
  source 1..21: mol_type = other DNA; mol_type = other DNA
tatgcgaaatccaatacgaat

SEQ ID NO: 3788 - DNA, 21 bp, synthetic construct
  source 1..21: mol_type = other DNA; mol_type = other DNA
gtggcgtatacgaatgggtat

SEQ ID NO: 3789 - DNA, 21 bp, synthetic construct
  source 1..21: mol_type = other DNA; mol_type = other DNA
tactcaaagtggaactcaaac

SEQ ID NO: 3790 - DNA, 21 bp, synthetic construct
  source 1..21: mol_type = other DNA; mol_type = other DNA
ttttcaaagcatggccccaac

SEQ ID NO: 3791 - DNA, 21 bp, synthetic construct
  source 1..21: mol_type = other DNA; mol_type = other DNA
ggcgccaacgaatggcgcgac

SEQ ID NO: 3792 - DNA, 21 bp, synthetic construct
  source 1..21: mol_type = other DNA; mol_type = other DNA
tacgcccgccccggccccaac

SEQ ID NO: 3793 - DNA, 21 bp, synthetic construct
  source 1..21: mol_type = other DNA; mol_type = other DNA
tacgccaagcgcggcgacaac

SEQ ID NO: 3794 - DNA, 21 bp, synthetic construct
  source 1..21: mol_type = other DNA; mol_type = other DNA
ttgccgaatcagtggagggat

SEQ ID NO: 3795 - DNA, 21 bp, synthetic construct
  source 1..21: mol_type = other DNA; mol_type = other DNA
tatttctcccagaggacggag

SEQ ID NO: 3796 - DNA, 21 bp, synthetic construct
  source 1..21: mol_type = other DNA; mol_type = other DNA
ttcgcgaggacgaatttcaat

SEQ ID NO: 3797 - DNA, 21 bp, synthetic construct
  source 1..21: mol_type = other DNA; mol_type = other DNA
gcgacgtccacgaatgggata

SEQ ID NO: 3798 - DNA, 21 bp, synthetic construct
  source 1..21: mol_type = other DNA; mol_type = other DNA
aacacctcatcaaacggcgta

SEQ ID NO: 3799 - DNA, 21 bp, synthetic construct
  source 1..21: mol_type = other DNA; mol_type = other DNA
tacggccgcgtaacctcaaac

SEQ ID NO: 3800 - DNA, 21 bp, synthetic construct
  source 1..21: mol_type = other DNA; mol_type = other DNA
tacgccaagctgggccaaaac

SEQ ID NO: 3801 - DNA, 21 bp, synthetic construct
  source 1..21: mol_type = other DNA; mol_type = other DNA
ttctccaaaggggggttcaat

SEQ ID NO: 3802 - DNA, 21 bp, synthetic construct
  source 1..21: mol_type = other DNA; mol_type = other DNA
ctggccaagctgggcatgaac

SEQ ID NO: 3803 - DNA, 21 bp, synthetic construct
  source 1..21: mol_type = other DNA; mol_type = other DNA
ttctccaggcaggggacgaat

SEQ ID NO: 3804 - DNA, 21 bp, synthetic construct
  source 1..21: mol_type = other DNA; mol_type = other DNA
tttgcccgctcaaacaccaac

SEQ ID NO: 3805 - DNA, 21 bp, synthetic construct
  source 1..21: mol_type = other DNA; mol_type = other DNA
ttttcacgcatgggctcaaac

SEQ ID NO: 3806 - DNA, 21 bp, synthetic construct
  source 1..21: mol_type = other DNA; mol_type = other DNA
ctggcccgcgtaggcaacaac

SEQ ID NO: 3807 - DNA, 21 bp, synthetic construct
  source 1..21: mol_type = other DNA; mol_type = other DNA
tttgcccgcctgggcaacaac

SEQ ID NO: 3808 - DNA, 21 bp, synthetic construct
  source 1..21: mol_type = other DNA; mol_type = other DNA
tactcacgctcaaacggcaac

SEQ ID NO: 3809 - DNA, 21 bp, synthetic construct
  source 1..21: mol_type = other DNA; mol_type = other DNA
ttctccaggcagaattccaat

SEQ ID NO: 3810 - DNA, 21 bp, synthetic construct
  source 1..21: mol_type = other DNA; mol_type = other DNA
tatgcgagggatgggaggaat

SEQ ID NO: 3811 - DNA, 21 bp, synthetic construct
  source 1..21: mol_type = other DNA; mol_type = other DNA
tatgcgaaatatggggggaat

SEQ ID NO: 3812 - DNA, 21 bp, synthetic construct
  source 1..21: mol_type = other DNA; mol_type = other DNA
tactcacgcaacaacctgaac

SEQ ID NO: 3813 - DNA, 21 bp, synthetic construct
  source 1..21: mol_type = other DNA; mol_type = other DNA
ttctccaaagcggggacgaat

SEQ ID NO: 3814 - DNA, 21 bp, synthetic construct
  source 1..21: mol_type = other DNA; mol_type = other DNA
tactcacgccataaccaaaac

SEQ ID NO: 3815 - DNA, 21 bp, synthetic construct
  source 1..21: mol_type = other DNA; mol_type = other DNA
tttgccaagcatggccataac

SEQ ID NO: 3816 - DNA, 21 bp, synthetic construct
  source 1..21: mol_type = other DNA; mol_type = other DNA
tggaagcatctgtcaatgggc

SEQ ID NO: 3817 - DNA, 21 bp, synthetic construct
  source 1..21: mol_type = other DNA; mol_type = other DNA
tacgcccgcgccggcgccaac

SEQ ID NO: 3818 - DNA, 21 bp, synthetic construct
  source 1..21: mol_type = other DNA; mol_type = other DNA
gaacgcaacatcggccgcctg

SEQ ID NO: 3819 - DNA, 21 bp, synthetic construct
  source 1..21: mol_type = other DNA; mol_type = other DNA
tgcaagggcggctgcatggta

SEQ ID NO: 3820 - DNA, 21 bp, synthetic construct
  source 1..21: mol_type = other DNA; mol_type = other DNA
tacgccaagcaaggcgacaac

SEQ ID NO: 3821 - DNA, 21 bp, synthetic construct
  source 1..21: mol_type = other DNA; mol_type = other DNA
tggttctccgggacgacgaat

SEQ ID NO: 3822 - DNA, 21 bp, synthetic construct
  source 1..21: mol_type = other DNA; mol_type = other DNA
ttttcaaagcgcaacgaaaac

SEQ ID NO: 3823 - DNA, 21 bp, synthetic construct
  source 1..21: mol_type = other DNA; mol_type = other DNA
ttttcacgcggcaacgccaac

SEQ ID NO: 3824 - DNA, 21 bp, synthetic construct
  source 1..21: mol_type = other DNA; mol_type = other DNA
ctggcccgcgtaggcatcaac

SEQ ID NO: 3825 - DNA, 21 bp, synthetic construct
  source 1..21: mol_type = other DNA; mol_type = other DNA
tactcacgcctgggcaccaac

SEQ ID NO: 3826 - DNA, 21 bp, synthetic construct
  source 1..21: mol_type = other DNA; mol_type = other DNA
ttctccagggtgaatgcgaat

SEQ ID NO: 3827 - DNA, 21 bp, synthetic construct
  source 1..21: mol_type = other DNA; mol_type = other DNA
ttttcacgcaacggctttaac

SEQ ID NO: 3828 - DNA, 21 bp, synthetic construct
  source 1..21: mol_type = other DNA; mol_type = other DNA
tatgcgaggccggggtccaat

SEQ ID NO: 3829 - DNA, 21 bp, synthetic construct
  source 1..21: mol_type = other DNA; mol_type = other DNA
tactcaaagaacaactgcaac

SEQ ID NO: 3830 - DNA, 21 bp, synthetic construct
  source 1..21: mol_type = other DNA; mol_type = other DNA
tacgcccgccaaaactcaaac

SEQ ID NO: 3831 - DNA, 21 bp, synthetic construct
  source 1..21: mol_type = other DNA; mol_type = other DNA
tacgccaagatcggctcaaac

SEQ ID NO: 3832 - DNA, 21 bp, synthetic construct
  source 1..21: mol_type = other DNA; mol_type = other DNA
ttttcaaagatcggcaccaac

SEQ ID NO: 3833 - DNA, 21 bp, synthetic construct
  source 1..21: mol_type = other DNA; mol_type = other DNA
ttttcacgcgtaaactacaac

SEQ ID NO: 3834 - DNA, 21 bp, synthetic construct
  source 1..21: mol_type = other DNA
ttcgcgagggggaatttcaat

SEQ ID NO: 3835 - DNA, 21 bp, synthetic construct
  source 1..21: mol_type = other DNA
ttcgcgaggacgaatcacaat

SEQ ID NO: 3836 - DNA, 21 bp, synthetic construct
  source 1..21: mol_type = other DNA
gatgcggcgtatgtgaaatat

SEQ ID NO: 3837 - DNA, 21 bp, synthetic construct
  source 1..21: mol_type = other DNA; mol_type = other DNA
tactcaaagtacaacgacaac

SEQ ID NO: 3838 - DNA, 21 bp, synthetic construct
  source 1..21: mol_type = other DNA; mol_type = other DNA
ttcgcgaggcagaatatgaat

SEQ ID NO: 3839 - DNA, 21 bp, synthetic construct
  source 1..21: mol_type = other DNA; mol_type = other DNA
aggttgacggatataacgtgg

SEQ ID NO: 3840 - DNA, 21 bp, synthetic construct
  source 1..21: mol_type = other DNA; mol_type = other DNA
tatgcgaggtatgggacgaat

SEQ ID NO: 3841 - DNA, 21 bp, synthetic construct
  source 1..21: mol_type = other DNA; mol_type = other DNA
ttcaatgggtccaataggtat

SEQ ID NO: 3842 - DNA, 21 bp, synthetic construct
  source 1..21: mol_type = other DNA; mol_type = other DNA
acgaattggggggggccggcg

SEQ ID NO: 3843 - DNA, 21 bp, synthetic construct
  source 1..21: mol_type = other DNA; mol_type = other DNA
tttgcccgcgccggcggcaac

SEQ ID NO: 3844 - DNA, 21 bp, synthetic construct
  source 1..21: mol_type = other DNA; mol_type = other DNA
tattccaaatataattccaat

SEQ ID NO: 3845 - DNA, 21 bp, synthetic construct
  source 1..21: mol_type = other DNA; mol_type = other DNA
tttgccaaggtaggctttaac

SEQ ID NO: 3846 - DNA, 21 bp, synthetic construct
  source 1..21: mol_type = other DNA; mol_type = other DNA
ttttcacgcaacggcatcaac

SEQ ID NO: 3847 - DNA, 21 bp, synthetic construct
  source 1..21: mol_type = other DNA; mol_type = other DNA
ttttcaaaggccggccataac

SEQ ID NO: 3848 - DNA, 21 bp, synthetic construct
  source 1..21: mol_type = other DNA; mol_type = other DNA
ttggcgaaaaatgggtgtaat

SEQ ID NO: 3849 - DNA, 21 bp, synthetic construct
  source 1..21: mol_type = other DNA; mol_type = other DNA
tatgcgaaatataatatgaat

SEQ ID NO: 3850 - DNA, 21 bp, synthetic construct
  source 1..21: mol_type = other DNA; mol_type = other DNA
gggggggggtccgtgaggtat

SEQ ID NO: 3851 - DNA, 21 bp, synthetic construct
  source 1..21: mol_type = other DNA; mol_type = other DNA
ttctccaggcagaatcacaat

SEQ ID NO: 3852 - DNA, 21 bp, synthetic construct
  source 1..21: mol_type = other DNA; mol_type = other DNA
cagcactataatgggttgggg

SEQ ID NO: 3853 - DNA, 21 bp, synthetic construct
  source 1..21: mol_type = other DNA; mol_type = other DNA
tacgccaaggccaactggaac

SEQ ID NO: 3854 - DNA, 21 bp, synthetic construct
  source 1..21: mol_type = other DNA; mol_type = other DNA
tatgcgaggcacgggacgaat

SEQ ID NO: 3855 - DNA, 21 bp, synthetic construct
  source 1..21: mol_type = other DNA; mol_type = other DNA
tttgcccgccatggcctgaac

SEQ ID NO: 3856 - DNA, 21 bp, synthetic construct
  source 1..21: mol_type = other DNA; mol_type = other DNA
tactcaaagcaaggccccaac

SEQ ID NO: 3857 - DNA, 21 bp, synthetic construct
  source 1..21: mol_type = other DNA; mol_type = other DNA
ttcgcgaggtccggggggaat

SEQ ID NO: 3858 - DNA, 21 bp, synthetic construct
  source 1..21: mol_type = other DNA; mol_type = other DNA
ttctccaggaataatgtgaat

SEQ ID NO: 3859 - DNA, 21 bp, synthetic construct
  source 1..21: mol_type = other DNA; mol_type = other DNA
ttctccaggttgggggggaat

SEQ ID NO: 3860 - DNA, 21 bp, synthetic construct
  source 1..21: mol_type = other DNA; mol_type = other DNA
tatgcgaggatgaatacgaat

SEQ ID NO: 3861 - DNA, 21 bp, synthetic construct
  source 1..21: mol_type = other DNA; mol_type = other DNA
gagcagtccacgaatggggtg

SEQ ID NO: 3862 - DNA, 21 bp, synthetic construct
  source 1..21: mol_type = other DNA; mol_type = other DNA
cgcgccgccgaagtatacccc

SEQ ID NO: 3863 - DNA, 21 bp, synthetic construct
  source 1..21: mol_type = other DNA; mol_type = other DNA
ctgtcaaagggcggctttaac

SEQ ID NO: 3864 - DNA, 21 bp, synthetic construct
  source 1..21: mol_type = other DNA; mol_type = other DNA
aacaagtggggcatgtcaccc

SEQ ID NO: 3865 - DNA, 21 bp, synthetic construct
  source 1..21: mol_type = other DNA; mol_type = other DNA
tatgcgaggttcaatccgaat

SEQ ID NO: 3866 - DNA, 21 bp, synthetic construct
  source 1..21: mol_type = other DNA; mol_type = other DNA
tatgcgaggtcctcccagtcc

SEQ ID NO: 3867 - DNA, 21 bp, synthetic construct
  source 1..21: mol_type = other DNA; mol_type = other DNA
tacgccaagaccaacaacaac

SEQ ID NO: 3868 - DNA, 21 bp, synthetic construct
  source 1..21: mol_type = other DNA; mol_type = other DNA
tattatcaggggacgtccgcg

SEQ ID NO: 3869 - DNA, 21 bp, synthetic construct
  source 1..21: mol_type = other DNA; mol_type = other DNA
ttttcacgccatggcatcaac

SEQ ID NO: 3870 - DNA, 21 bp, synthetic construct
  source 1..21: mol_type = other DNA; mol_type = other DNA
ttttcacgcgtaaacctgaac

SEQ ID NO: 3871 - DNA, 21 bp, synthetic construct
  source 1..21: mol_type = other DNA; mol_type = other DNA
tactcaaagtttaacgccaac

SEQ ID NO: 3872 - DNA, 21 bp, synthetic construct
  source 1..21: mol_type = other DNA; mol_type = other DNA
tacgcccgcatgaaccccaac

SEQ ID NO: 3873 - DNA, 21 bp, synthetic construct
  source 1..21: mol_type = other DNA; mol_type = other DNA
tatgcgaggtcctcccagata

SEQ ID NO: 3874 - DNA, 21 bp, synthetic construct
  source 1..21: mol_type = other DNA; mol_type = other DNA
tttgccaagggcggcgccaac

SEQ ID NO: 3875 - DNA, 21 bp, synthetic construct
  source 1..21: mol_type = other DNA; mol_type = other DNA
tattccaggtataattccaat

SEQ ID NO: 3876 - DNA, 21 bp, synthetic construct
  source 1..21: mol_type = other DNA; mol_type = other DNA
ttcgcgaggatgggggtgaat

SEQ ID NO: 3877 - DNA, 21 bp, synthetic construct
  source 1..21: mol_type = other DNA; mol_type = other DNA
tttgcccgctcaaacctgaac

SEQ ID NO: 3878 - DNA, 21 bp, synthetic construct
  source 1..21: mol_type = other DNA; mol_type = other DNA
tttgcccgccaaggctacaac

SEQ ID NO: 3879 - DNA, 21 bp, synthetic construct
  source 1..21: mol_type = other DNA; mol_type = other DNA
tatgcgaaaacgaatttgaat

SEQ ID NO: 3880 - DNA, 21 bp, synthetic construct
  source 1..21: mol_type = other DNA; mol_type = other DNA
ttttcacgctcaaactttaac

SEQ ID NO: 3881 - DNA, 21 bp, synthetic construct
  source 1..21: mol_type = other DNA; mol_type = other DNA
tttgccaagaacggcaacaac

SEQ ID NO: 3882 - DNA, 21 bp, synthetic construct
  source 1..21: mol_type = other DNA; mol_type = other DNA
tacgccaagcccggcctgaac

SEQ ID NO: 3883 - DNA, 21 bp, synthetic construct
  source 1..21: mol_type = other DNA; mol_type = other DNA
atcttttcatcaaacggcgta

SEQ ID NO: 3884 - DNA, 21 bp, synthetic construct
  source 1..21: mol_type = other DNA; mol_type = other DNA
ttctccaggtccaatcacaat

SEQ ID NO: 3885 - DNA, 21 bp, synthetic construct
  source 1..21: mol_type = other DNA; mol_type = other DNA
tttgcccgctcaggcgacaac

SEQ ID NO: 3886 - DNA, 21 bp, synthetic construct
  source 1..21: mol_type = other DNA; mol_type = other DNA
tatgcgagggagaataaaaat

SEQ ID NO: 3887 - DNA, 21 bp, synthetic construct
  source 1..21: mol_type = other DNA; mol_type = other DNA
tatgcgaaatatgggacgaat

SEQ ID NO: 3888 - DNA, 21 bp, synthetic construct
  source 1..21: mol_type = other DNA; mol_type = other DNA
ttttcacgctcaaacctgaac

SEQ ID NO: 3889 - DNA, 21 bp, synthetic construct
  source 1..21: mol_type = other DNA; mol_type = other DNA
cgcgaagtatcacgctcatac

SEQ ID NO: 3890 - DNA, 21 bp, synthetic construct
  source 1..21: mol_type = other DNA; mol_type = other DNA
atgaactcatcatcaggctgg

SEQ ID NO: 3891 - DNA, 21 bp, synthetic construct
  source 1..21: mol_type = other DNA; mol_type = other DNA
tattccaggatgggggggaat

SEQ ID NO: 3892 - DNA, 21 bp, synthetic construct
  source 1..21: mol_type = other DNA; mol_type = other DNA
ttctccaggcaggggcagaat

SEQ ID NO: 3893 - DNA, 21 bp, synthetic construct
  source 1..21: mol_type = other DNA; mol_type = other DNA
ttcgcgaggatagggcagaat

SEQ ID NO: 3894 - DNA, 21 bp, synthetic construct
  source 1..21: mol_type = other DNA; mol_type = other DNA
tatgcgaaatatggggtgaat

SEQ ID NO: 3895 - DNA, 21 bp, synthetic construct
  source 1..21: mol_type = other DNA; mol_type = other DNA
tactcacgccccaacaacaac

SEQ ID NO: 3896 - DNA, 21 bp, synthetic construct
  source 1..21: mol_type = other DNA; mol_type = other DNA
tactcaaagatcaaccccaac

SEQ ID NO: 3897 - DNA, 21 bp, synthetic construct
  source 1..21: mol_type = other DNA; mol_type = other DNA
atagggtcctccaatggggtg

SEQ ID NO: 3898 - DNA, 21 bp, synthetic construct
  source 1..21: mol_type = other DNA; mol_type = other DNA
ttctccaaacaggggttcaat

SEQ ID NO: 3899 - DNA, 21 bp, synthetic construct
  source 1..21: mol_type = other DNA; mol_type = other DNA
tactcaaagtcaaactggaac

SEQ ID NO: 3900 - DNA, 21 bp, synthetic construct
  source 1..21: mol_type = other DNA; mol_type = other DNA
ctggccaagcatggcaccaac

SEQ ID NO: 3901 - DNA, 21 bp, synthetic construct
  source 1..21: mol_type = other DNA; mol_type = other DNA
ttctccaggatggggatgaat

SEQ ID NO: 3902 - DNA, 21 bp, synthetic construct
  source 1..21: mol_type = other DNA; mol_type = other DNA
tttgcccgcatgggcatcaac

SEQ ID NO: 3903 - DNA, 21 bp, synthetic construct
  source 1..21: mol_type = other DNA; mol_type = other DNA
ttgtccaggcaggggtggaat

SEQ ID NO: 3904 - DNA, 21 bp, synthetic construct
  source 1..21: mol_type = other DNA; mol_type = other DNA
ttttcacgcaccaacctgaac

SEQ ID NO: 3905 - DNA, 21 bp, synthetic construct
  source 1..21: mol_type = other DNA; mol_type = other DNA
tatgcgaggatgaatgcgaat

SEQ ID NO: 3906 - DNA, 21 bp, synthetic construct
  source 1..21: mol_type = other DNA; mol_type = other DNA
ttgtccaaacacgggtataat

SEQ ID NO: 3907 - DNA, 21 bp, synthetic construct
  source 1..21: mol_type = other DNA; mol_type = other DNA
tacgcccgcgccggccccaac

SEQ ID NO: 3908 - DNA, 21 bp, synthetic construct
  source 1..21: mol_type = other DNA; mol_type = other DNA
gcgcaggcggcgaaaaattgg

SEQ ID NO: 3909 - DNA, 21 bp, synthetic construct
  source 1..21: mol_type = other DNA; mol_type = other DNA
ttgtccaggacgtccacgaat

SEQ ID NO: 3910 - DNA, 21 bp, synthetic construct
  source 1..21: mol_type = other DNA; mol_type = other DNA
tactcacgcctgggcgtaaac

SEQ ID NO: 3911 - DNA, 21 bp, synthetic construct
  source 1..21: mol_type = other DNA; mol_type = other DNA
tattccaaatataatttcaat

SEQ ID NO: 3912 - DNA, 21 bp, synthetic construct
  source 1..21: mol_type = other DNA; mol_type = other DNA
tatacgcactccacgtatggg

SEQ ID NO: 3913 - DNA, 21 bp, synthetic construct
  source 1..21: mol_type = other DNA; mol_type = other DNA
tatgcgagggtgaatcacaat

SEQ ID NO: 3914 - DNA, 21 bp, synthetic construct
  source 1..21: mol_type = other DNA; mol_type = other DNA
tactcacgccccggcaacaac

SEQ ID NO: 3915 - DNA, 21 bp, synthetic construct
  source 1..21: mol_type = other DNA; mol_type = other DNA
tacgccaaggtaggcctgaac

SEQ ID NO: 3916 - DNA, 21 bp, synthetic construct
  source 1..21: mol_type = other DNA; mol_type = other DNA
tactcacgccatggcatgaac

SEQ ID NO: 3917 - DNA, 21 bp, synthetic construct
  source 1..21: mol_type = other DNA; mol_type = other DNA
tatcacaaattgttgtccggg

SEQ ID NO: 3918 - DNA, 21 bp, synthetic construct
  source 1..21: mol_type = other DNA; mol_type = other DNA
ttcgcgaggcaggggcagaat

SEQ ID NO: 3919 - DNA, 21 bp, synthetic construct
  source 1..21: mol_type = other DNA; mol_type = other DNA
tatgcgaggcacggggggaat

SEQ ID NO: 3920 - DNA, 21 bp, synthetic construct
  source 1..21: mol_type = other DNA; mol_type = other DNA
ctggcccgcctgggctcaaac

SEQ ID NO: 3921 - DNA, 21 bp, synthetic construct
  source 1..21: mol_type = other DNA; mol_type = other DNA
ttctccaaatataataataat

SEQ ID NO: 3922 - DNA, 21 bp, synthetic construct
  source 1..21: mol_type = other DNA; mol_type = other DNA
tactcaaagctgaacaagaac

SEQ ID NO: 3923 - DNA, 21 bp, synthetic construct
  source 1..21: mol_type = other DNA; mol_type = other DNA
ttttcacgcggcggcgccaac

SEQ ID NO: 3924 - DNA, 21 bp, synthetic construct
  source 1..21: mol_type = other DNA; mol_type = other DNA
ttcgcgaggatgggggcgaat

SEQ ID NO: 3925 - DNA, 21 bp, synthetic construct
  source 1..21: mol_type = other DNA; mol_type = other DNA
gaaaaccgccccgaacgcaag

SEQ ID NO: 3926 - DNA, 21 bp, synthetic construct
  source 1..21: mol_type = other DNA; mol_type = other DNA
ttttcacgcaacggctacaac

SEQ ID NO: 3927 - DNA, 21 bp, synthetic construct
  source 1..21: mol_type = other DNA; mol_type = other DNA
ttcgcgaggttgggggtgaat

SEQ ID NO: 3928 - DNA, 21 bp, synthetic construct
  source 1..21: mol_type = other DNA; mol_type = other DNA
cgcaacgaatcatcatttccc

SEQ ID NO: 3929 - DNA, 21 bp, synthetic construct
  source 1..21: mol_type = other DNA; mol_type = other DNA
ttctccaggcacaatgtgaat

SEQ ID NO: 3930 - DNA, 21 bp, synthetic construct
  source 1..21: mol_type = other DNA; mol_type = other DNA
tactttgcccatgtacaagaa

SEQ ID NO: 3931 - DNA, 21 bp, synthetic construct
  source 1..21: mol_type = other DNA; mol_type = other DNA
ttggcgaggggggggtcctat

SEQ ID NO: 3932 - DNA, 21 bp, synthetic construct
  source 1..21: mol_type = other DNA; mol_type = other DNA
ttctccaaacacaatacgaat

SEQ ID NO: 3933 - DNA, 21 bp, synthetic construct
  source 1..21: mol_type = other DNA; mol_type = other DNA
atcgacggccattcatactac

SEQ ID NO: 3934 - DNA, 21 bp, synthetic construct
  source 1..21: mol_type = other DNA; mol_type = other DNA
tattccaaattcaattccaat

SEQ ID NO: 3935 - DNA, 21 bp, synthetic construct
  source 1..21: mol_type = other DNA; mol_type = other DNA
tatgcgaaatataatataaat

SEQ ID NO: 3936 - DNA, 21 bp, synthetic construct
  source 1..21: mol_type = other DNA; mol_type = other DNA
tactcaaagtacaacaacaac

SEQ ID NO: 3937 - DNA, 21 bp, synthetic construct
  source 1..21: mol_type = other DNA; mol_type = other DNA
tacgcccgcaccaacggcaac

SEQ ID NO: 3938 - DNA, 21 bp, synthetic construct
  source 1..21: mol_type = other DNA; mol_type = other DNA
ttgaattccatgtccaaatat

SEQ ID NO: 3939 - DNA, 21 bp, synthetic construct
  source 1..21: mol_type = other DNA; mol_type = other DNA
accggcggcacctcatactac

SEQ ID NO: 3940 - DNA, 21 bp, synthetic construct
  source 1..21: mol_type = other DNA; mol_type = other DNA
tacgcccgcaacaacatgaac

SEQ ID NO: 3941 - DNA, 21 bp, synthetic construct
  source 1..21: mol_type = other DNA; mol_type = other DNA
tatgcgaaacacggggggaat

SEQ ID NO: 3942 - DNA, 21 bp, synthetic construct
  source 1..21: mol_type = other DNA; mol_type = other DNA
agggcgaatgcgggggcgggg

SEQ ID NO: 3943 - DNA, 21 bp, synthetic construct
  source 1..21: mol_type = other DNA; mol_type = other DNA
ttttcacgcaccaacgccaac

SEQ ID NO: 3944 - DNA, 21 bp, synthetic construct
  source 1..21: mol_type = other DNA; mol_type = other DNA
ttctccagggtgaatatgaat

SEQ ID NO: 3945 - DNA, 21 bp, synthetic construct
  source 1..21: mol_type = other DNA; mol_type = other DNA
tttgccaagcatggctttaac

SEQ ID NO: 3946 - DNA, 21 bp, synthetic construct
  source 1..21: mol_type = other DNA; mol_type = other DNA
tacgcccgcgccaacatcaac

SEQ ID NO: 3947 - DNA, 21 bp, synthetic construct
  source 1..21: mol_type = other DNA; mol_type = other DNA
aatcagtatgggtccgggagg

SEQ ID NO: 3948 - DNA, 21 bp, synthetic construct
  source 1..21: mol_type = other DNA; mol_type = other DNA
ttctccagggtgaatcagaat

SEQ ID NO: 3949 - DNA, 21 bp, synthetic construct
  source 1..21: mol_type = other DNA; mol_type = other DNA
tttgcccgcgtaggcaacaac

SEQ ID NO: 3950 - DNA, 21 bp, synthetic construct
  source 1..21: mol_type = other DNA; mol_type = other DNA
ttctccaggtccaatgcgaat

SEQ ID NO: 3951 - DNA, 21 bp, synthetic construct
  source 1..21: mol_type = other DNA; mol_type = other DNA
tacgccaagaagggcgacaac

SEQ ID NO: 3952 - DNA, 21 bp, synthetic construct
  source 1..21: mol_type = other DNA; mol_type = other DNA
ttctccaggataaattccaat

SEQ ID NO: 3953 - DNA, 21 bp, synthetic construct
  source 1..21: mol_type = other DNA; mol_type = other DNA
tattccaggttcaatacgaat

SEQ ID NO: 3954 - DNA, 21 bp, synthetic construct
  source 1..21: mol_type = other DNA; mol_type = other DNA
ttcgcgaggtccaattataat

SEQ ID NO: 3955 - DNA, 21 bp, synthetic construct
  source 1..21: mol_type = other DNA; mol_type = other DNA
ctgtcacgcatcaacgaaaac

SEQ ID NO: 3956 - DNA, 21 bp, synthetic construct
  source 1..21: mol_type = other DNA; mol_type = other DNA
gggaatacgtccaaatcctgg

SEQ ID NO: 3957 - DNA, 21 bp, synthetic construct
  source 1..21: mol_type = other DNA; mol_type = other DNA
ttcgcgaggcagaataataat

SEQ ID NO: 3958 - DNA, 21 bp, synthetic construct
  source 1..21: mol_type = other DNA; mol_type = other DNA
ttgtccaaaccggggccgaat

SEQ ID NO: 3959 - DNA, 21 bp, synthetic construct
  source 1..21: mol_type = other DNA; mol_type = other DNA
tatgcgaggaataatttcaat

SEQ ID NO: 3960 - DNA, 21 bp, synthetic construct
  source 1..21: mol_type = other DNA; mol_type = other DNA
ttcgcgagggtgaataataat

SEQ ID NO: 3961 - DNA, 21 bp, synthetic construct
  source 1..21: mol_type = other DNA; mol_type = other DNA
tttgcccgcaccaacgtaaac

SEQ ID NO: 3962 - DNA, 21 bp, synthetic construct
  source 1..21: mol_type = other DNA; mol_type = other DNA
gtagacggccgctcaatgtac

SEQ ID NO: 3963 - DNA, 21 bp, synthetic construct
  source 1..21: mol_type = other DNA; mol_type = other DNA
ttttcacgcaccaaccataac

SEQ ID NO: 3964 - DNA, 21 bp, synthetic construct
  source 1..21: mol_type = other DNA; mol_type = other DNA
tactcaaagatcaactcaaac

SEQ ID NO: 3965 - DNA, 21 bp, synthetic construct
  source 1..21: mol_type = other DNA; mol_type = other DNA
gtacaaggccgctcatcatac

SEQ ID NO: 3966 - DNA, 21 bp, synthetic construct
  source 1..21: mol_type = other DNA; mol_type = other DNA
ttcgcgaaaaggaatgataat

SEQ ID NO: 3967 - DNA, 21 bp, synthetic construct
  source 1..21: mol_type = other DNA; mol_type = other DNA
ttcgcgaggttggggacgaat

SEQ ID NO: 3968 - DNA, 21 bp, synthetic construct
  source 1..21: mol_type = other DNA; mol_type = other DNA
tattccaaattcaatccgaat

SEQ ID NO: 3969 - DNA, 21 bp, synthetic construct
  source 1..21: mol_type = other DNA; mol_type = other DNA
tttgccaagcaaggcatgaac

SEQ ID NO: 3970 - DNA, 21 bp, synthetic construct
  source 1..21: mol_type = other DNA; mol_type = other DNA
tttgccaagctgggccccaac

SEQ ID NO: 3971 - DNA, 21 bp, synthetic construct
  source 1..21: mol_type = other DNA; mol_type = other DNA
tattccaaaataaatcagaat

SEQ ID NO: 3972 - DNA, 21 bp, synthetic construct
  source 1..21: mol_type = other DNA; mol_type = other DNA
ttcgcgaaaatggggcacaat

SEQ ID NO: 3973 - DNA, 21 bp, synthetic construct
  source 1..21: mol_type = other DNA; mol_type = other DNA
tattccaaaatggggaaaaat

SEQ ID NO: 3974 - DNA, 21 bp, synthetic construct
  source 1..21: mol_type = other DNA; mol_type = other DNA
ttctccaggacggggccgaat

SEQ ID NO: 3975 - DNA, 21 bp, synthetic construct
  source 1..21: mol_type = other DNA; mol_type = other DNA
aatgcgagggggatggggaat

SEQ ID NO: 3976 - DNA, 21 bp, synthetic construct
  source 1..21: mol_type = other DNA; mol_type = other DNA
tattatcagtataaaacggcg

SEQ ID NO: 3977 - DNA, 21 bp, synthetic construct
  source 1..21: mol_type = other DNA; mol_type = other DNA
ttctccaaagggaataataat

SEQ ID NO: 3978 - DNA, 21 bp, synthetic construct
  source 1..21: mol_type = other DNA; mol_type = other DNA
tacgccaagtacaactttaac

SEQ ID NO: 3979 - DNA, 21 bp, synthetic construct
  source 1..21: mol_type = other DNA; mol_type = other DNA
ctggccaagcaaggctcaaac

SEQ ID NO: 3980 - DNA, 21 bp, synthetic construct
  source 1..21: mol_type = other DNA; mol_type = other DNA
tactcaaagcccaactggaac

SEQ ID NO: 3981 - DNA, 21 bp, synthetic construct
  source 1..21: mol_type = other DNA; mol_type = other DNA
tacgccaagcccaactacaac

SEQ ID NO: 3982 - DNA, 21 bp, synthetic construct
  source 1..21: mol_type = other DNA; mol_type = other DNA
tactcaaagtttaaccataac

SEQ ID NO: 3983 - DNA, 21 bp, synthetic construct
  source 1..21: mol_type = other DNA; mol_type = other DNA
ttctccaggtccaatccgaat

SEQ ID NO: 3984 - DNA, 21 bp, synthetic construct
  source 1..21: mol_type = other DNA; mol_type = other DNA
ttctccaggccgaatcacaat

SEQ ID NO: 3985 - DNA, 21 bp, synthetic construct
  source 1..21: mol_type = other DNA; mol_type = other DNA
aaccaactgcccacccccaag

SEQ ID NO: 3986 - DNA, 21 bp, synthetic construct
  source 1..21: mol_type = other DNA; mol_type = other DNA
atgccgaggtccacgtatggg

SEQ ID NO: 3987 - DNA, 21 bp, synthetic construct
  source 1..21: mol_type = other DNA; mol_type = other DNA
ttcgcgaaatataataataat

SEQ ID NO: 3988 - DNA, 21 bp, synthetic construct
  source 1..21: mol_type = other DNA; mol_type = other DNA
ttttcacgctttaacaccaac

SEQ ID NO: 3989 - DNA, 21 bp, synthetic construct
  source 1..21: mol_type = other DNA; mol_type = other DNA
tatgcgaaatataattataat

SEQ ID NO: 3990 - DNA, 21 bp, synthetic construct
  source 1..21: mol_type = other DNA; mol_type = other DNA
tattccaggggggggcacaat

SEQ ID NO: 3991 - DNA, 21 bp, synthetic construct
  source 1..21: mol_type = other DNA; mol_type = other DNA
tatgcgaggccgaatccgaat

SEQ ID NO: 3992 - DNA, 21 bp, synthetic construct
  source 1..21: mol_type = other DNA; mol_type = other DNA
tactcaaagggcggcaccaac

SEQ ID NO: 3993 - DNA, 21 bp, synthetic construct
  source 1..21: mol_type = other DNA; mol_type = other DNA
tttgcccgccatggcatcaac

SEQ ID NO: 3994 - DNA, 21 bp, synthetic construct
  source 1..21: mol_type = other DNA; mol_type = other DNA
ttcgcgagggcggggcagaat

SEQ ID NO: 3995 - DNA, 21 bp, synthetic construct
  source 1..21: mol_type = other DNA; mol_type = other DNA
ttttcaaagatcggctcaaac

SEQ ID NO: 3996 - DNA, 21 bp, synthetic construct
  source 1..21: mol_type = other DNA; mol_type = other DNA
cgcaacacctcaaccaactgg

SEQ ID NO: 3997 - DNA, 21 bp, synthetic construct
  source 1..21: mol_type = other DNA; mol_type = other DNA
ttcgcgaggatggggtccaat

SEQ ID NO: 3998 - DNA, 21 bp, synthetic construct
  source 1..21: mol_type = other DNA; mol_type = other DNA
ctgtcaaagtggaacgaaaac

SEQ ID NO: 3999 - DNA, 21 bp, synthetic construct
  source 1..21: mol_type = other DNA; mol_type = other DNA
ttctccaggccgaattataat

SEQ ID NO: 4000 - DNA, 21 bp, synthetic construct
  source 1..21: mol_type = other DNA; mol_type = other DNA
tacgccaagaccaacgacaac

SEQ ID NO: 4001 - DNA, 21 bp, synthetic construct
  source 1..21: mol_type = other DNA; mol_type = other DNA
ttttcacgcggcaacaacaac

SEQ ID NO: 4002 - DNA, 21 bp, synthetic construct
  source 1..21: mol_type = other DNA; mol_type = other DNA
ctgtcaaagaacaacctgaac

SEQ ID NO: 4003 - DNA, 21 bp, synthetic construct
  source 1..21: mol_type = other DNA; mol_type = other DNA
cgcacctcatcatacggcgta

SEQ ID NO: 4004 - DNA, 21 bp, synthetic construct
  source 1..21: mol_type = other DNA; mol_type = other DNA
ctggccaagatcggcatgaac

SEQ ID NO: 4005 - DNA, 21 bp, synthetic construct
  source 1..21: mol_type = other DNA; mol_type = other DNA
tttgcccgcgccggcgtaaac

SEQ ID NO: 4006 - DNA, 21 bp, synthetic construct
  source 1..21: mol_type = other DNA; mol_type = other DNA
ttcgcgaaaccgaatataaat

SEQ ID NO: 4007 - DNA, 21 bp, synthetic construct
  source 1..21: mol_type = other DNA; mol_type = other DNA
tattccaggacggggccgaat

SEQ ID NO: 4008 - DNA, 21 bp, synthetic construct
  source 1..21: mol_type = other DNA; mol_type = other DNA
tatgcgagggaggggtggaat

SEQ ID NO: 4009 - DNA, 21 bp, synthetic construct
  source 1..21: mol_type = other DNA; mol_type = other DNA
tataggccgagggtgccggat

SEQ ID NO: 4010 - DNA, 21 bp, synthetic construct
  source 1..21: mol_type = other DNA; mol_type = other DNA
ttggcgaaagggcactatggg

SEQ ID NO: 4011 - DNA, 21 bp, synthetic construct
  source 1..21: mol_type = other DNA; mol_type = other DNA
gccggcaactcacgcgactgg

SEQ ID NO: 4012 - DNA, 21 bp, synthetic construct
  source 1..21: mol_type = other DNA; mol_type = other DNA
tatgcgaggccgaatatgaat

SEQ ID NO: 4013 - DNA, 21 bp, synthetic construct
  source 1..21: mol_type = other DNA; mol_type = other DNA
tatgcgagggaggggttcaat

SEQ ID NO: 4014 - DNA, 21 bp, synthetic construct
  source 1..21: mol_type = other DNA; mol_type = other DNA
tatgcgaaacagaatcagaat

SEQ ID NO: 4015 - DNA, 21 bp, synthetic construct
  source 1..21: mol_type = other DNA; mol_type = other DNA
ctgtcacgcatgggcggcaac

SEQ ID NO: 4016 - DNA, 21 bp, synthetic construct
  source 1..21: mol_type = other DNA; mol_type = other DNA
ctgtcaaagtggaacgacaac

SEQ ID NO: 4017 - DNA, 21 bp, synthetic construct
  source 1..21: mol_type = other DNA; mol_type = other DNA
ttttcaaagcgcggcgacaac

SEQ ID NO: 4018 - DNA, 21 bp, synthetic construct
  source 1..21: mol_type = other DNA; mol_type = other DNA
tactcacgcaagggcgacaac

SEQ ID NO: 4019 - DNA, 21 bp, synthetic construct
  source 1..21: mol_type = other DNA; mol_type = other DNA
ttttcaaagcatggctttaac

SEQ ID NO: 4020 - DNA, 21 bp, synthetic construct
  source 1..21: mol_type = other DNA; mol_type = other DNA
ttcgcgaggacgaatcagaat

SEQ ID NO: 4021 - DNA, 21 bp, synthetic construct
  source 1..21: mol_type = other DNA; mol_type = other DNA
tttgcccgctcaaacgtaaac

SEQ ID NO: 4022 - DNA, 21 bp, synthetic construct
  source 1..21: mol_type = other DNA; mol_type = other DNA
tttgccaagatcggccccaac

SEQ ID NO: 4023 - DNA, 21 bp, synthetic construct
  source 1..21: mol_type = other DNA; mol_type = other DNA
ttttcacgctcaaactcaaac

SEQ ID NO: 4024 - DNA, 21 bp, synthetic construct
  source 1..21: mol_type = other DNA; mol_type = other DNA
tatgcgaaattgggggggaat

SEQ ID NO: 4025 - DNA, 21 bp, synthetic construct
  source 1..21: mol_type = other DNA; mol_type = other DNA
ttttcaaagctgggccaaaac

SEQ ID NO: 4026 - DNA, 21 bp, synthetic construct
  source 1..21: mol_type = other DNA; mol_type = other DNA
ttcgcgaggcacaatgcgaat

SEQ ID NO: 4027 - DNA, 21 bp, synthetic construct
  source 1..21: mol_type = other DNA; mol_type = other DNA
ttcgcgaggtccaatcacaat

SEQ ID NO: 4028 - DNA, 21 bp, synthetic construct
  source 1..21: mol_type = other DNA; mol_type = other DNA
ttcgcgaggatggggtataat

SEQ ID NO: 4029 - DNA, 21 bp, synthetic construct
  source 1..21: mol_type = other DNA; mol_type = other DNA
tttgccaagaacggctggaac

SEQ ID NO: 4030 - DNA, 21 bp, synthetic construct
  source 1..21: mol_type = other DNA; mol_type = other DNA
ttcgcgaaattcgggccgaat

SEQ ID NO: 4031 - DNA, 21 bp, synthetic construct
  source 1..21: mol_type = other DNA; mol_type = other DNA
ttctccaggacgaattccaat

SEQ ID NO: 4032 - DNA, 21 bp, synthetic construct
  source 1..21: mol_type = other DNA; mol_type = other DNA
tttgcccgcgccaacgccaac

SEQ ID NO: 4033 - DNA, 21 bp, synthetic construct
  source 1..21: mol_type = other DNA; mol_type = other DNA
tactcaaagaccaacgccaac

SEQ ID NO: 4034 - DNA, 21 bp, synthetic construct
  source 1..21: mol_type = other DNA; mol_type = other DNA
tactcaaagtttaacctgaac

SEQ ID NO: 4035 - DNA, 21 bp, synthetic construct
  source 1..21: mol_type = other DNA; mol_type = other DNA
tatgcgaggaaaaatgagaat

SEQ ID NO: 4036 - DNA, 21 bp, synthetic construct
  source 1..21: mol_type = other DNA; mol_type = other DNA
aactacggcaacatgaagaac

SEQ ID NO: 4037 - DNA, 21 bp, synthetic construct
  source 1..21: mol_type = other DNA; mol_type = other DNA
tactcaaagtttaacaccaac

SEQ ID NO: 4038 - DNA, 21 bp, synthetic construct
  source 1..21: mol_type = other DNA; mol_type = other DNA
accaagtttggcctgtcagcc

SEQ ID NO: 4039 - DNA, 21 bp, synthetic construct
  source 1..21: mol_type = other DNA; mol_type = other DNA
tacgcccgcgaaggcaagaac

SEQ ID NO: 4040 - DNA, 21 bp, synthetic construct
  source 1..21: mol_type = other DNA; mol_type = other DNA
ttcgcgaggatgaatcacaat

SEQ ID NO: 4041 - DNA, 21 bp, synthetic construct
  source 1..21: mol_type = other DNA; mol_type = other DNA
ttcgcgaaaggggggcagaat

SEQ ID NO: 4042 - DNA, 21 bp, synthetic construct
  source 1..21: mol_type = other DNA; mol_type = other DNA
tactcacgcaacaacggcaac

SEQ ID NO: 4043 - DNA, 21 bp, synthetic construct
  source 1..21: mol_type = other DNA; mol_type = other DNA
ttcgcgaggtccaattccaat

SEQ ID NO: 4044 - DNA, 21 bp, synthetic construct
  source 1..21: mol_type = other DNA; mol_type = other DNA
tactcacgcgaaggccgcaac

SEQ ID NO: 4045 - DNA, 21 bp, synthetic construct
  source 1..21: mol_type = other DNA; mol_type = other DNA
ttcgcgaggcacggggtgaat

SEQ ID NO: 4046 - DNA, 21 bp, synthetic construct
  source 1..21: mol_type = other DNA; mol_type = other DNA
tttgcccgcatcggcgccaac

SEQ ID NO: 4047 - DNA, 21 bp, synthetic construct
  source 1..21: mol_type = other DNA; mol_type = other DNA
tattccaaaacgaattggaat

SEQ ID NO: 4048 - DNA, 21 bp, synthetic construct
  source 1..21: mol_type = other DNA; mol_type = other DNA
atgtggtcatcaaacggcgta

SEQ ID NO: 4049 - DNA, 21 bp, synthetic construct
  source 1..21: mol_type = other DNA; mol_type = other DNA
tattccaaatatgggatgaat

SEQ ID NO: 4050 - DNA, 21 bp, synthetic construct
  source 1..21: mol_type = other DNA; mol_type = other DNA
ttttcacgcggcaaccccaac

SEQ ID NO: 4051 - DNA, 21 bp, synthetic construct
  source 1..21: mol_type = other DNA; mol_type = other DNA
ttttcaaagatgggcgccaac

SEQ ID NO: 4052 - DNA, 21 bp, synthetic construct
  source 1..21: mol_type = other DNA; mol_type = other DNA
ttcgcgaggtccaatttcaat

SEQ ID NO: 4053 - DNA, 21 bp, synthetic construct
  source 1..21: mol_type = other DNA; mol_type = other DNA
tatgcgaaatggaatgcgaat

SEQ ID NO: 4054 - DNA, 21 bp, synthetic construct
  source 1..21: mol_type = other DNA; mol_type = other DNA
ctgtcaaagatcaactttaac

SEQ ID NO: 4055 - DNA, 21 bp, synthetic construct
  source 1..21: mol_type = other DNA; mol_type = other DNA
tacgccaagatcggcggcaac

SEQ ID NO: 4056 - DNA, 21 bp, synthetic construct
  source 1..21: mol_type = other DNA; mol_type = other DNA
atgggcacctcacgcggctgg

SEQ ID NO: 4057 - DNA, 21 bp, synthetic construct
  source 1..21: mol_type = other DNA; mol_type = other DNA
tatttcggggggaaacaggcg

SEQ ID NO: 4058 - DNA, 21 bp, synthetic construct
  source 1..21: mol_type = other DNA; mol_type = other DNA
tacgcccgctcatcacaagac

SEQ ID NO: 4059 - DNA, 21 bp, synthetic construct
  source 1..21: mol_type = other DNA; mol_type = other DNA
tggctgaagtcacaagcctca

SEQ ID NO: 4060 - DNA, 21 bp, synthetic construct
  source 1..21: mol_type = other DNA; mol_type = other DNA
ttttcacgcaacaacaacaac

SEQ ID NO: 4061 - DNA, 21 bp, synthetic construct
  source 1..21: mol_type = other DNA; mol_type = other DNA
cgctcaaactcagcctacccc

SEQ ID NO: 4062 - DNA, 21 bp, synthetic construct
  source 1..21: mol_type = other DNA; mol_type = other DNA
ggcaactcaacctcaaagttt

SEQ ID NO: 4063 - DNA, 21 bp, synthetic construct
  source 1..21: mol_type = other DNA; mol_type = other DNA
tttgccaagcaaggcatcaac

SEQ ID NO: 4064 - DNA, 21 bp, synthetic construct
  source 1..21: mol_type = other DNA; mol_type = other DNA
ctgtcacgctacggcgacaac

SEQ ID NO: 4065 - DNA, 21 bp, synthetic construct
  source 1..21: mol_type = other DNA; mol_type = other DNA
ttttcacgcatcaacgccaac

SEQ ID NO: 4066 - DNA, 21 bp, synthetic construct
  source 1..21: mol_type = other DNA; mol_type = other DNA
tcaaagggcacctcatactac

SEQ ID NO: 4067 - DNA, 21 bp, synthetic construct
  source 1..21: mol_type = other DNA; mol_type = other DNA
tttgccaagggcaaccccaac

SEQ ID NO: 4068 - DNA, 21 bp, synthetic construct
  source 1..21: mol_type = other DNA; mol_type = other DNA
ttctccagggggaatacgaat

SEQ ID NO: 4069 - DNA, 21 bp, synthetic construct
  source 1..21: mol_type = other DNA; mol_type = other DNA
ctgaagtcatcaaacggcgta

SEQ ID NO: 4070 - DNA, 21 bp, synthetic construct
  source 1..21: mol_type = other DNA; mol_type = other DNA
aaacactccacgaatggggtg

SEQ ID NO: 4071 - DNA, 21 bp, synthetic construct
  source 1..21: mol_type = other DNA; mol_type = other DNA
ttctccaaaccgaattataat

SEQ ID NO: 4072 - DNA, 21 bp, synthetic construct
  source 1..21: mol_type = other DNA; mol_type = other DNA
aataggtataaatccggggag

SEQ ID NO: 4073 - DNA, 21 bp, synthetic construct
  source 1..21: mol_type = other DNA; mol_type = other DNA
ttctccaggaataatttgaat

SEQ ID NO: 4074 - DNA, 21 bp, synthetic construct
  source 1..21: mol_type = other DNA; mol_type = other DNA
tatccggggaaatcctccttc

SEQ ID NO: 4075 - DNA, 21 bp, synthetic construct
  source 1..21: mol_type = other DNA; mol_type = other DNA
tattccaaatataattataat

SEQ ID NO: 4076 - DNA, 21 bp, synthetic construct
  source 1..21: mol_type = other DNA; mol_type = other DNA
tacgccaagtggaaccccaac

SEQ ID NO: 4077 - DNA, 21 bp, synthetic construct
  source 1..21: mol_type = other DNA; mol_type = other DNA
tatgcgaggcacaatcacaat

SEQ ID NO: 4078 - DNA, 21 bp, synthetic construct
  source 1..21: mol_type = other DNA; mol_type = other DNA
tttgccaagggcaacgccaac

SEQ ID NO: 4079 - DNA, 21 bp, synthetic construct
  source 1..21: mol_type = other DNA; mol_type = other DNA
gggaggttgaaatccgatcag

SEQ ID NO: 4080 - DNA, 21 bp, synthetic construct
  source 1..21: mol_type = other DNA; mol_type = other DNA
ttcgcgaggacgaatgcgaat

SEQ ID NO: 4081 - DNA, 21 bp, synthetic construct
  source 1..21: mol_type = other DNA; mol_type = other DNA
tatgcgaaattcaatccgaat

SEQ ID NO: 4082 - DNA, 21 bp, synthetic construct
  source 1..21: mol_type = other DNA
ttttcacgcgtaaactcaaac

SEQ ID NO: 4083 - DNA, 21 bp, synthetic construct
  source 1..21: mol_type = other DNA
cgcaacaacaccgtatacatg

SEQ ID NO: 4084 - DNA, 21 bp, synthetic construct
  source 1..21: mol_type = other DNA
ttctccaaacacgggcacaat

SEQ ID NO: 4085 - DNA, 21 bp, synthetic construct
  source 1..21: mol_type = other DNA
ctgtcaaagtttaactacaac

SEQ ID NO: 4086 - DNA, 21 bp, synthetic construct
  source 1..21: mol_type = other DNA
ttttcaaagcatggcctgaac

SEQ ID NO: 4087 - DNA, 21 bp, synthetic construct
  source 1..21: mol_type = other DNA
tccaggtatggggatgcggcg

SEQ ID NO: 4088 - DNA, 21 bp, synthetic construct
  source 1..21: mol_type = other DNA
aacaagtcatcatcatcatgg

SEQ ID NO: 4089 - DNA, 21 bp, synthetic construct
  source 1..21: mol_type = other DNA
ttttcacgcggcggcgtaaac

SEQ ID NO: 4090 - DNA, 21 bp, synthetic construct
  source 1..21: mol_type = other DNA
tacgcccgctcaaactacaac

SEQ ID NO: 4091 - DNA, 21 bp, synthetic construct
  source 1..21: mol_type = other DNA; mol_type = other DNA
accccctacggcaagatggcc

SEQ ID NO: 4092 - DNA, 21 bp, synthetic construct
  source 1..21: mol_type = other DNA; mol_type = other DNA
ttttcaaagaagaacgacaac

SEQ ID NO: 4093 - DNA, 21 bp, synthetic construct
  source 1..21: mol_type = other DNA; mol_type = other DNA
ttttcacgcaacaactcaaac

SEQ ID NO: 4094 - DNA, 21 bp, synthetic construct
  source 1..21: mol_type = other DNA; mol_type = other DNA
tttgcccgcaccaacctgaac

SEQ ID NO: 4095 - DNA, 21 bp, synthetic construct
  source 1..21: mol_type = other DNA; mol_type = other DNA
ttttcaaagtcaaactacaac

SEQ ID NO: 4096 - DNA, 21 bp, synthetic construct
  source 1..21: mol_type = other DNA; mol_type = other DNA
ttctccaaatccgggtggaat

SEQ ID NO: 4097 - DNA, 21 bp, synthetic construct
  source 1..21: mol_type = other DNA; mol_type = other DNA
tacgccaagcccaactttaac

SEQ ID NO: 4098 - DNA, 21 bp, synthetic construct
  source 1..21: mol_type = other DNA; mol_type = other DNA
tttgcccgcggcaaccccaac

SEQ ID NO: 4099 - DNA, 21 bp, synthetic construct
  source 1..21: mol_type = other DNA; mol_type = other DNA
tacgcccgccccaacatcaac

SEQ ID NO: 4100 - DNA, 21 bp, synthetic construct
  source 1..21: mol_type = other DNA; mol_type = other DNA
tgtgtgaaaacggataggaat

SEQ ID NO: 4101 - DNA, 21 bp, synthetic construct
  source 1..21: mol_type = other DNA; mol_type = other DNA
ttcgcgaggcagaatacgaat

SEQ ID NO: 4102 - DNA, 21 bp, synthetic construct
  source 1..21: mol_type = other DNA; mol_type = other DNA
tacgcccgctttaacatgaac

SEQ ID NO: 4103 - DNA, 21 bp, synthetic construct
  source 1..21: mol_type = other DNA; mol_type = other DNA
ttctccaaacagaatgcgaat

SEQ ID NO: 4104 - DNA, 21 bp, synthetic construct
  source 1..21: mol_type = other DNA; mol_type = other DNA
ttctccagggtgaatttcaat

SEQ ID NO: 4105 - DNA, 21 bp, synthetic construct
  source 1..21: mol_type = other DNA; mol_type = other DNA
ttctccaggaaaggggagaat

SEQ ID NO: 4106 - DNA, 21 bp, synthetic construct
  source 1..21: mol_type = other DNA; mol_type = other DNA
tatgcgaaagatgggaggaat

SEQ ID NO: 4107 - DNA, 21 bp, synthetic construct
  source 1..21: mol_type = other DNA
ttctccaggcacaatacgaat

SEQ ID NO: 4108 - DNA, 21 bp, synthetic construct
  source 1..21: mol_type = other DNA; mol_type = other DNA
ctgtcaaagcaaggctcaaac

SEQ ID NO: 4109 - DNA, 21 bp, synthetic construct
  source 1..21: mol_type = other DNA; mol_type = other DNA
tatgcgaggaggaatgagaat

SEQ ID NO: 4110 - DNA, 21 bp, synthetic construct
  source 1..21: mol_type = other DNA; mol_type = other DNA
ctgcgcggcggcgccgaccgc

SEQ ID NO: 4111 - DNA, 21 bp, synthetic construct
  source 1..21: mol_type = other DNA; mol_type = other DNA
tattccaggtataataataat

SEQ ID NO: 4112 - DNA, 21 bp, synthetic construct
  source 1..21: mol_type = other DNA; mol_type = other DNA
ttttcacgcggcaaccataac

SEQ ID NO: 4113 - DNA, 21 bp, synthetic construct
  source 1..21: mol_type = other DNA; mol_type = other DNA
tttgcccgcgtaggccaaaac

SEQ ID NO: 4114 - DNA, 21 bp, synthetic construct
  source 1..21: mol_type = other DNA; mol_type = other DNA
acctcaaacaacgtataccat

SEQ ID NO: 4115 - DNA, 21 bp, synthetic construct
  source 1..21: mol_type = other DNA; mol_type = other DNA
tactcaaagcccggctacaac

SEQ ID NO: 4116 - DNA, 21 bp, synthetic construct
  source 1..21: mol_type = other DNA; mol_type = other DNA
tttgcccgcgccaaccataac

SEQ ID NO: 4117 - DNA, 21 bp, synthetic construct
  source 1..21: mol_type = other DNA; mol_type = other DNA
ttcgcgaggtataatcagaat

SEQ ID NO: 4118 - DNA, 21 bp, synthetic construct
  source 1..21: mol_type = other DNA; mol_type = other DNA
tacgccaagatgggcaagaac

SEQ ID NO: 4119 - DNA, 21 bp, synthetic construct
  source 1..21: mol_type = other DNA; mol_type = other DNA
tacgccaagatgaactacaac

SEQ ID NO: 4120 - DNA, 21 bp, synthetic construct
  source 1..21: mol_type = other DNA; mol_type = other DNA
tttgcccgctcaaacgccaac

SEQ ID NO: 4121 - DNA, 21 bp, synthetic construct
  source 1..21: mol_type = other DNA; mol_type = other DNA
ttttcaaagatgaactcaaac

SEQ ID NO: 4122 - DNA, 21 bp, synthetic construct
  source 1..21: mol_type = other DNA; mol_type = other DNA
ttttcacgccccggccccaac

SEQ ID NO: 4123 - DNA, 21 bp, synthetic construct
  source 1..21: mol_type = other DNA; mol_type = other DNA
ctggcccgccatggcgacaac

SEQ ID NO: 4124 - DNA, 21 bp, synthetic construct
  source 1..21: mol_type = other DNA; mol_type = other DNA
ctgtcaaagtacaacgacaac

SEQ ID NO: 4125 - DNA, 21 bp, synthetic construct
  source 1..21: mol_type = other DNA; mol_type = other DNA
acgaatgcgaggtcctcctat

SEQ ID NO: 4126 - DNA, 21 bp, synthetic construct
  source 1..21: mol_type = other DNA; mol_type = other DNA
tatgcgaggtataatgcgaat

SEQ ID NO: 4127 - DNA, 21 bp, synthetic construct
  source 1..21: mol_type = other DNA; mol_type = other DNA
tactcacgcggcggcggcaac

SEQ ID NO: 4128 - DNA, 21 bp, synthetic construct
  source 1..21: mol_type = other DNA; mol_type = other DNA
cgctacaccggcacccccgcc

SEQ ID NO: 4129 - DNA, 21 bp, synthetic construct
  source 1..21: mol_type = other DNA; mol_type = other DNA
tattccagggataataggaat

SEQ ID NO: 4130 - DNA, 21 bp, synthetic construct
  source 1..21: mol_type = other DNA; mol_type = other DNA
ttcgcgaaattgaatatgaat

SEQ ID NO: 4131 - DNA, 21 bp, synthetic construct
  source 1..21: mol_type = other DNA; mol_type = other DNA
tatgcgaggttcaataataat

SEQ ID NO: 4132 - DNA, 21 bp, synthetic construct
  source 1..21: mol_type = other DNA; mol_type = other DNA
aacatcccctactcaatgccc

SEQ ID NO: 4133 - DNA, 21 bp, synthetic construct
  source 1..21: mol_type = other DNA; mol_type = other DNA
ttttcaaagcatggctacaac

SEQ ID NO: 4134 - DNA, 21 bp, synthetic construct
  source 1..21: mol_type = other DNA; mol_type = other DNA
tttgccaagaacggcgccaac

SEQ ID NO: 4135 - DNA, 21 bp, synthetic construct
  source 1..21: mol_type = other DNA; mol_type = other DNA
ttctccaaaatgggggtgaat

SEQ ID NO: 4136 - DNA, 21 bp, synthetic construct
  source 1..21: mol_type = other DNA; mol_type = other DNA
tacgcccgcatcaactcaaac

SEQ ID NO: 4137 - DNA, 21 bp, synthetic construct
  source 1..21: mol_type = other DNA; mol_type = other DNA
ttttcaaagcatggcatcaac

SEQ ID NO: 4138 - DNA, 21 bp, synthetic construct
  source 1..21: mol_type = other DNA; mol_type = other DNA
tccgagtccacgcacgggatg

SEQ ID NO: 4139 - DNA, 21 bp, synthetic construct
  source 1..21: mol_type = other DNA; mol_type = other DNA
ggggcgtccgggtccatatat

SEQ ID NO: 4140 - DNA, 21 bp, synthetic construct
  source 1..21: mol_type = other DNA; mol_type = other DNA
tacgcccgcatcaacctgaac

SEQ ID NO: 4141 - DNA, 21 bp, synthetic construct
  source 1..21: mol_type = other DNA; mol_type = other DNA
ctgtcaaagatcggcggcaac

SEQ ID NO: 4142 - DNA, 21 bp, synthetic construct
  source 1..21: mol_type = other DNA; mol_type = other DNA
ttttcaaagtacggcatgaac

SEQ ID NO: 4143 - DNA, 21 bp, synthetic construct
  source 1..21: mol_type = other DNA; mol_type = other DNA
ttttcacgctcaaaccaaaac

SEQ ID NO: 4144 - DNA, 21 bp, synthetic construct
  source 1..21: mol_type = other DNA; mol_type = other DNA
gtgaggtccacgtccgggata

SEQ ID NO: 4145 - DNA, 21 bp, synthetic construct
  source 1..21: mol_type = other DNA; mol_type = other DNA
ttttcacgcggcaactcaaac

SEQ ID NO: 4146 - DNA, 21 bp, synthetic construct
  source 1..21: mol_type = other DNA; mol_type = other DNA
tttgcccgcatcggcaccaac

SEQ ID NO: 4147 - DNA, 21 bp, synthetic construct
  source 1..21: mol_type = other DNA; mol_type = other DNA
tactcaaagcgcggcgaaaac

SEQ ID NO: 4148 - DNA, 21 bp, synthetic construct
  source 1..21: mol_type = other DNA; mol_type = other DNA
tacgccaagcatggcaccaac

SEQ ID NO: 4149 - DNA, 21 bp, synthetic construct
  source 1..21: mol_type = other DNA; mol_type = other DNA
ttcgcgaggcagaatgcgaat

SEQ ID NO: 4150 - DNA, 21 bp, synthetic construct
  source 1..21: mol_type = other DNA; mol_type = other DNA
tataggaatgcggtgataggg

SEQ ID NO: 4151 - DNA, 21 bp, synthetic construct
  source 1..21: mol_type = other DNA; mol_type = other DNA
tactcaaagcccggcaacaac

SEQ ID NO: 4152 - DNA, 21 bp, synthetic construct
  source 1..21: mol_type = other DNA; mol_type = other DNA
tttgccaagtcaaactttaac

SEQ ID NO: 4153 - DNA, 21 bp, synthetic construct
  source 1..21: mol_type = other DNA; mol_type = other DNA
ttcgcgaggcacgggcagaat

SEQ ID NO: 4154 - DNA, 21 bp, synthetic construct
  source 1..21: mol_type = other DNA; mol_type = other DNA
ttcgcgagggcggggtccaat

SEQ ID NO: 4155 - DNA, 21 bp, synthetic construct
  source 1..21: mol_type = other DNA; mol_type = other DNA
ttcgcgagggtggggtccaat

SEQ ID NO: 4156 - DNA, 21 bp, synthetic construct
  source 1..21: mol_type = other DNA; mol_type = other DNA
ttctccaaaacggggcagaat

SEQ ID NO: 4157 - DNA, 21 bp, synthetic construct
  source 1..21: mol_type = other DNA; mol_type = other DNA
ttttcacgcaccaacatgaac

SEQ ID NO: 4158 - DNA, 21 bp, synthetic construct
  source 1..21: mol_type = other DNA; mol_type = other DNA
tatacgtatgggataaaagcg

SEQ ID NO: 4159 - DNA, 21 bp, synthetic construct
  source 1..21: mol_type = other DNA; mol_type = other DNA
tatgcgaggatgaattccaat

SEQ ID NO: 4160 - DNA, 21 bp, synthetic construct
  source 1..21: mol_type = other DNA; mol_type = other DNA
ttcgcgaggatgaatttgaat

SEQ ID NO: 4161 - DNA, 21 bp, synthetic construct
  source 1..21: mol_type = other DNA; mol_type = other DNA
atgaccggccattcactgtac

SEQ ID NO: 4162 - DNA, 21 bp, synthetic construct
  source 1..21: mol_type = other DNA; mol_type = other DNA
ttctccaggataaatccgaat

SEQ ID NO: 4163 - DNA, 21 bp, synthetic construct
  source 1..21: mol_type = other DNA; mol_type = other DNA
ttttcaaagtacaacgtaaac

SEQ ID NO: 4164 - DNA, 21 bp, synthetic construct
  source 1..21: mol_type = other DNA; mol_type = other DNA
tatgcgaggttgaatgggaat

SEQ ID NO: 4165 - DNA, 21 bp, synthetic construct
  source 1..21: mol_type = other DNA; mol_type = other DNA
ggcatcgtaaccgtacgccat

SEQ ID NO: 4166 - DNA, 21 bp, synthetic construct
  source 1..21: mol_type = other DNA; mol_type = other DNA
tttgccaaggccggcgccaac

SEQ ID NO: 4167 - DNA, 21 bp, synthetic construct
  source 1..21: mol_type = other DNA; mol_type = other DNA
tacgccaagcaaaacgacaac

SEQ ID NO: 4168 - DNA, 21 bp, synthetic construct
  source 1..21: mol_type = other DNA; mol_type = other DNA
ttcgcgaggcagaatcacaat

SEQ ID NO: 4169 - DNA, 21 bp, synthetic construct
  source 1..21: mol_type = other DNA; mol_type = other DNA
ttcgcgaggataaataataat

SEQ ID NO: 4170 - DNA, 21 bp, synthetic construct
  source 1..21: mol_type = other DNA; mol_type = other DNA
ttcgcgagggtggggacgaat

SEQ ID NO: 4171 - DNA, 21 bp, synthetic construct
  source 1..21: mol_type = other DNA; mol_type = other DNA
ttcgcgaggtatgggaataat

SEQ ID NO: 4172 - DNA, 21 bp, synthetic construct
  source 1..21: mol_type = other DNA; mol_type = other DNA
tatgcgaaaataaataataat

SEQ ID NO: 4173 - DNA, 21 bp, synthetic construct
  source 1..21: mol_type = other DNA; mol_type = other DNA
ttttcaaagcaaaacgtaaac

SEQ ID NO: 4174 - DNA, 21 bp, synthetic construct
  source 1..21: mol_type = other DNA; mol_type = other DNA
ttcgcgaaaaggggggagaat

SEQ ID NO: 4175 - DNA, 21 bp, synthetic construct
  source 1..21: mol_type = other DNA; mol_type = other DNA
tatgcgaaatataataataat

SEQ ID NO: 4176 - DNA, 21 bp, synthetic construct
  source 1..21: mol_type = other DNA; mol_type = other DNA
ttctccaaattcaatcacaat

SEQ ID NO: 4177 - DNA, 21 bp, synthetic construct
  source 1..21: mol_type = other DNA; mol_type = other DNA
tttgccaagcaaaactggaac

SEQ ID NO: 4178 - DNA, 21 bp, synthetic construct
  source 1..21: mol_type = other DNA; mol_type = other DNA
ttctccaaatccgggacgaat

SEQ ID NO: 4179 - DNA, 21 bp, synthetic construct
  source 1..21: mol_type = other DNA; mol_type = other DNA
tcacgcaccggcctgaacgcc

SEQ ID NO: 4180 - DNA, 21 bp, synthetic construct
  source 1..21: mol_type = other DNA; mol_type = other DNA
tattccaggttcaatgtgaat

SEQ ID NO: 4181 - DNA, 21 bp, synthetic construct
  source 1..21: mol_type = other DNA; mol_type = other DNA
ttttcacgccatggcctgaac

SEQ ID NO: 4182 - DNA, 21 bp, synthetic construct
  source 1..21: mol_type = other DNA; mol_type = other DNA
tacgcccgctcaaacggcaac

SEQ ID NO: 4183 - DNA, 21 bp, synthetic construct
  source 1..21: mol_type = other DNA; mol_type = other DNA
tatgcgaggataaatgcgaat

SEQ ID NO: 4184 - DNA, 21 bp, synthetic construct
  source 1..21: mol_type = other DNA; mol_type = other DNA
tttgcccgcctgggccaaaac

SEQ ID NO: 4185 - DNA, 21 bp, synthetic construct
  source 1..21: mol_type = other DNA; mol_type = other DNA
ttttcacgcggcggctcaaac

SEQ ID NO: 4186 - DNA, 21 bp, synthetic construct
  source 1..21: mol_type = other DNA; mol_type = other DNA
ttttcacgctacggcgtaaac

SEQ ID NO: 4187 - DNA, 21 bp, synthetic construct
  source 1..21: mol_type = other DNA; mol_type = other DNA
tactcaaagatcaacaagaac

SEQ ID NO: 4188 - DNA, 21 bp, synthetic construct
  source 1..21: mol_type = other DNA; mol_type = other DNA
tttgcccgctacggcgtaaac

SEQ ID NO: 4189 - DNA, 21 bp, synthetic construct
  source 1..21: mol_type = other DNA; mol_type = other DNA
tatgcgaggataaatgtgaat

SEQ ID NO: 4190 - DNA, 21 bp, synthetic construct
  source 1..21: mol_type = other DNA; mol_type = other DNA
tacgccaagtggaactcaaac

SEQ ID NO: 4191 - DNA, 21 bp, synthetic construct
  source 1..21: mol_type = other DNA; mol_type = other DNA
gtatacgaccgcaagggcacc

SEQ ID NO: 4192 - DNA, 21 bp, synthetic construct
  source 1..21: mol_type = other DNA; mol_type = other DNA
ttttcacgcggcaacatgaac

SEQ ID NO: 4193 - DNA, 21 bp, synthetic construct
  source 1..21: mol_type = other DNA; mol_type = other DNA
ttcgcgaggcagaatcagaat

SEQ ID NO: 4194 - DNA, 21 bp, synthetic construct
  source 1..21: mol_type = other DNA; mol_type = other DNA
ttttcaaagtacaactcaaac

SEQ ID NO: 4195 - DNA, 21 bp, synthetic construct
  source 1..21: mol_type = other DNA; mol_type = other DNA
tatgcgagggtgaatccgaat

SEQ ID NO: 4196 - DNA, 21 bp, synthetic construct
  source 1..21: mol_type = other DNA; mol_type = other DNA
tacgcccgccatggcaacaac

SEQ ID NO: 4197 - DNA, 21 bp, synthetic construct
  source 1..21: mol_type = other DNA; mol_type = other DNA
tactcacgctacggcggcaac

SEQ ID NO: 4198 - DNA, 21 bp, synthetic construct
  source 1..21: mol_type = other DNA; mol_type = other DNA
tatgcgaaaatgaataaaaat

SEQ ID NO: 4199 - DNA, 21 bp, synthetic construct
  source 1..21: mol_type = other DNA; mol_type = other DNA
ttttcacgcaccaactttaac

SEQ ID NO: 4200 - DNA, 21 bp, synthetic construct
  source 1..21: mol_type = other DNA; mol_type = other DNA
gtaggccgctggggctcagac

SEQ ID NO: 4201 - DNA, 21 bp, synthetic construct
  source 1..21: mol_type = other DNA; mol_type = other DNA
ttctccaaatataatgggaat

SEQ ID NO: 4202 - DNA, 21 bp, synthetic construct
  source 1..21: mol_type = other DNA; mol_type = other DNA
cagtatgggacggcgaaattc

SEQ ID NO: 4203 - DNA, 21 bp, synthetic construct
  source 1..21: mol_type = other DNA; mol_type = other DNA
ttcgcgaaatataatcacaat

SEQ ID NO: 4204 - DNA, 21 bp, synthetic construct
  source 1..21: mol_type = other DNA; mol_type = other DNA
tataaatccaattccaattat

SEQ ID NO: 4205 - DNA, 21 bp, synthetic construct
  source 1..21: mol_type = other DNA; mol_type = other DNA
tttgccaagtcaggcgaaaac

SEQ ID NO: 4206 - DNA, 21 bp, synthetic construct
  source 1..21: mol_type = other DNA; mol_type = other DNA
tttgccaagcatggcctgaac

SEQ ID NO: 4207 - DNA, 21 bp, synthetic construct
  source 1..21: mol_type = other DNA; mol_type = other DNA
tatgcgagggtgaatttgaat

SEQ ID NO: 4208 - DNA, 21 bp, synthetic construct
  source 1..21: mol_type = other DNA; mol_type = other DNA
tgcaagtcaggcggccaaacc

SEQ ID NO: 4209 - DNA, 21 bp, synthetic construct
  source 1..21: mol_type = other DNA; mol_type = other DNA
acccgcaccggcgtaatggcc

SEQ ID NO: 4210 - DNA, 21 bp, synthetic construct
  source 1..21: mol_type = other DNA; mol_type = other DNA
ttcgcgaggcacaatcagaat

SEQ ID NO: 4211 - DNA, 21 bp, synthetic construct
  source 1..21: mol_type = other DNA; mol_type = other DNA
tatgcgaggcacaatgcgaat

SEQ ID NO: 4212 - DNA, 21 bp, synthetic construct
  source 1..21: mol_type = other DNA; mol_type = other DNA
tattccaaattggcgacgaat

SEQ ID NO: 4213 - DNA, 21 bp, synthetic construct
  source 1..21: mol_type = other DNA; mol_type = other DNA
tttgcccgcggcaaccaaaac

SEQ ID NO: 4214 - DNA, 21 bp, synthetic construct
  source 1..21: mol_type = other DNA; mol_type = other DNA
ttctccaggggggggaataat

SEQ ID NO: 4215 - DNA, 21 bp, synthetic construct
  source 1..21: mol_type = other DNA; mol_type = other DNA
ttctccaaagtgggggggaat

SEQ ID NO: 4216 - DNA, 21 bp, synthetic construct
  source 1..21: mol_type = other DNA; mol_type = other DNA
tacgccaagatgaaccccaac

SEQ ID NO: 4217 - DNA, 21 bp, synthetic construct
  source 1..21: mol_type = other DNA; mol_type = other DNA
ttctccagggataataggaat

SEQ ID NO: 4218 - DNA, 21 bp, synthetic construct
  source 1..21: mol_type = other DNA; mol_type = other DNA
tacgcccgcgacaaccgcaac

SEQ ID NO: 4219 - DNA, 21 bp, synthetic construct
  source 1..21: mol_type = other DNA; mol_type = other DNA
ttcgcgaggataaatcacaat

SEQ ID NO: 4220 - DNA, 21 bp, synthetic construct
  source 1..21: mol_type = other DNA; mol_type = other DNA
gtaaagtacaccggctcaaac

SEQ ID NO: 4221 - DNA, 21 bp, synthetic construct
  source 1..21: mol_type = other DNA; mol_type = other DNA
acccaatacaacacctaccat

SEQ ID NO: 4222 - DNA, 21 bp, synthetic construct
  source 1..21: mol_type = other DNA; mol_type = other DNA
tatgcgaggccgggggggaat

SEQ ID NO: 4223 - DNA, 21 bp, synthetic construct
  source 1..21: mol_type = other DNA; mol_type = other DNA
gtacgccaactgtcagccggc

SEQ ID NO: 4224 - DNA, 21 bp, synthetic construct
  source 1..21: mol_type = other DNA; mol_type = other DNA
aatgtgaggaggaatggggag

SEQ ID NO: 4225 - DNA, 21 bp, synthetic construct
  source 1..21: mol_type = other DNA; mol_type = other DNA
ttttcacgctcaaacaacaac

SEQ ID NO: 4226 - DNA, 21 bp, synthetic construct
  source 1..21: mol_type = other DNA; mol_type = other DNA
ttcgcgaggcacgggcacaat

SEQ ID NO: 4227 - DNA, 21 bp, synthetic construct
  source 1..21: mol_type = other DNA; mol_type = other DNA
ttctccaaatatggggtgaat

SEQ ID NO: 4228 - DNA, 21 bp, synthetic construct
  source 1..21: mol_type = other DNA; mol_type = other DNA
ttttcaaagcatggcgccaac

SEQ ID NO: 4229 - DNA, 21 bp, synthetic construct
  source 1..21: mol_type = other DNA; mol_type = other DNA
tacgccaagtggaacaccaac

SEQ ID NO: 4230 - DNA, 21 bp, synthetic construct
  source 1..21: mol_type = other DNA; mol_type = other DNA
ttcgcgaaagcgaatcacaat

SEQ ID NO: 4231 - DNA, 21 bp, synthetic construct
  source 1..21: mol_type = other DNA; mol_type = other DNA
tttgcccgcctgaactcaaac

SEQ ID NO: 4232 - DNA, 21 bp, synthetic construct
  source 1..21: mol_type = other DNA; mol_type = other DNA
tatgcgaaatgggggtccaat

SEQ ID NO: 4233 - DNA, 21 bp, synthetic construct
  source 1..21: mol_type = other DNA; mol_type = other DNA
ttctccaaacacaatccgaat

SEQ ID NO: 4234 - DNA, 21 bp, synthetic construct
  source 1..21: mol_type = other DNA; mol_type = other DNA
atgcataagctgcaagtagcc

SEQ ID NO: 4235 - DNA, 21 bp, synthetic construct
  source 1..21: mol_type = other DNA; mol_type = other DNA
ttctccaaaggggggcacaat

SEQ ID NO: 4236 - DNA, 21 bp, synthetic construct
  source 1..21: mol_type = other DNA; mol_type = other DNA
ttttcacgctttaacgccaac

SEQ ID NO: 4237 - DNA, 21 bp, synthetic construct
  source 1..21: mol_type = other DNA; mol_type = other DNA
atcccctcaaagtcagccggc

SEQ ID NO: 4238 - DNA, 21 bp, synthetic construct
  source 1..21: mol_type = other DNA; mol_type = other DNA
tatgcgaaatggaataataat

SEQ ID NO: 4239 - DNA, 21 bp, synthetic construct
  source 1..21: mol_type = other DNA; mol_type = other DNA
gtatcagcctcaaccaagtgg

SEQ ID NO: 4240 - DNA, 21 bp, synthetic construct
  source 1..21: mol_type = other DNA; mol_type = other DNA
tactcacgcgaaggcaacaac

SEQ ID NO: 4241 - DNA, 21 bp, synthetic construct
  source 1..21: mol_type = other DNA; mol_type = other DNA
ttcgcgaggcagaatttcaat

SEQ ID NO: 4242 - DNA, 21 bp, synthetic construct
  source 1..21: mol_type = other DNA; mol_type = other DNA
ttcgcgaaacagaatatgaat

SEQ ID NO: 4243 - DNA, 21 bp, synthetic construct
  source 1..21: mol_type = other DNA; mol_type = other DNA
agggcgtccggggtgtcctat

SEQ ID NO: 4244 - DNA, 21 bp, synthetic construct
  source 1..21: mol_type = other DNA; mol_type = other DNA
ttttcaaagggcggctggaac

SEQ ID NO: 4245 - DNA, 21 bp, synthetic construct
  source 1..21: mol_type = other DNA; mol_type = other DNA
acgaggcacggggggtccccg

SEQ ID NO: 4246 - DNA, 21 bp, synthetic construct
  source 1..21: mol_type = other DNA; mol_type = other DNA
cgcgaccgccaatcaacctac

SEQ ID NO: 4247 - DNA, 21 bp, synthetic construct
  source 1..21: mol_type = other DNA; mol_type = other DNA
tacgcccgcgtaaacgtaaac

SEQ ID NO: 4248 - DNA, 21 bp, synthetic construct
  source 1..21: mol_type = other DNA; mol_type = other DNA
atgaatgcgaaatcccactat

SEQ ID NO: 4249 - DNA, 21 bp, synthetic construct
  source 1..21: mol_type = other DNA; mol_type = other DNA
ttctccaaaataaataataat

SEQ ID NO: 4250 - DNA, 21 bp, synthetic construct
  source 1..21: mol_type = other DNA; mol_type = other DNA
ttttcaaagaacggctacaac

SEQ ID NO: 4251 - DNA, 21 bp, synthetic construct
  source 1..21: mol_type = other DNA; mol_type = other DNA
tttgccaaggccaactttaac

SEQ ID NO: 4252 - DNA, 21 bp, synthetic construct
  source 1..21: mol_type = other DNA; mol_type = other DNA
catgccggcgaccgctggatc

SEQ ID NO: 4253 - DNA, 21 bp, synthetic construct
  source 1..21: mol_type = other DNA; mol_type = other DNA
ttctccaggatagggtataat

SEQ ID NO: 4254 - DNA, 21 bp, synthetic construct
  source 1..21: mol_type = other DNA; mol_type = other DNA
tttgccaagtacaacgccaac

SEQ ID NO: 4255 - DNA, 21 bp, synthetic construct
  source 1..21: mol_type = other DNA; mol_type = other DNA
ttttcacgcatcaaccaaaac

SEQ ID NO: 4256 - DNA, 21 bp, synthetic construct
  source 1..21: mol_type = other DNA; mol_type = other DNA
tatgcgagggtgaatgcgaat

SEQ ID NO: 4257 - DNA, 21 bp, synthetic construct
  source 1..21: mol_type = other DNA; mol_type = other DNA
tactcacgccccggctttaac

SEQ ID NO: 4258 - DNA, 21 bp, synthetic construct
  source 1..21: mol_type = other DNA; mol_type = other DNA
tccagggggtccgggtatgcg

SEQ ID NO: 4259 - DNA, 21 bp, synthetic construct
  source 1..21: mol_type = other DNA; mol_type = other DNA
aacctgcgcggcaacggcggc

SEQ ID NO: 4260 - DNA, 21 bp, synthetic construct
  source 1..21: mol_type = other DNA; mol_type = other DNA
ttcgcgaaatatggggcgaat

SEQ ID NO: 4261 - DNA, 21 bp, synthetic construct
  source 1..21: mol_type = other DNA; mol_type = other DNA
ttttcaaagtttaacatgaac

SEQ ID NO: 4262 - DNA, 21 bp, synthetic construct
  source 1..21: mol_type = other DNA; mol_type = other DNA
ttttcacgccatggcgtaaac

SEQ ID NO: 4263 - DNA, 21 bp, synthetic construct
  source 1..21: mol_type = other DNA; mol_type = other DNA
ttttcaaagaccaactttaac

SEQ ID NO: 4264 - DNA, 21 bp, synthetic construct
  source 1..21: mol_type = other DNA; mol_type = other DNA
tattccaaatataatccgaat

SEQ ID NO: 4265 - DNA, 21 bp, synthetic construct
  source 1..21: mol_type = other DNA; mol_type = other DNA
ttttcaaagctgggcaccaac

SEQ ID NO: 4266 - DNA, 21 bp, synthetic construct
  source 1..21: mol_type = other DNA; mol_type = other DNA
ttcgcgaggataaatacgaat

SEQ ID NO: 4267 - DNA, 21 bp, synthetic construct
  source 1..21: mol_type = other DNA; mol_type = other DNA
tacgcccgccataacgtaaac

SEQ ID NO: 4268 - DNA, 21 bp, synthetic construct
  source 1..21: mol_type = other DNA; mol_type = other DNA
ttttcacgcggcggcatgaac

SEQ ID NO: 4269 - DNA, 21 bp, synthetic construct
  source 1..21: mol_type = other DNA; mol_type = other DNA
tacgtacgcaacatcgcctca

SEQ ID NO: 4270 - DNA, 21 bp, synthetic construct
  source 1..21: mol_type = other DNA; mol_type = other DNA
acgaggtccggggcgtcctcc

SEQ ID NO: 4271 - DNA, 21 bp, synthetic construct
  source 1..21: mol_type = other DNA; mol_type = other DNA
tttgcccgccaaaacctgaac

SEQ ID NO: 4272 - DNA, 21 bp, synthetic construct
  source 1..21: mol_type = other DNA; mol_type = other DNA
ttttcaaagtcaaacatgaac

SEQ ID NO: 4273 - DNA, 21 bp, synthetic construct
  source 1..21: mol_type = other DNA; mol_type = other DNA
tcaggctcacccaccaagtgg

SEQ ID NO: 4274 - DNA, 21 bp, synthetic construct
  source 1..21: mol_type = other DNA; mol_type = other DNA
tttgcccgcctgggcgccaac

SEQ ID NO: 4275 - DNA, 21 bp, synthetic construct
  source 1..21: mol_type = other DNA; mol_type = other DNA
aactcatcaggcgcccgctac

SEQ ID NO: 4276 - DNA, 21 bp, synthetic construct
  source 1..21: mol_type = other DNA; mol_type = other DNA
ttttcaaagatcaaccataac

SEQ ID NO: 4277 - DNA, 21 bp, synthetic construct
  source 1..21: mol_type = other DNA; mol_type = other DNA
tttgcccgctcaaacaacaac

SEQ ID NO: 4278 - DNA, 21 bp, synthetic construct
  source 1..21: mol_type = other DNA; mol_type = other DNA
ttttcaaagatgggcatcaac

SEQ ID NO: 4279 - DNA, 21 bp, synthetic construct
  source 1..21: mol_type = other DNA; mol_type = other DNA
ttctccaaattcaattccaat

SEQ ID NO: 4280 - DNA, 21 bp, synthetic construct
  source 1..21: mol_type = other DNA; mol_type = other DNA
tatatgagggggtccttgaat

SEQ ID NO: 4281 - DNA, 21 bp, synthetic construct
  source 1..21: mol_type = other DNA; mol_type = other DNA
ttctccaaacacaattccaat

SEQ ID NO: 4282 - DNA, 21 bp, synthetic construct
  source 1..21: mol_type = other DNA; mol_type = other DNA
tatgcgaggttcaatgcgaat

SEQ ID NO: 4283 - DNA, 21 bp, synthetic construct
  source 1..21: mol_type = other DNA; mol_type = other DNA
tattccagggtgtccgggttg

SEQ ID NO: 4284 - DNA, 21 bp, synthetic construct
  source 1..21: mol_type = other DNA; mol_type = other DNA
ttttcacgcggcggccataac

SEQ ID NO: 4285 - DNA, 21 bp, synthetic construct
  source 1..21: mol_type = other DNA; mol_type = other DNA
ttcgcgaaatatgggatgaat

SEQ ID NO: 4286 - DNA, 21 bp, synthetic construct
  source 1..21: mol_type = other DNA; mol_type = other DNA
ttcgcgaaacacggggtgaat

SEQ ID NO: 4287 - DNA, 21 bp, synthetic construct
  source 1..21: mol_type = other DNA; mol_type = other DNA
ttcaggatggggggggcgggg

SEQ ID NO: 4288 - DNA, 21 bp, synthetic construct
  source 1..21: mol_type = other DNA; mol_type = other DNA
caggcgttgtccgggaaaaat

SEQ ID NO: 4289 - DNA, 21 bp, synthetic construct
  source 1..21: mol_type = other DNA; mol_type = other DNA
atatccaatgcggtgaaatat

SEQ ID NO: 4290 - DNA, 21 bp, synthetic construct
  source 1..21: mol_type = other DNA; mol_type = other DNA
tttgccaagtacggcaccaac

SEQ ID NO: 4291 - DNA, 21 bp, synthetic construct
  source 1..21: mol_type = other DNA; mol_type = other DNA
tttgcccgcaacaaccataac

SEQ ID NO: 4292 - DNA, 21 bp, synthetic construct
  source 1..21: mol_type = other DNA; mol_type = other DNA
ttttcacgcgccaacggcaac

SEQ ID NO: 4293 - DNA, 21 bp, synthetic construct
  source 1..21: mol_type = other DNA; mol_type = other DNA
acgaaagggatgtcctcctat

SEQ ID NO: 4294 - DNA, 21 bp, synthetic construct
  source 1..21: mol_type = other DNA; mol_type = other DNA
tacgccaagcataaccataac

SEQ ID NO: 4295 - DNA, 21 bp, synthetic construct
  source 1..21: mol_type = other DNA; mol_type = other DNA
tttgccaagcaaggcaccaac

SEQ ID NO: 4296 - DNA, 21 bp, synthetic construct
  source 1..21: mol_type = other DNA; mol_type = other DNA
ttcgcgaggatggggcagaat

SEQ ID NO: 4297 - DNA, 21 bp, synthetic construct
  source 1..21: mol_type = other DNA; mol_type = other DNA
ttgccgaaagggaattatggg

SEQ ID NO: 4298 - DNA, 21 bp, synthetic construct
  source 1..21: mol_type = other DNA; mol_type = other DNA
ttttcaaagtacggcgccaac

SEQ ID NO: 4299 - DNA, 21 bp, synthetic construct
  source 1..21: mol_type = other DNA; mol_type = other DNA
tacgtaaagtcagccatgtca

SEQ ID NO: 4300 - DNA, 21 bp, synthetic construct
  source 1..21: mol_type = other DNA; mol_type = other DNA
tttgccaagcatggcaacaac

SEQ ID NO: 4301 - DNA, 21 bp, synthetic construct
  source 1..21: mol_type = other DNA; mol_type = other DNA
acctcaaccggccgcatggcc

SEQ ID NO: 4302 - DNA, 21 bp, synthetic construct
  source 1..21: mol_type = other DNA; mol_type = other DNA
tacgcccgccccaacctgaac

SEQ ID NO: 4303 - DNA, 21 bp, synthetic construct
  source 1..21: mol_type = other DNA; mol_type = other DNA
ttggcgagggtggcgaaagat

SEQ ID NO: 4304 - DNA, 21 bp, synthetic construct
  source 1..21: mol_type = other DNA; mol_type = other DNA
tttgccaagtggaaccaaaac

SEQ ID NO: 4305 - DNA, 21 bp, synthetic construct
  source 1..21: mol_type = other DNA; mol_type = other DNA
ttttcaaagtacaacatgaac

SEQ ID NO: 4306 - DNA, 21 bp, synthetic construct
  source 1..21: mol_type = other DNA; mol_type = other DNA
tttgcccgcgccaacatcaac

SEQ ID NO: 4307 - DNA, 21 bp, synthetic construct
  source 1..21: mol_type = other DNA; mol_type = other DNA
ttgccgaggtccgggaatgtg

SEQ ID NO: 4308 - DNA, 21 bp, synthetic construct
  source 1..21: mol_type = other DNA; mol_type = other DNA
ttcgcgagggtgaatcacaat

SEQ ID NO: 4309 - DNA, 21 bp, synthetic construct
  source 1..21: mol_type = other DNA; mol_type = other DNA
tacgtacgcaacggccaaggc

SEQ ID NO: 4310 - DNA, 21 bp, synthetic construct
  source 1..21: mol_type = other DNA; mol_type = other DNA
ttttcacgccataacgccaac

SEQ ID NO: 4311 - DNA, 21 bp, synthetic construct
  source 1..21: mol_type = other DNA; mol_type = other DNA
ttttcacgctttggcggcaac

SEQ ID NO: 4312 - DNA, 21 bp, synthetic construct
  source 1..21: mol_type = other DNA; mol_type = other DNA
ttcgcgaggaataatgcgaat

SEQ ID NO: 4313 - DNA, 21 bp, synthetic construct
  source 1..21: mol_type = other DNA; mol_type = other DNA
aggaatgggacgaatgggtat

SEQ ID NO: 4314 - DNA, 21 bp, synthetic construct
  source 1..21: mol_type = other DNA; mol_type = other DNA
ttctccaaacacggggtgaat

SEQ ID NO: 4315 - DNA, 21 bp, synthetic construct
  source 1..21: mol_type = other DNA; mol_type = other DNA
tttgcccgcctgaacggcaac

SEQ ID NO: 4316 - DNA, 21 bp, synthetic construct
  source 1..21: mol_type = other DNA; mol_type = other DNA
ttcgcgaaatatgggcacaat

SEQ ID NO: 4317 - DNA, 21 bp, synthetic construct
  source 1..21: mol_type = other DNA; mol_type = other DNA
accaagtacggccataccgcc

SEQ ID NO: 4318 - DNA, 21 bp, synthetic construct
  source 1..21: mol_type = other DNA; mol_type = other DNA
ttcgcgaaaaggggggataat

SEQ ID NO: 4319 - DNA, 21 bp, synthetic construct
  source 1..21: mol_type = other DNA; mol_type = other DNA
cgctcacataacaccgtagta

SEQ ID NO: 4320 - DNA, 21 bp, synthetic construct
  source 1..21: mol_type = other DNA; mol_type = other DNA
ttcgcgaaaatgaataataat

SEQ ID NO: 4321 - DNA, 21 bp, synthetic construct
  source 1..21: mol_type = other DNA; mol_type = other DNA
tacgcccgcctgggcggcaac

SEQ ID NO: 4322 - DNA, 21 bp, synthetic construct
  source 1..21: mol_type = other DNA; mol_type = other DNA
ataataatggtgaaaaatgcg

SEQ ID NO: 4323 - DNA, 21 bp, synthetic construct
  source 1..21: mol_type = other DNA; mol_type = other DNA
tacgcccgccataaccaaaac

SEQ ID NO: 4324 - DNA, 21 bp, synthetic construct
  source 1..21: mol_type = other DNA; mol_type = other DNA
ctgcatacccgcacctacgac

SEQ ID NO: 4325 - DNA, 21 bp, synthetic construct
  source 1..21: mol_type = other DNA; mol_type = other DNA
tttgccaagcatggcgccaac

SEQ ID NO: 4326 - DNA, 21 bp, synthetic construct
  source 1..21: mol_type = other DNA; mol_type = other DNA
tataaaccgttcacgacgaat

SEQ ID NO: 4327 - DNA, 21 bp, synthetic construct
  source 1..21: mol_type = other DNA; mol_type = other DNA
ttttcacgcatgggccaaaac

SEQ ID NO: 4328 - DNA, 21 bp, synthetic construct
  source 1..21: mol_type = other DNA; mol_type = other DNA
tacgccaagtacaacaccaac

SEQ ID NO: 4329 - DNA, 21 bp, synthetic construct
  source 1..21: mol_type = other DNA; mol_type = other DNA
ttttcaaagcaaggcatcaac

SEQ ID NO: 4330 - DNA, 21 bp, synthetic construct
  source 1..21: mol_type = other DNA; mol_type = other DNA
tatgcgaaatggaatcagaat

SEQ ID NO: 4331 - DNA, 21 bp, synthetic construct
  source 1..21: mol_type = other DNA; mol_type = other DNA
ttttcacgccccggctacaac

SEQ ID NO: 4332 - DNA, 21 bp, synthetic construct
  source 1..21: mol_type = other DNA; mol_type = other DNA
ttttcacgcggcaactttaac

SEQ ID NO: 4333 - DNA, 21 bp, synthetic construct
  source 1..21: mol_type = other DNA; mol_type = other DNA
gtaaacatggcccgcgccctg

SEQ ID NO: 4334 - DNA, 21 bp, synthetic construct
  source 1..21: mol_type = other DNA; mol_type = other DNA
ttttcacgctcaggcggcaac

SEQ ID NO: 4335 - DNA, 21 bp, synthetic construct
  source 1..21: mol_type = other DNA; mol_type = other DNA
accggcgccggcatgaagtac

SEQ ID NO: 4336 - DNA, 21 bp, synthetic construct
  source 1..21: mol_type = other DNA; mol_type = other DNA
ttcgcgaggcacaattccaat

SEQ ID NO: 4337 - DNA, 21 bp, synthetic construct
  source 1..21: mol_type = other DNA; mol_type = other DNA
ttcgcgaggccgaatataaat

SEQ ID NO: 4338 - DNA, 21 bp, synthetic construct
  source 1..21: mol_type = other DNA; mol_type = other DNA
ttcgcgaaaccgaataataat

SEQ ID NO: 4339 - DNA, 21 bp, synthetic construct
  source 1..21: mol_type = other DNA; mol_type = other DNA
cgccaaatggacacctacggc

SEQ ID NO: 4340 - DNA, 21 bp, synthetic construct
  source 1..21: mol_type = other DNA; mol_type = other DNA
accgcccgcggcgtatcagcc

SEQ ID NO: 4341 - DNA, 21 bp, synthetic construct
  source 1..21: mol_type = other DNA; mol_type = other DNA
tttgtacgcaccatcaacaac

SEQ ID NO: 4342 - DNA, 21 bp, synthetic construct
  source 1..21: mol_type = other DNA; mol_type = other DNA
ttcgcgaggataggggggaat

SEQ ID NO: 4343 - DNA, 21 bp, synthetic construct
  source 1..21: mol_type = other DNA; mol_type = other DNA
ttttcaaagcaaggcgtaaac

SEQ ID NO: 4344 - DNA, 21 bp, synthetic construct
  source 1..21: mol_type = other DNA; mol_type = other DNA
tttgcccgcgccaactttaac

SEQ ID NO: 4345 - DNA, 21 bp, synthetic construct
  source 1..21: mol_type = other DNA; mol_type = other DNA
agggcgaatcactccgggggg

SEQ ID NO: 4346 - DNA, 21 bp, synthetic construct
  source 1..21: mol_type = other DNA; mol_type = other DNA
tttgcccgcggcaacgacaac

SEQ ID NO: 4347 - DNA, 21 bp, synthetic construct
  source 1..21: mol_type = other DNA; mol_type = other DNA
tttgcccgctacggcgccaac

SEQ ID NO: 4348 - DNA, 21 bp, synthetic construct
  source 1..21: mol_type = other DNA; mol_type = other DNA
tacgccaagtggaacggcaac

SEQ ID NO: 4349 - DNA, 21 bp, synthetic construct
  source 1..21: mol_type = other DNA; mol_type = other DNA
tttgcccgcctgaaccataac

SEQ ID NO: 4350 - DNA, 21 bp, synthetic construct
  source 1..21: mol_type = other DNA; mol_type = other DNA
tttgcccgcctgggcctgaac

SEQ ID NO: 4351 - DNA, 21 bp, synthetic construct
  source 1..21: mol_type = other DNA; mol_type = other DNA
tacgccaagtggggcgccaac

SEQ ID NO: 4352 - DNA, 21 bp, synthetic construct
  source 1..21: mol_type = other DNA; mol_type = other DNA
ttctccaggcacgggcagaat

SEQ ID NO: 4353 - DNA, 21 bp, synthetic construct
  source 1..21: mol_type = other DNA; mol_type = other DNA
ttctccaggcacggggcgaat

SEQ ID NO: 4354 - DNA, 21 bp, synthetic construct
  source 1..21: mol_type = other DNA; mol_type = other DNA
tactcacgcgaaaaccgcaac

SEQ ID NO: 4355 - DNA, 21 bp, synthetic construct
  source 1..21: mol_type = other DNA; mol_type = other DNA
ttcgcgaaacagggggcgaat

SEQ ID NO: 4356 - DNA, 21 bp, synthetic construct
  source 1..21: mol_type = other DNA; mol_type = other DNA
ttctccaaaaggggggagaat

SEQ ID NO: 4357 - DNA, 21 bp, synthetic construct
  source 1..21: mol_type = other DNA; mol_type = other DNA
tatgcgagggagggggcgaat

SEQ ID NO: 4358 - DNA, 21 bp, synthetic construct
  source 1..21: mol_type = other DNA; mol_type = other DNA
ttctccaaattcaatgcgaat

SEQ ID NO: 4359 - DNA, 21 bp, synthetic construct
  source 1..21: mol_type = other DNA; mol_type = other DNA
ttcgcgaggaaaggggagaat

SEQ ID NO: 4360 - DNA, 21 bp, synthetic construct
  source 1..21: mol_type = other DNA; mol_type = other DNA
aacgtaccctcatcaatgtac

SEQ ID NO: 4361 - DNA, 21 bp, synthetic construct
  source 1..21: mol_type = other DNA; mol_type = other DNA
ggcctgaagtacaccccccat

SEQ ID NO: 4362 - DNA, 21 bp, synthetic construct
  source 1..21: mol_type = other DNA; mol_type = other DNA
ttctccaggcagggggggaat

SEQ ID NO: 4363 - DNA, 21 bp, synthetic construct
  source 1..21: mol_type = other DNA; mol_type = other DNA
ttttcaaagtacggcctgaac

SEQ ID NO: 4364 - DNA, 21 bp, synthetic construct
  source 1..21: mol_type = other DNA; mol_type = other DNA
ttttcacgccatggcatgaac

SEQ ID NO: 4365 - DNA, 21 bp, synthetic construct
  source 1..21: mol_type = other DNA; mol_type = other DNA
ttcgcgaggttgggggggaat

SEQ ID NO: 4366 - DNA, 21 bp, synthetic construct
  source 1..21: mol_type = other DNA; mol_type = other DNA
ttcgcgaaatatgggtccaat

SEQ ID NO: 4367 - DNA, 21 bp, synthetic construct
  source 1..21: mol_type = other DNA; mol_type = other DNA
tggtccaaattgaatgcgata

SEQ ID NO: 4368 - DNA, 21 bp, synthetic construct
  source 1..21: mol_type = other DNA; mol_type = other DNA
ttttcaaagaacggcatgaac

SEQ ID NO: 4369 - DNA, 21 bp, synthetic construct
  source 1..21: mol_type = other DNA; mol_type = other DNA
ttcgcgaggataaatgcgaat

SEQ ID NO: 4370 - DNA, 21 bp, synthetic construct
  source 1..21: mol_type = other DNA; mol_type = other DNA
tcaggcaacggctacgtacgc

SEQ ID NO: 4371 - DNA, 21 bp, synthetic construct
  source 1..21: mol_type = other DNA; mol_type = other DNA
tttgccaagtacggcatcaac

SEQ ID NO: 4372 - DNA, 21 bp, synthetic construct
  source 1..21: mol_type = other DNA; mol_type = other DNA
ttcgcgaggatgaatatgaat

SEQ ID NO: 4373 - DNA, 21 bp, synthetic construct
  source 1..21: mol_type = other DNA; mol_type = other DNA
ttcgcgaggaaaggggataat

SEQ ID NO: 4374 - DNA, 21 bp, synthetic construct
  source 1..21: mol_type = other DNA; mol_type = other DNA
cgcaactcatcatcaacctac

SEQ ID NO: 4375 - DNA, 21 bp, synthetic construct
  source 1..21: mol_type = other DNA; mol_type = other DNA
tattccaaatatggggggaat

SEQ ID NO: 4376 - DNA, 21 bp, synthetic construct
  source 1..21: mol_type = other DNA; mol_type = other DNA
ttcgcgaggataaattccaat

SEQ ID NO: 4377 - DNA, 21 bp, synthetic construct
  source 1..21: mol_type = other DNA; mol_type = other DNA
ttctccaaatataatacgaat

SEQ ID NO: 4378 - DNA, 21 bp, synthetic construct
  source 1..21: mol_type = other DNA; mol_type = other DNA
tacgccaagtacaactcaaac

SEQ ID NO: 4379 - DNA, 21 bp, synthetic construct
  source 1..21: mol_type = other DNA; mol_type = other DNA
aggagggcggattccgggggg

SEQ ID NO: 4380 - DNA, 21 bp, synthetic construct
  source 1..21: mol_type = other DNA; mol_type = other DNA
ttcgcgaggcagaattccaat

SEQ ID NO: 4381 - DNA, 21 bp, synthetic construct
  source 1..21: mol_type = other DNA; mol_type = other DNA
tactcaaagggcggcggcaac

SEQ ID NO: 4382 - DNA, 21 bp, synthetic construct
  source 1..21: mol_type = other DNA; mol_type = other DNA
tacgcccgcgacggctttaac

SEQ ID NO: 4383 - DNA, 21 bp, synthetic construct
  source 1..21: mol_type = other DNA; mol_type = other DNA
ttcgcgaggccggggaataat

SEQ ID NO: 4384 - DNA, 21 bp, synthetic construct
  source 1..21: mol_type = other DNA; mol_type = other DNA
tacgcccgcatcaaccataac

SEQ ID NO: 4385 - DNA, 21 bp, synthetic construct
  source 1..21: mol_type = other DNA; mol_type = other DNA
tttgcccgcgaaggcaagaac

SEQ ID NO: 4386 - DNA, 21 bp, synthetic construct
  source 1..21: mol_type = other DNA; mol_type = other DNA
ttcaggaatgggacgggggcg

SEQ ID NO: 4387 - DNA, 21 bp, synthetic construct
  source 1..21: mol_type = other DNA; mol_type = other DNA
agggggtccaatttgtatccg

SEQ ID NO: 4388 - DNA, 21 bp, synthetic construct
  source 1..21: mol_type = other DNA; mol_type = other DNA
tatgcgagggtgaatacgaat

SEQ ID NO: 4389 - DNA, 21 bp, synthetic construct
  source 1..21: mol_type = other DNA
gggaatcagacgtccaggaat

SEQ ID NO: 4390 - DNA, 21 bp, synthetic construct
  source 1..21: mol_type = other DNA
ttttcacgcggcaaccaaaac

SEQ ID NO: 4391 - DNA, 21 bp, synthetic construct
  source 1..21: mol_type = other DNA; mol_type = other DNA
tactcaaagcccggcgccaac

SEQ ID NO: 4392 - DNA, 21 bp, synthetic construct
  source 1..21: mol_type = other DNA; mol_type = other DNA
ttttcaaagtacggccaaaac

SEQ ID NO: 4393 - DNA, 21 bp, synthetic construct
  source 1..21: mol_type = other DNA; mol_type = other DNA
tactcaaagcccggcatcaac

SEQ ID NO: 4394 - DNA, 21 bp, synthetic construct
  source 1..21: mol_type = other DNA; mol_type = other DNA
tacgccaagcccaaccataac

SEQ ID NO: 4395 - DNA, 21 bp, synthetic construct
  source 1..21: mol_type = other DNA; mol_type = other DNA
acccgcacccatgacaagctg

SEQ ID NO: 4396 - DNA, 21 bp, synthetic construct
  source 1..21: mol_type = other DNA; mol_type = other DNA
tttgcccgccgcaacgaaaac

SEQ ID NO: 4397 - DNA, 21 bp, synthetic construct
  source 1..21: mol_type = other DNA; mol_type = other DNA
ttctccaggaggaatgagaat

SEQ ID NO: 4398 - DNA, 21 bp, synthetic construct
  source 1..21: mol_type = other DNA; mol_type = other DNA
tattccaggtatgggaataat

SEQ ID NO: 4399 - DNA, 21 bp, synthetic construct
  source 1..21: mol_type = other DNA; mol_type = other DNA
ttcgcgaaagcgaattggaat

SEQ ID NO: 4400 - DNA, 21 bp, synthetic construct
  source 1..21: mol_type = other DNA; mol_type = other DNA
tatgcgaaaataaataaaaat

SEQ ID NO: 4401 - DNA, 21 bp, synthetic construct
  source 1..21: mol_type = other DNA; mol_type = other DNA
tattccaaaatagggaaaaat

SEQ ID NO: 4402 - DNA, 21 bp, synthetic construct
  source 1..21: mol_type = other DNA; mol_type = other DNA
tacgccaagtggggcggcaac

SEQ ID NO: 4403 - DNA, 21 bp, synthetic construct
  source 1..21: mol_type = other DNA; mol_type = other DNA
tattccaaatgggggaataat

SEQ ID NO: 4404 - DNA, 21 bp, synthetic construct
  source 1..21: mol_type = other DNA; mol_type = other DNA
tacgccaagtacaacgccaac

SEQ ID NO: 4405 - DNA, 21 bp, synthetic construct
  source 1..21: mol_type = other DNA; mol_type = other DNA
aagtcaggcctgtcatcatac

SEQ ID NO: 4406 - DNA, 21 bp, synthetic construct
  source 1..21: mol_type = other DNA; mol_type = other DNA
tttgcccgcatgaaccaaaac

SEQ ID NO: 4407 - DNA, 21 bp, synthetic construct
  source 1..21: mol_type = other DNA; mol_type = other DNA
tttgccaagaacggctcaaac

SEQ ID NO: 4408 - DNA, 21 bp, synthetic construct
  source 1..21: mol_type = other DNA; mol_type = other DNA
atccccaccatgaagtacgcc

SEQ ID NO: 4409 - DNA, 21 bp, synthetic construct
  source 1..21: mol_type = other DNA; mol_type = other DNA
tccaggacggggagggaggcg

SEQ ID NO: 4410 - DNA, 21 bp, synthetic construct
  source 1..21: mol_type = other DNA; mol_type = other DNA
ttcgcgaggaataatgtgaat

SEQ ID NO: 4411 - DNA, 21 bp, synthetic construct
  source 1..21: mol_type = other DNA; mol_type = other DNA
tacgcccgccaaaacgccatg

SEQ ID NO: 4412 - DNA, 21 bp, synthetic construct
  source 1..21: mol_type = other DNA; mol_type = other DNA
tattccaaattcaatgggaat

SEQ ID NO: 4413 - DNA, 21 bp, synthetic construct
  source 1..21: mol_type = other DNA; mol_type = other DNA
atctcaggctacggcggcggc

SEQ ID NO: 4414 - DNA, 21 bp, synthetic construct
  source 1..21: mol_type = other DNA; mol_type = other DNA
ttcgcgaaattcaatccgaat

SEQ ID NO: 4415 - DNA, 21 bp, synthetic construct
  source 1..21: mol_type = other DNA; mol_type = other DNA
aaatccgagtatgggccgttc

SEQ ID NO: 4416 - DNA, 21 bp, synthetic construct
  source 1..21: mol_type = other DNA; mol_type = other DNA
tacgcccgcgccaacggcaac

SEQ ID NO: 4417 - DNA, 21 bp, synthetic construct
  source 1..21: mol_type = other DNA; mol_type = other DNA
ctgtcatactcaggccgcgac

SEQ ID NO: 4418 - DNA, 21 bp, synthetic construct
  source 1..21: mol_type = other DNA; mol_type = other DNA
tattccaggccgaatcagaat

SEQ ID NO: 4419 - DNA, 21 bp, synthetic construct
  source 1..21: mol_type = other DNA; mol_type = other DNA
tattattccaatacgaaagtg

SEQ ID NO: 4420 - DNA, 21 bp, synthetic construct
  source 1..21: mol_type = other DNA; mol_type = other DNA
ttcgcgaaatccaattggaat

SEQ ID NO: 4421 - DNA, 21 bp, synthetic construct
  source 1..21: mol_type = other DNA; mol_type = other DNA
tttgcccgctcaaaccccaac

SEQ ID NO: 4422 - DNA, 21 bp, synthetic construct
  source 1..21: mol_type = other DNA; mol_type = other DNA
tactcacgctcaaacatccaa

SEQ ID NO: 4423 - DNA, 21 bp, synthetic construct
  source 1..21: mol_type = other DNA; mol_type = other DNA
gagataaggacggggcacttg

SEQ ID NO: 4424 - DNA, 21 bp, synthetic construct
  source 1..21: mol_type = other DNA; mol_type = other DNA
gaaaagggcatgggccgcctg

SEQ ID NO: 4425 - DNA, 21 bp, synthetic construct
  source 1..21: mol_type = other DNA; mol_type = other DNA
ttgtccagggcggcggggata

SEQ ID NO: 4426 - DNA, 21 bp, synthetic construct
  source 1..21: mol_type = other DNA; mol_type = other DNA
gtagacaagaagtactacgcc

SEQ ID NO: 4427 - DNA, 21 bp, synthetic construct
  source 1..21: mol_type = other DNA; mol_type = other DNA
cgcaacctgcccatgctgaac

SEQ ID NO: 4428 - DNA, 21 bp, synthetic construct
  source 1..21: mol_type = other DNA; mol_type = other DNA
tatgcgaaaccggggcagaat

SEQ ID NO: 4429 - DNA, 21 bp, synthetic construct
  source 1..21: mol_type = other DNA; mol_type = other DNA
ttcgcgagggcgaatacgaat

SEQ ID NO: 4430 - DNA, 21 bp, synthetic construct
  source 1..21: mol_type = other DNA; mol_type = other DNA
ttgaggaatgggttctccccg

SEQ ID NO: 4431 - DNA, 21 bp, synthetic construct
  source 1..21: mol_type = other DNA; mol_type = other DNA
ttcgcgaggaataatacgaat

SEQ ID NO: 4432 - DNA, 21 bp, synthetic construct
  source 1..21: mol_type = other DNA; mol_type = other DNA
ctggccggcacctcacgcttt

SEQ ID NO: 4433 - DNA, 21 bp, synthetic construct
  source 1..21: mol_type = other DNA; mol_type = other DNA
tttgcccgcatcaacgtaaac

SEQ ID NO: 4434 - DNA, 21 bp, synthetic construct
  source 1..21: mol_type = other DNA; mol_type = other DNA
gtgttggggaggggggtgaat

SEQ ID NO: 4435 - DNA, 21 bp, synthetic construct
  source 1..21: mol_type = other DNA; mol_type = other DNA
ctgcgcggcgacggctacggc

SEQ ID NO: 4436 - DNA, 21 bp, synthetic construct
  source 1..21: mol_type = other DNA; mol_type = other DNA
ttcgcgagggcgaatatgaat

SEQ ID NO: 4437 - DNA, 21 bp, synthetic construct
  source 1..21: mol_type = other DNA; mol_type = other DNA
ttctccaggcacggggggaat

SEQ ID NO: 4438 - DNA, 21 bp, synthetic construct
  source 1..21: mol_type = other DNA; mol_type = other DNA
aggggggagtggtcctccccg

SEQ ID NO: 4439 - DNA, 21 bp, synthetic construct
  source 1..21: mol_type = other DNA; mol_type = other DNA
ttctccaaagcgaatgagaat

SEQ ID NO: 4440 - DNA, 21 bp, synthetic construct
  source 1..21: mol_type = other DNA; mol_type = other DNA
caacccatgcgcggcggcggc

SEQ ID NO: 4441 - DNA, 21 bp, synthetic construct
  source 1..21: mol_type = other DNA; mol_type = other DNA
tatgggccgcagccgaaattg

SEQ ID NO: 4442 - DNA, 21 bp, synthetic construct
  source 1..21: mol_type = other DNA; mol_type = other DNA
ttttcacgccatggcaccaac

SEQ ID NO: 4443 - DNA, 21 bp, synthetic construct
  source 1..21: mol_type = other DNA; mol_type = other DNA
tactcaaaggacggctggaac

SEQ ID NO: 4444 - DNA, 21 bp, synthetic construct
  source 1..21: mol_type = other DNA; mol_type = other DNA
tactcaaagtacggctttaac

SEQ ID NO: 4445 - DNA, 21 bp, synthetic construct
  source 1..21: mol_type = other DNA; mol_type = other DNA
tttgccaagtacaactcaaac

SEQ ID NO: 4446 - DNA, 21 bp, synthetic construct
  source 1..21: mol_type = other DNA; mol_type = other DNA
tttgccaagtacaacatgaac

SEQ ID NO: 4447 - DNA, 21 bp, synthetic construct
  source 1..21: mol_type = other DNA; mol_type = other DNA
gatgtgaggttgagggggcag

SEQ ID NO: 4448 - DNA, 21 bp, synthetic construct
  source 1..21: mol_type = other DNA; mol_type = other DNA
ttctccaaatatgggtccaat

SEQ ID NO: 4449 - DNA, 21 bp, synthetic construct
  source 1..21: mol_type = other DNA; mol_type = other DNA
tggttgaaatccacgccgaat

SEQ ID NO: 4450 - DNA, 21 bp, synthetic construct
  source 1..21: mol_type = other DNA; mol_type = other DNA
aatatgttcgggtccgggatg

SEQ ID NO: 4451 - DNA, 21 bp, synthetic construct
  source 1..21: mol_type = other DNA; mol_type = other DNA
aatcacgggtatatgagggat

SEQ ID NO: 4452 - DNA, 21 bp, synthetic construct
  source 1..21: mol_type = other DNA; mol_type = other DNA
tttgccaagtacaacctgaac

SEQ ID NO: 4453 - DNA, 21 bp, synthetic construct
  source 1..21: mol_type = other DNA; mol_type = other DNA
tacgccaagaagaacgacaac

SEQ ID NO: 4454 - DNA, 21 bp, synthetic construct
  source 1..21: mol_type = other DNA; mol_type = other DNA
tatgcgaaatataatcagaat

SEQ ID NO: 4455 - DNA, 21 bp, synthetic construct
  source 1..21: mol_type = other DNA; mol_type = other DNA
ttttcacgcgccaaccccaac

SEQ ID NO: 4456 - DNA, 21 bp, synthetic construct
  source 1..21: mol_type = other DNA; mol_type = other DNA
cgcggctcaaactcaatgccc

SEQ ID NO: 4457 - DNA, 21 bp, synthetic construct
  source 1..21: mol_type = other DNA; mol_type = other DNA
tacaaggtatcatcaacctac

SEQ ID NO: 4458 - DNA, 21 bp, synthetic construct
  source 1..21: mol_type = other DNA; mol_type = other DNA
aactcatcatcaggcccccgc

SEQ ID NO: 4459 - DNA, 21 bp, synthetic construct
  source 1..21: mol_type = other DNA; mol_type = other DNA
tttgcccgcatgaacgtaaac

SEQ ID NO: 4460 - DNA, 21 bp, synthetic construct
  source 1..21: mol_type = other DNA; mol_type = other DNA
ttgtccaggtccgggacggat

SEQ ID NO: 4461 - DNA, 21 bp, synthetic construct
  source 1..21: mol_type = other DNA; mol_type = other DNA
tttgcccgctacaacgccaac

SEQ ID NO: 4462 - DNA, 21 bp, synthetic construct
  source 1..21: mol_type = other DNA; mol_type = other DNA
tatgcgaaattcaatcagaat

SEQ ID NO: 4463 - DNA, 21 bp, synthetic construct
  source 1..21: mol_type = other DNA; mol_type = other DNA
atgaaaaatgggggggcggcg

SEQ ID NO: 4464 - DNA, 21 bp, synthetic construct
  source 1..21: mol_type = other DNA; mol_type = other DNA
atggattatgggtggtccgat

SEQ ID NO: 4465 - DNA, 21 bp, synthetic construct
  source 1..21: mol_type = other DNA; mol_type = other DNA
ttttcacgcggcggcaccaac

SEQ ID NO: 4466 - DNA, 21 bp, synthetic construct
  source 1..21: mol_type = other DNA; mol_type = other DNA
ttcgcgaggcacggggggaat

SEQ ID NO: 4467 - DNA, 21 bp, synthetic construct
  source 1..21: mol_type = other DNA; mol_type = other DNA
ttcgcgaggataggggataat

SEQ ID NO: 4468 - DNA, 21 bp, synthetic construct
  source 1..21: mol_type = other DNA; mol_type = other DNA
tattccgcggggaaaataaat

SEQ ID NO: 4469 - DNA, 21 bp, synthetic construct
  source 1..21: mol_type = other DNA; mol_type = other DNA
tatgcgaggttcaatacgaat

SEQ ID NO: 4470 - DNA, 21 bp, synthetic construct
  source 1..21: mol_type = other DNA; mol_type = other DNA
tacgcccgctacaacaccaac

SEQ ID NO: 4471 - DNA, 21 bp, synthetic construct
  source 1..21: mol_type = other DNA; mol_type = other DNA
ttctccaggccggggcacaat

SEQ ID NO: 4472 - DNA, 21 bp, synthetic construct
  source 1..21: mol_type = other DNA; mol_type = other DNA
tcctatgcggtgtccagggat

SEQ ID NO: 4473 - DNA, 21 bp, synthetic construct
  source 1..21: mol_type = other DNA; mol_type = other DNA
tacgcccgctacaacaacaac

SEQ ID NO: 4474 - DNA, 21 bp, synthetic construct
  source 1..21: mol_type = other DNA; mol_type = other DNA
tattccaggttcaatgggaat

SEQ ID NO: 4475 - DNA, 21 bp, synthetic construct
  source 1..21: mol_type = other DNA; mol_type = other DNA
agggggacgacgggggcgggg

SEQ ID NO: 4476 - DNA, 21 bp, synthetic construct
  source 1..21: mol_type = other DNA; mol_type = other DNA
aggtcccacgcgtccgcgggg

SEQ ID NO: 4477 - DNA, 21 bp, synthetic construct
  source 1..21: mol_type = other DNA; mol_type = other DNA
ttcgcgaaatatggggtgaat

SEQ ID NO: 4478 - DNA, 21 bp, synthetic construct
  source 1..21: mol_type = other DNA; mol_type = other DNA
ggcatgggctcaaccaagtac

SEQ ID NO: 4479 - DNA, 21 bp, synthetic construct
  source 1..21: mol_type = other DNA; mol_type = other DNA
tacgccaagtttaacgtaaac

SEQ ID NO: 4480 - DNA, 21 bp, synthetic construct
  source 1..21: mol_type = other DNA; mol_type = other DNA
tacatgaagtcaggccccaac

SEQ ID NO: 4481 - DNA, 21 bp, synthetic construct
  source 1..21: mol_type = other DNA; mol_type = other DNA
aggaattccgggtccgtgttc

SEQ ID NO: 4482 - DNA, 21 bp, synthetic construct
  source 1..21: mol_type = other DNA; mol_type = other DNA
acggagaatacggtgaggaaa

SEQ ID NO: 4483 - DNA, 21 bp, synthetic construct
  source 1..21: mol_type = other DNA; mol_type = other DNA
tacgcccgctttaacgtaaac

SEQ ID NO: 4484 - DNA, 21 bp, synthetic construct
  source 1..21: mol_type = other DNA; mol_type = other DNA
tatgcgaggccgaatgcgaat

SEQ ID NO: 4485 - DNA, 21 bp, synthetic construct
  source 1..21: mol_type = other DNA; mol_type = other DNA
aactacaaccgcggcgccggc

SEQ ID NO: 4486 - DNA, 21 bp, synthetic construct
  source 1..21: mol_type = other DNA; mol_type = other DNA
tatatgaaacactccccgaat

SEQ ID NO: 4487 - DNA, 21 bp, synthetic construct
  source 1..21: mol_type = other DNA; mol_type = other DNA
ttcgcgaaaataggggcgaat

SEQ ID NO: 4488 - DNA, 21 bp, synthetic construct
  source 1..21: mol_type = other DNA; mol_type = other DNA
ttcgcgaggccgaataataat

SEQ ID NO: 4489 - DNA, 21 bp, synthetic construct
  source 1..21: mol_type = other DNA; mol_type = other DNA
tacgcccgcatcaaccaaaac

SEQ ID NO: 4490 - DNA, 21 bp, synthetic construct
  source 1..21: mol_type = other DNA; mol_type = other DNA
tttgcccgcaacaactcaaac

SEQ ID NO: 4491 - DNA, 21 bp, synthetic construct
  source 1..21: mol_type = other DNA; mol_type = other DNA
tggaagggcggcacctcaaac

SEQ ID NO: 4492 - DNA, 21 bp, synthetic construct
  source 1..21: mol_type = other DNA; mol_type = other DNA
tacgccaagcgcaacgacaac

SEQ ID NO: 4493 - DNA, 21 bp, synthetic construct
  source 1..21: mol_type = other DNA; mol_type = other DNA
ttctccaggatgaatccgaat

SEQ ID NO: 4494 - DNA, 21 bp, synthetic construct
  source 1..21: mol_type = other DNA; mol_type = other DNA
aactcatcagacggcccccgc

SEQ ID NO: 4495 - DNA, 21 bp, synthetic construct
  source 1..21: mol_type = other DNA; mol_type = other DNA
tacgccaagtggggcaacaac

SEQ ID NO: 4496 - DNA, 21 bp, synthetic construct
  source 1..21: mol_type = other DNA; mol_type = other DNA
tttgccaagtttaaccataac

SEQ ID NO: 4497 - DNA, 21 bp, synthetic construct
  source 1..21: mol_type = other DNA; mol_type = other DNA
ttctccaggatgggggggaat

SEQ ID NO: 4498 - DNA, 21 bp, synthetic construct
  source 1..21: mol_type = other DNA; mol_type = other DNA
ttcgcgaggatgaatgcgaat

SEQ ID NO: 4499 - DNA, 21 bp, synthetic construct
  source 1..21: mol_type = other DNA; mol_type = other DNA
tattatgcgaaagtgttgccg

SEQ ID NO: 4500 - DNA, 21 bp, synthetic construct
  source 1..21: mol_type = other DNA; mol_type = other DNA
ttctccaaattcaatcagaat

SEQ ID NO: 4501 - DNA, 21 bp, synthetic construct
  source 1..21: mol_type = other DNA; mol_type = other DNA
tttgcccgcctgaacgccaac

SEQ ID NO: 4502 - DNA, 21 bp, synthetic construct
  source 1..21: mol_type = other DNA; mol_type = other DNA
ttcgcgagggtgggggggaat

SEQ ID NO: 4503 - DNA, 21 bp, synthetic construct
  source 1..21: mol_type = other DNA; mol_type = other DNA
tacgccaagtttaactcaaac

SEQ ID NO: 4504 - DNA, 21 bp, synthetic construct
  source 1..21: mol_type = other DNA; mol_type = other DNA
acccgcggcggcggctcaggc

SEQ ID NO: 4505 - DNA, 21 bp, synthetic construct
  source 1..21: mol_type = other DNA; mol_type = other DNA
ttcgcgaggaataatttcaat

SEQ ID NO: 4506 - DNA, 21 bp, synthetic construct
  source 1..21: mol_type = other DNA; mol_type = other DNA
tccgcgccgccgacgaaattc

SEQ ID NO: 4507 - DNA, 21 bp, synthetic construct
  source 1..21: mol_type = other DNA; mol_type = other DNA
tggaatcagttcacggggaat

SEQ ID NO: 4508 - DNA, 21 bp, synthetic construct
  source 1..21: mol_type = other DNA; mol_type = other DNA
gatgcgaatcacaataggaat

SEQ ID NO: 4509 - DNA, 21 bp, synthetic construct
  source 1..21: mol_type = other DNA; mol_type = other DNA
ttttcacgcctgggcgacaac

SEQ ID NO: 4510 - DNA, 21 bp, synthetic construct
  source 1..21: mol_type = other DNA; mol_type = other DNA
tatacgaaagggacggtgaat

SEQ ID NO: 4511 - DNA, 21 bp, synthetic construct
  source 1..21: mol_type = other DNA; mol_type = other DNA
tacgccaagatgggcaccaac

SEQ ID NO: 4512 - DNA, 21 bp, synthetic construct
  source 1..21: mol_type = other DNA; mol_type = other DNA
ttcgcgaggcacaatgggaat

SEQ ID NO: 4513 - DNA, 21 bp, synthetic construct
  source 1..21: mol_type = other DNA; mol_type = other DNA
ttcgcgagggtgaatcagaat

SEQ ID NO: 4514 - DNA, 21 bp, synthetic construct
  source 1..21: mol_type = other DNA; mol_type = other DNA
acgcacgcgttggtgaatgcg

SEQ ID NO: 4515 - DNA, 21 bp, synthetic construct
  source 1..21: mol_type = other DNA; mol_type = other DNA
tttgccaagtttaacgtaaac

SEQ ID NO: 4516 - DNA, 21 bp, synthetic construct
  source 1..21: mol_type = other DNA; mol_type = other DNA
tacatgaagcgcgaaatctca

SEQ ID NO: 4517 - DNA, 21 bp, synthetic construct
  source 1..21: mol_type = other DNA; mol_type = other DNA
acgccgccgacgttcaaagtg

SEQ ID NO: 4518 - DNA, 21 bp, synthetic construct
  source 1..21: mol_type = other DNA; mol_type = other DNA
tttgccaagtacggcaacaac

SEQ ID NO: 4519 - DNA, 21 bp, synthetic construct
  source 1..21: mol_type = other DNA; mol_type = other DNA
tatacgaggtatgggttggat

SEQ ID NO: 4520 - DNA, 21 bp, synthetic construct
  source 1..21: mol_type = other DNA; mol_type = other DNA
tacgcccgcgtaaacaacaac

SEQ ID NO: 4521 - DNA, 21 bp, synthetic construct
  source 1..21: mol_type = other DNA; mol_type = other DNA
acccccaccggccgccccgcc

SEQ ID NO: 4522 - DNA, 21 bp, synthetic construct
  source 1..21: mol_type = other DNA; mol_type = other DNA
ttctccaaatatgggaataat

SEQ ID NO: 4523 - DNA, 21 bp, synthetic construct
  source 1..21: mol_type = other DNA; mol_type = other DNA
ttcgcgaaacacgggcagaat

SEQ ID NO: 4524 - DNA, 21 bp, synthetic construct
  source 1..21: mol_type = other DNA; mol_type = other DNA
tggagggggaatggggtgaat

SEQ ID NO: 4525 - DNA, 21 bp, synthetic construct
  source 1..21: mol_type = other DNA; mol_type = other DNA
tatgcgaaattcaatcacaat

SEQ ID NO: 4526 - DNA, 21 bp, synthetic construct
  source 1..21: mol_type = other DNA; mol_type = other DNA
ttttcaaagcaaggctggaac

SEQ ID NO: 4527 - DNA, 21 bp, synthetic construct
  source 1..21: mol_type = other DNA; mol_type = other DNA
ttctccaaattcaatgtgaat

SEQ ID NO: 4528 - DNA, 21 bp, synthetic construct
  source 1..21: mol_type = other DNA; mol_type = other DNA
ttttcaaagtacggcggcaac

SEQ ID NO: 4529 - DNA, 21 bp, synthetic construct
  source 1..21: mol_type = other DNA; mol_type = other DNA
tactcaaagtttggccccaac

SEQ ID NO: 4530 - DNA, 21 bp, synthetic construct
  source 1..21: mol_type = other DNA; mol_type = other DNA
ttctccaaatataatttgaat

SEQ ID NO: 4531 - DNA, 21 bp, synthetic construct
  source 1..21: mol_type = other DNA; mol_type = other DNA
ttcgcgaaatataatacgaat

SEQ ID NO: 4532 - DNA, 21 bp, synthetic construct
  source 1..21: mol_type = other DNA; mol_type = other DNA
gggaataggaattattccgag

SEQ ID NO: 4533 - DNA, 21 bp, synthetic construct
  source 1..21: mol_type = other DNA; mol_type = other DNA
ttcgcgaggatgaatccgaat

SEQ ID NO: 4534 - DNA, 21 bp, synthetic construct
  source 1..21: mol_type = other DNA; mol_type = other DNA
tacgccaaggtatcatcaaac

SEQ ID NO: 4535 - DNA, 21 bp, synthetic construct
  source 1..21: mol_type = other DNA; mol_type = other DNA
ttctccaaaggggggtccaat

SEQ ID NO: 4536 - DNA, 21 bp, synthetic construct
  source 1..21: mol_type = other DNA; mol_type = other DNA
tttgccaagtacggcctgaac

SEQ ID NO: 4537 - DNA, 21 bp, synthetic construct
  source 1..21: mol_type = other DNA; mol_type = other DNA
ttcgcgaggatgaatacgaat

SEQ ID NO: 4538 - DNA, 21 bp, synthetic construct
  source 1..21: mol_type = other DNA; mol_type = other DNA
ttcgcgaaagcggggtccaat

SEQ ID NO: 4539 - DNA, 21 bp, synthetic construct
  source 1..21: mol_type = other DNA; mol_type = other DNA
tacgcccgcgtaaactcaaac

SEQ ID NO: 4540 - DNA, 21 bp, synthetic construct
  source 1..21: mol_type = other DNA; mol_type = other DNA
tacgcccgccatggccccaac

SEQ ID NO: 4541 - DNA, 21 bp, synthetic construct
  source 1..21: mol_type = other DNA; mol_type = other DNA
atcgtacatctgaagaactca

SEQ ID NO: 4542 - DNA, 21 bp, synthetic construct
  source 1..21: mol_type = other DNA; mol_type = other DNA
gggagggcgaatcactccggg

SEQ ID NO: 4543 - DNA, 21 bp, synthetic construct
  source 1..21: mol_type = other DNA; mol_type = other DNA
ttttcaaagaacaactttaac

SEQ ID NO: 4544 - DNA, 21 bp, synthetic construct
  source 1..21: mol_type = other DNA; mol_type = other DNA
tatgcgaaatataatgtgaat

SEQ ID NO: 4545 - DNA, 21 bp, synthetic construct
  source 1..21: mol_type = other DNA; mol_type = other DNA
tttgcccgcgtaggcgacaac

SEQ ID NO: 4546 - DNA, 21 bp, synthetic construct
  source 1..21: mol_type = other DNA; mol_type = other DNA
ttctccaggccgaatccgaat

SEQ ID NO: 4547 - DNA, 21 bp, synthetic construct
  source 1..21: mol_type = other DNA; mol_type = other DNA
tttgccaagtacaacgtaaac

SEQ ID NO: 4548 - DNA, 21 bp, synthetic construct
  source 1..21: mol_type = other DNA; mol_type = other DNA
aacaaccgcggcacctcagaa

SEQ ID NO: 4549 - DNA, 21 bp, synthetic construct
  source 1..21: mol_type = other DNA; mol_type = other DNA
catcgctcaggcggctacgac

SEQ ID NO: 4550 - DNA, 21 bp, synthetic construct
  source 1..21: mol_type = other DNA; mol_type = other DNA
ttcgcgaggcacaatgtgaat

SEQ ID NO: 4551 - DNA, 21 bp, synthetic construct
  source 1..21: mol_type = other DNA; mol_type = other DNA
tacgcccgccataacgacaac

SEQ ID NO: 4552 - DNA, 21 bp, synthetic construct
  source 1..21: mol_type = other DNA; mol_type = other DNA
accctgaccggccgcaactca

SEQ ID NO: 4553 - DNA, 21 bp, synthetic construct
  source 1..21: mol_type = other DNA; mol_type = other DNA
ttcgcgaaaatggggtccaat

SEQ ID NO: 4554 - DNA, 21 bp, synthetic construct
  source 1..21: mol_type = other DNA; mol_type = other DNA
ttcgcgagggtgaattccaat

SEQ ID NO: 4555 - DNA, 21 bp, synthetic construct
  source 1..21: mol_type = other DNA; mol_type = other DNA
gtgtataggccggtgacgaat

SEQ ID NO: 4556 - DNA, 21 bp, synthetic construct
  source 1..21: mol_type = other DNA; mol_type = other DNA
ttttcacgcaacaaccaaaac

SEQ ID NO: 4557 - DNA, 21 bp, synthetic construct
  source 1..21: mol_type = other DNA; mol_type = other DNA
atgaagtcatacggcgtaggc

SEQ ID NO: 4558 - DNA, 21 bp, synthetic construct
  source 1..21: mol_type = other DNA; mol_type = other DNA
ttttcaaagtacggcatcaac

SEQ ID NO: 4559 - DNA, 21 bp, synthetic construct
  source 1..21: mol_type = other DNA; mol_type = other DNA
tttgcccgcgccaaccaaaac

SEQ ID NO: 4560 - DNA, 21 bp, synthetic construct
  source 1..21: mol_type = other DNA; mol_type = other DNA
tttgcccgccatggctcaaac

SEQ ID NO: 4561 - DNA, 21 bp, synthetic construct
  source 1..21: mol_type = other DNA; mol_type = other DNA
aggtccaatgggtccgggccg

SEQ ID NO: 4562 - DNA, 21 bp, synthetic construct
  source 1..21: mol_type = other DNA; mol_type = other DNA
aacaactcacgcggctcatac

SEQ ID NO: 4563 - DNA, 21 bp, synthetic construct
  source 1..21: mol_type = other DNA; mol_type = other DNA
tacaccaagctgaccggcaac

SEQ ID NO: 4564 - DNA, 21 bp, synthetic construct
  source 1..21: mol_type = other DNA; mol_type = other DNA
ttcgcgaaacacaatcagaat

SEQ ID NO: 4565 - DNA, 21 bp, synthetic construct
  source 1..21: mol_type = other DNA; mol_type = other DNA
tactcacgctttaactcaaac

SEQ ID NO: 4566 - DNA, 21 bp, synthetic construct
  source 1..21: mol_type = other DNA; mol_type = other DNA
ttctccaaaaaaggggataat

SEQ ID NO: 4567 - DNA, 21 bp, synthetic construct
  source 1..21: mol_type = other DNA; mol_type = other DNA
tatgcgaggccgaatcagaat

SEQ ID NO: 4568 - DNA, 21 bp, synthetic construct
  source 1..21: mol_type = other DNA; mol_type = other DNA
tttgcccgcgtaaactacaac

SEQ ID NO: 4569 - DNA, 21 bp, synthetic construct
  source 1..21: mol_type = other DNA; mol_type = other DNA
cgcaccgaataccaagtaggc

SEQ ID NO: 4570 - DNA, 21 bp, synthetic construct
  source 1..21: mol_type = other DNA; mol_type = other DNA
ttcgcgaggtataataataat

SEQ ID NO: 4571 - DNA, 21 bp, synthetic construct
  source 1..21: mol_type = other DNA; mol_type = other DNA
ttctccaggtataatgggaat

SEQ ID NO: 4572 - DNA, 21 bp, synthetic construct
  source 1..21: mol_type = other DNA; mol_type = other DNA
ttcgcgaggttcggggggaat

SEQ ID NO: 4573 - DNA, 21 bp, synthetic construct
  source 1..21: mol_type = other DNA; mol_type = other DNA
ttttcaaaggaaaactgcaac

SEQ ID NO: 4574 - DNA, 21 bp, synthetic construct
  source 1..21: mol_type = other DNA; mol_type = other DNA
gactcaggctacaaccgcaac

SEQ ID NO: 4575 - DNA, 21 bp, synthetic construct
  source 1..21: mol_type = other DNA; mol_type = other DNA
ttcgcgaaaataggggtgaat

SEQ ID NO: 4576 - DNA, 21 bp, synthetic construct
  source 1..21: mol_type = other DNA; mol_type = other DNA
tatgcgaggccgaatgggaat

SEQ ID NO: 4577 - DNA, 21 bp, synthetic construct
  source 1..21: mol_type = other DNA; mol_type = other DNA
aaccgctcaggcacctcagcc

SEQ ID NO: 4578 - DNA, 21 bp, synthetic construct
  source 1..21: mol_type = other DNA; mol_type = other DNA
tttgccaagtacaacatcaac

SEQ ID NO: 4579 - DNA, 21 bp, synthetic construct
  source 1..21: mol_type = other DNA; mol_type = other DNA
ttcgcgaaattggggatgaat

SEQ ID NO: 4580 - DNA, 21 bp, synthetic construct
  source 1..21: mol_type = other DNA; mol_type = other DNA
tatgcgaggttcaattccaat

SEQ ID NO: 4581 - DNA, 21 bp, synthetic construct
  source 1..21: mol_type = other DNA; mol_type = other DNA
tttgccaagaagggcgaaaac

SEQ ID NO: 4582 - DNA, 21 bp, synthetic construct
  source 1..21: mol_type = other DNA; mol_type = other DNA
tttgccaagctgggcctgaac

SEQ ID NO: 4583 - DNA, 21 bp, synthetic construct
  source 1..21: mol_type = other DNA; mol_type = other DNA
tttgccaaggtaggccccaac

SEQ ID NO: 4584 - DNA, 21 bp, synthetic construct
  source 1..21: mol_type = other DNA; mol_type = other DNA
cgcggctcatcacgcgactca

SEQ ID NO: 4585 - DNA, 21 bp, synthetic construct
  source 1..21: mol_type = other DNA; mol_type = other DNA
tttgcccgcgtaaacgtaaac

SEQ ID NO: 4586 - DNA, 21 bp, synthetic construct
  source 1..21: mol_type = other DNA; mol_type = other DNA
tccgggtatgggatgatgaat

SEQ ID NO: 4587 - DNA, 21 bp, synthetic construct
  source 1..21: mol_type = other DNA; mol_type = other DNA
ttcgcgaaattgggggcgaat

SEQ ID NO: 4588 - DNA, 21 bp, synthetic construct
  source 1..21: mol_type = other DNA; mol_type = other DNA
gaccgcaacacccgcatggta

SEQ ID NO: 4589 - DNA, 21 bp, synthetic construct
  source 1..21: mol_type = other DNA; mol_type = other DNA
gcccaaaaggacaccatgtac

SEQ ID NO: 4590 - DNA, 21 bp, synthetic construct
  source 1..21: mol_type = other DNA; mol_type = other DNA
tattccaggttcaatcagaat

SEQ ID NO: 4591 - DNA, 21 bp, synthetic construct
  source 1..21: mol_type = other DNA; mol_type = other DNA
ttctccaaatatgggacgaat

SEQ ID NO: 4592 - DNA, 21 bp, synthetic construct
  source 1..21: mol_type = other DNA; mol_type = other DNA
tatgcgaggccgaatacgaat

SEQ ID NO: 4593 - DNA, 21 bp, synthetic construct
  source 1..21: mol_type = other DNA; mol_type = other DNA
ttcaaagggacgacgccgtat

SEQ ID NO: 4594 - DNA, 21 bp, synthetic construct
  source 1..21: mol_type = other DNA; mol_type = other DNA
cgctgggccaaggaagtaggc

SEQ ID NO: 4595 - DNA, 21 bp, synthetic construct
  source 1..21: mol_type = other DNA; mol_type = other DNA
tggtaccaaaaccaaaaggac

SEQ ID NO: 4596 - DNA, 21 bp, synthetic construct
  source 1..21: mol_type = other DNA; mol_type = other DNA
accatgctgggcgcccgcaac

SEQ ID NO: 4597 - DNA, 21 bp, synthetic construct
  source 1..21: mol_type = other DNA; mol_type = other DNA
tttgccaagtacggccaaaac

SEQ ID NO: 4598 - DNA, 21 bp, synthetic construct
  source 1..21: mol_type = other DNA; mol_type = other DNA
gataggggggataggttctcc

SEQ ID NO: 4599 - DNA, 21 bp, synthetic construct
  source 1..21: mol_type = other DNA; mol_type = other DNA
tatgcgaaattcaatacgaat

SEQ ID NO: 4600 - DNA, 21 bp, synthetic construct
  source 1..21: mol_type = other DNA; mol_type = other DNA
ttttcaaagggcggcgccaac

SEQ ID NO: 4601 - DNA, 21 bp, synthetic construct
  source 1..21: mol_type = other DNA; mol_type = other DNA
tttgcccgcaagaacgacaac

SEQ ID NO: 4602 - DNA, 21 bp, synthetic construct
  source 1..21: mol_type = other DNA; mol_type = other DNA
ttcgcgagggtgaatttgaat

SEQ ID NO: 4603 - DNA, 21 bp, synthetic construct
  source 1..21: mol_type = other DNA; mol_type = other DNA
gggccgccggcgttcaaagcg

SEQ ID NO: 4604 - DNA, 21 bp, synthetic construct
  source 1..21: mol_type = other DNA; mol_type = other DNA
cagccgaggaggatagaggtg

SEQ ID NO: 4605 - DNA, 21 bp, synthetic construct
  source 1..21: mol_type = other DNA; mol_type = other DNA
aggtccaggaatgagtccggg

SEQ ID NO: 4606 - DNA, 21 bp, synthetic construct
  source 1..21: mol_type = other DNA; mol_type = other DNA
ctgcgcaccgccggcgccggc

SEQ ID NO: 4607 - DNA, 21 bp, synthetic construct
  source 1..21: mol_type = other DNA; mol_type = other DNA
tttgcccgcgtaaacatgaac

SEQ ID NO: 4608 - DNA, 21 bp, synthetic construct
  source 1..21: mol_type = other DNA; mol_type = other DNA
tttgccaagcgcaacgaaaac

SEQ ID NO: 4609 - DNA, 21 bp, synthetic construct
  source 1..21: mol_type = other DNA; mol_type = other DNA
ttcgcgaaacacggggggaat

SEQ ID NO: 4610 - DNA, 21 bp, synthetic construct
  source 1..21: mol_type = other DNA; mol_type = other DNA
tcctggacgggggcgacggcg

SEQ ID NO: 4611 - DNA, 21 bp, synthetic construct
  source 1..21: mol_type = other DNA; mol_type = other DNA
ttctccaaatataatcagaat

SEQ ID NO: 4612 - DNA, 21 bp, synthetic construct
  source 1..21: mol_type = other DNA; mol_type = other DNA
ttcgcgagggtgaatgcgaat

SEQ ID NO: 4613 - DNA, 21 bp, synthetic construct
  source 1..21: mol_type = other DNA; mol_type = other DNA
tacgccaagatcaacaccaac

SEQ ID NO: 4614 - DNA, 21 bp, synthetic construct
  source 1..21: mol_type = other DNA; mol_type = other DNA
tttgccaagaccaacgccaac

SEQ ID NO: 4615 - DNA, 21 bp, synthetic construct
  source 1..21: mol_type = other DNA; mol_type = other DNA
acgaggacggggatagcgtcc

SEQ ID NO: 4616 - DNA, 21 bp, synthetic construct
  source 1..21: mol_type = other DNA; mol_type = other DNA
ttcgcgaaagcgaatccgaat

SEQ ID NO: 4617 - DNA, 21 bp, synthetic construct
  source 1..21: mol_type = other DNA; mol_type = other DNA
tacatgaagcgcggcgtagac

SEQ ID NO: 4618 - DNA, 21 bp, synthetic construct
  source 1..21: mol_type = other DNA; mol_type = other DNA
ttcgcgaggaggaatgataat

SEQ ID NO: 4619 - DNA, 21 bp, synthetic construct
  source 1..21: mol_type = other DNA; mol_type = other DNA
atcaacctgtcaaagctgcaa

SEQ ID NO: 4620 - DNA, 21 bp, synthetic construct
  source 1..21: mol_type = other DNA; mol_type = other DNA
ttctccaggtatgggcagaat

SEQ ID NO: 4621 - DNA, 21 bp, synthetic construct
  source 1..21: mol_type = other DNA; mol_type = other DNA
ctgtggaagaacgccatggac

SEQ ID NO: 4622 - DNA, 21 bp, synthetic construct
  source 1..21: mol_type = other DNA; mol_type = other DNA
ttcgcgaggaataatttgaat

SEQ ID NO: 4623 - DNA, 21 bp, synthetic construct
  source 1..21: mol_type = other DNA; mol_type = other DNA
tttgccaagcataaccataac

SEQ ID NO: 4624 - DNA, 21 bp, synthetic construct
  source 1..21: mol_type = other DNA; mol_type = other DNA
tatgcgaaaaataattccaat

SEQ ID NO: 4625 - DNA, 21 bp, synthetic construct
  source 1..21: mol_type = other DNA; mol_type = other DNA
tggcattcacccaacggcatc

SEQ ID NO: 4626 - DNA, 21 bp, synthetic construct
  source 1..21: mol_type = other DNA; mol_type = other DNA
tatgcgaggccgggggagaat

SEQ ID NO: 4627 - DNA, 21 bp, synthetic construct
  source 1..21: mol_type = other DNA; mol_type = other DNA
gagaaatataaagggcacatg

SEQ ID NO: 4628 - DNA, 21 bp, synthetic construct
  source 1..21: mol_type = other DNA; mol_type = other DNA
tatcagaggaataatatggtg

SEQ ID NO: 4629 - DNA, 21 bp, synthetic construct
  source 1..21: mol_type = other DNA; mol_type = other DNA
ttttcaaagatcggcggcaac

SEQ ID NO: 4630 - DNA, 21 bp, synthetic construct
  source 1..21: mol_type = other DNA; mol_type = other DNA
ttcgcgaggatgaattccaat

SEQ ID NO: 4631 - DNA, 21 bp, synthetic construct
  source 1..21: mol_type = other DNA; mol_type = other DNA
ttcgcgaaaatagggtccaat

SEQ ID NO: 4632 - DNA, 21 bp, synthetic construct
  source 1..21: mol_type = other DNA; mol_type = other DNA
aggtcctccaattccgcgtat

SEQ ID NO: 4633 - DNA, 21 bp, synthetic construct
  source 1..21: mol_type = other DNA; mol_type = other DNA
ttcgcgaaatccaattccaat

SEQ ID NO: 4634 - DNA, 21 bp, synthetic construct
  source 1..21: mol_type = other DNA; mol_type = other DNA
ttttcaaagcaaaaccaaaac

SEQ ID NO: 4635 - DNA, 21 bp, synthetic construct
  source 1..21: mol_type = other DNA; mol_type = other DNA
tacgccaagaactcaaacatc

SEQ ID NO: 4636 - DNA, 21 bp, synthetic construct
  source 1..21: mol_type = other DNA; mol_type = other DNA
cgctcaggcaccatctacccc

SEQ ID NO: 4637 - DNA, 21 bp, synthetic construct
  source 1..21: mol_type = other DNA; mol_type = other DNA
tttgcccgcatcaaccaaaac

SEQ ID NO: 4638 - DNA, 21 bp, synthetic construct
  source 1..21: mol_type = other DNA; mol_type = other DNA
acctcacatggccgctcagcc

SEQ ID NO: 4639 - DNA, 21 bp, synthetic construct
  source 1..21: mol_type = other DNA; mol_type = other DNA
ttcgcgaggtataattccaat

SEQ ID NO: 4640 - DNA, 21 bp, synthetic construct
  source 1..21: mol_type = other DNA; mol_type = other DNA
aataatagggggacgcaggcg

SEQ ID NO: 4641 - DNA, 21 bp, synthetic construct
  source 1..21: mol_type = other DNA; mol_type = other DNA
ttcgcgaggatgggggggaat

SEQ ID NO: 4642 - DNA, 21 bp, synthetic construct
  source 1..21: mol_type = other DNA; mol_type = other DNA
tttgcccgcgccaactcaaac

SEQ ID NO: 4643 - DNA, 21 bp, synthetic construct
  source 1..21: mol_type = other DNA; mol_type = other DNA
ttcgcgagggagaataaaaat

SEQ ID NO: 4644 - DNA, 21 bp, synthetic construct
  source 1..21: mol_type = other DNA; mol_type = other DNA
ttctccaggggggggcagaat

SEQ ID NO: 4645 - DNA, 21 bp, synthetic construct
  source 1..21: mol_type = other DNA
ttctccaggtccaatgggaat

SEQ ID NO: 4646 - DNA, 21 bp, synthetic construct
  source 1..21: mol_type = other DNA; mol_type = other DNA
ttttcacgcggcaacggcaac

SEQ ID NO: 4647 - DNA, 21 bp, synthetic construct
  source 1..21: mol_type = other DNA; mol_type = other DNA
tacgcccgcatgaacggcaac

SEQ ID NO: 4648 - DNA, 21 bp, synthetic construct
  source 1..21: mol_type = other DNA; mol_type = other DNA
gggataataaggtccccggtg

SEQ ID NO: 4649 - DNA, 21 bp, synthetic construct
  source 1..21: mol_type = other DNA; mol_type = other DNA
tggaaagagcacgcgaaaaat

SEQ ID NO: 4650 - DNA, 21 bp, synthetic construct
  source 1..21: mol_type = other DNA; mol_type = other DNA
tattccaaaccgaatacgaat

SEQ ID NO: 4651 - DNA, 21 bp, synthetic construct
  source 1..21: mol_type = other DNA; mol_type = other DNA
tacgccaagcccaacatcaac

SEQ ID NO: 4652 - DNA, 21 bp, synthetic construct
  source 1..21: mol_type = other DNA; mol_type = other DNA
ttcgcgaaattggggtccaat

SEQ ID NO: 4653 - DNA, 21 bp, synthetic construct
  source 1..21: mol_type = other DNA; mol_type = other DNA
ggcaagggcaacaccctgtac

SEQ ID NO: 4654 - DNA, 21 bp, synthetic construct
  source 1..21: mol_type = other DNA; mol_type = other DNA
ttttcacgccccggcaccaac

SEQ ID NO: 4655 - DNA, 21 bp, synthetic construct
  source 1..21: mol_type = other DNA; mol_type = other DNA
tttgccaaggccaacatgaac

SEQ ID NO: 4656 - DNA, 21 bp, synthetic construct
  source 1..21: mol_type = other DNA; mol_type = other DNA
ttctccagggcggggaatgag

SEQ ID NO: 4657 - DNA, 21 bp, synthetic construct
  source 1..21: mol_type = other DNA; mol_type = other DNA
tttaacggccgcggcatcaac

SEQ ID NO: 4658 - DNA, 21 bp, synthetic construct
  source 1..21: mol_type = other DNA; mol_type = other DNA
acgcagtattcctccgggtat

SEQ ID NO: 4659 - DNA, 21 bp, synthetic construct
  source 1..21: mol_type = other DNA; mol_type = other DNA
aatttgaggtccaggggggag

SEQ ID NO: 4660 - DNA, 21 bp, synthetic construct
  source 1..21: mol_type = other DNA; mol_type = other DNA
ctgcatcgcaacatgaccgac

SEQ ID NO: 4661 - DNA, 21 bp, synthetic construct
  source 1..21: mol_type = other DNA; mol_type = other DNA
gggataaggaggcaggtggat

SEQ ID NO: 4662 - DNA, 21 bp, synthetic construct
  source 1..21: mol_type = other DNA; mol_type = other DNA
ttcgcgaaatatggggggaat

SEQ ID NO: 4663 - DNA, 21 bp, synthetic construct
  source 1..21: mol_type = other DNA; mol_type = other DNA
gcggggtccacgtccagggcg

SEQ ID NO: 4664 - DNA, 21 bp, synthetic construct
  source 1..21: mol_type = other DNA; mol_type = other DNA
aaaaggtccgcggggttggat

SEQ ID NO: 4665 - DNA, 21 bp, synthetic construct
  source 1..21: mol_type = other DNA; mol_type = other DNA
ttttcaaagtttaacaccaac

SEQ ID NO: 4666 - DNA, 21 bp, synthetic construct
  source 1..21: mol_type = other DNA; mol_type = other DNA
cacaaaaatgggtccgggcag

SEQ ID NO: 4667 - DNA, 21 bp, synthetic construct
  source 1..21: mol_type = other DNA; mol_type = other DNA
tatgcgaaaataaatccgaat

SEQ ID NO: 4668 - DNA, 21 bp, synthetic construct
  source 1..21: mol_type = other DNA; mol_type = other DNA
aacccccgcaagaacgaaatg

SEQ ID NO: 4669 - DNA, 21 bp, synthetic construct
  source 1..21: mol_type = other DNA; mol_type = other DNA
tttgccaagctgaacatcaac

SEQ ID NO: 4670 - DNA, 21 bp, synthetic construct
  source 1..21: mol_type = other DNA; mol_type = other DNA
caagacaccaacaagtactgg

SEQ ID NO: 4671 - DNA, 21 bp, synthetic construct
  source 1..21: mol_type = other DNA; mol_type = other DNA
cattcaatgaaggtatcatac

SEQ ID NO: 4672 - DNA, 21 bp, synthetic construct
  source 1..21: mol_type = other DNA; mol_type = other DNA
tggtccccggggaggccgaat

SEQ ID NO: 4673 - DNA, 21 bp, synthetic construct
  source 1..21: mol_type = other DNA; mol_type = other DNA
ttttcaaagaagggcgaaaac

SEQ ID NO: 4674 - DNA, 21 bp, synthetic construct
  source 1..21: mol_type = other DNA; mol_type = other DNA
ttctccaaagtgaattccaat

SEQ ID NO: 4675 - DNA, 21 bp, synthetic construct
  source 1..21: mol_type = other DNA; mol_type = other DNA
acctacatcggcaacaaggcc

SEQ ID NO: 4676 - DNA, 21 bp, synthetic construct
  source 1..21: mol_type = other DNA; mol_type = other DNA
gaggggtcctcctggaaaaat

SEQ ID NO: 4677 - DNA, 21 bp, synthetic construct
  source 1..21: mol_type = other DNA; mol_type = other DNA
tacgcccgccataacaacaac

SEQ ID NO: 4678 - DNA, 21 bp, synthetic construct
  source 1..21: mol_type = other DNA; mol_type = other DNA
aactcaggcaagaccatgtac

SEQ ID NO: 4679 - DNA, 21 bp, synthetic construct
  source 1..21: mol_type = other DNA; mol_type = other DNA
ttcgcgaaattgaatcacaat

SEQ ID NO: 4680 - DNA, 21 bp, synthetic construct
  source 1..21: mol_type = other DNA; mol_type = other DNA
tacgccaagtttaacctgaac

SEQ ID NO: 4681 - DNA, 21 bp, synthetic construct
  source 1..21: mol_type = other DNA; mol_type = other DNA
ttttcacgcgaaaaccgcaac

SEQ ID NO: 4682 - DNA, 21 bp, synthetic construct
  source 1..21: mol_type = other DNA; mol_type = other DNA
atggggcacttgtcctcctat

SEQ ID NO: 4683 - DNA, 21 bp, synthetic construct
  source 1..21: mol_type = other DNA; mol_type = other DNA
cgcggcggcatgtacaccggc

SEQ ID NO: 4684 - DNA, 21 bp, synthetic construct
  source 1..21: mol_type = other DNA; mol_type = other DNA
tatgcgaaagtgaatgtgaat

SEQ ID NO: 4685 - DNA, 21 bp, synthetic construct
  source 1..21: mol_type = other DNA; mol_type = other DNA
acccgcgacggccgcgtagcc

SEQ ID NO: 4686 - DNA, 21 bp, synthetic construct
  source 1..21: mol_type = other DNA; mol_type = other DNA
gcgaggcaggtgaaagagttg

SEQ ID NO: 4687 - DNA, 21 bp, synthetic construct
  source 1..21: mol_type = other DNA; mol_type = other DNA
tttgccaagtttaacaacaac

SEQ ID NO: 4688 - DNA, 21 bp, synthetic construct
  source 1..21: mol_type = other DNA; mol_type = other DNA
accaacggccatggccgcaac

SEQ ID NO: 4689 - DNA, 21 bp, synthetic construct
  source 1..21: mol_type = other DNA; mol_type = other DNA
tttgccaagtacaaccaaaac

SEQ ID NO: 4690 - DNA, 21 bp, synthetic construct
  source 1..21: mol_type = other DNA; mol_type = other DNA
tatgcgaggttcggggggaat

SEQ ID NO: 4691 - DNA, 21 bp, synthetic construct
  source 1..21: mol_type = other DNA; mol_type = other DNA
tacgccaagtttggcggcaac

SEQ ID NO: 4692 - DNA, 21 bp, synthetic construct
  source 1..21: mol_type = other DNA; mol_type = other DNA
ttttcaaagatcaacctgaac

SEQ ID NO: 4693 - DNA, 21 bp, synthetic construct
  source 1..21: mol_type = other DNA; mol_type = other DNA
tacgcccgccataacaccaac

SEQ ID NO: 4694 - DNA, 21 bp, synthetic construct
  source 1..21: mol_type = other DNA; mol_type = other DNA
ttcgcgaggccgaatgcgaat

SEQ ID NO: 4695 - DNA, 21 bp, synthetic construct
  source 1..21: mol_type = other DNA; mol_type = other DNA
tatgcgaggcacaatgggaat

SEQ ID NO: 4696 - DNA, 21 bp, synthetic construct
  source 1..21: mol_type = other DNA; mol_type = other DNA
ttcgcgaaagaggggtgtaat

SEQ ID NO: 4697 - DNA, 21 bp, synthetic construct
  source 1..21: mol_type = other DNA; mol_type = other DNA
tttgccaagcataacaacaac

SEQ ID NO: 4698 - DNA, 21 bp, synthetic construct
  source 1..21: mol_type = other DNA; mol_type = other DNA
tttgccaagcataacctgaac

SEQ ID NO: 4699 - DNA, 21 bp, synthetic construct
  source 1..21: mol_type = other DNA; mol_type = other DNA
tacaacaagggcatcccctac

SEQ ID NO: 4700 - DNA, 21 bp, synthetic construct
  source 1..21: mol_type = other DNA; mol_type = other DNA
ttttcaaagtttaacaacaac

SEQ ID NO: 4701 - DNA, 21 bp, synthetic construct
  source 1..21: mol_type = other DNA; mol_type = other DNA
accgacaagtactcaaccttt

SEQ ID NO: 4702 - DNA, 21 bp, synthetic construct
  source 1..21: mol_type = other DNA; mol_type = other DNA
tttgcccgcgtaaacatcaac

SEQ ID NO: 4703 - DNA, 21 bp, synthetic construct
  source 1..21: mol_type = other DNA; mol_type = other DNA
tatatgtccgagacgtggtcc

SEQ ID NO: 4704 - DNA, 21 bp, synthetic construct
  source 1..21: mol_type = other DNA; mol_type = other DNA
tatataaaaaatcagagggat

SEQ ID NO: 4705 - DNA, 21 bp, synthetic construct
  source 1..21: mol_type = other DNA; mol_type = other DNA
aaccaaggcaccgtacgcttt

SEQ ID NO: 4706 - DNA, 21 bp, synthetic construct
  source 1..21: mol_type = other DNA; mol_type = other DNA
tttgcccgccccaacggcaac

SEQ ID NO: 4707 - DNA, 21 bp, synthetic construct
  source 1..21: mol_type = other DNA; mol_type = other DNA
tggcaggcgaaagtgatgtcc

SEQ ID NO: 4708 - DNA, 21 bp, synthetic construct
  source 1..21: mol_type = other DNA; mol_type = other DNA
atccatgccaagcaactgaac

SEQ ID NO: 4709 - DNA, 21 bp, synthetic construct
  source 1..21: mol_type = other DNA; mol_type = other DNA
gtatcagccacccgctttggc

SEQ ID NO: 4710 - DNA, 21 bp, synthetic construct
  source 1..21: mol_type = other DNA; mol_type = other DNA
tatttgaaaaaagatttgtcc

SEQ ID NO: 4711 - DNA, 21 bp, synthetic construct
  source 1..21: mol_type = other DNA; mol_type = other DNA
gtgcacccggagtatcacgcg

SEQ ID NO: 4712 - DNA, 21 bp, synthetic construct
  source 1..21: mol_type = other DNA; mol_type = other DNA
aagggcggcggccatcccttt

SEQ ID NO: 4713 - DNA, 21 bp, synthetic construct
  source 1..21: mol_type = other DNA; mol_type = other DNA
ttcgcgaaacagggggggaat

SEQ ID NO: 4714 - DNA, 21 bp, synthetic construct
  source 1..21: mol_type = other DNA; mol_type = other DNA
ttttcaaagatcaacgccaac

SEQ ID NO: 4715 - DNA, 21 bp, synthetic construct
  source 1..21: mol_type = other DNA; mol_type = other DNA
atgagggggccggtgtccccg

SEQ ID NO: 4716 - DNA, 21 bp, synthetic construct
  source 1..21: mol_type = other DNA; mol_type = other DNA
tttgcccgcatcaaccccaac

SEQ ID NO: 4717 - DNA, 21 bp, synthetic construct
  source 1..21: mol_type = other DNA; mol_type = other DNA
tttgccaagtttaacaccaac

SEQ ID NO: 4718 - DNA, 21 bp, synthetic construct
  source 1..21: mol_type = other DNA; mol_type = other DNA
tccatgaggtccccgaattcc

SEQ ID NO: 4719 - DNA, 21 bp, synthetic construct
  source 1..21: mol_type = other DNA; mol_type = other DNA
tttgcccgcatgggcgaaaac

SEQ ID NO: 4720 - DNA, 21 bp, synthetic construct
  source 1..21: mol_type = other DNA; mol_type = other DNA
tatacgaaaacgtccccgtcc

SEQ ID NO: 4721 - DNA, 21 bp, synthetic construct
  source 1..21: mol_type = other DNA; mol_type = other DNA
ttcttgaaatccaatacgggg

SEQ ID NO: 4722 - DNA, 21 bp, synthetic construct
  source 1..21: mol_type = other DNA
aaggccaacggctcatacgcc

SEQ ID NO: 4723 - DNA, 21 bp, synthetic construct
  source 1..21: mol_type = other DNA
ttcgcgaaagataattataat

SEQ ID NO: 4724 - DNA, 21 bp, synthetic construct
  source 1..21: mol_type = other DNA; mol_type = other DNA
aagggcgaccccccctggggc

SEQ ID NO: 4725 - DNA, 21 bp, synthetic construct
  source 1..21: mol_type = other DNA; mol_type = other DNA
tttgcccgcaacaacatgaac

SEQ ID NO: 4726 - DNA, 21 bp, synthetic construct
  source 1..21: mol_type = other DNA; mol_type = other DNA
tacgccgccaagtcaaacaac

SEQ ID NO: 4727 - DNA, 21 bp, synthetic construct
  source 1..21: mol_type = other DNA; mol_type = other DNA
tataggccggggaaaaatgag

SEQ ID NO: 4728 - DNA, 21 bp, synthetic construct
  source 1..21: mol_type = other DNA; mol_type = other DNA
tttgcccgcatgaacggcaac

SEQ ID NO: 4729 - DNA, 21 bp, synthetic construct
  source 1..21: mol_type = other DNA; mol_type = other DNA
tttgccaaggtaggcggcaac

SEQ ID NO: 4730 - DNA, 21 bp, synthetic construct
  source 1..21: mol_type = other DNA; mol_type = other DNA
tttgccaagatgaacgccaac

SEQ ID NO: 4731 - DNA, 21 bp, synthetic construct
  source 1..21: mol_type = other DNA; mol_type = other DNA
tacgccaagtacaacgacaac

SEQ ID NO: 4732 - DNA, 21 bp, synthetic construct
  source 1..21: mol_type = other DNA; mol_type = other DNA
tttgccaagtttggcggcaac

SEQ ID NO: 4733 - DNA, 21 bp, synthetic construct
  source 1..21: mol_type = other DNA; mol_type = other DNA
ttttcaaagcatggcggcaac

SEQ ID NO: 4734 - DNA, 21 bp, synthetic construct
  source 1..21: mol_type = other DNA; mol_type = other DNA
aagccctaccataacgacatc

SEQ ID NO: 4735 - DNA, 21 bp, synthetic construct
  source 1..21: mol_type = other DNA; mol_type = other DNA
gtacaaggcgtaggcaagaac

SEQ ID NO: 4736 - DNA, 21 bp, synthetic construct
  source 1..21: mol_type = other DNA; mol_type = other DNA
tttgcccgcgtaaactttaac

SEQ ID NO: 4737 - DNA, 21 bp, synthetic construct
  source 1..21: mol_type = other DNA; mol_type = other DNA
ttcgcgaaattgggggggaat

SEQ ID NO: 4738 - DNA, 21 bp, synthetic construct
  source 1..21: mol_type = other DNA; mol_type = other DNA
ttcgcgaaatataatgggaat

SEQ ID NO: 4739 - DNA, 21 bp, synthetic construct
  source 1..21: mol_type = other DNA; mol_type = other DNA
cagaaacagagggagataggg

SEQ ID NO: 4740 - DNA, 21 bp, synthetic construct
  source 1..21: mol_type = other DNA; mol_type = other DNA
ttcgcgaaaatagggacgaat

SEQ ID NO: 4741 - DNA, 21 bp, synthetic construct
  source 1..21: mol_type = other DNA; mol_type = other DNA
tttgccaaggccaacgtaaac

SEQ ID NO: 4742 - DNA, 21 bp, synthetic construct
  source 1..21: mol_type = other DNA; mol_type = other DNA
tttgcccgccaaaaccccaac

SEQ ID NO: 4743 - DNA, 21 bp, synthetic construct
  source 1..21: mol_type = other DNA; mol_type = other DNA
accaaccgcaacgacatccgc

SEQ ID NO: 4744 - DNA, 21 bp, synthetic construct
  source 1..21: mol_type = other DNA; mol_type = other DNA
tataaacacgggccgttggcg

SEQ ID NO: 4745 - DNA, 21 bp, synthetic construct
  source 1..21: mol_type = other DNA; mol_type = other DNA
acctcagtaggcacccgcaac

SEQ ID NO: 4746 - DNA, 21 bp, synthetic construct
  source 1..21: mol_type = other DNA; mol_type = other DNA
tttgcccgcgtaaacaccaac

SEQ ID NO: 4747 - DNA, 21 bp, synthetic construct
  source 1..21: mol_type = other DNA; mol_type = other DNA
gtagccaactacggccgcgac

SEQ ID NO: 4748 - DNA, 21 bp, synthetic construct
  source 1..21: mol_type = other DNA; mol_type = other DNA
cactccaaagggacgagggat

SEQ ID NO: 4749 - DNA, 21 bp, synthetic construct
  source 1..21: mol_type = other DNA; mol_type = other DNA
ttttcacgcgtaaaccccaac

SEQ ID NO: 4750 - DNA, 21 bp, synthetic construct
  source 1..21: mol_type = other DNA; mol_type = other DNA
tttgccaagaccaacgtaaac

SEQ ID NO: 4751 - DNA, 21 bp, synthetic construct
  source 1..21: mol_type = other DNA; mol_type = other DNA
cgcgacgccaccaactacccc

SEQ ID NO: 4752 - DNA, 21 bp, synthetic construct
  source 1..21: mol_type = other DNA; mol_type = other DNA
aaatccgggggggtggggtat

SEQ ID NO: 4753 - DNA, 21 bp, synthetic construct
  source 1..21: mol_type = other DNA; mol_type = other DNA
tttgcccgcatcaacggcaac

SEQ ID NO: 4754 - DNA, 21 bp, synthetic construct
  source 1..21: mol_type = other DNA; mol_type = other DNA
tttgccaagtttaacggcaac

SEQ ID NO: 4755 - DNA, 21 bp, synthetic construct
  source 1..21: mol_type = other DNA; mol_type = other DNA
tggaacaagaacatccattca

SEQ ID NO: 4756 - DNA, 21 bp, synthetic construct
  source 1..21: mol_type = other DNA; mol_type = other DNA
tttgcccgccccggcggcaac

SEQ ID NO: 4757 - DNA, 21 bp, synthetic construct
  source 1..21: mol_type = other DNA; mol_type = other DNA
ttcgcgaaaataaatcacaat

SEQ ID NO: 4758 - DNA, 21 bp, synthetic construct
  source 1..21: mol_type = other DNA; mol_type = other DNA
gggttcacgaattccgtgtat

SEQ ID NO: 4759 - DNA, 21 bp, synthetic construct
  source 1..21: mol_type = other DNA; mol_type = other DNA
ttttcacgccataactcaaac

SEQ ID NO: 4760 - DNA, 21 bp, synthetic construct
  source 1..21: mol_type = other DNA; mol_type = other DNA
tttgccaagtttaacatcaac

SEQ ID NO: 4761 - DNA, 21 bp, synthetic construct
  source 1..21: mol_type = other DNA; mol_type = other DNA
tacaagggctggaccgccgcc

SEQ ID NO: 4762 - DNA, 21 bp, synthetic construct
  source 1..21: mol_type = other DNA; mol_type = other DNA
aggccgtatacggatatggat

SEQ ID NO: 4763 - DNA, 21 bp, synthetic construct
  source 1..21: mol_type = other DNA; mol_type = other DNA
tacgccaagatcaactcaaac

SEQ ID NO: 4764 - DNA, 21 bp, synthetic construct
  source 1..21: mol_type = other DNA; mol_type = other DNA
tttgccaagatcaacatgaac

SEQ ID NO: 4765 - DNA, 21 bp, synthetic construct
  source 1..21: mol_type = other DNA; mol_type = other DNA
ttcgcgaggccggggtccaat

SEQ ID NO: 4766 - DNA, 21 bp, synthetic construct
  source 1..21: mol_type = other DNA; mol_type = other DNA
tacgccaagatcaaccataac

SEQ ID NO: 4767 - DNA, 21 bp, synthetic construct
  source 1..21: mol_type = other DNA; mol_type = other DNA
aacggcgacggcggctcatac

SEQ ID NO: 4768 - DNA, 21 bp, synthetic construct
  source 1..21: mol_type = other DNA; mol_type = other DNA
ttcgcgaggcacaatccgaat

SEQ ID NO: 4769 - DNA, 21 bp, synthetic construct
  source 1..21: mol_type = other DNA; mol_type = other DNA
ttttcaaagggcggccaaaac

SEQ ID NO: 4770 - DNA, 21 bp, synthetic construct
  source 1..21: mol_type = other DNA; mol_type = other DNA
cgcgccggcggcgcctcaggc

SEQ ID NO: 4771 - DNA, 21 bp, synthetic construct
  source 1..21: mol_type = other DNA; mol_type = other DNA
ccgataaaatcccagtccggg

SEQ ID NO: 4772 - DNA, 21 bp, synthetic construct
  source 1..21: mol_type = other DNA; mol_type = other DNA
ttcgcgaggtatggggggaat

SEQ ID NO: 4773 - DNA, 21 bp, synthetic construct
  source 1..21: mol_type = other DNA; mol_type = other DNA
ttttcaaagcccggctttaac

SEQ ID NO: 4774 - DNA, 21 bp, synthetic construct
  source 1..21: mol_type = other DNA; mol_type = other DNA
cactggtccggggcgaatccg

SEQ ID NO: 4775 - DNA, 21 bp, synthetic construct
  source 1..21: mol_type = other DNA; mol_type = other DNA
ttttcaaagtttaacatcaac

SEQ ID NO: 4776 - DNA, 21 bp, synthetic construct
  source 1..21: mol_type = other DNA; mol_type = other DNA
aattgggggaataaatccgat

SEQ ID NO: 4777 - DNA, 21 bp, synthetic construct
  source 1..21: mol_type = other DNA; mol_type = other DNA
tttgcccgctttaactcaaac

SEQ ID NO: 4778 - DNA, 21 bp, synthetic construct
  source 1..21: mol_type = other DNA; mol_type = other DNA
taccaagcctcaatggccaac

SEQ ID NO: 4779 - DNA, 21 bp, synthetic construct
  source 1..21: mol_type = other DNA; mol_type = other DNA
tttgccaagatcaactttaac

SEQ ID NO: 4780 - DNA, 21 bp, synthetic construct
  source 1..21: mol_type = other DNA; mol_type = other DNA
tactcacgccccaacggcaac

SEQ ID NO: 4781 - DNA, 21 bp, synthetic construct
  source 1..21: mol_type = other DNA; mol_type = other DNA
ataaaagggtatgggttggat

SEQ ID NO: 4782 - DNA, 21 bp, synthetic construct
  source 1..21: mol_type = other DNA; mol_type = other DNA
ttttcaaagctgtcacaacaa

SEQ ID NO: 4783 - DNA, 21 bp, synthetic construct
  source 1..21: mol_type = other DNA; mol_type = other DNA
ttcgcgaaaataggggataat

SEQ ID NO: 4784 - DNA, 21 bp, synthetic construct
  source 1..21: mol_type = other DNA; mol_type = other DNA
ttcgcgaggcacaatttcaat

SEQ ID NO: 4785 - DNA, 21 bp, synthetic construct
  source 1..21: mol_type = other DNA; mol_type = other DNA
ttctccaaaataaattccaat

SEQ ID NO: 4786 - DNA, 21 bp, synthetic construct
  source 1..21: mol_type = other DNA; mol_type = other DNA
ttcgcgaaaccggggataaat

SEQ ID NO: 4787 - DNA, 21 bp, synthetic construct
  source 1..21: mol_type = other DNA; mol_type = other DNA
tattccaaatggaatccgaat

SEQ ID NO: 4788 - DNA, 21 bp, synthetic construct
  source 1..21: mol_type = other DNA; mol_type = other DNA
ttttcaaagtggaaccaaaac

SEQ ID NO: 4789 - DNA, 21 bp, synthetic construct
  source 1..21: mol_type = other DNA; mol_type = other DNA
tggacgccgtccgcgtattcc

SEQ ID NO: 4790 - DNA, 21 bp, synthetic construct
  source 1..21: mol_type = other DNA; mol_type = other DNA
gacccccgctcacgcgcctca

SEQ ID NO: 4791 - DNA, 21 bp, synthetic construct
  source 1..21: mol_type = other DNA; mol_type = other DNA
ttcgcgaggaaaaatgagaat

SEQ ID NO: 4792 - DNA, 21 bp, synthetic construct
  source 1..21: mol_type = other DNA; mol_type = other DNA
tacatggtacgcaccggcggc

SEQ ID NO: 4793 - DNA, 21 bp, synthetic construct
  source 1..21: mol_type = other DNA; mol_type = other DNA
tttgccaagtttaaccaaaac

SEQ ID NO: 4794 - DNA, 21 bp, synthetic construct
  source 1..21: mol_type = other DNA; mol_type = other DNA
ggctacaagggcaccatgccc

SEQ ID NO: 4795 - DNA, 21 bp, synthetic construct
  source 1..21: mol_type = other DNA; mol_type = other DNA
tttgtaggcggccccatgacc

SEQ ID NO: 4796 - DNA, 21 bp, synthetic construct
  source 1..21: mol_type = other DNA; mol_type = other DNA
caatcactgaagggcgccggc

SEQ ID NO: 4797 - DNA, 21 bp, synthetic construct
  source 1..21: mol_type = other DNA; mol_type = other DNA
ctgctgcgcgaaggcgactgg

SEQ ID NO: 4798 - DNA, 21 bp, synthetic construct
  source 1..21: mol_type = other DNA; mol_type = other DNA
ttcgcgaggccgaattccaat

SEQ ID NO: 4799 - DNA, 21 bp, synthetic construct
  source 1..21: mol_type = other DNA; mol_type = other DNA
tacaagtcagcctcacccaac

SEQ ID NO: 4800 - DNA, 21 bp, synthetic construct
  source 1..21: mol_type = other DNA; mol_type = other DNA
ttttcaaagcccaacgccaac

SEQ ID NO: 4801 - DNA, 21 bp, synthetic construct
  source 1..21: mol_type = other DNA; mol_type = other DNA
gaacatggccgcggccatgac

SEQ ID NO: 4802 - DNA, 21 bp, synthetic construct
  source 1..21: mol_type = other DNA; mol_type = other DNA
ggccaagtacgcacccccacc

SEQ ID NO: 4803 - DNA, 21 bp, synthetic construct
  source 1..21: mol_type = other DNA; mol_type = other DNA
tatatagcggggccggtgaaa

SEQ ID NO: 4804 - DNA, 21 bp, synthetic construct
  source 1..21: mol_type = other DNA; mol_type = other DNA
tggcatacctcaatccccaac

SEQ ID NO: 4805 - DNA, 21 bp, synthetic construct
  source 1..21: mol_type = other DNA; mol_type = other DNA
gataaagggaaagggatgtat

SEQ ID NO: 4806 - DNA, 21 bp, synthetic construct
  source 1..21: mol_type = other DNA; mol_type = other DNA
catcgctcatggggcgacgcc

SEQ ID NO: 4807 - DNA, 21 bp, synthetic construct
  source 1..21: mol_type = other DNA; mol_type = other DNA
ttcgcgaaaaataatttgaat

SEQ ID NO: 4808 - DNA, 21 bp, synthetic construct
  source 1..21: mol_type = other DNA; mol_type = other DNA
ttctccaggaaaggggataat

SEQ ID NO: 4809 - DNA, 21 bp, synthetic construct
  source 1..21: mol_type = other DNA; mol_type = other DNA
tggcgcaacggcgaagccaac

SEQ ID NO: 4810 - DNA, 21 bp, synthetic construct
  source 1..21: mol_type = other DNA; mol_type = other DNA
cacgggcacgggacgtatacg

SEQ ID NO: 4811 - DNA, 21 bp, synthetic construct
  source 1..21: mol_type = other DNA; mol_type = other DNA
aattccaaagtggggagggat

SEQ ID NO: 4812 - DNA, 21 bp, synthetic construct
  source 1..21: mol_type = other DNA; mol_type = other DNA
tttgccaagcataacgccaac

SEQ ID NO: 4813 - DNA, 21 bp, synthetic construct
  source 1..21: mol_type = other DNA; mol_type = other DNA
tttgcccgccccaacaccaac

SEQ ID NO: 4814 - DNA, 21 bp, synthetic construct
  source 1..21: mol_type = other DNA; mol_type = other DNA
cgctcaaccggcggcgccggc

SEQ ID NO: 4815 - DNA, 21 bp, synthetic construct
  source 1..21: mol_type = other DNA; mol_type = other DNA
tatgggtccgggacgcagtat

SEQ ID NO: 4816 - DNA, 21 bp, synthetic construct
  source 1..21: mol_type = other DNA; mol_type = other DNA
caggggtccacgaattcctat

SEQ ID NO: 4817 - DNA, 21 bp, synthetic construct
  source 1..21: mol_type = other DNA; mol_type = other DNA
tacaacaacacctcaatgcgc

SEQ ID NO: 4818 - DNA, 21 bp, synthetic construct
  source 1..21: mol_type = other DNA; mol_type = other DNA
aataattatgggtccccgggg

SEQ ID NO: 4819 - DNA, 21 bp, synthetic construct
  source 1..21: mol_type = other DNA; mol_type = other DNA
ttcgcgaaaaataatgggaat

SEQ ID NO: 4820 - DNA, 21 bp, synthetic construct
  source 1..21: mol_type = other DNA; mol_type = other DNA
tacgtatcataccaagtaaac

SEQ ID NO: 4821 - DNA, 21 bp, synthetic construct
  source 1..21: mol_type = other DNA; mol_type = other DNA
gagatgaaacacgggcacatg

SEQ ID NO: 4822 - DNA, 21 bp, synthetic construct
  source 1..21: mol_type = other DNA; mol_type = other DNA
gtgagggcgaatcacacgaat

SEQ ID NO: 4823 - DNA, 21 bp, synthetic construct
  source 1..21: mol_type = other DNA; mol_type = other DNA
tataggccgggggcgcacgcg

SEQ ID NO: 4824 - DNA, 21 bp, synthetic construct
  source 1..21: mol_type = other DNA; mol_type = other DNA
ttcgcgaggaataatgataat

SEQ ID NO: 4825 - DNA, 21 bp, synthetic construct
  source 1..21: mol_type = other DNA; mol_type = other DNA
taccaacgcgacgtaatgcaa

SEQ ID NO: 4826 - DNA, 21 bp, synthetic construct
  source 1..21: mol_type = other DNA; mol_type = other DNA
tggcgctcagccgccgtaccc

SEQ ID NO: 4827 - DNA, 21 bp, synthetic construct
  source 1..21: mol_type = other DNA; mol_type = other DNA
tttgccaagtacggcgacaac

SEQ ID NO: 4828 - DNA, 21 bp, synthetic construct
  source 1..21: mol_type = other DNA; mol_type = other DNA
tatgcgagggagaatttcaat

SEQ ID NO: 4829 - DNA, 21 bp, synthetic construct
  source 1..21: mol_type = other DNA; mol_type = other DNA
tgtaaaaatgtgacggcggag

SEQ ID NO: 4830 - DNA, 21 bp, synthetic construct
  source 1..21: mol_type = other DNA; mol_type = other DNA
ctgaagtcacgcatcatcgaa

SEQ ID NO: 4831 - DNA, 21 bp, synthetic construct
  source 1..21: mol_type = other DNA; mol_type = other DNA
ttctccaaattcaatgataat

SEQ ID NO: 4832 - DNA, 21 bp, synthetic construct
  source 1..21: mol_type = other DNA; mol_type = other DNA
atgcaaccctacggctcaggc

SEQ ID NO: 4833 - DNA, 21 bp, synthetic construct
  source 1..21: mol_type = other DNA; mol_type = other DNA
ttcgcgaggccgaatttgaat

SEQ ID NO: 4834 - DNA, 21 bp, synthetic construct
  source 1..21: mol_type = other DNA; mol_type = other DNA
tactcacgccccggcgacaac

SEQ ID NO: 4835 - DNA, 21 bp, synthetic construct
  source 1..21: mol_type = other DNA; mol_type = other DNA
ttctccaaaccggggaataat

SEQ ID NO: 4836 - DNA, 21 bp, synthetic construct
  source 1..21: mol_type = other DNA; mol_type = other DNA
tataataaaacgggggcgaat

SEQ ID NO: 4837 - DNA, 21 bp, synthetic construct
  source 1..21: mol_type = other DNA; mol_type = other DNA
ttcgcgaaatatggggagaat

SEQ ID NO: 4838 - DNA, 21 bp, synthetic construct
  source 1..21: mol_type = other DNA; mol_type = other DNA
tttgccaagcataactttaac

SEQ ID NO: 4839 - DNA, 21 bp, synthetic construct
  source 1..21: mol_type = other DNA; mol_type = other DNA
tttgcccgccccggcatcaac

SEQ ID NO: 4840 - DNA, 21 bp, synthetic construct
  source 1..21: mol_type = other DNA; mol_type = other DNA
ttctccagggggggggagaat

SEQ ID NO: 4841 - DNA, 21 bp, synthetic construct
  source 1..21: mol_type = other DNA; mol_type = other DNA
ccggatataaataaaaggtcc

SEQ ID NO: 4842 - DNA, 21 bp, synthetic construct
  source 1..21: mol_type = other DNA; mol_type = other DNA
aatgcgaaatattccggggag

SEQ ID NO: 4843 - DNA, 21 bp, synthetic construct
  source 1..21: mol_type = other DNA; mol_type = other DNA
ttttcacgccccaacgtaaac

SEQ ID NO: 4844 - DNA, 21 bp, synthetic construct
  source 1..21: mol_type = other DNA; mol_type = other DNA
tatgcgaaagtgaatttgaat

SEQ ID NO: 4845 - DNA, 21 bp, synthetic construct
  source 1..21: mol_type = other DNA; mol_type = other DNA
cgcggcgacgtacaagcctgg

SEQ ID NO: 4846 - DNA, 21 bp, synthetic construct
  source 1..21: mol_type = other DNA; mol_type = other DNA
tttgccaagatcaacaacaac

SEQ ID NO: 4847 - DNA, 21 bp, synthetic construct
  source 1..21: mol_type = other DNA; mol_type = other DNA
ttcgcgaaaaatggggagaat

SEQ ID NO: 4848 - DNA, 21 bp, synthetic construct
  source 1..21: mol_type = other DNA; mol_type = other DNA
tactcaaagaccaacggcaac

SEQ ID NO: 4849 - DNA, 21 bp, synthetic construct
  source 1..21: mol_type = other DNA; mol_type = other DNA
ctgaacatcaactttcatggc

SEQ ID NO: 4850 - DNA, 21 bp, synthetic construct
  source 1..21: mol_type = other DNA; mol_type = other DNA
tcctatcacgatatgagggat

SEQ ID NO: 4851 - DNA, 21 bp, synthetic construct
  source 1..21: mol_type = other DNA; mol_type = other DNA
ttttcaaagcccaacgtaaac

SEQ ID NO: 4852 - DNA, 21 bp, synthetic construct
  source 1..21: mol_type = other DNA; mol_type = other DNA
tttgccaagaacaacatgaac

SEQ ID NO: 4853 - DNA, 21 bp, synthetic construct
  source 1..21: mol_type = other DNA; mol_type = other DNA
tttgccaagtggaacgaaaac

SEQ ID NO: 4854 - DNA, 21 bp, synthetic construct
  source 1..21: mol_type = other DNA; mol_type = other DNA
aacgtaaagggcaccacctac

SEQ ID NO: 4855 - DNA, 21 bp, synthetic construct
  source 1..21: mol_type = other DNA; mol_type = other DNA
ttgacgtatggggataggtcc

SEQ ID NO: 4856 - DNA, 21 bp, synthetic construct
  source 1..21: mol_type = other DNA; mol_type = other DNA
aaatcctcctccatgggggtg

SEQ ID NO: 4857 - DNA, 21 bp, synthetic construct
  source 1..21: mol_type = other DNA; mol_type = other DNA
tcagtatacggcggcgccggc

SEQ ID NO: 4858 - DNA, 21 bp, synthetic construct
  source 1..21: mol_type = other DNA; mol_type = other DNA
ttcgcgaaagtgaatccgaat

SEQ ID NO: 4859 - DNA, 21 bp, synthetic construct
  source 1..21: mol_type = other DNA; mol_type = other DNA
ttttcacgcgacaacgccaac

SEQ ID NO: 4860 - DNA, 21 bp, synthetic construct
  source 1..21: mol_type = other DNA; mol_type = other DNA
ttcgcgaggccggggtataat

SEQ ID NO: 4861 - DNA, 21 bp, synthetic construct
  source 1..21: mol_type = other DNA; mol_type = other DNA
tatgcgagggagaatccgaat

SEQ ID NO: 4862 - DNA, 21 bp, synthetic construct
  source 1..21: mol_type = other DNA; mol_type = other DNA
aacatgaacaactcatactca

SEQ ID NO: 4863 - DNA, 21 bp, synthetic construct
  source 1..21: mol_type = other DNA; mol_type = other DNA
acctcatacggccaaggctca

SEQ ID NO: 4864 - DNA, 21 bp, synthetic construct
  source 1..21: mol_type = other DNA; mol_type = other DNA
tttgcccgccatggcaccaac

SEQ ID NO: 4865 - DNA, 21 bp, synthetic construct
  source 1..21: mol_type = other DNA; mol_type = other DNA
ttctccaaaccgaattggaat

SEQ ID NO: 4866 - DNA, 21 bp, synthetic construct
  source 1..21: mol_type = other DNA; mol_type = other DNA
tcacgcgacaaccaacattgg

SEQ ID NO: 4867 - DNA, 21 bp, synthetic construct
  source 1..21: mol_type = other DNA; mol_type = other DNA
tattccaatttctcccactcc

SEQ ID NO: 4868 - DNA, 21 bp, synthetic construct
  source 1..21: mol_type = other DNA; mol_type = other DNA
accaagtcaggcgacaaggcc

SEQ ID NO: 4869 - DNA, 21 bp, synthetic construct
  source 1..21: mol_type = other DNA; mol_type = other DNA
cgcgacggccgcgactcagta

SEQ ID NO: 4870 - DNA, 21 bp, synthetic construct
  source 1..21: mol_type = other DNA; mol_type = other DNA
cgctcacatgccggctcagac

SEQ ID NO: 4871 - DNA, 21 bp, synthetic construct
  source 1..21: mol_type = other DNA; mol_type = other DNA
tacctgctgaactcacattca

SEQ ID NO: 4872 - DNA, 21 bp, synthetic construct
  source 1..21: mol_type = other DNA; mol_type = other DNA
aatgtgttgggggtgccggtg

SEQ ID NO: 4873 - DNA, 21 bp, synthetic construct
  source 1..21: mol_type = other DNA; mol_type = other DNA
tttgccaagatgaaccaaaac

SEQ ID NO: 4874 - DNA, 21 bp, synthetic construct
  source 1..21: mol_type = other DNA; mol_type = other DNA
tacgccaagaacaacgacaac

SEQ ID NO: 4875 - DNA, 21 bp, synthetic construct
  source 1..21: mol_type = other DNA; mol_type = other DNA
tttgccaagcataacaccaac

SEQ ID NO: 4876 - DNA, 21 bp, synthetic construct
  source 1..21: mol_type = other DNA; mol_type = other DNA
ttctccaggttcaatgggaat

SEQ ID NO: 4877 - DNA, 21 bp, synthetic construct
  source 1..21: mol_type = other DNA; mol_type = other DNA
tacgccaagatcaaccaaaac

SEQ ID NO: 4878 - DNA, 21 bp, synthetic construct
  source 1..21: mol_type = other DNA; mol_type = other DNA
tttgccaagaccaacgacaac

SEQ ID NO: 4879 - DNA, 21 bp, synthetic construct
  source 1..21: mol_type = other DNA; mol_type = other DNA
catggcaagacctcacgcgaa

SEQ ID NO: 4880 - DNA, 21 bp, synthetic construct
  source 1..21: mol_type = other DNA; mol_type = other DNA
tactcaaagcccaactcaaac

SEQ ID NO: 4881 - DNA, 21 bp, synthetic construct
  source 1..21: mol_type = other DNA; mol_type = other DNA
acccccatgtcaacccatttt

SEQ ID NO: 4882 - DNA, 21 bp, synthetic construct
  source 1..21: mol_type = other DNA; mol_type = other DNA
ctgtcacaaaccgtatcatac

SEQ ID NO: 4883 - DNA, 21 bp, synthetic construct
  source 1..21: mol_type = other DNA; mol_type = other DNA
cgccgcgccgaaccccaatca

SEQ ID NO: 4884 - DNA, 21 bp, synthetic construct
  source 1..21: mol_type = other DNA; mol_type = other DNA
tactcaaagcccggctggaac

SEQ ID NO: 4885 - DNA, 21 bp, synthetic construct
  source 1..21: mol_type = other DNA; mol_type = other DNA
tacgccaagtttggcaacaac

SEQ ID NO: 4886 - DNA, 21 bp, synthetic construct
  source 1..21: mol_type = other DNA; mol_type = other DNA
ttcgcgaaaccggggttgaat

SEQ ID NO: 4887 - DNA, 21 bp, synthetic construct
  source 1..21: mol_type = other DNA; mol_type = other DNA
tccaaaacgacgacgcagtat

SEQ ID NO: 4888 - DNA, 21 bp, synthetic construct
  source 1..21: mol_type = other DNA; mol_type = other DNA
atgaaaaatgtgtccaatttc

SEQ ID NO: 4889 - DNA, 21 bp, synthetic construct
  source 1..21: mol_type = other DNA; mol_type = other DNA
tatcacaggtcccacgagttg

SEQ ID NO: 4890 - DNA, 21 bp, synthetic construct
  source 1..21: mol_type = other DNA; mol_type = other DNA
cgcatcaccggctcatcaacc

SEQ ID NO: 4891 - DNA, 21 bp, synthetic construct
  source 1..21: mol_type = other DNA; mol_type = other DNA
ttttcacgccccggctcaaac

SEQ ID NO: 4892 - DNA, 21 bp, synthetic construct
  source 1..21: mol_type = other DNA; mol_type = other DNA
ctggcctcaaacggcgtaaac

SEQ ID NO: 4893 - DNA, 21 bp, synthetic construct
  source 1..21: mol_type = other DNA; mol_type = other DNA
tttgccaagatcaaccaaaac

SEQ ID NO: 4894 - DNA, 21 bp, synthetic construct
  source 1..21: mol_type = other DNA; mol_type = other DNA
ttcgcgagggaggggacgaat

SEQ ID NO: 4895 - DNA, 21 bp, synthetic construct
  source 1..21: mol_type = other DNA; mol_type = other DNA
gtgatgacgaggaatgagtgg

SEQ ID NO: 4896 - DNA, 21 bp, synthetic construct
  source 1..21: mol_type = other DNA; mol_type = other DNA
tttgccaaggtaaacatcaac

SEQ ID NO: 4897 - DNA, 21 bp, synthetic construct
  source 1..21: mol_type = other DNA; mol_type = other DNA
tttgccaagaagaacgacaac

SEQ ID NO: 4898 - DNA, 21 bp, synthetic construct
  source 1..21: mol_type = other DNA; mol_type = other DNA
ttctccaggatggggacgaat

SEQ ID NO: 4899 - DNA, 21 bp, synthetic construct
  source 1..21: mol_type = other DNA; mol_type = other DNA
tacgccaagtttggcatcaac

SEQ ID NO: 4900 - DNA, 21 bp, synthetic construct
  source 1..21: mol_type = other DNA; mol_type = other DNA
aacaccgactacggctacgcc

SEQ ID NO: 4901 - DNA, 21 bp, synthetic construct
  source 1..21: mol_type = other DNA; mol_type = other DNA
aagcatgccaacatcatcggc

SEQ ID NO: 4902 - DNA, 21 bp, synthetic construct
  source 1..21: mol_type = other DNA; mol_type = other DNA
aacacccgcatgaccggcgcc

SEQ ID NO: 4903 - DNA, 21 bp, synthetic construct
  source 1..21: mol_type = other DNA; mol_type = other DNA
tttgccaagaagaacgaaaac

SEQ ID NO: 4904 - DNA, 21 bp, synthetic construct
  source 1..21: mol_type = other DNA; mol_type = other DNA
cactccaggaattatacggat

SEQ ID NO: 4905 - DNA, 21 bp, synthetic construct
  source 1..21: mol_type = other DNA; mol_type = other DNA
ttcgcgaaacacgggacgaat

SEQ ID NO: 4906 - DNA, 21 bp, synthetic construct
  source 1..21: mol_type = other DNA; mol_type = other DNA
tttgccaagatcaacgccaac

SEQ ID NO: 4907 - DNA, 21 bp, synthetic construct
  source 1..21: mol_type = other DNA; mol_type = other DNA
tacgccaaggacggcctgaac

SEQ ID NO: 4908 - DNA, 21 bp, synthetic construct
  source 1..21: mol_type = other DNA; mol_type = other DNA
tttgccaagatcaaccccaac

SEQ ID NO: 4909 - DNA, 21 bp, synthetic construct
  source 1..21: mol_type = other DNA; mol_type = other DNA
ggccgcatggaaaagtcaacc

SEQ ID NO: 4910 - DNA, 21 bp, synthetic construct
  source 1..21: mol_type = other DNA; mol_type = other DNA
tatgcgaaagatgggacgaat

SEQ ID NO: 4911 - DNA, 21 bp, synthetic construct
  source 1..21: mol_type = other DNA; mol_type = other DNA
tttgccaagcccggcggcaac

SEQ ID NO: 4912 - DNA, 21 bp, synthetic construct
  source 1..21: mol_type = other DNA; mol_type = other DNA
tggaccaagtcaaacaccgcc

SEQ ID NO: 4913 - DNA, 21 bp, synthetic construct
  source 1..21: mol_type = other DNA; mol_type = other DNA
ataaggaatataacgggggag

SEQ ID NO: 4914 - DNA, 21 bp, synthetic construct
  source 1..21: mol_type = other DNA; mol_type = other DNA
tggacgaaagcgaatgatcac

SEQ ID NO: 4915 - DNA, 21 bp, synthetic construct
  source 1..21: mol_type = other DNA
tatgcgaaagataatccgaat

SEQ ID NO: 4916 - DNA, 21 bp, synthetic construct
  source 1..21: mol_type = other DNA; mol_type = other DNA
tttgcccgcgacaaccataac

SEQ ID NO: 4917 - DNA, 21 bp, synthetic construct
  source 1..21: mol_type = other DNA; mol_type = other DNA
tcacccaccggccgcgccgcc

SEQ ID NO: 4918 - DNA, 21 bp, synthetic construct
  source 1..21: mol_type = other DNA; mol_type = other DNA
ggggtgtccaatatgatggtg

SEQ ID NO: 4919 - DNA, 21 bp, synthetic construct
  source 1..21: mol_type = other DNA; mol_type = other DNA
ggcgacaacaagcccaactgg

SEQ ID NO: 4920 - DNA, 21 bp, synthetic construct
  source 1..21: mol_type = other DNA; mol_type = other DNA
atcatggtacgcgacaccaag

SEQ ID NO: 4921 - DNA, 21 bp, synthetic construct
  source 1..21: mol_type = other DNA; mol_type = other DNA
ttggagtcctccagggggtat

SEQ ID NO: 4922 - DNA, 21 bp, synthetic construct
  source 1..21: mol_type = other DNA; mol_type = other DNA
ttctccaaaccggggcagaat

SEQ ID NO: 4923 - DNA, 21 bp, synthetic construct
  source 1..21: mol_type = other DNA; mol_type = other DNA
tccagggggttgaatccgtcc

SEQ ID NO: 4924 - DNA, 21 bp, synthetic construct
  source 1..21: mol_type = other DNA; mol_type = other DNA
atcgccggcctgaacaaggcc

SEQ ID NO: 4925 - DNA, 21 bp, synthetic construct
  source 1..21: mol_type = other DNA; mol_type = other DNA
aaggtaaacggcggctcaggc

SEQ ID NO: 4926 - DNA, 21 bp, synthetic construct
  source 1..21: mol_type = other DNA; mol_type = other DNA
gtatcaaacaacatccgcggc

SEQ ID NO: 4927 - DNA, 21 bp, synthetic construct
  source 1..21: mol_type = other DNA; mol_type = other DNA
tcatcaaagggcaccaacgcc

SEQ ID NO: 4928 - DNA, 21 bp, synthetic construct
  source 1..21: mol_type = other DNA; mol_type = other DNA
ttttcacgcgacggcgtaaac

SEQ ID NO: 4929 - DNA, 21 bp, synthetic construct
  source 1..21: mol_type = other DNA; mol_type = other DNA
ttttcaaagcccaacatgaac

SEQ ID NO: 4930 - DNA, 21 bp, synthetic construct
  source 1..21: mol_type = other DNA; mol_type = other DNA
ttcgcgaaagataatataaat

SEQ ID NO: 4931 - DNA, 21 bp, synthetic construct
  source 1..21: mol_type = other DNA; mol_type = other DNA
accaagcatggcgccgacgta

SEQ ID NO: 4932 - DNA, 21 bp, synthetic construct
  source 1..21: mol_type = other DNA; mol_type = other DNA
gatcagaataaaaatacgtgg

SEQ ID NO: 4933 - DNA, 21 bp, synthetic construct
  source 1..21: mol_type = other DNA; mol_type = other DNA
tactcaaaggaaaacgtaaac

SEQ ID NO: 4934 - DNA, 21 bp, synthetic construct
  source 1..21: mol_type = other DNA; mol_type = other DNA
catggccccaactcatacggc

SEQ ID NO: 4935 - DNA, 21 bp, synthetic construct
  source 1..21: mol_type = other DNA; mol_type = other DNA
ggcaactcaaacaccgcccat

SEQ ID NO: 4936 - DNA, 21 bp, synthetic construct
  source 1..21: mol_type = other DNA; mol_type = other DNA
cattacggcgacaagtaccaa

SEQ ID NO: 4937 - DNA, 21 bp, synthetic construct
  source 1..21: mol_type = other DNA; mol_type = other DNA
tataggtccacggtggcggat

SEQ ID NO: 4938 - DNA, 21 bp, synthetic construct
  source 1..21: mol_type = other DNA; mol_type = other DNA
ttctccaggaataatccgaat

SEQ ID NO: 4939 - DNA, 21 bp, synthetic construct
  source 1..21: mol_type = other DNA; mol_type = other DNA
taccgccccggctcaggcgac

SEQ ID NO: 4940 - DNA, 21 bp, synthetic construct
  source 1..21: mol_type = other DNA; mol_type = other DNA
aacaagacctggggcgacgcc

SEQ ID NO: 4941 - DNA, 21 bp, synthetic construct
  source 1..21: mol_type = other DNA; mol_type = other DNA
accggcaccaacaccacctac

SEQ ID NO: 4942 - DNA, 21 bp, synthetic construct
  source 1..21: mol_type = other DNA; mol_type = other DNA
gaagcccccgccaaccgcaac

SEQ ID NO: 4943 - DNA, 21 bp, synthetic construct
  source 1..21: mol_type = other DNA; mol_type = other DNA
ttctccaaagaggggatgaat

SEQ ID NO: 4944 - DNA, 21 bp, synthetic construct
  source 1..21: mol_type = other DNA; mol_type = other DNA
ggggatgagtccaggtattat

SEQ ID NO: 4945 - DNA, 21 bp, synthetic construct
  source 1..21: mol_type = other DNA; mol_type = other DNA
ttttcacgccataacatgaac

SEQ ID NO: 4946 - DNA, 21 bp, synthetic construct
  source 1..21: mol_type = other DNA; mol_type = other DNA
tacctgaacaagtcatacgac

SEQ ID NO: 4947 - DNA, 21 bp, synthetic construct
  source 1..21: mol_type = other DNA; mol_type = other DNA
ttctccaaaccggggacgaat

SEQ ID NO: 4948 - DNA, 21 bp, synthetic construct
  source 1..21: mol_type = other DNA; mol_type = other DNA
tttgccaagtttaacgaaaac

SEQ ID NO: 4949 - DNA, 21 bp, synthetic construct
  source 1..21: mol_type = other DNA; mol_type = other DNA
ttttcaaagcccaacaacaac

SEQ ID NO: 4950 - DNA, 21 bp, synthetic construct
  source 1..21: mol_type = other DNA; mol_type = other DNA
ggctttcgcggcgacggcgcc

SEQ ID NO: 4951 - DNA, 21 bp, synthetic construct
  source 1..21: mol_type = other DNA; mol_type = other DNA
tttgcccgccataacatgaac

SEQ ID NO: 4952 - DNA, 21 bp, synthetic construct
  source 1..21: mol_type = other DNA; mol_type = other DNA
tactcaggctcatcatacgcc

SEQ ID NO: 4953 - DNA, 21 bp, synthetic construct
  source 1..21: mol_type = other DNA; mol_type = other DNA
tggttgaaacacgaggcgtcc

SEQ ID NO: 4954 - DNA, 21 bp, synthetic construct
  source 1..21: mol_type = other DNA; mol_type = other DNA
tttgccaagcccggcatgaac

SEQ ID NO: 4955 - DNA, 21 bp, synthetic construct
  source 1..21: mol_type = other DNA; mol_type = other DNA
aaaacggagtccgataatagg

SEQ ID NO: 4956 - DNA, 21 bp, synthetic construct
  source 1..21: mol_type = other DNA; mol_type = other DNA
gtgaaaaggtccgagccgata

SEQ ID NO: 4957 - DNA, 21 bp, synthetic construct
  source 1..21: mol_type = other DNA; mol_type = other DNA
ttttcacgcgacaaccaaaac

SEQ ID NO: 4958 - DNA, 21 bp, synthetic construct
  source 1..21: mol_type = other DNA; mol_type = other DNA
ttttcacgccccggccaaaac

SEQ ID NO: 4959 - DNA, 21 bp, synthetic construct
  source 1..21: mol_type = other DNA; mol_type = other DNA
tttgcccgcgacaacgccaac

SEQ ID NO: 4960 - DNA, 21 bp, synthetic construct
  source 1..21: mol_type = other DNA; mol_type = other DNA
tattataaaaatggggcggcg

SEQ ID NO: 4961 - DNA, 21 bp, synthetic construct
  source 1..21: mol_type = other DNA; mol_type = other DNA
ttcgcgagggagaattggaat

SEQ ID NO: 4962 - DNA, 21 bp, synthetic construct
  source 1..21: mol_type = other DNA; mol_type = other DNA
ttctccaaaccggggtggaat

SEQ ID NO: 4963 - DNA, 21 bp, synthetic construct
  source 1..21: mol_type = other DNA; mol_type = other DNA
tttgccaaggacaacgccaac

SEQ ID NO: 4964 - DNA, 21 bp, synthetic construct
  source 1..21: mol_type = other DNA; mol_type = other DNA
aagcccaacggctaccccgcc

SEQ ID NO: 4965 - DNA, 21 bp, synthetic construct
  source 1..21: mol_type = other DNA; mol_type = other DNA
ttcgcgaaattgggggagaat

SEQ ID NO: 4966 - DNA, 21 bp, synthetic construct
  source 1..21: mol_type = other DNA; mol_type = other DNA
ttcgcgaaagatggggagaat

SEQ ID NO: 4967 - DNA, 21 bp, synthetic construct
  source 1..21: mol_type = other DNA; mol_type = other DNA
ttcgcgagggagaatgataat

SEQ ID NO: 4968 - DNA, 21 bp, synthetic construct
  source 1..21: mol_type = other DNA; mol_type = other DNA
cgcaagtcagaaaccggcggc

SEQ ID NO: 4969 - DNA, 21 bp, synthetic construct
  source 1..21: mol_type = other DNA; mol_type = other DNA
cgcaacgaaggcgccgccggc

SEQ ID NO: 4970 - DNA, 21 bp, synthetic construct
  source 1..21: mol_type = other DNA; mol_type = other DNA
ttcgcgaaagatgggtccaat

SEQ ID NO: 4971 - DNA, 21 bp, synthetic construct
  source 1..21: mol_type = other DNA; mol_type = other DNA
tgggaaaacaagcaagcctgg

SEQ ID NO: 4972 - DNA, 21 bp, synthetic construct
  source 1..21: mol_type = other DNA; mol_type = other DNA
ttctccaaagataatcagaat

SEQ ID NO: 4973 - DNA, 21 bp, synthetic construct
  source 1..21: mol_type = other DNA; mol_type = other DNA
gacggcggccgcggccgcgac

SEQ ID NO: 4974 - DNA, 21 bp, synthetic construct
  source 1..21: mol_type = other DNA; mol_type = other DNA
ttttcaaagtacaaccccaac

SEQ ID NO: 4975 - DNA, 21 bp, synthetic construct
  source 1..21: mol_type = other DNA; mol_type = other DNA
ttttcacgccgcggcgacaac

SEQ ID NO: 4976 - DNA, 21 bp, synthetic construct
  source 1..21: mol_type = other DNA; mol_type = other DNA
ttctccaaattcgggcacaat

SEQ ID NO: 4977 - DNA, 21 bp, synthetic construct
  source 1..21: mol_type = other DNA; mol_type = other DNA
tattccaggtatgggccgaat

SEQ ID NO: 4978 - DNA, 21 bp, synthetic construct
  source 1..21: mol_type = other DNA; mol_type = other DNA
ttcgcgaggttcaataataat

SEQ ID NO: 4979 - DNA, 21 bp, synthetic construct
  source 1..21: mol_type = other DNA; mol_type = other DNA
tttgcccgctttaacgccaac

SEQ ID NO: 4980 - DNA, 21 bp, synthetic construct
  source 1..21: mol_type = other DNA; mol_type = other DNA
tattccaaatgggggcagaat

SEQ ID NO: 4981 - DNA, 21 bp, synthetic construct
  source 1..21: mol_type = other DNA; mol_type = other DNA
tattccaaatggaatgggaat

SEQ ID NO: 4982 - DNA, 21 bp, synthetic construct
  source 1..21: mol_type = other DNA; mol_type = other DNA
ttttcacgctacaaccaaaac

SEQ ID NO: 4983 - DNA, 21 bp, synthetic construct
  source 1..21: mol_type = other DNA; mol_type = other DNA
tacgcccgccccaactacaac

SEQ ID NO: 4984 - DNA, 21 bp, synthetic construct
  source 1..21: mol_type = other DNA; mol_type = other DNA
tattccaggaggaatgagaat

SEQ ID NO: 4985 - DNA, 21 bp, synthetic construct
  source 1..21: mol_type = other DNA; mol_type = other DNA
ttttcaaaggccaactggaac

SEQ ID NO: 4986 - DNA, 21 bp, synthetic construct
  source 1..21: mol_type = other DNA; mol_type = other DNA
ttcgcgagggagaattataat

SEQ ID NO: 4987 - DNA, 21 bp, synthetic construct
  source 1..21: mol_type = other DNA; mol_type = other DNA
tacgcccgctttggcaacaac

SEQ ID NO: 4988 - DNA, 21 bp, synthetic construct
  source 1..21: mol_type = other DNA; mol_type = other DNA
ttttcacgccccggctttaac

SEQ ID NO: 4989 - DNA, 21 bp, synthetic construct
  source 1..21: mol_type = other DNA; mol_type = other DNA
ttctccaaagcgaattataat

SEQ ID NO: 4990 - DNA, 21 bp, synthetic construct
  source 1..21: mol_type = other DNA; mol_type = other DNA
tattccaaaataaatataaat

SEQ ID NO: 4991 - DNA, 21 bp, synthetic construct
  source 1..21: mol_type = other DNA; mol_type = other DNA
tatgcgaaatccaattataat

SEQ ID NO: 4992 - DNA, 21 bp, synthetic construct
  source 1..21: mol_type = other DNA; mol_type = other DNA
ttgcacgcgaggaatataaat

SEQ ID NO: 4993 - DNA, 21 bp, synthetic construct
  source 1..21: mol_type = other DNA; mol_type = other DNA
tatgcgaaaacgaatataaat

SEQ ID NO: 4994 - DNA, 21 bp, synthetic construct
  source 1..21: mol_type = other DNA; mol_type = other DNA
tatgcgaaatccgggtataat

SEQ ID NO: 4995 - DNA, 21 bp, synthetic construct
  source 1..21: mol_type = other DNA; mol_type = other DNA
ttctccaaagtggggataaat

SEQ ID NO: 4996 - DNA, 21 bp, synthetic construct
  source 1..21: mol_type = other DNA; mol_type = other DNA
tatgcgaaaaatgggaataat

SEQ ID NO: 4997 - DNA, 21 bp, synthetic construct
  source 1..21: mol_type = other DNA; mol_type = other DNA
tatgcgaggccggggaataat

SEQ ID NO: 4998 - DNA, 21 bp, synthetic construct
  source 1..21: mol_type = other DNA; mol_type = other DNA
tatgcgaaaccggggataaat

SEQ ID NO: 4999 - DNA, 21 bp, synthetic construct
  source 1..21: mol_type = other DNA; mol_type = other DNA
tattccaggcacggggcgaat

SEQ ID NO: 5000 - DNA, 21 bp, synthetic construct
  source 1..21: mol_type = other DNA; mol_type = other DNA
tatgcgaaaatggggaataat

SEQ ID NO: 5001 - DNA, 21 bp, synthetic construct
  source 1..21: mol_type = other DNA; mol_type = other DNA
ttcgcgaggaatgggaataat

SEQ ID NO: 5002 - DNA, 21 bp, synthetic construct
  source 1..21: mol_type = other DNA; mol_type = other DNA
tttgccaagggcggccccaac

SEQ ID NO: 5003 - DNA, 21 bp, synthetic construct
  source 1..21: mol_type = other DNA; mol_type = other DNA
tattccaaaacggggataaat

SEQ ID NO: 5004 - DNA, 21 bp, synthetic construct
  source 1..21: mol_type = other DNA; mol_type = other DNA
tatgcgaaagtggggaataat

SEQ ID NO: 5005 - DNA, 21 bp, synthetic construct
  source 1..21: mol_type = other DNA; mol_type = other DNA
tattccaaagcggggtccaat

SEQ ID NO: 5006 - DNA, 21 bp, synthetic construct
  source 1..21: mol_type = other DNA; mol_type = other DNA
tattccagggcgaatttgaat

SEQ ID NO: 5007 - DNA, 21 bp, synthetic construct
  source 1..21: mol_type = other DNA; mol_type = other DNA
tattccaggccggggccgaat

SEQ ID NO: 5008 - DNA, 21 bp, synthetic construct
  source 1..21: mol_type = other DNA; mol_type = other DNA
ttcgcgaggacggggcacaat

SEQ ID NO: 5009 - DNA, 21 bp, synthetic construct
  source 1..21: mol_type = other DNA; mol_type = other DNA
gtggcgatgagggggataggg

SEQ ID NO: 5010 - DNA, 21 bp, synthetic construct
  source 1..21: mol_type = other DNA; mol_type = other DNA
ttgtccaaagtggggcagaat

SEQ ID NO: 5011 - DNA, 21 bp, synthetic construct
  source 1..21: mol_type = other DNA; mol_type = other DNA
accaactacggccgcccctca

SEQ ID NO: 5012 - DNA, 21 bp, synthetic construct
  source 1..21: mol_type = other DNA; mol_type = other DNA
tacgcccgccaaaactttaac

SEQ ID NO: 5013 - DNA, 21 bp, synthetic construct
  source 1..21: mol_type = other DNA; mol_type = other DNA
tatgcgaggcagggggcgaat

SEQ ID NO: 5014 - DNA, 21 bp, synthetic construct
  source 1..21: mol_type = other DNA; mol_type = other DNA
tatgcgaggataaattataat

SEQ ID NO: 5015 - DNA, 21 bp, synthetic construct
  source 1..21: mol_type = other DNA; mol_type = other DNA
tacgccaagcaaggccataac

SEQ ID NO: 5016 - DNA, 21 bp, synthetic construct
  source 1..21: mol_type = other DNA; mol_type = other DNA
ctgcataagtcaggcatgaac

SEQ ID NO: 5017 - DNA, 21 bp, synthetic construct
  source 1..21: mol_type = other DNA; mol_type = other DNA
tccacgtcctcctccgggagg

SEQ ID NO: 5018 - DNA, 21 bp, synthetic construct
  source 1..21: mol_type = other DNA; mol_type = other DNA
tatgcgagggagaataggaat

SEQ ID NO: 5019 - DNA, 21 bp, synthetic construct
  source 1..21: mol_type = other DNA; mol_type = other DNA
ttctccagggtggggttcaat

SEQ ID NO: 5020 - DNA, 21 bp, synthetic construct
  source 1..21: mol_type = other DNA; mol_type = other DNA
ttttcaaagatcggctttaac

SEQ ID NO: 5021 - DNA, 21 bp, synthetic construct
  source 1..21: mol_type = other DNA; mol_type = other DNA
ttctccaggataggggcgaat

SEQ ID NO: 5022 - DNA, 21 bp, synthetic construct
  source 1..21: mol_type = other DNA; mol_type = other DNA
tacgccaagatgggccccaac

SEQ ID NO: 5023 - DNA, 21 bp, synthetic construct
  source 1..21: mol_type = other DNA; mol_type = other DNA
tactcaaagctgggccaaaac

SEQ ID NO: 5024 - DNA, 21 bp, synthetic construct
  source 1..21: mol_type = other DNA; mol_type = other DNA
ttgtccaaagcgaatgtgaat

SEQ ID NO: 5025 - DNA, 21 bp, synthetic construct
  source 1..21: mol_type = other DNA; mol_type = other DNA
tattccaaacaggggaataat

SEQ ID NO: 5026 - DNA, 21 bp, synthetic construct
  source 1..21: mol_type = other DNA; mol_type = other DNA
tactcaaaggccaacctgaac

SEQ ID NO: 5027 - DNA, 21 bp, synthetic construct
  source 1..21: mol_type = other DNA; mol_type = other DNA
caccagtcctccaatggggtg

SEQ ID NO: 5028 - DNA, 21 bp, synthetic construct
  source 1..21: mol_type = other DNA; mol_type = other DNA
ttcgcgaaagggaatttcaat

SEQ ID NO: 5029 - DNA, 21 bp, synthetic construct
  source 1..21: mol_type = other DNA; mol_type = other DNA
ttctccaaattgaatttcaat

SEQ ID NO: 5030 - DNA, 21 bp, synthetic construct
  source 1..21: mol_type = other DNA; mol_type = other DNA
tattccagggggaatacgaat

SEQ ID NO: 5031 - DNA, 21 bp, synthetic construct
  source 1..21: mol_type = other DNA; mol_type = other DNA
ttcgcgaaaggggggttcaat

SEQ ID NO: 5032 - DNA, 21 bp, synthetic construct
  source 1..21: mol_type = other DNA; mol_type = other DNA
tatgcgaggtccaattccaat

SEQ ID NO: 5033 - DNA, 21 bp, synthetic construct
  source 1..21: mol_type = other DNA; mol_type = other DNA
ctgtcaaagatcggctcaaac

SEQ ID NO: 5034 - DNA, 21 bp, synthetic construct
  source 1..21: mol_type = other DNA; mol_type = other DNA
gggtcctccacgtccatatgg

SEQ ID NO: 5035 - DNA, 21 bp, synthetic construct
  source 1..21: mol_type = other DNA; mol_type = other DNA
tattccaaacaggggcagaat

SEQ ID NO: 5036 - DNA, 21 bp, synthetic construct
  source 1..21: mol_type = other DNA; mol_type = other DNA
ttttcacgctcaggcatgaac

SEQ ID NO: 5037 - DNA, 21 bp, synthetic construct
  source 1..21: mol_type = other DNA; mol_type = other DNA
tacgccaagctgggcgccaac

SEQ ID NO: 5038 - DNA, 21 bp, synthetic construct
  source 1..21: mol_type = other DNA; mol_type = other DNA
tacgcccgcatgaacctgaac

SEQ ID NO: 5039 - DNA, 21 bp, synthetic construct
  source 1..21: mol_type = other DNA; mol_type = other DNA
ttcgcgaggtccgggtccaat

SEQ ID NO: 5040 - DNA, 21 bp, synthetic construct
  source 1..21: mol_type = other DNA; mol_type = other DNA
tatgcgaaatatgggaataat

SEQ ID NO: 5041 - DNA, 21 bp, synthetic construct
  source 1..21: mol_type = other DNA; mol_type = other DNA
tactcaaagatgggcatcaac

SEQ ID NO: 5042 - DNA, 21 bp, synthetic construct
  source 1..21: mol_type = other DNA; mol_type = other DNA
ttcgcgagggagaataggaat

SEQ ID NO: 5043 - DNA, 21 bp, synthetic construct
  source 1..21: mol_type = other DNA; mol_type = other DNA
tattccaggacgggggagaat

SEQ ID NO: 5044 - DNA, 21 bp, synthetic construct
  source 1..21: mol_type = other DNA; mol_type = other DNA
tactcaaagggcaactacaac

SEQ ID NO: 5045 - DNA, 21 bp, synthetic construct
  source 1..21: mol_type = other DNA; mol_type = other DNA
tactcaaaggtaggccaaaac

SEQ ID NO: 5046 - DNA, 21 bp, synthetic construct
  source 1..21: mol_type = other DNA; mol_type = other DNA
ttgtccaaaaatgggccgaat

SEQ ID NO: 5047 - DNA, 21 bp, synthetic construct
  source 1..21: mol_type = other DNA; mol_type = other DNA
tatgcgagggcgaatacgaat

SEQ ID NO: 5048 - DNA, 21 bp, synthetic construct
  source 1..21: mol_type = other DNA; mol_type = other DNA
tatgcgaggcagaatgcgaat

SEQ ID NO: 5049 - DNA, 21 bp, synthetic construct
  source 1..21: mol_type = other DNA; mol_type = other DNA
gcgatgtccacgaatgggagg

SEQ ID NO: 5050 - DNA, 21 bp, synthetic construct
  source 1..21: mol_type = other DNA; mol_type = other DNA
ctggccaagatgggcgccaac

SEQ ID NO: 5051 - DNA, 21 bp, synthetic construct
  source 1..21: mol_type = other DNA; mol_type = other DNA
ccctacgccaagtcagaactg

SEQ ID NO: 5052 - DNA, 21 bp, synthetic construct
  source 1..21: mol_type = other DNA; mol_type = other DNA
tacgccaaggccaactttaac

SEQ ID NO: 5053 - DNA, 21 bp, synthetic construct
  source 1..21: mol_type = other DNA; mol_type = other DNA
acccaatcaaccaacggcatc

SEQ ID NO: 5054 - DNA, 21 bp, synthetic construct
  source 1..21: mol_type = other DNA; mol_type = other DNA
tatgcgaggatagggttgaat

SEQ ID NO: 5055 - DNA, 21 bp, synthetic construct
  source 1..21: mol_type = other DNA; mol_type = other DNA
tatgcgaggttgggggagaat

SEQ ID NO: 5056 - DNA, 21 bp, synthetic construct
  source 1..21: mol_type = other DNA; mol_type = other DNA
tactcacgcgccaaccaaaac

SEQ ID NO: 5057 - DNA, 21 bp, synthetic construct
  source 1..21: mol_type = other DNA; mol_type = other DNA
tatgcgaaaccggggccgaat

SEQ ID NO: 5058 - DNA, 21 bp, synthetic construct
  source 1..21: mol_type = other DNA; mol_type = other DNA
tacgccaaggccggccataac

SEQ ID NO: 5059 - DNA, 21 bp, synthetic construct
  source 1..21: mol_type = other DNA; mol_type = other DNA
ttcgcgaaaggggggaataat

SEQ ID NO: 5060 - DNA, 21 bp, synthetic construct
  source 1..21: mol_type = other DNA; mol_type = other DNA
ccggcgtccacgaatggggtg

SEQ ID NO: 5061 - DNA, 21 bp, synthetic construct
  source 1..21: mol_type = other DNA; mol_type = other DNA
gtactgtcatcaaacggcgta

SEQ ID NO: 5062 - DNA, 21 bp, synthetic construct
  source 1..21: mol_type = other DNA; mol_type = other DNA
tattccaaaacggggccgaat

SEQ ID NO: 5063 - DNA, 21 bp, synthetic construct
  source 1..21: mol_type = other DNA; mol_type = other DNA
tattccaaaatgaatgataat

SEQ ID NO: 5064 - DNA, 21 bp, synthetic construct
  source 1..21: mol_type = other DNA; mol_type = other DNA
tatgcgaggtccaatgcgaat

SEQ ID NO: 5065 - DNA, 21 bp, synthetic construct
  source 1..21: mol_type = other DNA; mol_type = other DNA
tattccaggttgggggataat

SEQ ID NO: 5066 - DNA, 21 bp, synthetic construct
  source 1..21: mol_type = other DNA; mol_type = other DNA
tatgcgaaaggggggccgaat

SEQ ID NO: 5067 - DNA, 21 bp, synthetic construct
  source 1..21: mol_type = other DNA; mol_type = other DNA
tattccaaaaatgggccgaat

SEQ ID NO: 5068 - DNA, 21 bp, synthetic construct
  source 1..21: mol_type = other DNA; mol_type = other DNA
tattccaaacagggggcgaat

SEQ ID NO: 5069 - DNA, 21 bp, synthetic construct
  source 1..21: mol_type = other DNA; mol_type = other DNA
ctgtcaaaggccaacatcaac

SEQ ID NO: 5070 - DNA, 21 bp, synthetic construct
  source 1..21: mol_type = other DNA; mol_type = other DNA
caggtgtccacgaatgggata

SEQ ID NO: 5071 - DNA, 21 bp, synthetic construct
  source 1..21: mol_type = other DNA; mol_type = other DNA
tactcaaagaacggcatgaac

SEQ ID NO: 5072 - DNA, 21 bp, synthetic construct
  source 1..21: mol_type = other DNA; mol_type = other DNA
tattccaaaatgaatgcgaat

SEQ ID NO: 5073 - DNA, 21 bp, synthetic construct
  source 1..21: mol_type = other DNA; mol_type = other DNA
ttctccaaaatagggttgaat

SEQ ID NO: 5074 - DNA, 21 bp, synthetic construct
  source 1..21: mol_type = other DNA; mol_type = other DNA
tattccaaagtggggttgaat

SEQ ID NO: 5075 - DNA, 21 bp, synthetic construct
  source 1..21: mol_type = other DNA; mol_type = other DNA
tatgcgaaacaggggatgaat

SEQ ID NO: 5076 - DNA, 21 bp, synthetic construct
  source 1..21: mol_type = other DNA; mol_type = other DNA
acggtgtccacgaatggggtg

SEQ ID NO: 5077 - DNA, 21 bp, synthetic construct
  source 1..21: mol_type = other DNA; mol_type = other DNA
ctggccaaggccggcgccaac

SEQ ID NO: 5078 - DNA, 21 bp, synthetic construct
  source 1..21: mol_type = other DNA; mol_type = other DNA
tattccaaacaggggcacaat

SEQ ID NO: 5079 - DNA, 21 bp, synthetic construct
  source 1..21: mol_type = other DNA; mol_type = other DNA
tatgcgaaatccggggataat

SEQ ID NO: 5080 - DNA, 21 bp, synthetic construct
  source 1..21: mol_type = other DNA; mol_type = other DNA
ctgtcaaaggccggcaacaac

SEQ ID NO: 5081 - DNA, 21 bp, synthetic construct
  source 1..21: mol_type = other DNA; mol_type = other DNA
tccaaatccacgaatggggtg

SEQ ID NO: 5082 - DNA, 21 bp, synthetic construct
  source 1..21: mol_type = other DNA; mol_type = other DNA
ttttcaaaggtaggctttaac

SEQ ID NO: 5083 - DNA, 21 bp, synthetic construct
  source 1..21: mol_type = other DNA; mol_type = other DNA
ttctccaggataggggagaat

SEQ ID NO: 5084 - DNA, 21 bp, synthetic construct
  source 1..21: mol_type = other DNA; mol_type = other DNA
tactcacgcgtaaacctgaac

SEQ ID NO: 5085 - DNA, 21 bp, synthetic construct
  source 1..21: mol_type = other DNA; mol_type = other DNA
tatgcgaaaatggggatgaat

SEQ ID NO: 5086 - DNA, 21 bp, synthetic construct
  source 1..21: mol_type = other DNA; mol_type = other DNA
tttgccaagtcaggctacaac

SEQ ID NO: 5087 - DNA, 21 bp, synthetic construct
  source 1..21: mol_type = other DNA; mol_type = other DNA
tacgccaagaacggctttaac

SEQ ID NO: 5088 - DNA, 21 bp, synthetic construct
  source 1..21: mol_type = other DNA; mol_type = other DNA
ttcgcgaaatccgggcagaat

SEQ ID NO: 5089 - DNA, 21 bp, synthetic construct
  source 1..21: mol_type = other DNA; mol_type = other DNA
ctgtcaaagctgaacaccaac

SEQ ID NO: 5090 - DNA, 21 bp, synthetic construct
  source 1..21: mol_type = other DNA; mol_type = other DNA
ttggcgaaagcggggttcaat

SEQ ID NO: 5091 - DNA, 21 bp, synthetic construct
  source 1..21: mol_type = other DNA; mol_type = other DNA
tatatgtccacgaatggggtg

SEQ ID NO: 5092 - DNA, 21 bp, synthetic construct
  source 1..21: mol_type = other DNA; mol_type = other DNA
ctgtcacgcaccggccaaaac

SEQ ID NO: 5093 - DNA, 21 bp, synthetic construct
  source 1..21: mol_type = other DNA; mol_type = other DNA
atgcgcaacggcaccatgtca

SEQ ID NO: 5094 - DNA, 21 bp, synthetic construct
  source 1..21: mol_type = other DNA; mol_type = other DNA
tacgccaagtcaggctttaac

SEQ ID NO: 5095 - DNA, 21 bp, synthetic construct
  source 1..21: mol_type = other DNA; mol_type = other DNA
tactcaaagatcggcggcaac

SEQ ID NO: 5096 - DNA, 21 bp, synthetic construct
  source 1..21: mol_type = other DNA; mol_type = other DNA
tacgccaagggcggcctgaac

SEQ ID NO: 5097 - DNA, 21 bp, synthetic construct
  source 1..21: mol_type = other DNA; mol_type = other DNA
ctgtcaaagtcaggcgtaaac

SEQ ID NO: 5098 - DNA, 21 bp, synthetic construct
  source 1..21: mol_type = other DNA; mol_type = other DNA
catgtatcaaccaacggcatc

SEQ ID NO: 5099 - DNA, 21 bp, synthetic construct
  source 1..21: mol_type = other DNA
ttgtccaaagtggcggtgaat

SEQ ID NO: 5100 - DNA, 21 bp, synthetic construct
  source 1..21: mol_type = other DNA
ttggcgagggtgggggcgaat

SEQ ID NO: 5101 - DNA, 21 bp, synthetic construct
  source 1..21: mol_type = other DNA
ttgtccagggcggggccgttg

SEQ ID NO: 5102 - DNA, 21 bp, synthetic construct
  source 1..21: mol_type = other DNA; mol_type = other DNA
ttctccaaacagaatcacaat

SEQ ID NO: 5103 - DNA, 21 bp, synthetic construct
  source 1..21: mol_type = other DNA; mol_type = other DNA
atcatctcaaccaacggcgta

SEQ ID NO: 5104 - DNA, 21 bp, synthetic construct
  source 1..21: mol_type = other DNA; mol_type = other DNA
tactcacgccaaggcggcaac

SEQ ID NO: 5105 - DNA, 21 bp, synthetic construct
  source 1..21: mol_type = other DNA; mol_type = other DNA
acgttgtccacgaatggggtg

SEQ ID NO: 5106 - DNA, 21 bp, synthetic construct
  source 1..21: mol_type = other DNA; mol_type = other DNA
tattccaaatccaatttcaat

SEQ ID NO: 5107 - DNA, 21 bp, synthetic construct
  source 1..21: mol_type = other DNA; mol_type = other DNA
tatgcgaaaacggggacgaat

SEQ ID NO: 5108 - DNA, 21 bp, synthetic construct
  source 1..21: mol_type = other DNA; mol_type = other DNA
gtgtattccacgaatgggata

SEQ ID NO: 5109 - DNA, 21 bp, synthetic construct
  source 1..21: mol_type = other DNA; mol_type = other DNA
ttttcaaaggtaggctcaaac

SEQ ID NO: 5110 - DNA, 21 bp, synthetic construct
  source 1..21: mol_type = other DNA; mol_type = other DNA
tatatgtcctccaatggggtg

SEQ ID NO: 5111 - DNA, 21 bp, synthetic construct
  source 1..21: mol_type = other DNA; mol_type = other DNA
ttgtccaaacacaatttcaat

SEQ ID NO: 5112 - DNA, 21 bp, synthetic construct
  source 1..21: mol_type = other DNA; mol_type = other DNA
ttctccaaattggggatgaat

SEQ ID NO: 5113 - DNA, 21 bp, synthetic construct
  source 1..21: mol_type = other DNA; mol_type = other DNA
ttttcacgcctgaacgaaaac

SEQ ID NO: 5114 - DNA, 21 bp, synthetic construct
  source 1..21: mol_type = other DNA; mol_type = other DNA
tatgcgaaacagaatttcaat

SEQ ID NO: 5115 - DNA, 21 bp, synthetic construct
  source 1..21: mol_type = other DNA; mol_type = other DNA
ctgtcaaaggccaacctgaac

SEQ ID NO: 5116 - DNA, 21 bp, synthetic construct
  source 1..21: mol_type = other DNA; mol_type = other DNA
cagatatccacgaatgggagg

SEQ ID NO: 5117 - DNA, 21 bp, synthetic construct
  source 1..21: mol_type = other DNA; mol_type = other DNA
tatgcgaaagggaatgcgaat

SEQ ID NO: 5118 - DNA, 21 bp, synthetic construct
  source 1..21: mol_type = other DNA; mol_type = other DNA
ctggccaaggtaggctttaac

SEQ ID NO: 5119 - DNA, 21 bp, synthetic construct
  source 1..21: mol_type = other DNA; mol_type = other DNA
ttcaggtccacgaatggggtg

SEQ ID NO: 5120 - DNA, 21 bp, synthetic construct
  source 1..21: mol_type = other DNA; mol_type = other DNA
tattccagggcgggggagaat

SEQ ID NO: 5121 - DNA, 21 bp, synthetic construct
  source 1..21: mol_type = other DNA; mol_type = other DNA
ctgtcaaagaccggcaccaac

SEQ ID NO: 5122 - DNA, 21 bp, synthetic construct
  source 1..21: mol_type = other DNA; mol_type = other DNA
acgaggtccgggttgaatgcg

SEQ ID NO: 5123 - DNA, 21 bp, synthetic construct
  source 1..21: mol_type = other DNA; mol_type = other DNA
tactcaaagctgggcctgaac

SEQ ID NO: 5124 - DNA, 21 bp, synthetic construct
  source 1..21: mol_type = other DNA; mol_type = other DNA
tattccaaagtgaatacgaat

SEQ ID NO: 5125 - DNA, 21 bp, synthetic construct
  source 1..21: mol_type = other DNA; mol_type = other DNA
tactcaaagctggcccccaac

SEQ ID NO: 5126 - DNA, 21 bp, synthetic construct
  source 1..21: mol_type = other DNA; mol_type = other DNA
tattccaggatgaatgagaat

SEQ ID NO: 5127 - DNA, 21 bp, synthetic construct
  source 1..21: mol_type = other DNA; mol_type = other DNA
ctgtcaaagtcaggcatcaac

SEQ ID NO: 5128 - DNA, 21 bp, synthetic construct
  source 1..21: mol_type = other DNA; mol_type = other DNA
acgttctccacgaatgggata

SEQ ID NO: 5129 - DNA, 21 bp, synthetic construct
  source 1..21: mol_type = other DNA; mol_type = other DNA
tatgcgaaaacggggtccaat

SEQ ID NO: 5130 - DNA, 21 bp, synthetic construct
  source 1..21: mol_type = other DNA; mol_type = other DNA
tattccaaattcaatgataat

SEQ ID NO: 5131 - DNA, 21 bp, synthetic construct
  source 1..21: mol_type = other DNA; mol_type = other DNA
tattcctccacgaatgggata

SEQ ID NO: 5132 - DNA, 21 bp, synthetic construct
  source 1..21: mol_type = other DNA; mol_type = other DNA
tattccaggaatggggggaat

SEQ ID NO: 5133 - DNA, 21 bp, synthetic construct
  source 1..21: mol_type = other DNA; mol_type = other DNA
tttgcccgcggcaacaccaac

SEQ ID NO: 5134 - DNA, 21 bp, synthetic construct
  source 1..21: mol_type = other DNA; mol_type = other DNA
tacgccaagcatggcaacaac

SEQ ID NO: 5135 - DNA, 21 bp, synthetic construct
  source 1..21: mol_type = other DNA; mol_type = other DNA
ctgtcacgcatgaacatgaac

SEQ ID NO: 5136 - DNA, 21 bp, synthetic construct
  source 1..21: mol_type = other DNA; mol_type = other DNA
tactcaaagctgggcggcaac

SEQ ID NO: 5137 - DNA, 21 bp, synthetic construct
  source 1..21: mol_type = other DNA; mol_type = other DNA
ttctccagggtgggggagaat

SEQ ID NO: 5138 - DNA, 21 bp, synthetic construct
  source 1..21: mol_type = other DNA; mol_type = other DNA
ctggccaagcatggcgtaaac

SEQ ID NO: 5139 - DNA, 21 bp, synthetic construct
  source 1..21: mol_type = other DNA; mol_type = other DNA
ttgtccaaattgaatgagaat

SEQ ID NO: 5140 - DNA, 21 bp, synthetic construct
  source 1..21: mol_type = other DNA; mol_type = other DNA
ttcgcgaaacaggggccgaat

SEQ ID NO: 5141 - DNA, 21 bp, synthetic construct
  source 1..21: mol_type = other DNA; mol_type = other DNA
cactcctcctccaatggggtg

SEQ ID NO: 5142 - DNA, 21 bp, synthetic construct
  source 1..21: mol_type = other DNA; mol_type = other DNA
ttgtccagggcgaatgataat

SEQ ID NO: 5143 - DNA, 21 bp, synthetic construct
  source 1..21: mol_type = other DNA; mol_type = other DNA
ttcgcgagggataataggaat

SEQ ID NO: 5144 - DNA, 21 bp, synthetic construct
  source 1..21: mol_type = other DNA; mol_type = other DNA
ttgtccaggacgaatgataat

SEQ ID NO: 5145 - DNA, 21 bp, synthetic construct
  source 1..21: mol_type = other DNA; mol_type = other DNA
atgcagtccacgaatgggata

SEQ ID NO: 5146 - DNA, 21 bp, synthetic construct
  source 1..21: mol_type = other DNA; mol_type = other DNA
tactcaaagatgaaccaaaac

SEQ ID NO: 5147 - DNA, 21 bp, synthetic construct
  source 1..21: mol_type = other DNA; mol_type = other DNA
ttttcacgcaacggcgtaaac

SEQ ID NO: 5148 - DNA, 21 bp, synthetic construct
  source 1..21: mol_type = other DNA; mol_type = other DNA
tatgcgaaaaatggggataat

SEQ ID NO: 5149 - DNA, 21 bp, synthetic construct
  source 1..21: mol_type = other DNA; mol_type = other DNA
tactcaaaggtacaaaccaac

SEQ ID NO: 5150 - DNA, 21 bp, synthetic construct
  source 1..21: mol_type = other DNA; mol_type = other DNA
ctggcccgccaaggctcaaac

SEQ ID NO: 5151 - DNA, 21 bp, synthetic construct
  source 1..21: mol_type = other DNA; mol_type = other DNA
tacgccaagcaaggcatcaac

SEQ ID NO: 5152 - DNA, 21 bp, synthetic construct
  source 1..21: mol_type = other DNA; mol_type = other DNA
tacgcccgcggcggccaaaac

SEQ ID NO: 5153 - DNA, 21 bp, synthetic construct
  source 1..21: mol_type = other DNA; mol_type = other DNA
tatgcgtccacgaatgggata

SEQ ID NO: 5154 - DNA, 21 bp, synthetic construct
  source 1..21: mol_type = other DNA; mol_type = other DNA
ttctccaaattgggggtgaat

SEQ ID NO: 5155 - DNA, 21 bp, synthetic construct
  source 1..21: mol_type = other DNA; mol_type = other DNA
tactcaaagcaaggctggaac

SEQ ID NO: 5156 - DNA, 21 bp, synthetic construct
  source 1..21: mol_type = other DNA; mol_type = other DNA
acctggtcaaccaacggcgta

SEQ ID NO: 5157 - DNA, 21 bp, synthetic construct
  source 1..21: mol_type = other DNA; mol_type = other DNA
tatgcgaaaaatggggcgaat

SEQ ID NO: 5158 - DNA, 21 bp, synthetic construct
  source 1..21: mol_type = other DNA; mol_type = other DNA
ttttcaaagatgaacatcaac

SEQ ID NO: 5159 - DNA, 21 bp, synthetic construct
  source 1..21: mol_type = other DNA; mol_type = other DNA
tactcaaagaacaacctgaac

SEQ ID NO: 5160 - DNA, 21 bp, synthetic construct
  source 1..21: mol_type = other DNA; mol_type = other DNA
tattccaaacacgggatgaat

SEQ ID NO: 5161 - DNA, 21 bp, synthetic construct
  source 1..21: mol_type = other DNA; mol_type = other DNA
gtacaatcaaccaacggccgc

SEQ ID NO: 5162 - DNA, 21 bp, synthetic construct
  source 1..21: mol_type = other DNA; mol_type = other DNA
acgcactccacgaatggggtg

SEQ ID NO: 5163 - DNA, 21 bp, synthetic construct
  source 1..21: mol_type = other DNA; mol_type = other DNA
ttcgcgaaacagaattataat

SEQ ID NO: 5164 - DNA, 21 bp, synthetic construct
  source 1..21: mol_type = other DNA; mol_type = other DNA
atgttgtccacgaatgggagg

SEQ ID NO: 5165 - DNA, 21 bp, synthetic construct
  source 1..21: mol_type = other DNA; mol_type = other DNA
tactcaaagtcaggcgccaac

SEQ ID NO: 5166 - DNA, 21 bp, synthetic construct
  source 1..21: mol_type = other DNA; mol_type = other DNA
ttttcaaaggccaacatgaac

SEQ ID NO: 5167 - DNA, 21 bp, synthetic construct
  source 1..21: mol_type = other DNA; mol_type = other DNA
tactcaaagcatggcgtaaac

SEQ ID NO: 5168 - DNA, 21 bp, synthetic construct
  source 1..21: mol_type = other DNA; mol_type = other DNA
ttctccaaagcggggatgaat

SEQ ID NO: 5169 - DNA, 21 bp, synthetic construct
  source 1..21: mol_type = other DNA; mol_type = other DNA
ttcgcgaggcaggggttcaat

SEQ ID NO: 5170 - DNA, 21 bp, synthetic construct
  source 1..21: mol_type = other DNA; mol_type = other DNA
tattccaaattgggggagaat

SEQ ID NO: 5171 - DNA, 21 bp, synthetic construct
  source 1..21: mol_type = other DNA; mol_type = other DNA
ctgtcaaagtcaggcatgaac

SEQ ID NO: 5172 - DNA, 21 bp, synthetic construct
  source 1..21: mol_type = other DNA; mol_type = other DNA
tataaatcctccaatggggtg

SEQ ID NO: 5173 - DNA, 21 bp, synthetic construct
  source 1..21: mol_type = other DNA; mol_type = other DNA
caatggtcaaccaacggcgta

SEQ ID NO: 5174 - DNA, 21 bp, synthetic construct
  source 1..21: mol_type = other DNA; mol_type = other DNA
tatgcgaaacaggggcagaat

SEQ ID NO: 5175 - DNA, 21 bp, synthetic construct
  source 1..21: mol_type = other DNA; mol_type = other DNA
tatgcgaaatatgggttgaat

SEQ ID NO: 5176 - DNA, 21 bp, synthetic construct
  source 1..21: mol_type = other DNA; mol_type = other DNA
tccgcgtccacgaatggggtg

SEQ ID NO: 5177 - DNA, 21 bp, synthetic construct
  source 1..21: mol_type = other DNA; mol_type = other DNA
ttgtccaggatgaatgagaat

SEQ ID NO: 5178 - DNA, 21 bp, synthetic construct
  source 1..21: mol_type = other DNA; mol_type = other DNA
ttctccaggtccggggcgaat

SEQ ID NO: 5179 - DNA, 21 bp, synthetic construct
  source 1..21: mol_type = other DNA; mol_type = other DNA
tgggtgaaatcctccccgaat

SEQ ID NO: 5180 - DNA, 21 bp, synthetic construct
  source 1..21: mol_type = other DNA; mol_type = other DNA
tatgcgaggttgaatgagaat

SEQ ID NO: 5181 - DNA, 21 bp, synthetic construct
  source 1..21: mol_type = other DNA; mol_type = other DNA
tataggtccacgaatgggata

SEQ ID NO: 5182 - DNA, 21 bp, synthetic construct
  source 1..21: mol_type = other DNA; mol_type = other DNA
ttggcgaaaaatgggttgaat

SEQ ID NO: 5183 - DNA, 21 bp, synthetic construct
  source 1..21: mol_type = other DNA; mol_type = other DNA
gtacattcaaccaacggcatc

SEQ ID NO: 5184 - DNA, 21 bp, synthetic construct
  source 1..21: mol_type = other DNA; mol_type = other DNA
gactacaccggcaagtcagcc

SEQ ID NO: 5185 - DNA, 21 bp, synthetic construct
  source 1..21: mol_type = other DNA; mol_type = other DNA
tactcaaagtcaggcgacaac

SEQ ID NO: 5186 - DNA, 21 bp, synthetic construct
  source 1..21: mol_type = other DNA; mol_type = other DNA
tactcacgcgtaaacgacaac

SEQ ID NO: 5187 - DNA, 21 bp, synthetic construct
  source 1..21: mol_type = other DNA; mol_type = other DNA
tactcaaagcaaaactcaaac

SEQ ID NO: 5188 - DNA, 21 bp, synthetic construct
  source 1..21: mol_type = other DNA; mol_type = other DNA
ttgtccaaaatggggatgaat

SEQ ID NO: 5189 - DNA, 21 bp, synthetic construct
  source 1..21: mol_type = other DNA; mol_type = other DNA
ttcgcgaaaacggggttgaat

SEQ ID NO: 5190 - DNA, 21 bp, synthetic construct
  source 1..21: mol_type = other DNA; mol_type = other DNA
gacaagtacaacgactacaag

SEQ ID NO: 5191 - DNA, 21 bp, synthetic construct
  source 1..21: mol_type = other DNA; mol_type = other DNA
tattccaaagggggggcgaat

SEQ ID NO: 5192 - DNA, 21 bp, synthetic construct
  source 1..21: mol_type = other DNA; mol_type = other DNA
tacgccaagcatggcatgaac

SEQ ID NO: 5193 - DNA, 21 bp, synthetic construct
  source 1..21: mol_type = other DNA; mol_type = other DNA
ttcaaatcctccaatggggtg

SEQ ID NO: 5194 - DNA, 21 bp, synthetic construct
  source 1..21: mol_type = other DNA; mol_type = other DNA
tattccaggttgaatgatgcg

SEQ ID NO: 5195 - DNA, 21 bp, synthetic construct
  source 1..21: mol_type = other DNA; mol_type = other DNA
ttcgcgaaattcaatatgaat

SEQ ID NO: 5196 - DNA, 21 bp, synthetic construct
  source 1..21: mol_type = other DNA; mol_type = other DNA
tattccaaaggggggcagaat

SEQ ID NO: 5197 - DNA, 21 bp, synthetic construct
  source 1..21: mol_type = other DNA; mol_type = other DNA
ctgtcaaagaccggctcaaac

SEQ ID NO: 5198 - DNA, 21 bp, synthetic construct
  source 1..21: mol_type = other DNA; mol_type = other DNA
tatttcacggggatacacggg

SEQ ID NO: 5199 - DNA, 21 bp, synthetic construct
  source 1..21: mol_type = other DNA; mol_type = other DNA
tacgccaaggccaacgccaac

SEQ ID NO: 5200 - DNA, 21 bp, synthetic construct
  source 1..21: mol_type = other DNA; mol_type = other DNA
tatacgaaatccaatacgcac

SEQ ID NO: 5201 - DNA, 21 bp, synthetic construct
  source 1..21: mol_type = other DNA; mol_type = other DNA
ttttcaaagaccggccataac

SEQ ID NO: 5202 - DNA, 21 bp, synthetic construct
  source 1..21: mol_type = other DNA; mol_type = other DNA
ttcgcgaggatagggatgaat

SEQ ID NO: 5203 - DNA, 21 bp, synthetic construct
  source 1..21: mol_type = other DNA; mol_type = other DNA
tacgccaagtcaaacgtaaac

SEQ ID NO: 5204 - DNA, 21 bp, synthetic construct
  source 1..21: mol_type = other DNA; mol_type = other DNA
ttctccaggcagggggtgaat

SEQ ID NO: 5205 - DNA, 21 bp, synthetic construct
  source 1..21: mol_type = other DNA; mol_type = other DNA
tttgccaagtcaggctcaaac

SEQ ID NO: 5206 - DNA, 21 bp, synthetic construct
  source 1..21: mol_type = other DNA; mol_type = other DNA
tattccaggatggggacgaat

SEQ ID NO: 5207 - DNA, 21 bp, synthetic construct
  source 1..21: mol_type = other DNA; mol_type = other DNA
gtgatgtccacgaatggggtg

SEQ ID NO: 5208 - DNA, 21 bp, synthetic construct
  source 1..21: mol_type = other DNA; mol_type = other DNA
aataattccacgaatgggata

SEQ ID NO: 5209 - DNA, 21 bp, synthetic construct
  source 1..21: mol_type = other DNA; mol_type = other DNA
tattccaggccgggggcgaat

SEQ ID NO: 5210 - DNA, 21 bp, synthetic construct
  source 1..21: mol_type = other DNA; mol_type = other DNA
tacgccaagatcggccaaaac

SEQ ID NO: 5211 - DNA, 21 bp, synthetic construct
  source 1..21: mol_type = other DNA; mol_type = other DNA
tatgcgaaatatgggttcaat

SEQ ID NO: 5212 - DNA, 21 bp, synthetic construct
  source 1..21: mol_type = other DNA; mol_type = other DNA
ttgtccaaagtgaatttcaat

SEQ ID NO: 5213 - DNA, 21 bp, synthetic construct
  source 1..21: mol_type = other DNA; mol_type = other DNA
tactcaaagtcaaaccaaaac

SEQ ID NO: 5214 - DNA, 21 bp, synthetic construct
  source 1..21: mol_type = other DNA; mol_type = other DNA
tatatatcctccaatggggtg

SEQ ID NO: 5215 - DNA, 21 bp, synthetic construct
  source 1..21: mol_type = other DNA; mol_type = other DNA
ttcgcgaaagcgaattataat

SEQ ID NO: 5216 - DNA, 21 bp, synthetic construct
  source 1..21: mol_type = other DNA; mol_type = other DNA
ggggggtccgggatgaaatat

SEQ ID NO: 5217 - DNA, 21 bp, synthetic construct
  source 1..21: mol_type = other DNA; mol_type = other DNA
tcaaacaccggccgcaacgcc

SEQ ID NO: 5218 - DNA, 21 bp, synthetic construct
  source 1..21: mol_type = other DNA; mol_type = other DNA
tatgcgaggatgaatgtgaat

SEQ ID NO: 5219 - DNA, 21 bp, synthetic construct
  source 1..21: mol_type = other DNA
aaacagtccacgaatggggtg

SEQ ID NO: 5220 - DNA, 21 bp, synthetic construct
  source 1..21: mol_type = other DNA; mol_type = other DNA
tatgagtccgggccgatgagg

SEQ ID NO: 5221 - DNA, 21 bp, synthetic construct
  source 1..21: mol_type = other DNA; mol_type = other DNA
aaaggggaggcgacgacgtgg

SEQ ID NO: 5222 - DNA, 21 bp, synthetic construct
  source 1..21: mol_type = other DNA; mol_type = other DNA
ttcgcgaaaacgggggcgaat

SEQ ID NO: 5223 - DNA, 21 bp, synthetic construct
  source 1..21: mol_type = other DNA; mol_type = other DNA
tttgccaagggcaactggaac

SEQ ID NO: 5224 - DNA, 21 bp, synthetic construct
  source 1..21: mol_type = other DNA; mol_type = other DNA
tattccaaagtgaatcacaat

SEQ ID NO: 5225 - DNA, 21 bp, synthetic construct
  source 1..21: mol_type = other DNA; mol_type = other DNA
ttctccaaatccgggataaat

SEQ ID NO: 5226 - DNA, 21 bp, synthetic construct
  source 1..21: mol_type = other DNA; mol_type = other DNA
tatgcgaaaacgaatgcgaat

SEQ ID NO: 5227 - DNA, 21 bp, synthetic construct
  source 1..21: mol_type = other DNA; mol_type = other DNA
tactcacgcaacaacgaaaac

SEQ ID NO: 5228 - DNA, 21 bp, synthetic construct
  source 1..21: mol_type = other DNA; mol_type = other DNA
ttttcaaagatgaacctgaac

SEQ ID NO: 5229 - DNA, 21 bp, synthetic construct
  source 1..21: mol_type = other DNA; mol_type = other DNA
cgcgaatcatcaaacggcgta

SEQ ID NO: 5230 - DNA, 21 bp, synthetic construct
  source 1..21: mol_type = other DNA; mol_type = other DNA
ttgtccaaacacaatgagaat

SEQ ID NO: 5231 - DNA, 21 bp, synthetic construct
  source 1..21: mol_type = other DNA; mol_type = other DNA
caattttcaaccaacggcatc

SEQ ID NO: 5232 - DNA, 21 bp, synthetic construct
  source 1..21: mol_type = other DNA; mol_type = other DNA
ttcgcgagggtggggttcaat

SEQ ID NO: 5233 - DNA, 21 bp, synthetic construct
  source 1..21: mol_type = other DNA; mol_type = other DNA
ttcgcgaaaaatgggcacaat

SEQ ID NO: 5234 - DNA, 21 bp, synthetic construct
  source 1..21: mol_type = other DNA; mol_type = other DNA
ttctccaggatgggggtgaat

SEQ ID NO: 5235 - DNA, 21 bp, synthetic construct
  source 1..21: mol_type = other DNA; mol_type = other DNA
catcattcaaccaacggcgta

SEQ ID NO: 5236 - DNA, 21 bp, synthetic construct
  source 1..21: mol_type = other DNA; mol_type = other DNA
ctgtcaaagaacggctttaac

SEQ ID NO: 5237 - DNA, 21 bp, synthetic construct
  source 1..21: mol_type = other DNA; mol_type = other DNA
tattccaggccgaatgcgaat

SEQ ID NO: 5238 - DNA, 21 bp, synthetic construct
  source 1..21: mol_type = other DNA; mol_type = other DNA
tatgcgaaacagaattggaat

SEQ ID NO: 5239 - DNA, 21 bp, synthetic construct
  source 1..21: mol_type = other DNA; mol_type = other DNA
tactcaaaggtaaacaacaac

SEQ ID NO: 5240 - DNA, 21 bp, synthetic construct
  source 1..21: mol_type = other DNA; mol_type = other DNA
ttggcgaaaatagggcacaat

SEQ ID NO: 5241 - DNA, 21 bp, synthetic construct
  source 1..21: mol_type = other DNA; mol_type = other DNA
accaccgactttaacggcttt

SEQ ID NO: 5242 - DNA, 21 bp, synthetic construct
  source 1..21: mol_type = other DNA; mol_type = other DNA
atctactcatcaaacggcgta

SEQ ID NO: 5243 - DNA, 21 bp, synthetic construct
  source 1..21: mol_type = other DNA; mol_type = other DNA
cgcgactcacaaaccacctgg

SEQ ID NO: 5244 - DNA, 21 bp, synthetic construct
  source 1..21: mol_type = other DNA; mol_type = other DNA
cgcgtatcatcaaacggcgta

SEQ ID NO: 5245 - DNA, 21 bp, synthetic construct
  source 1..21: mol_type = other DNA; mol_type = other DNA
ttcgcgaaagggaataataat

SEQ ID NO: 5246 - DNA, 21 bp, synthetic construct
  source 1..21: mol_type = other DNA; mol_type = other DNA
ttctccaggatgggggataat

SEQ ID NO: 5247 - DNA, 21 bp, synthetic construct
  source 1..21: mol_type = other DNA; mol_type = other DNA
atgcatgtaaagtcacccaac

SEQ ID NO: 5248 - DNA, 21 bp, synthetic construct
  source 1..21: mol_type = other DNA; mol_type = other DNA
gtaggctcaatcaacggcatc

SEQ ID NO: 5249 - DNA, 21 bp, synthetic construct
  source 1..21: mol_type = other DNA; mol_type = other DNA
tactcaaaggtaaacctgaac

SEQ ID NO: 5250 - DNA, 21 bp, synthetic construct
  source 1..21: mol_type = other DNA; mol_type = other DNA
acggggtccgcggtgaaatgg

SEQ ID NO: 5251 - DNA, 21 bp, synthetic construct
  source 1..21: mol_type = other DNA; mol_type = other DNA
tactacaccaaggtacccacc

SEQ ID NO: 5252 - DNA, 21 bp, synthetic construct
  source 1..21: mol_type = other DNA; mol_type = other DNA
tattccaaaaatggggggaat

SEQ ID NO: 5253 - DNA, 21 bp, synthetic construct
  source 1..21: mol_type = other DNA; mol_type = other DNA
atgtacggcggcgtaaacccc

SEQ ID NO: 5254 - DNA, 21 bp, synthetic construct
  source 1..21: mol_type = other DNA; mol_type = other DNA
cgccccaacaccgccaacttt

SEQ ID NO: 5255 - DNA, 21 bp, synthetic construct
  source 1..21: mol_type = other DNA; mol_type = other DNA
tactactcatcaaacggcgta

SEQ ID NO: 5256 - DNA, 21 bp, synthetic construct
  source 1..21: mol_type = other DNA; mol_type = other DNA
ttcgcgaaacaggggcacaat

SEQ ID NO: 5257 - DNA, 21 bp, synthetic construct
  source 1..21: mol_type = other DNA; mol_type = other DNA
aatgggtccacgaatgggagg

SEQ ID NO: 5258 - DNA, 21 bp, synthetic construct
  source 1..21: mol_type = other DNA; mol_type = other DNA
ctgtcaaagcataaccaaaac

SEQ ID NO: 5259 - DNA, 21 bp, synthetic construct
  source 1..21: mol_type = other DNA; mol_type = other DNA
tacgcccgcatgaacatgaac

SEQ ID NO: 5260 - DNA, 21 bp, synthetic construct
  source 1..21: mol_type = other DNA; mol_type = other DNA
ctgtcaaagtcaaaccataac

SEQ ID NO: 5261 - DNA, 21 bp, synthetic construct
  source 1..21: mol_type = other DNA; mol_type = other DNA
tatgcgaggaataatgataat

SEQ ID NO: 5262 - DNA, 21 bp, synthetic construct
  source 1..21: mol_type = other DNA; mol_type = other DNA
atcgaacgcgaacgctacgcc

SEQ ID NO: 5263 - DNA, 21 bp, synthetic construct
  source 1..21: mol_type = other DNA; mol_type = other DNA
tcaatgaccggcacctcatac

SEQ ID NO: 5264 - DNA, 21 bp, synthetic construct
  source 1..21: mol_type = other DNA; mol_type = other DNA
ttttcaaagaccggcatcaac

SEQ ID NO: 5265 - DNA, 21 bp, synthetic construct
  source 1..21: mol_type = other DNA; mol_type = other DNA
tactcacgcgaaggctacaac

SEQ ID NO: 5266 - DNA, 21 bp, synthetic construct
  source 1..21: mol_type = other DNA; mol_type = other DNA
tatacgaaatcccagacggat

SEQ ID NO: 5267 - DNA, 21 bp, synthetic construct
  source 1..21: mol_type = other DNA; mol_type = other DNA
ttgaataggttggggccgacg

SEQ ID NO: 5268 - DNA, 21 bp, synthetic construct
  source 1..21: mol_type = other DNA; mol_type = other DNA
aggtattccacgaatggggtg

SEQ ID NO: 5269 - DNA, 21 bp, synthetic construct
  source 1..21: mol_type = other DNA; mol_type = other DNA
ttcgcgaaattggggttcaat

SEQ ID NO: 5270 - DNA, 21 bp, synthetic construct
  source 1..21: mol_type = other DNA; mol_type = other DNA
ttgtccaaaacgaatttcaat

SEQ ID NO: 5271 - DNA, 21 bp, synthetic construct
  source 1..21: mol_type = other DNA; mol_type = other DNA
tacgccaagaacaactacaac

SEQ ID NO: 5272 - DNA, 21 bp, synthetic construct
  source 1..21: mol_type = other DNA; mol_type = other DNA
tcagacggcaactcatcatac

SEQ ID NO: 5273 - DNA, 21 bp, synthetic construct
  source 1..21: mol_type = other DNA; mol_type = other DNA
agggggtccccgacgttgtat

SEQ ID NO: 5274 - DNA, 21 bp, synthetic construct
  source 1..21: mol_type = other DNA; mol_type = other DNA
ttcgcgaaaacggggacgaat

SEQ ID NO: 5275 - DNA, 21 bp, synthetic construct
  source 1..21: mol_type = other DNA; mol_type = other DNA
ttttcaaagcataacctgaac

SEQ ID NO: 5276 - DNA, 21 bp, synthetic construct
  source 1..21: mol_type = other DNA; mol_type = other DNA
ttttcaaagatgaacatgaac

SEQ ID NO: 5277 - DNA, 21 bp, synthetic construct
  source 1..21: mol_type = other DNA; mol_type = other DNA
ttcgcgaggatagggtccaat

SEQ ID NO: 5278 - DNA, 21 bp, synthetic construct
  source 1..21: mol_type = other DNA; mol_type = other DNA
aatccggggaggtcctcctat

SEQ ID NO: 5279 - DNA, 21 bp, synthetic construct
  source 1..21: mol_type = other DNA; mol_type = other DNA
aatatgacggggaaatccgcg

SEQ ID NO: 5280 - DNA, 21 bp, synthetic construct
  source 1..21: mol_type = other DNA; mol_type = other DNA
ttggcgaaaatggggacgaat

SEQ ID NO: 5281 - DNA, 21 bp, synthetic construct
  source 1..21: mol_type = other DNA; mol_type = other DNA
gagaggaaaccggggaatata

SEQ ID NO: 5282 - DNA, 21 bp, synthetic construct
  source 1..21: mol_type = other DNA; mol_type = other DNA
ccgttgtccacgaatggggtg

SEQ ID NO: 5283 - DNA, 21 bp, synthetic construct
  source 1..21: mol_type = other DNA; mol_type = other DNA
tcctattcctccaatggggtg

SEQ ID NO: 5284 - DNA, 21 bp, synthetic construct
  source 1..21: mol_type = other DNA; mol_type = other DNA
ctgtcaaagcaaggcctgaac

SEQ ID NO: 5285 - DNA, 21 bp, synthetic construct
  source 1..21: mol_type = other DNA; mol_type = other DNA
tactcacgccccggctcaaac

SEQ ID NO: 5286 - DNA, 21 bp, synthetic construct
  source 1..21: mol_type = other DNA; mol_type = other DNA
ctgtcacgcaacaacgaaaac

SEQ ID NO: 5287 - DNA, 21 bp, synthetic construct
  source 1..21: mol_type = other DNA; mol_type = other DNA
ttttcaaagatgaaccaaaac

SEQ ID NO: 5288 - DNA, 21 bp, synthetic construct
  source 1..21: mol_type = other DNA; mol_type = other DNA
acgccggggaggtccgggttc

SEQ ID NO: 5289 - DNA, 21 bp, synthetic construct
  source 1..21: mol_type = other DNA; mol_type = other DNA
gcgcactcctccaatggggtg

SEQ ID NO: 5290 - DNA, 21 bp, synthetic construct
  source 1..21: mol_type = other DNA; mol_type = other DNA
cgcggcgaccaatcaacctgg

SEQ ID NO: 5291 - DNA, 21 bp, synthetic construct
  source 1..21: mol_type = other DNA; mol_type = other DNA
ttctccaaaatggggatgaat

SEQ ID NO: 5292 - DNA, 21 bp, synthetic construct
  source 1..21: mol_type = other DNA; mol_type = other DNA
aggggggatcacgcggggttc

SEQ ID NO: 5293 - DNA, 21 bp, synthetic construct
  source 1..21: mol_type = other DNA; mol_type = other DNA
tttgccaaggaaaaccgcaac

SEQ ID NO: 5294 - DNA, 21 bp, synthetic construct
  source 1..21: mol_type = other DNA; mol_type = other DNA
ttctccaaagggaatgtgaat

SEQ ID NO: 5295 - DNA, 21 bp, synthetic construct
  source 1..21: mol_type = other DNA; mol_type = other DNA
tacgccaagctgaacgacaac

SEQ ID NO: 5296 - DNA, 21 bp, synthetic construct
  source 1..21: mol_type = other DNA; mol_type = other DNA
aataatagggggacgccggcg

SEQ ID NO: 5297 - DNA, 21 bp, synthetic construct
  source 1..21: mol_type = other DNA; mol_type = other DNA
tattccaggccgaatccgaat

SEQ ID NO: 5298 - DNA, 21 bp, synthetic construct
  source 1..21: mol_type = other DNA; mol_type = other DNA
tttgccaagcatggcatgaac

SEQ ID NO: 5299 - DNA, 21 bp, synthetic construct
  source 1..21: mol_type = other DNA; mol_type = other DNA
tacgcccgccccaaccataac

SEQ ID NO: 5300 - DNA, 21 bp, synthetic construct
  source 1..21: mol_type = other DNA; mol_type = other DNA
ttcgcgaaaccgaattggaat

SEQ ID NO: 5301 - DNA, 21 bp, synthetic construct
  source 1..21: mol_type = other DNA; mol_type = other DNA
ttctccaggaatgggcagaat

SEQ ID NO: 5302 - DNA, 21 bp, synthetic construct
  source 1..21: mol_type = other DNA; mol_type = other DNA
aagtcaggcggctacccctac

SEQ ID NO: 5303 - DNA, 21 bp, synthetic construct
  source 1..21: mol_type = other DNA; mol_type = other DNA
tacgcccgctcatcagactca

SEQ ID NO: 5304 - DNA, 21 bp, synthetic construct
  source 1..21: mol_type = other DNA; mol_type = other DNA
ctgtcacgcgtaaacatgaac

SEQ ID NO: 5305 - DNA, 21 bp, synthetic construct
  source 1..21: mol_type = other DNA; mol_type = other DNA
aaatccgggaattcctcctat

SEQ ID NO: 5306 - DNA, 21 bp, synthetic construct
  source 1..21: mol_type = other DNA; mol_type = other DNA
tattccaggccggggacgaat

SEQ ID NO: 5307 - DNA, 21 bp, synthetic construct
  source 1..21: mol_type = other DNA; mol_type = other DNA
atgtcacgcctgaacgccacc

SEQ ID NO: 5308 - DNA, 21 bp, synthetic construct
  source 1..21: mol_type = other DNA; mol_type = other DNA
tacgccaagaagggcgaaaac

SEQ ID NO: 5309 - DNA, 21 bp, synthetic construct
  source 1..21: mol_type = other DNA; mol_type = other DNA
tatgcgaaagtggggacgaat

SEQ ID NO: 5310 - DNA, 21 bp, synthetic construct
  source 1..21: mol_type = other DNA; mol_type = other DNA
ttctccaggataaatcacaat

SEQ ID NO: 5311 - DNA, 21 bp, synthetic construct
  source 1..21: mol_type = other DNA; mol_type = other DNA
tacacccgctcacaagaaatg

SEQ ID NO: 5312 - DNA, 21 bp, synthetic construct
  source 1..21: mol_type = other DNA; mol_type = other DNA
ctgtcaaagctgaacggcaac

SEQ ID NO: 5313 - DNA, 21 bp, synthetic construct
  source 1..21: mol_type = other DNA; mol_type = other DNA
tatgcgaggatgaatcagaat

SEQ ID NO: 5314 - DNA, 21 bp, synthetic construct
  source 1..21: mol_type = other DNA; mol_type = other DNA
tataatgcggtgataatgaaa

SEQ ID NO: 5315 - DNA, 21 bp, synthetic construct
  source 1..21: mol_type = other DNA; mol_type = other DNA
tacgcccgccccaacgtaaac

SEQ ID NO: 5316 - DNA, 21 bp, synthetic construct
  source 1..21: mol_type = other DNA; mol_type = other DNA
ctggcccgccccggcaacaac

SEQ ID NO: 5317 - DNA, 21 bp, synthetic construct
  source 1..21: mol_type = other DNA; mol_type = other DNA
tttgcccgcctgaacaccaac

SEQ ID NO: 5318 - DNA, 21 bp, synthetic construct
  source 1..21: mol_type = other DNA; mol_type = other DNA
aggaattcccagtccgtgttc

SEQ ID NO: 5319 - DNA, 21 bp, synthetic construct
  source 1..21: mol_type = other DNA; mol_type = other DNA
ctgtggcgcaacgccgaaaac

SEQ ID NO: 5320 - DNA, 21 bp, synthetic construct
  source 1..21: mol_type = other DNA; mol_type = other DNA
tttgccaagaccggctcaaac

SEQ ID NO: 5321 - DNA, 21 bp, synthetic construct
  source 1..21: mol_type = other DNA; mol_type = other DNA
agggggacgtcctccaattat

SEQ ID NO: 5322 - DNA, 21 bp, synthetic construct
  source 1..21: mol_type = other DNA; mol_type = other DNA
ttgtccagggcgcagtccata

SEQ ID NO: 5323 - DNA, 21 bp, synthetic construct
  source 1..21: mol_type = other DNA; mol_type = other DNA
gggccggtgcacgtgaattat

SEQ ID NO: 5324 - DNA, 21 bp, synthetic construct
  source 1..21: mol_type = other DNA; mol_type = other DNA
tattccgtgaggcacccgaat

SEQ ID NO: 5325 - DNA, 21 bp, synthetic construct
  source 1..21: mol_type = other DNA; mol_type = other DNA
ttcgcgaaagataataggaat

SEQ ID NO: 5326 - DNA, 21 bp, synthetic construct
  source 1..21: mol_type = other DNA; mol_type = other DNA
tcacgcaacggcggcaacgcc

SEQ ID NO: 5327 - DNA, 21 bp, synthetic construct
  source 1..21: mol_type = other DNA; mol_type = other DNA
tgggcgaaattgtccttgaat

SEQ ID NO: 5328 - DNA, 21 bp, synthetic construct
  source 1..21: mol_type = other DNA; mol_type = other DNA
tttgccaagcaaggcaacaac

SEQ ID NO: 5329 - DNA, 21 bp, synthetic construct
  source 1..21: mol_type = other DNA; mol_type = other DNA
tacgccaagatcggcgaaaac

SEQ ID NO: 5330 - DNA, 21 bp, synthetic construct
  source 1..21: mol_type = other DNA; mol_type = other DNA
ttttcacgccaaaacaccaac

SEQ ID NO: 5331 - DNA, 21 bp, synthetic construct
  source 1..21: mol_type = other DNA; mol_type = other DNA
ttttcaaagtcaaaccataac

SEQ ID NO: 5332 - DNA, 21 bp, synthetic construct
  source 1..21: mol_type = other DNA; mol_type = other DNA
tacgcccgcgtaaacatcaac

SEQ ID NO: 5333 - DNA, 21 bp, synthetic construct
  source 1..21: mol_type = other DNA; mol_type = other DNA
tacgcccgcatcaacatgaac

SEQ ID NO: 5334 - DNA, 21 bp, synthetic construct
  source 1..21: mol_type = other DNA; mol_type = other DNA
ttttcaaagtcaggctcaaac

SEQ ID NO: 5335 - DNA, 21 bp, synthetic construct
  source 1..21: mol_type = other DNA; mol_type = other DNA
aatgtgaggaatcagatggcg

SEQ ID NO: 5336 - DNA, 21 bp, synthetic construct
  source 1..21: mol_type = other DNA; mol_type = other DNA
tactcaaagcccggctttaac

SEQ ID NO: 5337 - DNA, 21 bp, synthetic construct
  source 1..21: mol_type = other DNA; mol_type = other DNA
ttcgcgagggcgaatttgaat

SEQ ID NO: 5338 - DNA, 21 bp, synthetic construct
  source 1..21: mol_type = other DNA; mol_type = other DNA
tacgccaaggacggctacaac

SEQ ID NO: 5339 - DNA, 21 bp, synthetic construct
  source 1..21: mol_type = other DNA; mol_type = other DNA
tatgcgaggccgggggataat

SEQ ID NO: 5340 - DNA, 21 bp, synthetic construct
  source 1..21: mol_type = other DNA; mol_type = other DNA
ggcgacaaggtaatccgctac

SEQ ID NO: 5341 - DNA, 21 bp, synthetic construct
  source 1..21: mol_type = other DNA; mol_type = other DNA
tatgcgaaatataatttgaat

SEQ ID NO: 5342 - DNA, 21 bp, synthetic construct
  source 1..21: mol_type = other DNA; mol_type = other DNA
ttcgcgaaaatgaatataaat

SEQ ID NO: 5343 - DNA, 21 bp, synthetic construct
  source 1..21: mol_type = other DNA; mol_type = other DNA
ttctccaaaatggggtccaat

SEQ ID NO: 5344 - DNA, 21 bp, synthetic construct
  source 1..21: mol_type = other DNA; mol_type = other DNA
aactcacgcctgaacgacaac

SEQ ID NO: 5345 - DNA, 21 bp, synthetic construct
  source 1..21: mol_type = other DNA; mol_type = other DNA
gtatcaaacaagggcgccggc

SEQ ID NO: 5346 - DNA, 21 bp, synthetic construct
  source 1..21: mol_type = other DNA; mol_type = other DNA
aggggggagcacaatgcgtgg

SEQ ID NO: 5347 - DNA, 21 bp, synthetic construct
  source 1..21: mol_type = other DNA; mol_type = other DNA
tatgagaggttcataccgaat

SEQ ID NO: 5348 - DNA, 21 bp, synthetic construct
  source 1..21: mol_type = other DNA; mol_type = other DNA
acgaaatccgggacgaatgcg

SEQ ID NO: 5349 - DNA, 21 bp, synthetic construct
  source 1..21: mol_type = other DNA; mol_type = other DNA
tatgcgttgaaagggatgaat

SEQ ID NO: 5350 - DNA, 21 bp, synthetic construct
  source 1..21: mol_type = other DNA; mol_type = other DNA
tttgccaagtcaggcggcaac

SEQ ID NO: 5351 - DNA, 21 bp, synthetic construct
  source 1..21: mol_type = other DNA; mol_type = other DNA
tttgcccgctcaaaccaaaac

SEQ ID NO: 5352 - DNA, 21 bp, synthetic construct
  source 1..21: mol_type = other DNA; mol_type = other DNA
ttcgcgaaaatagggaataat

SEQ ID NO: 5353 - DNA, 21 bp, synthetic construct
  source 1..21: mol_type = other DNA; mol_type = other DNA
tcctccgggtccaatcactgg

SEQ ID NO: 5354 - DNA, 21 bp, synthetic construct
  source 1..21: mol_type = other DNA; mol_type = other DNA
atgacggggacgtcctcctat

SEQ ID NO: 5355 - DNA, 21 bp, synthetic construct
  source 1..21: mol_type = other DNA; mol_type = other DNA
tactcacgccccggccaaaac

SEQ ID NO: 5356 - DNA, 21 bp, synthetic construct
  source 1..21: mol_type = other DNA; mol_type = other DNA
ttttcaaagggcaacaccaac

SEQ ID NO: 5357 - DNA, 21 bp, synthetic construct
  source 1..21: mol_type = other DNA; mol_type = other DNA
cgccgcgacggcgtaaacgcc

SEQ ID NO: 5358 - DNA, 21 bp, synthetic construct
  source 1..21: mol_type = other DNA; mol_type = other DNA
tatcacaaatattccacggat

SEQ ID NO: 5359 - DNA, 21 bp, synthetic construct
  source 1..21: mol_type = other DNA; mol_type = other DNA
tactcaaagcccaacaacaac

SEQ ID NO: 5360 - DNA, 21 bp, synthetic construct
  source 1..21: mol_type = other DNA; mol_type = other DNA
ttcgcgaaaatggggataaat

SEQ ID NO: 5361 - DNA, 21 bp, synthetic construct
  source 1..21: mol_type = other DNA; mol_type = other DNA
ttcgcgaaacacaatataaat

SEQ ID NO: 5362 - DNA, 21 bp, synthetic construct
  source 1..21: mol_type = other DNA; mol_type = other DNA
acccgctcaggcggcgtagcc

SEQ ID NO: 5363 - DNA, 21 bp, synthetic construct
  source 1..21: mol_type = other DNA; mol_type = other DNA
aaccgctcaggcatggccgcc

SEQ ID NO: 5364 - DNA, 21 bp, synthetic construct
  source 1..21: mol_type = other DNA; mol_type = other DNA
tataggcaggggttgtccaat

SEQ ID NO: 5365 - DNA, 21 bp, synthetic construct
  source 1..21: mol_type = other DNA; mol_type = other DNA
ttcgcgaggataaatatgaat

SEQ ID NO: 5366 - DNA, 21 bp, synthetic construct
  source 1..21: mol_type = other DNA; mol_type = other DNA
ttcgcgaaattggggcacaat

SEQ ID NO: 5367 - DNA, 21 bp, synthetic construct
  source 1..21: mol_type = other DNA; mol_type = other DNA
ttcgcgaaacagaataataat

SEQ ID NO: 5368 - DNA, 21 bp, synthetic construct
  source 1..21: mol_type = other DNA; mol_type = other DNA
tttgccaagcatggctcaaac

SEQ ID NO: 5369 - DNA, 21 bp, synthetic construct
  source 1..21: mol_type = other DNA; mol_type = other DNA
ttctccaaacaggggcagaat

SEQ ID NO: 5370 - DNA, 21 bp, synthetic construct
  source 1..21: mol_type = other DNA; mol_type = other DNA
gatatgaggaggatgggggag

SEQ ID NO: 5371 - DNA, 21 bp, synthetic construct
  source 1..21: mol_type = other DNA; mol_type = other DNA
ggccccggcatctcaaagtac

SEQ ID NO: 5372 - DNA, 21 bp, synthetic construct
  source 1..21: mol_type = other DNA; mol_type = other DNA
aacaccgtaaacaccatgcgc

SEQ ID NO: 5373 - DNA, 21 bp, synthetic construct
  source 1..21: mol_type = other DNA; mol_type = other DNA
ttctccaaagtgaatcagaat

SEQ ID NO: 5374 - DNA, 21 bp, synthetic construct
  source 1..21: mol_type = other DNA; mol_type = other DNA
tactcaaagaccaaccaaaac

SEQ ID NO: 5375 - DNA, 21 bp, synthetic construct
  source 1..21: mol_type = other DNA; mol_type = other DNA
tacgccaagtttaacgccaac

SEQ ID NO: 5376 - DNA, 21 bp, synthetic construct
  source 1..21: mol_type = other DNA; mol_type = other DNA
ctggccaagtcatcacccatc

SEQ ID NO: 5377 - DNA, 21 bp, synthetic construct
  source 1..21: mol_type = other DNA; mol_type = other DNA
acccgctcaggcggctcaccc

SEQ ID NO: 5378 - DNA, 21 bp, synthetic construct
  source 1..21: mol_type = other DNA; mol_type = other DNA
tacgccaagggcaacggcaac

SEQ ID NO: 5379 - DNA, 21 bp, synthetic construct
  source 1..21: mol_type = other DNA; mol_type = other DNA
tttgccaagcaaggctcaaac

SEQ ID NO: 5380 - DNA, 21 bp, synthetic construct
  source 1..21: mol_type = other DNA; mol_type = other DNA
ttctccaaaaataattccaat

SEQ ID NO: 5381 - DNA, 21 bp, synthetic construct
  source 1..21: mol_type = other DNA; mol_type = other DNA
ttttcaaaggtaaaccccaac

SEQ ID NO: 5382 - DNA, 21 bp, synthetic construct
  source 1..21: mol_type = other DNA; mol_type = other DNA
tatggggcgatagggaggaat

SEQ ID NO: 5383 - DNA, 21 bp, synthetic construct
  source 1..21: mol_type = other DNA; mol_type = other DNA
ttttcaaagtcaaacaacaac

SEQ ID NO: 5384 - DNA, 21 bp, synthetic construct
  source 1..21: mol_type = other DNA; mol_type = other DNA
ttcgcgaggttgaatcagaat

SEQ ID NO: 5385 - DNA, 21 bp, synthetic construct
  source 1..21: mol_type = other DNA; mol_type = other DNA
atgaggaatcagccgaatgcg

SEQ ID NO: 5386 - DNA, 21 bp, synthetic construct
  source 1..21: mol_type = other DNA; mol_type = other DNA
tatacgagggtggattccaat

SEQ ID NO: 5387 - DNA, 21 bp, synthetic construct
  source 1..21: mol_type = other DNA; mol_type = other DNA
tactcacgccccggcggcaac

SEQ ID NO: 5388 - DNA, 21 bp, synthetic construct
  source 1..21: mol_type = other DNA; mol_type = other DNA
cactccaggttgacggataat

SEQ ID NO: 5389 - DNA, 21 bp, synthetic construct
  source 1..21: mol_type = other DNA; mol_type = other DNA
gtaggctcaaaccattcatgg

SEQ ID NO: 5390 - DNA, 21 bp, synthetic construct
  source 1..21: mol_type = other DNA; mol_type = other DNA
ttgcacgattccaggacgtat

SEQ ID NO: 5391 - DNA, 21 bp, synthetic construct
  source 1..21: mol_type = other DNA; mol_type = other DNA
tacgccaagtacaacggcaac

SEQ ID NO: 5392 - DNA, 21 bp, synthetic construct
  source 1..21: mol_type = other DNA; mol_type = other DNA
acgtattccaaaccgaattcc

SEQ ID NO: 5393 - DNA, 21 bp, synthetic construct
  source 1..21: mol_type = other DNA; mol_type = other DNA
tattccagggagaatgcgaat

SEQ ID NO: 5394 - DNA, 21 bp, synthetic construct
  source 1..21: mol_type = other DNA; mol_type = other DNA
aaagcggagtatggggcgggg

SEQ ID NO: 5395 - DNA, 21 bp, synthetic construct
  source 1..21: mol_type = other DNA; mol_type = other DNA
tttgccaaggtaggcaacaac

SEQ ID NO: 5396 - DNA, 21 bp, synthetic construct
  source 1..21: mol_type = other DNA; mol_type = other DNA
gggacgtcctccgcggcgtgg

SEQ ID NO: 5397 - DNA, 21 bp, synthetic construct
  source 1..21: mol_type = other DNA; mol_type = other DNA
ttttcaaagcatggctcaaac

SEQ ID NO: 5398 - DNA, 21 bp, synthetic construct
  source 1..21: mol_type = other DNA; mol_type = other DNA
tatgcgagggggtccgatttg

SEQ ID NO: 5399 - DNA, 21 bp, synthetic construct
  source 1..21: mol_type = other DNA; mol_type = other DNA
ttctccaggccgaatataaat

SEQ ID NO: 5400 - DNA, 21 bp, synthetic construct
  source 1..21: mol_type = other DNA; mol_type = other DNA
tttgccaagatgggcgccaac

SEQ ID NO: 5401 - DNA, 21 bp, synthetic construct
  source 1..21: mol_type = other DNA; mol_type = other DNA
ttctccaaaacgaatcacaat

SEQ ID NO: 5402 - DNA, 21 bp, synthetic construct
  source 1..21: mol_type = other DNA; mol_type = other DNA
aggttctccggggagccgtcc

SEQ ID NO: 5403 - DNA, 21 bp, synthetic construct
  source 1..21: mol_type = other DNA; mol_type = other DNA
aaatccgatgggtccacgtgg

SEQ ID NO: 5404 - DNA, 21 bp, synthetic construct
  source 1..21: mol_type = other DNA; mol_type = other DNA
ataacgaatgtgaattatggg

SEQ ID NO: 5405 - DNA, 21 bp, synthetic construct
  source 1..21: mol_type = other DNA; mol_type = other DNA
tatgtgcagaataggccgaat

SEQ ID NO: 5406 - DNA, 21 bp, synthetic construct
  source 1..21: mol_type = other DNA; mol_type = other DNA
tacctgcccggccatatgaac

SEQ ID NO: 5407 - DNA, 21 bp, synthetic construct
  source 1..21: mol_type = other DNA; mol_type = other DNA
tatataagggggaatacgaat

SEQ ID NO: 5408 - DNA, 21 bp, synthetic construct
  source 1..21: mol_type = other DNA; mol_type = other DNA
ttctccaggcacaatgggaat

SEQ ID NO: 5409 - DNA, 21 bp, synthetic construct
  source 1..21: mol_type = other DNA; mol_type = other DNA
cgcggcggcaacaccatgccc

SEQ ID NO: 5410 - DNA, 21 bp, synthetic construct
  source 1..21: mol_type = other DNA; mol_type = other DNA
ttcgcgaggataggggagaat

SEQ ID NO: 5411 - DNA, 21 bp, synthetic construct
  source 1..21: mol_type = other DNA; mol_type = other DNA
cgctcaaacggctcaggctca

SEQ ID NO: 5412 - DNA, 21 bp, synthetic construct
  source 1..21: mol_type = other DNA; mol_type = other DNA
ggggggaataaatccaattat

SEQ ID NO: 5413 - DNA, 21 bp, synthetic construct
  source 1..21: mol_type = other DNA; mol_type = other DNA
tactcacgctcagccaaggac

SEQ ID NO: 5414 - DNA, 21 bp, synthetic construct
  source 1..21: mol_type = other DNA; mol_type = other DNA
ttcgcgaggcacggggataat

SEQ ID NO: 5415 - DNA, 21 bp, synthetic construct
  source 1..21: mol_type = other DNA; mol_type = other DNA
tacgcccgcgacggcatcaac

SEQ ID NO: 5416 - DNA, 21 bp, synthetic construct
  source 1..21: mol_type = other DNA; mol_type = other DNA
tacgcccgccataacatcaac

SEQ ID NO: 5417 - DNA, 21 bp, synthetic construct
  source 1..21: mol_type = other DNA; mol_type = other DNA
tatgcgagggagggggtgaat

SEQ ID NO: 5418 - DNA, 21 bp, synthetic construct
  source 1..21: mol_type = other DNA; mol_type = other DNA
acgagggatgtggcggggagg

SEQ ID NO: 5419 - DNA, 21 bp, synthetic construct
  source 1..21: mol_type = other DNA; mol_type = other DNA
tcactgggctcatcaaagtac

SEQ ID NO: 5420 - DNA, 21 bp, synthetic construct
  source 1..21: mol_type = other DNA; mol_type = other DNA
ttcgcgaaagggggggggaat

SEQ ID NO: 5421 - DNA, 21 bp, synthetic construct
  source 1..21: mol_type = other DNA; mol_type = other DNA
gggagggatagggggccgggg

SEQ ID NO: 5422 - DNA, 21 bp, synthetic construct
  source 1..21: mol_type = other DNA; mol_type = other DNA
ataaaaggggggtcctccggg

SEQ ID NO: 5423 - DNA, 21 bp, synthetic construct
  source 1..21: mol_type = other DNA; mol_type = other DNA
tacaagggcggctacaacaac

SEQ ID NO: 5424 - DNA, 21 bp, synthetic construct
  source 1..21: mol_type = other DNA; mol_type = other DNA
tttgcccgccgcggcgaaaac

SEQ ID NO: 5425 - DNA, 21 bp, synthetic construct
  source 1..21: mol_type = other DNA; mol_type = other DNA
tttgcccgctacaacaccaac

SEQ ID NO: 5426 - DNA, 21 bp, synthetic construct
  source 1..21: mol_type = other DNA; mol_type = other DNA
tactcacgccccaactcaaac

SEQ ID NO: 5427 - DNA, 21 bp, synthetic construct
  source 1..21: mol_type = other DNA; mol_type = other DNA
tactcaaaggaaggctacaac

SEQ ID NO: 5428 - DNA, 21 bp, synthetic construct
  source 1..21: mol_type = other DNA; mol_type = other DNA
ttcgcgaaaatggggcagaat

SEQ ID NO: 5429 - DNA, 21 bp, synthetic construct
  source 1..21: mol_type = other DNA; mol_type = other DNA
tttgccaagtcaaacaacaac

SEQ ID NO: 5430 - DNA, 21 bp, synthetic construct
  source 1..21: mol_type = other DNA; mol_type = other DNA
ttttcacgcgaaggccgcaac

SEQ ID NO: 5431 - DNA, 21 bp, synthetic construct
  source 1..21: mol_type = other DNA; mol_type = other DNA
atgacggggaattccgcgtat

SEQ ID NO: 5432 - DNA, 21 bp, synthetic construct
  source 1..21: mol_type = other DNA; mol_type = other DNA
tttgccaagctgggcaacaac

SEQ ID NO: 5433 - DNA, 21 bp, synthetic construct
  source 1..21: mol_type = other DNA; mol_type = other DNA
caagaatacggcggctaccaa

SEQ ID NO: 5434 - DNA, 21 bp, synthetic construct
  source 1..21: mol_type = other DNA; mol_type = other DNA
aacacccgcggcaacggctca

SEQ ID NO: 5435 - DNA, 21 bp, synthetic construct
  source 1..21: mol_type = other DNA; mol_type = other DNA
gcggagtcctccaggacgtat

SEQ ID NO: 5436 - DNA, 21 bp, synthetic construct
  source 1..21: mol_type = other DNA; mol_type = other DNA
aagaaccatggcggctcatac

SEQ ID NO: 5437 - DNA, 21 bp, synthetic construct
  source 1..21: mol_type = other DNA; mol_type = other DNA
tataaagcggatacgaggaat

SEQ ID NO: 5438 - DNA, 21 bp, synthetic construct
  source 1..21: mol_type = other DNA; mol_type = other DNA
tatgcgaaattgaatgagaat

SEQ ID NO: 5439 - DNA, 21 bp, synthetic construct
  source 1..21: mol_type = other DNA; mol_type = other DNA
tataatcagagggggcagaat

SEQ ID NO: 5440 - DNA, 21 bp, synthetic construct
  source 1..21: mol_type = other DNA; mol_type = other DNA
tttgccaagaccaaccaaaac

SEQ ID NO: 5441 - DNA, 21 bp, synthetic construct
  source 1..21: mol_type = other DNA; mol_type = other DNA
tggacctcaggctactcaaac

SEQ ID NO: 5442 - DNA, 21 bp, synthetic construct
  source 1..21: mol_type = other DNA; mol_type = other DNA
tactcaaagatcaacggcaac

SEQ ID NO: 5443 - DNA, 21 bp, synthetic construct
  source 1..21: mol_type = other DNA; mol_type = other DNA
gaccaatcatcaaccacctgg

SEQ ID NO: 5444 - DNA, 21 bp, synthetic construct
  source 1..21: mol_type = other DNA; mol_type = other DNA
tacgccaagcataacggcaac

SEQ ID NO: 5445 - DNA, 21 bp, synthetic construct
  source 1..21: mol_type = other DNA; mol_type = other DNA
ttcgcgaaatccaatgcgaat

SEQ ID NO: 5446 - DNA, 21 bp, synthetic construct
  source 1..21: mol_type = other DNA; mol_type = other DNA
ttcgcgaaacagaatacgaat

SEQ ID NO: 5447 - DNA, 21 bp, synthetic construct
  source 1..21: mol_type = other DNA; mol_type = other DNA
ttcgcgaggatgggggataat

SEQ ID NO: 5448 - DNA, 21 bp, synthetic construct
  source 1..21: mol_type = other DNA; mol_type = other DNA
ttctccaaagtgaatacgaat

SEQ ID NO: 5449 - DNA, 21 bp, synthetic construct
  source 1..21: mol_type = other DNA; mol_type = other DNA
tatacggatcacatgaggaat

SEQ ID NO: 5450 - DNA, 21 bp, synthetic construct
  source 1..21: mol_type = other DNA; mol_type = other DNA
taccgctcaaacgccatcgta

SEQ ID NO: 5451 - DNA, 21 bp, synthetic construct
  source 1..21: mol_type = other DNA; mol_type = other DNA
ttcgcgaggaataatcagaat

SEQ ID NO: 5452 - DNA, 21 bp, synthetic construct
  source 1..21: mol_type = other DNA; mol_type = other DNA
ttctccaaaatgggggggaat

SEQ ID NO: 5453 - DNA, 21 bp, synthetic construct
  source 1..21: mol_type = other DNA; mol_type = other DNA
ttcgcgaaaatgaatttcaat

SEQ ID NO: 5454 - DNA, 21 bp, synthetic construct
  source 1..21: mol_type = other DNA; mol_type = other DNA
tttgccaagcaaaactcaaac

SEQ ID NO: 5455 - DNA, 21 bp, synthetic construct
  source 1..21: mol_type = other DNA; mol_type = other DNA
aacgcccgcggcgccaacgcc

SEQ ID NO: 5456 - DNA, 21 bp, synthetic construct
  source 1..21: mol_type = other DNA; mol_type = other DNA
ttctccagggtgaatgggaat

SEQ ID NO: 5457 - DNA, 21 bp, synthetic construct
  source 1..21: mol_type = other DNA; mol_type = other DNA
aatacgagggggacgtccgcg

SEQ ID NO: 5458 - DNA, 21 bp, synthetic construct
  source 1..21: mol_type = other DNA; mol_type = other DNA
tacgccaagcccaacaacaac

SEQ ID NO: 5459 - DNA, 21 bp, synthetic construct
  source 1..21: mol_type = other DNA; mol_type = other DNA
ttcgcgaaaatgaatccgaat

SEQ ID NO: 5460 - DNA, 21 bp, synthetic construct
  source 1..21: mol_type = other DNA
ttcgtgaaatccgcgaatggg

SEQ ID NO: 5461 - DNA, 21 bp, synthetic construct
  source 1..21: mol_type = other DNA
ttcgcgaggcagaatgggaat

SEQ ID NO: 5462 - DNA, 21 bp, synthetic construct
  source 1..21: mol_type = other DNA; mol_type = other DNA
ttgtcctccaatttgaaatat

SEQ ID NO: 5463 - DNA, 21 bp, synthetic construct
  source 1..21: mol_type = other DNA; mol_type = other DNA
aggtcctccgggacgccggcg

SEQ ID NO: 5464 - DNA, 21 bp, synthetic construct
  source 1..21: mol_type = other DNA; mol_type = other DNA
ttcgcgaggttgaatgataat

SEQ ID NO: 5465 - DNA, 21 bp, synthetic construct
  source 1..21: mol_type = other DNA; mol_type = other DNA
tacgccaagatgaaccaaaac

SEQ ID NO: 5466 - DNA, 21 bp, synthetic construct
  source 1..21: mol_type = other DNA; mol_type = other DNA
tattccaaagatgggaggaat

SEQ ID NO: 5467 - DNA, 21 bp, synthetic construct
  source 1..21: mol_type = other DNA; mol_type = other DNA
ttgtatggggggacgaatccg

SEQ ID NO: 5468 - DNA, 21 bp, synthetic construct
  source 1..21: mol_type = other DNA; mol_type = other DNA
agggatcacatggcgaggggg

SEQ ID NO: 5469 - DNA, 21 bp, synthetic construct
  source 1..21: mol_type = other DNA; mol_type = other DNA
aggccgtatggggggtccgat

SEQ ID NO: 5470 - DNA, 21 bp, synthetic construct
  source 1..21: mol_type = other DNA; mol_type = other DNA
ttcgcgaggataaatataaat

SEQ ID NO: 5471 - DNA, 21 bp, synthetic construct
  source 1..21: mol_type = other DNA; mol_type = other DNA
gtaaacatgggcaaggcctac

SEQ ID NO: 5472 - DNA, 21 bp, synthetic construct
  source 1..21: mol_type = other DNA; mol_type = other DNA
ttcgcgaaaccggggtggaat

SEQ ID NO: 5473 - DNA, 21 bp, synthetic construct
  source 1..21: mol_type = other DNA; mol_type = other DNA
ttcgcgaaattcgggaataat

SEQ ID NO: 5474 - DNA, 21 bp, synthetic construct
  source 1..21: mol_type = other DNA; mol_type = other DNA
aaagcggattcctccaggtat

SEQ ID NO: 5475 - DNA, 21 bp, synthetic construct
  source 1..21: mol_type = other DNA; mol_type = other DNA
cgcggcaacggcaccggctca

SEQ ID NO: 5476 - DNA, 21 bp, synthetic construct
  source 1..21: mol_type = other DNA; mol_type = other DNA
gggggggtggcgtcctcctat

SEQ ID NO: 5477 - DNA, 21 bp, synthetic construct
  source 1..21: mol_type = other DNA; mol_type = other DNA
gacacctacggcaccaagcat

SEQ ID NO: 5478 - DNA, 21 bp, synthetic construct
  source 1..21: mol_type = other DNA; mol_type = other DNA
gactcaggcgtaggccgctac

SEQ ID NO: 5479 - DNA, 21 bp, synthetic construct
  source 1..21: mol_type = other DNA; mol_type = other DNA
tattccagggagggggggaat

SEQ ID NO: 5480 - DNA, 21 bp, synthetic construct
  source 1..21: mol_type = other DNA; mol_type = other DNA
tattgggggggggagaaacag

SEQ ID NO: 5481 - DNA, 21 bp, synthetic construct
  source 1..21: mol_type = other DNA; mol_type = other DNA
tttgccaagtttaacgccaac

SEQ ID NO: 5482 - DNA, 21 bp, synthetic construct
  source 1..21: mol_type = other DNA; mol_type = other DNA
accatctcatcatcaaactgg

SEQ ID NO: 5483 - DNA, 21 bp, synthetic construct
  source 1..21: mol_type = other DNA; mol_type = other DNA
ataaaatattcctcctccgat

SEQ ID NO: 5484 - DNA, 21 bp, synthetic construct
  source 1..21: mol_type = other DNA; mol_type = other DNA
ttcgcgaggccggggacgaat

SEQ ID NO: 5485 - DNA, 21 bp, synthetic construct
  source 1..21: mol_type = other DNA; mol_type = other DNA
cgctcaggcggcgccggcggc

SEQ ID NO: 5486 - DNA, 21 bp, synthetic construct
  source 1..21: mol_type = other DNA; mol_type = other DNA
aaagataatgcgacgaggtat

SEQ ID NO: 5487 - DNA, 21 bp, synthetic construct
  source 1..21: mol_type = other DNA; mol_type = other DNA
tacgccaagcccaactcaaac

SEQ ID NO: 5488 - DNA, 21 bp, synthetic construct
  source 1..21: mol_type = other DNA; mol_type = other DNA
tacgcccgctacaaccaaaac

SEQ ID NO: 5489 - DNA, 21 bp, synthetic construct
  source 1..21: mol_type = other DNA; mol_type = other DNA
aatgcgagggatataaggtat

SEQ ID NO: 5490 - DNA, 21 bp, synthetic construct
  source 1..21: mol_type = other DNA; mol_type = other DNA
atagggcacatggggtccgat

SEQ ID NO: 5491 - DNA, 21 bp, synthetic construct
  source 1..21: mol_type = other DNA; mol_type = other DNA
tactcacgcggcgaccataac

SEQ ID NO: 5492 - DNA, 21 bp, synthetic construct
  source 1..21: mol_type = other DNA; mol_type = other DNA
tataaaaatgggatgtccaat

SEQ ID NO: 5493 - DNA, 21 bp, synthetic construct
  source 1..21: mol_type = other DNA
ttctccaggccgggggcgaat

SEQ ID NO: 5494 - DNA, 21 bp, synthetic construct
  source 1..21: mol_type = other DNA
ttttcaaagcccggctacaac

SEQ ID NO: 5495 - DNA, 21 bp, synthetic construct
  source 1..21: mol_type = other DNA
ttttcacatgcctcatcatac

SEQ ID NO: 5496 - DNA, 21 bp, synthetic construct
  source 1..21: mol_type = other DNA
aagggcgacaagatcacctgg

SEQ ID NO: 5497 - DNA, 21 bp, synthetic construct
  source 1..21: mol_type = other DNA
tactcacaaggcaagaccaac

SEQ ID NO: 5498 - DNA, 21 bp, synthetic construct
  source 1..21: mol_type = other DNA
ttcgcgaaattgggggtgaat

SEQ ID NO: 5499 - DNA, 21 bp, synthetic construct
  source 1..21: mol_type = other DNA
ttctccaaagaggggaaaaat

SEQ ID NO: 5500 - DNA, 21 bp, synthetic construct
  source 1..21: mol_type = other DNA
atagtgaattccaggaattcc

SEQ ID NO: 5501 - DNA, 21 bp, synthetic construct
  source 1..21: mol_type = other DNA; mol_type = other DNA
tttgccaagatcaactacaac

SEQ ID NO: 5502 - DNA, 21 bp, synthetic construct
  source 1..21: mol_type = other DNA; mol_type = other DNA
atcggctactcaggcgccgac

SEQ ID NO: 5503 - DNA, 21 bp, synthetic construct
  source 1..21: mol_type = other DNA; mol_type = other DNA
ttcgcgaaatataatgagaat

SEQ ID NO: 5504 - DNA, 21 bp, synthetic construct
  source 1..21: mol_type = other DNA; mol_type = other DNA
ttttcaaaggtaaacaacaac

SEQ ID NO: 5505 - DNA, 21 bp, synthetic construct
  source 1..21: mol_type = other DNA; mol_type = other DNA
cataccaacgtaaccgcctgg

SEQ ID NO: 5506 - DNA, 21 bp, synthetic construct
  source 1..21: mol_type = other DNA; mol_type = other DNA
taccattcatcatcaggcaac

SEQ ID NO: 5507 - DNA, 21 bp, synthetic construct
  source 1..21: mol_type = other DNA; mol_type = other DNA
ttttttcaaggcggccatcat

SEQ ID NO: 5508 - DNA, 21 bp, synthetic construct
  source 1..21: mol_type = other DNA; mol_type = other DNA
ttcgcgaaaatgaatgtgaat

SEQ ID NO: 5509 - DNA, 21 bp, synthetic construct
  source 1..21: mol_type = other DNA; mol_type = other DNA
tacgccaaggtaaacatgaac

SEQ ID NO: 5510 - DNA, 21 bp, synthetic construct
  source 1..21: mol_type = other DNA; mol_type = other DNA
tataggtatgatgcggtggtg

SEQ ID NO: 5511 - DNA, 21 bp, synthetic construct
  source 1..21: mol_type = other DNA; mol_type = other DNA
tggaaaccgggggtgccgtcc

SEQ ID NO: 5512 - DNA, 21 bp, synthetic construct
  source 1..21: mol_type = other DNA; mol_type = other DNA
ttctccaaaccgaattccaat

SEQ ID NO: 5513 - DNA, 21 bp, synthetic construct
  source 1..21: mol_type = other DNA; mol_type = other DNA
tttgccaagctgaactcaaac

SEQ ID NO: 5514 - DNA, 21 bp, synthetic construct
  source 1..21: mol_type = other DNA; mol_type = other DNA
ttctccaaagggggggggaat

SEQ ID NO: 5515 - DNA, 21 bp, synthetic construct
  source 1..21: mol_type = other DNA; mol_type = other DNA
ttcgcgaggataaatgataat

SEQ ID NO: 5516 - DNA, 21 bp, synthetic construct
  source 1..21: mol_type = other DNA; mol_type = other DNA
ttcgcgaaaacgaatttgaat

SEQ ID NO: 5517 - DNA, 21 bp, synthetic construct
  source 1..21: mol_type = other DNA; mol_type = other DNA
gtatcaggctttaccaagcaa

SEQ ID NO: 5518 - DNA, 21 bp, synthetic construct
  source 1..21: mol_type = other DNA; mol_type = other DNA
ttctccaggttcaatgagaat

SEQ ID NO: 5519 - DNA, 21 bp, synthetic construct
  source 1..21: mol_type = other DNA; mol_type = other DNA
gtatcactgggcacccgcaac

SEQ ID NO: 5520 - DNA, 21 bp, synthetic construct
  source 1..21: mol_type = other DNA; mol_type = other DNA
ttctccagggggggggggaat

SEQ ID NO: 5521 - DNA, 21 bp, synthetic construct
  source 1..21: mol_type = other DNA; mol_type = other DNA
caaaagatcatgcgcggcgac

SEQ ID NO: 5522 - DNA, 21 bp, synthetic construct
  source 1..21: mol_type = other DNA; mol_type = other DNA
taccaacgcgacggctacggc

SEQ ID NO: 5523 - DNA, 21 bp, synthetic construct
  source 1..21: mol_type = other DNA; mol_type = other DNA
ttctccaaaacgaatacgaat

SEQ ID NO: 5524 - DNA, 21 bp, synthetic construct
  source 1..21: mol_type = other DNA; mol_type = other DNA
cactcccacggggggagggat

SEQ ID NO: 5525 - DNA, 21 bp, synthetic construct
  source 1..21: mol_type = other DNA; mol_type = other DNA
cacgataggacgtccacgtat

SEQ ID NO: 5526 - DNA, 21 bp, synthetic construct
  source 1..21: mol_type = other DNA; mol_type = other DNA
acctcagactcacgcggctgg

SEQ ID NO: 5527 - DNA, 21 bp, synthetic construct
  source 1..21: mol_type = other DNA; mol_type = other DNA
tggaggacggatgggatgggg

SEQ ID NO: 5528 - DNA, 21 bp, synthetic construct
  source 1..21: mol_type = other DNA; mol_type = other DNA
ggggtgaaatccgcgtatcag

SEQ ID NO: 5529 - DNA, 21 bp, synthetic construct
  source 1..21: mol_type = other DNA; mol_type = other DNA
tttgcccgcatgaacgaaaac

SEQ ID NO: 5530 - DNA, 21 bp, synthetic construct
  source 1..21: mol_type = other DNA; mol_type = other DNA
tattccaaacacaatgcgtcc

SEQ ID NO: 5531 - DNA, 21 bp, synthetic construct
  source 1..21: mol_type = other DNA; mol_type = other DNA
ttcgcgaaaatgaatacgaat

SEQ ID NO: 5532 - DNA, 21 bp, synthetic construct
  source 1..21: mol_type = other DNA; mol_type = other DNA
aaggccgaccgcaacccctac

SEQ ID NO: 5533 - DNA, 21 bp, synthetic construct
  source 1..21: mol_type = other DNA; mol_type = other DNA
ttttcacgcgacggcaagaac

SEQ ID NO: 5534 - DNA, 21 bp, synthetic construct
  source 1..21: mol_type = other DNA; mol_type = other DNA
tccaatgggaaatggtccggg

SEQ ID NO: 5535 - DNA, 21 bp, synthetic construct
  source 1..21: mol_type = other DNA; mol_type = other DNA
aataatttcgggacgagggat

SEQ ID NO: 5536 - DNA, 21 bp, synthetic construct
  source 1..21: mol_type = other DNA; mol_type = other DNA
ttcgcgaaagtgaatgcgaat

SEQ ID NO: 5537 - DNA, 21 bp, synthetic construct
  source 1..21: mol_type = other DNA; mol_type = other DNA
tatttcccggggacgatgccg

SEQ ID NO: 5538 - DNA, 21 bp, synthetic construct
  source 1..21: mol_type = other DNA; mol_type = other DNA
tatgcgcagcaggggttgaat

SEQ ID NO: 5539 - DNA, 21 bp, synthetic construct
  source 1..21: mol_type = other DNA; mol_type = other DNA
tatgcgagggatgggacgaat

SEQ ID NO: 5540 - DNA, 21 bp, synthetic construct
  source 1..21: mol_type = other DNA; mol_type = other DNA
ttcgcgaaacacaatgggaat

SEQ ID NO: 5541 - DNA, 21 bp, synthetic construct
  source 1..21: mol_type = other DNA; mol_type = other DNA
aggaatatggagtccatgtat

SEQ ID NO: 5542 - DNA, 21 bp, synthetic construct
  source 1..21: mol_type = other DNA; mol_type = other DNA
tttgccaagatcggcggcaac

SEQ ID NO: 5543 - DNA, 21 bp, synthetic construct
  source 1..21: mol_type = other DNA; mol_type = other DNA
ttcgcgaaaccggggtccaat

SEQ ID NO: 5544 - DNA, 21 bp, synthetic construct
  source 1..21: mol_type = other DNA; mol_type = other DNA
ttcgcgaaagcgggggataat

SEQ ID NO: 5545 - DNA, 21 bp, synthetic construct
  source 1..21: mol_type = other DNA; mol_type = other DNA
gatttcggggtgtccaggcac

SEQ ID NO: 5546 - DNA, 21 bp, synthetic construct
  source 1..21: mol_type = other DNA; mol_type = other DNA
ttcgcgaaatccaatacgaat

SEQ ID NO: 5547 - DNA, 21 bp, synthetic construct
  source 1..21: mol_type = other DNA; mol_type = other DNA
tatcacgggcacacgttgcac

SEQ ID NO: 5548 - DNA, 21 bp, synthetic construct
  source 1..21: mol_type = other DNA; mol_type = other DNA
tttgccaaggccggcggcaac

SEQ ID NO: 5549 - DNA, 21 bp, synthetic construct
  source 1..21: mol_type = other DNA; mol_type = other DNA
gccaacatgaaccgcaccgaa

SEQ ID NO: 5550 - DNA, 21 bp, synthetic construct
  source 1..21: mol_type = other DNA; mol_type = other DNA
ttttcacgcgaaaactcaaac

SEQ ID NO: 5551 - DNA, 21 bp, synthetic construct
  source 1..21: mol_type = other DNA; mol_type = other DNA
ttttcaaagggcaacgaaaac

SEQ ID NO: 5552 - DNA, 21 bp, synthetic construct
  source 1..21: mol_type = other DNA; mol_type = other DNA
tatgcgaaaatgaatgagaat

SEQ ID NO: 5553 - DNA, 21 bp, synthetic construct
  source 1..21: mol_type = other DNA; mol_type = other DNA
tacgccaagcccaacatgaac

SEQ ID NO: 5554 - DNA, 21 bp, synthetic construct
  source 1..21: mol_type = other DNA; mol_type = other DNA
gggaatcagaattccaattat

SEQ ID NO: 5555 - DNA, 21 bp, synthetic construct
  source 1..21: mol_type = other DNA; mol_type = other DNA
tattccagggatggggagaat

SEQ ID NO: 5556 - DNA, 21 bp, synthetic construct
  source 1..21: mol_type = other DNA; mol_type = other DNA
tacaaccaaaacacctacaag

SEQ ID NO: 5557 - DNA, 21 bp, synthetic construct
  source 1..21: mol_type = other DNA; mol_type = other DNA
tttgccaagctgaacgccaac

SEQ ID NO: 5558 - DNA, 21 bp, synthetic construct
  source 1..21: mol_type = other DNA; mol_type = other DNA
ttttcaaagaccaaccaaaac

SEQ ID NO: 5559 - DNA, 21 bp, synthetic construct
  source 1..21: mol_type = other DNA; mol_type = other DNA
ttctccaggccgaatgagaat

SEQ ID NO: 5560 - DNA, 21 bp, synthetic construct
  source 1..21: mol_type = other DNA; mol_type = other DNA
ttttcacgccccggcgtaaac

SEQ ID NO: 5561 - DNA, 21 bp, synthetic construct
  source 1..21: mol_type = other DNA; mol_type = other DNA
ttcgcgagggagggggtgaat

SEQ ID NO: 5562 - DNA, 21 bp, synthetic construct
  source 1..21: mol_type = other DNA; mol_type = other DNA
ttttcaaaggacggccgcaac

SEQ ID NO: 5563 - DNA, 21 bp, synthetic construct
  source 1..21: mol_type = other DNA; mol_type = other DNA
aatcacaaatccacggcgaat

SEQ ID NO: 5564 - DNA, 21 bp, synthetic construct
  source 1..21: mol_type = other DNA; mol_type = other DNA
ttcgcgaggccggggcagaat

SEQ ID NO: 5565 - DNA, 21 bp, synthetic construct
  source 1..21: mol_type = other DNA; mol_type = other DNA
aactcacaagacaccaagtgg

SEQ ID NO: 5566 - DNA, 21 bp, synthetic construct
  source 1..21: mol_type = other DNA; mol_type = other DNA
aacctgtcacatggccatggc

SEQ ID NO: 5567 - DNA, 21 bp, synthetic construct
  source 1..21: mol_type = other DNA; mol_type = other DNA
ttcgcgaggttcaatgagaat

SEQ ID NO: 5568 - DNA, 21 bp, synthetic construct
  source 1..21: mol_type = other DNA; mol_type = other DNA
tatatgaggaatacggtgccg

SEQ ID NO: 5569 - DNA, 21 bp, synthetic construct
  source 1..21: mol_type = other DNA; mol_type = other DNA
tatgagaaatatacgaattcc

SEQ ID NO: 5570 - DNA, 21 bp, synthetic construct
  source 1..21: mol_type = other DNA; mol_type = other DNA
catggcggcaccaagaacggc

SEQ ID NO: 5571 - DNA, 21 bp, synthetic construct
  source 1..21: mol_type = other DNA; mol_type = other DNA
ttttcacgcgacggccataac

SEQ ID NO: 5572 - DNA, 21 bp, synthetic construct
  source 1..21: mol_type = other DNA; mol_type = other DNA
ttttcaaagcccggcatcaac

SEQ ID NO: 5573 - DNA, 21 bp, synthetic construct
  source 1..21: mol_type = other DNA; mol_type = other DNA
ttcgcgaaacagggggataat

SEQ ID NO: 5574 - DNA, 21 bp, synthetic construct
  source 1..21: mol_type = other DNA; mol_type = other DNA
tttgccaagatcaacaccaac

SEQ ID NO: 5575 - DNA, 21 bp, synthetic construct
  source 1..21: mol_type = other DNA; mol_type = other DNA
tactcacgcgacggctcaaac

SEQ ID NO: 5576 - DNA, 21 bp, synthetic construct
  source 1..21: mol_type = other DNA; mol_type = other DNA
ttttcaaagcccaaccccaac

SEQ ID NO: 5577 - DNA, 21 bp, synthetic construct
  source 1..21: mol_type = other DNA; mol_type = other DNA
cgccccaccggccccaacggc

SEQ ID NO: 5578 - DNA, 21 bp, synthetic construct
  source 1..21: mol_type = other DNA; mol_type = other DNA
tggtcaggcggctcaggcggc

SEQ ID NO: 5579 - DNA, 21 bp, synthetic construct
  source 1..21: mol_type = other DNA; mol_type = other DNA
aactcagaccgcggcaagaac

SEQ ID NO: 5580 - DNA, 21 bp, synthetic construct
  source 1..21: mol_type = other DNA; mol_type = other DNA
gataaagggaataatgcgtat

SEQ ID NO: 5581 - DNA, 21 bp, synthetic construct
  source 1..21: mol_type = other DNA; mol_type = other DNA
gtagtagccatgcataagcaa

SEQ ID NO: 5582 - DNA, 21 bp, synthetic construct
  source 1..21: mol_type = other DNA; mol_type = other DNA
ataggggggaaacaggggttg

SEQ ID NO: 5583 - DNA, 21 bp, synthetic construct
  source 1..21: mol_type = other DNA; mol_type = other DNA
aggataaaagatacgccggag

SEQ ID NO: 5584 - DNA, 21 bp, synthetic construct
  source 1..21: mol_type = other DNA; mol_type = other DNA
tactacaagaccgactcatca

SEQ ID NO: 5585 - DNA, 21 bp, synthetic construct
  source 1..21: mol_type = other DNA; mol_type = other DNA
ttttcaaagatcaacggcaac

SEQ ID NO: 5586 - DNA, 21 bp, synthetic construct
  source 1..21: mol_type = other DNA; mol_type = other DNA
ctgggcgacggctggggcaag

SEQ ID NO: 5587 - DNA, 21 bp, synthetic construct
  source 1..21: mol_type = other DNA; mol_type = other DNA
ttttcaaagaacaacgaaaac

SEQ ID NO: 5588 - DNA, 21 bp, synthetic construct
  source 1..21: mol_type = other DNA; mol_type = other DNA
ttcgcgagggatggggcgaat

SEQ ID NO: 5589 - DNA, 21 bp, synthetic construct
  source 1..21: mol_type = other DNA; mol_type = other DNA
tacgccaaggacaacctgaac

SEQ ID NO: 5590 - DNA, 21 bp, synthetic construct
  source 1..21: mol_type = other DNA; mol_type = other DNA
ttcgcgaaagagaattccaat

SEQ ID NO: 5591 - DNA, 21 bp, synthetic construct
  source 1..21: mol_type = other DNA; mol_type = other DNA
gattataaagggttcccgtcc

SEQ ID NO: 5592 - DNA, 21 bp, synthetic construct
  source 1..21: mol_type = other DNA; mol_type = other DNA
ttcgcgaaattgggggataat

SEQ ID NO: 5593 - DNA, 21 bp, synthetic construct
  source 1..21: mol_type = other DNA; mol_type = other DNA
tttgccaaggacggctacaac

SEQ ID NO: 5594 - DNA, 21 bp, synthetic construct
  source 1..21: mol_type = other DNA; mol_type = other DNA
ttcgcgaaagatgggatgaat

SEQ ID NO: 5595 - DNA, 21 bp, synthetic construct
  source 1..21: mol_type = other DNA; mol_type = other DNA
ttcgcgaaagcgaatgagaat

SEQ ID NO: 5596 - DNA, 21 bp, synthetic construct
  source 1..21: mol_type = other DNA; mol_type = other DNA
ttcgcgaaagagggggggaat

SEQ ID NO: 5597 - DNA, 21 bp, synthetic construct
  source 1..21: mol_type = other DNA; mol_type = other DNA
taccccggctcaggcggcctg

SEQ ID NO: 5598 - DNA, 21 bp, synthetic construct
  source 1..21: mol_type = other DNA; mol_type = other DNA
aattcctccgggatgagggag

SEQ ID NO: 5599 - DNA, 21 bp, synthetic construct
  source 1..21: mol_type = other DNA; mol_type = other DNA
ttttcaaagcccaacctgaac

SEQ ID NO: 5600 - DNA, 21 bp, synthetic construct
  source 1..21: mol_type = other DNA; mol_type = other DNA
tactcaaagtttggcgtaaac

SEQ ID NO: 5601 - DNA, 21 bp, synthetic construct
  source 1..21: mol_type = other DNA; mol_type = other DNA
atcgcctcactgggccgcgac

SEQ ID NO: 5602 - DNA, 21 bp, synthetic construct
  source 1..21: mol_type = other DNA; mol_type = other DNA
ttttcaaagatcaacgacaac

SEQ ID NO: 5603 - DNA, 21 bp, synthetic construct
  source 1..21: mol_type = other DNA; mol_type = other DNA
gtacgcatcgaccaagcccaa

SEQ ID NO: 5604 - DNA, 21 bp, synthetic construct
  source 1..21: mol_type = other DNA; mol_type = other DNA
tacgccaaggaaaacctgaac

SEQ ID NO: 5605 - DNA, 21 bp, synthetic construct
  source 1..21: mol_type = other DNA; mol_type = other DNA
tttgcccgccccaaccataac

SEQ ID NO: 5606 - DNA, 21 bp, synthetic construct
  source 1..21: mol_type = other DNA; mol_type = other DNA
aatatacacgggtatgtgacg

SEQ ID NO: 5607 - DNA, 21 bp, synthetic construct
  source 1..21: mol_type = other DNA; mol_type = other DNA
tacgccaaggacaaccaaaac

SEQ ID NO: 5608 - DNA, 21 bp, synthetic construct
  source 1..21: mol_type = other DNA; mol_type = other DNA
ttttcaaaggaaaaccaaaac

SEQ ID NO: 5609 - DNA, 21 bp, synthetic construct
  source 1..21: mol_type = other DNA; mol_type = other DNA
ttcgcgaaaaataattataat

SEQ ID NO: 5610 - DNA, 21 bp, synthetic construct
  source 1..21: mol_type = other DNA; mol_type = other DNA
ttttcaaagtttggcatcaac

SEQ ID NO: 5611 - DNA, 21 bp, synthetic construct
  source 1..21: mol_type = other DNA; mol_type = other DNA
tattcccgactctccgcgata

SEQ ID NO: 5612 - DNA, 21 bp, synthetic construct
  source 1..21: mol_type = other DNA; mol_type = other DNA
tggcccccgcctgttaattcc

SEQ ID NO: 5613 - DNA, 21 bp, synthetic construct
  source 1..21: mol_type = other DNA; mol_type = other DNA
aggactgcactcgtatttcca

SEQ ID NO: 5614 - DNA, 21 bp, synthetic construct
  source 1..21: mol_type = other DNA; mol_type = other DNA
attcaccgtctactcccttcc

SEQ ID NO: 5615 - DNA, 21 bp, synthetic construct
  source 1..21: mol_type = other DNA; mol_type = other DNA
tactcacgtctatcagctatc

SEQ ID NO: 5616 - DNA, 21 bp, synthetic construct
  source 1..21: mol_type = other DNA; mol_type = other DNA
tattcacgtatcaatgcaaat

SEQ ID NO: 5617 - DNA, 21 bp, synthetic construct
  source 1..21: mol_type = other DNA; mol_type = other DNA
tattttactggcgttgtggcc

SEQ ID NO: 5618 - DNA, 21 bp, synthetic construct
  source 1..21: mol_type = other DNA
cgtaatgacatggtttttccc

SEQ ID NO: 5619 - DNA, 21 bp, synthetic construct
  source 1..21: mol_type = other DNA; mol_type = other DNA
ttgcataggctcttgaaagac

SEQ ID NO: 5620 - DNA, 21 bp, synthetic construct
  source 1..21: mol_type = other DNA; mol_type = other DNA
tatcttaaatctcagtcatat

SEQ ID NO: 5621 - DNA, 21 bp, synthetic construct
  source 1..21: mol_type = other DNA; mol_type = other DNA
tattctcggataaacacgaac

SEQ ID NO: 5622 - DNA, 21 bp, synthetic construct
  source 1..21: mol_type = other DNA; mol_type = other DNA
tggcctccaccggtcaacagc

SEQ ID NO: 5623 - DNA, 21 bp, synthetic construct
  source 1..21: mol_type = other DNA; mol_type = other DNA
tacacaaagtccgacgtgcgg

SEQ ID NO: 5624 - DNA, 21 bp, synthetic construct
  source 1..21: mol_type = other DNA; mol_type = other DNA
ttcagccgcgttggcttcaat

SEQ ID NO: 5625 - DNA, 21 bp, synthetic construct
  source 1..21: mol_type = other DNA; mol_type = other DNA
cgtacagcccttgtgttcccg

SEQ ID NO: 5626 - DNA, 21 bp, synthetic construct
  source 1..21: mol_type = other DNA; mol_type = other DNA
aaaacatatgatgcatttgtg

SEQ ID NO: 5627 - DNA, 21 bp, synthetic construct
  source 1..21: mol_type = other DNA; mol_type = other DNA
tatactaaatcggatgtacga

SEQ ID NO: 5628 - DNA, 21 bp, synthetic construct
  source 1..21: mol_type = other DNA; mol_type = other DNA
tatagcagatctaacgcaaat

SEQ ID NO: 5629 - DNA, 21 bp, synthetic construct
  source 1..21: mol_type = other DNA; mol_type = other DNA
tattcccggcccggccccaat

SEQ ID NO: 5630 - DNA, 21 bp, synthetic construct
  source 1..21: mol_type = other DNA; mol_type = other DNA
aagacctacgacgcgttcgtc

SEQ ID NO: 5631 - DNA, 21 bp, synthetic construct
  source 1..21: mol_type = other DNA; mol_type = other DNA
tatcttaagtctgaacgtaat

SEQ ID NO: 5632 - DNA, 21 bp, synthetic construct
  source 1..21: mol_type = other DNA; mol_type = other DNA
agatccgaacatgtctttcca

SEQ ID NO: 5633 - DNA, 21 bp, synthetic construct
  source 1..21: mol_type = other DNA; mol_type = other DNA
tcatacgcgaagtccctcttg

SEQ ID NO: 5634 - DNA, 21 bp, synthetic construct
  source 1..21: mol_type = other DNA; mol_type = other DNA
ttatctaagctaagtgcaaac

SEQ ID NO: 5635 - DNA, 21 bp, synthetic construct
  source 1..21: mol_type = other DNA; mol_type = other DNA
tattcgaggttatctgggaat

SEQ ID NO: 5636 - DNA, 21 bp, synthetic construct
  source 1..21: mol_type = other DNA; mol_type = other DNA
tacagccgtatcaataccaat

SEQ ID NO: 5637 - DNA, 21 bp, synthetic construct
  source 1..21: mol_type = other DNA; mol_type = other DNA
tatagcagactaaacaaagac

SEQ ID NO: 5638 - DNA, 21 bp, synthetic construct
  source 1..21: mol_type = other DNA; mol_type = other DNA
atccatagacttctaccctca

SEQ ID NO: 5639 - DNA, 21 bp, synthetic construct
  source 1..21: mol_type = other DNA; mol_type = other DNA
tactcagccattggaatgaac

SEQ ID NO: 5640 - DNA, 21 bp, synthetic construct
  source 1..21: mol_type = other DNA; mol_type = other DNA
tacctgaagagccaatcctac

SEQ ID NO: 5641 - DNA, 21 bp, synthetic construct
  source 1..21: mol_type = other DNA; mol_type = other DNA
tatttgaagagtcaggggaac

SEQ ID NO: 5642 - DNA, 21 bp, synthetic construct
  source 1..21: mol_type = other DNA; mol_type = other DNA
tacgcgcgaatcgggctgaac

SEQ ID NO: 5643 - DNA, 21 bp, synthetic construct
  source 1..21: mol_type = other DNA; mol_type = other DNA
cggaacgatatggtcttccct

SEQ ID NO: 5644 - DNA, 21 bp, synthetic construct
  source 1..21: mol_type = other DNA; mol_type = other DNA
tactcacgccttaataaggat

SEQ ID NO: 5645 - DNA, 21 bp, synthetic construct
  source 1..21: mol_type = other DNA; mol_type = other DNA
tatagcaaacttaatgataag

SEQ ID NO: 5646 - DNA, 21 bp, synthetic construct
  source 1..21: mol_type = other DNA; mol_type = other DNA
tatgccaaaaatggctttaac

SEQ ID NO: 5647 - DNA, 21 bp, synthetic construct
  source 1..21: mol_type = other DNA; mol_type = other DNA
tattcgaaggtccagaccaat

SEQ ID NO: 5648 - DNA, 21 bp, synthetic construct
  source 1..21: mol_type = other DNA; mol_type = other DNA
tactctcgttccaatgctaac

SEQ ID NO: 5649 - DNA, 21 bp, synthetic construct
  source 1..21: mol_type = other DNA; mol_type = other DNA
tacactcgcttaaaccaaaat

SEQ ID NO: 5650 - DNA, 21 bp, synthetic construct
  source 1..21: mol_type = other DNA; mol_type = other DNA
tacagtagattgtccggaaac

SEQ ID NO: 5651 - DNA, 21 bp, synthetic construct
  source 1..21: mol_type = other DNA; mol_type = other DNA
ctacacaagtctggaatgaat

SEQ ID NO: 5652 - DNA, 21 bp, synthetic construct
  source 1..21: mol_type = other DNA; mol_type = other DNA
ctttctaaggtcggagctaat

SEQ ID NO: 5653 - DNA, 21 bp, synthetic construct
  source 1..21: mol_type = other DNA; mol_type = other DNA
tacttaaagtcgcaggctatg

SEQ ID NO: 5654 - DNA, 21 bp, synthetic construct
  source 1..21: mol_type = other DNA; mol_type = other DNA
tacgttaaatcctccaataat

SEQ ID NO: 5655 - DNA, 21 bp, synthetic construct
  source 1..21: mol_type = other DNA; mol_type = other DNA
tacgtcaaatcggaccatcac

SEQ ID NO: 5656 - DNA, 21 bp, synthetic construct
  source 1..21: mol_type = other DNA; mol_type = other DNA
tatgctcggttaggaatgaac

SEQ ID NO: 5657 - DNA, 21 bp, synthetic construct
  source 1..21: mol_type = other DNA; mol_type = other DNA
tataccagactgaatcagaac

SEQ ID NO: 5658 - DNA, 21 bp, synthetic construct
  source 1..21: mol_type = other DNA; mol_type = other DNA
tacgcgcgtggaggaatgaat

SEQ ID NO: 5659 - DNA, 21 bp, synthetic construct
  source 1..21: mol_type = other DNA; mol_type = other DNA
cgagggatcgacttctacccc

SEQ ID NO: 5660 - DNA, 21 bp, synthetic construct
  source 1..21: mol_type = other DNA; mol_type = other DNA
tacgtaaggtcggatgttcgg

SEQ ID NO: 5661 - DNA, 21 bp, synthetic construct
  source 1..21: mol_type = other DNA; mol_type = other DNA
tatgttaagtctgatcaccat

SEQ ID NO: 5662 - DNA, 21 bp, synthetic construct
  source 1..21: mol_type = other DNA; mol_type = other DNA
tacgcgaagaacggattcaat

SEQ ID NO: 5663 - DNA, 21 bp, synthetic construct
  source 1..21: mol_type = other DNA; mol_type = other DNA
tacctgaaatcagagcgcaac

SEQ ID NO: 5664 - DNA, 21 bp, synthetic construct
  source 1..21: mol_type = other DNA; mol_type = other DNA
tactcacggttgaatatgaac

SEQ ID NO: 5665 - DNA, 21 bp, synthetic construct
  source 1..21: mol_type = other DNA; mol_type = other DNA
tactcaaagctcaacgacaaa

SEQ ID NO: 5666 - DNA, 21 bp, synthetic construct
  source 1..21: mol_type = other DNA; mol_type = other DNA
tatagtcggatgaatgcaaat

SEQ ID NO: 5667 - DNA, 21 bp, synthetic construct
  source 1..21: mol_type = other DNA; mol_type = other DNA
ctgagcaaattatccgccaat

SEQ ID NO: 5668 - DNA, 21 bp, synthetic construct
  source 1..21: mol_type = other DNA; mol_type = other DNA
tatcataagttagcgaataat

SEQ ID NO: 5669 - DNA, 21 bp, synthetic construct
  source 1..21: mol_type = other DNA; mol_type = other DNA
tatgcaagaggtggaaacaat

SEQ ID NO: 5670 - DNA, 21 bp, synthetic construct
  source 1..21: mol_type = other DNA; mol_type = other DNA
aggtcggagcacgtattcccc

SEQ ID NO: 5671 - DNA, 21 bp, synthetic construct
  source 1..21: mol_type = other DNA; mol_type = other DNA
tatagcaagaatgggatgaac

SEQ ID NO: 5672 - DNA, 21 bp, synthetic construct
  source 1..21: mol_type = other DNA; mol_type = other DNA
tattcgaaactcggtgggaac

SEQ ID NO: 5673 - DNA, 21 bp, synthetic construct
  source 1..21: mol_type = other DNA; mol_type = other DNA
tatgcacgcggtgggatgaac

SEQ ID NO: 5674 - DNA, 21 bp, synthetic construct
  source 1..21: mol_type = other DNA; mol_type = other DNA
tattcgcggatgaacactaac

SEQ ID NO: 5675 - DNA, 21 bp, synthetic construct
  source 1..21: mol_type = other DNA; mol_type = other DNA
tattcacgaatgaataacaat

SEQ ID NO: 5676 - DNA, 21 bp, synthetic construct
  source 1..21: mol_type = other DNA; mol_type = other DNA
tatcacattttagggaaaaat

SEQ ID NO: 5677 - DNA, 21 bp, synthetic construct
  source 1..21: mol_type = other DNA; mol_type = other DNA
ctaagtagggtgggcatcgat

SEQ ID NO: 5678 - DNA, 21 bp, synthetic construct
  source 1..21: mol_type = other DNA; mol_type = other DNA
tattctcgcttaaacatgaat

SEQ ID NO: 5679 - DNA, 21 bp, synthetic construct
  source 1..21: mol_type = other DNA; mol_type = other DNA
tatttgaaaagtcaagcaatg

SEQ ID NO: 5680 - DNA, 21 bp, synthetic construct
  source 1..21: mol_type = other DNA; mol_type = other DNA
tacttcacaggtgtcgtcgca

SEQ ID NO: 5681 - DNA, 21 bp, synthetic construct
  source 1..21: mol_type = other DNA; mol_type = other DNA
tattctcggatgaactctaac

SEQ ID NO: 5682 - DNA, 21 bp, synthetic construct
  source 1..21: mol_type = other DNA; mol_type = other DNA
atgtcccgtattggagtgaat

SEQ ID NO: 5683 - DNA, 21 bp, synthetic construct
  source 1..21: mol_type = other DNA; mol_type = other DNA
ttaagccgctctggcaataac

SEQ ID NO: 5684 - DNA, 21 bp, synthetic construct
  source 1..21: mol_type = other DNA; mol_type = other DNA
tactctaaatcgggagcgaat

SEQ ID NO: 5685 - DNA, 21 bp, synthetic construct
  source 1..21: mol_type = other DNA; mol_type = other DNA
tatagcaaagctcagccgaat

SEQ ID NO: 5686 - DNA, 21 bp, synthetic construct
  source 1..21: mol_type = other DNA; mol_type = other DNA
taccacaagtcgcaaagtaat

SEQ ID NO: 5687 - DNA, 21 bp, synthetic construct
  source 1..21: mol_type = other DNA; mol_type = other DNA
gatatgtcctcgcgaatctgg

SEQ ID NO: 5688 - DNA, 21 bp, synthetic construct
  source 1..21: mol_type = other DNA; mol_type = other DNA
cactcgaggttgaacgtatcg

SEQ ID NO: 5689 - DNA, 21 bp, synthetic construct
  source 1..21: mol_type = other DNA; mol_type = other DNA
tatcataaaagccagtcgaac

SEQ ID NO: 5690 - DNA, 21 bp, synthetic construct
  source 1..21: mol_type = other DNA; mol_type = other DNA
tactccaaaatgaatgataac

SEQ ID NO: 5691 - DNA, 21 bp, synthetic construct
  source 1..21: mol_type = other DNA; mol_type = other DNA
taccacaaacttgccaacaac

SEQ ID NO: 5692 - DNA, 21 bp, synthetic construct
  source 1..21: mol_type = other DNA; mol_type = other DNA
cgaacaccaactgtgtatcct

SEQ ID NO: 5693 - DNA, 21 bp, synthetic construct
  source 1..21: mol_type = other DNA; mol_type = other DNA
ttgcataaatcaggcatgaac

SEQ ID NO: 5694 - DNA, 21 bp, synthetic construct
  source 1..21: mol_type = other DNA; mol_type = other DNA
tatacgcgactctcgatgaat

SEQ ID NO: 5695 - DNA, 21 bp, synthetic construct
  source 1..21: mol_type = other DNA; mol_type = other DNA
tatctgaaatcggacaaaagc

SEQ ID NO: 5696 - DNA, 21 bp, synthetic construct
  source 1..21: mol_type = other DNA; mol_type = other DNA
tatacacgttcacagacagaa

SEQ ID NO: 5697 - DNA, 21 bp, synthetic construct
  source 1..21: mol_type = other DNA; mol_type = other DNA
gtaacgtccaccaatggcatc

SEQ ID NO: 5698 - DNA, 21 bp, synthetic construct
  source 1..21: mol_type = other DNA; mol_type = other DNA
tacgctcggggagggaataac

SEQ ID NO: 5699 - DNA, 21 bp, synthetic construct
  source 1..21: mol_type = other DNA; mol_type = other DNA
ttcgttaagtccgatactaaa

SEQ ID NO: 5700 - DNA, 21 bp, synthetic construct
  source 1..21: mol_type = other DNA; mol_type = other DNA
tacacccgtttgagtatgaac

SEQ ID NO: 5701 - DNA, 21 bp, synthetic construct
  source 1..21: mol_type = other DNA; mol_type = other DNA
tacagtcgtatgaattccaat

SEQ ID NO: 5702 - DNA, 21 bp, synthetic construct
  source 1..21: mol_type = other DNA; mol_type = other DNA
agggcgcttgaatgctgctac

SEQ ID NO: 5703 - DNA, 21 bp, synthetic construct
  source 1..21: mol_type = other DNA; mol_type = other DNA
ctgcaccgcgatggaattaac

SEQ ID NO: 5704 - DNA, 21 bp, synthetic construct
  source 1..21: mol_type = other DNA; mol_type = other DNA
tattcgaagatgaacgacaat

SEQ ID NO: 5705 - DNA, 21 bp, synthetic construct
  source 1..21: mol_type = other DNA; mol_type = other DNA
taccttaaatcacaaggtaat

SEQ ID NO: 5706 - DNA, 21 bp, synthetic construct
  source 1..21: mol_type = other DNA; mol_type = other DNA
gtacatcgcctgcaagataag

SEQ ID NO: 5707 - DNA, 21 bp, synthetic construct
  source 1..21: mol_type = other DNA; mol_type = other DNA
tactctcgacctgggccgaac

SEQ ID NO: 5708 - DNA, 21 bp, synthetic construct
  source 1..21: mol_type = other DNA; mol_type = other DNA
tatgttcggtccgacgtgcga

SEQ ID NO: 5709 - DNA, 21 bp, synthetic construct
  source 1..21: mol_type = other DNA; mol_type = other DNA
tatgtgcgttcagataggaac

SEQ ID NO: 5710 - DNA, 21 bp, synthetic construct
  source 1..21: mol_type = other DNA; mol_type = other DNA
tatgcaagaataggcctaaat

SEQ ID NO: 5711 - DNA, 21 bp, synthetic construct
  source 1..21: mol_type = other DNA; mol_type = other DNA
taccttaagtcagataagtcg

SEQ ID NO: 5712 - DNA, 21 bp, synthetic construct
  source 1..21: mol_type = other DNA; mol_type = other DNA
tactctcgaatgaataccaat

SEQ ID NO: 5713 - DNA, 21 bp, synthetic construct
  source 1..21: mol_type = other DNA; mol_type = other DNA
tattcgtccactcatggcgtg

SEQ ID NO: 5714 - DNA, 21 bp, synthetic construct
  source 1..21: mol_type = other DNA; mol_type = other DNA
tactcttcgacccacggtgta

SEQ ID NO: 5715 - DNA, 21 bp, synthetic construct
  source 1..21: mol_type = other DNA; mol_type = other DNA
tacactcgcagccaaacggag

SEQ ID NO: 5716 - DNA, 21 bp, synthetic construct
  source 1..21: mol_type = other DNA; mol_type = other DNA
tacagccgcatgaacaataac

SEQ ID NO: 5717 - DNA, 21 bp, synthetic construct
  source 1..21: mol_type = other DNA; mol_type = other DNA
tactccaaagtgcaaactaac

SEQ ID NO: 5718 - DNA, 21 bp, synthetic construct
  source 1..21: mol_type = other DNA; mol_type = other DNA
tttagtcgagtggggtttaac

SEQ ID NO: 5719 - DNA, 21 bp, synthetic construct
  source 1..21: mol_type = other DNA; mol_type = other DNA
tacagtaaggcccaacctaac

SEQ ID NO: 5720 - DNA, 21 bp, synthetic construct
  source 1..21: mol_type = other DNA; mol_type = other DNA
tcaatggaatctcgactgtgg

SEQ ID NO: 5721 - DNA, 21 bp, synthetic construct
  source 1..21: mol_type = other DNA; mol_type = other DNA
tacgcacgccttgggatgaat

SEQ ID NO: 5722 - DNA, 21 bp, synthetic construct
  source 1..21: mol_type = other DNA; mol_type = other DNA
ctccaccgcctagcatcttcg

SEQ ID NO: 5723 - DNA, 21 bp, synthetic construct
  source 1..21: mol_type = other DNA; mol_type = other DNA
gacctttcgagtcataactgg

SEQ ID NO: 5724 - DNA, 21 bp, synthetic construct
  source 1..21: mol_type = other DNA; mol_type = other DNA
ttgtcaagagtaggtatagac

SEQ ID NO: 5725 - DNA, 21 bp, synthetic construct
  source 1..21: mol_type = other DNA; mol_type = other DNA
cttcatgcattaagtcataac

SEQ ID NO: 5726 - DNA, 21 bp, synthetic construct
  source 1..21: mol_type = other DNA; mol_type = other DNA
gtcactagcacgaacgggata

SEQ ID NO: 5727 - DNA, 21 bp, synthetic construct
  source 1..21: mol_type = other DNA; mol_type = other DNA
tatgctagaagcggtttaaac

SEQ ID NO: 5728 - DNA, 21 bp, synthetic construct
  source 1..21: mol_type = other DNA; mol_type = other DNA
tactcaaaaaacggcatgaat

SEQ ID NO: 5729 - DNA, 21 bp, synthetic construct
  source 1..21: mol_type = other DNA; mol_type = other DNA
cgtactcctaccgtctacccc

SEQ ID NO: 5730 - DNA, 21 bp, synthetic construct
  source 1..21: mol_type = other DNA; mol_type = other DNA
tactctaaggtcgggcagaat

SEQ ID NO: 5731 - DNA, 21 bp, synthetic construct
  source 1..21: mol_type = other DNA; mol_type = other DNA
tactcaagaatgggaatgaat

SEQ ID NO: 5732 - DNA, 21 bp, synthetic construct
  source 1..21: mol_type = other DNA; mol_type = other DNA
ctccatgtccgaagcctaaac

SEQ ID NO: 5733 - DNA, 21 bp, synthetic construct
  source 1..21: mol_type = other DNA; mol_type = other DNA
ttgcatcgggacggtatcaat

SEQ ID NO: 5734 - DNA, 21 bp, synthetic construct
  source 1..21: mol_type = other DNA; mol_type = other DNA
tatagtcggcagaacgagaat

SEQ ID NO: 5735 - DNA, 21 bp, synthetic construct
  source 1..21: mol_type = other DNA; mol_type = other DNA
tactcacgcgttaatgataat

SEQ ID NO: 5736 - DNA, 21 bp, synthetic construct
  source 1..21: mol_type = other DNA; mol_type = other DNA
gacatgagtagtagaatatgg

SEQ ID NO: 5737 - DNA, 21 bp, synthetic construct
  source 1..21: mol_type = other DNA; mol_type = other DNA
tatgtgaaatatgaagataaa

SEQ ID NO: 5738 - DNA, 21 bp, synthetic construct
  source 1..21: mol_type = other DNA; mol_type = other DNA
tattccaagtcaggtgcaaac

SEQ ID NO: 5739 - DNA, 21 bp, synthetic construct
  source 1..21: mol_type = other DNA; mol_type = other DNA
tatagtcgcttgcaagaaaat

SEQ ID NO: 5740 - DNA, 21 bp, synthetic construct
  source 1..21: mol_type = other DNA; mol_type = other DNA
ctgcacagactgttaaaggat

SEQ ID NO: 5741 - DNA, 21 bp, synthetic construct
  source 1..21: mol_type = other DNA; mol_type = other DNA
tacgcgcgatctggcctgaat

SEQ ID NO: 5742 - DNA, 21 bp, synthetic construct
  source 1..21: mol_type = other DNA; mol_type = other DNA
ctttctagagtaggtttcaat

SEQ ID NO: 5743 - DNA, 21 bp, synthetic construct
  source 1..21: mol_type = other DNA; mol_type = other DNA
tattcgcgtgtaaacgacaac

SEQ ID NO: 5744 - DNA, 21 bp, synthetic construct
  source 1..21: mol_type = other DNA; mol_type = other DNA
tacgctcggggagggcccaat

SEQ ID NO: 5745 - DNA, 21 bp, synthetic construct
  source 1..21: mol_type = other DNA; mol_type = other DNA
tatgcgcgtggtggacctaac

SEQ ID NO: 5746 - DNA, 21 bp, synthetic construct
  source 1..21: mol_type = other DNA; mol_type = other DNA
cactgcggaaaatgcctaaat

SEQ ID NO: 5747 - DNA, 21 bp, synthetic construct
  source 1..21: mol_type = other DNA; mol_type = other DNA
ttgcacagatcaggcgataat

SEQ ID NO: 5748 - DNA, 21 bp, synthetic construct
  source 1..21: mol_type = other DNA; mol_type = other DNA
ctgcatcgttctggggacaac

SEQ ID NO: 5749 - DNA, 21 bp, synthetic construct
  source 1..21: mol_type = other DNA; mol_type = other DNA
tattcccgaatgggtatgaac

SEQ ID NO: 5750 - DNA, 21 bp, synthetic construct
  source 1..21: mol_type = other DNA; mol_type = other DNA
tattccaaagtaggccaaaac

SEQ ID NO: 5751 - DNA, 21 bp, synthetic construct
  source 1..21: mol_type = other DNA; mol_type = other DNA
aactgtaagccttgcttcgat

SEQ ID NO: 5752 - DNA, 21 bp, synthetic construct
  source 1..21: mol_type = other DNA; mol_type = other DNA
ctgtcacgcgtgggctttaac

SEQ ID NO: 5753 - DNA, 21 bp, synthetic construct
  source 1..21: mol_type = other DNA; mol_type = other DNA
tactcacgccaaaatgaaaac

SEQ ID NO: 5754 - DNA, 21 bp, synthetic construct
  source 1..21: mol_type = other DNA
tacgtaaagtacgaggacaag

SEQ ID NO: 5755 - DNA, 21 bp, synthetic construct
  source 1..21: mol_type = other DNA
tactcacgattacaggagaac

SEQ ID NO: 5756 - DNA, 21 bp, synthetic construct
  source 1..21: mol_type = other DNA
agaggcattgatttttatcct

SEQ ID NO: 5757 - DNA, 21 bp, synthetic construct
  source 1..21: mol_type = other DNA
catagtcgcatgaatgaaaat

SEQ ID NO: 5758 - DNA, 21 bp, synthetic construct
  source 1..21: mol_type = other DNA
tacgtcagaagtgacagaaat

SEQ ID NO: 5759 - DNA, 21 bp, synthetic construct
  source 1..21: mol_type = other DNA
gatttgtcatcgcacaattgg

SEQ ID NO: 5760 - DNA, 21 bp, synthetic construct
  source 1..21: mol_type = other DNA
ttgcatcggctatccccttat

SEQ ID NO: 5761 - DNA, 21 bp, synthetic construct
  source 1..21: mol_type = other DNA
tactcaaggatgaacgaaaat

SEQ ID NO: 5762 - DNA, 21 bp, synthetic construct
  source 1..21: mol_type = other DNA
ctgcataaagctggatataat

SEQ ID NO: 5763 - DNA, 21 bp, synthetic construct
  source 1..21: mol_type = other DNA
ttacacgctttgtcacacaat

SEQ ID NO: 5764 - DNA, 21 bp, synthetic construct
  source 1..21: mol_type = other DNA
tatagccgtatgaatgagaac

SEQ ID NO: 5765 - DNA, 21 bp, synthetic construct
  source 1..21: mol_type = other DNA
ttgtcacggatttctgtaaac

SEQ ID NO: 5766 - DNA, 21 bp, synthetic construct
  source 1..21: mol_type = other DNA
ctacacgtacgtagtctgaat

SEQ ID NO: 5767 - DNA, 21 bp, synthetic construct
  source 1..21: mol_type = other DNA
tattcgaggatgaacgacaac

SEQ ID NO: 5768 - DNA, 21 bp, synthetic construct
  source 1..21: mol_type = other DNA
ttatggaggacagggattaac

SEQ ID NO: 5769 - DNA, 21 bp, synthetic construct
  source 1..21: mol_type = other DNA
tattttatggggcggtccgac

SEQ ID NO: 5770 - DNA, 21 bp, synthetic construct
  source 1..21: mol_type = other DNA
tactcccggatgaatgataat

SEQ ID NO: 5771 - DNA, 21 bp, synthetic construct
  source 1..21: mol_type = other DNA
ctacaccgagctagcagcaac

SEQ ID NO: 5772 - DNA, 21 bp, synthetic construct
  source 1..21: mol_type = other DNA
tactcccgtgttgatgatcgc

SEQ ID NO: 5773 - DNA, 21 bp, synthetic construct
  source 1..21: mol_type = other DNA
ctgcatcgtgcgtcatccaat

SEQ ID NO: 5774 - DNA, 21 bp, synthetic construct
  source 1..21: mol_type = other DNA
tattcgcgcaacagcgacaac

SEQ ID NO: 5775 - DNA, 21 bp, synthetic construct
  source 1..21: mol_type = other DNA
tatagtgctcgtgggcccaat

SEQ ID NO: 5776 - DNA, 21 bp, synthetic construct
  source 1..21: mol_type = other DNA; mol_type = other DNA
agagctctggagtgttgttat

SEQ ID NO: 5777 - DNA, 21 bp, synthetic construct
  source 1..21: mol_type = other DNA; mol_type = other DNA
ttaactaggatctcacacaac

SEQ ID NO: 5778 - DNA, 21 bp, synthetic construct
  source 1..21: mol_type = other DNA; mol_type = other DNA
ctgacccgaattagtcataat

SEQ ID NO: 5779 - DNA, 21 bp, synthetic construct
  source 1..21: mol_type = other DNA; mol_type = other DNA
ctttgtcgtccatgttcagag

SEQ ID NO: 5780 - DNA, 21 bp, synthetic construct
  source 1..21: mol_type = other DNA; mol_type = other DNA
ttaagtcgcttaaatcacaat

SEQ ID NO: 5781 - DNA, 21 bp, synthetic construct
  source 1..21: mol_type = other DNA; mol_type = other DNA
ctacacgtgcttggaccgaat

SEQ ID NO: 5782 - DNA, 21 bp, synthetic construct
  source 1..21: mol_type = other DNA; mol_type = other DNA
tacttcacgggcatctgggct

SEQ ID NO: 5783 - DNA, 21 bp, synthetic construct
  source 1..21: mol_type = other DNA; mol_type = other DNA
tacatgaaatatgatacacaa

SEQ ID NO: 5784 - DNA, 21 bp, synthetic construct
  source 1..21: mol_type = other DNA; mol_type = other DNA
atgtcacggctgtcacagaac

SEQ ID NO: 5785 - DNA, 21 bp, synthetic construct
  source 1..21: mol_type = other DNA; mol_type = other DNA
ctccatcgcagtagtaataat

SEQ ID NO: 5786 - DNA, 21 bp, synthetic construct
  source 1..21: mol_type = other DNA; mol_type = other DNA
tacgctcggtccgggtataat

SEQ ID NO: 5787 - DNA, 21 bp, synthetic construct
  source 1..21: mol_type = other DNA; mol_type = other DNA
taccatcgtttgtccaataac

SEQ ID NO: 5788 - DNA, 21 bp, synthetic construct
  source 1..21: mol_type = other DNA; mol_type = other DNA
ctgcatgtcctggggccaaac

SEQ ID NO: 5789 - DNA, 21 bp, synthetic construct
  source 1..21: mol_type = other DNA; mol_type = other DNA
tatgcgcgcagcggatacaac

SEQ ID NO: 5790 - DNA, 21 bp, synthetic construct
  source 1..21: mol_type = other DNA
ttgcacaggtcttcaaacaac

SEQ ID NO: 5791 - DNA, 21 bp, synthetic construct
  source 1..21: mol_type = other DNA
tatcaccggctttctaacaat

SEQ ID NO: 5792 - DNA, 21 bp, synthetic construct
  source 1..21: mol_type = other DNA
tatcatgctcgcgctccgaat

SEQ ID NO: 5793 - DNA, 21 bp, synthetic construct
  source 1..21: mol_type = other DNA; mol_type = other DNA
ctatgcagaccgtgctcggaa

SEQ ID NO: 5794 - DNA, 21 bp, synthetic construct
  source 1..21: mol_type = other DNA; mol_type = other DNA
ttacacagactgagcccatac

SEQ ID NO: 5795 - DNA, 21 bp, synthetic construct
  source 1..21: mol_type = other DNA; mol_type = other DNA
taccacgcacgggccccaaac

SEQ ID NO: 5796 - DNA, 21 bp, synthetic construct
  source 1..21: mol_type = other DNA; mol_type = other DNA
aacgaagactgggtgaagtgg

SEQ ID NO: 5797 - DNA, 21 bp, synthetic construct
  source 1..21: mol_type = other DNA; mol_type = other DNA
atgtcccgattatctcaaaat

SEQ ID NO: 5798 - DNA, 21 bp, synthetic construct
  source 1..21: mol_type = other DNA; mol_type = other DNA
attatgagcagtcgaagctgg

SEQ ID NO: 5799 - DNA, 21 bp, synthetic construct
  source 1..21: mol_type = other DNA; mol_type = other DNA
aatgaggattgggtaaaatgg

SEQ ID NO: 5800 - DNA, 21 bp, synthetic construct
  source 1..21: mol_type = other DNA; mol_type = other DNA
cattgtggtaagtgtcttaac

SEQ ID NO: 5801 - DNA, 21 bp, synthetic construct
  source 1..21: mol_type = other DNA; mol_type = other DNA
tacgctcgaacttcgcataat

SEQ ID NO: 5802 - DNA, 21 bp, synthetic construct
  source 1..21: mol_type = other DNA; mol_type = other DNA
aatggtcctcacggctggaat

SEQ ID NO: 5803 - DNA, 21 bp, synthetic construct
  source 1..21: mol_type = other DNA; mol_type = other DNA
tactcccgagctggatataac

SEQ ID NO: 5804 - DNA, 21 bp, synthetic construct
  source 1..21: mol_type = other DNA; mol_type = other DNA
tgggtacggtcggacacaaaa

SEQ ID NO: 5805 - DNA, 21 bp, synthetic construct
  source 1..21: mol_type = other DNA; mol_type = other DNA
taccaacgccaaggatgggac

SEQ ID NO: 5806 - DNA, 21 bp, synthetic construct
  source 1..21: mol_type = other DNA; mol_type = other DNA
tatgcccggacctcccacaac

SEQ ID NO: 5807 - DNA, 21 bp, synthetic construct
  source 1..21: mol_type = other DNA; mol_type = other DNA
cgactctatgacgcttatcag

SEQ ID NO: 5808 - DNA, 21 bp, synthetic construct
  source 1..21: mol_type = other DNA; mol_type = other DNA
gggccggggtatgtgaactgg

SEQ ID NO: 5809 - DNA, 21 bp, synthetic construct
  source 1..21: mol_type = other DNA; mol_type = other DNA
tgggtgaggtctgatacgaag

SEQ ID NO: 5810 - DNA, 21 bp, synthetic construct
  source 1..21: mol_type = other DNA; mol_type = other DNA
aacggcccgcatggttggaac

SEQ ID NO: 5811 - DNA, 21 bp, synthetic construct
  source 1..21: mol_type = other DNA; mol_type = other DNA
cttcatcgcaatactcaaaac

SEQ ID NO: 5812 - DNA, 21 bp, synthetic construct
  source 1..21: mol_type = other DNA; mol_type = other DNA
ttgcacaggaacacccagaat

SEQ ID NO: 5813 - DNA, 21 bp, synthetic construct
  source 1..21: mol_type = other DNA; mol_type = other DNA
atgcctaatgaggggtggttt

SEQ ID NO: 5814 - DNA, 21 bp, synthetic construct
  source 1..21: mol_type = other DNA; mol_type = other DNA
tatctagatcgtgttgtttac

SEQ ID NO: 5815 - DNA, 21 bp, synthetic construct
  source 1..21: mol_type = other DNA; mol_type = other DNA
tcctacgcccggtctgtgaac

SEQ ID NO: 5816 - DNA, 21 bp, synthetic construct
  source 1..21: mol_type = other DNA; mol_type = other DNA
aggctatacgatgcctaccaa

SEQ ID NO: 5817 - DNA, 21 bp, synthetic construct
  source 1..21: mol_type = other DNA; mol_type = other DNA
tacctcgaccgcgtggtatat

SEQ ID NO: 5818 - DNA, 21 bp, synthetic construct
  source 1..21: mol_type = other DNA
atgccaaacgaaggatggttc

SEQ ID NO: 5819 - DNA, 21 bp, synthetic construct
  source 1..21: mol_type = other DNA; mol_type = other DNA
ctgacaaggctttcccacaat

SEQ ID NO: 5820 - DNA, 21 bp, synthetic construct
  source 1..21: mol_type = other DNA; mol_type = other DNA
agttatgcacgcagcgtaaat

SEQ ID NO: 5821 - DNA, 21 bp, synthetic construct
  source 1..21: mol_type = other DNA; mol_type = other DNA
tatagtcgggccggctacaat

SEQ ID NO: 5822 - DNA, 21 bp, synthetic construct
  source 1..21: mol_type = other DNA; mol_type = other DNA
tatcgaagtctagttgtcggg

SEQ ID NO: 5823 - DNA, 21 bp, synthetic construct
  source 1..21: mol_type = other DNA; mol_type = other DNA
cttaccagattaagccataac

SEQ ID NO: 5824 - DNA, 21 bp, synthetic construct
  source 1..21: mol_type = other DNA; mol_type = other DNA
tatgtgaagtccgatcgatgc

SEQ ID NO: 5825 - DNA, 21 bp, synthetic construct
  source 1..21: mol_type = other DNA; mol_type = other DNA
ctttggcgcacgggtatcaat

SEQ ID NO: 5826 - DNA, 21 bp, synthetic construct
  source 1..21: mol_type = other DNA; mol_type = other DNA
tattttacaggaatatgggca

SEQ ID NO: 5827 - DNA, 21 bp, synthetic construct
  source 1..21: mol_type = other DNA; mol_type = other DNA
taccacagggctcaaatgaat

SEQ ID NO: 5828 - DNA, 21 bp, synthetic construct
  source 1..21: mol_type = other DNA; mol_type = other DNA
gatgggggccgatctgcttgg

SEQ ID NO: 5829 - DNA, 21 bp, synthetic construct
  source 1..21: mol_type = other DNA; mol_type = other DNA
taccgttcactggtagtgggt

SEQ ID NO: 5830 - DNA, 21 bp, synthetic construct
  source 1..21: mol_type = other DNA; mol_type = other DNA
gacggagggagatcagcatgg

SEQ ID NO: 5831 - DNA, 21 bp, synthetic construct
  source 1..21: mol_type = other DNA; mol_type = other DNA
ctgagccggtcatcatacaat

SEQ ID NO: 5832 - DNA, 21 bp, synthetic construct
  source 1..21: mol_type = other DNA; mol_type = other DNA
tacgtcaaatcggacagatgt

SEQ ID NO: 5833 - DNA, 21 bp, synthetic construct
  source 1..21: mol_type = other DNA; mol_type = other DNA
cgtgtattagcaaactggcct

SEQ ID NO: 5834 - DNA, 21 bp, synthetic construct
  source 1..21: mol_type = other DNA; mol_type = other DNA
ctaatgatagacgcttttcca

SEQ ID NO: 5835 - DNA, 21 bp, synthetic construct
  source 1..21: mol_type = other DNA; mol_type = other DNA
taccataggactgggaataat

SEQ ID NO: 5836 - DNA, 21 bp, synthetic construct
  source 1..21: mol_type = other DNA; mol_type = other DNA
tatcaccggacaggcaacaac

SEQ ID NO: 5837 - DNA, 21 bp, synthetic construct
  source 1..21: mol_type = other DNA; mol_type = other DNA
ttaatgattgatgcattccct

SEQ ID NO: 5838 - DNA, 21 bp, synthetic construct
  source 1..21: mol_type = other DNA; mol_type = other DNA
ttgagtaggtcttcttataac

SEQ ID NO: 5839 - DNA, 21 bp, synthetic construct
  source 1..21: mol_type = other DNA; mol_type = other DNA
atgacatacgacagttacgac

SEQ ID NO: 5840 - DNA, 21 bp, synthetic construct
  source 1..21: mol_type = other DNA; mol_type = other DNA
cgaaatctatatgatactcaa

SEQ ID NO: 5841 - DNA, 21 bp, synthetic construct
  source 1..21: mol_type = other DNA; mol_type = other DNA
tttaagcagttagtcaactac

SEQ ID NO: 5842 - DNA, 21 bp, synthetic construct
  source 1..21: mol_type = other DNA; mol_type = other DNA
cagccatatgagctaccatgg

SEQ ID NO: 5843 - DNA, 21 bp, synthetic construct
  source 1..21: mol_type = other DNA; mol_type = other DNA
gagatggagtcctttaattgg

SEQ ID NO: 5844 - DNA, 21 bp, synthetic construct
  source 1..21: mol_type = other DNA; mol_type = other DNA
atgcatcggctggcagtaaat

SEQ ID NO: 5845 - DNA, 21 bp, synthetic construct
  source 1..21: mol_type = other DNA
agggtctcggtgttatggccc

SEQ ID NO: 5846 - DNA, 21 bp, synthetic construct
  source 1..21: mol_type = other DNA; mol_type = other DNA
tataaaaatctaatacaaggc

SEQ ID NO: 5847 - DNA, 21 bp, synthetic construct
  source 1..21: mol_type = other DNA; mol_type = other DNA
ctccataggttagcagccaat

SEQ ID NO: 5848 - DNA, 21 bp, synthetic construct
  source 1..21: mol_type = other DNA; mol_type = other DNA
gaaatggaatcattcaactgg

SEQ ID NO: 5849 - DNA, 21 bp, synthetic construct
  source 1..21: mol_type = other DNA; mol_type = other DNA
tacaagaaccttatccagggg

SEQ ID NO: 5850 - DNA, 21 bp, synthetic construct
  source 1..21: mol_type = other DNA; mol_type = other DNA
ttcaaacaactggtgaattat

SEQ ID NO: 5851 - DNA, 21 bp, synthetic construct
  source 1..21: mol_type = other DNA; mol_type = other DNA
tatttcaatgttgttaagggg

SEQ ID NO: 5852 - DNA, 21 bp, synthetic construct
  source 1..21: mol_type = other DNA; mol_type = other DNA
atgcacagacttgcggttaac

SEQ ID NO: 5853 - DNA, 21 bp, synthetic construct
  source 1..21: mol_type = other DNA; mol_type = other DNA
cagtatgtccgatcatcaata

SEQ ID NO: 5854 - DNA, 21 bp, synthetic construct
  source 1..21: mol_type = other DNA; mol_type = other DNA
ctgcaccggctcgctgcgaac

SEQ ID NO: 5855 - DNA, 21 bp, synthetic construct
  source 1..21: mol_type = other DNA; mol_type = other DNA
atgtcaaggttcgacattcat

SEQ ID NO: 5856 - DNA, 21 bp, synthetic construct
  source 1..21: mol_type = other DNA; mol_type = other DNA
caatacgtgcgtagctcgatc

SEQ ID NO: 5857 - DNA, 21 bp, synthetic construct
  source 1..21: mol_type = other DNA; mol_type = other DNA
tactttaacgtagtaaaagga

SEQ ID NO: 5858 - DNA, 21 bp, synthetic construct
  source 1..21: mol_type = other DNA; mol_type = other DNA
cttacgtacgacgcctatgaa

SEQ ID NO: 5859 - DNA, 21 bp, synthetic construct
  source 1..21: mol_type = other DNA; mol_type = other DNA
tggggcttatggaggctggac

SEQ ID NO: 5860 - DNA, 21 bp, synthetic construct
  source 1..21: mol_type = other DNA; mol_type = other DNA
taccgtgacatcatatcgggt

SEQ ID NO: 5861 - DNA, 21 bp, synthetic construct
  source 1..21: mol_type = other DNA; mol_type = other DNA
tatcgagatataatttcagga

SEQ ID NO: 5862 - DNA, 21 bp, synthetic construct
  source 1..21: mol_type = other DNA; mol_type = other DNA
ttgacatatgatgcatacgag

SEQ ID NO: 5863 - DNA, 21 bp, synthetic construct
  source 1..21: mol_type = other DNA; mol_type = other DNA
tcctatacccgcctccaaacg

SEQ ID NO: 5864 - DNA, 21 bp, synthetic construct
  source 1..21: mol_type = other DNA; mol_type = other DNA
cagtatacacgcaacgtgtcc

SEQ ID NO: 5865 - DNA, 21 bp, synthetic construct
  source 1..21: mol_type = other DNA; mol_type = other DNA
tcatacacacggctacagact

SEQ ID NO: 5866 - DNA, 21 bp, synthetic construct
  source 1..21: mol_type = other DNA; mol_type = other DNA
ggccctggatacgtcaattgg

SEQ ID NO: 5867 - DNA, 21 bp, synthetic construct
  source 1..21: mol_type = other DNA; mol_type = other DNA
ttacacgtccggctcaacaat

SEQ ID NO: 5868 - DNA, 21 bp, synthetic construct
  source 1..21: mol_type = other DNA; mol_type = other DNA
agaaccagggaagtttggcct

SEQ ID NO: 5869 - DNA, 21 bp, synthetic construct
  source 1..21: mol_type = other DNA; mol_type = other DNA
aacgcccctctatggttttcc

SEQ ID NO: 5870 - DNA, 21 bp, synthetic construct
  source 1..21: mol_type = other DNA; mol_type = other DNA
cgtaacgcgtttgaccatatg

SEQ ID NO: 5871 - DNA, 21 bp, synthetic construct
  source 1..21: mol_type = other DNA; mol_type = other DNA
caatacacccgaaatgtaagt

SEQ ID NO: 5872 - DNA, 21 bp, synthetic construct
  source 1..21: mol_type = other DNA; mol_type = other DNA
ttctcgggcagggtacttttt

SEQ ID NO: 5873 - DNA, 21 bp, synthetic construct
  source 1..21: mol_type = other DNA; mol_type = other DNA
aagcatgggaccatgtggggg

SEQ ID NO: 5874 - DNA, 21 bp, synthetic construct
  source 1..21: mol_type = other DNA; mol_type = other DNA
tctcgcaaaacgggataccct

SEQ ID NO: 5875 - DNA, 21 bp, synthetic construct
  source 1..21: mol_type = other DNA; mol_type = other DNA
atacaaaacaaactatggtct

SEQ ID NO: 5876 - DNA, 21 bp, synthetic construct
  source 1..21: mol_type = other DNA; mol_type = other DNA
tcttacactaggctcaccttg

SEQ ID NO: 5877 - DNA, 21 bp, synthetic construct
  source 1..21: mol_type = other DNA; mol_type = other DNA
aatgcgcccctctggttctcg

SEQ ID NO: 5878 - DNA, 21 bp, synthetic construct
  source 1..21: mol_type = other DNA; mol_type = other DNA
aacgatttggtccactggcct

SEQ ID NO: 5879 - DNA, 21 bp, synthetic construct
  source 1..21: mol_type = other DNA; mol_type = other DNA
agccggaagactggctatcca

SEQ ID NO: 5880 - DNA, 21 bp, synthetic construct
  source 1..21: mol_type = other DNA; mol_type = other DNA
gcctatagcagactcatgtct

SEQ ID NO: 5881 - DNA, 21 bp, synthetic construct
  source 1..21: mol_type = other DNA; mol_type = other DNA
tggccatcaatcacgacctat

SEQ ID NO: 5882 - DNA, 21 bp, synthetic construct
  source 1..21: mol_type = other DNA; mol_type = other DNA
caactgtccgggctatggcct

SEQ ID NO: 5883 - DNA, 21 bp, synthetic construct
  source 1..21: mol_type = other DNA; mol_type = other DNA
aattctccctttgatacttac

SEQ ID NO: 5884 - DNA, 21 bp, synthetic construct
  source 1..21: mol_type = other DNA; mol_type = other DNA
atgtcaccgctggtgtggacc

SEQ ID NO: 5885 - DNA, 21 bp, synthetic construct
  source 1..21: mol_type = other DNA; mol_type = other DNA
cggcaagggacgtactttccg

SEQ ID NO: 5886 - DNA, 21 bp, synthetic construct
  source 1..21: mol_type = other DNA; mol_type = other DNA
accaataccataagatggccc

SEQ ID NO: 5887 - DNA, 21 bp, synthetic construct
  source 1..21: mol_type = other DNA; mol_type = other DNA
tacgcgatttattcaacccac

SEQ ID NO: 5888 - DNA, 21 bp, synthetic construct
  source 1..21: mol_type = other DNA; mol_type = other DNA
tcagcactgcacgggtaccct

SEQ ID NO: 5889 - DNA, 21 bp, synthetic construct
  source 1..21: mol_type = other DNA; mol_type = other DNA
atatatgtgagatcgatttct

SEQ ID NO: 5890 - DNA, 21 bp, synthetic construct
  source 1..21: mol_type = other DNA; mol_type = other DNA
acccggggtatggattggcct

SEQ ID NO: 5891 - DNA, 21 bp, synthetic construct
  source 1..21: mol_type = other DNA; mol_type = other DNA
tacaagcaatggcatttcgat

SEQ ID NO: 5892 - DNA, 21 bp, synthetic construct
  source 1..21: mol_type = other DNA; mol_type = other DNA
gtatacgtccgatcgcagtcc

SEQ ID NO: 5893 - DNA, 21 bp, synthetic construct
  source 1..21: mol_type = other DNA; mol_type = other DNA
ctcattaatggcagttggccg

SEQ ID NO: 5894 - DNA, 21 bp, synthetic construct
  source 1..21: mol_type = other DNA; mol_type = other DNA
gtgcccatatggcataatggt

SEQ ID NO: 5895 - DNA, 21 bp, synthetic construct
  source 1..21: mol_type = other DNA; mol_type = other DNA
gtagttcatggggtttggccc

SEQ ID NO: 5896 - DNA, 21 bp, synthetic construct
  source 1..21: mol_type = other DNA; mol_type = other DNA
tcctacgtccggagtacccaa

SEQ ID NO: 5897 - DNA, 21 bp, synthetic construct
  source 1..21: mol_type = other DNA; mol_type = other DNA
ggtagcccaataaactgggcc

SEQ ID NO: 5898 - DNA, 21 bp, synthetic construct
  source 1..21: mol_type = other DNA; mol_type = other DNA
agtgcgctacatggttatcca

SEQ ID NO: 5899 - DNA, 21 bp, synthetic construct
  source 1..21: mol_type = other DNA; mol_type = other DNA
atatatagtaaattacagcat

SEQ ID NO: 5900 - DNA, 21 bp, synthetic construct
  source 1..21: mol_type = other DNA; mol_type = other DNA
gaggaatctttttggcgagca

SEQ ID NO: 5901 - DNA, 21 bp, synthetic construct
  source 1..21: mol_type = other DNA; mol_type = other DNA
gcttacagtcgacttatgtca

SEQ ID NO: 5902 - DNA, 21 bp, synthetic construct
  source 1..21: mol_type = other DNA; mol_type = other DNA
gtttgggttaaaagctcgatc

SEQ ID NO: 5903 - DNA, 21 bp, synthetic construct
  source 1..21: mol_type = other DNA; mol_type = other DNA
gtgtatgtaagatctcaaagc

SEQ ID NO: 5904 - DNA, 21 bp, synthetic construct
  source 1..21: mol_type = other DNA; mol_type = other DNA
acttacgtgcgatctattact

SEQ ID NO: 5905 - DNA, 21 bp, synthetic construct
  source 1..21: mol_type = other DNA; mol_type = other DNA
aagacaggcggaatttggcca

SEQ ID NO: 5906 - DNA, 21 bp, synthetic construct
  source 1..21: mol_type = other DNA; mol_type = other DNA
atgagtcccttagtctggacg

SEQ ID NO: 5907 - DNA, 21 bp, synthetic construct
  source 1..21: mol_type = other DNA; mol_type = other DNA
ccaggctcgctgcgctatggc

SEQ ID NO: 5908 - DNA, 21 bp, synthetic construct
  source 1..21: mol_type = other DNA; mol_type = other DNA
cttgtgtcaaatgactggccc

SEQ ID NO: 5909 - DNA, 21 bp, synthetic construct
  source 1..21: mol_type = other DNA; mol_type = other DNA
gggagaagcgtaagcacttgg

SEQ ID NO: 5910 - DNA, 21 bp, synthetic construct
  source 1..21: mol_type = other DNA; mol_type = other DNA
gggagcacctacagccgggcg

SEQ ID NO: 5911 - DNA, 21 bp, synthetic construct
  source 1..21: mol_type = other DNA; mol_type = other DNA
ccgggaagtttgagatacggt

SEQ ID NO: 5912 - DNA, 21 bp, synthetic construct
  source 1..21: mol_type = other DNA; mol_type = other DNA
aaaattagtggatcatggcca

SEQ ID NO: 5913 - DNA, 21 bp, synthetic construct
  source 1..21: mol_type = other DNA; mol_type = other DNA
aaacttggaacagcctggccg

SEQ ID NO: 5914 - DNA, 21 bp, synthetic construct
  source 1..21: mol_type = other DNA; mol_type = other DNA
gtgtatagtcgcatcgatatt

SEQ ID NO: 5915 - DNA, 21 bp, synthetic construct
  source 1..21: mol_type = other DNA; mol_type = other DNA
atttacgtgcgaagtgctagt

SEQ ID NO: 5916 - DNA, 21 bp, synthetic construct
  source 1..21: mol_type = other DNA; mol_type = other DNA
aacagtccgttcgacacgtat

SEQ ID NO: 5917 - DNA, 21 bp, synthetic construct
  source 1..21: mol_type = other DNA; mol_type = other DNA
tggccctcgattactacgtac

SEQ ID NO: 5918 - DNA, 21 bp, synthetic construct
  source 1..21: mol_type = other DNA; mol_type = other DNA
cggagcctttacgacacgttg

SEQ ID NO: 5919 - DNA, 21 bp, synthetic construct
  source 1..21: mol_type = other DNA; mol_type = other DNA
tactatgatcttgtcgaatac

SEQ ID NO: 5920 - DNA, 21 bp, synthetic construct
  source 1..21: mol_type = other DNA; mol_type = other DNA
atgttggaatattataacaat

SEQ ID NO: 5921 - DNA, 21 bp, synthetic construct
  source 1..21: mol_type = other DNA; mol_type = other DNA
aaaacgggtggtatatggcct

SEQ ID NO: 5922 - DNA, 21 bp, synthetic construct
  source 1..21: mol_type = other DNA; mol_type = other DNA
aatgacctggttcattggccc

SEQ ID NO: 5923 - DNA, 21 bp, synthetic construct
  source 1..21: mol_type = other DNA; mol_type = other DNA
actaatatgtacgacacttat

SEQ ID NO: 5924 - DNA, 21 bp, synthetic construct
  source 1..21: mol_type = other DNA; mol_type = other DNA
aagatcctaacggtgtggcca

SEQ ID NO: 5925 - DNA, 21 bp, synthetic construct
  source 1..21: mol_type = other DNA; mol_type = other DNA
atatatgtacggtcggcaagc

SEQ ID NO: 5926 - DNA, 21 bp, synthetic construct
  source 1..21: mol_type = other DNA; mol_type = other DNA
atttactcgaagctgcaacac

SEQ ID NO: 5927 - DNA, 21 bp, synthetic construct
  source 1..21: mol_type = other DNA; mol_type = other DNA
gtttactcccggatagacata

SEQ ID NO: 5928 - DNA, 21 bp, synthetic construct
  source 1..21: mol_type = other DNA; mol_type = other DNA
tcttatgtacgctccacacag

SEQ ID NO: 5929 - DNA, 21 bp, synthetic construct
  source 1..21: mol_type = other DNA; mol_type = other DNA
ttgtatactcgattagatatt

SEQ ID NO: 5930 - DNA, 21 bp, synthetic construct
  source 1..21: mol_type = other DNA; mol_type = other DNA
agagatgaggccaactggcct

SEQ ID NO: 5931 - DNA, 21 bp, synthetic construct
  source 1..21: mol_type = other DNA; mol_type = other DNA
aaatctcctaacacgccatgg

SEQ ID NO: 5932 - DNA, 21 bp, synthetic construct
  source 1..21: mol_type = other DNA; mol_type = other DNA
gggttcataactgtctaccca

SEQ ID NO: 5933 - DNA, 21 bp, synthetic construct
  source 1..21: mol_type = other DNA; mol_type = other DNA
acccgcagcatgtggagcgaa

SEQ ID NO: 5934 - DNA, 21 bp, synthetic construct
  source 1..21: mol_type = other DNA; mol_type = other DNA
tataagacaaacaattggccg

SEQ ID NO: 5935 - DNA, 21 bp, synthetic construct
  source 1..21: mol_type = other DNA; mol_type = other DNA
aaaaatgcaaccgtgtggccc

SEQ ID NO: 5936 - DNA, 21 bp, synthetic construct
  source 1..21: mol_type = other DNA; mol_type = other DNA
gttgtcaaagattactggcct

SEQ ID NO: 5937 - DNA, 21 bp, synthetic construct
  source 1..21: mol_type = other DNA; mol_type = other DNA
gggctaggctggataaacggc

SEQ ID NO: 5938 - DNA, 21 bp, synthetic construct
  source 1..21: mol_type = other DNA; mol_type = other DNA
caatacgtgagaacagcaaca

SEQ ID NO: 5939 - DNA, 21 bp, synthetic construct
  source 1..21: mol_type = other DNA; mol_type = other DNA
cagtatgtacgcacggcgact

SEQ ID NO: 5940 - DNA, 21 bp, synthetic construct
  source 1..21: mol_type = other DNA; mol_type = other DNA
agaaatacgtatgactcatat

SEQ ID NO: 5941 - DNA, 21 bp, synthetic construct
  source 1..21: mol_type = other DNA; mol_type = other DNA
gttcctacgatgtggagtgcg

SEQ ID NO: 5942 - DNA, 21 bp, synthetic construct
  source 1..21: mol_type = other DNA; mol_type = other DNA
atcgttggggaggcgtggcct

SEQ ID NO: 5943 - DNA, 21 bp, synthetic construct
  source 1..21: mol_type = other DNA; mol_type = other DNA
acctatgtccggtcaataaca

SEQ ID NO: 5944 - DNA, 21 bp, synthetic construct
  source 1..21: mol_type = other DNA; mol_type = other DNA
actgtcaccgaagtctggcca

SEQ ID NO: 5945 - DNA, 21 bp, synthetic construct
  source 1..21: mol_type = other DNA; mol_type = other DNA
aagcaaccggtgtggttagca

SEQ ID NO: 5946 - DNA, 21 bp, synthetic construct
  source 1..21: mol_type = other DNA; mol_type = other DNA
agggacgaagctaattggccc

SEQ ID NO: 5947 - DNA, 21 bp, synthetic construct
  source 1..21: mol_type = other DNA; mol_type = other DNA
aagtacacaaggaccgaaatc

SEQ ID NO: 5948 - DNA, 21 bp, synthetic construct
  source 1..21: mol_type = other DNA; mol_type = other DNA
cccatgccgaatatggtgtgg

SEQ ID NO: 5949 - DNA, 21 bp, synthetic construct
  source 1..21: mol_type = other DNA; mol_type = other DNA
ctatacacccggcttgacatc

SEQ ID NO: 5950 - DNA, 21 bp, synthetic construct
  source 1..21: mol_type = other DNA; mol_type = other DNA
gctcgtgggcagttaccgtgg

SEQ ID NO: 5951 - DNA, 21 bp, synthetic construct
  source 1..21: mol_type = other DNA; mol_type = other DNA
ctgcaggggtcaaattggccc

SEQ ID NO: 5952 - DNA, 21 bp, synthetic construct
  source 1..21: mol_type = other DNA; mol_type = other DNA
acgcaggcactcaactggccc

SEQ ID NO: 5953 - DNA, 21 bp, synthetic construct
  source 1..21: mol_type = other DNA; mol_type = other DNA
aagtcaccgaatactccctgg

SEQ ID NO: 5954 - DNA, 21 bp, synthetic construct
  source 1..21: mol_type = other DNA; mol_type = other DNA
atgtatgttcgatccgtggag

SEQ ID NO: 5955 - DNA, 21 bp, synthetic construct
  source 1..21: mol_type = other DNA; mol_type = other DNA
gctttgacgaggctccaaatg

SEQ ID NO: 5956 - DNA, 21 bp, synthetic construct
  source 1..21: mol_type = other DNA; mol_type = other DNA
tataaacagtggcactttgac

SEQ ID NO: 5957 - DNA, 21 bp, synthetic construct
  source 1..21: mol_type = other DNA; mol_type = other DNA
gatccaaaagggtattttttt

SEQ ID NO: 5958 - DNA, 21 bp, synthetic construct
  source 1..21: mol_type = other DNA; mol_type = other DNA
ggacgaagtgtttccacctgg

SEQ ID NO: 5959 - DNA, 21 bp, synthetic construct
  source 1..21: mol_type = other DNA; mol_type = other DNA
cgtactagagaggtgtggcca

SEQ ID NO: 5960 - DNA, 21 bp, synthetic construct
  source 1..21: mol_type = other DNA; mol_type = other DNA
tcttatgtccgaacgttaagt

SEQ ID NO: 5961 - DNA, 21 bp, synthetic construct
  source 1..21: mol_type = other DNA; mol_type = other DNA
cgacagaatagtgtctggcca

SEQ ID NO: 5962 - DNA, 21 bp, synthetic construct
  source 1..21: mol_type = other DNA; mol_type = other DNA
gcttttgttcggagcgtacca

SEQ ID NO: 5963 - DNA, 21 bp, synthetic construct
  source 1..21: mol_type = other DNA; mol_type = other DNA
aacaagaacggtaactggccc

SEQ ID NO: 5964 - DNA, 21 bp, synthetic construct
  source 1..21: mol_type = other DNA; mol_type = other DNA
ctgataaacggatcttggccc

SEQ ID NO: 5965 - DNA, 21 bp, synthetic construct
  source 1..21: mol_type = other DNA; mol_type = other DNA
cagtacactcgtctgcagctt

SEQ ID NO: 5966 - DNA, 21 bp, synthetic construct
  source 1..21: mol_type = other DNA; mol_type = other DNA
gtaaagcctaatataatgtgg

SEQ ID NO: 5967 - DNA, 21 bp, synthetic construct
  source 1..21: mol_type = other DNA; mol_type = other DNA
aagagcggggaccactggcca

SEQ ID NO: 5968 - DNA, 21 bp, synthetic construct
  source 1..21: mol_type = other DNA; mol_type = other DNA
atctatataaagtcagcggtg

SEQ ID NO: 5969 - DNA, 21 bp, synthetic construct
  source 1..21: mol_type = other DNA; mol_type = other DNA
cgacttaacgatacttggcca

SEQ ID NO: 5970 - DNA, 21 bp, synthetic construct
  source 1..21: mol_type = other DNA; mol_type = other DNA
aggtcgctatatgatacacta

SEQ ID NO: 5971 - DNA, 21 bp, synthetic construct
  source 1..21: mol_type = other DNA; mol_type = other DNA
aaatctggcgatcattggccc

SEQ ID NO: 5972 - DNA, 21 bp, synthetic construct
  source 1..21: mol_type = other DNA; mol_type = other DNA
atggtcaataaaacctggccg

SEQ ID NO: 5973 - DNA, 21 bp, synthetic construct
  source 1..21: mol_type = other DNA; mol_type = other DNA
agctacgtgcgcaccttgtca

SEQ ID NO: 5974 - DNA, 21 bp, synthetic construct
  source 1..21: mol_type = other DNA; mol_type = other DNA
gtctattcccgactagataca

SEQ ID NO: 5975 - DNA, 21 bp, synthetic construct
  source 1..21: mol_type = other DNA; mol_type = other DNA
aagatatccggttcttggcct

SEQ ID NO: 5976 - DNA, 21 bp, synthetic construct
  source 1..21: mol_type = other DNA; mol_type = other DNA
ttaaaagaccataattggcct

SEQ ID NO: 5977 - DNA, 21 bp, synthetic construct
  source 1..21: mol_type = other DNA; mol_type = other DNA
agtgccccgatctattttaat

SEQ ID NO: 5978 - DNA, 21 bp, synthetic construct
  source 1..21: mol_type = other DNA; mol_type = other DNA
aaatatactcggactgagatt

SEQ ID NO: 5979 - DNA, 21 bp, synthetic construct
  source 1..21: mol_type = other DNA; mol_type = other DNA
ttggttcatgacgcttggccg

SEQ ID NO: 5980 - DNA, 21 bp, synthetic construct
  source 1..21: mol_type = other DNA; mol_type = other DNA
aggtgggatccacacgaccaa

SEQ ID NO: 5981 - DNA, 21 bp, synthetic construct
  source 1..21: mol_type = other DNA; mol_type = other DNA
gtgtacagccgccttgacacc

SEQ ID NO: 5982 - DNA, 21 bp, synthetic construct
  source 1..21: mol_type = other DNA; mol_type = other DNA
ctcaatgtttggaagcaacca

SEQ ID NO: 5983 - DNA, 21 bp, synthetic construct
  source 1..21: mol_type = other DNA; mol_type = other DNA
aggttgacagatacttggccg

SEQ ID NO: 5984 - DNA, 21 bp, synthetic construct
  source 1..21: mol_type = other DNA; mol_type = other DNA
aaacacggaactatgtgggga

SEQ ID NO: 5985 - DNA, 21 bp, synthetic construct
  source 1..21: mol_type = other DNA; mol_type = other DNA
atttatgttaagagtgttagt

SEQ ID NO: 5986 - DNA, 21 bp, synthetic construct
  source 1..21: mol_type = other DNA; mol_type = other DNA
atgaaagggaacaactggccg

SEQ ID NO: 5987 - DNA, 21 bp, synthetic construct
  source 1..21: mol_type = other DNA; mol_type = other DNA
agaaacgtatatgatgggtac

SEQ ID NO: 5988 - DNA, 21 bp, synthetic construct
  source 1..21: mol_type = other DNA; mol_type = other DNA
atatatataaagtcgagcacc

SEQ ID NO: 5989 - DNA, 21 bp, synthetic construct
  source 1..21: mol_type = other DNA; mol_type = other DNA
actaaacactatacatttccc

SEQ ID NO: 5990 - DNA, 21 bp, synthetic construct
  source 1..21: mol_type = other DNA; mol_type = other DNA
gcattaacccggttacagatg

SEQ ID NO: 5991 - DNA, 21 bp, synthetic construct
  source 1..21: mol_type = other DNA; mol_type = other DNA
gttaaaccaaacatcatgtgg

SEQ ID NO: 5992 - DNA, 21 bp, synthetic construct
  source 1..21: mol_type = other DNA; mol_type = other DNA
tggaaaatgactcaactcggc

SEQ ID NO: 5993 - DNA, 21 bp, synthetic construct
  source 1..21: mol_type = other DNA; mol_type = other DNA
tatgctatctactcgacacat

SEQ ID NO: 5994 - DNA, 21 bp, synthetic construct
  source 1..21: mol_type = other DNA; mol_type = other DNA
cagtatattcgttctagcagt

SEQ ID NO: 5995 - DNA, 21 bp, synthetic construct
  source 1..21: mol_type = other DNA; mol_type = other DNA
tctatgatccttgactggaag

SEQ ID NO: 5996 - DNA, 21 bp, synthetic construct
  source 1..21: mol_type = other DNA; mol_type = other DNA
tggaagatgacgcagcttggt

SEQ ID NO: 5997 - DNA, 21 bp, synthetic construct
  source 1..21: mol_type = other DNA; mol_type = other DNA
cgcgagttcgagcagtggcca

SEQ ID NO: 5998 - DNA, 21 bp, synthetic construct
  source 1..21: mol_type = other DNA; mol_type = other DNA
tataccgtctattcaacgttc

SEQ ID NO: 5999 - DNA, 21 bp, synthetic construct
  source 1..21: mol_type = other DNA; mol_type = other DNA
agactaacggacacatggccc

SEQ ID NO: 6000 - DNA, 21 bp, synthetic construct
  source 1..21: mol_type = other DNA; mol_type = other DNA
agggaatttgaacaatggccg

SEQ ID NO: 6001 - DNA, 21 bp, synthetic construct
  source 1..21: mol_type = other DNA; mol_type = other DNA
gccttcgtaagatcggttccg

SEQ ID NO: 6002 - DNA, 21 bp, synthetic construct
  source 1..21: mol_type = other DNA; mol_type = other DNA
acgaagcattacactttcccg

SEQ ID NO: 6003 - DNA, 21 bp, synthetic construct
  source 1..21: mol_type = other DNA; mol_type = other DNA
aataagccactcgactggaaa

SEQ ID NO: 6004 - DNA, 21 bp, synthetic construct
  source 1..21: mol_type = other DNA; mol_type = other DNA
aagaacgcgacagtctggccg

SEQ ID NO: 6005 - DNA, 21 bp, synthetic construct
  source 1..21: mol_type = other DNA; mol_type = other DNA
atctacgtaaaatctgtctcg

SEQ ID NO: 6006 - DNA, 21 bp, synthetic construct
  source 1..21: mol_type = other DNA; mol_type = other DNA
gctacctggccgttgatgggg

SEQ ID NO: 6007 - DNA, 21 bp, synthetic construct
  source 1..21: mol_type = other DNA; mol_type = other DNA
atatacattaaaagtgccgta

SEQ ID NO: 6008 - DNA, 21 bp, synthetic construct
  source 1..21: mol_type = other DNA; mol_type = other DNA
ggtaacgaattttggagtcca

SEQ ID NO: 6009 - DNA, 21 bp, synthetic construct
  source 1..21: mol_type = other DNA; mol_type = other DNA
atctacgtccgctcaatatca

SEQ ID NO: 6010 - DNA, 21 bp, synthetic construct
  source 1..21: mol_type = other DNA; mol_type = other DNA
ctcatgaacaacgattggccc

SEQ ID NO: 6011 - DNA, 21 bp, synthetic construct
  source 1..21: mol_type = other DNA; mol_type = other DNA
gttacgggggcggtttggccg

SEQ ID NO: 6012 - DNA, 21 bp, synthetic construct
  source 1..21: mol_type = other DNA; mol_type = other DNA
acgcgtggcatggactggccg

SEQ ID NO: 6013 - DNA, 21 bp, synthetic construct
  source 1..21: mol_type = other DNA; mol_type = other DNA
tcgggacctatctggctagca

SEQ ID NO: 6014 - DNA, 21 bp, synthetic construct
  source 1..21: mol_type = other DNA; mol_type = other DNA
cataaaaacccactgtggggg

SEQ ID NO: 6015 - DNA, 21 bp, synthetic construct
  source 1..21: mol_type = other DNA; mol_type = other DNA
tccaacggcaggctaaactgg

SEQ ID NO: 6016 - DNA, 21 bp, synthetic construct
  source 1..21: mol_type = other DNA; mol_type = other DNA
caatataccaggttgcaatta

SEQ ID NO: 6017 - DNA, 21 bp, synthetic construct
  source 1..21: mol_type = other DNA; mol_type = other DNA
atacggggtaatgaatggcca

SEQ ID NO: 6018 - DNA, 21 bp, synthetic construct
  source 1..21: mol_type = other DNA; mol_type = other DNA
aggggtccagtgtatctttcg

SEQ ID NO: 6019 - DNA, 21 bp, synthetic construct
  source 1..21: mol_type = other DNA; mol_type = other DNA
aggaacaaaggagactggcct

SEQ ID NO: 6020 - DNA, 21 bp, synthetic construct
  source 1..21: mol_type = other DNA; mol_type = other DNA
gtgtcgctcttttcaaatcac

SEQ ID NO: 6021 - DNA, 21 bp, synthetic construct
  source 1..21: mol_type = other DNA; mol_type = other DNA
atgaagggcaataattggcct

SEQ ID NO: 6022 - DNA, 21 bp, synthetic construct
  source 1..21: mol_type = other DNA; mol_type = other DNA
cgcaataagggggattggccg

SEQ ID NO: 6023 - DNA, 21 bp, synthetic construct
  source 1..21: mol_type = other DNA; mol_type = other DNA
acacaagctcttaattggccg

SEQ ID NO: 6024 - DNA, 21 bp, synthetic construct
  source 1..21: mol_type = other DNA; mol_type = other DNA
aaacagcccgtttggcttgcc

SEQ ID NO: 6025 - DNA, 21 bp, synthetic construct
  source 1..21: mol_type = other DNA; mol_type = other DNA
caaggcctctggagggacgcc

SEQ ID NO: 6026 - DNA, 21 bp, synthetic construct
  source 1..21: mol_type = other DNA; mol_type = other DNA
cggctcaatgacacctggcct

SEQ ID NO: 6027 - DNA, 21 bp, synthetic construct
  source 1..21: mol_type = other DNA; mol_type = other DNA
tcctatacgcggttaacactc

SEQ ID NO: 6028 - DNA, 21 bp, synthetic construct
  source 1..21: mol_type = other DNA; mol_type = other DNA
tttgtcgcatccgagtggcca

SEQ ID NO: 6029 - DNA, 21 bp, synthetic construct
  source 1..21: mol_type = other DNA; mol_type = other DNA
gtctatcataaatttcagatc

SEQ ID NO: 6030 - DNA, 21 bp, synthetic construct
  source 1..21: mol_type = other DNA; mol_type = other DNA
ggtcgtcctaacctactatgg

SEQ ID NO: 6031 - DNA, 21 bp, synthetic construct
  source 1..21: mol_type = other DNA; mol_type = other DNA
tggcgcagcactagtttcggg

SEQ ID NO: 6032 - DNA, 21 bp, synthetic construct
  source 1..21: mol_type = other DNA; mol_type = other DNA
attcgaggcaacgagtggccg

SEQ ID NO: 6033 - DNA, 21 bp, synthetic construct
  source 1..21: mol_type = other DNA; mol_type = other DNA
caatacataaggtccagttcg

SEQ ID NO: 6034 - DNA, 21 bp, synthetic construct
  source 1..21: mol_type = other DNA; mol_type = other DNA
aataacatatttgccacatat

SEQ ID NO: 6035 - DNA, 21 bp, synthetic construct
  source 1..21: mol_type = other DNA; mol_type = other DNA
tcacgattaacgctcttcccc

SEQ ID NO: 6036 - DNA, 21 bp, synthetic construct
  source 1..21: mol_type = other DNA; mol_type = other DNA
cggtatttgaaaagccaagaa

SEQ ID NO: 6037 - DNA, 21 bp, synthetic construct
  source 1..21: mol_type = other DNA; mol_type = other DNA
cacaagaatcctttgtggggt

SEQ ID NO: 6038 - DNA, 21 bp, synthetic construct
  source 1..21: mol_type = other DNA; mol_type = other DNA
acttttgtcaggtcagttcta

SEQ ID NO: 6039 - DNA, 21 bp, synthetic construct
  source 1..21: mol_type = other DNA
actcgtatggccatgttccct

SEQ ID NO: 6040 - DNA, 21 bp, synthetic construct
  source 1..21: mol_type = other DNA; mol_type = other DNA
caatatacgcataaagtactt

SEQ ID NO: 6041 - DNA, 21 bp, synthetic construct
  source 1..21: mol_type = other DNA; mol_type = other DNA
atggcacagggtaattggcct

SEQ ID NO: 6042 - DNA, 21 bp, synthetic construct
  source 1..21: mol_type = other DNA; mol_type = other DNA
gtctactctaaattgatgacc

SEQ ID NO: 6043 - DNA, 21 bp, synthetic construct
  source 1..21: mol_type = other DNA; mol_type = other DNA
ttaatgaataatgactggcca

SEQ ID NO: 6044 - DNA, 21 bp, synthetic construct
  source 1..21: mol_type = other DNA; mol_type = other DNA
gtgtgggtgaagtcgtcaata

SEQ ID NO: 6045 - DNA, 21 bp, synthetic construct
  source 1..21: mol_type = other DNA; mol_type = other DNA
atgatgtcggacgcttggccg

SEQ ID NO: 6046 - DNA, 21 bp, synthetic construct
  source 1..21: mol_type = other DNA; mol_type = other DNA
cgcaaagaaagcatgtggccc

SEQ ID NO: 6047 - DNA, 21 bp, synthetic construct
  source 1..21: mol_type = other DNA; mol_type = other DNA
tccggctggctgaccgaggtt

SEQ ID NO: 6048 - DNA, 21 bp, synthetic construct
  source 1..21: mol_type = other DNA; mol_type = other DNA
ttgcaaggctctaactggccg

SEQ ID NO: 6049 - DNA, 21 bp, synthetic construct
  source 1..21: mol_type = other DNA; mol_type = other DNA
gtgctatcgggcatgtggccc

SEQ ID NO: 6050 - DNA, 21 bp, synthetic construct
  source 1..21: mol_type = other DNA; mol_type = other DNA
gtgccgactatgtggtccgca

SEQ ID NO: 6051 - DNA, 21 bp, synthetic construct
  source 1..21: mol_type = other DNA; mol_type = other DNA
tcttattctagggttcaggtg

SEQ ID NO: 6052 - DNA, 21 bp, synthetic construct
  source 1..21: mol_type = other DNA; mol_type = other DNA
gatgggttagccggttactat

SEQ ID NO: 6053 - DNA, 21 bp, synthetic construct
  source 1..21: mol_type = other DNA; mol_type = other DNA
gatccagttaacgtgtggggc

SEQ ID NO: 6054 - DNA, 21 bp, synthetic construct
  source 1..21: mol_type = other DNA; mol_type = other DNA
gtgtacacgcgcatggatatc

SEQ ID NO: 6055 - DNA, 21 bp, synthetic construct
  source 1..21: mol_type = other DNA; mol_type = other DNA
agatacctgaagagtcaggag

SEQ ID NO: 6056 - DNA, 21 bp, synthetic construct
  source 1..21: mol_type = other DNA; mol_type = other DNA
gttgaacacaacaattggccc

SEQ ID NO: 6057 - DNA, 21 bp, synthetic construct
  source 1..21: mol_type = other DNA; mol_type = other DNA
tcttacgcacgctcggtcccg

SEQ ID NO: 6058 - DNA, 21 bp, synthetic construct
  source 1..21: mol_type = other DNA; mol_type = other DNA
cagttgagcggcctctggccg

SEQ ID NO: 6059 - DNA, 21 bp, synthetic construct
  source 1..21: mol_type = other DNA; mol_type = other DNA
caaagagctactttatttccc

SEQ ID NO: 6060 - DNA, 21 bp, synthetic construct
  source 1..21: mol_type = other DNA; mol_type = other DNA
atttacatcaaaagctcaacg

SEQ ID NO: 6061 - DNA, 21 bp, synthetic construct
  source 1..21: mol_type = other DNA; mol_type = other DNA
acagttactgaggtgtggccc

SEQ ID NO: 6062 - DNA, 21 bp, synthetic construct
  source 1..21: mol_type = other DNA; mol_type = other DNA
agaggaccggtttacttatcc

SEQ ID NO: 6063 - DNA, 21 bp, synthetic construct
  source 1..21: mol_type = other DNA; mol_type = other DNA
acgtacagtaggctgcaacta

SEQ ID NO: 6064 - DNA, 21 bp, synthetic construct
  source 1..21: mol_type = other DNA; mol_type = other DNA
atggataaagatgcttggccg

SEQ ID NO: 6065 - DNA, 21 bp, synthetic construct
  source 1..21: mol_type = other DNA; mol_type = other DNA
gaaaaagggatgtggaccccc

SEQ ID NO: 6066 - DNA, 21 bp, synthetic construct
  source 1..21: mol_type = other DNA; mol_type = other DNA
ctatacgtaaagtcaacagtt

SEQ ID NO: 6067 - DNA, 21 bp, synthetic construct
  source 1..21: mol_type = other DNA; mol_type = other DNA
gtctatacccgaatggacatt

SEQ ID NO: 6068 - DNA, 21 bp, synthetic construct
  source 1..21: mol_type = other DNA; mol_type = other DNA
gctatggggtctctttggccg

SEQ ID NO: 6069 - DNA, 21 bp, synthetic construct
  source 1..21: mol_type = other DNA; mol_type = other DNA
atgatgggtcagcaatggccc

SEQ ID NO: 6070 - DNA, 21 bp, synthetic construct
  source 1..21: mol_type = other DNA; mol_type = other DNA
atggttaacaagacatggccc

SEQ ID NO: 6071 - DNA, 21 bp, synthetic construct
  source 1..21: mol_type = other DNA; mol_type = other DNA
agttatgtaaagtcctccact

SEQ ID NO: 6072 - DNA, 21 bp, synthetic construct
  source 1..21: mol_type = other DNA; mol_type = other DNA
ctaattctggaaaattggccc

SEQ ID NO: 6073 - DNA, 21 bp, synthetic construct
  source 1..21: mol_type = other DNA; mol_type = other DNA
cgcaatggagacaattggccg

SEQ ID NO: 6074 - DNA, 21 bp, synthetic construct
  source 1..21: mol_type = other DNA; mol_type = other DNA
tattacgacctcgtggagtat

SEQ ID NO: 6075 - DNA, 21 bp, synthetic construct
  source 1..21: mol_type = other DNA; mol_type = other DNA
gtcttctcgaagatacagcac

SEQ ID NO: 6076 - DNA, 21 bp, synthetic construct
  source 1..21: mol_type = other DNA; mol_type = other DNA
gtaatgaaggacctttggccg

SEQ ID NO: 6077 - DNA, 21 bp, synthetic construct
  source 1..21: mol_type = other DNA; mol_type = other DNA
aagctagggacggcatggcca

SEQ ID NO: 6078 - DNA, 21 bp, synthetic construct
  source 1..21: mol_type = other DNA; mol_type = other DNA
actaggtctatgtggtcagag

SEQ ID NO: 6079 - DNA, 21 bp, synthetic construct
  source 1..21: mol_type = other DNA; mol_type = other DNA
tcgtatgcccggtctgtgcct

SEQ ID NO: 6080 - DNA, 21 bp, synthetic construct
  source 1..21: mol_type = other DNA; mol_type = other DNA
acatattcgcgtttacagtta

SEQ ID NO: 6081 - DNA, 21 bp, synthetic construct
  source 1..21: mol_type = other DNA; mol_type = other DNA
aaacgtctccaggaatggcct

SEQ ID NO: 6082 - DNA, 21 bp, synthetic construct
  source 1..21: mol_type = other DNA; mol_type = other DNA
gcgatgggttcgctatggccc

SEQ ID NO: 6083 - DNA, 21 bp, synthetic construct
  source 1..21: mol_type = other DNA; mol_type = other DNA
cctatgaacgggaattggcct

SEQ ID NO: 6084 - DNA, 21 bp, synthetic construct
  source 1..21: mol_type = other DNA; mol_type = other DNA
ataaatctgaaggagtggccg

SEQ ID NO: 6085 - DNA, 21 bp, synthetic construct
  source 1..21: mol_type = other DNA; mol_type = other DNA
aacaaacccttagattggaag

SEQ ID NO: 6086 - DNA, 21 bp, synthetic construct
  source 1..21: mol_type = other DNA; mol_type = other DNA
caatacgtcttgtcgatgaaa

SEQ ID NO: 6087 - DNA, 21 bp, synthetic construct
  source 1..21: mol_type = other DNA; mol_type = other DNA
atagtcggagaagcttggccg

SEQ ID NO: 6088 - DNA, 21 bp, synthetic construct
  source 1..21: mol_type = other DNA; mol_type = other DNA
aacttgatgggaacatggccc

SEQ ID NO: 6089 - DNA, 21 bp, synthetic construct
  source 1..21: mol_type = other DNA; mol_type = other DNA
gtgttctcgaagagcatgtac

SEQ ID NO: 6090 - DNA, 21 bp, synthetic construct
  source 1..21: mol_type = other DNA; mol_type = other DNA
cagtatgtgaaatccaccact

SEQ ID NO: 6091 - DNA, 21 bp, synthetic construct
  source 1..21: mol_type = other DNA; mol_type = other DNA
aagcccatgtatctaggtacg

SEQ ID NO: 6092 - DNA, 21 bp, synthetic construct
  source 1..21: mol_type = other DNA; mol_type = other DNA
tacaaaactaataactggcca

SEQ ID NO: 6093 - DNA, 21 bp, synthetic construct
  source 1..21: mol_type = other DNA; mol_type = other DNA
ttgtatgttaaaagcacggtg

SEQ ID NO: 6094 - DNA, 21 bp, synthetic construct
  source 1..21: mol_type = other DNA; mol_type = other DNA
cagtacaccaagagcgtaccc

SEQ ID NO: 6095 - DNA, 21 bp, synthetic construct
  source 1..21: mol_type = other DNA; mol_type = other DNA
cagtttgtgaaatctatctct

SEQ ID NO: 6096 - DNA, 21 bp, synthetic construct
  source 1..21: mol_type = other DNA; mol_type = other DNA
gatggtttcaccaatctctgg

SEQ ID NO: 6097 - DNA, 21 bp, synthetic construct
  source 1..21: mol_type = other DNA; mol_type = other DNA
aagaacgccgaggtgtggcct

SEQ ID NO: 6098 - DNA, 21 bp, synthetic construct
  source 1..21: mol_type = other DNA; mol_type = other DNA
tcacgttcaagcttattccct

SEQ ID NO: 6099 - DNA, 21 bp, synthetic construct
  source 1..21: mol_type = other DNA; mol_type = other DNA
atggctcaagggaactggccc

SEQ ID NO: 6100 - DNA, 21 bp, synthetic construct
  source 1..21: mol_type = other DNA; mol_type = other DNA
gtatatcacaaacttaccaca

SEQ ID NO: 6101 - DNA, 21 bp, synthetic construct
  source 1..21: mol_type = other DNA; mol_type = other DNA
gtgtaccataagctcacgact

SEQ ID NO: 6102 - DNA, 21 bp, synthetic construct
  source 1..21: mol_type = other DNA; mol_type = other DNA
ggtggaatgttcatgagtccc

SEQ ID NO: 6103 - DNA, 21 bp, synthetic construct
  source 1..21: mol_type = other DNA; mol_type = other DNA
cagtacgtacgctccgaaccg

SEQ ID NO: 6104 - DNA, 21 bp, synthetic construct
  source 1..21: mol_type = other DNA; mol_type = other DNA
cgcaacaactatgacaactat

SEQ ID NO: 6105 - DNA, 21 bp, synthetic construct
  source 1..21: mol_type = other DNA; mol_type = other DNA
gtgtatgtccgcagtgcggag

SEQ ID NO: 6106 - DNA, 21 bp, synthetic construct
  source 1..21: mol_type = other DNA; mol_type = other DNA
cagtatgtcattagtcaaaag

SEQ ID NO: 6107 - DNA, 21 bp, synthetic construct
  source 1..21: mol_type = other DNA; mol_type = other DNA
ctcaaggatcacaactggcca

SEQ ID NO: 6108 - DNA, 21 bp, synthetic construct
  source 1..21: mol_type = other DNA; mol_type = other DNA
aaaaatccattgcagtttcat

SEQ ID NO: 6109 - DNA, 21 bp, synthetic construct
  source 1..21: mol_type = other DNA; mol_type = other DNA
cgtggaacgtttgacgtttac

SEQ ID NO: 6110 - DNA, 21 bp, synthetic construct
  source 1..21: mol_type = other DNA; mol_type = other DNA
cttaacgtctggaaacagccc

SEQ ID NO: 6111 - DNA, 21 bp, synthetic construct
  source 1..21: mol_type = other DNA; mol_type = other DNA
caccgcggtgaactcaactgg

SEQ ID NO: 6112 - DNA, 21 bp, synthetic construct
  source 1..21: mol_type = other DNA; mol_type = other DNA
atgcgcgtaatcgactggtct

SEQ ID NO: 6113 - DNA, 21 bp, synthetic construct
  source 1..21: mol_type = other DNA; mol_type = other DNA
attcatgatggtgtttggcct

SEQ ID NO: 6114 - DNA, 21 bp, synthetic construct
  source 1..21: mol_type = other DNA; mol_type = other DNA
ggcactgcaaagcacccctgg

SEQ ID NO: 6115 - DNA, 21 bp, synthetic construct
  source 1..21: mol_type = other DNA; mol_type = other DNA
ggaacagctaaacatccatgg

SEQ ID NO: 6116 - DNA, 21 bp, synthetic construct
  source 1..21: mol_type = other DNA; mol_type = other DNA
caatacgttaagtcaactaca

SEQ ID NO: 6117 - DNA, 21 bp, synthetic construct
  source 1..21: mol_type = other DNA; mol_type = other DNA
tggcgtggcaccagtatgcaa

SEQ ID NO: 6118 - DNA, 21 bp, synthetic construct
  source 1..21: mol_type = other DNA; mol_type = other DNA
cagggtctatggcgcgatgcg

SEQ ID NO: 6119 - DNA, 21 bp, synthetic construct
  source 1..21: mol_type = other DNA; mol_type = other DNA
tggaagggaaccacatttcac

SEQ ID NO: 6120 - DNA, 21 bp, synthetic construct
  source 1..21: mol_type = other DNA; mol_type = other DNA
atgatgggacaacagtggccg

SEQ ID NO: 6121 - DNA, 21 bp, synthetic construct
  source 1..21: mol_type = other DNA; mol_type = other DNA
gtctacacaaagtcaacctct

SEQ ID NO: 6122 - DNA, 21 bp, synthetic construct
  source 1..21: mol_type = other DNA; mol_type = other DNA
ttcgtggcttctgaatggcct

SEQ ID NO: 6123 - DNA, 21 bp, synthetic construct
  source 1..21: mol_type = other DNA; mol_type = other DNA
aacaataaaggaaactggccg

SEQ ID NO: 6124 - DNA, 21 bp, synthetic construct
  source 1..21: mol_type = other DNA; mol_type = other DNA
acgggtgtatggatgcaaacg

SEQ ID NO: 6125 - DNA, 21 bp, synthetic construct
  source 1..21: mol_type = other DNA; mol_type = other DNA
gatcggattaactacttgggg

SEQ ID NO: 6126 - DNA, 21 bp, synthetic construct
  source 1..21: mol_type = other DNA; mol_type = other DNA
acctactcgaggctcgactcg

SEQ ID NO: 6127 - DNA, 21 bp, synthetic construct
  source 1..21: mol_type = other DNA; mol_type = other DNA
tcctacatatatgatggcgac

SEQ ID NO: 6128 - DNA, 21 bp, synthetic construct
  source 1..21: mol_type = other DNA; mol_type = other DNA
gcctatgtgaaatctataacc

SEQ ID NO: 6129 - DNA, 21 bp, synthetic construct
  source 1..21: mol_type = other DNA; mol_type = other DNA
cagtatacgaagcacgtttca

SEQ ID NO: 6130 - DNA, 21 bp, synthetic construct
  source 1..21: mol_type = other DNA; mol_type = other DNA
cgccagcatgtgctatttccc

SEQ ID NO: 6131 - DNA, 21 bp, synthetic construct
  source 1..21: mol_type = other DNA; mol_type = other DNA
gcgagaggacaattgccctgg

SEQ ID NO: 6132 - DNA, 21 bp, synthetic construct
  source 1..21: mol_type = other DNA; mol_type = other DNA
ggaaagagcataacgcattgg

SEQ ID NO: 6133 - DNA, 21 bp, synthetic construct
  source 1..21: mol_type = other DNA; mol_type = other DNA
agttatgcgaaatcagtaata

SEQ ID NO: 6134 - DNA, 21 bp, synthetic construct
  source 1..21: mol_type = other DNA; mol_type = other DNA
gggcgaattacgctgtttccg

SEQ ID NO: 6135 - DNA, 21 bp, synthetic construct
  source 1..21: mol_type = other DNA; mol_type = other DNA
atttactctgctctgcaaacg

SEQ ID NO: 6136 - DNA, 21 bp, synthetic construct
  source 1..21: mol_type = other DNA; mol_type = other DNA
aaagtacagcaacagtggccg

SEQ ID NO: 6137 - DNA, 21 bp, synthetic construct
  source 1..21: mol_type = other DNA; mol_type = other DNA
gcatacgtgaagtccatgtct

SEQ ID NO: 6138 - DNA, 21 bp, synthetic construct
  source 1..21: mol_type = other DNA; mol_type = other DNA
aaacgtgatagcatgtggccg

SEQ ID NO: 6139 - DNA, 21 bp, synthetic construct
  source 1..21: mol_type = other DNA; mol_type = other DNA
atgttagcggagaactggccg

SEQ ID NO: 6140 - DNA, 21 bp, synthetic construct
  source 1..21: mol_type = other DNA; mol_type = other DNA
acacggatggcgatgtttcca

SEQ ID NO: 6141 - DNA, 21 bp, synthetic construct
  source 1..21: mol_type = other DNA; mol_type = other DNA
aaacctatgtacttggggaca

SEQ ID NO: 6142 - DNA, 21 bp, synthetic construct
  source 1..21: mol_type = other DNA; mol_type = other DNA
agtagatcgagtctttttccc

SEQ ID NO: 6143 - DNA, 21 bp, synthetic construct
  source 1..21: mol_type = other DNA; mol_type = other DNA
cgttgggacccccatgatcag

SEQ ID NO: 6144 - DNA, 21 bp, synthetic construct
  source 1..21: mol_type = other DNA; mol_type = other DNA
ccaatgaggggccacctgttc

SEQ ID NO: 6145 - DNA, 21 bp, synthetic construct
  source 1..21: mol_type = other DNA; mol_type = other DNA
tggaaaggtactacgttccat

SEQ ID NO: 6146 - DNA, 21 bp, synthetic construct
  source 1..21: mol_type = other DNA; mol_type = other DNA
taccaacgggctgattggccg

SEQ ID NO: 6147 - DNA, 21 bp, synthetic construct
  source 1..21: mol_type = other DNA; mol_type = other DNA
gcgtacgttaagagttcaatc

SEQ ID NO: 6148 - DNA, 21 bp, synthetic construct
  source 1..21: mol_type = other DNA; mol_type = other DNA
agttacagccgggtacaagtc

SEQ ID NO: 6149 - DNA, 21 bp, synthetic construct
  source 1..21: mol_type = other DNA; mol_type = other DNA
ttcctaaagtatagtgattac

SEQ ID NO: 6150 - DNA, 21 bp, synthetic construct
  source 1..21: mol_type = other DNA; mol_type = other DNA
cgcatttcgaacgattggccc

SEQ ID NO: 6151 - DNA, 21 bp, synthetic construct
  source 1..21: mol_type = other DNA; mol_type = other DNA
caatatactaaaagtgtgcct

SEQ ID NO: 6152 - DNA, 21 bp, synthetic construct
  source 1..21: mol_type = other DNA; mol_type = other DNA
aaatttgaatcgaattggcct

SEQ ID NO: 6153 - DNA, 21 bp, synthetic construct
  source 1..21: mol_type = other DNA; mol_type = other DNA
gtaaagggagaggcttggccg

SEQ ID NO: 6154 - DNA, 21 bp, synthetic construct
  source 1..21: mol_type = other DNA; mol_type = other DNA
caatatgtaaagcatctatct

SEQ ID NO: 6155 - DNA, 21 bp, synthetic construct
  source 1..21: mol_type = other DNA; mol_type = other DNA
gtttacgtacggtcggctgaa

SEQ ID NO: 6156 - DNA, 21 bp, synthetic construct
  source 1..21: mol_type = other DNA; mol_type = other DNA
gagaagggaatgtggacgccg

SEQ ID NO: 6157 - DNA, 21 bp, synthetic construct
  source 1..21: mol_type = other DNA; mol_type = other DNA
aaagtaggggctctgtggccc

SEQ ID NO: 6158 - DNA, 21 bp, synthetic construct
  source 1..21: mol_type = other DNA; mol_type = other DNA
gtttacacccgtacagagaag

SEQ ID NO: 6159 - DNA, 21 bp, synthetic construct
  source 1..21: mol_type = other DNA; mol_type = other DNA
gacacatggaatatgggaggc

SEQ ID NO: 6160 - DNA, 21 bp, synthetic construct
  source 1..21: mol_type = other DNA; mol_type = other DNA
tacaaccatccactaaattgg

SEQ ID NO: 6161 - DNA, 21 bp, synthetic construct
  source 1..21: mol_type = other DNA; mol_type = other DNA
gtgtatacacgaaccgaaaaa

SEQ ID NO: 6162 - DNA, 21 bp, synthetic construct
  source 1..21: mol_type = other DNA; mol_type = other DNA
cgaaatgtgtacgacggttat

SEQ ID NO: 6163 - DNA, 21 bp, synthetic construct
  source 1..21: mol_type = other DNA; mol_type = other DNA
gttcatcacaaaagcatgaca

SEQ ID NO: 6164 - DNA, 21 bp, synthetic construct
  source 1..21: mol_type = other DNA; mol_type = other DNA
tggcagggggagcatccatgg

SEQ ID NO: 6165 - DNA, 21 bp, synthetic construct
  source 1..21: mol_type = other DNA; mol_type = other DNA
gacaggaataaacttatctgg

SEQ ID NO: 6166 - DNA, 21 bp, synthetic construct
  source 1..21: mol_type = other DNA; mol_type = other DNA
gtgtattcaaagcttatgacg

SEQ ID NO: 6167 - DNA, 21 bp, synthetic construct
  source 1..21: mol_type = other DNA; mol_type = other DNA
tggcagcccgacccctttcca

SEQ ID NO: 6168 - DNA, 21 bp, synthetic construct
  source 1..21: mol_type = other DNA; mol_type = other DNA
ggcttggggtggattaatggg

SEQ ID NO: 6169 - DNA, 21 bp, synthetic construct
  source 1..21: mol_type = other DNA; mol_type = other DNA
cgagttctagcgaattggccg

SEQ ID NO: 6170 - DNA, 21 bp, synthetic construct
  source 1..21: mol_type = other DNA; mol_type = other DNA
tggacaactcataatatcgtt

SEQ ID NO: 6171 - DNA, 21 bp, synthetic construct
  source 1..21: mol_type = other DNA; mol_type = other DNA
cagcgcgcaaccctattccct

SEQ ID NO: 6172 - DNA, 21 bp, synthetic construct
  source 1..21: mol_type = other DNA; mol_type = other DNA
cagtacacacacaaggttttg

SEQ ID NO: 6173 - DNA, 21 bp, synthetic construct
  source 1..21: mol_type = other DNA; mol_type = other DNA
cgtaacacatacgatagctac

SEQ ID NO: 6174 - DNA, 21 bp, synthetic construct
  source 1..21: mol_type = other DNA; mol_type = other DNA
gacatgccgaactggtcgtgg

SEQ ID NO: 6175 - DNA, 21 bp, synthetic construct
  source 1..21: mol_type = other DNA; mol_type = other DNA
atatacgtaaaattcgaatcg

SEQ ID NO: 6176 - DNA, 21 bp, synthetic construct
  source 1..21: mol_type = other DNA; mol_type = other DNA
tacgtagctgacgattggcca

SEQ ID NO: 6177 - DNA, 21 bp, synthetic construct
  source 1..21: mol_type = other DNA; mol_type = other DNA
cagtacgtcaaacacttgtcc

SEQ ID NO: 6178 - DNA, 21 bp, synthetic construct
  source 1..21: mol_type = other DNA; mol_type = other DNA
aagcggttacaagagtggcca

SEQ ID NO: 6179 - DNA, 21 bp, synthetic construct
  source 1..21: mol_type = other DNA; mol_type = other DNA
cgggaaaggaacgagtggcct

SEQ ID NO: 6180 - DNA, 21 bp, synthetic construct
  source 1..21: mol_type = other DNA; mol_type = other DNA
aagatagaggggagctggcca

SEQ ID NO: 6181 - DNA, 21 bp, synthetic construct
  source 1..21: mol_type = other DNA; mol_type = other DNA
gcgtatgttaaatcaatgagt

SEQ ID NO: 6182 - DNA, 21 bp, synthetic construct
  source 1..21: mol_type = other DNA; mol_type = other DNA
tcatatgttaagtcccaaact

SEQ ID NO: 6183 - DNA, 21 bp, synthetic construct
  source 1..21: mol_type = other DNA; mol_type = other DNA
gtcaaaggcgaagcctggccc

SEQ ID NO: 6184 - DNA, 21 bp, synthetic construct
  source 1..21: mol_type = other DNA; mol_type = other DNA
atgatgagcgatgcatggccc

SEQ ID NO: 6185 - DNA, 21 bp, synthetic construct
  source 1..21: mol_type = other DNA; mol_type = other DNA
tatttggatctcgattggcca

SEQ ID NO: 6186 - DNA, 21 bp, synthetic construct
  source 1..21: mol_type = other DNA; mol_type = other DNA
gcttacgttaagagtatcact

SEQ ID NO: 6187 - DNA, 21 bp, synthetic construct
  source 1..21: mol_type = other DNA; mol_type = other DNA
agctacgtgaaatcatcgaca

SEQ ID NO: 6188 - DNA, 21 bp, synthetic construct
  source 1..21: mol_type = other DNA; mol_type = other DNA
taccttgacttggactggccc

SEQ ID NO: 6189 - DNA, 21 bp, synthetic construct
  source 1..21: mol_type = other DNA; mol_type = other DNA
gaccgcataaattatcttgga

SEQ ID NO: 6190 - DNA, 21 bp, synthetic construct
  source 1..21: mol_type = other DNA; mol_type = other DNA
aaggtggagtacaactggccg

SEQ ID NO: 6191 - DNA, 21 bp, synthetic construct
  source 1..21: mol_type = other DNA; mol_type = other DNA
tcagagcaagaatttaactgg

SEQ ID NO: 6192 - DNA, 21 bp, synthetic construct
  source 1..21: mol_type = other DNA; mol_type = other DNA
acttattcccgactggattca

SEQ ID NO: 6193 - DNA, 21 bp, synthetic construct
  source 1..21: mol_type = other DNA; mol_type = other DNA
gtatacacaaagaatgaacgg

SEQ ID NO: 6194 - DNA, 21 bp, synthetic construct
  source 1..21: mol_type = other DNA; mol_type = other DNA
atctactcaaaactgcaaaca

SEQ ID NO: 6195 - DNA, 21 bp, synthetic construct
  source 1..21: mol_type = other DNA; mol_type = other DNA
ggcaaatcaatcactcactgg

SEQ ID NO: 6196 - DNA, 21 bp, synthetic construct
  source 1..21: mol_type = other DNA; mol_type = other DNA
ggcatctatgctaccttcccg

SEQ ID NO: 6197 - DNA, 21 bp, synthetic construct
  source 1..21: mol_type = other DNA; mol_type = other DNA
aaccatccgcttgcttgggag

SEQ ID NO: 6198 - DNA, 21 bp, synthetic construct
  source 1..21: mol_type = other DNA; mol_type = other DNA
cggcgctccgacaattggcct

SEQ ID NO: 6199 - DNA, 21 bp, synthetic construct
  source 1..21: mol_type = other DNA; mol_type = other DNA
caattcgtcaagtcgattagt

SEQ ID NO: 6200 - DNA, 21 bp, synthetic construct
  source 1..21: mol_type = other DNA; mol_type = other DNA
gtcgagcataataactggcca

SEQ ID NO: 6201 - DNA, 21 bp, synthetic construct
  source 1..21: mol_type = other DNA; mol_type = other DNA
cgacacactacggagtggcct

SEQ ID NO: 6202 - DNA, 21 bp, synthetic construct
  source 1..21: mol_type = other DNA; mol_type = other DNA
aataagcctctatatttctcc

SEQ ID NO: 6203 - DNA, 21 bp, synthetic construct
  source 1..21: mol_type = other DNA; mol_type = other DNA
gtgtatgtcaagactcaatcg

SEQ ID NO: 6204 - DNA, 21 bp, synthetic construct
  source 1..21: mol_type = other DNA; mol_type = other DNA
aaagtagaatataattggcca

SEQ ID NO: 6205 - DNA, 21 bp, synthetic construct
  source 1..21: mol_type = other DNA; mol_type = other DNA
ggccagcagtatagttattcg

SEQ ID NO: 6206 - DNA, 21 bp, synthetic construct
  source 1..21: mol_type = other DNA; mol_type = other DNA
gggcaacaatactcatacagc

SEQ ID NO: 6207 - DNA, 21 bp, synthetic construct
  source 1..21: mol_type = other DNA; mol_type = other DNA
acaggggtttggatgcagact

SEQ ID NO: 6208 - DNA, 21 bp, synthetic construct
  source 1..21: mol_type = other DNA; mol_type = other DNA
tttttgaaatactctgactat

SEQ ID NO: 6209 - DNA, 21 bp, synthetic construct
  source 1..21: mol_type = other DNA; mol_type = other DNA
tcatacagccgcattgcccca

SEQ ID NO: 6210 - DNA, 21 bp, synthetic construct
  source 1..21: mol_type = other DNA; mol_type = other DNA
gtacaccataagtctatgact

SEQ ID NO: 6211 - DNA, 21 bp, synthetic construct
  source 1..21: mol_type = other DNA; mol_type = other DNA
acattcgttcgatccgtatta

SEQ ID NO: 6212 - DNA, 21 bp, synthetic construct
  source 1..21: mol_type = other DNA; mol_type = other DNA
gatcggaacaagctaatatgg

SEQ ID NO: 6213 - DNA, 21 bp, synthetic construct
  source 1..21: mol_type = other DNA; mol_type = other DNA
tctcgtgacgttacgtggccc

SEQ ID NO: 6214 - DNA, 21 bp, synthetic construct
  source 1..21: mol_type = other DNA; mol_type = other DNA
cgagacactttttggtcaggc

SEQ ID NO: 6215 - DNA, 21 bp, synthetic construct
  source 1..21: mol_type = other DNA; mol_type = other DNA
agttacgtaaaatctcagacc

SEQ ID NO: 6216 - DNA, 21 bp, synthetic construct
  source 1..21: mol_type = other DNA; mol_type = other DNA
gcatatgtgaaaagcagtata

SEQ ID NO: 6217 - DNA, 21 bp, synthetic construct
  source 1..21: mol_type = other DNA; mol_type = other DNA
acgtcgaggccgctcaattgg

SEQ ID NO: 6218 - DNA, 21 bp, synthetic construct
  source 1..21: mol_type = other DNA; mol_type = other DNA
caataccataagtcagagtct

SEQ ID NO: 6219 - DNA, 21 bp, synthetic construct
  source 1..21: mol_type = other DNA; mol_type = other DNA
ggaaatgagttctggtctccc

SEQ ID NO: 6220 - DNA, 21 bp, synthetic construct
  source 1..21: mol_type = other DNA; mol_type = other DNA
aaaaacgaagacatctggcct

SEQ ID NO: 6221 - DNA, 21 bp, synthetic construct
  source 1..21: mol_type = other DNA; mol_type = other DNA
tataacgaagggtcctggccg

SEQ ID NO: 6222 - DNA, 21 bp, synthetic construct
  source 1..21: mol_type = other DNA; mol_type = other DNA
tcgagtatacacgatcgatat

SEQ ID NO: 6223 - DNA, 21 bp, synthetic construct
  source 1..21: mol_type = other DNA; mol_type = other DNA
ccgatgaatggtaactggccc

SEQ ID NO: 6224 - DNA, 21 bp, synthetic construct
  source 1..21: mol_type = other DNA; mol_type = other DNA
tcgtattctcggatcgctccc

SEQ ID NO: 6225 - DNA, 21 bp, synthetic construct
  source 1..21: mol_type = other DNA; mol_type = other DNA
cgcaataactatgacagcatg

SEQ ID NO: 6226 - DNA, 21 bp, synthetic construct
  source 1..21: mol_type = other DNA; mol_type = other DNA
tcgcgtctcacattgtttcct

SEQ ID NO: 6227 - DNA, 21 bp, synthetic construct
  source 1..21: mol_type = other DNA; mol_type = other DNA
atgcaagacatcaagtggcct

SEQ ID NO: 6228 - DNA, 21 bp, synthetic construct
  source 1..21: mol_type = other DNA; mol_type = other DNA
agaaatgtgttcgatacctct

SEQ ID NO: 6229 - DNA, 21 bp, synthetic construct
  source 1..21: mol_type = other DNA; mol_type = other DNA
gaggcaaatttcagtaattgg

SEQ ID NO: 6230 - DNA, 21 bp, synthetic construct
  source 1..21: mol_type = other DNA
acatatagtcgcttagtctta

SEQ ID NO: 6231 - DNA, 21 bp, synthetic construct
  source 1..21: mol_type = other DNA
acatatgtgaggtcggaagtc

SEQ ID NO: 6232 - DNA, 21 bp, synthetic construct
  source 1..21: mol_type = other DNA
caatacactaaatcaagtatc

SEQ ID NO: 6233 - DNA, 21 bp, synthetic construct
  source 1..21: mol_type = other DNA
tcatatatctacgacggtgat

SEQ ID NO: 6234 - DNA, 21 bp, synthetic construct
  source 1..21: mol_type = other DNA; mol_type = other DNA
atacacgacggggtctggccg

SEQ ID NO: 6235 - DNA, 21 bp, synthetic construct
  source 1..21: mol_type = other DNA; mol_type = other DNA
agaatcagtaatgactggcca

SEQ ID NO: 6236 - DNA, 21 bp, synthetic construct
  source 1..21: mol_type = other DNA; mol_type = other DNA
tggtccacaagggagatgatc

SEQ ID NO: 6237 - DNA, 21 bp, synthetic construct
  source 1..21: mol_type = other DNA; mol_type = other DNA
ggctctacggatccctggccg

SEQ ID NO: 6238 - DNA, 21 bp, synthetic construct
  source 1..21: mol_type = other DNA; mol_type = other DNA
tcgtacgctaagtccgttatc

SEQ ID NO: 6239 - DNA, 21 bp, synthetic construct
  source 1..21: mol_type = other DNA; mol_type = other DNA
aagttcgagtccaactggccg

SEQ ID NO: 6240 - DNA, 21 bp, synthetic construct
  source 1..21: mol_type = other DNA; mol_type = other DNA
tatttcaccgacgagtggcca

SEQ ID NO: 6241 - DNA, 21 bp, synthetic construct
  source 1..21: mol_type = other DNA; mol_type = other DNA
tactttacagatgaatggccc

SEQ ID NO: 6242 - DNA, 21 bp, synthetic construct
  source 1..21: mol_type = other DNA; mol_type = other DNA
caatacacaaaacatgtatct

SEQ ID NO: 6243 - DNA, 21 bp, synthetic construct
  source 1..21: mol_type = other DNA; mol_type = other DNA
gttatgtcggaggtctggcca

SEQ ID NO: 6244 - DNA, 21 bp, synthetic construct
  source 1..21: mol_type = other DNA; mol_type = other DNA
agagatcgggccgaatggcct

SEQ ID NO: 6245 - DNA, 21 bp, synthetic construct
  source 1..21: mol_type = other DNA; mol_type = other DNA
tcctatagcagacttatagag

SEQ ID NO: 6246 - DNA, 21 bp, synthetic construct
  source 1..21: mol_type = other DNA; mol_type = other DNA
gtaaatagattggtagactgg

SEQ ID NO: 6247 - DNA, 21 bp, synthetic construct
  source 1..21: mol_type = other DNA; mol_type = other DNA
acagtaaaaatacaatggccc

SEQ ID NO: 6248 - DNA, 21 bp, synthetic construct
  source 1..21: mol_type = other DNA; mol_type = other DNA
cagtatcacaaatcggaaagt

SEQ ID NO: 6249 - DNA, 21 bp, synthetic construct
  source 1..21: mol_type = other DNA; mol_type = other DNA
acttataccaagtctcaaacg

SEQ ID NO: 6250 - DNA, 21 bp, synthetic construct
  source 1..21: mol_type = other DNA; mol_type = other DNA
aggaatcactacgatacccaa

SEQ ID NO: 6251 - DNA, 21 bp, synthetic construct
  source 1..21: mol_type = other DNA; mol_type = other DNA
tacaatgagggatcatggcca

SEQ ID NO: 6252 - DNA, 21 bp, synthetic construct
  source 1..21: mol_type = other DNA; mol_type = other DNA
aaaattgaaggatcatggccg

SEQ ID NO: 6253 - DNA, 21 bp, synthetic construct
  source 1..21: mol_type = other DNA; mol_type = other DNA
ttgaaagtattacaatgggac

SEQ ID NO: 6254 - DNA, 21 bp, synthetic construct
  source 1..21: mol_type = other DNA; mol_type = other DNA
ttcgtgtcttctgactggccg

SEQ ID NO: 6255 - DNA, 21 bp, synthetic construct
  source 1..21: mol_type = other DNA; mol_type = other DNA
tggtcaacccgggaaatgatt

SEQ ID NO: 6256 - DNA, 21 bp, synthetic construct
  source 1..21: mol_type = other DNA; mol_type = other DNA
gggtttggcgagaagtggcct

SEQ ID NO: 6257 - DNA, 21 bp, synthetic construct
  source 1..21: mol_type = other DNA; mol_type = other DNA
gcttacgtgaagagcaatacg

SEQ ID NO: 6258 - DNA, 21 bp, synthetic construct
  source 1..21: mol_type = other DNA; mol_type = other DNA
ctggtttcgaacgattggcct

SEQ ID NO: 6259 - DNA, 21 bp, synthetic construct
  source 1..21: mol_type = other DNA; mol_type = other DNA
ggtatttacgcaacgtttcca

SEQ ID NO: 6260 - DNA, 21 bp, synthetic construct
  source 1..21: mol_type = other DNA; mol_type = other DNA
caatacgttatatctcagaaa

SEQ ID NO: 6261 - DNA, 21 bp, synthetic construct
  source 1..21: mol_type = other DNA; mol_type = other DNA
cggaacggcgataactggcct

SEQ ID NO: 6262 - DNA, 21 bp, synthetic construct
  source 1..21: mol_type = other DNA; mol_type = other DNA
tcgggatggttgacagaagtc

SEQ ID NO: 6263 - DNA, 21 bp, synthetic construct
  source 1..21: mol_type = other DNA; mol_type = other DNA
cgccatacaacagaatggccc

SEQ ID NO: 6264 - DNA, 21 bp, synthetic construct
  source 1..21: mol_type = other DNA; mol_type = other DNA
aggagatcagataactggcca

SEQ ID NO: 6265 - DNA, 21 bp, synthetic construct
  source 1..21: mol_type = other DNA; mol_type = other DNA
tccaaatatcatgacgtcttt

SEQ ID NO: 6266 - DNA, 21 bp, synthetic construct
  source 1..21: mol_type = other DNA; mol_type = other DNA
gtatataccaagtccgagtgg

SEQ ID NO: 6267 - DNA, 21 bp, synthetic construct
  source 1..21: mol_type = other DNA; mol_type = other DNA
cagtatgtactttctatgaag

SEQ ID NO: 6268 - DNA, 21 bp, synthetic construct
  source 1..21: mol_type = other DNA; mol_type = other DNA
tatatgagtcctgattggcca

SEQ ID NO: 6269 - DNA, 21 bp, synthetic construct
  source 1..21: mol_type = other DNA; mol_type = other DNA
cagtatacgaagagcagcatt

SEQ ID NO: 6270 - DNA, 21 bp, synthetic construct
  source 1..21: mol_type = other DNA; mol_type = other DNA
aaaaagagcctagattggcct

SEQ ID NO: 6271 - DNA, 21 bp, synthetic construct
  source 1..21: mol_type = other DNA; mol_type = other DNA
agcagaaatgtactgggttgg

SEQ ID NO: 6272 - DNA, 21 bp, synthetic construct
  source 1..21: mol_type = other DNA; mol_type = other DNA
gcgtatgtaaaatccaacact

SEQ ID NO: 6273 - DNA, 21 bp, synthetic construct
  source 1..21: mol_type = other DNA; mol_type = other DNA
acgtacacaaaatcccagacc

SEQ ID NO: 6274 - DNA, 21 bp, synthetic construct
  source 1..21: mol_type = other DNA; mol_type = other DNA
caatatgtccggtcggagcca

SEQ ID NO: 6275 - DNA, 21 bp, synthetic construct
  source 1..21: mol_type = other DNA; mol_type = other DNA
gttaaggatggcacatggccg

SEQ ID NO: 6276 - DNA, 21 bp, synthetic construct
  source 1..21: mol_type = other DNA; mol_type = other DNA
cgtgaccgagcagagtggcca

SEQ ID NO: 6277 - DNA, 21 bp, synthetic construct
  source 1..21: mol_type = other DNA; mol_type = other DNA
gatacgtggaacatgggtggt

SEQ ID NO: 6278 - DNA, 21 bp, synthetic construct
  source 1..21: mol_type = other DNA; mol_type = other DNA
gtctatactaaaaacgagcga

SEQ ID NO: 6279 - DNA, 21 bp, synthetic construct
  source 1..21: mol_type = other DNA; mol_type = other DNA
atcacggtagatggctggcca

SEQ ID NO: 6280 - DNA, 21 bp, synthetic construct
  source 1..21: mol_type = other DNA; mol_type = other DNA
cgtaataattacgataattac

SEQ ID NO: 6281 - DNA, 21 bp, synthetic construct
  source 1..21: mol_type = other DNA; mol_type = other DNA
ttctcaggcgatacgtggccg

SEQ ID NO: 6282 - DNA, 21 bp, synthetic construct
  source 1..21: mol_type = other DNA; mol_type = other DNA
gtttactccaaattaaacacg

SEQ ID NO: 6283 - DNA, 21 bp, synthetic construct
  source 1..21: mol_type = other DNA; mol_type = other DNA
acgtccaggttcgacacctac

SEQ ID NO: 6284 - DNA, 21 bp, synthetic construct
  source 1..21: mol_type = other DNA; mol_type = other DNA
aaagtaaatgatacatggcct

SEQ ID NO: 6285 - DNA, 21 bp, synthetic construct
  source 1..21: mol_type = other DNA; mol_type = other DNA
agtaagtaccacgatgttttc

SEQ ID NO: 6286 - DNA, 21 bp, synthetic construct
  source 1..21: mol_type = other DNA; mol_type = other DNA
aggaacgtctttgacacatcg

SEQ ID NO: 6287 - DNA, 21 bp, synthetic construct
  source 1..21: mol_type = other DNA; mol_type = other DNA
ataacagtcgacggatggcct

SEQ ID NO: 6288 - DNA, 21 bp, synthetic construct
  source 1..21: mol_type = other DNA; mol_type = other DNA
tggaaattccagacagagatc

SEQ ID NO: 6289 - DNA, 21 bp, synthetic construct
  source 1..21: mol_type = other DNA; mol_type = other DNA
gtctacactaaatcggaatgg

SEQ ID NO: 6290 - DNA, 21 bp, synthetic construct
  source 1..21: mol_type = other DNA; mol_type = other DNA
ggcacttttcaattgtttccg

SEQ ID NO: 6291 - DNA, 21 bp, synthetic construct
  source 1..21: mol_type = other DNA; mol_type = other DNA
tatcagcgcgcggactggccc

SEQ ID NO: 6292 - DNA, 21 bp, synthetic construct
  source 1..21: mol_type = other DNA; mol_type = other DNA
gtgtatgtacggacggaaatg

SEQ ID NO: 6293 - DNA, 21 bp, synthetic construct
  source 1..21: mol_type = other DNA; mol_type = other DNA
caggttgtgaaatacttgcct

SEQ ID NO: 6294 - DNA, 21 bp, synthetic construct
  source 1..21: mol_type = other DNA; mol_type = other DNA
acgttcgttaagtcgctaacg

SEQ ID NO: 6295 - DNA, 21 bp, synthetic construct
  source 1..21: mol_type = other DNA; mol_type = other DNA
aaggtcgaatatgactggccc

SEQ ID NO: 6296 - DNA, 21 bp, synthetic construct
  source 1..21: mol_type = other DNA; mol_type = other DNA
tttgtctcctccgattggccc

SEQ ID NO: 6297 - DNA, 21 bp, synthetic construct
  source 1..21: mol_type = other DNA; mol_type = other DNA
caatggacaaagacagtacct

SEQ ID NO: 6298 - DNA, 21 bp, synthetic construct
  source 1..21: mol_type = other DNA; mol_type = other DNA
tcatttgtgagatcggttgaa

SEQ ID NO: 6299 - DNA, 21 bp, synthetic construct
  source 1..21: mol_type = other DNA; mol_type = other DNA
gttaaccgactggttgattgg

SEQ ID NO: 6300 - DNA, 21 bp, synthetic construct
  source 1..21: mol_type = other DNA; mol_type = other DNA
cctatgcctaacatggtatgg

SEQ ID NO: 6301 - DNA, 21 bp, synthetic construct
  source 1..21: mol_type = other DNA; mol_type = other DNA
aagaatgaggatatttggccc

SEQ ID NO: 6302 - DNA, 21 bp, synthetic construct
  source 1..21: mol_type = other DNA; mol_type = other DNA
tttaaggaggggatctggcct

SEQ ID NO: 6303 - DNA, 21 bp, synthetic construct
  source 1..21: mol_type = other DNA; mol_type = other DNA
gggaagaatgtattatggccc

SEQ ID NO: 6304 - DNA, 21 bp, synthetic construct
  source 1..21: mol_type = other DNA; mol_type = other DNA
agcttcgtacgatctgtggag

SEQ ID NO: 6305 - DNA, 21 bp, synthetic construct
  source 1..21: mol_type = other DNA; mol_type = other DNA
gtagttcgattctcaaatcac

SEQ ID NO: 6306 - DNA, 21 bp, synthetic construct
  source 1..21: mol_type = other DNA; mol_type = other DNA
gttcaggcagagagttggccc

SEQ ID NO: 6307 - DNA, 21 bp, synthetic construct
  source 1..21: mol_type = other DNA; mol_type = other DNA
gtacacgaggagctatggcca

SEQ ID NO: 6308 - DNA, 21 bp, synthetic construct
  source 1..21: mol_type = other DNA; mol_type = other DNA
gccttcactagattagaagtt

SEQ ID NO: 6309 - DNA, 21 bp, synthetic construct
  source 1..21: mol_type = other DNA; mol_type = other DNA
gtattttctaaaagtatgtat

SEQ ID NO: 6310 - DNA, 21 bp, synthetic construct
  source 1..21: mol_type = other DNA; mol_type = other DNA
gtgatgaaagatctatggccc

SEQ ID NO: 6311 - DNA, 21 bp, synthetic construct
  source 1..21: mol_type = other DNA; mol_type = other DNA
cgctataccaagcttgaggag

SEQ ID NO: 6312 - DNA, 21 bp, synthetic construct
  source 1..21: mol_type = other DNA; mol_type = other DNA
cgatatgaagcggattggccc

SEQ ID NO: 6313 - DNA, 21 bp, synthetic construct
  source 1..21: mol_type = other DNA; mol_type = other DNA
aggaacaattacgattcaatg

SEQ ID NO: 6314 - DNA, 21 bp, synthetic construct
  source 1..21: mol_type = other DNA; mol_type = other DNA
gtgtatactaaatccacaagt

SEQ ID NO: 6315 - DNA, 21 bp, synthetic construct
  source 1..21: mol_type = other DNA; mol_type = other DNA
ctttacgaagatgtatggcca

SEQ ID NO: 6316 - DNA, 21 bp, synthetic construct
  source 1..21: mol_type = other DNA; mol_type = other DNA
ggcagaccaaatcttttatgg

SEQ ID NO: 6317 - DNA, 21 bp, synthetic construct
  source 1..21: mol_type = other DNA; mol_type = other DNA
aaacagggctcagagtggcca

SEQ ID NO: 6318 - DNA, 21 bp, synthetic construct
  source 1..21: mol_type = other DNA; mol_type = other DNA
atgcttttcaaatacgaggct

SEQ ID NO: 6319 - DNA, 21 bp, synthetic construct
  source 1..21: mol_type = other DNA; mol_type = other DNA
tcgagagatgtaacttggcct

SEQ ID NO: 6320 - DNA, 21 bp, synthetic construct
  source 1..21: mol_type = other DNA; mol_type = other DNA
tatgtggcagatgactggccc

SEQ ID NO: 6321 - DNA, 21 bp, synthetic construct
  source 1..21: mol_type = other DNA; mol_type = other DNA
gtctacgtaaaaacgcagagt

SEQ ID NO: 6322 - DNA, 21 bp, synthetic construct
  source 1..21: mol_type = other DNA; mol_type = other DNA
atcctatttaaacgcgagagc

SEQ ID NO: 6323 - DNA, 21 bp, synthetic construct
  source 1..21: mol_type = other DNA; mol_type = other DNA
tacgacatgcctgactggcct

SEQ ID NO: 6324 - DNA, 21 bp, synthetic construct
  source 1..21: mol_type = other DNA; mol_type = other DNA
attctggatcggaactggcct

SEQ ID NO: 6325 - DNA, 21 bp, synthetic construct
  source 1..21: mol_type = other DNA; mol_type = other DNA
acacaagtcgaacactggcca

SEQ ID NO: 6326 - DNA, 21 bp, synthetic construct
  source 1..21: mol_type = other DNA; mol_type = other DNA
cgtaaccattatgacacacag

SEQ ID NO: 6327 - DNA, 21 bp, synthetic construct
  source 1..21: mol_type = other DNA; mol_type = other DNA
cgactgattgagaattggccc

SEQ ID NO: 6328 - DNA, 21 bp, synthetic construct
  source 1..21: mol_type = other DNA; mol_type = other DNA
aagaaccctcttcaattccac

SEQ ID NO: 6329 - DNA, 21 bp, synthetic construct
  source 1..21: mol_type = other DNA; mol_type = other DNA
gcatacagccggcttgagtcc

SEQ ID NO: 6330 - DNA, 21 bp, synthetic construct
  source 1..21: mol_type = other DNA; mol_type = other DNA
tggaagtttcaaacggaaata

SEQ ID NO: 6331 - DNA, 21 bp, synthetic construct
  source 1..21: mol_type = other DNA; mol_type = other DNA
actgttaagattcagtggcca

SEQ ID NO: 6332 - DNA, 21 bp, synthetic construct
  source 1..21: mol_type = other DNA; mol_type = other DNA
acctttgtcaaatcattaaca

SEQ ID NO: 6333 - DNA, 21 bp, synthetic construct
  source 1..21: mol_type = other DNA; mol_type = other DNA
aagaaatcgctcgactggcca

SEQ ID NO: 6334 - DNA, 21 bp, synthetic construct
  source 1..21: mol_type = other DNA; mol_type = other DNA
aagcaaggtagcgaatggcct

SEQ ID NO: 6335 - DNA, 21 bp, synthetic construct
  source 1..21: mol_type = other DNA; mol_type = other DNA
ggtcggataacactattccca

SEQ ID NO: 6336 - DNA, 21 bp, synthetic construct
  source 1..21: mol_type = other DNA; mol_type = other DNA
aatctgatggggacttggccg

SEQ ID NO: 6337 - DNA, 21 bp, synthetic construct
  source 1..21: mol_type = other DNA; mol_type = other DNA
tacgctgaggaagactggcca

SEQ ID NO: 6338 - DNA, 21 bp, synthetic construct
  source 1..21: mol_type = other DNA; mol_type = other DNA
aaggtccaacagcaatggcct

SEQ ID NO: 6339 - DNA, 21 bp, synthetic construct
  source 1..21: mol_type = other DNA; mol_type = other DNA
attctgttcaagagagaatca

SEQ ID NO: 6340 - DNA, 21 bp, synthetic construct
  source 1..21: mol_type = other DNA; mol_type = other DNA
cgcaatgccttcgacacacta

SEQ ID NO: 6341 - DNA, 21 bp, synthetic construct
  source 1..21: mol_type = other DNA; mol_type = other DNA
tggaaagatacacgatttgag

SEQ ID NO: 6342 - DNA, 21 bp, synthetic construct
  source 1..21: mol_type = other DNA; mol_type = other DNA
aaagagttttatgtgggaagt

SEQ ID NO: 6343 - DNA, 21 bp, synthetic construct
  source 1..21: mol_type = other DNA; mol_type = other DNA
aagcctctatacgatggttcc

SEQ ID NO: 6344 - DNA, 21 bp, synthetic construct
  source 1..21: mol_type = other DNA; mol_type = other DNA
ggtttcggtgaaaaatggcca

SEQ ID NO: 6345 - DNA, 21 bp, synthetic construct
  source 1..21: mol_type = other DNA; mol_type = other DNA
acaggtgtagagttatggccc

SEQ ID NO: 6346 - DNA, 21 bp, synthetic construct
  source 1..21: mol_type = other DNA; mol_type = other DNA
actagccgttttgatacttat

SEQ ID NO: 6347 - DNA, 21 bp, synthetic construct
  source 1..21: mol_type = other DNA; mol_type = other DNA
cagctaacaaggttagagtct

SEQ ID NO: 6348 - DNA, 21 bp, synthetic construct
  source 1..21: mol_type = other DNA; mol_type = other DNA
cgtcttatagaaaactggcct

SEQ ID NO: 6349 - DNA, 21 bp, synthetic construct
  source 1..21: mol_type = other DNA; mol_type = other DNA
acgcaggtggagcattggccg

SEQ ID NO: 6350 - DNA, 21 bp, synthetic construct
  source 1..21: mol_type = other DNA; mol_type = other DNA
tggaaggacactcgcttcgaa

SEQ ID NO: 6351 - DNA, 21 bp, synthetic construct
  source 1..21: mol_type = other DNA; mol_type = other DNA
atgaacgataggatctggcct

SEQ ID NO: 6352 - DNA, 21 bp, synthetic construct
  source 1..21: mol_type = other DNA; mol_type = other DNA
gttgtcagtgaaatatggccg

SEQ ID NO: 6353 - DNA, 21 bp, synthetic construct
  source 1..21: mol_type = other DNA; mol_type = other DNA
gtcaaagacggtacctggcct

SEQ ID NO: 6354 - DNA, 21 bp, synthetic construct
  source 1..21: mol_type = other DNA; mol_type = other DNA
atcattgatgcagaatggcca

SEQ ID NO: 6355 - DNA, 21 bp, synthetic construct
  source 1..21: mol_type = other DNA
gtgtacacaaagcatgagttt

SEQ ID NO: 6356 - DNA, 21 bp, synthetic construct
  source 1..21: mol_type = other DNA
ggcggtatgtttatgtccccg

SEQ ID NO: 6357 - DNA, 21 bp, synthetic construct
  source 1..21: mol_type = other DNA
atgctctttaagtatgaagcg

SEQ ID NO: 6358 - DNA, 21 bp, synthetic construct
  source 1..21: mol_type = other DNA
gtggacaacaacgaatggccc

SEQ ID NO: 6359 - DNA, 21 bp, synthetic construct
  source 1..21: mol_type = other DNA
atttatgtcaagtttgagagc

SEQ ID NO: 6360 - DNA, 21 bp, synthetic construct
  source 1..21: mol_type = other DNA; mol_type = other DNA
gtgtattctaagagccaagaa

SEQ ID NO: 6361 - DNA, 21 bp, synthetic construct
  source 1..21: mol_type = other DNA
ttatatgaggacgtttggccc

SEQ ID NO: 6362 - DNA, 21 bp, synthetic construct
  source 1..21: mol_type = other DNA
gtttacagcaaatcgcaggag

SEQ ID NO: 6363 - DNA, 21 bp, synthetic construct
  source 1..21: mol_type = other DNA
aaggttaacgacacgtggcca

SEQ ID NO: 6364 - DNA, 21 bp, synthetic construct
  source 1..21: mol_type = other DNA
tggccttccgagcttgggtgg

SEQ ID NO: 6365 - DNA, 21 bp, synthetic construct
  source 1..21: mol_type = other DNA
gcctacgttaagagtgaaagt

SEQ ID NO: 6366 - DNA, 21 bp, synthetic construct
  source 1..21: mol_type = other DNA
ggttttattaccgtatatccg

SEQ ID NO: 6367 - DNA, 21 bp, synthetic construct
  source 1..21: mol_type = other DNA
caaccaagagccttattcccc

SEQ ID NO: 6368 - DNA, 21 bp, synthetic construct
  source 1..21: mol_type = other DNA
gtttacgtcaaaagtgaaagt

SEQ ID NO: 6369 - DNA, 21 bp, synthetic construct
  source 1..21: mol_type = other DNA
catgggccgagtctttggccc

SEQ ID NO: 6370 - DNA, 21 bp, synthetic construct
  source 1..21: mol_type = other DNA
gtttacgttcgcacagagatg

SEQ ID NO: 6371 - DNA, 21 bp, synthetic construct
  source 1..21: mol_type = other DNA
catcggggggagctaaattgg

SEQ ID NO: 6372 - DNA, 21 bp, synthetic construct
  source 1..21: mol_type = other DNA
ggttggatgaatcgaatcgcg

SEQ ID NO: 6373 - DNA, 21 bp, synthetic construct
  source 1..21: mol_type = other DNA
gtgtattctaagctgaatact

SEQ ID NO: 6374 - DNA, 21 bp, synthetic construct
  source 1..21: mol_type = other DNA
atgaccggaccagtttggccg

SEQ ID NO: 6375 - DNA, 21 bp, synthetic construct
  source 1..21: mol_type = other DNA
cgatacactaaattagaagaa

SEQ ID NO: 6376 - DNA, 21 bp, synthetic construct
  source 1..21: mol_type = other DNA
aaggttgaacaggaatggccc

SEQ ID NO: 6377 - DNA, 21 bp, synthetic construct
  source 1..21: mol_type = other DNA; mol_type = other DNA
gggtgggtaaaccgcattgat

SEQ ID NO: 6378 - DNA, 21 bp, synthetic construct
  source 1..21: mol_type = other DNA; mol_type = other DNA
cagccgagggctctctttccg

SEQ ID NO: 6379 - DNA, 21 bp, synthetic construct
  source 1..21: mol_type = other DNA; mol_type = other DNA
ctcatgcaagatgtctggcct

SEQ ID NO: 6380 - DNA, 21 bp, synthetic construct
  source 1..21: mol_type = other DNA; mol_type = other DNA
atcctcgaccgtaattggccc

SEQ ID NO: 6381 - DNA, 21 bp, synthetic construct
  source 1..21: mol_type = other DNA; mol_type = other DNA
cctatgcgcggacatctattt

SEQ ID NO: 6382 - DNA, 21 bp, synthetic construct
  source 1..21: mol_type = other DNA; mol_type = other DNA
gtggtgtccgagatttggcca

SEQ ID NO: 6383 - DNA, 21 bp, synthetic construct
  source 1..21: mol_type = other DNA; mol_type = other DNA
gttgaagagatgagttggcct

SEQ ID NO: 6384 - DNA, 21 bp, synthetic construct
  source 1..21: mol_type = other DNA; mol_type = other DNA
gtctataccaaacacgaattc

SEQ ID NO: 6385 - DNA, 21 bp, synthetic construct
  source 1..21: mol_type = other DNA; mol_type = other DNA
ataatcgacgctgagtggccc

SEQ ID NO: 6386 - DNA, 21 bp, synthetic construct
  source 1..21: mol_type = other DNA; mol_type = other DNA
gcatttacacgactagaggtg

SEQ ID NO: 6387 - DNA, 21 bp, synthetic construct
  source 1..21: mol_type = other DNA; mol_type = other DNA
atttggatcaagtcacaaact

SEQ ID NO: 6388 - DNA, 21 bp, synthetic construct
  source 1..21: mol_type = other DNA; mol_type = other DNA
aaagtggagtacgattggccg

SEQ ID NO: 6389 - DNA, 21 bp, synthetic construct
  source 1..21: mol_type = other DNA; mol_type = other DNA
gcttatgtcaaatccgagtcg

SEQ ID NO: 6390 - DNA, 21 bp, synthetic construct
  source 1..21: mol_type = other DNA; mol_type = other DNA
gcctattccagactagaaagc

SEQ ID NO: 6391 - DNA, 21 bp, synthetic construct
  source 1..21: mol_type = other DNA; mol_type = other DNA
tatgatatgccggattggccc

SEQ ID NO: 6392 - DNA, 21 bp, synthetic construct
  source 1..21: mol_type = other DNA; mol_type = other DNA
gtctatgtaaagtcggagtcc

SEQ ID NO: 6393 - DNA, 21 bp, synthetic construct
  source 1..21: mol_type = other DNA; mol_type = other DNA
cggaacgcttttgatactctc

SEQ ID NO: 6394 - DNA, 21 bp, synthetic construct
  source 1..21: mol_type = other DNA; mol_type = other DNA
agcgaacaggagttcaattgg

SEQ ID NO: 6395 - DNA, 21 bp, synthetic construct
  source 1..21: mol_type = other DNA; mol_type = other DNA
cgttacgaggctgactggcct

SEQ ID NO: 6396 - DNA, 21 bp, synthetic construct
  source 1..21: mol_type = other DNA; mol_type = other DNA
aaacccctttatgacggatca

SEQ ID NO: 6397 - DNA, 21 bp, synthetic construct
  source 1..21: mol_type = other DNA; mol_type = other DNA
caactcacgcggcttgaatcg

SEQ ID NO: 6398 - DNA, 21 bp, synthetic construct
  source 1..21: mol_type = other DNA; mol_type = other DNA
caagtagttaagtatctcccg

SEQ ID NO: 6399 - DNA, 21 bp, synthetic construct
  source 1..21: mol_type = other DNA; mol_type = other DNA
aacaaacccctttactttagc

SEQ ID NO: 6400 - DNA, 21 bp, synthetic construct
  source 1..21: mol_type = other DNA; mol_type = other DNA
agtgggccgatttggctcgcg

SEQ ID NO: 6401 - DNA, 21 bp, synthetic construct
  source 1..21: mol_type = other DNA; mol_type = other DNA
tattttgacgatgagttccca

SEQ ID NO: 6402 - DNA, 21 bp, synthetic construct
  source 1..21: mol_type = other DNA; mol_type = other DNA
gtagataataatgagtggccg

SEQ ID NO: 6403 - DNA, 21 bp, synthetic construct
  source 1..21: mol_type = other DNA; mol_type = other DNA
aggaatcaatgggacacagca

SEQ ID NO: 6404 - DNA, 21 bp, synthetic construct
  source 1..21: mol_type = other DNA; mol_type = other DNA
ttcaaagaaggcatatggccc

SEQ ID NO: 6405 - DNA, 21 bp, synthetic construct
  source 1..21: mol_type = other DNA; mol_type = other DNA
aagcgggactctatgtggcct

SEQ ID NO: 6406 - DNA, 21 bp, synthetic construct
  source 1..21: mol_type = other DNA; mol_type = other DNA
gtgcatgaagaactctggccg

SEQ ID NO: 6407 - DNA, 21 bp, synthetic construct
  source 1..21: mol_type = other DNA; mol_type = other DNA
ttttacgaccccgattggccc

SEQ ID NO: 6408 - DNA, 21 bp, synthetic construct
  source 1..21: mol_type = other DNA; mol_type = other DNA
accggggtcgaattgtggcct

SEQ ID NO: 6409 - DNA, 21 bp, synthetic construct
  source 1..21: mol_type = other DNA; mol_type = other DNA
aatgaaacaatgtggtcgcct

SEQ ID NO: 6410 - DNA, 21 bp, synthetic construct
  source 1..21: mol_type = other DNA; mol_type = other DNA
aggaaggagagtatgtggccg

SEQ ID NO: 6411 - DNA, 21 bp, synthetic construct
  source 1..21: mol_type = other DNA; mol_type = other DNA
ctcaaggtgttgcagtgggat

SEQ ID NO: 6412 - DNA, 21 bp, synthetic construct
  source 1..21: mol_type = other DNA; mol_type = other DNA
tacttcgatgacgaatttccg

SEQ ID NO: 6413 - DNA, 21 bp, synthetic construct
  source 1..21: mol_type = other DNA; mol_type = other DNA
aaggaattctacgtcggcagc

SEQ ID NO: 6414 - DNA, 21 bp, synthetic construct
  source 1..21: mol_type = other DNA; mol_type = other DNA
tggcaaggagaacacccgtgg

SEQ ID NO: 6415 - DNA, 21 bp, synthetic construct
  source 1..21: mol_type = other DNA; mol_type = other DNA
cgagacagcattgagtggcct

SEQ ID NO: 6416 - DNA, 21 bp, synthetic construct
  source 1..21: mol_type = other DNA; mol_type = other DNA
cgcgagagaaatgaatggccg

SEQ ID NO: 6417 - DNA, 21 bp, synthetic construct
  source 1..21: mol_type = other DNA; mol_type = other DNA
gtgcacgtcaagttcgagtac

SEQ ID NO: 6418 - DNA, 21 bp, synthetic construct
  source 1..21: mol_type = other DNA; mol_type = other DNA
ttctatgatccagactggcct

SEQ ID NO: 6419 - DNA, 21 bp, synthetic construct
  source 1..21: mol_type = other DNA; mol_type = other DNA
aagcttgagttggagtggccg

SEQ ID NO: 6420 - DNA, 21 bp, synthetic construct
  source 1..21: mol_type = other DNA; mol_type = other DNA
cgggattcgatagaatggcca

SEQ ID NO: 6421 - DNA, 21 bp, synthetic construct
  source 1..21: mol_type = other DNA; mol_type = other DNA
aacgagaccatgtggagcccc

SEQ ID NO: 6422 - DNA, 21 bp, synthetic construct
  source 1..21: mol_type = other DNA; mol_type = other DNA
gtccaagcggaatcctggccg

SEQ ID NO: 6423 - DNA, 21 bp, synthetic construct
  source 1..21: mol_type = other DNA; mol_type = other DNA
aatcaccctttagcatgggaa

SEQ ID NO: 6424 - DNA, 21 bp, synthetic construct
  source 1..21: mol_type = other DNA; mol_type = other DNA
ggatggatgaaccgtattgcc

SEQ ID NO: 6425 - DNA, 21 bp, synthetic construct
  source 1..21: mol_type = other DNA; mol_type = other DNA
aaagtagagcaagagtggcct

SEQ ID NO: 6426 - DNA, 21 bp, synthetic construct
  source 1..21: mol_type = other DNA; mol_type = other DNA
atatattcggcgctccagact

SEQ ID NO: 6427 - DNA, 21 bp, synthetic construct
  source 1..21: mol_type = other DNA; mol_type = other DNA
aaactagaacttgaatggcct

SEQ ID NO: 6428 - DNA, 21 bp, synthetic construct
  source 1..21: mol_type = other DNA; mol_type = other DNA
gtcgaggaaatgtcttggccg

SEQ ID NO: 6429 - DNA, 21 bp, synthetic construct
  source 1..21: mol_type = other DNA; mol_type = other DNA
gtcatgagcgaagtgtggccc

SEQ ID NO: 6430 - DNA, 21 bp, synthetic construct
  source 1..21: mol_type = other DNA; mol_type = other DNA
aaaattctcacagtttggcct

SEQ ID NO: 6431 - DNA, 21 bp, synthetic construct
  source 1..21: mol_type = other DNA; mol_type = other DNA
cttttcaacggtaattggccg

SEQ ID NO: 6432 - DNA, 21 bp, synthetic construct
  source 1..21: mol_type = other DNA; mol_type = other DNA
tccatgattctcgattggaaa

SEQ ID NO: 6433 - DNA, 21 bp, synthetic construct
  source 1..21: mol_type = other DNA; mol_type = other DNA
tacatgtcccccgactggccg

SEQ ID NO: 6434 - DNA, 21 bp, synthetic construct
  source 1..21: mol_type = other DNA; mol_type = other DNA
acgtatgtgcggtttgaacaa

SEQ ID NO: 6435 - DNA, 21 bp, synthetic construct
  source 1..21: mol_type = other DNA; mol_type = other DNA
aaggtgggcgcattgtggcca

SEQ ID NO: 6436 - DNA, 21 bp, synthetic construct
  source 1..21: mol_type = other DNA; mol_type = other DNA
gtattatcaggaatgtggccg

SEQ ID NO: 6437 - DNA, 21 bp, synthetic construct
  source 1..21: mol_type = other DNA; mol_type = other DNA
cggatgaattttgactggccg

SEQ ID NO: 6438 - DNA, 21 bp, synthetic construct
  source 1..21: mol_type = other DNA; mol_type = other DNA
atgctcgccgaaaattggccc

SEQ ID NO: 6439 - DNA, 21 bp, synthetic construct
  source 1..21: mol_type = other DNA; mol_type = other DNA
ttgatcctagagaactggcct

SEQ ID NO: 6440 - DNA, 21 bp, synthetic construct
  source 1..21: mol_type = other DNA; mol_type = other DNA
tacaaagtgttagactggaca

SEQ ID NO: 6441 - DNA, 21 bp, synthetic construct
  source 1..21: mol_type = other DNA; mol_type = other DNA
atgactggtccggtgtggcca

SEQ ID NO: 6442 - DNA, 21 bp, synthetic construct
  source 1..21: mol_type = other DNA; mol_type = other DNA
gaccccaagggatacttcttc

SEQ ID NO: 6443 - DNA, 21 bp, synthetic construct
  source 1..21: mol_type = other DNA; mol_type = other DNA
ctaatgcaggacgtatggcca

SEQ ID NO: 6444 - DNA, 21 bp, synthetic construct
  source 1..21: mol_type = other DNA; mol_type = other DNA
tataaggtccttgattggact

SEQ ID NO: 6445 - DNA, 21 bp, synthetic construct
  source 1..21: mol_type = other DNA; mol_type = other DNA
cgaatgaacttcgattggccc

SEQ ID NO: 6446 - DNA, 21 bp, synthetic construct
  source 1..21: mol_type = other DNA; mol_type = other DNA
caccgtcatgttcttttcccc

SEQ ID NO: 6447 - DNA, 21 bp, synthetic construct
  source 1..21: mol_type = other DNA; mol_type = other DNA
gtcactggtgcagtatggcct

SEQ ID NO: 6448 - DNA, 21 bp, synthetic construct
  source 1..21: mol_type = other DNA; mol_type = other DNA
acttactcgaggctcgttctc

SEQ ID NO: 6449 - DNA, 21 bp, synthetic construct
  source 1..21: mol_type = other DNA; mol_type = other DNA
catcggcacgtgctatttcct

SEQ ID NO: 6450 - DNA, 21 bp, synthetic construct
  source 1..21: mol_type = other DNA; mol_type = other DNA
acatacgtccgattcgagcag

SEQ ID NO: 6451 - DNA, 21 bp, synthetic construct
  source 1..21: mol_type = other DNA; mol_type = other DNA
tacaagatgatggaatggccc

SEQ ID NO: 6452 - DNA, 21 bp, synthetic construct
  source 1..21: mol_type = other DNA; mol_type = other DNA
tataaaatgatggagtggcct

SEQ ID NO: 6453 - DNA, 21 bp, synthetic construct
  source 1..21: mol_type = other DNA; mol_type = other DNA
gacccggtaaatgtttggggg

SEQ ID NO: 6454 - DNA, 21 bp, synthetic construct
  source 1..21: mol_type = other DNA; mol_type = other DNA
gtttaccacaagttccaaatt

SEQ ID NO: 6455 - DNA, 21 bp, synthetic construct
  source 1..21: mol_type = other DNA; mol_type = other DNA
tctgaaacctgggtgttccca

SEQ ID NO: 6456 - DNA, 21 bp, synthetic construct
  source 1..21: mol_type = other DNA; mol_type = other DNA
ggtacgttccagcttttcccc

SEQ ID NO: 6457 - DNA, 21 bp, synthetic construct
  source 1..21: mol_type = other DNA; mol_type = other DNA
gatatgccaaattggtcctgg

SEQ ID NO: 6458 - DNA, 21 bp, synthetic construct
  source 1..21: mol_type = other DNA; mol_type = other DNA
aggcaaaactcagtatggccc

SEQ ID NO: 6459 - DNA, 21 bp, synthetic construct
  source 1..21: mol_type = other DNA; mol_type = other DNA
gtggtgaaggactattggccg

SEQ ID NO: 6460 - DNA, 21 bp, synthetic construct
  source 1..21: mol_type = other DNA; mol_type = other DNA
aacaatatcttcgctacttac

SEQ ID NO: 6461 - DNA, 21 bp, synthetic construct
  source 1..21: mol_type = other DNA; mol_type = other DNA
tgggggctgtggcgactagat

SEQ ID NO: 6462 - DNA, 21 bp, synthetic construct
  source 1..21: mol_type = other DNA; mol_type = other DNA
ggcaaaaacgttctttggcca

SEQ ID NO: 6463 - DNA, 21 bp, synthetic construct
  source 1..21: mol_type = other DNA; mol_type = other DNA
tataatcaccccctgaactgg

SEQ ID NO: 6464 - DNA, 21 bp, synthetic construct
  source 1..21: mol_type = other DNA; mol_type = other DNA
ttttccggtgacacctggcca

SEQ ID NO: 6465 - DNA, 21 bp, synthetic construct
  source 1..21: mol_type = other DNA; mol_type = other DNA
agaggcaccttcgatgtctat

SEQ ID NO: 6466 - DNA, 21 bp, synthetic construct
  source 1..21: mol_type = other DNA; mol_type = other DNA
tatcttggagagctctggccc

SEQ ID NO: 6467 - DNA, 21 bp, synthetic construct
  source 1..21: mol_type = other DNA; mol_type = other DNA
cgtaaccagtgggatacggcg

SEQ ID NO: 6468 - DNA, 21 bp, synthetic construct
  source 1..21: mol_type = other DNA; mol_type = other DNA
cgcgtgtccgtcttgtggccg

SEQ ID NO: 6469 - DNA, 21 bp, synthetic construct
  source 1..21: mol_type = other DNA; mol_type = other DNA
ggctctccgatcaattgggct

SEQ ID NO: 6470 - DNA, 21 bp, synthetic construct
  source 1..21: mol_type = other DNA; mol_type = other DNA
gctaacgttctaaattgggca

SEQ ID NO: 6471 - DNA, 21 bp, synthetic construct
  source 1..21: mol_type = other DNA; mol_type = other DNA
gccaatgtattgaactgggcg

SEQ ID NO: 6472 - DNA, 21 bp, synthetic construct
  source 1..21: mol_type = other DNA; mol_type = other DNA
agacagggcacctatttccct

SEQ ID NO: 6473 - DNA, 21 bp, synthetic construct
  source 1..21: mol_type = other DNA; mol_type = other DNA
tggccgagtgaactaggatgg

SEQ ID NO: 6474 - DNA, 21 bp, synthetic construct
  source 1..21: mol_type = other DNA; mol_type = other DNA
aggatctctatttccccttgg

SEQ ID NO: 6475 - DNA, 21 bp, synthetic construct
  source 1..21: mol_type = other DNA; mol_type = other DNA
cataacgggttttggacaggg

SEQ ID NO: 6476 - DNA, 21 bp, synthetic construct
  source 1..21: mol_type = other DNA; mol_type = other DNA
cgacttttcaggctggaagct

SEQ ID NO: 6477 - DNA, 21 bp, synthetic construct
  source 1..21: mol_type = other DNA; mol_type = other DNA
tggcaaccggatcctttccct

SEQ ID NO: 6478 - DNA, 21 bp, synthetic construct
  source 1..21: mol_type = other DNA; mol_type = other DNA
atgcgggtgattgattggagc

SEQ ID NO: 6479 - DNA, 21 bp, synthetic construct
  source 1..21: mol_type = other DNA; mol_type = other DNA
cacaatggtttctggaccggt

SEQ ID NO: 6480 - DNA, 21 bp, synthetic construct
  source 1..21: mol_type = other DNA; mol_type = other DNA
ggatcaacagacccgtggccc

SEQ ID NO: 6481 - DNA, 21 bp, synthetic construct
  source 1..21: mol_type = other DNA; mol_type = other DNA
gttagtttgttcagcaaccat

SEQ ID NO: 6482 - DNA, 21 bp, synthetic construct
  source 1..21: mol_type = other DNA; mol_type = other DNA
aagtactttacgtttgaacca

SEQ ID NO: 6483 - DNA, 21 bp, synthetic construct
  source 1..21: mol_type = other DNA; mol_type = other DNA
acaaatgattttgatgtgtac

SEQ ID NO: 6484 - DNA, 21 bp, synthetic construct
  source 1..21: mol_type = other DNA; mol_type = other DNA
ctttctagagtaggtttcaat

SEQ ID NO: 6485 - DNA, 21 bp, synthetic construct
  source 1..21: mol_type = other DNA; mol_type = other DNA
ctgcataaagctggatataat

SEQ ID NO: 6486 - DNA, 21 bp, synthetic construct
  source 1..21: mol_type = other DNA; mol_type = other DNA
ctatcccgtttgaaccataac

SEQ ID NO: 6487 - DNA, 21 bp, synthetic construct
  source 1..21: mol_type = other DNA; mol_type = other DNA
aaagagaaacccgataaaaga

SEQ ID NO: 6488 - DNA, 21 bp, synthetic construct
  source 1..21: mol_type = other DNA; mol_type = other DNA
gggctgtgtccgtctaccaaa

SEQ ID NO: 6489 - DNA, 21 bp, synthetic construct
  source 1..21: mol_type = other DNA; mol_type = other DNA
ctgcacagactgttaaaggat

SEQ ID NO: 6490 - DNA, 21 bp, synthetic construct
  source 1..21: mol_type = other DNA; mol_type = other DNA
ttaagtcgcttaaatcacaat

SEQ ID NO: 6491 - DNA, 21 bp, synthetic construct
  source 1..21: mol_type = other DNA; mol_type = other DNA
agttgtgcggtatctcatcgt

SEQ ID NO: 6492 - DNA, 21 bp, synthetic construct
  source 1..21: mol_type = other DNA; mol_type = other DNA
ctgtcacgcgtgggctttaac

SEQ ID NO: 6493 - DNA, 21 bp, synthetic construct
  source 1..21: mol_type = other DNA; mol_type = other DNA
tatgtgaaatatgaagataaa

SEQ ID NO: 6494 - DNA, 21 bp, synthetic construct
  source 1..21: mol_type = other DNA; mol_type = other DNA
tactcccggatgaatgataat

SEQ ID NO: 6495 - DNA, 21 bp, synthetic construct
  source 1..21: mol_type = other DNA; mol_type = other DNA
tactcacgccttaataaggat

SEQ ID NO: 6496 - DNA, 21 bp, synthetic construct
  source 1..21: mol_type = other DNA; mol_type = other DNA
tcttgtcccaaaaatgacctc

SEQ ID NO: 6497 - DNA, 21 bp, synthetic construct
  source 1..21: mol_type = other DNA; mol_type = other DNA
tatagcagactaaacaaagac

SEQ ID NO: 6498 - DNA, 21 bp, synthetic construct
  source 1..21: mol_type = other DNA; mol_type = other DNA
cgcaatgaatacaccacttat

SEQ ID NO: 6499 - DNA, 21 bp, synthetic construct
  source 1..21: mol_type = other DNA; mol_type = other DNA
ttttatagatcagacaactgt

SEQ ID NO: 6500 - DNA, 21 bp, synthetic construct
  source 1..21: mol_type = other DNA; mol_type = other DNA
cttcacaaggcagggtacaac

SEQ ID NO: 6501 - DNA, 21 bp, synthetic construct
  source 1..21: mol_type = other DNA; mol_type = other DNA
tacgtaaagtacgaggacaag

SEQ ID NO: 6502 - DNA, 21 bp, synthetic construct
  source 1..21: mol_type = other DNA; mol_type = other DNA
ttgcataggctcttgaaagac

SEQ ID NO: 6503 - DNA, 21 bp, synthetic construct
  source 1..21: mol_type = other DNA; mol_type = other DNA
tgcaattatgattccttccct

SEQ ID NO: 6504 - DNA, 21 bp, synthetic construct
  source 1..21: mol_type = other DNA; mol_type = other DNA
taccatcgtttgtccaataac

SEQ ID NO: 6505 - DNA, 21 bp, synthetic construct
  source 1..21: mol_type = other DNA; mol_type = other DNA
tatcaccggctttctaacaat

SEQ ID NO: 6506 - DNA, 21 bp, synthetic construct
  source 1..21: mol_type = other DNA; mol_type = other DNA
tatgtaaagaacgacgcgaga

SEQ ID NO: 6507 - DNA, 21 bp, synthetic construct
  source 1..21: mol_type = other DNA; mol_type = other DNA
tacgttaaaaatgatgcacgc

SEQ ID NO: 6508 - DNA, 21 bp, synthetic construct
  source 1..21: mol_type = other DNA; mol_type = other DNA
cgcaatgagaaccgaaaaggt

SEQ ID NO: 6509 - DNA, 21 bp, synthetic construct
  source 1..21: mol_type = other DNA; mol_type = other DNA
cttcatgcattaagtcataac

SEQ ID NO: 6510 - DNA, 21 bp, synthetic construct
  source 1..21: mol_type = other DNA; mol_type = other DNA
tacgctcggggagggcccaat

SEQ ID NO: 6511 - DNA, 21 bp, synthetic construct
  source 1..21: mol_type = other DNA; mol_type = other DNA
cgaaacgagtatacgacgtac

SEQ ID NO: 6512 - DNA, 21 bp, synthetic construct
  source 1..21: mol_type = other DNA; mol_type = other DNA
tattctcgcttaaacatgaat

SEQ ID NO: 6513 - DNA, 21 bp, synthetic construct
  source 1..21: mol_type = other DNA; mol_type = other DNA
tactcacggttgaatatgaac

SEQ ID NO: 6514 - DNA, 21 bp, synthetic construct
  source 1..21: mol_type = other DNA; mol_type = other DNA
tactcaaggatgaacgaaaat

SEQ ID NO: 6515 - DNA, 21 bp, synthetic construct
  source 1..21: mol_type = other DNA; mol_type = other DNA
catagtcgggtcggccataac

SEQ ID NO: 6516 - DNA, 21 bp, synthetic construct
  source 1..21: mol_type = other DNA; mol_type = other DNA
aggcaagcaaagcaaaagaac

SEQ ID NO: 6517 - DNA, 21 bp, synthetic construct
  source 1..21: mol_type = other DNA; mol_type = other DNA
tacgcgcgatctggcctgaat

SEQ ID NO: 6518 - DNA, 21 bp, synthetic construct
  source 1..21: mol_type = other DNA; mol_type = other DNA
ctccataggttagcagccaat

SEQ ID NO: 6519 - DNA, 21 bp, synthetic construct
  source 1..21: mol_type = other DNA; mol_type = other DNA
tatgcgcgtggtggacctaac

SEQ ID NO: 6520 - DNA, 21 bp, synthetic construct
  source 1..21: mol_type = other DNA; mol_type = other DNA
cgaacaccaactgtgtatcct

SEQ ID NO: 6521 - DNA, 21 bp, synthetic construct
  source 1..21: mol_type = other DNA; mol_type = other DNA
tattcgaggatgaacgacaac

SEQ ID NO: 6522 - DNA, 21 bp, synthetic construct
  source 1..21: mol_type = other DNA; mol_type = other DNA
aagatgagttctagcacgtgg

SEQ ID NO: 6523 - DNA, 21 bp, synthetic construct
  source 1..21: mol_type = other DNA; mol_type = other DNA
tccacaaattgttacaagagt

SEQ ID NO: 6524 - DNA, 21 bp, synthetic construct
  source 1..21: mol_type = other DNA; mol_type = other DNA
ttagattgtgagaggtaccaa

SEQ ID NO: 6525 - DNA, 21 bp, synthetic construct
  source 1..21: mol_type = other DNA; mol_type = other DNA
gtctcctcgagcaatggccgt

SEQ ID NO: 6526 - DNA, 21 bp, synthetic construct
  source 1..21: mol_type = other DNA; mol_type = other DNA
tacgctcggtccgggtataat

SEQ ID NO: 6527 - DNA, 21 bp, synthetic construct
  source 1..21: mol_type = other DNA
cactcgcgcgtgggtcacaat

SEQ ID NO: 6528 - DNA, 21 bp, synthetic construct
  source 1..21: mol_type = other DNA
ttacacgctttgtcacacaat

SEQ ID NO: 6529 - DNA, 21 bp, synthetic construct
  source 1..21: mol_type = other DNA; mol_type = other DNA
tgtgactatattagttacgcg

SEQ ID NO: 6530 - DNA, 21 bp, synthetic construct
  source 1..21: mol_type = other DNA; mol_type = other DNA
cgtactcctaccgtctacccc

SEQ ID NO: 6531 - DNA, 21 bp, synthetic construct
  source 1..21: mol_type = other DNA; mol_type = other DNA
tatagccgtatgaatgagaac

SEQ ID NO: 6532 - DNA, 21 bp, synthetic construct
  source 1..21: mol_type = other DNA; mol_type = other DNA
tatgctagaagcggtttaaac

SEQ ID NO: 6533 - DNA, 21 bp, synthetic construct
  source 1..21: mol_type = other DNA; mol_type = other DNA
ctgtctcgtatctccgtgaat

SEQ ID NO: 6534 - DNA, 21 bp, synthetic construct
  source 1..21: mol_type = other DNA; mol_type = other DNA
aatgaggattgggtaaaatgg

SEQ ID NO: 6535 - DNA, 21 bp, synthetic construct
  source 1..21: mol_type = other DNA; mol_type = other DNA
cactgcggaaaatgcctaaat

SEQ ID NO: 6536 - DNA, 21 bp, synthetic construct
  source 1..21: mol_type = other DNA; mol_type = other DNA
aaaatgtcgagttcaacatgg

SEQ ID NO: 6537 - DNA, 21 bp, synthetic construct
  source 1..21: mol_type = other DNA; mol_type = other DNA
gtcgagagttccaacgggcgc

SEQ ID NO: 6538 - DNA, 21 bp, synthetic construct
  source 1..21: mol_type = other DNA; mol_type = other DNA
aacgaagactgggtgaagtgg

SEQ ID NO: 6539 - DNA, 21 bp, synthetic construct
  source 1..21: mol_type = other DNA; mol_type = other DNA
gtgtcgagcagtaacggtaga

SEQ ID NO: 6540 - DNA, 21 bp, synthetic construct
  source 1..21: mol_type = other DNA; mol_type = other DNA
gttgaatcatcgaatggtagg

SEQ ID NO: 6541 - DNA, 21 bp, synthetic construct
  source 1..21: mol_type = other DNA; mol_type = other DNA
tactcccgagctggatataac

SEQ ID NO: 6542 - DNA, 21 bp, synthetic construct
  source 1..21: mol_type = other DNA; mol_type = other DNA
tatagtcgggccggctacaat

SEQ ID NO: 6543 - DNA, 21 bp, synthetic construct
  source 1..21: mol_type = other DNA; mol_type = other DNA
agatccgaacatgtctttcca

SEQ ID NO: 6544 - DNA, 21 bp, synthetic construct
  source 1..21: mol_type = other DNA; mol_type = other DNA
cgagttaataccagggccaac

SEQ ID NO: 6545 - DNA, 21 bp, synthetic construct
  source 1..21: mol_type = other DNA; mol_type = other DNA
tgcgctttcacaggcaccaga

SEQ ID NO: 6546 - DNA, 21 bp, synthetic construct
  source 1..21: mol_type = other DNA; mol_type = other DNA
cattactgccctaacaaatta

SEQ ID NO: 6547 - DNA, 21 bp, synthetic construct
  source 1..21: mol_type = other DNA; mol_type = other DNA
ccccgcatgtgtgccaataat

SEQ ID NO: 6548 - DNA, 21 bp, synthetic construct
  source 1..21: mol_type = other DNA; mol_type = other DNA
aggaataaagatcgcaactca

SEQ ID NO: 6549 - DNA, 21 bp, synthetic construct
  source 1..21: mol_type = other DNA; mol_type = other DNA
cataggcaggacagtcgtcga

SEQ ID NO: 6550 - DNA, 21 bp, synthetic construct
  source 1..21: mol_type = other DNA; mol_type = other DNA
ttgtcaagagtaggtatagac

SEQ ID NO: 6551 - DNA, 21 bp, synthetic construct
  source 1..21: mol_type = other DNA; mol_type = other DNA
aaaatggatagtaggctgtgg

SEQ ID NO: 6552 - DNA, 21 bp, synthetic construct
  source 1..21: mol_type = other DNA; mol_type = other DNA
agaaacatgtccgtgtatccc

SEQ ID NO: 6553 - DNA, 21 bp, synthetic construct
  source 1..21: mol_type = other DNA; mol_type = other DNA
cgcaatatgtctgtttaccca

SEQ ID NO: 6554 - DNA, 21 bp, synthetic construct
  source 1..21: mol_type = other DNA; mol_type = other DNA
agcgcggagtgggtttcatac

SEQ ID NO: 6555 - DNA, 21 bp, synthetic construct
  source 1..21: mol_type = other DNA; mol_type = other DNA
taccataggactgggaataat

SEQ ID NO: 6556 - DNA, 21 bp, synthetic construct
  source 1..21: mol_type = other DNA; mol_type = other DNA
tactctaaggtcgggcagaat

SEQ ID NO: 6557 - DNA, 21 bp, synthetic construct
  source 1..21: mol_type = other DNA; mol_type = other DNA
tcaatggaatctcgactgtgg

SEQ ID NO: 6558 - DNA, 21 bp, synthetic construct
  source 1..21: mol_type = other DNA; mol_type = other DNA
ttgtcacggatttctgtaaac

SEQ ID NO: 6559 - DNA, 21 bp, synthetic construct
  source 1..21: mol_type = other DNA; mol_type = other DNA
tcggcagaatgggtctcttat

SEQ ID NO: 6560 - DNA, 21 bp, synthetic construct
  source 1..21: mol_type = other DNA; mol_type = other DNA
aggtcggagcacgtattcccc

SEQ ID NO: 6561 - DNA, 21 bp, synthetic construct
  source 1..21: mol_type = other DNA; mol_type = other DNA
tatagtgctcgtgggcccaat

SEQ ID NO: 6562 - DNA, 21 bp, synthetic construct
  source 1..21: mol_type = other DNA; mol_type = other DNA
tatgcgcgcagcggatacaac

SEQ ID NO: 6563 - DNA, 21 bp, synthetic construct
  source 1..21: mol_type = other DNA; mol_type = other DNA
ctccgcagtgaatgttgtgta

SEQ ID NO: 6564 - DNA, 21 bp, synthetic construct
  source 1..21: mol_type = other DNA; mol_type = other DNA
tactctcgaatgaataccaat

SEQ ID NO: 6565 - DNA, 21 bp, synthetic construct
  source 1..21: mol_type = other DNA; mol_type = other DNA
gacctttcgagtcataactgg

SEQ ID NO: 6566 - DNA, 21 bp, synthetic construct
  source 1..21: mol_type = other DNA; mol_type = other DNA
cagcttgaagcgcggacgtgg

SEQ ID NO: 6567 - DNA, 21 bp, synthetic construct
  source 1..21: mol_type = other DNA; mol_type = other DNA
ctgacccgaattagtcataat

SEQ ID NO: 6568 - DNA, 21 bp, synthetic construct
  source 1..21: mol_type = other DNA; mol_type = other DNA
ctaagtagggtgggcatcgat

SEQ ID NO: 6569 - DNA, 21 bp, synthetic construct
  source 1..21: mol_type = other DNA; mol_type = other DNA
tactcttcgacccacggtgta

SEQ ID NO: 6570 - DNA, 21 bp, synthetic construct
  source 1..21: mol_type = other DNA; mol_type = other DNA
gagatgcagtctagagcctgg

SEQ ID NO: 6571 - DNA, 21 bp, synthetic construct
  source 1..21: mol_type = other DNA; mol_type = other DNA
cgactctatgacgcttatcag

SEQ ID NO: 6572 - DNA, 21 bp, synthetic construct
  source 1..21: mol_type = other DNA; mol_type = other DNA
ctgagcaaattatccgccaat

SEQ ID NO: 6573 - DNA, 21 bp, synthetic construct
  source 1..21: mol_type = other DNA; mol_type = other DNA
accatgagtgaccgcacctgg

SEQ ID NO: 6574 - DNA, 21 bp, synthetic construct
  source 1..21: mol_type = other DNA; mol_type = other DNA
cgagaagacgggctacgttgg

SEQ ID NO: 6575 - DNA, 21 bp, synthetic construct
  source 1..21: mol_type = other DNA; mol_type = other DNA
catagtcgtttaaatctccaa

SEQ ID NO: 6576 - DNA, 21 bp, synthetic construct
  source 1..21: mol_type = other DNA; mol_type = other DNA
ctctgtaggtcatgtgccaaa

SEQ ID NO: 6577 - DNA, 21 bp, synthetic construct
  source 1..21: mol_type = other DNA; mol_type = other DNA
agaggtaacggggggcataag

SEQ ID NO: 6578 - DNA, 21 bp, synthetic construct
  source 1..21: mol_type = other DNA; mol_type = other DNA
tacacatttctcggccgcaat

SEQ ID NO: 6579 - DNA, 21 bp, synthetic construct
  source 1..21: mol_type = other DNA; mol_type = other DNA
ctttgtcgatactcgggcggc

SEQ ID NO: 6580 - DNA, 21 bp, synthetic construct
  source 1..21: mol_type = other DNA; mol_type = other DNA
tcttctaattgcctccactac

SEQ ID NO: 6581 - DNA, 21 bp, synthetic construct
  source 1..21: mol_type = other DNA; mol_type = other DNA
ttgaggtctgagtgctgcgtc

SEQ ID NO: 6582 - DNA, 21 bp, synthetic construct
  source 1..21: mol_type = other DNA; mol_type = other DNA
cggacatttgattcgttcgag

SEQ ID NO: 6583 - DNA, 21 bp, synthetic construct
  source 1..21: mol_type = other DNA; mol_type = other DNA
gaaatgcaaagccgagcttgg

SEQ ID NO: 6584 - DNA, 21 bp, synthetic construct
  source 1..21: mol_type = other DNA; mol_type = other DNA
catagtcgcatgaatgaaaat

SEQ ID NO: 6585 - DNA, 21 bp, synthetic construct
  source 1..21: mol_type = other DNA; mol_type = other DNA
tatcataagttagcgaataat

SEQ ID NO: 6586 - DNA, 21 bp, synthetic construct
  source 1..21: mol_type = other DNA; mol_type = other DNA
ctccatcgcagtagtaataat

SEQ ID NO: 6587 - DNA, 21 bp, synthetic construct
  source 1..21: mol_type = other DNA; mol_type = other DNA
tactcggcgagaggtccgaac

SEQ ID NO: 6588 - DNA, 21 bp, synthetic construct
  source 1..21: mol_type = other DNA; mol_type = other DNA
tacgctcgaacttcgcataat

SEQ ID NO: 6589 - DNA, 21 bp, synthetic construct
  source 1..21: mol_type = other DNA; mol_type = other DNA
caattggaggctcgcacttgg

SEQ ID NO: 6590 - DNA, 21 bp, synthetic construct
  source 1..21: mol_type = other DNA; mol_type = other DNA
agggaggatggactcagatgg

SEQ ID NO: 6591 - DNA, 21 bp, synthetic construct
  source 1..21: mol_type = other DNA; mol_type = other DNA
cgtaatgacatggtttttccc

SEQ ID NO: 6592 - DNA, 21 bp, synthetic construct
  source 1..21: mol_type = other DNA; mol_type = other DNA
aagatggacagccgattatgg

SEQ ID NO: 6593 - DNA, 21 bp, synthetic construct
  source 1..21: mol_type = other DNA; mol_type = other DNA
ctgcaccggctcgctgcgaac

SEQ ID NO: 6594 - DNA, 21 bp, synthetic construct
  source 1..21: mol_type = other DNA; mol_type = other DNA
gtccccggtgactgctgtgtt

SEQ ID NO: 6595 - DNA, 21 bp, synthetic construct
  source 1..21: mol_type = other DNA; mol_type = other DNA
ctttctaaggtcggagctaat

SEQ ID NO: 6596 - DNA, 21 bp, synthetic construct
  source 1..21: mol_type = other DNA; mol_type = other DNA
tatagtcggatgaatgcaaat

SEQ ID NO: 6597 - DNA, 21 bp, synthetic construct
  source 1..21: mol_type = other DNA; mol_type = other DNA
actatgtccgatcgaacttgg

SEQ ID NO: 6598 - DNA, 21 bp, synthetic construct
  source 1..21: mol_type = other DNA; mol_type = other DNA
tctatggagtcaagactttgg

SEQ ID NO: 6599 - DNA, 21 bp, synthetic construct
  source 1..21: mol_type = other DNA; mol_type = other DNA
ctgcatcgtgcgtcatccaat

SEQ ID NO: 6600 - DNA, 21 bp, synthetic construct
  source 1..21: mol_type = other DNA; mol_type = other DNA
tattccaaagtaggccaaaac

SEQ ID NO: 6601 - DNA, 21 bp, synthetic construct
  source 1..21: mol_type = other DNA; mol_type = other DNA
acagagtcatcatctggtaga

SEQ ID NO: 6602 - DNA, 21 bp, synthetic construct
  source 1..21: mol_type = other DNA; mol_type = other DNA
cattgtggtaagtgtcttaac

SEQ ID NO: 6603 - DNA, 21 bp, synthetic construct
  source 1..21: mol_type = other DNA; mol_type = other DNA
tatcaccggacaggcaacaac

SEQ ID NO: 6604 - DNA, 21 bp, synthetic construct
  source 1..21: mol_type = other DNA; mol_type = other DNA
cactccagacttaacctgcag

SEQ ID NO: 6605 - DNA, 21 bp, synthetic construct
  source 1..21: mol_type = other DNA; mol_type = other DNA
atgccaaacgaaggatggttc

SEQ ID NO: 6606 - DNA, 21 bp, synthetic construct
  source 1..21: mol_type = other DNA; mol_type = other DNA
aagatgtcatccgctaactgg

SEQ ID NO: 6607 - DNA, 21 bp, synthetic construct
  source 1..21: mol_type = other DNA; mol_type = other DNA
ctatctaaactaaacgataac

SEQ ID NO: 6608 - DNA, 21 bp, synthetic construct
  source 1..21: mol_type = other DNA; mol_type = other DNA
cggaacgatatggtcttccct

SEQ ID NO: 6609 - DNA, 21 bp, synthetic construct
  source 1..21: mol_type = other DNA; mol_type = other DNA
tattcgtccactcatggcgtg

SEQ ID NO: 6610 - DNA, 21 bp, synthetic construct
  source 1..21: mol_type = other DNA; mol_type = other DNA
ctatccaaagttggtgcaaac

SEQ ID NO: 6611 - DNA, 21 bp, synthetic construct
  source 1..21: mol_type = other DNA; mol_type = other DNA
cgagggatcgacttctacccc

SEQ ID NO: 6612 - DNA, 21 bp, synthetic construct
  source 1..21: mol_type = other DNA; mol_type = other DNA
tactccaaaatgaatgataac

SEQ ID NO: 6613 - DNA, 21 bp, synthetic construct
  source 1..21: mol_type = other DNA; mol_type = other DNA
aggacgttcgacagttttgaa

SEQ ID NO: 6614 - DNA, 21 bp, synthetic construct
  source 1..21: mol_type = other DNA; mol_type = other DNA
aaaatgtcttctgccaattgg

SEQ ID NO: 6615 - DNA, 21 bp, synthetic construct
  source 1..21: mol_type = other DNA; mol_type = other DNA
gatttgtcatcgcacaattgg

SEQ ID NO: 6616 - DNA, 21 bp, synthetic construct
  source 1..21: mol_type = other DNA; mol_type = other DNA
tactctcgtatgaacgccaac

SEQ ID NO: 6617 - DNA, 21 bp, synthetic construct
  source 1..21: mol_type = other DNA; mol_type = other DNA
tacgtcagaagtgacagaaat

SEQ ID NO: 6618 - DNA, 21 bp, synthetic construct
  source 1..21: mol_type = other DNA; mol_type = other DNA
cacagccgtatgaacgagaac

SEQ ID NO: 6619 - DNA, 21 bp, synthetic construct
  source 1..21: mol_type = other DNA; mol_type = other DNA
gtaacgtccaccaatggcatc

SEQ ID NO: 6620 - DNA, 21 bp, synthetic construct
  source 1..21: mol_type = other DNA; mol_type = other DNA
ttaactaggatctcacacaac

SEQ ID NO: 6621 - DNA, 21 bp, synthetic construct
  source 1..21: mol_type = other DNA; mol_type = other DNA
ctacaccgagctagcagcaac

SEQ ID NO: 6622 - DNA, 21 bp, synthetic construct
  source 1..21: mol_type = other DNA; mol_type = other DNA
acggaatccagctcgggccga

SEQ ID NO: 6623 - DNA, 21 bp, synthetic construct
  source 1..21: mol_type = other DNA; mol_type = other DNA
tattcgcggatgaacactaac

SEQ ID NO: 6624 - DNA, 21 bp, synthetic construct
  source 1..21: mol_type = other DNA; mol_type = other DNA
cttacgtacgacgcctatgaa

SEQ ID NO: 6625 - DNA, 21 bp, synthetic construct
  source 1..21: mol_type = other DNA; mol_type = other DNA
tattcgaagatgaacgacaat

SEQ ID NO: 6626 - DNA, 21 bp, synthetic construct
  source 1..21: mol_type = other DNA; mol_type = other DNA
gtacatcgcctgcaagataag

SEQ ID NO: 6627 - DNA, 21 bp, synthetic construct
  source 1..21: mol_type = other DNA; mol_type = other DNA
cgggaaacttacgtgtaccca

SEQ ID NO: 6628 - DNA, 21 bp, synthetic construct
  source 1..21: mol_type = other DNA; mol_type = other DNA
ttatctaagctaagtgcaaac

SEQ ID NO: 6629 - DNA, 21 bp, synthetic construct
  source 1..21: mol_type = other DNA; mol_type = other DNA
ttttctcgtgtaggcgagaat

SEQ ID NO: 6630 - DNA, 21 bp, synthetic construct
  source 1..21: mol_type = other DNA; mol_type = other DNA
tacagtcgtatgaattccaat

SEQ ID NO: 6631 - DNA, 21 bp, synthetic construct
  source 1..21: mol_type = other DNA; mol_type = other DNA
atgtcccgattatctcaaaat

SEQ ID NO: 6632 - DNA, 21 bp, synthetic construct
  source 1..21: mol_type = other DNA; mol_type = other DNA
cagccatatgagctaccatgg

SEQ ID NO: 6633 - DNA, 21 bp, synthetic construct
  source 1..21: mol_type = other DNA; mol_type = other DNA
cactattgtccgaataagctc

SEQ ID NO: 6634 - DNA, 21 bp, synthetic construct
  source 1..21: mol_type = other DNA; mol_type = other DNA
tacaatagtactcacgggaga

SEQ ID NO: 6635 - DNA, 21 bp, synthetic construct
  source 1..21: mol_type = other DNA; mol_type = other DNA
taccacaaacttgccaacaac

SEQ ID NO: 6636 - DNA, 21 bp, synthetic construct
  source 1..21: mol_type = other DNA; mol_type = other DNA
gtcactagcacgaacgggata

SEQ ID NO: 6637 - DNA, 21 bp, synthetic construct
  source 1..21: mol_type = other DNA; mol_type = other DNA
ttgacatatgatgcatacgag

SEQ ID NO: 6638 - DNA, 21 bp, synthetic construct
  source 1..21: mol_type = other DNA; mol_type = other DNA
gtctatgtcagaactgacaga

SEQ ID NO: 6639 - DNA, 21 bp, synthetic construct
  source 1..21: mol_type = other DNA; mol_type = other DNA
gacgatggcagatcgaggtat

SEQ ID NO: 6640 - DNA, 21 bp, synthetic construct
  source 1..21: mol_type = other DNA; mol_type = other DNA
ttaagcaagctcaatgacaat

SEQ ID NO: 6641 - DNA, 21 bp, synthetic construct
  source 1..21: mol_type = other DNA; mol_type = other DNA
atcgttggggaggcgtggcct

SEQ ID NO: 6642 - DNA, 21 bp, synthetic construct
  source 1..21: mol_type = other DNA; mol_type = other DNA
tgttcagggtttgagcgtcgt

SEQ ID NO: 6643 - DNA, 21 bp, synthetic construct
  source 1..21: mol_type = other DNA; mol_type = other DNA
ttcttttacaataaaccaacg

SEQ ID NO: 6644 - DNA, 21 bp, synthetic construct
  source 1..21: mol_type = other DNA; mol_type = other DNA
aaaccctatattttacataaa

SEQ ID NO: 6645 - DNA, 21 bp, synthetic construct
  source 1..21: mol_type = other DNA; mol_type = other DNA
aagcgaccccctgaggcccgt

SEQ ID NO: 6646 - DNA, 21 bp, synthetic construct
  source 1..21: mol_type = other DNA; mol_type = other DNA
atgttggaatattataacaat

SEQ ID NO: 6647 - DNA, 21 bp, synthetic construct
  source 1..21: mol_type = other DNA; mol_type = other DNA
cactcgaggttgaacgtatcg

SEQ ID NO: 6648 - DNA, 21 bp, synthetic construct
  source 1..21: mol_type = other DNA; mol_type = other DNA
tactcacgcgttaatgataat

SEQ ID NO: 6649 - DNA, 21 bp, synthetic construct
  source 1..21: mol_type = other DNA; mol_type = other DNA
atgcctaatgaggggtggttt

SEQ ID NO: 6650 - DNA, 21 bp, synthetic construct
  source 1..21: mol_type = other DNA; mol_type = other DNA
cttaccagattaagccataac

SEQ ID NO: 6651 - DNA, 21 bp, synthetic construct
  source 1..21: mol_type = other DNA; mol_type = other DNA
cattcccggctgaatgttagt

SEQ ID NO: 6652 - DNA, 21 bp, synthetic construct
  source 1..21: mol_type = other DNA; mol_type = other DNA
agaggcattgatttttatcct

SEQ ID NO: 6653 - DNA, 21 bp, synthetic construct
  source 1..21: mol_type = other DNA; mol_type = other DNA
tatagtcgcttgcaagaaaat

SEQ ID NO: 6654 - DNA, 21 bp, synthetic construct
  source 1..21: mol_type = other DNA; mol_type = other DNA
aaacgcgaacccgaacgccgt

SEQ ID NO: 6655 - DNA, 21 bp, synthetic construct
  source 1..21: mol_type = other DNA; mol_type = other DNA
gatgacgggaggtcccgatac

SEQ ID NO: 6656 - DNA, 21 bp, synthetic construct
  source 1..21: mol_type = other DNA; mol_type = other DNA
aggctatacgatgcctaccaa

SEQ ID NO: 6657 - DNA, 21 bp, synthetic construct
  source 1..21: mol_type = other DNA; mol_type = other DNA
agagctctggagtgttgttat

SEQ ID NO: 6658 - DNA, 21 bp, synthetic construct
  source 1..21: mol_type = other DNA; mol_type = other DNA
ctaagtcgtgtagcgatgaat

SEQ ID NO: 6659 - DNA, 21 bp, synthetic construct
  source 1..21: mol_type = other DNA; mol_type = other DNA
tacagccgcatgaacaataac

SEQ ID NO: 6660 - DNA, 21 bp, synthetic construct
  source 1..21: mol_type = other DNA; mol_type = other DNA
gtgccaggcgattgttgcgtc

SEQ ID NO: 6661 - DNA, 21 bp, synthetic construct
  source 1..21: mol_type = other DNA; mol_type = other DNA
tactcacgattacaggagaac

SEQ ID NO: 6662 - DNA, 21 bp, synthetic construct
  source 1..21: mol_type = other DNA; mol_type = other DNA
cgtatgtcagatcacaattgg

SEQ ID NO: 6663 - DNA, 21 bp, synthetic construct
  source 1..21: mol_type = other DNA; mol_type = other DNA
tactctcgtatgggtcataat

SEQ ID NO: 6664 - DNA, 21 bp, synthetic construct
  source 1..21: mol_type = other DNA; mol_type = other DNA
cgcgttgaccaacccaagaaa

SEQ ID NO: 6665 - DNA, 21 bp, synthetic construct
  source 1..21: mol_type = other DNA; mol_type = other DNA
tataactcaacgcatggtcgc

SEQ ID NO: 6666 - DNA, 21 bp, synthetic construct
  source 1..21: mol_type = other DNA; mol_type = other DNA
gtgcacaggcttcaggacaaa

SEQ ID NO: 6667 - DNA, 21 bp, synthetic construct
  source 1..21: mol_type = other DNA; mol_type = other DNA
ttctcacgcgttggggaaaac

SEQ ID NO: 6668 - DNA, 21 bp, synthetic construct
  source 1..21: mol_type = other DNA; mol_type = other DNA
tatgcccggacctcccacaac

SEQ ID NO: 6669 - DNA, 21 bp, synthetic construct
  source 1..21: mol_type = other DNA; mol_type = other DNA
aggatgagcgaccataactgg

SEQ ID NO: 6670 - DNA, 21 bp, synthetic construct
  source 1..21: mol_type = other DNA; mol_type = other DNA
agagagacgtatgtatatccc

SEQ ID NO: 6671 - DNA, 21 bp, synthetic construct
  source 1..21: mol_type = other DNA; mol_type = other DNA
ttgcacaggtcttcaaacaac

SEQ ID NO: 6672 - DNA, 21 bp, synthetic construct
  source 1..21: mol_type = other DNA; mol_type = other DNA
ctacacgtgcttggaccgaat

SEQ ID NO: 6673 - DNA, 21 bp, synthetic construct
  source 1..21: mol_type = other DNA; mol_type = other DNA
ctgcatgtcctggggccaaac

SEQ ID NO: 6674 - DNA, 21 bp, synthetic construct
  source 1..21: mol_type = other DNA; mol_type = other DNA
tattcacgaatgaataacaat

SEQ ID NO: 6675 - DNA, 21 bp, synthetic construct
  source 1..21: mol_type = other DNA; mol_type = other DNA
ctgacaaggctttcccacaat

SEQ ID NO: 6676 - DNA, 21 bp, synthetic construct
  source 1..21: mol_type = other DNA; mol_type = other DNA
atgcatcggctggcagtaaat

SEQ ID NO: 6677 - DNA, 21 bp, synthetic construct
  source 1..21: mol_type = other DNA; mol_type = other DNA
aattatgcttctcactcctgg

SEQ ID NO: 6678 - DNA, 21 bp, synthetic construct
  source 1..21: mol_type = other DNA; mol_type = other DNA
catgggagcactaatggaaaa

SEQ ID NO: 6679 - DNA, 21 bp, synthetic construct
  source 1..21: mol_type = other DNA; mol_type = other DNA
atgcacagacttgcggttaac

SEQ ID NO: 6680 - DNA, 21 bp, synthetic construct
  source 1..21: mol_type = other DNA; mol_type = other DNA
tactcacgccaaaatgaaaac

SEQ ID NO: 6681 - DNA, 21 bp, synthetic construct
  source 1..21: mol_type = other DNA; mol_type = other DNA
cgcaatggtactagctcgtgg

SEQ ID NO: 6682 - DNA, 21 bp, synthetic construct
  source 1..21: mol_type = other DNA; mol_type = other DNA
ctacacaagtctggaatgaat

SEQ ID NO: 6683 - DNA, 21 bp, synthetic construct
  source 1..21: mol_type = other DNA; mol_type = other DNA
cacggatccacgaacgggaag

SEQ ID NO: 6684 - DNA, 21 bp, synthetic construct
  source 1..21: mol_type = other DNA; mol_type = other DNA
aagatgccttctcgagattgg

SEQ ID NO: 6685 - DNA, 21 bp, synthetic construct
  source 1..21: mol_type = other DNA; mol_type = other DNA
tatagtcggcagaacgagaat

SEQ ID NO: 6686 - DNA, 21 bp, synthetic construct
  source 1..21: mol_type = other DNA; mol_type = other DNA
ggtggcgatggtaatcattat

SEQ ID NO: 6687 - DNA, 21 bp, synthetic construct
  source 1..21: mol_type = other DNA; mol_type = other DNA
atgtcacggctgtcacagaac

SEQ ID NO: 6688 - DNA, 21 bp, synthetic construct
  source 1..21: mol_type = other DNA; mol_type = other DNA
atgtacaacgactgttgcgtt

SEQ ID NO: 6689 - DNA, 21 bp, synthetic construct
  source 1..21: mol_type = other DNA; mol_type = other DNA
tactctaaatcgggagcgaat

SEQ ID NO: 6690 - DNA, 21 bp, synthetic construct
  source 1..21: mol_type = other DNA; mol_type = other DNA
aaaatgccaagccgggactgg

SEQ ID NO: 6691 - DNA, 21 bp, synthetic construct
  source 1..21: mol_type = other DNA; mol_type = other DNA
gattacacgggaaagagtgct

SEQ ID NO: 6692 - DNA, 21 bp, synthetic construct
  source 1..21: mol_type = other DNA; mol_type = other DNA
gtttacgtaaggacggatcgc

SEQ ID NO: 6693 - DNA, 21 bp, synthetic construct
  source 1..21: mol_type = other DNA; mol_type = other DNA
agggcgcttgaatgctgctac

SEQ ID NO: 6694 - DNA, 21 bp, synthetic construct
  source 1..21: mol_type = other DNA; mol_type = other DNA
gtacgcgagtacatgtcttac

SEQ ID NO: 6695 - DNA, 21 bp, synthetic construct
  source 1..21: mol_type = other DNA; mol_type = other DNA
tctctattgaaacctgctaaa

SEQ ID NO: 6696 - DNA, 21 bp, synthetic construct
  source 1..21: mol_type = other DNA; mol_type = other DNA
ttcgaaggaagaggatggaac

SEQ ID NO: 6697 - DNA, 21 bp, synthetic construct
  source 1..21: mol_type = other DNA; mol_type = other DNA
gacatgagtagtagaatatgg

SEQ ID NO: 6698 - DNA, 21 bp, synthetic construct
  source 1..21: mol_type = other DNA; mol_type = other DNA
tacgtaaggtcggatgttcgg

SEQ ID NO: 6699 - DNA, 21 bp, synthetic construct
  source 1..21: mol_type = other DNA; mol_type = other DNA
ctgagccggtcatcatacaat

SEQ ID NO: 6700 - DNA, 21 bp, synthetic construct
  source 1..21: mol_type = other DNA; mol_type = other DNA
gactatactggtaaatccgcg

SEQ ID NO: 6701 - DNA, 21 bp, synthetic construct
  source 1..21: mol_type = other DNA; mol_type = other DNA
ctttggcgcacgggtatcaat

SEQ ID NO: 6702 - DNA, 21 bp, synthetic construct
  source 1..21: mol_type = other DNA; mol_type = other DNA
tattcgcgtgtaaacgacaac

SEQ ID NO: 6703 - DNA, 21 bp, synthetic construct
  source 1..21: mol_type = other DNA; mol_type = other DNA
tatagcaaacttaatgataag

SEQ ID NO: 6704 - DNA, 21 bp, synthetic construct
  source 1..21: mol_type = other DNA; mol_type = other DNA
tactcaaagctcaacgacaaa

SEQ ID NO: 6705 - DNA, 21 bp, synthetic construct
  source 1..21: mol_type = other DNA; mol_type = other DNA
gatatgtcctcgcgaatctgg

SEQ ID NO: 6706 - DNA, 21 bp, synthetic construct
  source 1..21: mol_type = other DNA; mol_type = other DNA
tacgtcaaatcggacagatgt

SEQ ID NO: 6707 - DNA, 21 bp, synthetic construct
  source 1..21: mol_type = other DNA; mol_type = other DNA
aagctggagccgcctaagagg

SEQ ID NO: 6708 - DNA, 21 bp, synthetic construct
  source 1..21: mol_type = other DNA; mol_type = other DNA
atgtataatgattgctgtgta

SEQ ID NO: 6709 - DNA, 21 bp, synthetic construct
  source 1..21: mol_type = other DNA; mol_type = other DNA
cggaacggaacctcgagctgg

SEQ ID NO: 6710 - DNA, 21 bp, synthetic construct
  source 1..21: mol_type = other DNA; mol_type = other DNA
agggtcgatcagcctaaaaag

SEQ ID NO: 6711 - DNA, 21 bp, synthetic construct
  source 1..21: mol_type = other DNA; mol_type = other DNA
tttgagggccgcgggtggaat

SEQ ID NO: 6712 - DNA, 21 bp, synthetic construct
  source 1..21: mol_type = other DNA; mol_type = other DNA
cgcaactacgatacgtaccct

SEQ ID NO: 6713 - DNA, 21 bp, synthetic construct
  source 1..21: mol_type = other DNA; mol_type = other DNA
gttagggaatatatgtcctat

SEQ ID NO: 6714 - DNA, 21 bp, synthetic construct
  source 1..21: mol_type = other DNA; mol_type = other DNA
aagatcctaacggtgtggcca

SEQ ID NO: 6715 - DNA, 21 bp, synthetic construct
  source 1..21: mol_type = other DNA; mol_type = other DNA
ttgagtaggtcttcttataac

SEQ ID NO: 6716 - DNA, 21 bp, synthetic construct
  source 1..21: mol_type = other DNA; mol_type = other DNA
tatcttaaatctcagtcatat

SEQ ID NO: 6717 - DNA, 21 bp, synthetic construct
  source 1..21: mol_type = other DNA; mol_type = other DNA
tatgttcggtccgacgtgcga

SEQ ID NO: 6718 - DNA, 21 bp, synthetic construct
  source 1..21: mol_type = other DNA; mol_type = other DNA
agaaattatgacacttatccc

SEQ ID NO: 6719 - DNA, 21 bp, synthetic construct
  source 1..21: mol_type = other DNA; mol_type = other DNA
tatcagcggcagggttgggat

SEQ ID NO: 6720 - DNA, 21 bp, synthetic construct
  source 1..21: mol_type = other DNA; mol_type = other DNA
taccaacgccaaggatgggac

SEQ ID NO: 6721 - DNA, 21 bp, synthetic construct
  source 1..21: mol_type = other DNA; mol_type = other DNA
aagcgggagccagagcgtcga

SEQ ID NO: 6722 - DNA, 21 bp, synthetic construct
  source 1..21: mol_type = other DNA; mol_type = other DNA
cttcatcgcaatactcaaaac

SEQ ID NO: 6723 - DNA, 21 bp, synthetic construct
  source 1..21: mol_type = other DNA; mol_type = other DNA
cagtcggtatgtacgacgaag

SEQ ID NO: 6724 - DNA, 21 bp, synthetic construct
  source 1..21: mol_type = other DNA; mol_type = other DNA
aactacgcgtcccatagttgg

SEQ ID NO: 6725 - DNA, 21 bp, synthetic construct
  source 1..21: mol_type = other DNA; mol_type = other DNA
tttagtcgagtggggtttaac

SEQ ID NO: 6726 - DNA, 21 bp, synthetic construct
  source 1..21: mol_type = other DNA; mol_type = other DNA
ttgcataaatcaggcatgaac

SEQ ID NO: 6727 - DNA, 21 bp, synthetic construct
  source 1..21: mol_type = other DNA; mol_type = other DNA
ttgcacaggaacacccagaat

SEQ ID NO: 6728 - DNA, 21 bp, synthetic construct
  source 1..21: mol_type = other DNA; mol_type = other DNA
tattccaagtcaggtgcaaac

SEQ ID NO: 6729 - DNA, 21 bp, synthetic construct
  source 1..21: mol_type = other DNA; mol_type = other DNA
attatgagcagtcgaagctgg

SEQ ID NO: 6730 - DNA, 21 bp, synthetic construct
  source 1..21: mol_type = other DNA; mol_type = other DNA
aggaatcatgaaactttccct

SEQ ID NO: 6731 - DNA, 21 bp, synthetic construct
  source 1..21: mol_type = other DNA; mol_type = other DNA
ttttcccggacggggtttaat

SEQ ID NO: 6732 - DNA, 21 bp, synthetic construct
  source 1..21: mol_type = other DNA; mol_type = other DNA
tatgcaagaataggcctaaat

SEQ ID NO: 6733 - DNA, 21 bp, synthetic construct
  source 1..21: mol_type = other DNA; mol_type = other DNA
ggaggtgacgggaaccactac

SEQ ID NO: 6734 - DNA, 21 bp, synthetic construct
  source 1..21: mol_type = other DNA; mol_type = other DNA
tacctgaagagccaatcctac

SEQ ID NO: 6735 - DNA, 21 bp, synthetic construct
  source 1..21: mol_type = other DNA; mol_type = other DNA
ggacttatcggtgtttggccc

SEQ ID NO: 6736 - DNA, 21 bp, synthetic construct
  source 1..21: mol_type = other DNA; mol_type = other DNA
gataaagggcactgccacccg

SEQ ID NO: 6737 - DNA, 21 bp, synthetic construct
  source 1..21: mol_type = other DNA; mol_type = other DNA
tatgttaagtctgatcaccat

SEQ ID NO: 6738 - DNA, 21 bp, synthetic construct
  source 1..21: mol_type = other DNA; mol_type = other DNA
gctcaacgcgtgaggagcata

SEQ ID NO: 6739 - DNA, 21 bp, synthetic construct
  source 1..21: mol_type = other DNA; mol_type = other DNA
tattcccggcccggccccaat

SEQ ID NO: 6740 - DNA, 21 bp, synthetic construct
  source 1..21: mol_type = other DNA; mol_type = other DNA
aagacgatcaatcctggaaag

SEQ ID NO: 6741 - DNA, 21 bp, synthetic construct
  source 1..21: mol_type = other DNA; mol_type = other DNA
catagttctacgaatggagcc

SEQ ID NO: 6742 - DNA, 21 bp, synthetic construct
  source 1..21: mol_type = other DNA; mol_type = other DNA
tactctcgacctgggccgaac

SEQ ID NO: 6743 - DNA, 21 bp, synthetic construct
  source 1..21: mol_type = other DNA; mol_type = other DNA
tattctcggatgaactctaac

SEQ ID NO: 6744 - DNA, 21 bp, synthetic construct
  source 1..21: mol_type = other DNA; mol_type = other DNA
ttcagccgcgttggcttcaat

SEQ ID NO: 6745 - DNA, 21 bp, synthetic construct
  source 1..21: mol_type = other DNA; mol_type = other DNA
gaaaatcaccccctatggggt

SEQ ID NO: 6746 - DNA, 21 bp, synthetic construct
  source 1..21: mol_type = other DNA; mol_type = other DNA
cgtacagcccttgtgttcccg

SEQ ID NO: 6747 - DNA, 21 bp, synthetic construct
  source 1..21: mol_type = other DNA; mol_type = other DNA
ataatgtcgagccggtcatgg

SEQ ID NO: 6748 - DNA, 21 bp, synthetic construct
  source 1..21: mol_type = other DNA; mol_type = other DNA
tatgcaagaggtggaaacaat

SEQ ID NO: 6749 - DNA, 21 bp, synthetic construct
  source 1..21: mol_type = other DNA; mol_type = other DNA
atccatagacttctaccctca

SEQ ID NO: 6750 - DNA, 21 bp, synthetic construct
  source 1..21: mol_type = other DNA; mol_type = other DNA
tacgcgcgaatcgggctgaac

SEQ ID NO: 6751 - DNA, 21 bp, synthetic construct
  source 1..21: mol_type = other DNA; mol_type = other DNA
aaaacaattaaccccggtaaa

SEQ ID NO: 6752 - DNA, 21 bp, synthetic construct
  source 1..21: mol_type = other DNA; mol_type = other DNA
tttcataaattgatgtcgaat

SEQ ID NO: 6753 - DNA, 21 bp, synthetic construct
  source 1..21: mol_type = other DNA; mol_type = other DNA
cggaaccacgagacgtttccg

SEQ ID NO: 6754 - DNA, 21 bp, synthetic construct
  source 1..21: mol_type = other DNA; mol_type = other DNA
cacgattttaatttccgaggt

SEQ ID NO: 6755 - DNA, 21 bp, synthetic construct
  source 1..21: mol_type = other DNA; mol_type = other DNA
ttgcacagatcaggcgataat

SEQ ID NO: 6756 - DNA, 21 bp, synthetic construct
  source 1..21: mol_type = other DNA; mol_type = other DNA
cactcaagcacaaacggggct

SEQ ID NO: 6757 - DNA, 21 bp, synthetic construct
  source 1..21: mol_type = other DNA; mol_type = other DNA
agctgcccgaagaacgatctt

SEQ ID NO: 6758 - DNA, 21 bp, synthetic construct
  source 1..21: mol_type = other DNA; mol_type = other DNA
tatgtgaagtccgatcgatgc

SEQ ID NO: 6759 - DNA, 21 bp, synthetic construct
  source 1..21: mol_type = other DNA; mol_type = other DNA
tatgtgcgttcagataggaac

SEQ ID NO: 6760 - DNA, 21 bp, synthetic construct
  source 1..21: mol_type = other DNA; mol_type = other DNA
tacgtcaaatcggaccatcac

SEQ ID NO: 6761 - DNA, 21 bp, synthetic construct
  source 1..21: mol_type = other DNA; mol_type = other DNA
tattccaggatgggacacaac

SEQ ID NO: 6762 - DNA, 21 bp, synthetic construct
  source 1..21: mol_type = other DNA; mol_type = other DNA
gattgccagacaaatcggtcc

SEQ ID NO: 6763 - DNA, 21 bp, synthetic construct
  source 1..21: mol_type = other DNA; mol_type = other DNA
attcaccgtctactcccttcc

SEQ ID NO: 6764 - DNA, 21 bp, synthetic construct
  source 1..21: mol_type = other DNA; mol_type = other DNA
atccccaactgttataagcat

SEQ ID NO: 6765 - DNA, 21 bp, synthetic construct
  source 1..21: mol_type = other DNA; mol_type = other DNA
tactcaagaatgggaatgaat

SEQ ID NO: 6766 - DNA, 21 bp, synthetic construct
  source 1..21: mol_type = other DNA; mol_type = other DNA
tcactgcttaagccagccaag

SEQ ID NO: 6767 - DNA, 21 bp, synthetic construct
  source 1..21: mol_type = other DNA; mol_type = other DNA
cggacggactgcgtttatcct

SEQ ID NO: 6768 - DNA, 21 bp, synthetic construct
  source 1..21: mol_type = other DNA; mol_type = other DNA
tgcgataaagaggcttatcaa

SEQ ID NO: 6769 - DNA, 21 bp, synthetic construct
  source 1..21: mol_type = other DNA; mol_type = other DNA
gattgtaaatattttaaggca

SEQ ID NO: 6770 - DNA, 21 bp, synthetic construct
  source 1..21: mol_type = other DNA; mol_type = other DNA
tggccttccgagcttgggtgg

SEQ ID NO: 6771 - DNA, 21 bp, synthetic construct
  source 1..21: mol_type = other DNA; mol_type = other DNA
tacgctcggggagggaataac

SEQ ID NO: 6772 - DNA, 21 bp, synthetic construct
  source 1..21: mol_type = other DNA; mol_type = other DNA
tacctcctgagaggttgcgcg

SEQ ID NO: 6773 - DNA, 21 bp, synthetic construct
  source 1..21: mol_type = other DNA; mol_type = other DNA
tactcagccattggaatgaac

SEQ ID NO: 6774 - DNA, 21 bp, synthetic construct
  source 1..21: mol_type = other DNA; mol_type = other DNA
gttgctatgcgcgggattgga

SEQ ID NO: 6775 - DNA, 21 bp, synthetic construct
  source 1..21: mol_type = other DNA; mol_type = other DNA
ttgtctcgagtggctatgaac

SEQ ID NO: 6776 - DNA, 21 bp, synthetic construct
  source 1..21: mol_type = other DNA; mol_type = other DNA
caaagaggtgtgccaaattgg

SEQ ID NO: 6777 - DNA, 21 bp, synthetic construct
  source 1..21: mol_type = other DNA; mol_type = other DNA
gccagtacgcactgcacgcgg

SEQ ID NO: 6778 - DNA, 21 bp, synthetic construct
  source 1..21: mol_type = other DNA; mol_type = other DNA
cagatgaatccaattaagaaa

SEQ ID NO: 6779 - DNA, 21 bp, synthetic construct
  source 1..21: mol_type = other DNA; mol_type = other DNA
tgcggggtcgataagtcccgc

SEQ ID NO: 6780 - DNA, 21 bp, synthetic construct
  source 1..21: mol_type = other DNA; mol_type = other DNA
aaggaaaagccagacaagagg

SEQ ID NO: 6781 - DNA, 21 bp, synthetic construct
  source 1..21: mol_type = other DNA; mol_type = other DNA
ggtcggatggcagtgagagtc

SEQ ID NO: 6782 - DNA, 21 bp, synthetic construct
  source 1..21: mol_type = other DNA; mol_type = other DNA
tgccaccgcgaacactcactt

SEQ ID NO: 6783 - DNA, 21 bp, synthetic construct
  source 1..21: mol_type = other DNA; mol_type = other DNA
ctttggcggaattgcgatgca

SEQ ID NO: 6784 - DNA, 21 bp, synthetic construct
  source 1..21: mol_type = other DNA; mol_type = other DNA
gagaaccatccgctgtggggc

SEQ ID NO: 6785 - DNA, 21 bp, synthetic construct
  source 1..21: mol_type = other DNA; mol_type = other DNA
ttagttaggtatgagaacgta

SEQ ID NO: 6786 - DNA, 21 bp, synthetic construct
  source 1..21: mol_type = other DNA; mol_type = other DNA
catggctcagggaattttgta

SEQ ID NO: 6787 - DNA, 21 bp, synthetic construct
  source 1..21: mol_type = other DNA; mol_type = other DNA
tttagtcgaattggggagaat

SEQ ID NO: 6788 - DNA, 21 bp, synthetic construct
  source 1..21: mol_type = other DNA; mol_type = other DNA
cttgtcagatacgaaaatgtg

SEQ ID NO: 6789 - DNA, 21 bp, synthetic construct
  source 1..21: mol_type = other DNA; mol_type = other DNA
aaattggaaccacccaaacgt

SEQ ID NO: 6790 - DNA, 21 bp, synthetic construct
  source 1..21: mol_type = other DNA; mol_type = other DNA
tacgcgaagaacggattcaat

SEQ ID NO: 6791 - DNA, 21 bp, synthetic construct
  source 1..21: mol_type = other DNA; mol_type = other DNA
acggagacgaaattctgcaac

SEQ ID NO: 6792 - DNA, 21 bp, synthetic construct
  source 1..21: mol_type = other DNA; mol_type = other DNA
aaggagaataatgcgaagaaa

SEQ ID NO: 6793 - DNA, 21 bp, synthetic construct
  source 1..21: mol_type = other DNA; mol_type = other DNA
gaaatggaatcattcaactgg

SEQ ID NO: 6794 - DNA, 21 bp, synthetic construct
  source 1..21: mol_type = other DNA; mol_type = other DNA
ctgcatcgttctggggacaac

SEQ ID NO: 6795 - DNA, 21 bp, synthetic construct
  source 1..21: mol_type = other DNA; mol_type = other DNA
tacgcggcaggcagttggaat

SEQ ID NO: 6796 - DNA, 21 bp, synthetic construct
  source 1..21: mol_type = other DNA; mol_type = other DNA
gagagaaactcctgcatgcac

SEQ ID NO: 6797 - DNA, 21 bp, synthetic construct
  source 1..21: mol_type = other DNA; mol_type = other DNA
gatgcatatgagctctgtgct

SEQ ID NO: 6798 - DNA, 21 bp, synthetic construct
  source 1..21: mol_type = other DNA; mol_type = other DNA
cgaaccccggattcgtattgc

SEQ ID NO: 6799 - DNA, 21 bp, synthetic construct
  source 1..21: mol_type = other DNA; mol_type = other DNA
tacgcgcgtggaggaatgaat

SEQ ID NO: 6800 - DNA, 21 bp, synthetic construct
  source 1..21: mol_type = other DNA; mol_type = other DNA
cagcgtggcgtacccaactgg

SEQ ID NO: 6801 - DNA, 21 bp, synthetic construct
  source 1..21: mol_type = other DNA; mol_type = other DNA
ctccatgtccgaagcctaaac

SEQ ID NO: 6802 - DNA, 21 bp, synthetic construct
  source 1..21: mol_type = other DNA; mol_type = other DNA
cgcgggaatgaatgttggagt

SEQ ID NO: 6803 - DNA, 21 bp, synthetic construct
  source 1..21: mol_type = other DNA; mol_type = other DNA
ctacacgtacgtagtctgaat

SEQ ID NO: 6804 - DNA, 21 bp, synthetic construct
  source 1..21: mol_type = other DNA; mol_type = other DNA
tccaacaacgcgtattggggg

SEQ ID NO: 6805 - DNA, 21 bp, synthetic construct
  source 1..21: mol_type = other DNA; mol_type = other DNA
gtggcaatgagaggtatcggc

SEQ ID NO: 6806 - DNA, 21 bp, synthetic construct
  source 1..21: mol_type = other DNA; mol_type = other DNA
cacgggtccggaaacttcgtg

SEQ ID NO: 6807 - DNA, 21 bp, synthetic construct
  source 1..21: mol_type = other DNA; mol_type = other DNA
tgggtgaggtctgatacgaag

SEQ ID NO: 6808 - DNA, 21 bp, synthetic construct
  source 1..21: mol_type = other DNA; mol_type = other DNA
cgcgtagattgtggctcaagg

SEQ ID NO: 6809 - DNA, 21 bp, synthetic construct
  source 1..21: mol_type = other DNA; mol_type = other DNA
gggaatcagaactataagaag

SEQ ID NO: 6810 - DNA, 21 bp, synthetic construct
  source 1..21: mol_type = other DNA; mol_type = other DNA
tgcgggtatactaaccatgta

SEQ ID NO: 6811 - DNA, 21 bp, synthetic construct
  source 1..21: mol_type = other DNA; mol_type = other DNA
cataagtgccaaatttcgggt

SEQ ID NO: 6812 - DNA, 21 bp, synthetic construct
  source 1..21: mol_type = other DNA; mol_type = other DNA
caaatgaacccgataaaaaag

SEQ ID NO: 6813 - DNA, 21 bp, synthetic construct
  source 1..21: mol_type = other DNA; mol_type = other DNA
tattctgcgataggcatgaat

SEQ ID NO: 6814 - DNA, 21 bp, synthetic construct
  source 1..21: mol_type = other DNA; mol_type = other DNA
tttgcgaaagaaggacgaaat

SEQ ID NO: 6815 - DNA, 21 bp, synthetic construct
  source 1..21: mol_type = other DNA; mol_type = other DNA
ttcgttaagtccgatactaaa

SEQ ID NO: 6816 - DNA, 21 bp, synthetic construct
  source 1..21: mol_type = other DNA; mol_type = other DNA
tgcgaattcttccaacgtgaa

SEQ ID NO: 6817 - DNA, 21 bp, synthetic construct
  source 1..21: mol_type = other DNA; mol_type = other DNA
cgtaaagataatccaccgcgc

SEQ ID NO: 6818 - DNA, 21 bp, synthetic construct
  source 1..21: mol_type = other DNA; mol_type = other DNA
ggctacgcaggtaagaggaat

SEQ ID NO: 6819 - DNA, 21 bp, synthetic construct
  source 1..21: mol_type = other DNA; mol_type = other DNA
ttctcccgattgggtcataac

SEQ ID NO: 6820 - DNA, 21 bp, synthetic construct
  source 1..21: mol_type = other DNA; mol_type = other DNA
tactctcgttccaatgctaac

SEQ ID NO: 6821 - DNA, 21 bp, synthetic construct
  source 1..21: mol_type = other DNA; mol_type = other DNA
ttcgccaaggagggtaggaac

SEQ ID NO: 6822 - DNA, 21 bp, synthetic construct
  source 1..21: mol_type = other DNA; mol_type = other DNA
ttcagccgcactggcttcaac

SEQ ID NO: 6823 - DNA, 21 bp, synthetic construct
  source 1..21: mol_type = other DNA; mol_type = other DNA
tacagtaaggcccaacctaac

SEQ ID NO: 6824 - DNA, 21 bp, synthetic construct
  source 1..21: mol_type = other DNA; mol_type = other DNA
ggaaaatatcctccccaaggc

SEQ ID NO: 6825 - DNA, 21 bp, synthetic construct
  source 1..21: mol_type = other DNA; mol_type = other DNA
tatgctcggttaggaatgaac

SEQ ID NO: 6826 - DNA, 21 bp, synthetic construct
  source 1..21: mol_type = other DNA; mol_type = other DNA
tacagcaaagctgggtatgac

SEQ ID NO: 6827 - DNA, 21 bp, synthetic construct
  source 1..21: mol_type = other DNA; mol_type = other DNA
tatagtaaggcgggctacgat

SEQ ID NO: 6828 - DNA, 21 bp, synthetic construct
  source 1..21: mol_type = other DNA; mol_type = other DNA
cggcaggctaaacagaaaaat

SEQ ID NO: 6829 - DNA, 21 bp, synthetic construct
  source 1..21: mol_type = other DNA; mol_type = other DNA
tgtggtccccattggaatgct

SEQ ID NO: 6830 - DNA, 21 bp, synthetic construct
  source 1..21: mol_type = other DNA; mol_type = other DNA
ttccacaagctcatgagcaac

SEQ ID NO: 6831 - DNA, 21 bp, synthetic construct
  source 1..21: mol_type = other DNA; mol_type = other DNA
agagtaacacattgtactggt

SEQ ID NO: 6832 - DNA, 21 bp, synthetic construct
  source 1..21: mol_type = other DNA; mol_type = other DNA
ttcaaagccgggacttggaat

SEQ ID NO: 6833 - DNA, 21 bp, synthetic construct
  source 1..21: mol_type = other DNA; mol_type = other DNA
cattggactgagtacaacagc

SEQ ID NO: 6834 - DNA, 21 bp, synthetic construct
  source 1..21: mol_type = other DNA; mol_type = other DNA
ctacatcgattgatagcagat

SEQ ID NO: 6835 - DNA, 21 bp, synthetic construct
  source 1..21: mol_type = other DNA; mol_type = other DNA
atgaactgcgccgcaatgcgc

SEQ ID NO: 6836 - DNA, 21 bp, synthetic construct
  source 1..21: mol_type = other DNA; mol_type = other DNA
agtgaaaagaaattaaaattt

SEQ ID NO: 6837 - DNA, 21 bp, synthetic construct
  source 1..21: mol_type = other DNA; mol_type = other DNA
tattcccgaatgggtatgaac

SEQ ID NO: 6838 - DNA, 21 bp, synthetic construct
  source 1..21: mol_type = other DNA; mol_type = other DNA
gcttgtgatcgctcccatacg

SEQ ID NO: 6839 - DNA, 21 bp, synthetic construct
  source 1..21: mol_type = other DNA; mol_type = other DNA
aatccccacacatgtaacaat

SEQ ID NO: 6840 - DNA, 21 bp, synthetic construct
  source 1..21: mol_type = other DNA; mol_type = other DNA
tgggtacggtcggacacaaaa

SEQ ID NO: 6841 - DNA, 21 bp, synthetic construct
  source 1..21: mol_type = other DNA; mol_type = other DNA
tatgctaagaatggcgcaaat

SEQ ID NO: 6842 - DNA, 21 bp, synthetic construct
  source 1..21: mol_type = other DNA; mol_type = other DNA
tatgcgaaattcggccccaat

SEQ ID NO: 6843 - DNA, 21 bp, synthetic construct
  source 1..21: mol_type = other DNA; mol_type = other DNA
tacgcacgccttgggatgaat

SEQ ID NO: 6844 - DNA, 21 bp, synthetic construct
  source 1..21: mol_type = other DNA; mol_type = other DNA
ctatcgcggtccggtaacaat

SEQ ID NO: 6845 - DNA, 21 bp, synthetic construct
  source 1..21: mol_type = other DNA; mol_type = other DNA
tatagtcgagttaatgtaaat

SEQ ID NO: 6846 - DNA, 21 bp, synthetic construct
  source 1..21: mol_type = other DNA; mol_type = other DNA
ttttctaaaattggttttaac

SEQ ID NO: 6847 - DNA, 21 bp, synthetic construct
  source 1..21: mol_type = other DNA; mol_type = other DNA
tatagcagatctaacgcaaat

SEQ ID NO: 6848 - DNA, 21 bp, synthetic construct
  source 1..21: mol_type = other DNA; mol_type = other DNA
aggaacgaaaatcgcaaggga

SEQ ID NO: 6849 - DNA, 21 bp, synthetic construct
  source 1..21: mol_type = other DNA; mol_type = other DNA
tatagcaaagctcagccgaat

SEQ ID NO: 6850 - DNA, 21 bp, synthetic construct
  source 1..21: mol_type = other DNA; mol_type = other DNA
agtaaaaattcgatatggacc

SEQ ID NO: 6851 - DNA, 21 bp, synthetic construct
  source 1..21: mol_type = other DNA; mol_type = other DNA
atgaattgtgctgccatgcgt

SEQ ID NO: 6852 - DNA, 21 bp, synthetic construct
  source 1..21: mol_type = other DNA; mol_type = other DNA
ttcagccggataggcgaaaac

SEQ ID NO: 6853 - DNA, 21 bp, synthetic construct
  source 1..21: mol_type = other DNA; mol_type = other DNA
tacgcaaaaaacggtgcgaac

SEQ ID NO: 6854 - DNA, 21 bp, synthetic construct
  source 1..21: mol_type = other DNA; mol_type = other DNA
taccttaaatcacaaggtaat

SEQ ID NO: 6855 - DNA, 21 bp, synthetic construct
  source 1..21: mol_type = other DNA; mol_type = other DNA
ttcagcaaattgaattccaat

SEQ ID NO: 6856 - DNA, 21 bp, synthetic construct
  source 1..21: mol_type = other DNA; mol_type = other DNA
tacggatgtcagtcagggttc

SEQ ID NO: 6857 - DNA, 21 bp, synthetic construct
  source 1..21: mol_type = other DNA; mol_type = other DNA
ggcaagtacccgccacagggg

SEQ ID NO: 6858 - DNA, 21 bp, synthetic construct
  source 1..21: mol_type = other DNA; mol_type = other DNA
tcctgtagaattagcgagaaa

SEQ ID NO: 6859 - DNA, 21 bp, synthetic construct
  source 1..21: mol_type = other DNA; mol_type = other DNA
tatgccaaaaatggctttaac

SEQ ID NO: 6860 - DNA, 21 bp, synthetic construct
  source 1..21: mol_type = other DNA; mol_type = other DNA
aaaatgagctcgtctgtttgg

SEQ ID NO: 6861 - DNA, 21 bp, synthetic construct
  source 1..21: mol_type = other DNA; mol_type = other DNA
tacagtagattgtccggaaac

SEQ ID NO: 6862 - DNA, 21 bp, synthetic construct
  source 1..21: mol_type = other DNA; mol_type = other DNA
cttcataaaggctgtacaaac

SEQ ID NO: 6863 - DNA, 21 bp, synthetic construct
  source 1..21: mol_type = other DNA; mol_type = other DNA
tgcggccctcactggaacgcc

SEQ ID NO: 6864 - DNA, 21 bp, synthetic construct
  source 1..21: mol_type = other DNA; mol_type = other DNA
tggatctttcaatcacacacg

SEQ ID NO: 6865 - DNA, 21 bp, synthetic construct
  source 1..21: mol_type = other DNA; mol_type = other DNA
tgccgtggtacagtgtttccc

SEQ ID NO: 6866 - DNA, 21 bp, synthetic construct
  source 1..21: mol_type = other DNA; mol_type = other DNA
ctgcctgttcgtggtaaacat

SEQ ID NO: 6867 - DNA, 21 bp, synthetic construct
  source 1..21: mol_type = other DNA; mol_type = other DNA
tatagcaaaaagaatgaaaat

SEQ ID NO: 6868 - DNA, 21 bp, synthetic construct
  source 1..21: mol_type = other DNA; mol_type = other DNA
tactcccgagtaaacctcaat

SEQ ID NO: 6869 - DNA, 21 bp, synthetic construct
  source 1..21: mol_type = other DNA; mol_type = other DNA
tacgccaagtttggtccgaac

SEQ ID NO: 6870 - DNA, 21 bp, synthetic construct
  source 1..21: mol_type = other DNA; mol_type = other DNA
atcatgatgataacgcgggga

SEQ ID NO: 6871 - DNA, 21 bp, synthetic construct
  source 1..21: mol_type = other DNA; mol_type = other DNA
ggccaatgtggcccgaagtct

SEQ ID NO: 6872 - DNA, 21 bp, synthetic construct
  source 1..21: mol_type = other DNA; mol_type = other DNA
accacaattcattcaaggtgg

SEQ ID NO: 6873 - DNA, 21 bp, synthetic construct
  source 1..21: mol_type = other DNA; mol_type = other DNA
aaatcgatctggacagacgac

SEQ ID NO: 6874 - DNA, 21 bp, synthetic construct
  source 1..21: mol_type = other DNA; mol_type = other DNA
tgtaccggcaatagctccaaa

SEQ ID NO: 6875 - DNA, 21 bp, synthetic construct
  source 1..21: mol_type = other DNA; mol_type = other DNA
tgcgaccgatccaatgggggg

SEQ ID NO: 6876 - DNA, 21 bp, synthetic construct
  source 1..21: mol_type = other DNA; mol_type = other DNA
tgcaacccgtcggtatacaga

SEQ ID NO: 6877 - DNA, 21 bp, synthetic construct
  source 1..21: mol_type = other DNA; mol_type = other DNA
tgtaaaagctacggttcgtcc

SEQ ID NO: 6878 - DNA, 21 bp, synthetic construct
  source 1..21: mol_type = other DNA; mol_type = other DNA
tatgcagcgggatcctggaac

SEQ ID NO: 6879 - DNA, 21 bp, synthetic construct
  source 1..21: mol_type = other DNA; mol_type = other DNA
aatattgttaactaccgccaa

SEQ ID NO: 6880 - DNA, 21 bp, synthetic construct
  source 1..21: mol_type = other DNA; mol_type = other DNA
taccacaagtcgcaaagtaat

SEQ ID NO: 6881 - DNA, 21 bp, synthetic construct
  source 1..21: mol_type = other DNA; mol_type = other DNA
tgcacacgaatggactacggg

SEQ ID NO: 6882 - DNA, 21 bp, synthetic construct
  source 1..21: mol_type = other DNA; mol_type = other DNA
tatgcacgcggtgggatgaac

SEQ ID NO: 6883 - DNA, 21 bp, synthetic construct
  source 1..21: mol_type = other DNA; mol_type = other DNA
atcagtgaatacagcaaatgg

SEQ ID NO: 6884 - DNA, 21 bp, synthetic construct
  source 1..21: mol_type = other DNA; mol_type = other DNA
atgacctatgatagctatgat

SEQ ID NO: 6885 - DNA, 21 bp, synthetic construct
  source 1..21: mol_type = other DNA; mol_type = other DNA
actaattgggaatcatactta

SEQ ID NO: 6886 - DNA, 21 bp, synthetic construct
  source 1..21: mol_type = other DNA; mol_type = other DNA
tggcctccaccggtcaacagc

SEQ ID NO: 6887 - DNA, 21 bp, synthetic construct
  source 1..21: mol_type = other DNA; mol_type = other DNA
tgtgcatttaccgggacgcgc

SEQ ID NO: 6888 - DNA, 21 bp, synthetic construct
  source 1..21: mol_type = other DNA; mol_type = other DNA
tggacttgttctaggaagcag

SEQ ID NO: 6889 - DNA, 21 bp, synthetic construct
  source 1..21: mol_type = other DNA; mol_type = other DNA
ttccatcaccgtcaaaaccat

SEQ ID NO: 6890 - DNA, 21 bp, synthetic construct
  source 1..21: mol_type = other DNA; mol_type = other DNA
tttaaagtttgggatggaggc

SEQ ID NO: 6891 - DNA, 21 bp, synthetic construct
  source 1..21: mol_type = other DNA; mol_type = other DNA
tacttcacaggtgtcgtcgca

SEQ ID NO: 6892 - DNA, 21 bp, synthetic construct
  source 1..21: mol_type = other DNA; mol_type = other DNA
aaaattcctattaattggtcc

SEQ ID NO: 6893 - DNA, 21 bp, synthetic construct
  source 1..21: mol_type = other DNA; mol_type = other DNA
ggctacagatctttatacccg

SEQ ID NO: 6894 - DNA, 21 bp, synthetic construct
  source 1..21: mol_type = other DNA; mol_type = other DNA
aggcaggagaagcacttgagg

SEQ ID NO: 6895 - DNA, 21 bp, synthetic construct
  source 1..21: mol_type = other DNA; mol_type = other DNA
ttttcgaggctcgggcacaat

SEQ ID NO: 6896 - DNA, 21 bp, synthetic construct
  source 1..21: mol_type = other DNA; mol_type = other DNA
tattttactggcgttgtggcc

SEQ ID NO: 6897 - DNA, 21 bp, synthetic construct
  source 1..21: mol_type = other DNA; mol_type = other DNA
cgaaaggacaaccctcctcgg

SEQ ID NO: 6898 - DNA, 21 bp, synthetic construct
  source 1..21: mol_type = other DNA; mol_type = other DNA
tatcataaaagccagtcgaac

SEQ ID NO: 6899 - DNA, 21 bp, synthetic construct
  source 1..21: mol_type = other DNA; mol_type = other DNA
tacgttaaatcctccaataat

SEQ ID NO: 6900 - DNA, 21 bp, synthetic construct
  source 1..21: mol_type = other DNA; mol_type = other DNA
tacgcgcgcgaaacatggaat

SEQ ID NO: 6901 - DNA, 21 bp, synthetic construct
  source 1..21: mol_type = other DNA; mol_type = other DNA
tgttgggacactagtaacgcg

SEQ ID NO: 6902 - DNA, 21 bp, synthetic construct
  source 1..21: mol_type = other DNA; mol_type = other DNA
tacgccaaagccggccacaat

SEQ ID NO: 6903 - DNA, 21 bp, synthetic construct
  source 1..21: mol_type = other DNA; mol_type = other DNA
atgacatacgacagttacgac

SEQ ID NO: 6904 - DNA, 21 bp, synthetic construct
  source 1..21: mol_type = other DNA; mol_type = other DNA
aagatgtcgtcctcggtgtgg

SEQ ID NO: 6905 - DNA, 21 bp, synthetic construct
  source 1..21: mol_type = other DNA; mol_type = other DNA
tacgccaggatgggaataaat

SEQ ID NO: 6906 - DNA, 21 bp, synthetic construct
  source 1..21: mol_type = other DNA; mol_type = other DNA
gattctccgtggtcaaactgg

SEQ ID NO: 6907 - DNA, 21 bp, synthetic construct
  source 1..21: mol_type = other DNA; mol_type = other DNA
aattcgacttcatgtacaccg

SEQ ID NO: 6908 - DNA, 21 bp, synthetic construct
  source 1..21: mol_type = other DNA; mol_type = other DNA
aggactgcactcgtatttcca

SEQ ID NO: 6909 - DNA, 21 bp, synthetic construct
  source 1..21: mol_type = other DNA; mol_type = other DNA
tatgcgaaggctggtcataac

SEQ ID NO: 6910 - DNA, 21 bp, synthetic construct
  source 1..21: mol_type = other DNA; mol_type = other DNA
cacaagtgtggtgacactcgc

SEQ ID NO: 6911 - DNA, 21 bp, synthetic construct
  source 1..21: mol_type = other DNA; mol_type = other DNA
ctagctaggaacgcgagtaat

SEQ ID NO: 6912 - DNA, 21 bp, synthetic construct
  source 1..21: mol_type = other DNA; mol_type = other DNA
agaatgaaagacgtctaccct

SEQ ID NO: 6913 - DNA, 21 bp, synthetic construct
  source 1..21: mol_type = other DNA; mol_type = other DNA
cgttgcgagatcaacgctaca

SEQ ID NO: 6914 - DNA, 21 bp, synthetic construct
  source 1..21: mol_type = other DNA; mol_type = other DNA
tattctgagtatgacacctac

SEQ ID NO: 6915 - DNA, 21 bp, synthetic construct
  source 1..21: mol_type = other DNA; mol_type = other DNA
cgaatgaaggatgtgtatccc

SEQ ID NO: 6916 - DNA, 21 bp, synthetic construct
  source 1..21: mol_type = other DNA; mol_type = other DNA
tttgtcaaatcggacaccaag

SEQ ID NO: 6917 - DNA, 21 bp, synthetic construct
  source 1..21: mol_type = other DNA; mol_type = other DNA
tactcacgtgtcaacgtcaac

SEQ ID NO: 6918 - DNA, 21 bp, synthetic construct
  source 1..21: mol_type = other DNA; mol_type = other DNA
taccacgcacgggccccaaac

SEQ ID NO: 6919 - DNA, 21 bp, synthetic construct
  source 1..21: mol_type = other DNA; mol_type = other DNA
aacatagtcaattatcgacag

SEQ ID NO: 6920 - DNA, 21 bp, synthetic construct
  source 1..21: mol_type = other DNA; mol_type = other DNA
tacatttgtagtaacgccaag

SEQ ID NO: 6921 - DNA, 21 bp, synthetic construct
  source 1..21: mol_type = other DNA; mol_type = other DNA
accttgatgggaaaatgtacg

SEQ ID NO: 6922 - DNA, 21 bp, synthetic construct
  source 1..21: mol_type = other DNA; mol_type = other DNA
agtactatggaatgctcatcc

SEQ ID NO: 6923 - DNA, 21 bp, synthetic construct
  source 1..21: mol_type = other DNA; mol_type = other DNA
aaatgggttcgatccgctgtg

SEQ ID NO: 6924 - DNA, 21 bp, synthetic construct
  source 1..21: mol_type = other DNA; mol_type = other DNA
cgaaacaaggacagaaatagt

SEQ ID NO: 6925 - DNA, 21 bp, synthetic construct
  source 1..21: mol_type = other DNA; mol_type = other DNA
cgttggtcagagcgggattgt

SEQ ID NO: 6926 - DNA, 21 bp, synthetic construct
  source 1..21: mol_type = other DNA; mol_type = other DNA
gacaagatgtgcttcgctaag

SEQ ID NO: 6927 - DNA, 21 bp, synthetic construct
  source 1..21: mol_type = other DNA; mol_type = other DNA
ttaagccgctctggcaataac

SEQ ID NO: 6928 - DNA, 21 bp, synthetic construct
  source 1..21: mol_type = other DNA; mol_type = other DNA
gtccacgactcaagccactgt

SEQ ID NO: 6929 - DNA, 21 bp, synthetic construct
  source 1..21: mol_type = other DNA; mol_type = other DNA
tattcgaggttatctgggaat

SEQ ID NO: 6930 - DNA, 21 bp, synthetic construct
  source 1..21: mol_type = other DNA; mol_type = other DNA
tgcgattacggttcgcgctca

SEQ ID NO: 6931 - DNA, 21 bp, synthetic construct
  source 1..21: mol_type = other DNA; mol_type = other DNA
tcctgcaaatccgggaacgct

SEQ ID NO: 6932 - DNA, 21 bp, synthetic construct
  source 1..21: mol_type = other DNA; mol_type = other DNA
ctgggactgtggaccgaatct

SEQ ID NO: 6933 - DNA, 21 bp, synthetic construct
  source 1..21: mol_type = other DNA; mol_type = other DNA
acgtgtaggacgctgaaaaca

SEQ ID NO: 6934 - DNA, 21 bp, synthetic construct
  source 1..21: mol_type = other DNA; mol_type = other DNA
tgtacagaaaatcgaggagta

SEQ ID NO: 6935 - DNA, 21 bp, synthetic construct
  source 1..21: mol_type = other DNA; mol_type = other DNA
ggtcccggtacatgcaaatcc

SEQ ID NO: 6936 - DNA, 21 bp, synthetic construct
  source 1..21: mol_type = other DNA; mol_type = other DNA
tgccagtacgttaaatgggaa

SEQ ID NO: 6937 - DNA, 21 bp, synthetic construct
  source 1..21: mol_type = other DNA; mol_type = other DNA
accgaaacaaagttttgtaat

SEQ ID NO: 6938 - DNA, 21 bp, synthetic construct
  source 1..21: mol_type = other DNA; mol_type = other DNA
aactcttctgcttgccgcacc

SEQ ID NO: 6939 - DNA, 21 bp, synthetic construct
  source 1..21: mol_type = other DNA; mol_type = other DNA
agtggatgtagccggacggat

SEQ ID NO: 6940 - DNA, 21 bp, synthetic construct
  source 1..21: mol_type = other DNA; mol_type = other DNA
atgtgttcgatgcgaaatgca

SEQ ID NO: 6941 - DNA, 21 bp, synthetic construct
  source 1..21: mol_type = other DNA; mol_type = other DNA
aggtcctgtttgggctccaat

SEQ ID NO: 6942 - DNA, 21 bp, synthetic construct
  source 1..21: mol_type = other DNA; mol_type = other DNA
aaacgtccgccggaagcacgg

SEQ ID NO: 6943 - DNA, 21 bp, synthetic construct
  source 1..21: mol_type = other DNA; mol_type = other DNA
ttttctaagctaaactcaaac

SEQ ID NO: 6944 - DNA, 21 bp, synthetic construct
  source 1..21: mol_type = other DNA; mol_type = other DNA
aagaataactgcacgtttgga

SEQ ID NO: 6945 - DNA, 21 bp, synthetic construct
  source 1..21: mol_type = other DNA; mol_type = other DNA
tgtaacaatagtggatactct

SEQ ID NO: 6946 - DNA, 21 bp, synthetic construct
  source 1..21: mol_type = other DNA; mol_type = other DNA
atgtctcgaatcggcgttaac

SEQ ID NO: 6947 - DNA, 21 bp, synthetic construct
  source 1..21: mol_type = other DNA; mol_type = other DNA
tatcatgctcgcgctccgaat

SEQ ID NO: 6948 - DNA, 21 bp, synthetic construct
  source 1..21: mol_type = other DNA; mol_type = other DNA
ttgaagctgtgtgcccacaat

SEQ ID NO: 6949 - DNA, 21 bp, synthetic construct
  source 1..21: mol_type = other DNA; mol_type = other DNA
agatgcgataaaatattaacg

SEQ ID NO: 6950 - DNA, 21 bp, synthetic construct
  source 1..21: mol_type = other DNA; mol_type = other DNA
tcaaaaacgtatagctgtccg

SEQ ID NO: 6951 - DNA, 21 bp, synthetic construct
  source 1..21: mol_type = other DNA; mol_type = other DNA
aaaatgttacctggtaaccgt

SEQ ID NO: 6952 - DNA, 21 bp, synthetic construct
  source 1..21: mol_type = other DNA; mol_type = other DNA
tatcaacggcaatgtgagagc

SEQ ID NO: 6953 - DNA, 21 bp, synthetic construct
  source 1..21: mol_type = other DNA; mol_type = other DNA
aatacataccgatgtgatggg

SEQ ID NO: 6954 - DNA, 21 bp, synthetic construct
  source 1..21: mol_type = other DNA; mol_type = other DNA
tcttgtggcggattacacggg

SEQ ID NO: 6955 - DNA, 21 bp, synthetic construct
  source 1..21: mol_type = other DNA; mol_type = other DNA
attagcgagtattcgaagtgg

SEQ ID NO: 6956 - DNA, 21 bp, synthetic construct
  source 1..21: mol_type = other DNA; mol_type = other DNA
tttaaggctggaacctggaac

SEQ ID NO: 6957 - DNA, 21 bp, synthetic construct
  source 1..21: mol_type = other DNA; mol_type = other DNA
tcttgtaagagcggcaatgcc

SEQ ID NO: 6958 - DNA, 21 bp, synthetic construct
  source 1..21: mol_type = other DNA; mol_type = other DNA
ctatccaagttatcctgcaat

SEQ ID NO: 6959 - DNA, 21 bp, synthetic construct
  source 1..21: mol_type = other DNA; mol_type = other DNA
tacagcagaattaacgccaac

SEQ ID NO: 6960 - DNA, 21 bp, synthetic construct
  source 1..21: mol_type = other DNA; mol_type = other DNA
ctcgggttgtggacagagtcc

SEQ ID NO: 6961 - DNA, 21 bp, synthetic construct
  source 1..21: mol_type = other DNA; mol_type = other DNA
aagatgttgccgggaaatcgg

SEQ ID NO: 6962 - DNA, 21 bp, synthetic construct
  source 1..21: mol_type = other DNA; mol_type = other DNA
tactggagtcagacgccttcg

SEQ ID NO: 6963 - DNA, 21 bp, synthetic construct
  source 1..21: mol_type = other DNA; mol_type = other DNA
acggtttggacatcggattgt

SEQ ID NO: 6964 - DNA, 21 bp, synthetic construct
  source 1..21: mol_type = other DNA; mol_type = other DNA
tgtggttacaccaatcacgtt

SEQ ID NO: 6965 - DNA, 21 bp, synthetic construct
  source 1..21: mol_type = other DNA; mol_type = other DNA
cagtatgtccgatcatcaata

SEQ ID NO: 6966 - DNA, 21 bp, synthetic construct
  source 1..21: mol_type = other DNA; mol_type = other DNA
agttgtatgaatgtcgctccg

SEQ ID NO: 6967 - DNA, 21 bp, synthetic construct
  source 1..21: mol_type = other DNA; mol_type = other DNA
gccttttgtacaaacaaaacg

SEQ ID NO: 6968 - DNA, 21 bp, synthetic construct
  source 1..21: mol_type = other DNA; mol_type = other DNA
acgcagtgcaaagagcactac

SEQ ID NO: 6969 - DNA, 21 bp, synthetic construct
  source 1..21: mol_type = other DNA; mol_type = other DNA
cggtggagcgaaagagactgc

SEQ ID NO: 6970 - DNA, 21 bp, synthetic construct
  source 1..21: mol_type = other DNA; mol_type = other DNA
tgtacatacaagtggagtgaa

SEQ ID NO: 6971 - DNA, 21 bp, synthetic construct
  source 1..21: mol_type = other DNA; mol_type = other DNA
attagcgtgtgtaaacaacag

SEQ ID NO: 6972 - DNA, 21 bp, synthetic construct
  source 1..21: mol_type = other DNA; mol_type = other DNA
tcccactggagtgactgcgac

SEQ ID NO: 6973 - DNA, 21 bp, synthetic construct
  source 1..21: mol_type = other DNA; mol_type = other DNA
atgtcccgtattggagtgaat

SEQ ID NO: 6974 - DNA, 21 bp, synthetic construct
  source 1..21: mol_type = other DNA; mol_type = other DNA
tacgcacgagggaatgataat

SEQ ID NO: 6975 - DNA, 21 bp, synthetic construct
  source 1..21: mol_type = other DNA; mol_type = other DNA
agctgtcgactagtagacgtt

SEQ ID NO: 6976 - DNA, 21 bp, synthetic construct
  source 1..21: mol_type = other DNA; mol_type = other DNA
ttgccagtgagagggaagcac

SEQ ID NO: 6977 - DNA, 21 bp, synthetic construct
  source 1..21: mol_type = other DNA; mol_type = other DNA
aagagtatttggaccgatgat

SEQ ID NO: 6978 - DNA, 21 bp, synthetic construct
  source 1..21: mol_type = other DNA; mol_type = other DNA
tgtcaatcagaaggtagaacc

SEQ ID NO: 6979 - DNA, 21 bp, synthetic construct
  source 1..21: mol_type = other DNA; mol_type = other DNA
ctttgcaggccatgccgggaa

SEQ ID NO: 6980 - DNA, 21 bp, synthetic construct
  source 1..21: mol_type = other DNA; mol_type = other DNA
tcttggacatacgaggaatgt

SEQ ID NO: 6981 - DNA, 21 bp, synthetic construct
  source 1..21: mol_type = other DNA; mol_type = other DNA
acctgtcagcgtctgtccggt

SEQ ID NO: 6982 - DNA, 21 bp, synthetic construct
  source 1..21: mol_type = other DNA; mol_type = other DNA
ttgcaccggcttatcgctgac

SEQ ID NO: 6983 - DNA, 21 bp, synthetic construct
  source 1..21: mol_type = other DNA; mol_type = other DNA
tgtgacgggacggggcgacgt

SEQ ID NO: 6984 - DNA, 21 bp, synthetic construct
  source 1..21: mol_type = other DNA; mol_type = other DNA
catgacttcaactttagggga

SEQ ID NO: 6985 - DNA, 21 bp, synthetic construct
  source 1..21: mol_type = other DNA; mol_type = other DNA
gcgttctgcaccaataagact

SEQ ID NO: 6986 - DNA, 21 bp, synthetic construct
  source 1..21: mol_type = other DNA; mol_type = other DNA
agagaggtattaaaatggagt

SEQ ID NO: 6987 - DNA, 21 bp, synthetic construct
  source 1..21: mol_type = other DNA; mol_type = other DNA
acgtgtggaatgaggggagct

SEQ ID NO: 6988 - DNA, 21 bp, synthetic construct
  source 1..21: mol_type = other DNA; mol_type = other DNA
tgcggtcgaggagctggaata

SEQ ID NO: 6989 - DNA, 21 bp, synthetic construct
  source 1..21: mol_type = other DNA; mol_type = other DNA
tatttcgagaagatatgtgaa

SEQ ID NO: 6990 - DNA, 21 bp, synthetic construct
  source 1..21: mol_type = other DNA
cctcgtatgtgcgcgaacaac

SEQ ID NO: 6991 - DNA, 21 bp, synthetic construct
  source 1..21: mol_type = other DNA
tactttacagatgaatggccc

SEQ ID NO: 6992 - DNA, 21 bp, synthetic construct
  source 1..21: mol_type = other DNA; mol_type = other DNA
gggtgctcagggtttaagaca

SEQ ID NO: 6993 - DNA, 21 bp, synthetic construct
  source 1..21: mol_type = other DNA; mol_type = other DNA
tgcaaatggatacgggaaggc

SEQ ID NO: 6994 - DNA, 21 bp, synthetic construct
  source 1..21: mol_type = other DNA; mol_type = other DNA
atgaaaatcacaggtccccgc

SEQ ID NO: 6995 - DNA, 21 bp, synthetic construct
  source 1..21: mol_type = other DNA; mol_type = other DNA
tgtcaatatgtcaagtgggag

SEQ ID NO: 6996 - DNA, 21 bp, synthetic construct
  source 1..21: mol_type = other DNA; mol_type = other DNA
cgaacatacgacacttacatc

SEQ ID NO: 6997 - DNA, 21 bp, synthetic construct
  source 1..21: mol_type = other DNA; mol_type = other DNA
cgatacgaggcaagtaattgg

SEQ ID NO: 6998 - DNA, 21 bp, synthetic construct
  source 1..21: mol_type = other DNA; mol_type = other DNA
tacagcaagctaggaggtaat

SEQ ID NO: 6999 - DNA, 21 bp, synthetic construct
  source 1..21: mol_type = other DNA; mol_type = other DNA
tattctcgggtgaatctgaac

SEQ ID NO: 7000 - DNA, 21 bp, synthetic construct
  source 1..21: mol_type = other DNA; mol_type = other DNA
tacttcgcccatttttcccat

SEQ ID NO: 7001 - DNA, 21 bp, synthetic construct
  source 1..21: mol_type = other DNA; mol_type = other DNA
gggtgcaaccgttcaacggct

SEQ ID NO: 7002 - DNA, 21 bp, synthetic construct
  source 1..21: mol_type = other DNA; mol_type = other DNA
aagctctgtcccaatcttatc

SEQ ID NO: 7003 - DNA, 21 bp, synthetic construct
  source 1..21: mol_type = other DNA; mol_type = other DNA
tggcctacagccttttacgct

SEQ ID NO: 7004 - DNA, 21 bp, synthetic construct
  source 1..21: mol_type = other DNA
ctttgtcgtccatgttcagag

SEQ ID NO: 7005 - DNA, 21 bp, synthetic construct
  source 1..21: mol_type = other DNA
tactctaagaaaaacgagaac

SEQ ID NO: 7006 - DNA, 21 bp, synthetic construct
  source 1..21: mol_type = other DNA; mol_type = other DNA
tgcctgatacgtgacgttaaa

SEQ ID NO: 7007 - DNA, 21 bp, synthetic construct
  source 1..21: mol_type = other DNA; mol_type = other DNA
cacgactcggcctggagctgg

SEQ ID NO: 7008 - DNA, 21 bp, synthetic construct
  source 1..21: mol_type = other DNA; mol_type = other DNA
agggcaaaaatcaattggcca

SEQ ID NO: 7009 - DNA, 21 bp, synthetic construct
  source 1..21: mol_type = other DNA; mol_type = other DNA
acgggtgtatggatgcaaacg

SEQ ID NO: 7010 - DNA, 21 bp, synthetic construct
  source 1..21: mol_type = other DNA; mol_type = other DNA
tacagcgaatacgatacatat

SEQ ID NO: 7011 - DNA, 21 bp, synthetic construct
  source 1..21: mol_type = other DNA; mol_type = other DNA
tacagccgcaccggaagcgat

SEQ ID NO: 7012 - DNA, 21 bp, synthetic construct
  source 1..21: mol_type = other DNA; mol_type = other DNA
tactcaaaaaacggcatgaat

SEQ ID NO: 7013 - DNA, 21 bp, synthetic construct
  source 1..21: mol_type = other DNA; mol_type = other DNA
tgtgactatggaagcagatcc

SEQ ID NO: 7014 - DNA, 21 bp, synthetic construct
  source 1..21: mol_type = other DNA; mol_type = other DNA
tgctcgggtttcgaacggcga

SEQ ID NO: 7015 - DNA, 21 bp, synthetic construct
  source 1..21: mol_type = other DNA; mol_type = other DNA
tgcaatataggcgataaacgg

SEQ ID NO: 7016 - DNA, 21 bp, synthetic construct
  source 1..21: mol_type = other DNA; mol_type = other DNA
tatagtagaacggggagtgac

SEQ ID NO: 7017 - DNA, 21 bp, synthetic construct
  source 1..21: mol_type = other DNA; mol_type = other DNA
ggagagtggtgtgtgaagaat

SEQ ID NO: 7018 - DNA, 21 bp, synthetic construct
  source 1..21: mol_type = other DNA; mol_type = other DNA
taccataaacatagtctgaac

SEQ ID NO: 7019 - DNA, 21 bp, synthetic construct
  source 1..21: mol_type = other DNA; mol_type = other DNA
ttttctaaaatgaacatcaat

SEQ ID NO: 7020 - DNA, 21 bp, synthetic construct
  source 1..21: mol_type = other DNA; mol_type = other DNA
atatgccgcggatatacatct

SEQ ID NO: 7021 - DNA, 21 bp, synthetic construct
  source 1..21: mol_type = other DNA; mol_type = other DNA
cagtaccatatctatagcgga

SEQ ID NO: 7022 - DNA, 21 bp, synthetic construct
  source 1..21: mol_type = other DNA; mol_type = other DNA
tgcatcatcaagaaccaggtg

SEQ ID NO: 7023 - DNA, 21 bp, synthetic construct
  source 1..21: mol_type = other DNA; mol_type = other DNA
tacgcgaaacaaggccataat

SEQ ID NO: 7024 - DNA, 21 bp, synthetic construct
  source 1..21: mol_type = other DNA; mol_type = other DNA
gagctcggccgcttcggatgc

SEQ ID NO: 7025 - DNA, 21 bp, synthetic construct
  source 1..21: mol_type = other DNA; mol_type = other DNA
gaatatcagactagaccgtgc

SEQ ID NO: 7026 - DNA, 21 bp, synthetic construct
  source 1..21: mol_type = other DNA; mol_type = other DNA
acttccgggatttggaacgtt

SEQ ID NO: 7027 - DNA, 21 bp, synthetic construct
  source 1..21: mol_type = other DNA; mol_type = other DNA
agcaataatgcctactgggga

SEQ ID NO: 7028 - DNA, 21 bp, synthetic construct
  source 1..21: mol_type = other DNA; mol_type = other DNA
tgcgccgtacagggtgtcaag

SEQ ID NO: 7029 - DNA, 21 bp, synthetic construct
  source 1..21: mol_type = other DNA; mol_type = other DNA
tatttgaagagtcaggggaac

SEQ ID NO: 7030 - DNA, 21 bp, synthetic construct
  source 1..21: mol_type = other DNA; mol_type = other DNA
gaatggtgcaatacggacaaa

SEQ ID NO: 7031 - DNA, 21 bp, synthetic construct
  source 1..21: mol_type = other DNA; mol_type = other DNA
tatcacaagcactccttgaat

SEQ ID NO: 7032 - DNA, 21 bp, synthetic construct
  source 1..21: mol_type = other DNA; mol_type = other DNA
atgcgaactcctgttatacgg

SEQ ID NO: 7033 - DNA, 21 bp, synthetic construct
  source 1..21: mol_type = other DNA; mol_type = other DNA
agctgtaaatcttcttatacg

SEQ ID NO: 7034 - DNA, 21 bp, synthetic construct
  source 1..21: mol_type = other DNA; mol_type = other DNA
gaactagggcgttttgggtgt

SEQ ID NO: 7035 - DNA, 21 bp, synthetic construct
  source 1..21: mol_type = other DNA; mol_type = other DNA
atgttgtgtgtagctggtgac

SEQ ID NO: 7036 - DNA, 21 bp, synthetic construct
  source 1..21: mol_type = other DNA; mol_type = other DNA
tatgctcgtgagacctggaac

SEQ ID NO: 7037 - DNA, 21 bp, synthetic construct
  source 1..21: mol_type = other DNA; mol_type = other DNA
taccagcgtcagtgcgaatca

SEQ ID NO: 7038 - DNA, 21 bp, synthetic construct
  source 1..21: mol_type = other DNA; mol_type = other DNA
ggcccaggaacttgtaagtct

SEQ ID NO: 7039 - DNA, 21 bp, synthetic construct
  source 1..21: mol_type = other DNA; mol_type = other DNA
agttacagcaacccttggatc

SEQ ID NO: 7040 - DNA, 21 bp, synthetic construct
  source 1..21: mol_type = other DNA; mol_type = other DNA
tacggtgctggtacctggcat

SEQ ID NO: 7041 - DNA, 21 bp, synthetic construct
  source 1..21: mol_type = other DNA; mol_type = other DNA
tcaacttgcaacatgcaagct

SEQ ID NO: 7042 - DNA, 21 bp, synthetic construct
  source 1..21: mol_type = other DNA; mol_type = other DNA
acaaagcgccagcaatggcca

SEQ ID NO: 7043 - DNA, 21 bp, synthetic construct
  source 1..21: mol_type = other DNA; mol_type = other DNA
ctgaaactatgcgctcataac

SEQ ID NO: 7044 - DNA, 21 bp, synthetic construct
  source 1..21: mol_type = other DNA; mol_type = other DNA
tacgctagaggcggtcaaaat

SEQ ID NO: 7045 - DNA, 21 bp, synthetic construct
  source 1..21: mol_type = other DNA; mol_type = other DNA
tgtacatctgatagctttccc

SEQ ID NO: 7046 - DNA, 21 bp, synthetic construct
  source 1..21: mol_type = other DNA; mol_type = other DNA
ttttcaaagatgaactataat

SEQ ID NO: 7047 - DNA, 21 bp, synthetic construct
  source 1..21: mol_type = other DNA; mol_type = other DNA
tacttcacgggcatctgggct

SEQ ID NO: 7048 - DNA, 21 bp, synthetic construct
  source 1..21: mol_type = other DNA; mol_type = other DNA
agctgcatgaacgtagccccc

SEQ ID NO: 7049 - DNA, 21 bp, synthetic construct
  source 1..21: mol_type = other DNA; mol_type = other DNA
tgctgggatacatcgaatgct

SEQ ID NO: 7050 - DNA, 21 bp, synthetic construct
  source 1..21: mol_type = other DNA; mol_type = other DNA
tgtgagttttttcagagagag

SEQ ID NO: 7051 - DNA, 21 bp, synthetic construct
  source 1..21: mol_type = other DNA; mol_type = other DNA
tgtactaataacggcaaccgt

SEQ ID NO: 7052 - DNA, 21 bp, synthetic construct
  source 1..21: mol_type = other DNA; mol_type = other DNA
tacagtaaaatgaaccaaaat

SEQ ID NO: 7053 - DNA, 21 bp, synthetic construct
  source 1..21: mol_type = other DNA; mol_type = other DNA
cggtgtgaaattaatgcaact

SEQ ID NO: 7054 - DNA, 21 bp, synthetic construct
  source 1..21: mol_type = other DNA; mol_type = other DNA
cgtcatccctccttaaatttt

SEQ ID NO: 7055 - DNA, 21 bp, synthetic construct
  source 1..21: mol_type = other DNA; mol_type = other DNA
cagtacactcgtctgcagctt

SEQ ID NO: 7056 - DNA, 21 bp, synthetic construct
  source 1..21: mol_type = other DNA; mol_type = other DNA
ttggcccggaatgcctcaaac

SEQ ID NO: 7057 - DNA, 21 bp, synthetic construct
  source 1..21: mol_type = other DNA; mol_type = other DNA
tactttcccaatttcatttcg

SEQ ID NO: 7058 - DNA, 21 bp, synthetic construct
  source 1..21: mol_type = other DNA; mol_type = other DNA
gcttacagtcgacttatgtca

SEQ ID NO: 7059 - DNA, 21 bp, synthetic construct
  source 1..21: mol_type = other DNA; mol_type = other DNA
tcctcaaagtattcgccctgg

SEQ ID NO: 7060 - DNA, 21 bp, synthetic construct
  source 1..21: mol_type = other DNA; mol_type = other DNA
ctgtgccggtatagcggtgga

SEQ ID NO: 7061 - DNA, 21 bp, synthetic construct
  source 1..21: mol_type = other DNA; mol_type = other DNA
actccttattgcaaccttcgc

SEQ ID NO: 7062 - DNA, 21 bp, synthetic construct
  source 1..21: mol_type = other DNA; mol_type = other DNA
gcctacgtctccagtacctgt

SEQ ID NO: 7063 - DNA, 21 bp, synthetic construct
  source 1..21: mol_type = other DNA; mol_type = other DNA
tgctatagacacgttacagca

SEQ ID NO: 7064 - DNA, 21 bp, synthetic construct
  source 1..21: mol_type = other DNA; mol_type = other DNA
gatcagtggtgcaaaaaggtg

SEQ ID NO: 7065 - DNA, 21 bp, synthetic construct
  source 1..21: mol_type = other DNA; mol_type = other DNA
aactgtaattttgttggaaaa

SEQ ID NO: 7066 - DNA, 21 bp, synthetic construct
  source 1..21: mol_type = other DNA; mol_type = other DNA
tgcgtagattgggggcttgac

SEQ ID NO: 7067 - DNA, 21 bp, synthetic construct
  source 1..21: mol_type = other DNA; mol_type = other DNA
cgtatgtctgccagtaactgg

SEQ ID NO: 7068 - DNA, 21 bp, synthetic construct
  source 1..21: mol_type = other DNA; mol_type = other DNA
ttctacaggtccgataattgc

SEQ ID NO: 7069 - DNA, 21 bp, synthetic construct
  source 1..21: mol_type = other DNA; mol_type = other DNA
tactccaggtataatattaat

SEQ ID NO: 7070 - DNA, 21 bp, synthetic construct
  source 1..21: mol_type = other DNA; mol_type = other DNA
tgccatcaggttctcttgcct

SEQ ID NO: 7071 - DNA, 21 bp, synthetic construct
  source 1..21: mol_type = other DNA; mol_type = other DNA
tgtctcatccgggatgtcaag

SEQ ID NO: 7072 - DNA, 21 bp, synthetic construct
  source 1..21: mol_type = other DNA; mol_type = other DNA
cgtgtaaacacacgagctaat

SEQ ID NO: 7073 - DNA, 21 bp, synthetic construct
  source 1..21: mol_type = other DNA; mol_type = other DNA
tgtggcagaggggcggggatc

SEQ ID NO: 7074 - DNA, 21 bp, synthetic construct
  source 1..21: mol_type = other DNA; mol_type = other DNA
tatgcacgtcaaaattataat

SEQ ID NO: 7075 - DNA, 21 bp, synthetic construct
  source 1..21: mol_type = other DNA; mol_type = other DNA
tattcacgtatcaatgcaaat

SEQ ID NO: 7076 - DNA, 21 bp, synthetic construct
  source 1..21: mol_type = other DNA; mol_type = other DNA
tatacgcgactctcgatgaat

SEQ ID NO: 7077 - DNA, 21 bp, synthetic construct
  source 1..21: mol_type = other DNA; mol_type = other DNA
ccgtgtggcccttgtacttat

SEQ ID NO: 7078 - DNA, 21 bp, synthetic construct
  source 1..21: mol_type = other DNA; mol_type = other DNA
tatttttcagggaagacccta

SEQ ID NO: 7079 - DNA, 21 bp, synthetic construct
  source 1..21: mol_type = other DNA; mol_type = other DNA
acttactcgaggctcgttctc

SEQ ID NO: 7080 - DNA, 21 bp, synthetic construct
  source 1..21: mol_type = other DNA; mol_type = other DNA
aactgtaagccttgcttcgat

SEQ ID NO: 7081 - DNA, 21 bp, synthetic construct
  source 1..21: mol_type = other DNA; mol_type = other DNA
aatctcggctggctaaaaccc

SEQ ID NO: 7082 - DNA, 21 bp, synthetic construct
  source 1..21: mol_type = other DNA; mol_type = other DNA
tacagcaaaaccggcgataat

SEQ ID NO: 7083 - DNA, 21 bp, synthetic construct
  source 1..21: mol_type = other DNA; mol_type = other DNA
gattggtcgacccgagagtgg

SEQ ID NO: 7084 - DNA, 21 bp, synthetic construct
  source 1..21: mol_type = other DNA; mol_type = other DNA
caatataccaggttgcaatta

SEQ ID NO: 7085 - DNA, 21 bp, synthetic construct
  source 1..21: mol_type = other DNA; mol_type = other DNA
ttcagcaagataggcttcaat

SEQ ID NO: 7086 - DNA, 21 bp, synthetic construct
  source 1..21: mol_type = other DNA; mol_type = other DNA
ttcaaggtgtgggacggggga

SEQ ID NO: 7087 - DNA, 21 bp, synthetic construct
  source 1..21: mol_type = other DNA; mol_type = other DNA
aactatgttaaaagcacatgt

SEQ ID NO: 7088 - DNA, 21 bp, synthetic construct
  source 1..21: mol_type = other DNA; mol_type = other DNA
atgcactgggacgcactccat

SEQ ID NO: 7089 - DNA, 21 bp, synthetic construct
  source 1..21: mol_type = other DNA; mol_type = other DNA
tattcgaaactcggtgggaac

SEQ ID NO: 7090 - DNA, 21 bp, synthetic construct
  source 1..21: mol_type = other DNA
ctttttaggtctggccctaat

SEQ ID NO: 7091 - DNA, 21 bp, synthetic construct
  source 1..21: mol_type = other DNA; mol_type = other DNA
aacaaaaattgggtaatagga

SEQ ID NO: 7092 - DNA, 21 bp, synthetic construct
  source 1..21: mol_type = other DNA; mol_type = other DNA
ggcctctgcccatcgactaag

SEQ ID NO: 7093 - DNA, 21 bp, synthetic construct
  source 1..21: mol_type = other DNA; mol_type = other DNA
ctacctatctactcgttaacc

SEQ ID NO: 7094 - DNA, 21 bp, synthetic construct
  source 1..21: mol_type = other DNA; mol_type = other DNA
gagatggagtcctttaattgg

SEQ ID NO: 7095 - DNA, 21 bp, synthetic construct
  source 1..21: mol_type = other DNA; mol_type = other DNA
cgtgccaagataaactggcct

SEQ ID NO: 7096 - DNA, 21 bp, synthetic construct
  source 1..21: mol_type = other DNA; mol_type = other DNA
tcttgtgagatcaagcatatc

SEQ ID NO: 7097 - DNA, 21 bp, synthetic construct
  source 1..21: mol_type = other DNA; mol_type = other DNA
ttatggaggacagggattaac

SEQ ID NO: 7098 - DNA, 21 bp, synthetic construct
  source 1..21: mol_type = other DNA; mol_type = other DNA
atgtgttcgaactatggtagc

SEQ ID NO: 7099 - DNA, 21 bp, synthetic construct
  source 1..21: mol_type = other DNA; mol_type = other DNA
atctggataaaatcccagacc

SEQ ID NO: 7100 - DNA, 21 bp, synthetic construct
  source 1..21: mol_type = other DNA; mol_type = other DNA
aagacctacgacgcgttcgtc

SEQ ID NO: 7101 - DNA, 21 bp, synthetic construct
  source 1..21: mol_type = other DNA; mol_type = other DNA
agtaatggaagactgaattgg

SEQ ID NO: 7102 - DNA, 21 bp, synthetic construct
  source 1..21: mol_type = other DNA; mol_type = other DNA
tatgtgaagtcgagtaacaac

SEQ ID NO: 7103 - DNA, 21 bp, synthetic construct
  source 1..21: mol_type = other DNA; mol_type = other DNA
aacaccatgtggttaaatccg

SEQ ID NO: 7104 - DNA, 21 bp, synthetic construct
  source 1..21: mol_type = other DNA; mol_type = other DNA
aacacgtataggtgcgacggc

SEQ ID NO: 7105 - DNA, 21 bp, synthetic construct
  source 1..21: mol_type = other DNA; mol_type = other DNA
tctacgtgtaatatgcaggca

SEQ ID NO: 7106 - DNA, 21 bp, synthetic construct
  source 1..21: mol_type = other DNA; mol_type = other DNA
tatgctcggggcaacgacaac

SEQ ID NO: 7107 - DNA, 21 bp, synthetic construct
  source 1..21: mol_type = other DNA; mol_type = other DNA
caatatcacatatactcaggt

SEQ ID NO: 7108 - DNA, 21 bp, synthetic construct
  source 1..21: mol_type = other DNA; mol_type = other DNA
cgaatgtcagcgtcaaattgg

SEQ ID NO: 7109 - DNA, 21 bp, synthetic construct
  source 1..21: mol_type = other DNA; mol_type = other DNA
tattcccgactctccgcgata

SEQ ID NO: 7110 - DNA, 21 bp, synthetic construct
  source 1..21: mol_type = other DNA; mol_type = other DNA
tatgggtgccaatccggcttt

SEQ ID NO: 7111 - DNA, 21 bp, synthetic construct
  source 1..21: mol_type = other DNA; mol_type = other DNA
tggatgaatatcaacgactgc

SEQ ID NO: 7112 - DNA, 21 bp, synthetic construct
  source 1..21: mol_type = other DNA; mol_type = other DNA
tatgctcgcatgggtattaac

SEQ ID NO: 7113 - DNA, 21 bp, synthetic construct
  source 1..21: mol_type = other DNA; mol_type = other DNA
tactttagtggacagatttgt

SEQ ID NO: 7114 - DNA, 21 bp, synthetic construct
  source 1..21: mol_type = other DNA; mol_type = other DNA
gcgtatgtgtcgtcaacatgc

SEQ ID NO: 7115 - DNA, 21 bp, synthetic construct
  source 1..21: mol_type = other DNA; mol_type = other DNA
tatcacaaggggaataacaat

SEQ ID NO: 7116 - DNA, 21 bp, synthetic construct
  source 1..21: mol_type = other DNA; mol_type = other DNA
ggatgttcgggcttcaaaact

SEQ ID NO: 7117 - DNA, 21 bp, synthetic construct
  source 1..21: mol_type = other DNA; mol_type = other DNA
ggttgccaggcggggatgaaa

SEQ ID NO: 7118 - DNA, 21 bp, synthetic construct
  source 1..21: mol_type = other DNA; mol_type = other DNA
agttgcaggctcgtcgatgtg

SEQ ID NO: 7119 - DNA, 21 bp, synthetic construct
  source 1..21: mol_type = other DNA; mol_type = other DNA
tgcgattacataagctatgct

SEQ ID NO: 7120 - DNA, 21 bp, synthetic construct
  source 1..21: mol_type = other DNA; mol_type = other DNA
tactccaagtctggcgataat

SEQ ID NO: 7121 - DNA, 21 bp, synthetic construct
  source 1..21: mol_type = other DNA; mol_type = other DNA
aatcattgggtgcgtgatcat

SEQ ID NO: 7122 - DNA, 21 bp, synthetic construct
  source 1..21: mol_type = other DNA; mol_type = other DNA
gtaatgagtaattggaaccgc

SEQ ID NO: 7123 - DNA, 21 bp, synthetic construct
  source 1..21: mol_type = other DNA; mol_type = other DNA
tcgggctgctctcgaactgac

SEQ ID NO: 7124 - DNA, 21 bp, synthetic construct
  source 1..21: mol_type = other DNA; mol_type = other DNA
tatcacgttgcggaccgttgc

SEQ ID NO: 7125 - DNA, 21 bp, synthetic construct
  source 1..21: mol_type = other DNA; mol_type = other DNA
cgggaccacgattgctacgca

SEQ ID NO: 7126 - DNA, 21 bp, synthetic construct
  source 1..21: mol_type = other DNA; mol_type = other DNA
tccccaaacggctgtaatggt

SEQ ID NO: 7127 - DNA, 21 bp, synthetic construct
  source 1..21: mol_type = other DNA; mol_type = other DNA
ttgcatcgggacggtatcaat

SEQ ID NO: 7128 - DNA, 21 bp, synthetic construct
  source 1..21: mol_type = other DNA; mol_type = other DNA
gcctgtgaaaggaaaatgaca

SEQ ID NO: 7129 - DNA, 21 bp, synthetic construct
  source 1..21: mol_type = other DNA; mol_type = other DNA
atctaccttaagaagcaagtc

SEQ ID NO: 7130 - DNA, 21 bp, synthetic construct
  source 1..21: mol_type = other DNA; mol_type = other DNA
aagcacagaacaatcgtgaac

SEQ ID NO: 7131 - DNA, 21 bp, synthetic construct
  source 1..21: mol_type = other DNA; mol_type = other DNA
aatagctgcaatatgactagg

SEQ ID NO: 7132 - DNA, 21 bp, synthetic construct
  source 1..21: mol_type = other DNA; mol_type = other DNA
tgtgacaaggaagcctaccag

SEQ ID NO: 7133 - DNA, 21 bp, synthetic construct
  source 1..21: mol_type = other DNA; mol_type = other DNA
tatagcaagaatgggatgaac

SEQ ID NO: 7134 - DNA, 21 bp, synthetic construct
  source 1..21: mol_type = other DNA; mol_type = other DNA
cgggactggattcagttcgag

SEQ ID NO: 7135 - DNA, 21 bp, synthetic construct
  source 1..21: mol_type = other DNA; mol_type = other DNA
cacgagacgtgcgtgcgtgga

SEQ ID NO: 7136 - DNA, 21 bp, synthetic construct
  source 1..21: mol_type = other DNA; mol_type = other DNA
gataaatatctgaacacatgt

SEQ ID NO: 7137 - DNA, 21 bp, synthetic construct
  source 1..21: mol_type = other DNA; mol_type = other DNA
tatcttaagtctgaacgtaat

SEQ ID NO: 7138 - DNA, 21 bp, synthetic construct
  source 1..21: mol_type = other DNA; mol_type = other DNA
gagtggtgtaacaccgataag

SEQ ID NO: 7139 - DNA, 21 bp, synthetic construct
  source 1..21: mol_type = other DNA; mol_type = other DNA
gtgttctcgcgttccatgtgc

SEQ ID NO: 7140 - DNA, 21 bp, synthetic construct
  source 1..21: mol_type = other DNA; mol_type = other DNA
acgcaagtgtattccaattgg

SEQ ID NO: 7141 - DNA, 21 bp, synthetic construct
  source 1..21: mol_type = other DNA; mol_type = other DNA
agaactcaacctcccgctcgt

SEQ ID NO: 7142 - DNA, 21 bp, synthetic construct
  source 1..21: mol_type = other DNA; mol_type = other DNA
ttggcacggtcagcagtcaat

SEQ ID NO: 7143 - DNA, 21 bp, synthetic construct
  source 1..21: mol_type = other DNA; mol_type = other DNA
tacagccgtatcaataccaat

SEQ ID NO: 7144 - DNA, 21 bp, synthetic construct
  source 1..21: mol_type = other DNA
gcgagaggacaattgccctgg

SEQ ID NO: 7145 - DNA, 21 bp, synthetic construct
  source 1..21: mol_type = other DNA
gagggatatcatgactgggcg

SEQ ID NO: 7146 - DNA, 21 bp, synthetic construct
  source 1..21: mol_type = other DNA
gacaatacattttctaattgg

SEQ ID NO: 7147 - DNA, 21 bp, synthetic construct
  source 1..21: mol_type = other DNA
gactggtctacgagggaatgg

SEQ ID NO: 7148 - DNA, 21 bp, synthetic construct
  source 1..21: mol_type = other DNA
ataatgatgattacccgtggt

SEQ ID NO: 7149 - DNA, 21 bp, synthetic construct
  source 1..21: mol_type = other DNA; mol_type = other DNA
ggttatcgaagtctttatcct

SEQ ID NO: 7150 - DNA, 21 bp, synthetic construct
  source 1..21: mol_type = other DNA; mol_type = other DNA
tggcatcgtcttagtgtgaat

SEQ ID NO: 7151 - DNA, 21 bp, synthetic construct
  source 1..21: mol_type = other DNA; mol_type = other DNA
aaactatgccctaacttaata

SEQ ID NO: 7152 - DNA, 21 bp, synthetic construct
  source 1..21: mol_type = other DNA; mol_type = other DNA
cgttatgaagcctctaactgg

SEQ ID NO: 7153 - DNA, 21 bp, synthetic construct
  source 1..21: mol_type = other DNA; mol_type = other DNA
gtcatgtgcgatgcttatccc

SEQ ID NO: 7154 - DNA, 21 bp, synthetic construct
  source 1..21: mol_type = other DNA; mol_type = other DNA
tcccgccgattttatgaggaa

SEQ ID NO: 7155 - DNA, 21 bp, synthetic construct
  source 1..21: mol_type = other DNA; mol_type = other DNA
aaaacatatgatgcatttgtg

SEQ ID NO: 7156 - DNA, 21 bp, synthetic construct
  source 1..21: mol_type = other DNA; mol_type = other DNA
gaacgcggatacctcgattat

SEQ ID NO: 7157 - DNA, 21 bp, synthetic construct
  source 1..21: mol_type = other DNA; mol_type = other DNA
tacagcagaactaataccaat

SEQ ID NO: 7158 - DNA, 21 bp, synthetic construct
  source 1..21: mol_type = other DNA; mol_type = other DNA
agtgagtactcatcgtggccc

SEQ ID NO: 7159 - DNA, 21 bp, synthetic construct
  source 1..21: mol_type = other DNA; mol_type = other DNA
cgtgaagtgctcaagtggtct

SEQ ID NO: 7160 - DNA, 21 bp, synthetic construct
  source 1..21: mol_type = other DNA; mol_type = other DNA
gcttgcgagcgtaagatgact

SEQ ID NO: 7161 - DNA, 21 bp, synthetic construct
  source 1..21: mol_type = other DNA; mol_type = other DNA
ctttgttatccgtgcaactcc

SEQ ID NO: 7162 - DNA, 21 bp, synthetic construct
  source 1..21: mol_type = other DNA; mol_type = other DNA
caatacgtgcgtagctcgatc

SEQ ID NO: 7163 - DNA, 21 bp, synthetic construct
  source 1..21: mol_type = other DNA; mol_type = other DNA
atctcaaataagcactggtca

SEQ ID NO: 7164 - DNA, 21 bp, synthetic construct
  source 1..21: mol_type = other DNA; mol_type = other DNA
ggccctggatacgtcaattgg

SEQ ID NO: 7165 - DNA, 21 bp, synthetic construct
  source 1..21: mol_type = other DNA; mol_type = other DNA
gggtcctcaacctccatttgg

SEQ ID NO: 7166 - DNA, 21 bp, synthetic construct
  source 1..21: mol_type = other DNA; mol_type = other DNA
ctatgcagaccgtgctcggaa

SEQ ID NO: 7167 - DNA, 21 bp, synthetic construct
  source 1..21: mol_type = other DNA; mol_type = other DNA
tgttatgggacgtcgatgtat

SEQ ID NO: 7168 - DNA, 21 bp, synthetic construct
  source 1..21: mol_type = other DNA; mol_type = other DNA
ccgggaagtttgagatacggt

SEQ ID NO: 7169 - DNA, 21 bp, synthetic construct
  source 1..21: mol_type = other DNA; mol_type = other DNA
ctgcaccgcgatggaattaac

SEQ ID NO: 7170 - DNA, 21 bp, synthetic construct
  source 1..21: mol_type = other DNA; mol_type = other DNA
ctcgcgcgtagcgcggttaac

SEQ ID NO: 7171 - DNA, 21 bp, synthetic construct
  source 1..21: mol_type = other DNA; mol_type = other DNA
tatgcacgcggtgggcagaac

SEQ ID NO: 7172 - DNA, 21 bp, synthetic construct
  source 1..21: mol_type = other DNA; mol_type = other DNA
aagatacccatcaactggagt

SEQ ID NO: 7173 - DNA, 21 bp, synthetic construct
  source 1..21: mol_type = other DNA; mol_type = other DNA
ccaagaccgaacgtctatagc

SEQ ID NO: 7174 - DNA, 21 bp, synthetic construct
  source 1..21: mol_type = other DNA; mol_type = other DNA
tactcacgtctatcagctatc

SEQ ID NO: 7175 - DNA, 21 bp, synthetic construct
  source 1..21: mol_type = other DNA; mol_type = other DNA
catagtcattatactaattat

SEQ ID NO: 7176 - DNA, 21 bp, synthetic construct
  source 1..21: mol_type = other DNA; mol_type = other DNA
cactggaccgaatataatagt

SEQ ID NO: 7177 - DNA, 21 bp, synthetic construct
  source 1..21: mol_type = other DNA; mol_type = other DNA
atgaccacgtgcgaaaacgtg

SEQ ID NO: 7178 - DNA, 21 bp, synthetic construct
  source 1..21: mol_type = other DNA; mol_type = other DNA
tgcacgaacaatgggaataga

SEQ ID NO: 7179 - DNA, 21 bp, synthetic construct
  source 1..21: mol_type = other DNA; mol_type = other DNA
aaaaacaattgtacattcggc

SEQ ID NO: 7180 - DNA, 21 bp, synthetic construct
  source 1..21: mol_type = other DNA; mol_type = other DNA
tggcccccgcctgttaattcc

SEQ ID NO: 7181 - DNA, 21 bp, synthetic construct
  source 1..21: mol_type = other DNA; mol_type = other DNA
atgtacagccaacatgagtgt

SEQ ID NO: 7182 - DNA, 21 bp, synthetic construct
  source 1..21: mol_type = other DNA; mol_type = other DNA
aatacgtgggcgcgagattat

SEQ ID NO: 7183 - DNA, 21 bp, synthetic construct
  source 1..21: mol_type = other DNA; mol_type = other DNA
agactgtttaatactatccaa

SEQ ID NO: 7184 - DNA, 21 bp, synthetic construct
  source 1..21: mol_type = other DNA; mol_type = other DNA
atctctgtttgcaagcagcaa

SEQ ID NO: 7185 - DNA, 21 bp, synthetic construct
  source 1..21: mol_type = other DNA; mol_type = other DNA
agaggtgggttctcaccattc

SEQ ID NO: 7186 - DNA, 21 bp, synthetic construct
  source 1..21: mol_type = other DNA; mol_type = other DNA
tgcacgggtaacagttcgaag

SEQ ID NO: 7187 - DNA, 21 bp, synthetic construct
  source 1..21: mol_type = other DNA; mol_type = other DNA
tcgcgactaatgtttgtcgga

SEQ ID NO: 7188 - DNA, 21 bp, synthetic construct
  source 1..21: mol_type = other DNA; mol_type = other DNA
tacagtaaatcaaattgcaat

SEQ ID NO: 7189 - DNA, 21 bp, synthetic construct
  source 1..21: mol_type = other DNA; mol_type = other DNA
cggtgtgacaagattctcaca

SEQ ID NO: 7190 - DNA, 21 bp, synthetic construct
  source 1..21: mol_type = other DNA; mol_type = other DNA
aaggacatgttacgttgggac

SEQ ID NO: 7191 - DNA, 21 bp, synthetic construct
  source 1..21: mol_type = other DNA; mol_type = other DNA
ctttggaaaaccggtcacaat

SEQ ID NO: 7192 - DNA, 21 bp, synthetic construct
  source 1..21: mol_type = other DNA; mol_type = other DNA
tcgcgatacacatactctgag

SEQ ID NO: 7193 - DNA, 21 bp, synthetic construct
  source 1..21: mol_type = other DNA; mol_type = other DNA
tgtaatccaagtgtgtatagg

SEQ ID NO: 7194 - DNA, 21 bp, synthetic construct
  source 1..21: mol_type = other DNA; mol_type = other DNA
tttaattattcgacgctaccg

SEQ ID NO: 7195 - DNA, 21 bp, synthetic construct
  source 1..21: mol_type = other DNA; mol_type = other DNA
aagccatacatcctgcacaag

SEQ ID NO: 7196 - DNA, 21 bp, synthetic construct
  source 1..21: mol_type = other DNA; mol_type = other DNA
aaagctatgtgtggatcgggc

SEQ ID NO: 7197 - DNA, 21 bp, synthetic construct
  source 1..21: mol_type = other DNA; mol_type = other DNA
ggatgtcaagccggaatgaag

SEQ ID NO: 7198 - DNA, 21 bp, synthetic construct
  source 1..21: mol_type = other DNA; mol_type = other DNA
gctcgtgggcagttaccgtgg

SEQ ID NO: 7199 - DNA, 21 bp, synthetic construct
  source 1..21: mol_type = other DNA; mol_type = other DNA
ctagactgcgaacggtatcag

SEQ ID NO: 7200 - DNA, 21 bp, synthetic construct
  source 1..21: mol_type = other DNA; mol_type = other DNA
tactttgaaaaaatttgcgag

SEQ ID NO: 7201 - DNA, 21 bp, synthetic construct
  source 1..21: mol_type = other DNA; mol_type = other DNA
aataggaaatcgcagtcggtc

SEQ ID NO: 7202 - DNA, 21 bp, synthetic construct
  source 1..21: mol_type = other DNA; mol_type = other DNA
aagtatttcaataccttcccc

SEQ ID NO: 7203 - DNA, 21 bp, synthetic construct
  source 1..21: mol_type = other DNA; mol_type = other DNA
taccataaaatgcaatgcaat

SEQ ID NO: 7204 - DNA, 21 bp, synthetic construct
  source 1..21: mol_type = other DNA; mol_type = other DNA
atacataggttcacgacaaat

SEQ ID NO: 7205 - DNA, 21 bp, synthetic construct
  source 1..21: mol_type = other DNA; mol_type = other DNA
acttgccaacgcctaagcgga

SEQ ID NO: 7206 - DNA, 21 bp, synthetic construct
  source 1..21: mol_type = other DNA; mol_type = other DNA
agtagattaatgttcgtaggc

SEQ ID NO: 7207 - DNA, 21 bp, synthetic construct
  source 1..21: mol_type = other DNA; mol_type = other DNA
cgtaccgattgtgtctacccg

SEQ ID NO: 7208 - DNA, 21 bp, synthetic construct
  source 1..21: mol_type = other DNA; mol_type = other DNA
tatgcaaggcaaaacttcaat

SEQ ID NO: 7209 - DNA, 21 bp, synthetic construct
  source 1..21: mol_type = other DNA; mol_type = other DNA
aactacattaaagctaattgc

SEQ ID NO: 7210 - DNA, 21 bp, synthetic construct
  source 1..21: mol_type = other DNA
cgcaatcaggagtgtgagagt

SEQ ID NO: 7211 - DNA, 21 bp, synthetic construct
  source 1..21: mol_type = other DNA; mol_type = other DNA
caaaacacgaaatgggcgtgt

SEQ ID NO: 7212 - DNA, 21 bp, synthetic construct
  source 1..21: mol_type = other DNA; mol_type = other DNA
cctcgtcccaatgtatactcg

SEQ ID NO: 7213 - DNA, 21 bp, synthetic construct
  source 1..21: mol_type = other DNA; mol_type = other DNA
tactacacaggtcgtactaat

SEQ ID NO: 7214 - DNA, 21 bp, synthetic construct
  source 1..21: mol_type = other DNA; mol_type = other DNA
aattgcaaaccatgttttgac

SEQ ID NO: 7215 - DNA, 21 bp, synthetic construct
  source 1..21: mol_type = other DNA; mol_type = other DNA
ttctcaaagatgaatataaac

SEQ ID NO: 7216 - DNA, 21 bp, synthetic construct
  source 1..21: mol_type = other DNA; mol_type = other DNA
tattcaaagatgaatcagaac

SEQ ID NO: 7217 - DNA, 21 bp, synthetic construct
  source 1..21: mol_type = other DNA; mol_type = other DNA
tacgccaaaagtaattacaat

SEQ ID NO: 7218 - DNA, 21 bp, synthetic construct
  source 1..21: mol_type = other DNA; mol_type = other DNA
catgaaacatgtgtcagaggg

SEQ ID NO: 7219 - DNA, 21 bp, synthetic construct
  source 1..21: mol_type = other DNA; mol_type = other DNA
gtttactgggttggagaagtg

SEQ ID NO: 7220 - DNA, 21 bp, synthetic construct
  source 1..21: mol_type = other DNA; mol_type = other DNA
gtgagtgcatacagaggagct

SEQ ID NO: 7221 - DNA, 21 bp, synthetic construct
  source 1..21: mol_type = other DNA; mol_type = other DNA
tattctaaatcaggtgacaac

SEQ ID NO: 7222 - DNA, 21 bp, synthetic construct
  source 1..21: mol_type = other DNA; mol_type = other DNA
acaaatgaattttatggctgg

SEQ ID NO: 7223 - DNA, 21 bp, synthetic construct
  source 1..21: mol_type = other DNA; mol_type = other DNA
tgcttgagaacggatattgcc

SEQ ID NO: 7224 - DNA, 21 bp, synthetic construct
  source 1..21: mol_type = other DNA; mol_type = other DNA
ccttgcggaccgtgcacgtac

SEQ ID NO: 7225 - DNA, 21 bp, synthetic construct
  source 1..21: mol_type = other DNA; mol_type = other DNA
gggcgcatggcggtaagggta

SEQ ID NO: 7226 - DNA, 21 bp, synthetic construct
  source 1..21: mol_type = other DNA; mol_type = other DNA
cgggtttccgattactcgtgg

SEQ ID NO: 7227 - DNA, 21 bp, synthetic construct
  source 1..21: mol_type = other DNA; mol_type = other DNA
cacaatggtttctggaccggt

SEQ ID NO: 7228 - DNA, 21 bp, synthetic construct
  source 1..21: mol_type = other DNA; mol_type = other DNA
atggagatagaccccattttt

SEQ ID NO: 7229 - DNA, 21 bp, synthetic construct
  source 1..21: mol_type = other DNA; mol_type = other DNA
aattacgtcaagtcgacgtgc

SEQ ID NO: 7230 - DNA, 21 bp, synthetic construct
  source 1..21: mol_type = other DNA; mol_type = other DNA
tacttcagcggaaaaacgctg

SEQ ID NO: 7231 - DNA, 21 bp, synthetic construct
  source 1..21: mol_type = other DNA; mol_type = other DNA
tatagtaagacgggagacaac

SEQ ID NO: 7232 - DNA, 21 bp, synthetic construct
  source 1..21: mol_type = other DNA; mol_type = other DNA
aaatacgaccacctcggatcc

SEQ ID NO: 7233 - DNA, 21 bp, synthetic construct
  source 1..21: mol_type = other DNA; mol_type = other DNA
ggtaatacggggatctgctac

SEQ ID NO: 7234 - DNA, 21 bp, synthetic construct
  source 1..21: mol_type = other DNA; mol_type = other DNA
gacaagtacttgaatacctgc

SEQ ID NO: 7235 - DNA, 21 bp, synthetic construct
  source 1..21: mol_type = other DNA; mol_type = other DNA
ttgtgtcgcccgtgtagggag

SEQ ID NO: 7236 - DNA, 21 bp, synthetic construct
  source 1..21: mol_type = other DNA; mol_type = other DNA
tggcacagattatccgtaaac

SEQ ID NO: 7237 - DNA, 21 bp, synthetic construct
  source 1..21: mol_type = other DNA; mol_type = other DNA
gctggagtggcaacatatagc

SEQ ID NO: 7238 - DNA, 21 bp, synthetic construct
  source 1..21: mol_type = other DNA; mol_type = other DNA
agcaacatgtacgactcgtac

SEQ ID NO: 7239 - DNA, 21 bp, synthetic construct
  source 1..21: mol_type = other DNA; mol_type = other DNA
ttggcgtataatgtatcgaca

SEQ ID NO: 7240 - DNA, 21 bp, synthetic construct
  source 1..21: mol_type = other DNA; mol_type = other DNA
tatagcggccaagggtgcgta

SEQ ID NO: 7241 - DNA, 21 bp, synthetic construct
  source 1..21: mol_type = other DNA; mol_type = other DNA
aaatccccgtatgctacgttt

SEQ ID NO: 7242 - DNA, 21 bp, synthetic construct
  source 1..21: mol_type = other DNA; mol_type = other DNA
atttgtcgtggctacaccagt

SEQ ID NO: 7243 - DNA, 21 bp, synthetic construct
  source 1..21: mol_type = other DNA; mol_type = other DNA
tgtaacggcttttattgtgaa

SEQ ID NO: 7244 - DNA, 21 bp, synthetic construct
  source 1..21: mol_type = other DNA; mol_type = other DNA
tgcaatggcgaggcggcatct

SEQ ID NO: 7245 - DNA, 21 bp, synthetic construct
  source 1..21: mol_type = other DNA; mol_type = other DNA
ctagcatacaacgtttccacg

SEQ ID NO: 7246 - DNA, 21 bp, synthetic construct
  source 1..21: mol_type = other DNA; mol_type = other DNA
aacagttgtaacatgacgcgt

SEQ ID NO: 7247 - DNA, 21 bp, synthetic construct
  source 1..21: mol_type = other DNA; mol_type = other DNA
caaagcgtttgcaccacaaaa

SEQ ID NO: 7248 - DNA, 21 bp, synthetic construct
  source 1..21: mol_type = other DNA; mol_type = other DNA
gcaggtgtagccacgtactca

SEQ ID NO: 7249 - DNA, 21 bp, synthetic construct
  source 1..21: mol_type = other DNA; mol_type = other DNA
cagacggactgtgtaaaccaa

SEQ ID NO: 7250 - DNA, 21 bp, synthetic construct
  source 1..21: mol_type = other DNA; mol_type = other DNA
tgcgtcgcgacaaaagatcgt

SEQ ID NO: 7251 - DNA, 21 bp, synthetic construct
  source 1..21: mol_type = other DNA; mol_type = other DNA
ttctcgaaaatgaattacaac

SEQ ID NO: 7252 - DNA, 21 bp, synthetic construct
  source 1..21: mol_type = other DNA; mol_type = other DNA
acaatggtagaatcctgtcga

SEQ ID NO: 7253 - DNA, 21 bp, synthetic construct
  source 1..21: mol_type = other DNA; mol_type = other DNA
acacatcaggactggtcgtct

SEQ ID NO: 7254 - DNA, 21 bp, synthetic construct
  source 1..21: mol_type = other DNA; mol_type = other DNA
tgcaataactcagggtattcg

SEQ ID NO: 7255 - DNA, 21 bp, synthetic construct
  source 1..21: mol_type = other DNA; mol_type = other DNA
tgcgatggaacaggtaggagg

SEQ ID NO: 7256 - DNA, 21 bp, synthetic construct
  source 1..21: mol_type = other DNA; mol_type = other DNA
cataaatgcggagatacccgt

SEQ ID NO: 7257 - DNA, 21 bp, synthetic construct
  source 1..21: mol_type = other DNA; mol_type = other DNA
tcgtgccgaatctcggaaaag

SEQ ID NO: 7258 - DNA, 21 bp, synthetic construct
  source 1..21: mol_type = other DNA; mol_type = other DNA
agcgcctgtaatgtgaagcat

SEQ ID NO: 7259 - DNA, 21 bp, synthetic construct
  source 1..21: mol_type = other DNA; mol_type = other DNA
tcagccgcccaagtttggccg

SEQ ID NO: 7260 - DNA, 21 bp, synthetic construct
  source 1..21: mol_type = other DNA; mol_type = other DNA
taccacagggctcaaatgaat

SEQ ID NO: 7261 - DNA, 21 bp, synthetic construct
  source 1..21: mol_type = other DNA; mol_type = other DNA
tggtgccgagaatgcatgaac

SEQ ID NO: 7262 - DNA, 21 bp, synthetic construct
  source 1..21: mol_type = other DNA; mol_type = other DNA
tcaagatatacttattcagaa

SEQ ID NO: 7263 - DNA, 21 bp, synthetic construct
  source 1..21: mol_type = other DNA; mol_type = other DNA
cataataagtactcgaattat

SEQ ID NO: 7264 - DNA, 21 bp, synthetic construct
  source 1..21: mol_type = other DNA; mol_type = other DNA
acttacgctagcagcaactgg

SEQ ID NO: 7265 - DNA, 21 bp, synthetic construct
  source 1..21: mol_type = other DNA; mol_type = other DNA
tatgtccgctcaggcgattgt

SEQ ID NO: 7266 - DNA, 21 bp, synthetic construct
  source 1..21: mol_type = other DNA; mol_type = other DNA
acacaatgtaaggaacattat

SEQ ID NO: 7267 - DNA, 21 bp, synthetic construct
  source 1..21: mol_type = other DNA; mol_type = other DNA
ttgtatataaaatccgcactt

SEQ ID NO: 7268 - DNA, 21 bp, synthetic construct
  source 1..21: mol_type = other DNA; mol_type = other DNA
acatatgcaagttctaattgg

SEQ ID NO: 7269 - DNA, 21 bp, synthetic construct
  source 1..21: mol_type = other DNA; mol_type = other DNA
aattcatccgcctgtcggaca

SEQ ID NO: 7270 - DNA, 21 bp, synthetic construct
  source 1..21: mol_type = other DNA; mol_type = other DNA
gctaagtcggtcttccagtct

SEQ ID NO: 7271 - DNA, 21 bp, synthetic construct
  source 1..21: mol_type = other DNA; mol_type = other DNA
aatactatgtggctcaaccct

SEQ ID NO: 7272 - DNA, 21 bp, synthetic construct
  source 1..21: mol_type = other DNA; mol_type = other DNA
aaagatatgcttaggtgggat

SEQ ID NO: 7273 - DNA, 21 bp, synthetic construct
  source 1..21: mol_type = other DNA; mol_type = other DNA
tatgccaagcaggggcacaac

SEQ ID NO: 7274 - DNA, 21 bp, synthetic construct
  source 1..21: mol_type = other DNA; mol_type = other DNA
tatgcccggggtggagtaaac

SEQ ID NO: 7275 - DNA, 21 bp, synthetic construct
  source 1..21: mol_type = other DNA; mol_type = other DNA
taccataaaggcaacaataac

SEQ ID NO: 7276 - DNA, 21 bp, synthetic construct
  source 1..21: mol_type = other DNA; mol_type = other DNA
cgtgttacccactgcacgggc

SEQ ID NO: 7277 - DNA, 21 bp, synthetic construct
  source 1..21: mol_type = other DNA; mol_type = other DNA
ggggaaacaaactggcgcttt

SEQ ID NO: 7278 - DNA, 21 bp, synthetic construct
  source 1..21: mol_type = other DNA; mol_type = other DNA
aagtatgatcatttaggttct

SEQ ID NO: 7279 - DNA, 21 bp, synthetic construct
  source 1..21: mol_type = other DNA; mol_type = other DNA
aatgggtggggctacggtccc

SEQ ID NO: 7280 - DNA, 21 bp, synthetic construct
  source 1..21: mol_type = other DNA; mol_type = other DNA
acaaacactatccgttggcct

SEQ ID NO: 7281 - DNA, 21 bp, synthetic construct
  source 1..21: mol_type = other DNA; mol_type = other DNA
gtgcgtggagcaacctgcgag

SEQ ID NO: 7282 - DNA, 21 bp, synthetic construct
  source 1..21: mol_type = other DNA; mol_type = other DNA
atccaccgaatgatggttaat

SEQ ID NO: 7283 - DNA, 21 bp, synthetic construct
  source 1..21: mol_type = other DNA; mol_type = other DNA
ctcgtacggggccttaactgg

SEQ ID NO: 7284 - DNA, 21 bp, synthetic construct
  source 1..21: mol_type = other DNA; mol_type = other DNA
tttgctcggtccggtatgaat

SEQ ID NO: 7285 - DNA, 21 bp, synthetic construct
  source 1..21: mol_type = other DNA; mol_type = other DNA
tatggggccggaacttggcac

SEQ ID NO: 7286 - DNA, 21 bp, synthetic construct
  source 1..21: mol_type = other DNA; mol_type = other DNA
ggcatgcgtatacgtgagaaa

SEQ ID NO: 7287 - DNA, 21 bp, synthetic construct
  source 1..21: mol_type = other DNA; mol_type = other DNA
tacgctcgacagaattttaac

SEQ ID NO: 7288 - DNA, 21 bp, synthetic construct
  source 1..21: mol_type = other DNA; mol_type = other DNA
tccggctggctgaccgaggtt

SEQ ID NO: 7289 - DNA, 21 bp, synthetic construct
  source 1..21: mol_type = other DNA; mol_type = other DNA
atacatcggatgatggtaaac

SEQ ID NO: 7290 - DNA, 21 bp, synthetic construct
  source 1..21: mol_type = other DNA; mol_type = other DNA
actagccgttttgatacttat

SEQ ID NO: 7291 - DNA, 21 bp, synthetic construct
  source 1..21: mol_type = other DNA; mol_type = other DNA
aaagtttacggttacaatccg

SEQ ID NO: 7292 - DNA, 21 bp, synthetic construct
  source 1..21: mol_type = other DNA; mol_type = other DNA
tattctcggataaacacgaac

SEQ ID NO: 7293 - DNA, 21 bp, synthetic construct
  source 1..21: mol_type = other DNA; mol_type = other DNA
cttcgaatgtgggacgaagcg

SEQ ID NO: 7294 - DNA, 21 bp, synthetic construct
  source 1..21: mol_type = other DNA; mol_type = other DNA
tgtggcgtagacaaatcaaga

SEQ ID NO: 7295 - DNA, 21 bp, synthetic construct
  source 1..21: mol_type = other DNA; mol_type = other DNA
acgtggaagggtcctccttgc

SEQ ID NO: 7296 - DNA, 21 bp, synthetic construct
  source 1..21: mol_type = other DNA; mol_type = other DNA
tcatattcgaatccgtggatt

SEQ ID NO: 7297 - DNA, 21 bp, synthetic construct
  source 1..21: mol_type = other DNA; mol_type = other DNA
tacgctcgacagaactacaac

SEQ ID NO: 7298 - DNA, 21 bp, synthetic construct
  source 1..21: mol_type = other DNA; mol_type = other DNA
tatcacattttagggaaaaat

SEQ ID NO: 7299 - DNA, 21 bp, synthetic construct
  source 1..21: mol_type = other DNA; mol_type = other DNA
ttctccaggatgggaccaaat

SEQ ID NO: 7300 - DNA, 21 bp, synthetic construct
  source 1..21: mol_type = other DNA; mol_type = other DNA
aagggaaattggtactccgaa

SEQ ID NO: 7301 - DNA, 21 bp, synthetic construct
  source 1..21: mol_type = other DNA; mol_type = other DNA
aataagaactgggttatcggt

SEQ ID NO: 7302 - DNA, 21 bp, synthetic construct
  source 1..21: mol_type = other DNA; mol_type = other DNA
tatgcgaagtcaaactataac

SEQ ID NO: 7303 - DNA, 21 bp, synthetic construct
  source 1..21: mol_type = other DNA; mol_type = other DNA
ttcggtctgtccgatcggtgg

SEQ ID NO: 7304 - DNA, 21 bp, synthetic construct
  source 1..21: mol_type = other DNA; mol_type = other DNA
gtttgttcgtcaaacctagtc

SEQ ID NO: 7305 - DNA, 21 bp, synthetic construct
  source 1..21: mol_type = other DNA; mol_type = other DNA
ataagcaacaaacattggtcg

SEQ ID NO: 7306 - DNA, 21 bp, synthetic construct
  source 1..21: mol_type = other DNA; mol_type = other DNA
ctcaggatgtgggatgaggcc

SEQ ID NO: 7307 - DNA, 21 bp, synthetic construct
  source 1..21: mol_type = other DNA; mol_type = other DNA
cggcacccaagtctcaacttc

SEQ ID NO: 7308 - DNA, 21 bp, synthetic construct
  source 1..21: mol_type = other DNA; mol_type = other DNA
tgccagagtgaggggcgaact

SEQ ID NO: 7309 - DNA, 21 bp, synthetic construct
  source 1..21: mol_type = other DNA; mol_type = other DNA
atttactacaaagggaatctt

SEQ ID NO: 7310 - DNA, 21 bp, synthetic construct
  source 1..21: mol_type = other DNA; mol_type = other DNA
aagcaaccggtgtggttagca

SEQ ID NO: 7311 - DNA, 21 bp, synthetic construct
  source 1..21: mol_type = other DNA; mol_type = other DNA
actatggtggagtcttgccgg

SEQ ID NO: 7312 - DNA, 21 bp, synthetic construct
  source 1..21: mol_type = other DNA; mol_type = other DNA
tactttactcggcaggttaac

SEQ ID NO: 7313 - DNA, 21 bp, synthetic construct
  source 1..21: mol_type = other DNA; mol_type = other DNA
tgcaacaaaacttcggtaact

SEQ ID NO: 7314 - DNA, 21 bp, synthetic construct
  source 1..21: mol_type = other DNA; mol_type = other DNA
tgtcgctggtcagattgttca

SEQ ID NO: 7315 - DNA, 21 bp, synthetic construct
  source 1..21: mol_type = other DNA; mol_type = other DNA
tacgcgcgatcagattgctgt

SEQ ID NO: 7316 - DNA, 21 bp, synthetic construct
  source 1..21: mol_type = other DNA; mol_type = other DNA
ggatcgacatattctcgtgcc

SEQ ID NO: 7317 - DNA, 21 bp, synthetic construct
  source 1..21: mol_type = other DNA; mol_type = other DNA
cgtggcaacgagtgctggtct

SEQ ID NO: 7318 - DNA, 21 bp, synthetic construct
  source 1..21: mol_type = other DNA; mol_type = other DNA
agttgcaagtcatcatacacc

SEQ ID NO: 7319 - DNA, 21 bp, synthetic construct
  source 1..21: mol_type = other DNA; mol_type = other DNA
ttacacaagagtacatgcgat

SEQ ID NO: 7320 - DNA, 21 bp, synthetic construct
  source 1..21: mol_type = other DNA; mol_type = other DNA
gtgtatagtcgcatcgatatt

SEQ ID NO: 7321 - DNA, 21 bp, synthetic construct
  source 1..21: mol_type = other DNA; mol_type = other DNA
cggattaaattcgatacctac

SEQ ID NO: 7322 - DNA, 21 bp, synthetic construct
  source 1..21: mol_type = other DNA; mol_type = other DNA
aaagggaactggtatagtgag

SEQ ID NO: 7323 - DNA, 21 bp, synthetic construct
  source 1..21: mol_type = other DNA; mol_type = other DNA
aacttaggatggcttaagcct

SEQ ID NO: 7324 - DNA, 21 bp, synthetic construct
  source 1..21: mol_type = other DNA; mol_type = other DNA
gtaaggtatacggatagtaaa

SEQ ID NO: 7325 - DNA, 21 bp, synthetic construct
  source 1..21: mol_type = other DNA; mol_type = other DNA
ctgtggagaaacgataaccaa

SEQ ID NO: 7326 - DNA, 21 bp, synthetic construct
  source 1..21: mol_type = other DNA; mol_type = other DNA
aagcatcacgatgttaattgc

SEQ ID NO: 7327 - DNA, 21 bp, synthetic construct
  source 1..21: mol_type = other DNA; mol_type = other DNA
gacatgccgaactggtcgtgg

SEQ ID NO: 7328 - DNA, 21 bp, synthetic construct
  source 1..21: mol_type = other DNA; mol_type = other DNA
aataaatcctgtagttctatg

SEQ ID NO: 7329 - DNA, 21 bp, synthetic construct
  source 1..21: mol_type = other DNA; mol_type = other DNA
atgagtcggtttgatatccac

SEQ ID NO: 7330 - DNA, 21 bp, synthetic construct
  source 1..21: mol_type = other DNA; mol_type = other DNA
ggtatgcgcattcgagaaaag

SEQ ID NO: 7331 - DNA, 21 bp, synthetic construct
  source 1..21: mol_type = other DNA; mol_type = other DNA
gggatagcaccgtgtggcagt

SEQ ID NO: 7332 - DNA, 21 bp, synthetic construct
  source 1..21: mol_type = other DNA; mol_type = other DNA
cgaaatgtgtacgacggttat

SEQ ID NO: 7333 - DNA, 21 bp, synthetic construct
  source 1..21: mol_type = other DNA; mol_type = other DNA
agccgttttgtatcatgggac

SEQ ID NO: 7334 - DNA, 21 bp, synthetic construct
  source 1..21: mol_type = other DNA; mol_type = other DNA
tacgctcgaggcggcgtcaat

SEQ ID NO: 7335 - DNA, 21 bp, synthetic construct
  source 1..21: mol_type = other DNA; mol_type = other DNA
aatcgaatcgacgcaaaatgc

SEQ ID NO: 7336 - DNA, 21 bp, synthetic construct
  source 1..21: mol_type = other DNA; mol_type = other DNA
accgggtgcatggccggcaaa

SEQ ID NO: 7337 - DNA, 21 bp, synthetic construct
  source 1..21: mol_type = other DNA; mol_type = other DNA
tcggcaccaatttacttcaac

SEQ ID NO: 7338 - DNA, 21 bp, synthetic construct
  source 1..21: mol_type = other DNA; mol_type = other DNA
gccagctgcaatgggctacgg

SEQ ID NO: 7339 - DNA, 21 bp, synthetic construct
  source 1..21: mol_type = other DNA; mol_type = other DNA
tacgcgaaaggaaacgcgaac

SEQ ID NO: 7340 - DNA, 21 bp, synthetic construct
  source 1..21: mol_type = other DNA; mol_type = other DNA
gtttcaactaacaacccttgc

SEQ ID NO: 7341 - DNA, 21 bp, synthetic construct
  source 1..21: mol_type = other DNA; mol_type = other DNA
cgggatatctggcgtgacgct

SEQ ID NO: 7342 - DNA, 21 bp, synthetic construct
  source 1..21: mol_type = other DNA; mol_type = other DNA
tccccctgttcgacgggtaat

SEQ ID NO: 7343 - DNA, 21 bp, synthetic construct
  source 1..21: mol_type = other DNA; mol_type = other DNA
aataattgcgcggacaatttc

SEQ ID NO: 7344 - DNA, 21 bp, synthetic construct
  source 1..21: mol_type = other DNA; mol_type = other DNA
tttagtcgtatgggccccaac

SEQ ID NO: 7345 - DNA, 21 bp, synthetic construct
  source 1..21: mol_type = other DNA; mol_type = other DNA
ggtggatggaatcacctagtt

SEQ ID NO: 7346 - DNA, 21 bp, synthetic construct
  source 1..21: mol_type = other DNA; mol_type = other DNA
aaaaatgtgggccgtaacaac

SEQ ID NO: 7347 - DNA, 21 bp, synthetic construct
  source 1..21: mol_type = other DNA; mol_type = other DNA
aatcgtgcacgcaacgtatca

SEQ ID NO: 7348 - DNA, 21 bp, synthetic construct
  source 1..21: mol_type = other DNA; mol_type = other DNA
gcaaactgtgacgtcgtagac

SEQ ID NO: 7349 - DNA, 21 bp, synthetic construct
  source 1..21: mol_type = other DNA; mol_type = other DNA
tcgtgcgattctggtaaagca

SEQ ID NO: 7350 - DNA, 21 bp, synthetic construct
  source 1..21: mol_type = other DNA; mol_type = other DNA
aagtggaggggagatgagtca

SEQ ID NO: 7351 - DNA, 21 bp, synthetic construct
  source 1..21: mol_type = other DNA; mol_type = other DNA
atttatggaagagtgattaac

SEQ ID NO: 7352 - DNA, 21 bp, synthetic construct
  source 1..21: mol_type = other DNA; mol_type = other DNA
tatgctcggcagaatgcaaat

SEQ ID NO: 7353 - DNA, 21 bp, synthetic construct
  source 1..21: mol_type = other DNA; mol_type = other DNA
atgttagagtactacaataac

SEQ ID NO: 7354 - DNA, 21 bp, synthetic construct
  source 1..21: mol_type = other DNA; mol_type = other DNA
tctcaaaatgcgtacgctatg

SEQ ID NO: 7355 - DNA, 21 bp, synthetic construct
  source 1..21: mol_type = other DNA; mol_type = other DNA
tctctgtgcccgagactttcg

SEQ ID NO: 7356 - DNA, 21 bp, synthetic construct
  source 1..21: mol_type = other DNA; mol_type = other DNA
taccttaattgcatgaaaccc

SEQ ID NO: 7357 - DNA, 21 bp, synthetic construct
  source 1..21: mol_type = other DNA; mol_type = other DNA
ggcatgataaagccaacccgg

SEQ ID NO: 7358 - DNA, 21 bp, synthetic construct
  source 1..21: mol_type = other DNA; mol_type = other DNA
aggacttatgatacctatata

SEQ ID NO: 7359 - DNA, 21 bp, synthetic construct
  source 1..21: mol_type = other DNA; mol_type = other DNA
tactcccgtgttgatgatcgc

SEQ ID NO: 7360 - DNA, 21 bp, synthetic construct
  source 1..21: mol_type = other DNA; mol_type = other DNA
gagtggatgagacccggacaa

SEQ ID NO: 7361 - DNA, 21 bp, synthetic construct
  source 1..21: mol_type = other DNA; mol_type = other DNA
agcaactggcgaacagacctt

SEQ ID NO: 7362 - DNA, 21 bp, synthetic construct
  source 1..21: mol_type = other DNA; mol_type = other DNA
gagcatatgtggcacactgag

SEQ ID NO: 7363 - DNA, 21 bp, synthetic construct
  source 1..21: mol_type = other DNA; mol_type = other DNA
tgcgtgtatgcaataggctcc

SEQ ID NO: 7364 - DNA, 21 bp, synthetic construct
  source 1..21: mol_type = other DNA; mol_type = other DNA
tccatatgtgccaacggtgaa

SEQ ID NO: 7365 - DNA, 21 bp, synthetic construct
  source 1..21: mol_type = other DNA; mol_type = other DNA
aaccctcatacttgcaataac

SEQ ID NO: 7366 - DNA, 21 bp, synthetic construct
  source 1..21: mol_type = other DNA; mol_type = other DNA
gacaggccgatatattactcg

SEQ ID NO: 7367 - DNA, 21 bp, synthetic construct
  source 1..21: mol_type = other DNA; mol_type = other DNA
gtatgctcatcgaatttggtg

SEQ ID NO: 7368 - DNA, 21 bp, synthetic construct
  source 1..21: mol_type = other DNA; mol_type = other DNA
aacactcaatttacgtgtgtc

SEQ ID NO: 7369 - DNA, 21 bp, synthetic construct
  source 1..21: mol_type = other DNA; mol_type = other DNA
gaacggaatagctgtatgcat

SEQ ID NO: 7370 - DNA, 21 bp, synthetic construct
  source 1..21: mol_type = other DNA; mol_type = other DNA
cagaataccaagtgggcttgc

SEQ ID NO: 7371 - DNA, 21 bp, synthetic construct
  source 1..21: mol_type = other DNA; mol_type = other DNA
acgtacactcggctagtaaat

SEQ ID NO: 7372 - DNA, 21 bp, synthetic construct
  source 1..21: mol_type = other DNA; mol_type = other DNA
atagtcggagaagcttggccg

SEQ ID NO: 7373 - DNA, 21 bp, synthetic construct
  source 1..21: mol_type = other DNA; mol_type = other DNA
agggtgagcgactattcctgg

SEQ ID NO: 7374 - DNA, 21 bp, synthetic construct
  source 1..21: mol_type = other DNA; mol_type = other DNA
attcaccgatttaccactaac

SEQ ID NO: 7375 - DNA, 21 bp, synthetic construct
  source 1..21: mol_type = other DNA; mol_type = other DNA
ctctcaaaattgtcttgtaac

SEQ ID NO: 7376 - DNA, 21 bp, synthetic construct
  source 1..21: mol_type = other DNA; mol_type = other DNA
tattcgaggaccaacacaaac

SEQ ID NO: 7377 - DNA, 21 bp, synthetic construct
  source 1..21: mol_type = other DNA; mol_type = other DNA
tgcgtaaatctgattcgtaat

SEQ ID NO: 7378 - DNA, 21 bp, synthetic construct
  source 1..21: mol_type = other DNA; mol_type = other DNA
tggatattccagtcccatacc

SEQ ID NO: 7379 - DNA, 21 bp, synthetic construct
  source 1..21: mol_type = other DNA; mol_type = other DNA
agaaaacccgaggctacccgg

SEQ ID NO: 7380 - DNA, 21 bp, synthetic construct
  source 1..21: mol_type = other DNA; mol_type = other DNA
gtatattgggtcggcgaggtc

SEQ ID NO: 7381 - DNA, 21 bp, synthetic construct
  source 1..21: mol_type = other DNA; mol_type = other DNA
aacaagtcatgctcttcgatg

SEQ ID NO: 7382 - DNA, 21 bp, synthetic construct
  source 1..21: mol_type = other DNA; mol_type = other DNA
tataggccatgtaatgcttca

SEQ ID NO: 7383 - DNA, 21 bp, synthetic construct
  source 1..21: mol_type = other DNA; mol_type = other DNA
ttcgtgtgcgatccttcaaag

SEQ ID NO: 7384 - DNA, 21 bp, synthetic construct
  source 1..21: mol_type = other DNA; mol_type = other DNA
cgcaccccaaattacaattat

SEQ ID NO: 7385 - DNA, 21 bp, synthetic construct
  source 1..21: mol_type = other DNA; mol_type = other DNA
aattatatcaaggcgaactgt

SEQ ID NO: 7386 - DNA, 21 bp, synthetic construct
  source 1..21: mol_type = other DNA; mol_type = other DNA
tacacccgtttgagtatgaac

SEQ ID NO: 7387 - DNA, 21 bp, synthetic construct
  source 1..21: mol_type = other DNA; mol_type = other DNA
gtccccaccagacaatggccg

SEQ ID NO: 7388 - DNA, 21 bp, synthetic construct
  source 1..21: mol_type = other DNA; mol_type = other DNA
ttctctatccgccttggtacc

SEQ ID NO: 7389 - DNA, 21 bp, synthetic construct
  source 1..21: mol_type = other DNA; mol_type = other DNA
tgtgtttacgcgattggtagt

SEQ ID NO: 7390 - DNA, 21 bp, synthetic construct
  source 1..21: mol_type = other DNA; mol_type = other DNA
tgtaagtggatccgtgaggga

SEQ ID NO: 7391 - DNA, 21 bp, synthetic construct
  source 1..21: mol_type = other DNA; mol_type = other DNA
ctctctagaatccagaccaat

SEQ ID NO: 7392 - DNA, 21 bp, synthetic construct
  source 1..21: mol_type = other DNA; mol_type = other DNA
ggctgtaatcgctctaccgcg

SEQ ID NO: 7393 - DNA, 21 bp, synthetic construct
  source 1..21: mol_type = other DNA; mol_type = other DNA
cggacgcccgacagttactgt

SEQ ID NO: 7394 - DNA, 21 bp, synthetic construct
  source 1..21: mol_type = other DNA; mol_type = other DNA
atgtgctctatgaggaacgcg

SEQ ID NO: 7395 - DNA, 21 bp, synthetic construct
  source 1..21: mol_type = other DNA; mol_type = other DNA
tcctacatatatgatggcgac

SEQ ID NO: 7396 - DNA, 21 bp, synthetic construct
  source 1..21: mol_type = other DNA; mol_type = other DNA
tacagccggcaaggcggaaac

SEQ ID NO: 7397 - DNA, 21 bp, synthetic construct
  source 1..21: mol_type = other DNA; mol_type = other DNA
actacgaggtgggcaggccct

SEQ ID NO: 7398 - DNA, 21 bp, synthetic construct
  source 1..21: mol_type = other DNA; mol_type = other DNA
gctatggggtctctttggccg

SEQ ID NO: 7399 - DNA, 21 bp, synthetic construct
  source 1..21: mol_type = other DNA; mol_type = other DNA
agctggacttatgaagagtgc

SEQ ID NO: 7400 - DNA, 21 bp, synthetic construct
  source 1..21: mol_type = other DNA; mol_type = other DNA
tacctgaaatcagagcgcaac

SEQ ID NO: 7401 - DNA, 21 bp, synthetic construct
  source 1..21: mol_type = other DNA; mol_type = other DNA
ggttttattaccgtatatccg

SEQ ID NO: 7402 - DNA, 21 bp, synthetic construct
  source 1..21: mol_type = other DNA; mol_type = other DNA
tcatctaaatactccccgtgg

SEQ ID NO: 7403 - DNA, 21 bp, synthetic construct
  source 1..21: mol_type = other DNA; mol_type = other DNA
caatattataattccgcatca

SEQ ID NO: 7404 - DNA, 21 bp, synthetic construct
  source 1..21: mol_type = other DNA; mol_type = other DNA
tataaggtccttgattggact

SEQ ID NO: 7405 - DNA, 21 bp, synthetic construct
  source 1..21: mol_type = other DNA; mol_type = other DNA
cgctatgactggccgcataac

SEQ ID NO: 7406 - DNA, 21 bp, synthetic construct
  source 1..21: mol_type = other DNA; mol_type = other DNA
aaagtatgttcagcaactgac

SEQ ID NO: 7407 - DNA, 21 bp, synthetic construct
  source 1..21: mol_type = other DNA; mol_type = other DNA
tgtaacggtgaagcagcctca

SEQ ID NO: 7408 - DNA, 21 bp, synthetic construct
  source 1..21: mol_type = other DNA; mol_type = other DNA
atggaatggcaggagaggtat

SEQ ID NO: 7409 - DNA, 21 bp, synthetic construct
  source 1..21: mol_type = other DNA; mol_type = other DNA
tgccgttggtccgactgcagc

SEQ ID NO: 7410 - DNA, 21 bp, synthetic construct
  source 1..21: mol_type = other DNA; mol_type = other DNA
aaagaaaacaacgctaaaaag

SEQ ID NO: 7411 - DNA, 21 bp, synthetic construct
  source 1..21: mol_type = other DNA; mol_type = other DNA
tacttttccggagtacccagt

SEQ ID NO: 7412 - DNA, 21 bp, synthetic construct
  source 1..21: mol_type = other DNA; mol_type = other DNA
tggatcccgggaatggggacg

SEQ ID NO: 7413 - DNA, 21 bp, synthetic construct
  source 1..21: mol_type = other DNA; mol_type = other DNA
ggcccgatcaactgtaagagc

SEQ ID NO: 7414 - DNA, 21 bp, synthetic construct
  source 1..21: mol_type = other DNA; mol_type = other DNA
tacagtggacagggttgtgtc

SEQ ID NO: 7415 - DNA, 21 bp, synthetic construct
  source 1..21: mol_type = other DNA; mol_type = other DNA
acgcaccaagattggtccagt

SEQ ID NO: 7416 - DNA, 21 bp, synthetic construct
  source 1..21: mol_type = other DNA; mol_type = other DNA
aaccgatggaataatcacggc

SEQ ID NO: 7417 - DNA, 21 bp, synthetic construct
  source 1..21: mol_type = other DNA; mol_type = other DNA
ggatggatgaaccgtattgcc

SEQ ID NO: 7418 - DNA, 21 bp, synthetic construct
  source 1..21: mol_type = other DNA; mol_type = other DNA
tggtccacaagggagatgatc

SEQ ID NO: 7419 - DNA, 21 bp, synthetic construct
  source 1..21: mol_type = other DNA; mol_type = other DNA
tattctaagtcgaactgtaac

SEQ ID NO: 7420 - DNA, 21 bp, synthetic construct
  source 1..21: mol_type = other DNA; mol_type = other DNA
aaggtatatggctataaccca

SEQ ID NO: 7421 - DNA, 21 bp, synthetic construct
  source 1..21: mol_type = other DNA; mol_type = other DNA
gggcctattaattgcaaatcg

SEQ ID NO: 7422 - DNA, 21 bp, synthetic construct
  source 1..21: mol_type = other DNA; mol_type = other DNA
tgtgcggttcaaggcgtgaaa

SEQ ID NO: 7423 - DNA, 21 bp, synthetic construct
  source 1..21: mol_type = other DNA; mol_type = other DNA
tattctcgggtgaatctgaac

SEQ ID NO: 7424 - DNA, 21 bp, synthetic construct
  source 1..21: mol_type = other DNA; mol_type = other DNA
acacacaggttgattgtagcc

SEQ ID NO: 7425 - DNA, 21 bp, synthetic construct
  source 1..21: mol_type = other DNA; mol_type = other DNA
tttcataaattgatgtcgaat

SEQ ID NO: 7426 - DNA, 21 bp, synthetic construct
  source 1..21: mol_type = other DNA; mol_type = other DNA
tatagcaaaaagaatgaaaat

SEQ ID NO: 7427 - DNA, 21 bp, synthetic construct
  source 1..21: mol_type = other DNA; mol_type = other DNA
tacttcgccggccaattcagt

SEQ ID NO: 7428 - DNA, 21 bp, synthetic construct
  source 1..21: mol_type = other DNA; mol_type = other DNA
ttttctaaaattggttttaac

SEQ ID NO: 7429 - DNA, 21 bp, synthetic construct
  source 1..21: mol_type = other DNA; mol_type = other DNA
ttcagcaaattgaattccaat

SEQ ID NO: 7430 - DNA, 21 bp, synthetic construct
  source 1..21: mol_type = other DNA; mol_type = other DNA
tactctaagaaaaacgagaac

SEQ ID NO: 7431 - DNA, 21 bp, synthetic construct
  source 1..21: mol_type = other DNA; mol_type = other DNA
catggctcagggaattttgta

SEQ ID NO: 7432 - DNA, 21 bp, synthetic construct
  source 1..21: mol_type = other DNA; mol_type = other DNA
ttaagcaagctcaatgacaat

SEQ ID NO: 7433 - DNA, 21 bp, synthetic construct
  source 1..21: mol_type = other DNA; mol_type = other DNA
ttccacaagctcatgagcaac

SEQ ID NO: 7434 - DNA, 21 bp, synthetic construct
  source 1..21: mol_type = other DNA; mol_type = other DNA
tatttttcagggaagacccta

SEQ ID NO: 7435 - DNA, 21 bp, synthetic construct
  source 1..21: mol_type = other DNA; mol_type = other DNA
ttcagcaagataggcttcaat

SEQ ID NO: 7436 - DNA, 21 bp, synthetic construct
  source 1..21: mol_type = other DNA; mol_type = other DNA
tatgctaaaggtggcctaaac

SEQ ID NO: 7437 - DNA, 21 bp, synthetic construct
  source 1..21: mol_type = other DNA; mol_type = other DNA
tactcacgtgtcaacgtcaac

SEQ ID NO: 7438 - DNA, 21 bp, synthetic construct
  source 1..21: mol_type = other DNA; mol_type = other DNA
ctacatcgattgatagcagat

SEQ ID NO: 7439 - DNA, 21 bp, synthetic construct
  source 1..21: mol_type = other DNA; mol_type = other DNA
tatagtcgagttaatgtaaat

SEQ ID NO: 7440 - DNA, 21 bp, synthetic construct
  source 1..21: mol_type = other DNA; mol_type = other DNA
cgaatgaaggatgtgtatccc

SEQ ID NO: 7441 - DNA, 21 bp, synthetic construct
  source 1..21: mol_type = other DNA; mol_type = other DNA
tacgccaagggcggattaaat

SEQ ID NO: 7442 - DNA, 21 bp, synthetic construct
  source 1..21: mol_type = other DNA; mol_type = other DNA
tacgccaggatgggaataaat

SEQ ID NO: 7443 - DNA, 21 bp, synthetic construct
  source 1..21: mol_type = other DNA; mol_type = other DNA
tactcccgagtaaacctcaat

SEQ ID NO: 7444 - DNA, 21 bp, synthetic construct
  source 1..21: mol_type = other DNA; mol_type = other DNA
ctaagtcgtgtagcgatgaat

SEQ ID NO: 7445 - DNA, 21 bp, synthetic construct
  source 1..21: mol_type = other DNA; mol_type = other DNA
tacttcagcggaaaaacgctg

SEQ ID NO: 7446 - DNA, 21 bp, synthetic construct
  source 1..21: mol_type = other DNA; mol_type = other DNA
tatgtaaaatccaaccacggc

SEQ ID NO: 7447 - DNA, 21 bp, synthetic construct
  source 1..21: mol_type = other DNA; mol_type = other DNA
tacagtaaaatgaaccaaaat

SEQ ID NO: 7448 - DNA, 21 bp, synthetic construct
  source 1..21: mol_type = other DNA; mol_type = other DNA
tatgtcaaaagtgacaatgcg

SEQ ID NO: 7449 - DNA, 21 bp, synthetic construct
  source 1..21: mol_type = other DNA; mol_type = other DNA
tatgctcgcatgggtattaac

SEQ ID NO: 7450 - DNA, 21 bp, synthetic construct
  source 1..21: mol_type = other DNA; mol_type = other DNA
tatgcccggggtggagtaaac

SEQ ID NO: 7451 - DNA, 21 bp, synthetic construct
  source 1..21: mol_type = other DNA; mol_type = other DNA
ttgtctcgagtggctatgaac

SEQ ID NO: 7452 - DNA, 21 bp, synthetic construct
  source 1..21: mol_type = other DNA; mol_type = other DNA
tatgtgaagtcgagtaacaac

SEQ ID NO: 7453 - DNA, 21 bp, synthetic construct
  source 1..21: mol_type = other DNA; mol_type = other DNA
tggtttacggggtacaatgca

SEQ ID NO: 7454 - DNA, 21 bp, synthetic construct
  source 1..21: mol_type = other DNA; mol_type = other DNA
tacgctaaagcgaatttcaac

SEQ ID NO: 7455 - DNA, 21 bp, synthetic construct
  source 1..21: mol_type = other DNA; mol_type = other DNA
ctatctaaactaaacgataac

SEQ ID NO: 7456 - DNA, 21 bp, synthetic construct
  source 1..21: mol_type = other DNA; mol_type = other DNA
cattcccggctgaatgttagt

SEQ ID NO: 7457 - DNA, 21 bp, synthetic construct
  source 1..21: mol_type = other DNA; mol_type = other DNA
ttttctaaaatgaacatcaat

SEQ ID NO: 7458 - DNA, 21 bp, synthetic construct
  source 1..21: mol_type = other DNA; mol_type = other DNA
ttttctaagctaaactcaaac

SEQ ID NO: 7459 - DNA, 21 bp, synthetic construct
  source 1..21: mol_type = other DNA; mol_type = other DNA
tattcacgggtgaacaataac

SEQ ID NO: 7460 - DNA, 21 bp, synthetic construct
  source 1..21: mol_type = other DNA; mol_type = other DNA
atgtctcgaatcggcgttaac

SEQ ID NO: 7461 - DNA, 21 bp, synthetic construct
  source 1..21: mol_type = other DNA; mol_type = other DNA
ttctcaaagatgaatataaac

SEQ ID NO: 7462 - DNA, 21 bp, synthetic construct
  source 1..21: mol_type = other DNA; mol_type = other DNA
tacagcagaattaacgccaac

SEQ ID NO: 7463 - DNA, 21 bp, synthetic construct
  source 1..21: mol_type = other DNA; mol_type = other DNA
tacgcccgacaaaacgcgaac

SEQ ID NO: 7464 - DNA, 21 bp, synthetic construct
  source 1..21: mol_type = other DNA; mol_type = other DNA
tattacacgggagtcaaggga

SEQ ID NO: 7465 - DNA, 21 bp, synthetic construct
  source 1..21: mol_type = other DNA; mol_type = other DNA
tatgcaaaggcaaactttaat

SEQ ID NO: 7466 - DNA, 21 bp, synthetic construct
  source 1..21: mol_type = other DNA; mol_type = other DNA
tacgccaagtttggtccgaac

SEQ ID NO: 7467 - DNA, 21 bp, synthetic construct
  source 1..21: mol_type = other DNA; mol_type = other DNA
ctatccaaagttggtgcaaac

SEQ ID NO: 7468 - DNA, 21 bp, synthetic construct
  source 1..21: mol_type = other DNA; mol_type = other DNA
tacagcagaactaataccaat

SEQ ID NO: 7469 - DNA, 21 bp, synthetic construct
  source 1..21: mol_type = other DNA; mol_type = other DNA
tatgcgaaattcggccccaat

SEQ ID NO: 7470 - DNA, 21 bp, synthetic construct
  source 1..21: mol_type = other DNA; mol_type = other DNA
taccatatacttggaaagaac

SEQ ID NO: 7471 - DNA, 21 bp, synthetic construct
  source 1..21: mol_type = other DNA; mol_type = other DNA
tatgcaaggcaaaacttcaat

SEQ ID NO: 7472 - DNA, 21 bp, synthetic construct
  source 1..21: mol_type = other DNA; mol_type = other DNA
ctagctaggaacgcgagtaat

SEQ ID NO: 7473 - DNA, 21 bp, synthetic construct
  source 1..21: mol_type = other DNA; mol_type = other DNA
aagatggacagccgattatgg

SEQ ID NO: 7474 - DNA, 21 bp, synthetic construct
  source 1..21: mol_type = other DNA; mol_type = other DNA
tttgtcaaatcggacaccaag

SEQ ID NO: 7475 - DNA, 21 bp, synthetic construct
  source 1..21: mol_type = other DNA; mol_type = other DNA
agttatgccaaatcactactg

SEQ ID NO: 7476 - DNA, 21 bp, synthetic construct
  source 1..21: mol_type = other DNA; mol_type = other DNA
tattatcacgggatgctagcc

SEQ ID NO: 7477 - DNA, 21 bp, synthetic construct
  source 1..21: mol_type = other DNA; mol_type = other DNA
tatacaaagagtgactcgaaa

SEQ ID NO: 7478 - DNA, 21 bp, synthetic construct
  source 1..21: mol_type = other DNA; mol_type = other DNA
tacgccaaaagtaattacaat

SEQ ID NO: 7479 - DNA, 21 bp, synthetic construct
  source 1..21: mol_type = other DNA; mol_type = other DNA
cggaaccacgagacgtttccg

SEQ ID NO: 7480 - DNA, 21 bp, synthetic construct
  source 1..21: mol_type = other DNA; mol_type = other DNA
tacagcaagctaggaggtaat

SEQ ID NO: 7481 - DNA, 21 bp, synthetic construct
  source 1..21: mol_type = other DNA; mol_type = other DNA
ttggcacggtcagcagtcaat

SEQ ID NO: 7482 - DNA, 21 bp, synthetic construct
  source 1..21: mol_type = other DNA; mol_type = other DNA
ctccgcagtgaatgttgtgta

SEQ ID NO: 7483 - DNA, 21 bp, synthetic construct
  source 1..21: mol_type = other DNA; mol_type = other DNA
gttgctatgcgcgggattgga

SEQ ID NO: 7484 - DNA, 21 bp, synthetic construct
  source 1..21: mol_type = other DNA; mol_type = other DNA
tatgctaagaatggcgcaaat

SEQ ID NO: 7485 - DNA, 21 bp, synthetic construct
  source 1..21: mol_type = other DNA; mol_type = other DNA
tatgcgaaggctggtcataac

SEQ ID NO: 7486 - DNA, 21 bp, synthetic construct
  source 1..21: mol_type = other DNA; mol_type = other DNA
tacgcaaaaggtaacatgaat

SEQ ID NO: 7487 - DNA, 21 bp, synthetic construct
  source 1..21: mol_type = other DNA; mol_type = other DNA
caattggaggctcgcacttgg

SEQ ID NO: 7488 - DNA, 21 bp, synthetic construct
  source 1..21: mol_type = other DNA; mol_type = other DNA
tacgcaaaaaacggtgcgaac

SEQ ID NO: 7489 - DNA, 21 bp, synthetic construct
  source 1..21: mol_type = other DNA; mol_type = other DNA
tttagtcgaattggggagaat

SEQ ID NO: 7490 - DNA, 21 bp, synthetic construct
  source 1..21: mol_type = other DNA; mol_type = other DNA
tatgccaagcaggggcacaac

SEQ ID NO: 7491 - DNA, 21 bp, synthetic construct
  source 1..21: mol_type = other DNA; mol_type = other DNA
tatgctcggcagaatgcaaat

SEQ ID NO: 7492 - DNA, 21 bp, synthetic construct
  source 1..21: mol_type = other DNA; mol_type = other DNA
ttcagccggataggcgaaaac

SEQ ID NO: 7493 - DNA, 21 bp, synthetic construct
  source 1..21: mol_type = other DNA; mol_type = other DNA
tatgcacgcggtgggcagaac

SEQ ID NO: 7494 - DNA, 21 bp, synthetic construct
  source 1..21: mol_type = other DNA; mol_type = other DNA
ctctcaaaagtagctgtcaat

SEQ ID NO: 7495 - DNA, 21 bp, synthetic construct
  source 1..21: mol_type = other DNA; mol_type = other DNA
ctcgcgcgtagcgcggttaac

SEQ ID NO: 7496 - DNA, 21 bp, synthetic construct
  source 1..21: mol_type = other DNA; mol_type = other DNA
ggaaaatatcctccccaaggc

SEQ ID NO: 7497 - DNA, 21 bp, synthetic construct
  source 1..21: mol_type = other DNA; mol_type = other DNA
aagatgagttctagcacgtgg

SEQ ID NO: 7498 - DNA, 21 bp, synthetic construct
  source 1..21: mol_type = other DNA; mol_type = other DNA
tacaccaaaagcgattctaag

SEQ ID NO: 7499 - DNA, 21 bp, synthetic construct
  source 1..21: mol_type = other DNA; mol_type = other DNA
tattctgcgataggcatgaat

SEQ ID NO: 7500 - DNA, 21 bp, synthetic construct
  source 1..21: mol_type = other DNA; mol_type = other DNA
tatgcgaagtcaaactataac

SEQ ID NO: 7501 - DNA, 21 bp, synthetic construct
  source 1..21: mol_type = other DNA; mol_type = other DNA
tacgcgaaacaaggccataat

SEQ ID NO: 7502 - DNA, 21 bp, synthetic construct
  source 1..21: mol_type = other DNA; mol_type = other DNA
tactctcgtatgaacgccaac

SEQ ID NO: 7503 - DNA, 21 bp, synthetic construct
  source 1..21: mol_type = other DNA; mol_type = other DNA
catagtcgtttaaatctccaa

SEQ ID NO: 7504 - DNA, 21 bp, synthetic construct
  source 1..21: mol_type = other DNA; mol_type = other DNA
tatgcgagagtagggactaat

SEQ ID NO: 7505 - DNA, 21 bp, synthetic construct
  source 1..21: mol_type = other DNA; mol_type = other DNA
aaaatggatagtaggctgtgg

SEQ ID NO: 7506 - DNA, 21 bp, synthetic construct
  source 1..21: mol_type = other DNA; mol_type = other DNA
ttgcaccggcttatcgctgac

SEQ ID NO: 7507 - DNA, 21 bp, synthetic construct
  source 1..21: mol_type = other DNA; mol_type = other DNA
tacgctaaaatggggatgaat

SEQ ID NO: 7508 - DNA, 21 bp, synthetic construct
  source 1..21: mol_type = other DNA; mol_type = other DNA
cactcaagcacaaacggggct

SEQ ID NO: 7509 - DNA, 21 bp, synthetic construct
  source 1..21: mol_type = other DNA; mol_type = other DNA
tactataccggggtaaaaggt

SEQ ID NO: 7510 - DNA, 21 bp, synthetic construct
  source 1..21: mol_type = other DNA; mol_type = other DNA
ttcgctaaacaaggacccaac

SEQ ID NO: 7511 - DNA, 21 bp, synthetic construct
  source 1..21: mol_type = other DNA; mol_type = other DNA
ttctcacgcgttggggaaaac

SEQ ID NO: 7512 - DNA, 21 bp, synthetic construct
  source 1..21: mol_type = other DNA; mol_type = other DNA
tatgctaagggaaatatgaac

SEQ ID NO: 7513 - DNA, 21 bp, synthetic construct
  source 1..21: mol_type = other DNA; mol_type = other DNA
gtgcacaggcttcaggacaaa

SEQ ID NO: 7514 - DNA, 21 bp, synthetic construct
  source 1..21: mol_type = other DNA; mol_type = other DNA
tacagtcgtgttaataacaat

SEQ ID NO: 7515 - DNA, 21 bp, synthetic construct
  source 1..21: mol_type = other DNA; mol_type = other DNA
ttcaaagccgggacttggaat

SEQ ID NO: 7516 - DNA, 21 bp, synthetic construct
  source 1..21: mol_type = other DNA; mol_type = other DNA
tatgccaagatgggtatgaac

SEQ ID NO: 7517 - DNA, 21 bp, synthetic construct
  source 1..21: mol_type = other DNA; mol_type = other DNA
tatagtaagacgggagacaac

SEQ ID NO: 7518 - DNA, 21 bp, synthetic construct
  source 1..21: mol_type = other DNA; mol_type = other DNA
ctgtcccgtattcaaactaac

SEQ ID NO: 7519 - DNA, 21 bp, synthetic construct
  source 1..21: mol_type = other DNA; mol_type = other DNA
aattgcaaaccatgttttgac

SEQ ID NO: 7520 - DNA, 21 bp, synthetic construct
  source 1..21: mol_type = other DNA; mol_type = other DNA
agcttgtgtccccgactatct

SEQ ID NO: 7521 - DNA, 21 bp, synthetic construct
  source 1..21: mol_type = other DNA; mol_type = other DNA
ggcaagtacccgccacagggg

SEQ ID NO: 7522 - DNA, 21 bp, synthetic construct
  source 1..21: mol_type = other DNA; mol_type = other DNA
ttggcccggaatgcctcaaac

SEQ ID NO: 7523 - DNA, 21 bp, synthetic construct
  source 1..21: mol_type = other DNA; mol_type = other DNA
aagatgtcatccgctaactgg

SEQ ID NO: 7524 - DNA, 21 bp, synthetic construct
  source 1..21: mol_type = other DNA; mol_type = other DNA
tacgcgaaaggaaacgcgaac

SEQ ID NO: 7525 - DNA, 21 bp, synthetic construct
  source 1..21: mol_type = other DNA; mol_type = other DNA
ttcagccgcactggcttcaac

SEQ ID NO: 7526 - DNA, 21 bp, synthetic construct
  source 1..21: mol_type = other DNA; mol_type = other DNA
aaaatgtcgagttcaacatgg

SEQ ID NO: 7527 - DNA, 21 bp, synthetic construct
  source 1..21: mol_type = other DNA; mol_type = other DNA
ctctctagaatccagaccaat

SEQ ID NO: 7528 - DNA, 21 bp, synthetic construct
  source 1..21: mol_type = other DNA; mol_type = other DNA
tattctaaaatcaatatcaat

SEQ ID NO: 7529 - DNA, 21 bp, synthetic construct
  source 1..21: mol_type = other DNA; mol_type = other DNA
tatcacaagcactccttgaat

SEQ ID NO: 7530 - DNA, 21 bp, synthetic construct
  source 1..21: mol_type = other DNA; mol_type = other DNA
tactcaaagattaacataaac

SEQ ID NO: 7531 - DNA, 21 bp, synthetic construct
  source 1..21: mol_type = other DNA; mol_type = other DNA
tacagcaaaaccggcgataat

SEQ ID NO: 7532 - DNA, 21 bp, synthetic construct
  source 1..21: mol_type = other DNA; mol_type = other DNA
tacgcccgggttggcaccaac

SEQ ID NO: 7533 - DNA, 21 bp, synthetic construct
  source 1..21: mol_type = other DNA; mol_type = other DNA
tattcgaggaccaacacaaac

SEQ ID NO: 7534 - DNA, 21 bp, synthetic construct
  source 1..21: mol_type = other DNA; mol_type = other DNA
tattcaaagatgaatcagaac

SEQ ID NO: 7535 - DNA, 21 bp, synthetic construct
  source 1..21: mol_type = other DNA; mol_type = other DNA
tacgtcaagagcaatcatgga

SEQ ID NO: 7536 - DNA, 21 bp, synthetic construct
  source 1..21: mol_type = other DNA; mol_type = other DNA
aaaatgagctcgtctgtttgg

SEQ ID NO: 7537 - DNA, 21 bp, synthetic construct
  source 1..21: mol_type = other DNA; mol_type = other DNA
ctacatcggttggccagctcc

SEQ ID NO: 7538 - DNA, 21 bp, synthetic construct
  source 1..21: mol_type = other DNA; mol_type = other DNA
ttatcgaaggtggccgtgaac

SEQ ID NO: 7539 - DNA, 21 bp, synthetic construct
  source 1..21: mol_type = other DNA; mol_type = other DNA
tatttcagcggcgtgccgtcc

SEQ ID NO: 7540 - DNA, 21 bp, synthetic construct
  source 1..21: mol_type = other DNA; mol_type = other DNA
tactcgcgcacaaacccaaac

SEQ ID NO: 7541 - DNA, 21 bp, synthetic construct
  source 1..21: mol_type = other DNA; mol_type = other DNA
agaatgaaagacgtctaccct

SEQ ID NO: 7542 - DNA, 21 bp, synthetic construct
  source 1..21: mol_type = other DNA; mol_type = other DNA
tacgctcgaggcggcgtcaat

SEQ ID NO: 7543 - DNA, 21 bp, synthetic construct
  source 1..21: mol_type = other DNA; mol_type = other DNA
aggaatcatgaaactttccct

SEQ ID NO: 7544 - DNA, 21 bp, synthetic construct
  source 1..21: mol_type = other DNA; mol_type = other DNA
ttttcccggacggggtttaat

SEQ ID NO: 7545 - DNA, 21 bp, synthetic construct
  source 1..21: mol_type = other DNA; mol_type = other DNA
ttttctcgtgtaggcgagaat

SEQ ID NO: 7546 - DNA, 21 bp, synthetic construct
  source 1..21: mol_type = other DNA; mol_type = other DNA
cgagaagacgggctacgttgg

SEQ ID NO: 7547 - DNA, 21 bp, synthetic construct
  source 1..21: mol_type = other DNA; mol_type = other DNA
actagaagtgggctgaacgcg

SEQ ID NO: 7548 - DNA, 21 bp, synthetic construct
  source 1..21: mol_type = other DNA; mol_type = other DNA
tatgccaagggcaatgcaaat

SEQ ID NO: 7549 - DNA, 21 bp, synthetic construct
  source 1..21: mol_type = other DNA; mol_type = other DNA
tatgtaaagaacgacgcgaga

SEQ ID NO: 7550 - DNA, 21 bp, synthetic construct
  source 1..21: mol_type = other DNA; mol_type = other DNA
atcagtgaatacagcaaatgg

SEQ ID NO: 7551 - DNA, 21 bp, synthetic construct
  source 1..21: mol_type = other DNA; mol_type = other DNA
gtggcaatgagaggtatcggc

SEQ ID NO: 7552 - DNA, 21 bp, synthetic construct
  source 1..21: mol_type = other DNA; mol_type = other DNA
tacttttccggagtacccagt

SEQ ID NO: 7553 - DNA, 21 bp, synthetic construct
  source 1..21: mol_type = other DNA; mol_type = other DNA
tatacaaagagcaaccacctg

SEQ ID NO: 7554 - DNA, 21 bp, synthetic construct
  source 1..21: mol_type = other DNA; mol_type = other DNA
gtgtcgagcagtaacggtaga

SEQ ID NO: 7555 - DNA, 21 bp, synthetic construct
  source 1..21: mol_type = other DNA; mol_type = other DNA
tacgctcgacagaattttaac

SEQ ID NO: 7556 - DNA, 21 bp, synthetic construct
  source 1..21: mol_type = other DNA; mol_type = other DNA
tacagcaaagctgggtatgac

SEQ ID NO: 7557 - DNA, 21 bp, synthetic construct
  source 1..21: mol_type = other DNA; mol_type = other DNA
ttagttaggtatgagaacgta

SEQ ID NO: 7558 - DNA, 21 bp, synthetic construct
  source 1..21: mol_type = other DNA; mol_type = other DNA
tatgcgaggttgggaggcaat

SEQ ID NO: 7559 - DNA, 21 bp, synthetic construct
  source 1..21: mol_type = other DNA; mol_type = other DNA
attcaccccactagatatggt

SEQ ID NO: 7560 - DNA, 21 bp, synthetic construct
  source 1..21: mol_type = other DNA; mol_type = other DNA
tttgctcggtccggtatgaat

SEQ ID NO: 7561 - DNA, 21 bp, synthetic construct
  source 1..21: mol_type = other DNA; mol_type = other DNA
ttttccaagttaggaaataac

SEQ ID NO: 7562 - DNA, 21 bp, synthetic construct
  source 1..21: mol_type = other DNA; mol_type = other DNA
tatgcgcggcagaatatgaat

SEQ ID NO: 7563 - DNA, 21 bp, synthetic construct
  source 1..21: mol_type = other DNA; mol_type = other DNA
agggaggatggactcagatgg

SEQ ID NO: 7564 - DNA, 21 bp, synthetic construct
  source 1..21: mol_type = other DNA; mol_type = other DNA
agaaacatgtccgtgtatccc

SEQ ID NO: 7565 - DNA, 21 bp, synthetic construct
  source 1..21: mol_type = other DNA; mol_type = other DNA
tttaaggctggaacctggaac

SEQ ID NO: 7566 - DNA, 21 bp, synthetic construct
  source 1..21: mol_type = other DNA; mol_type = other DNA
tacgctagaggcggtcaaaat

SEQ ID NO: 7567 - DNA, 21 bp, synthetic construct
  source 1..21: mol_type = other DNA; mol_type = other DNA
aaaatgtcttctgccaattgg

SEQ ID NO: 7568 - DNA, 21 bp, synthetic construct
  source 1..21: mol_type = other DNA; mol_type = other DNA
tatgctcggggcaacgacaac

SEQ ID NO: 7569 - DNA, 21 bp, synthetic construct
  source 1..21: mol_type = other DNA; mol_type = other DNA
cacgggtccggaaacttcgtg

SEQ ID NO: 7570 - DNA, 21 bp, synthetic construct
  source 1..21: mol_type = other DNA; mol_type = other DNA
tctatggagtcaagactttgg

SEQ ID NO: 7571 - DNA, 21 bp, synthetic construct
  source 1..21: mol_type = other DNA; mol_type = other DNA
gtctcctcgagcaatggccgt

SEQ ID NO: 7572 - DNA, 21 bp, synthetic construct
  source 1..21: mol_type = other DNA; mol_type = other DNA
ttcgcgcgctctggcatgaac

SEQ ID NO: 7573 - DNA, 21 bp, synthetic construct
  source 1..21: mol_type = other DNA; mol_type = other DNA
tatagtaaggcgggctacgat

SEQ ID NO: 7574 - DNA, 21 bp, synthetic construct
  source 1..21: mol_type = other DNA; mol_type = other DNA
tacactaaaagtaatcatttg

SEQ ID NO: 7575 - DNA, 21 bp, synthetic construct
  source 1..21: mol_type = other DNA; mol_type = other DNA
gactatactggtaaatccgcg

SEQ ID NO: 7576 - DNA, 21 bp, synthetic construct
  source 1..21: mol_type = other DNA; mol_type = other DNA
tatttccacgccacgagagat

SEQ ID NO: 7577 - DNA, 21 bp, synthetic construct
  source 1..21: mol_type = other DNA; mol_type = other DNA
tttgccaagcaggggcctaat

SEQ ID NO: 7578 - DNA, 21 bp, synthetic construct
  source 1..21: mol_type = other DNA; mol_type = other DNA
tacgcacggcttggtggaaac

SEQ ID NO: 7579 - DNA, 21 bp, synthetic construct
  source 1..21: mol_type = other DNA; mol_type = other DNA
actatgtccgatcgaacttgg

SEQ ID NO: 7580 - DNA, 21 bp, synthetic construct
  source 1..21: mol_type = other DNA; mol_type = other DNA
cagcttgaagcgcggacgtgg

SEQ ID NO: 7581 - DNA, 21 bp, synthetic construct
  source 1..21: mol_type = other DNA; mol_type = other DNA
accatgagtgaccgcacctgg

SEQ ID NO: 7582 - DNA, 21 bp, synthetic construct
  source 1..21: mol_type = other DNA; mol_type = other DNA
gttgaatcatcgaatggtagg

SEQ ID NO: 7583 - DNA, 21 bp, synthetic construct
  source 1..21: mol_type = other DNA; mol_type = other DNA
aaaatgccaagccgggactgg

SEQ ID NO: 7584 - DNA, 21 bp, synthetic construct
  source 1..21: mol_type = other DNA; mol_type = other DNA
acacgctctggtttaaatgcc

SEQ ID NO: 7585 - DNA, 21 bp, synthetic construct
  source 1..21: mol_type = other DNA; mol_type = other DNA
tacgcacgagggaatgataat

SEQ ID NO: 7586 - DNA, 21 bp, synthetic construct
  source 1..21: mol_type = other DNA; mol_type = other DNA
cactccagacttaacctgcag

SEQ ID NO: 7587 - DNA, 21 bp, synthetic construct
  source 1..21: mol_type = other DNA; mol_type = other DNA
tactccaagtctggcgataat

SEQ ID NO: 7588 - DNA, 21 bp, synthetic construct
  source 1..21: mol_type = other DNA; mol_type = other DNA
cacagccgtatgaacgagaac

SEQ ID NO: 7589 - DNA, 21 bp, synthetic construct
  source 1..21: mol_type = other DNA; mol_type = other DNA
cgcaatatgtctgtttaccca

SEQ ID NO: 7590 - DNA, 21 bp, synthetic construct
  source 1..21: mol_type = other DNA; mol_type = other DNA
tatgcgcgtctcaacgagaat

SEQ ID NO: 7591 - DNA, 21 bp, synthetic construct
  source 1..21: mol_type = other DNA; mol_type = other DNA
cggaacggaacctcgagctgg

SEQ ID NO: 7592 - DNA, 21 bp, synthetic construct
  source 1..21: mol_type = other DNA; mol_type = other DNA
aagatgccttctcgagattgg

SEQ ID NO: 7593 - DNA, 21 bp, synthetic construct
  source 1..21: mol_type = other DNA; mol_type = other DNA
acggaatccagctcgggccga

SEQ ID NO: 7594 - DNA, 21 bp, synthetic construct
  source 1..21: mol_type = other DNA; mol_type = other DNA
tacgccaaagccggccacaat

SEQ ID NO: 7595 - DNA, 21 bp, synthetic construct
  source 1..21: mol_type = other DNA; mol_type = other DNA
acagagtcatcatctggtaga

SEQ ID NO: 7596 - DNA, 21 bp, synthetic construct
  source 1..21: mol_type = other DNA; mol_type = other DNA
catagttctacgaatggagcc

SEQ ID NO: 7597 - DNA, 21 bp, synthetic construct
  source 1..21: mol_type = other DNA; mol_type = other DNA
tacagccgcaccggaagcgat

SEQ ID NO: 7598 - DNA, 21 bp, synthetic construct
  source 1..21: mol_type = other DNA; mol_type = other DNA
gtcgagagttccaacgggcgc

SEQ ID NO: 7599 - DNA, 21 bp, synthetic construct
  source 1..21: mol_type = other DNA; mol_type = other DNA
tacgccaggttgaatgaaaac

SEQ ID NO: 7600 - DNA, 21 bp, synthetic construct
  source 1..21: mol_type = other DNA; mol_type = other DNA
tggcatcgtcttagtgtgaat

SEQ ID NO: 7601 - DNA, 21 bp, synthetic construct
  source 1..21: mol_type = other DNA; mol_type = other DNA
tacaatagtactcacgggaga

SEQ ID NO: 7602 - DNA, 21 bp, synthetic construct
  source 1..21: mol_type = other DNA; mol_type = other DNA
taccataaacatagtctgaac

SEQ ID NO: 7603 - DNA, 21 bp, synthetic construct
  source 1..21: mol_type = other DNA; mol_type = other DNA
tactcgaaaggtggagcgaat

SEQ ID NO: 7604 - DNA, 21 bp, synthetic construct
  source 1..21: mol_type = other DNA; mol_type = other DNA
tattctaaatcaggtgacaac

SEQ ID NO: 7605 - DNA, 21 bp, synthetic construct
  source 1..21: mol_type = other DNA; mol_type = other DNA
gattacacgggaaagagtgct

SEQ ID NO: 7606 - DNA, 21 bp, synthetic construct
  source 1..21: mol_type = other DNA; mol_type = other DNA
ctatcgcggtccggtaacaat

SEQ ID NO: 7607 - DNA, 21 bp, synthetic construct
  source 1..21: mol_type = other DNA; mol_type = other DNA
gggtcctcaacctccatttgg

SEQ ID NO: 7608 - DNA, 21 bp, synthetic construct
  source 1..21: mol_type = other DNA; mol_type = other DNA
tggcacagattatccgtaaac

SEQ ID NO: 7609 - DNA, 21 bp, synthetic construct
  source 1..21: mol_type = other DNA; mol_type = other DNA
aattacgcaaagtcatatgcc

SEQ ID NO: 7610 - DNA, 21 bp, synthetic construct
  source 1..21: mol_type = other DNA; mol_type = other DNA
tacttttccggtaccgagaat

SEQ ID NO: 7611 - DNA, 21 bp, synthetic construct
  source 1..21: mol_type = other DNA; mol_type = other DNA
atgagcagggcagggaataac

SEQ ID NO: 7612 - DNA, 21 bp, synthetic construct
  source 1..21: mol_type = other DNA; mol_type = other DNA
ttgaggtctgagtgctgcgtc

SEQ ID NO: 7613 - DNA, 21 bp, synthetic construct
  source 1..21: mol_type = other DNA; mol_type = other DNA
tactgggaaggaactcgacac

SEQ ID NO: 7614 - DNA, 21 bp, synthetic construct
  source 1..21: mol_type = other DNA; mol_type = other DNA
tatagtagaacggggagtgac

SEQ ID NO: 7615 - DNA, 21 bp, synthetic construct
  source 1..21: mol_type = other DNA; mol_type = other DNA
ctgtctcgtatctccgtgaat

SEQ ID NO: 7616 - DNA, 21 bp, synthetic construct
  source 1..21: mol_type = other DNA; mol_type = other DNA
ttctcgaaactgggtaacaat

SEQ ID NO: 7617 - DNA, 21 bp, synthetic construct
  source 1..21: mol_type = other DNA; mol_type = other DNA
attagcgagtattcgaagtgg

SEQ ID NO: 7618 - DNA, 21 bp, synthetic construct
  source 1..21: mol_type = other DNA; mol_type = other DNA
tactggcaaggggtaaatgaa

SEQ ID NO: 7619 - DNA, 21 bp, synthetic construct
  source 1..21: mol_type = other DNA; mol_type = other DNA
tacgttaagagcgataacgct

SEQ ID NO: 7620 - DNA, 21 bp, synthetic construct
  source 1..21: mol_type = other DNA; mol_type = other DNA
ctttactcacgactcgataag

SEQ ID NO: 7621 - DNA, 21 bp, synthetic construct
  source 1..21: mol_type = other DNA; mol_type = other DNA
tattgggagggcacaagacat

SEQ ID NO: 7622 - DNA, 21 bp, synthetic construct
  source 1..21: mol_type = other DNA; mol_type = other DNA
catactgatgatagttacccg

SEQ ID NO: 7623 - DNA, 21 bp, synthetic construct
  source 1..21: mol_type = other DNA; mol_type = other DNA
gtccccggtgactgctgtgtt

SEQ ID NO: 7624 - DNA, 21 bp, synthetic construct
  source 1..21: mol_type = other DNA; mol_type = other DNA
tttgagggccgcgggtggaat

SEQ ID NO: 7625 - DNA, 21 bp, synthetic construct
  source 1..21: mol_type = other DNA; mol_type = other DNA
tatttcagcggcacggaaaac

SEQ ID NO: 7626 - DNA, 21 bp, synthetic construct
  source 1..21: mol_type = other DNA; mol_type = other DNA
tacgcaagacagaatcagaat

SEQ ID NO: 7627 - DNA, 21 bp, synthetic construct
  source 1..21: mol_type = other DNA; mol_type = other DNA
tacgttcgcaatgatgacaaa

SEQ ID NO: 7628 - DNA, 21 bp, synthetic construct
  source 1..21: mol_type = other DNA; mol_type = other DNA
ttcgcgaagcaggggttcaac

SEQ ID NO: 7629 - DNA, 21 bp, synthetic construct
  source 1..21: mol_type = other DNA; mol_type = other DNA
gtgccaggcgattgttgcgtc

SEQ ID NO: 7630 - DNA, 21 bp, synthetic construct
  source 1..21: mol_type = other DNA; mol_type = other DNA
cttcacaaggcagggtacaac

SEQ ID NO: 7631 - DNA, 21 bp, synthetic construct
  source 1..21: mol_type = other DNA; mol_type = other DNA
tactaccatggtatgttagcg

SEQ ID NO: 7632 - DNA, 21 bp, synthetic construct
  source 1..21: mol_type = other DNA; mol_type = other DNA
taccataaaggcaacaataac

SEQ ID NO: 7633 - DNA, 21 bp, synthetic construct
  source 1..21: mol_type = other DNA; mol_type = other DNA
aactatgcgaaatcgtacgct

SEQ ID NO: 7634 - DNA, 21 bp, synthetic construct
  source 1..21: mol_type = other DNA; mol_type = other DNA
tacgcggcaggcagttggaat

SEQ ID NO: 7635 - DNA, 21 bp, synthetic construct
  source 1..21: mol_type = other DNA; mol_type = other DNA
caaaaacatgccccgaatgcc

SEQ ID NO: 7636 - DNA, 21 bp, synthetic construct
  source 1..21: mol_type = other DNA; mol_type = other DNA
tacgttaaaaatgatgcacgc

SEQ ID NO: 7637 - DNA, 21 bp, synthetic construct
  source 1..21: mol_type = other DNA; mol_type = other DNA
cagaagcacgctccaaacgct

SEQ ID NO: 7638 - DNA, 21 bp, synthetic construct
  source 1..21: mol_type = other DNA; mol_type = other DNA
acatggtctgacaatggggta

SEQ ID NO: 7639 - DNA, 21 bp, synthetic construct
  source 1..21: mol_type = other DNA; mol_type = other DNA
cgaacatacgacacttacatc

SEQ ID NO: 7640 - DNA, 21 bp, synthetic construct
  source 1..21: mol_type = other DNA; mol_type = other DNA
ggaagctctacaagcatatgg

SEQ ID NO: 7641 - DNA, 21 bp, synthetic construct
  source 1..21: mol_type = other DNA; mol_type = other DNA
cgcaatggtactagctcgtgg

SEQ ID NO: 7642 - DNA, 21 bp, synthetic construct
  source 1..21: mol_type = other DNA; mol_type = other DNA
tatgcgcggcaaaaccaaaac

SEQ ID NO: 7643 - DNA, 21 bp, synthetic construct
  source 1..21: mol_type = other DNA; mol_type = other DNA
tattctaagggaggggccaac

SEQ ID NO: 7644 - DNA, 21 bp, synthetic construct
  source 1..21: mol_type = other DNA; mol_type = other DNA
tatgcgcgtgttggaggcaac

SEQ ID NO: 7645 - DNA, 21 bp, synthetic construct
  source 1..21: mol_type = other DNA; mol_type = other DNA
atgagtcgtgccggcaacaat

SEQ ID NO: 7646 - DNA, 21 bp, synthetic construct
  source 1..21: mol_type = other DNA; mol_type = other DNA
tatgtgaggaacgacgataag

SEQ ID NO: 7647 - DNA, 21 bp, synthetic construct
  source 1..21: mol_type = other DNA; mol_type = other DNA
cttgtcagatacgaaaatgtg

SEQ ID NO: 7648 - DNA, 21 bp, synthetic construct
  source 1..21: mol_type = other DNA; mol_type = other DNA
tattataccggcaggacgaac

SEQ ID NO: 7649 - DNA, 21 bp, synthetic construct
  source 1..21: mol_type = other DNA; mol_type = other DNA
tacgctagagtcggcggtaat

SEQ ID NO: 7650 - DNA, 21 bp, synthetic construct
  source 1..21: mol_type = other DNA; mol_type = other DNA
ttcgaaggaagaggatggaac

SEQ ID NO: 7651 - DNA, 21 bp, synthetic construct
  source 1..21: mol_type = other DNA
tatcacaaggggaataacaat

SEQ ID NO: 7652 - DNA, 21 bp, synthetic construct
  source 1..21: mol_type = other DNA
tattggcagggagtgaacgag

SEQ ID NO: 7653 - DNA, 21 bp, synthetic construct
  source 1..21: mol_type = other DNA
cgaacgaacaacgaatatccc

SEQ ID NO: 7654 - DNA, 21 bp, synthetic construct
  source 1..21: mol_type = other DNA; mol_type = other DNA
tatgcccggatgggtgagaac

SEQ ID NO: 7655 - DNA, 21 bp, synthetic construct
  source 1..21: mol_type = other DNA; mol_type = other DNA
tatataaaatcggactatcag

SEQ ID NO: 7656 - DNA, 21 bp, synthetic construct
  source 1..21: mol_type = other DNA; mol_type = other DNA
cacacggacgacagctatccc

SEQ ID NO: 7657 - DNA, 21 bp, synthetic construct
  source 1..21: mol_type = other DNA; mol_type = other DNA
tactttcatgcaacaagggac

SEQ ID NO: 7658 - DNA, 21 bp, synthetic construct
  source 1..21: mol_type = other DNA; mol_type = other DNA
tacagtcgaaacaattccaat

SEQ ID NO: 7659 - DNA, 21 bp, synthetic construct
  source 1..21: mol_type = other DNA; mol_type = other DNA
tacgcgcgtctgggtccttcg

SEQ ID NO: 7660 - DNA, 21 bp, synthetic construct
  source 1..21: mol_type = other DNA; mol_type = other DNA
cgaaatggaacgtcagtgtgg

SEQ ID NO: 7661 - DNA, 21 bp, synthetic construct
  source 1..21: mol_type = other DNA; mol_type = other DNA
tttgccaaacaaggctttaat

SEQ ID NO: 7662 - DNA, 21 bp, synthetic construct
  source 1..21: mol_type = other DNA; mol_type = other DNA
tattatacgggtatgaataat

SEQ ID NO: 7663 - DNA, 21 bp, synthetic construct
  source 1..21: mol_type = other DNA; mol_type = other DNA
tactactcaggagaacgaaac

SEQ ID NO: 7664 - DNA, 21 bp, synthetic construct
  source 1..21: mol_type = other DNA; mol_type = other DNA
tacgcacgtatgggagaaaat

SEQ ID NO: 7665 - DNA, 21 bp, synthetic construct
  source 1..21: mol_type = other DNA; mol_type = other DNA
tattcaagaggtggtttcaac

SEQ ID NO: 7666 - DNA, 21 bp, synthetic construct
  source 1..21: mol_type = other DNA; mol_type = other DNA
ttgtatagtaggcttgacaaa

SEQ ID NO: 7667 - DNA, 21 bp, synthetic construct
  source 1..21: mol_type = other DNA; mol_type = other DNA
acgtggtcggataacggagtt

SEQ ID NO: 7668 - DNA, 21 bp, synthetic construct
  source 1..21: mol_type = other DNA; mol_type = other DNA
cacggatccacgaacgggaag

SEQ ID NO: 7669 - DNA, 21 bp, synthetic construct
  source 1..21: mol_type = other DNA; mol_type = other DNA
actcataaattgtccgtgaat

SEQ ID NO: 7670 - DNA, 21 bp, synthetic construct
  source 1..21: mol_type = other DNA; mol_type = other DNA
tttgcacggcagggcttcaat

SEQ ID NO: 7671 - DNA, 21 bp, synthetic construct
  source 1..21: mol_type = other DNA; mol_type = other DNA
tatgctcgattaggccccagc

SEQ ID NO: 7672 - DNA, 21 bp, synthetic construct
  source 1..21: mol_type = other DNA; mol_type = other DNA
tacgcgcgcgaaacatggaat

SEQ ID NO: 7673 - DNA, 21 bp, synthetic construct
  source 1..21: mol_type = other DNA; mol_type = other DNA
tattgggcggataagcacgca

SEQ ID NO: 7674 - DNA, 21 bp, synthetic construct
  source 1..21: mol_type = other DNA; mol_type = other DNA
tattcaagagtagacgacaga

SEQ ID NO: 7675 - DNA, 21 bp, synthetic construct
  source 1..21: mol_type = other DNA; mol_type = other DNA
gactacgcgaaatcactcttg

SEQ ID NO: 7676 - DNA, 21 bp, synthetic construct
  source 1..21: mol_type = other DNA; mol_type = other DNA
cgcacaaataatgagtaccca

SEQ ID NO: 7677 - DNA, 21 bp, synthetic construct
  source 1..21: mol_type = other DNA; mol_type = other DNA
tataactcaacgcatggtcgc

SEQ ID NO: 7678 - DNA, 21 bp, synthetic construct
  source 1..21: mol_type = other DNA; mol_type = other DNA
aagatgtcgtcctcggtgtgg

SEQ ID NO: 7679 - DNA, 21 bp, synthetic construct
  source 1..21: mol_type = other DNA; mol_type = other DNA
tactcggcgagaggtccgaac

SEQ ID NO: 7680 - DNA, 21 bp, synthetic construct
  source 1..21: mol_type = other DNA
ttcgctcgacaaggatttaac

SEQ ID NO: 7681 - DNA, 21 bp, synthetic construct
  source 1..21: mol_type = other DNA; mol_type = other DNA
tttagtagaatgaaccagaac

SEQ ID NO: 7682 - DNA, 21 bp, synthetic construct
  source 1..21: mol_type = other DNA; mol_type = other DNA
ttttcaaagatgaactataat

SEQ ID NO: 7683 - DNA, 21 bp, synthetic construct
  source 1..21: mol_type = other DNA; mol_type = other DNA
actcatcgacttatcgtcgca

SEQ ID NO: 7684 - DNA, 21 bp, synthetic construct
  source 1..21: mol_type = other DNA; mol_type = other DNA
tactcgcgaggcggatttaat

SEQ ID NO: 7685 - DNA, 21 bp, synthetic construct
  source 1..21: mol_type = other DNA; mol_type = other DNA
ggtggcgatggtaatcattat

SEQ ID NO: 7686 - DNA, 21 bp, synthetic construct
  source 1..21: mol_type = other DNA; mol_type = other DNA
tattctaggcataatttaaat

SEQ ID NO: 7687 - DNA, 21 bp, synthetic construct
  source 1..21: mol_type = other DNA; mol_type = other DNA
cggaacgggacttctgtttgg

SEQ ID NO: 7688 - DNA, 21 bp, synthetic construct
  source 1..21: mol_type = other DNA; mol_type = other DNA
tatagcaggacgaatccgaat

SEQ ID NO: 7689 - DNA, 21 bp, synthetic construct
  source 1..21: mol_type = other DNA; mol_type = other DNA
tattcgagaaataacagtaac

SEQ ID NO: 7690 - DNA, 21 bp, synthetic construct
  source 1..21: mol_type = other DNA; mol_type = other DNA
cttaggcgcaagccagacctt

SEQ ID NO: 7691 - DNA, 21 bp, synthetic construct
  source 1..21: mol_type = other DNA; mol_type = other DNA
tatgcagcgggatcctggaac

SEQ ID NO: 7692 - DNA, 21 bp, synthetic construct
  source 1..21: mol_type = other DNA; mol_type = other DNA
ttcagccggatgaatcaaaat

SEQ ID NO: 7693 - DNA, 21 bp, synthetic construct
  source 1..21: mol_type = other DNA; mol_type = other DNA
tattattcgggtgagcgcaat

SEQ ID NO: 7694 - DNA, 21 bp, synthetic construct
  source 1..21: mol_type = other DNA; mol_type = other DNA
catgggagcactaatggaaaa

SEQ ID NO: 7695 - DNA, 21 bp, synthetic construct
  source 1..21: mol_type = other DNA; mol_type = other DNA
tacttcatgggtcgcagtgat

SEQ ID NO: 7696 - DNA, 21 bp, synthetic construct
  source 1..21: mol_type = other DNA; mol_type = other DNA
ttctcgaaaatgaattacaac

SEQ ID NO: 7697 - DNA, 21 bp, synthetic construct
  source 1..21: mol_type = other DNA; mol_type = other DNA
tatgctcgtgagacctggaac

SEQ ID NO: 7698 - DNA, 21 bp, synthetic construct
  source 1..21: mol_type = other DNA; mol_type = other DNA
ataatgtcgagccggtcatgg

SEQ ID NO: 7699 - DNA, 21 bp, synthetic construct
  source 1..21: mol_type = other DNA; mol_type = other DNA
ttttcgcgtatgaacagtaat

SEQ ID NO: 7700 - DNA, 21 bp, synthetic construct
  source 1..21: mol_type = other DNA; mol_type = other DNA
tactgggcagacaaacatgcc

SEQ ID NO: 7701 - DNA, 21 bp, synthetic construct
  source 1..21: mol_type = other DNA; mol_type = other DNA
tttgctcgacaaggcatgaac

SEQ ID NO: 7702 - DNA, 21 bp, synthetic construct
  source 1..21: mol_type = other DNA; mol_type = other DNA
acccacaagctatctgtaaac

SEQ ID NO: 7703 - DNA, 21 bp, synthetic construct
  source 1..21: mol_type = other DNA; mol_type = other DNA
ttcagccgcatgaattccaac

SEQ ID NO: 7704 - DNA, 21 bp, synthetic construct
  source 1..21: mol_type = other DNA; mol_type = other DNA
tttgtaaagtttcaagtcaac

SEQ ID NO: 7705 - DNA, 21 bp, synthetic construct
  source 1..21: mol_type = other DNA; mol_type = other DNA
atccatccgacgaggtacggg

SEQ ID NO: 7706 - DNA, 21 bp, synthetic construct
  source 1..21: mol_type = other DNA; mol_type = other DNA
caaagtaagctgagcacatgg

SEQ ID NO: 7707 - DNA, 21 bp, synthetic construct
  source 1..21: mol_type = other DNA; mol_type = other DNA
tactcccggcacaacctaaac

SEQ ID NO: 7708 - DNA, 21 bp, synthetic construct
  source 1..21: mol_type = other DNA; mol_type = other DNA
ttcgcacgccagggaatgaat

SEQ ID NO: 7709 - DNA, 21 bp, synthetic construct
  source 1..21: mol_type = other DNA; mol_type = other DNA
tatgcgaaaaatggcgacaac

SEQ ID NO: 7710 - DNA, 21 bp, synthetic construct
  source 1..21: mol_type = other DNA; mol_type = other DNA
cggacatttgattcgttcgag

SEQ ID NO: 7711 - DNA, 21 bp, synthetic construct
  source 1..21: mol_type = other DNA; mol_type = other DNA
ttctcccgtagtggcatgaac

SEQ ID NO: 7712 - DNA, 21 bp, synthetic construct
  source 1..21: mol_type = other DNA; mol_type = other DNA
aggacttatgatacctatata

SEQ ID NO: 7713 - DNA, 21 bp, synthetic construct
  source 1..21: mol_type = other DNA; mol_type = other DNA
ttcgcaaaatccggacaaaac

SEQ ID NO: 7714 - DNA, 21 bp, synthetic construct
  source 1..21: mol_type = other DNA; mol_type = other DNA
tatgcacgtcaaaattataat

SEQ ID NO: 7715 - DNA, 21 bp, synthetic construct
  source 1..21: mol_type = other DNA; mol_type = other DNA
tattgggtagataaggtagct

SEQ ID NO: 7716 - DNA, 21 bp, synthetic construct
  source 1..21: mol_type = other DNA; mol_type = other DNA
gaaatgcaaagccgagcttgg

SEQ ID NO: 7717 - DNA, 21 bp, synthetic construct
  source 1..21: mol_type = other DNA; mol_type = other DNA
agagagacgtatgtatatccc

SEQ ID NO: 7718 - DNA, 21 bp, synthetic construct
  source 1..21: mol_type = other DNA; mol_type = other DNA
tactacacaggtcgtactaat

SEQ ID NO: 7719 - DNA, 21 bp, synthetic construct
  source 1..21: mol_type = other DNA; mol_type = other DNA
ttcgtcaaattccaggttaat

SEQ ID NO: 7720 - DNA, 21 bp, synthetic construct
  source 1..21: mol_type = other DNA; mol_type = other DNA
tttagtcgctcaggaatgaat

SEQ ID NO: 7721 - DNA, 21 bp, synthetic construct
  source 1..21: mol_type = other DNA; mol_type = other DNA
tacgcaaagatggggtggaac

SEQ ID NO: 7722 - DNA, 21 bp, synthetic construct
  source 1..21: mol_type = other DNA; mol_type = other DNA
tactacactgggatgaacaac

SEQ ID NO: 7723 - DNA, 21 bp, synthetic construct
  source 1..21: mol_type = other DNA; mol_type = other DNA
tacagtcggaattctgataat

SEQ ID NO: 7724 - DNA, 21 bp, synthetic construct
  source 1..21: mol_type = other DNA; mol_type = other DNA
tactccaggtataatattaat

SEQ ID NO: 7725 - DNA, 21 bp, synthetic construct
  source 1..21: mol_type = other DNA; mol_type = other DNA
cgcacagatcagtactttccg

SEQ ID NO: 7726 - DNA, 21 bp, synthetic construct
  source 1..21: mol_type = other DNA; mol_type = other DNA
aggcaagcaaagcaaaagaac

SEQ ID NO: 7727 - DNA, 21 bp, synthetic construct
  source 1..21: mol_type = other DNA; mol_type = other DNA
tatgcgaaaatgggctggaat

SEQ ID NO: 7728 - DNA, 21 bp, synthetic construct
  source 1..21: mol_type = other DNA; mol_type = other DNA
tacataaaaggggatttattt

SEQ ID NO: 7729 - DNA, 21 bp, synthetic construct
  source 1..21: mol_type = other DNA; mol_type = other DNA
taccatagatatggcattgac

SEQ ID NO: 7730 - DNA, 21 bp, synthetic construct
  source 1..21: mol_type = other DNA; mol_type = other DNA
gagatgcagtctagagcctgg

SEQ ID NO: 7731 - DNA, 21 bp, synthetic construct
  source 1..21: mol_type = other DNA; mol_type = other DNA
ctatcccgtttgaaccataac

SEQ ID NO: 7732 - DNA, 21 bp, synthetic construct
  source 1..21: mol_type = other DNA; mol_type = other DNA
cagtcgaaattgtcgacctgg

SEQ ID NO: 7733 - DNA, 21 bp, synthetic construct
  source 1..21: mol_type = other DNA; mol_type = other DNA
tatagtaaattcaatgacaac

SEQ ID NO: 7734 - DNA, 21 bp, synthetic construct
  source 1..21: mol_type = other DNA; mol_type = other DNA
tatgctaagttaaaccataac

SEQ ID NO: 7735 - DNA, 21 bp, synthetic construct
  source 1..21: mol_type = other DNA; mol_type = other DNA
aggacgttcgacagttttgaa

SEQ ID NO: 7736 - DNA, 21 bp, synthetic construct
  source 1..21: mol_type = other DNA; mol_type = other DNA
tattttgcaggacagttttct

SEQ ID NO: 7737 - DNA, 21 bp, synthetic construct
  source 1..21: mol_type = other DNA; mol_type = other DNA
tttgcgaagtcgggccagaat

SEQ ID NO: 7738 - DNA, 21 bp, synthetic construct
  source 1..21: mol_type = other DNA; mol_type = other DNA
tattctaaatggaaccagaat

SEQ ID NO: 7739 - DNA, 21 bp, synthetic construct
  source 1..21: mol_type = other DNA; mol_type = other DNA
tatctcataagcgatactaaa

SEQ ID NO: 7740 - DNA, 21 bp, synthetic construct
  source 1..21: mol_type = other DNA; mol_type = other DNA
tacgcaaagaacggagataat

SEQ ID NO: 7741 - DNA, 21 bp, synthetic construct
  source 1..21: mol_type = other DNA; mol_type = other DNA
gattatgctaagtcgttgcta

SEQ ID NO: 7742 - DNA, 21 bp, synthetic construct
  source 1..21: mol_type = other DNA; mol_type = other DNA
tacgcccgaccaggccacaat

SEQ ID NO: 7743 - DNA, 21 bp, synthetic construct
  source 1..21: mol_type = other DNA; mol_type = other DNA
ggaggtgacgggaaccactac

SEQ ID NO: 7744 - DNA, 21 bp, synthetic construct
  source 1..21: mol_type = other DNA; mol_type = other DNA
tttgcccgacaaggatacaat

SEQ ID NO: 7745 - DNA, 21 bp, synthetic construct
  source 1..21: mol_type = other DNA; mol_type = other DNA
tttgcgaaagaaggacgaaat

SEQ ID NO: 7746 - DNA, 21 bp, synthetic construct
  source 1..21: mol_type = other DNA; mol_type = other DNA
gacgatggcagatcgaggtat

SEQ ID NO: 7747 - DNA, 21 bp, synthetic construct
  source 1..21: mol_type = other DNA; mol_type = other DNA
tacgcgaaactaaatcacaat

SEQ ID NO: 7748 - DNA, 21 bp, synthetic construct
  source 1..21: mol_type = other DNA; mol_type = other DNA
gaacatggcaagtcactgtgg

SEQ ID NO: 7749 - DNA, 21 bp, synthetic construct
  source 1..21: mol_type = other DNA; mol_type = other DNA
tactcgaagtttaacgataat

SEQ ID NO: 7750 - DNA, 21 bp, synthetic construct
  source 1..21: mol_type = other DNA; mol_type = other DNA
tactgggtggacaaagtggcc

SEQ ID NO: 7751 - DNA, 21 bp, synthetic construct
  source 1..21: mol_type = other DNA; mol_type = other DNA
tatcaccggtacgggatcgat

SEQ ID NO: 7752 - DNA, 21 bp, synthetic construct
  source 1..21: mol_type = other DNA; mol_type = other DNA
tacctgattagtgacaccaag

SEQ ID NO: 7753 - DNA, 21 bp, synthetic construct
  source 1..21: mol_type = other DNA; mol_type = other DNA
ttctccaggatgggaccaaat

SEQ ID NO: 7754 - DNA, 21 bp, synthetic construct
  source 1..21: mol_type = other DNA; mol_type = other DNA
tggttcagtggggagcattcc

SEQ ID NO: 7755 - DNA, 21 bp, synthetic construct
  source 1..21: mol_type = other DNA; mol_type = other DNA
ttcgccaaggagggtaggaac

SEQ ID NO: 7756 - DNA, 21 bp, synthetic construct
  source 1..21: mol_type = other DNA; mol_type = other DNA
gatgacgggaggtcccgatac

SEQ ID NO: 7757 - DNA, 21 bp, synthetic construct
  source 1..21: mol_type = other DNA; mol_type = other DNA
tggttcaccggttataacgcc

SEQ ID NO: 7758 - DNA, 21 bp, synthetic construct
  source 1..21: mol_type = other DNA; mol_type = other DNA
tatatgaagtacgacacccag

SEQ ID NO: 7759 - DNA, 21 bp, synthetic construct
  source 1..21: mol_type = other DNA; mol_type = other DNA
tttgttcgaagtcaaattagt

SEQ ID NO: 7760 - DNA, 21 bp, synthetic construct
  source 1..21: mol_type = other DNA; mol_type = other DNA
tatgcacgcccgggacataac

SEQ ID NO: 7761 - DNA, 21 bp, synthetic construct
  source 1..21: mol_type = other DNA; mol_type = other DNA
agaacggaccaatatttcccc

SEQ ID NO: 7762 - DNA, 21 bp, synthetic construct
  source 1..21: mol_type = other DNA; mol_type = other DNA
cgggaaacttacgtgtaccca

SEQ ID NO: 7763 - DNA, 21 bp, synthetic construct
  source 1..21: mol_type = other DNA; mol_type = other DNA
atatgccgcggatatacatct

SEQ ID NO: 7764 - DNA, 21 bp, synthetic construct
  source 1..21: mol_type = other DNA; mol_type = other DNA
tatagtcgtcagggaggcaat

SEQ ID NO: 7765 - DNA, 21 bp, synthetic construct
  source 1..21: mol_type = other DNA; mol_type = other DNA
tataaagatggtacgtggtac

SEQ ID NO: 7766 - DNA, 21 bp, synthetic construct
  source 1..21: mol_type = other DNA; mol_type = other DNA
tgcaaaaaaggctgctttgag

SEQ ID NO: 7767 - DNA, 21 bp, synthetic construct
  source 1..21: mol_type = other DNA; mol_type = other DNA
ttttcgaggctcgggcacaat

SEQ ID NO: 7768 - DNA, 21 bp, synthetic construct
  source 1..21: mol_type = other DNA; mol_type = other DNA
tacgctcgacagaactacaac

SEQ ID NO: 7769 - DNA, 21 bp, synthetic construct
  source 1..21: mol_type = other DNA; mol_type = other DNA
tttgcgcgggcaggattaaat

SEQ ID NO: 7770 - DNA, 21 bp, synthetic construct
  source 1..21: mol_type = other DNA; mol_type = other DNA
tttgctcgaggggggtacaac

SEQ ID NO: 7771 - DNA, 21 bp, synthetic construct
  source 1..21: mol_type = other DNA; mol_type = other DNA
tactcgaagtggaatcaaaac

SEQ ID NO: 7772 - DNA, 21 bp, synthetic construct
  source 1..21: mol_type = other DNA; mol_type = other DNA
tgtaagaagggttgtttcgaa

SEQ ID NO: 7773 - DNA, 21 bp, synthetic construct
  source 1..21: mol_type = other DNA; mol_type = other DNA
tttagtcgtatgggccccaac

SEQ ID NO: 7774 - DNA, 21 bp, synthetic construct
  source 1..21: mol_type = other DNA; mol_type = other DNA
atgtataatgattgctgtgta

SEQ ID NO: 7775 - DNA, 21 bp, synthetic construct
  source 1..21: mol_type = other DNA; mol_type = other DNA
tacagccggcaaggcggaaac

SEQ ID NO: 7776 - DNA, 21 bp, synthetic construct
  source 1..21: mol_type = other DNA; mol_type = other DNA
aactatgcgcgttccaacaat

SEQ ID NO: 7777 - DNA, 21 bp, synthetic construct
  source 1..21: mol_type = other DNA; mol_type = other DNA
tacattaagagtgattaccaa

SEQ ID NO: 7778 - DNA, 21 bp, synthetic construct
  source 1..21: mol_type = other DNA; mol_type = other DNA
ttcgctagggctggtctgaac

SEQ ID NO: 7779 - DNA, 21 bp, synthetic construct
  source 1..21: mol_type = other DNA; mol_type = other DNA
tggttttcgggtgaacactct

SEQ ID NO: 7780 - DNA, 21 bp, synthetic construct
  source 1..21: mol_type = other DNA; mol_type = other DNA
tatatcaagggcgaccttttc

SEQ ID NO: 7781 - DNA, 21 bp, synthetic construct
  source 1..21: mol_type = other DNA; mol_type = other DNA
tactttactcggcaggttaac

SEQ ID NO: 7782 - DNA, 21 bp, synthetic construct
  source 1..21: mol_type = other DNA; mol_type = other DNA
attgaaagagtgtcgtatgga

SEQ ID NO: 7783 - DNA, 21 bp, synthetic construct
  source 1..21: mol_type = other DNA; mol_type = other DNA
caccataaagggaacatgaat

SEQ ID NO: 7784 - DNA, 21 bp, synthetic construct
  source 1..21: mol_type = other DNA; mol_type = other DNA
ttcgcgcgccagggctataac

SEQ ID NO: 7785 - DNA, 21 bp, synthetic construct
  source 1..21: mol_type = other DNA; mol_type = other DNA
cgtatgtcagatcacaattgg

SEQ ID NO: 7786 - DNA, 21 bp, synthetic construct
  source 1..21: mol_type = other DNA; mol_type = other DNA
ttctcccgattgggtcataac

SEQ ID NO: 7787 - DNA, 21 bp, synthetic construct
  source 1..21: mol_type = other DNA; mol_type = other DNA
atcgagcgagtctcatacggt

SEQ ID NO: 7788 - DNA, 21 bp, synthetic construct
  source 1..21: mol_type = other DNA; mol_type = other DNA
cgaatgtcagcgtcaaattgg

SEQ ID NO: 7789 - DNA, 21 bp, synthetic construct
  source 1..21: mol_type = other DNA; mol_type = other DNA
tacgcgaggaacaatatgaat

SEQ ID NO: 7790 - DNA, 21 bp, synthetic construct
  source 1..21: mol_type = other DNA; mol_type = other DNA
gagcacggtaaaagcctctgg

SEQ ID NO: 7791 - DNA, 21 bp, synthetic construct
  source 1..21: mol_type = other DNA; mol_type = other DNA
ttcgcgcgcggcggttataat

SEQ ID NO: 7792 - DNA, 21 bp, synthetic construct
  source 1..21: mol_type = other DNA; mol_type = other DNA
ttcgtaaggtctcagatctcc

SEQ ID NO: 7793 - DNA, 21 bp, synthetic construct
  source 1..21: mol_type = other DNA; mol_type = other DNA
tgcggtgcctactggacagag

SEQ ID NO: 7794 - DNA, 21 bp, synthetic construct
  source 1..21: mol_type = other DNA; mol_type = other DNA
tttgcgaagggaggaaataac

SEQ ID NO: 7795 - DNA, 21 bp, synthetic construct
  source 1..21: mol_type = other DNA; mol_type = other DNA
atccaccgaatgatggttaat

SEQ ID NO: 7796 - DNA, 21 bp, synthetic construct
  source 1..21: mol_type = other DNA; mol_type = other DNA
tatgcacgaaataacatgaac

SEQ ID NO: 7797 - DNA, 21 bp, synthetic construct
  source 1..21: mol_type = other DNA; mol_type = other DNA
ttcgctaaaggggggaacaat

SEQ ID NO: 7798 - DNA, 21 bp, synthetic construct
  source 1..21: mol_type = other DNA; mol_type = other DNA
catcacaagggcaatatgaac

SEQ ID NO: 7799 - DNA, 21 bp, synthetic construct
  source 1..21: mol_type = other DNA; mol_type = other DNA
tacacccactccaacttgcat

SEQ ID NO: 7800 - DNA, 21 bp, synthetic construct
  source 1..21: mol_type = other DNA; mol_type = other DNA
tcaaatgcacactcctcatgg

SEQ ID NO: 7801 - DNA, 21 bp, synthetic construct
  source 1..21: mol_type = other DNA; mol_type = other DNA
ttgcacaggatgggaacgagt

SEQ ID NO: 7802 - DNA, 21 bp, synthetic construct
  source 1..21: mol_type = other DNA; mol_type = other DNA
aggatgagcgaccataactgg

SEQ ID NO: 7803 - DNA, 21 bp, synthetic construct
  source 1..21: mol_type = other DNA
cgtgttacccactgcacgggc

SEQ ID NO: 7804 - DNA, 21 bp, synthetic construct
  source 1..21: mol_type = other DNA
tatactcatagcaatctccac

SEQ ID NO: 7805 - DNA, 21 bp, synthetic construct
  source 1..21: mol_type = other DNA; mol_type = other DNA
tacgcccgttatggtctaaat

SEQ ID NO: 7806 - DNA, 21 bp, synthetic construct
  source 1..21: mol_type = other DNA; mol_type = other DNA
atttcagaattgagtcgctgg

SEQ ID NO: 7807 - DNA, 21 bp, synthetic construct
  source 1..21: mol_type = other DNA; mol_type = other DNA
tgcgctttcacaggcaccaga

SEQ ID NO: 7808 - DNA, 21 bp, synthetic construct
  source 1..21: mol_type = other DNA; mol_type = other DNA
aattacgctcgcagcaataac

SEQ ID NO: 7809 - DNA, 21 bp, synthetic construct
  source 1..21: mol_type = other DNA; mol_type = other DNA
ataagtgagctgagccgttgg

SEQ ID NO: 7810 - DNA, 21 bp, synthetic construct
  source 1..21: mol_type = other DNA; mol_type = other DNA
ttcgcaaggatgggtccgaac

SEQ ID NO: 7811 - DNA, 21 bp, synthetic construct
  source 1..21: mol_type = other DNA; mol_type = other DNA
tatcagcggcagggttgggat

SEQ ID NO: 7812 - DNA, 21 bp, synthetic construct
  source 1..21: mol_type = other DNA; mol_type = other DNA
tacaaggacggcacctggtat

SEQ ID NO: 7813 - DNA, 21 bp, synthetic construct
  source 1..21: mol_type = other DNA; mol_type = other DNA
tatggggccggaacttggcac

SEQ ID NO: 7814 - DNA, 21 bp, synthetic construct
  source 1..21: mol_type = other DNA; mol_type = other DNA
tatcaccgccttgacaatcca

SEQ ID NO: 7815 - DNA, 21 bp, synthetic construct
  source 1..21: mol_type = other DNA; mol_type = other DNA
tacgctagtggacactggaat

SEQ ID NO: 7816 - DNA, 21 bp, synthetic construct
  source 1..21: mol_type = other DNA; mol_type = other DNA
tcggcagaatgggtctcttat

SEQ ID NO: 7817 - DNA, 21 bp, synthetic construct
  source 1..21: mol_type = other DNA; mol_type = other DNA
ctgcatcgcatgggcactagc

SEQ ID NO: 7818 - DNA, 21 bp, synthetic construct
  source 1..21: mol_type = other DNA; mol_type = other DNA
agaggtaacggggggcataag

SEQ ID NO: 7819 - DNA, 21 bp, synthetic construct
  source 1..21: mol_type = other DNA; mol_type = other DNA
atgtacaacgactgttgcgtt

SEQ ID NO: 7820 - DNA, 21 bp, synthetic construct
  source 1..21: mol_type = other DNA; mol_type = other DNA
cataaatgcggagatacccgt

SEQ ID NO: 7821 - DNA, 21 bp, synthetic construct
  source 1..21: mol_type = other DNA; mol_type = other DNA
aaccaaaagcatcttatgtat

SEQ ID NO: 7822 - DNA, 21 bp, synthetic construct
  source 1..21: mol_type = other DNA; mol_type = other DNA
cgcaactacgatacgtaccct

SEQ ID NO: 7823 - DNA, 21 bp, synthetic construct
  source 1..21: mol_type = other DNA; mol_type = other DNA
tatttcacccgacaagtgaat

SEQ ID NO: 7824 - DNA, 21 bp, synthetic construct
  source 1..21: mol_type = other DNA; mol_type = other DNA
tattggaaaaatactcccgac

SEQ ID NO: 7825 - DNA, 21 bp, synthetic construct
  source 1..21: mol_type = other DNA; mol_type = other DNA
agaaattatgacacttatccc

SEQ ID NO: 7826 - DNA, 21 bp, synthetic construct
  source 1..21: mol_type = other DNA; mol_type = other DNA
tatagccgctacaacataaac

SEQ ID NO: 7827 - DNA, 21 bp, synthetic construct
  source 1..21: mol_type = other DNA; mol_type = other DNA
taccatagattggataacccc

SEQ ID NO: 7828 - DNA, 21 bp, synthetic construct
  source 1..21: mol_type = other DNA; mol_type = other DNA
tacacaaggacacaagcgtac

SEQ ID NO: 7829 - DNA, 21 bp, synthetic construct
  source 1..21: mol_type = other DNA; mol_type = other DNA
atgagtgcgcatgttaagtat

SEQ ID NO: 7830 - DNA, 21 bp, synthetic construct
  source 1..21: mol_type = other DNA; mol_type = other DNA
aagagcccctacgcaaccttc

SEQ ID NO: 7831 - DNA, 21 bp, synthetic construct
  source 1..21: mol_type = other DNA; mol_type = other DNA
tcgaacgcccattcatcctgg

SEQ ID NO: 7832 - DNA, 21 bp, synthetic construct
  source 1..21: mol_type = other DNA; mol_type = other DNA
tatgcgtctgggcattggaac

SEQ ID NO: 7833 - DNA, 21 bp, synthetic construct
  source 1..21: mol_type = other DNA; mol_type = other DNA
atgtccgcacacgtgaaatac

SEQ ID NO: 7834 - DNA, 21 bp, synthetic construct
  source 1..21: mol_type = other DNA; mol_type = other DNA
cgtatgtctgccagtaactgg

SEQ ID NO: 7835 - DNA, 21 bp, synthetic construct
  source 1..21: mol_type = other DNA; mol_type = other DNA
tactggaagaacacaccggat

SEQ ID NO: 7836 - DNA, 21 bp, synthetic construct
  source 1..21: mol_type = other DNA; mol_type = other DNA
tttgctcgcatgggaccaaat

SEQ ID NO: 7837 - DNA, 21 bp, synthetic construct
  source 1..21: mol_type = other DNA; mol_type = other DNA
ttgtgtgggagttgtcggagt

SEQ ID NO: 7838 - DNA, 21 bp, synthetic construct
  source 1..21: mol_type = other DNA; mol_type = other DNA
aattcgccataccgtcctttt

SEQ ID NO: 7839 - DNA, 21 bp, synthetic construct
  source 1..21: mol_type = other DNA; mol_type = other DNA
ctgtggaggtccggagtgaac

SEQ ID NO: 7840 - DNA, 21 bp, synthetic construct
  source 1..21: mol_type = other DNA; mol_type = other DNA
tacggtgctggtacctggcat

SEQ ID NO: 7841 - DNA, 21 bp, synthetic construct
  source 1..21: mol_type = other DNA; mol_type = other DNA
agatgcggagactgtgtgttc

SEQ ID NO: 7842 - DNA, 21 bp, synthetic construct
  source 1..21: mol_type = other DNA; mol_type = other DNA
ttgtgtcgcccgtgtagggag

SEQ ID NO: 7843 - DNA, 21 bp, synthetic construct
  source 1..21: mol_type = other DNA; mol_type = other DNA
tacgcaaggcaaaatcacaat

SEQ ID NO: 7844 - DNA, 21 bp, synthetic construct
  source 1..21: mol_type = other DNA; mol_type = other DNA
tattggaagggcgacaatggt

SEQ ID NO: 7845 - DNA, 21 bp, synthetic construct
  source 1..21: mol_type = other DNA; mol_type = other DNA
tactggaaaggagataacggc

SEQ ID NO: 7846 - DNA, 21 bp, synthetic construct
  source 1..21: mol_type = other DNA; mol_type = other DNA
tattccagaaatgctgataac

SEQ ID NO: 7847 - DNA, 21 bp, synthetic construct
  source 1..21: mol_type = other DNA; mol_type = other DNA
cgcggagaatggcaatttgcg

SEQ ID NO: 7848 - DNA, 21 bp, synthetic construct
  source 1..21: mol_type = other DNA; mol_type = other DNA
tatgtgtacagtaatacccac

SEQ ID NO: 7849 - DNA, 21 bp, synthetic construct
  source 1..21: mol_type = other DNA; mol_type = other DNA
agcgcggagtgggtttcatac

SEQ ID NO: 7850 - DNA, 21 bp, synthetic construct
  source 1..21: mol_type = other DNA; mol_type = other DNA
atacatcggatgatggtaaac

SEQ ID NO: 7851 - DNA, 21 bp, synthetic construct
  source 1..21: mol_type = other DNA; mol_type = other DNA
tacgtttattcgaacacacat

SEQ ID NO: 7852 - DNA, 21 bp, synthetic construct
  source 1..21: mol_type = other DNA; mol_type = other DNA
tccaagtatgcaccaaatagt

SEQ ID NO: 7853 - DNA, 21 bp, synthetic construct
  source 1..21: mol_type = other DNA; mol_type = other DNA
tcctgtagaattagcgagaaa

SEQ ID NO: 7854 - DNA, 21 bp, synthetic construct
  source 1..21: mol_type = other DNA; mol_type = other DNA
tcaaaatacgcgccgaactct

SEQ ID NO: 7855 - DNA, 21 bp, synthetic construct
  source 1..21: mol_type = other DNA; mol_type = other DNA
tatgctcgctacggattaaac

SEQ ID NO: 7856 - DNA, 21 bp, synthetic construct
  source 1..21: mol_type = other DNA; mol_type = other DNA
aatcagaaacacctgatgtac

SEQ ID NO: 7857 - DNA, 21 bp, synthetic construct
  source 1..21: mol_type = other DNA; mol_type = other DNA
tattccaggatgggacacaac

SEQ ID NO: 7858 - DNA, 21 bp, synthetic construct
  source 1..21: mol_type = other DNA; mol_type = other DNA
tatacccgaactcaggcctat

SEQ ID NO: 7859 - DNA, 21 bp, synthetic construct
  source 1..21: mol_type = other DNA; mol_type = other DNA
tggtgccgagaatgcatgaac

SEQ ID NO: 7860 - DNA, 21 bp, synthetic construct
  source 1..21: mol_type = other DNA; mol_type = other DNA
aactccccttataggccgttc

SEQ ID NO: 7861 - DNA, 21 bp, synthetic construct
  source 1..21: mol_type = other DNA; mol_type = other DNA
gttagggaatatatgtcctat

SEQ ID NO: 7862 - DNA, 21 bp, synthetic construct
  source 1..21: mol_type = other DNA; mol_type = other DNA
tatcatcgtgcacagatgaac

SEQ ID NO: 7863 - DNA, 21 bp, synthetic construct
  source 1..21: mol_type = other DNA; mol_type = other DNA
acgaacgagttctacggttgg

SEQ ID NO: 7864 - DNA, 21 bp, synthetic construct
  source 1..21: mol_type = other DNA; mol_type = other DNA
tatgcccgacagaaccataac

SEQ ID NO: 7865 - DNA, 21 bp, synthetic construct
  source 1..21: mol_type = other DNA; mol_type = other DNA
tactctcgcaacgcagacaat

SEQ ID NO: 7866 - DNA, 21 bp, synthetic construct
  source 1..21: mol_type = other DNA; mol_type = other DNA
taccaccgccttggatcaact

SEQ ID NO: 7867 - DNA, 21 bp, synthetic construct
  source 1..21: mol_type = other DNA; mol_type = other DNA
cgaaacgagtatacgacgtac

SEQ ID NO: 7868 - DNA, 21 bp, synthetic construct
  source 1..21: mol_type = other DNA; mol_type = other DNA
taccacaggtcaagtagcaat

SEQ ID NO: 7869 - DNA, 21 bp, synthetic construct
  source 1..21: mol_type = other DNA; mol_type = other DNA
tatcatcgattaggtagcacg

SEQ ID NO: 7870 - DNA, 21 bp, synthetic construct
  source 1..21: mol_type = other DNA; mol_type = other DNA
cgcaatgaatacaccacttat

SEQ ID NO: 7871 - DNA, 21 bp, synthetic construct
  source 1..21: mol_type = other DNA; mol_type = other DNA
aattatgcttctcactcctgg

SEQ ID NO: 7872 - DNA, 21 bp, synthetic construct
  source 1..21: mol_type = other DNA; mol_type = other DNA
atgctctgcgtcgcaggcgat

SEQ ID NO: 7873 - DNA, 21 bp, synthetic construct
  source 1..21: mol_type = other DNA; mol_type = other DNA
cgttgtggcgattgcgtattt

SEQ ID NO: 7874 - DNA, 21 bp, synthetic construct
  source 1..21: mol_type = other DNA; mol_type = other DNA
tatgctaggttaaaccataac

SEQ ID NO: 7875 - DNA, 21 bp, synthetic construct
  source 1..21: mol_type = other DNA; mol_type = other DNA
ggctacgcaggtaagaggaat

SEQ ID NO: 7876 - DNA, 21 bp, synthetic construct
  source 1..21: mol_type = other DNA; mol_type = other DNA
ctatccaagttatcctgcaat

SEQ ID NO: 7877 - DNA, 21 bp, synthetic construct
  source 1..21: mol_type = other DNA; mol_type = other DNA
tactctcgtatgggtcataat

SEQ ID NO: 7878 - DNA, 21 bp, synthetic construct
  source 1..21: mol_type = other DNA; mol_type = other DNA
aataattgcgcggacaatttc

SEQ ID NO: 7879 - DNA, 21 bp, synthetic construct
  source 1..21: mol_type = other DNA; mol_type = other DNA
tcttctcccaaccttagctgg

SEQ ID NO: 7880 - DNA, 21 bp, synthetic construct
  source 1..21: mol_type = other DNA; mol_type = other DNA
tgtgcatttaccgggacgcgc

SEQ ID NO: 7881 - DNA, 21 bp, synthetic construct
  source 1..21: mol_type = other DNA; mol_type = other DNA
cgttatgaagcctctaactgg

SEQ ID NO: 7882 - DNA, 21 bp, synthetic construct
  source 1..21: mol_type = other DNA; mol_type = other DNA
cgcaacgacttccaagtctat

SEQ ID NO: 7883 - DNA, 21 bp, synthetic construct
  source 1..21: mol_type = other DNA; mol_type = other DNA
tacgcccgtctaaatcacaat

SEQ ID NO: 7884 - DNA, 21 bp, synthetic construct
  source 1..21: mol_type = other DNA; mol_type = other DNA
gtacgcgagtacatgtcttac

SEQ ID NO: 7885 - DNA, 21 bp, synthetic construct
  source 1..21: mol_type = other DNA; mol_type = other DNA
ctttggaaaaccggtcacaat

SEQ ID NO: 7886 - DNA, 21 bp, synthetic construct
  source 1..21: mol_type = other DNA; mol_type = other DNA
acttacgctagcagcaactgg

SEQ ID NO: 7887 - DNA, 21 bp, synthetic construct
  source 1..21: mol_type = other DNA; mol_type = other DNA
ggagagtggtgtgtgaagaat

SEQ ID NO: 7888 - DNA, 21 bp, synthetic construct
  source 1..21: mol_type = other DNA; mol_type = other DNA
tatcatcgttcgtcttctaac

SEQ ID NO: 7889 - DNA, 21 bp, synthetic construct
  source 1..21: mol_type = other DNA; mol_type = other DNA
ttgtggaagactgggcataac

SEQ ID NO: 7890 - DNA, 21 bp, synthetic construct
  source 1..21: mol_type = other DNA; mol_type = other DNA
aagaatatgtggcaaaattca

SEQ ID NO: 7891 - DNA, 21 bp, synthetic construct
  source 1..21: mol_type = other DNA; mol_type = other DNA
cagcacggacactcccagtgg

SEQ ID NO: 7892 - DNA, 21 bp, synthetic construct
  source 1..21: mol_type = other DNA; mol_type = other DNA
agaaatgattttcaggtttac

SEQ ID NO: 7893 - DNA, 21 bp, synthetic construct
  source 1..21: mol_type = other DNA; mol_type = other DNA
accgaaacaaagttttgtaat

SEQ ID NO: 7894 - DNA, 21 bp, synthetic construct
  source 1..21: mol_type = other DNA; mol_type = other DNA
cgatacgaggcaagtaattgg

SEQ ID NO: 7895 - DNA, 21 bp, synthetic construct
  source 1..21: mol_type = other DNA; mol_type = other DNA
tattggaaaagccagacagat

SEQ ID NO: 7896 - DNA, 21 bp, synthetic construct
  source 1..21: mol_type = other DNA; mol_type = other DNA
tcatccccgaatctctcgtgg

SEQ ID NO: 7897 - DNA, 21 bp, synthetic construct
  source 1..21: mol_type = other DNA; mol_type = other DNA
tgtacatctgatagctttccc

SEQ ID NO: 7898 - DNA, 21 bp, synthetic construct
  source 1..21: mol_type = other DNA; mol_type = other DNA
tggtgtcgtgagtgtatgaat

SEQ ID NO: 7899 - DNA, 21 bp, synthetic construct
  source 1..21: mol_type = other DNA; mol_type = other DNA
catagtcgggtcggccataac

SEQ ID NO: 7900 - DNA, 21 bp, synthetic construct
  source 1..21: mol_type = other DNA; mol_type = other DNA
tactggaagtcacaaaccgac

SEQ ID NO: 7901 - DNA, 21 bp, synthetic construct
  source 1..21: mol_type = other DNA; mol_type = other DNA
tacgcgaggcacggacagaat

SEQ ID NO: 7902 - DNA, 21 bp, synthetic construct
  source 1..21: mol_type = other DNA; mol_type = other DNA
tcctcaccatactctcaattc

SEQ ID NO: 7903 - DNA, 21 bp, synthetic construct
  source 1..21: mol_type = other DNA; mol_type = other DNA
cactcgcgcgtgggtcacaat

SEQ ID NO: 7904 - DNA, 21 bp, synthetic construct
  source 1..21: mol_type = other DNA; mol_type = other DNA
tactatcatgggatggctgtc

SEQ ID NO: 7905 - DNA, 21 bp, synthetic construct
  source 1..21: mol_type = other DNA; mol_type = other DNA
cggggtgagtggcagttcgca

SEQ ID NO: 7906 - DNA, 21 bp, synthetic construct
  source 1..21: mol_type = other DNA; mol_type = other DNA
atgcactgggacgcactccat

SEQ ID NO: 7907 - DNA, 21 bp, synthetic construct
  source 1..21: mol_type = other DNA; mol_type = other DNA
tatgcccgccatggccaaaac

SEQ ID NO: 7908 - DNA, 21 bp, synthetic construct
  source 1..21: mol_type = other DNA; mol_type = other DNA
tattaccacggtatggcggtt

SEQ ID NO: 7909 - DNA, 21 bp, synthetic construct
  source 1..21: mol_type = other DNA; mol_type = other DNA
agtccgtttatgaggcgtgag

SEQ ID NO: 7910 - DNA, 21 bp, synthetic construct
  source 1..21: mol_type = other DNA; mol_type = other DNA
aatgctttggtggggcgggat

SEQ ID NO: 7911 - DNA, 21 bp, synthetic construct
  source 1..21: mol_type = other DNA; mol_type = other DNA
tatgtggttacgcatcggaat

SEQ ID NO: 7912 - DNA, 21 bp, synthetic construct
  source 1..21: mol_type = other DNA; mol_type = other DNA
ggtcgttttagtgaggggcgt

SEQ ID NO: 7913 - DNA, 21 bp, synthetic construct
  source 1..21: mol_type = other DNA; mol_type = other DNA
acgaagtggggtgcgcatgtt

SEQ ID NO: 7914 - DNA, 21 bp, synthetic construct
  source 1..21: mol_type = other DNA; mol_type = other DNA
ctgaggtattctcggactgag

SEQ ID NO: 7915 - DNA, 21 bp, synthetic construct
  source 1..21: mol_type = other DNA; mol_type = other DNA
tttcgggggaattgtgggcct

SEQ ID NO: 7916 - DNA, 21 bp, synthetic construct
  source 1..21: mol_type = other DNA; mol_type = other DNA
gggcctggtgcggggtgtaat

SEQ ID NO: 7917 - DNA, 21 bp, synthetic construct
  source 1..21: mol_type = other DNA; mol_type = other DNA
tattttagtaagcagattgct

SEQ ID NO: 7918 - DNA, 21 bp, synthetic construct
  source 1..21: mol_type = other DNA; mol_type = other DNA
gatttgtctgataggaggtgg

SEQ ID NO: 7919 - DNA, 21 bp, synthetic construct
  source 1..21: mol_type = other DNA; mol_type = other DNA
cggaagcttccgggggttgct

SEQ ID NO: 7920 - DNA, 21 bp, synthetic construct
  source 1..21: mol_type = other DNA; mol_type = other DNA
gggcgtgttgttagtaagccg

SEQ ID NO: 7921 - DNA, 21 bp, synthetic construct
  source 1..21: mol_type = other DNA; mol_type = other DNA
ttgagggatggtactcctagt

SEQ ID NO: 7922 - DNA, 21 bp, synthetic construct
  source 1..21: mol_type = other DNA; mol_type = other DNA
tttgatgagaaggtgaggcgg

SEQ ID NO: 7923 - DNA, 21 bp, synthetic construct
  source 1..21: mol_type = other DNA; mol_type = other DNA
gttcaggttggtcgggcgtgt

SEQ ID NO: 7924 - DNA, 21 bp, synthetic construct
  source 1..21: mol_type = other DNA; mol_type = other DNA
gttatggaggctagggcgtgg

SEQ ID NO: 7925 - DNA, 21 bp, synthetic construct
  source 1..21: mol_type = other DNA; mol_type = other DNA
ggtgttgctggttgtgtggct

SEQ ID NO: 7926 - DNA, 21 bp, synthetic construct
  source 1..21: mol_type = other DNA; mol_type = other DNA
aattcttattcgcgtgcgttt

SEQ ID NO: 7927 - DNA, 21 bp, synthetic construct
  source 1..21: mol_type = other DNA; mol_type = other DNA
atgcggcttagtcggcaggat

SEQ ID NO: 7928 - DNA, 21 bp, synthetic construct
  source 1..21: mol_type = other DNA; mol_type = other DNA
cttttggagtctagtaagtgg

SEQ ID NO: 7929 - DNA, 21 bp, synthetic construct
  source 1..21: mol_type = other DNA; mol_type = other DNA
agttcgctttgtttgcgtgag

SEQ ID NO: 7930 - DNA, 21 bp, synthetic construct
  source 1..21: mol_type = other DNA; mol_type = other DNA
ggtggtcctgggtctatttgg

SEQ ID NO: 7931 - DNA, 21 bp, synthetic construct
  source 1..21: mol_type = other DNA; mol_type = other DNA
tattatcggggtccgtcgggt

SEQ ID NO: 7932 - DNA, 21 bp, synthetic construct
  source 1..21: mol_type = other DNA; mol_type = other DNA
gggcttggttcgacgtgttcg

SEQ ID NO: 7933 - DNA, 21 bp, synthetic construct
  source 1..21: mol_type = other DNA; mol_type = other DNA
tatgtgcggtcttcgatgggt

SEQ ID NO: 7934 - DNA, 21 bp, synthetic construct
  source 1..21: mol_type = other DNA; mol_type = other DNA
tgtggtgggcttagtcgtggt

SEQ ID NO: 7935 - DNA, 21 bp, synthetic construct
  source 1..21: mol_type = other DNA; mol_type = other DNA
tgggctttgaggcggatggag

SEQ ID NO: 7936 - DNA, 21 bp, synthetic construct
  source 1..21: mol_type = other DNA; mol_type = other DNA
tgtatgtcggataagagggcg

SEQ ID NO: 7937 - DNA, 21 bp, synthetic construct
  source 1..21: mol_type = other DNA; mol_type = other DNA
tgttcgatgattaataagtct

SEQ ID NO: 7938 - DNA, 21 bp, synthetic construct
  source 1..21: mol_type = other DNA; mol_type = other DNA
gatccggttgctcgtagttgg

SEQ ID NO: 7939 - DNA, 21 bp, synthetic construct
  source 1..21: mol_type = other DNA; mol_type = other DNA
gagtcttcttcgcggacgtgg

SEQ ID NO: 7940 - DNA, 21 bp, synthetic construct
  source 1..21: mol_type = other DNA; mol_type = other DNA
ctgagtcgtgctagtgtgaat

SEQ ID NO: 7941 - DNA, 21 bp, synthetic construct
  source 1..21: mol_type = other DNA; mol_type = other DNA
gatccgtcttggaagcgggtt

SEQ ID NO: 7942 - DNA, 21 bp, synthetic construct
  source 1..21: mol_type = other DNA; mol_type = other DNA
tatgggcagggttatggtcgg

SEQ ID NO: 7943 - DNA, 21 bp, synthetic construct
  source 1..21: mol_type = other DNA; mol_type = other DNA
ttggatgctaagtgtatgccg

SEQ ID NO: 7944 - DNA, 21 bp, synthetic construct
  source 1..21: mol_type = other DNA; mol_type = other DNA
tattttgctggtcgtattgat

SEQ ID NO: 7945 - DNA, 21 bp, synthetic construct
  source 1..21: mol_type = other DNA; mol_type = other DNA
tattttagtggtcgtgtggct

SEQ ID NO: 7946 - DNA, 21 bp, synthetic construct
  source 1..21: mol_type = other DNA; mol_type = other DNA
tattctcggcttctgcctatg

SEQ ID NO: 7947 - DNA, 21 bp, synthetic construct
  source 1..21: mol_type = other DNA; mol_type = other DNA
tattctcggattatggctaat

SEQ ID NO: 7948 - DNA, 21 bp, synthetic construct
  source 1..21: mol_type = other DNA; mol_type = other DNA
gtgcgtcatcggagtgagttg

SEQ ID NO: 7949 - DNA, 21 bp, synthetic construct
  source 1..21: mol_type = other DNA; mol_type = other DNA
gatatggagtcggctgtttgg

SEQ ID NO: 7950 - DNA, 21 bp, synthetic construct
  source 1..21: mol_type = other DNA; mol_type = other DNA
tggacgactcggattagtcat

SEQ ID NO: 7951 - DNA, 21 bp, synthetic construct
  source 1..21: mol_type = other DNA; mol_type = other DNA
catcgttttctgaagggggag

SEQ ID NO: 7952 - DNA, 21 bp, synthetic construct
  source 1..21: mol_type = other DNA; mol_type = other DNA
tgggttgggggtcggagtaat

SEQ ID NO: 7953 - DNA, 21 bp, synthetic construct
  source 1..21: mol_type = other DNA; mol_type = other DNA
cttcataggcagctgccgctg

SEQ ID NO: 7954 - DNA, 21 bp, synthetic construct
  source 1..21: mol_type = other DNA; mol_type = other DNA
tgtgagaagctgtcttctagg

SEQ ID NO: 7955 - DNA, 21 bp, synthetic construct
  source 1..21: mol_type = other DNA; mol_type = other DNA
ttgcgtcatattagtcatact

SEQ ID NO: 7956 - DNA, 21 bp, synthetic construct
  source 1..21: mol_type = other DNA; mol_type = other DNA
gcgtgggagcgtaagcttatg

SEQ ID NO: 7957 - DNA, 21 bp, synthetic construct
  source 1..21: mol_type = other DNA
tttgttgctcgtgtgcgtgat

SEQ ID NO: 7958 - DNA, 21 bp, synthetic construct
  source 1..21: mol_type = other DNA
tggggtcatcctagtagggcg

SEQ ID NO: 7959 - DNA, 21 bp, synthetic construct
  source 1..21: mol_type = other DNA
gctgagagggggtgttgtggt

SEQ ID NO: 7960 - DNA, 21 bp, synthetic construct
  source 1..21: mol_type = other DNA
aggatggagtcgagtgtttgg

SEQ ID NO: 7961 - DNA, 21 bp, synthetic construct
  source 1..21: mol_type = other DNA
tgtgttagtgtgggtagggct

SEQ ID NO: 7962 - DNA, 21 bp, synthetic construct
  source 1..21: mol_type = other DNA
gttgagtcgtctaatggtgtt

SEQ ID NO: 7963 - DNA, 21 bp, synthetic construct
  source 1..21: mol_type = other DNA
gattctgattttacgagttgg

SEQ ID NO: 7964 - DNA, 21 bp, synthetic construct
  source 1..21: mol_type = other DNA
gctcatcgtcttcttccttct

SEQ ID NO: 7965 - DNA, 21 bp, synthetic construct
  source 1..21: mol_type = other DNA
ggtcaggattctaggaggaat

SEQ ID NO: 7966 - DNA, 21 bp, synthetic construct
  source 1..21: mol_type = other DNA
gatcttaattctcggtcgtgg

SEQ ID NO: 7967 - DNA, 21 bp, synthetic construct
  source 1..21: mol_type = other DNA
gcgagtattacgacgtgtagg

SEQ ID NO: 7968 - DNA, 21 bp, synthetic construct
  source 1..21: mol_type = other DNA
gcttttactcatcgggtgcag

SEQ ID NO: 7969 - DNA, 21 bp, synthetic construct
  source 1..21: mol_type = other DNA
tatcttaagtctcagacgagt

SEQ ID NO: 7970 - DNA, 21 bp, synthetic construct
  source 1..21: mol_type = other DNA
tgtggtagttggcagcgtgag

SEQ ID NO: 7971 - DNA, 21 bp, synthetic construct
  source 1..21: mol_type = other DNA; mol_type = other DNA
tatagtcgtcttcatgttgat

SEQ ID NO: 7972 - DNA, 21 bp, synthetic construct
  source 1..21: mol_type = other DNA; mol_type = other DNA
cgtgtgtcgtgtcctccgccg

SEQ ID NO: 7973 - DNA, 21 bp, synthetic construct
  source 1..21: mol_type = other DNA; mol_type = other DNA
cgttcggattttgttacttat

SEQ ID NO: 7974 - DNA, 21 bp, synthetic construct
  source 1..21: mol_type = other DNA; mol_type = other DNA
cagtatgcgaggagtctggag

SEQ ID NO: 7975 - DNA, 21 bp, synthetic construct
  source 1..21: mol_type = other DNA; mol_type = other DNA
ggtatggagcctgtgcgttgg

SEQ ID NO: 7976 - DNA, 21 bp, synthetic construct
  source 1..21: mol_type = other DNA; mol_type = other DNA
gatatgaggatggggacttgg

SEQ ID NO: 7977 - DNA, 21 bp, synthetic construct
  source 1..21: mol_type = other DNA; mol_type = other DNA
cagccgccttcttgtaaggcg

SEQ ID NO: 7978 - DNA, 21 bp, synthetic construct
  source 1..21: mol_type = other DNA; mol_type = other DNA
gcccaaggggcggattcttgg

SEQ ID NO: 7979 - DNA, 21 bp, synthetic construct
  source 1..21: mol_type = other DNA; mol_type = other DNA
ggtgggcattatatgcttaag

SEQ ID NO: 7980 - DNA, 21 bp, synthetic construct
  source 1..21: mol_type = other DNA; mol_type = other DNA
tttagtaggcttgggattaat

SEQ ID NO: 7981 - DNA, 21 bp, synthetic construct
  source 1..21: mol_type = other DNA
tattcggttattgggcctaat

SEQ ID NO: 7982 - DNA, 21 bp, synthetic construct
  source 1..21: mol_type = other DNA; mol_type = other DNA
cgggatgtgacggtgtttcct

SEQ ID NO: 7983 - DNA, 21 bp, synthetic construct
  source 1..21: mol_type = other DNA; mol_type = other DNA
cgtaatagggatgtttatccg

SEQ ID NO: 7984 - DNA, 21 bp, synthetic construct
  source 1..21: mol_type = other DNA; mol_type = other DNA
ggtatggcggatagggcttgg

SEQ ID NO: 7985 - DNA, 21 bp, synthetic construct
  source 1..21: mol_type = other DNA; mol_type = other DNA
actgagtctactaatgggcgt

SEQ ID NO: 7986 - DNA, 21 bp, synthetic construct
  source 1..21: mol_type = other DNA; mol_type = other DNA
agtgttcggcaggagcgttat

SEQ ID NO: 7987 - DNA, 21 bp, synthetic construct
  source 1..21: mol_type = other DNA; mol_type = other DNA
ggggttgatcaggtgaggtgg

SEQ ID NO: 7988 - DNA, 21 bp, synthetic construct
  source 1..21: mol_type = other DNA; mol_type = other DNA
aatttgatgggttgtactggt

SEQ ID NO: 7989 - DNA, 21 bp, synthetic construct
  source 1..21: mol_type = other DNA; mol_type = other DNA
ggggctgagggtgtgcggtgg

SEQ ID NO: 7990 - DNA, 21 bp, synthetic construct
  source 1..21: mol_type = other DNA; mol_type = other DNA
gttatggaggataggatttgg

SEQ ID NO: 7991 - DNA, 21 bp, synthetic construct
  source 1..21: mol_type = other DNA; mol_type = other DNA
ctgacgtctcgtgagggtatt

SEQ ID NO: 7992 - DNA, 21 bp, synthetic construct
  source 1..21: mol_type = other DNA; mol_type = other DNA
tggagtacgcataaggctttt

SEQ ID NO: 7993 - DNA, 21 bp, synthetic construct
  source 1..21: mol_type = other DNA; mol_type = other DNA
cgggaggaggtttcgatttgg

SEQ ID NO: 7994 - DNA, 21 bp, synthetic construct
  source 1..21: mol_type = other DNA; mol_type = other DNA
aatatggcgtcggcggggtgg

SEQ ID NO: 7995 - DNA, 21 bp, synthetic construct
  source 1..21: mol_type = other DNA; mol_type = other DNA
cttatttctggtgatggtccg

SEQ ID NO: 7996 - DNA, 21 bp, synthetic construct
  source 1..21: mol_type = other DNA; mol_type = other DNA
tcggcttatagtgctaagtat

SEQ ID NO: 7997 - DNA, 21 bp, synthetic construct
  source 1..21: mol_type = other DNA; mol_type = other DNA
tatgctagggcggggcctgat

SEQ ID NO: 7998 - DNA, 21 bp, synthetic construct
  source 1..21: mol_type = other DNA; mol_type = other DNA
gtggagtcttcgcggttgtgg

SEQ ID NO: 7999 - DNA, 21 bp, synthetic construct
  source 1..21: mol_type = other DNA; mol_type = other DNA
gatatgtcgtcggttgcgtgg

SEQ ID NO: 8000 - DNA, 21 bp, synthetic construct
  source 1..21: mol_type = other DNA; mol_type = other DNA
gattcttttcgggggtatgat

SEQ ID NO: 8001 - DNA, 21 bp, synthetic construct
  source 1..21: mol_type = other DNA; mol_type = other DNA
gggggtcctggttcgatttgg

SEQ ID NO: 8002 - DNA, 21 bp, synthetic construct
  source 1..21: mol_type = other DNA; mol_type = other DNA
gatctggcgagtccggattgg

SEQ ID NO: 8003 - DNA, 21 bp, synthetic construct
  source 1..21: mol_type = other DNA; mol_type = other DNA
gtgagtacgcattgttgtgcg

SEQ ID NO: 8004 - DNA, 21 bp, synthetic construct
  source 1..21: mol_type = other DNA; mol_type = other DNA
gtgctgagttctaatgtttgg

SEQ ID NO: 8005 - DNA, 21 bp, synthetic construct
  source 1..21: mol_type = other DNA; mol_type = other DNA
gtgatgcctgatagggtttgg

SEQ ID NO: 8006 - DNA, 21 bp, synthetic construct
  source 1..21: mol_type = other DNA; mol_type = other DNA
aagatggaggataggagttgg

SEQ ID NO: 8007 - DNA, 21 bp, synthetic construct
  source 1..21: mol_type = other DNA; mol_type = other DNA
aggtcgatggttgggtgtgat

SEQ ID NO: 8008 - DNA, 21 bp, synthetic construct
  source 1..21: mol_type = other DNA; mol_type = other DNA
agtttgagtgataggggttgg

SEQ ID NO: 8009 - DNA, 21 bp, synthetic construct
  source 1..21: mol_type = other DNA; mol_type = other DNA
acttttgcgcatacgaatcgt

SEQ ID NO: 8010 - DNA, 21 bp, synthetic construct
  source 1..21: mol_type = other DNA; mol_type = other DNA
ttgagtaaggttggtacgaat

SEQ ID NO: 8011 - DNA, 21 bp, synthetic construct
  source 1..21: mol_type = other DNA; mol_type = other DNA
tcgggtaattatacggctcgt

SEQ ID NO: 8012 - DNA, 21 bp, synthetic construct
  source 1..21: mol_type = other DNA; mol_type = other DNA
tatcatagggctgctgcgttg

SEQ ID NO: 8013 - DNA, 21 bp, synthetic construct
  source 1..21: mol_type = other DNA; mol_type = other DNA
aatatgagtgcggggacgtgg

SEQ ID NO: 8014 - DNA, 21 bp, synthetic construct
  source 1..21: mol_type = other DNA; mol_type = other DNA
gcgaagggttgggttcgggat

SEQ ID NO: 8015 - DNA, 21 bp, synthetic construct
  source 1..21: mol_type = other DNA; mol_type = other DNA
gttatggcgagtcagggttgg

SEQ ID NO: 8016 - DNA, 21 bp, synthetic construct
  source 1..21: mol_type = other DNA; mol_type = other DNA
gatttgagttctgggaattgg

SEQ ID NO: 8017 - DNA, 21 bp, synthetic construct
  source 1..21: mol_type = other DNA; mol_type = other DNA
aagttggatgattatggttgg

SEQ ID NO: 8018 - DNA, 21 bp, synthetic construct
  source 1..21: mol_type = other DNA; mol_type = other DNA
tattcgaggttggatgtgctg

SEQ ID NO: 8019 - DNA, 21 bp, synthetic construct
  source 1..21: mol_type = other DNA; mol_type = other DNA
attttgtcggatcgttcttgg

SEQ ID NO: 8020 - DNA, 21 bp, synthetic construct
  source 1..21: mol_type = other DNA; mol_type = other DNA
tattcgagggttggttcgggt

SEQ ID NO: 8021 - DNA, 21 bp, synthetic construct
  source 1..21: mol_type = other DNA; mol_type = other DNA
ggttttgcgaggctgcgggat

SEQ ID NO: 8022 - DNA, 21 bp, synthetic construct
  source 1..21: mol_type = other DNA; mol_type = other DNA
cttagtcgtattggtactaat

SEQ ID NO: 8023 - DNA, 21 bp, synthetic construct
  source 1..21: mol_type = other DNA; mol_type = other DNA
ggtggggagtcgtcgatttgg

SEQ ID NO: 8024 - DNA, 21 bp, synthetic construct
  source 1..21: mol_type = other DNA; mol_type = other DNA
attagtgagtttagtggttat

SEQ ID NO: 8025 - DNA, 21 bp, synthetic construct
  source 1..21: mol_type = other DNA; mol_type = other DNA
aggcttgcggatgcgtatccg

SEQ ID NO: 8026 - DNA, 21 bp, synthetic construct
  source 1..21: mol_type = other DNA; mol_type = other DNA
tggttttctgggcagattgct

SEQ ID NO: 8027 - DNA, 21 bp, synthetic construct
  source 1..21: mol_type = other DNA; mol_type = other DNA
tgtacttctaagactgggcat

SEQ ID NO: 8028 - DNA, 21 bp, synthetic construct
  source 1..21: mol_type = other DNA; mol_type = other DNA
aggacgaatcgggttgagtgg

SEQ ID NO: 8029 - DNA, 21 bp, synthetic construct
  source 1..21: mol_type = other DNA; mol_type = other DNA
gttgaggcgtctaggtcttgg

SEQ ID NO: 8030 - DNA, 21 bp, synthetic construct
  source 1..21: mol_type = other DNA; mol_type = other DNA
gtgctttctgcgagtagttgg

SEQ ID NO: 8031 - DNA, 21 bp, synthetic construct
  source 1..21: mol_type = other DNA; mol_type = other DNA
gttctgtctgagcggagttgg

SEQ ID NO: 8032 - DNA, 21 bp, synthetic construct
  source 1..21: mol_type = other DNA; mol_type = other DNA
ctttcggcgttgtctgttaat

SEQ ID NO: 8033 - DNA, 21 bp, synthetic construct
  source 1..21: mol_type = other DNA; mol_type = other DNA
cgtggtggtggtctgtttgtt

SEQ ID NO: 8034 - DNA, 21 bp, synthetic construct
  source 1..21: mol_type = other DNA; mol_type = other DNA
acggagtcgactcatggtcgg

SEQ ID NO: 8035 - DNA, 21 bp, synthetic construct
  source 1..21: mol_type = other DNA; mol_type = other DNA
tatgtgcggtctgatactgct

SEQ ID NO: 8036 - DNA, 21 bp, synthetic construct
  source 1..21: mol_type = other DNA; mol_type = other DNA
agggaggcggtttctacgtgg

SEQ ID NO: 8037 - DNA, 21 bp, synthetic construct
  source 1..21: mol_type = other DNA; mol_type = other DNA
tattattcgggtgttaagttg

SEQ ID NO: 8038 - DNA, 21 bp, synthetic construct
  source 1..21: mol_type = other DNA; mol_type = other DNA
tatcgtatgtctcttgagcgt

SEQ ID NO: 8039 - DNA, 21 bp, synthetic construct
  source 1..21: mol_type = other DNA; mol_type = other DNA
ttgatggagcagaggacttgg

SEQ ID NO: 8040 - DNA, 21 bp, synthetic construct
  source 1..21: mol_type = other DNA; mol_type = other DNA
ggttgtcggcatggggatatt

SEQ ID NO: 8041 - DNA, 21 bp, synthetic construct
  source 1..21: mol_type = other DNA; mol_type = other DNA
tggcgtggtagtcagcatgtt

SEQ ID NO: 8042 - DNA, 21 bp, synthetic construct
  source 1..21: mol_type = other DNA; mol_type = other DNA
ggttctgagtttgtgtcgtat

SEQ ID NO: 8043 - DNA, 21 bp, synthetic construct
  source 1..21: mol_type = other DNA; mol_type = other DNA
agtcttagtgatcggggttgg

SEQ ID NO: 8044 - DNA, 21 bp, synthetic construct
  source 1..21: mol_type = other DNA; mol_type = other DNA
tattggcatggtaagccggag

SEQ ID NO: 8045 - DNA, 21 bp, synthetic construct
  source 1..21: mol_type = other DNA; mol_type = other DNA
ttttttcgtggtaatatgggg

SEQ ID NO: 8046 - DNA, 21 bp, synthetic construct
  source 1..21: mol_type = other DNA; mol_type = other DNA
gtggagtcgtctagtcgttgg

SEQ ID NO: 8047 - DNA, 21 bp, synthetic construct
  source 1..21: mol_type = other DNA; mol_type = other DNA
tgtgggaaggctcatagttcg

SEQ ID NO: 8048 - DNA, 21 bp, synthetic construct
  source 1..21: mol_type = other DNA
gatatgtcggtggggaagtgg

SEQ ID NO: 8049 - DNA, 21 bp, synthetic construct
  source 1..21: mol_type = other DNA
ttgctgtcttctcatgattgg

SEQ ID NO: 8050 - DNA, 21 bp, synthetic construct
  source 1..21: mol_type = other DNA; mol_type = other DNA
atgagggatgggactagtagt

SEQ ID NO: 8051 - DNA, 21 bp, synthetic construct
  source 1..21: mol_type = other DNA; mol_type = other DNA
tatgttaagtcggatgttggt

SEQ ID NO: 8052 - DNA, 21 bp, synthetic construct
  source 1..21: mol_type = other DNA; mol_type = other DNA
tggtcgcgtgtgggggtgaat

SEQ ID NO: 8053 - DNA, 21 bp, synthetic construct
  source 1..21: mol_type = other DNA; mol_type = other DNA
tggtcttataagtctaatggt

SEQ ID NO: 8054 - DNA, 21 bp, synthetic construct
  source 1..21: mol_type = other DNA; mol_type = other DNA
tattggggtggggttgttagt

SEQ ID NO: 8055 - DNA, 21 bp, synthetic construct
  source 1..21: mol_type = other DNA; mol_type = other DNA
aagatggaggcgatgacgtgg

SEQ ID NO: 8056 - DNA, 21 bp, synthetic construct
  source 1..21: mol_type = other DNA; mol_type = other DNA
cttagtcggttggggggtggg

SEQ ID NO: 8057 - DNA, 21 bp, synthetic construct
  source 1..21: mol_type = other DNA; mol_type = other DNA
ttgatggaggcggctacttgg

SEQ ID NO: 8058 - DNA, 21 bp, synthetic construct
  source 1..21: mol_type = other DNA; mol_type = other DNA
aagctggattatcttgggacg

SEQ ID NO: 8059 - DNA, 21 bp, synthetic construct
  source 1..21: mol_type = other DNA; mol_type = other DNA
ctttcgagggcttcgcatgat

SEQ ID NO: 8060 - DNA, 21 bp, synthetic construct
  source 1..21: mol_type = other DNA; mol_type = other DNA
tattttagtggtgttcagccg

SEQ ID NO: 8061 - DNA, 21 bp, synthetic construct
  source 1..21: mol_type = other DNA; mol_type = other DNA
ctgtcgcgtgttagtcctgat

SEQ ID NO: 8062 - DNA, 21 bp, synthetic construct
  source 1..21: mol_type = other DNA; mol_type = other DNA
tggcgtgctgggaaggattat

SEQ ID NO: 8063 - DNA, 21 bp, synthetic construct
  source 1..21: mol_type = other DNA; mol_type = other DNA
aggttggagagtgttcagtgg

SEQ ID NO: 8064 - DNA, 21 bp, synthetic construct
  source 1..21: mol_type = other DNA; mol_type = other DNA
tatttttctggtagggatgag

SEQ ID NO: 8065 - DNA, 21 bp, synthetic construct
  source 1..21: mol_type = other DNA; mol_type = other DNA
attttgaagtgtacgaataat

SEQ ID NO: 8066 - DNA, 21 bp, synthetic construct
  source 1..21: mol_type = other DNA; mol_type = other DNA
tattctcgtgtggcgccggat

SEQ ID NO: 8067 - DNA, 21 bp, synthetic construct
  source 1..21: mol_type = other DNA; mol_type = other DNA
cgtttggagtctactcattgg

SEQ ID NO: 8068 - DNA, 21 bp, synthetic construct
  source 1..21: mol_type = other DNA; mol_type = other DNA
tattggtctggtactgtgacg

SEQ ID NO: 8069 - DNA, 21 bp, synthetic construct
  source 1..21: mol_type = other DNA; mol_type = other DNA
tatgctcgtcttagtattaat

SEQ ID NO: 8070 - DNA, 21 bp, synthetic construct
  source 1..21: mol_type = other DNA; mol_type = other DNA
aggggggagtatcattatccg

SEQ ID NO: 8071 - DNA, 21 bp, synthetic construct
  source 1..21: mol_type = other DNA; mol_type = other DNA
tttgctgcgaagtggtcgagt

SEQ ID NO: 8072 - DNA, 21 bp, synthetic construct
  source 1..21: mol_type = other DNA; mol_type = other DNA
tatgtgaagagtcagactatt

SEQ ID NO: 8073 - DNA, 21 bp, synthetic construct
  source 1..21: mol_type = other DNA; mol_type = other DNA
agtctttgtaagactacgtcg

SEQ ID NO: 8074 - DNA, 21 bp, synthetic construct
  source 1..21: mol_type = other DNA; mol_type = other DNA
cctcttagttctggtgtttgg

SEQ ID NO: 8075 - DNA, 21 bp, synthetic construct
  source 1..21: mol_type = other DNA; mol_type = other DNA
ttgatgggtggtgggacgtgg

SEQ ID NO: 8076 - DNA, 21 bp, synthetic construct
  source 1..21: mol_type = other DNA; mol_type = other DNA
ggttcgccgggggtgtcgtgg

SEQ ID NO: 8077 - DNA, 21 bp, synthetic construct
  source 1..21: mol_type = other DNA; mol_type = other DNA
caggatgattatcttacgtgg

SEQ ID NO: 8078 - DNA, 21 bp, synthetic construct
  source 1..21: mol_type = other DNA; mol_type = other DNA
tatgtgaagagtcagcagtct

SEQ ID NO: 8079 - DNA, 21 bp, synthetic construct
  source 1..21: mol_type = other DNA; mol_type = other DNA
cagaatgagtatgttatttat

SEQ ID NO: 8080 - DNA, 21 bp, synthetic construct
  source 1..21: mol_type = other DNA; mol_type = other DNA
gttccggggcgttctggtttt

SEQ ID NO: 8081 - DNA, 21 bp, synthetic construct
  source 1..21: mol_type = other DNA; mol_type = other DNA
ttttggagtgggaaggctgct

SEQ ID NO: 8082 - DNA, 21 bp, synthetic construct
  source 1..21: mol_type = other DNA; mol_type = other DNA
tcgacgtatgatagttttccg

SEQ ID NO: 8083 - DNA, 21 bp, synthetic construct
  source 1..21: mol_type = other DNA; mol_type = other DNA
tattttagtggtcggcatgag

SEQ ID NO: 8084 - DNA, 21 bp, synthetic construct
  source 1..21: mol_type = other DNA
cattctaagtctggtgggtgg

SEQ ID NO: 8085 - DNA, 21 bp, synthetic construct
  source 1..21: mol_type = other DNA; mol_type = other DNA
ggtgggccggggtctaattgg

SEQ ID NO: 8086 - DNA, 21 bp, synthetic construct
  source 1..21: mol_type = other DNA; mol_type = other DNA
ggttctcctggttcgatttgg

SEQ ID NO: 8087 - DNA, 21 bp, synthetic construct
  source 1..21: mol_type = other DNA; mol_type = other DNA
gttagtgagtttgcttcgtat

SEQ ID NO: 8088 - DNA, 21 bp, synthetic construct
  source 1..21: mol_type = other DNA; mol_type = other DNA
cttcataagttgtcgaataat

SEQ ID NO: 8089 - DNA, 21 bp, synthetic construct
  source 1..21: mol_type = other DNA; mol_type = other DNA
ctttgtaagccgtgtttgact

SEQ ID NO: 8090 - DNA, 21 bp, synthetic construct
  source 1..21: mol_type = other DNA; mol_type = other DNA
cgtagtttggattcttatccg

SEQ ID NO: 8091 - DNA, 21 bp, synthetic construct
  source 1..21: mol_type = other DNA; mol_type = other DNA
tgtgcgcctcgggtgtcgagt

SEQ ID NO: 8092 - DNA, 21 bp, synthetic construct
  source 1..21: mol_type = other DNA; mol_type = other DNA
ccgtatgcgaagagtccgctt

SEQ ID NO: 8093 - DNA, 21 bp, synthetic construct
  source 1..21: mol_type = other DNA; mol_type = other DNA
tctttgagttctcgggattgg

SEQ ID NO: 8094 - DNA, 21 bp, synthetic construct
  source 1..21: mol_type = other DNA; mol_type = other DNA
tgggttgataggacgaggggt

SEQ ID NO: 8095 - DNA, 21 bp, synthetic construct
  source 1..21: mol_type = other DNA; mol_type = other DNA
attatgcctgataggagttgg

SEQ ID NO: 8096 - DNA, 21 bp, synthetic construct
  source 1..21: mol_type = other DNA; mol_type = other DNA
attaattctcgtgagggtatt

SEQ ID NO: 8097 - DNA, 21 bp, synthetic construct
  source 1..21: mol_type = other DNA; mol_type = other DNA
ctgagtgatggtacgagtccg

SEQ ID NO: 8098 - DNA, 21 bp, synthetic construct
  source 1..21: mol_type = other DNA; mol_type = other DNA
tatgtgcggtctcagccgctt

SEQ ID NO: 8099 - DNA, 21 bp, synthetic construct
  source 1..21: mol_type = other DNA; mol_type = other DNA
tattttagtggggtgagggag

SEQ ID NO: 8100 - DNA, 21 bp, synthetic construct
  source 1..21: mol_type = other DNA; mol_type = other DNA
tatagtgcgtatcgtagtgtt

SEQ ID NO: 8101 - DNA, 21 bp, synthetic construct
  source 1..21: mol_type = other DNA; mol_type = other DNA
ggtggggagcattctacttgg

SEQ ID NO: 8102 - DNA, 21 bp, synthetic construct
  source 1..21: mol_type = other DNA; mol_type = other DNA
gtgatgctggatcgtggttgg

SEQ ID NO: 8103 - DNA, 21 bp, synthetic construct
  source 1..21: mol_type = other DNA; mol_type = other DNA
ggggggggggttgtgaagtat

SEQ ID NO: 8104 - DNA, 21 bp, synthetic construct
  source 1..21: mol_type = other DNA; mol_type = other DNA
tattggtcggaggttagggcg

SEQ ID NO: 8105 - DNA, 21 bp, synthetic construct
  source 1..21: mol_type = other DNA; mol_type = other DNA
attatgtcggataggctttgg

SEQ ID NO: 8106 - DNA, 21 bp, synthetic construct
  source 1..21: mol_type = other DNA; mol_type = other DNA
ttgcatagtaagctgcctaat

SEQ ID NO: 8107 - DNA, 21 bp, synthetic construct
  source 1..21: mol_type = other DNA; mol_type = other DNA
tattggtcgcatgtgaaggag

SEQ ID NO: 8108 - DNA, 21 bp, synthetic construct
  source 1..21: mol_type = other DNA; mol_type = other DNA
gcgcctgcggatcggggttgg

SEQ ID NO: 8109 - DNA, 21 bp, synthetic construct
  source 1..21: mol_type = other DNA; mol_type = other DNA
tattatagtggtcagcatgct

SEQ ID NO: 8110 - DNA, 21 bp, synthetic construct
  source 1..21: mol_type = other DNA; mol_type = other DNA
gatctgcggatggcgacttgg

SEQ ID NO: 8111 - DNA, 21 bp, synthetic construct
  source 1..21: mol_type = other DNA; mol_type = other DNA
gtggtgagtactaatggtgtt

SEQ ID NO: 8112 - DNA, 21 bp, synthetic construct
  source 1..21: mol_type = other DNA; mol_type = other DNA
ttgtcgagggttgggcagaat

SEQ ID NO: 8113 - DNA, 21 bp, synthetic construct
  source 1..21: mol_type = other DNA; mol_type = other DNA
tattttacggggagggagaag

SEQ ID NO: 8114 - DNA, 21 bp, synthetic construct
  source 1..21: mol_type = other DNA; mol_type = other DNA
tattggtctcaggttcgtgag

SEQ ID NO: 8115 - DNA, 21 bp, synthetic construct
  source 1..21: mol_type = other DNA; mol_type = other DNA
ctttcgaggctttcgccggtg

SEQ ID NO: 8116 - DNA, 21 bp, synthetic construct
  source 1..21: mol_type = other DNA; mol_type = other DNA
tctatgagtagtgctatgtgg

SEQ ID NO: 8117 - DNA, 21 bp, synthetic construct
  source 1..21: mol_type = other DNA; mol_type = other DNA
attggtgagtctaggctgtgg

SEQ ID NO: 8118 - DNA, 21 bp, synthetic construct
  source 1..21: mol_type = other DNA; mol_type = other DNA
gttcggtcgactaatggtgtt

SEQ ID NO: 8119 - DNA, 21 bp, synthetic construct
  source 1..21: mol_type = other DNA; mol_type = other DNA
tgtatgggtgcgcttccggag

SEQ ID NO: 8120 - DNA, 21 bp, synthetic construct
  source 1..21: mol_type = other DNA; mol_type = other DNA
gttttgtcttcggtttcttgg

SEQ ID NO: 8121 - DNA, 21 bp, synthetic construct
  source 1..21: mol_type = other DNA; mol_type = other DNA
attactagttcgaatggtatt

SEQ ID NO: 8122 - DNA, 21 bp, synthetic construct
  source 1..21: mol_type = other DNA; mol_type = other DNA
ttgagtaggactagtattgat

SEQ ID NO: 8123 - DNA, 21 bp, synthetic construct
  source 1..21: mol_type = other DNA; mol_type = other DNA
tattggtcgcaggttgttgag

SEQ ID NO: 8124 - DNA, 21 bp, synthetic construct
  source 1..21: mol_type = other DNA; mol_type = other DNA
gtgtattcgactaatgggatt

SEQ ID NO: 8125 - DNA, 21 bp, synthetic construct
  source 1..21: mol_type = other DNA; mol_type = other DNA
tcggaggcgttgactcgtagg

SEQ ID NO: 8126 - DNA, 21 bp, synthetic construct
  source 1..21: mol_type = other DNA; mol_type = other DNA
atgagggatggtacgaatgct

SEQ ID NO: 8127 - DNA, 21 bp, synthetic construct
  source 1..21: mol_type = other DNA; mol_type = other DNA
aagttggatgttggtaattgg

SEQ ID NO: 8128 - DNA, 21 bp, synthetic construct
  source 1..21: mol_type = other DNA; mol_type = other DNA
gataatgcttcgtctgtttgg

SEQ ID NO: 8129 - DNA, 21 bp, synthetic construct
  source 1..21: mol_type = other DNA; mol_type = other DNA
attttgtctagttctgggtgg

SEQ ID NO: 8130 - DNA, 21 bp, synthetic construct
  source 1..21: mol_type = other DNA; mol_type = other DNA
ctttatgagtctcgtgcgtgg

SEQ ID NO: 8131 - DNA, 21 bp, synthetic construct
  source 1..21: mol_type = other DNA; mol_type = other DNA
tattatggtcgtacgtcgagt

SEQ ID NO: 8132 - DNA, 21 bp, synthetic construct
  source 1..21: mol_type = other DNA; mol_type = other DNA
tttagtcggattgggggtggt

SEQ ID NO: 8133 - DNA, 21 bp, synthetic construct
  source 1..21: mol_type = other DNA; mol_type = other DNA
gtggcgcttaaggggtgggat

SEQ ID NO: 8134 - DNA, 21 bp, synthetic construct
  source 1..21: mol_type = other DNA; mol_type = other DNA
atgagtcgtgcgtcgtataat

SEQ ID NO: 8135 - DNA, 21 bp, synthetic construct
  source 1..21: mol_type = other DNA; mol_type = other DNA
tgtggtgtgggtcgtattgct

SEQ ID NO: 8136 - DNA, 21 bp, synthetic construct
  source 1..21: mol_type = other DNA; mol_type = other DNA
aaggatgattttagtgtgtat

SEQ ID NO: 8137 - DNA, 21 bp, synthetic construct
  source 1..21: mol_type = other DNA; mol_type = other DNA
tttgtttctaagaatggggtt

SEQ ID NO: 8138 - DNA, 21 bp, synthetic construct
  source 1..21: mol_type = other DNA; mol_type = other DNA
acgtggacgggtaataatgcg

SEQ ID NO: 8139 - DNA, 21 bp, synthetic construct
  source 1..21: mol_type = other DNA; mol_type = other DNA
aggggtgattctccgtcttgg

SEQ ID NO: 8140 - DNA, 21 bp, synthetic construct
  source 1..21: mol_type = other DNA; mol_type = other DNA
gatatggtttctcggagttgg

SEQ ID NO: 8141 - DNA, 21 bp, synthetic construct
  source 1..21: mol_type = other DNA; mol_type = other DNA
tattttacggggagtcagaat

SEQ ID NO: 8142 - DNA, 21 bp, synthetic construct
  source 1..21: mol_type = other DNA; mol_type = other DNA
gttacgtcgacgatgggtagg

SEQ ID NO: 8143 - DNA, 21 bp, synthetic construct
  source 1..21: mol_type = other DNA; mol_type = other DNA
gtgatggcggatcgtgcgtgg

SEQ ID NO: 8144 - DNA, 21 bp, synthetic construct
  source 1..21: mol_type = other DNA; mol_type = other DNA
gcttatcgtacggatagtcgt

SEQ ID NO: 8145 - DNA, 21 bp, synthetic construct
  source 1..21: mol_type = other DNA; mol_type = other DNA
tattttgcgggtaggttggcg

SEQ ID NO: 8146 - DNA, 21 bp, synthetic construct
  source 1..21: mol_type = other DNA; mol_type = other DNA
cagttggagtcgaggagttgg

SEQ ID NO: 8147 - DNA, 21 bp, synthetic construct
  source 1..21: mol_type = other DNA; mol_type = other DNA
aagatggattatagtacgcgt

SEQ ID NO: 8148 - DNA, 21 bp, synthetic construct
  source 1..21: mol_type = other DNA; mol_type = other DNA
ggtgagagttcggtgcggtgg

SEQ ID NO: 8149 - DNA, 21 bp, synthetic construct
  source 1..21: mol_type = other DNA; mol_type = other DNA
catagtaggctgaatgttgtt

SEQ ID NO: 8150 - DNA, 21 bp, synthetic construct
  source 1..21: mol_type = other DNA; mol_type = other DNA
ttgcctgatggggatgggcct

SEQ ID NO: 8151 - DNA, 21 bp, synthetic construct
  source 1..21: mol_type = other DNA; mol_type = other DNA
tattttactggggcttgggat

SEQ ID NO: 8152 - DNA, 21 bp, synthetic construct
  source 1..21: mol_type = other DNA; mol_type = other DNA
agggagtctggggtttcttgg

SEQ ID NO: 8153 - DNA, 21 bp, synthetic construct
  source 1..21: mol_type = other DNA; mol_type = other DNA
tatgagcctggttgtaaggag

SEQ ID NO: 8154 - DNA, 21 bp, synthetic construct
  source 1..21: mol_type = other DNA; mol_type = other DNA
ttggcgcgtgggggtcctgat

SEQ ID NO: 8155 - DNA, 21 bp, synthetic construct
  source 1..21: mol_type = other DNA
tatgcgcgtcagtctaataat

SEQ ID NO: 8156 - DNA, 21 bp, synthetic construct
  source 1..21: mol_type = other DNA
tggaaggctggtggtaaggtt

SEQ ID NO: 8157 - DNA, 21 bp, synthetic construct
  source 1..21: mol_type = other DNA
gagccggagcggggttggttt

SEQ ID NO: 8158 - DNA, 21 bp, synthetic construct
  source 1..21: mol_type = other DNA
cggggtgagtctcatagttgg

SEQ ID NO: 8159 - DNA, 21 bp, synthetic construct
  source 1..21: mol_type = other DNA
tattggaatgcgaatctggag

SEQ ID NO: 8160 - DNA, 21 bp, synthetic construct
  source 1..21: mol_type = other DNA
tattggtctggtgtgactgag

SEQ ID NO: 8161 - DNA, 21 bp, synthetic construct
  source 1..21: mol_type = other DNA; mol_type = other DNA
tctaggagtactaatggggtg

SEQ ID NO: 8162 - DNA, 21 bp, synthetic construct
  source 1..21: mol_type = other DNA; mol_type = other DNA
tattttacggggaggcttgat

SEQ ID NO: 8163 - DNA, 21 bp, synthetic construct
  source 1..21: mol_type = other DNA; mol_type = other DNA
tggtggtcgggttatgtggag

SEQ ID NO: 8164 - DNA, 21 bp, synthetic construct
  source 1..21: mol_type = other DNA; mol_type = other DNA
tattttactggtgtgagttcg

SEQ ID NO: 8165 - DNA, 21 bp, synthetic construct
  source 1..21: mol_type = other DNA; mol_type = other DNA
aggcctgtttgtcctactggt

SEQ ID NO: 8166 - DNA, 21 bp, synthetic construct
  source 1..21: mol_type = other DNA; mol_type = other DNA
tattggtcttctgtgcgtgag

SEQ ID NO: 8167 - DNA, 21 bp, synthetic construct
  source 1..21: mol_type = other DNA; mol_type = other DNA
ttgcatgttgctatgccgaat

SEQ ID NO: 8168 - DNA, 21 bp, synthetic construct
  source 1..21: mol_type = other DNA; mol_type = other DNA
ttgcataggttgtctgttgat

SEQ ID NO: 8169 - DNA, 21 bp, synthetic construct
  source 1..21: mol_type = other DNA; mol_type = other DNA
cggacttatgattcttttgcg

SEQ ID NO: 8170 - DNA, 21 bp, synthetic construct
  source 1..21: mol_type = other DNA; mol_type = other DNA
cgttcgttggagggttcggat

SEQ ID NO: 8171 - DNA, 21 bp, synthetic construct
  source 1..21: mol_type = other DNA; mol_type = other DNA
ctgcatcgtttgggggattcg

SEQ ID NO: 8172 - DNA, 21 bp, synthetic construct
  source 1..21: mol_type = other DNA; mol_type = other DNA
actcgggatagtcctatgttt

SEQ ID NO: 8173 - DNA, 21 bp, synthetic construct
  source 1..21: mol_type = other DNA; mol_type = other DNA
cttcgttcgggtatggggcct

SEQ ID NO: 8174 - DNA, 21 bp, synthetic construct
  source 1..21: mol_type = other DNA; mol_type = other DNA
gggagtggggaggagaggtgg

SEQ ID NO: 8175 - DNA, 21 bp, synthetic construct
  source 1..21: mol_type = other DNA; mol_type = other DNA
tggactcctatgtgtaaggcg

SEQ ID NO: 8176 - DNA, 21 bp, synthetic construct
  source 1..21: mol_type = other DNA; mol_type = other DNA
ttttggcatggtgttagtgat

SEQ ID NO: 8177 - DNA, 21 bp, synthetic construct
  source 1..21: mol_type = other DNA; mol_type = other DNA
ctgactaagttgtcgaataat

SEQ ID NO: 8178 - DNA, 21 bp, synthetic construct
  source 1..21: mol_type = other DNA; mol_type = other DNA
gtggggtatcggaatcaggtg

SEQ ID NO: 8179 - DNA, 21 bp, synthetic construct
  source 1..21: mol_type = other DNA; mol_type = other DNA
ctttcgcggttgtctcctgtg

SEQ ID NO: 8180 - DNA, 21 bp, synthetic construct
  source 1..21: mol_type = other DNA; mol_type = other DNA
ttgcgggagaggtatagtaat

SEQ ID NO: 8181 - DNA, 21 bp, synthetic construct
  source 1..21: mol_type = other DNA; mol_type = other DNA
tcgtatgcgaagtctgtgctg

SEQ ID NO: 8182 - DNA, 21 bp, synthetic construct
  source 1..21: mol_type = other DNA; mol_type = other DNA
aatatggcgtcttctggttgg

SEQ ID NO: 8183 - DNA, 21 bp, synthetic construct
  source 1..21: mol_type = other DNA; mol_type = other DNA
aggacttatgatgcgattgct

SEQ ID NO: 8184 - DNA, 21 bp, synthetic construct
  source 1..21: mol_type = other DNA; mol_type = other DNA
ttgagtcgggtttcttttgat

SEQ ID NO: 8185 - DNA, 21 bp, synthetic construct
  source 1..21: mol_type = other DNA; mol_type = other DNA
aggtctgagtttgttagtttt

SEQ ID NO: 8186 - DNA, 21 bp, synthetic construct
  source 1..21: mol_type = other DNA; mol_type = other DNA
ggtgggtcgctgttgatgtct

SEQ ID NO: 8187 - DNA, 21 bp, synthetic construct
  source 1..21: mol_type = other DNA; mol_type = other DNA
gatccttctagtcattcgtgg

SEQ ID NO: 8188 - DNA, 21 bp, synthetic construct
  source 1..21: mol_type = other DNA; mol_type = other DNA
gtgcttgcgtctgtgacttgg

SEQ ID NO: 8189 - DNA, 21 bp, synthetic construct
  source 1..21: mol_type = other DNA; mol_type = other DNA
gctcctgctagtgctacttgg

SEQ ID NO: 8190 - DNA, 21 bp, synthetic construct
  source 1..21: mol_type = other DNA; mol_type = other DNA
gaggtgaggacttatcctaag

SEQ ID NO: 8191 - DNA, 21 bp, synthetic construct
  source 1..21: mol_type = other DNA; mol_type = other DNA
gggtggggttcgaataataag

SEQ ID NO: 8192 - DNA, 21 bp, synthetic construct
  source 1..21: mol_type = other DNA; mol_type = other DNA
aggaatagtacggtttatcct

SEQ ID NO: 8193 - DNA, 21 bp, synthetic construct
  source 1..21: mol_type = other DNA; mol_type = other DNA
tattggtcggggctgaatgat

SEQ ID NO: 8194 - DNA, 21 bp, synthetic construct
  source 1..21: mol_type = other DNA; mol_type = other DNA
gcccaagggcttagtgctggt

SEQ ID NO: 8195 - DNA, 21 bp, synthetic construct
  source 1..21: mol_type = other DNA; mol_type = other DNA
ttggggtcttggaggaatagt

SEQ ID NO: 8196 - DNA, 21 bp, synthetic construct
  source 1..21: mol_type = other DNA; mol_type = other DNA
aggacttctactatgggggtg

SEQ ID NO: 8197 - DNA, 21 bp, synthetic construct
  source 1..21: mol_type = other DNA; mol_type = other DNA
tattttactggtactttgacg

SEQ ID NO: 8198 - DNA, 21 bp, synthetic construct
  source 1..21: mol_type = other DNA; mol_type = other DNA
tgtgaggggaagcttcatccg

SEQ ID NO: 8199 - DNA, 21 bp, synthetic construct
  source 1..21: mol_type = other DNA; mol_type = other DNA
gcgtatgcttattctgctgcg

SEQ ID NO: 8200 - DNA, 21 bp, synthetic construct
  source 1..21: mol_type = other DNA; mol_type = other DNA
tcgatggcgagtaatacttgg

SEQ ID NO: 8201 - DNA, 21 bp, synthetic construct
  source 1..21: mol_type = other DNA; mol_type = other DNA
ggttcgagtacgtctaattgg

SEQ ID NO: 8202 - DNA, 21 bp, synthetic construct
  source 1..21: mol_type = other DNA; mol_type = other DNA
cttgctaggggtgggtttgat

SEQ ID NO: 8203 - DNA, 21 bp, synthetic construct
  source 1..21: mol_type = other DNA; mol_type = other DNA
tatgtgcgttttgataataat

SEQ ID NO: 8204 - DNA, 21 bp, synthetic construct
  source 1..21: mol_type = other DNA; mol_type = other DNA
tggggtgttcgtgagcgtggg

SEQ ID NO: 8205 - DNA, 21 bp, synthetic construct
  source 1..21: mol_type = other DNA; mol_type = other DNA
tttggtaagcagcagatgctg

SEQ ID NO: 8206 - DNA, 21 bp, synthetic construct
  source 1..21: mol_type = other DNA; mol_type = other DNA
tatgtgcgtagtggtccgatg

SEQ ID NO: 8207 - DNA, 21 bp, synthetic construct
  source 1..21: mol_type = other DNA; mol_type = other DNA
aggggggatagtcctctgtgg

SEQ ID NO: 8208 - DNA, 21 bp, synthetic construct
  source 1..21: mol_type = other DNA; mol_type = other DNA
ctgcatcggttgagtagtgat

SEQ ID NO: 8209 - DNA, 21 bp, synthetic construct
  source 1..21: mol_type = other DNA; mol_type = other DNA
ctttcgaaggcgagtagtaat

SEQ ID NO: 8210 - DNA, 21 bp, synthetic construct
  source 1..21: mol_type = other DNA; mol_type = other DNA
gtggctttggagggggcggat

SEQ ID NO: 8211 - DNA, 21 bp, synthetic construct
  source 1..21: mol_type = other DNA; mol_type = other DNA
tattcgcgtgtggggccggtt

SEQ ID NO: 8212 - DNA, 21 bp, synthetic construct
  source 1..21: mol_type = other DNA; mol_type = other DNA
cagccgcaggatcgttcgtgg

SEQ ID NO: 8213 - DNA, 21 bp, synthetic construct
  source 1..21: mol_type = other DNA; mol_type = other DNA
tttagtcggcttagtccgctg

SEQ ID NO: 8214 - DNA, 21 bp, synthetic construct
  source 1..21: mol_type = other DNA; mol_type = other DNA
tatagtcgtattcagcttgat

SEQ ID NO: 8215 - DNA, 21 bp, synthetic construct
  source 1..21: mol_type = other DNA; mol_type = other DNA
tgtgagaagggtattcggtgt

SEQ ID NO: 8216 - DNA, 21 bp, synthetic construct
  source 1..21: mol_type = other DNA; mol_type = other DNA
cgtggtaattctccgctgact

SEQ ID NO: 8217 - DNA, 21 bp, synthetic construct
  source 1..21: mol_type = other DNA; mol_type = other DNA
attgtttcgactaatgggagg

SEQ ID NO: 8218 - DNA, 21 bp, synthetic construct
  source 1..21: mol_type = other DNA; mol_type = other DNA
gttcttcagtcttctgtttgg

SEQ ID NO: 8219 - DNA, 21 bp, synthetic construct
  source 1..21: mol_type = other DNA; mol_type = other DNA
acgtgggatgggctggttgct

SEQ ID NO: 8220 - DNA, 21 bp, synthetic construct
  source 1..21: mol_type = other DNA; mol_type = other DNA
aggatgtctgatgcttatgcg

SEQ ID NO: 8221 - DNA, 21 bp, synthetic construct
  source 1..21: mol_type = other DNA; mol_type = other DNA
ggtagttatggggggagtcgt

SEQ ID NO: 8222 - DNA, 21 bp, synthetic construct
  source 1..21: mol_type = other DNA; mol_type = other DNA
ctggtgcgtggggggacgaat

SEQ ID NO: 8223 - DNA, 21 bp, synthetic construct
  source 1..21: mol_type = other DNA; mol_type = other DNA
ggggggggggcgcagatgtgg

SEQ ID NO: 8224 - DNA, 21 bp, synthetic construct
  source 1..21: mol_type = other DNA; mol_type = other DNA
ggtagtagtggtgtggcgtgg

SEQ ID NO: 8225 - DNA, 21 bp, synthetic construct
  source 1..21: mol_type = other DNA; mol_type = other DNA
aagtgggagcggtctccgatt

SEQ ID NO: 8226 - DNA, 21 bp, synthetic construct
  source 1..21: mol_type = other DNA; mol_type = other DNA
tatcatgctcttaatctggat

SEQ ID NO: 8227 - DNA, 21 bp, synthetic construct
  source 1..21: mol_type = other DNA; mol_type = other DNA
ggtgatgctctgtctcattgg

SEQ ID NO: 8228 - DNA, 21 bp, synthetic construct
  source 1..21: mol_type = other DNA; mol_type = other DNA
gatacgcttcttcatttgagg

SEQ ID NO: 8229 - DNA, 21 bp, synthetic construct
  source 1..21: mol_type = other DNA; mol_type = other DNA
tcggatggtgtgtcgaagtgg

SEQ ID NO: 8230 - DNA, 21 bp, synthetic construct
  source 1..21: mol_type = other DNA; mol_type = other DNA
ctgagtagggtgggtcctgat

SEQ ID NO: 8231 - DNA, 21 bp, synthetic construct
  source 1..21: mol_type = other DNA; mol_type = other DNA
gatctgagttcgacttcgtgg

SEQ ID NO: 8232 - DNA, 21 bp, synthetic construct
  source 1..21: mol_type = other DNA; mol_type = other DNA
ggggcggattttgttaagtgg

SEQ ID NO: 8233 - DNA, 21 bp, synthetic construct
  source 1..21: mol_type = other DNA; mol_type = other DNA
catgattctacgcatggtcgg

SEQ ID NO: 8234 - DNA, 21 bp, synthetic construct
  source 1..21: mol_type = other DNA; mol_type = other DNA
ccgtctcgtttggagaatagg

SEQ ID NO: 8235 - DNA, 21 bp, synthetic construct
  source 1..21: mol_type = other DNA; mol_type = other DNA
ctgtcgaaggttgggcataat

SEQ ID NO: 8236 - DNA, 21 bp, synthetic construct
  source 1..21: mol_type = other DNA; mol_type = other DNA
gtgggggtgaaggggtgggat

SEQ ID NO: 8237 - DNA, 21 bp, synthetic construct
  source 1..21: mol_type = other DNA; mol_type = other DNA
tatgggacggggacgtggtct

SEQ ID NO: 8238 - DNA, 21 bp, synthetic construct
  source 1..21: mol_type = other DNA; mol_type = other DNA
agtttgagtagtagtgtttgg

SEQ ID NO: 8239 - DNA, 21 bp, synthetic construct
  source 1..21: mol_type = other DNA; mol_type = other DNA
tattttactgcgcgtatggag

SEQ ID NO: 8240 - DNA, 21 bp, synthetic construct
  source 1..21: mol_type = other DNA; mol_type = other DNA
cgtgttccgtctaagtgggat

SEQ ID NO: 8241 - DNA, 21 bp, synthetic construct
  source 1..21: mol_type = other DNA; mol_type = other DNA
gaggatgagtttactgggttt

SEQ ID NO: 8242 - DNA, 21 bp, synthetic construct
  source 1..21: mol_type = other DNA; mol_type = other DNA
ggtggtgaggggtctttttgg

SEQ ID NO: 8243 - DNA, 21 bp, synthetic construct
  source 1..21: mol_type = other DNA; mol_type = other DNA
ttgcatgctaatttgccgaat

SEQ ID NO: 8244 - DNA, 21 bp, synthetic construct
  source 1..21: mol_type = other DNA; mol_type = other DNA
tttggtggtgggttgtttgtt

SEQ ID NO: 8245 - DNA, 21 bp, synthetic construct
  source 1..21: mol_type = other DNA; mol_type = other DNA
gttatgggggctcgtgattgg

SEQ ID NO: 8246 - DNA, 21 bp, synthetic construct
  source 1..21: mol_type = other DNA; mol_type = other DNA
tggactagtactcatggtgtt

SEQ ID NO: 8247 - DNA, 21 bp, synthetic construct
  source 1..21: mol_type = other DNA; mol_type = other DNA
tattcgagggcgggtgggtct

SEQ ID NO: 8248 - DNA, 21 bp, synthetic construct
  source 1..21: mol_type = other DNA; mol_type = other DNA
tattatacggggaagttggat

SEQ ID NO: 8249 - DNA, 21 bp, synthetic construct
  source 1..21: mol_type = other DNA; mol_type = other DNA
aggtctgattggaagatttct

SEQ ID NO: 8250 - DNA, 21 bp, synthetic construct
  source 1..21: mol_type = other DNA; mol_type = other DNA
aatatgaattcgagtacgtgg

SEQ ID NO: 8251 - DNA, 21 bp, synthetic construct
  source 1..21: mol_type = other DNA; mol_type = other DNA
cgtggggatctggtgtatcct

SEQ ID NO: 8252 - DNA, 21 bp, synthetic construct
  source 1..21: mol_type = other DNA; mol_type = other DNA
gatcttcgtgctgggaattgg

SEQ ID NO: 8253 - DNA, 21 bp, synthetic construct
  source 1..21: mol_type = other DNA; mol_type = other DNA
gctcctggtaatatttcttgg

SEQ ID NO: 8254 - DNA, 21 bp, synthetic construct
  source 1..21: mol_type = other DNA; mol_type = other DNA
gtgaagtataatgttcatctg

SEQ ID NO: 8255 - DNA, 21 bp, synthetic construct
  source 1..21: mol_type = other DNA; mol_type = other DNA
cggggggatgatcgtggttgg

SEQ ID NO: 8256 - DNA, 21 bp, synthetic construct
  source 1..21: mol_type = other DNA; mol_type = other DNA
tatttttcgggtattcattct

SEQ ID NO: 8257 - DNA, 21 bp, synthetic construct
  source 1..21: mol_type = other DNA; mol_type = other DNA
actcctagtacgatttatttt

SEQ ID NO: 8258 - DNA, 21 bp, synthetic construct
  source 1..21: mol_type = other DNA; mol_type = other DNA
gagatggagagtagtgtttgg

SEQ ID NO: 8259 - DNA, 21 bp, synthetic construct
  source 1..21: mol_type = other DNA; mol_type = other DNA
tggactgagggtactaggtat

SEQ ID NO: 8260 - DNA, 21 bp, synthetic construct
  source 1..21: mol_type = other DNA; mol_type = other DNA
gagggtattgcgcgtacgtgg

SEQ ID NO: 8261 - DNA, 21 bp, synthetic construct
  source 1..21: mol_type = other DNA; mol_type = other DNA
atgtatgcgttttcgattgag

SEQ ID NO: 8262 - DNA, 21 bp, synthetic construct
  source 1..21: mol_type = other DNA; mol_type = other DNA
tatgtttattcggatagtcgg

SEQ ID NO: 8263 - DNA, 21 bp, synthetic construct
  source 1..21: mol_type = other DNA; mol_type = other DNA
gatagtgtttatcagctgcgt

SEQ ID NO: 8264 - DNA, 21 bp, synthetic construct
  source 1..21: mol_type = other DNA; mol_type = other DNA
cggcttttggatgtgtatccg

SEQ ID NO: 8265 - DNA, 21 bp, synthetic construct
  source 1..21: mol_type = other DNA; mol_type = other DNA
gggaggagttatattccgtcg

SEQ ID NO: 8266 - DNA, 21 bp, synthetic construct
  source 1..21: mol_type = other DNA; mol_type = other DNA
tattttcagggtaagattgcg

SEQ ID NO: 8267 - DNA, 21 bp, synthetic construct
  source 1..21: mol_type = other DNA; mol_type = other DNA
tatgttaggtctgatggtatg

SEQ ID NO: 8268 - DNA, 21 bp, synthetic construct
  source 1..21: mol_type = other DNA; mol_type = other DNA
attccgcctttgtttaatgtt

SEQ ID NO: 8269 - DNA, 21 bp, synthetic construct
  source 1..21: mol_type = other DNA; mol_type = other DNA
cagggtgtttcgagggagtgg

SEQ ID NO: 8270 - DNA, 21 bp, synthetic construct
  source 1..21: mol_type = other DNA; mol_type = other DNA
cgtcttgaggcggcgaattgg

SEQ ID NO: 8271 - DNA, 21 bp, synthetic construct
  source 1..21: mol_type = other DNA; mol_type = other DNA
tggtggagtgagattcgttct

SEQ ID NO: 8272 - DNA, 21 bp, synthetic construct
  source 1..21: mol_type = other DNA; mol_type = other DNA
tattctcgtttgtcggctgat

SEQ ID NO: 8273 - DNA, 21 bp, synthetic construct
  source 1..21: mol_type = other DNA; mol_type = other DNA
gctcctggggatattcggtgg

SEQ ID NO: 8274 - DNA, 21 bp, synthetic construct
  source 1..21: mol_type = other DNA; mol_type = other DNA
cggtcggatcagtggaggggt

SEQ ID NO: 8275 - DNA, 21 bp, synthetic construct
  source 1..21: mol_type = other DNA; mol_type = other DNA
cattatcctttgagtgcgaag

SEQ ID NO: 8276 - DNA, 21 bp, synthetic construct
  source 1..21: mol_type = other DNA; mol_type = other DNA
atggatgattttactgtgtat

SEQ ID NO: 8277 - DNA, 21 bp, synthetic construct
  source 1..21: mol_type = other DNA; mol_type = other DNA
ggtggtcttggttctcagtgg

SEQ ID NO: 8278 - DNA, 21 bp, synthetic construct
  source 1..21: mol_type = other DNA; mol_type = other DNA
ctgtctcgtacggcttatgat

SEQ ID NO: 8279 - DNA, 21 bp, synthetic construct
  source 1..21: mol_type = other DNA; mol_type = other DNA
cgttatggtgatgtgatgcga

SEQ ID NO: 8280 - DNA, 21 bp, synthetic construct
  source 1..21: mol_type = other DNA; mol_type = other DNA
gatcttcggggtacgagtgcg

SEQ ID NO: 8281 - DNA, 21 bp, synthetic construct
  source 1..21: mol_type = other DNA; mol_type = other DNA
tcgtataggggggctagggag

SEQ ID NO: 8282 - DNA, 21 bp, synthetic construct
  source 1..21: mol_type = other DNA; mol_type = other DNA
atgcataggcttctgtctgat

SEQ ID NO: 8283 - DNA, 21 bp, synthetic construct
  source 1..21: mol_type = other DNA; mol_type = other DNA
gatttgcagagttcgtcttgg

SEQ ID NO: 8284 - DNA, 21 bp, synthetic construct
  source 1..21: mol_type = other DNA; mol_type = other DNA
aataggtatggggttgtttct

SEQ ID NO: 8285 - DNA, 21 bp, synthetic construct
  source 1..21: mol_type = other DNA; mol_type = other DNA
gttgtgatgactcgtgatagg

SEQ ID NO: 8286 - DNA, 21 bp, synthetic construct
  source 1..21: mol_type = other DNA; mol_type = other DNA
tatagtcggattggtgcgggt

SEQ ID NO: 8287 - DNA, 21 bp, synthetic construct
  source 1..21: mol_type = other DNA; mol_type = other DNA
tgtggtgaggggagtaaggcg

SEQ ID NO: 8288 - DNA, 21 bp, synthetic construct
  source 1..21: mol_type = other DNA; mol_type = other DNA
gggtctgagtttttgggttgg

SEQ ID NO: 8289 - DNA, 21 bp, synthetic construct
  source 1..21: mol_type = other DNA; mol_type = other DNA
agggatagtgataatgggatt

SEQ ID NO: 8290 - DNA, 21 bp, synthetic construct
  source 1..21: mol_type = other DNA; mol_type = other DNA
tggaggcgggagtcgtcttcg

SEQ ID NO: 8291 - DNA, 21 bp, synthetic construct
  source 1..21: mol_type = other DNA; mol_type = other DNA
ttgtctcggcttagtcaggat

SEQ ID NO: 8292 - DNA, 21 bp, synthetic construct
  source 1..21: mol_type = other DNA; mol_type = other DNA
tattttgcggggattgcgcag

SEQ ID NO: 8293 - DNA, 21 bp, synthetic construct
  source 1..21: mol_type = other DNA; mol_type = other DNA
agtagtcctcgtgggtcggat

SEQ ID NO: 8294 - DNA, 21 bp, synthetic construct
  source 1..21: mol_type = other DNA; mol_type = other DNA
tttgggttgattatgaaggcg

SEQ ID NO: 8295 - DNA, 21 bp, synthetic construct
  source 1..21: mol_type = other DNA; mol_type = other DNA
aagagtattgcgtcgcctggg

SEQ ID NO: 8296 - DNA, 21 bp, synthetic construct
  source 1..21: mol_type = other DNA; mol_type = other DNA
gtgctgcattcgtcgaattgg

SEQ ID NO: 8297 - DNA, 21 bp, synthetic construct
  source 1..21: mol_type = other DNA; mol_type = other DNA
gtggcggatcatttgcgttgg

SEQ ID NO: 8298 - DNA, 21 bp, synthetic construct
  source 1..21: mol_type = other DNA; mol_type = other DNA
tatccgcctatgcttattgct

SEQ ID NO: 8299 - DNA, 21 bp, synthetic construct
  source 1..21: mol_type = other DNA; mol_type = other DNA
gggtgtaaggggtcgtgtggg

SEQ ID NO: 8300 - DNA, 21 bp, synthetic construct
  source 1..21: mol_type = other DNA; mol_type = other DNA
cattatgagaagactggtcgg

SEQ ID NO: 8301 - DNA, 21 bp, synthetic construct
  source 1..21: mol_type = other DNA; mol_type = other DNA
ctggctcgtactggttgggat

SEQ ID NO: 8302 - DNA, 21 bp, synthetic construct
  source 1..21: mol_type = other DNA; mol_type = other DNA
gggggtggttatgggcgtaat

SEQ ID NO: 8303 - DNA, 21 bp, synthetic construct
  source 1..21: mol_type = other DNA; mol_type = other DNA
tggcgtcttcataagggggat

SEQ ID NO: 8304 - DNA, 21 bp, synthetic construct
  source 1..21: mol_type = other DNA; mol_type = other DNA
ctgtctcgtattgctaataat

SEQ ID NO: 8305 - DNA, 21 bp, synthetic construct
  source 1..21: mol_type = other DNA; mol_type = other DNA
gcgttgggtgatcggacttgg

SEQ ID NO: 8306 - DNA, 21 bp, synthetic construct
  source 1..21: mol_type = other DNA; mol_type = other DNA
gattttcgtggtgctcgtttg

SEQ ID NO: 8307 - DNA, 21 bp, synthetic construct
  source 1..21: mol_type = other DNA; mol_type = other DNA
cttgcgaagactgcgcataat

SEQ ID NO: 8308 - DNA, 21 bp, synthetic construct
  source 1..21: mol_type = other DNA; mol_type = other DNA
cctatggcttcgcttcagtgg

SEQ ID NO: 8309 - DNA, 21 bp, synthetic construct
  source 1..21: mol_type = other DNA; mol_type = other DNA
tatgcgaggcttggtaataat

SEQ ID NO: 8310 - DNA, 21 bp, synthetic construct
  source 1..21: mol_type = other DNA; mol_type = other DNA
ggtagtgagctgagttcgtgg

SEQ ID NO: 8311 - DNA, 21 bp, synthetic construct
  source 1..21: mol_type = other DNA; mol_type = other DNA
tattttcattcgacgaagact

SEQ ID NO: 8312 - DNA, 21 bp, synthetic construct
  source 1..21: mol_type = other DNA; mol_type = other DNA
aggatgtcttctgattatcgg

SEQ ID NO: 8313 - DNA, 21 bp, synthetic construct
  source 1..21: mol_type = other DNA; mol_type = other DNA
gtgatggcggatgcgtttcct

SEQ ID NO: 8314 - DNA, 21 bp, synthetic construct
  source 1..21: mol_type = other DNA; mol_type = other DNA
tggaagggtcgggagacgact

SEQ ID NO: 8315 - DNA, 21 bp, synthetic construct
  source 1..21: mol_type = other DNA; mol_type = other DNA
cttggtagtagggagaggttt

SEQ ID NO: 8316 - DNA, 21 bp, synthetic construct
  source 1..21: mol_type = other DNA; mol_type = other DNA
atggggaaggtgtgtaatagt

SEQ ID NO: 8317 - DNA, 21 bp, synthetic construct
  source 1..21: mol_type = other DNA; mol_type = other DNA
gatgggagtagtaggtcttgg

SEQ ID NO: 8318 - DNA, 21 bp, synthetic construct
  source 1..21: mol_type = other DNA; mol_type = other DNA
ctgtctaggcttaatgctgat

SEQ ID NO: 8319 - DNA, 21 bp, synthetic construct
  source 1..21: mol_type = other DNA; mol_type = other DNA
ctttttagtggggttgggcct

SEQ ID NO: 8320 - DNA, 21 bp, synthetic construct
  source 1..21: mol_type = other DNA; mol_type = other DNA
gttgcttcggtttgtaagggg

SEQ ID NO: 8321 - DNA, 21 bp, synthetic construct
  source 1..21: mol_type = other DNA; mol_type = other DNA
tattatgatctgaagaggtct

SEQ ID NO: 8322 - DNA, 21 bp, synthetic construct
  source 1..21: mol_type = other DNA; mol_type = other DNA
tgggtggcgtctcgttcgagt

SEQ ID NO: 8323 - DNA, 21 bp, synthetic construct
  source 1..21: mol_type = other DNA; mol_type = other DNA
gttatgactgcgcgggattgg

SEQ ID NO: 8324 - DNA, 21 bp, synthetic construct
  source 1..21: mol_type = other DNA; mol_type = other DNA
cttagtaagcttagttctaat

SEQ ID NO: 8325 - DNA, 21 bp, synthetic construct
  source 1..21: mol_type = other DNA; mol_type = other DNA
cgtggtctggagggtatggat

SEQ ID NO: 8326 - DNA, 21 bp, synthetic construct
  source 1..21: mol_type = other DNA; mol_type = other DNA
tgggctatgcggcgggtggag

SEQ ID NO: 8327 - DNA, 21 bp, synthetic construct
  source 1..21: mol_type = other DNA; mol_type = other DNA
tatcggggtgcgtctaatcat

SEQ ID NO: 8328 - DNA, 21 bp, synthetic construct
  source 1..21: mol_type = other DNA; mol_type = other DNA
cagggtaatgggttgtatcgt

SEQ ID NO: 8329 - DNA, 21 bp, synthetic construct
  source 1..21: mol_type = other DNA; mol_type = other DNA
acgcgttcgtttagtcatggt

SEQ ID NO: 8330 - DNA, 21 bp, synthetic construct
  source 1..21: mol_type = other DNA; mol_type = other DNA
tattggacgggtctgcatgag

SEQ ID NO: 8331 - DNA, 21 bp, synthetic construct
  source 1..21: mol_type = other DNA; mol_type = other DNA
gtgttgtctgatattacttgg

SEQ ID NO: 8332 - DNA, 21 bp, synthetic construct
  source 1..21: mol_type = other DNA; mol_type = other DNA
ttgttggattctgcgaagtgg

SEQ ID NO: 8333 - DNA, 21 bp, synthetic construct
  source 1..21: mol_type = other DNA; mol_type = other DNA
agtactagtactaatgggatt

SEQ ID NO: 8334 - DNA, 21 bp, synthetic construct
  source 1..21: mol_type = other DNA; mol_type = other DNA
gttcctgattgggttgatcgt

SEQ ID NO: 8335 - DNA, 21 bp, synthetic construct
  source 1..21: mol_type = other DNA; mol_type = other DNA
tctgggtatcggggggctgtg

SEQ ID NO: 8336 - DNA, 21 bp, synthetic construct
  source 1..21: mol_type = other DNA; mol_type = other DNA
ttgaaggatgggactagtgct

SEQ ID NO: 8337 - DNA, 21 bp, synthetic construct
  source 1..21: mol_type = other DNA; mol_type = other DNA
tatagtagggctggtgatgat

SEQ ID NO: 8338 - DNA, 21 bp, synthetic construct
  source 1..21: mol_type = other DNA; mol_type = other DNA
ttgtctcggtcgtcgatgaat

SEQ ID NO: 8339 - DNA, 21 bp, synthetic construct
  source 1..21: mol_type = other DNA; mol_type = other DNA
tatagtaagttgtcggatcgt

SEQ ID NO: 8340 - DNA, 21 bp, synthetic construct
  source 1..21: mol_type = other DNA; mol_type = other DNA
gatgggtatagtgggcgtgat

SEQ ID NO: 8341 - DNA, 21 bp, synthetic construct
  source 1..21: mol_type = other DNA; mol_type = other DNA
tattcgcgtcttaatgtgggg

SEQ ID NO: 8342 - DNA, 21 bp, synthetic construct
  source 1..21: mol_type = other DNA; mol_type = other DNA
gaggcgtggactgatcggggg

SEQ ID NO: 8343 - DNA, 21 bp, synthetic construct
  source 1..21: mol_type = other DNA; mol_type = other DNA
gtgtcgaataagtctacgggt

SEQ ID NO: 8344 - DNA, 21 bp, synthetic construct
  source 1..21: mol_type = other DNA; mol_type = other DNA
tggagtaggggggcggcgacg

SEQ ID NO: 8345 - DNA, 21 bp, synthetic construct
  source 1..21: mol_type = other DNA; mol_type = other DNA
gatacgtatgagacgcggtgg

SEQ ID NO: 8346 - DNA, 21 bp, synthetic construct
  source 1..21: mol_type = other DNA; mol_type = other DNA
gttatgtcttcggctgggtgg

SEQ ID NO: 8347 - DNA, 21 bp, synthetic construct
  source 1..21: mol_type = other DNA; mol_type = other DNA
tatactcgtgttcaggagaat

SEQ ID NO: 8348 - DNA, 21 bp, synthetic construct
  source 1..21: mol_type = other DNA; mol_type = other DNA
gagcttgagtcgtggtcgtgg

SEQ ID NO: 8349 - DNA, 21 bp, synthetic construct
  source 1..21: mol_type = other DNA; mol_type = other DNA
cgggatggtgtttctgcgtgg

SEQ ID NO: 8350 - DNA, 21 bp, synthetic construct
  source 1..21: mol_type = other DNA; mol_type = other DNA
agttttggtcctccttatggt

SEQ ID NO: 8351 - DNA, 21 bp, synthetic construct
  source 1..21: mol_type = other DNA; mol_type = other DNA
actttttatgggcagaatgcg

SEQ ID NO: 8352 - DNA, 21 bp, synthetic construct
  source 1..21: mol_type = other DNA; mol_type = other DNA
aggatggaggtgggggattgg

SEQ ID NO: 8353 - DNA, 21 bp, synthetic construct
  source 1..21: mol_type = other DNA; mol_type = other DNA
tattcgaaggctcagggtgtg

SEQ ID NO: 8354 - DNA, 21 bp, synthetic construct
  source 1..21: mol_type = other DNA; mol_type = other DNA
cattcgaagctgaatcctatg

SEQ ID NO: 8355 - DNA, 21 bp, synthetic construct
  source 1..21: mol_type = other DNA; mol_type = other DNA
ttgtttgatgctacgccgagt

SEQ ID NO: 8356 - DNA, 21 bp, synthetic construct
  source 1..21: mol_type = other DNA; mol_type = other DNA
cgtgaggggtatcgggggtat

SEQ ID NO: 8357 - DNA, 21 bp, synthetic construct
  source 1..21: mol_type = other DNA; mol_type = other DNA
ttggcgcggagtgggggtggt

SEQ ID NO: 8358 - DNA, 21 bp, synthetic construct
  source 1..21: mol_type = other DNA; mol_type = other DNA
ttttggggtggtgttgttgat

SEQ ID NO: 8359 - DNA, 21 bp, synthetic construct
  source 1..21: mol_type = other DNA; mol_type = other DNA
gtttcttcggataatggtatg

SEQ ID NO: 8360 - DNA, 21 bp, synthetic construct
  source 1..21: mol_type = other DNA; mol_type = other DNA
tatgttcgttcggattctagt

SEQ ID NO: 8361 - DNA, 21 bp, synthetic construct
  source 1..21: mol_type = other DNA; mol_type = other DNA
attagtaagacgtgtcgggag

SEQ ID NO: 8362 - DNA, 21 bp, synthetic construct
  source 1..21: mol_type = other DNA; mol_type = other DNA
agtatgcaggatcgtagttgg

SEQ ID NO: 8363 - DNA, 21 bp, synthetic construct
  source 1..21: mol_type = other DNA; mol_type = other DNA
tggtctaatcgtgctcgtgat

SEQ ID NO: 8364 - DNA, 21 bp, synthetic construct
  source 1..21: mol_type = other DNA; mol_type = other DNA
tatgttattagtgatcgtaat

SEQ ID NO: 8365 - DNA, 21 bp, synthetic construct
  source 1..21: mol_type = other DNA; mol_type = other DNA
ttgcgtctgcatgggcgggat

SEQ ID NO: 8366 - DNA, 21 bp, synthetic construct
  source 1..21: mol_type = other DNA; mol_type = other DNA
aatcagcggtatggttctagt

SEQ ID NO: 8367 - DNA, 21 bp, synthetic construct
  source 1..21: mol_type = other DNA; mol_type = other DNA
tttgtttctacgaatggggtt

SEQ ID NO: 8368 - DNA, 21 bp, synthetic construct
  source 1..21: mol_type = other DNA; mol_type = other DNA
tcggggggtgggttgtttcct

SEQ ID NO: 8369 - DNA, 21 bp, synthetic construct
  source 1..21: mol_type = other DNA; mol_type = other DNA
gatattgcgcataagcgttat

SEQ ID NO: 8370 - DNA, 21 bp, synthetic construct
  source 1..21: mol_type = other DNA; mol_type = other DNA
gtggctttgaagggggcgggt

SEQ ID NO: 8371 - DNA, 21 bp, synthetic construct
  source 1..21: mol_type = other DNA; mol_type = other DNA
tgtacgaatgtgtgtaatgct

SEQ ID NO: 8372 - DNA, 21 bp, synthetic construct
  source 1..21: mol_type = other DNA; mol_type = other DNA
atgtggaatgggacgccgtcg

SEQ ID NO: 8373 - DNA, 21 bp, synthetic construct
  source 1..21: mol_type = other DNA; mol_type = other DNA
ttgtatggtagtcgtcagact

SEQ ID NO: 8374 - DNA, 21 bp, synthetic construct
  source 1..21: mol_type = other DNA; mol_type = other DNA
gcgggggatgggctgtgggtg

SEQ ID NO: 8375 - DNA, 21 bp, synthetic construct
  source 1..21: mol_type = other DNA; mol_type = other DNA
gttctttctcatgctacttgg

SEQ ID NO: 8376 - DNA, 21 bp, synthetic construct
  source 1..21: mol_type = other DNA; mol_type = other DNA
tatcatgcgaagggtgataat

SEQ ID NO: 8377 - DNA, 21 bp, synthetic construct
  source 1..21: mol_type = other DNA; mol_type = other DNA
gagactgatggttggaggaat

SEQ ID NO: 8378 - DNA, 21 bp, synthetic construct
  source 1..21: mol_type = other DNA; mol_type = other DNA
ttgcttagtagtgctgattgg

SEQ ID NO: 8379 - DNA, 21 bp, synthetic construct
  source 1..21: mol_type = other DNA; mol_type = other DNA
aaggatggttttagtacttat

SEQ ID NO: 8380 - DNA, 21 bp, synthetic construct
  source 1..21: mol_type = other DNA; mol_type = other DNA
gggtcggaggttactaggcgg

SEQ ID NO: 8381 - DNA, 21 bp, synthetic construct
  source 1..21: mol_type = other DNA; mol_type = other DNA
gctgagccgccggtgatgtgg

SEQ ID NO: 8382 - DNA, 21 bp, synthetic construct
  source 1..21: mol_type = other DNA; mol_type = other DNA
tttgctcatattcatgggaag

SEQ ID NO: 8383 - DNA, 21 bp, synthetic construct
  source 1..21: mol_type = other DNA; mol_type = other DNA
attcagagtacgaatggtcgg

SEQ ID NO: 8384 - DNA, 21 bp, synthetic construct
  source 1..21: mol_type = other DNA; mol_type = other DNA
ggtacgaagtggtcggatcgg

SEQ ID NO: 8385 - DNA, 21 bp, synthetic construct
  source 1..21: mol_type = other DNA; mol_type = other DNA
gtttggcctggtaggtctact

SEQ ID NO: 8386 - DNA, 21 bp, synthetic construct
  source 1..21: mol_type = other DNA; mol_type = other DNA
ttggcgcggcttgggcctgat

SEQ ID NO: 8387 - DNA, 21 bp, synthetic construct
  source 1..21: mol_type = other DNA; mol_type = other DNA
cattgtcctacgattccgatg

SEQ ID NO: 8388 - DNA, 21 bp, synthetic construct
  source 1..21: mol_type = other DNA; mol_type = other DNA
tatgctcgtgggtcgctgaat

SEQ ID NO: 8389 - DNA, 21 bp, synthetic construct
  source 1..21: mol_type = other DNA; mol_type = other DNA
tatgttaagtctgctgggagt

SEQ ID NO: 8390 - DNA, 21 bp, synthetic construct
  source 1..21: mol_type = other DNA; mol_type = other DNA
tgggatgctattaggcggaat

SEQ ID NO: 8391 - DNA, 21 bp, synthetic construct
  source 1..21: mol_type = other DNA; mol_type = other DNA
ctgggggagaatttgcggtgg

SEQ ID NO: 8392 - DNA, 21 bp, synthetic construct
  source 1..21: mol_type = other DNA; mol_type = other DNA
tggttttctggtgtgcagctt

SEQ ID NO: 8393 - DNA, 21 bp, synthetic construct
  source 1..21: mol_type = other DNA; mol_type = other DNA
tggtggacgggtatgattgcg

SEQ ID NO: 8394 - DNA, 21 bp, synthetic construct
  source 1..21: mol_type = other DNA; mol_type = other DNA
gatcatcgggggacgggttgg

SEQ ID NO: 8395 - DNA, 21 bp, synthetic construct
  source 1..21: mol_type = other DNA; mol_type = other DNA
tttttttctgggactaaggtg

SEQ ID NO: 8396 - DNA, 21 bp, synthetic construct
  source 1..21: mol_type = other DNA; mol_type = other DNA
aatggtgcggatggtcgttgg

SEQ ID NO: 8397 - DNA, 21 bp, synthetic construct
  source 1..21: mol_type = other DNA; mol_type = other DNA
agttatcggctggttgataag

SEQ ID NO: 8398 - DNA, 21 bp, synthetic construct
  source 1..21: mol_type = other DNA; mol_type = other DNA
tggccgtatgggaatgatgcg

SEQ ID NO: 8399 - DNA, 21 bp, synthetic construct
  source 1..21: mol_type = other DNA; mol_type = other DNA
cggggtggggggctttatgtt

SEQ ID NO: 8400 - DNA, 21 bp, synthetic construct
  source 1..21: mol_type = other DNA; mol_type = other DNA
tattcgtatgcgggtgggggg

SEQ ID NO: 8401 - DNA, 21 bp, synthetic construct
  source 1..21: mol_type = other DNA; mol_type = other DNA
gtttatgttaaggcgcataat

SEQ ID NO: 8402 - DNA, 21 bp, synthetic construct
  source 1..21: mol_type = other DNA; mol_type = other DNA
tattggtctggtactcagggt

SEQ ID NO: 8403 - DNA, 21 bp, synthetic construct
  source 1..21: mol_type = other DNA; mol_type = other DNA
gagatggctgcgtatgattgg

SEQ ID NO: 8404 - DNA, 21 bp, synthetic construct
  source 1..21: mol_type = other DNA; mol_type = other DNA
cgttcggatactacttatccg

SEQ ID NO: 8405 - DNA, 21 bp, synthetic construct
  source 1..21: mol_type = other DNA; mol_type = other DNA
agggaggattttagtgcgtgg

SEQ ID NO: 8406 - DNA, 21 bp, synthetic construct
  source 1..21: mol_type = other DNA; mol_type = other DNA
tatgctcgtcagaattttaat

SEQ ID NO: 8407 - DNA, 21 bp, synthetic construct
  source 1..21: mol_type = other DNA; mol_type = other DNA
atgtcttcagagtatgagcgt

SEQ ID NO: 8408 - DNA, 21 bp, synthetic construct
  source 1..21: mol_type = other DNA; mol_type = other DNA
tggaggaagacggatgggggg

SEQ ID NO: 8409 - DNA, 21 bp, synthetic construct
  source 1..21: mol_type = other DNA; mol_type = other DNA
tgggataatggggttacgggt

SEQ ID NO: 8410 - DNA, 21 bp, synthetic construct
  source 1..21: mol_type = other DNA; mol_type = other DNA
aagtggcagagtgtttctgct

SEQ ID NO: 8411 - DNA, 21 bp, synthetic construct
  source 1..21: mol_type = other DNA; mol_type = other DNA
gtggagtatcgtgggattggg

SEQ ID NO: 8412 - DNA, 21 bp, synthetic construct
  source 1..21: mol_type = other DNA; mol_type = other DNA
agtctgaatgatcatttgctg

SEQ ID NO: 8413 - DNA, 21 bp, synthetic construct
  source 1..21: mol_type = other DNA; mol_type = other DNA
tatgtgcgtagtgatcgggtg

SEQ ID NO: 8414 - DNA, 21 bp, synthetic construct
  source 1..21: mol_type = other DNA; mol_type = other DNA
tgtcggcctgtgtgtacgcct

SEQ ID NO: 8415 - DNA, 21 bp, synthetic construct
  source 1..21: mol_type = other DNA; mol_type = other DNA
aattttcgtagtgatttgcgt

SEQ ID NO: 8416 - DNA, 21 bp, synthetic construct
  source 1..21: mol_type = other DNA; mol_type = other DNA
cctatgcgtgagacgctttgg

SEQ ID NO: 8417 - DNA, 21 bp, synthetic construct
  source 1..21: mol_type = other DNA; mol_type = other DNA
tatctgatttctgatacgaag

SEQ ID NO: 8418 - DNA, 21 bp, synthetic construct
  source 1..21: mol_type = other DNA; mol_type = other DNA
ttgtggaatggggttgggcct

SEQ ID NO: 8419 - DNA, 21 bp, synthetic construct
  source 1..21: mol_type = other DNA; mol_type = other DNA
ttggcggagactcggcgttat

SEQ ID NO: 8420 - DNA, 21 bp, synthetic construct
  source 1..21: mol_type = other DNA; mol_type = other DNA
tctcagtcttcgaggtgtgcg

SEQ ID NO: 8421 - DNA, 21 bp, synthetic construct
  source 1..21: mol_type = other DNA; mol_type = other DNA
ttggctaagtcggggactaat

SEQ ID NO: 8422 - DNA, 21 bp, synthetic construct
  source 1..21: mol_type = other DNA; mol_type = other DNA
attagtaagacgtgtgggtcg

SEQ ID NO: 8423 - DNA, 21 bp, synthetic construct
  source 1..21: mol_type = other DNA; mol_type = other DNA
ttggcgggtagggggtgggat

SEQ ID NO: 8424 - DNA, 21 bp, synthetic construct
  source 1..21: mol_type = other DNA; mol_type = other DNA
gcgaggcatcatacgtcttct

SEQ ID NO: 8425 - DNA, 21 bp, synthetic construct
  source 1..21: mol_type = other DNA; mol_type = other DNA
tggttgaagattgggaaggcg

SEQ ID NO: 8426 - DNA, 21 bp, synthetic construct
  source 1..21: mol_type = other DNA; mol_type = other DNA
atgctttcttctcagacttgg

SEQ ID NO: 8427 - DNA, 21 bp, synthetic construct
  source 1..21: mol_type = other DNA; mol_type = other DNA
tggtggacggggtatgtggat

SEQ ID NO: 8428 - DNA, 21 bp, synthetic construct
  source 1..21: mol_type = other DNA; mol_type = other DNA
gagtggtcttcgcttgatgat

SEQ ID NO: 8429 - DNA, 21 bp, synthetic construct
  source 1..21: mol_type = other DNA; mol_type = other DNA
cttcgtgatgggacgctgagg

SEQ ID NO: 8430 - DNA, 21 bp, synthetic construct
  source 1..21: mol_type = other DNA; mol_type = other DNA
tttcagcgtgtttataaggat

SEQ ID NO: 8431 - DNA, 21 bp, synthetic construct
  source 1..21: mol_type = other DNA; mol_type = other DNA
gggggtgctacgtcgaattgg

SEQ ID NO: 8432 - DNA, 21 bp, synthetic construct
  source 1..21: mol_type = other DNA; mol_type = other DNA
aagtttcattcgaattctctt

SEQ ID NO: 8433 - DNA, 21 bp, synthetic construct
  source 1..21: mol_type = other DNA; mol_type = other DNA
ctgagtgctcttaatcgtaat

SEQ ID NO: 8434 - DNA, 21 bp, synthetic construct
  source 1..21: mol_type = other DNA; mol_type = other DNA
gggggtgagagttcggtgtgg

SEQ ID NO: 8435 - DNA, 21 bp, synthetic construct
  source 1..21: mol_type = other DNA; mol_type = other DNA
cgtttggatgcgcatgattgg

SEQ ID NO: 8436 - DNA, 21 bp, synthetic construct
  source 1..21: mol_type = other DNA; mol_type = other DNA
ggggttgatgtggttcgttgg

SEQ ID NO: 8437 - DNA, 21 bp, synthetic construct
  source 1..21: mol_type = other DNA; mol_type = other DNA
gcccaagggattagtgctggg

SEQ ID NO: 8438 - DNA, 21 bp, synthetic construct
  source 1..21: mol_type = other DNA; mol_type = other DNA
aatggtgttaatgggttgtgg

SEQ ID NO: 8439 - DNA, 21 bp, synthetic construct
  source 1..21: mol_type = other DNA; mol_type = other DNA
gatcttaggagttctgattgg

SEQ ID NO: 8440 - DNA, 21 bp, synthetic construct
  source 1..21: mol_type = other DNA; mol_type = other DNA
gggggggagtcgagtctgtgg

SEQ ID NO: 8441 - DNA, 21 bp, synthetic construct
  source 1..21: mol_type = other DNA; mol_type = other DNA
cttgctcggggggggtgggat

SEQ ID NO: 8442 - DNA, 21 bp, synthetic construct
  source 1..21: mol_type = other DNA; mol_type = other DNA
ggtaatagtgagcggaggtgg

SEQ ID NO: 8443 - DNA, 21 bp, synthetic construct
  source 1..21: mol_type = other DNA; mol_type = other DNA
tattttactaggacgatggcg

SEQ ID NO: 8444 - DNA, 21 bp, synthetic construct
  source 1..21: mol_type = other DNA; mol_type = other DNA
gggggggagggtagtgcttgg

SEQ ID NO: 8445 - DNA, 21 bp, synthetic construct
  source 1..21: mol_type = other DNA; mol_type = other DNA
tctgggaagtgtgcggcgacg

SEQ ID NO: 8446 - DNA, 21 bp, synthetic construct
  source 1..21: mol_type = other DNA; mol_type = other DNA
gatggtccggtgtttaatcgg

SEQ ID NO: 8447 - DNA, 21 bp, synthetic construct
  source 1..21: mol_type = other DNA; mol_type = other DNA
ttgccgcagtcgtcgaattgg

SEQ ID NO: 8448 - DNA, 21 bp, synthetic construct
  source 1..21: mol_type = other DNA; mol_type = other DNA
gttgatgagtttctttcttgg

SEQ ID NO: 8449 - DNA, 21 bp, synthetic construct
  source 1..21: mol_type = other DNA; mol_type = other DNA
tttcatggtaatgcgcgtgtg

SEQ ID NO: 8450 - DNA, 21 bp, synthetic construct
  source 1..21: mol_type = other DNA; mol_type = other DNA
cgtgcttttgattcgtattcg

SEQ ID NO: 8451 - DNA, 21 bp, synthetic construct
  source 1..21: mol_type = other DNA; mol_type = other DNA
ttgcatcgtctgatgcctgat

SEQ ID NO: 8452 - DNA, 21 bp, synthetic construct
  source 1..21: mol_type = other DNA; mol_type = other DNA
tatgttaagtcgcagcctggg

SEQ ID NO: 8453 - DNA, 21 bp, synthetic construct
  source 1..21: mol_type = other DNA; mol_type = other DNA
tatagtaagctgaatacgcat

SEQ ID NO: 8454 - DNA, 21 bp, synthetic construct
  source 1..21: mol_type = other DNA; mol_type = other DNA
ttggcgcggagtggttatgat

SEQ ID NO: 8455 - DNA, 21 bp, synthetic construct
  source 1..21: mol_type = other DNA; mol_type = other DNA
ctgagtcgggtgggtgcggat

SEQ ID NO: 8456 - DNA, 21 bp, synthetic construct
  source 1..21: mol_type = other DNA; mol_type = other DNA
gagctggtgactaagcggtat

SEQ ID NO: 8457 - DNA, 21 bp, synthetic construct
  source 1..21: mol_type = other DNA; mol_type = other DNA
aatgcgtttgagggggctgat

SEQ ID NO: 8458 - DNA, 21 bp, synthetic construct
  source 1..21: mol_type = other DNA; mol_type = other DNA
atgtttgatgggagttctgcg

SEQ ID NO: 8459 - DNA, 21 bp, synthetic construct
  source 1..21: mol_type = other DNA; mol_type = other DNA
tgggctagtcggactcgtgat

SEQ ID NO: 8460 - DNA, 21 bp, synthetic construct
  source 1..21: mol_type = other DNA; mol_type = other DNA
tggggttctcggagggagggt

SEQ ID NO: 8461 - DNA, 21 bp, synthetic construct
  source 1..21: mol_type = other DNA; mol_type = other DNA
ttttctcgtttgcatattgat

SEQ ID NO: 8462 - DNA, 21 bp, synthetic construct
  source 1..21: mol_type = other DNA; mol_type = other DNA
gcttatcgtcgtccggatgct

SEQ ID NO: 8463 - DNA, 21 bp, synthetic construct
  source 1..21: mol_type = other DNA; mol_type = other DNA
gatgggtcgacgagtacttgg

SEQ ID NO: 8464 - DNA, 21 bp, synthetic construct
  source 1..21: mol_type = other DNA; mol_type = other DNA
gcccaaggtaattggaagggt

SEQ ID NO: 8465 - DNA, 21 bp, synthetic construct
  source 1..21: mol_type = other DNA; mol_type = other DNA
tgttgtggtggtagggggcct

SEQ ID NO: 8466 - DNA, 21 bp, synthetic construct
  source 1..21: mol_type = other DNA; mol_type = other DNA
gttagtgagtctctgtattgg

SEQ ID NO: 8467 - DNA, 21 bp, synthetic construct
  source 1..21: mol_type = other DNA; mol_type = other DNA
agttatgcggtgaggagggag

SEQ ID NO: 8468 - DNA, 21 bp, synthetic construct
  source 1..21: mol_type = other DNA; mol_type = other DNA
ggtggggattttgagcattgg

SEQ ID NO: 8469 - DNA, 21 bp, synthetic construct
  source 1..21: mol_type = other DNA; mol_type = other DNA
acgtcttatggggctaatgct

SEQ ID NO: 8470 - DNA, 21 bp, synthetic construct
  source 1..21: mol_type = other DNA; mol_type = other DNA
tttgggaatgggagtagttat

SEQ ID NO: 8471 - DNA, 21 bp, synthetic construct
  source 1..21: mol_type = other DNA; mol_type = other DNA
ttttttactggtgttgtgggt

SEQ ID NO: 8472 - DNA, 21 bp, synthetic construct
  source 1..21: mol_type = other DNA; mol_type = other DNA
ctgggtggtacttcgcggtat

SEQ ID NO: 8473 - DNA, 21 bp, synthetic construct
  source 1..21: mol_type = other DNA; mol_type = other DNA
acgtatgagggtgctgttgct

SEQ ID NO: 8474 - DNA, 21 bp, synthetic construct
  source 1..21: mol_type = other DNA; mol_type = other DNA
gctgatttgacggtgcggagg

SEQ ID NO: 8475 - DNA, 21 bp, synthetic construct
  source 1..21: mol_type = other DNA; mol_type = other DNA
cttgcgcgttcgggtccggat

SEQ ID NO: 8476 - DNA, 21 bp, synthetic construct
  source 1..21: mol_type = other DNA; mol_type = other DNA
actgatgagactgtgtatcgg

SEQ ID NO: 8477 - DNA, 21 bp, synthetic construct
  source 1..21: mol_type = other DNA; mol_type = other DNA
gatgatggttctagtcgttat

SEQ ID NO: 8478 - DNA, 21 bp, synthetic construct
  source 1..21: mol_type = other DNA; mol_type = other DNA
gattcgcctgagtggagggat

SEQ ID NO: 8479 - DNA, 21 bp, synthetic construct
  source 1..21: mol_type = other DNA; mol_type = other DNA
aaggttgcgcttcttagtacg

SEQ ID NO: 8480 - DNA, 21 bp, synthetic construct
  source 1..21: mol_type = other DNA; mol_type = other DNA
ttgcataagcttggtgatgat

SEQ ID NO: 8481 - DNA, 21 bp, synthetic construct
  source 1..21: mol_type = other DNA; mol_type = other DNA
tattatacggggatgattagt

SEQ ID NO: 8482 - DNA, 21 bp, synthetic construct
  source 1..21: mol_type = other DNA; mol_type = other DNA
tttgaggctcctaattcttgg

SEQ ID NO: 8483 - DNA, 21 bp, synthetic construct
  source 1..21: mol_type = other DNA; mol_type = other DNA
gatgagggtggttatccgtgg

SEQ ID NO: 8484 - DNA, 21 bp, synthetic construct
  source 1..21: mol_type = other DNA; mol_type = other DNA
tgggtgagggaggctaatcgt

SEQ ID NO: 8485 - DNA, 21 bp, synthetic construct
  source 1..21: mol_type = other DNA; mol_type = other DNA
cggtataatatgtcgcgggag

SEQ ID NO: 8486 - DNA, 21 bp, synthetic construct
  source 1..21: mol_type = other DNA; mol_type = other DNA
gttctgtctacgaatggtgtt

SEQ ID NO: 8487 - DNA, 21 bp, synthetic construct
  source 1..21: mol_type = other DNA; mol_type = other DNA
tataattttaagcgggatggt

SEQ ID NO: 8488 - DNA, 21 bp, synthetic construct
  source 1..21: mol_type = other DNA; mol_type = other DNA
tggtggacggggacggttagt

SEQ ID NO: 8489 - DNA, 21 bp, synthetic construct
  source 1..21: mol_type = other DNA; mol_type = other DNA
tattgggcgggtattccggat

SEQ ID NO: 8490 - DNA, 21 bp, synthetic construct
  source 1..21: mol_type = other DNA; mol_type = other DNA
ttgtggggtggtattcctagt

SEQ ID NO: 8491 - DNA, 21 bp, synthetic construct
  source 1..21: mol_type = other DNA; mol_type = other DNA
gttgttgattatatgagtcat

SEQ ID NO: 8492 - DNA, 21 bp, synthetic construct
  source 1..21: mol_type = other DNA; mol_type = other DNA
ttttttagtggtattattgat

SEQ ID NO: 8493 - DNA, 21 bp, synthetic construct
  source 1..21: mol_type = other DNA; mol_type = other DNA
tatgtgcgttttgattcgggt

SEQ ID NO: 8494 - DNA, 21 bp, synthetic construct
  source 1..21: mol_type = other DNA; mol_type = other DNA
cgggttggtcatactgcttgg

SEQ ID NO: 8495 - DNA, 21 bp, synthetic construct
  source 1..21: mol_type = other DNA; mol_type = other DNA
tggtcgcatatggggaagggg

SEQ ID NO: 8496 - DNA, 21 bp, synthetic construct
  source 1..21: mol_type = other DNA; mol_type = other DNA
tattatactggttttacgaat

SEQ ID NO: 8497 - DNA, 21 bp, synthetic construct
  source 1..21: mol_type = other DNA; mol_type = other DNA
gttattgaggatgcgtatcct

SEQ ID NO: 8498 - DNA, 21 bp, synthetic construct
  source 1..21: mol_type = other DNA; mol_type = other DNA
ggtgtgattaatgtggcttgg

SEQ ID NO: 8499 - DNA, 21 bp, synthetic construct
  source 1..21: mol_type = other DNA; mol_type = other DNA
tatatgagtactaatgggatt

SEQ ID NO: 8500 - DNA, 21 bp, synthetic construct
  source 1..21: mol_type = other DNA; mol_type = other DNA
attgagtcttttaatgggagg

SEQ ID NO: 8501 - DNA, 21 bp, synthetic construct
  source 1..21: mol_type = other DNA; mol_type = other DNA
gggatggggagtgagcggtgg

SEQ ID NO: 8502 - DNA, 21 bp, synthetic construct
  source 1..21: mol_type = other DNA; mol_type = other DNA
tcggcgtatcgtgggggtggt

SEQ ID NO: 8503 - DNA, 21 bp, synthetic construct
  source 1..21: mol_type = other DNA; mol_type = other DNA
cattgggctaagagtcttgag

SEQ ID NO: 8504 - DNA, 21 bp, synthetic construct
  source 1..21: mol_type = other DNA; mol_type = other DNA
gatcttgggagtgcgtcgtgg

SEQ ID NO: 8505 - DNA, 21 bp, synthetic construct
  source 1..21: mol_type = other DNA; mol_type = other DNA
tatagtaagcagaattttaat

SEQ ID NO: 8506 - DNA, 21 bp, synthetic construct
  source 1..21: mol_type = other DNA; mol_type = other DNA
ggttttcgtcatccggggagt

SEQ ID NO: 8507 - DNA, 21 bp, synthetic construct
  source 1..21: mol_type = other DNA; mol_type = other DNA
cgtatgagttcgggtgtgtgg

SEQ ID NO: 8508 - DNA, 21 bp, synthetic construct
  source 1..21: mol_type = other DNA; mol_type = other DNA
gctgagagtagtaggctgtgg

SEQ ID NO: 8509 - DNA, 21 bp, synthetic construct
  source 1..21: mol_type = other DNA; mol_type = other DNA
ttgtgggatggtactggtgct

SEQ ID NO: 8510 - DNA, 21 bp, synthetic construct
  source 1..21: mol_type = other DNA; mol_type = other DNA
tctagtgattattcgagttat

SEQ ID NO: 8511 - DNA, 21 bp, synthetic construct
  source 1..21: mol_type = other DNA; mol_type = other DNA
gagaatgggggtgggaggtgg

SEQ ID NO: 8512 - DNA, 21 bp, synthetic construct
  source 1..21: mol_type = other DNA; mol_type = other DNA
tatgatcggttgtctgataat

SEQ ID NO: 8513 - DNA, 21 bp, synthetic construct
  source 1..21: mol_type = other DNA; mol_type = other DNA
cggaatgagtttactggtttt

SEQ ID NO: 8514 - DNA, 21 bp, synthetic construct
  source 1..21: mol_type = other DNA; mol_type = other DNA
tctgattctactaatggtatg

SEQ ID NO: 8515 - DNA, 21 bp, synthetic construct
  source 1..21: mol_type = other DNA; mol_type = other DNA
gagaggatgaattgtcatagt

SEQ ID NO: 8516 - DNA, 21 bp, synthetic construct
  source 1..21: mol_type = other DNA; mol_type = other DNA
tattctaggttgggtggggat

SEQ ID NO: 8517 - DNA, 21 bp, synthetic construct
  source 1..21: mol_type = other DNA; mol_type = other DNA
cttttgcagagttcgacgtgg

SEQ ID NO: 8518 - DNA, 21 bp, synthetic construct
  source 1..21: mol_type = other DNA; mol_type = other DNA
tgggctagggggagtgggttg

SEQ ID NO: 8519 - DNA, 21 bp, synthetic construct
  source 1..21: mol_type = other DNA; mol_type = other DNA
ggtgcggatgcggtgcgttgg

SEQ ID NO: 8520 - DNA, 21 bp, synthetic construct
  source 1..21: mol_type = other DNA; mol_type = other DNA
gatttttatggtcggcctgcg

SEQ ID NO: 8521 - DNA, 21 bp, synthetic construct
  source 1..21: mol_type = other DNA; mol_type = other DNA
agtggtgctacgagtaattgg

SEQ ID NO: 8522 - DNA, 21 bp, synthetic construct
  source 1..21: mol_type = other DNA; mol_type = other DNA
cgtgctttggaggggcgtgat

SEQ ID NO: 8523 - DNA, 21 bp, synthetic construct
  source 1..21: mol_type = other DNA; mol_type = other DNA
cagtggaaggtgactgatagg

SEQ ID NO: 8524 - DNA, 21 bp, synthetic construct
  source 1..21: mol_type = other DNA; mol_type = other DNA
gggggggttccgcctaagtat

SEQ ID NO: 8525 - DNA, 21 bp, synthetic construct
  source 1..21: mol_type = other DNA; mol_type = other DNA
ggtaggtctggtggggtttgg

SEQ ID NO: 8526 - DNA, 21 bp, synthetic construct
  source 1..21: mol_type = other DNA; mol_type = other DNA
tattcgcggttgagtgtggat

SEQ ID NO: 8527 - DNA, 21 bp, synthetic construct
  source 1..21: mol_type = other DNA; mol_type = other DNA
ttttttgctggtgttaaggat

SEQ ID NO: 8528 - DNA, 21 bp, synthetic construct
  source 1..21: mol_type = other DNA; mol_type = other DNA
tggtgtgagggtgtgatgacg

SEQ ID NO: 8529 - DNA, 21 bp, synthetic construct
  source 1..21: mol_type = other DNA; mol_type = other DNA
tggcgtgtgtctgatcagaag

SEQ ID NO: 8530 - DNA, 21 bp, synthetic construct
  source 1..21: mol_type = other DNA; mol_type = other DNA
tatgtgaagagtgattcgcat

SEQ ID NO: 8531 - DNA, 21 bp, synthetic construct
  source 1..21: mol_type = other DNA; mol_type = other DNA
ggtatggggtcgagtgtgtgg

SEQ ID NO: 8532 - DNA, 21 bp, synthetic construct
  source 1..21: mol_type = other DNA; mol_type = other DNA
gctggtgagagtcggggttgg

SEQ ID NO: 8533 - DNA, 21 bp, synthetic construct
  source 1..21: mol_type = other DNA; mol_type = other DNA
tgggcgaggagtcctgggagt

SEQ ID NO: 8534 - DNA, 21 bp, synthetic construct
  source 1..21: mol_type = other DNA; mol_type = other DNA
aagagtgttaagtttctgggt

SEQ ID NO: 8535 - DNA, 21 bp, synthetic construct
  source 1..21: mol_type = other DNA; mol_type = other DNA
actctggttaggactacgggt

SEQ ID NO: 8536 - DNA, 21 bp, synthetic construct
  source 1..21: mol_type = other DNA; mol_type = other DNA
tattatacggggcggctggag

SEQ ID NO: 8537 - DNA, 21 bp, synthetic construct
  source 1..21: mol_type = other DNA; mol_type = other DNA
aagtggacttctaatagtggg

SEQ ID NO: 8538 - DNA, 21 bp, synthetic construct
  source 1..21: mol_type = other DNA; mol_type = other DNA
ttgagtaaggttggtcagaat

SEQ ID NO: 8539 - DNA, 21 bp, synthetic construct
  source 1..21: mol_type = other DNA; mol_type = other DNA
gtgagggcgtatgcgacgggt

SEQ ID NO: 8540 - DNA, 21 bp, synthetic construct
  source 1..21: mol_type = other DNA; mol_type = other DNA
cattcgcgtttgaatgagagt

SEQ ID NO: 8541 - DNA, 21 bp, synthetic construct
  source 1..21: mol_type = other DNA; mol_type = other DNA
actaggtatactggtcagcat

SEQ ID NO: 8542 - DNA, 21 bp, synthetic construct
  source 1..21: mol_type = other DNA; mol_type = other DNA
cgttttcatgctgggacgatg

SEQ ID NO: 8543 - DNA, 21 bp, synthetic construct
  source 1..21: mol_type = other DNA; mol_type = other DNA
tatcgtgtgcgtgatattggg

SEQ ID NO: 8544 - DNA, 21 bp, synthetic construct
  source 1..21: mol_type = other DNA; mol_type = other DNA
gttgatagtacttgtcatgct

SEQ ID NO: 8545 - DNA, 21 bp, synthetic construct
  source 1..21: mol_type = other DNA; mol_type = other DNA
aagtattcttcgttttcggct

SEQ ID NO: 8546 - DNA, 21 bp, synthetic construct
  source 1..21: mol_type = other DNA; mol_type = other DNA
cgtgatgggaatagtgcttgg

SEQ ID NO: 8547 - DNA, 21 bp, synthetic construct
  source 1..21: mol_type = other DNA; mol_type = other DNA
tggttttctggggagacggat

SEQ ID NO: 8548 - DNA, 21 bp, synthetic construct
  source 1..21: mol_type = other DNA; mol_type = other DNA
cgttcggcgtttgagcctttt

SEQ ID NO: 8549 - DNA, 21 bp, synthetic construct
  source 1..21: mol_type = other DNA; mol_type = other DNA
catcattttagtgggaagcag

SEQ ID NO: 8550 - DNA, 21 bp, synthetic construct
  source 1..21: mol_type = other DNA; mol_type = other DNA
tctaggtggggtgatgcggct

SEQ ID NO: 8551 - DNA, 21 bp, synthetic construct
  source 1..21: mol_type = other DNA; mol_type = other DNA
ttgtggcggtcggataataat

SEQ ID NO: 8552 - DNA, 21 bp, synthetic construct
  source 1..21: mol_type = other DNA; mol_type = other DNA
gggagtgagtttcatacttgg

SEQ ID NO: 8553 - DNA, 21 bp, synthetic construct
  source 1..21: mol_type = other DNA; mol_type = other DNA
ggtgctgggacgagttcgtgg

SEQ ID NO: 8554 - DNA, 21 bp, synthetic construct
  source 1..21: mol_type = other DNA; mol_type = other DNA
tatgttcgttctcaggttgat

SEQ ID NO: 8555 - DNA, 21 bp, synthetic construct
  source 1..21: mol_type = other DNA; mol_type = other DNA
ccgaataggtttactaaggat

SEQ ID NO: 8556 - DNA, 21 bp, synthetic construct
  source 1..21: mol_type = other DNA; mol_type = other DNA
gcgagtagtactaatggtcgg

SEQ ID NO: 8557 - DNA, 21 bp, synthetic construct
  source 1..21: mol_type = other DNA; mol_type = other DNA
agggttgaggatgcgtttcct

SEQ ID NO: 8558 - DNA, 21 bp, synthetic construct
  source 1..21: mol_type = other DNA; mol_type = other DNA
ttgcatcgtgagtcgcctaat

SEQ ID NO: 8559 - DNA, 21 bp, synthetic construct
  source 1..21: mol_type = other DNA; mol_type = other DNA
tttttttctacgaatggggtt

SEQ ID NO: 8560 - DNA, 21 bp, synthetic construct
  source 1..21: mol_type = other DNA; mol_type = other DNA
ttgactcgtattagtagtaat

SEQ ID NO: 8561 - DNA, 21 bp, synthetic construct
  source 1..21: mol_type = other DNA; mol_type = other DNA
agggttccgtataagggtgat

SEQ ID NO: 8562 - DNA, 21 bp, synthetic construct
  source 1..21: mol_type = other DNA; mol_type = other DNA
gtgtcgtcgcagtggcggggt

SEQ ID NO: 8563 - DNA, 21 bp, synthetic construct
  source 1..21: mol_type = other DNA; mol_type = other DNA
cggtcggctgatgcttttccg

SEQ ID NO: 8564 - DNA, 21 bp, synthetic construct
  source 1..21: mol_type = other DNA; mol_type = other DNA
tatgttggtggggcgtattcg

SEQ ID NO: 8565 - DNA, 21 bp, synthetic construct
  source 1..21: mol_type = other DNA; mol_type = other DNA
actagttatgattctggttgg

SEQ ID NO: 8566 - DNA, 21 bp, synthetic construct
  source 1..21: mol_type = other DNA; mol_type = other DNA
ggggctgatcatgtgacttgg

SEQ ID NO: 8567 - DNA, 21 bp, synthetic construct
  source 1..21: mol_type = other DNA; mol_type = other DNA
tatgttcggtcgatgaatact

SEQ ID NO: 8568 - DNA, 21 bp, synthetic construct
  source 1..21: mol_type = other DNA; mol_type = other DNA
ctgagtcgggtgagtgcggat

SEQ ID NO: 8569 - DNA, 21 bp, synthetic construct
  source 1..21: mol_type = other DNA; mol_type = other DNA
tcttgtacgccttgtaaggcg

SEQ ID NO: 8570 - DNA, 21 bp, synthetic construct
  source 1..21: mol_type = other DNA; mol_type = other DNA
gtggcgacgcatggggcgggt

SEQ ID NO: 8571 - DNA, 21 bp, synthetic construct
  source 1..21: mol_type = other DNA; mol_type = other DNA
tttcctggttcgtgttgtgct

SEQ ID NO: 8572 - DNA, 21 bp, synthetic construct
  source 1..21: mol_type = other DNA; mol_type = other DNA
gtggagtctagtcgtgcgtgg

SEQ ID NO: 8573 - DNA, 21 bp, synthetic construct
  source 1..21: mol_type = other DNA; mol_type = other DNA
ttttatgggcatccttatgat

SEQ ID NO: 8574 - DNA, 21 bp, synthetic construct
  source 1..21: mol_type = other DNA; mol_type = other DNA
aggctggagtctacgggttgg

SEQ ID NO: 8575 - DNA, 21 bp, synthetic construct
  source 1..21: mol_type = other DNA; mol_type = other DNA
gttgctaggacgtatcgtgag

SEQ ID NO: 8576 - DNA, 21 bp, synthetic construct
  source 1..21: mol_type = other DNA; mol_type = other DNA
tattctaagattgggcgtgat

SEQ ID NO: 8577 - DNA, 21 bp, synthetic construct
  source 1..21: mol_type = other DNA; mol_type = other DNA
aaggatgattatactactttt

SEQ ID NO: 8578 - DNA, 21 bp, synthetic construct
  source 1..21: mol_type = other DNA; mol_type = other DNA
tggtatagtgggattattgcg

SEQ ID NO: 8579 - DNA, 21 bp, synthetic construct
  source 1..21: mol_type = other DNA; mol_type = other DNA
agggatgtgggttgttgtggt

SEQ ID NO: 8580 - DNA, 21 bp, synthetic construct
  source 1..21: mol_type = other DNA; mol_type = other DNA
ctttttactgggtttggtcct

SEQ ID NO: 8581 - DNA, 21 bp, synthetic construct
  source 1..21: mol_type = other DNA; mol_type = other DNA
tattttgctgggactcatact

SEQ ID NO: 8582 - DNA, 21 bp, synthetic construct
  source 1..21: mol_type = other DNA; mol_type = other DNA
aggacgaatgttgtgtttccg

SEQ ID NO: 8583 - DNA, 21 bp, synthetic construct
  source 1..21: mol_type = other DNA; mol_type = other DNA
ctggtgtatgggaagaatgtt

SEQ ID NO: 8584 - DNA, 21 bp, synthetic construct
  source 1..21: mol_type = other DNA; mol_type = other DNA
ttgacgaggctgcatgcggtt

SEQ ID NO: 8585 - DNA, 21 bp, synthetic construct
  source 1..21: mol_type = other DNA; mol_type = other DNA
ttgcatgttagtcttgagaat

SEQ ID NO: 8586 - DNA, 21 bp, synthetic construct
  source 1..21: mol_type = other DNA; mol_type = other DNA
atggttaggaatcagccgaat

SEQ ID NO: 8587 - DNA, 21 bp, synthetic construct
  source 1..21: mol_type = other DNA; mol_type = other DNA
cattttcctcgtagtacgggt

SEQ ID NO: 8588 - DNA, 21 bp, synthetic construct
  source 1..21: mol_type = other DNA; mol_type = other DNA
gattttacggatcgtaagtgg

SEQ ID NO: 8589 - DNA, 21 bp, synthetic construct
  source 1..21: mol_type = other DNA; mol_type = other DNA
cttcctaggactggtgattgg

SEQ ID NO: 8590 - DNA, 21 bp, synthetic construct
  source 1..21: mol_type = other DNA; mol_type = other DNA
aatgatgggcatattaagggt

SEQ ID NO: 8591 - DNA, 21 bp, synthetic construct
  source 1..21: mol_type = other DNA; mol_type = other DNA
tggggtgggcataggggggtt

SEQ ID NO: 8592 - DNA, 21 bp, synthetic construct
  source 1..21: mol_type = other DNA; mol_type = other DNA
gctactgattctggtcctcgg

SEQ ID NO: 8593 - DNA, 21 bp, synthetic construct
  source 1..21: mol_type = other DNA; mol_type = other DNA
tcgtggagtggtgggacgaag

SEQ ID NO: 8594 - DNA, 21 bp, synthetic construct
  source 1..21: mol_type = other DNA; mol_type = other DNA
tttatgccgggtcataggacg

SEQ ID NO: 8595 - DNA, 21 bp, synthetic construct
  source 1..21: mol_type = other DNA; mol_type = other DNA
gttgcgatgtcgggggctggg

SEQ ID NO: 8596 - DNA, 21 bp, synthetic construct
  source 1..21: mol_type = other DNA; mol_type = other DNA
aagttgcctaattatgggtat

SEQ ID NO: 8597 - DNA, 21 bp, synthetic construct
  source 1..21: mol_type = other DNA; mol_type = other DNA
gagatgctgagtgttagttgg

SEQ ID NO: 8598 - DNA, 21 bp, synthetic construct
  source 1..21: mol_type = other DNA; mol_type = other DNA
tttcttaagcataataattat

SEQ ID NO: 8599 - DNA, 21 bp, synthetic construct
  source 1..21: mol_type = other DNA; mol_type = other DNA
cgttcggagcatgcgtatcct

SEQ ID NO: 8600 - DNA, 21 bp, synthetic construct
  source 1..21: mol_type = other DNA; mol_type = other DNA
attggggttaagggttgggat

SEQ ID NO: 8601 - DNA, 21 bp, synthetic construct
  source 1..21: mol_type = other DNA; mol_type = other DNA
gaggcgttgaatgggtgggat

SEQ ID NO: 8602 - DNA, 21 bp, synthetic construct
  source 1..21: mol_type = other DNA; mol_type = other DNA
cattggtctcagaatggggtg

SEQ ID NO: 8603 - DNA, 21 bp, synthetic construct
  source 1..21: mol_type = other DNA; mol_type = other DNA
agttttgggccgaggactagt

SEQ ID NO: 8604 - DNA, 21 bp, synthetic construct
  source 1..21: mol_type = other DNA; mol_type = other DNA
tattttgagcgtaagcctgat

SEQ ID NO: 8605 - DNA, 21 bp, synthetic construct
  source 1..21: mol_type = other DNA; mol_type = other DNA
gggtcgcctggggtggcgtgg

SEQ ID NO: 8606 - DNA, 21 bp, synthetic construct
  source 1..21: mol_type = other DNA; mol_type = other DNA
acggggggtgggatgtttgtg

SEQ ID NO: 8607 - DNA, 21 bp, synthetic construct
  source 1..21: mol_type = other DNA; mol_type = other DNA
ggggagttgatgggtattgag

SEQ ID NO: 8608 - DNA, 21 bp, synthetic construct
  source 1..21: mol_type = other DNA; mol_type = other DNA
ctttggagtggtattggtccg

SEQ ID NO: 8609 - DNA, 21 bp, synthetic construct
  source 1..21: mol_type = other DNA; mol_type = other DNA
aaggatgattataatacgtat

SEQ ID NO: 8610 - DNA, 21 bp, synthetic construct
  source 1..21: mol_type = other DNA; mol_type = other DNA
cagggggaggcgcgtatttgg

SEQ ID NO: 8611 - DNA, 21 bp, synthetic construct
  source 1..21: mol_type = other DNA; mol_type = other DNA
attgatgcgagttctatttgg

SEQ ID NO: 8612 - DNA, 21 bp, synthetic construct
  source 1..21: mol_type = other DNA; mol_type = other DNA
gcgtttgatgggacgtctgct

SEQ ID NO: 8613 - DNA, 21 bp, synthetic construct
  source 1..21: mol_type = other DNA; mol_type = other DNA
gctaggtatgggggtagggag

SEQ ID NO: 8614 - DNA, 21 bp, synthetic construct
  source 1..21: mol_type = other DNA; mol_type = other DNA
gataataggggtttgattgct

SEQ ID NO: 8615 - DNA, 21 bp, synthetic construct
  source 1..21: mol_type = other DNA; mol_type = other DNA
cggtctgaggtttctgtttgg

SEQ ID NO: 8616 - DNA, 21 bp, synthetic construct
  source 1..21: mol_type = other DNA; mol_type = other DNA
agggaggggactagtgcttgg

SEQ ID NO: 8617 - DNA, 21 bp, synthetic construct
  source 1..21: mol_type = other DNA; mol_type = other DNA
gatcctgcgagtcgggcttgg

SEQ ID NO: 8618 - DNA, 21 bp, synthetic construct
  source 1..21: mol_type = other DNA; mol_type = other DNA
tgttgtactgctctgagtccg

SEQ ID NO: 8619 - DNA, 21 bp, synthetic construct
  source 1..21: mol_type = other DNA; mol_type = other DNA
gttgttggtgtttgtccggcg

SEQ ID NO: 8620 - DNA, 21 bp, synthetic construct
  source 1..21: mol_type = other DNA; mol_type = other DNA
tctcctggttatcctagtttt

SEQ ID NO: 8621 - DNA, 21 bp, synthetic construct
  source 1..21: mol_type = other DNA; mol_type = other DNA
ttttttagtggtaagctggat

SEQ ID NO: 8622 - DNA, 21 bp, synthetic construct
  source 1..21: mol_type = other DNA; mol_type = other DNA
tattggacgggtaggcctgat

SEQ ID NO: 8623 - DNA, 21 bp, synthetic construct
  source 1..21: mol_type = other DNA; mol_type = other DNA
tttgagtctgataatggggtg

SEQ ID NO: 8624 - DNA, 21 bp, synthetic construct
  source 1..21: mol_type = other DNA; mol_type = other DNA
ctttctaagctttctttgaat

SEQ ID NO: 8625 - DNA, 21 bp, synthetic construct
  source 1..21: mol_type = other DNA; mol_type = other DNA
gttggggagcgtgggtgggat

SEQ ID NO: 8626 - DNA, 21 bp, synthetic construct
  source 1..21: mol_type = other DNA; mol_type = other DNA
gggagtgctttgtcttcgtgg

SEQ ID NO: 8627 - DNA, 21 bp, synthetic construct
  source 1..21: mol_type = other DNA; mol_type = other DNA
gttagtgattttttggtttat

SEQ ID NO: 8628 - DNA, 21 bp, synthetic construct
  source 1..21: mol_type = other DNA; mol_type = other DNA
tgtctgggggagttggcggct

SEQ ID NO: 8629 - DNA, 21 bp, synthetic construct
  source 1..21: mol_type = other DNA; mol_type = other DNA
gggtgtggtactaagtgtggg

SEQ ID NO: 8630 - DNA, 21 bp, synthetic construct
  source 1..21: mol_type = other DNA; mol_type = other DNA
ggttgtcgtcatagtcctgtt

SEQ ID NO: 8631 - DNA, 21 bp, synthetic construct
  source 1..21: mol_type = other DNA; mol_type = other DNA
ggtgggcttacttgttgtggt

SEQ ID NO: 8632 - DNA, 21 bp, synthetic construct
  source 1..21: mol_type = other DNA; mol_type = other DNA
attgagtcgacgaatggggct

SEQ ID NO: 8633 - DNA, 21 bp, synthetic construct
  source 1..21: mol_type = other DNA; mol_type = other DNA
aagaatcgggatatgtcgtgg

SEQ ID NO: 8634 - DNA, 21 bp, synthetic construct
  source 1..21: mol_type = other DNA; mol_type = other DNA
cgtgaggctgatgcgtatgcg

SEQ ID NO: 8635 - DNA, 21 bp, synthetic construct
  source 1..21: mol_type = other DNA; mol_type = other DNA
cggcttattgatgtttatcct

SEQ ID NO: 8636 - DNA, 21 bp, synthetic construct
  source 1..21: mol_type = other DNA; mol_type = other DNA
tgtgggagtgttcaggtgaat

SEQ ID NO: 8637 - DNA, 21 bp, synthetic construct
  source 1..21: mol_type = other DNA; mol_type = other DNA
ggttatcagcatatgaagatg

SEQ ID NO: 8638 - DNA, 21 bp, synthetic construct
  source 1..21: mol_type = other DNA; mol_type = other DNA
gcggctaagtattctgatcgt

SEQ ID NO: 8639 - DNA, 21 bp, synthetic construct
  source 1..21: mol_type = other DNA; mol_type = other DNA
atgcgggatggtacggttgct

SEQ ID NO: 8640 - DNA, 21 bp, synthetic construct
  source 1..21: mol_type = other DNA; mol_type = other DNA
gggacggagtggcagccgttt

SEQ ID NO: 8641 - DNA, 21 bp, synthetic construct
  source 1..21: mol_type = other DNA; mol_type = other DNA
ggttcgcctggtgtggcgtgg

SEQ ID NO: 8642 - DNA, 21 bp, synthetic construct
  source 1..21: mol_type = other DNA; mol_type = other DNA
gatgcgattaatgggcgtaat

SEQ ID NO: 8643 - DNA, 21 bp, synthetic construct
  source 1..21: mol_type = other DNA; mol_type = other DNA
ttgcatcgtttgaatccgtcg

SEQ ID NO: 8644 - DNA, 21 bp, synthetic construct
  source 1..21: mol_type = other DNA; mol_type = other DNA
tggattggttatgtgaagaat

SEQ ID NO: 8645 - DNA, 21 bp, synthetic construct
  source 1..21: mol_type = other DNA
gttatgatgcttccgaatagt

SEQ ID NO: 8646 - DNA, 21 bp, synthetic construct
  source 1..21: mol_type = other DNA
cctggtagggctggttatttg

SEQ ID NO: 8647 - DNA, 21 bp, synthetic construct
  source 1..21: mol_type = other DNA; mol_type = other DNA
gtgatgtcgactcatggggtg

SEQ ID NO: 8648 - DNA, 21 bp, synthetic construct
  source 1..21: mol_type = other DNA; mol_type = other DNA
aatgtgaaggggatttcgctt

SEQ ID NO: 8649 - DNA, 21 bp, synthetic construct
  source 1..21: mol_type = other DNA; mol_type = other DNA
gaggtgattgggcggcgtgcg

SEQ ID NO: 8650 - DNA, 21 bp, synthetic construct
  source 1..21: mol_type = other DNA; mol_type = other DNA
ggtcatgagcctgggtgggcg

SEQ ID NO: 8651 - DNA, 21 bp, synthetic construct
  source 1..21: mol_type = other DNA; mol_type = other DNA
acgcgttctgattatttgagg

SEQ ID NO: 8652 - DNA, 21 bp, synthetic construct
  source 1..21: mol_type = other DNA; mol_type = other DNA
ggtactcctcgtagggattgg

SEQ ID NO: 8653 - DNA, 21 bp, synthetic construct
  source 1..21: mol_type = other DNA; mol_type = other DNA
ttttttgcggggaaggttagt

SEQ ID NO: 8654 - DNA, 21 bp, synthetic construct
  source 1..21: mol_type = other DNA; mol_type = other DNA
cgttctcttgagggttatttt

SEQ ID NO: 8655 - DNA, 21 bp, synthetic construct
  source 1..21: mol_type = other DNA; mol_type = other DNA
gtgaatagtacgaatgggatg

SEQ ID NO: 8656 - DNA, 21 bp, synthetic construct
  source 1..21: mol_type = other DNA; mol_type = other DNA
tattttagtggtgcggttgat

SEQ ID NO: 8657 - DNA, 21 bp, synthetic construct
  source 1..21: mol_type = other DNA; mol_type = other DNA
ggtgatgagtgggagcatttt

SEQ ID NO: 8658 - DNA, 21 bp, synthetic construct
  source 1..21: mol_type = other DNA; mol_type = other DNA
gatttgagtgcggttgattgg

SEQ ID NO: 8659 - DNA, 21 bp, synthetic construct
  source 1..21: mol_type = other DNA; mol_type = other DNA
agtgcccaagggaagtatagt

SEQ ID NO: 8660 - DNA, 21 bp, synthetic construct
  source 1..21: mol_type = other DNA; mol_type = other DNA
ggttatcggtctgcttctttg

SEQ ID NO: 8661 - DNA, 21 bp, synthetic construct
  source 1..21: mol_type = other DNA; mol_type = other DNA
aagtatgctttttcttctgag

SEQ ID NO: 8662 - DNA, 21 bp, synthetic construct
  source 1..21: mol_type = other DNA; mol_type = other DNA
ggtattcgtaatgttatgcat

SEQ ID NO: 8663 - DNA, 21 bp, synthetic construct
  source 1..21: mol_type = other DNA; mol_type = other DNA
gatgggagggttaattttagg

SEQ ID NO: 8664 - DNA, 21 bp, synthetic construct
  source 1..21: mol_type = other DNA; mol_type = other DNA
cgggagaatcatcctcgggcg

SEQ ID NO: 8665 - DNA, 21 bp, synthetic construct
  source 1..21: mol_type = other DNA; mol_type = other DNA
gttgggtcgtgtgctagggct

SEQ ID NO: 8666 - DNA, 21 bp, synthetic construct
  source 1..21: mol_type = other DNA; mol_type = other DNA
agggtggggaagggtgattgg

SEQ ID NO: 8667 - DNA, 21 bp, synthetic construct
  source 1..21: mol_type = other DNA; mol_type = other DNA
aatgttagtgagtggaggaat

SEQ ID NO: 8668 - DNA, 21 bp, synthetic construct
  source 1..21: mol_type = other DNA; mol_type = other DNA
aatcgtggtaattgtcggggt

SEQ ID NO: 8669 - DNA, 21 bp, synthetic construct
  source 1..21: mol_type = other DNA; mol_type = other DNA
tatgttaagtcttctaatatt

SEQ ID NO: 8670 - DNA, 21 bp, synthetic construct
  source 1..21: mol_type = other DNA; mol_type = other DNA
gatttggctagttctgcttgg

SEQ ID NO: 8671 - DNA, 21 bp, synthetic construct
  source 1..21: mol_type = other DNA; mol_type = other DNA
aatagttgggggaagggttcg

SEQ ID NO: 8672 - DNA, 21 bp, synthetic construct
  source 1..21: mol_type = other DNA; mol_type = other DNA
gggtttaggctggggcatggg

SEQ ID NO: 8673 - DNA, 21 bp, synthetic construct
  source 1..21: mol_type = other DNA; mol_type = other DNA
caggatgggcgttcgtcgtat

SEQ ID NO: 8674 - DNA, 21 bp, synthetic construct
  source 1..21: mol_type = other DNA; mol_type = other DNA
tcgtgggctcggtcggagttg

SEQ ID NO: 8675 - DNA, 21 bp, synthetic construct
  source 1..21: mol_type = other DNA; mol_type = other DNA
gatagtgtggagtttttgcgt

SEQ ID NO: 8676 - DNA, 21 bp, synthetic construct
  source 1..21: mol_type = other DNA; mol_type = other DNA
cctctggattcttataagtgg

SEQ ID NO: 8677 - DNA, 21 bp, synthetic construct
  source 1..21: mol_type = other DNA; mol_type = other DNA
ttgtctcgtgcttctgcgaat

SEQ ID NO: 8678 - DNA, 21 bp, synthetic construct
  source 1..21: mol_type = other DNA; mol_type = other DNA
ggttatcgtacggggaatacg

SEQ ID NO: 8679 - DNA, 21 bp, synthetic construct
  source 1..21: mol_type = other DNA; mol_type = other DNA
gtgtctcgggatagttatcgt

SEQ ID NO: 8680 - DNA, 21 bp, synthetic construct
  source 1..21: mol_type = other DNA; mol_type = other DNA
gggaagtatcaggataagtat

SEQ ID NO: 8681 - DNA, 21 bp, synthetic construct
  source 1..21: mol_type = other DNA; mol_type = other DNA
cataataataagtatcgggat

SEQ ID NO: 8682 - DNA, 21 bp, synthetic construct
  source 1..21: mol_type = other DNA; mol_type = other DNA
tattttcaggggacttataat

SEQ ID NO: 8683 - DNA, 21 bp, synthetic construct
  source 1..21: mol_type = other DNA; mol_type = other DNA
tgtgggccgcgtaatcctgag

SEQ ID NO: 8684 - DNA, 21 bp, synthetic construct
  source 1..21: mol_type = other DNA; mol_type = other DNA
tttactggggtgctgtgtgcg

SEQ ID NO: 8685 - DNA, 21 bp, synthetic construct
  source 1..21: mol_type = other DNA; mol_type = other DNA
gcgggtggtgggttgtatatt

SEQ ID NO: 8686 - DNA, 21 bp, synthetic construct
  source 1..21: mol_type = other DNA; mol_type = other DNA
tcgctggctgcgcatgattgg

SEQ ID NO: 8687 - DNA, 21 bp, synthetic construct
  source 1..21: mol_type = other DNA; mol_type = other DNA
tttgtgagtagtcattcgcgg

SEQ ID NO: 8688 - DNA, 21 bp, synthetic construct
  source 1..21: mol_type = other DNA; mol_type = other DNA
gatctgtctacgtatgattgg

SEQ ID NO: 8689 - DNA, 21 bp, synthetic construct
  source 1..21: mol_type = other DNA; mol_type = other DNA
ttggcgcgtaatttgcctaat

SEQ ID NO: 8690 - DNA, 21 bp, synthetic construct
  source 1..21: mol_type = other DNA; mol_type = other DNA
catacgattgattcgtttcct

SEQ ID NO: 8691 - DNA, 21 bp, synthetic construct
  source 1..21: mol_type = other DNA; mol_type = other DNA
ggtagtcagggttcgtcttgg

SEQ ID NO: 8692 - DNA, 21 bp, synthetic construct
  source 1..21: mol_type = other DNA; mol_type = other DNA
actcatcatccgcggttgagt

SEQ ID NO: 8693 - DNA, 21 bp, synthetic construct
  source 1..21: mol_type = other DNA; mol_type = other DNA
tgtgagaagcgtcaggcttcg

SEQ ID NO: 8694 - DNA, 21 bp, synthetic construct
  source 1..21: mol_type = other DNA; mol_type = other DNA
tggggttctctgcatcgtact

SEQ ID NO: 8695 - DNA, 21 bp, synthetic construct
  source 1..21: mol_type = other DNA; mol_type = other DNA
gggggtacgacttctacgtgg

SEQ ID NO: 8696 - DNA, 21 bp, synthetic construct
  source 1..21: mol_type = other DNA; mol_type = other DNA
ttgcataggatgcagacggat

SEQ ID NO: 8697 - DNA, 21 bp, synthetic construct
  source 1..21: mol_type = other DNA; mol_type = other DNA
gataagttgccggcttataag

SEQ ID NO: 8698 - DNA, 21 bp, synthetic construct
  source 1..21: mol_type = other DNA; mol_type = other DNA
gattatgcgtatagtaaggag

SEQ ID NO: 8699 - DNA, 21 bp, synthetic construct
  source 1..21: mol_type = other DNA; mol_type = other DNA
aatctgttgtctgcgcagtgg

SEQ ID NO: 8700 - DNA, 21 bp, synthetic construct
  source 1..21: mol_type = other DNA; mol_type = other DNA
ggtcctgaggggattcggtgg

SEQ ID NO: 8701 - DNA, 21 bp, synthetic construct
  source 1..21: mol_type = other DNA; mol_type = other DNA
cataagtatggttctaatgtt

SEQ ID NO: 8702 - DNA, 21 bp, synthetic construct
  source 1..21: mol_type = other DNA; mol_type = other DNA
ccgcatgcttcggggccggtg

SEQ ID NO: 8703 - DNA, 21 bp, synthetic construct
  source 1..21: mol_type = other DNA; mol_type = other DNA
agggatcagggtgtgtcgtgg

SEQ ID NO: 8704 - DNA, 21 bp, synthetic construct
  source 1..21: mol_type = other DNA; mol_type = other DNA
gatactgttgctcgtaggctt

SEQ ID NO: 8705 - DNA, 21 bp, synthetic construct
  source 1..21: mol_type = other DNA; mol_type = other DNA
aatgctacggtgtgttgtggt

SEQ ID NO: 8706 - DNA, 21 bp, synthetic construct
  source 1..21: mol_type = other DNA; mol_type = other DNA
ctttctcggcttacggttaat

SEQ ID NO: 8707 - DNA, 21 bp, synthetic construct
  source 1..21: mol_type = other DNA; mol_type = other DNA
acgtcggagtatcatgtgtat

SEQ ID NO: 8708 - DNA, 21 bp, synthetic construct
  source 1..21: mol_type = other DNA; mol_type = other DNA
gggggtgagactagtcagtgg

SEQ ID NO: 8709 - DNA, 21 bp, synthetic construct
  source 1..21: mol_type = other DNA; mol_type = other DNA
gatatgcgttcgccgaattgg

SEQ ID NO: 8710 - DNA, 21 bp, synthetic construct
  source 1..21: mol_type = other DNA; mol_type = other DNA
agggaggagaatgttaggtgg

SEQ ID NO: 8711 - DNA, 21 bp, synthetic construct
  source 1..21: mol_type = other DNA; mol_type = other DNA
ctgcatgatgcgactgggcct

SEQ ID NO: 8712 - DNA, 21 bp, synthetic construct
  source 1..21: mol_type = other DNA; mol_type = other DNA
gggcatttgcgggagaggacg

SEQ ID NO: 8713 - DNA, 21 bp, synthetic construct
  source 1..21: mol_type = other DNA; mol_type = other DNA
tttcattctacgtcgaggacg

SEQ ID NO: 8714 - DNA, 21 bp, synthetic construct
  source 1..21: mol_type = other DNA; mol_type = other DNA
tggagtggtcctgttcgttcg

SEQ ID NO: 8715 - DNA, 21 bp, synthetic construct
  source 1..21: mol_type = other DNA; mol_type = other DNA
gtttcggattgggcgcctttt

SEQ ID NO: 8716 - DNA, 21 bp, synthetic construct
  source 1..21: mol_type = other DNA; mol_type = other DNA
gcgcctagtggtattatggct

SEQ ID NO: 8717 - DNA, 21 bp, synthetic construct
  source 1..21: mol_type = other DNA; mol_type = other DNA
acttggactggtatgaatgcg

SEQ ID NO: 8718 - DNA, 21 bp, synthetic construct
  source 1..21: mol_type = other DNA; mol_type = other DNA
tattattctggtgtgacgtcg

SEQ ID NO: 8719 - DNA, 21 bp, synthetic construct
  source 1..21: mol_type = other DNA; mol_type = other DNA
agttttgggagtgatcatgat

SEQ ID NO: 8720 - DNA, 21 bp, synthetic construct
  source 1..21: mol_type = other DNA; mol_type = other DNA
tcgtatcttgcggataggaag

SEQ ID NO: 8721 - DNA, 21 bp, synthetic construct
  source 1..21: mol_type = other DNA; mol_type = other DNA
gtgtatgttaagagtacgagt

SEQ ID NO: 8722 - DNA, 21 bp, synthetic construct
  source 1..21: mol_type = other DNA; mol_type = other DNA
atttcggagtttcgttcgtat

SEQ ID NO: 8723 - DNA, 21 bp, synthetic construct
  source 1..21: mol_type = other DNA; mol_type = other DNA
ttgtgggatggttcggcgagt

SEQ ID NO: 8724 - DNA, 21 bp, synthetic construct
  source 1..21: mol_type = other DNA; mol_type = other DNA
ttggctcgtagttcgtctaat

SEQ ID NO: 8725 - DNA, 21 bp, synthetic construct
  source 1..21: mol_type = other DNA; mol_type = other DNA
cggggggatgatcggtcgtgg

SEQ ID NO: 8726 - DNA, 21 bp, synthetic construct
  source 1..21: mol_type = other DNA; mol_type = other DNA
tattttagtgggtctctgtct

SEQ ID NO: 8727 - DNA, 21 bp, synthetic construct
  source 1..21: mol_type = other DNA; mol_type = other DNA
ccgtatgcgcgggatgcgggt

SEQ ID NO: 8728 - DNA, 21 bp, synthetic construct
  source 1..21: mol_type = other DNA; mol_type = other DNA
tattttagtaatgttgctgcg

SEQ ID NO: 8729 - DNA, 21 bp, synthetic construct
  source 1..21: mol_type = other DNA; mol_type = other DNA
gatttgcgtgatagggcgtgg

SEQ ID NO: 8730 - DNA, 21 bp, synthetic construct
  source 1..21: mol_type = other DNA; mol_type = other DNA
tattcgcgtaatagtgataat

SEQ ID NO: 8731 - DNA, 21 bp, synthetic construct
  source 1..21: mol_type = other DNA; mol_type = other DNA
cagtcgggtatgttgaggtgt

SEQ ID NO: 8732 - DNA, 21 bp, synthetic construct
  source 1..21: mol_type = other DNA; mol_type = other DNA
gtgttggggcagggtaattgg

SEQ ID NO: 8733 - DNA, 21 bp, synthetic construct
  source 1..21: mol_type = other DNA; mol_type = other DNA
actcagctgcatggttctaat

SEQ ID NO: 8734 - DNA, 21 bp, synthetic construct
  source 1..21: mol_type = other DNA; mol_type = other DNA
gagaggtatcctagtcagagg

SEQ ID NO: 8735 - DNA, 21 bp, synthetic construct
  source 1..21: mol_type = other DNA; mol_type = other DNA
gtgtatcataataagtcggtg

SEQ ID NO: 8736 - DNA, 21 bp, synthetic construct
  source 1..21: mol_type = other DNA; mol_type = other DNA
ggttctgggttgtcgagttgg

SEQ ID NO: 8737 - DNA, 21 bp, synthetic construct
  source 1..21: mol_type = other DNA; mol_type = other DNA
gaggctttgcggggttgggat

SEQ ID NO: 8738 - DNA, 21 bp, synthetic construct
  source 1..21: mol_type = other DNA; mol_type = other DNA
ggtgtggtgaatgtttcttgg

SEQ ID NO: 8739 - DNA, 21 bp, synthetic construct
  source 1..21: mol_type = other DNA; mol_type = other DNA
tggcctacgtcgcgggggacg

SEQ ID NO: 8740 - DNA, 21 bp, synthetic construct
  source 1..21: mol_type = other DNA; mol_type = other DNA
tttacggtgcctggtatggat

SEQ ID NO: 8741 - DNA, 21 bp, synthetic construct
  source 1..21: mol_type = other DNA; mol_type = other DNA
ttgcataggctgtctggtgat

SEQ ID NO: 8742 - DNA, 21 bp, synthetic construct
  source 1..21: mol_type = other DNA; mol_type = other DNA
gatggggattggacggttttt

SEQ ID NO: 8743 - DNA, 21 bp, synthetic construct
  source 1..21: mol_type = other DNA; mol_type = other DNA
ggtcatgggacgaatagtttt

SEQ ID NO: 8744 - DNA, 21 bp, synthetic construct
  source 1..21: mol_type = other DNA; mol_type = other DNA
ggtggtaagtttcattcgggg

SEQ ID NO: 8745 - DNA, 21 bp, synthetic construct
  source 1..21: mol_type = other DNA; mol_type = other DNA
tgtgatggtactaaggtttcg

SEQ ID NO: 8746 - DNA, 21 bp, synthetic construct
  source 1..21: mol_type = other DNA; mol_type = other DNA
gtgcatgggatgggttgggat

SEQ ID NO: 8747 - DNA, 21 bp, synthetic construct
  source 1..21: mol_type = other DNA; mol_type = other DNA
attgatgattggaatgcgtgg

SEQ ID NO: 8748 - DNA, 21 bp, synthetic construct
  source 1..21: mol_type = other DNA; mol_type = other DNA
gggtatagtgagcgtgtgcgt

SEQ ID NO: 8749 - DNA, 21 bp, synthetic construct
  source 1..21: mol_type = other DNA; mol_type = other DNA
gttgctcatgctggtgcgggt

SEQ ID NO: 8750 - DNA, 21 bp, synthetic construct
  source 1..21: mol_type = other DNA; mol_type = other DNA
aggagtgagggttatttgaag

SEQ ID NO: 8751 - DNA, 21 bp, synthetic construct
  source 1..21: mol_type = other DNA; mol_type = other DNA
tattattcggggcaggtgttg

SEQ ID NO: 8752 - DNA, 21 bp, synthetic construct
  source 1..21: mol_type = other DNA; mol_type = other DNA
aaggagtatgggggtagtcgg

SEQ ID NO: 8753 - DNA, 21 bp, synthetic construct
  source 1..21: mol_type = other DNA; mol_type = other DNA
gattgggctaagaggtctgtt

SEQ ID NO: 8754 - DNA, 21 bp, synthetic construct
  source 1..21: mol_type = other DNA; mol_type = other DNA
gtgtcgggtggtactgcgggt

SEQ ID NO: 8755 - DNA, 21 bp, synthetic construct
  source 1..21: mol_type = other DNA; mol_type = other DNA
agggatcttgatgcttatcct

SEQ ID NO: 8756 - DNA, 21 bp, synthetic construct
  source 1..21: mol_type = other DNA; mol_type = other DNA
aattggaagagtggtagtggt

SEQ ID NO: 8757 - DNA, 21 bp, synthetic construct
  source 1..21: mol_type = other DNA; mol_type = other DNA
tcttatgggatgccgaggagt

SEQ ID NO: 8758 - DNA, 21 bp, synthetic construct
  source 1..21: mol_type = other DNA; mol_type = other DNA
aatgctcttggttgtgcgggt

SEQ ID NO: 8759 - DNA, 21 bp, synthetic construct
  source 1..21: mol_type = other DNA; mol_type = other DNA
tggcgtggtaagcctgagtcg

SEQ ID NO: 8760 - DNA, 21 bp, synthetic construct
  source 1..21: mol_type = other DNA; mol_type = other DNA
gatggtgcgatttatcttcgg

SEQ ID NO: 8761 - DNA, 21 bp, synthetic construct
  source 1..21: mol_type = other DNA; mol_type = other DNA
tgtgggagttataggcaggct

SEQ ID NO: 8762 - DNA, 21 bp, synthetic construct
  source 1..21: mol_type = other DNA; mol_type = other DNA
gtggctaggatggagagtgtg

SEQ ID NO: 8763 - DNA, 21 bp, synthetic construct
  source 1..21: mol_type = other DNA; mol_type = other DNA
ggggttcttgctaaggtggtt

SEQ ID NO: 8764 - DNA, 21 bp, synthetic construct
  source 1..21: mol_type = other DNA; mol_type = other DNA
gggggggataggtttcggacg

SEQ ID NO: 8765 - DNA, 21 bp, synthetic construct
  source 1..21: mol_type = other DNA; mol_type = other DNA
gttcggtcgcatttttcggct

SEQ ID NO: 8766 - DNA, 21 bp, synthetic construct
  source 1..21: mol_type = other DNA; mol_type = other DNA
tattttagtggtacgaataat

SEQ ID NO: 8767 - DNA, 21 bp, synthetic construct
  source 1..21: mol_type = other DNA; mol_type = other DNA
gtttcgacgggttctcctccg

SEQ ID NO: 8768 - DNA, 21 bp, synthetic construct
  source 1..21: mol_type = other DNA; mol_type = other DNA
agtggtggtcggtgggttggt

SEQ ID NO: 8769 - DNA, 21 bp, synthetic construct
  source 1..21: mol_type = other DNA; mol_type = other DNA
agtaggtttgagagtgtgcgg

SEQ ID NO: 8770 - DNA, 21 bp, synthetic construct
  source 1..21: mol_type = other DNA; mol_type = other DNA
cgtgggagtgagcgtatttgt

SEQ ID NO: 8771 - DNA, 21 bp, synthetic construct
  source 1..21: mol_type = other DNA; mol_type = other DNA
cgggaggatggttcgtattgg

SEQ ID NO: 8772 - DNA, 21 bp, synthetic construct
  source 1..21: mol_type = other DNA; mol_type = other DNA
tggaatccgattaggcatgcg

SEQ ID NO: 8773 - DNA, 21 bp, synthetic construct
  source 1..21: mol_type = other DNA; mol_type = other DNA
gctcattctcgtccgtttgtt

SEQ ID NO: 8774 - DNA, 21 bp, synthetic construct
  source 1..21: mol_type = other DNA; mol_type = other DNA
tggaaggggcattctggtcat

SEQ ID NO: 8775 - DNA, 21 bp, synthetic construct
  source 1..21: mol_type = other DNA; mol_type = other DNA
tatgcgcgtcttggggataat

SEQ ID NO: 8776 - DNA, 21 bp, synthetic construct
  source 1..21: mol_type = other DNA; mol_type = other DNA
attaggatggatgcttatcct

SEQ ID NO: 8777 - DNA, 21 bp, synthetic construct
  source 1..21: mol_type = other DNA; mol_type = other DNA
gagcttaggttttcgaagaat

SEQ ID NO: 8778 - DNA, 21 bp, synthetic construct
  source 1..21: mol_type = other DNA; mol_type = other DNA
cgtgatgagctgactacgtat

SEQ ID NO: 8779 - DNA, 21 bp, synthetic construct
  source 1..21: mol_type = other DNA; mol_type = other DNA
gtggctacgctggggtgggat

SEQ ID NO: 8780 - DNA, 21 bp, synthetic construct
  source 1..21: mol_type = other DNA; mol_type = other DNA
tcgtctccgcgttggaaggat

SEQ ID NO: 8781 - DNA, 21 bp, synthetic construct
  source 1..21: mol_type = other DNA; mol_type = other DNA
gggtggtcgagtaagaatagt

SEQ ID NO: 8782 - DNA, 21 bp, synthetic construct
  source 1..21: mol_type = other DNA; mol_type = other DNA
tggtttacggggattcgtgat

SEQ ID NO: 8783 - DNA, 21 bp, synthetic construct
  source 1..21: mol_type = other DNA; mol_type = other DNA
atggatggtaattctctttgg

SEQ ID NO: 8784 - DNA, 21 bp, synthetic construct
  source 1..21: mol_type = other DNA; mol_type = other DNA
gatttgacgctgtctagttgg

SEQ ID NO: 8785 - DNA, 21 bp, synthetic construct
  source 1..21: mol_type = other DNA; mol_type = other DNA
acgggtcaggggtatcgtagt

SEQ ID NO: 8786 - DNA, 21 bp, synthetic construct
  source 1..21: mol_type = other DNA; mol_type = other DNA
tgggataagggtgctgggcgt

SEQ ID NO: 8787 - DNA, 21 bp, synthetic construct
  source 1..21: mol_type = other DNA; mol_type = other DNA
gttgtgtcggggtcgagtgct

SEQ ID NO: 8788 - DNA, 21 bp, synthetic construct
  source 1..21: mol_type = other DNA; mol_type = other DNA
gttgggggtgggacgtggaat

SEQ ID NO: 8789 - DNA, 21 bp, synthetic construct
  source 1..21: mol_type = other DNA; mol_type = other DNA
tatgttcggtcgagtacgggt

SEQ ID NO: 8790 - DNA, 21 bp, synthetic construct
  source 1..21: mol_type = other DNA; mol_type = other DNA
tggggtcgtcagggtattggg

SEQ ID NO: 8791 - DNA, 21 bp, synthetic construct
  source 1..21: mol_type = other DNA; mol_type = other DNA
tattggtctcaggtggcgcag

SEQ ID NO: 8792 - DNA, 21 bp, synthetic construct
  source 1..21: mol_type = other DNA; mol_type = other DNA
aggagtgagttttcgacttat

SEQ ID NO: 8793 - DNA, 21 bp, synthetic construct
  source 1..21: mol_type = other DNA; mol_type = other DNA
atgtataagactagttcgcat

SEQ ID NO: 8794 - DNA, 21 bp, synthetic construct
  source 1..21: mol_type = other DNA; mol_type = other DNA
tatccgtttcctcaggtttct

SEQ ID NO: 8795 - DNA, 21 bp, synthetic construct
  source 1..21: mol_type = other DNA; mol_type = other DNA
tggttttctgggcagactgag

SEQ ID NO: 8796 - DNA, 21 bp, synthetic construct
  source 1..21: mol_type = other DNA; mol_type = other DNA
tgggatcgtgggaagcagttg

SEQ ID NO: 8797 - DNA, 21 bp, synthetic construct
  source 1..21: mol_type = other DNA; mol_type = other DNA
ggggttaatgaggtgcgttgg

SEQ ID NO: 8798 - DNA, 21 bp, synthetic construct
  source 1..21: mol_type = other DNA; mol_type = other DNA
catggtagtgcttgtgggatg

SEQ ID NO: 8799 - DNA, 21 bp, synthetic construct
  source 1..21: mol_type = other DNA; mol_type = other DNA
tggagtagtgggcgtgagcgt

SEQ ID NO: 8800 - DNA, 21 bp, synthetic construct
  source 1..21: mol_type = other DNA; mol_type = other DNA
tgtaggcctgttaaggatggg

SEQ ID NO: 8801 - DNA, 21 bp, synthetic construct
  source 1..21: mol_type = other DNA; mol_type = other DNA
ggtgatgagtatcattcttgg

SEQ ID NO: 8802 - DNA, 21 bp, synthetic construct
  source 1..21: mol_type = other DNA; mol_type = other DNA
tatagtcgggctgggtcttcg

SEQ ID NO: 8803 - DNA, 21 bp, synthetic construct
  source 1..21: mol_type = other DNA; mol_type = other DNA
gggtatttgaagaggccgcct

SEQ ID NO: 8804 - DNA, 21 bp, synthetic construct
  source 1..21: mol_type = other DNA; mol_type = other DNA
acgtataatcctaggtcttcg

SEQ ID NO: 8805 - DNA, 21 bp, synthetic construct
  source 1..21: mol_type = other DNA; mol_type = other DNA
ttgcataagcttactacggat

SEQ ID NO: 8806 - DNA, 21 bp, synthetic construct
  source 1..21: mol_type = other DNA; mol_type = other DNA
acgaaggatgggtggctgcct

SEQ ID NO: 8807 - DNA, 21 bp, synthetic construct
  source 1..21: mol_type = other DNA; mol_type = other DNA
tttttttcgggtgagaggtct

SEQ ID NO: 8808 - DNA, 21 bp, synthetic construct
  source 1..21: mol_type = other DNA; mol_type = other DNA
ttggcggggacgcagactgag

SEQ ID NO: 8809 - DNA, 21 bp, synthetic construct
  source 1..21: mol_type = other DNA; mol_type = other DNA
tttgcgaggagtggtgggggg

SEQ ID NO: 8810 - DNA, 21 bp, synthetic construct
  source 1..21: mol_type = other DNA; mol_type = other DNA
ggggatgtggaggtgcggtgg

SEQ ID NO: 8811 - DNA, 21 bp, synthetic construct
  source 1..21: mol_type = other DNA; mol_type = other DNA
gtgtgggagaaggctcgtatg

SEQ ID NO: 8812 - DNA, 21 bp, synthetic construct
  source 1..21: mol_type = other DNA; mol_type = other DNA
tggtttagtgggaaggttgat

SEQ ID NO: 8813 - DNA, 21 bp, synthetic construct
  source 1..21: mol_type = other DNA; mol_type = other DNA
aggtatgagggggcgctgcgt

SEQ ID NO: 8814 - DNA, 21 bp, synthetic construct
  source 1..21: mol_type = other DNA; mol_type = other DNA
gctggttttgatcgtcagtgg

SEQ ID NO: 8815 - DNA, 21 bp, synthetic construct
  source 1..21: mol_type = other DNA; mol_type = other DNA
tatgttaggagtaatgatttg

SEQ ID NO: 8816 - DNA, 21 bp, synthetic construct
  source 1..21: mol_type = other DNA; mol_type = other DNA
tttggtcgggcttatggggct

SEQ ID NO: 8817 - DNA, 21 bp, synthetic construct
  source 1..21: mol_type = other DNA; mol_type = other DNA
aggtttggtgatatgacgagg

SEQ ID NO: 8818 - DNA, 21 bp, synthetic construct
  source 1..21: mol_type = other DNA; mol_type = other DNA
gggctgtatgattatgtggcg

SEQ ID NO: 8819 - DNA, 21 bp, synthetic construct
  source 1..21: mol_type = other DNA; mol_type = other DNA
agtatgcctagtagtcagtgg

SEQ ID NO: 8820 - DNA, 21 bp, synthetic construct
  source 1..21: mol_type = other DNA; mol_type = other DNA
ttgaggagtggtgtggggcct

SEQ ID NO: 8821 - DNA, 21 bp, synthetic construct
  source 1..21: mol_type = other DNA; mol_type = other DNA
gggtctggtgattctaagtgg

SEQ ID NO: 8822 - DNA, 21 bp, synthetic construct
  source 1..21: mol_type = other DNA; mol_type = other DNA
tattggtctggggtgagtgct

SEQ ID NO: 8823 - DNA, 21 bp, synthetic construct
  source 1..21: mol_type = other DNA; mol_type = other DNA
tggcctggtcagtctggtttt

SEQ ID NO: 8824 - DNA, 21 bp, synthetic construct
  source 1..21: mol_type = other DNA; mol_type = other DNA
ttgtatcataagtcgtcgtct

SEQ ID NO: 8825 - DNA, 21 bp, synthetic construct
  source 1..21: mol_type = other DNA; mol_type = other DNA
aggtatcctaatcagactaat

SEQ ID NO: 8826 - DNA, 21 bp, synthetic construct
  source 1..21: mol_type = other DNA; mol_type = other DNA
aggatttttaataagggggag

SEQ ID NO: 8827 - DNA, 21 bp, synthetic construct
  source 1..21: mol_type = other DNA; mol_type = other DNA
ttggcttcgagggggtgggat

SEQ ID NO: 8828 - DNA, 21 bp, synthetic construct
  source 1..21: mol_type = other DNA; mol_type = other DNA
ggtgagggtgtggctaggtgg

SEQ ID NO: 8829 - DNA, 21 bp, synthetic construct
  source 1..21: mol_type = other DNA; mol_type = other DNA
gatctgacgtcggctgagtgg

SEQ ID NO: 8830 - DNA, 21 bp, synthetic construct
  source 1..21: mol_type = other DNA; mol_type = other DNA
cagaatgattctgttcgttgg

SEQ ID NO: 8831 - DNA, 21 bp, synthetic construct
  source 1..21: mol_type = other DNA; mol_type = other DNA
gttttgcagtcggcgagttgg

SEQ ID NO: 8832 - DNA, 21 bp, synthetic construct
  source 1..21: mol_type = other DNA; mol_type = other DNA
acgcgtgagggtgatccggct

SEQ ID NO: 8833 - DNA, 21 bp, synthetic construct
  source 1..21: mol_type = other DNA; mol_type = other DNA
tgggtggcgaggacgaaggat

SEQ ID NO: 8834 - DNA, 21 bp, synthetic construct
  source 1..21: mol_type = other DNA; mol_type = other DNA
agtcttcctccgtcttatggt

SEQ ID NO: 8835 - DNA, 21 bp, synthetic construct
  source 1..21: mol_type = other DNA; mol_type = other DNA
aatgtggcgcgtgcggctgtt

SEQ ID NO: 8836 - DNA, 21 bp, synthetic construct
  source 1..21: mol_type = other DNA; mol_type = other DNA
catcataagtggcctaatgct

SEQ ID NO: 8837 - DNA, 21 bp, synthetic construct
  source 1..21: mol_type = other DNA; mol_type = other DNA
ggttggagggttcgtgagggg

SEQ ID NO: 8838 - DNA, 21 bp, synthetic construct
  source 1..21: mol_type = other DNA; mol_type = other DNA
actcatggtacttcgacttgt

SEQ ID NO: 8839 - DNA, 21 bp, synthetic construct
  source 1..21: mol_type = other DNA; mol_type = other DNA
tcttttcgtagtgttcatcag

SEQ ID NO: 8840 - DNA, 21 bp, synthetic construct
  source 1..21: mol_type = other DNA; mol_type = other DNA
ggttgtgctaagctgtgtgat

SEQ ID NO: 8841 - DNA, 21 bp, synthetic construct
  source 1..21: mol_type = other DNA; mol_type = other DNA
tttggtcggattggttgggat

SEQ ID NO: 8842 - DNA, 21 bp, synthetic construct
  source 1..21: mol_type = other DNA; mol_type = other DNA
cggaagtctgatgtgtatccg

SEQ ID NO: 8843 - DNA, 21 bp, synthetic construct
  source 1..21: mol_type = other DNA; mol_type = other DNA
gttgcggatggtcttcgttgg

SEQ ID NO: 8844 - DNA, 21 bp, synthetic construct
  source 1..21: mol_type = other DNA; mol_type = other DNA
tttgatggtcattctgcgtgg

SEQ ID NO: 8845 - DNA, 21 bp, synthetic construct
  source 1..21: mol_type = other DNA; mol_type = other DNA
agttatgctcatcgttctcct

SEQ ID NO: 8846 - DNA, 21 bp, synthetic construct
  source 1..21: mol_type = other DNA; mol_type = other DNA
ggtgttgagacttctaggtgg

SEQ ID NO: 8847 - DNA, 21 bp, synthetic construct
  source 1..21: mol_type = other DNA; mol_type = other DNA
ttttcgggtaagtatggtcat

SEQ ID NO: 8848 - DNA, 21 bp, synthetic construct
  source 1..21: mol_type = other DNA; mol_type = other DNA
atgcttgatgggacgagtgcg

SEQ ID NO: 8849 - DNA, 21 bp, synthetic construct
  source 1..21: mol_type = other DNA; mol_type = other DNA
catgctccgacggatcgtagg

SEQ ID NO: 8850 - DNA, 21 bp, synthetic construct
  source 1..21: mol_type = other DNA; mol_type = other DNA
ttttctcgggctggtagtaat

SEQ ID NO: 8851 - DNA, 21 bp, synthetic construct
  source 1..21: mol_type = other DNA; mol_type = other DNA
ttgaggaatgggaatgctgcg

SEQ ID NO: 8852 - DNA, 21 bp, synthetic construct
  source 1..21: mol_type = other DNA; mol_type = other DNA
gatatgggggctggttcttgg

SEQ ID NO: 8853 - DNA, 21 bp, synthetic construct
  source 1..21: mol_type = other DNA; mol_type = other DNA
caggagaagtgggggaagggg

SEQ ID NO: 8854 - DNA, 21 bp, synthetic construct
  source 1..21: mol_type = other DNA; mol_type = other DNA
tattttagtggtgagactcgg

SEQ ID NO: 8855 - DNA, 21 bp, synthetic construct
  source 1..21: mol_type = other DNA; mol_type = other DNA
tttattgaggcgaggcggaat

SEQ ID NO: 8856 - DNA, 21 bp, synthetic construct
  source 1..21: mol_type = other DNA; mol_type = other DNA
ggttcgatgagttctacttgg

SEQ ID NO: 8857 - DNA, 21 bp, synthetic construct
  source 1..21: mol_type = other DNA; mol_type = other DNA
tctgatggttcttctaagtgg

SEQ ID NO: 8858 - DNA, 21 bp, synthetic construct
  source 1..21: mol_type = other DNA; mol_type = other DNA
ggggctaggagtgctgattat

SEQ ID NO: 8859 - DNA, 21 bp, synthetic construct
  source 1..21: mol_type = other DNA; mol_type = other DNA
gtttttaggacgcagggtggg

SEQ ID NO: 8860 - DNA, 21 bp, synthetic construct
  source 1..21: mol_type = other DNA; mol_type = other DNA
gttatttatcctagtggtgcg

SEQ ID NO: 8861 - DNA, 21 bp, synthetic construct
  source 1..21: mol_type = other DNA; mol_type = other DNA
aagttggttgagagtgatggt

SEQ ID NO: 8862 - DNA, 21 bp, synthetic construct
  source 1..21: mol_type = other DNA; mol_type = other DNA
tcttttgatcgtcagcgtagt

SEQ ID NO: 8863 - DNA, 21 bp, synthetic construct
  source 1..21: mol_type = other DNA; mol_type = other DNA
aggtttgctcataaggagaat

SEQ ID NO: 8864 - DNA, 21 bp, synthetic construct
  source 1..21: mol_type = other DNA; mol_type = other DNA
cgttatcctgatcgggctctt

SEQ ID NO: 8865 - DNA, 21 bp, synthetic construct
  source 1..21: mol_type = other DNA; mol_type = other DNA
tattctgctctgcagcgtaat

SEQ ID NO: 8866 - DNA, 21 bp, synthetic construct
  source 1..21: mol_type = other DNA; mol_type = other DNA
aattctgagtttatgagttat

SEQ ID NO: 8867 - DNA, 21 bp, synthetic construct
  source 1..21: mol_type = other DNA; mol_type = other DNA
ggtcagggtaattcggtttgg

SEQ ID NO: 8868 - DNA, 21 bp, synthetic construct
  source 1..21: mol_type = other DNA; mol_type = other DNA
gtggatgagtggagtactttt

SEQ ID NO: 8869 - DNA, 21 bp, synthetic construct
  source 1..21: mol_type = other DNA; mol_type = other DNA
tattatgcggggcagagggag

SEQ ID NO: 8870 - DNA, 21 bp, synthetic construct
  source 1..21: mol_type = other DNA; mol_type = other DNA
tgtcagaaggttgggatgatt

SEQ ID NO: 8871 - DNA, 21 bp, synthetic construct
  source 1..21: mol_type = other DNA; mol_type = other DNA
agggatggtcagtcttcttat

SEQ ID NO: 8872 - DNA, 21 bp, synthetic construct
  source 1..21: mol_type = other DNA; mol_type = other DNA
ccgcttagtacttctaattgg

SEQ ID NO: 8873 - DNA, 21 bp, synthetic construct
  source 1..21: mol_type = other DNA; mol_type = other DNA
gggtgtgttcatggtggtgct

SEQ ID NO: 8874 - DNA, 21 bp, synthetic construct
  source 1..21: mol_type = other DNA; mol_type = other DNA
tatgagtgttgtaagcagacg

SEQ ID NO: 8875 - DNA, 21 bp, synthetic construct
  source 1..21: mol_type = other DNA; mol_type = other DNA
aggtcggagaagggttatcat

SEQ ID NO: 8876 - DNA, 21 bp, synthetic construct
  source 1..21: mol_type = other DNA; mol_type = other DNA
tggtggcatggtgtgtcggct

SEQ ID NO: 8877 - DNA, 21 bp, synthetic construct
  source 1..21: mol_type = other DNA; mol_type = other DNA
gcggtgattcctagtcgtggg

SEQ ID NO: 8878 - DNA, 21 bp, synthetic construct
  source 1..21: mol_type = other DNA; mol_type = other DNA
acttatactaagtcggctgtt

SEQ ID NO: 8879 - DNA, 21 bp, synthetic construct
  source 1..21: mol_type = other DNA; mol_type = other DNA
cgtgagcagatggtgagttgg

SEQ ID NO: 8880 - DNA, 21 bp, synthetic construct
  source 1..21: mol_type = other DNA; mol_type = other DNA
gcttatgggagtgtgaggtct

SEQ ID NO: 8881 - DNA, 21 bp, synthetic construct
  source 1..21: mol_type = other DNA; mol_type = other DNA
cgtttgagtgagtcgacttgg

SEQ ID NO: 8882 - DNA, 21 bp, synthetic construct
  source 1..21: mol_type = other DNA; mol_type = other DNA
gatgaggagggtgctctgagt

SEQ ID NO: 8883 - DNA, 21 bp, synthetic construct
  source 1..21: mol_type = other DNA; mol_type = other DNA
aagcatgattcgagtcgttat

SEQ ID NO: 8884 - DNA, 21 bp, synthetic construct
  source 1..21: mol_type = other DNA; mol_type = other DNA
tggcggtcggggaatatgggt

SEQ ID NO: 8885 - DNA, 21 bp, synthetic construct
  source 1..21: mol_type = other DNA; mol_type = other DNA
aagtatgattcttccagttgg

SEQ ID NO: 8886 - DNA, 21 bp, synthetic construct
  source 1..21: mol_type = other DNA; mol_type = other DNA
ctgtgggatgggacgtttgcg

SEQ ID NO: 8887 - DNA, 21 bp, synthetic construct
  source 1..21: mol_type = other DNA; mol_type = other DNA
agggctcctgatactaggtgg

SEQ ID NO: 8888 - DNA, 21 bp, synthetic construct
  source 1..21: mol_type = other DNA; mol_type = other DNA
tataggcctgatggttatggg

SEQ ID NO: 8889 - DNA, 21 bp, synthetic construct
  source 1..21: mol_type = other DNA; mol_type = other DNA
gttcattctgatcggtcttgg

SEQ ID NO: 8890 - DNA, 21 bp, synthetic construct
  source 1..21: mol_type = other DNA; mol_type = other DNA
tatctggggcagccgtatttt

SEQ ID NO: 8891 - DNA, 21 bp, synthetic construct
  source 1..21: mol_type = other DNA; mol_type = other DNA
attttgcatgatagttctgag

SEQ ID NO: 8892 - DNA, 21 bp, synthetic construct
  source 1..21: mol_type = other DNA; mol_type = other DNA
acggttgagcgggcgcggttt

SEQ ID NO: 8893 - DNA, 21 bp, synthetic construct
  source 1..21: mol_type = other DNA; mol_type = other DNA
tattttagtggtgttgcggct

SEQ ID NO: 8894 - DNA, 21 bp, synthetic construct
  source 1..21: mol_type = other DNA; mol_type = other DNA
ttttttactgggattgctgat

SEQ ID NO: 8895 - DNA, 21 bp, synthetic construct
  source 1..21: mol_type = other DNA; mol_type = other DNA
tggcagagtgctaatggtgtt

SEQ ID NO: 8896 - DNA, 21 bp, synthetic construct
  source 1..21: mol_type = other DNA; mol_type = other DNA
gttgatgattttaattctttt

SEQ ID NO: 8897 - DNA, 21 bp, synthetic construct
  source 1..21: mol_type = other DNA; mol_type = other DNA
aaggcgtttcatgcgggggcg

SEQ ID NO: 8898 - DNA, 21 bp, synthetic construct
  source 1..21: mol_type = other DNA; mol_type = other DNA
aggggtggttcgtatggtagt

SEQ ID NO: 8899 - DNA, 21 bp, synthetic construct
  source 1..21: mol_type = other DNA; mol_type = other DNA
actgatgcgttttgtgcgccg

SEQ ID NO: 8900 - DNA, 21 bp, synthetic construct
  source 1..21: mol_type = other DNA; mol_type = other DNA
tggaatgctcctcatcgtgcg

SEQ ID NO: 8901 - DNA, 21 bp, synthetic construct
  source 1..21: mol_type = other DNA; mol_type = other DNA
tgtttggggatgtgtagtgag

SEQ ID NO: 8902 - DNA, 21 bp, synthetic construct
  source 1..21: mol_type = other DNA; mol_type = other DNA
actaggccggggtcgcatgtg

SEQ ID NO: 8903 - DNA, 21 bp, synthetic construct
  source 1..21: mol_type = other DNA; mol_type = other DNA
acggatgcgatgagtagttgg

SEQ ID NO: 8904 - DNA, 21 bp, synthetic construct
  source 1..21: mol_type = other DNA; mol_type = other DNA
catcatcctcggatgggtctt

SEQ ID NO: 8905 - DNA, 21 bp, synthetic construct
  source 1..21: mol_type = other DNA; mol_type = other DNA
tatggggtgggtacgtggtcg

SEQ ID NO: 8906 - DNA, 21 bp, synthetic construct
  source 1..21: mol_type = other DNA; mol_type = other DNA
tggcagaagaggcctacggag

SEQ ID NO: 8907 - DNA, 21 bp, synthetic construct
  source 1..21: mol_type = other DNA; mol_type = other DNA
cagaggtatgcttctcctcag

SEQ ID NO: 8908 - DNA, 21 bp, synthetic construct
  source 1..21: mol_type = other DNA; mol_type = other DNA
ctgagtagggctagtgataat

SEQ ID NO: 8909 - DNA, 21 bp, synthetic construct
  source 1..21: mol_type = other DNA; mol_type = other DNA
gcggatgggagtgtgcgttgg

SEQ ID NO: 8910 - DNA, 21 bp, synthetic construct
  source 1..21: mol_type = other DNA; mol_type = other DNA
agggttgttaatgttatgccg

SEQ ID NO: 8911 - DNA, 21 bp, synthetic construct
  source 1..21: mol_type = other DNA; mol_type = other DNA
tatccgtcgggtagtgctggt

SEQ ID NO: 8912 - DNA, 21 bp, synthetic construct
  source 1..21: mol_type = other DNA; mol_type = other DNA
attaagtcgagttggcatgct

SEQ ID NO: 8913 - DNA, 21 bp, synthetic construct
  source 1..21: mol_type = other DNA; mol_type = other DNA
tatacgaggttggataatgat

SEQ ID NO: 8914 - DNA, 21 bp, synthetic construct
  source 1..21: mol_type = other DNA; mol_type = other DNA
tattttgcgggtgtgtcggat

SEQ ID NO: 8915 - DNA, 21 bp, synthetic construct
  source 1..21: mol_type = other DNA; mol_type = other DNA
aatgcgaattttgagcgtcgg

SEQ ID NO: 8916 - DNA, 21 bp, synthetic construct
  source 1..21: mol_type = other DNA; mol_type = other DNA
tggaagcctaattcgaagtct

SEQ ID NO: 8917 - DNA, 21 bp, synthetic construct
  source 1..21: mol_type = other DNA; mol_type = other DNA
tatacgaggttgaattttgat

SEQ ID NO: 8918 - DNA, 21 bp, synthetic construct
  source 1..21: mol_type = other DNA; mol_type = other DNA
gtgcataagctttcgcttaat

SEQ ID NO: 8919 - DNA, 21 bp, synthetic construct
  source 1..21: mol_type = other DNA; mol_type = other DNA
ggttcgtatagggggttgggt

SEQ ID NO: 8920 - DNA, 21 bp, synthetic construct
  source 1..21: mol_type = other DNA; mol_type = other DNA
gtgttttcgtctaatggtgtg

SEQ ID NO: 8921 - DNA, 21 bp, synthetic construct
  source 1..21: mol_type = other DNA; mol_type = other DNA
tttcgttcggatcgttatggt

SEQ ID NO: 8922 - DNA, 21 bp, synthetic construct
  source 1..21: mol_type = other DNA; mol_type = other DNA
gggagttggattcctcatggt

SEQ ID NO: 8923 - DNA, 21 bp, synthetic construct
  source 1..21: mol_type = other DNA; mol_type = other DNA
cggggtggggggattagtgcg

SEQ ID NO: 8924 - DNA, 21 bp, synthetic construct
  source 1..21: mol_type = other DNA; mol_type = other DNA
gggcagctgcggtatgataag

SEQ ID NO: 8925 - DNA, 21 bp, synthetic construct
  source 1..21: mol_type = other DNA; mol_type = other DNA
cgtggtgggacttatcatagt

SEQ ID NO: 8926 - DNA, 21 bp, synthetic construct
  source 1..21: mol_type = other DNA; mol_type = other DNA
ccttttgcggtttcgattgag

SEQ ID NO: 8927 - DNA, 21 bp, synthetic construct
  source 1..21: mol_type = other DNA; mol_type = other DNA
gagaatgatcagttgccgcct

SEQ ID NO: 8928 - DNA, 21 bp, synthetic construct
  source 1..21: mol_type = other DNA; mol_type = other DNA
ggtctttcggataatcggagg

SEQ ID NO: 8929 - DNA, 21 bp, synthetic construct
  source 1..21: mol_type = other DNA; mol_type = other DNA
gctcttgggcgtgagtatagg

SEQ ID NO: 8930 - DNA, 21 bp, synthetic construct
  source 1..21: mol_type = other DNA; mol_type = other DNA
gtgggtggtagtaggttttcg

SEQ ID NO: 8931 - DNA, 21 bp, synthetic construct
  source 1..21: mol_type = other DNA; mol_type = other DNA
ctttttaggatgcgtgatggg

SEQ ID NO: 8932 - DNA, 21 bp, synthetic construct
  source 1..21: mol_type = other DNA; mol_type = other DNA
ttttttgttggtcatcatgat

SEQ ID NO: 8933 - DNA, 21 bp, synthetic construct
  source 1..21: mol_type = other DNA; mol_type = other DNA
atggagtctagtaatggtgtt

SEQ ID NO: 8934 - DNA, 21 bp, synthetic construct
  source 1..21: mol_type = other DNA; mol_type = other DNA
actgagagtacggtttatagt

SEQ ID NO: 8935 - DNA, 21 bp, synthetic construct
  source 1..21: mol_type = other DNA; mol_type = other DNA
tgtgttaatcggtgtgttgtg

SEQ ID NO: 8936 - DNA, 21 bp, synthetic construct
  source 1..21: mol_type = other DNA; mol_type = other DNA
aattatagtcatattaagtct

SEQ ID NO: 8937 - DNA, 21 bp, synthetic construct
  source 1..21: mol_type = other DNA; mol_type = other DNA
tgggataggatgtcggcgaag

SEQ ID NO: 8938 - DNA, 21 bp, synthetic construct
  source 1..21: mol_type = other DNA; mol_type = other DNA
gatcgtgcgtcgtcttcgtgg

SEQ ID NO: 8939 - DNA, 21 bp, synthetic construct
  source 1..21: mol_type = other DNA; mol_type = other DNA
cgtgaggattcgtctatgtgg

SEQ ID NO: 8940 - DNA, 21 bp, synthetic construct
  source 1..21: mol_type = other DNA; mol_type = other DNA
gtggcttggcagggtacgggg

SEQ ID NO: 8941 - DNA, 21 bp, synthetic construct
  source 1..21: mol_type = other DNA; mol_type = other DNA
tatggtacgcatcggtttact

SEQ ID NO: 8942 - DNA, 21 bp, synthetic construct
  source 1..21: mol_type = other DNA; mol_type = other DNA
acgcggtgtgttggggagatt

SEQ ID NO: 8943 - DNA, 21 bp, synthetic construct
  source 1..21: mol_type = other DNA; mol_type = other DNA
ctggaggatcatttgcggtgg

SEQ ID NO: 8944 - DNA, 21 bp, synthetic construct
  source 1..21: mol_type = other DNA; mol_type = other DNA
gtgtatgggacgtcgcgtagt

SEQ ID NO: 8945 - DNA, 21 bp, synthetic construct
  source 1..21: mol_type = other DNA; mol_type = other DNA
tggcagggggggcagcggggt

SEQ ID NO: 8946 - DNA, 21 bp, synthetic construct
  source 1..21: mol_type = other DNA; mol_type = other DNA
gtgccgcctttgtttgcggtg

SEQ ID NO: 8947 - DNA, 21 bp, synthetic construct
  source 1..21: mol_type = other DNA; mol_type = other DNA
actgttacgcatcatcgtctt

SEQ ID NO: 8948 - DNA, 21 bp, synthetic construct
  source 1..21: mol_type = other DNA; mol_type = other DNA
ggtggtcctggtacttggaat

SEQ ID NO: 8949 - DNA, 21 bp, synthetic construct
  source 1..21: mol_type = other DNA; mol_type = other DNA
gatcgttgggggagtagtgcg

SEQ ID NO: 8950 - DNA, 21 bp, synthetic construct
  source 1..21: mol_type = other DNA; mol_type = other DNA
tctggttatcgtgctcaggcg

SEQ ID NO: 8951 - DNA, 21 bp, synthetic construct
  source 1..21: mol_type = other DNA; mol_type = other DNA
gatctttcgagtcttgagtgg

SEQ ID NO: 8952 - DNA, 21 bp, synthetic construct
  source 1..21: mol_type = other DNA; mol_type = other DNA
tatgagtcgacgaatggggtt

SEQ ID NO: 8953 - DNA, 21 bp, synthetic construct
  source 1..21: mol_type = other DNA; mol_type = other DNA
aggggtgattatcaggttttt

SEQ ID NO: 8954 - DNA, 21 bp, synthetic construct
  source 1..21: mol_type = other DNA; mol_type = other DNA
tttaatccgccggctatgtat

SEQ ID NO: 8955 - DNA, 21 bp, synthetic construct
  source 1..21: mol_type = other DNA; mol_type = other DNA
gtttttgataataggcggtct

SEQ ID NO: 8956 - DNA, 21 bp, synthetic construct
  source 1..21: mol_type = other DNA; mol_type = other DNA
gggtggcgtggtgtgagtgct

SEQ ID NO: 8957 - DNA, 21 bp, synthetic construct
  source 1..21: mol_type = other DNA; mol_type = other DNA
tggtggcaggggattacggag

SEQ ID NO: 8958 - DNA, 21 bp, synthetic construct
  source 1..21: mol_type = other DNA; mol_type = other DNA
cgttgttgtggtcatttttat

SEQ ID NO: 8959 - DNA, 21 bp, synthetic construct
  source 1..21: mol_type = other DNA; mol_type = other DNA
ggggctcggactccgacgtgg

SEQ ID NO: 8960 - DNA, 21 bp, synthetic construct
  source 1..21: mol_type = other DNA; mol_type = other DNA
tattttggtgcgaggcgtgag

SEQ ID NO: 8961 - DNA, 21 bp, synthetic construct
  source 1..21: mol_type = other DNA; mol_type = other DNA
tggtctagtaataggtcttct

SEQ ID NO: 8962 - DNA, 21 bp, synthetic construct
  source 1..21: mol_type = other DNA; mol_type = other DNA
tggtggacgggggaggttgag

SEQ ID NO: 8963 - DNA, 21 bp, synthetic construct
  source 1..21: mol_type = other DNA; mol_type = other DNA
gttggttcgtcgaagtgtgtg

SEQ ID NO: 8964 - DNA, 21 bp, synthetic construct
  source 1..21: mol_type = other DNA; mol_type = other DNA
actgatgattggagtacgtgg

SEQ ID NO: 8965 - DNA, 21 bp, synthetic construct
  source 1..21: mol_type = other DNA; mol_type = other DNA
acttggagtggtatgaatgcg

SEQ ID NO: 8966 - DNA, 21 bp, synthetic construct
  source 1..21: mol_type = other DNA; mol_type = other DNA
gtgagtacgagtaagcattgg

SEQ ID NO: 8967 - DNA, 21 bp, synthetic construct
  source 1..21: mol_type = other DNA; mol_type = other DNA
aatcggtatggggcggcgcat

SEQ ID NO: 8968 - DNA, 21 bp, synthetic construct
  source 1..21: mol_type = other DNA; mol_type = other DNA
tggaatgcgtcgtataagcag

SEQ ID NO: 8969 - DNA, 21 bp, synthetic construct
  source 1..21: mol_type = other DNA; mol_type = other DNA
acggatgagtggagtccttat

SEQ ID NO: 8970 - DNA, 21 bp, synthetic construct
  source 1..21: mol_type = other DNA; mol_type = other DNA
ggtcaggttgggcgttataat

SEQ ID NO: 8971 - DNA, 21 bp, synthetic construct
  source 1..21: mol_type = other DNA; mol_type = other DNA
tgtaagccgtgtactgcgaat

SEQ ID NO: 8972 - DNA, 21 bp, synthetic construct
  source 1..21: mol_type = other DNA; mol_type = other DNA
ggtggtcgggggtataatatg

SEQ ID NO: 8973 - DNA, 21 bp, synthetic construct
  source 1..21: mol_type = other DNA; mol_type = other DNA
ggtgtggctaatactatgtgg

SEQ ID NO: 8974 - DNA, 21 bp, synthetic construct
  source 1..21: mol_type = other DNA; mol_type = other DNA
ctgcttgatagtcgtgattgg

SEQ ID NO: 8975 - DNA, 21 bp, synthetic construct
  source 1..21: mol_type = other DNA; mol_type = other DNA
cataaggaggggtgtggtctt

SEQ ID NO: 8976 - DNA, 21 bp, synthetic construct
  source 1..21: mol_type = other DNA; mol_type = other DNA
gatttgcaggctcatgattgg

SEQ ID NO: 8977 - DNA, 21 bp, synthetic construct
  source 1..21: mol_type = other DNA; mol_type = other DNA
tctgggattacttgttgtcct

SEQ ID NO: 8978 - DNA, 21 bp, synthetic construct
  source 1..21: mol_type = other DNA; mol_type = other DNA
cggggtgtgtatcgtagtgag

SEQ ID NO: 8979 - DNA, 21 bp, synthetic construct
  source 1..21: mol_type = other DNA; mol_type = other DNA
ggtgggtttggtgcggataag

SEQ ID NO: 8980 - DNA, 21 bp, synthetic construct
  source 1..21: mol_type = other DNA; mol_type = other DNA
tattcgagggttgattataat

SEQ ID NO: 8981 - DNA, 21 bp, synthetic construct
  source 1..21: mol_type = other DNA; mol_type = other DNA
gggacgcatacgagtgcttgt

SEQ ID NO: 8982 - DNA, 21 bp, synthetic construct
  source 1..21: mol_type = other DNA; mol_type = other DNA
ggttctccttcgtctagttgg

SEQ ID NO: 8983 - DNA, 21 bp, synthetic construct
  source 1..21: mol_type = other DNA; mol_type = other DNA
tggtggtctggggtttctgtg

SEQ ID NO: 8984 - DNA, 21 bp, synthetic construct
  source 1..21: mol_type = other DNA; mol_type = other DNA
tcgaggtttcgggttactgat

SEQ ID NO: 8985 - DNA, 21 bp, synthetic construct
  source 1..21: mol_type = other DNA; mol_type = other DNA
gtgaatgagtattctcggtat

SEQ ID NO: 8986 - DNA, 21 bp, synthetic construct
  source 1..21: mol_type = other DNA; mol_type = other DNA
tattttacggctcagttggat

SEQ ID NO: 8987 - DNA, 21 bp, synthetic construct
  source 1..21: mol_type = other DNA; mol_type = other DNA
tgtgagagtgtttgtctttat

SEQ ID NO: 8988 - DNA, 21 bp, synthetic construct
  source 1..21: mol_type = other DNA; mol_type = other DNA
tgtgttcaggtgaagagtggg

SEQ ID NO: 8989 - DNA, 21 bp, synthetic construct
  source 1..21: mol_type = other DNA; mol_type = other DNA
tgggcggatgctcggcggacg

SEQ ID NO: 8990 - DNA, 21 bp, synthetic construct
  source 1..21: mol_type = other DNA; mol_type = other DNA
tatcatagtcgtccgtttgcg

SEQ ID NO: 8991 - DNA, 21 bp, synthetic construct
  source 1..21: mol_type = other DNA; mol_type = other DNA
agtcagtgtacgagtagtccg

SEQ ID NO: 8992 - DNA, 21 bp, synthetic construct
  source 1..21: mol_type = other DNA; mol_type = other DNA
atttcggagtttcttgggtgg

SEQ ID NO: 8993 - DNA, 21 bp, synthetic construct
  source 1..21: mol_type = other DNA; mol_type = other DNA
attgatgagtgggcttcttat

SEQ ID NO: 8994 - DNA, 21 bp, synthetic construct
  source 1..21: mol_type = other DNA; mol_type = other DNA
ttgattgcttctgttagtgct

SEQ ID NO: 8995 - DNA, 21 bp, synthetic construct
  source 1..21: mol_type = other DNA; mol_type = other DNA
ctgttgtcggatgtgaagtgg

SEQ ID NO: 8996 - DNA, 21 bp, synthetic construct
  source 1..21: mol_type = other DNA; mol_type = other DNA
agtgggtcgaggtttaattct

SEQ ID NO: 8997 - DNA, 21 bp, synthetic construct
  source 1..21: mol_type = other DNA; mol_type = other DNA
agtgggaatcgtggggtgtgg

SEQ ID NO: 8998 - DNA, 21 bp, synthetic construct
  source 1..21: mol_type = other DNA; mol_type = other DNA
gataaggttcctgcgaggttt

SEQ ID NO: 8999 - DNA, 21 bp, synthetic construct
  source 1..21: mol_type = other DNA; mol_type = other DNA
attgagcggaggggttgggat

SEQ ID NO: 9000 - DNA, 21 bp, synthetic construct
  source 1..21: mol_type = other DNA; mol_type = other DNA
agttggttgaaggatgatgtt

SEQ ID NO: 9001 - DNA, 21 bp, synthetic construct
  source 1..21: mol_type = other DNA; mol_type = other DNA
aggggtcgggagtttcgggag

SEQ ID NO: 9002 - DNA, 21 bp, synthetic construct
  source 1..21: mol_type = other DNA; mol_type = other DNA
catgggtctgatcgtcgtttt

SEQ ID NO: 9003 - DNA, 21 bp, synthetic construct
  source 1..21: mol_type = other DNA; mol_type = other DNA
acgccgggtaatacgtcgagt

SEQ ID NO: 9004 - DNA, 21 bp, synthetic construct
  source 1..21: mol_type = other DNA; mol_type = other DNA
tgtgatgggtcttgtaaggcg

SEQ ID NO: 9005 - DNA, 21 bp, synthetic construct
  source 1..21: mol_type = other DNA; mol_type = other DNA
gggacgcggcctagtgagcct

SEQ ID NO: 9006 - DNA, 21 bp, synthetic construct
  source 1..21: mol_type = other DNA; mol_type = other DNA
tcgaagtatcatggttcgggg

SEQ ID NO: 9007 - DNA, 21 bp, synthetic construct
  source 1..21: mol_type = other DNA; mol_type = other DNA
gcgcgttatagtactggggct

SEQ ID NO: 9008 - DNA, 21 bp, synthetic construct
  source 1..21: mol_type = other DNA; mol_type = other DNA
cagggtaatggtagttttatt

SEQ ID NO: 9009 - DNA, 21 bp, synthetic construct
  source 1..21: mol_type = other DNA; mol_type = other DNA
ggtggtgagggttcgagttgg

SEQ ID NO: 9010 - DNA, 21 bp, synthetic construct
  source 1..21: mol_type = other DNA; mol_type = other DNA
tgttgtaagggtcagcctatg

SEQ ID NO: 9011 - DNA, 21 bp, synthetic construct
  source 1..21: mol_type = other DNA; mol_type = other DNA
gtgtttagggggcatgttggt

SEQ ID NO: 9012 - DNA, 21 bp, synthetic construct
  source 1..21: mol_type = other DNA; mol_type = other DNA
aagagggatgggacttctgcg

SEQ ID NO: 9013 - DNA, 21 bp, synthetic construct
  source 1..21: mol_type = other DNA; mol_type = other DNA
tttcctgggtctatttgtgtg

SEQ ID NO: 9014 - DNA, 21 bp, synthetic construct
  source 1..21: mol_type = other DNA; mol_type = other DNA
aatggtgattcgggtaagtgg

SEQ ID NO: 9015 - DNA, 21 bp, synthetic construct
  source 1..21: mol_type = other DNA; mol_type = other DNA
aattttggtcctcgtgctact

SEQ ID NO: 9016 - DNA, 21 bp, synthetic construct
  source 1..21: mol_type = other DNA; mol_type = other DNA
tgtgaggatgtgtgtcatggg

SEQ ID NO: 9017 - DNA, 21 bp, synthetic construct
  source 1..21: mol_type = other DNA; mol_type = other DNA
actttgtcgactaatgggagg

SEQ ID NO: 9018 - DNA, 21 bp, synthetic construct
  source 1..21: mol_type = other DNA; mol_type = other DNA
ttgagtgattttaagatttat

SEQ ID NO: 9019 - DNA, 21 bp, synthetic construct
  source 1..21: mol_type = other DNA; mol_type = other DNA
gatgtgtgttgtacgcgggtt

SEQ ID NO: 9020 - DNA, 21 bp, synthetic construct
  source 1..21: mol_type = other DNA; mol_type = other DNA
gggagtatgacgtcgagttgg

SEQ ID NO: 9021 - DNA, 21 bp, synthetic construct
  source 1..21: mol_type = other DNA; mol_type = other DNA
gggaatggtgagattcgttgg

SEQ ID NO: 9022 - DNA, 21 bp, synthetic construct
  source 1..21: mol_type = other DNA; mol_type = other DNA
gatagtgttgtgcatctgcgg

SEQ ID NO: 9023 - DNA, 21 bp, synthetic construct
  source 1..21: mol_type = other DNA; mol_type = other DNA
gagtataagacgtatgggaag

SEQ ID NO: 9024 - DNA, 21 bp, synthetic construct
  source 1..21: mol_type = other DNA; mol_type = other DNA
cgtgcgcttgatgggtgggat

SEQ ID NO: 9025 - DNA, 21 bp, synthetic construct
  source 1..21: mol_type = other DNA; mol_type = other DNA
ggttcgggggatagtctttgg

SEQ ID NO: 9026 - DNA, 21 bp, synthetic construct
  source 1..21: mol_type = other DNA; mol_type = other DNA
cagggtcagccttctaagtgg

SEQ ID NO: 9027 - DNA, 21 bp, synthetic construct
  source 1..21: mol_type = other DNA; mol_type = other DNA
gggggtagttcgagtacttgg

SEQ ID NO: 9028 - DNA, 21 bp, synthetic construct
  source 1..21: mol_type = other DNA; mol_type = other DNA
gggtcttatcagaatactcgt

SEQ ID NO: 9029 - DNA, 21 bp, synthetic construct
  source 1..21: mol_type = other DNA; mol_type = other DNA
atgtggaaggataagagtaat

SEQ ID NO: 9030 - DNA, 21 bp, synthetic construct
  source 1..21: mol_type = other DNA; mol_type = other DNA
ggtagtccggggtctcattgg

SEQ ID NO: 9031 - DNA, 21 bp, synthetic construct
  source 1..21: mol_type = other DNA; mol_type = other DNA
gttcataggctgcagcttgat

SEQ ID NO: 9032 - DNA, 21 bp, synthetic construct
  source 1..21: mol_type = other DNA; mol_type = other DNA
gagcgtccgagtagtaagtat

SEQ ID NO: 9033 - DNA, 21 bp, synthetic construct
  source 1..21: mol_type = other DNA; mol_type = other DNA
ggggggaatggggtttcgtgg

SEQ ID NO: 9034 - DNA, 21 bp, synthetic construct
  source 1..21: mol_type = other DNA; mol_type = other DNA
tatcatggtaagtatcagctg

SEQ ID NO: 9035 - DNA, 21 bp, synthetic construct
  source 1..21: mol_type = other DNA; mol_type = other DNA
tttatgcgtggtatgggtagt

SEQ ID NO: 9036 - DNA, 21 bp, synthetic construct
  source 1..21: mol_type = other DNA; mol_type = other DNA
agggaggggtctagttcttgg

SEQ ID NO: 9037 - DNA, 21 bp, synthetic construct
  source 1..21: mol_type = other DNA; mol_type = other DNA
ccgagttggggtgatcatttg

SEQ ID NO: 9038 - DNA, 21 bp, synthetic construct
  source 1..21: mol_type = other DNA; mol_type = other DNA
ttttcgaaggagtggaggccg

SEQ ID NO: 9039 - DNA, 21 bp, synthetic construct
  source 1..21: mol_type = other DNA; mol_type = other DNA
gttgagtttgagatgagttat

SEQ ID NO: 9040 - DNA, 21 bp, synthetic construct
  source 1..21: mol_type = other DNA
gatgatgttgtgtctaggcgt

SEQ ID NO: 9041 - DNA, 21 bp, synthetic construct
  source 1..21: mol_type = other DNA; mol_type = other DNA
gtgtttcggagtgttgagaag

SEQ ID NO: 9042 - DNA, 21 bp, synthetic construct
  source 1..21: mol_type = other DNA; mol_type = other DNA
ctgacgcggcttagtcctgat

SEQ ID NO: 9043 - DNA, 21 bp, synthetic construct
  source 1..21: mol_type = other DNA; mol_type = other DNA
aattgggctcgttcgattgag

SEQ ID NO: 9044 - DNA, 21 bp, synthetic construct
  source 1..21: mol_type = other DNA; mol_type = other DNA
gatatgggggatcatggttgg

SEQ ID NO: 9045 - DNA, 21 bp, synthetic construct
  source 1..21: mol_type = other DNA; mol_type = other DNA
cgtgagtctgctgtgagttgg

SEQ ID NO: 9046 - DNA, 21 bp, synthetic construct
  source 1..21: mol_type = other DNA; mol_type = other DNA
aatttggagtcgcatgtgtgg

SEQ ID NO: 9047 - DNA, 21 bp, synthetic construct
  source 1..21: mol_type = other DNA; mol_type = other DNA
tatattaagtatgatacgggt

SEQ ID NO: 9048 - DNA, 21 bp, synthetic construct
  source 1..21: mol_type = other DNA; mol_type = other DNA
tggtggagtggtgttattgag

SEQ ID NO: 9049 - DNA, 21 bp, synthetic construct
  source 1..21: mol_type = other DNA; mol_type = other DNA
gggatgtctattgaggcgcgg

SEQ ID NO: 9050 - DNA, 21 bp, synthetic construct
  source 1..21: mol_type = other DNA; mol_type = other DNA
cgtgatgctgaggtttttcct

SEQ ID NO: 9051 - DNA, 21 bp, synthetic construct
  source 1..21: mol_type = other DNA; mol_type = other DNA
gagaagaagtttgttccggcg

SEQ ID NO: 9052 - DNA, 21 bp, synthetic construct
  source 1..21: mol_type = other DNA; mol_type = other DNA
ttggtgaagagtacgaattat

SEQ ID NO: 9053 - DNA, 21 bp, synthetic construct
  source 1..21: mol_type = other DNA; mol_type = other DNA
gattgggcggtttctattgag

SEQ ID NO: 9054 - DNA, 21 bp, synthetic construct
  source 1..21: mol_type = other DNA; mol_type = other DNA
tgggttagggagcgggcgtct

SEQ ID NO: 9055 - DNA, 21 bp, synthetic construct
  source 1..21: mol_type = other DNA; mol_type = other DNA
ttgcgtgatgggacgtatgcg

SEQ ID NO: 9056 - DNA, 21 bp, synthetic construct
  source 1..21: mol_type = other DNA; mol_type = other DNA
gattggacgggtaatgcggcg

SEQ ID NO: 9057 - DNA, 21 bp, synthetic construct
  source 1..21: mol_type = other DNA; mol_type = other DNA
agggatgttactgtttttccg

SEQ ID NO: 9058 - DNA, 21 bp, synthetic construct
  source 1..21: mol_type = other DNA; mol_type = other DNA
gaggttgatggtttgcgttgg

SEQ ID NO: 9059 - DNA, 21 bp, synthetic construct
  source 1..21: mol_type = other DNA; mol_type = other DNA
gtgtggtctgctaatggtatt

SEQ ID NO: 9060 - DNA, 21 bp, synthetic construct
  source 1..21: mol_type = other DNA; mol_type = other DNA
ccgttggcggatcgtatgtgg

SEQ ID NO: 9061 - DNA, 21 bp, synthetic construct
  source 1..21: mol_type = other DNA; mol_type = other DNA
tgtggtgatattgggagtgtg

SEQ ID NO: 9062 - DNA, 21 bp, synthetic construct
  source 1..21: mol_type = other DNA; mol_type = other DNA
ctttctcggttgggtattgat

SEQ ID NO: 9063 - DNA, 21 bp, synthetic construct
  source 1..21: mol_type = other DNA; mol_type = other DNA
cgttatcgtgatggtgctgcg

SEQ ID NO: 9064 - DNA, 21 bp, synthetic construct
  source 1..21: mol_type = other DNA; mol_type = other DNA
attgagagttcgtctgggcgg

SEQ ID NO: 9065 - DNA, 21 bp, synthetic construct
  source 1..21: mol_type = other DNA; mol_type = other DNA
gatgttatgaggtcgaggtcg

SEQ ID NO: 9066 - DNA, 21 bp, synthetic construct
  source 1..21: mol_type = other DNA; mol_type = other DNA
catgatggttcgtcgcagtgg

SEQ ID NO: 9067 - DNA, 21 bp, synthetic construct
  source 1..21: mol_type = other DNA; mol_type = other DNA
aatggttttaaggatcgtggt

SEQ ID NO: 9068 - DNA, 21 bp, synthetic construct
  source 1..21: mol_type = other DNA; mol_type = other DNA
tattttacgggtatgactgtg

SEQ ID NO: 9069 - DNA, 21 bp, synthetic construct
  source 1..21: mol_type = other DNA; mol_type = other DNA
tgtgcgacgaggcttgcgcat

SEQ ID NO: 9070 - DNA, 21 bp, synthetic construct
  source 1..21: mol_type = other DNA; mol_type = other DNA
gggctggggcatcagcagtgt

SEQ ID NO: 9071 - DNA, 21 bp, synthetic construct
  source 1..21: mol_type = other DNA; mol_type = other DNA
gagcggacttcggttgcggcg

SEQ ID NO: 9072 - DNA, 21 bp, synthetic construct
  source 1..21: mol_type = other DNA; mol_type = other DNA
tgtgggagtggttgttcgatt

SEQ ID NO: 9073 - DNA, 21 bp, synthetic construct
  source 1..21: mol_type = other DNA; mol_type = other DNA
tgtactatttcgcggtgtccg

SEQ ID NO: 9074 - DNA, 21 bp, synthetic construct
  source 1..21: mol_type = other DNA; mol_type = other DNA
cggacttctatgcatcctggg

SEQ ID NO: 9075 - DNA, 21 bp, synthetic construct
  source 1..21: mol_type = other DNA; mol_type = other DNA
tgtttggctaagcatgttgcg

SEQ ID NO: 9076 - DNA, 21 bp, synthetic construct
  source 1..21: mol_type = other DNA; mol_type = other DNA
tatagtcgtactggtcagggg

SEQ ID NO: 9077 - DNA, 21 bp, synthetic construct
  source 1..21: mol_type = other DNA; mol_type = other DNA
gagactgattctggttattgg

SEQ ID NO: 9078 - DNA, 21 bp, synthetic construct
  source 1..21: mol_type = other DNA; mol_type = other DNA
tatagtacgaattggaagtct

SEQ ID NO: 9079 - DNA, 21 bp, synthetic construct
  source 1..21: mol_type = other DNA; mol_type = other DNA
tgggtgcgggcgagtgcgagt

SEQ ID NO: 9080 - DNA, 21 bp, synthetic construct
  source 1..21: mol_type = other DNA; mol_type = other DNA
aggagggatgggagtccggct

SEQ ID NO: 9081 - DNA, 21 bp, synthetic construct
  source 1..21: mol_type = other DNA; mol_type = other DNA
ggtgatacggtggtgcggtgg

SEQ ID NO: 9082 - DNA, 21 bp, synthetic construct
  source 1..21: mol_type = other DNA; mol_type = other DNA
gtttttcgttcgacgcctgct

SEQ ID NO: 9083 - DNA, 21 bp, synthetic construct
  source 1..21: mol_type = other DNA; mol_type = other DNA
agttttaagcgggcgaatgag

SEQ ID NO: 9084 - DNA, 21 bp, synthetic construct
  source 1..21: mol_type = other DNA; mol_type = other DNA
tgtgatagtgtttgtgcttat

SEQ ID NO: 9085 - DNA, 21 bp, synthetic construct
  source 1..21: mol_type = other DNA; mol_type = other DNA
ggttgttctggtaattcgtgt

SEQ ID NO: 9086 - DNA, 21 bp, synthetic construct
  source 1..21: mol_type = other DNA; mol_type = other DNA
tttccgttgcggcgtgtggat

SEQ ID NO: 9087 - DNA, 21 bp, synthetic construct
  source 1..21: mol_type = other DNA; mol_type = other DNA
aatctggggagttcgacgtgg

SEQ ID NO: 9088 - DNA, 21 bp, synthetic construct
  source 1..21: mol_type = other DNA; mol_type = other DNA
ttggctaggcttgcttatgat

SEQ ID NO: 9089 - DNA, 21 bp, synthetic construct
  source 1..21: mol_type = other DNA; mol_type = other DNA
gcttgtcggcataatccggcg

SEQ ID NO: 9090 - DNA, 21 bp, synthetic construct
  source 1..21: mol_type = other DNA; mol_type = other DNA
tcgtggaagtcgacttctgcg

SEQ ID NO: 9091 - DNA, 21 bp, synthetic construct
  source 1..21: mol_type = other DNA; mol_type = other DNA
gctggtccggattatgggtgg

SEQ ID NO: 9092 - DNA, 21 bp, synthetic construct
  source 1..21: mol_type = other DNA; mol_type = other DNA
gctccgcctgatgttcgttgg

SEQ ID NO: 9093 - DNA, 21 bp, synthetic construct
  source 1..21: mol_type = other DNA; mol_type = other DNA
gtgttgtcgtctactacttgg

SEQ ID NO: 9094 - DNA, 21 bp, synthetic construct
  source 1..21: mol_type = other DNA; mol_type = other DNA
cgtttgtatgatacgtttgct

SEQ ID NO: 9095 - DNA, 21 bp, synthetic construct
  source 1..21: mol_type = other DNA; mol_type = other DNA
tgggcgggggcgggtcgtacg

SEQ ID NO: 9096 - DNA, 21 bp, synthetic construct
  source 1..21: mol_type = other DNA; mol_type = other DNA
cagtatgctcgtcagaatcat

SEQ ID NO: 9097 - DNA, 21 bp, synthetic construct
  source 1..21: mol_type = other DNA; mol_type = other DNA
actaggtataagcctacggat

SEQ ID NO: 9098 - DNA, 21 bp, synthetic construct
  source 1..21: mol_type = other DNA; mol_type = other DNA
aatgtgggtaaggctaattgt

SEQ ID NO: 9099 - DNA, 21 bp, synthetic construct
  source 1..21: mol_type = other DNA; mol_type = other DNA
gtggggaagtatgctgtgcat

SEQ ID NO: 9100 - DNA, 21 bp, synthetic construct
  source 1..21: mol_type = other DNA; mol_type = other DNA
gtgggtacgcgggctgcttgg

SEQ ID NO: 9101 - DNA, 21 bp, synthetic construct
  source 1..21: mol_type = other DNA; mol_type = other DNA
ttgggtgatgctgtgtgtcgg

SEQ ID NO: 9102 - DNA, 21 bp, synthetic construct
  source 1..21: mol_type = other DNA; mol_type = other DNA
gcgcataatcgtagtacttat

SEQ ID NO: 9103 - DNA, 21 bp, synthetic construct
  source 1..21: mol_type = other DNA; mol_type = other DNA
tatgtggcgggttgtaaggag

SEQ ID NO: 9104 - DNA, 21 bp, synthetic construct
  source 1..21: mol_type = other DNA; mol_type = other DNA
gttgggattaattgtaaggag

SEQ ID NO: 9105 - DNA, 21 bp, synthetic construct
  source 1..21: mol_type = other DNA; mol_type = other DNA
aagggtgtttatgcgcatggt

SEQ ID NO: 9106 - DNA, 21 bp, synthetic construct
  source 1..21: mol_type = other DNA; mol_type = other DNA
ggggggcctggttattcgagg

SEQ ID NO: 9107 - DNA, 21 bp, synthetic construct
  source 1..21: mol_type = other DNA; mol_type = other DNA
aatgctggtgtttttacgggg

SEQ ID NO: 9108 - DNA, 21 bp, synthetic construct
  source 1..21: mol_type = other DNA; mol_type = other DNA
actcttggttctcctgatcgg

SEQ ID NO: 9109 - DNA, 21 bp, synthetic construct
  source 1..21: mol_type = other DNA; mol_type = other DNA
tattggcaggggctggcgtct

SEQ ID NO: 9110 - DNA, 21 bp, synthetic construct
  source 1..21: mol_type = other DNA; mol_type = other DNA
ggtgctactgtgtatcgtggt

SEQ ID NO: 9111 - DNA, 21 bp, synthetic construct
  source 1..21: mol_type = other DNA; mol_type = other DNA
cgtggtgataatatttttcct

SEQ ID NO: 9112 - DNA, 21 bp, synthetic construct
  source 1..21: mol_type = other DNA; mol_type = other DNA
tatgtgcgtcatgatacgctg

SEQ ID NO: 9113 - DNA, 21 bp, synthetic construct
  source 1..21: mol_type = other DNA; mol_type = other DNA
ggttcgggtatgaatgcgtgg

SEQ ID NO: 9114 - DNA, 21 bp, synthetic construct
  source 1..21: mol_type = other DNA; mol_type = other DNA
tctcgggatgagtggagggat

SEQ ID NO: 9115 - DNA, 21 bp, synthetic construct
  source 1..21: mol_type = other DNA; mol_type = other DNA
ttggcgaggactgcgttgaat

SEQ ID NO: 9116 - DNA, 21 bp, synthetic construct
  source 1..21: mol_type = other DNA; mol_type = other DNA
cgtttggcgggggagtgtaat

SEQ ID NO: 9117 - DNA, 21 bp, synthetic construct
  source 1..21: mol_type = other DNA; mol_type = other DNA
ctgttgtctgcgaatacgtgg

SEQ ID NO: 9118 - DNA, 21 bp, synthetic construct
  source 1..21: mol_type = other DNA; mol_type = other DNA
gatctggcgtctatggtttgg

SEQ ID NO: 9119 - DNA, 21 bp, synthetic construct
  source 1..21: mol_type = other DNA; mol_type = other DNA
aattatgctaagtctcagaat

SEQ ID NO: 9120 - DNA, 21 bp, synthetic construct
  source 1..21: mol_type = other DNA; mol_type = other DNA
tggagggggaatgcgactgtt

SEQ ID NO: 9121 - DNA, 21 bp, synthetic construct
  source 1..21: mol_type = other DNA; mol_type = other DNA
gcgtataatggtccgcgtgct

SEQ ID NO: 9122 - DNA, 21 bp, synthetic construct
  source 1..21: mol_type = other DNA; mol_type = other DNA
tgtactagggttgttgtggat

SEQ ID NO: 9123 - DNA, 21 bp, synthetic construct
  source 1..21: mol_type = other DNA; mol_type = other DNA
tttgatgagcatgagccgccg

SEQ ID NO: 9124 - DNA, 21 bp, synthetic construct
  source 1..21: mol_type = other DNA; mol_type = other DNA
cctcatctgcataggggtgcg

SEQ ID NO: 9125 - DNA, 21 bp, synthetic construct
  source 1..21: mol_type = other DNA; mol_type = other DNA
tattttactggtgttgttggg

SEQ ID NO: 9126 - DNA, 21 bp, synthetic construct
  source 1..21: mol_type = other DNA; mol_type = other DNA
tggtcggggacgcggatgcag

SEQ ID NO: 9127 - DNA, 21 bp, synthetic construct
  source 1..21: mol_type = other DNA; mol_type = other DNA
tggagtgttaagagggagact

SEQ ID NO: 9128 - DNA, 21 bp, synthetic construct
  source 1..21: mol_type = other DNA; mol_type = other DNA
ttgtctaaggctgctacgaat

SEQ ID NO: 9129 - DNA, 21 bp, synthetic construct
  source 1..21: mol_type = other DNA; mol_type = other DNA
tatttttcgggggtgagtgat

SEQ ID NO: 9130 - DNA, 21 bp, synthetic construct
  source 1..21: mol_type = other DNA; mol_type = other DNA
gatctggagagtgcgaggtgg

SEQ ID NO: 9131 - DNA, 21 bp, synthetic construct
  source 1..21: mol_type = other DNA; mol_type = other DNA
cattttgcgggtacttgggat

SEQ ID NO: 9132 - DNA, 21 bp, synthetic construct
  source 1..21: mol_type = other DNA; mol_type = other DNA
gtgcctgtgggttgttgtggt

SEQ ID NO: 9133 - DNA, 21 bp, synthetic construct
  source 1..21: mol_type = other DNA; mol_type = other DNA
gggttgggtgcgtctcggtat

SEQ ID NO: 9134 - DNA, 21 bp, synthetic construct
  source 1..21: mol_type = other DNA; mol_type = other DNA
gtgacggatacgaatggtgtg

SEQ ID NO: 9135 - DNA, 21 bp, synthetic construct
  source 1..21: mol_type = other DNA; mol_type = other DNA
tatactaggtcggatcataat

SEQ ID NO: 9136 - DNA, 21 bp, synthetic construct
  source 1..21: mol_type = other DNA; mol_type = other DNA
gtgcgtagtgttaatggggtg

SEQ ID NO: 9137 - DNA, 21 bp, synthetic construct
  source 1..21: mol_type = other DNA; mol_type = other DNA
tggagggcggttcgtgcggag

SEQ ID NO: 9138 - DNA, 21 bp, synthetic construct
  source 1..21: mol_type = other DNA; mol_type = other DNA
gggagtgggactaatgcgtgg

SEQ ID NO: 9139 - DNA, 21 bp, synthetic construct
  source 1..21: mol_type = other DNA; mol_type = other DNA
ttttcggagaggcgtgggctt

SEQ ID NO: 9140 - DNA, 21 bp, synthetic construct
  source 1..21: mol_type = other DNA; mol_type = other DNA
gttttggcgagtgttagttgg

SEQ ID NO: 9141 - DNA, 21 bp, synthetic construct
  source 1..21: mol_type = other DNA; mol_type = other DNA
tggaggggtggtggtggtagt

SEQ ID NO: 9142 - DNA, 21 bp, synthetic construct
  source 1..21: mol_type = other DNA; mol_type = other DNA
agtacgtatgatgctattgtt

SEQ ID NO: 9143 - DNA, 21 bp, synthetic construct
  source 1..21: mol_type = other DNA; mol_type = other DNA
tatcataggactgcttctttg

SEQ ID NO: 9144 - DNA, 21 bp, synthetic construct
  source 1..21: mol_type = other DNA; mol_type = other DNA
agggataatgggtatccttgg

SEQ ID NO: 9145 - DNA, 21 bp, synthetic construct
  source 1..21: mol_type = other DNA; mol_type = other DNA
tatgattctactaatggggtt

SEQ ID NO: 9146 - DNA, 21 bp, synthetic construct
  source 1..21: mol_type = other DNA; mol_type = other DNA
ctttctcggttgggtcctatt

SEQ ID NO: 9147 - DNA, 21 bp, synthetic construct
  source 1..21: mol_type = other DNA; mol_type = other DNA
gatttgcgtgttcagacgtgg

SEQ ID NO: 9148 - DNA, 21 bp, synthetic construct
  source 1..21: mol_type = other DNA; mol_type = other DNA
acgtatcgggatggggggagg

SEQ ID NO: 9149 - DNA, 21 bp, synthetic construct
  source 1..21: mol_type = other DNA; mol_type = other DNA
gctggtggttcgcgtgattgg

SEQ ID NO: 9150 - DNA, 21 bp, synthetic construct
  source 1..21: mol_type = other DNA; mol_type = other DNA
tatttttcgggggctcattct

SEQ ID NO: 9151 - DNA, 21 bp, synthetic construct
  source 1..21: mol_type = other DNA; mol_type = other DNA
tttatggatgggacggcggcg

SEQ ID NO: 9152 - DNA, 21 bp, synthetic construct
  source 1..21: mol_type = other DNA; mol_type = other DNA
ttggtgcggtttgagaatgtg

SEQ ID NO: 9153 - DNA, 21 bp, synthetic construct
  source 1..21: mol_type = other DNA; mol_type = other DNA
gggtctgcgacgagtggttgg

SEQ ID NO: 9154 - DNA, 21 bp, synthetic construct
  source 1..21: mol_type = other DNA; mol_type = other DNA
aggtgtggggagtgtggtgtt

SEQ ID NO: 9155 - DNA, 21 bp, synthetic construct
  source 1..21: mol_type = other DNA; mol_type = other DNA
tggggttcgtctagggctact

SEQ ID NO: 9156 - DNA, 21 bp, synthetic construct
  source 1..21: mol_type = other DNA; mol_type = other DNA
ggtgatggtgagagtcggtgg

SEQ ID NO: 9157 - DNA, 21 bp, synthetic construct
  source 1..21: mol_type = other DNA; mol_type = other DNA
ttgtcgcgtgcggcgaataat

SEQ ID NO: 9158 - DNA, 21 bp, synthetic construct
  source 1..21: mol_type = other DNA; mol_type = other DNA
gcgatgctttctagtacgtgg

SEQ ID NO: 9159 - DNA, 21 bp, synthetic construct
  source 1..21: mol_type = other DNA; mol_type = other DNA
agtgcttataggagtggtacg

SEQ ID NO: 9160 - DNA, 21 bp, synthetic construct
  source 1..21: mol_type = other DNA; mol_type = other DNA
agtttgggggatcggacgtgg

SEQ ID NO: 9161 - DNA, 21 bp, synthetic construct
  source 1..21: mol_type = other DNA; mol_type = other DNA
agggatggttcttctagttgg

SEQ ID NO: 9162 - DNA, 21 bp, synthetic construct
  source 1..21: mol_type = other DNA; mol_type = other DNA
tttaggttgcctcgtgagact

SEQ ID NO: 9163 - DNA, 21 bp, synthetic construct
  source 1..21: mol_type = other DNA; mol_type = other DNA
cggatggattcggcggcttgg

SEQ ID NO: 9164 - DNA, 21 bp, synthetic construct
  source 1..21: mol_type = other DNA; mol_type = other DNA
tggattaatggtatggttgct

SEQ ID NO: 9165 - DNA, 21 bp, synthetic construct
  source 1..21: mol_type = other DNA; mol_type = other DNA
tctttgtctgatcgtacgtgg

SEQ ID NO: 9166 - DNA, 21 bp, synthetic construct
  source 1..21: mol_type = other DNA; mol_type = other DNA
gtttctgagtttgagattttt

SEQ ID NO: 9167 - DNA, 21 bp, synthetic construct
  source 1..21: mol_type = other DNA; mol_type = other DNA
tggcctaatggggttaatggt

SEQ ID NO: 9168 - DNA, 21 bp, synthetic construct
  source 1..21: mol_type = other DNA; mol_type = other DNA
ggtgatggtgctagtcggtat

SEQ ID NO: 9169 - DNA, 21 bp, synthetic construct
  source 1..21: mol_type = other DNA; mol_type = other DNA
aggtatgtgaataaggagagt

SEQ ID NO: 9170 - DNA, 21 bp, synthetic construct
  source 1..21: mol_type = other DNA; mol_type = other DNA
gttaagagttcgaatggggtt

SEQ ID NO: 9171 - DNA, 21 bp, synthetic construct
  source 1..21: mol_type = other DNA; mol_type = other DNA
agggatcagttttcgacgtat

SEQ ID NO: 9172 - DNA, 21 bp, synthetic construct
  source 1..21: mol_type = other DNA; mol_type = other DNA
ggtggtatgctggtggagcgg

SEQ ID NO: 9173 - DNA, 21 bp, synthetic construct
  source 1..21: mol_type = other DNA; mol_type = other DNA
attgctagtgagggggctggg

SEQ ID NO: 9174 - DNA, 21 bp, synthetic construct
  source 1..21: mol_type = other DNA; mol_type = other DNA
gcgattactgctattgggtgt

SEQ ID NO: 9175 - DNA, 21 bp, synthetic construct
  source 1..21: mol_type = other DNA; mol_type = other DNA
tattattctgggcagttggcg

SEQ ID NO: 9176 - DNA, 21 bp, synthetic construct
  source 1..21: mol_type = other DNA; mol_type = other DNA
gggacgtgtggggttgagaag

SEQ ID NO: 9177 - DNA, 21 bp, synthetic construct
  source 1..21: mol_type = other DNA; mol_type = other DNA
aatcatctgcatgctcgtagt

SEQ ID NO: 9178 - DNA, 21 bp, synthetic construct
  source 1..21: mol_type = other DNA; mol_type = other DNA
agtgctagtgcgctgagttgg

SEQ ID NO: 9179 - DNA, 21 bp, synthetic construct
  source 1..21: mol_type = other DNA; mol_type = other DNA
aggtggctgaagaatgagccg

SEQ ID NO: 9180 - DNA, 21 bp, synthetic construct
  source 1..21: mol_type = other DNA; mol_type = other DNA
tatgttcggagtgattctact

SEQ ID NO: 9181 - DNA, 21 bp, synthetic construct
  source 1..21: mol_type = other DNA; mol_type = other DNA
tgtgtgactggttgtcgggat

SEQ ID NO: 9182 - DNA, 21 bp, synthetic construct
  source 1..21: mol_type = other DNA; mol_type = other DNA
tttttttcgggtgcgattgag

SEQ ID NO: 9183 - DNA, 21 bp, synthetic construct
  source 1..21: mol_type = other DNA; mol_type = other DNA
acggatgattttcttgcttgg

SEQ ID NO: 9184 - DNA, 21 bp, synthetic construct
  source 1..21: mol_type = other DNA; mol_type = other DNA
tttggtggtgtttctgcgtat

SEQ ID NO: 9185 - DNA, 21 bp, synthetic construct
  source 1..21: mol_type = other DNA; mol_type = other DNA
tgttgtggttcgaagaatgct

SEQ ID NO: 9186 - DNA, 21 bp, synthetic construct
  source 1..21: mol_type = other DNA; mol_type = other DNA
tggtattcgggggttttgtct

SEQ ID NO: 9187 - DNA, 21 bp, synthetic construct
  source 1..21: mol_type = other DNA; mol_type = other DNA
gataggcatcctgataggcgg

SEQ ID NO: 9188 - DNA, 21 bp, synthetic construct
  source 1..21: mol_type = other DNA; mol_type = other DNA
tattcgcgtttgaatggttct

SEQ ID NO: 9189 - DNA, 21 bp, synthetic construct
  source 1..21: mol_type = other DNA; mol_type = other DNA
aatgaggattttgtggcttgg

SEQ ID NO: 9190 - DNA, 21 bp, synthetic construct
  source 1..21: mol_type = other DNA; mol_type = other DNA
agtaggtcgtatggttctggt

SEQ ID NO: 9191 - DNA, 21 bp, synthetic construct
  source 1..21: mol_type = other DNA; mol_type = other DNA
tggttttctggggaggtggcg

SEQ ID NO: 9192 - DNA, 21 bp, synthetic construct
  source 1..21: mol_type = other DNA; mol_type = other DNA
agggatcatcatcctcgtgtt

SEQ ID NO: 9193 - DNA, 21 bp, synthetic construct
  source 1..21: mol_type = other DNA; mol_type = other DNA
gtggaggctactaatggggtt

SEQ ID NO: 9194 - DNA, 21 bp, synthetic construct
  source 1..21: mol_type = other DNA; mol_type = other DNA
agggcgggggcgcggtatgat

SEQ ID NO: 9195 - DNA, 21 bp, synthetic construct
  source 1..21: mol_type = other DNA; mol_type = other DNA
attgagatttataaggcgaat

SEQ ID NO: 9196 - DNA, 21 bp, synthetic construct
  source 1..21: mol_type = other DNA; mol_type = other DNA
cattggatgggtaataaggag

SEQ ID NO: 9197 - DNA, 21 bp, synthetic construct
  source 1..21: mol_type = other DNA; mol_type = other DNA
gtttatggtagttctgggagg

SEQ ID NO: 9198 - DNA, 21 bp, synthetic construct
  source 1..21: mol_type = other DNA; mol_type = other DNA
ggttctggtgcttctgcgtgg

SEQ ID NO: 9199 - DNA, 21 bp, synthetic construct
  source 1..21: mol_type = other DNA; mol_type = other DNA
ggttctgatcatgttatgtgg

SEQ ID NO: 9200 - DNA, 21 bp, synthetic construct
  source 1..21: mol_type = other DNA; mol_type = other DNA
gggtcttatcgttctgtgggt

SEQ ID NO: 9201 - DNA, 21 bp, synthetic construct
  source 1..21: mol_type = other DNA; mol_type = other DNA
gatgctgatgaggtgcatggg

SEQ ID NO: 9202 - DNA, 21 bp, synthetic construct
  source 1..21: mol_type = other DNA; mol_type = other DNA
ggtattgagacgagtaagtgg

SEQ ID NO: 9203 - DNA, 21 bp, synthetic construct
  source 1..21: mol_type = other DNA; mol_type = other DNA
gggtctgaggggtcgacgtgg

SEQ ID NO: 9204 - DNA, 21 bp, synthetic construct
  source 1..21: mol_type = other DNA; mol_type = other DNA
acgacggttccgacggggttg

SEQ ID NO: 9205 - DNA, 21 bp, synthetic construct
  source 1..21: mol_type = other DNA; mol_type = other DNA
tttaattctactgttgcttat

SEQ ID NO: 9206 - DNA, 21 bp, synthetic construct
  source 1..21: mol_type = other DNA; mol_type = other DNA
tgtcggcatcctgttactgct

SEQ ID NO: 9207 - DNA, 21 bp, synthetic construct
  source 1..21: mol_type = other DNA; mol_type = other DNA
ggtgataatgcgtttgggggg

SEQ ID NO: 9208 - DNA, 21 bp, synthetic construct
  source 1..21: mol_type = other DNA; mol_type = other DNA
tattggcgtggtacgatggat

SEQ ID NO: 9209 - DNA, 21 bp, synthetic construct
  source 1..21: mol_type = other DNA; mol_type = other DNA
gcgacttcggcgctggagaat

SEQ ID NO: 9210 - DNA, 21 bp, synthetic construct
  source 1..21: mol_type = other DNA; mol_type = other DNA
ggtgggggtgcgagtacgtgg

SEQ ID NO: 9211 - DNA, 21 bp, synthetic construct
  source 1..21: mol_type = other DNA; mol_type = other DNA
gatgagaatgcgtttccttat

SEQ ID NO: 9212 - DNA, 21 bp, synthetic construct
  source 1..21: mol_type = other DNA; mol_type = other DNA
tgtctgaagaatgagcggggg

SEQ ID NO: 9213 - DNA, 21 bp, synthetic construct
  source 1..21: mol_type = other DNA; mol_type = other DNA
tatatgagtgatcgtacttgg

SEQ ID NO: 9214 - DNA, 21 bp, synthetic construct
  source 1..21: mol_type = other DNA; mol_type = other DNA
actaattgtgctattaatgcg

SEQ ID NO: 9215 - DNA, 21 bp, synthetic construct
  source 1..21: mol_type = other DNA; mol_type = other DNA
aatatgtcgcaggggtcttgg

SEQ ID NO: 9216 - DNA, 21 bp, synthetic construct
  source 1..21: mol_type = other DNA; mol_type = other DNA
tatggtgctatgtgtcttgag

SEQ ID NO: 9217 - DNA, 21 bp, synthetic construct
  source 1..21: mol_type = other DNA; mol_type = other DNA
gggagttcgacgtctcattgg

SEQ ID NO: 9218 - DNA, 21 bp, synthetic construct
  source 1..21: mol_type = other DNA; mol_type = other DNA
gtgatgaatgcttctgattct

SEQ ID NO: 9219 - DNA, 21 bp, synthetic construct
  source 1..21: mol_type = other DNA; mol_type = other DNA
gtgaatgattatttgtcttat

SEQ ID NO: 9220 - DNA, 21 bp, synthetic construct
  source 1..21: mol_type = other DNA; mol_type = other DNA
ttgactcggttgtctcctgtg

SEQ ID NO: 9221 - DNA, 21 bp, synthetic construct
  source 1..21: mol_type = other DNA; mol_type = other DNA
aaggatagttatcatgtgttt

SEQ ID NO: 9222 - DNA, 21 bp, synthetic construct
  source 1..21: mol_type = other DNA; mol_type = other DNA
tggtcgttggagcgtacgtgg

SEQ ID NO: 9223 - DNA, 21 bp, synthetic construct
  source 1..21: mol_type = other DNA; mol_type = other DNA
ctttttgatggtacggagtct

SEQ ID NO: 9224 - DNA, 21 bp, synthetic construct
  source 1..21: mol_type = other DNA; mol_type = other DNA
tggactagttcgaatgtggcg

SEQ ID NO: 9225 - DNA, 21 bp, synthetic construct
  source 1..21: mol_type = other DNA; mol_type = other DNA
agggaggatactagtacttgg

SEQ ID NO: 9226 - DNA, 21 bp, synthetic construct
  source 1..21: mol_type = other DNA; mol_type = other DNA
ttgcggactgattgttgtgtg

SEQ ID NO: 9227 - DNA, 21 bp, synthetic construct
  source 1..21: mol_type = other DNA; mol_type = other DNA
gttcatagttttaatggggtg

SEQ ID NO: 9228 - DNA, 21 bp, synthetic construct
  source 1..21: mol_type = other DNA; mol_type = other DNA
gcccaaggtgggcagtctttt

SEQ ID NO: 9229 - DNA, 21 bp, synthetic construct
  source 1..21: mol_type = other DNA; mol_type = other DNA
ggtgtggagagggctaagtgg

SEQ ID NO: 9230 - DNA, 21 bp, synthetic construct
  source 1..21: mol_type = other DNA; mol_type = other DNA
tttggtaagggggagtgggcg

SEQ ID NO: 9231 - DNA, 21 bp, synthetic construct
  source 1..21: mol_type = other DNA; mol_type = other DNA
aagatggatgctgtgtcgtgg

SEQ ID NO: 9232 - DNA, 21 bp, synthetic construct
  source 1..21: mol_type = other DNA; mol_type = other DNA
tggtttactgggactgtggcg

SEQ ID NO: 9233 - DNA, 21 bp, synthetic construct
  source 1..21: mol_type = other DNA; mol_type = other DNA
ggtgggggtagttctttgtgg

SEQ ID NO: 9234 - DNA, 21 bp, synthetic construct
  source 1..21: mol_type = other DNA; mol_type = other DNA
tattttacgggggcgcctgat

SEQ ID NO: 9235 - DNA, 21 bp, synthetic construct
  source 1..21: mol_type = other DNA; mol_type = other DNA
tggactgggacgaaggatcct

SEQ ID NO: 9236 - DNA, 21 bp, synthetic construct
  source 1..21: mol_type = other DNA; mol_type = other DNA
catacgatgcgtggtggttat

SEQ ID NO: 9237 - DNA, 21 bp, synthetic construct
  source 1..21: mol_type = other DNA; mol_type = other DNA
gtggatgatgatgtgtggggt

SEQ ID NO: 9238 - DNA, 21 bp, synthetic construct
  source 1..21: mol_type = other DNA; mol_type = other DNA
cttgctaggtcgtcgactaat

SEQ ID NO: 9239 - DNA, 21 bp, synthetic construct
  source 1..21: mol_type = other DNA; mol_type = other DNA
ggggtgacgacttctgggtgg

SEQ ID NO: 9240 - DNA, 21 bp, synthetic construct
  source 1..21: mol_type = other DNA; mol_type = other DNA
cctgagtatgggaagtcggtt

SEQ ID NO: 9241 - DNA, 21 bp, synthetic construct
  source 1..21: mol_type = other DNA; mol_type = other DNA
tatttttcggggtatacttcg

SEQ ID NO: 9242 - DNA, 21 bp, synthetic construct
  source 1..21: mol_type = other DNA; mol_type = other DNA
gatgcgagggtggtgcgtcat

SEQ ID NO: 9243 - DNA, 21 bp, synthetic construct
  source 1..21: mol_type = other DNA; mol_type = other DNA
tcggatgagtattctacttat

SEQ ID NO: 9244 - DNA, 21 bp, synthetic construct
  source 1..21: mol_type = other DNA; mol_type = other DNA
cttttttctggggaggcggct

SEQ ID NO: 9245 - DNA, 21 bp, synthetic construct
  source 1..21: mol_type = other DNA; mol_type = other DNA
tggcagagtcatacgcgtaat

SEQ ID NO: 9246 - DNA, 21 bp, synthetic construct
  source 1..21: mol_type = other DNA; mol_type = other DNA
tgtgttagtgcgtgtgagcgt

SEQ ID NO: 9247 - DNA, 21 bp, synthetic construct
  source 1..21: mol_type = other DNA; mol_type = other DNA
tattttactgatattcgtgag

SEQ ID NO: 9248 - DNA, 21 bp, synthetic construct
  source 1..21: mol_type = other DNA; mol_type = other DNA
cctgtggcgagtcgggattgg

SEQ ID NO: 9249 - DNA, 21 bp, synthetic construct
  source 1..21: mol_type = other DNA; mol_type = other DNA
acgtataggggtcaggggggt

SEQ ID NO: 9250 - DNA, 21 bp, synthetic construct
  source 1..21: mol_type = other DNA; mol_type = other DNA
tggtcgagggatgcgcagaag

SEQ ID NO: 9251 - DNA, 21 bp, synthetic construct
  source 1..21: mol_type = other DNA; mol_type = other DNA
tttggtgggctgtgttgtagt

SEQ ID NO: 9252 - DNA, 21 bp, synthetic construct
  source 1..21: mol_type = other DNA; mol_type = other DNA
gctgggtcgattgatgggtcg

SEQ ID NO: 9253 - DNA, 21 bp, synthetic construct
  source 1..21: mol_type = other DNA; mol_type = other DNA
attcctgatacttgttgtgtg

SEQ ID NO: 9254 - DNA, 21 bp, synthetic construct
  source 1..21: mol_type = other DNA; mol_type = other DNA
acgacggattatgtgatgtat

SEQ ID NO: 9255 - DNA, 21 bp, synthetic construct
  source 1..21: mol_type = other DNA; mol_type = other DNA
tatgctattgagtgtagtaag

SEQ ID NO: 9256 - DNA, 21 bp, synthetic construct
  source 1..21: mol_type = other DNA; mol_type = other DNA
atttcttggtcgcaggtggat

SEQ ID NO: 9257 - DNA, 21 bp, synthetic construct
  source 1..21: mol_type = other DNA; mol_type = other DNA
actgatggtacgtctatgtgg

SEQ ID NO: 9258 - DNA, 21 bp, synthetic construct
  source 1..21: mol_type = other DNA; mol_type = other DNA
gttatgatttcggcgagttgg

SEQ ID NO: 9259 - DNA, 21 bp, synthetic construct
  source 1..21: mol_type = other DNA; mol_type = other DNA
aagcatgattttactgggtct

SEQ ID NO: 9260 - DNA, 21 bp, synthetic construct
  source 1..21: mol_type = other DNA; mol_type = other DNA
actgttgggacgactatgttg

SEQ ID NO: 9261 - DNA, 21 bp, synthetic construct
  source 1..21: mol_type = other DNA; mol_type = other DNA
agttatgggaaggtgatggtt

SEQ ID NO: 9262 - DNA, 21 bp, synthetic construct
  source 1..21: mol_type = other DNA; mol_type = other DNA
gggcagtggaggacttctgct

SEQ ID NO: 9263 - DNA, 21 bp, synthetic construct
  source 1..21: mol_type = other DNA; mol_type = other DNA
gggattgtgtctgtgtcgtgg

SEQ ID NO: 9264 - DNA, 21 bp, synthetic construct
  source 1..21: mol_type = other DNA; mol_type = other DNA
gatgctgtgctgcatcttagg

SEQ ID NO: 9265 - DNA, 21 bp, synthetic construct
  source 1..21: mol_type = other DNA; mol_type = other DNA
gtgggtcgggataatttgacg

SEQ ID NO: 9266 - DNA, 21 bp, synthetic construct
  source 1..21: mol_type = other DNA; mol_type = other DNA
attgcgtcgaagggtgcgggt

SEQ ID NO: 9267 - DNA, 21 bp, synthetic construct
  source 1..21: mol_type = other DNA; mol_type = other DNA
gttgcgtctcatggtgcgggg

SEQ ID NO: 9268 - DNA, 21 bp, synthetic construct
  source 1..21: mol_type = other DNA; mol_type = other DNA
gataagcgtcagcctgggtgg

SEQ ID NO: 9269 - DNA, 21 bp, synthetic construct
  source 1..21: mol_type = other DNA; mol_type = other DNA
gcgccggttgcgcaggatggg

SEQ ID NO: 9270 - DNA, 21 bp, synthetic construct
  source 1..21: mol_type = other DNA; mol_type = other DNA
aagcatgatgagggtaatggt

SEQ ID NO: 9271 - DNA, 21 bp, synthetic construct
  source 1..21: mol_type = other DNA; mol_type = other DNA
cagtatcgtgcgagtgctgct

SEQ ID NO: 9272 - DNA, 21 bp, synthetic construct
  source 1..21: mol_type = other DNA; mol_type = other DNA
tggtcttctaaggctgaggag

SEQ ID NO: 9273 - DNA, 21 bp, synthetic construct
  source 1..21: mol_type = other DNA; mol_type = other DNA
tatgatgtgggtacgtggtcg

SEQ ID NO: 9274 - DNA, 21 bp, synthetic construct
  source 1..21: mol_type = other DNA; mol_type = other DNA
attggggctttgggttgggat

SEQ ID NO: 9275 - DNA, 21 bp, synthetic construct
  source 1..21: mol_type = other DNA; mol_type = other DNA
tgtaataagcctatgactgct

SEQ ID NO: 9276 - DNA, 21 bp, synthetic construct
  source 1..21: mol_type = other DNA; mol_type = other DNA
gcgggttcgttttcgcggagt

SEQ ID NO: 9277 - DNA, 21 bp, synthetic construct
  source 1..21: mol_type = other DNA; mol_type = other DNA
ctgcatgcgcgtggggttgat

SEQ ID NO: 9278 - DNA, 21 bp, synthetic construct
  source 1..21: mol_type = other DNA; mol_type = other DNA
attatgtcggggcatgattgg

SEQ ID NO: 9279 - DNA, 21 bp, synthetic construct
  source 1..21: mol_type = other DNA; mol_type = other DNA
ggggcgagtagtaggaattgg

SEQ ID NO: 9280 - DNA, 21 bp, synthetic construct
  source 1..21: mol_type = other DNA; mol_type = other DNA
tatttttctgctcggttggat

SEQ ID NO: 9281 - DNA, 21 bp, synthetic construct
  source 1..21: mol_type = other DNA; mol_type = other DNA
tctgctcctgggactcattgt

SEQ ID NO: 9282 - DNA, 21 bp, synthetic construct
  source 1..21: mol_type = other DNA; mol_type = other DNA
aagagttcggttaatcatgat

SEQ ID NO: 9283 - DNA, 21 bp, synthetic construct
  source 1..21: mol_type = other DNA; mol_type = other DNA
aggacggctgatagttttatt

SEQ ID NO: 9284 - DNA, 21 bp, synthetic construct
  source 1..21: mol_type = other DNA; mol_type = other DNA
ctgccggagaggcttggtagt

SEQ ID NO: 9285 - DNA, 21 bp, synthetic construct
  source 1..21: mol_type = other DNA; mol_type = other DNA
gtgaattcgtctaatggtcgt

SEQ ID NO: 9286 - DNA, 21 bp, synthetic construct
  source 1..21: mol_type = other DNA; mol_type = other DNA
tatccgaattgtcctggggtt

SEQ ID NO: 9287 - DNA, 21 bp, synthetic construct
  source 1..21: mol_type = other DNA; mol_type = other DNA
atttcgcttaagtgttcggag

SEQ ID NO: 9288 - DNA, 21 bp, synthetic construct
  source 1..21: mol_type = other DNA; mol_type = other DNA
gttctggattctgtgaggtgg

SEQ ID NO: 9289 - DNA, 21 bp, synthetic construct
  source 1..21: mol_type = other DNA; mol_type = other DNA
tcggcgagtactaatggggtg

SEQ ID NO: 9290 - DNA, 21 bp, synthetic construct
  source 1..21: mol_type = other DNA; mol_type = other DNA
gttttgagttcgaagacttgg

SEQ ID NO: 9291 - DNA, 21 bp, synthetic construct
  source 1..21: mol_type = other DNA; mol_type = other DNA
aatcgggagttgggtagttct

SEQ ID NO: 9292 - DNA, 21 bp, synthetic construct
  source 1..21: mol_type = other DNA; mol_type = other DNA
gatagtcttccggtggataag

SEQ ID NO: 9293 - DNA, 21 bp, synthetic construct
  source 1..21: mol_type = other DNA; mol_type = other DNA
tcttatggtaataggactact

SEQ ID NO: 9294 - DNA, 21 bp, synthetic construct
  source 1..21: mol_type = other DNA; mol_type = other DNA
tttacgaagagtgggccgaat

SEQ ID NO: 9295 - DNA, 21 bp, synthetic construct
  source 1..21: mol_type = other DNA; mol_type = other DNA
tattctaagctggatagtatg

SEQ ID NO: 9296 - DNA, 21 bp, synthetic construct
  source 1..21: mol_type = other DNA; mol_type = other DNA
aggactgaggggacttttccg

SEQ ID NO: 9297 - DNA, 21 bp, synthetic construct
  source 1..21: mol_type = other DNA; mol_type = other DNA
ggggagcgtgtggatcggcgt

SEQ ID NO: 9298 - DNA, 21 bp, synthetic construct
  source 1..21: mol_type = other DNA; mol_type = other DNA
gttaatagtaggtggcatgcg

SEQ ID NO: 9299 - DNA, 21 bp, synthetic construct
  source 1..21: mol_type = other DNA; mol_type = other DNA
ggtagtattggtgcgctttgg

SEQ ID NO: 9300 - DNA, 21 bp, synthetic construct
  source 1..21: mol_type = other DNA; mol_type = other DNA
tgtaaggctcagtcgtgtggg

SEQ ID NO: 9301 - DNA, 21 bp, synthetic construct
  source 1..21: mol_type = other DNA; mol_type = other DNA
tattggagtggtaatgctgct

SEQ ID NO: 9302 - DNA, 21 bp, synthetic construct
  source 1..21: mol_type = other DNA; mol_type = other DNA
ttgatgaatgatgcgtatgtg

SEQ ID NO: 9303 - DNA, 21 bp, synthetic construct
  source 1..21: mol_type = other DNA; mol_type = other DNA
tatgttcgtcatgatgtgatg

SEQ ID NO: 9304 - DNA, 21 bp, synthetic construct
  source 1..21: mol_type = other DNA; mol_type = other DNA
tattttagtggtactaatatg

SEQ ID NO: 9305 - DNA, 21 bp, synthetic construct
  source 1..21: mol_type = other DNA; mol_type = other DNA
gagccgggggagcggtcgggt

SEQ ID NO: 9306 - DNA, 21 bp, synthetic construct
  source 1..21: mol_type = other DNA; mol_type = other DNA
gcgatgtcggcgtcgaattgg

SEQ ID NO: 9307 - DNA, 21 bp, synthetic construct
  source 1..21: mol_type = other DNA; mol_type = other DNA
gtttgggatgcgaatggggtt

SEQ ID NO: 9308 - DNA, 21 bp, synthetic construct
  source 1..21: mol_type = other DNA; mol_type = other DNA
tgtgggggtctgtgttcgtcg

SEQ ID NO: 9309 - DNA, 21 bp, synthetic construct
  source 1..21: mol_type = other DNA; mol_type = other DNA
tggtttagtggtcatgtggag

SEQ ID NO: 9310 - DNA, 21 bp, synthetic construct
  source 1..21: mol_type = other DNA; mol_type = other DNA
aagtttgattatagtagtatt

SEQ ID NO: 9311 - DNA, 21 bp, synthetic construct
  source 1..21: mol_type = other DNA; mol_type = other DNA
gtttatgctaagtcgcaggtg

SEQ ID NO: 9312 - DNA, 21 bp, synthetic construct
  source 1..21: mol_type = other DNA; mol_type = other DNA
ctgttgtcgagtgcgacttgg

SEQ ID NO: 9313 - DNA, 21 bp, synthetic construct
  source 1..21: mol_type = other DNA; mol_type = other DNA
gcgagggttgaggcgtttcct

SEQ ID NO: 9314 - DNA, 21 bp, synthetic construct
  source 1..21: mol_type = other DNA; mol_type = other DNA
gtggaggtggcgcgggtgagg

SEQ ID NO: 9315 - DNA, 21 bp, synthetic construct
  source 1..21: mol_type = other DNA; mol_type = other DNA
gttgggactggtccttgtggg

SEQ ID NO: 9316 - DNA, 21 bp, synthetic construct
  source 1..21: mol_type = other DNA; mol_type = other DNA
tattattctggtacttatgtt

SEQ ID NO: 9317 - DNA, 21 bp, synthetic construct
  source 1..21: mol_type = other DNA; mol_type = other DNA
aatgagcgtgggtgttgtggg

SEQ ID NO: 9318 - DNA, 21 bp, synthetic construct
  source 1..21: mol_type = other DNA; mol_type = other DNA
tattttatgggggagcgtgag

SEQ ID NO: 9319 - DNA, 21 bp, synthetic construct
  source 1..21: mol_type = other DNA; mol_type = other DNA
aattcgccggcttgtaaggcg

SEQ ID NO: 9320 - DNA, 21 bp, synthetic construct
  source 1..21: mol_type = other DNA; mol_type = other DNA
ttttttacgggggtgttgaat

SEQ ID NO: 9321 - DNA, 21 bp, synthetic construct
  source 1..21: mol_type = other DNA; mol_type = other DNA
gggggtaatgggagttcttgg

SEQ ID NO: 9322 - DNA, 21 bp, synthetic construct
  source 1..21: mol_type = other DNA; mol_type = other DNA
tcggcttatcgtcagggtacg

SEQ ID NO: 9323 - DNA, 21 bp, synthetic construct
  source 1..21: mol_type = other DNA; mol_type = other DNA
gcggggcttgattctcgtccg

SEQ ID NO: 9324 - DNA, 21 bp, synthetic construct
  source 1..21: mol_type = other DNA; mol_type = other DNA
agtgatctgaggtgttgtgcg

SEQ ID NO: 9325 - DNA, 21 bp, synthetic construct
  source 1..21: mol_type = other DNA; mol_type = other DNA
gttgttaagcagacggctacg

SEQ ID NO: 9326 - DNA, 21 bp, synthetic construct
  source 1..21: mol_type = other DNA; mol_type = other DNA
gcttgtacgacggctcttatt

SEQ ID NO: 9327 - DNA, 21 bp, synthetic construct
  source 1..21: mol_type = other DNA; mol_type = other DNA
ttgaagtatagtgagactagg

SEQ ID NO: 9328 - DNA, 21 bp, synthetic construct
  source 1..21: mol_type = other DNA; mol_type = other DNA
ttgactagggtgggtttgaat

SEQ ID NO: 9329 - DNA, 21 bp, synthetic construct
  source 1..21: mol_type = other DNA; mol_type = other DNA
ggtgggattgcttcgacgtgg

SEQ ID NO: 9330 - DNA, 21 bp, synthetic construct
  source 1..21: mol_type = other DNA; mol_type = other DNA
gggtggagttcggctggtaag

SEQ ID NO: 9331 - DNA, 21 bp, synthetic construct
  source 1..21: mol_type = other DNA; mol_type = other DNA
attgatgatggttcttgggcg

SEQ ID NO: 9332 - DNA, 21 bp, synthetic construct
  source 1..21: mol_type = other DNA; mol_type = other DNA
tgttgtaagcttgagacgcct

SEQ ID NO: 9333 - DNA, 21 bp, synthetic construct
  source 1..21: mol_type = other DNA; mol_type = other DNA
gtggtttatgatgcgtttgtg

SEQ ID NO: 9334 - DNA, 21 bp, synthetic construct
  source 1..21: mol_type = other DNA; mol_type = other DNA
tgtggggcttgttctccgaat

SEQ ID NO: 9335 - DNA, 21 bp, synthetic construct
  source 1..21: mol_type = other DNA; mol_type = other DNA
gggagtgcgacgagtacgtgg

SEQ ID NO: 9336 - DNA, 21 bp, synthetic construct
  source 1..21: mol_type = other DNA; mol_type = other DNA
tgtcggggtccttgtacgggg

SEQ ID NO: 9337 - DNA, 21 bp, synthetic construct
  source 1..21: mol_type = other DNA; mol_type = other DNA
gagattccgccgattcgtcgg

SEQ ID NO: 9338 - DNA, 21 bp, synthetic construct
  source 1..21: mol_type = other DNA; mol_type = other DNA
tgtaaggcgaatcgggttgag

SEQ ID NO: 9339 - DNA, 21 bp, synthetic construct
  source 1..21: mol_type = other DNA; mol_type = other DNA
attgggacgtctcgggagtgg

SEQ ID NO: 9340 - DNA, 21 bp, synthetic construct
  source 1..21: mol_type = other DNA; mol_type = other DNA
tgtaatctttctccgacttct

SEQ ID NO: 9341 - DNA, 21 bp, synthetic construct
  source 1..21: mol_type = other DNA; mol_type = other DNA
gggcggtctactgataatacg

SEQ ID NO: 9342 - DNA, 21 bp, synthetic construct
  source 1..21: mol_type = other DNA; mol_type = other DNA
tctgagttttatgctgctgtg

SEQ ID NO: 9343 - DNA, 21 bp, synthetic construct
  source 1..21: mol_type = other DNA; mol_type = other DNA
cctgggggtactagtggttgg

SEQ ID NO: 9344 - DNA, 21 bp, synthetic construct
  source 1..21: mol_type = other DNA; mol_type = other DNA
tgttgtgcgggtcgtactgcg

SEQ ID NO: 9345 - DNA, 21 bp, synthetic construct
  source 1..21: mol_type = other DNA; mol_type = other DNA
gtggattcgactcatggtgtg

SEQ ID NO: 9346 - DNA, 21 bp, synthetic construct
  source 1..21: mol_type = other DNA; mol_type = other DNA
actgtgggggggtgttgtctt

SEQ ID NO: 9347 - DNA, 21 bp, synthetic construct
  source 1..21: mol_type = other DNA; mol_type = other DNA
ggttctgaggggtcgctttgg

SEQ ID NO: 9348 - DNA, 21 bp, synthetic construct
  source 1..21: mol_type = other DNA; mol_type = other DNA
aagtatctgcatgctgatttt

SEQ ID NO: 9349 - DNA, 21 bp, synthetic construct
  source 1..21: mol_type = other DNA
gtgggtggtgctagtacttgg

SEQ ID NO: 9350 - DNA, 21 bp, synthetic construct
  source 1..21: mol_type = other DNA; mol_type = other DNA
atggagggttgttgtgctggt

SEQ ID NO: 9351 - DNA, 21 bp, synthetic construct
  source 1..21: mol_type = other DNA; mol_type = other DNA
gagcgttcggcggaggcgcat

SEQ ID NO: 9352 - DNA, 21 bp, synthetic construct
  source 1..21: mol_type = other DNA; mol_type = other DNA
cgttctcaggattcgtttccg

SEQ ID NO: 9353 - DNA, 21 bp, synthetic construct
  source 1..21: mol_type = other DNA; mol_type = other DNA
aggcctaatgagagtgattgg

SEQ ID NO: 9354 - DNA, 21 bp, synthetic construct
  source 1..21: mol_type = other DNA; mol_type = other DNA
cgtctggagagtcatggttgg

SEQ ID NO: 9355 - DNA, 21 bp, synthetic construct
  source 1..21: mol_type = other DNA; mol_type = other DNA
atggttcagcagtgttgtggg

SEQ ID NO: 9356 - DNA, 21 bp, synthetic construct
  source 1..21: mol_type = other DNA; mol_type = other DNA
gctcgggcggatgggtggggg

SEQ ID NO: 9357 - DNA, 21 bp, synthetic construct
  source 1..21: mol_type = other DNA; mol_type = other DNA
tgggcgcgtgggagtaatggt

SEQ ID NO: 9358 - DNA, 21 bp, synthetic construct
  source 1..21: mol_type = other DNA; mol_type = other DNA
ctggcgcgtttgggtgctaat

SEQ ID NO: 9359 - DNA, 21 bp, synthetic construct
  source 1..21: mol_type = other DNA; mol_type = other DNA
catgtgacgacgcattgttct

SEQ ID NO: 9360 - DNA, 21 bp, synthetic construct
  source 1..21: mol_type = other DNA; mol_type = other DNA
tggccttttggggagtctgct

SEQ ID NO: 9361 - DNA, 21 bp, synthetic construct
  source 1..21: mol_type = other DNA; mol_type = other DNA
gggaggccgcctctgaagccg

SEQ ID NO: 9362 - DNA, 21 bp, synthetic construct
  source 1..21: mol_type = other DNA; mol_type = other DNA
tattcgcggcttgatagtgtt

SEQ ID NO: 9363 - DNA, 21 bp, synthetic construct
  source 1..21: mol_type = other DNA; mol_type = other DNA
ttgactgggcaggctgagttg

SEQ ID NO: 9364 - DNA, 21 bp, synthetic construct
  source 1..21: mol_type = other DNA; mol_type = other DNA
caggggctgggttgttgtgtg

SEQ ID NO: 9365 - DNA, 21 bp, synthetic construct
  source 1..21: mol_type = other DNA; mol_type = other DNA
tattcgcgtgtttcggagctg

SEQ ID NO: 9366 - DNA, 21 bp, synthetic construct
  source 1..21: mol_type = other DNA; mol_type = other DNA
gagtgtgggggttgtcggcct

SEQ ID NO: 9367 - DNA, 21 bp, synthetic construct
  source 1..21: mol_type = other DNA; mol_type = other DNA
tatgttcggtcggatgggact

SEQ ID NO: 9368 - DNA, 21 bp, synthetic construct
  source 1..21: mol_type = other DNA; mol_type = other DNA
tgtgatgctgagatgcgtgag

SEQ ID NO: 9369 - DNA, 21 bp, synthetic construct
  source 1..21: mol_type = other DNA; mol_type = other DNA
catcggaaggttgcgtatgat

SEQ ID NO: 9370 - DNA, 21 bp, synthetic construct
  source 1..21: mol_type = other DNA; mol_type = other DNA
ggtactagtgcgtataggggt

SEQ ID NO: 9371 - DNA, 21 bp, synthetic construct
  source 1..21: mol_type = other DNA; mol_type = other DNA
ttgtggattgagaagccgacg

SEQ ID NO: 9372 - DNA, 21 bp, synthetic construct
  source 1..21: mol_type = other DNA; mol_type = other DNA
agtaggtataaggaggttctg

SEQ ID NO: 9373 - DNA, 21 bp, synthetic construct
  source 1..21: mol_type = other DNA; mol_type = other DNA
tattcgaggcttggtgtgcag

SEQ ID NO: 9374 - DNA, 21 bp, synthetic construct
  source 1..21: mol_type = other DNA; mol_type = other DNA
tattttactggttctacggat

SEQ ID NO: 9375 - DNA, 21 bp, synthetic construct
  source 1..21: mol_type = other DNA; mol_type = other DNA
aatttgagtgatgtgcgttgg

SEQ ID NO: 9376 - DNA, 21 bp, synthetic construct
  source 1..21: mol_type = other DNA; mol_type = other DNA
aaggggaattcggggaatctt

SEQ ID NO: 9377 - DNA, 21 bp, synthetic construct
  source 1..21: mol_type = other DNA; mol_type = other DNA
tgggaggggatgaagcgtaat

SEQ ID NO: 9378 - DNA, 21 bp, synthetic construct
  source 1..21: mol_type = other DNA; mol_type = other DNA
ggtgtgggttcgtatattgtt

SEQ ID NO: 9379 - DNA, 21 bp, synthetic construct
  source 1..21: mol_type = other DNA; mol_type = other DNA
cctctgtctgcgtcgtcgtgg

SEQ ID NO: 9380 - DNA, 21 bp, synthetic construct
  source 1..21: mol_type = other DNA; mol_type = other DNA
tgtgagggtgtgagtcgggag

SEQ ID NO: 9381 - DNA, 21 bp, synthetic construct
  source 1..21: mol_type = other DNA; mol_type = other DNA
tttccggatgggaagaggttt

SEQ ID NO: 9382 - DNA, 21 bp, synthetic construct
  source 1..21: mol_type = other DNA; mol_type = other DNA
gggtggcgtgctggtggtgct

SEQ ID NO: 9383 - DNA, 21 bp, synthetic construct
  source 1..21: mol_type = other DNA; mol_type = other DNA
ttgtgtgctgatcctagtagg

SEQ ID NO: 9384 - DNA, 21 bp, synthetic construct
  source 1..21: mol_type = other DNA; mol_type = other DNA
cgtaattttgggcgtgatggt

SEQ ID NO: 9385 - DNA, 21 bp, synthetic construct
  source 1..21: mol_type = other DNA; mol_type = other DNA
atgacgactgtggttactgct

SEQ ID NO: 9386 - DNA, 21 bp, synthetic construct
  source 1..21: mol_type = other DNA; mol_type = other DNA
tttcagactgagagtagtgtg

SEQ ID NO: 9387 - DNA, 21 bp, synthetic construct
  source 1..21: mol_type = other DNA; mol_type = other DNA
cttttggcgtcggcgacttgg

SEQ ID NO: 9388 - DNA, 21 bp, synthetic construct
  source 1..21: mol_type = other DNA; mol_type = other DNA
gatttgcgtactgcgtcttgg

SEQ ID NO: 9389 - DNA, 21 bp, synthetic construct
  source 1..21: mol_type = other DNA; mol_type = other DNA
gggaaggggcttgagcatatt

SEQ ID NO: 9390 - DNA, 21 bp, synthetic construct
  source 1..21: mol_type = other DNA; mol_type = other DNA
caggcgcagacttcgggttgg

SEQ ID NO: 9391 - DNA, 21 bp, synthetic construct
  source 1..21: mol_type = other DNA; mol_type = other DNA
aatggggatgctgggtcttgg

SEQ ID NO: 9392 - DNA, 21 bp, synthetic construct
  source 1..21: mol_type = other DNA; mol_type = other DNA
tatgtgaggtctgatagtgct

SEQ ID NO: 9393 - DNA, 21 bp, synthetic construct
  source 1..21: mol_type = other DNA; mol_type = other DNA
tgtggtgggggttgtccgtct

SEQ ID NO: 9394 - DNA, 21 bp, synthetic construct
  source 1..21: mol_type = other DNA; mol_type = other DNA
tggcgtacggggttgggtggg

SEQ ID NO: 9395 - DNA, 21 bp, synthetic construct
  source 1..21: mol_type = other DNA; mol_type = other DNA
gcgtcgacttggaatgatcct

SEQ ID NO: 9396 - DNA, 21 bp, synthetic construct
  source 1..21: mol_type = other DNA; mol_type = other DNA
gagaagctttgttgtcatggg

SEQ ID NO: 9397 - DNA, 21 bp, synthetic construct
  source 1..21: mol_type = other DNA; mol_type = other DNA
tgtcagcttaattgtagtgtg

SEQ ID NO: 9398 - DNA, 21 bp, synthetic construct
  source 1..21: mol_type = other DNA; mol_type = other DNA
acttctggtccgcctcatcgt

SEQ ID NO: 9399 - DNA, 21 bp, synthetic construct
  source 1..21: mol_type = other DNA; mol_type = other DNA
tcttttgatgggacgcctagt

SEQ ID NO: 9400 - DNA, 21 bp, synthetic construct
  source 1..21: mol_type = other DNA; mol_type = other DNA
gctggtgcggcgaagacttgg

SEQ ID NO: 9401 - DNA, 21 bp, synthetic construct
  source 1..21: mol_type = other DNA; mol_type = other DNA
gatcgggttgttagtactgtg

SEQ ID NO: 9402 - DNA, 21 bp, synthetic construct
  source 1..21: mol_type = other DNA; mol_type = other DNA
cgtgggggggattctgcttgg

SEQ ID NO: 9403 - DNA, 21 bp, synthetic construct
  source 1..21: mol_type = other DNA; mol_type = other DNA
ggttggggtgattggaaggat

SEQ ID NO: 9404 - DNA, 21 bp, synthetic construct
  source 1..21: mol_type = other DNA; mol_type = other DNA
cttgctaagacgggtcttaat

SEQ ID NO: 9405 - DNA, 21 bp, synthetic construct
  source 1..21: mol_type = other DNA; mol_type = other DNA
acgtattcgggtgatctgcct

SEQ ID NO: 9406 - DNA, 21 bp, synthetic construct
  source 1..21: mol_type = other DNA; mol_type = other DNA
gtggagtatgattggcaggat

SEQ ID NO: 9407 - DNA, 21 bp, synthetic construct
  source 1..21: mol_type = other DNA; mol_type = other DNA
aagtgtacgtatgagcagaat

SEQ ID NO: 9408 - DNA, 21 bp, synthetic construct
  source 1..21: mol_type = other DNA; mol_type = other DNA
ccggggggttcgggtacgtgg

SEQ ID NO: 9409 - DNA, 21 bp, synthetic construct
  source 1..21: mol_type = other DNA; mol_type = other DNA
cttgcgcatggtccgtataat

SEQ ID NO: 9410 - DNA, 21 bp, synthetic construct
  source 1..21: mol_type = other DNA; mol_type = other DNA
tatgctaagcctggttttaat

SEQ ID NO: 9411 - DNA, 21 bp, synthetic construct
  source 1..21: mol_type = other DNA; mol_type = other DNA
cgggatccttcttcgtcttgg

SEQ ID NO: 9412 - DNA, 21 bp, synthetic construct
  source 1..21: mol_type = other DNA; mol_type = other DNA
agtgggccggagcggtcgtgg

SEQ ID NO: 9413 - DNA, 21 bp, synthetic construct
  source 1..21: mol_type = other DNA; mol_type = other DNA
cggagtattgatgcttatccg

SEQ ID NO: 9414 - DNA, 21 bp, synthetic construct
  source 1..21: mol_type = other DNA; mol_type = other DNA
ttgtggcggggttctgatctg

SEQ ID NO: 9415 - DNA, 21 bp, synthetic construct
  source 1..21: mol_type = other DNA; mol_type = other DNA
ggttcgtggtgtactgttccg

SEQ ID NO: 9416 - DNA, 21 bp, synthetic construct
  source 1..21: mol_type = other DNA; mol_type = other DNA
gaggtggtgtctcgggctggg

SEQ ID NO: 9417 - DNA, 21 bp, synthetic construct
  source 1..21: mol_type = other DNA; mol_type = other DNA
ggggggttgtgttgtccgagt

SEQ ID NO: 9418 - DNA, 21 bp, synthetic construct
  source 1..21: mol_type = other DNA; mol_type = other DNA
tatatggttgatgcgtttgtg

SEQ ID NO: 9419 - DNA, 21 bp, synthetic construct
  source 1..21: mol_type = other DNA; mol_type = other DNA
tggaatcattcgccggcggct

SEQ ID NO: 9420 - DNA, 21 bp, synthetic construct
  source 1..21: mol_type = other DNA; mol_type = other DNA
attgtgtctgattctcgtggg

SEQ ID NO: 9421 - DNA, 21 bp, synthetic construct
  source 1..21: mol_type = other DNA; mol_type = other DNA
gcgagtaatacgcgttttcat

SEQ ID NO: 9422 - DNA, 21 bp, synthetic construct
  source 1..21: mol_type = other DNA
gtgtctctggagggtaggaat

SEQ ID NO: 9423 - DNA, 21 bp, synthetic construct
  source 1..21: mol_type = other DNA
gctcatgagtttggtccggtg

SEQ ID NO: 9424 - DNA, 21 bp, synthetic construct
  source 1..21: mol_type = other DNA; mol_type = other DNA
cagttggagagggggaattgg

SEQ ID NO: 9425 - DNA, 21 bp, synthetic construct
  source 1..21: mol_type = other DNA; mol_type = other DNA
tatgatctttgttctaagagg

SEQ ID NO: 9426 - DNA, 21 bp, synthetic construct
  source 1..21: mol_type = other DNA; mol_type = other DNA
gtgcttacgtctcagatttgg

SEQ ID NO: 9427 - DNA, 21 bp, synthetic construct
  source 1..21: mol_type = other DNA; mol_type = other DNA
gggggtccgggtgttgggtgg

SEQ ID NO: 9428 - DNA, 21 bp, synthetic construct
  source 1..21: mol_type = other DNA; mol_type = other DNA
gtggaggagggttggtcttgg

SEQ ID NO: 9429 - DNA, 21 bp, synthetic construct
  source 1..21: mol_type = other DNA; mol_type = other DNA
gtggctggtggtagtgctggg

SEQ ID NO: 9430 - DNA, 21 bp, synthetic construct
  source 1..21: mol_type = other DNA; mol_type = other DNA
tgtggggctcttcggatttct

SEQ ID NO: 9431 - DNA, 21 bp, synthetic construct
  source 1..21: mol_type = other DNA; mol_type = other DNA
gggttgtatgcggcgactctg

SEQ ID NO: 9432 - DNA, 21 bp, synthetic construct
  source 1..21: mol_type = other DNA; mol_type = other DNA
gagggtgctagtgttctttgg

SEQ ID NO: 9433 - DNA, 21 bp, synthetic construct
  source 1..21: mol_type = other DNA; mol_type = other DNA
ggtggtgcggagaggcggtat

SEQ ID NO: 9434 - DNA, 21 bp, synthetic construct
  source 1..21: mol_type = other DNA; mol_type = other DNA
gggatgtttggtcggcgtgat

SEQ ID NO: 9435 - DNA, 21 bp, synthetic construct
  source 1..21: mol_type = other DNA; mol_type = other DNA
gattctgaggggatgcgttat

SEQ ID NO: 9436 - DNA, 21 bp, synthetic construct
  source 1..21: mol_type = other DNA; mol_type = other DNA
ggtatggctgatcctacgtgg

SEQ ID NO: 9437 - DNA, 21 bp, synthetic construct
  source 1..21: mol_type = other DNA; mol_type = other DNA
ttttataatcagcattcgtgt

SEQ ID NO: 9438 - DNA, 21 bp, synthetic construct
  source 1..21: mol_type = other DNA; mol_type = other DNA
tttgttaagtatgatccttct

SEQ ID NO: 9439 - DNA, 21 bp, synthetic construct
  source 1..21: mol_type = other DNA; mol_type = other DNA
tatcagcgttatggtacggct

SEQ ID NO: 9440 - DNA, 21 bp, synthetic construct
  source 1..21: mol_type = other DNA; mol_type = other DNA
cggggtagtgatacgtatccg

SEQ ID NO: 9441 - DNA, 21 bp, synthetic construct
  source 1..21: mol_type = other DNA; mol_type = other DNA
ttgttggattcttatgattgg

SEQ ID NO: 9442 - DNA, 21 bp, synthetic construct
  source 1..21: mol_type = other DNA; mol_type = other DNA
cattctagggctgcgagtttt

SEQ ID NO: 9443 - DNA, 21 bp, synthetic construct
  source 1..21: mol_type = other DNA
ggtggtgctggtagtctttgg

SEQ ID NO: 9444 - DNA, 21 bp, synthetic construct
  source 1..21: mol_type = other DNA
acgaatgtgcctagtcttaat

SEQ ID NO: 9445 - DNA, 21 bp, synthetic construct
  source 1..21: mol_type = other DNA
gtggatttgtatgttagttgg

SEQ ID NO: 9446 - DNA, 21 bp, synthetic construct
  source 1..21: mol_type = other DNA
tcgaagggttgttgtgattct

SEQ ID NO: 9447 - DNA, 21 bp, synthetic construct
  source 1..21: mol_type = other DNA
ttttctgatgttgatacgctg

SEQ ID NO: 9448 - DNA, 21 bp, synthetic construct
  source 1..21: mol_type = other DNA
tatcataagttgtctgttgtg

SEQ ID NO: 9449 - DNA, 21 bp, synthetic construct
  source 1..21: mol_type = other DNA
ggtgtttatagtatgaagact

SEQ ID NO: 9450 - DNA, 21 bp, synthetic construct
  source 1..21: mol_type = other DNA
cttatgtctggtgagggtccg

SEQ ID NO: 9451 - DNA, 21 bp, synthetic construct
  source 1..21: mol_type = other DNA
ggggatgctgctggtcgtagg

SEQ ID NO: 9452 - DNA, 21 bp, synthetic construct
  source 1..21: mol_type = other DNA
actgtttatgcgggggagcct

SEQ ID NO: 9453 - DNA, 21 bp, synthetic construct
  source 1..21: mol_type = other DNA
ttgcatcgtcttggggtgtct

SEQ ID NO: 9454 - DNA, 21 bp, synthetic construct
  source 1..21: mol_type = other DNA
tgtggtacgaagtgttcgttg

SEQ ID NO: 9455 - DNA, 21 bp, synthetic construct
  source 1..21: mol_type = other DNA; mol_type = other DNA
tggcttgctgataaggggtct

SEQ ID NO: 9456 - DNA, 21 bp, synthetic construct
  source 1..21: mol_type = other DNA; mol_type = other DNA
ggtggtgctcattctaatttt

SEQ ID NO: 9457 - DNA, 21 bp, synthetic construct
  source 1..21: mol_type = other DNA; mol_type = other DNA
aagtttgagatgaatgctttg

SEQ ID NO: 9458 - DNA, 21 bp, synthetic construct
  source 1..21: mol_type = other DNA; mol_type = other DNA
gctgatcagcgtatgcgtgtg

SEQ ID NO: 9459 - DNA, 21 bp, synthetic construct
  source 1..21: mol_type = other DNA; mol_type = other DNA
tggtgggcgggtgttgtgagt

SEQ ID NO: 9460 - DNA, 21 bp, synthetic construct
  source 1..21: mol_type = other DNA; mol_type = other DNA
aagtttgttgcggtgtcggat

SEQ ID NO: 9461 - DNA, 21 bp, synthetic construct
  source 1..21: mol_type = other DNA; mol_type = other DNA
atttatgctgatcggacttgg

SEQ ID NO: 9462 - DNA, 21 bp, synthetic construct
  source 1..21: mol_type = other DNA; mol_type = other DNA
cagggggaggcgaggagttgg

SEQ ID NO: 9463 - DNA, 21 bp, synthetic construct
  source 1..21: mol_type = other DNA; mol_type = other DNA
tgtggttttgcgtgtccttcg

SEQ ID NO: 9464 - DNA, 21 bp, synthetic construct
  source 1..21: mol_type = other DNA; mol_type = other DNA
tattattctggtgtgactcat

SEQ ID NO: 9465 - DNA, 21 bp, synthetic construct
  source 1..21: mol_type = other DNA; mol_type = other DNA
tatccttcggggtctattggg

SEQ ID NO: 9466 - DNA, 21 bp, synthetic construct
  source 1..21: mol_type = other DNA; mol_type = other DNA
gtgttgtctcagtcgttgtgg

SEQ ID NO: 9467 - DNA, 21 bp, synthetic construct
  source 1..21: mol_type = other DNA; mol_type = other DNA
cagggtgggagtggggcgtgg

SEQ ID NO: 9468 - DNA, 21 bp, synthetic construct
  source 1..21: mol_type = other DNA; mol_type = other DNA
tttttggcttctcgtgattgg

SEQ ID NO: 9469 - DNA, 21 bp, synthetic construct
  source 1..21: mol_type = other DNA; mol_type = other DNA
cttatgagtccgtgttgtggt

SEQ ID NO: 9470 - DNA, 21 bp, synthetic construct
  source 1..21: mol_type = other DNA; mol_type = other DNA
tgtagtggggcttgtgctgct

SEQ ID NO: 9471 - DNA, 21 bp, synthetic construct
  source 1..21: mol_type = other DNA; mol_type = other DNA
gcttcggagtcgctgcggcgg

SEQ ID NO: 9472 - DNA, 21 bp, synthetic construct
  source 1..21: mol_type = other DNA; mol_type = other DNA
gtgcaggatggtttgcgttgg

SEQ ID NO: 9473 - DNA, 21 bp, synthetic construct
  source 1..21: mol_type = other DNA; mol_type = other DNA
gtttggaagcctgagccgggt

SEQ ID NO: 9474 - DNA, 21 bp, synthetic construct
  source 1..21: mol_type = other DNA; mol_type = other DNA
acgactgattatactatgttt

SEQ ID NO: 9475 - DNA, 21 bp, synthetic construct
  source 1..21: mol_type = other DNA; mol_type = other DNA
tgtaatgattcgactaagagt

SEQ ID NO: 9476 - DNA, 21 bp, synthetic construct
  source 1..21: mol_type = other DNA; mol_type = other DNA
tgggcggagctgcgtagggct

SEQ ID NO: 9477 - DNA, 21 bp, synthetic construct
  source 1..21: mol_type = other DNA; mol_type = other DNA
tgttgttcgggggtggggatt

SEQ ID NO: 9478 - DNA, 21 bp, synthetic construct
  source 1..21: mol_type = other DNA; mol_type = other DNA
atggtttttgaggatagggtg

SEQ ID NO: 9479 - DNA, 21 bp, synthetic construct
  source 1..21: mol_type = other DNA; mol_type = other DNA
tattctaggcttagtaatgtt

SEQ ID NO: 9480 - DNA, 21 bp, synthetic construct
  source 1..21: mol_type = other DNA; mol_type = other DNA
tctctggtgaaggatgctccg

SEQ ID NO: 9481 - DNA, 21 bp, synthetic construct
  source 1..21: mol_type = other DNA; mol_type = other DNA
gagaggggggcgggtgaggtt

SEQ ID NO: 9482 - DNA, 21 bp, synthetic construct
  source 1..21: mol_type = other DNA; mol_type = other DNA
ggtcctgagaggatgtcggtt

SEQ ID NO: 9483 - DNA, 21 bp, synthetic construct
  source 1..21: mol_type = other DNA; mol_type = other DNA
aggggggagtcgagtatttgg

SEQ ID NO: 9484 - DNA, 21 bp, synthetic construct
  source 1..21: mol_type = other DNA; mol_type = other DNA
tgtaggtcgggggcggcgttg

SEQ ID NO: 9485 - DNA, 21 bp, synthetic construct
  source 1..21: mol_type = other DNA; mol_type = other DNA
ccgactgctgattctattggt

SEQ ID NO: 9486 - DNA, 21 bp, synthetic construct
  source 1..21: mol_type = other DNA; mol_type = other DNA
ttgagtcgtctgttgccggat

SEQ ID NO: 9487 - DNA, 21 bp, synthetic construct
  source 1..21: mol_type = other DNA; mol_type = other DNA
tgtgggccgtctagtgcggct

SEQ ID NO: 9488 - DNA, 21 bp, synthetic construct
  source 1..21: mol_type = other DNA; mol_type = other DNA
gtggttggtgcggagtctacg

SEQ ID NO: 9489 - DNA, 21 bp, synthetic construct
  source 1..21: mol_type = other DNA; mol_type = other DNA
tgtaagttgccgtgtgggttg

SEQ ID NO: 9490 - DNA, 21 bp, synthetic construct
  source 1..21: mol_type = other DNA; mol_type = other DNA
cttttgtgtaaggctcagggt

SEQ ID NO: 9491 - DNA, 21 bp, synthetic construct
  source 1..21: mol_type = other DNA; mol_type = other DNA
acttggtctggtgataatcct

SEQ ID NO: 9492 - DNA, 21 bp, synthetic construct
  source 1..21: mol_type = other DNA; mol_type = other DNA
ggtggtggttctcagtcgtgg

SEQ ID NO: 9493 - DNA, 21 bp, synthetic construct
  source 1..21: mol_type = other DNA; mol_type = other DNA
ttggggggtgcggcttataag

SEQ ID NO: 9494 - DNA, 21 bp, synthetic construct
  source 1..21: mol_type = other DNA; mol_type = other DNA
tatgattcttctaatggtatt

SEQ ID NO: 9495 - DNA, 21 bp, synthetic construct
  source 1..21: mol_type = other DNA; mol_type = other DNA
tttcatgtgagggggcctgat

SEQ ID NO: 9496 - DNA, 21 bp, synthetic construct
  source 1..21: mol_type = other DNA; mol_type = other DNA
ggggtgccgtatacgatgccg

SEQ ID NO: 9497 - DNA, 21 bp, synthetic construct
  source 1..21: mol_type = other DNA; mol_type = other DNA
gggaagtcggcgcttaatggt

SEQ ID NO: 9498 - DNA, 21 bp, synthetic construct
  source 1..21: mol_type = other DNA; mol_type = other DNA
caggatggtagttcgacttgg

SEQ ID NO: 9499 - DNA, 21 bp, synthetic construct
  source 1..21: mol_type = other DNA; mol_type = other DNA
tgggcggcggggggtgcgagg

SEQ ID NO: 9500 - DNA, 21 bp, synthetic construct
  source 1..21: mol_type = other DNA; mol_type = other DNA
aggtgtcctgattgtcatctg

SEQ ID NO: 9501 - DNA, 21 bp, synthetic construct
  source 1..21: mol_type = other DNA; mol_type = other DNA
acgcgtagtggggagaatgcg

SEQ ID NO: 9502 - DNA, 21 bp, synthetic construct
  source 1..21: mol_type = other DNA; mol_type = other DNA
aggcttgagagtgtggcttgg

SEQ ID NO: 9503 - DNA, 21 bp, synthetic construct
  source 1..21: mol_type = other DNA; mol_type = other DNA
tattatacggggcattctctt

SEQ ID NO: 9504 - DNA, 21 bp, synthetic construct
  source 1..21: mol_type = other DNA; mol_type = other DNA
tgtcagacggtttgtgcggct

SEQ ID NO: 9505 - DNA, 21 bp, synthetic construct
  source 1..21: mol_type = other DNA; mol_type = other DNA
tattggtcggctactactgcg

SEQ ID NO: 9506 - DNA, 21 bp, synthetic construct
  source 1..21: mol_type = other DNA; mol_type = other DNA
gagctttcggttgtgattcat

SEQ ID NO: 9507 - DNA, 21 bp, synthetic construct
  source 1..21: mol_type = other DNA
agtgttggttcgagtgagagg

SEQ ID NO: 9508 - DNA, 21 bp, synthetic construct
  source 1..21: mol_type = other DNA
tggttggagggtgagagtgtg

SEQ ID NO: 9509 - DNA, 21 bp, synthetic construct
  source 1..21: mol_type = other DNA
tatgctaggacgtctacgccg

SEQ ID NO: 9510 - DNA, 21 bp, synthetic construct
  source 1..21: mol_type = other DNA; mol_type = other DNA
ggggggatgtcgagtacgtgg

SEQ ID NO: 9511 - DNA, 21 bp, synthetic construct
  source 1..21: mol_type = other DNA
ccgaatggggaggctacttgg

SEQ ID NO: 9512 - DNA, 21 bp, synthetic construct
  source 1..21: mol_type = other DNA
tgggattctgataatggtcgt

SEQ ID NO: 9513 - DNA, 21 bp, synthetic construct
  source 1..21: mol_type = other DNA
aggggggttggtccggattcg

SEQ ID NO: 9514 - DNA, 21 bp, synthetic construct
  source 1..21: mol_type = other DNA
tgttatttgacgaagtgtgat

SEQ ID NO: 9515 - DNA, 21 bp, synthetic construct
  source 1..21: mol_type = other DNA
ttgtatgttaggtggtgtggt

SEQ ID NO: 9516 - DNA, 21 bp, synthetic construct
  source 1..21: mol_type = other DNA
gttgcgtcggcgtgttgtggg

SEQ ID NO: 9517 - DNA, 21 bp, synthetic construct
  source 1..21: mol_type = other DNA
acgattgggggtgcgtgtatt

SEQ ID NO: 9518 - DNA, 21 bp, synthetic construct
  source 1..21: mol_type = other DNA
tattatgctggtgttcttagt

SEQ ID NO: 9519 - DNA, 21 bp, synthetic construct
  source 1..21: mol_type = other DNA
ttggagtatggtatgagtggt

SEQ ID NO: 9520 - DNA, 21 bp, synthetic construct
  source 1..21: mol_type = other DNA
acgtatcgtggtaagccggat

SEQ ID NO: 9521 - DNA, 21 bp, synthetic construct
  source 1..21: mol_type = other DNA
gggggtcgtaatgggattgag

SEQ ID NO: 9522 - DNA, 21 bp, synthetic construct
  source 1..21: mol_type = other DNA
cttctgggtgagaatcctgat

SEQ ID NO: 9523 - DNA, 21 bp, synthetic construct
  source 1..21: mol_type = other DNA
ggtggtgattttagttcttat

SEQ ID NO: 9524 - DNA, 21 bp, synthetic construct
  source 1..21: mol_type = other DNA
cgggatgaggggtcgacttgg

SEQ ID NO: 9525 - DNA, 21 bp, synthetic construct
  source 1..21: mol_type = other DNA
tctggggctagtcatttgtgg

SEQ ID NO: 9526 - DNA, 21 bp, synthetic construct
  source 1..21: mol_type = other DNA
ggttctagtacgagtgtttgg

SEQ ID NO: 9527 - DNA, 21 bp, synthetic construct
  source 1..21: mol_type = other DNA
tatgttcaggggaataagtat

SEQ ID NO: 9528 - DNA, 21 bp, synthetic construct
  source 1..21: mol_type = other DNA
gttgatagtacggagggtgtg

SEQ ID NO: 9529 - DNA, 21 bp, synthetic construct
  source 1..21: mol_type = other DNA
agttctgatgcggttcgttgg

SEQ ID NO: 9530 - DNA, 21 bp, synthetic construct
  source 1..21: mol_type = other DNA
actgaggggaagcgttttacg

SEQ ID NO: 9531 - DNA, 21 bp, synthetic construct
  source 1..21: mol_type = other DNA
gtggcttcgatggggattggt

SEQ ID NO: 9532 - DNA, 21 bp, synthetic construct
  source 1..21: mol_type = other DNA
tggtattctgggattcagatg

SEQ ID NO: 9533 - DNA, 21 bp, synthetic construct
  source 1..21: mol_type = other DNA
tgtggtcttggtagtgaggct

SEQ ID NO: 9534 - DNA, 21 bp, synthetic construct
  source 1..21: mol_type = other DNA
tggggtgctcgtgctgagcgg

SEQ ID NO: 9535 - DNA, 21 bp, synthetic construct
  source 1..21: mol_type = other DNA
agttctgagtatttggtttat

SEQ ID NO: 9536 - DNA, 21 bp, synthetic construct
  source 1..21: mol_type = other DNA
agttatcatctgaagatgggt

SEQ ID NO: 9537 - DNA, 21 bp, synthetic construct
  source 1..21: mol_type = other DNA
attggttttgtgtgttctgag

SEQ ID NO: 9538 - DNA, 21 bp, synthetic construct
  source 1..21: mol_type = other DNA
tattcgtctttgaatattaat

SEQ ID NO: 9539 - DNA, 21 bp, synthetic construct
  source 1..21: mol_type = other DNA
tattttgctgggatggtgcag

SEQ ID NO: 9540 - DNA, 21 bp, synthetic construct
  source 1..21: mol_type = other DNA; mol_type = other DNA
gtggggtggcggggtaggtcg

SEQ ID NO: 9541 - DNA, 21 bp, synthetic construct
  source 1..21: mol_type = other DNA; mol_type = other DNA
tctatgtcggatgttaggtgg

SEQ ID NO: 9542 - DNA, 21 bp, synthetic construct
  source 1..21: mol_type = other DNA; mol_type = other DNA
cgtctgagtgatgttgcgtgg

SEQ ID NO: 9543 - DNA, 21 bp, synthetic construct
  source 1..21: mol_type = other DNA; mol_type = other DNA
tcgagtgggatgagttcgtgg

SEQ ID NO: 9544 - DNA, 21 bp, synthetic construct
  source 1..21: mol_type = other DNA; mol_type = other DNA
acttcggagaatgtttatttt

SEQ ID NO: 9545 - DNA, 21 bp, synthetic construct
  source 1..21: mol_type = other DNA; mol_type = other DNA
ggggatgagtatgtggcgttt

SEQ ID NO: 9546 - DNA, 21 bp, synthetic construct
  source 1..21: mol_type = other DNA; mol_type = other DNA
tattggtctggtattaaggag

SEQ ID NO: 9547 - DNA, 21 bp, synthetic construct
  source 1..21: mol_type = other DNA; mol_type = other DNA
tcggcttttgtgcattgtgtg

SEQ ID NO: 9548 - DNA, 21 bp, synthetic construct
  source 1..21: mol_type = other DNA; mol_type = other DNA
ggggagggtcagagttcgtgg

SEQ ID NO: 9549 - DNA, 21 bp, synthetic construct
  source 1..21: mol_type = other DNA; mol_type = other DNA
cttgttagtggtgaggatgtg

SEQ ID NO: 9550 - DNA, 21 bp, synthetic construct
  source 1..21: mol_type = other DNA; mol_type = other DNA
cgtgcggattcgaagcagtcg

SEQ ID NO: 9551 - DNA, 21 bp, synthetic construct
  source 1..21: mol_type = other DNA; mol_type = other DNA
aatgcgttggattggcgggat

SEQ ID NO: 9552 - DNA, 21 bp, synthetic construct
  source 1..21: mol_type = other DNA; mol_type = other DNA
ggtctggctagttctgcttgg

SEQ ID NO: 9553 - DNA, 21 bp, synthetic construct
  source 1..21: mol_type = other DNA; mol_type = other DNA
agtcttgggaagtatgggcat

SEQ ID NO: 9554 - DNA, 21 bp, synthetic construct
  source 1..21: mol_type = other DNA; mol_type = other DNA
actcttgttttgtgtcgggag

SEQ ID NO: 9555 - DNA, 21 bp, synthetic construct
  source 1..21: mol_type = other DNA; mol_type = other DNA
agtgatggtgcttgttgtgct

SEQ ID NO: 9556 - DNA, 21 bp, synthetic construct
  source 1..21: mol_type = other DNA; mol_type = other DNA
cttgatgatgggaggtttcag

SEQ ID NO: 9557 - DNA, 21 bp, synthetic construct
  source 1..21: mol_type = other DNA; mol_type = other DNA
gctggtatggagaataagatg

SEQ ID NO: 9558 - DNA, 21 bp, synthetic construct
  source 1..21: mol_type = other DNA; mol_type = other DNA
ggttctgataattcgcgttgg

SEQ ID NO: 9559 - DNA, 21 bp, synthetic construct
  source 1..21: mol_type = other DNA; mol_type = other DNA
aggaggctgtcgatgagtctg

SEQ ID NO: 9560 - DNA, 21 bp, synthetic construct
  source 1..21: mol_type = other DNA; mol_type = other DNA
aagctggatcatatggggatg

SEQ ID NO: 9561 - DNA, 21 bp, synthetic construct
  source 1..21: mol_type = other DNA; mol_type = other DNA
gatatgatgggtaatccggct

SEQ ID NO: 9562 - DNA, 21 bp, synthetic construct
  source 1..21: mol_type = other DNA; mol_type = other DNA
ggggattcgagtgttaggaag

SEQ ID NO: 9563 - DNA, 21 bp, synthetic construct
  source 1..21: mol_type = other DNA; mol_type = other DNA
gggtatatggagggtgggggt

SEQ ID NO: 9564 - DNA, 21 bp, synthetic construct
  source 1..21: mol_type = other DNA; mol_type = other DNA
tggggtcgtcaggctttgggg

SEQ ID NO: 9565 - DNA, 21 bp, synthetic construct
  source 1..21: mol_type = other DNA; mol_type = other DNA
gataattcgggtcggctttat

SEQ ID NO: 9566 - DNA, 21 bp, synthetic construct
  source 1..21: mol_type = other DNA; mol_type = other DNA
gggtttgctctgcctggtggg

SEQ ID NO: 9567 - DNA, 21 bp, synthetic construct
  source 1..21: mol_type = other DNA; mol_type = other DNA
ggttctgggtcggcgttgtgg

SEQ ID NO: 9568 - DNA, 21 bp, synthetic construct
  source 1..21: mol_type = other DNA; mol_type = other DNA
tattggctggataatgttggg

SEQ ID NO: 9569 - DNA, 21 bp, synthetic construct
  source 1..21: mol_type = other DNA; mol_type = other DNA
tggggtagtcaggggcgtggg

SEQ ID NO: 9570 - DNA, 21 bp, synthetic construct
  source 1..21: mol_type = other DNA; mol_type = other DNA
cggcttgatgataggagttgg

SEQ ID NO: 9571 - DNA, 21 bp, synthetic construct
  source 1..21: mol_type = other DNA; mol_type = other DNA
tgttgtaaggtggcgatgagt

SEQ ID NO: 9572 - DNA, 21 bp, synthetic construct
  source 1..21: mol_type = other DNA; mol_type = other DNA
atgaattgtggtatgcagtgt

SEQ ID NO: 9573 - DNA, 21 bp, synthetic construct
  source 1..21: mol_type = other DNA; mol_type = other DNA
gttggtactgataggggttgg

SEQ ID NO: 9574 - DNA, 21 bp, synthetic construct
  source 1..21: mol_type = other DNA; mol_type = other DNA
agtactagttctcggtattcg

SEQ ID NO: 9575 - DNA, 21 bp, synthetic construct
  source 1..21: mol_type = other DNA; mol_type = other DNA
tcttggggtgcgaagcagagt

SEQ ID NO: 9576 - DNA, 21 bp, synthetic construct
  source 1..21: mol_type = other DNA; mol_type = other DNA
gctccgtcgcatattgcgtgg

SEQ ID NO: 9577 - DNA, 21 bp, synthetic construct
  source 1..21: mol_type = other DNA; mol_type = other DNA
gatccgatgagtttggggtgg

SEQ ID NO: 9578 - DNA, 21 bp, synthetic construct
  source 1..21: mol_type = other DNA; mol_type = other DNA
ttgaatactaggtggcagggg

SEQ ID NO: 9579 - DNA, 21 bp, synthetic construct
  source 1..21: mol_type = other DNA; mol_type = other DNA
tgtaagaggggttggtcggag

SEQ ID NO: 9580 - DNA, 21 bp, synthetic construct
  source 1..21: mol_type = other DNA; mol_type = other DNA
atgacggtgcgtactagtttg

SEQ ID NO: 9581 - DNA, 21 bp, synthetic construct
  source 1..21: mol_type = other DNA; mol_type = other DNA
gatctgcgtgcggttagttgg

SEQ ID NO: 9582 - DNA, 21 bp, synthetic construct
  source 1..21: mol_type = other DNA; mol_type = other DNA
ttgttggagagtcgtagttgg

SEQ ID NO: 9583 - DNA, 21 bp, synthetic construct
  source 1..21: mol_type = other DNA; mol_type = other DNA
tattattcgggtgtttcggag

SEQ ID NO: 9584 - DNA, 21 bp, synthetic construct
  source 1..21: mol_type = other DNA; mol_type = other DNA
tcttatcgttctgctgtgctg

SEQ ID NO: 9585 - DNA, 21 bp, synthetic construct
  source 1..21: mol_type = other DNA; mol_type = other DNA
tattatagtggggttcgtgat

SEQ ID NO: 9586 - DNA, 21 bp, synthetic construct
  source 1..21: mol_type = other DNA; mol_type = other DNA
atgcgtctgggtgggctgact

SEQ ID NO: 9587 - DNA, 21 bp, synthetic construct
  source 1..21: mol_type = other DNA; mol_type = other DNA
attgcgggggctgagagggct

SEQ ID NO: 9588 - DNA, 21 bp, synthetic construct
  source 1..21: mol_type = other DNA; mol_type = other DNA
aatcataagaatacgcctccg

SEQ ID NO: 9589 - DNA, 21 bp, synthetic construct
  source 1..21: mol_type = other DNA; mol_type = other DNA
tttattgagcagttgccgcag

SEQ ID NO: 9590 - DNA, 21 bp, synthetic construct
  source 1..21: mol_type = other DNA; mol_type = other DNA
tcggttgtgagtcagaagtct

SEQ ID NO: 9591 - DNA, 21 bp, synthetic construct
  source 1..21: mol_type = other DNA
tgtagtcttaaggatcgttgt

SEQ ID NO: 9592 - DNA, 21 bp, synthetic construct
  source 1..21: mol_type = other DNA; mol_type = other DNA
ttttgtattcggttgtggttg

SEQ ID NO: 9593 - DNA, 21 bp, synthetic construct
  source 1..21: mol_type = other DNA; mol_type = other DNA
gctatggtggcgcgtgattgg

SEQ ID NO: 9594 - DNA, 21 bp, synthetic construct
  source 1..21: mol_type = other DNA; mol_type = other DNA
attttggcggagcgtactgct

SEQ ID NO: 9595 - DNA, 21 bp, synthetic construct
  source 1..21: mol_type = other DNA; mol_type = other DNA
tataatgaggtttctattgcg

SEQ ID NO: 9596 - DNA, 21 bp, synthetic construct
  source 1..21: mol_type = other DNA; mol_type = other DNA
ggtattggttgtacgaagctg

SEQ ID NO: 9597 - DNA, 21 bp, synthetic construct
  source 1..21: mol_type = other DNA; mol_type = other DNA
gggtcgggtgtgagtaattgg

SEQ ID NO: 9598 - DNA, 21 bp, synthetic construct
  source 1..21: mol_type = other DNA; mol_type = other DNA
tcggtgcgtttgcagagtgag

SEQ ID NO: 9599 - DNA, 21 bp, synthetic construct
  source 1..21: mol_type = other DNA; mol_type = other DNA
gttatgaagtcggtgagtact

SEQ ID NO: 9600 - DNA, 21 bp, synthetic construct
  source 1..21: mol_type = other DNA; mol_type = other DNA
gttcctgggcggggtgctggt

SEQ ID NO: 9601 - DNA, 21 bp, synthetic construct
  source 1..21: mol_type = other DNA; mol_type = other DNA
ctgtgggatggtactcgtgcg

SEQ ID NO: 9602 - DNA, 21 bp, synthetic construct
  source 1..21: mol_type = other DNA; mol_type = other DNA
ttttctgggtattcgagtagt

SEQ ID NO: 9603 - DNA, 21 bp, synthetic construct
  source 1..21: mol_type = other DNA; mol_type = other DNA
gatatggagtctaatcgttgg

SEQ ID NO: 9604 - DNA, 21 bp, synthetic construct
  source 1..21: mol_type = other DNA; mol_type = other DNA
ctggatgattggagtcatttt

SEQ ID NO: 9605 - DNA, 21 bp, synthetic construct
  source 1..21: mol_type = other DNA; mol_type = other DNA
tatgcgcggggggctcttaat

SEQ ID NO: 9606 - DNA, 21 bp, synthetic construct
  source 1..21: mol_type = other DNA; mol_type = other DNA
tatcggagtactagtcatctg

SEQ ID NO: 9607 - DNA, 21 bp, synthetic construct
  source 1..21: mol_type = other DNA; mol_type = other DNA
tgtcgtcctgagcatgggccg

SEQ ID NO: 9608 - DNA, 21 bp, synthetic construct
  source 1..21: mol_type = other DNA; mol_type = other DNA
atgtataagtcgcgggttgat

SEQ ID NO: 9609 - DNA, 21 bp, synthetic construct
  source 1..21: mol_type = other DNA; mol_type = other DNA
ctttcgaatgctcctgtgggt

SEQ ID NO: 9610 - DNA, 21 bp, synthetic construct
  source 1..21: mol_type = other DNA; mol_type = other DNA
agtgctcctgagcgtttgctg

SEQ ID NO: 9611 - DNA, 21 bp, synthetic construct
  source 1..21: mol_type = other DNA; mol_type = other DNA
gctggtgagggggtgaagtgg

SEQ ID NO: 9612 - DNA, 21 bp, synthetic construct
  source 1..21: mol_type = other DNA; mol_type = other DNA
ggtacgctgcctgcttatagg

SEQ ID NO: 9613 - DNA, 21 bp, synthetic construct
  source 1..21: mol_type = other DNA; mol_type = other DNA
tggagtcgtgatactgataat

SEQ ID NO: 9614 - DNA, 21 bp, synthetic construct
  source 1..21: mol_type = other DNA; mol_type = other DNA
cggggtagtgggtttcatggg

SEQ ID NO: 9615 - DNA, 21 bp, synthetic construct
  source 1..21: mol_type = other DNA; mol_type = other DNA
tgtggtactccttgttcggct

SEQ ID NO: 9616 - DNA, 21 bp, synthetic construct
  source 1..21: mol_type = other DNA; mol_type = other DNA
attgggtctgcggtgctgagg

SEQ ID NO: 9617 - DNA, 21 bp, synthetic construct
  source 1..21: mol_type = other DNA; mol_type = other DNA
aggatggctgattctgtttgg

SEQ ID NO: 9618 - DNA, 21 bp, synthetic construct
  source 1..21: mol_type = other DNA; mol_type = other DNA
gatttttttgggcatgatgcg

SEQ ID NO: 9619 - DNA, 21 bp, synthetic construct
  source 1..21: mol_type = other DNA; mol_type = other DNA
acgggtgctacggttggttgt

SEQ ID NO: 9620 - DNA, 21 bp, synthetic construct
  source 1..21: mol_type = other DNA; mol_type = other DNA
gagaggtatgggttgtgtgct

SEQ ID NO: 9621 - DNA, 21 bp, synthetic construct
  source 1..21: mol_type = other DNA; mol_type = other DNA
cgggatgagaggccgggtggt

SEQ ID NO: 9622 - DNA, 21 bp, synthetic construct
  source 1..21: mol_type = other DNA; mol_type = other DNA
gctcgttttgatgcgtttcct

SEQ ID NO: 9623 - DNA, 21 bp, synthetic construct
  source 1..21: mol_type = other DNA; mol_type = other DNA
tatgatccgaggtcgaataat

SEQ ID NO: 9624 - DNA, 21 bp, synthetic construct
  source 1..21: mol_type = other DNA; mol_type = other DNA
gagcttgattctattcagtgg

SEQ ID NO: 9625 - DNA, 21 bp, synthetic construct
  source 1..21: mol_type = other DNA; mol_type = other DNA
tatgttcgtgcgccgctgtcg

SEQ ID NO: 9626 - DNA, 21 bp, synthetic construct
  source 1..21: mol_type = other DNA; mol_type = other DNA
tattcgcggattggtgatcat

SEQ ID NO: 9627 - DNA, 21 bp, synthetic construct
  source 1..21: mol_type = other DNA; mol_type = other DNA
attacttttcgttgtggtaag

SEQ ID NO: 9628 - DNA, 21 bp, synthetic construct
  source 1..21: mol_type = other DNA; mol_type = other DNA
gtggagactgtgcggtataag

SEQ ID NO: 9629 - DNA, 21 bp, synthetic construct
  source 1..21: mol_type = other DNA; mol_type = other DNA
gatctgatgtcgttgagttgg

SEQ ID NO: 9630 - DNA, 21 bp, synthetic construct
  source 1..21: mol_type = other DNA; mol_type = other DNA
gcgagtgattatcagactttt

SEQ ID NO: 9631 - DNA, 21 bp, synthetic construct
  source 1..21: mol_type = other DNA; mol_type = other DNA
atgagtgatgggactggtccg

SEQ ID NO: 9632 - DNA, 21 bp, synthetic construct
  source 1..21: mol_type = other DNA; mol_type = other DNA
gcgtctgatgagtggagggat

SEQ ID NO: 9633 - DNA, 21 bp, synthetic construct
  source 1..21: mol_type = other DNA; mol_type = other DNA
tatttggggggtgatcattgg

SEQ ID NO: 9634 - DNA, 21 bp, synthetic construct
  source 1..21: mol_type = other DNA; mol_type = other DNA
ctgccgacggggtgggggccg

SEQ ID NO: 9635 - DNA, 21 bp, synthetic construct
  source 1..21: mol_type = other DNA; mol_type = other DNA
ggtccggagactgtgaagtgg

SEQ ID NO: 9636 - DNA, 21 bp, synthetic construct
  source 1..21: mol_type = other DNA; mol_type = other DNA
tattctagtgtggttgcggag

SEQ ID NO: 9637 - DNA, 21 bp, synthetic construct
  source 1..21: mol_type = other DNA; mol_type = other DNA
tattttgagggggtgaagggt

SEQ ID NO: 9638 - DNA, 21 bp, synthetic construct
  source 1..21: mol_type = other DNA; mol_type = other DNA
ggtccgaatttgcatccgagt

SEQ ID NO: 9639 - DNA, 21 bp, synthetic construct
  source 1..21: mol_type = other DNA; mol_type = other DNA
cgggaggattatgtttatcct

SEQ ID NO: 9640 - DNA, 21 bp, synthetic construct
  source 1..21: mol_type = other DNA; mol_type = other DNA
tgtagtaagcctagtgctgtt

SEQ ID NO: 9641 - DNA, 21 bp, synthetic construct
  source 1..21: mol_type = other DNA; mol_type = other DNA
tatggttgtaatggttgtagt

SEQ ID NO: 9642 - DNA, 21 bp, synthetic construct
  source 1..21: mol_type = other DNA; mol_type = other DNA
gatatgagttctacgaagtgg

SEQ ID NO: 9643 - DNA, 21 bp, synthetic construct
  source 1..21: mol_type = other DNA; mol_type = other DNA
ggtgctgggaatagtctttgg

SEQ ID NO: 9644 - DNA, 21 bp, synthetic construct
  source 1..21: mol_type = other DNA; mol_type = other DNA
atgattgcggatggtggtgct

SEQ ID NO: 9645 - DNA, 21 bp, synthetic construct
  source 1..21: mol_type = other DNA; mol_type = other DNA
tggtattcggggaggactgag

SEQ ID NO: 9646 - DNA, 21 bp, synthetic construct
  source 1..21: mol_type = other DNA; mol_type = other DNA
tgtaagtatggggcggaggct

SEQ ID NO: 9647 - DNA, 21 bp, synthetic construct
  source 1..21: mol_type = other DNA; mol_type = other DNA
gttgttccgctttgtgatcct

SEQ ID NO: 9648 - DNA, 21 bp, synthetic construct
  source 1..21: mol_type = other DNA; mol_type = other DNA
acgcggagtggtagtaatgcg

SEQ ID NO: 9649 - DNA, 21 bp, synthetic construct
  source 1..21: mol_type = other DNA; mol_type = other DNA
cttgcttctgcttgtcttagt

SEQ ID NO: 9650 - DNA, 21 bp, synthetic construct
  source 1..21: mol_type = other DNA; mol_type = other DNA
gctggggcgtgtgatgcgtcg

SEQ ID NO: 9651 - DNA, 21 bp, synthetic construct
  source 1..21: mol_type = other DNA; mol_type = other DNA
tgtaattctggttgttctgtt

SEQ ID NO: 9652 - DNA, 21 bp, synthetic construct
  source 1..21: mol_type = other DNA; mol_type = other DNA
tggagtagggggggtagtgcg

SEQ ID NO: 9653 - DNA, 21 bp, synthetic construct
  source 1..21: mol_type = other DNA; mol_type = other DNA
gagattagtaagactcagatt

SEQ ID NO: 9654 - DNA, 21 bp, synthetic construct
  source 1..21: mol_type = other DNA; mol_type = other DNA
tttgatcgtaagccgcagatt

SEQ ID NO: 9655 - DNA, 21 bp, synthetic construct
  source 1..21: mol_type = other DNA; mol_type = other DNA
tatacgagtgataatgggttg

SEQ ID NO: 9656 - DNA, 21 bp, synthetic construct
  source 1..21: mol_type = other DNA; mol_type = other DNA
aatggggcgaatggtgtttgg

SEQ ID NO: 9657 - DNA, 21 bp, synthetic construct
  source 1..21: mol_type = other DNA; mol_type = other DNA
ttggaggctgtttctagggct

SEQ ID NO: 9658 - DNA, 21 bp, synthetic construct
  source 1..21: mol_type = other DNA; mol_type = other DNA
gagatgctgccgtatcgtggt

SEQ ID NO: 9659 - DNA, 21 bp, synthetic construct
  source 1..21: mol_type = other DNA; mol_type = other DNA
agtgcggatacttggcgggat

SEQ ID NO: 9660 - DNA, 21 bp, synthetic construct
  source 1..21: mol_type = other DNA; mol_type = other DNA
ttgactgtggcgactgtggag

SEQ ID NO: 9661 - DNA, 21 bp, synthetic construct
  source 1..21: mol_type = other DNA; mol_type = other DNA
ctgactgagaagctggctagt

SEQ ID NO: 9662 - DNA, 21 bp, synthetic construct
  source 1..21: mol_type = other DNA; mol_type = other DNA
tatttttcgggttcttcggcg

SEQ ID NO: 9663 - DNA, 21 bp, synthetic construct
  source 1..21: mol_type = other DNA; mol_type = other DNA
atgtttgggtcgactgcgggt

SEQ ID NO: 9664 - DNA, 21 bp, synthetic construct
  source 1..21: mol_type = other DNA; mol_type = other DNA
tatgattatgatgcttatcct

SEQ ID NO: 9665 - DNA, 21 bp, synthetic construct
  source 1..21: mol_type = other DNA
tcgaatcctgctcctcattct

SEQ ID NO: 9666 - DNA, 21 bp, synthetic construct
  source 1..21: mol_type = other DNA
tattttgtgggtgagcgtgag

SEQ ID NO: 9667 - DNA, 21 bp, synthetic construct
  source 1..21: mol_type = other DNA
tgggggaagaatatggggttg

SEQ ID NO: 9668 - DNA, 21 bp, synthetic construct
  source 1..21: mol_type = other DNA
gttgctcatgttcctctttgt

SEQ ID NO: 9669 - DNA, 21 bp, synthetic construct
  source 1..21: mol_type = other DNA; mol_type = other DNA
tatgctcggactggtacgtcg

SEQ ID NO: 9670 - DNA, 21 bp, synthetic construct
  source 1..21: mol_type = other DNA; mol_type = other DNA
ggtggtggtacttcgtcttgg

SEQ ID NO: 9671 - DNA, 21 bp, synthetic construct
  source 1..21: mol_type = other DNA; mol_type = other DNA
ggtaatttggataatggtggt

SEQ ID NO: 9672 - DNA, 21 bp, synthetic construct
  source 1..21: mol_type = other DNA; mol_type = other DNA
cggacttatgattcgatgcct

SEQ ID NO: 9673 - DNA, 21 bp, synthetic construct
  source 1..21: mol_type = other DNA; mol_type = other DNA
ggtggggagagtacgtcttgg

SEQ ID NO: 9674 - DNA, 21 bp, synthetic construct
  source 1..21: mol_type = other DNA; mol_type = other DNA
tatcggcttaggattagtgat

SEQ ID NO: 9675 - DNA, 21 bp, synthetic construct
  source 1..21: mol_type = other DNA; mol_type = other DNA
attgctgcgacgtgttgtaat

SEQ ID NO: 9676 - DNA, 21 bp, synthetic construct
  source 1..21: mol_type = other DNA; mol_type = other DNA
gggggggagggtctgcggtgg

SEQ ID NO: 9677 - DNA, 21 bp, synthetic construct
  source 1..21: mol_type = other DNA; mol_type = other DNA
tgtgctcctgattatcgtgag

SEQ ID NO: 9678 - DNA, 21 bp, synthetic construct
  source 1..21: mol_type = other DNA; mol_type = other DNA
attttgtctgatagggtgtgg

SEQ ID NO: 9679 - DNA, 21 bp, synthetic construct
  source 1..21: mol_type = other DNA; mol_type = other DNA
gcccaaggtattggtacttgg

SEQ ID NO: 9680 - DNA, 21 bp, synthetic construct
  source 1..21: mol_type = other DNA; mol_type = other DNA
gatgagagtgtgcggacgtgg

SEQ ID NO: 9681 - DNA, 21 bp, synthetic construct
  source 1..21: mol_type = other DNA; mol_type = other DNA
tggcttaagagtcaggctggg

SEQ ID NO: 9682 - DNA, 21 bp, synthetic construct
  source 1..21: mol_type = other DNA; mol_type = other DNA
aagtcgactacttcggagccg

SEQ ID NO: 9683 - DNA, 21 bp, synthetic construct
  source 1..21: mol_type = other DNA; mol_type = other DNA
ggggagatgtcggttcggtgg

SEQ ID NO: 9684 - DNA, 21 bp, synthetic construct
  source 1..21: mol_type = other DNA; mol_type = other DNA
ttgtctgcgctgagtaataat

SEQ ID NO: 9685 - DNA, 21 bp, synthetic construct
  source 1..21: mol_type = other DNA; mol_type = other DNA
gggggggattatattggtacg

SEQ ID NO: 9686 - DNA, 21 bp, synthetic construct
  source 1..21: mol_type = other DNA; mol_type = other DNA
gatatggggtctgcggattgg

SEQ ID NO: 9687 - DNA, 21 bp, synthetic construct
  source 1..21: mol_type = other DNA; mol_type = other DNA
tggctggcgggtccgtcggct

SEQ ID NO: 9688 - DNA, 21 bp, synthetic construct
  source 1..21: mol_type = other DNA; mol_type = other DNA
gtggcggatcatgttcggtgg

SEQ ID NO: 9689 - DNA, 21 bp, synthetic construct
  source 1..21: mol_type = other DNA; mol_type = other DNA
cgtgaggggacggtttattgg

SEQ ID NO: 9690 - DNA, 21 bp, synthetic construct
  source 1..21: mol_type = other DNA; mol_type = other DNA
tcgttgtcttctcaggagtgg

SEQ ID NO: 9691 - DNA, 21 bp, synthetic construct
  source 1..21: mol_type = other DNA; mol_type = other DNA
gatcaggggtatagtacgtgg

SEQ ID NO: 9692 - DNA, 21 bp, synthetic construct
  source 1..21: mol_type = other DNA; mol_type = other DNA
ttggcgaggcttgggtatgat

SEQ ID NO: 9693 - DNA, 21 bp, synthetic construct
  source 1..21: mol_type = other DNA; mol_type = other DNA
actgcgacggggtgttgtcct

SEQ ID NO: 9694 - DNA, 21 bp, synthetic construct
  source 1..21: mol_type = other DNA; mol_type = other DNA
acttattctgttgatcttggg

SEQ ID NO: 9695 - DNA, 21 bp, synthetic construct
  source 1..21: mol_type = other DNA; mol_type = other DNA
ttgggggcttattctctgcat

SEQ ID NO: 9696 - DNA, 21 bp, synthetic construct
  source 1..21: mol_type = other DNA; mol_type = other DNA
tgtaagatgggtcgggatgag

SEQ ID NO: 9697 - DNA, 21 bp, synthetic construct
  source 1..21: mol_type = other DNA; mol_type = other DNA
ttgcggggtgatgattgtgcg

SEQ ID NO: 9698 - DNA, 21 bp, synthetic construct
  source 1..21: mol_type = other DNA; mol_type = other DNA
ttgccgagtggtgattcgccg

SEQ ID NO: 9699 - DNA, 21 bp, synthetic construct
  source 1..21: mol_type = other DNA; mol_type = other DNA
tgtgggaaggatttgcttcat

SEQ ID NO: 9700 - DNA, 21 bp, synthetic construct
  source 1..21: mol_type = other DNA; mol_type = other DNA
gagatgggtggtcgtgagtgg

SEQ ID NO: 9701 - DNA, 21 bp, synthetic construct
  source 1..21: mol_type = other DNA; mol_type = other DNA
tatgtgaagtttgagtctggt

SEQ ID NO: 9702 - DNA, 21 bp, synthetic construct
  source 1..21: mol_type = other DNA; mol_type = other DNA
gggactgggggggatactggg

SEQ ID NO: 9703 - DNA, 21 bp, synthetic construct
  source 1..21: mol_type = other DNA; mol_type = other DNA
gttactggtgcgtgttgttct

SEQ ID NO: 9704 - DNA, 21 bp, synthetic construct
  source 1..21: mol_type = other DNA; mol_type = other DNA
gattatgcgtcgattaagtgg

SEQ ID NO: 9705 - DNA, 21 bp, synthetic construct
  source 1..21: mol_type = other DNA; mol_type = other DNA
ggggatgagtcgtcggtttgg

SEQ ID NO: 9706 - DNA, 21 bp, synthetic construct
  source 1..21: mol_type = other DNA; mol_type = other DNA
cagtcgtctgtttttaatgat

SEQ ID NO: 9707 - DNA, 21 bp, synthetic construct
  source 1..21: mol_type = other DNA; mol_type = other DNA
ggtgataaggagactgcggcg

SEQ ID NO: 9708 - DNA, 21 bp, synthetic construct
  source 1..21: mol_type = other DNA; mol_type = other DNA
agtgcttattctcctttgagt

SEQ ID NO: 9709 - DNA, 21 bp, synthetic construct
  source 1..21: mol_type = other DNA; mol_type = other DNA
aatcctttggcgtctaattgg

SEQ ID NO: 9710 - DNA, 21 bp, synthetic construct
  source 1..21: mol_type = other DNA; mol_type = other DNA
cgtgaggatgtttcgttgtgg

SEQ ID NO: 9711 - DNA, 21 bp, synthetic construct
  source 1..21: mol_type = other DNA; mol_type = other DNA
tattttacgggtcatcttgag

SEQ ID NO: 9712 - DNA, 21 bp, synthetic construct
  source 1..21: mol_type = other DNA; mol_type = other DNA
gggctgaatgttgttgcgtgg

SEQ ID NO: 9713 - DNA, 21 bp, synthetic construct
  source 1..21: mol_type = other DNA; mol_type = other DNA
atgatgacgtctagtcagtgg

SEQ ID NO: 9714 - DNA, 21 bp, synthetic construct
  source 1..21: mol_type = other DNA; mol_type = other DNA
cctgatttttctactaggtat

SEQ ID NO: 9715 - DNA, 21 bp, synthetic construct
  source 1..21: mol_type = other DNA; mol_type = other DNA
tgtattgtgactgctaattgt

SEQ ID NO: 9716 - DNA, 21 bp, synthetic construct
  source 1..21: mol_type = other DNA; mol_type = other DNA
gtgaatgatggggtgaagtgg

SEQ ID NO: 9717 - DNA, 21 bp, synthetic construct
  source 1..21: mol_type = other DNA; mol_type = other DNA
ctttgtaagagttgtggttct

SEQ ID NO: 9718 - DNA, 21 bp, synthetic construct
  source 1..21: mol_type = other DNA; mol_type = other DNA
acggtgtggggggatgcggct

SEQ ID NO: 9719 - DNA, 21 bp, synthetic construct
  source 1..21: mol_type = other DNA; mol_type = other DNA
gatcttgagtcttcttattgg

SEQ ID NO: 9720 - DNA, 21 bp, synthetic construct
  source 1..21: mol_type = other DNA; mol_type = other DNA
gttgattctactaatgggttg

SEQ ID NO: 9721 - DNA, 21 bp, synthetic construct
  source 1..21: mol_type = other DNA; mol_type = other DNA
aggttggagtcggcggtgtgg

SEQ ID NO: 9722 - DNA, 21 bp, synthetic construct
  source 1..21: mol_type = other DNA; mol_type = other DNA
cctatgagtgcggtgggttgg

SEQ ID NO: 9723 - DNA, 21 bp, synthetic construct
  source 1..21: mol_type = other DNA; mol_type = other DNA
agggatccgtctgtttttccg

SEQ ID NO: 9724 - DNA, 21 bp, synthetic construct
  source 1..21: mol_type = other DNA; mol_type = other DNA
acgaatgctcagattctgact

SEQ ID NO: 9725 - DNA, 21 bp, synthetic construct
  source 1..21: mol_type = other DNA; mol_type = other DNA
ttttctgtgcgtggtaatctg

SEQ ID NO: 9726 - DNA, 21 bp, synthetic construct
  source 1..21: mol_type = other DNA; mol_type = other DNA
tgtttggcgatgtctaagccg

SEQ ID NO: 9727 - DNA, 21 bp, synthetic construct
  source 1..21: mol_type = other DNA; mol_type = other DNA
acgcgggagggtgatgctcct

SEQ ID NO: 9728 - DNA, 21 bp, synthetic construct
  source 1..21: mol_type = other DNA; mol_type = other DNA
gtgttgtctcatactgatttg

SEQ ID NO: 9729 - DNA, 21 bp, synthetic construct
  source 1..21: mol_type = other DNA; mol_type = other DNA
tatacgcggttggattcgtcg

SEQ ID NO: 9730 - DNA, 21 bp, synthetic construct
  source 1..21: mol_type = other DNA; mol_type = other DNA
caggatgagtggacttatgtt

SEQ ID NO: 9731 - DNA, 21 bp, synthetic construct
  source 1..21: mol_type = other DNA; mol_type = other DNA
gttattggtatggggcgggat

SEQ ID NO: 9732 - DNA, 21 bp, synthetic construct
  source 1..21: mol_type = other DNA; mol_type = other DNA
ggtgatgagtatatttcgtat

SEQ ID NO: 9733 - DNA, 21 bp, synthetic construct
  source 1..21: mol_type = other DNA; mol_type = other DNA
agtaattcgtctttgaattgt

SEQ ID NO: 9734 - DNA, 21 bp, synthetic construct
  source 1..21: mol_type = other DNA; mol_type = other DNA
acgtctcttgagtttggggct

SEQ ID NO: 9735 - DNA, 21 bp, synthetic construct
  source 1..21: mol_type = other DNA; mol_type = other DNA
ggtgtgacggaggtttcttgg

SEQ ID NO: 9736 - DNA, 21 bp, synthetic construct
  source 1..21: mol_type = other DNA; mol_type = other DNA
agttttgatgcggataggtgg

SEQ ID NO: 9737 - DNA, 21 bp, synthetic construct
  source 1..21: mol_type = other DNA; mol_type = other DNA
ttttttagtggggctgtggag

SEQ ID NO: 9738 - DNA, 21 bp, synthetic construct
  source 1..21: mol_type = other DNA; mol_type = other DNA
atgcggttttgtaaggattcg

SEQ ID NO: 9739 - DNA, 21 bp, synthetic construct
  source 1..21: mol_type = other DNA; mol_type = other DNA
tattcggattttgctcctttt

SEQ ID NO: 9740 - DNA, 21 bp, synthetic construct
  source 1..21: mol_type = other DNA; mol_type = other DNA
ggttctactgtgtgtaaggat

SEQ ID NO: 9741 - DNA, 21 bp, synthetic construct
  source 1..21: mol_type = other DNA; mol_type = other DNA
ggggagcctaggagtgggaat

SEQ ID NO: 9742 - DNA, 21 bp, synthetic construct
  source 1..21: mol_type = other DNA; mol_type = other DNA
tttggttataggcaggggtcg

SEQ ID NO: 9743 - DNA, 21 bp, synthetic construct
  source 1..21: mol_type = other DNA; mol_type = other DNA
tctatgtgtaaggatgattgt

SEQ ID NO: 9744 - DNA, 21 bp, synthetic construct
  source 1..21: mol_type = other DNA; mol_type = other DNA
gggtatagtgattttcgtaat

SEQ ID NO: 9745 - DNA, 21 bp, synthetic construct
  source 1..21: mol_type = other DNA; mol_type = other DNA
ggtttgtatgttgaggcgggt

SEQ ID NO: 9746 - DNA, 21 bp, synthetic construct
  source 1..21: mol_type = other DNA; mol_type = other DNA
aatattcctggtatgatgtat

SEQ ID NO: 9747 - DNA, 21 bp, synthetic construct
  source 1..21: mol_type = other DNA; mol_type = other DNA
cttagtgttgatatttgtgct

SEQ ID NO: 9748 - DNA, 21 bp, synthetic construct
  source 1..21: mol_type = other DNA; mol_type = other DNA
gtgtctatggggtctgctggt

SEQ ID NO: 9749 - DNA, 21 bp, synthetic construct
  source 1..21: mol_type = other DNA; mol_type = other DNA
actcggcagggggatgaggcg

SEQ ID NO: 9750 - DNA, 21 bp, synthetic construct
  source 1..21: mol_type = other DNA; mol_type = other DNA
gggggtattaattatgatttg

SEQ ID NO: 9751 - DNA, 21 bp, synthetic construct
  source 1..21: mol_type = other DNA; mol_type = other DNA
tggaatgctggtggtgctttt

SEQ ID NO: 9752 - DNA, 21 bp, synthetic construct
  source 1..21: mol_type = other DNA; mol_type = other DNA
aggatggatcatactaatttt

SEQ ID NO: 9753 - DNA, 21 bp, synthetic construct
  source 1..21: mol_type = other DNA; mol_type = other DNA
attatgagtgatcttgcttgg

SEQ ID NO: 9754 - DNA, 21 bp, synthetic construct
  source 1..21: mol_type = other DNA; mol_type = other DNA
tgtggggaggctattctgatg

SEQ ID NO: 9755 - DNA, 21 bp, synthetic construct
  source 1..21: mol_type = other DNA; mol_type = other DNA
agtagtacgcagagttcgttt

SEQ ID NO: 9756 - DNA, 21 bp, synthetic construct
  source 1..21: mol_type = other DNA; mol_type = other DNA
gggcttagttcggcgacttgg

SEQ ID NO: 9757 - DNA, 21 bp, synthetic construct
  source 1..21: mol_type = other DNA; mol_type = other DNA
gtgagtgctgggtatcagtgg

SEQ ID NO: 9758 - DNA, 21 bp, synthetic construct
  source 1..21: mol_type = other DNA; mol_type = other DNA
tattttgcgggtattcctgcg

SEQ ID NO: 9759 - DNA, 21 bp, synthetic construct
  source 1..21: mol_type = other DNA; mol_type = other DNA
gagcttatggctcattcgtgg

SEQ ID NO: 9760 - DNA, 21 bp, synthetic construct
  source 1..21: mol_type = other DNA; mol_type = other DNA
ggtgggactcctgttaatgtg

SEQ ID NO: 9761 - DNA, 21 bp, synthetic construct
  source 1..21: mol_type = other DNA; mol_type = other DNA
ggtgttacggctgttgcttgg

SEQ ID NO: 9762 - DNA, 21 bp, synthetic construct
  source 1..21: mol_type = other DNA; mol_type = other DNA
gagcctgagagtaggagttgg

SEQ ID NO: 9763 - DNA, 21 bp, synthetic construct
  source 1..21: mol_type = other DNA; mol_type = other DNA
tgtgatggtgtgcctcggggt

SEQ ID NO: 9764 - DNA, 21 bp, synthetic construct
  source 1..21: mol_type = other DNA; mol_type = other DNA
agggatggtgggcggattggt

SEQ ID NO: 9765 - DNA, 21 bp, synthetic construct
  source 1..21: mol_type = other DNA; mol_type = other DNA
aatgggcagggggggcattgg

SEQ ID NO: 9766 - DNA, 21 bp, synthetic construct
  source 1..21: mol_type = other DNA; mol_type = other DNA
gttgagtcgtctagtttgtgg

SEQ ID NO: 9767 - DNA, 21 bp, synthetic construct
  source 1..21: mol_type = other DNA; mol_type = other DNA
acttgtactgggacttgttcg

SEQ ID NO: 9768 - DNA, 21 bp, synthetic construct
  source 1..21: mol_type = other DNA; mol_type = other DNA
gtggatagtgataatgggcgt

SEQ ID NO: 9769 - DNA, 21 bp, synthetic construct
  source 1..21: mol_type = other DNA; mol_type = other DNA
attgtgagtatttgtgcggcg

SEQ ID NO: 9770 - DNA, 21 bp, synthetic construct
  source 1..21: mol_type = other DNA; mol_type = other DNA
gatcatgctaatccgccggat

SEQ ID NO: 9771 - DNA, 21 bp, synthetic construct
  source 1..21: mol_type = other DNA; mol_type = other DNA
ttttcgggtatgagtccttcg

SEQ ID NO: 9772 - DNA, 21 bp, synthetic construct
  source 1..21: mol_type = other DNA; mol_type = other DNA
tgtatgactggtctgaagtgt

SEQ ID NO: 9773 - DNA, 21 bp, synthetic construct
  source 1..21: mol_type = other DNA; mol_type = other DNA
aattgtaatgcgtcttgtgtg

SEQ ID NO: 9774 - DNA, 21 bp, synthetic construct
  source 1..21: mol_type = other DNA; mol_type = other DNA
aaggtgggtgatctgcgtgct

SEQ ID NO: 9775 - DNA, 21 bp, synthetic construct
  source 1..21: mol_type = other DNA; mol_type = other DNA
gtggagagttcgaatggtagg

SEQ ID NO: 9776 - DNA, 21 bp, synthetic construct
  source 1..21: mol_type = other DNA; mol_type = other DNA
gagtttgatgctcgtacgtgg

SEQ ID NO: 9777 - DNA, 21 bp, synthetic construct
  source 1..21: mol_type = other DNA; mol_type = other DNA
atttgtagtcgtgtgaatggt

SEQ ID NO: 9778 - DNA, 21 bp, synthetic construct
  source 1..21: mol_type = other DNA; mol_type = other DNA
catgtgaagtgttgtcctcct

SEQ ID NO: 9779 - DNA, 21 bp, synthetic construct
  source 1..21: mol_type = other DNA; mol_type = other DNA
agtagtatggtgtcttgtgct

SEQ ID NO: 9780 - DNA, 21 bp, synthetic construct
  source 1..21: mol_type = other DNA; mol_type = other DNA
ttgagtgcgggggagctttgg

SEQ ID NO: 9781 - DNA, 21 bp, synthetic construct
  source 1..21: mol_type = other DNA; mol_type = other DNA
gtgatgaattctagtggtgcg

SEQ ID NO: 9782 - DNA, 21 bp, synthetic construct
  source 1..21: mol_type = other DNA; mol_type = other DNA
ttggatgggtgttgttctgct

SEQ ID NO: 9783 - DNA, 21 bp, synthetic construct
  source 1..21: mol_type = other DNA; mol_type = other DNA
tttagggatggtactgctgct

SEQ ID NO: 9784 - DNA, 21 bp, synthetic construct
  source 1..21: mol_type = other DNA; mol_type = other DNA
tgtgatactgcttgtacgcgg

SEQ ID NO: 9785 - DNA, 21 bp, synthetic construct
  source 1..21: mol_type = other DNA; mol_type = other DNA
ggggagttgacggtgcggtgg

SEQ ID NO: 9786 - DNA, 21 bp, synthetic construct
  source 1..21: mol_type = other DNA; mol_type = other DNA
ttggaggggagggaggagggg

SEQ ID NO: 9787 - DNA, 21 bp, synthetic construct
  source 1..21: mol_type = other DNA; mol_type = other DNA
tgtttgaagatttgtacgcct

SEQ ID NO: 9788 - DNA, 21 bp, synthetic construct
  source 1..21: mol_type = other DNA; mol_type = other DNA
atggagcggaattcttcgagt

SEQ ID NO: 9789 - DNA, 21 bp, synthetic construct
  source 1..21: mol_type = other DNA; mol_type = other DNA
ggtggtgagcggtcgacgtgg

SEQ ID NO: 9790 - DNA, 21 bp, synthetic construct
  source 1..21: mol_type = other DNA; mol_type = other DNA
tggcattcgacgaatgggctg

SEQ ID NO: 9791 - DNA, 21 bp, synthetic construct
  source 1..21: mol_type = other DNA; mol_type = other DNA
gggggttctgatcggatttgg

SEQ ID NO: 9792 - DNA, 21 bp, synthetic construct
  source 1..21: mol_type = other DNA; mol_type = other DNA
tgtgcggttgtgtgttcttct

SEQ ID NO: 9793 - DNA, 21 bp, synthetic construct
  source 1..21: mol_type = other DNA; mol_type = other DNA
gtgttttcgcgtctggatact

SEQ ID NO: 9794 - DNA, 21 bp, synthetic construct
  source 1..21: mol_type = other DNA; mol_type = other DNA
gggcattgtggggctacggtg

SEQ ID NO: 9795 - DNA, 21 bp, synthetic construct
  source 1..21: mol_type = other DNA; mol_type = other DNA
ggtgttgctggtgcgagtttt

SEQ ID NO: 9796 - DNA, 21 bp, synthetic construct
  source 1..21: mol_type = other DNA; mol_type = other DNA
gctggtgagtgggtgacttat

SEQ ID NO: 9797 - DNA, 21 bp, synthetic construct
  source 1..21: mol_type = other DNA; mol_type = other DNA
cttgagcatcgtctggttaat

SEQ ID NO: 9798 - DNA, 21 bp, synthetic construct
  source 1..21: mol_type = other DNA; mol_type = other DNA
gatagtgcgtctcgtgcgtgg

SEQ ID NO: 9799 - DNA, 21 bp, synthetic construct
  source 1..21: mol_type = other DNA; mol_type = other DNA
gggtgttgtacgaatgaggtg

SEQ ID NO: 9800 - DNA, 21 bp, synthetic construct
  source 1..21: mol_type = other DNA; mol_type = other DNA
tattcgcgggcgtctgatgat

SEQ ID NO: 9801 - DNA, 21 bp, synthetic construct
  source 1..21: mol_type = other DNA; mol_type = other DNA
atgtggaatggtattaatcct

SEQ ID NO: 9802 - DNA, 21 bp, synthetic construct
  source 1..21: mol_type = other DNA; mol_type = other DNA
ggtggtatgggtgttagttgg

SEQ ID NO: 9803 - DNA, 21 bp, synthetic construct
  source 1..21: mol_type = other DNA; mol_type = other DNA
tgttgtgatcctagtaatgtg

SEQ ID NO: 9804 - DNA, 21 bp, synthetic construct
  source 1..21: mol_type = other DNA; mol_type = other DNA
ggtattcctaattgtagggag

SEQ ID NO: 9805 - DNA, 21 bp, synthetic construct
  source 1..21: mol_type = other DNA; mol_type = other DNA
ttgtgtaagctggctcagcct

SEQ ID NO: 9806 - DNA, 21 bp, synthetic construct
  source 1..21: mol_type = other DNA; mol_type = other DNA
cctcggagtactcatggtgtt

SEQ ID NO: 9807 - DNA, 21 bp, synthetic construct
  source 1..21: mol_type = other DNA; mol_type = other DNA
gagatgcatgctgatgttatt

SEQ ID NO: 9808 - DNA, 21 bp, synthetic construct
  source 1..21: mol_type = other DNA; mol_type = other DNA
ttgattactaagcctgggtat

SEQ ID NO: 9809 - DNA, 21 bp, synthetic construct
  source 1..21: mol_type = other DNA; mol_type = other DNA
acgattgctgatgcgtatcct

SEQ ID NO: 9810 - DNA, 21 bp, synthetic construct
  source 1..21: mol_type = other DNA; mol_type = other DNA
actatgagggatgcttttccg

SEQ ID NO: 9811 - DNA, 21 bp, synthetic construct
  source 1..21: mol_type = other DNA; mol_type = other DNA
gcgactaattggcggctggct

SEQ ID NO: 9812 - DNA, 21 bp, synthetic construct
  source 1..21: mol_type = other DNA; mol_type = other DNA
agtgcccaatcgtggacggat

SEQ ID NO: 9813 - DNA, 21 bp, synthetic construct
  source 1..21: mol_type = other DNA; mol_type = other DNA
cttcatgcgagtcagatgaat

SEQ ID NO: 9814 - DNA, 21 bp, synthetic construct
  source 1..21: mol_type = other DNA; mol_type = other DNA
atgcataggctgtctatggat

SEQ ID NO: 9815 - DNA, 21 bp, synthetic construct
  source 1..21: mol_type = other DNA; mol_type = other DNA
gttgctcaggcgggtgcgggt

SEQ ID NO: 9816 - DNA, 21 bp, synthetic construct
  source 1..21: mol_type = other DNA; mol_type = other DNA
ggtgcgcctgatagtattcgt

SEQ ID NO: 9817 - DNA, 21 bp, synthetic construct
  source 1..21: mol_type = other DNA; mol_type = other DNA
cgggaggattttagtacgttt

SEQ ID NO: 9818 - DNA, 21 bp, synthetic construct
  source 1..21: mol_type = other DNA; mol_type = other DNA
catgaggattcgtgtagtgct

SEQ ID NO: 9819 - DNA, 21 bp, synthetic construct
  source 1..21: mol_type = other DNA; mol_type = other DNA
tattattcggggcgtagtgag

SEQ ID NO: 9820 - DNA, 21 bp, synthetic construct
  source 1..21: mol_type = other DNA; mol_type = other DNA
ttttttaatactgctcatagt

SEQ ID NO: 9821 - DNA, 21 bp, synthetic construct
  source 1..21: mol_type = other DNA; mol_type = other DNA
tatgtgaagtcgcagggtgtg

SEQ ID NO: 9822 - DNA, 21 bp, synthetic construct
  source 1..21: mol_type = other DNA; mol_type = other DNA
tgtacgaagaatgtgaatgcg

SEQ ID NO: 9823 - DNA, 21 bp, synthetic construct
  source 1..21: mol_type = other DNA; mol_type = other DNA
atggtgtcttgtggtggttgt

SEQ ID NO: 9824 - DNA, 21 bp, synthetic construct
  source 1..21: mol_type = other DNA; mol_type = other DNA
actttgtctactaatggtgtg

SEQ ID NO: 9825 - DNA, 21 bp, synthetic construct
  source 1..21: mol_type = other DNA; mol_type = other DNA
tctgctagtacggcgaagagt

SEQ ID NO: 9826 - DNA, 21 bp, synthetic construct
  source 1..21: mol_type = other DNA; mol_type = other DNA
gttatgtctgaggcttcgtgg

SEQ ID NO: 9827 - DNA, 21 bp, synthetic construct
  source 1..21: mol_type = other DNA; mol_type = other DNA
cttggtgcggctacgtgtcag

SEQ ID NO: 9828 - DNA, 21 bp, synthetic construct
  source 1..21: mol_type = other DNA; mol_type = other DNA
tgttgtggtaatgtgaagatt

SEQ ID NO: 9829 - DNA, 21 bp, synthetic construct
  source 1..21: mol_type = other DNA; mol_type = other DNA
tctggggagtatactcctttt

SEQ ID NO: 9830 - DNA, 21 bp, synthetic construct
  source 1..21: mol_type = other DNA; mol_type = other DNA
tgtaaggtttctgcgaatttg

SEQ ID NO: 9831 - DNA, 21 bp, synthetic construct
  source 1..21: mol_type = other DNA; mol_type = other DNA
gggagtgatacgtcgcgttgg

SEQ ID NO: 9832 - DNA, 21 bp, synthetic construct
  source 1..21: mol_type = other DNA; mol_type = other DNA
cgttgtccgtttgttgagacg

SEQ ID NO: 9833 - DNA, 21 bp, synthetic construct
  source 1..21: mol_type = other DNA; mol_type = other DNA
atgttgagtttgtgttgtgcg

SEQ ID NO: 9834 - DNA, 21 bp, synthetic construct
  source 1..21: mol_type = other DNA; mol_type = other DNA
cagaattgtgttgatcggtgt

SEQ ID NO: 9835 - DNA, 21 bp, synthetic construct
  source 1..21: mol_type = other DNA; mol_type = other DNA
tttgaggtgcctggagataag

SEQ ID NO: 9836 - DNA, 21 bp, synthetic construct
  source 1..21: mol_type = other DNA; mol_type = other DNA
cctggggcgtcttcggtgtgg

SEQ ID NO: 9837 - DNA, 21 bp, synthetic construct
  source 1..21: mol_type = other DNA; mol_type = other DNA
ggttttggtgattttcagaat

SEQ ID NO: 9838 - DNA, 21 bp, synthetic construct
  source 1..21: mol_type = other DNA; mol_type = other DNA
agtactgctgggacgagttgt

SEQ ID NO: 9839 - DNA, 21 bp, synthetic construct
  source 1..21: mol_type = other DNA; mol_type = other DNA
ggtatggttccgcgggatatg

SEQ ID NO: 9840 - DNA, 21 bp, synthetic construct
  source 1..21: mol_type = other DNA; mol_type = other DNA
gcgtggagtactaatggtgtg

SEQ ID NO: 9841 - DNA, 21 bp, synthetic construct
  source 1..21: mol_type = other DNA; mol_type = other DNA
tgttcgaataagtgtactgtt

SEQ ID NO: 9842 - DNA, 21 bp, synthetic construct
  source 1..21: mol_type = other DNA; mol_type = other DNA
tggtggagtggtacgccggat

SEQ ID NO: 9843 - DNA, 21 bp, synthetic construct
  source 1..21: mol_type = other DNA; mol_type = other DNA
gagtgtctggcgtcttgtcgg

SEQ ID NO: 9844 - DNA, 21 bp, synthetic construct
  source 1..21: mol_type = other DNA; mol_type = other DNA
tttgatgcttctactctgtct

SEQ ID NO: 9845 - DNA, 21 bp, synthetic construct
  source 1..21: mol_type = other DNA; mol_type = other DNA
attactgagcgtgttaatact

SEQ ID NO: 9846 - DNA, 21 bp, synthetic construct
  source 1..21: mol_type = other DNA; mol_type = other DNA
tatagtaaggcggcgccgttg

SEQ ID NO: 9847 - DNA, 21 bp, synthetic construct
  source 1..21: mol_type = other DNA; mol_type = other DNA
ggtttgagtagtagtagttgg

SEQ ID NO: 9848 - DNA, 21 bp, synthetic construct
  source 1..21: mol_type = other DNA; mol_type = other DNA
cggcttgagaatcctcatact

SEQ ID NO: 9849 - DNA, 21 bp, synthetic construct
  source 1..21: mol_type = other DNA; mol_type = other DNA
aagcttgatgaggtgtatcct

SEQ ID NO: 9850 - DNA, 21 bp, synthetic construct
  source 1..21: mol_type = other DNA; mol_type = other DNA
ccgtctgctaagaatctgggg

SEQ ID NO: 9851 - DNA, 21 bp, synthetic construct
  source 1..21: mol_type = other DNA; mol_type = other DNA
gagggtcctccgccgaggaat

SEQ ID NO: 9852 - DNA, 21 bp, synthetic construct
  source 1..21: mol_type = other DNA; mol_type = other DNA
gttggtcagcaggttgtgttg

SEQ ID NO: 9853 - DNA, 21 bp, synthetic construct
  source 1..21: mol_type = other DNA; mol_type = other DNA
gtgtcggattttgatattttt

SEQ ID NO: 9854 - DNA, 21 bp, synthetic construct
  source 1..21: mol_type = other DNA; mol_type = other DNA
gggagttttcgtcagggtggt

SEQ ID NO: 9855 - DNA, 21 bp, synthetic construct
  source 1..21: mol_type = other DNA; mol_type = other DNA
catgagccgtcgaggacgtgg

SEQ ID NO: 9856 - DNA, 21 bp, synthetic construct
  source 1..21: mol_type = other DNA; mol_type = other DNA
actggtgtgcatgtgacgccg

SEQ ID NO: 9857 - DNA, 21 bp, synthetic construct
  source 1..21: mol_type = other DNA; mol_type = other DNA
tgtatgcagctgaagtctcat

SEQ ID NO: 9858 - DNA, 21 bp, synthetic construct
  source 1..21: mol_type = other DNA; mol_type = other DNA
catgatgcgttttcttcttgg

SEQ ID NO: 9859 - DNA, 21 bp, synthetic construct
  source 1..21: mol_type = other DNA; mol_type = other DNA
acgtggcatggtgatgggcct

SEQ ID NO: 9860 - DNA, 21 bp, synthetic construct
  source 1..21: mol_type = other DNA; mol_type = other DNA
tggggtagtcagggggggacg

SEQ ID NO: 9861 - DNA, 21 bp, synthetic construct
  source 1..21: mol_type = other DNA; mol_type = other DNA
attgaggggcttagggcgtct

SEQ ID NO: 9862 - DNA, 21 bp, synthetic construct
  source 1..21: mol_type = other DNA; mol_type = other DNA
ttgtctaggatttcgatggat

SEQ ID NO: 9863 - DNA, 21 bp, synthetic construct
  source 1..21: mol_type = other DNA; mol_type = other DNA
tgtgagcggaatgagtgtccg

SEQ ID NO: 9864 - DNA, 21 bp, synthetic construct
  source 1..21: mol_type = other DNA; mol_type = other DNA
gattatgagagtgcttgtgtt

SEQ ID NO: 9865 - DNA, 21 bp, synthetic construct
  source 1..21: mol_type = other DNA; mol_type = other DNA
gcttgggataatgaggctatg

SEQ ID NO: 9866 - DNA, 21 bp, synthetic construct
  source 1..21: mol_type = other DNA; mol_type = other DNA
aagaatggttcgtcgtcgtgg

SEQ ID NO: 9867 - DNA, 21 bp, synthetic construct
  source 1..21: mol_type = other DNA; mol_type = other DNA
actgattctgagtggagggat

SEQ ID NO: 9868 - DNA, 21 bp, synthetic construct
  source 1..21: mol_type = other DNA; mol_type = other DNA
tgttgtggtccgggtaagtct

SEQ ID NO: 9869 - DNA, 21 bp, synthetic construct
  source 1..21: mol_type = other DNA; mol_type = other DNA
gtttcggatactaatggtatt

SEQ ID NO: 9870 - DNA, 21 bp, synthetic construct
  source 1..21: mol_type = other DNA; mol_type = other DNA
atgggtttgggtcttcatatt

SEQ ID NO: 9871 - DNA, 21 bp, synthetic construct
  source 1..21: mol_type = other DNA; mol_type = other DNA
tgtgttattgttaagcaggtg

SEQ ID NO: 9872 - DNA, 21 bp, synthetic construct
  source 1..21: mol_type = other DNA; mol_type = other DNA
agtgagatttgttcgtcgccg

SEQ ID NO: 9873 - DNA, 21 bp, synthetic construct
  source 1..21: mol_type = other DNA; mol_type = other DNA
tgtgcggctggtacgtcgcct

SEQ ID NO: 9874 - DNA, 21 bp, synthetic construct
  source 1..21: mol_type = other DNA; mol_type = other DNA
atttgtggtgcgccgtgtgtg

SEQ ID NO: 9875 - DNA, 21 bp, synthetic construct
  source 1..21: mol_type = other DNA; mol_type = other DNA
gattcgatggctacggagcgg

SEQ ID NO: 9876 - DNA, 21 bp, synthetic construct
  source 1..21: mol_type = other DNA; mol_type = other DNA
ttttgtttggggaattcgggt

SEQ ID NO: 9877 - DNA, 21 bp, synthetic construct
  source 1..21: mol_type = other DNA; mol_type = other DNA
aatgatggtcggagtgggtgg

SEQ ID NO: 9878 - DNA, 21 bp, synthetic construct
  source 1..21: mol_type = other DNA; mol_type = other DNA
ggtcctacgagtgtgctgtgg

SEQ ID NO: 9879 - DNA, 21 bp, synthetic construct
  source 1..21: mol_type = other DNA; mol_type = other DNA
gataggatttttctgtcggct

SEQ ID NO: 9880 - DNA, 21 bp, synthetic construct
  source 1..21: mol_type = other DNA; mol_type = other DNA
atggataatgcggctcagcgt

SEQ ID NO: 9881 - DNA, 21 bp, synthetic construct
  source 1..21: mol_type = other DNA; mol_type = other DNA
gctgatggtgggacggtttat

SEQ ID NO: 9882 - DNA, 21 bp, synthetic construct
  source 1..21: mol_type = other DNA; mol_type = other DNA
tattggagtagggtgagtgag

SEQ ID NO: 9883 - DNA, 21 bp, synthetic construct
  source 1..21: mol_type = other DNA; mol_type = other DNA
tggagtgagcggctgcgttct

SEQ ID NO: 9884 - DNA, 21 bp, synthetic construct
  source 1..21: mol_type = other DNA; mol_type = other DNA
tattgggagggggttactagt

SEQ ID NO: 9885 - DNA, 21 bp, synthetic construct
  source 1..21: mol_type = other DNA; mol_type = other DNA
gtgaaggggattgctgtgagt

SEQ ID NO: 9886 - DNA, 21 bp, synthetic construct
  source 1..21: mol_type = other DNA; mol_type = other DNA
tgtgttgcgtcttatacgtgt

SEQ ID NO: 9887 - DNA, 21 bp, synthetic construct
  source 1..21: mol_type = other DNA; mol_type = other DNA
aaggagtttttgtctgatcgg

SEQ ID NO: 9888 - DNA, 21 bp, synthetic construct
  source 1..21: mol_type = other DNA; mol_type = other DNA
tgggagtttaagcatctgggt

SEQ ID NO: 9889 - DNA, 21 bp, synthetic construct
  source 1..21: mol_type = other DNA; mol_type = other DNA
ccgatgcatgctacttcgtgg

SEQ ID NO: 9890 - DNA, 21 bp, synthetic construct
  source 1..21: mol_type = other DNA; mol_type = other DNA
gataagaagagtgatttggtg

SEQ ID NO: 9891 - DNA, 21 bp, synthetic construct
  source 1..21: mol_type = other DNA; mol_type = other DNA
agggtggagctgagtcctctg

SEQ ID NO: 9892 - DNA, 21 bp, synthetic construct
  source 1..21: mol_type = other DNA; mol_type = other DNA
tctgcttgtaagacgactgag

SEQ ID NO: 9893 - DNA, 21 bp, synthetic construct
  source 1..21: mol_type = other DNA; mol_type = other DNA
attcctaatcggtgtgaggcg

SEQ ID NO: 9894 - DNA, 21 bp, synthetic construct
  source 1..21: mol_type = other DNA; mol_type = other DNA
tgtaatccttcgtcggagaag

SEQ ID NO: 9895 - DNA, 21 bp, synthetic construct
  source 1..21: mol_type = other DNA; mol_type = other DNA
ttgtctcattgttgtgattct

SEQ ID NO: 9896 - DNA, 21 bp, synthetic construct
  source 1..21: mol_type = other DNA; mol_type = other DNA
ggtattaatgttccgactggg

SEQ ID NO: 9897 - DNA, 21 bp, synthetic construct
  source 1..21: mol_type = other DNA; mol_type = other DNA
tgtggtgtgaagtgtcagctt

SEQ ID NO: 9898 - DNA, 21 bp, synthetic construct
  source 1..21: mol_type = other DNA; mol_type = other DNA
tctggtacgttttcgggggag

SEQ ID NO: 9899 - DNA, 21 bp, synthetic construct
  source 1..21: mol_type = other DNA; mol_type = other DNA
cttgttatttgtcgtgggcat

SEQ ID NO: 9900 - DNA, 21 bp, synthetic construct
  source 1..21: mol_type = other DNA; mol_type = other DNA
ttgtctgttaattcttctggg

SEQ ID NO: 9901 - DNA, 21 bp, synthetic construct
  source 1..21: mol_type = other DNA; mol_type = other DNA
ttgcataagcttagtgtgact

SEQ ID NO: 9902 - DNA, 21 bp, synthetic construct
  source 1..21: mol_type = other DNA; mol_type = other DNA
tatttttcgggtcaggcggag

SEQ ID NO: 9903 - DNA, 21 bp, synthetic construct
  source 1..21: mol_type = other DNA; mol_type = other DNA
tatgttcttagtgatagtcgt

SEQ ID NO: 9904 - DNA, 21 bp, synthetic construct
  source 1..21: mol_type = other DNA; mol_type = other DNA
gagctgattggtggtgggtct

SEQ ID NO: 9905 - DNA, 21 bp, synthetic construct
  source 1..21: mol_type = other DNA; mol_type = other DNA
atgacggtggattgttctcgg

SEQ ID NO: 9906 - DNA, 21 bp, synthetic construct
  source 1..21: mol_type = other DNA; mol_type = other DNA
ctggagtatcataaggttcct

SEQ ID NO: 9907 - DNA, 21 bp, synthetic construct
  source 1..21: mol_type = other DNA; mol_type = other DNA
gtgggtacttttagggagggt

SEQ ID NO: 9908 - DNA, 21 bp, synthetic construct
  source 1..21: mol_type = other DNA; mol_type = other DNA
gttccggatgctgtgcgttgg

SEQ ID NO: 9909 - DNA, 21 bp, synthetic construct
  source 1..21: mol_type = other DNA; mol_type = other DNA
attggggggtcttctggttgg

SEQ ID NO: 9910 - DNA, 21 bp, synthetic construct
  source 1..21: mol_type = other DNA; mol_type = other DNA
gagatgtttttgaatggtgtg

SEQ ID NO: 9911 - DNA, 21 bp, synthetic construct
  source 1..21: mol_type = other DNA; mol_type = other DNA
tctgggaagggttggtcggct

SEQ ID NO: 9912 - DNA, 21 bp, synthetic construct
  source 1..21: mol_type = other DNA; mol_type = other DNA
ggggcttcggctgggacgttt

SEQ ID NO: 9913 - DNA, 21 bp, synthetic construct
  source 1..21: mol_type = other DNA; mol_type = other DNA
cgtggggtgtattcgaatgtt

SEQ ID NO: 9914 - DNA, 21 bp, synthetic construct
  source 1..21: mol_type = other DNA; mol_type = other DNA
gggggtggggatcagcgttgg

SEQ ID NO: 9915 - DNA, 21 bp, synthetic construct
  source 1..21: mol_type = other DNA; mol_type = other DNA
gatttggatcatgagggtgtt

SEQ ID NO: 9916 - DNA, 21 bp, synthetic construct
  source 1..21: mol_type = other DNA; mol_type = other DNA
cctgggaattcgcatgcgtgg

SEQ ID NO: 9917 - DNA, 21 bp, synthetic construct
  source 1..21: mol_type = other DNA; mol_type = other DNA
tgttctctggggtcggatcgt

SEQ ID NO: 9918 - DNA, 21 bp, synthetic construct
  source 1..21: mol_type = other DNA; mol_type = other DNA
gttactgcgtcggggtgtgct

SEQ ID NO: 9919 - DNA, 21 bp, synthetic construct
  source 1..21: mol_type = other DNA; mol_type = other DNA
cttggtcttaaggggtgggat

SEQ ID NO: 9920 - DNA, 21 bp, synthetic construct
  source 1..21: mol_type = other DNA; mol_type = other DNA
gttgagggtgtgacggggcat

SEQ ID NO: 9921 - DNA, 21 bp, synthetic construct
  source 1..21: mol_type = other DNA; mol_type = other DNA
attggtcatgttagtgattgg

SEQ ID NO: 9922 - DNA, 21 bp, synthetic construct
  source 1..21: mol_type = other DNA; mol_type = other DNA
ggtcggaattttgggactcct

SEQ ID NO: 9923 - DNA, 21 bp, synthetic construct
  source 1..21: mol_type = other DNA; mol_type = other DNA
tattttagtgctgttactgcg

SEQ ID NO: 9924 - DNA, 21 bp, synthetic construct
  source 1..21: mol_type = other DNA; mol_type = other DNA
agtgggggtactagtttgtgg

SEQ ID NO: 9925 - DNA, 21 bp, synthetic construct
  source 1..21: mol_type = other DNA; mol_type = other DNA
gggttgatgcatgagcatttg

SEQ ID NO: 9926 - DNA, 21 bp, synthetic construct
  source 1..21: mol_type = other DNA; mol_type = other DNA
agtcaggattgttgtgggcct

SEQ ID NO: 9927 - DNA, 21 bp, synthetic construct
  source 1..21: mol_type = other DNA; mol_type = other DNA
ttgtggactggtgctggtcct

SEQ ID NO: 9928 - DNA, 21 bp, synthetic construct
  source 1..21: mol_type = other DNA; mol_type = other DNA
gtgactggggatcgtattgtt

SEQ ID NO: 9929 - DNA, 21 bp, synthetic construct
  source 1..21: mol_type = other DNA; mol_type = other DNA
cgtagtatggatatttttcct

SEQ ID NO: 9930 - DNA, 21 bp, synthetic construct
  source 1..21: mol_type = other DNA; mol_type = other DNA
tttttttctgggacgttggag

SEQ ID NO: 9931 - DNA, 21 bp, synthetic construct
  source 1..21: mol_type = other DNA; mol_type = other DNA
tgtgagtttcagaagtgtccg

SEQ ID NO: 9932 - DNA, 21 bp, synthetic construct
  source 1..21: mol_type = other DNA; mol_type = other DNA
gtggagatgggtcggactggt

SEQ ID NO: 9933 - DNA, 21 bp, synthetic construct
  source 1..21: mol_type = other DNA; mol_type = other DNA
acgagtctggtgagggtgagt

SEQ ID NO: 9934 - DNA, 21 bp, synthetic construct
  source 1..21: mol_type = other DNA; mol_type = other DNA
tcgatgcttaagtatccgagt

SEQ ID NO: 9935 - DNA, 21 bp, synthetic construct
  source 1..21: mol_type = other DNA; mol_type = other DNA
tatttttcgcttgagcgtgat

SEQ ID NO: 9936 - DNA, 21 bp, synthetic construct
  source 1..21: mol_type = other DNA; mol_type = other DNA
ggtggggatttgcggcagcag

SEQ ID NO: 9937 - DNA, 21 bp, synthetic construct
  source 1..21: mol_type = other DNA; mol_type = other DNA
attcggggtggtggtgctggt

SEQ ID NO: 9938 - DNA, 21 bp, synthetic construct
  source 1..21: mol_type = other DNA; mol_type = other DNA
gcttggactgaggctaatcgt

SEQ ID NO: 9939 - DNA, 21 bp, synthetic construct
  source 1..21: mol_type = other DNA; mol_type = other DNA
ggggggaatgggtcgtcgtat

SEQ ID NO: 9940 - DNA, 21 bp, synthetic construct
  source 1..21: mol_type = other DNA; mol_type = other DNA
ggggttactgagattaagtgt

SEQ ID NO: 9941 - DNA, 21 bp, synthetic construct
  source 1..21: mol_type = other DNA; mol_type = other DNA
ttggttacgcatggttctctt

SEQ ID NO: 9942 - DNA, 21 bp, synthetic construct
  source 1..21: mol_type = other DNA; mol_type = other DNA
gggatgcgggattctgtgacg

SEQ ID NO: 9943 - DNA, 21 bp, synthetic construct
  source 1..21: mol_type = other DNA; mol_type = other DNA
ggtgatttgtttttggcggtt

SEQ ID NO: 9944 - DNA, 21 bp, synthetic construct
  source 1..21: mol_type = other DNA; mol_type = other DNA
gagttgacgtctgatccgggg

SEQ ID NO: 9945 - DNA, 21 bp, synthetic construct
  source 1..21: mol_type = other DNA; mol_type = other DNA
gctttgggtatgcctttgcag

SEQ ID NO: 9946 - DNA, 21 bp, synthetic construct
  source 1..21: mol_type = other DNA; mol_type = other DNA
tttagtcggcttaatgatgat

SEQ ID NO: 9947 - DNA, 21 bp, synthetic construct
  source 1..21: mol_type = other DNA; mol_type = other DNA
tttagtgttggtatttgtagt

SEQ ID NO: 9948 - DNA, 21 bp, synthetic construct
  source 1..21: mol_type = other DNA; mol_type = other DNA
agtagggttacgtatcgggag

SEQ ID NO: 9949 - DNA, 21 bp, synthetic construct
  source 1..21: mol_type = other DNA; mol_type = other DNA
ctgtgtcttggtgcttgtacg

SEQ ID NO: 9950 - DNA, 21 bp, synthetic construct
  source 1..21: mol_type = other DNA; mol_type = other DNA
ggtggtgcgggttctgcgtgg

SEQ ID NO: 9951 - DNA, 21 bp, synthetic construct
  source 1..21: mol_type = other DNA; mol_type = other DNA
gattctagtccttcgtgtcct

SEQ ID NO: 9952 - DNA, 21 bp, synthetic construct
  source 1..21: mol_type = other DNA; mol_type = other DNA
gggcttagttctcctttgtgg

SEQ ID NO: 9953 - DNA, 21 bp, synthetic construct
  source 1..21: mol_type = other DNA; mol_type = other DNA
tgtattactcgggagcatgtg

SEQ ID NO: 9954 - DNA, 21 bp, synthetic construct
  source 1..21: mol_type = other DNA; mol_type = other DNA
aatgctccggttggggctggg

SEQ ID NO: 9955 - DNA, 21 bp, synthetic construct
  source 1..21: mol_type = other DNA; mol_type = other DNA
gtgccttctagtgttacgtgg

SEQ ID NO: 9956 - DNA, 21 bp, synthetic construct
  source 1..21: mol_type = other DNA; mol_type = other DNA
tatagtagggttcagggtgat

SEQ ID NO: 9957 - DNA, 21 bp, synthetic construct
  source 1..21: mol_type = other DNA; mol_type = other DNA
ttgagtaagattggttataat

SEQ ID NO: 9958 - DNA, 21 bp, synthetic construct
  source 1..21: mol_type = other DNA; mol_type = other DNA
cggggtgaggggcggctttat

SEQ ID NO: 9959 - DNA, 21 bp, synthetic construct
  source 1..21: mol_type = other DNA; mol_type = other DNA
aaggttggtgagcagactcgg

SEQ ID NO: 9960 - DNA, 21 bp, synthetic construct
  source 1..21: mol_type = other DNA; mol_type = other DNA
agtctttctacggagaatctg

SEQ ID NO: 9961 - DNA, 21 bp, synthetic construct
  source 1..21: mol_type = other DNA; mol_type = other DNA
gcgtgttcgactattcatctg

SEQ ID NO: 9962 - DNA, 21 bp, synthetic construct
  source 1..21: mol_type = other DNA; mol_type = other DNA
gatcaggctgtgagggtgtcg

SEQ ID NO: 9963 - DNA, 21 bp, synthetic construct
  source 1..21: mol_type = other DNA; mol_type = other DNA
gattcgacgtcgcagctgtcg

SEQ ID NO: 9964 - DNA, 21 bp, synthetic construct
  source 1..21: mol_type = other DNA; mol_type = other DNA
ggtgcggggacttctgggtgg

SEQ ID NO: 9965 - DNA, 21 bp, synthetic construct
  source 1..21: mol_type = other DNA; mol_type = other DNA
gatccttcgactcagctgtgg

SEQ ID NO: 9966 - DNA, 21 bp, synthetic construct
  source 1..21: mol_type = other DNA; mol_type = other DNA
cagggggcgtcttctagttgg

SEQ ID NO: 9967 - DNA, 21 bp, synthetic construct
  source 1..21: mol_type = other DNA; mol_type = other DNA
cttgtgaagtgtgtggttggg

SEQ ID NO: 9968 - DNA, 21 bp, synthetic construct
  source 1..21: mol_type = other DNA; mol_type = other DNA
tggtcgtctacgaagacgcat

SEQ ID NO: 9969 - DNA, 21 bp, synthetic construct
  source 1..21: mol_type = other DNA; mol_type = other DNA
gtgccgtatgagactcctgtg

SEQ ID NO: 9970 - DNA, 21 bp, synthetic construct
  source 1..21: mol_type = other DNA; mol_type = other DNA
gtgggggcggatcggcagtgg

SEQ ID NO: 9971 - DNA, 21 bp, synthetic construct
  source 1..21: mol_type = other DNA; mol_type = other DNA
tggagggctgaggttagtcgt

SEQ ID NO: 9972 - DNA, 21 bp, synthetic construct
  source 1..21: mol_type = other DNA; mol_type = other DNA
attgttgctggttatagtttt

SEQ ID NO: 9973 - DNA, 21 bp, synthetic construct
  source 1..21: mol_type = other DNA; mol_type = other DNA
actaggacgggtgagaatgct

SEQ ID NO: 9974 - DNA, 21 bp, synthetic construct
  source 1..21: mol_type = other DNA; mol_type = other DNA
gtgtgtagtggtgctgagggt

SEQ ID NO: 9975 - DNA, 21 bp, synthetic construct
  source 1..21: mol_type = other DNA; mol_type = other DNA
gattttaaggctcttggtact

SEQ ID NO: 9976 - DNA, 21 bp, synthetic construct
  source 1..21: mol_type = other DNA; mol_type = other DNA
gatagttttggtaatgctgct

SEQ ID NO: 9977 - DNA, 21 bp, synthetic construct
  source 1..21: mol_type = other DNA; mol_type = other DNA
gatccttttgcgcctagttgg

SEQ ID NO: 9978 - DNA, 21 bp, synthetic construct
  source 1..21: mol_type = other DNA; mol_type = other DNA
ttgtgggatgctcaggggaag

SEQ ID NO: 9979 - DNA, 21 bp, synthetic construct
  source 1..21: mol_type = other DNA; mol_type = other DNA
tttaatagtagtgttggtttt

SEQ ID NO: 9980 - DNA, 21 bp, synthetic construct
  source 1..21: mol_type = other DNA; mol_type = other DNA
attggtaatggtacttggaat

SEQ ID NO: 9981 - DNA, 21 bp, synthetic construct
  source 1..21: mol_type = other DNA; mol_type = other DNA
aagagtgggacggttggtgag

SEQ ID NO: 9982 - DNA, 21 bp, synthetic construct
  source 1..21: mol_type = other DNA; mol_type = other DNA
gttgctatgagttcttgttgt

SEQ ID NO: 9983 - DNA, 21 bp, synthetic construct
  source 1..21: mol_type = other DNA; mol_type = other DNA
gttgatactattgtttgtgag

SEQ ID NO: 9984 - DNA, 21 bp, synthetic construct
  source 1..21: mol_type = other DNA; mol_type = other DNA
tttggggggcattcgagttat

SEQ ID NO: 9985 - DNA, 21 bp, synthetic construct
  source 1..21: mol_type = other DNA; mol_type = other DNA
tttggtcggtgtgatattacg

SEQ ID NO: 9986 - DNA, 21 bp, synthetic construct
  source 1..21: mol_type = other DNA; mol_type = other DNA
tattatactgctgtggtgggt

SEQ ID NO: 9987 - DNA, 21 bp, synthetic construct
  source 1..21: mol_type = other DNA; mol_type = other DNA
tatgttttttcggggcctgtg

SEQ ID NO: 9988 - DNA, 21 bp, synthetic construct
  source 1..21: mol_type = other DNA; mol_type = other DNA
cctggtcagattatgacggct

SEQ ID NO: 9989 - DNA, 21 bp, synthetic construct
  source 1..21: mol_type = other DNA; mol_type = other DNA
attgattatgcgcctggtgag

SEQ ID NO: 9990 - DNA, 21 bp, synthetic construct
  source 1..21: mol_type = other DNA; mol_type = other DNA
gagtctgcgactcttgttctt

SEQ ID NO: 9991 - DNA, 21 bp, synthetic construct
  source 1..21: mol_type = other DNA; mol_type = other DNA
tcggatcctaagattgtggcg

SEQ ID NO: 9992 - DNA, 21 bp, synthetic construct
  source 1..21: mol_type = other DNA; mol_type = other DNA
ctgcagaagtttgatcggtcg

SEQ ID NO: 9993 - DNA, 21 bp, synthetic construct
  source 1..21: mol_type = other DNA; mol_type = other DNA
tgttgtaagagtgttactgcg

SEQ ID NO: 9994 - DNA, 21 bp, synthetic construct
  source 1..21: mol_type = other DNA; mol_type = other DNA
ggtctgagtagtgcggtgtgg

SEQ ID NO: 9995 - DNA, 21 bp, synthetic construct
  source 1..21: mol_type = other DNA; mol_type = other DNA
aatggtgtgtggactaatccg

SEQ ID NO: 9996 - DNA, 21 bp, synthetic construct
  source 1..21: mol_type = other DNA; mol_type = other DNA
gtgactacgcggggtcctaat

SEQ ID NO: 9997 - DNA, 21 bp, synthetic construct
  source 1..21: mol_type = other DNA; mol_type = other DNA
agtacggagtggattccttat

SEQ ID NO: 9998 - DNA, 21 bp, synthetic construct
  source 1..21: mol_type = other DNA; mol_type = other DNA
gatgtgtcttctcgtacttgg

SEQ ID NO: 9999 - DNA, 21 bp, synthetic construct
  source 1..21: mol_type = other DNA; mol_type = other DNA
tctgatggggttagtgttcgt

SEQ ID NO: 10000 - DNA, 21 bp, synthetic construct
  source 1..21: mol_type = other DNA; mol_type = other DNA
tttgagtctaatgagccgtgg

SEQ ID NO: 10001 - DNA, 21 bp, synthetic construct
  source 1..21: mol_type = other DNA; mol_type = other DNA
gggtctgttgggaatgcttgg

SEQ ID NO: 10002 - DNA, 21 bp, synthetic construct
  source 1..21: mol_type = other DNA; mol_type = other DNA
gttcctggtattcctgttaat

SEQ ID NO: 10003 - DNA, 21 bp, synthetic construct
  source 1..21: mol_type = other DNA; mol_type = other DNA
gtttgtaatgggaatatttgt

SEQ ID NO: 10004 - DNA, 21 bp, synthetic construct
  source 1..21: mol_type = other DNA; mol_type = other DNA
gtggcgactgaggggcgggat

SEQ ID NO: 10005 - DNA, 21 bp, synthetic construct
  source 1..21: mol_type = other DNA; mol_type = other DNA
cgggagggtattgagtcttgg

SEQ ID NO: 10006 - DNA, 21 bp, synthetic construct
  source 1..21: mol_type = other DNA; mol_type = other DNA
gctgtggagggttgttgtggg

SEQ ID NO: 10007 - DNA, 21 bp, synthetic construct
  source 1..21: mol_type = other DNA; mol_type = other DNA
atttctggtattagtatgtat

SEQ ID NO: 10008 - DNA, 21 bp, synthetic construct
  source 1..21: mol_type = other DNA; mol_type = other DNA
gattggtcgcggtgttctaag

SEQ ID NO: 10009 - DNA, 21 bp, synthetic construct
  source 1..21: mol_type = other DNA; mol_type = other DNA
tattgggctggtgtggagtcg

SEQ ID NO: 10010 - DNA, 21 bp, synthetic construct
  source 1..21: mol_type = other DNA; mol_type = other DNA
ttttatagtggggtgttgagt

SEQ ID NO: 10011 - DNA, 21 bp, synthetic construct
  source 1..21: mol_type = other DNA; mol_type = other DNA
cgtgtggctgattgtgcgccg

SEQ ID NO: 10012 - DNA, 21 bp, synthetic construct
  source 1..21: mol_type = other DNA; mol_type = other DNA
tatattgctgggtgtggtaat

SEQ ID NO: 10013 - DNA, 21 bp, synthetic construct
  source 1..21: mol_type = other DNA; mol_type = other DNA
gggagtggtcagtcgatttgg

SEQ ID NO: 10014 - DNA, 21 bp, synthetic construct
  source 1..21: mol_type = other DNA; mol_type = other DNA
tctctttcgtctacgacttgg

SEQ ID NO: 10015 - DNA, 21 bp, synthetic construct
  source 1..21: mol_type = other DNA; mol_type = other DNA
agtcttggggggagtacgtgg

SEQ ID NO: 10016 - DNA, 21 bp, synthetic construct
  source 1..21: mol_type = other DNA; mol_type = other DNA
ccgattcgtgtttctgatgtt

SEQ ID NO: 10017 - DNA, 21 bp, synthetic construct
  source 1..21: mol_type = other DNA; mol_type = other DNA
agttgttcgacgggttatcct

SEQ ID NO: 10018 - DNA, 21 bp, synthetic construct
  source 1..21: mol_type = other DNA; mol_type = other DNA
gttggtgttagtagttcgggt

SEQ ID NO: 10019 - DNA, 21 bp, synthetic construct
  source 1..21: mol_type = other DNA; mol_type = other DNA
gggctggtgtcgagtgctatg

SEQ ID NO: 10020 - DNA, 21 bp, synthetic construct
  source 1..21: mol_type = other DNA; mol_type = other DNA
gttggttgtgctcatcttcct

SEQ ID NO: 10021 - DNA, 21 bp, synthetic construct
  source 1..21: mol_type = other DNA; mol_type = other DNA
cttcatgctctgagtacggat

SEQ ID NO: 10022 - DNA, 21 bp, synthetic construct
  source 1..21: mol_type = other DNA; mol_type = other DNA
gagcttgattcgcgggattgg

SEQ ID NO: 10023 - DNA, 21 bp, synthetic construct
  source 1..21: mol_type = other DNA; mol_type = other DNA
gatgtgcgtactgatagtaat

SEQ ID NO: 10024 - DNA, 21 bp, synthetic construct
  source 1..21: mol_type = other DNA; mol_type = other DNA
gttgcggggcagattacgatt

SEQ ID NO: 10025 - DNA, 21 bp, synthetic construct
  source 1..21: mol_type = other DNA; mol_type = other DNA
ggtgttgataggcatatgcct

SEQ ID NO: 10026 - DNA, 21 bp, synthetic construct
  source 1..21: mol_type = other DNA; mol_type = other DNA
gggtgtattattccgggtgtg

SEQ ID NO: 10027 - DNA, 21 bp, synthetic construct
  source 1..21: mol_type = other DNA; mol_type = other DNA
cgtctggatgatgttctttgg

SEQ ID NO: 10028 - DNA, 21 bp, synthetic construct
  source 1..21: mol_type = other DNA; mol_type = other DNA
ggtgggagtacgtctgtgtgg

SEQ ID NO: 10029 - DNA, 21 bp, synthetic construct
  source 1..21: mol_type = other DNA; mol_type = other DNA
tatttttcgggtcgtgagtct

SEQ ID NO: 10030 - DNA, 21 bp, synthetic construct
  source 1..21: mol_type = other DNA; mol_type = other DNA
gggagtagttcgtcggcttgg

SEQ ID NO: 10031 - DNA, 21 bp, synthetic construct
  source 1..21: mol_type = other DNA; mol_type = other DNA
agggataggaattcttatgtt

SEQ ID NO: 10032 - DNA, 21 bp, synthetic construct
  source 1..21: mol_type = other DNA; mol_type = other DNA
ttgggtggggttttgacggtg

SEQ ID NO: 10033 - DNA, 21 bp, synthetic construct
  source 1..21: mol_type = other DNA; mol_type = other DNA
atggttgcttgtggttgtggt

SEQ ID NO: 10034 - DNA, 21 bp, synthetic construct
  source 1..21: mol_type = other DNA; mol_type = other DNA
tgtgatggggtgggggttgcg

SEQ ID NO: 10035 - DNA, 21 bp, synthetic construct
  source 1..21: mol_type = other DNA; mol_type = other DNA
agtgggagtacgagtggttgg

SEQ ID NO: 10036 - DNA, 21 bp, synthetic construct
  source 1..21: mol_type = other DNA; mol_type = other DNA
gagctgagtagtagggagtgg

SEQ ID NO: 10037 - DNA, 21 bp, synthetic construct
  source 1..21: mol_type = other DNA; mol_type = other DNA
ggtgttaagatgaattgttcg

SEQ ID NO: 10038 - DNA, 21 bp, synthetic construct
  source 1..21: mol_type = other DNA; mol_type = other DNA
tggctgaagcagactttgctt

SEQ ID NO: 10039 - DNA, 21 bp, synthetic construct
  source 1..21: mol_type = other DNA; mol_type = other DNA
cgggatattgattgtctgtct

SEQ ID NO: 10040 - DNA, 21 bp, synthetic construct
  source 1..21: mol_type = other DNA; mol_type = other DNA
cgtatttatgatgctgttccg

SEQ ID NO: 10041 - DNA, 21 bp, synthetic construct
  source 1..21: mol_type = other DNA; mol_type = other DNA
gggcgggcgtatgcgcatcct

SEQ ID NO: 10042 - DNA, 21 bp, synthetic construct
  source 1..21: mol_type = other DNA; mol_type = other DNA
gttgctgggcgttgttgtcgg

SEQ ID NO: 10043 - DNA, 21 bp, synthetic construct
  source 1..21: mol_type = other DNA; mol_type = other DNA
ggttctgctggtgttagttgg

SEQ ID NO: 10044 - DNA, 21 bp, synthetic construct
  source 1..21: mol_type = other DNA; mol_type = other DNA
atggaggttagggagtcgggg

SEQ ID NO: 10045 - DNA, 21 bp, synthetic construct
  source 1..21: mol_type = other DNA; mol_type = other DNA
cgggagggggtgtctgcgtgg

SEQ ID NO: 10046 - DNA, 21 bp, synthetic construct
  source 1..21: mol_type = other DNA; mol_type = other DNA
acgtgggaggggagtcctgct

SEQ ID NO: 10047 - DNA, 21 bp, synthetic construct
  source 1..21: mol_type = other DNA; mol_type = other DNA
gggagtcatggggtgtcttgg

SEQ ID NO: 10048 - DNA, 21 bp, synthetic construct
  source 1..21: mol_type = other DNA; mol_type = other DNA
ggggtgcggaatgtgatgcct

SEQ ID NO: 10049 - DNA, 21 bp, synthetic construct
  source 1..21: mol_type = other DNA; mol_type = other DNA
gatgattcgttttatccgagt

SEQ ID NO: 10050 - DNA, 21 bp, synthetic construct
  source 1..21: mol_type = other DNA; mol_type = other DNA
ttggatatttgttgtaaggtt

SEQ ID NO: 10051 - DNA, 21 bp, synthetic construct
  source 1..21: mol_type = other DNA; mol_type = other DNA
gtgggtgtgtcgccgctgtgg

SEQ ID NO: 10052 - DNA, 21 bp, synthetic construct
  source 1..21: mol_type = other DNA; mol_type = other DNA
gcgcttttggctgctcggagt

SEQ ID NO: 10053 - DNA, 21 bp, synthetic construct
  source 1..21: mol_type = other DNA; mol_type = other DNA
gatgcgtattctgggcgggat

SEQ ID NO: 10054 - DNA, 21 bp, synthetic construct
  source 1..21: mol_type = other DNA; mol_type = other DNA
ggtcaggatgggaatgcttgg

SEQ ID NO: 10055 - DNA, 21 bp, synthetic construct
  source 1..21: mol_type = other DNA; mol_type = other DNA
tcgtcgggtacgtctctttgg

SEQ ID NO: 10056 - DNA, 21 bp, synthetic construct
  source 1..21: mol_type = other DNA; mol_type = other DNA
tcgggggcgtcgccgctgtgg

SEQ ID NO: 10057 - DNA, 21 bp, synthetic construct
  source 1..21: mol_type = other DNA; mol_type = other DNA
ttgttgggtgtttgtgatgcg

SEQ ID NO: 10058 - DNA, 21 bp, synthetic construct
  source 1..21: mol_type = other DNA; mol_type = other DNA
tttgtggatccgcgttgtacg

SEQ ID NO: 10059 - DNA, 21 bp, synthetic construct
  source 1..21: mol_type = other DNA; mol_type = other DNA
ttggcgtcgcgtgatgcggcg

SEQ ID NO: 10060 - DNA, 21 bp, synthetic construct
  source 1..21: mol_type = other DNA; mol_type = other DNA
acggttcattcgttgtctgat

SEQ ID NO: 10061 - DNA, 21 bp, synthetic construct
  source 1..21: mol_type = other DNA; mol_type = other DNA
gggttgaaggtgggtgctatt

SEQ ID NO: 10062 - DNA, 21 bp, synthetic construct
  source 1..21: mol_type = other DNA; mol_type = other DNA
cagagtagtccgcttgtgagg

SEQ ID NO: 10063 - DNA, 21 bp, synthetic construct
  source 1..21: mol_type = other DNA; mol_type = other DNA
gtggatgattggagtatgtat

SEQ ID NO: 10064 - DNA, 21 bp, synthetic construct
  source 1..21: mol_type = other DNA; mol_type = other DNA
gatgctctggagtggcgggat

SEQ ID NO: 10065 - DNA, 21 bp, synthetic construct
  source 1..21: mol_type = other DNA; mol_type = other DNA
ttgagtagggcggggtttgat

SEQ ID NO: 10066 - DNA, 21 bp, synthetic construct
  source 1..21: mol_type = other DNA; mol_type = other DNA
ttgtcggcgctttctgttaat

SEQ ID NO: 10067 - DNA, 21 bp, synthetic construct
  source 1..21: mol_type = other DNA; mol_type = other DNA
atttttgctggtcctggtcct

SEQ ID NO: 10068 - DNA, 21 bp, synthetic construct
  source 1..21: mol_type = other DNA; mol_type = other DNA
gcgatggagtcgacgcagtgg

SEQ ID NO: 10069 - DNA, 21 bp, synthetic construct
  source 1..21: mol_type = other DNA; mol_type = other DNA
cataatattggtcgtgatgtt

SEQ ID NO: 10070 - DNA, 21 bp, synthetic construct
  source 1..21: mol_type = other DNA; mol_type = other DNA
cgttctgagacggtgtatgtg

SEQ ID NO: 10071 - DNA, 21 bp, synthetic construct
  source 1..21: mol_type = other DNA; mol_type = other DNA
gatgaggggaattttcgtagt

SEQ ID NO: 10072 - DNA, 21 bp, synthetic construct
  source 1..21: mol_type = other DNA; mol_type = other DNA
agtcggtgtgagaaggttgtg

SEQ ID NO: 10073 - DNA, 21 bp, synthetic construct
  source 1..21: mol_type = other DNA; mol_type = other DNA
cgtactggttctttttgtatt

SEQ ID NO: 10074 - DNA, 21 bp, synthetic construct
  source 1..21: mol_type = other DNA; mol_type = other DNA
tgtggtcggagtgggactcat

SEQ ID NO: 10075 - DNA, 21 bp, synthetic construct
  source 1..21: mol_type = other DNA; mol_type = other DNA
ggtgagcttacggttaagtgg

SEQ ID NO: 10076 - DNA, 21 bp, synthetic construct
  source 1..21: mol_type = other DNA; mol_type = other DNA
tatgcgcgtaatgctccgagt

SEQ ID NO: 10077 - DNA, 21 bp, synthetic construct
  source 1..21: mol_type = other DNA; mol_type = other DNA
gtggatgattggtctctttat

SEQ ID NO: 10078 - DNA, 21 bp, synthetic construct
  source 1..21: mol_type = other DNA; mol_type = other DNA
gttactgattatgttacttat

SEQ ID NO: 10079 - DNA, 21 bp, synthetic construct
  source 1..21: mol_type = other DNA; mol_type = other DNA
tgtacttctggtaatgaggct

SEQ ID NO: 10080 - DNA, 21 bp, synthetic construct
  source 1..21: mol_type = other DNA; mol_type = other DNA
aatgagagtacgagttcgtgg

SEQ ID NO: 10081 - DNA, 21 bp, synthetic construct
  source 1..21: mol_type = other DNA; mol_type = other DNA
tgtgatagtccttgtacggct

SEQ ID NO: 10082 - DNA, 21 bp, synthetic construct
  source 1..21: mol_type = other DNA; mol_type = other DNA
cggatgatgtctggggattgg

SEQ ID NO: 10083 - DNA, 21 bp, synthetic construct
  source 1..21: mol_type = other DNA; mol_type = other DNA
ctgcatggtggttgttgtgct

SEQ ID NO: 10084 - DNA, 21 bp, synthetic construct
  source 1..21: mol_type = other DNA; mol_type = other DNA
gtggtgaatcctggtcatgat

SEQ ID NO: 10085 - DNA, 21 bp, synthetic construct
  source 1..21: mol_type = other DNA; mol_type = other DNA
agtcatgattcttgtcagaat

SEQ ID NO: 10086 - DNA, 21 bp, synthetic construct
  source 1..21: mol_type = other DNA; mol_type = other DNA
gttcctccggagctgcatgcg

SEQ ID NO: 10087 - DNA, 21 bp, synthetic construct
  source 1..21: mol_type = other DNA; mol_type = other DNA
ttgttgcatactgggaattgg

SEQ ID NO: 10088 - DNA, 21 bp, synthetic construct
  source 1..21: mol_type = other DNA; mol_type = other DNA
tataatgcgagtgggggtaat

SEQ ID NO: 10089 - DNA, 21 bp, synthetic construct
  source 1..21: mol_type = other DNA; mol_type = other DNA
gatatgacgtcgagtgtttgg

SEQ ID NO: 10090 - DNA, 21 bp, synthetic construct
  source 1..21: mol_type = other DNA; mol_type = other DNA
attagtggtcagtctgggtgg

SEQ ID NO: 10091 - DNA, 21 bp, synthetic construct
  source 1..21: mol_type = other DNA; mol_type = other DNA
gtgtgttgtggtcctcgtggg

SEQ ID NO: 10092 - DNA, 21 bp, synthetic construct
  source 1..21: mol_type = other DNA; mol_type = other DNA
ctgtatgagtttgatcatacg

SEQ ID NO: 10093 - DNA, 21 bp, synthetic construct
  source 1..21: mol_type = other DNA; mol_type = other DNA
ctggtgaattcggttgctagg

SEQ ID NO: 10094 - DNA, 21 bp, synthetic construct
  source 1..21: mol_type = other DNA; mol_type = other DNA
ttggcggctagttgttgtgtt

SEQ ID NO: 10095 - DNA, 21 bp, synthetic construct
  source 1..21: mol_type = other DNA; mol_type = other DNA
cagctgcctggtaattgtggt

SEQ ID NO: 10096 - DNA, 21 bp, synthetic construct
  source 1..21: mol_type = other DNA; mol_type = other DNA
tggcatcatggtacgaatgtg

SEQ ID NO: 10097 - DNA, 21 bp, synthetic construct
  source 1..21: mol_type = other DNA; mol_type = other DNA
ttgagtaagttgtcgtatgat

SEQ ID NO: 10098 - DNA, 21 bp, synthetic construct
  source 1..21: mol_type = other DNA; mol_type = other DNA
gtgcatagggaggatggtgtt

SEQ ID NO: 10099 - DNA, 21 bp, synthetic construct
  source 1..21: mol_type = other DNA; mol_type = other DNA
ggtatggattctaattctgtg

SEQ ID NO: 10100 - DNA, 21 bp, synthetic construct
  source 1..21: mol_type = other DNA; mol_type = other DNA
gagttgggttcgcatacgtgg

SEQ ID NO: 10101 - DNA, 21 bp, synthetic construct
  source 1..21: mol_type = other DNA; mol_type = other DNA
agtcatgcgttggctccgggt

SEQ ID NO: 10102 - DNA, 21 bp, synthetic construct
  source 1..21: mol_type = other DNA; mol_type = other DNA
aggggtgagagtgttagttgg

SEQ ID NO: 10103 - DNA, 21 bp, synthetic construct
  source 1..21: mol_type = other DNA; mol_type = other DNA
cgggctattgattcgccgatg

SEQ ID NO: 10104 - DNA, 21 bp, synthetic construct
  source 1..21: mol_type = other DNA; mol_type = other DNA
ggggggagtgcgtctacttgg

SEQ ID NO: 10105 - DNA, 21 bp, synthetic construct
  source 1..21: mol_type = other DNA; mol_type = other DNA
aggatggatgatagttatgcg

SEQ ID NO: 10106 - DNA, 21 bp, synthetic construct
  source 1..21: mol_type = other DNA; mol_type = other DNA
tctttttggggtgatcttccg

SEQ ID NO: 10107 - DNA, 21 bp, synthetic construct
  source 1..21: mol_type = other DNA; mol_type = other DNA
gatgagtggacgctgtcgcct

SEQ ID NO: 10108 - DNA, 21 bp, synthetic construct
  source 1..21: mol_type = other DNA; mol_type = other DNA
tcttggacggggcaggcggct

SEQ ID NO: 10109 - DNA, 21 bp, synthetic construct
  source 1..21: mol_type = other DNA; mol_type = other DNA
gttgcgaatgcggggtgggat

SEQ ID NO: 10110 - DNA, 21 bp, synthetic construct
  source 1..21: mol_type = other DNA; mol_type = other DNA
gatctgtcgagtaattcgtgg

SEQ ID NO: 10111 - DNA, 21 bp, synthetic construct
  source 1..21: mol_type = other DNA; mol_type = other DNA
gtgggttatgttgggattggg

SEQ ID NO: 10112 - DNA, 21 bp, synthetic construct
  source 1..21: mol_type = other DNA; mol_type = other DNA
gtgcctcagagtgtgcattgg

SEQ ID NO: 10113 - DNA, 21 bp, synthetic construct
  source 1..21: mol_type = other DNA; mol_type = other DNA
atggagtctcaggtgaggtgg

SEQ ID NO: 10114 - DNA, 21 bp, synthetic construct
  source 1..21: mol_type = other DNA; mol_type = other DNA
gatggttcggcgcgtttgtgg

SEQ ID NO: 10115 - DNA, 21 bp, synthetic construct
  source 1..21: mol_type = other DNA; mol_type = other DNA
cgggcgctgtctggtgcgggg

SEQ ID NO: 10116 - DNA, 21 bp, synthetic construct
  source 1..21: mol_type = other DNA; mol_type = other DNA
aagtttgattttaatgcggtg

SEQ ID NO: 10117 - DNA, 21 bp, synthetic construct
  source 1..21: mol_type = other DNA; mol_type = other DNA
gctaatgattatatgtcgtat

SEQ ID NO: 10118 - DNA, 21 bp, synthetic construct
  source 1..21: mol_type = other DNA; mol_type = other DNA
cctgctcgtggggagacgtgg

SEQ ID NO: 10119 - DNA, 21 bp, synthetic construct
  source 1..21: mol_type = other DNA; mol_type = other DNA
tggttggctgctagtgataag

SEQ ID NO: 10120 - DNA, 21 bp, synthetic construct
  source 1..21: mol_type = other DNA; mol_type = other DNA
gggtcgcgtgaggttgcttgg

SEQ ID NO: 10121 - DNA, 21 bp, synthetic construct
  source 1..21: mol_type = other DNA; mol_type = other DNA
atgttgcttgagagttgtggg

SEQ ID NO: 10122 - DNA, 21 bp, synthetic construct
  source 1..21: mol_type = other DNA; mol_type = other DNA
gtggctcatgaggggattggt

SEQ ID NO: 10123 - DNA, 21 bp, synthetic construct
  source 1..21: mol_type = other DNA; mol_type = other DNA
atggagaggggtgggtcgacg

SEQ ID NO: 10124 - DNA, 21 bp, synthetic construct
  source 1..21: mol_type = other DNA; mol_type = other DNA
tatccgaatgggaatgcgggg

SEQ ID NO: 10125 - DNA, 21 bp, synthetic construct
  source 1..21: mol_type = other DNA; mol_type = other DNA
tatctgaagaatgatccgttg

SEQ ID NO: 10126 - DNA, 21 bp, synthetic construct
  source 1..21: mol_type = other DNA; mol_type = other DNA
gatcagtctgcgcatagttgg

SEQ ID NO: 10127 - DNA, 21 bp, synthetic construct
  source 1..21: mol_type = other DNA; mol_type = other DNA
gtgtctactcgtccttatagt

SEQ ID NO: 10128 - DNA, 21 bp, synthetic construct
  source 1..21: mol_type = other DNA; mol_type = other DNA
cgggagcatacttctaattgg

SEQ ID NO: 10129 - DNA, 21 bp, synthetic construct
  source 1..21: mol_type = other DNA; mol_type = other DNA
gggcgtggtcagacgggtgag

SEQ ID NO: 10130 - DNA, 21 bp, synthetic construct
  source 1..21: mol_type = other DNA; mol_type = other DNA
tcggtgcgtccttctcatgag

SEQ ID NO: 10131 - DNA, 21 bp, synthetic construct
  source 1..21: mol_type = other DNA; mol_type = other DNA
tttgcttcgtcgatgtgttgt

SEQ ID NO: 10132 - DNA, 21 bp, synthetic construct
  source 1..21: mol_type = other DNA; mol_type = other DNA
ccgtattctagtattatggag

SEQ ID NO: 10133 - DNA, 21 bp, synthetic construct
  source 1..21: mol_type = other DNA; mol_type = other DNA
gggagtgaggttagtagttgg

SEQ ID NO: 10134 - DNA, 21 bp, synthetic construct
  source 1..21: mol_type = other DNA; mol_type = other DNA
tcggaggctgggaatactttt

SEQ ID NO: 10135 - DNA, 21 bp, synthetic construct
  source 1..21: mol_type = other DNA; mol_type = other DNA
gggcagtcgactagtagttgg

SEQ ID NO: 10136 - DNA, 21 bp, synthetic construct
  source 1..21: mol_type = other DNA; mol_type = other DNA
tgtgtggttgatgtgcgttgt

SEQ ID NO: 10137 - DNA, 21 bp, synthetic construct
  source 1..21: mol_type = other DNA; mol_type = other DNA
gagccgaatggtcggggtgtg

SEQ ID NO: 10138 - DNA, 21 bp, synthetic construct
  source 1..21: mol_type = other DNA; mol_type = other DNA
tattttatgggggttagggag

SEQ ID NO: 10139 - DNA, 21 bp, synthetic construct
  source 1..21: mol_type = other DNA; mol_type = other DNA
gagggggcggagacgactccg

SEQ ID NO: 10140 - DNA, 21 bp, synthetic construct
  source 1..21: mol_type = other DNA; mol_type = other DNA
tgtggttgtgtgatgtcgccg

SEQ ID NO: 10141 - DNA, 21 bp, synthetic construct
  source 1..21: mol_type = other DNA; mol_type = other DNA
attacgggtttttcgacggat

SEQ ID NO: 10142 - DNA, 21 bp, synthetic construct
  source 1..21: mol_type = other DNA; mol_type = other DNA
gcggatggtagtcagggtgct

SEQ ID NO: 10143 - DNA, 21 bp, synthetic construct
  source 1..21: mol_type = other DNA; mol_type = other DNA
tatagtgcgaatggtcctaat

SEQ ID NO: 10144 - DNA, 21 bp, synthetic construct
  source 1..21: mol_type = other DNA; mol_type = other DNA
gtggatcaggcgtctcgtgct

SEQ ID NO: 10145 - DNA, 21 bp, synthetic construct
  source 1..21: mol_type = other DNA; mol_type = other DNA
tcgaagtttcagcgtatggat

SEQ ID NO: 10146 - DNA, 21 bp, synthetic construct
  source 1..21: mol_type = other DNA; mol_type = other DNA
atttcgtgtgggacttgtgat

SEQ ID NO: 10147 - DNA, 21 bp, synthetic construct
  source 1..21: mol_type = other DNA; mol_type = other DNA
attacttcgactaatggtgcg

SEQ ID NO: 10148 - DNA, 21 bp, synthetic construct
  source 1..21: mol_type = other DNA; mol_type = other DNA
acgttgggggggaatgggtgt

SEQ ID NO: 10149 - DNA, 21 bp, synthetic construct
  source 1..21: mol_type = other DNA; mol_type = other DNA
gatggtagtagtagtaagtgg

SEQ ID NO: 10150 - DNA, 21 bp, synthetic construct
  source 1..21: mol_type = other DNA; mol_type = other DNA
cgggaggggtattcgcattgg

SEQ ID NO: 10151 - DNA, 21 bp, synthetic construct
  source 1..21: mol_type = other DNA; mol_type = other DNA
gataggctgccggcgtcgcat

SEQ ID NO: 10152 - DNA, 21 bp, synthetic construct
  source 1..21: mol_type = other DNA; mol_type = other DNA
gggttgccggatcgtacgtgg

SEQ ID NO: 10153 - DNA, 21 bp, synthetic construct
  source 1..21: mol_type = other DNA; mol_type = other DNA
agtggtttttcggagtctaat

SEQ ID NO: 10154 - DNA, 21 bp, synthetic construct
  source 1..21: mol_type = other DNA; mol_type = other DNA
actgtgggggtggagtggact

SEQ ID NO: 10155 - DNA, 21 bp, synthetic construct
  source 1..21: mol_type = other DNA; mol_type = other DNA
gggggttctacttctgggtgg

SEQ ID NO: 10156 - DNA, 21 bp, synthetic construct
  source 1..21: mol_type = other DNA; mol_type = other DNA
ggggagctttgttgtgttggg

SEQ ID NO: 10157 - DNA, 21 bp, synthetic construct
  source 1..21: mol_type = other DNA; mol_type = other DNA
cctttggcttctgggtcttgg

SEQ ID NO: 10158 - DNA, 21 bp, synthetic construct
  source 1..21: mol_type = other DNA; mol_type = other DNA
tgtaagccttctggggttatg

SEQ ID NO: 10159 - DNA, 21 bp, synthetic construct
  source 1..21: mol_type = other DNA; mol_type = other DNA
tatgcgcgggcgggtgttaat

SEQ ID NO: 10160 - DNA, 21 bp, synthetic construct
  source 1..21: mol_type = other DNA; mol_type = other DNA
tatgttaggtctagtgatcag

SEQ ID NO: 10161 - DNA, 21 bp, synthetic construct
  source 1..21: mol_type = other DNA; mol_type = other DNA
gtgatgtctgtttcttcgtgg

SEQ ID NO: 10162 - DNA, 21 bp, synthetic construct
  source 1..21: mol_type = other DNA; mol_type = other DNA
tcgagtgatctggcttcgggg

SEQ ID NO: 10163 - DNA, 21 bp, synthetic construct
  source 1..21: mol_type = other DNA; mol_type = other DNA
gggtgttgtgataagcctatg

SEQ ID NO: 10164 - DNA, 21 bp, synthetic construct
  source 1..21: mol_type = other DNA; mol_type = other DNA
gagttggaggggtttcagtat

SEQ ID NO: 10165 - DNA, 21 bp, synthetic construct
  source 1..21: mol_type = other DNA; mol_type = other DNA
ttggattatcttccgccggag

SEQ ID NO: 10166 - DNA, 21 bp, synthetic construct
  source 1..21: mol_type = other DNA; mol_type = other DNA
tgtcagggtcttcggttgtgt

SEQ ID NO: 10167 - DNA, 21 bp, synthetic construct
  source 1..21: mol_type = other DNA; mol_type = other DNA
cgttttgatggtactcctccg

SEQ ID NO: 10168 - DNA, 21 bp, synthetic construct
  source 1..21: mol_type = other DNA; mol_type = other DNA
ggtgagagttctcataatctg

SEQ ID NO: 10169 - DNA, 21 bp, synthetic construct
  source 1..21: mol_type = other DNA; mol_type = other DNA
cgttctgagtttacggagtat

SEQ ID NO: 10170 - DNA, 21 bp, synthetic construct
  source 1..21: mol_type = other DNA; mol_type = other DNA
gcgccggtgagtagggagtgg

SEQ ID NO: 10171 - DNA, 21 bp, synthetic construct
  source 1..21: mol_type = other DNA; mol_type = other DNA
gggctgccttgttgttcggcg

SEQ ID NO: 10172 - DNA, 21 bp, synthetic construct
  source 1..21: mol_type = other DNA; mol_type = other DNA
tatgggccttcgacttgtaat

SEQ ID NO: 10173 - DNA, 21 bp, synthetic construct
  source 1..21: mol_type = other DNA; mol_type = other DNA
attgagtcgcgggagggtatt

SEQ ID NO: 10174 - DNA, 21 bp, synthetic construct
  source 1..21: mol_type = other DNA; mol_type = other DNA
gggcattgtggtagggattgt

SEQ ID NO: 10175 - DNA, 21 bp, synthetic construct
  source 1..21: mol_type = other DNA; mol_type = other DNA
attgggtcgccgactggtgtt

SEQ ID NO: 10176 - DNA, 21 bp, synthetic construct
  source 1..21: mol_type = other DNA; mol_type = other DNA
tggtggagtgctatgcctaat

SEQ ID NO: 10177 - DNA, 21 bp, synthetic construct
  source 1..21: mol_type = other DNA; mol_type = other DNA
catggggatcctatgcggtgg

SEQ ID NO: 10178 - DNA, 21 bp, synthetic construct
  source 1..21: mol_type = other DNA; mol_type = other DNA
tgtgagcgtaggtgtgtggat

SEQ ID NO: 10179 - DNA, 21 bp, synthetic construct
  source 1..21: mol_type = other DNA; mol_type = other DNA
tttgtgcttctgggtgatggg

SEQ ID NO: 10180 - DNA, 21 bp, synthetic construct
  source 1..21: mol_type = other DNA; mol_type = other DNA
aagtgtcagggtggttgtgct

SEQ ID NO: 10181 - DNA, 21 bp, synthetic construct
  source 1..21: mol_type = other DNA; mol_type = other DNA
attacgagttttaatggggtt

SEQ ID NO: 10182 - DNA, 21 bp, synthetic construct
  source 1..21: mol_type = other DNA; mol_type = other DNA
atttcgggtggtggtgctggg

SEQ ID NO: 10183 - DNA, 21 bp, synthetic construct
  source 1..21: mol_type = other DNA; mol_type = other DNA
gttaataatagttgtctgacg

SEQ ID NO: 10184 - DNA, 21 bp, synthetic construct
  source 1..21: mol_type = other DNA; mol_type = other DNA
ttggatgattattcgatgtat

SEQ ID NO: 10185 - DNA, 21 bp, synthetic construct
  source 1..21: mol_type = other DNA; mol_type = other DNA
gctggtggtacttctctttgg

SEQ ID NO: 10186 - DNA, 21 bp, synthetic construct
  source 1..21: mol_type = other DNA; mol_type = other DNA
ctggagacttgttgtacggcg

SEQ ID NO: 10187 - DNA, 21 bp, synthetic construct
  source 1..21: mol_type = other DNA; mol_type = other DNA
tggtatagtaatattaaggat

SEQ ID NO: 10188 - DNA, 21 bp, synthetic construct
  source 1..21: mol_type = other DNA; mol_type = other DNA
agtccttcgaggacgaggcct

SEQ ID NO: 10189 - DNA, 21 bp, synthetic construct
  source 1..21: mol_type = other DNA; mol_type = other DNA
tggtttagtaatattcaggcg

SEQ ID NO: 10190 - DNA, 21 bp, synthetic construct
  source 1..21: mol_type = other DNA; mol_type = other DNA
tcgggtgcgtatatgagggcg

SEQ ID NO: 10191 - DNA, 21 bp, synthetic construct
  source 1..21: mol_type = other DNA; mol_type = other DNA
agggttacttgggttgttggg

SEQ ID NO: 10192 - DNA, 21 bp, synthetic construct
  source 1..21: mol_type = other DNA; mol_type = other DNA
tctgcggatgcggttcgttgg

SEQ ID NO: 10193 - DNA, 21 bp, synthetic construct
  source 1..21: mol_type = other DNA; mol_type = other DNA
agttgggcgcggagtgtggag

SEQ ID NO: 10194 - DNA, 21 bp, synthetic construct
  source 1..21: mol_type = other DNA; mol_type = other DNA
ggttatgctgtttctgagtgt

SEQ ID NO: 10195 - DNA, 21 bp, synthetic construct
  source 1..21: mol_type = other DNA; mol_type = other DNA
caagatgtgaagggtaagtgg

SEQ ID NO: 10196 - DNA, 21 bp, synthetic construct
  source 1..21: mol_type = other DNA; mol_type = other DNA
tgtaatcagggtggtactgtg

SEQ ID NO: 10197 - DNA, 21 bp, synthetic construct
  source 1..21: mol_type = other DNA; mol_type = other DNA
gcttgtaggcatgggggtccg

SEQ ID NO: 10198 - DNA, 21 bp, synthetic construct
  source 1..21: mol_type = other DNA; mol_type = other DNA
aatgggcgggggggtgagtgg

SEQ ID NO: 10199 - DNA, 21 bp, synthetic construct
  source 1..21: mol_type = other DNA; mol_type = other DNA
aggggtgatgatcgtggttgg

SEQ ID NO: 10200 - DNA, 21 bp, synthetic construct
  source 1..21: mol_type = other DNA; mol_type = other DNA
cgggagggtggtcatttgaat

SEQ ID NO: 10201 - DNA, 21 bp, synthetic construct
  source 1..21: mol_type = other DNA; mol_type = other DNA
cagtctagtttgacgcaggat

SEQ ID NO: 10202 - DNA, 21 bp, synthetic construct
  source 1..21: mol_type = other DNA; mol_type = other DNA
attcagtcgtctagtggtatt

SEQ ID NO: 10203 - DNA, 21 bp, synthetic construct
  source 1..21: mol_type = other DNA; mol_type = other DNA
ccgtatgcggtttctcctttg

SEQ ID NO: 10204 - DNA, 21 bp, synthetic construct
  source 1..21: mol_type = other DNA; mol_type = other DNA
tctaaggattgttgtattggt

SEQ ID NO: 10205 - DNA, 21 bp, synthetic construct
  source 1..21: mol_type = other DNA; mol_type = other DNA
gatcatagtgctggtagtggt

SEQ ID NO: 10206 - DNA, 21 bp, synthetic construct
  source 1..21: mol_type = other DNA; mol_type = other DNA
tgtattaatttgtgggtgcag

SEQ ID NO: 10207 - DNA, 21 bp, synthetic construct
  source 1..21: mol_type = other DNA; mol_type = other DNA
gggactgttcctccgggttct

SEQ ID NO: 10208 - DNA, 21 bp, synthetic construct
  source 1..21: mol_type = other DNA; mol_type = other DNA
aaggttcaggatgcgtatccg

SEQ ID NO: 10209 - DNA, 21 bp, synthetic construct
  source 1..21: mol_type = other DNA; mol_type = other DNA
cagtttgcgtattctcgggag

SEQ ID NO: 10210 - DNA, 21 bp, synthetic construct
  source 1..21: mol_type = other DNA; mol_type = other DNA
agtgatgggtttcgtattagt

SEQ ID NO: 10211 - DNA, 21 bp, synthetic construct
  source 1..21: mol_type = other DNA; mol_type = other DNA
gggagtagggcgatgtatccg

SEQ ID NO: 10212 - DNA, 21 bp, synthetic construct
  source 1..21: mol_type = other DNA; mol_type = other DNA
tattcgttggttagtacgaag

SEQ ID NO: 10213 - DNA, 21 bp, synthetic construct
  source 1..21: mol_type = other DNA; mol_type = other DNA
tgtgcgccttctatggagaag

SEQ ID NO: 10214 - DNA, 21 bp, synthetic construct
  source 1..21: mol_type = other DNA; mol_type = other DNA
ggttctggtccgtgttgtgct

SEQ ID NO: 10215 - DNA, 21 bp, synthetic construct
  source 1..21: mol_type = other DNA; mol_type = other DNA
tgtcttgagcgttcgacgctg

SEQ ID NO: 10216 - DNA, 21 bp, synthetic construct
  source 1..21: mol_type = other DNA; mol_type = other DNA
aatggttttgatggtagttgg

SEQ ID NO: 10217 - DNA, 21 bp, synthetic construct
  source 1..21: mol_type = other DNA; mol_type = other DNA
ccgattgatgagacgtgttcg

SEQ ID NO: 10218 - DNA, 21 bp, synthetic construct
  source 1..21: mol_type = other DNA; mol_type = other DNA
tgggatgtggggacttggaat

SEQ ID NO: 10219 - DNA, 21 bp, synthetic construct
  source 1..21: mol_type = other DNA; mol_type = other DNA
attatggagtcggcgacgtgg

SEQ ID NO: 10220 - DNA, 21 bp, synthetic construct
  source 1..21: mol_type = other DNA; mol_type = other DNA
cgtgatgttgttaatggtact

SEQ ID NO: 10221 - DNA, 21 bp, synthetic construct
  source 1..21: mol_type = other DNA; mol_type = other DNA
tttggtggtaatgggctgcag

SEQ ID NO: 10222 - DNA, 21 bp, synthetic construct
  source 1..21: mol_type = other DNA; mol_type = other DNA
gggggggatggttcggcttat

SEQ ID NO: 10223 - DNA, 21 bp, synthetic construct
  source 1..21: mol_type = other DNA; mol_type = other DNA
ggtggtgggtttgttgcgtat

SEQ ID NO: 10224 - DNA, 21 bp, synthetic construct
  source 1..21: mol_type = other DNA; mol_type = other DNA
tttgcgaagtgtagtgtggtg

SEQ ID NO: 10225 - DNA, 21 bp, synthetic construct
  source 1..21: mol_type = other DNA; mol_type = other DNA
tctacggattatgtgtcttgg

SEQ ID NO: 10226 - DNA, 21 bp, synthetic construct
  source 1..21: mol_type = other DNA; mol_type = other DNA
tgtggtggtgcttgtgcgtct

SEQ ID NO: 10227 - DNA, 21 bp, synthetic construct
  source 1..21: mol_type = other DNA; mol_type = other DNA
tgtcagacgagtgataggccg

SEQ ID NO: 10228 - DNA, 21 bp, synthetic construct
  source 1..21: mol_type = other DNA; mol_type = other DNA
ctgtgtgctccggctaagtgt

SEQ ID NO: 10229 - DNA, 21 bp, synthetic construct
  source 1..21: mol_type = other DNA; mol_type = other DNA
gcgtataggcctctttcgggg

SEQ ID NO: 10230 - DNA, 21 bp, synthetic construct
  source 1..21: mol_type = other DNA; mol_type = other DNA
tggttgaaggggcttactgat

SEQ ID NO: 10231 - DNA, 21 bp, synthetic construct
  source 1..21: mol_type = other DNA; mol_type = other DNA
gagttgctttcgagtcattgg

SEQ ID NO: 10232 - DNA, 21 bp, synthetic construct
  source 1..21: mol_type = other DNA; mol_type = other DNA
acgatgggtcagggggttccg

SEQ ID NO: 10233 - DNA, 21 bp, synthetic construct
  source 1..21: mol_type = other DNA; mol_type = other DNA
tgtgcgcctgcgtttagggag

SEQ ID NO: 10234 - DNA, 21 bp, synthetic construct
  source 1..21: mol_type = other DNA; mol_type = other DNA
gattggcatgggctgattgct

SEQ ID NO: 10235 - DNA, 21 bp, synthetic construct
  source 1..21: mol_type = other DNA; mol_type = other DNA
ttgatgggtagttgttgtccg

SEQ ID NO: 10236 - DNA, 21 bp, synthetic construct
  source 1..21: mol_type = other DNA; mol_type = other DNA
aatgggatgacggagcggtgg

SEQ ID NO: 10237 - DNA, 21 bp, synthetic construct
  source 1..21: mol_type = other DNA; mol_type = other DNA
tcgatgtgttggcttttggtt

SEQ ID NO: 10238 - DNA, 21 bp, synthetic construct
  source 1..21: mol_type = other DNA; mol_type = other DNA
tcgattggggttcatcgtgcg

SEQ ID NO: 10239 - DNA, 21 bp, synthetic construct
  source 1..21: mol_type = other DNA; mol_type = other DNA
gattcttctcgtgcgtatccg

SEQ ID NO: 10240 - DNA, 21 bp, synthetic construct
  source 1..21: mol_type = other DNA; mol_type = other DNA
ttgtcgcgtgctgcgcatgat

SEQ ID NO: 10241 - DNA, 21 bp, synthetic construct
  source 1..21: mol_type = other DNA; mol_type = other DNA
actggtcttgctacgtcgtgt

SEQ ID NO: 10242 - DNA, 21 bp, synthetic construct
  source 1..21: mol_type = other DNA; mol_type = other DNA
aattcggattttaaggtgttt

SEQ ID NO: 10243 - DNA, 21 bp, synthetic construct
  source 1..21: mol_type = other DNA; mol_type = other DNA
gggtggttgaaggagctgcat

SEQ ID NO: 10244 - DNA, 21 bp, synthetic construct
  source 1..21: mol_type = other DNA; mol_type = other DNA
actagtgattataagacgtat

SEQ ID NO: 10245 - DNA, 21 bp, synthetic construct
  source 1..21: mol_type = other DNA; mol_type = other DNA
acgtatgataatgtgtttagg

SEQ ID NO: 10246 - DNA, 21 bp, synthetic construct
  source 1..21: mol_type = other DNA; mol_type = other DNA
tgtattccttgtgtgccgagg

SEQ ID NO: 10247 - DNA, 21 bp, synthetic construct
  source 1..21: mol_type = other DNA; mol_type = other DNA
cattgggatggttcggctgct

SEQ ID NO: 10248 - DNA, 21 bp, synthetic construct
  source 1..21: mol_type = other DNA; mol_type = other DNA
acggatgggaagtgttgtatg

SEQ ID NO: 10249 - DNA, 21 bp, synthetic construct
  source 1..21: mol_type = other DNA; mol_type = other DNA
tgtattgattcgtgtgttcgt

SEQ ID NO: 10250 - DNA, 21 bp, synthetic construct
  source 1..21: mol_type = other DNA; mol_type = other DNA
gtgccgggttatggtgctggt

SEQ ID NO: 10251 - DNA, 21 bp, synthetic construct
  source 1..21: mol_type = other DNA; mol_type = other DNA
ccgaatacgactcatggtggt

SEQ ID NO: 10252 - DNA, 21 bp, synthetic construct
  source 1..21: mol_type = other DNA; mol_type = other DNA
gcgtcggggcagtcggcgtgg

SEQ ID NO: 10253 - DNA, 21 bp, synthetic construct
  source 1..21: mol_type = other DNA; mol_type = other DNA
ggtaggattgctcctcatagt

SEQ ID NO: 10254 - DNA, 21 bp, synthetic construct
  source 1..21: mol_type = other DNA; mol_type = other DNA
tgtttgcctgggaatgcgtgt

SEQ ID NO: 10255 - DNA, 21 bp, synthetic construct
  source 1..21: mol_type = other DNA; mol_type = other DNA
gattcgttgtcgggtcgtaat

SEQ ID NO: 10256 - DNA, 21 bp, synthetic construct
  source 1..21: mol_type = other DNA; mol_type = other DNA
tgtgctggtgagtgtcgggct

SEQ ID NO: 10257 - DNA, 21 bp, synthetic construct
  source 1..21: mol_type = other DNA; mol_type = other DNA
agggatggggctgtgtcttgg

SEQ ID NO: 10258 - DNA, 21 bp, synthetic construct
  source 1..21: mol_type = other DNA; mol_type = other DNA
tattttgctgggcaggctgag

SEQ ID NO: 10259 - DNA, 21 bp, synthetic construct
  source 1..21: mol_type = other DNA; mol_type = other DNA
tgggagggtggtctttctggt

SEQ ID NO: 10260 - DNA, 21 bp, synthetic construct
  source 1..21: mol_type = other DNA; mol_type = other DNA
gtggatgctagttgttctgct

SEQ ID NO: 10261 - DNA, 21 bp, synthetic construct
  source 1..21: mol_type = other DNA; mol_type = other DNA
catgagactaaggttcctgcg

SEQ ID NO: 10262 - DNA, 21 bp, synthetic construct
  source 1..21: mol_type = other DNA; mol_type = other DNA
aagagggatcgtctgtatggg

SEQ ID NO: 10263 - DNA, 21 bp, synthetic construct
  source 1..21: mol_type = other DNA; mol_type = other DNA
cgggagacgggtgtggagtgg

SEQ ID NO: 10264 - DNA, 21 bp, synthetic construct
  source 1..21: mol_type = other DNA; mol_type = other DNA
gtgccgatgaggggggctgat

SEQ ID NO: 10265 - DNA, 21 bp, synthetic construct
  source 1..21: mol_type = other DNA; mol_type = other DNA
ttggttagtaaggttagttgt

SEQ ID NO: 10266 - DNA, 21 bp, synthetic construct
  source 1..21: mol_type = other DNA; mol_type = other DNA
cgtgagcctgatgtgcggtat

SEQ ID NO: 10267 - DNA, 21 bp, synthetic construct
  source 1..21: mol_type = other DNA; mol_type = other DNA
cttcatcggacttcggttgat

SEQ ID NO: 10268 - DNA, 21 bp, synthetic construct
  source 1..21: mol_type = other DNA; mol_type = other DNA
tattggagtgataagatggcg

SEQ ID NO: 10269 - DNA, 21 bp, synthetic construct
  source 1..21: mol_type = other DNA; mol_type = other DNA
atgtcgcgtgtgagtaataat

SEQ ID NO: 10270 - DNA, 21 bp, synthetic construct
  source 1..21: mol_type = other DNA; mol_type = other DNA
aaggagaatcatgttacttgg

SEQ ID NO: 10271 - DNA, 21 bp, synthetic construct
  source 1..21: mol_type = other DNA; mol_type = other DNA
aatttggggtctgctcattgg

SEQ ID NO: 10272 - DNA, 21 bp, synthetic construct
  source 1..21: mol_type = other DNA; mol_type = other DNA
ggtctgactgggtgttgtggg

SEQ ID NO: 10273 - DNA, 21 bp, synthetic construct
  source 1..21: mol_type = other DNA; mol_type = other DNA
gttccttgtgggcttgttcgt

SEQ ID NO: 10274 - DNA, 21 bp, synthetic construct
  source 1..21: mol_type = other DNA; mol_type = other DNA
tattttcagggtgtggctctg

SEQ ID NO: 10275 - DNA, 21 bp, synthetic construct
  source 1..21: mol_type = other DNA; mol_type = other DNA
tcttcttcttcttcgacgtgg

SEQ ID NO: 10276 - DNA, 21 bp, synthetic construct
  source 1..21: mol_type = other DNA; mol_type = other DNA
tctgtggcgaagatgacgggt

SEQ ID NO: 10277 - DNA, 21 bp, synthetic construct
  source 1..21: mol_type = other DNA; mol_type = other DNA
tatgtgaggtctgctttgaat

SEQ ID NO: 10278 - DNA, 21 bp, synthetic construct
  source 1..21: mol_type = other DNA; mol_type = other DNA
cataagtggttggatactgat

SEQ ID NO: 10279 - DNA, 21 bp, synthetic construct
  source 1..21: mol_type = other DNA; mol_type = other DNA
acggcgggtatgcctggggct

SEQ ID NO: 10280 - DNA, 21 bp, synthetic construct
  source 1..21: mol_type = other DNA; mol_type = other DNA
gcgtattatctgaaggattct

SEQ ID NO: 10281 - DNA, 21 bp, synthetic construct
  source 1..21: mol_type = other DNA; mol_type = other DNA
gggggggagctgaggacgtgg

SEQ ID NO: 10282 - DNA, 21 bp, synthetic construct
  source 1..21: mol_type = other DNA; mol_type = other DNA
ttgggtcatggtacgtgggat

SEQ ID NO: 10283 - DNA, 21 bp, synthetic construct
  source 1..21: mol_type = other DNA; mol_type = other DNA
tttccgattagtggttgtggt

SEQ ID NO: 10284 - DNA, 21 bp, synthetic construct
  source 1..21: mol_type = other DNA; mol_type = other DNA
tttagtcatgttgataatggt

SEQ ID NO: 10285 - DNA, 21 bp, synthetic construct
  source 1..21: mol_type = other DNA; mol_type = other DNA
gagtctagtactcatggggtt

SEQ ID NO: 10286 - DNA, 21 bp, synthetic construct
  source 1..21: mol_type = other DNA; mol_type = other DNA
tttgtgtgtgtgatgcttgtt

SEQ ID NO: 10287 - DNA, 21 bp, synthetic construct
  source 1..21: mol_type = other DNA; mol_type = other DNA
tattttgagggtaagcagtcg

SEQ ID NO: 10288 - DNA, 21 bp, synthetic construct
  source 1..21: mol_type = other DNA; mol_type = other DNA
gagtgggcgcggtctcttatg

SEQ ID NO: 10289 - DNA, 21 bp, synthetic construct
  source 1..21: mol_type = other DNA; mol_type = other DNA
aatgatagtacgagtaagtgg

SEQ ID NO: 10290 - DNA, 21 bp, synthetic construct
  source 1..21: mol_type = other DNA; mol_type = other DNA
gctgcggattttgtgaggtat

SEQ ID NO: 10291 - DNA, 21 bp, synthetic construct
  source 1..21: mol_type = other DNA; mol_type = other DNA
ctttctggtagttgttgtgct

SEQ ID NO: 10292 - DNA, 21 bp, synthetic construct
  source 1..21: mol_type = other DNA; mol_type = other DNA
cttttttctggggaggctccg

SEQ ID NO: 10293 - DNA, 21 bp, synthetic construct
  source 1..21: mol_type = other DNA; mol_type = other DNA
cggacggctgatagttttgct

SEQ ID NO: 10294 - DNA, 21 bp, synthetic construct
  source 1..21: mol_type = other DNA; mol_type = other DNA
tatacgaagcttaatgataat

SEQ ID NO: 10295 - DNA, 21 bp, synthetic construct
  source 1..21: mol_type = other DNA; mol_type = other DNA
tgtgagcttccgtgttgtgag

SEQ ID NO: 10296 - DNA, 21 bp, synthetic construct
  source 1..21: mol_type = other DNA; mol_type = other DNA
tatattaagtctgatgtgggt

SEQ ID NO: 10297 - DNA, 21 bp, synthetic construct
  source 1..21: mol_type = other DNA; mol_type = other DNA
aatttgttgtctttggctcat

SEQ ID NO: 10298 - DNA, 21 bp, synthetic construct
  source 1..21: mol_type = other DNA; mol_type = other DNA
ggtagtcatgattcgcattgg

SEQ ID NO: 10299 - DNA, 21 bp, synthetic construct
  source 1..21: mol_type = other DNA; mol_type = other DNA
gggagtgcggagagttgtgct

SEQ ID NO: 10300 - DNA, 21 bp, synthetic construct
  source 1..21: mol_type = other DNA; mol_type = other DNA
acgattaatgtggctatggcg

SEQ ID NO: 10301 - DNA, 21 bp, synthetic construct
  source 1..21: mol_type = other DNA; mol_type = other DNA
attgggtctacgaatggtgtt

SEQ ID NO: 10302 - DNA, 21 bp, synthetic construct
  source 1..21: mol_type = other DNA; mol_type = other DNA
ttttggaatggtaattctccg

SEQ ID NO: 10303 - DNA, 21 bp, synthetic construct
  source 1..21: mol_type = other DNA; mol_type = other DNA
gctgagatttcgaggagttgg

SEQ ID NO: 10304 - DNA, 21 bp, synthetic construct
  source 1..21: mol_type = other DNA; mol_type = other DNA
gttactgatggggttcgttgg

SEQ ID NO: 10305 - DNA, 21 bp, synthetic construct
  source 1..21: mol_type = other DNA; mol_type = other DNA
tattttagtgcggtggcggct

SEQ ID NO: 10306 - DNA, 21 bp, synthetic construct
  source 1..21: mol_type = other DNA; mol_type = other DNA
ggtgagggtacgagtcattgg

SEQ ID NO: 10307 - DNA, 21 bp, synthetic construct
  source 1..21: mol_type = other DNA; mol_type = other DNA
gtgattgatcgttcgctgagt

SEQ ID NO: 10308 - DNA, 21 bp, synthetic construct
  source 1..21: mol_type = other DNA; mol_type = other DNA
attaatgagagttctaaggat

SEQ ID NO: 10309 - DNA, 21 bp, synthetic construct
  source 1..21: mol_type = other DNA; mol_type = other DNA
gagatgaaggctgtgcatgcg

SEQ ID NO: 10310 - DNA, 21 bp, synthetic construct
  source 1..21: mol_type = other DNA; mol_type = other DNA
tctggggggggttctagttgg

SEQ ID NO: 10311 - DNA, 21 bp, synthetic construct
  source 1..21: mol_type = other DNA; mol_type = other DNA
agggatgagattaatcattgg

SEQ ID NO: 10312 - DNA, 21 bp, synthetic construct
  source 1..21: mol_type = other DNA; mol_type = other DNA
tatgtgcggacggatatgtat

SEQ ID NO: 10313 - DNA, 21 bp, synthetic construct
  source 1..21: mol_type = other DNA; mol_type = other DNA
tgtatgagttcgccgtgttct

SEQ ID NO: 10314 - DNA, 21 bp, synthetic construct
  source 1..21: mol_type = other DNA; mol_type = other DNA
tgggggagtgtgtgttgtgct

SEQ ID NO: 10315 - DNA, 21 bp, synthetic construct
  source 1..21: mol_type = other DNA; mol_type = other DNA
cgtgatgtggaggtttttcct

SEQ ID NO: 10316 - DNA, 21 bp, synthetic construct
  source 1..21: mol_type = other DNA; mol_type = other DNA
gttacgtttgggaatccgctt

SEQ ID NO: 10317 - DNA, 21 bp, synthetic construct
  source 1..21: mol_type = other DNA; mol_type = other DNA
ttgtgtcggaattatctgact

SEQ ID NO: 10318 - DNA, 21 bp, synthetic construct
  source 1..21: mol_type = other DNA; mol_type = other DNA
cctatgggtacggctctgtgg

SEQ ID NO: 10319 - DNA, 21 bp, synthetic construct
  source 1..21: mol_type = other DNA; mol_type = other DNA
ttttttacgcataagatggat

SEQ ID NO: 10320 - DNA, 21 bp, synthetic construct
  source 1..21: mol_type = other DNA
gtgcgtgtgatgagttcggag

SEQ ID NO: 10321 - DNA, 21 bp, synthetic construct
  source 1..21: mol_type = other DNA
ggttctcatgttagttcgtgg

SEQ ID NO: 10322 - DNA, 21 bp, synthetic construct
  source 1..21: mol_type = other DNA; mol_type = other DNA
ggggcttcggatagtaggtgg

SEQ ID NO: 10323 - DNA, 21 bp, synthetic construct
  source 1..21: mol_type = other DNA; mol_type = other DNA
ggggatgggtctagtctgtgg

SEQ ID NO: 10324 - DNA, 21 bp, synthetic construct
  source 1..21: mol_type = other DNA; mol_type = other DNA
tttactcgtctgcatgcggat

SEQ ID NO: 10325 - DNA, 21 bp, synthetic construct
  source 1..21: mol_type = other DNA; mol_type = other DNA
agggatgggaattcggcttat

SEQ ID NO: 10326 - DNA, 21 bp, synthetic construct
  source 1..21: mol_type = other DNA; mol_type = other DNA
aggcttagtacgaatggtatt

SEQ ID NO: 10327 - DNA, 21 bp, synthetic construct
  source 1..21: mol_type = other DNA; mol_type = other DNA
agtcgtagtggttcggttgtt

SEQ ID NO: 10328 - DNA, 21 bp, synthetic construct
  source 1..21: mol_type = other DNA; mol_type = other DNA
ttgcatcggttgtcggagggt

SEQ ID NO: 10329 - DNA, 21 bp, synthetic construct
  source 1..21: mol_type = other DNA; mol_type = other DNA
actttggctgatcgtggttgg

SEQ ID NO: 10330 - DNA, 21 bp, synthetic construct
  source 1..21: mol_type = other DNA; mol_type = other DNA
gttgggattgcttcggaggcg

SEQ ID NO: 10331 - DNA, 21 bp, synthetic construct
  source 1..21: mol_type = other DNA; mol_type = other DNA
acggcgggtatgattttgggt

SEQ ID NO: 10332 - DNA, 21 bp, synthetic construct
  source 1..21: mol_type = other DNA; mol_type = other DNA
ccgttgtatgatgggcctcgg

SEQ ID NO: 10333 - DNA, 21 bp, synthetic construct
  source 1..21: mol_type = other DNA; mol_type = other DNA
aatgatggttcgagttcttat

SEQ ID NO: 10334 - DNA, 21 bp, synthetic construct
  source 1..21: mol_type = other DNA; mol_type = other DNA
tttactggtacgtctgggacg

SEQ ID NO: 10335 - DNA, 21 bp, synthetic construct
  source 1..21: mol_type = other DNA; mol_type = other DNA
gatttgtcgaaggcgatgtgg

SEQ ID NO: 10336 - DNA, 21 bp, synthetic construct
  source 1..21: mol_type = other DNA; mol_type = other DNA
ctgtctgttgtttgttgtgcg

SEQ ID NO: 10337 - DNA, 21 bp, synthetic construct
  source 1..21: mol_type = other DNA; mol_type = other DNA
tttgatgggaattctgcttat

SEQ ID NO: 10338 - DNA, 21 bp, synthetic construct
  source 1..21: mol_type = other DNA; mol_type = other DNA
actatgagttcgtcggcttgg

SEQ ID NO: 10339 - DNA, 21 bp, synthetic construct
  source 1..21: mol_type = other DNA; mol_type = other DNA
tggccgtcgggggggcagggg

SEQ ID NO: 10340 - DNA, 21 bp, synthetic construct
  source 1..21: mol_type = other DNA; mol_type = other DNA
tatagtcgtggtggtcctgat

SEQ ID NO: 10341 - DNA, 21 bp, synthetic construct
  source 1..21: mol_type = other DNA; mol_type = other DNA
cctagtcgtgcggaggcggat

SEQ ID NO: 10342 - DNA, 21 bp, synthetic construct
  source 1..21: mol_type = other DNA; mol_type = other DNA
tttgagggtcagtataaggtg

SEQ ID NO: 10343 - DNA, 21 bp, synthetic construct
  source 1..21: mol_type = other DNA; mol_type = other DNA
tgtcttgaggttaagattgct

SEQ ID NO: 10344 - DNA, 21 bp, synthetic construct
  source 1..21: mol_type = other DNA; mol_type = other DNA
gcttcttcgctgattattttg

SEQ ID NO: 10345 - DNA, 21 bp, synthetic construct
  source 1..21: mol_type = other DNA; mol_type = other DNA
tgtggtggtagttgtgcggcg

SEQ ID NO: 10346 - DNA, 21 bp, synthetic construct
  source 1..21: mol_type = other DNA; mol_type = other DNA
tggacgaaggatgctgcttgg

SEQ ID NO: 10347 - DNA, 21 bp, synthetic construct
  source 1..21: mol_type = other DNA; mol_type = other DNA
gatcggggttttttgcagagt

SEQ ID NO: 10348 - DNA, 21 bp, synthetic construct
  source 1..21: mol_type = other DNA; mol_type = other DNA
gcgcttacttctcagtcttgg

SEQ ID NO: 10349 - DNA, 21 bp, synthetic construct
  source 1..21: mol_type = other DNA; mol_type = other DNA
catggtagtggtatgatgatt

SEQ ID NO: 10350 - DNA, 21 bp, synthetic construct
  source 1..21: mol_type = other DNA; mol_type = other DNA
tgggctaggagtagtagtggt

SEQ ID NO: 10351 - DNA, 21 bp, synthetic construct
  source 1..21: mol_type = other DNA; mol_type = other DNA
gtgcctacgaagggtattggg

SEQ ID NO: 10352 - DNA, 21 bp, synthetic construct
  source 1..21: mol_type = other DNA; mol_type = other DNA
acgctgttgaattcgcctaat

SEQ ID NO: 10353 - DNA, 21 bp, synthetic construct
  source 1..21: mol_type = other DNA; mol_type = other DNA
ttggcttcgcgggttactgct

SEQ ID NO: 10354 - DNA, 21 bp, synthetic construct
  source 1..21: mol_type = other DNA; mol_type = other DNA
tatgcgcggctgggttatgat

SEQ ID NO: 10355 - DNA, 21 bp, synthetic construct
  source 1..21: mol_type = other DNA; mol_type = other DNA
tgtggtcatagttgtgtgtcg

SEQ ID NO: 10356 - DNA, 21 bp, synthetic construct
  source 1..21: mol_type = other DNA; mol_type = other DNA
gttaataaggtgtgtgctgat

SEQ ID NO: 10357 - DNA, 21 bp, synthetic construct
  source 1..21: mol_type = other DNA; mol_type = other DNA
gatggtcttagtgggtctgat

SEQ ID NO: 10358 - DNA, 21 bp, synthetic construct
  source 1..21: mol_type = other DNA; mol_type = other DNA
tattttagtggtagtgtgttt

SEQ ID NO: 10359 - DNA, 21 bp, synthetic construct
  source 1..21: mol_type = other DNA; mol_type = other DNA
atgtggagtgagaatcatggg

SEQ ID NO: 10360 - DNA, 21 bp, synthetic construct
  source 1..21: mol_type = other DNA; mol_type = other DNA
gtgaatgtggttccgacgctg

SEQ ID NO: 10361 - DNA, 21 bp, synthetic construct
  source 1..21: mol_type = other DNA; mol_type = other DNA
cggactcttacgcaggggact

SEQ ID NO: 10362 - DNA, 21 bp, synthetic construct
  source 1..21: mol_type = other DNA; mol_type = other DNA
gtgttggggagtagtaattgg

SEQ ID NO: 10363 - DNA, 21 bp, synthetic construct
  source 1..21: mol_type = other DNA; mol_type = other DNA
tcggtggtgggttatgggagt

SEQ ID NO: 10364 - DNA, 21 bp, synthetic construct
  source 1..21: mol_type = other DNA; mol_type = other DNA
gatctgcggggtcaggctgcg

SEQ ID NO: 10365 - DNA, 21 bp, synthetic construct
  source 1..21: mol_type = other DNA; mol_type = other DNA
ggtgatggtagtgtgaggtat

SEQ ID NO: 10366 - DNA, 21 bp, synthetic construct
  source 1..21: mol_type = other DNA; mol_type = other DNA
gcttttcagactagtatgatg

SEQ ID NO: 10367 - DNA, 21 bp, synthetic construct
  source 1..21: mol_type = other DNA; mol_type = other DNA
gattatggggggcgtcttttg

SEQ ID NO: 10368 - DNA, 21 bp, synthetic construct
  source 1..21: mol_type = other DNA; mol_type = other DNA
catcctccgttgcttgttgtg

SEQ ID NO: 10369 - DNA, 21 bp, synthetic construct
  source 1..21: mol_type = other DNA; mol_type = other DNA
tatttttctaatattccgacg

SEQ ID NO: 10370 - DNA, 21 bp, synthetic construct
  source 1..21: mol_type = other DNA; mol_type = other DNA
agggatcctatgacgtcgtat

SEQ ID NO: 10371 - DNA, 21 bp, synthetic construct
  source 1..21: mol_type = other DNA; mol_type = other DNA
gtgtctgagtttactacgtat

SEQ ID NO: 10372 - DNA, 21 bp, synthetic construct
  source 1..21: mol_type = other DNA; mol_type = other DNA
tggcgtaatccggatattgtg

SEQ ID NO: 10373 - DNA, 21 bp, synthetic construct
  source 1..21: mol_type = other DNA; mol_type = other DNA
atggttatgcttcagagtgcg

SEQ ID NO: 10374 - DNA, 21 bp, synthetic construct
  source 1..21: mol_type = other DNA; mol_type = other DNA
tttggggagcttagggagggg

SEQ ID NO: 10375 - DNA, 21 bp, synthetic construct
  source 1..21: mol_type = other DNA; mol_type = other DNA
gattatgagtctagggtgtgg

SEQ ID NO: 10376 - DNA, 21 bp, synthetic construct
  source 1..21: mol_type = other DNA; mol_type = other DNA
gcgccgaatacggtgagttgg

SEQ ID NO: 10377 - DNA, 21 bp, synthetic construct
  source 1..21: mol_type = other DNA; mol_type = other DNA
cgtgaggtggctgtgtcgtgg

SEQ ID NO: 10378 - DNA, 21 bp, synthetic construct
  source 1..21: mol_type = other DNA; mol_type = other DNA
actgtgaataatgtttatcat

SEQ ID NO: 10379 - DNA, 21 bp, synthetic construct
  source 1..21: mol_type = other DNA; mol_type = other DNA
gtggagagtgtgaatgggatt

SEQ ID NO: 10380 - DNA, 21 bp, synthetic construct
  source 1..21: mol_type = other DNA; mol_type = other DNA
attgctactttgggtattggt

SEQ ID NO: 10381 - DNA, 21 bp, synthetic construct
  source 1..21: mol_type = other DNA; mol_type = other DNA
ggggatgtggctgggttttcg

SEQ ID NO: 10382 - DNA, 21 bp, synthetic construct
  source 1..21: mol_type = other DNA; mol_type = other DNA
tatagtaagctggatcctctt

SEQ ID NO: 10383 - DNA, 21 bp, synthetic construct
  source 1..21: mol_type = other DNA; mol_type = other DNA
tcgacgccttcgtctcctacg

SEQ ID NO: 10384 - DNA, 21 bp, synthetic construct
  source 1..21: mol_type = other DNA; mol_type = other DNA
ggttgttgtcctatggaggct

SEQ ID NO: 10385 - DNA, 21 bp, synthetic construct
  source 1..21: mol_type = other DNA; mol_type = other DNA
ggtagtaatctgttgcctgtg

SEQ ID NO: 10386 - DNA, 21 bp, synthetic construct
  source 1..21: mol_type = other DNA; mol_type = other DNA
cctggggaggtgcgggagtgg

SEQ ID NO: 10387 - DNA, 21 bp, synthetic construct
  source 1..21: mol_type = other DNA; mol_type = other DNA
ttttatacgggtgtgtcggct

SEQ ID NO: 10388 - DNA, 21 bp, synthetic construct
  source 1..21: mol_type = other DNA; mol_type = other DNA
tctgatcctctgagtcggccg

SEQ ID NO: 10389 - DNA, 21 bp, synthetic construct
  source 1..21: mol_type = other DNA; mol_type = other DNA
cttcatcggctgcaggatgat

SEQ ID NO: 10390 - DNA, 21 bp, synthetic construct
  source 1..21: mol_type = other DNA; mol_type = other DNA
ggtgtggattctgtgaagtgg

SEQ ID NO: 10391 - DNA, 21 bp, synthetic construct
  source 1..21: mol_type = other DNA; mol_type = other DNA
agtgggtcgacttctacgtgg

SEQ ID NO: 10392 - DNA, 21 bp, synthetic construct
  source 1..21: mol_type = other DNA; mol_type = other DNA
aagtttgataatagtggtagt

SEQ ID NO: 10393 - DNA, 21 bp, synthetic construct
  source 1..21: mol_type = other DNA; mol_type = other DNA
tatccgagtggtggggcgggg

SEQ ID NO: 10394 - DNA, 21 bp, synthetic construct
  source 1..21: mol_type = other DNA; mol_type = other DNA
tgtcgttgttttaggggtatt

SEQ ID NO: 10395 - DNA, 21 bp, synthetic construct
  source 1..21: mol_type = other DNA; mol_type = other DNA
gatgctgggttggctgaggtg

SEQ ID NO: 10396 - DNA, 21 bp, synthetic construct
  source 1..21: mol_type = other DNA; mol_type = other DNA
aagtttgataatactgggagt

SEQ ID NO: 10397 - DNA, 21 bp, synthetic construct
  source 1..21: mol_type = other DNA; mol_type = other DNA
tgtgcgccgtatcttcatgag

SEQ ID NO: 10398 - DNA, 21 bp, synthetic construct
  source 1..21: mol_type = other DNA; mol_type = other DNA
tttgctgcgtatgtgtctact

SEQ ID NO: 10399 - DNA, 21 bp, synthetic construct
  source 1..21: mol_type = other DNA; mol_type = other DNA
gatgttggtttgcggccttgg

SEQ ID NO: 10400 - DNA, 21 bp, synthetic construct
  source 1..21: mol_type = other DNA; mol_type = other DNA
tattatcaggggactgttgat

SEQ ID NO: 10401 - DNA, 21 bp, synthetic construct
  source 1..21: mol_type = other DNA; mol_type = other DNA
ggtaatagggatgctgtggag

SEQ ID NO: 10402 - DNA, 21 bp, synthetic construct
  source 1..21: mol_type = other DNA; mol_type = other DNA
tgtggtggtccgtgtcagtct

SEQ ID NO: 10403 - DNA, 21 bp, synthetic construct
  source 1..21: mol_type = other DNA; mol_type = other DNA
gcttcggtggcgggggttcgt

SEQ ID NO: 10404 - DNA, 21 bp, synthetic construct
  source 1..21: mol_type = other DNA; mol_type = other DNA
aatgttagtcatgagcgtggt

SEQ ID NO: 10405 - DNA, 21 bp, synthetic construct
  source 1..21: mol_type = other DNA; mol_type = other DNA
attaagatgacgggtagggat

SEQ ID NO: 10406 - DNA, 21 bp, synthetic construct
  source 1..21: mol_type = other DNA; mol_type = other DNA
ggtgggactgatcgtacttgg

SEQ ID NO: 10407 - DNA, 21 bp, synthetic construct
  source 1..21: mol_type = other DNA
tgttcgccgatgagggattgt

SEQ ID NO: 10408 - DNA, 21 bp, synthetic construct
  source 1..21: mol_type = other DNA
gatgtgtatggtgggtttgcg

SEQ ID NO: 10409 - DNA, 21 bp, synthetic construct
  source 1..21: mol_type = other DNA
aatatgggtgatcgggtgtgg

SEQ ID NO: 10410 - DNA, 21 bp, synthetic construct
  source 1..21: mol_type = other DNA
gaggggccgtcgcgtgggtgg

SEQ ID NO: 10411 - DNA, 21 bp, synthetic construct
  source 1..21: mol_type = other DNA; mol_type = other DNA
ggttatggttctcctcattct

SEQ ID NO: 10412 - DNA, 21 bp, synthetic construct
  source 1..21: mol_type = other DNA; mol_type = other DNA
gattgtcgtgctgcttgtaag

SEQ ID NO: 10413 - DNA, 21 bp, synthetic construct
  source 1..21: mol_type = other DNA; mol_type = other DNA
ttgcctcctctgtatcaggtt

SEQ ID NO: 10414 - DNA, 21 bp, synthetic construct
  source 1..21: mol_type = other DNA; mol_type = other DNA
gcgacggctgtgccgaagact

SEQ ID NO: 10415 - DNA, 21 bp, synthetic construct
  source 1..21: mol_type = other DNA; mol_type = other DNA
acgcctgttaagggtgcgatg

SEQ ID NO: 10416 - DNA, 21 bp, synthetic construct
  source 1..21: mol_type = other DNA; mol_type = other DNA
agtgatggtagttctaattgg

SEQ ID NO: 10417 - DNA, 21 bp, synthetic construct
  source 1..21: mol_type = other DNA; mol_type = other DNA
ggtcaggtggcggatggttgg

SEQ ID NO: 10418 - DNA, 21 bp, synthetic construct
  source 1..21: mol_type = other DNA; mol_type = other DNA
gggagtggtagtagtccttgg

SEQ ID NO: 10419 - DNA, 21 bp, synthetic construct
  source 1..21: mol_type = other DNA; mol_type = other DNA
cttgggcatgattattttccg

SEQ ID NO: 10420 - DNA, 21 bp, synthetic construct
  source 1..21: mol_type = other DNA; mol_type = other DNA
cttgtgggtcttaagcagttg

SEQ ID NO: 10421 - DNA, 21 bp, synthetic construct
  source 1..21: mol_type = other DNA; mol_type = other DNA
agtaaggattggtcgggtagt

SEQ ID NO: 10422 - DNA, 21 bp, synthetic construct
  source 1..21: mol_type = other DNA; mol_type = other DNA
tatgttcggtatgatactggg

SEQ ID NO: 10423 - DNA, 21 bp, synthetic construct
  source 1..21: mol_type = other DNA; mol_type = other DNA
gaggcgcataatcctgtgtat

SEQ ID NO: 10424 - DNA, 21 bp, synthetic construct
  source 1..21: mol_type = other DNA; mol_type = other DNA
attagtgatgagcggtgttgt

SEQ ID NO: 10425 - DNA, 21 bp, synthetic construct
  source 1..21: mol_type = other DNA; mol_type = other DNA
ggggttgattataatactggg

SEQ ID NO: 10426 - DNA, 21 bp, synthetic construct
  source 1..21: mol_type = other DNA; mol_type = other DNA
cgtgatgatagttcttcgtgg

SEQ ID NO: 10427 - DNA, 21 bp, synthetic construct
  source 1..21: mol_type = other DNA; mol_type = other DNA
gttcatgagtcggtgcattgg

SEQ ID NO: 10428 - DNA, 21 bp, synthetic construct
  source 1..21: mol_type = other DNA; mol_type = other DNA
gtgtgggctgatcattcttgg

SEQ ID NO: 10429 - DNA, 21 bp, synthetic construct
  source 1..21: mol_type = other DNA; mol_type = other DNA
tggaagatgggttgtgctgat

SEQ ID NO: 10430 - DNA, 21 bp, synthetic construct
  source 1..21: mol_type = other DNA; mol_type = other DNA
actcctcagtcgccgatgttt

SEQ ID NO: 10431 - DNA, 21 bp, synthetic construct
  source 1..21: mol_type = other DNA; mol_type = other DNA
cctttgtcttcgaatttgtgg

SEQ ID NO: 10432 - DNA, 21 bp, synthetic construct
  source 1..21: mol_type = other DNA; mol_type = other DNA
aatggtgatgatcagtctatg

SEQ ID NO: 10433 - DNA, 21 bp, synthetic construct
  source 1..21: mol_type = other DNA; mol_type = other DNA
gggcctccggagagtatgatt

SEQ ID NO: 10434 - DNA, 21 bp, synthetic construct
  source 1..21: mol_type = other DNA; mol_type = other DNA
gtggatcgtgaggcgactgct

SEQ ID NO: 10435 - DNA, 21 bp, synthetic construct
  source 1..21: mol_type = other DNA; mol_type = other DNA
tgttgtagtccgcagaaggtt

SEQ ID NO: 10436 - DNA, 21 bp, synthetic construct
  source 1..21: mol_type = other DNA; mol_type = other DNA
acgagtagtgcttgttgttcg

SEQ ID NO: 10437 - DNA, 21 bp, synthetic construct
  source 1..21: mol_type = other DNA; mol_type = other DNA
ggttggaattcgacgcttggg

SEQ ID NO: 10438 - DNA, 21 bp, synthetic construct
  source 1..21: mol_type = other DNA; mol_type = other DNA
acgaattatggtgttggtgcg

SEQ ID NO: 10439 - DNA, 21 bp, synthetic construct
  source 1..21: mol_type = other DNA; mol_type = other DNA
tgtgggaagcagacttgtatt

SEQ ID NO: 10440 - DNA, 21 bp, synthetic construct
  source 1..21: mol_type = other DNA; mol_type = other DNA
gggaatgaggggagtagtctt

SEQ ID NO: 10441 - DNA, 21 bp, synthetic construct
  source 1..21: mol_type = other DNA; mol_type = other DNA
tttgatggtactgttccgttt

SEQ ID NO: 10442 - DNA, 21 bp, synthetic construct
  source 1..21: mol_type = other DNA; mol_type = other DNA
tgtgggagttctagtaattgt

SEQ ID NO: 10443 - DNA, 21 bp, synthetic construct
  source 1..21: mol_type = other DNA; mol_type = other DNA
tggttgaaggattctacgatt

SEQ ID NO: 10444 - DNA, 21 bp, synthetic construct
  source 1..21: mol_type = other DNA; mol_type = other DNA
ggggggggttcgtcggggtgg

SEQ ID NO: 10445 - DNA, 21 bp, synthetic construct
  source 1..21: mol_type = other DNA; mol_type = other DNA
cgtttggaggttggtagttgg

SEQ ID NO: 10446 - DNA, 21 bp, synthetic construct
  source 1..21: mol_type = other DNA; mol_type = other DNA
gctcctggtcatgttgggtgg

SEQ ID NO: 10447 - DNA, 21 bp, synthetic construct
  source 1..21: mol_type = other DNA; mol_type = other DNA
ttgcatcgggctggtattgat

SEQ ID NO: 10448 - DNA, 21 bp, synthetic construct
  source 1..21: mol_type = other DNA; mol_type = other DNA
cagctttatgatgctggggtg

SEQ ID NO: 10449 - DNA, 21 bp, synthetic construct
  source 1..21: mol_type = other DNA; mol_type = other DNA
cctatgggtgctaatacttgg

SEQ ID NO: 10450 - DNA, 21 bp, synthetic construct
  source 1..21: mol_type = other DNA; mol_type = other DNA
ttggatgcttttagtggttgg

SEQ ID NO: 10451 - DNA, 21 bp, synthetic construct
  source 1..21: mol_type = other DNA; mol_type = other DNA
tatgttcgttttgaggatcct

SEQ ID NO: 10452 - DNA, 21 bp, synthetic construct
  source 1..21: mol_type = other DNA; mol_type = other DNA
tcggtgacgtgtactttgcct

SEQ ID NO: 10453 - DNA, 21 bp, synthetic construct
  source 1..21: mol_type = other DNA; mol_type = other DNA
aaggattcttttacgagttgg

SEQ ID NO: 10454 - DNA, 21 bp, synthetic construct
  source 1..21: mol_type = other DNA; mol_type = other DNA
ggtgggcctgcgactacgggg

SEQ ID NO: 10455 - DNA, 21 bp, synthetic construct
  source 1..21: mol_type = other DNA; mol_type = other DNA
gtgtattcgtctaatggtgtg

SEQ ID NO: 10456 - DNA, 21 bp, synthetic construct
  source 1..21: mol_type = other DNA; mol_type = other DNA
acgtctggtccttcgaggctg

SEQ ID NO: 10457 - DNA, 21 bp, synthetic construct
  source 1..21: mol_type = other DNA; mol_type = other DNA
aatcgtatggatggtgatccg

SEQ ID NO: 10458 - DNA, 21 bp, synthetic construct
  source 1..21: mol_type = other DNA; mol_type = other DNA
agtaattcgacttctgggtgg

SEQ ID NO: 10459 - DNA, 21 bp, synthetic construct
  source 1..21: mol_type = other DNA; mol_type = other DNA
aatgtgcatagtgagccttgt

SEQ ID NO: 10460 - DNA, 21 bp, synthetic construct
  source 1..21: mol_type = other DNA; mol_type = other DNA
tatgcgggtgagatgattgtg

SEQ ID NO: 10461 - DNA, 21 bp, synthetic construct
  source 1..21: mol_type = other DNA; mol_type = other DNA
tattggtcgggtcagggggcg

SEQ ID NO: 10462 - DNA, 21 bp, synthetic construct
  source 1..21: mol_type = other DNA; mol_type = other DNA
ccggctaatggggttgttggt

SEQ ID NO: 10463 - DNA, 21 bp, synthetic construct
  source 1..21: mol_type = other DNA; mol_type = other DNA
ttgtcggctcatacgacgcct

SEQ ID NO: 10464 - DNA, 21 bp, synthetic construct
  source 1..21: mol_type = other DNA; mol_type = other DNA
gtgtcggattatgcttcgtat

SEQ ID NO: 10465 - DNA, 21 bp, synthetic construct
  source 1..21: mol_type = other DNA; mol_type = other DNA
gattggactggggttatggcg

SEQ ID NO: 10466 - DNA, 21 bp, synthetic construct
  source 1..21: mol_type = other DNA; mol_type = other DNA
gcttatgctccggaggtttcg

SEQ ID NO: 10467 - DNA, 21 bp, synthetic construct
  source 1..21: mol_type = other DNA; mol_type = other DNA
tatgatcctactttgacgaat

SEQ ID NO: 10468 - DNA, 21 bp, synthetic construct
  source 1..21: mol_type = other DNA; mol_type = other DNA
ttgctgacgccggcgtgtgat

SEQ ID NO: 10469 - DNA, 21 bp, synthetic construct
  source 1..21: mol_type = other DNA; mol_type = other DNA
attgcgcatttgggttctggt

SEQ ID NO: 10470 - DNA, 21 bp, synthetic construct
  source 1..21: mol_type = other DNA; mol_type = other DNA
agtctggatactgtgcgttgg

SEQ ID NO: 10471 - DNA, 21 bp, synthetic construct
  source 1..21: mol_type = other DNA; mol_type = other DNA
tggttgattgctgaggctgat

SEQ ID NO: 10472 - DNA, 21 bp, synthetic construct
  source 1..21: mol_type = other DNA; mol_type = other DNA
ggtatgagtaattctagttgg

SEQ ID NO: 10473 - DNA, 21 bp, synthetic construct
  source 1..21: mol_type = other DNA; mol_type = other DNA
ggggaggatcaggttcgttgg

SEQ ID NO: 10474 - DNA, 21 bp, synthetic construct
  source 1..21: mol_type = other DNA; mol_type = other DNA
cgtccgggtgggtcggctggt

SEQ ID NO: 10475 - DNA, 21 bp, synthetic construct
  source 1..21: mol_type = other DNA; mol_type = other DNA
gcgtgttctgattgtatggtt

SEQ ID NO: 10476 - DNA, 21 bp, synthetic construct
  source 1..21: mol_type = other DNA; mol_type = other DNA
tgtggtattgggtcgtgtcat

SEQ ID NO: 10477 - DNA, 21 bp, synthetic construct
  source 1..21: mol_type = other DNA; mol_type = other DNA
gttggttcgattactcagtgg

SEQ ID NO: 10478 - DNA, 21 bp, synthetic construct
  source 1..21: mol_type = other DNA; mol_type = other DNA
ggtgctcatacgagtacgtgg

SEQ ID NO: 10479 - DNA, 21 bp, synthetic construct
  source 1..21: mol_type = other DNA; mol_type = other DNA
acggttaagggggctgcgttg

SEQ ID NO: 10480 - DNA, 21 bp, synthetic construct
  source 1..21: mol_type = other DNA; mol_type = other DNA
cagcctgagtctcgttcgtgg

SEQ ID NO: 10481 - DNA, 21 bp, synthetic construct
  source 1..21: mol_type = other DNA; mol_type = other DNA
ggtgcttcgtcgtcgtcgtgg

SEQ ID NO: 10482 - DNA, 21 bp, synthetic construct
  source 1..21: mol_type = other DNA; mol_type = other DNA
tgtggggggtgtgttggtgtg

SEQ ID NO: 10483 - DNA, 21 bp, synthetic construct
  source 1..21: mol_type = other DNA; mol_type = other DNA
gtggttcggtgtgatgggtgt

SEQ ID NO: 10484 - DNA, 21 bp, synthetic construct
  source 1..21: mol_type = other DNA; mol_type = other DNA
atggaggggcggtgttgtagt

SEQ ID NO: 10485 - DNA, 21 bp, synthetic construct
  source 1..21: mol_type = other DNA; mol_type = other DNA
ctggtgggtctgaagtctctt

SEQ ID NO: 10486 - DNA, 21 bp, synthetic construct
  source 1..21: mol_type = other DNA; mol_type = other DNA
ggtgatggtgtttcgctttgg

SEQ ID NO: 10487 - DNA, 21 bp, synthetic construct
  source 1..21: mol_type = other DNA; mol_type = other DNA
tcggttgctccgctgtgtgcg

SEQ ID NO: 10488 - DNA, 21 bp, synthetic construct
  source 1..21: mol_type = other DNA; mol_type = other DNA
tattctaagcttgatgcgacg

SEQ ID NO: 10489 - DNA, 21 bp, synthetic construct
  source 1..21: mol_type = other DNA; mol_type = other DNA
gtttgggatgctatgggggtt

SEQ ID NO: 10490 - DNA, 21 bp, synthetic construct
  source 1..21: mol_type = other DNA; mol_type = other DNA
atgcctgctctggatcttggt

SEQ ID NO: 10491 - DNA, 21 bp, synthetic construct
  source 1..21: mol_type = other DNA; mol_type = other DNA
ctttgggatggtcagagtgcg

SEQ ID NO: 10492 - DNA, 21 bp, synthetic construct
  source 1..21: mol_type = other DNA; mol_type = other DNA
actgcgtggttgaagcaggat

SEQ ID NO: 10493 - DNA, 21 bp, synthetic construct
  source 1..21: mol_type = other DNA; mol_type = other DNA
catttggcgagtgcgaattgg

SEQ ID NO: 10494 - DNA, 21 bp, synthetic construct
  source 1..21: mol_type = other DNA; mol_type = other DNA
tatgttcggagttctaatgag

SEQ ID NO: 10495 - DNA, 21 bp, synthetic construct
  source 1..21: mol_type = other DNA; mol_type = other DNA
ttgagttcttctaatgggcgt

SEQ ID NO: 10496 - DNA, 21 bp, synthetic construct
  source 1..21: mol_type = other DNA; mol_type = other DNA
gctatggctgatactacgtgg

SEQ ID NO: 10497 - DNA, 21 bp, synthetic construct
  source 1..21: mol_type = other DNA; mol_type = other DNA
tgtggtgtgatggagaagtgt

SEQ ID NO: 10498 - DNA, 21 bp, synthetic construct
  source 1..21: mol_type = other DNA; mol_type = other DNA
gtgagtagtacgtgtacggct

SEQ ID NO: 10499 - DNA, 21 bp, synthetic construct
  source 1..21: mol_type = other DNA; mol_type = other DNA
atttgtgcttctaggctttcg

SEQ ID NO: 10500 - DNA, 21 bp, synthetic construct
  source 1..21: mol_type = other DNA; mol_type = other DNA
tcgagtcagtttgtttcgtat

SEQ ID NO: 10501 - DNA, 21 bp, synthetic construct
  source 1..21: mol_type = other DNA; mol_type = other DNA
tctgtttctcatgagggtggt

SEQ ID NO: 10502 - DNA, 21 bp, synthetic construct
  source 1..21: mol_type = other DNA; mol_type = other DNA
ctttggaatggggtttcgtcg

SEQ ID NO: 10503 - DNA, 21 bp, synthetic construct
  source 1..21: mol_type = other DNA; mol_type = other DNA
tttgattcgtctaatggtcgt

SEQ ID NO: 10504 - DNA, 21 bp, synthetic construct
  source 1..21: mol_type = other DNA; mol_type = other DNA
acggagagttctcaggggcgg

SEQ ID NO: 10505 - DNA, 21 bp, synthetic construct
  source 1..21: mol_type = other DNA; mol_type = other DNA
tattttcatggtttgcctgat

SEQ ID NO: 10506 - DNA, 21 bp, synthetic construct
  source 1..21: mol_type = other DNA; mol_type = other DNA
gttggttcttcttcttcgtgg

SEQ ID NO: 10507 - DNA, 21 bp, synthetic construct
  source 1..21: mol_type = other DNA; mol_type = other DNA
gtggtgggttgtagtccggat

SEQ ID NO: 10508 - DNA, 21 bp, synthetic construct
  source 1..21: mol_type = other DNA; mol_type = other DNA
gcttcggggaatagttcttgg

SEQ ID NO: 10509 - DNA, 21 bp, synthetic construct
  source 1..21: mol_type = other DNA; mol_type = other DNA
ttgaagaatggtactcctgct

SEQ ID NO: 10510 - DNA, 21 bp, synthetic construct
  source 1..21: mol_type = other DNA; mol_type = other DNA
atggaggggaaggggtgggat

SEQ ID NO: 10511 - DNA, 21 bp, synthetic construct
  source 1..21: mol_type = other DNA; mol_type = other DNA
catcctccggattatagtgcg

SEQ ID NO: 10512 - DNA, 21 bp, synthetic construct
  source 1..21: mol_type = other DNA; mol_type = other DNA
gagactaggcttggtgcgggg

SEQ ID NO: 10513 - DNA, 21 bp, synthetic construct
  source 1..21: mol_type = other DNA; mol_type = other DNA
ttgacttatgatgctggtatt

SEQ ID NO: 10514 - DNA, 21 bp, synthetic construct
  source 1..21: mol_type = other DNA; mol_type = other DNA
ctgccgagtgcgtatccgttt

SEQ ID NO: 10515 - DNA, 21 bp, synthetic construct
  source 1..21: mol_type = other DNA; mol_type = other DNA
gggggtcctacttctcagtgg

SEQ ID NO: 10516 - DNA, 21 bp, synthetic construct
  source 1..21: mol_type = other DNA; mol_type = other DNA
attactggtgtgtcgggtaat

SEQ ID NO: 10517 - DNA, 21 bp, synthetic construct
  source 1..21: mol_type = other DNA; mol_type = other DNA
aattgtagtattaagccttgt

SEQ ID NO: 10518 - DNA, 21 bp, synthetic construct
  source 1..21: mol_type = other DNA; mol_type = other DNA
gatagggctcctgcttctgcg

SEQ ID NO: 10519 - DNA, 21 bp, synthetic construct
  source 1..21: mol_type = other DNA; mol_type = other DNA
gtggataggggttcgacgatt

SEQ ID NO: 10520 - DNA, 21 bp, synthetic construct
  source 1..21: mol_type = other DNA; mol_type = other DNA
tatgtgcgtactgataagggg

SEQ ID NO: 10521 - DNA, 21 bp, synthetic construct
  source 1..21: mol_type = other DNA; mol_type = other DNA
ggggttgatgctggtgtgagg

SEQ ID NO: 10522 - DNA, 21 bp, synthetic construct
  source 1..21: mol_type = other DNA; mol_type = other DNA
gatcagtcgccggtgaagtgg

SEQ ID NO: 10523 - DNA, 21 bp, synthetic construct
  source 1..21: mol_type = other DNA; mol_type = other DNA
ccttatgcgcagagtccgatg

SEQ ID NO: 10524 - DNA, 21 bp, synthetic construct
  source 1..21: mol_type = other DNA; mol_type = other DNA
tgtcaggatgggtctggggct

SEQ ID NO: 10525 - DNA, 21 bp, synthetic construct
  source 1..21: mol_type = other DNA; mol_type = other DNA
aagactgatcatgtttttcct

SEQ ID NO: 10526 - DNA, 21 bp, synthetic construct
  source 1..21: mol_type = other DNA; mol_type = other DNA
ggtggggattattcttcgttt

SEQ ID NO: 10527 - DNA, 21 bp, synthetic construct
  source 1..21: mol_type = other DNA; mol_type = other DNA
gtttgtcgtcagagttgtgag

SEQ ID NO: 10528 - DNA, 21 bp, synthetic construct
  source 1..21: mol_type = other DNA; mol_type = other DNA
tggagtgctattacggataat

SEQ ID NO: 10529 - DNA, 21 bp, synthetic construct
  source 1..21: mol_type = other DNA; mol_type = other DNA
ggtgggggttcggcttcgtgg

SEQ ID NO: 10530 - DNA, 21 bp, synthetic construct
  source 1..21: mol_type = other DNA; mol_type = other DNA
agggaggattctaggtcttgg

SEQ ID NO: 10531 - DNA, 21 bp, synthetic construct
  source 1..21: mol_type = other DNA; mol_type = other DNA
ttggctactggtgatggtcct

SEQ ID NO: 10532 - DNA, 21 bp, synthetic construct
  source 1..21: mol_type = other DNA; mol_type = other DNA
gtttcgcatggttctgctggg

SEQ ID NO: 10533 - DNA, 21 bp, synthetic construct
  source 1..21: mol_type = other DNA; mol_type = other DNA
gcgtctgagacgtctacgtgg

SEQ ID NO: 10534 - DNA, 21 bp, synthetic construct
  source 1..21: mol_type = other DNA; mol_type = other DNA
attatgttgccgggtcatggg

SEQ ID NO: 10535 - DNA, 21 bp, synthetic construct
  source 1..21: mol_type = other DNA; mol_type = other DNA
ttgagtgtggctgggcggatg

SEQ ID NO: 10536 - DNA, 21 bp, synthetic construct
  source 1..21: mol_type = other DNA; mol_type = other DNA
aagtgggattcgcaggggact

SEQ ID NO: 10537 - DNA, 21 bp, synthetic construct
  source 1..21: mol_type = other DNA; mol_type = other DNA
gggttggattctcgtgctgct

SEQ ID NO: 10538 - DNA, 21 bp, synthetic construct
  source 1..21: mol_type = other DNA; mol_type = other DNA
attatgaattctggggtgtgg

SEQ ID NO: 10539 - DNA, 21 bp, synthetic construct
  source 1..21: mol_type = other DNA; mol_type = other DNA
ttttctgcgcctaatgctttt

SEQ ID NO: 10540 - DNA, 21 bp, synthetic construct
  source 1..21: mol_type = other DNA; mol_type = other DNA
ggtagtgggcagcatggtgcg

SEQ ID NO: 10541 - DNA, 21 bp, synthetic construct
  source 1..21: mol_type = other DNA; mol_type = other DNA
tgtaatgagtgtcctcatcct

SEQ ID NO: 10542 - DNA, 21 bp, synthetic construct
  source 1..21: mol_type = other DNA; mol_type = other DNA
agttttaatcctaagtgtgag

SEQ ID NO: 10543 - DNA, 21 bp, synthetic construct
  source 1..21: mol_type = other DNA; mol_type = other DNA
agtggtgtgacggatgcgcgt

SEQ ID NO: 10544 - DNA, 21 bp, synthetic construct
  source 1..21: mol_type = other DNA; mol_type = other DNA
gaggttgagaggcgggctcct

SEQ ID NO: 10545 - DNA, 21 bp, synthetic construct
  source 1..21: mol_type = other DNA; mol_type = other DNA
aggggggattcggttcattgg

SEQ ID NO: 10546 - DNA, 21 bp, synthetic construct
  source 1..21: mol_type = other DNA; mol_type = other DNA
tatcagcctcttctgacggtg

SEQ ID NO: 10547 - DNA, 21 bp, synthetic construct
  source 1..21: mol_type = other DNA; mol_type = other DNA
cgtccggcttgtactgtgtgt

SEQ ID NO: 10548 - DNA, 21 bp, synthetic construct
  source 1..21: mol_type = other DNA; mol_type = other DNA
ggggggtcgaattcgagttgg

SEQ ID NO: 10549 - DNA, 21 bp, synthetic construct
  source 1..21: mol_type = other DNA; mol_type = other DNA
gggattcatcaggagccgcat

SEQ ID NO: 10550 - DNA, 21 bp, synthetic construct
  source 1..21: mol_type = other DNA; mol_type = other DNA
gttgcggatccttctgcggct

SEQ ID NO: 10551 - DNA, 21 bp, synthetic construct
  source 1..21: mol_type = other DNA; mol_type = other DNA
gggccgagttcgagtttgtgg

SEQ ID NO: 10552 - DNA, 21 bp, synthetic construct
  source 1..21: mol_type = other DNA; mol_type = other DNA
gttgcggagcggggtgcgggg

SEQ ID NO: 10553 - DNA, 21 bp, synthetic construct
  source 1..21: mol_type = other DNA; mol_type = other DNA
actaatgagagtgtttatgtg

SEQ ID NO: 10554 - DNA, 21 bp, synthetic construct
  source 1..21: mol_type = other DNA; mol_type = other DNA
acgagtccggttgcggttaat

SEQ ID NO: 10555 - DNA, 21 bp, synthetic construct
  source 1..21: mol_type = other DNA; mol_type = other DNA
gttgagcggtgttgtgtggct

SEQ ID NO: 10556 - DNA, 21 bp, synthetic construct
  source 1..21: mol_type = other DNA; mol_type = other DNA
tgtttggatgcgtgtaatcgg

SEQ ID NO: 10557 - DNA, 21 bp, synthetic construct
  source 1..21: mol_type = other DNA; mol_type = other DNA
aatggggctcgtttgccgggt

SEQ ID NO: 10558 - DNA, 21 bp, synthetic construct
  source 1..21: mol_type = other DNA; mol_type = other DNA
gatatgagtaagagttgtgtg

SEQ ID NO: 10559 - DNA, 21 bp, synthetic construct
  source 1..21: mol_type = other DNA; mol_type = other DNA
gcgatgacgggtgctagtact

SEQ ID NO: 10560 - DNA, 21 bp, synthetic construct
  source 1..21: mol_type = other DNA; mol_type = other DNA
tgtttgtcgtgtcctaagagt

SEQ ID NO: 10561 - DNA, 21 bp, synthetic construct
  source 1..21: mol_type = other DNA; mol_type = other DNA
ggttcgaatacgtcgggttgg

SEQ ID NO: 10562 - DNA, 21 bp, synthetic construct
  source 1..21: mol_type = other DNA; mol_type = other DNA
gagccgggttcggtgcgttgg

SEQ ID NO: 10563 - DNA, 21 bp, synthetic construct
  source 1..21: mol_type = other DNA; mol_type = other DNA
ttttatactggtaggtcggag

SEQ ID NO: 10564 - DNA, 21 bp, synthetic construct
  source 1..21: mol_type = other DNA; mol_type = other DNA
gggtctgatcggtcggggtcg

SEQ ID NO: 10565 - DNA, 21 bp, synthetic construct
  source 1..21: mol_type = other DNA; mol_type = other DNA
gggcgtggggatagtggttgg

SEQ ID NO: 10566 - DNA, 21 bp, synthetic construct
  source 1..21: mol_type = other DNA; mol_type = other DNA
tggaatagtaatgctgataat

SEQ ID NO: 10567 - DNA, 21 bp, synthetic construct
  source 1..21: mol_type = other DNA; mol_type = other DNA
tctccttctgaggttaattcg

SEQ ID NO: 10568 - DNA, 21 bp, synthetic construct
  source 1..21: mol_type = other DNA; mol_type = other DNA
cttatggataatgtgagtcat

SEQ ID NO: 10569 - DNA, 21 bp, synthetic construct
  source 1..21: mol_type = other DNA; mol_type = other DNA
ttgtctgatggttggcgggat

SEQ ID NO: 10570 - DNA, 21 bp, synthetic construct
  source 1..21: mol_type = other DNA; mol_type = other DNA
ggtttggaggggtcgaagtgg

SEQ ID NO: 10571 - DNA, 21 bp, synthetic construct
  source 1..21: mol_type = other DNA; mol_type = other DNA
gatggggcggctattatgtct

SEQ ID NO: 10572 - DNA, 21 bp, synthetic construct
  source 1..21: mol_type = other DNA; mol_type = other DNA
tggactaagtcgcaggagtgg

SEQ ID NO: 10573 - DNA, 21 bp, synthetic construct
  source 1..21: mol_type = other DNA; mol_type = other DNA
cgtccggagtcgagtcagtgg

SEQ ID NO: 10574 - DNA, 21 bp, synthetic construct
  source 1..21: mol_type = other DNA; mol_type = other DNA
gtggagggtcgtatgtggtcg

SEQ ID NO: 10575 - DNA, 21 bp, synthetic construct
  source 1..21: mol_type = other DNA; mol_type = other DNA
attgatggtacgtcgatgtgg

SEQ ID NO: 10576 - DNA, 21 bp, synthetic construct
  source 1..21: mol_type = other DNA; mol_type = other DNA
gttcctcatgatagggagtgg

SEQ ID NO: 10577 - DNA, 21 bp, synthetic construct
  source 1..21: mol_type = other DNA; mol_type = other DNA
ggtgggtcgagttcggtttgg

SEQ ID NO: 10578 - DNA, 21 bp, synthetic construct
  source 1..21: mol_type = other DNA; mol_type = other DNA
aggctgccggagtctactgat

SEQ ID NO: 10579 - DNA, 21 bp, synthetic construct
  source 1..21: mol_type = other DNA; mol_type = other DNA
ctgggtgattctaatatggtt

SEQ ID NO: 10580 - DNA, 21 bp, synthetic construct
  source 1..21: mol_type = other DNA; mol_type = other DNA
cgtgaggaggttggggtgtgg

SEQ ID NO: 10581 - DNA, 21 bp, synthetic construct
  source 1..21: mol_type = other DNA; mol_type = other DNA
gatttggattcgtatctggat

SEQ ID NO: 10582 - DNA, 21 bp, synthetic construct
  source 1..21: mol_type = other DNA; mol_type = other DNA
ttggctaaggggggttatgat

SEQ ID NO: 10583 - DNA, 21 bp, synthetic construct
  source 1..21: mol_type = other DNA; mol_type = other DNA
cttgatggtgtttctctgtat

SEQ ID NO: 10584 - DNA, 21 bp, synthetic construct
  source 1..21: mol_type = other DNA; mol_type = other DNA
agggaggctcagagtgggtgg

SEQ ID NO: 10585 - DNA, 21 bp, synthetic construct
  source 1..21: mol_type = other DNA; mol_type = other DNA
gggcttagtagtgcttcttgg

SEQ ID NO: 10586 - DNA, 21 bp, synthetic construct
  source 1..21: mol_type = other DNA; mol_type = other DNA
tattttgaggggatgtttgat

SEQ ID NO: 10587 - DNA, 21 bp, synthetic construct
  source 1..21: mol_type = other DNA; mol_type = other DNA
ggtgcgcctggggatgcgaag

SEQ ID NO: 10588 - DNA, 21 bp, synthetic construct
  source 1..21: mol_type = other DNA; mol_type = other DNA
tgttgtgggttgaagagtggg

SEQ ID NO: 10589 - DNA, 21 bp, synthetic construct
  source 1..21: mol_type = other DNA; mol_type = other DNA
ggtgggcatgtgtctagttgg

SEQ ID NO: 10590 - DNA, 21 bp, synthetic construct
  source 1..21: mol_type = other DNA; mol_type = other DNA
aatgcgagtactagtagttgg

SEQ ID NO: 10591 - DNA, 21 bp, synthetic construct
  source 1..21: mol_type = other DNA; mol_type = other DNA
tggtctatgactacggataat

SEQ ID NO: 10592 - DNA, 21 bp, synthetic construct
  source 1..21: mol_type = other DNA; mol_type = other DNA
actcagattgcgccggatcgg

SEQ ID NO: 10593 - DNA, 21 bp, synthetic construct
  source 1..21: mol_type = other DNA; mol_type = other DNA
tatctggttatgtcttcgagt

SEQ ID NO: 10594 - DNA, 21 bp, synthetic construct
  source 1..21: mol_type = other DNA; mol_type = other DNA
agggaggaggctgagcgtggg

SEQ ID NO: 10595 - DNA, 21 bp, synthetic construct
  source 1..21: mol_type = other DNA; mol_type = other DNA
gttgggggtacttctttgtat

SEQ ID NO: 10596 - DNA, 21 bp, synthetic construct
  source 1..21: mol_type = other DNA; mol_type = other DNA
ggtgttattcagggttgttgt

SEQ ID NO: 10597 - DNA, 21 bp, synthetic construct
  source 1..21: mol_type = other DNA; mol_type = other DNA
tattggtcggctatggcggag

SEQ ID NO: 10598 - DNA, 21 bp, synthetic construct
  source 1..21: mol_type = other DNA; mol_type = other DNA
gggtcgcctagtagtggttgg

SEQ ID NO: 10599 - DNA, 21 bp, synthetic construct
  source 1..21: mol_type = other DNA; mol_type = other DNA
tggtcgcggctgaattctgat

SEQ ID NO: 10600 - DNA, 21 bp, synthetic construct
  source 1..21: mol_type = other DNA; mol_type = other DNA
tattttcatgctatgcagtct

SEQ ID NO: 10601 - DNA, 21 bp, synthetic construct
  source 1..21: mol_type = other DNA; mol_type = other DNA
cgttctgatactagttcttgg

SEQ ID NO: 10602 - DNA, 21 bp, synthetic construct
  source 1..21: mol_type = other DNA; mol_type = other DNA
atgtctccgatgagtcagaat

SEQ ID NO: 10603 - DNA, 21 bp, synthetic construct
  source 1..21: mol_type = other DNA; mol_type = other DNA
gagttgttggcggcgacttgg

SEQ ID NO: 10604 - DNA, 21 bp, synthetic construct
  source 1..21: mol_type = other DNA; mol_type = other DNA
tatagtaagtctagtccgctt

SEQ ID NO: 10605 - DNA, 21 bp, synthetic construct
  source 1..21: mol_type = other DNA; mol_type = other DNA
gaggatcggggtttggagggt

SEQ ID NO: 10606 - DNA, 21 bp, synthetic construct
  source 1..21: mol_type = other DNA; mol_type = other DNA
cgtactccttctgagtatccg

SEQ ID NO: 10607 - DNA, 21 bp, synthetic construct
  source 1..21: mol_type = other DNA; mol_type = other DNA
gggagggttgatatgtatgat

SEQ ID NO: 10608 - DNA, 21 bp, synthetic construct
  source 1..21: mol_type = other DNA; mol_type = other DNA
tgtgggcgtgattattgtcct

SEQ ID NO: 10609 - DNA, 21 bp, synthetic construct
  source 1..21: mol_type = other DNA; mol_type = other DNA
tctggggggtctcatacgtgg

SEQ ID NO: 10610 - DNA, 21 bp, synthetic construct
  source 1..21: mol_type = other DNA; mol_type = other DNA
gataggtgtgttcagccgtgt

SEQ ID NO: 10611 - DNA, 21 bp, synthetic construct
  source 1..21: mol_type = other DNA; mol_type = other DNA
tgtctttcgtctccttgtagt

SEQ ID NO: 10612 - DNA, 21 bp, synthetic construct
  source 1..21: mol_type = other DNA; mol_type = other DNA
gtgcctgatactgtgcgttat

SEQ ID NO: 10613 - DNA, 21 bp, synthetic construct
  source 1..21: mol_type = other DNA; mol_type = other DNA
tgtaagggttcgtgtgagcag

SEQ ID NO: 10614 - DNA, 21 bp, synthetic construct
  source 1..21: mol_type = other DNA; mol_type = other DNA
gagtggtctgctatttgtaag

SEQ ID NO: 10615 - DNA, 21 bp, synthetic construct
  source 1..21: mol_type = other DNA; mol_type = other DNA
agggagatgtctgttcattgg

SEQ ID NO: 10616 - DNA, 21 bp, synthetic construct
  source 1..21: mol_type = other DNA; mol_type = other DNA
tttcttaatgggtgttgtagt

SEQ ID NO: 10617 - DNA, 21 bp, synthetic construct
  source 1..21: mol_type = other DNA; mol_type = other DNA
tctccttggggggatccgtct

SEQ ID NO: 10618 - DNA, 21 bp, synthetic construct
  source 1..21: mol_type = other DNA; mol_type = other DNA
agtgaggaggcgtttccgtat

SEQ ID NO: 10619 - DNA, 21 bp, synthetic construct
  source 1..21: mol_type = other DNA; mol_type = other DNA
tgttttctgagtgattgtctg

SEQ ID NO: 10620 - DNA, 21 bp, synthetic construct
  source 1..21: mol_type = other DNA; mol_type = other DNA
ggtagtctggattcgcgttgg

SEQ ID NO: 10621 - DNA, 21 bp, synthetic construct
  source 1..21: mol_type = other DNA; mol_type = other DNA
tatttttcgcgtgagatttcg

SEQ ID NO: 10622 - DNA, 21 bp, synthetic construct
  source 1..21: mol_type = other DNA; mol_type = other DNA
gttgagccttgttgtcgtatg

SEQ ID NO: 10623 - DNA, 21 bp, synthetic construct
  source 1..21: mol_type = other DNA; mol_type = other DNA
gttggtccggtgctgtgtagt

SEQ ID NO: 10624 - DNA, 21 bp, synthetic construct
  source 1..21: mol_type = other DNA; mol_type = other DNA
gcccaatcggtgggtacttgg

SEQ ID NO: 10625 - DNA, 21 bp, synthetic construct
  source 1..21: mol_type = other DNA; mol_type = other DNA
ttgcataagcttagtgtgggt

SEQ ID NO: 10626 - DNA, 21 bp, synthetic construct
  source 1..21: mol_type = other DNA; mol_type = other DNA
gcgcgtgctgatttgggtagt

SEQ ID NO: 10627 - DNA, 21 bp, synthetic construct
  source 1..21: mol_type = other DNA; mol_type = other DNA
ggtagtccgtcggcgagttgg

SEQ ID NO: 10628 - DNA, 21 bp, synthetic construct
  source 1..21: mol_type = other DNA; mol_type = other DNA
gttccgggttttggggcgggt

SEQ ID NO: 10629 - DNA, 21 bp, synthetic construct
  source 1..21: mol_type = other DNA; mol_type = other DNA
ggtggggcgattcgggagtgg

SEQ ID NO: 10630 - DNA, 21 bp, synthetic construct
  source 1..21: mol_type = other DNA; mol_type = other DNA
actgcgcagtcgtatacgttt

SEQ ID NO: 10631 - DNA, 21 bp, synthetic construct
  source 1..21: mol_type = other DNA; mol_type = other DNA
tggctgcttaagtctgatgtt

SEQ ID NO: 10632 - DNA, 21 bp, synthetic construct
  source 1..21: mol_type = other DNA; mol_type = other DNA
gggcctcctcatgtggcgtgg

SEQ ID NO: 10633 - DNA, 21 bp, synthetic construct
  source 1..21: mol_type = other DNA; mol_type = other DNA
tgtagtcaggtggcgtgtccg

SEQ ID NO: 10634 - DNA, 21 bp, synthetic construct
  source 1..21: mol_type = other DNA; mol_type = other DNA
gtgcgttcgggttcggctggg

SEQ ID NO: 10635 - DNA, 21 bp, synthetic construct
  source 1..21: mol_type = other DNA; mol_type = other DNA
tgtgcgattactgggtgtcgg

SEQ ID NO: 10636 - DNA, 21 bp, synthetic construct
  source 1..21: mol_type = other DNA; mol_type = other DNA
gttatgacgtctgctgggtgg

SEQ ID NO: 10637 - DNA, 21 bp, synthetic construct
  source 1..21: mol_type = other DNA; mol_type = other DNA
attaatagttcttcggtttgg

SEQ ID NO: 10638 - DNA, 21 bp, synthetic construct
  source 1..21: mol_type = other DNA; mol_type = other DNA
tgtggttcgtcttgtgcggct

SEQ ID NO: 10639 - DNA, 21 bp, synthetic construct
  source 1..21: mol_type = other DNA; mol_type = other DNA
ggtttggagtcgcgggagtgg

SEQ ID NO: 10640 - DNA, 21 bp, synthetic construct
  source 1..21: mol_type = other DNA; mol_type = other DNA
acttggacgggtgatggtgcg

SEQ ID NO: 10641 - DNA, 21 bp, synthetic construct
  source 1..21: mol_type = other DNA; mol_type = other DNA
gattggctggagaagggtatt

SEQ ID NO: 10642 - DNA, 21 bp, synthetic construct
  source 1..21: mol_type = other DNA; mol_type = other DNA
cctctgatgagtggtccgatt

SEQ ID NO: 10643 - DNA, 21 bp, synthetic construct
  source 1..21: mol_type = other DNA; mol_type = other DNA
tgggcgcggggtcatgataat

SEQ ID NO: 10644 - DNA, 21 bp, synthetic construct
  source 1..21: mol_type = other DNA; mol_type = other DNA
tgtgggtcgtctacttgttct

SEQ ID NO: 10645 - DNA, 21 bp, synthetic construct
  source 1..21: mol_type = other DNA; mol_type = other DNA
tatgctaatgtggctcataat

SEQ ID NO: 10646 - DNA, 21 bp, synthetic construct
  source 1..21: mol_type = other DNA; mol_type = other DNA
gttgcgagtatgtatggtatt

SEQ ID NO: 10647 - DNA, 21 bp, synthetic construct
  source 1..21: mol_type = other DNA; mol_type = other DNA
gggtcggcggcgtcggcttgg

SEQ ID NO: 10648 - DNA, 21 bp, synthetic construct
  source 1..21: mol_type = other DNA; mol_type = other DNA
tcggatggggagtcttcgtgg

SEQ ID NO: 10649 - DNA, 21 bp, synthetic construct
  source 1..21: mol_type = other DNA; mol_type = other DNA
tattggtctggttcgattgct

SEQ ID NO: 10650 - DNA, 21 bp, synthetic construct
  source 1..21: mol_type = other DNA; mol_type = other DNA
attgcggggcgtggggctggg

SEQ ID NO: 10651 - DNA, 21 bp, synthetic construct
  source 1..21: mol_type = other DNA; mol_type = other DNA
aggggtactgaggtttatccg

SEQ ID NO: 10652 - DNA, 21 bp, synthetic construct
  source 1..21: mol_type = other DNA; mol_type = other DNA
tcgagtgggtcgagtacgtgg

SEQ ID NO: 10653 - DNA, 21 bp, synthetic construct
  source 1..21: mol_type = other DNA; mol_type = other DNA
gatgatggggattctcggtgg

SEQ ID NO: 10654 - DNA, 21 bp, synthetic construct
  source 1..21: mol_type = other DNA; mol_type = other DNA
gatatgaatgttggggcttgg

SEQ ID NO: 10655 - DNA, 21 bp, synthetic construct
  source 1..21: mol_type = other DNA; mol_type = other DNA
cgggagggtggtggttcgtgg

SEQ ID NO: 10656 - DNA, 21 bp, synthetic construct
  source 1..21: mol_type = other DNA; mol_type = other DNA
gttagtgggggtgcgttggct

SEQ ID NO: 10657 - DNA, 21 bp, synthetic construct
  source 1..21: mol_type = other DNA; mol_type = other DNA
gtgggggtgtctgggaatggg

SEQ ID NO: 10658 - DNA, 21 bp, synthetic construct
  source 1..21: mol_type = other DNA; mol_type = other DNA
ggggagctttgttgtgagacg

SEQ ID NO: 10659 - DNA, 21 bp, synthetic construct
  source 1..21: mol_type = other DNA; mol_type = other DNA
ggtgggtcgggggtttcgtgg

SEQ ID NO: 10660 - DNA, 21 bp, synthetic construct
  source 1..21: mol_type = other DNA; mol_type = other DNA
aggtcttcggttaatggggtg

SEQ ID NO: 10661 - DNA, 21 bp, synthetic construct
  source 1..21: mol_type = other DNA; mol_type = other DNA
ggtgtggagtctagtccgcag

SEQ ID NO: 10662 - DNA, 21 bp, synthetic construct
  source 1..21: mol_type = other DNA; mol_type = other DNA
agggattcggggagtgcgtgg

SEQ ID NO: 10663 - DNA, 21 bp, synthetic construct
  source 1..21: mol_type = other DNA; mol_type = other DNA
agtagtgggtcgtcgatgtgg

SEQ ID NO: 10664 - DNA, 21 bp, synthetic construct
  source 1..21: mol_type = other DNA; mol_type = other DNA
cggacggttgatttgtttccg

SEQ ID NO: 10665 - DNA, 21 bp, synthetic construct
  source 1..21: mol_type = other DNA; mol_type = other DNA
gcttcgagtgggaatcttatg

SEQ ID NO: 10666 - DNA, 21 bp, synthetic construct
  source 1..21: mol_type = other DNA; mol_type = other DNA
tattcgtctagtaatggtttg

SEQ ID NO: 10667 - DNA, 21 bp, synthetic construct
  source 1..21: mol_type = other DNA; mol_type = other DNA
agggagaatacgccggggtgg

SEQ ID NO: 10668 - DNA, 21 bp, synthetic construct
  source 1..21: mol_type = other DNA; mol_type = other DNA
attttgtctgagcgggcgtgg

SEQ ID NO: 10669 - DNA, 21 bp, synthetic construct
  source 1..21: mol_type = other DNA; mol_type = other DNA
aatgagcgggggggtgttgtt

SEQ ID NO: 10670 - DNA, 21 bp, synthetic construct
  source 1..21: mol_type = other DNA; mol_type = other DNA
actgatgagtggcagagttat

SEQ ID NO: 10671 - DNA, 21 bp, synthetic construct
  source 1..21: mol_type = other DNA; mol_type = other DNA
gtggctgcgagttcgacttgg

SEQ ID NO: 10672 - DNA, 21 bp, synthetic construct
  source 1..21: mol_type = other DNA; mol_type = other DNA
attcatagggctttgcatgat

SEQ ID NO: 10673 - DNA, 21 bp, synthetic construct
  source 1..21: mol_type = other DNA; mol_type = other DNA
tgtggggttaggtgtcaggat

SEQ ID NO: 10674 - DNA, 21 bp, synthetic construct
  source 1..21: mol_type = other DNA; mol_type = other DNA
ggggttcctgggacgatgccg

SEQ ID NO: 10675 - DNA, 21 bp, synthetic construct
  source 1..21: mol_type = other DNA; mol_type = other DNA
ttgtatggtggtagtattggg

SEQ ID NO: 10676 - DNA, 21 bp, synthetic construct
  source 1..21: mol_type = other DNA; mol_type = other DNA
gattattctgggcggagtgct

SEQ ID NO: 10677 - DNA, 21 bp, synthetic construct
  source 1..21: mol_type = other DNA; mol_type = other DNA
tcgggtcttgcttatgcgatg

SEQ ID NO: 10678 - DNA, 21 bp, synthetic construct
  source 1..21: mol_type = other DNA; mol_type = other DNA
gggcatagttgttgtactttg

SEQ ID NO: 10679 - DNA, 21 bp, synthetic construct
  source 1..21: mol_type = other DNA; mol_type = other DNA
tgtatgccgaattgtctggtt

SEQ ID NO: 10680 - DNA, 21 bp, synthetic construct
  source 1..21: mol_type = other DNA; mol_type = other DNA
gctggtggggggtatattctg

SEQ ID NO: 10681 - DNA, 21 bp, synthetic construct
  source 1..21: mol_type = other DNA; mol_type = other DNA
aatttgcgtggttcgggggct

SEQ ID NO: 10682 - DNA, 21 bp, synthetic construct
  source 1..21: mol_type = other DNA; mol_type = other DNA
gggtattctgcttgttcgcat

SEQ ID NO: 10683 - DNA, 21 bp, synthetic construct
  source 1..21: mol_type = other DNA; mol_type = other DNA
gttctggttgatgcgtatgtt

SEQ ID NO: 10684 - DNA, 21 bp, synthetic construct
  source 1..21: mol_type = other DNA; mol_type = other DNA
tttgaggcggatgcgtatccg

SEQ ID NO: 10685 - DNA, 21 bp, synthetic construct
  source 1..21: mol_type = other DNA; mol_type = other DNA
aatcagttgggggatcgtttg

SEQ ID NO: 10686 - DNA, 21 bp, synthetic construct
  source 1..21: mol_type = other DNA; mol_type = other DNA
ggggaggtgatgagtcttacg

SEQ ID NO: 10687 - DNA, 21 bp, synthetic construct
  source 1..21: mol_type = other DNA; mol_type = other DNA
tggatggcgaaggttgttgag

SEQ ID NO: 10688 - DNA, 21 bp, synthetic construct
  source 1..21: mol_type = other DNA; mol_type = other DNA
aataagtggggtgatccgagt

SEQ ID NO: 10689 - DNA, 21 bp, synthetic construct
  source 1..21: mol_type = other DNA; mol_type = other DNA
gggcttattgctccgcattcg

SEQ ID NO: 10690 - DNA, 21 bp, synthetic construct
  source 1..21: mol_type = other DNA; mol_type = other DNA
cgtgggattgatgagtttcct

SEQ ID NO: 10691 - DNA, 21 bp, synthetic construct
  source 1..21: mol_type = other DNA; mol_type = other DNA
attgggctgacgggtgattgg

SEQ ID NO: 10692 - DNA, 21 bp, synthetic construct
  source 1..21: mol_type = other DNA; mol_type = other DNA
gggggggggcagactagttgg

SEQ ID NO: 10693 - DNA, 21 bp, synthetic construct
  source 1..21: mol_type = other DNA; mol_type = other DNA
ccgtcttcgttgatggcgagt

SEQ ID NO: 10694 - DNA, 21 bp, synthetic construct
  source 1..21: mol_type = other DNA; mol_type = other DNA
atgactggtcttagtattgtg

SEQ ID NO: 10695 - DNA, 21 bp, synthetic construct
  source 1..21: mol_type = other DNA; mol_type = other DNA
gggatgagtgaggttttgtgg

SEQ ID NO: 10696 - DNA, 21 bp, synthetic construct
  source 1..21: mol_type = other DNA; mol_type = other DNA
acgcaggtttcgtcttataag

SEQ ID NO: 10697 - DNA, 21 bp, synthetic construct
  source 1..21: mol_type = other DNA; mol_type = other DNA
tggaagagtgggggtgcgctg

SEQ ID NO: 10698 - DNA, 21 bp, synthetic construct
  source 1..21: mol_type = other DNA; mol_type = other DNA
cagaagggtctggggattgcg

SEQ ID NO: 10699 - DNA, 21 bp, synthetic construct
  source 1..21: mol_type = other DNA; mol_type = other DNA
tgggctttggcgacgattcat

SEQ ID NO: 10700 - DNA, 21 bp, synthetic construct
  source 1..21: mol_type = other DNA; mol_type = other DNA
tctttgattgagaagcttagg

SEQ ID NO: 10701 - DNA, 21 bp, synthetic construct
  source 1..21: mol_type = other DNA; mol_type = other DNA
cttactttgacgaatattaag

SEQ ID NO: 10702 - DNA, 21 bp, synthetic construct
  source 1..21: mol_type = other DNA; mol_type = other DNA
tataagctgggtcttcttggg

SEQ ID NO: 10703 - DNA, 21 bp, synthetic construct
  source 1..21: mol_type = other DNA; mol_type = other DNA
tataagtctttgtcggctgct

SEQ ID NO: 10704 - DNA, 21 bp, synthetic construct
  source 1..21: mol_type = other DNA; mol_type = other DNA
agtgggctgagtacgactaag

SEQ ID NO: 10705 - DNA, 21 bp, synthetic construct
  source 1..21: mol_type = other DNA; mol_type = other DNA
gctagtttgacgtctcagcat

SEQ ID NO: 10706 - DNA, 21 bp, synthetic construct
  source 1..21: mol_type = other DNA; mol_type = other DNA
aattctttggcgacgtttaag

SEQ ID NO: 10707 - DNA, 21 bp, synthetic construct
  source 1..21: mol_type = other DNA; mol_type = other DNA
gggaagatgggggctttgtcg

SEQ ID NO: 10708 - DNA, 21 bp, synthetic construct
  source 1..21: mol_type = other DNA; mol_type = other DNA
acgctgatgacgaaggtgggt

SEQ ID NO: 10709 - DNA, 21 bp, synthetic construct
  source 1..21: mol_type = other DNA; mol_type = other DNA
tctacgattgctagtcctcat

SEQ ID NO: 10710 - DNA, 21 bp, synthetic construct
  source 1..21: mol_type = other DNA; mol_type = other DNA
gctagtttgtctagtcgtagt

SEQ ID NO: 10711 - DNA, 21 bp, synthetic construct
  source 1..21: mol_type = other DNA; mol_type = other DNA
tcgaaggggttgggtgcggtg

SEQ ID NO: 10712 - DNA, 21 bp, synthetic construct
  source 1..21: mol_type = other DNA; mol_type = other DNA
acgaatgtttcgaatggtaag

SEQ ID NO: 10713 - DNA, 21 bp, synthetic construct
  source 1..21: mol_type = other DNA; mol_type = other DNA
atgatgactatttcgactaag

SEQ ID NO: 10714 - DNA, 21 bp, synthetic construct
  source 1..21: mol_type = other DNA; mol_type = other DNA
cattctttgtctagttctggt

SEQ ID NO: 10715 - DNA, 21 bp, synthetic construct
  source 1..21: mol_type = other DNA; mol_type = other DNA
acgactacgtctagtcatgct

SEQ ID NO: 10716 - DNA, 21 bp, synthetic construct
  source 1..21: mol_type = other DNA; mol_type = other DNA
caggctattaagcttatgccg

SEQ ID NO: 10717 - DNA, 21 bp, synthetic construct
  source 1..21: mol_type = other DNA; mol_type = other DNA
gtgattacgattggttcgaag

SEQ ID NO: 10718 - DNA, 21 bp, synthetic construct
  source 1..21: mol_type = other DNA; mol_type = other DNA
gatgggatgtcgatgaatagg

SEQ ID NO: 10719 - DNA, 21 bp, synthetic construct
  source 1..21: mol_type = other DNA; mol_type = other DNA
agtaagctttctctgtctggt

SEQ ID NO: 10720 - DNA, 21 bp, synthetic construct
  source 1..21: mol_type = other DNA; mol_type = other DNA
acggtgccgacgcagactaag

SEQ ID NO: 10721 - DNA, 21 bp, synthetic construct
  source 1..21: mol_type = other DNA; mol_type = other DNA
agtattgggcttgtgaagccg

SEQ ID NO: 10722 - DNA, 21 bp, synthetic construct
  source 1..21: mol_type = other DNA; mol_type = other DNA
tggtcgcttgcgtcgacgggt

SEQ ID NO: 10723 - DNA, 21 bp, synthetic construct
  source 1..21: mol_type = other DNA; mol_type = other DNA
ttgaaggggtcgcatgctgat

SEQ ID NO: 10724 - DNA, 21 bp, synthetic construct
  source 1..21: mol_type = other DNA; mol_type = other DNA
tctaaggttccgctgatgccg

SEQ ID NO: 10725 - DNA, 21 bp, synthetic construct
  source 1..21: mol_type = other DNA; mol_type = other DNA
ctttcgaagatgccgtttggg

SEQ ID NO: 10726 - DNA, 21 bp, synthetic construct
  source 1..21: mol_type = other DNA; mol_type = other DNA
cagtggtcttcgaagttgttt

SEQ ID NO: 10727 - DNA, 21 bp, synthetic construct
  source 1..21: mol_type = other DNA; mol_type = other DNA
atgtcgcttaagggggttaat

SEQ ID NO: 10728 - DNA, 21 bp, synthetic construct
  source 1..21: mol_type = other DNA; mol_type = other DNA
acgctggtgtctaatactaag

SEQ ID NO: 10729 - DNA, 30 bp, synthetic construct
  source 1..30: mol_type = other DNA; mol_type = other DNA
gtggggtggagtcggctggatcttactact

SEQ ID NO: 10730 - DNA, 30 bp, synthetic construct
  source 1..30: mol_type = other DNA; mol_type = other DNA
gggggtttgggtaatcttcgtcattgtgtg

SEQ ID NO: 10731 - DNA, 30 bp, synthetic construct
  source 1..30: mol_type = other DNA; mol_type = other DNA
cttgggtatgttagtattggggctgcttgt

SEQ ID NO: 10732 - DNA, 30 bp, synthetic construct
  source 1..30: mol_type = other DNA; mol_type = other DNA
cgggaggctggtcgtattgtgagtcaggag

SEQ ID NO: 10733 - DNA, 30 bp, synthetic construct
  source 1..30: mol_type = other DNA; mol_type = other DNA
cttcggtatagtaagactcagggggagtct

SEQ ID NO: 10734 - DNA, 30 bp, synthetic construct
  source 1..30: mol_type = other DNA; mol_type = other DNA
aagccttatgcgcttaatggtagggaggtg

SEQ ID NO: 10735 - DNA, 30 bp, synthetic construct
  source 1..30: mol_type = other DNA; mol_type = other DNA
tattctctgacgggtgggtctatttgtctt

SEQ ID NO: 10736 - DNA, 30 bp, synthetic construct
  source 1..30: mol_type = other DNA; mol_type = other DNA
ctgggtccgcctcctgctattgggaagtgt

SEQ ID NO: 10737 - DNA, 30 bp, synthetic construct
  source 1..30: mol_type = other DNA; mol_type = other DNA
cttggttttactaagtcgtctggttcggat

SEQ ID NO: 10738 - DNA, 30 bp, synthetic construct
  source 1..30: mol_type = other DNA; mol_type = other DNA
tcgccgtatgctaggagttctgcgggggtg

SEQ ID NO: 10739 - DNA, 30 bp, synthetic construct
  source 1..30: mol_type = other DNA; mol_type = other DNA
ttgggttgggcttcgaattcggtggcttct

SEQ ID NO: 10740 - DNA, 30 bp, synthetic construct
  source 1..30: mol_type = other DNA; mol_type = other DNA
tcgtcgattaatggtccgccgaagtggtcg

SEQ ID NO: 10741 - DNA, 30 bp, synthetic construct
  source 1..30: mol_type = other DNA; mol_type = other DNA
ttggggtttgctcgtactggtgctgcggat

SEQ ID NO: 10742 - DNA, 30 bp, synthetic construct
  source 1..30: mol_type = other DNA; mol_type = other DNA
aagacgatgaatgggatgtctagggctatt

SEQ ID NO: 10743 - DNA, 30 bp, synthetic construct
  source 1..30: mol_type = other DNA; mol_type = other DNA
aagcctcttcatgcgttggggtctgtgttg

SEQ ID NO: 10744 - DNA, 30 bp, synthetic construct
  source 1..30: mol_type = other DNA; mol_type = other DNA
ttttggcctaatagtagtctgcctattcgg

SEQ ID NO: 10745 - DNA, 30 bp, synthetic construct
  source 1..30: mol_type = other DNA; mol_type = other DNA
cagcgtttttcggctgcttctgtttcgccg

SEQ ID NO: 10746 - DNA, 30 bp, synthetic construct
  source 1..30: mol_type = other DNA; mol_type = other DNA
ggtaatatgctggcgaggcagagtgcgttt

SEQ ID NO: 10747 - DNA, 30 bp, synthetic construct
  source 1..30: mol_type = other DNA; mol_type = other DNA
ctgcgttattcggttgcgggttcttcggtt

SEQ ID NO: 10748 - DNA, 30 bp, synthetic construct
  source 1..30: mol_type = other DNA; mol_type = other DNA
attgggatggttcctgcgactgggttttgt

SEQ ID NO: 10749 - DNA, 30 bp, synthetic construct
  source 1..30: mol_type = other DNA; mol_type = other DNA
tctgctcttttgggggttccgaagtgtacg

SEQ ID NO: 10750 - DNA, 30 bp, synthetic construct
  source 1..30: mol_type = other DNA; mol_type = other DNA
gatcctcatagggttcatctgggtttgggt

SEQ ID NO: 10751 - DNA, 30 bp, synthetic construct
  source 1..30: mol_type = other DNA; mol_type = other DNA
ggggtgttgaagagtttgacttggacgggg

SEQ ID NO: 10752 - DNA, 30 bp, synthetic construct
  source 1..30: mol_type = other DNA; mol_type = other DNA
attcctttttcgcgggttaatccggatacg

SEQ ID NO: 10753 - DNA, 30 bp, synthetic construct
  source 1..30: mol_type = other DNA; mol_type = other DNA
aatctgattgtggggtttgatccgatggcg

SEQ ID NO: 10754 - DNA, 30 bp, synthetic construct
  source 1..30: mol_type = other DNA; mol_type = other DNA
ctgcttccgaatttggtgggttctagggcg

SEQ ID NO: 10755 - DNA, 30 bp, synthetic construct
  source 1..30: mol_type = other DNA; mol_type = other DNA
gctggtgggcatccggaggggtatgttaat

SEQ ID NO: 10756 - DNA, 21 bp, synthetic construct
  source 1..21: mol_type = other DNA; mol_type = other DNA
tattggactcagcggtatgct

SEQ ID NO: 10757 - DNA, 21 bp, synthetic construct
  source 1..21: mol_type = other DNA; mol_type = other DNA
tattggggtcagagggctgtt

SEQ ID NO: 10758 - DNA, 21 bp, synthetic construct
  source 1..21: mol_type = other DNA; mol_type = other DNA
tattattcgcagcagtctcgg

SEQ ID NO: 10759 - DNA, 21 bp, synthetic construct
  source 1..21: mol_type = other DNA; mol_type = other DNA
ttttggacgcagaagggttct

SEQ ID NO: 10760 - DNA, 21 bp, synthetic construct
  source 1..21: mol_type = other DNA; mol_type = other DNA
tattggtcgcagcgtgcgttt

SEQ ID NO: 10761 - DNA, 21 bp, synthetic construct
  source 1..21: mol_type = other DNA; mol_type = other DNA
tattttggtcagagttgtagg

SEQ ID NO: 10762 - DNA, 21 bp, synthetic construct
  source 1..21: mol_type = other DNA; mol_type = other DNA
tttatgtatcagaaggggtgt

SEQ ID NO: 10763 - DNA, 21 bp, synthetic construct
  source 1..21: mol_type = other DNA; mol_type = other DNA
gctactcgggatttgcatagg

SEQ ID NO: 10764 - DNA, 21 bp, synthetic construct
  source 1..21: mol_type = other DNA; mol_type = other DNA
tttatgcgtcagtctagttgt

SEQ ID NO: 10765 - DNA, 21 bp, synthetic construct
  source 1..21: mol_type = other DNA; mol_type = other DNA
tattggggtcaggggaggtgt

SEQ ID NO: 10766 - DNA, 21 bp, synthetic construct
  source 1..21: mol_type = other DNA; mol_type = other DNA
ttttggggtcagaggactggt

SEQ ID NO: 10767 - DNA, 21 bp, synthetic construct
  source 1..21: mol_type = other DNA; mol_type = other DNA
ttttctcatcagcgttcgctt

SEQ ID NO: 10768 - DNA, 21 bp, synthetic construct
  source 1..21: mol_type = other DNA; mol_type = other DNA
tttactttgcagcgttgtctt

SEQ ID NO: 10769 - DNA, 21 bp, synthetic construct
  source 1..21: mol_type = other DNA; mol_type = other DNA
tattttgcgcagcatgggttt

SEQ ID NO: 10770 - DNA, 21 bp, synthetic construct
  source 1..21: mol_type = other DNA; mol_type = other DNA
tattttggtcagggtcggagt

SEQ ID NO: 10771 - DNA, 21 bp, synthetic construct
  source 1..21: mol_type = other DNA; mol_type = other DNA
cggttgtttgttaaggaggcg

SEQ ID NO: 10772 - DNA, 21 bp, synthetic construct
  source 1..21: mol_type = other DNA; mol_type = other DNA
tttcgttctcagcagcggacg

SEQ ID NO: 10773 - DNA, 21 bp, synthetic construct
  source 1..21: mol_type = other DNA; mol_type = other DNA
tttttgtcgcagcgttgtgcg

SEQ ID NO: 10774 - DNA, 21 bp, synthetic construct
  source 1..21: mol_type = other DNA; mol_type = other DNA
ttttttaagcaggtgggtaag

SEQ ID NO: 10775 - DNA, 21 bp, synthetic construct
  source 1..21: mol_type = other DNA; mol_type = other DNA
tttggttttcagaagagtcag

SEQ ID NO: 10776 - DNA, 21 bp, synthetic construct
  source 1..21: mol_type = other DNA; mol_type = other DNA
tttattgctcagcagcggagg

SEQ ID NO: 10777 - DNA, 21 bp, synthetic construct
  source 1..21: mol_type = other DNA; mol_type = other DNA
tttagtctgcagaagcggtgg

SEQ ID NO: 10778 - DNA, 21 bp, synthetic construct
  source 1..21: mol_type = other DNA; mol_type = other DNA
tttgttggtcagagggggtgt

SEQ ID NO: 10779 - DNA, 21 bp, synthetic construct
  source 1..21: mol_type = other DNA; mol_type = other DNA
tttaggtctcagcagttttgt

SEQ ID NO: 10780 - DNA, 21 bp, synthetic construct
  source 1..21: mol_type = other DNA; mol_type = other DNA
tttattcatcagcggaatcag

SEQ ID NO: 10781 - DNA, 21 bp, synthetic construct
  source 1..21: mol_type = other DNA; mol_type = other DNA
ttttctgctcagaggtgtgct

SEQ ID NO: 10782 - DNA, 21 bp, synthetic construct
  source 1..21: mol_type = other DNA; mol_type = other DNA
tttcttagtcagaagtgtcat

SEQ ID NO: 10783 - DNA, 21 bp, synthetic construct
  source 1..21: mol_type = other DNA; mol_type = other DNA
tttcattctcaggggcggtcg

SEQ ID NO: 10784 - DNA, 21 bp, synthetic construct
  source 1..21: mol_type = other DNA; mol_type = other DNA
tggtatagtcagatgaagggg

SEQ ID NO: 10785 - DNA, 21 bp, synthetic construct
  source 1..21: mol_type = other DNA; mol_type = other DNA
tgtgatgggggtgtgcggatg

SEQ ID NO: 10786 - DNA, 21 bp, synthetic construct
  source 1..21: mol_type = other DNA; mol_type = other DNA
gtggggtataagggtgtgggt

SEQ ID NO: 10787 - DNA, 21 bp, synthetic construct
  source 1..21: mol_type = other DNA; mol_type = other DNA
ttttttaagcaggttcattgt

SEQ ID NO: 10788 - DNA, 21 bp, synthetic construct
  source 1..21: mol_type = other DNA; mol_type = other DNA
tttgcttatcagcgggctagt

SEQ ID NO: 10789 - DNA, 21 bp, synthetic construct
  source 1..21: mol_type = other DNA; mol_type = other DNA
tttggggcgcagaaggtttat

SEQ ID NO: 10790 - DNA, 21 bp, synthetic construct
  source 1..21: mol_type = other DNA; mol_type = other DNA
gcttgtaatgattcggcgagg

SEQ ID NO: 10791 - DNA, 21 bp, synthetic construct
  source 1..21: mol_type = other DNA; mol_type = other DNA
tattttttgcagaagccttgt

SEQ ID NO: 10792 - DNA, 21 bp, synthetic construct
  source 1..21: mol_type = other DNA; mol_type = other DNA
aattgtgcgcatgtttcgggg

SEQ ID NO: 10793 - DNA, 21 bp, synthetic construct
  source 1..21: mol_type = other DNA; mol_type = other DNA
gcgacgaagcctgcgctgagt

SEQ ID NO: 10794 - DNA, 21 bp, synthetic construct
  source 1..21: mol_type = other DNA; mol_type = other DNA
caggatccgattaaggctcgt

SEQ ID NO: 10795 - DNA, 21 bp, synthetic construct
  source 1..21: mol_type = other DNA; mol_type = other DNA
ctgagtaatactaagtgtgtt

SEQ ID NO: 10796 - DNA, 21 bp, synthetic construct
  source 1..21: mol_type = other DNA; mol_type = other DNA
gggcttaagagtcttacgccg

SEQ ID NO: 10797 - DNA, 30 bp, synthetic construct
  source 1..30: mol_type = other DNA; mol_type = other DNA
cgtttggtgacgaataagttggttcagctg

SEQ ID NO: 10798 - DNA, 30 bp, synthetic construct
  source 1..30: mol_type = other DNA; mol_type = other DNA
cgtttggcgtatatgactgatacgttgttg

SEQ ID NO: 10799 - DNA, 30 bp, synthetic construct
  source 1..30: mol_type = other DNA; mol_type = other DNA
tatcggcggatggatatggatagggttgtg

SEQ ID NO: 10800 - DNA, 30 bp, synthetic construct
  source 1..30: mol_type = other DNA; mol_type = other DNA
ttgactggggggcagccgcgtaataggctt

SEQ ID NO: 10801 - DNA, 30 bp, synthetic construct
  source 1..30: mol_type = other DNA; mol_type = other DNA
tggtggatgggttctgataattcgggtatt

SEQ ID NO: 10802 - DNA, 30 bp, synthetic construct
  source 1..30: mol_type = other DNA; mol_type = other DNA
gttatggggtatttgactgaggggtgtact

SEQ ID NO: 10803 - DNA, 30 bp, synthetic construct
  source 1..30: mol_type = other DNA; mol_type = other DNA
tgtcctggggatagtcagggtagtgtgggt

SEQ ID NO: 10804 - DNA, 30 bp, synthetic construct
  source 1..30: mol_type = other DNA; mol_type = other DNA
tcgaagacggctcgtgaggcttttccgttt

SEQ ID NO: 10805 - DNA, 30 bp, synthetic construct
  source 1..30: mol_type = other DNA; mol_type = other DNA
gttcgggaggggtttgagggttatggtctt

SEQ ID NO: 10806 - DNA, 30 bp, synthetic construct
  source 1..30: mol_type = other DNA; mol_type = other DNA
gagaattttgatcggactcgtcctaggtct

SEQ ID NO: 10807 - DNA, 30 bp, synthetic construct
  source 1..30: mol_type = other DNA; mol_type = other DNA
tcttatgctgatgctttttgtgataggtgt

SEQ ID NO: 10808 - DNA, 30 bp, synthetic construct
  source 1..30: mol_type = other DNA; mol_type = other DNA
acttatagtggggatggtgatgtggcgtgt

SEQ ID NO: 10809 - DNA, 30 bp, synthetic construct
  source 1..30: mol_type = other DNA; mol_type = other DNA
aggcttagggttgatatgggtagttgggct

SEQ ID NO: 10810 - DNA, 30 bp, synthetic construct
  source 1..30: mol_type = other DNA; mol_type = other DNA
aattatgattctaggtcttgtagtcgttgt

SEQ ID NO: 10811 - DNA, 30 bp, synthetic construct
  source 1..30: mol_type = other DNA; mol_type = other DNA
gcttttccgaatctggtgtcttctcgtttt

SEQ ID NO: 10812 - DNA, 30 bp, synthetic construct
  source 1..30: mol_type = other DNA; mol_type = other DNA
agttatgtttcttctagttcgacttgtatt

SEQ ID NO: 10813 - DNA, 30 bp, synthetic construct
  source 1..30: mol_type = other DNA
cagtatttgagtgggcgtgttggtcagtgt

SEQ ID NO: 10814 - DNA, 30 bp, synthetic construct
  source 1..30: mol_type = other DNA
ggtatttcgttgaatactaggaatcatctg

SEQ ID NO: 10815 - DNA, 30 bp, synthetic construct
  source 1..30: mol_type = other DNA
ttgtcgaatgattcgaattgggttaattgt

SEQ ID NO: 10816 - DNA, 30 bp, synthetic construct
  source 1..30: mol_type = other DNA
cgtgaggcttggaagcgtgagtctggtttg

SEQ ID NO: 10817 - DNA, 30 bp, synthetic construct
  source 1..30: mol_type = other DNA
tctactgttagtgttgatcggcctagggtg

SEQ ID NO: 10818 - DNA, 30 bp, synthetic construct
  source 1..30: mol_type = other DNA
cttatgaagacgtcttatcttgagtctgat

SEQ ID NO: 10819 - DNA, 30 bp, synthetic construct
  source 1..30: mol_type = other DNA
tcgcgtagtacggcgtctatggtttgttgt

SEQ ID NO: 10820 - DNA, 30 bp, synthetic construct
  source 1..30: mol_type = other DNA
tgtcctgagaggtctcatagtagtgtggat

SEQ ID NO: 10821 - DNA, 30 bp, synthetic construct
  source 1..30: mol_type = other DNA
ttttttcctaatcataataagagtgcgcag

SEQ ID NO: 10822 - DNA, 30 bp, synthetic construct
  source 1..30: mol_type = other DNA; mol_type = other DNA
atggataggctggatcggtttacggcttgt

SEQ ID NO: 10823 - DNA, 30 bp, synthetic construct
  source 1..30: mol_type = other DNA; mol_type = other DNA
gagttgttttctcagtctcgtagtgggtat

SEQ ID NO: 10824 - DNA, 30 bp, synthetic construct
  source 1..30: mol_type = other DNA; mol_type = other DNA
atgtatcatcttaatgtgcctaagggggtt

SEQ ID NO: 10825 - DNA, 30 bp, synthetic construct
  source 1..30: mol_type = other DNA; mol_type = other DNA
ttgttgccgaatgggcgtgggcttgttacg

SEQ ID NO: 10826 - DNA, 30 bp, synthetic construct
  source 1..30: mol_type = other DNA; mol_type = other DNA
tattttcctaataagttggtggaggttgcg

SEQ ID NO: 10827 - DNA, 21 bp, synthetic construct
  source 1..21: mol_type = other DNA; mol_type = other DNA
tatcataaagcgatgcagaat

SEQ ID NO: 10828 - DNA, 21 bp, synthetic construct
  source 1..21: mol_type = other DNA; mol_type = other DNA
tatccctctggtatgcgactt

SEQ ID NO: 10829 - DNA, 21 bp, synthetic construct
  source 1..21: mol_type = other DNA; mol_type = other DNA
tatcacaaaaatatgccaaat

SEQ ID NO: 10830 - DNA, 21 bp, synthetic construct
  source 1..21: mol_type = other DNA; mol_type = other DNA
tacccgtttccgactgaggcg

SEQ ID NO: 10831 - DNA, 21 bp, synthetic construct
  source 1..21: mol_type = other DNA; mol_type = other DNA
gtactaggccgcccatcctac

SEQ ID NO: 10832 - DNA, 21 bp, synthetic construct
  source 1..21: mol_type = other DNA; mol_type = other DNA
aacgcacgtgagggtcgtaat

SEQ ID NO: 10833 - DNA, 21 bp, synthetic construct
  source 1..21: mol_type = other DNA; mol_type = other DNA
tgccgggcgaattgtgtccca

SEQ ID NO: 10834 - DNA, 21 bp, synthetic construct
  source 1..21: mol_type = other DNA; mol_type = other DNA
ctgcatcgttcgggcatcgat

SEQ ID NO: 10835 - DNA, 21 bp, synthetic construct
  source 1..21: mol_type = other DNA; mol_type = other DNA
tatttttcgggtatacagagc

SEQ ID NO: 10836 - DNA, 21 bp, synthetic construct
  source 1..21: mol_type = other DNA; mol_type = other DNA
atgatcagggatgcatacccc

SEQ ID NO: 10837 - DNA, 21 bp, synthetic construct
  source 1..21: mol_type = other DNA; mol_type = other DNA
gatcataaagggaatatcgct

SEQ ID NO: 10838 - DNA, 21 bp, synthetic construct
  source 1..21: mol_type = other DNA; mol_type = other DNA
catcataagctacaaactctc

SEQ ID NO: 10839 - DNA, 21 bp, synthetic construct
  source 1..21: mol_type = other DNA; mol_type = other DNA
aaacccgcgtccaccagttgg

SEQ ID NO: 10840 - DNA, 21 bp, synthetic construct
  source 1..21: mol_type = other DNA; mol_type = other DNA
gtcgcgacccatggggcggga

SEQ ID NO: 10841 - DNA, 21 bp, synthetic construct
  source 1..21: mol_type = other DNA; mol_type = other DNA
tattggagcggcataccggaa

SEQ ID NO: 10842 - DNA, 21 bp, synthetic construct
  source 1..21: mol_type = other DNA; mol_type = other DNA
cggtccaaggcagacgatcat

SEQ ID NO: 10843 - DNA, 21 bp, synthetic construct
  source 1..21: mol_type = other DNA; mol_type = other DNA
tacgctaaggggggatctaac

SEQ ID NO: 10844 - DNA, 21 bp, synthetic construct
  source 1..21: mol_type = other DNA
tttccatatggccaaaaaatg

SEQ ID NO: 10845 - DNA, 21 bp, synthetic construct
  source 1..21: mol_type = other DNA
accgatttgacggtatacaga

SEQ ID NO: 10846 - DNA, 21 bp, synthetic construct
  source 1..21: mol_type = other DNA; mol_type = other DNA
gacatgtcaacgcggacctgg

SEQ ID NO: 10847 - DNA, 21 bp, synthetic construct
  source 1..21: mol_type = other DNA; mol_type = other DNA
tgtaagcagggatgtatgact

SEQ ID NO: 10848 - DNA, 21 bp, synthetic construct
  source 1..21: mol_type = other DNA; mol_type = other DNA
ttacataaatttgctgagaac

SEQ ID NO: 10849 - DNA, 21 bp, synthetic construct
  source 1..21: mol_type = other DNA; mol_type = other DNA
tatgtaaagtcgcaggtaatc

SEQ ID NO: 10850 - DNA, 21 bp, synthetic construct
  source 1..21: mol_type = other DNA; mol_type = other DNA
tgcaaccaaaaatgtgctgca

SEQ ID NO: 10851 - DNA, 21 bp, synthetic construct
  source 1..21: mol_type = other DNA; mol_type = other DNA
tgtaataaattatgtacccct

SEQ ID NO: 10852 - DNA, 21 bp, synthetic construct
  source 1..21: mol_type = other DNA; mol_type = other DNA
agttacgacggaaccgcggcc

SEQ ID NO: 10853 - DNA, 21 bp, synthetic construct
  source 1..21: mol_type = other DNA; mol_type = other DNA
acttttaaacacaatcccttc

SEQ ID NO: 10854 - DNA, 21 bp, synthetic construct
  source 1..21: mol_type = other DNA; mol_type = other DNA
gttaaatcctccaatggggtc

SEQ ID NO: 10855 - DNA, 21 bp, synthetic construct
  source 1..21: mol_type = other DNA; mol_type = other DNA
cgcgagtcaccatacaagctt

SEQ ID NO: 10856 - DNA, 21 bp, synthetic construct
  source 1..21: mol_type = other DNA; mol_type = other DNA
tgtcctagattaggctgtgcg

SEQ ID NO: 10857 - DNA, 21 bp, synthetic construct
  source 1..21: mol_type = other DNA; mol_type = other DNA
ccccatgtacgtcaaactatc

SEQ ID NO: 10858 - DNA, 21 bp, synthetic construct
  source 1..21: mol_type = other DNA; mol_type = other DNA
tgtaaacagacctgtatgatg

SEQ ID NO: 10859 - DNA, 21 bp, synthetic construct
  source 1..21: mol_type = other DNA; mol_type = other DNA
agagttaacggtgattggcct

SEQ ID NO: 10860 - DNA, 21 bp, synthetic construct
  source 1..21: mol_type = other DNA; mol_type = other DNA
tgcgataagaagtgcacgact

SEQ ID NO: 10861 - DNA, 21 bp, synthetic construct
  source 1..21: mol_type = other DNA; mol_type = other DNA
tgcggtcaagcctgtaaaccg

SEQ ID NO: 10862 - DNA, 21 bp, synthetic construct
  source 1..21: mol_type = other DNA; mol_type = other DNA
tatcatgcctcagggccaaaa

SEQ ID NO: 10863 - DNA, 21 bp, synthetic construct
  source 1..21: mol_type = other DNA; mol_type = other DNA
aaggaagggcccgtctggcct

SEQ ID NO: 10864 - DNA, 21 bp, synthetic construct
  source 1..21: mol_type = other DNA; mol_type = other DNA
cacaccaggctaagcaacggc

SEQ ID NO: 10865 - DNA, 21 bp, synthetic construct
  source 1..21: mol_type = other DNA; mol_type = other DNA
ctgctcgcaagctcagagtgg

SEQ ID NO: 10866 - DNA, 21 bp, synthetic construct
  source 1..21: mol_type = other DNA; mol_type = other DNA
tgcactaagaccagagactgc

SEQ ID NO: 10867 - DNA, 21 bp, synthetic construct
  source 1..21: mol_type = other DNA; mol_type = other DNA
tgtgaaggcaggcacacgtgc

SEQ ID NO: 10868 - DNA, 21 bp, synthetic construct
  source 1..21: mol_type = other DNA; mol_type = other DNA
tgcaaccaacgctgtgcacca

SEQ ID NO: 10869 - DNA, 21 bp, synthetic construct
  source 1..21: mol_type = other DNA; mol_type = other DNA
tgcaacgtaacacgtaactgt

SEQ ID NO: 10870 - DNA, 21 bp, synthetic construct
  source 1..21: mol_type = other DNA; mol_type = other DNA
ttgcggaacgggaccaatccc

SEQ ID NO: 10871 - DNA, 21 bp, synthetic construct
  source 1..21: mol_type = other DNA; mol_type = other DNA
tgctccggtagccagaaatgc

SEQ ID NO: 10872 - DNA, 21 bp, synthetic construct
  source 1..21: mol_type = other DNA; mol_type = other DNA
ccctgcaagacgggaggtgaa

SEQ ID NO: 10873 - DNA, 21 bp, synthetic construct
  source 1..21: mol_type = other DNA; mol_type = other DNA
gagccggtcgccaggagttgg

SEQ ID NO: 10874 - DNA, 21 bp, synthetic construct
  source 1..21: mol_type = other DNA; mol_type = other DNA
gtggcatacgatgcgatagtt

SEQ ID NO: 10875 - DNA, 21 bp, synthetic construct
  source 1..21: mol_type = other DNA; mol_type = other DNA
tgtagagcggactgccaccca

SEQ ID NO: 10876 - DNA, 21 bp, synthetic construct
  source 1..21: mol_type = other DNA; mol_type = other DNA
tgcgctctgaagaactgtcca

SEQ ID NO: 10877 - DNA, 21 bp, synthetic construct
  source 1..21: mol_type = other DNA; mol_type = other DNA
caagatgtgcggcaaacgaaa

SEQ ID NO: 10878 - DNA, 21 bp, synthetic construct
  source 1..21: mol_type = other DNA; mol_type = other DNA
tgtaggggtgtgacggggtgt

SEQ ID NO: 10879 - DNA, 21 bp, synthetic construct
  source 1..21: mol_type = other DNA; mol_type = other DNA
tgtgagaaggtactcaagcct

SEQ ID NO: 10880 - DNA, 21 bp, synthetic construct
  source 1..21: mol_type = other DNA; mol_type = other DNA
tattggcatgctaaagttgaa

SEQ ID NO: 10881 - DNA, 21 bp, synthetic construct
  source 1..21: mol_type = other DNA; mol_type = other DNA
cagttcgtaagatcagaacct

SEQ ID NO: 10882 - DNA, 21 bp, synthetic construct
  source 1..21: mol_type = other DNA; mol_type = other DNA
gatccggtcagtcctaagtgg

SEQ ID NO: 10883 - DNA, 21 bp, synthetic construct
  source 1..21: mol_type = other DNA; mol_type = other DNA
tgcaggacgacgtgtcacgag

SEQ ID NO: 10884 - DNA, 21 bp, synthetic construct
  source 1..21: mol_type = other DNA; mol_type = other DNA
tgcaaatctgcgtgtcacgaa

SEQ ID NO: 10885 - DNA, 21 bp, synthetic construct
  source 1..21: mol_type = other DNA; mol_type = other DNA
aacctgcgggggcaggctgcg

SEQ ID NO: 10886 - DNA, 21 bp, synthetic construct
  source 1..21: mol_type = other DNA; mol_type = other DNA
tgtgcgcgtaattcgacatgt

SEQ ID NO: 10887 - DNA, 21 bp, synthetic construct
  source 1..21: mol_type = other DNA; mol_type = other DNA
gtttatcaccgcacccaggag

SEQ ID NO: 10888 - DNA, 21 bp, synthetic construct
  source 1..21: mol_type = other DNA; mol_type = other DNA
tgcaaagatggtcctatgctt

SEQ ID NO: 10889 - DNA, 21 bp, synthetic construct
  source 1..21: mol_type = other DNA; mol_type = other DNA
tggtacgatggtactggcccg

SEQ ID NO: 10890 - DNA, 21 bp, synthetic construct
  source 1..21: mol_type = other DNA; mol_type = other DNA
atcatgagttcatctgcgtgg

SEQ ID NO: 10891 - DNA, 21 bp, synthetic construct
  source 1..21: mol_type = other DNA; mol_type = other DNA
tgtaaggggcaaactatggat

SEQ ID NO: 10892 - DNA, 21 bp, synthetic construct
  source 1..21: mol_type = other DNA; mol_type = other DNA
tattcaaaatctggccccggg

SEQ ID NO: 10893 - DNA, 21 bp, synthetic construct
  source 1..21: mol_type = other DNA; mol_type = other DNA
aacatggagtcccgcgattgg

SEQ ID NO: 10894 - DNA, 21 bp, synthetic construct
  source 1..21: mol_type = other DNA; mol_type = other DNA
tgccgcatcggggtctgtccg

SEQ ID NO: 10895 - DNA, 21 bp, synthetic construct
  source 1..21: mol_type = other DNA; mol_type = other DNA
aggaacgactataactacccc

SEQ ID NO: 10896 - DNA, 21 bp, synthetic construct
  source 1..21: mol_type = other DNA; mol_type = other DNA
ccgtgtaaaaatggaatggcg

SEQ ID NO: 10897 - DNA, 21 bp, synthetic construct
  source 1..21: mol_type = other DNA; mol_type = other DNA
tgccataagttgaattgtgcc

SEQ ID NO: 10898 - DNA, 21 bp, synthetic construct
  source 1..21: mol_type = other DNA; mol_type = other DNA
tgtgctctacagaagtgcgct

SEQ ID NO: 10899 - DNA, 21 bp, synthetic construct
  source 1..21: mol_type = other DNA; mol_type = other DNA
gctggggatgactgtaagaaa

SEQ ID NO: 10900 - DNA, 21 bp, synthetic construct
  source 1..21: mol_type = other DNA; mol_type = other DNA
tataatggcgggccgatgcag

SEQ ID NO: 10901 - DNA, 21 bp, synthetic construct
  source 1..21: mol_type = other DNA; mol_type = other DNA
ccagaggacttccaccagctg

SEQ ID NO: 10902 - DNA, 21 bp, synthetic construct
  source 1..21: mol_type = other DNA; mol_type = other DNA
tgtgccaaccatacaaagccc

SEQ ID NO: 10903 - DNA, 21 bp, synthetic construct
  source 1..21: mol_type = other DNA; mol_type = other DNA
tataaatctgattgttgtgta

SEQ ID NO: 10904 - DNA, 21 bp, synthetic construct
  source 1..21: mol_type = other DNA; mol_type = other DNA
tttactaagaccaattgtaat

SEQ ID NO: 10905 - DNA, 21 bp, synthetic construct
  source 1..21: mol_type = other DNA; mol_type = other DNA
tatacacggaccagcccaatt

SEQ ID NO: 10906 - DNA, 21 bp, synthetic construct
  source 1..21: mol_type = other DNA; mol_type = other DNA
tgcatcaagaatacagcttgc

SEQ ID NO: 10907 - DNA, 21 bp, synthetic construct
  source 1..21: mol_type = other DNA; mol_type = other DNA
atgtatatgtccgggaaaggc

SEQ ID NO: 10908 - DNA, 21 bp, synthetic construct
  source 1..21: mol_type = other DNA; mol_type = other DNA
ccagaccatgacaagtgtaag

SEQ ID NO: 10909 - DNA, 21 bp, synthetic construct
  source 1..21: mol_type = other DNA; mol_type = other DNA
cgagccgaagattacttcccc

SEQ ID NO: 10910 - DNA, 21 bp, synthetic construct
  source 1..21: mol_type = other DNA; mol_type = other DNA
acgaaagggggcacgtacggg

SEQ ID NO: 10911 - DNA, 21 bp, synthetic construct
  source 1..21: mol_type = other DNA; mol_type = other DNA
tgcatgtctacgaggtgtgaa

SEQ ID NO: 10912 - DNA, 21 bp, synthetic construct
  source 1..21: mol_type = other DNA; mol_type = other DNA
ccgggtgacacttaccctgca

SEQ ID NO: 10913 - DNA, 21 bp, synthetic construct
  source 1..21: mol_type = other DNA; mol_type = other DNA
tgcggaaaactgtgttcgcac

SEQ ID NO: 10914 - DNA, 21 bp, synthetic construct
  source 1..21: mol_type = other DNA; mol_type = other DNA
taccacaaggcgtcgatcggc

SEQ ID NO: 10915 - DNA, 21 bp, synthetic construct
  source 1..21: mol_type = other DNA; mol_type = other DNA
actaggaacggtatgaacgct

SEQ ID NO: 10916 - DNA, 21 bp, synthetic construct
  source 1..21: mol_type = other DNA; mol_type = other DNA
tgccgcgccaacagtgggtgt

SEQ ID NO: 10917 - DNA, 21 bp, synthetic construct
  source 1..21: mol_type = other DNA; mol_type = other DNA
tacaagcagggtgtcatgaac

SEQ ID NO: 10918 - DNA, 21 bp, synthetic construct
  source 1..21: mol_type = other DNA; mol_type = other DNA
atgaagggaggctccgctggc

SEQ ID NO: 10919 - DNA, 21 bp, synthetic construct
  source 1..21: mol_type = other DNA; mol_type = other DNA
cgggatggcatgcgtggattt

SEQ ID NO: 10920 - DNA, 21 bp, synthetic construct
  source 1..21: mol_type = other DNA; mol_type = other DNA
cgcatggatacaggtaagtgg

SEQ ID NO: 10921 - DNA, 21 bp, synthetic construct
  source 1..21: mol_type = other DNA; mol_type = other DNA
caccaccgagcgcaggacaac

SEQ ID NO: 10922 - DNA, 21 bp, synthetic construct
  source 1..21: mol_type = other DNA; mol_type = other DNA
tgtaacgcgatgaaatgtgca

SEQ ID NO: 10923 - DNA, 21 bp, synthetic construct
  source 1..21: mol_type = other DNA; mol_type = other DNA
caactgcaatctcaacaatgg

SEQ ID NO: 10924 - DNA, 21 bp, synthetic construct
  source 1..21: mol_type = other DNA; mol_type = other DNA
gtcttagaggacagatcgtgg

SEQ ID NO: 10925 - DNA, 21 bp, synthetic construct
  source 1..21: mol_type = other DNA; mol_type = other DNA
tatgcgcgagggagcgcgtta

SEQ ID NO: 10926 - DNA, 21 bp, synthetic construct
  source 1..21: mol_type = other DNA; mol_type = other DNA
tgtacccaaaaaggctgttcc

SEQ ID NO: 10927 - DNA, 21 bp, synthetic construct
  source 1..21: mol_type = other DNA; mol_type = other DNA
aacgaagcggcgagcacatgg

SEQ ID NO: 10928 - DNA, 21 bp, synthetic construct
  source 1..21: mol_type = other DNA; mol_type = other DNA
tggctagttaaaacgtccggg

SEQ ID NO: 10929 - DNA, 21 bp, synthetic construct
  source 1..21: mol_type = other DNA; mol_type = other DNA
tgcggttcgaaagtctgcaac

SEQ ID NO: 10930 - DNA, 21 bp, synthetic construct
  source 1..21: mol_type = other DNA; mol_type = other DNA
tgttctaaaagctgcatggtt

SEQ ID NO: 10931 - DNA, 21 bp, synthetic construct
  source 1..21: mol_type = other DNA; mol_type = other DNA
tgctcgtctgtaaagtgcatg

SEQ ID NO: 10932 - DNA, 21 bp, synthetic construct
  source 1..21: mol_type = other DNA; mol_type = other DNA
ttatggcgcacggagcctgac

SEQ ID NO: 10933 - DNA, 21 bp, synthetic construct
  source 1..21: mol_type = other DNA; mol_type = other DNA
tgcggacaaaaatgttctcac

SEQ ID NO: 10934 - DNA, 21 bp, synthetic construct
  source 1..21: mol_type = other DNA; mol_type = other DNA
tgcgcagatcgctgcaattcg

SEQ ID NO: 10935 - DNA, 21 bp, synthetic construct
  source 1..21: mol_type = other DNA; mol_type = other DNA
tactccaaatccatgcctaat

SEQ ID NO: 10936 - DNA, 21 bp, synthetic construct
  source 1..21: mol_type = other DNA; mol_type = other DNA
ataatggcccacaataattgg

SEQ ID NO: 10937 - DNA, 21 bp, synthetic construct
  source 1..21: mol_type = other DNA; mol_type = other DNA
tgcccgaaacagttatgcata

SEQ ID NO: 10938 - DNA, 21 bp, synthetic construct
  source 1..21: mol_type = other DNA; mol_type = other DNA
tgtaggctaggtgagtgtcac

SEQ ID NO: 10939 - DNA, 21 bp, synthetic construct
  source 1..21: mol_type = other DNA; mol_type = other DNA
gatctgcgagcaagccagtgg

SEQ ID NO: 10940 - DNA, 21 bp, synthetic construct
  source 1..21: mol_type = other DNA; mol_type = other DNA
tgcagggaccaatgcatgcaa

SEQ ID NO: 10941 - DNA, 21 bp, synthetic construct
  source 1..21: mol_type = other DNA; mol_type = other DNA
tacgcgaagtcgagtccctcg

SEQ ID NO: 10942 - DNA, 21 bp, synthetic construct
  source 1..21: mol_type = other DNA; mol_type = other DNA
cagtctgattataagtacttt

SEQ ID NO: 10943 - DNA, 21 bp, synthetic construct
  source 1..21: mol_type = other DNA; mol_type = other DNA
ttgtcgcgttcaggacgcgac

SEQ ID NO: 10944 - DNA, 21 bp, synthetic construct
  source 1..21: mol_type = other DNA; mol_type = other DNA
taccacaggcttgatgcgatg

SEQ ID NO: 10945 - DNA, 21 bp, synthetic construct
  source 1..21: mol_type = other DNA; mol_type = other DNA
atgaggtcgggctccggtcca

SEQ ID NO: 10946 - DNA, 21 bp, synthetic construct
  source 1..21: mol_type = other DNA; mol_type = other DNA
catccattggcctcgggctgg

SEQ ID NO: 10947 - DNA, 21 bp, synthetic construct
  source 1..21: mol_type = other DNA; mol_type = other DNA
ggggggactcgcggcaatacc

SEQ ID NO: 10948 - DNA, 21 bp, synthetic construct
  source 1..21: mol_type = other DNA; mol_type = other DNA
tacgctaagtcagcgcaaaac

SEQ ID NO: 10949 - DNA, 21 bp, synthetic construct
  source 1..21: mol_type = other DNA; mol_type = other DNA
actgtcggttcgcgcaccgcg

SEQ ID NO: 10950 - DNA, 21 bp, synthetic construct
  source 1..21: mol_type = other DNA; mol_type = other DNA
taccagaagaacatgatgaat

SEQ ID NO: 10951 - DNA, 21 bp, synthetic construct
  source 1..21: mol_type = other DNA; mol_type = other DNA
tggaaggactggatgcccaat

SEQ ID NO: 10952 - protein, 7 aa, synthetic construct
YSKSNNN

SEQ ID NO: 10953 - protein, 7 aa, synthetic construct
DHGINKW

SEQ ID NO: 10954 - protein, 7 aa, synthetic construct
STGVNKW

SEQ ID NO: 10955 - protein, 7 aa, synthetic construct
YAKGNIN

SEQ ID NO: 10956 - protein, 7 aa, synthetic construct
LHRQNID

SEQ ID NO: 10957 - protein, 7 aa, synthetic construct
HSKVNIN

SEQ ID NO: 10958 - protein, 7 aa, synthetic construct
YAKLNIN

SEQ ID NO: 10959 - protein, 7 aa, synthetic construct
YSKVNIN

SEQ ID NO: 10960 - protein, 7 aa, synthetic construct
YAKANYN

SEQ ID NO: 10961 - protein, 7 aa, synthetic construct
FSKQNYN

SEQ ID NO: 10962 - protein, 7 aa, synthetic construct
YAKSNNN

SEQ ID NO: 10963 - protein, 7 aa, synthetic construct
YSKSNIN

SEQ ID NO: 10964 - protein, 7 aa, synthetic construct
IDEWHHF

SEQ ID NO: 10965 - protein, 7 aa, synthetic construct
YAKANIN

SEQ ID NO: 10966 - protein, 7 aa, synthetic construct
YSKANCN

SEQ ID NO: 10967 - protein, 7 aa, synthetic construct
FSRMNDN

SEQ ID NO: 10968 - protein, 7 aa, synthetic construct
YAKIGYN

SEQ ID NO: 10969 - protein, 7 aa, synthetic construct
GNDYQSY

SEQ ID NO: 10970 - protein, 7 aa, synthetic construct
YAKSNIN

SEQ ID NO: 10971 - protein, 7 aa, synthetic construct
FSKANIN

SEQ ID NO: 10972 - protein, 7 aa, synthetic construct
YSRENYN

SEQ ID NO: 10973 - protein, 7 aa, synthetic construct
YARLNMN

SEQ ID NO: 10974 - protein, 7 aa, synthetic construct
YAKGNNN

SEQ ID NO: 10975 - protein, 7 aa, synthetic construct
TEETYYK

SEQ ID NO: 10976 - protein, 7 aa, synthetic construct
FAKGNIN

SEQ ID NO: 10977 - protein, 7 aa, synthetic construct
YAKQGNN

SEQ ID NO: 10978 - protein, 7 aa, synthetic construct
FSKLGYN

SEQ ID NO: 10979 - protein, 7 aa, synthetic construct
FAKAGYN

SEQ ID NO: 10980 - protein, 7 aa, synthetic construct
YSRFNDN

SEQ ID NO: 10981 - protein, 7 aa, synthetic construct
YSKAGCN

SEQ ID NO: 10982 - protein, 7 aa, synthetic construct
YAKQNIN

SEQ ID NO: 10983 - protein, 7 aa, synthetic construct
DNHSNKW

SEQ ID NO: 10984 - protein, 7 aa, synthetic construct
YAKHGYN

SEQ ID NO: 10985 - protein, 7 aa, synthetic construct
DGLSNKW

SEQ ID NO: 10986 - protein, 7 aa, synthetic construct
FAKTGYN

SEQ ID NO: 10987 - protein, 7 aa, synthetic construct
SNDTVYR

SEQ ID NO: 10988 - protein, 7 aa, synthetic construct
NGTSYSW

SEQ ID NO: 10989 - protein, 7 aa, synthetic construct
FSRMNHN

SEQ ID NO: 10990 - protein, 7 aa, synthetic construct
YSKQGIN

SEQ ID NO: 10991 - protein, 7 aa, synthetic construct
TNNTVYK

SEQ ID NO: 10992 - protein, 7 aa, synthetic construct
DVNGNYA

SEQ ID NO: 10993 - protein, 7 aa, synthetic construct
YSRHNDN

SEQ ID NO: 10994 - protein, 7 aa, synthetic construct
YAKANCN

SEQ ID NO: 10995 - protein, 7 aa, synthetic construct
LSRTSDN

SEQ ID NO: 10996 - protein, 7 aa, synthetic construct
YSRYGDN

SEQ ID NO: 10997 - protein, 7 aa, synthetic construct
YAKPGYN

SEQ ID NO: 10998 - protein, 7 aa, synthetic construct
YAKAGNN

SEQ ID NO: 10999 - protein, 7 aa, synthetic construct
YAKANNN

SEQ ID NO: 11000 - protein, 7 aa, synthetic construct
YSKQNMN

SEQ ID NO: 11001 - protein, 7 aa, synthetic construct
YAKQNMN

SEQ ID NO: 11002 - protein, 7 aa, synthetic construct
IVSTNGV

SEQ ID NO: 11003 - protein, 7 aa, synthetic construct
LAKTGIN

SEQ ID NO: 11004 - protein, 7 aa, synthetic construct
YAKAGIN

SEQ ID NO: 11005 - protein, 7 aa, synthetic construct
LSRLNII

SEQ ID NO: 11006 - protein, 7 aa, synthetic construct
FAKSGIN

SEQ ID NO: 11007 - protein, 7 aa, synthetic construct
DDVSRKW

SEQ ID NO: 11008 - protein, 7 aa, synthetic construct
YVKSDNG

SEQ ID NO: 11009 - protein, 7 aa, synthetic construct
VAHAGIG

SEQ ID NO: 11010 - protein, 7 aa, synthetic construct
FSKLGFN

SEQ ID NO: 11011 - protein, 7 aa, synthetic construct
YAKSGIN

SEQ ID NO: 11012 - protein, 7 aa, synthetic construct
YAKLGNN

SEQ ID NO: 11013 - protein, 7 aa, synthetic construct
YSKTNIN

SEQ ID NO: 11014 - protein, 7 aa, synthetic construct
FSRLSDN

SEQ ID NO: 11015 - protein, 7 aa, synthetic construct
LSKLNDN

SEQ ID NO: 11016 - protein, 7 aa, synthetic construct
YARTGSS

SEQ ID NO: 11017 - protein, 7 aa, synthetic construct
YSKAGIN

SEQ ID NO: 11018 - protein, 7 aa, synthetic construct
LHKLSNQ

SEQ ID NO: 11019 - protein, 7 aa, synthetic construct
YHKLNLV

SEQ ID NO: 11020 - protein, 7 aa, synthetic construct
YSRLDRD

SEQ ID NO: 11021 - protein, 7 aa, synthetic construct
YARIGDN

SEQ ID NO: 11022 - protein, 7 aa, synthetic construct
VESSSKW

SEQ ID NO: 11023 - protein, 7 aa, synthetic construct
YARPGYN

SEQ ID NO: 11024 - protein, 7 aa, synthetic construct
LAKLGPN

SEQ ID NO: 11025 - protein, 7 aa, synthetic construct
YSKHNMN

SEQ ID NO: 11026 - protein, 7 aa, synthetic construct
YAKTGIN

SEQ ID NO: 11027 - protein, 7 aa, synthetic construct
YAKNGIN

SEQ ID NO: 11028 - protein, 7 aa, synthetic construct
LSRTGDN

SEQ ID NO: 11029 - protein, 7 aa, synthetic construct
NDGESQW

SEQ ID NO: 11030 - protein, 7 aa, synthetic construct
YHASSYN

SEQ ID NO: 11031 - protein, 7 aa, synthetic construct
EAYSDRD

SEQ ID NO: 11032 - protein, 7 aa, synthetic construct
YSKTNCN

SEQ ID NO: 11033 - protein, 7 aa, synthetic construct
YSKSGQN

SEQ ID NO: 11034 - protein, 7 aa, synthetic construct
LARGADN

SEQ ID NO: 11035 - protein, 7 aa, synthetic construct
YARLGQN

SEQ ID NO: 11036 - protein, 7 aa, synthetic construct
YFAGKYD

SEQ ID NO: 11037 - protein, 7 aa, synthetic construct
LSKTGNN

SEQ ID NO: 11038 - protein, 7 aa, synthetic construct
LSRSSID

SEQ ID NO: 11039 - protein, 7 aa, synthetic construct
GRFYSDG

SEQ ID NO: 11040 - protein, 7 aa, synthetic construct
YSRHNHN

SEQ ID NO: 11041 - protein, 7 aa, synthetic construct
DKFDNYA

SEQ ID NO: 11042 - protein, 7 aa, synthetic construct
YAKENRN

SEQ ID NO: 11043 - protein, 7 aa, synthetic construct
LSKLNSN

SEQ ID NO: 11044 - protein, 7 aa, synthetic construct
LAKAGIN

SEQ ID NO: 11045 - protein, 7 aa, synthetic construct
LAKNGIN

SEQ ID NO: 11046 - protein, 7 aa, synthetic construct
ASGSSSW

SEQ ID NO: 11047 - protein, 7 aa, synthetic construct
YARLGSN

SEQ ID NO: 11048 - protein, 7 aa, synthetic construct
LSRMNFN

SEQ ID NO: 11049 - protein, 7 aa, synthetic construct
LSRSGDN

SEQ ID NO: 11050 - protein, 7 aa, synthetic construct
MTRIENN

SEQ ID NO: 11051 - protein, 7 aa, synthetic construct
RITHPYS

SEQ ID NO: 11052 - protein, 7 aa, synthetic construct
TSDYMSF

SEQ ID NO: 11053 - protein, 7 aa, synthetic construct
YAKTGCN

SEQ ID NO: 11054 - protein, 7 aa, synthetic construct
YSKVNMN

SEQ ID NO: 11055 - protein, 7 aa, synthetic construct
EHATSNW

SEQ ID NO: 11056 - protein, 7 aa, synthetic construct
MISTNGR

SEQ ID NO: 11057 - protein, 7 aa, synthetic construct
LSRAGDN

SEQ ID NO: 11058 - protein, 7 aa, synthetic construct
FSKINYN

SEQ ID NO: 11059 - protein, 7 aa, synthetic construct
YARVGDN

SEQ ID NO: 11060 - protein, 7 aa, synthetic construct
FSRIGDN

SEQ ID NO: 11061 - protein, 7 aa, synthetic construct
FSKAGNN

SEQ ID NO: 11062 - protein, 7 aa, synthetic construct
HEGHSHW

SEQ ID NO: 11063 - protein, 7 aa, synthetic construct
TVSTNGI

SEQ ID NO: 11064 - protein, 7 aa, synthetic construct
RSDTVYI

SEQ ID NO: 11065 - protein, 7 aa, synthetic construct
YSKANDN

SEQ ID NO: 11066 - protein, 7 aa, synthetic construct
YSKNNYN

SEQ ID NO: 11067 - protein, 7 aa, synthetic construct
YSARNDN

SEQ ID NO: 11068 - protein, 7 aa, synthetic construct
VPSSQVW

SEQ ID NO: 11069 - protein, 7 aa, synthetic construct
FAYENRN

SEQ ID NO: 11070 - protein, 7 aa, synthetic construct
FSKLNPN

SEQ ID NO: 11071 - protein, 7 aa, synthetic construct
YSRNGDN

SEQ ID NO: 11072 - protein, 7 aa, synthetic construct
YSRASDQ

SEQ ID NO: 11073 - protein, 7 aa, synthetic construct
YLKSTNN

SEQ ID NO: 11074 - protein, 7 aa, synthetic construct
FSKLNQN

SEQ ID NO: 11075 - protein, 7 aa, synthetic construct
QHKLQPL

SEQ ID NO: 11076 - protein, 7 aa, synthetic construct
NADYNRN

SEQ ID NO: 11077 - protein, 7 aa, synthetic construct
LSRIGDN

SEQ ID NO: 11078 - protein, 7 aa, synthetic construct
YAKLGPN

SEQ ID NO: 11079 - protein, 7 aa, synthetic construct
LSRLGDN

SEQ ID NO: 11080 - protein, 7 aa, synthetic construct
YAREGYN

SEQ ID NO: 11081 - protein, 7 aa, synthetic construct
HPPAYSS

SEQ ID NO: 11082 - protein, 7 aa, synthetic construct
YSRTNDN

SEQ ID NO: 11083 - protein, 7 aa, synthetic construct
YARLGDN

SEQ ID NO: 11084 - protein, 7 aa, synthetic construct
FAKSGFN

SEQ ID NO: 11085 - protein, 7 aa, synthetic construct
YARMGQN

SEQ ID NO: 11086 - protein, 7 aa, synthetic construct
FARTSDN

SEQ ID NO: 11087 - protein, 7 aa, synthetic construct
LSKIGLN

SEQ ID NO: 11088 - protein, 7 aa, synthetic construct
FTSSNGV

SEQ ID NO: 11089 - protein, 7 aa, synthetic construct
YARANLN

SEQ ID NO: 11090 - protein, 7 aa, synthetic construct
LSKIGQN

SEQ ID NO: 11091 - protein, 7 aa, synthetic construct
FARTGDN

SEQ ID NO: 11092 - protein, 7 aa, synthetic construct
FAKTGNN

SEQ ID NO: 11093 - protein, 7 aa, synthetic construct
FSRINLN

SEQ ID NO: 11094 - protein, 7 aa, synthetic construct
ASEFMTF

SEQ ID NO: 11095 - protein, 7 aa, synthetic construct
FSRAGDN

SEQ ID NO: 11096 - protein, 7 aa, synthetic construct
YSKAGQN

SEQ ID NO: 11097 - protein, 7 aa, synthetic construct
FSRAGFN

SEQ ID NO: 11098 - protein, 7 aa, synthetic construct
FSRYGSN

SEQ ID NO: 11099 - protein, 7 aa, synthetic construct
YARQNTN

SEQ ID NO: 11100 - protein, 7 aa, synthetic construct
MVSTNGV

SEQ ID NO: 11101 - protein, 7 aa, synthetic construct
AKSTNGI

SEQ ID NO: 11102 - protein, 7 aa, synthetic construct
VGSAHNW

SEQ ID NO: 11103 - protein, 7 aa, synthetic construct
YSKQNTN

SEQ ID NO: 11104 - protein, 7 aa, synthetic construct
LARSGDN

SEQ ID NO: 11105 - protein, 7 aa, synthetic construct
ILSTNGI

SEQ ID NO: 11106 - protein, 7 aa, synthetic construct
VFSTNGI

SEQ ID NO: 11107 - protein, 7 aa, synthetic construct
LLSTNGR

SEQ ID NO: 11108 - protein, 7 aa, synthetic construct
YARQGQN

SEQ ID NO: 11109 - protein, 7 aa, synthetic construct
YSRSGIN

SEQ ID NO: 11110 - protein, 7 aa, synthetic construct
LSKVGDN

SEQ ID NO: 11111 - protein, 7 aa, synthetic construct
YSKANTN

SEQ ID NO: 11112 - protein, 7 aa, synthetic construct
GESDRKW

SEQ ID NO: 11113 - protein, 7 aa, synthetic construct
LSKIGVN

SEQ ID NO: 11114 - protein, 7 aa, synthetic construct
LAKSGQN

SEQ ID NO: 11115 - protein, 7 aa, synthetic construct
YAKSGQN

SEQ ID NO: 11116 - protein, 7 aa, synthetic construct
FSKLGHN

SEQ ID NO: 11117 - protein, 7 aa, synthetic construct
YSRVNEN

SEQ ID NO: 11118 - protein, 7 aa, synthetic construct
YSKNNHN

SEQ ID NO: 11119 - protein, 7 aa, synthetic construct
LYSTNGI

SEQ ID NO: 11120 - protein, 7 aa, synthetic construct
YARQGMN

SEQ ID NO: 11121 - protein, 7 aa, synthetic construct
LSKVGSN

SEQ ID NO: 11122 - protein, 7 aa, synthetic construct
EMGGGSW

SEQ ID NO: 11123 - protein, 7 aa, synthetic construct
FAKSGHN

SEQ ID NO: 11124 - protein, 7 aa, synthetic construct
YAKSNMN

SEQ ID NO: 11125 - protein, 7 aa, synthetic construct
YAKANMN

SEQ ID NO: 11126 - protein, 7 aa, synthetic construct
DLSHAKW

SEQ ID NO: 11127 - protein, 7 aa, synthetic construct
GEGIVRW

SEQ ID NO: 11128 - protein, 7 aa, synthetic construct
YSKGNDN

SEQ ID NO: 11129 - protein, 7 aa, synthetic construct
YARVGQN

SEQ ID NO: 11130 - protein, 7 aa, synthetic construct
LARTGDN

SEQ ID NO: 11131 - protein, 7 aa, synthetic construct
LSRSNDN

SEQ ID NO: 11132 - protein, 7 aa, synthetic construct
SVSTNGR

SEQ ID NO: 11133 - protein, 7 aa, synthetic construct
YSKHNVN

SEQ ID NO: 11134 - protein, 7 aa, synthetic construct
YARANVN

SEQ ID NO: 11135 - protein, 7 aa, synthetic construct
LAKNGNN

SEQ ID NO: 11136 - protein, 7 aa, synthetic construct
LHKLTVS

SEQ ID NO: 11137 - protein, 7 aa, synthetic construct
LAKQGFN

SEQ ID NO: 11138 - protein, 7 aa, synthetic construct
GNDMSTW

SEQ ID NO: 11139 - protein, 7 aa, synthetic construct
FVSTNGI

SEQ ID NO: 11140 - protein, 7 aa, synthetic construct
FSRINDN

SEQ ID NO: 11141 - protein, 7 aa, synthetic construct
FARAGMN

SEQ ID NO: 11142 - protein, 7 aa, synthetic construct
GSGIQNW

SEQ ID NO: 11143 - protein, 7 aa, synthetic construct
YVSTNGV

SEQ ID NO: 11144 - protein, 7 aa, synthetic construct
LSKAGFN

SEQ ID NO: 11145 - protein, 7 aa, synthetic construct
YSKGNMN

SEQ ID NO: 11146 - protein, 7 aa, synthetic construct
YARQGDN

SEQ ID NO: 11147 - protein, 7 aa, synthetic construct
YAKTGQN

SEQ ID NO: 11148 - protein, 7 aa, synthetic construct
TRNGNIA

SEQ ID NO: 11149 - protein, 7 aa, synthetic construct
QVSTNGV

SEQ ID NO: 11150 - protein, 7 aa, synthetic construct
FHSTNGI

SEQ ID NO: 11151 - protein, 7 aa, synthetic construct
TRIGNNA

SEQ ID NO: 11152 - protein, 7 aa, synthetic construct
FVRSDIK

SEQ ID NO: 11153 - protein, 7 aa, synthetic construct
FSKTGPN

SEQ ID NO: 11154 - protein, 7 aa, synthetic construct
LSKLGPN

SEQ ID NO: 11155 - protein, 7 aa, synthetic construct
VKSMNGV

SEQ ID NO: 11156 - protein, 7 aa, synthetic construct
LFSTNGV

SEQ ID NO: 11157 - protein, 7 aa, synthetic construct
YARSGDN

SEQ ID NO: 11158 - protein, 7 aa, synthetic construct
YSKQGSN

SEQ ID NO: 11159 - protein, 7 aa, synthetic construct
YAKLNFN

SEQ ID NO: 11160 - protein, 7 aa, synthetic construct
IESTNGV

SEQ ID NO: 11161 - protein, 7 aa, synthetic construct
LHRATYD

SEQ ID NO: 11162 - protein, 7 aa, synthetic construct
FVSTNGV

SEQ ID NO: 11163 - protein, 7 aa, synthetic construct
YAKDNWN

SEQ ID NO: 11164 - protein, 7 aa, synthetic construct
PQSTNGV

SEQ ID NO: 11165 - protein, 7 aa, synthetic construct
YSKWNDN

SEQ ID NO: 11166 - protein, 7 aa, synthetic construct
LAKQGHN

SEQ ID NO: 11167 - protein, 7 aa, synthetic construct
SISTNGR

SEQ ID NO: 11168 - protein, 7 aa, synthetic construct
YAKLGFN

SEQ ID NO: 11169 - protein, 7 aa, synthetic construct
LHKASPT

SEQ ID NO: 11170 - protein, 7 aa, synthetic construct
YSSLNPK

SEQ ID NO: 11171 - protein, 7 aa, synthetic construct
YARTNDN

SEQ ID NO: 11172 - protein, 7 aa, synthetic construct
LAKNGFN

SEQ ID NO: 11173 - protein, 7 aa, synthetic construct
LAKSGMN

SEQ ID NO: 11174 - protein, 7 aa, synthetic construct
FSKAGIN

SEQ ID NO: 11175 - protein, 7 aa, synthetic construct
LSKQGNN

SEQ ID NO: 11176 - protein, 7 aa, synthetic construct
FSKTGFN

SEQ ID NO: 11177 - protein, 7 aa, synthetic construct
YSKQGMN

SEQ ID NO: 11178 - protein, 7 aa, synthetic construct
LSKMGPN

SEQ ID NO: 11179 - protein, 7 aa, synthetic construct
YARLNDN

SEQ ID NO: 11180 - protein, 7 aa, synthetic construct
YSRMGDN

SEQ ID NO: 11181 - protein, 7 aa, synthetic construct
RNEGSSW

SEQ ID NO: 11182 - protein, 7 aa, synthetic construct
YSKSGYN

SEQ ID NO: 11183 - protein, 7 aa, synthetic construct
LAKQGLN

SEQ ID NO: 11184 - protein, 7 aa, synthetic construct
HKSTNGY

SEQ ID NO: 11185 - protein, 7 aa, synthetic construct
LSKLGLN

SEQ ID NO: 11186 - protein, 7 aa, synthetic construct
QDGNSRY

SEQ ID NO: 11187 - protein, 7 aa, synthetic construct
LSRMNDN

SEQ ID NO: 11188 - protein, 7 aa, synthetic construct
LAKGGFN

SEQ ID NO: 11189 - protein, 7 aa, synthetic construct
LSKSGPN

SEQ ID NO: 11190 - protein, 7 aa, synthetic construct
FMSTNGV

SEQ ID NO: 11191 - protein, 7 aa, synthetic construct
YGSTNGV

SEQ ID NO: 11192 - protein, 7 aa, synthetic construct
MSKLNAN

SEQ ID NO: 11193 - protein, 7 aa, synthetic construct
KLPDYGN

SEQ ID NO: 11194 - protein, 7 aa, synthetic construct
YAKQGFN

SEQ ID NO: 11195 - protein, 7 aa, synthetic construct
THSGKSA

SEQ ID NO: 11196 - protein, 7 aa, synthetic construct
FSRTGDN

SEQ ID NO: 11197 - protein, 7 aa, synthetic construct
LAKSGLN

SEQ ID NO: 11198 - protein, 7 aa, synthetic construct
FARAGPN

SEQ ID NO: 11199 - protein, 7 aa, synthetic construct
YSKMNTN

SEQ ID NO: 11200 - protein, 7 aa, synthetic construct
LQSTNGI

SEQ ID NO: 11201 - protein, 7 aa, synthetic construct
MTSTNGV

SEQ ID NO: 11202 - protein, 7 aa, synthetic construct
YARPGIN

SEQ ID NO: 11203 - protein, 7 aa, synthetic construct
YAKTGFN

SEQ ID NO: 11204 - protein, 7 aa, synthetic construct
YAKNGHN

SEQ ID NO: 11205 - protein, 7 aa, synthetic construct
FSKVGMN

SEQ ID NO: 11206 - protein, 7 aa, synthetic construct
LAKTGMN

SEQ ID NO: 11207 - protein, 7 aa, synthetic construct
LSKTGPN

SEQ ID NO: 11208 - protein, 7 aa, synthetic construct
MSSTNGV

SEQ ID NO: 11209 - protein, 7 aa, synthetic construct
LSRQNDN

SEQ ID NO: 11210 - protein, 7 aa, synthetic construct
YAKSGGN

SEQ ID NO: 11211 - protein, 7 aa, synthetic construct
LAKAGHN

SEQ ID NO: 11212 - protein, 7 aa, synthetic construct
YSKTGHN

SEQ ID NO: 11213 - protein, 7 aa, synthetic construct
WASTNGV

SEQ ID NO: 11214 - protein, 7 aa, synthetic construct
IVSTNGI

SEQ ID NO: 11215 - protein, 7 aa, synthetic construct
YAKGGQN

SEQ ID NO: 11216 - protein, 7 aa, synthetic construct
FAKTGHN

SEQ ID NO: 11217 - protein, 7 aa, synthetic construct
FAKGGIN

SEQ ID NO: 11218 - protein, 7 aa, synthetic construct
YSKHNDN

SEQ ID NO: 11219 - protein, 7 aa, synthetic construct
FSKVGAN

SEQ ID NO: 11220 - protein, 7 aa, synthetic construct
YAKNGYN

SEQ ID NO: 11221 - protein, 7 aa, synthetic construct
FSKIGPN

SEQ ID NO: 11222 - protein, 7 aa, synthetic construct
FAKSGNN

SEQ ID NO: 11223 - protein, 7 aa, synthetic construct
YSRQGTN

SEQ ID NO: 11224 - protein, 7 aa, synthetic construct
HISTNGV

SEQ ID NO: 11225 - protein, 7 aa, synthetic construct
YARAGQN

SEQ ID NO: 11226 - protein, 7 aa, synthetic construct
YSKMGMN

SEQ ID NO: 11227 - protein, 7 aa, synthetic construct
LAKTGHN

SEQ ID NO: 11228 - protein, 7 aa, synthetic construct
YSKQNPN

SEQ ID NO: 11229 - protein, 7 aa, synthetic construct
YARAGKD

SEQ ID NO: 11230 - protein, 7 aa, synthetic construct
YSKVGDN

SEQ ID NO: 11231 - protein, 7 aa, synthetic construct
FISTNGI

SEQ ID NO: 11232 - protein, 7 aa, synthetic construct
FASTNGI

SEQ ID NO: 11233 - protein, 7 aa, synthetic construct
FWSGEVS

SEQ ID NO: 11234 - protein, 7 aa, synthetic construct
CSGRPQE

SEQ ID NO: 11235 - protein, 7 aa, synthetic construct
FASTNGV

SEQ ID NO: 11236 - protein, 7 aa, synthetic construct
LSKSSVN

SEQ ID NO: 11237 - protein, 7 aa, synthetic construct
FAKGGWN

SEQ ID NO: 11238 - protein, 7 aa, synthetic construct
YSKLGIN

SEQ ID NO: 11239 - protein, 7 aa, synthetic construct
LSKVGMN

SEQ ID NO: 11240 - protein, 7 aa, synthetic construct
TYSGNNA

SEQ ID NO: 11241 - protein, 7 aa, synthetic construct
RSPVTFP

SEQ ID NO: 11242 - protein, 7 aa, synthetic construct
LARPGPN

SEQ ID NO: 11243 - protein, 7 aa, synthetic construct
LAKGGIN

SEQ ID NO: 11244 - protein, 7 aa, synthetic construct
IVSTNGR

SEQ ID NO: 11245 - protein, 7 aa, synthetic construct
WESTNGV

SEQ ID NO: 11246 - protein, 7 aa, synthetic construct
YAKNGVN

SEQ ID NO: 11247 - protein, 7 aa, synthetic construct
LSRTGEN

SEQ ID NO: 11248 - protein, 7 aa, synthetic construct
TKLGDNA

SEQ ID NO: 11249 - protein, 7 aa, synthetic construct
FSKQGYN

SEQ ID NO: 11250 - protein, 7 aa, synthetic construct
FDSTNGI

SEQ ID NO: 11251 - protein, 7 aa, synthetic construct
YARNGDN

SEQ ID NO: 11252 - protein, 7 aa, synthetic construct
LSKVGEN

SEQ ID NO: 11253 - protein, 7 aa, synthetic construct
LSKLGIN

SEQ ID NO: 11254 - protein, 7 aa, synthetic construct
YARQGEN

SEQ ID NO: 11255 - protein, 7 aa, synthetic construct
YVSTNGI

SEQ ID NO: 11256 - protein, 7 aa, synthetic construct
QESTNGV

SEQ ID NO: 11257 - protein, 7 aa, synthetic construct
LHARGLD

SEQ ID NO: 11258 - protein, 7 aa, synthetic construct
YARLNVN

SEQ ID NO: 11259 - protein, 7 aa, synthetic construct
PYAVSMK

SEQ ID NO: 11260 - protein, 7 aa, synthetic construct
YSKVNFN

SEQ ID NO: 11261 - protein, 7 aa, synthetic construct
LSKTGHN

SEQ ID NO: 11262 - protein, 7 aa, synthetic construct
VMSTNGI

SEQ ID NO: 11263 - protein, 7 aa, synthetic construct
LAKTGQN

SEQ ID NO: 11264 - protein, 7 aa, synthetic construct
YAKGGFN

SEQ ID NO: 11265 - protein, 7 aa, synthetic construct
LSKAGPN

SEQ ID NO: 11266 - protein, 7 aa, synthetic construct
FAKTGMN

SEQ ID NO: 11267 - protein, 7 aa, synthetic construct
LSKAGMN

SEQ ID NO: 11268 - protein, 7 aa, synthetic construct
YSKQGDN

SEQ ID NO: 11269 - protein, 7 aa, synthetic construct
YARDGYN

SEQ ID NO: 11270 - protein, 7 aa, synthetic construct
YSRQGMN

SEQ ID NO: 11271 - protein, 7 aa, synthetic construct
LAKTGFN

SEQ ID NO: 11272 - protein, 7 aa, synthetic construct
TLSTNGI

SEQ ID NO: 11273 - protein, 7 aa, synthetic construct
AISTNGR

SEQ ID NO: 11274 - protein, 7 aa, synthetic construct
YARNGQN

SEQ ID NO: 11275 - protein, 7 aa, synthetic construct
YAKPGNN

SEQ ID NO: 11276 - protein, 7 aa, synthetic construct
FSKLNTN

SEQ ID NO: 11277 - protein, 7 aa, synthetic construct
IKSTNGV

SEQ ID NO: 11278 - protein, 7 aa, synthetic construct
TLSANGR

SEQ ID NO: 11279 - protein, 7 aa, synthetic construct
RESTNGV

SEQ ID NO: 11280 - protein, 7 aa, synthetic construct
YAKPGFN

SEQ ID NO: 11281 - protein, 7 aa, synthetic construct
YARAGIN

SEQ ID NO: 11282 - protein, 7 aa, synthetic construct
AKSTNGV

SEQ ID NO: 11283 - protein, 7 aa, synthetic construct
VKYDWSD

SEQ ID NO: 11284 - protein, 7 aa, synthetic construct
YHKTSLN

SEQ ID NO: 11285 - protein, 7 aa, synthetic construct
YAKGNPN

SEQ ID NO: 11286 - protein, 7 aa, synthetic construct
EWSTNGR

SEQ ID NO: 11287 - protein, 7 aa, synthetic construct
LKSTNGI

SEQ ID NO: 11288 - protein, 7 aa, synthetic construct
VGSTNGI

SEQ ID NO: 11289 - protein, 7 aa, synthetic construct
RDETRLW

SEQ ID NO: 11290 - protein, 7 aa, synthetic construct
LAKQGIN

SEQ ID NO: 11291 - protein, 7 aa, synthetic construct
YSRMGEN

SEQ ID NO: 11292 - protein, 7 aa, synthetic construct
VQSTNGI

SEQ ID NO: 11293 - protein, 7 aa, synthetic construct
YSKTGLN

SEQ ID NO: 11294 - protein, 7 aa, synthetic construct
YSKQGVN

SEQ ID NO: 11295 - protein, 7 aa, synthetic construct
FSKLNLN

SEQ ID NO: 11296 - protein, 7 aa, synthetic construct
YAKSGLN

SEQ ID NO: 11297 - protein, 7 aa, synthetic construct
SETSSRW

SEQ ID NO: 11298 - protein, 7 aa, synthetic construct
IPQTNYA

SEQ ID NO: 11299 - protein, 7 aa, synthetic construct
GNMNRYD

SEQ ID NO: 11300 - protein, 7 aa, synthetic construct
LLSTNGI

SEQ ID NO: 11301 - protein, 7 aa, synthetic construct
HGGASAY

SEQ ID NO: 11302 - protein, 7 aa, synthetic construct
EKSTNGR

SEQ ID NO: 11303 - protein, 7 aa, synthetic construct
LSRMGDN

SEQ ID NO: 11304 - protein, 7 aa, synthetic construct
GNDGSKY

SEQ ID NO: 11305 - protein, 7 aa, synthetic construct
YSKGNTN

SEQ ID NO: 11306 - protein, 7 aa, synthetic construct
FAKTGPN

SEQ ID NO: 11307 - protein, 7 aa, synthetic construct
YARLGVN

SEQ ID NO: 11308 - protein, 7 aa, synthetic construct
YSKGNVN

SEQ ID NO: 11309 - protein, 7 aa, synthetic construct
YMSTNGI

SEQ ID NO: 11310 - protein, 7 aa, synthetic construct
SYSTNGI

SEQ ID NO: 11311 - protein, 7 aa, synthetic construct
YSKSNVN

SEQ ID NO: 11312 - protein, 7 aa, synthetic construct
SLSTNGR

SEQ ID NO: 11313 - protein, 7 aa, synthetic construct
YSRHGTN

SEQ ID NO: 11314 - protein, 7 aa, synthetic construct
YSKTGGN

SEQ ID NO: 11315 - protein, 7 aa, synthetic construct
YSKANAN

SEQ ID NO: 11316 - protein, 7 aa, synthetic construct
LAKSGIN

SEQ ID NO: 11317 - protein, 7 aa, synthetic construct
LAKGGQN

SEQ ID NO: 11318 - protein, 7 aa, synthetic construct
YSKGNQN

SEQ ID NO: 11319 - protein, 7 aa, synthetic construct
LSKAGQN

SEQ ID NO: 11320 - protein, 7 aa, synthetic construct
WDSSNGV

SEQ ID NO: 11321 - protein, 7 aa, synthetic construct
LAKSGSN

SEQ ID NO: 11322 - protein, 7 aa, synthetic construct
YSKYGPN

SEQ ID NO: 11323 - protein, 7 aa, synthetic construct
LSKAGHN

SEQ ID NO: 11324 - protein, 7 aa, synthetic construct
LSKMNLN

SEQ ID NO: 11325 - protein, 7 aa, synthetic construct
LAKGGLN

SEQ ID NO: 11326 - protein, 7 aa, synthetic construct
LSKVGLN

SEQ ID NO: 11327 - protein, 7 aa, synthetic construct
FAKGGHN

SEQ ID NO: 11328 - protein, 7 aa, synthetic construct
EQSTNGR

SEQ ID NO: 11329 - protein, 7 aa, synthetic construct
GEVNVRW

SEQ ID NO: 11330 - protein, 7 aa, synthetic construct
PMSTNGR

SEQ ID NO: 11331 - protein, 7 aa, synthetic construct
NVSTNGR

SEQ ID NO: 11332 - protein, 7 aa, synthetic construct
YARLNAN

SEQ ID NO: 11333 - protein, 7 aa, synthetic construct
LAKNGHN

SEQ ID NO: 11334 - protein, 7 aa, synthetic construct
NTSTNGV

SEQ ID NO: 11335 - protein, 7 aa, synthetic construct
LARNGDN

SEQ ID NO: 11336 - protein, 7 aa, synthetic construct
YAKIGLN

SEQ ID NO: 11337 - protein, 7 aa, synthetic construct
YSKTGDN

SEQ ID NO: 11338 - protein, 7 aa, synthetic construct
ITSTNGI

SEQ ID NO: 11339 - protein, 7 aa, synthetic construct
YSKNNFN

SEQ ID NO: 11340 - protein, 7 aa, synthetic construct
TYSTNGI

SEQ ID NO: 11341 - protein, 7 aa, synthetic construct
GMDGNKY

SEQ ID NO: 11342 - protein, 7 aa, synthetic construct
LMSTNGI

SEQ ID NO: 11343 - protein, 7 aa, synthetic construct
MQSTNGV

SEQ ID NO: 11344 - protein, 7 aa, synthetic construct
YAKAGAN

SEQ ID NO: 11345 - protein, 7 aa, synthetic construct
LAKTGSN

SEQ ID NO: 11346 - protein, 7 aa, synthetic construct
LSKIGMN

SEQ ID NO: 11347 - protein, 7 aa, synthetic construct
FSKTGNN

SEQ ID NO: 11348 - protein, 7 aa, synthetic construct
YSKTGAN

SEQ ID NO: 11349 - protein, 7 aa, synthetic construct
ANGRSLY

SEQ ID NO: 11350 - protein, 7 aa, synthetic construct
YAKSGVN

SEQ ID NO: 11351 - protein, 7 aa, synthetic construct
YSRININ

SEQ ID NO: 11352 - protein, 7 aa, synthetic construct
YSKIGEN

SEQ ID NO: 11353 - protein, 7 aa, synthetic construct
HMSTNGV

SEQ ID NO: 11354 - protein, 7 aa, synthetic construct
AQSTNGV

SEQ ID NO: 11355 - protein, 7 aa, synthetic construct
LAKSGHN

SEQ ID NO: 11356 - protein, 7 aa, synthetic construct
LAKMGFN

SEQ ID NO: 11357 - protein, 7 aa, synthetic construct
RSETVYQ

SEQ ID NO: 11358 - protein, 7 aa, synthetic construct
YSKSGTN

SEQ ID NO: 11359 - protein, 7 aa, synthetic construct
YSKGNAN

SEQ ID NO: 11360 - protein, 7 aa, synthetic construct
GGSNSSW

SEQ ID NO: 11361 - protein, 7 aa, synthetic construct
AHSTNGV

SEQ ID NO: 11362 - protein, 7 aa, synthetic construct
LSKAGVN

SEQ ID NO: 11363 - protein, 7 aa, synthetic construct
IASTNGI

SEQ ID NO: 11364 - protein, 7 aa, synthetic construct
REPNVQW

SEQ ID NO: 11365 - protein, 7 aa, synthetic construct
YASSGYN

SEQ ID NO: 11366 - protein, 7 aa, synthetic construct
VSSSNGV

SEQ ID NO: 11367 - protein, 7 aa, synthetic construct
FARSGVN

SEQ ID NO: 11368 - protein, 7 aa, synthetic construct
YAKTGLN

SEQ ID NO: 11369 - protein, 7 aa, synthetic construct
YARSNDN

SEQ ID NO: 11370 - protein, 7 aa, synthetic construct
FARNGQN

SEQ ID NO: 11371 - protein, 7 aa, synthetic construct
LAKQGPN

SEQ ID NO: 11372 - protein, 7 aa, synthetic construct
NQADLRW

SEQ ID NO: 11373 - protein, 7 aa, synthetic construct
DPSDKRW

SEQ ID NO: 11374 - protein, 7 aa, synthetic construct
LSSTNGI

SEQ ID NO: 11375 - protein, 7 aa, synthetic construct
HKSTNGI

SEQ ID NO: 11376 - protein, 7 aa, synthetic construct
YAKTGDN

SEQ ID NO: 11377 - protein, 7 aa, synthetic construct
YSKNGLN

SEQ ID NO: 11378 - protein, 7 aa, synthetic construct
FARNGMN

SEQ ID NO: 11379 - protein, 7 aa, synthetic construct
EKSTNGI

SEQ ID NO: 11380 - protein, 7 aa, synthetic construct
IGGTSNY

SEQ ID NO: 11381 - protein, 7 aa, synthetic construct
YSRANNN

SEQ ID NO: 11382 - protein, 7 aa, synthetic construct
LSKQGYN

SEQ ID NO: 11383 - protein, 7 aa, synthetic construct
LAKTGVN

SEQ ID NO: 11384 - protein, 7 aa, synthetic construct
YSKIGTN

SEQ ID NO: 11385 - protein, 7 aa, synthetic construct
YSRLGFN

SEQ ID NO: 11386 - protein, 7 aa, synthetic construct
IHSSNGV

SEQ ID NO: 11387 - protein, 7 aa, synthetic construct
MSESSRW

SEQ ID NO: 11388 - protein, 7 aa, synthetic construct
YSRNGLN

SEQ ID NO: 11389 - protein, 7 aa, synthetic construct
LAKTGAN

SEQ ID NO: 11390 - protein, 7 aa, synthetic construct
LARGGDN

SEQ ID NO: 11391 - protein, 7 aa, synthetic construct
FSKLNMN

SEQ ID NO: 11392 - protein, 7 aa, synthetic construct
TRSGSSA

SEQ ID NO: 11393 - protein, 7 aa, synthetic construct
YAKANLN

SEQ ID NO: 11394 - protein, 7 aa, synthetic construct
YAKHGFN

SEQ ID NO: 11395 - protein, 7 aa, synthetic construct
SVSTNGI

SEQ ID NO: 11396 - protein, 7 aa, synthetic construct
IGSTNGI

SEQ ID NO: 11397 - protein, 7 aa, synthetic construct
LSKLNPN

SEQ ID NO: 11398 - protein, 7 aa, synthetic construct
YSKTGNN

SEQ ID NO: 11399 - protein, 7 aa, synthetic construct
YSKHNSN

SEQ ID NO: 11400 - protein, 7 aa, synthetic construct
FVSTNGR

SEQ ID NO: 11401 - protein, 7 aa, synthetic construct
YAKANVN

SEQ ID NO: 11402 - protein, 7 aa, synthetic construct
TNSTHGI

SEQ ID NO: 11403 - protein, 7 aa, synthetic construct
LSKSGLN

SEQ ID NO: 11404 - protein, 7 aa, synthetic construct
RDEFRAY

SEQ ID NO: 11405 - protein, 7 aa, synthetic construct
LGSTNGR

SEQ ID NO: 11406 - protein, 7 aa, synthetic construct
QKSTNGV

SEQ ID NO: 11407 - protein, 7 aa, synthetic construct
YSKAGGN

SEQ ID NO: 11408 - protein, 7 aa, synthetic construct
VVSTNGV

SEQ ID NO: 11409 - protein, 7 aa, synthetic construct
PKSTNGV

SEQ ID NO: 11410 - protein, 7 aa, synthetic construct
SDSSNGR

SEQ ID NO: 11411 - protein, 7 aa, synthetic construct
YSKANSN

SEQ ID NO: 11412 - protein, 7 aa, synthetic construct
LSKSGFN

SEQ ID NO: 11413 - protein, 7 aa, synthetic construct
ATSTNGV

SEQ ID NO: 11414 - protein, 7 aa, synthetic construct
REGTSYY

SEQ ID NO: 11415 - protein, 7 aa, synthetic construct
FSSTNGI

SEQ ID NO: 11416 - protein, 7 aa, synthetic construct
YQSTNGI

SEQ ID NO: 11417 - protein, 7 aa, synthetic construct
YARSNEN

SEQ ID NO: 11418 - protein, 7 aa, synthetic construct
HESTNGV

SEQ ID NO: 11419 - protein, 7 aa, synthetic construct
STSTNGI

SEQ ID NO: 11420 - protein, 7 aa, synthetic construct
VYSSNGV

SEQ ID NO: 11421 - protein, 7 aa, synthetic construct
ESSTNGR

SEQ ID NO: 11422 - protein, 7 aa, synthetic construct
LAKMGMN

SEQ ID NO: 11423 - protein, 7 aa, synthetic construct
TKSTNGV

SEQ ID NO: 11424 - protein, 7 aa, synthetic construct
YAKVGPN

SEQ ID NO: 11425 - protein, 7 aa, synthetic construct
NASTNGR

SEQ ID NO: 11426 - protein, 7 aa, synthetic construct
YARLGFN

SEQ ID NO: 11427 - protein, 7 aa, synthetic construct
MSEASTW

SEQ ID NO: 11428 - protein, 7 aa, synthetic construct
LAKIGPN

SEQ ID NO: 11429 - protein, 7 aa, synthetic construct
NSGTAKY

SEQ ID NO: 11430 - protein, 7 aa, synthetic construct
FSKAGPN

SEQ ID NO: 11431 - protein, 7 aa, synthetic construct
YAKGGDN

SEQ ID NO: 11432 - protein, 7 aa, synthetic construct
LAKSGTN

SEQ ID NO: 11433 - protein, 7 aa, synthetic construct
LSKMGHN

SEQ ID NO: 11434 - protein, 7 aa, synthetic construct
TTSQNGR

SEQ ID NO: 11435 - protein, 7 aa, synthetic construct
YSRINFN

SEQ ID NO: 11436 - protein, 7 aa, synthetic construct
YAKGGNN

SEQ ID NO: 11437 - protein, 7 aa, synthetic construct
FSRQNDN

SEQ ID NO: 11438 - protein, 7 aa, synthetic construct
TYSTNGV

SEQ ID NO: 11439 - protein, 7 aa, synthetic construct
FAKTGFN

SEQ ID NO: 11440 - protein, 7 aa, synthetic construct
DGGTSRY

SEQ ID NO: 11441 - protein, 7 aa, synthetic construct
LSKGNYN

SEQ ID NO: 11442 - protein, 7 aa, synthetic construct
HDSSNGV

SEQ ID NO: 11443 - protein, 7 aa, synthetic construct
LKNGQSA

SEQ ID NO: 11444 - protein, 7 aa, synthetic construct
QDTSSRW

SEQ ID NO: 11445 - protein, 7 aa, synthetic construct
YAKAGLN

SEQ ID NO: 11446 - protein, 7 aa, synthetic construct
LSKQNIN

SEQ ID NO: 11447 - protein, 7 aa, synthetic construct
LHSTNGV

SEQ ID NO: 11448 - protein, 7 aa, synthetic construct
YESSNGV

SEQ ID NO: 11449 - protein, 7 aa, synthetic construct
YAKSNFN

SEQ ID NO: 11450 - protein, 7 aa, synthetic construct
TGSTNGI

SEQ ID NO: 11451 - protein, 7 aa, synthetic construct
TQSTNGV

SEQ ID NO: 11452 - protein, 7 aa, synthetic construct
YESTNGI

SEQ ID NO: 11453 - protein, 7 aa, synthetic construct
MKSTNGV

SEQ ID NO: 11454 - protein, 7 aa, synthetic construct
YSKDNWN

SEQ ID NO: 11455 - protein, 7 aa, synthetic construct
HVSTNGV

SEQ ID NO: 11456 - protein, 7 aa, synthetic construct
LVSTNGV

SEQ ID NO: 11457 - protein, 7 aa, synthetic construct
FSKVGTN

SEQ ID NO: 11458 - protein, 7 aa, synthetic construct
YSKAGVN

SEQ ID NO: 11459 - protein, 7 aa, synthetic construct
FGSTNGV

SEQ ID NO: 11460 - protein, 7 aa, synthetic construct
LAKGGHN

SEQ ID NO: 11461 - protein, 7 aa, synthetic construct
VASSNGV

SEQ ID NO: 11462 - protein, 7 aa, synthetic construct
IKSTNGI

SEQ ID NO: 11463 - protein, 7 aa, synthetic construct
TRSGDIA

SEQ ID NO: 11464 - protein, 7 aa, synthetic construct
YSKGNLN

SEQ ID NO: 11465 - protein, 7 aa, synthetic construct
FAKQGWN

SEQ ID NO: 11466 - protein, 7 aa, synthetic construct
LSKAGLN

SEQ ID NO: 11467 - protein, 7 aa, synthetic construct
SFSTNGI

SEQ ID NO: 11468 - protein, 7 aa, synthetic construct
YSRPGHN

SEQ ID NO: 11469 - protein, 7 aa, synthetic construct
TRDTNGR

SEQ ID NO: 11470 - protein, 7 aa, synthetic construct
YAKTGGN

SEQ ID NO: 11471 - protein, 7 aa, synthetic construct
YARGNDN

SEQ ID NO: 11472 - protein, 7 aa, synthetic construct
VASTNGI

SEQ ID NO: 11473 - protein, 7 aa, synthetic construct
AQSTNGI

SEQ ID NO: 11474 - protein, 7 aa, synthetic construct
FAKTGIN

SEQ ID NO: 11475 - protein, 7 aa, synthetic construct
RASDVYP

SEQ ID NO: 11476 - protein, 7 aa, synthetic construct
RGSDVFP

SEQ ID NO: 11477 - protein, 7 aa, synthetic construct
LAKGGPN

SEQ ID NO: 11478 - protein, 7 aa, synthetic construct
LSKAGAN

SEQ ID NO: 11479 - protein, 7 aa, synthetic construct
YAKGNFN

SEQ ID NO: 11480 - protein, 7 aa, synthetic construct
ADSTNGR

SEQ ID NO: 11481 - protein, 7 aa, synthetic construct
LAKAGYN

SEQ ID NO: 11482 - protein, 7 aa, synthetic construct
LSKVGVN

SEQ ID NO: 11483 - protein, 7 aa, synthetic construct
YSKGNIN

SEQ ID NO: 11484 - protein, 7 aa, synthetic construct
WSSSNGV

SEQ ID NO: 11485 - protein, 7 aa, synthetic construct
AVSTNGR

SEQ ID NO: 11486 - protein, 7 aa, synthetic construct
LSKIGNN

SEQ ID NO: 11487 - protein, 7 aa, synthetic construct
IDSTNGV

SEQ ID NO: 11488 - protein, 7 aa, synthetic construct
SSDYKIY

SEQ ID NO: 11489 - protein, 7 aa, synthetic construct
FSKAGFN

SEQ ID NO: 11490 - protein, 7 aa, synthetic construct
FESTNGV

SEQ ID NO: 11491 - protein, 7 aa, synthetic construct
SNSREGI

SEQ ID NO: 11492 - protein, 7 aa, synthetic construct
YSKANVN

SEQ ID NO: 11493 - protein, 7 aa, synthetic construct
SHSTNGV

SEQ ID NO: 11494 - protein, 7 aa, synthetic construct
YSRGNEN

SEQ ID NO: 11495 - protein, 7 aa, synthetic construct
LSKTGIN

SEQ ID NO: 11496 - protein, 7 aa, synthetic construct
YSKSNDN

SEQ ID NO: 11497 - protein, 7 aa, synthetic construct
YSRHGFN

SEQ ID NO: 11498 - protein, 7 aa, synthetic construct
YARYGDN

SEQ ID NO: 11499 - protein, 7 aa, synthetic construct
YSRQNDN

SEQ ID NO: 11500 - protein, 7 aa, synthetic construct
LSKGNFN

SEQ ID NO: 11501 - protein, 7 aa, synthetic construct
QKSTNGI

SEQ ID NO: 11502 - protein, 7 aa, synthetic construct
FARNGAN

SEQ ID NO: 11503 - protein, 7 aa, synthetic construct
FISTNGV

SEQ ID NO: 11504 - protein, 7 aa, synthetic construct
YAKQGLN

SEQ ID NO: 11505 - protein, 7 aa, synthetic construct
DYTGRIA

SEQ ID NO: 11506 - protein, 7 aa, synthetic construct
TYSSNGV

SEQ ID NO: 11507 - protein, 7 aa, synthetic construct
SRSTNGA

SEQ ID NO: 11508 - protein, 7 aa, synthetic construct
YSKHNAN

SEQ ID NO: 11509 - protein, 7 aa, synthetic construct
LARPGIN

SEQ ID NO: 11510 - protein, 7 aa, synthetic construct
VPYTSSN

SEQ ID NO: 11511 - protein, 7 aa, synthetic construct
YHSSNGV

SEQ ID NO: 11512 - protein, 7 aa, synthetic construct
YHKNGYN

SEQ ID NO: 11513 - protein, 7 aa, synthetic construct
IFSTNGV

SEQ ID NO: 11514 - protein, 7 aa, synthetic construct
FSKANVN

SEQ ID NO: 11515 - protein, 7 aa, synthetic construct
YAKNGSN

SEQ ID NO: 11516 - protein, 7 aa, synthetic construct
AESTNGR

SEQ ID NO: 11517 - protein, 7 aa, synthetic construct
YAKAGTN

SEQ ID NO: 11518 - protein, 7 aa, synthetic construct
HISTNGI

SEQ ID NO: 11519 - protein, 7 aa, synthetic construct
YAKAGVN

SEQ ID NO: 11520 - protein, 7 aa, synthetic construct
FSKTGYN

SEQ ID NO: 11521 - protein, 7 aa, synthetic construct
YARGGDN

SEQ ID NO: 11522 - protein, 7 aa, synthetic construct
VESTNGV

SEQ ID NO: 11523 - protein, 7 aa, synthetic construct
FQSSNGV

SEQ ID NO: 11524 - protein, 7 aa, synthetic construct
SHSSNGV

SEQ ID NO: 11525 - protein, 7 aa, synthetic construct
YAKSNHN

SEQ ID NO: 11526 - protein, 7 aa, synthetic construct
LARLGDN

SEQ ID NO: 11527 - protein, 7 aa, synthetic construct
LQSTNGV

SEQ ID NO: 11528 - protein, 7 aa, synthetic construct
YSKANIN

SEQ ID NO: 11529 - protein, 7 aa, synthetic construct
HNSSNGV

SEQ ID NO: 11530 - protein, 7 aa, synthetic construct
LSKQGPN

SEQ ID NO: 11531 - protein, 7 aa, synthetic construct
VISTNGI

SEQ ID NO: 11532 - protein, 7 aa, synthetic construct
FAKSGLN

SEQ ID NO: 11533 - protein, 7 aa, synthetic construct
YAKVGAN

SEQ ID NO: 11534 - protein, 7 aa, synthetic construct
LSSTNGV

SEQ ID NO: 11535 - protein, 7 aa, synthetic construct
YAKGGSN

SEQ ID NO: 11536 - protein, 7 aa, synthetic construct
FSKANHN

SEQ ID NO: 11537 - protein, 7 aa, synthetic construct
FISTNGR

SEQ ID NO: 11538 - protein, 7 aa, synthetic construct
LSRLSET

SEQ ID NO: 11539 - protein, 7 aa, synthetic construct
WQSSNGI

SEQ ID NO: 11540 - protein, 7 aa, synthetic construct
YYSTNGV

SEQ ID NO: 11541 - protein, 7 aa, synthetic construct
NWSTNGV

SEQ ID NO: 11542 - protein, 7 aa, synthetic construct
YSKTGMN

SEQ ID NO: 11543 - protein, 7 aa, synthetic construct
LSKVGTN

SEQ ID NO: 11544 - protein, 7 aa, synthetic construct
THYDNGR

SEQ ID NO: 11545 - protein, 7 aa, synthetic construct
YRSSNGV

SEQ ID NO: 11546 - protein, 7 aa, synthetic construct
RESDLKW

SEQ ID NO: 11547 - protein, 7 aa, synthetic construct
YAKSGSN

SEQ ID NO: 11548 - protein, 7 aa, synthetic construct
YAKGNLN

SEQ ID NO: 11549 - protein, 7 aa, synthetic construct
YAKSGTN

SEQ ID NO: 11550 - protein, 7 aa, synthetic construct
YISTNGI

SEQ ID NO: 11551 - protein, 7 aa, synthetic construct
EDGSPRW

SEQ ID NO: 11552 - protein, 7 aa, synthetic construct
LSRQGDN

SEQ ID NO: 11553 - protein, 7 aa, synthetic construct
LSKVGIN

SEQ ID NO: 11554 - protein, 7 aa, synthetic construct
WGSTNGV

SEQ ID NO: 11555 - protein, 7 aa, synthetic construct
LSKLGNN

SEQ ID NO: 11556 - protein, 7 aa, synthetic construct
YASTNGV

SEQ ID NO: 11557 - protein, 7 aa, synthetic construct
YSKIGVN

SEQ ID NO: 11558 - protein, 7 aa, synthetic construct
YSRNGVN

SEQ ID NO: 11559 - protein, 7 aa, synthetic construct
YSKVGIN

SEQ ID NO: 11560 - protein, 7 aa, synthetic construct
YSRINDN

SEQ ID NO: 11561 - protein, 7 aa, synthetic construct
LSKIGIN

SEQ ID NO: 11562 - protein, 7 aa, synthetic construct
VGSSNGV

SEQ ID NO: 11563 - protein, 7 aa, synthetic construct
TISTNGI

SEQ ID NO: 11564 - protein, 7 aa, synthetic construct
YSKKNEN

SEQ ID NO: 11565 - protein, 7 aa, synthetic construct
LARSGEN

SEQ ID NO: 11566 - protein, 7 aa, synthetic construct
VRSTNGE

SEQ ID NO: 11567 - protein, 7 aa, synthetic construct
YAKGNTN

SEQ ID NO: 11568 - protein, 7 aa, synthetic construct
QGSTNGR

SEQ ID NO: 11569 - protein, 7 aa, synthetic construct
FSKVGLN

SEQ ID NO: 11570 - protein, 7 aa, synthetic construct
LAKGGMN

SEQ ID NO: 11571 - protein, 7 aa, synthetic construct
LVSTNGR

SEQ ID NO: 11572 - protein, 7 aa, synthetic construct
LAKSGVN

SEQ ID NO: 11573 - protein, 7 aa, synthetic construct
YSKPGPN

SEQ ID NO: 11574 - protein, 7 aa, synthetic construct
YSKTGTN

SEQ ID NO: 11575 - protein, 7 aa, synthetic construct
RKDGTAS

SEQ ID NO: 11576 - protein, 7 aa, synthetic construct
TQSSNGV

SEQ ID NO: 11577 - protein, 7 aa, synthetic construct
YSKHNNN

SEQ ID NO: 11578 - protein, 7 aa, synthetic construct
YSKVNYN

SEQ ID NO: 11579 - protein, 7 aa, synthetic construct
LSKLNQN

SEQ ID NO: 11580 - protein, 7 aa, synthetic construct
LAKLGIN

SEQ ID NO: 11581 - protein, 7 aa, synthetic construct
YARVGFN

SEQ ID NO: 11582 - protein, 7 aa, synthetic construct
QNGHSSW

SEQ ID NO: 11583 - protein, 7 aa, synthetic construct
YSKSGVN

SEQ ID NO: 11584 - protein, 7 aa, synthetic construct
GGDGNAY

SEQ ID NO: 11585 - protein, 7 aa, synthetic construct
YARANDN

SEQ ID NO: 11586 - protein, 7 aa, synthetic construct
VLSTNGV

SEQ ID NO: 11587 - protein, 7 aa, synthetic construct
TDETVYS

SEQ ID NO: 11588 - protein, 7 aa, synthetic construct
ITSSNGV

SEQ ID NO: 11589 - protein, 7 aa, synthetic construct
MMSTNGV

SEQ ID NO: 11590 - protein, 7 aa, synthetic construct
LSKIGTN

SEQ ID NO: 11591 - protein, 7 aa, synthetic construct
RSDTSIW

SEQ ID NO: 11592 - protein, 7 aa, synthetic construct
SFSTNGV

SEQ ID NO: 11593 - protein, 7 aa, synthetic construct
FSKLGAN

SEQ ID NO: 11594 - protein, 7 aa, synthetic construct
SESTNGI

SEQ ID NO: 11595 - protein, 7 aa, synthetic construct
YAKAGSN

SEQ ID NO: 11596 - protein, 7 aa, synthetic construct
IESTNGI

SEQ ID NO: 11597 - protein, 7 aa, synthetic construct
QSSTNGV

SEQ ID NO: 11598 - protein, 7 aa, synthetic construct
FSSSNGV

SEQ ID NO: 11599 - protein, 7 aa, synthetic construct
YAKGGMN

SEQ ID NO: 11600 - protein, 7 aa, synthetic construct
YARANMN

SEQ ID NO: 11601 - protein, 7 aa, synthetic construct
YAKGGAN

SEQ ID NO: 11602 - protein, 7 aa, synthetic construct
YAKNGQN

SEQ ID NO: 11603 - protein, 7 aa, synthetic construct
GTSTNGR

SEQ ID NO: 11604 - protein, 7 aa, synthetic construct
YAKTNYN

SEQ ID NO: 11605 - protein, 7 aa, synthetic construct
RAESKTW

SEQ ID NO: 11606 - protein, 7 aa, synthetic construct
STSQNGR

SEQ ID NO: 11607 - protein, 7 aa, synthetic construct
PNSTNGV

SEQ ID NO: 11608 - protein, 7 aa, synthetic construct
FARNGTN

SEQ ID NO: 11609 - protein, 7 aa, synthetic construct
LSKVGNN

SEQ ID NO: 11610 - protein, 7 aa, synthetic construct
FARNGVN

SEQ ID NO: 11611 - protein, 7 aa, synthetic construct
FSRVGDN

SEQ ID NO: 11612 - protein, 7 aa, synthetic construct
YAKIGAN

SEQ ID NO: 11613 - protein, 7 aa, synthetic construct
NEDFVRY

SEQ ID NO: 11614 - protein, 7 aa, synthetic construct
VDEFRTY

SEQ ID NO: 11615 - protein, 7 aa, synthetic construct
TDSTNGI

SEQ ID NO: 11616 - protein, 7 aa, synthetic construct
RHDQVYP

SEQ ID NO: 11617 - protein, 7 aa, synthetic construct
YRSTNGY

SEQ ID NO: 11618 - protein, 7 aa, synthetic construct
HSRLNVE

SEQ ID NO: 11619 - protein, 7 aa, synthetic construct
ERSTNGV

SEQ ID NO: 11620 - protein, 7 aa, synthetic construct
LSKSGHN

SEQ ID NO: 11621 - protein, 7 aa, synthetic construct
FSRTGEN

SEQ ID NO: 11622 - protein, 7 aa, synthetic construct
GSSTNGR

SEQ ID NO: 11623 - protein, 7 aa, synthetic construct
YSRNGMN

SEQ ID NO: 11624 - protein, 7 aa, synthetic construct
LSKANFN

SEQ ID NO: 11625 - protein, 7 aa, synthetic construct
WESSNGV

SEQ ID NO: 11626 - protein, 7 aa, synthetic construct
IESSNGV

SEQ ID NO: 11627 - protein, 7 aa, synthetic construct
FARNGFN

SEQ ID NO: 11628 - protein, 7 aa, synthetic construct
VMSSNGV

SEQ ID NO: 11629 - protein, 7 aa, synthetic construct
YSKHNFN

SEQ ID NO: 11630 - protein, 7 aa, synthetic construct
YSKNGFN

SEQ ID NO: 11631 - protein, 7 aa, synthetic construct
YAKEGRN

SEQ ID NO: 11632 - protein, 7 aa, synthetic construct
YSKNGSN

SEQ ID NO: 11633 - protein, 7 aa, synthetic construct
ASSTNGV

SEQ ID NO: 11634 - protein, 7 aa, synthetic construct
YAKLGMN

SEQ ID NO: 11635 - protein, 7 aa, synthetic construct
SWSSNGV

SEQ ID NO: 11636 - protein, 7 aa, synthetic construct
RNLDVTW

SEQ ID NO: 11637 - protein, 7 aa, synthetic construct
PQSSNGV

SEQ ID NO: 11638 - protein, 7 aa, synthetic construct
YFTGTSS

SEQ ID NO: 11639 - protein, 7 aa, synthetic construct
LMSTNGV

SEQ ID NO: 11640 - protein, 7 aa, synthetic construct
YSKSGNN

SEQ ID NO: 11641 - protein, 7 aa, synthetic construct
GWSTNGV

SEQ ID NO: 11642 - protein, 7 aa, synthetic construct
TKSGMNA

SEQ ID NO: 11643 - protein, 7 aa, synthetic construct
YSRQGNN

SEQ ID NO: 11644 - protein, 7 aa, synthetic construct
TESTNGI

SEQ ID NO: 11645 - protein, 7 aa, synthetic construct
VPYTGYD

SEQ ID NO: 11646 - protein, 7 aa, synthetic construct
LSARSDN

SEQ ID NO: 11647 - protein, 7 aa, synthetic construct
QDSTNGI

SEQ ID NO: 11648 - protein, 7 aa, synthetic construct
YSKSGMN

SEQ ID NO: 11649 - protein, 7 aa, synthetic construct
TQSSSGR

SEQ ID NO: 11650 - protein, 7 aa, synthetic construct
LSRNNDN

SEQ ID NO: 11651 - protein, 7 aa, synthetic construct
YARSGEN

SEQ ID NO: 11652 - protein, 7 aa, synthetic construct
QVSTNGR

SEQ ID NO: 11653 - protein, 7 aa, synthetic construct
LSKLGTN

SEQ ID NO: 11654 - protein, 7 aa, synthetic construct
YSRNNNN

SEQ ID NO: 11655 - protein, 7 aa, synthetic construct
LSKAGSN

SEQ ID NO: 11656 - protein, 7 aa, synthetic construct
LHVQGPN

SEQ ID NO: 11657 - protein, 7 aa, synthetic construct
HFSSNGV

SEQ ID NO: 11658 - protein, 7 aa, synthetic construct
YSKSNHN

SEQ ID NO: 11659 - protein, 7 aa, synthetic construct
TFSSNGV

SEQ ID NO: 11660 - protein, 7 aa, synthetic construct
YSKMGLN

SEQ ID NO: 11661 - protein, 7 aa, synthetic construct
YSKVGGN

SEQ ID NO: 11662 - protein, 7 aa, synthetic construct
LSKIGDN

SEQ ID NO: 11663 - protein, 7 aa, synthetic construct
VASTNGV

SEQ ID NO: 11664 - protein, 7 aa, synthetic construct
SDSTNGV

SEQ ID NO: 11665 - protein, 7 aa, synthetic construct
LISTNGV

SEQ ID NO: 11666 - protein, 7 aa, synthetic construct
YSKSGGN

SEQ ID NO: 11667 - protein, 7 aa, synthetic construct
YSKTGSN

SEQ ID NO: 11668 - protein, 7 aa, synthetic construct
LARNGWN

SEQ ID NO: 11669 - protein, 7 aa, synthetic construct
MASTNGV

SEQ ID NO: 11670 - protein, 7 aa, synthetic construct
FSRQNVN

SEQ ID NO: 11671 - protein, 7 aa, synthetic construct
VKSSNGV

SEQ ID NO: 11672 - protein, 7 aa, synthetic construct
YARSNFN

SEQ ID NO: 11673 - protein, 7 aa, synthetic construct
LAKGGAN

SEQ ID NO: 11674 - protein, 7 aa, synthetic construct
FAKNGYN

SEQ ID NO: 11675 - protein, 7 aa, synthetic construct
FDSTNGV

SEQ ID NO: 11676 - protein, 7 aa, synthetic construct
LSKSGAN

SEQ ID NO: 11677 - protein, 7 aa, synthetic construct
YAKAGMN

SEQ ID NO: 11678 - protein, 7 aa, synthetic construct
FSKQGPN

SEQ ID NO: 11679 - protein, 7 aa, synthetic construct
MVSTNGR

SEQ ID NO: 11680 - protein, 7 aa, synthetic construct
VISSNGV

SEQ ID NO: 11681 - protein, 7 aa, synthetic construct
FSRMNEN

SEQ ID NO: 11682 - protein, 7 aa, synthetic construct
YARMGDN

SEQ ID NO: 11683 - protein, 7 aa, synthetic construct
YSKQNAN

SEQ ID NO: 11684 - protein, 7 aa, synthetic construct
RESTNGI

SEQ ID NO: 11685 - protein, 7 aa, synthetic construct
LSKGNVN

SEQ ID NO: 11686 - protein, 7 aa, synthetic construct
LSKLGSN

SEQ ID NO: 11687 - protein, 7 aa, synthetic construct
YAKLGLN

SEQ ID NO: 11688 - protein, 7 aa, synthetic construct
YSKQNLN

SEQ ID NO: 11689 - protein, 7 aa, synthetic construct
LSKANHN

SEQ ID NO: 11690 - protein, 7 aa, synthetic construct
VLSTNGI

SEQ ID NO: 11691 - protein, 7 aa, synthetic construct
HRSTNGQ

SEQ ID NO: 11692 - protein, 7 aa, synthetic construct
TTSTNGV

SEQ ID NO: 11693 - protein, 7 aa, synthetic construct
FSKMNVN

SEQ ID NO: 11694 - protein, 7 aa, synthetic construct
GADGSRW

SEQ ID NO: 11695 - protein, 7 aa, synthetic construct
AASTNGI

SEQ ID NO: 11696 - protein, 7 aa, synthetic construct
LAKGGVN

SEQ ID NO: 11697 - protein, 7 aa, synthetic construct
GMKNVMF

SEQ ID NO: 11698 - protein, 7 aa, synthetic construct
HESTNGI

SEQ ID NO: 11699 - protein, 7 aa, synthetic construct
YSKMGSN

SEQ ID NO: 11700 - protein, 7 aa, synthetic construct
NNGGSLW

SEQ ID NO: 11701 - protein, 7 aa, synthetic construct
LMSTNGR

SEQ ID NO: 11702 - protein, 7 aa, synthetic construct
AVSTNGV

SEQ ID NO: 11703 - protein, 7 aa, synthetic construct
YSRQNTN

SEQ ID NO: 11704 - protein, 7 aa, synthetic construct
FSKVGHN

SEQ ID NO: 11705 - protein, 7 aa, synthetic construct
YHRQGGD

SEQ ID NO: 11706 - protein, 7 aa, synthetic construct
FARTGEN

SEQ ID NO: 11707 - protein, 7 aa, synthetic construct
RALEGAD

SEQ ID NO: 11708 - protein, 7 aa, synthetic construct
YAKSNDN

SEQ ID NO: 11709 - protein, 7 aa, synthetic construct
LRNGNSA

SEQ ID NO: 11710 - protein, 7 aa, synthetic construct
LLSTNGV

SEQ ID NO: 11711 - protein, 7 aa, synthetic construct
LAKSGEN

SEQ ID NO: 11712 - protein, 7 aa, synthetic construct
YAKTNMN

SEQ ID NO: 11713 - protein, 7 aa, synthetic construct
RRDGTAY

SEQ ID NO: 11714 - protein, 7 aa, synthetic construct
STSTNGV

SEQ ID NO: 11715 - protein, 7 aa, synthetic construct
YSKYNLN

SEQ ID NO: 11716 - protein, 7 aa, synthetic construct
DGGTSHY

SEQ ID NO: 11717 - protein, 7 aa, synthetic construct
MESTNGR

SEQ ID NO: 11718 - protein, 7 aa, synthetic construct
HQSTNGI

SEQ ID NO: 11719 - protein, 7 aa, synthetic construct
LAKGGNN

SEQ ID NO: 11720 - protein, 7 aa, synthetic construct
SESTNGR

SEQ ID NO: 11721 - protein, 7 aa, synthetic construct
YSKHGNN

SEQ ID NO: 11722 - protein, 7 aa, synthetic construct
LPREVYA

SEQ ID NO: 11723 - protein, 7 aa, synthetic construct
QMSTNGR

SEQ ID NO: 11724 - protein, 7 aa, synthetic construct
YSKQNVN

SEQ ID NO: 11725 - protein, 7 aa, synthetic construct
YAREGPN

SEQ ID NO: 11726 - protein, 7 aa, synthetic construct
KDGESSW

SEQ ID NO: 11727 - protein, 7 aa, synthetic construct
YARAGDN

SEQ ID NO: 11728 - protein, 7 aa, synthetic construct
FSKVGDN

SEQ ID NO: 11729 - protein, 7 aa, synthetic construct
AASTNGV

SEQ ID NO: 11730 - protein, 7 aa, synthetic construct
LSKMGFN

SEQ ID NO: 11731 - protein, 7 aa, synthetic construct
QRYDAYE

SEQ ID NO: 11732 - protein, 7 aa, synthetic construct
TISTNGV

SEQ ID NO: 11733 - protein, 7 aa, synthetic construct
EGSTNGR

SEQ ID NO: 11734 - protein, 7 aa, synthetic construct
YAKSGEN

SEQ ID NO: 11735 - protein, 7 aa, synthetic construct
LAKTGNN

SEQ ID NO: 11736 - protein, 7 aa, synthetic construct
NFSTNGI

SEQ ID NO: 11737 - protein, 7 aa, synthetic construct
LAKVGYN

SEQ ID NO: 11738 - protein, 7 aa, synthetic construct
IASTNGV

SEQ ID NO: 11739 - protein, 7 aa, synthetic construct
RGADVHW

SEQ ID NO: 11740 - protein, 7 aa, synthetic construct
FSKLNEN

SEQ ID NO: 11741 - protein, 7 aa, synthetic construct
YFSGTTD

SEQ ID NO: 11742 - protein, 7 aa, synthetic construct
LAKMGPN

SEQ ID NO: 11743 - protein, 7 aa, synthetic construct
YSKINHN

SEQ ID NO: 11744 - protein, 7 aa, synthetic construct
VEFEWSD

SEQ ID NO: 11745 - protein, 7 aa, synthetic construct
YARLNFN

SEQ ID NO: 11746 - protein, 7 aa, synthetic construct
YSKHNIN

SEQ ID NO: 11747 - protein, 7 aa, synthetic construct
AMSTNGV

SEQ ID NO: 11748 - protein, 7 aa, synthetic construct
LAKLGLN

SEQ ID NO: 11749 - protein, 7 aa, synthetic construct
LAKSGNN

SEQ ID NO: 11750 - protein, 7 aa, synthetic construct
HFSTNGI

SEQ ID NO: 11751 - protein, 7 aa, synthetic construct
HASSNGV

SEQ ID NO: 11752 - protein, 7 aa, synthetic construct
QQSTNGI

SEQ ID NO: 11753 - protein, 7 aa, synthetic construct
YSRSNIN

SEQ ID NO: 11754 - protein, 7 aa, synthetic construct
SNESSTW

SEQ ID NO: 11755 - protein, 7 aa, synthetic construct
YAKQGAN

SEQ ID NO: 11756 - protein, 7 aa, synthetic construct
PASTNGR

SEQ ID NO: 11757 - protein, 7 aa, synthetic construct
VFSTNGV

SEQ ID NO: 11758 - protein, 7 aa, synthetic construct
YSKMGDN

SEQ ID NO: 11759 - protein, 7 aa, synthetic construct
YSKWGAN

SEQ ID NO: 11760 - protein, 7 aa, synthetic construct
YSKTGVN

SEQ ID NO: 11761 - protein, 7 aa, synthetic construct
LAKAGVN

SEQ ID NO: 11762 - protein, 7 aa, synthetic construct
LSRIGEN

SEQ ID NO: 11763 - protein, 7 aa, synthetic construct
YSKSNLN

SEQ ID NO: 11764 - protein, 7 aa, synthetic construct
YSRTNEN

SEQ ID NO: 11765 - protein, 7 aa, synthetic construct
VGSTNGV

SEQ ID NO: 11766 - protein, 7 aa, synthetic construct
YAKTGAN

SEQ ID NO: 11767 - protein, 7 aa, synthetic construct
GSERSSW

SEQ ID NO: 11768 - protein, 7 aa, synthetic construct
LSKMNDN

SEQ ID NO: 11769 - protein, 7 aa, synthetic construct
QQSTNGV

SEQ ID NO: 11770 - protein, 7 aa, synthetic construct
YARQNDN

SEQ ID NO: 11771 - protein, 7 aa, synthetic construct
HNSTNGI

SEQ ID NO: 11772 - protein, 7 aa, synthetic construct
FSRTGQN

SEQ ID NO: 11773 - protein, 7 aa, synthetic construct
PQSTNGI

SEQ ID NO: 11774 - protein, 7 aa, synthetic construct
SQSTNGV

SEQ ID NO: 11775 - protein, 7 aa, synthetic construct
PWSSNGV

SEQ ID NO: 11776 - protein, 7 aa, synthetic construct
IMSTNGV

SEQ ID NO: 11777 - protein, 7 aa, synthetic construct
SKSTNGI

SEQ ID NO: 11778 - protein, 7 aa, synthetic construct
WNSSNGV

SEQ ID NO: 11779 - protein, 7 aa, synthetic construct
YARIGEN

SEQ ID NO: 11780 - protein, 7 aa, synthetic construct
LSGESRY

SEQ ID NO: 11781 - protein, 7 aa, synthetic construct
YARNGGN

SEQ ID NO: 11782 - protein, 7 aa, synthetic construct
DNRGNNA

SEQ ID NO: 11783 - protein, 7 aa, synthetic construct
LESTNGR

SEQ ID NO: 11784 - protein, 7 aa, synthetic construct
LAKQGMN

SEQ ID NO: 11785 - protein, 7 aa, synthetic construct
FTSTNGV

SEQ ID NO: 11786 - protein, 7 aa, synthetic construct
NESTNGV

SEQ ID NO: 11787 - protein, 7 aa, synthetic construct
THSTNGI

SEQ ID NO: 11788 - protein, 7 aa, synthetic construct
YVHSQNY

SEQ ID NO: 11789 - protein, 7 aa, synthetic construct
NDGRSNY

SEQ ID NO: 11790 - protein, 7 aa, synthetic construct
YAKVGMN

SEQ ID NO: 11791 - protein, 7 aa, synthetic construct
LAKSGAN

SEQ ID NO: 11792 - protein, 7 aa, synthetic construct
YSRHNEN

SEQ ID NO: 11793 - protein, 7 aa, synthetic construct
YAKANPN

SEQ ID NO: 11794 - protein, 7 aa, synthetic construct
RSEATYP

SEQ ID NO: 11795 - protein, 7 aa, synthetic construct
LSRSGEN

SEQ ID NO: 11796 - protein, 7 aa, synthetic construct
YSKMNLN

SEQ ID NO: 11797 - protein, 7 aa, synthetic construct
YAKNGMN

SEQ ID NO: 11798 - protein, 7 aa, synthetic construct
FHSSNGV

SEQ ID NO: 11799 - protein, 7 aa, synthetic construct
LSRAGEN

SEQ ID NO: 11800 - protein, 7 aa, synthetic construct
LGSTNGI

SEQ ID NO: 11801 - protein, 7 aa, synthetic construct
YSSSNGV

SEQ ID NO: 11802 - protein, 7 aa, synthetic construct
LAKQGVN

SEQ ID NO: 11803 - protein, 7 aa, synthetic construct
FSRQGMN

SEQ ID NO: 11804 - protein, 7 aa, synthetic construct
SASTNGI

SEQ ID NO: 11805 - protein, 7 aa, synthetic construct
QMSTNGV

SEQ ID NO: 11806 - protein, 7 aa, synthetic construct
LSKNNVN

SEQ ID NO: 11807 - protein, 7 aa, synthetic construct
HASTNGI

SEQ ID NO: 11808 - protein, 7 aa, synthetic construct
TPDHVQW

SEQ ID NO: 11809 - protein, 7 aa, synthetic construct
RLETHDW

SEQ ID NO: 11810 - protein, 7 aa, synthetic construct
GTSTASW

SEQ ID NO: 11811 - protein, 7 aa, synthetic construct
YSKNGHN

SEQ ID NO: 11812 - protein, 7 aa, synthetic construct
YSKHNTN

SEQ ID NO: 11813 - protein, 7 aa, synthetic construct
YSRHGEN

SEQ ID NO: 11814 - protein, 7 aa, synthetic construct
LARQGDN

SEQ ID NO: 11815 - protein, 7 aa, synthetic construct
FSKIGIN

SEQ ID NO: 11816 - protein, 7 aa, synthetic construct
YSKLGDN

SEQ ID NO: 11817 - protein, 7 aa, synthetic construct
YSKLNGN

SEQ ID NO: 11818 - protein, 7 aa, synthetic construct
YSRNGQN

SEQ ID NO: 11819 - protein, 7 aa, synthetic construct
ISSTNGV

SEQ ID NO: 11820 - protein, 7 aa, synthetic construct
YALSGFN

SEQ ID NO: 11821 - protein, 7 aa, synthetic construct
PISTNGR

SEQ ID NO: 11822 - protein, 7 aa, synthetic construct
MFSTNGI

SEQ ID NO: 11823 - protein, 7 aa, synthetic construct
LSKMNHN

SEQ ID NO: 11824 - protein, 7 aa, synthetic construct
TDGQSGW

SEQ ID NO: 11825 - protein, 7 aa, synthetic construct
AISTNGV

SEQ ID NO: 11826 - protein, 7 aa, synthetic construct
VTSTNGI

SEQ ID NO: 11827 - protein, 7 aa, synthetic construct
LAKTGDN

SEQ ID NO: 11828 - protein, 7 aa, synthetic construct
YSKGGFN

SEQ ID NO: 11829 - protein, 7 aa, synthetic construct
LSKLNMN

SEQ ID NO: 11830 - protein, 7 aa, synthetic construct
YQSSNGV

SEQ ID NO: 11831 - protein, 7 aa, synthetic construct
LTSTNGV

SEQ ID NO: 11832 - protein, 7 aa, synthetic construct
LSKQNVN

SEQ ID NO: 11833 - protein, 7 aa, synthetic construct
LSKQGHN

SEQ ID NO: 11834 - protein, 7 aa, synthetic construct
DALHGRN

SEQ ID NO: 11835 - protein, 7 aa, synthetic construct
YSKVNSN

SEQ ID NO: 11836 - protein, 7 aa, synthetic construct
FESSNGV

SEQ ID NO: 11837 - protein, 7 aa, synthetic construct
YSKVNVN

SEQ ID NO: 11838 - protein, 7 aa, synthetic construct
FSKVGVN

SEQ ID NO: 11839 - protein, 7 aa, synthetic construct
TSGSSSW

SEQ ID NO: 11840 - protein, 7 aa, synthetic construct
TMSTNGV

SEQ ID NO: 11841 - protein, 7 aa, synthetic construct
HNSTNGV

SEQ ID NO: 11842 - protein, 7 aa, synthetic construct
MHSTNGI

SEQ ID NO: 11843 - protein, 7 aa, synthetic construct
YAKGNQN

SEQ ID NO: 11844 - protein, 7 aa, synthetic construct
SNSTNGI

SEQ ID NO: 11845 - protein, 7 aa, synthetic construct
YSKAGTN

SEQ ID NO: 11846 - protein, 7 aa, synthetic construct
TESTNGV

SEQ ID NO: 11847 - protein, 7 aa, synthetic construct
NVDHVSW

SEQ ID NO: 11848 - protein, 7 aa, synthetic construct
TDSTNGV

SEQ ID NO: 11849 - protein, 7 aa, synthetic construct
FSKSGHN

SEQ ID NO: 11850 - protein, 7 aa, synthetic construct
SISTNGI

SEQ ID NO: 11851 - protein, 7 aa, synthetic construct
SMSTNGI

SEQ ID NO: 11852 - protein, 7 aa, synthetic construct
SMSTNGV

SEQ ID NO: 11853 - protein, 7 aa, synthetic construct
HQSTNGV

SEQ ID NO: 11854 - protein, 7 aa, synthetic construct
QASTNGV

SEQ ID NO: 11855 - protein, 7 aa, synthetic construct
PHSTNGV

SEQ ID NO: 11856 - protein, 7 aa, synthetic construct
RLSESNW

SEQ ID NO: 11857 - protein, 7 aa, synthetic construct
EHSTNGR

SEQ ID NO: 11858 - protein, 7 aa, synthetic construct
MHSTNGV

SEQ ID NO: 11859 - protein, 7 aa, synthetic construct
VTSSMGR

SEQ ID NO: 11860 - protein, 7 aa, synthetic construct
YSKSGIN

SEQ ID NO: 11861 - protein, 7 aa, synthetic construct
FSKDNFN

SEQ ID NO: 11862 - protein, 7 aa, synthetic construct
YSKGNNN

SEQ ID NO: 11863 - protein, 7 aa, synthetic construct
TKSSNGV

SEQ ID NO: 11864 - protein, 7 aa, synthetic construct
TASTNGI

SEQ ID NO: 11865 - protein, 7 aa, synthetic construct
YSKIGQN

SEQ ID NO: 11866 - protein, 7 aa, synthetic construct
HTSTNGI

SEQ ID NO: 11867 - protein, 7 aa, synthetic construct
SDSTNGI

SEQ ID NO: 11868 - protein, 7 aa, synthetic construct
LAKHGAN

SEQ ID NO: 11869 - protein, 7 aa, synthetic construct
AESTNGV

SEQ ID NO: 11870 - protein, 7 aa, synthetic construct
YLSTNGV

SEQ ID NO: 11871 - protein, 7 aa, synthetic construct
LAKMGVN

SEQ ID NO: 11872 - protein, 7 aa, synthetic construct
SASSNGV

SEQ ID NO: 11873 - protein, 7 aa, synthetic construct
VVSSNGV

SEQ ID NO: 11874 - protein, 7 aa, synthetic construct
AISTNGI

SEQ ID NO: 11875 - protein, 7 aa, synthetic construct
HTSTNGV

SEQ ID NO: 11876 - protein, 7 aa, synthetic construct
FAKGGMN

SEQ ID NO: 11877 - protein, 7 aa, synthetic construct
GGGTNAW

SEQ ID NO: 11878 - protein, 7 aa, synthetic construct
TNSTNGV

SEQ ID NO: 11879 - protein, 7 aa, synthetic construct
YAKNGLN

SEQ ID NO: 11880 - protein, 7 aa, synthetic construct
YSKANQN

SEQ ID NO: 11881 - protein, 7 aa, synthetic construct
VEYGQRN

SEQ ID NO: 11882 - protein, 7 aa, synthetic construct
ASSTNGI

SEQ ID NO: 11883 - protein, 7 aa, synthetic construct
LSKMGNN

SEQ ID NO: 11884 - protein, 7 aa, synthetic construct
YAKQGVN

SEQ ID NO: 11885 - protein, 7 aa, synthetic construct
PESTNGV

SEQ ID NO: 11886 - protein, 7 aa, synthetic construct
HYSTNGI

SEQ ID NO: 11887 - protein, 7 aa, synthetic construct
LSKVGPN

SEQ ID NO: 11888 - protein, 7 aa, synthetic construct
TASSNGV

SEQ ID NO: 11889 - protein, 7 aa, synthetic construct
INSTNGI

SEQ ID NO: 11890 - protein, 7 aa, synthetic construct
YARDGPN

SEQ ID NO: 11891 - protein, 7 aa, synthetic construct
YSKMNIN

SEQ ID NO: 11892 - protein, 7 aa, synthetic construct
LNSTNGV

SEQ ID NO: 11893 - protein, 7 aa, synthetic construct
YSKQNEN

SEQ ID NO: 11894 - protein, 7 aa, synthetic construct
YAKGNHN

SEQ ID NO: 11895 - protein, 7 aa, synthetic construct
EVSTNGR

SEQ ID NO: 11896 - protein, 7 aa, synthetic construct
YAKGNDN

SEQ ID NO: 11897 - protein, 7 aa, synthetic construct
SDGSSLW

SEQ ID NO: 11898 - protein, 7 aa, synthetic construct
TFSTNGV

SEQ ID NO: 11899 - protein, 7 aa, synthetic construct
LSKTGVN

SEQ ID NO: 11900 - protein, 7 aa, synthetic construct
YSRNGYN

SEQ ID NO: 11901 - protein, 7 aa, synthetic construct
YARTSTD

SEQ ID NO: 11902 - protein, 7 aa, synthetic construct
LSKAGTN

SEQ ID NO: 11903 - protein, 7 aa, synthetic construct
YSKQGEN

SEQ ID NO: 11904 - protein, 7 aa, synthetic construct
FAKSGAN

SEQ ID NO: 11905 - protein, 7 aa, synthetic construct
LARQGEN

SEQ ID NO: 11906 - protein, 7 aa, synthetic construct
QTSTNGV

SEQ ID NO: 11907 - protein, 7 aa, synthetic construct
LSKANMN

SEQ ID NO: 11908 - protein, 7 aa, synthetic construct
YESTNGV

SEQ ID NO: 11909 - protein, 7 aa, synthetic construct
LSKAGDN

SEQ ID NO: 11910 - protein, 7 aa, synthetic construct
YSKMGNN

SEQ ID NO: 11911 - protein, 7 aa, synthetic construct
YSRANEN

SEQ ID NO: 11912 - protein, 7 aa, synthetic construct
TRNGANA

SEQ ID NO: 11913 - protein, 7 aa, synthetic construct
ETSTNGR

SEQ ID NO: 11914 - protein, 7 aa, synthetic construct
WQETNGK

SEQ ID NO: 11915 - protein, 7 aa, synthetic construct
ITSTNGV

SEQ ID NO: 11916 - protein, 7 aa, synthetic construct
SGSTNGV

SEQ ID NO: 11917 - protein, 7 aa, synthetic construct
FNSSNGV

SEQ ID NO: 11918 - protein, 7 aa, synthetic construct
FSRAGTN

SEQ ID NO: 11919 - protein, 7 aa, synthetic construct
QTSSNGV

SEQ ID NO: 11920 - protein, 7 aa, synthetic construct
PESTNGR

SEQ ID NO: 11921 - protein, 7 aa, synthetic construct
IMSTNGI

SEQ ID NO: 11922 - protein, 7 aa, synthetic construct
ENSTNGR

SEQ ID NO: 11923 - protein, 7 aa, synthetic construct
RPNGHSA

SEQ ID NO: 11924 - protein, 7 aa, synthetic construct
IHSTNGI

SEQ ID NO: 11925 - protein, 7 aa, synthetic construct
PRSSNGV

SEQ ID NO: 11926 - protein, 7 aa, synthetic construct
LQSSNGV

SEQ ID NO: 11927 - protein, 7 aa, synthetic construct
YSKVGVN

SEQ ID NO: 11928 - protein, 7 aa, synthetic construct
YSKQNHN

SEQ ID NO: 11929 - protein, 7 aa, synthetic construct
LSKGGPN

SEQ ID NO: 11930 - protein, 7 aa, synthetic construct
IQSTNGI

SEQ ID NO: 11931 - protein, 7 aa, synthetic construct
TNRVPHS

SEQ ID NO: 11932 - protein, 7 aa, synthetic construct
HHGVSAY

SEQ ID NO: 11933 - protein, 7 aa, synthetic construct
VWSSNGV

SEQ ID NO: 11934 - protein, 7 aa, synthetic construct
YSKQGTN

SEQ ID NO: 11935 - protein, 7 aa, synthetic construct
ADSTNGV

SEQ ID NO: 11936 - protein, 7 aa, synthetic construct
GEGYSTW

SEQ ID NO: 11937 - protein, 7 aa, synthetic construct
LSRINFN

SEQ ID NO: 11938 - protein, 7 aa, synthetic construct
HMSTNGI

SEQ ID NO: 11939 - protein, 7 aa, synthetic construct
YAKANDN

SEQ ID NO: 11940 - protein, 7 aa, synthetic construct
IISTNGI

SEQ ID NO: 11941 - protein, 7 aa, synthetic construct
HYSTNGV

SEQ ID NO: 11942 - protein, 7 aa, synthetic construct
IISTNGR

SEQ ID NO: 11943 - protein, 7 aa, synthetic construct
YARYNDN

SEQ ID NO: 11944 - protein, 7 aa, synthetic construct
LISTNGI

SEQ ID NO: 11945 - protein, 7 aa, synthetic construct
YSKSGLN

SEQ ID NO: 11946 - protein, 7 aa, synthetic construct
HWSTNGI

SEQ ID NO: 11947 - protein, 7 aa, synthetic construct
LSKLNLN

SEQ ID NO: 11948 - protein, 7 aa, synthetic construct
YSKSNPN

SEQ ID NO: 11949 - protein, 7 aa, synthetic construct
YSRNGTN

SEQ ID NO: 11950 - protein, 7 aa, synthetic construct
YAKIGMN

SEQ ID NO: 11951 - protein, 7 aa, synthetic construct
LTSTNGI

SEQ ID NO: 11952 - protein, 7 aa, synthetic construct
SVSTNGV

SEQ ID NO: 11953 - protein, 7 aa, synthetic construct
MESSNGV

SEQ ID NO: 11954 - protein, 7 aa, synthetic construct
SNSSNGV

SEQ ID NO: 11955 - protein, 7 aa, synthetic construct
VYSTNGV

SEQ ID NO: 11956 - protein, 7 aa, synthetic construct
SHSTNGI

SEQ ID NO: 11957 - protein, 7 aa, synthetic construct
QHSTNGV

SEQ ID NO: 11958 - protein, 7 aa, synthetic construct
LSKTGMN

SEQ ID NO: 11959 - protein, 7 aa, synthetic construct
LSKQGMN

SEQ ID NO: 11960 - protein, 7 aa, synthetic construct
LSKSSNN

SEQ ID NO: 11961 - protein, 7 aa, synthetic construct
FGSTNGI

SEQ ID NO: 11962 - protein, 7 aa, synthetic construct
YARVGEN

SEQ ID NO: 11963 - protein, 7 aa, synthetic construct
FSKAGQN

SEQ ID NO: 11964 - protein, 7 aa, synthetic construct
HTSSNGV

SEQ ID NO: 11965 - protein, 7 aa, synthetic construct
YSKTGEN

SEQ ID NO: 11966 - protein, 7 aa, synthetic construct
YFSHVVE

SEQ ID NO: 11967 - protein, 7 aa, synthetic construct
LAKNGPN

SEQ ID NO: 11968 - protein, 7 aa, synthetic construct
ISESSRW

SEQ ID NO: 11969 - protein, 7 aa, synthetic construct
LSRYNEN

SEQ ID NO: 11970 - protein, 7 aa, synthetic construct
LSRLSDT

SEQ ID NO: 11971 - protein, 7 aa, synthetic construct
LASTNGR

SEQ ID NO: 11972 - protein, 7 aa, synthetic construct
YAKAGDN

SEQ ID NO: 11973 - protein, 7 aa, synthetic construct
HGSTNGV

SEQ ID NO: 11974 - protein, 7 aa, synthetic construct
VSSTNGI

SEQ ID NO: 11975 - protein, 7 aa, synthetic construct
FSKSGPN

SEQ ID NO: 11976 - protein, 7 aa, synthetic construct
AWSTNGV

SEQ ID NO: 11977 - protein, 7 aa, synthetic construct
LSKMGIN

SEQ ID NO: 11978 - protein, 7 aa, synthetic construct
LAKAGLN

SEQ ID NO: 11979 - protein, 7 aa, synthetic construct
VTSSNGV

SEQ ID NO: 11980 - protein, 7 aa, synthetic construct
YSKANPN

SEQ ID NO: 11981 - protein, 7 aa, synthetic construct
LSKGNHN

SEQ ID NO: 11982 - protein, 7 aa, synthetic construct
TAAHVTW

SEQ ID NO: 11983 - protein, 7 aa, synthetic construct
QESTNGR

SEQ ID NO: 11984 - protein, 7 aa, synthetic construct
LSKMGLN

SEQ ID NO: 11985 - protein, 7 aa, synthetic construct
ISSSNGM

SEQ ID NO: 11986 - protein, 7 aa, synthetic construct
LHSTNGI

SEQ ID NO: 11987 - protein, 7 aa, synthetic construct
LAKNGMN

SEQ ID NO: 11988 - protein, 7 aa, synthetic construct
YSKSNAN

SEQ ID NO: 11989 - protein, 7 aa, synthetic construct
LAKTGTN

SEQ ID NO: 11990 - protein, 7 aa, synthetic construct
MMSTNGI

SEQ ID NO: 11991 - protein, 7 aa, synthetic construct
YSRDGYN

SEQ ID NO: 11992 - protein, 7 aa, synthetic construct
YTSSNGV

SEQ ID NO: 11993 - protein, 7 aa, synthetic construct
EASTNGR

SEQ ID NO: 11994 - protein, 7 aa, synthetic construct
NSSTSTW

SEQ ID NO: 11995 - protein, 7 aa, synthetic construct
YSKANNN

SEQ ID NO: 11996 - protein, 7 aa, synthetic construct
TSSTNGV

SEQ ID NO: 11997 - protein, 7 aa, synthetic construct
PYAASRD

SEQ ID NO: 11998 - protein, 7 aa, synthetic construct
ANGSSKY

SEQ ID NO: 11999 - protein, 7 aa, synthetic construct
NHSTNGR

SEQ ID NO: 12000 - protein, 7 aa, synthetic construct
YSRQNPN

SEQ ID NO: 12001 - protein, 7 aa, synthetic construct
YAKSQMN

SEQ ID NO: 12002 - protein, 7 aa, synthetic construct
QISTNGI

SEQ ID NO: 12003 - protein, 7 aa, synthetic construct
YHVHGDN

SEQ ID NO: 12004 - protein, 7 aa, synthetic construct
YAKPGAN

SEQ ID NO: 12005 - protein, 7 aa, synthetic construct
YSKSGSN

SEQ ID NO: 12006 - protein, 7 aa, synthetic construct
YAKSGAN

SEQ ID NO: 12007 - protein, 7 aa, synthetic construct
YNSSNGV

SEQ ID NO: 12008 - protein, 7 aa, synthetic construct
YRTDGFS

SEQ ID NO: 12009 - protein, 7 aa, synthetic construct
SSSTNGI

SEQ ID NO: 12010 - protein, 7 aa, synthetic construct
YAKMGLN

SEQ ID NO: 12011 - protein, 7 aa, synthetic construct
YSASGPN

SEQ ID NO: 12012 - protein, 7 aa, synthetic construct
LSKQGFN

SEQ ID NO: 12013 - protein, 7 aa, synthetic construct
HDSTNGV

SEQ ID NO: 12014 - protein, 7 aa, synthetic construct
VSSQNGV

SEQ ID NO: 12015 - protein, 7 aa, synthetic construct
YSKMGQN

SEQ ID NO: 12016 - protein, 7 aa, synthetic construct
NFSTNGR

SEQ ID NO: 12017 - protein, 7 aa, synthetic construct
YSRGNDN

SEQ ID NO: 12018 - protein, 7 aa, synthetic construct
ASDTNGR

SEQ ID NO: 12019 - protein, 7 aa, synthetic construct
TQSLNGR

SEQ ID NO: 12020 - protein, 7 aa, synthetic construct
PSSTNGV

SEQ ID NO: 12021 - protein, 7 aa, synthetic construct
KDGNSSW

SEQ ID NO: 12022 - protein, 7 aa, synthetic construct
FAKAGWN

SEQ ID NO: 12023 - protein, 7 aa, synthetic construct
YYSGKID

SEQ ID NO: 12024 - protein, 7 aa, synthetic construct
LSRINDN

SEQ ID NO: 12025 - protein, 7 aa, synthetic construct
TTSTNGI

SEQ ID NO: 12026 - protein, 7 aa, synthetic construct
EASTNGI

SEQ ID NO: 12027 - protein, 7 aa, synthetic construct
FSSTNGV

SEQ ID NO: 12028 - protein, 7 aa, synthetic construct
FAKAGFN

SEQ ID NO: 12029 - protein, 7 aa, synthetic construct
LARGGEN

SEQ ID NO: 12030 - protein, 7 aa, synthetic construct
VESSNGV

SEQ ID NO: 12031 - protein, 7 aa, synthetic construct
YAKNGGN

SEQ ID NO: 12032 - protein, 7 aa, synthetic construct
SGSTNGI

SEQ ID NO: 12033 - protein, 7 aa, synthetic construct
YAKNGTN

SEQ ID NO: 12034 - protein, 7 aa, synthetic construct
LHKNTEN

SEQ ID NO: 12035 - protein, 7 aa, synthetic construct
FRSSNGV

SEQ ID NO: 12036 - protein, 7 aa, synthetic construct
KGADHSW

SEQ ID NO: 12037 - protein, 7 aa, synthetic construct
VNSTNGV

SEQ ID NO: 12038 - protein, 7 aa, synthetic construct
VNSTNGI

SEQ ID NO: 12039 - protein, 7 aa, synthetic construct
NHASHAW

SEQ ID NO: 12040 - protein, 7 aa, synthetic construct
LAKMGLN

SEQ ID NO: 12041 - protein, 7 aa, synthetic construct
YSKYNIN

SEQ ID NO: 12042 - protein, 7 aa, synthetic construct
YFTHQSE

SEQ ID NO: 12043 - protein, 7 aa, synthetic construct
YAKTGNN

SEQ ID NO: 12044 - protein, 7 aa, synthetic construct
LISTNGR

SEQ ID NO: 12045 - protein, 7 aa, synthetic construct
SRSSNGV

SEQ ID NO: 12046 - protein, 7 aa, synthetic construct
LASTNGI

SEQ ID NO: 12047 - protein, 7 aa, synthetic construct
AGSTNGV

SEQ ID NO: 12048 - protein, 7 aa, synthetic construct
RTSSNGQ

SEQ ID NO: 12049 - protein, 7 aa, synthetic construct
ERSTNGI

SEQ ID NO: 12050 - protein, 7 aa, synthetic construct
PGSTNGV

SEQ ID NO: 12051 - protein, 7 aa, synthetic construct
LARNGEN

SEQ ID NO: 12052 - protein, 7 aa, synthetic construct
SQSTNGI

SEQ ID NO: 12053 - protein, 7 aa, synthetic construct
YAKMGQN

SEQ ID NO: 12054 - protein, 7 aa, synthetic construct
KFPSHDW

SEQ ID NO: 12055 - protein, 7 aa, synthetic construct
VESTNGI

SEQ ID NO: 12056 - protein, 7 aa, synthetic construct
LSKMNIN

SEQ ID NO: 12057 - protein, 7 aa, synthetic construct
RNEGVAW

SEQ ID NO: 12058 - protein, 7 aa, synthetic construct
YAKGGVN

SEQ ID NO: 12059 - protein, 7 aa, synthetic construct
YSKMGGN

SEQ ID NO: 12060 - protein, 7 aa, synthetic construct
FISSNGV

SEQ ID NO: 12061 - protein, 7 aa, synthetic construct
YSKGNPN

SEQ ID NO: 12062 - protein, 7 aa, synthetic construct
ALSTNGR

SEQ ID NO: 12063 - protein, 7 aa, synthetic construct
KESSYAW

SEQ ID NO: 12064 - protein, 7 aa, synthetic construct
TGSTNGV

SEQ ID NO: 12065 - protein, 7 aa, synthetic construct
LSKTGAN

SEQ ID NO: 12066 - protein, 7 aa, synthetic construct
RESSNGY

SEQ ID NO: 12067 - protein, 7 aa, synthetic construct
LAKGGSN

SEQ ID NO: 12068 - protein, 7 aa, synthetic construct
GTGKQQW

SEQ ID NO: 12069 - protein, 7 aa, synthetic construct
SSSTNGV

SEQ ID NO: 12070 - protein, 7 aa, synthetic construct
RDSTNGI

SEQ ID NO: 12071 - protein, 7 aa, synthetic construct
LKDGTAS

SEQ ID NO: 12072 - protein, 7 aa, synthetic construct
MDSTNGR

SEQ ID NO: 12073 - protein, 7 aa, synthetic construct
HASTNGV

SEQ ID NO: 12074 - protein, 7 aa, synthetic construct
QWDGSPS

SEQ ID NO: 12075 - protein, 7 aa, synthetic construct
MGSTNGV

SEQ ID NO: 12076 - protein, 7 aa, synthetic construct
NDSTNGR

SEQ ID NO: 12077 - protein, 7 aa, synthetic construct
TPEPVRW

SEQ ID NO: 12078 - protein, 7 aa, synthetic construct
TTSSNGV

SEQ ID NO: 12079 - protein, 7 aa, synthetic construct
NFSTNGV

SEQ ID NO: 12080 - protein, 7 aa, synthetic construct
LARNGGN

SEQ ID NO: 12081 - protein, 7 aa, synthetic construct
TGSSNGV

SEQ ID NO: 12082 - protein, 7 aa, synthetic construct
YAKPGHN

SEQ ID NO: 12083 - protein, 7 aa, synthetic construct
YAKHGAN

SEQ ID NO: 12084 - protein, 7 aa, synthetic construct
ARSSNGV

SEQ ID NO: 12085 - protein, 7 aa, synthetic construct
YSKTNYN

SEQ ID NO: 12086 - protein, 7 aa, synthetic construct
SSSTNGL

SEQ ID NO: 12087 - protein, 7 aa, synthetic construct
FQSTNGI

SEQ ID NO: 12088 - protein, 7 aa, synthetic construct
IGSTNGV

SEQ ID NO: 12089 - protein, 7 aa, synthetic construct
NESTNGR

SEQ ID NO: 12090 - protein, 7 aa, synthetic construct
PLSTNGR

SEQ ID NO: 12091 - protein, 7 aa, synthetic construct
YSKGNSN

SEQ ID NO: 12092 - protein, 7 aa, synthetic construct
LSKAGEN

SEQ ID NO: 12093 - protein, 7 aa, synthetic construct
KKDGTNA

SEQ ID NO: 12094 - protein, 7 aa, synthetic construct
YSRSGEN

SEQ ID NO: 12095 - protein, 7 aa, synthetic construct
YARYNPN

SEQ ID NO: 12096 - protein, 7 aa, synthetic construct
VNETNGV

SEQ ID NO: 12097 - protein, 7 aa, synthetic construct
TMSTNGI

SEQ ID NO: 12098 - protein, 7 aa, synthetic construct
RDSTNGV

SEQ ID NO: 12099 - protein, 7 aa, synthetic construct
YYSTNGI

SEQ ID NO: 12100 - protein, 7 aa, synthetic construct
VHSSNGV

SEQ ID NO: 12101 - protein, 7 aa, synthetic construct
YSKMGAN

SEQ ID NO: 12102 - protein, 7 aa, synthetic construct
LSKSNVN

SEQ ID NO: 12103 - protein, 7 aa, synthetic construct
YNNGSRY

SEQ ID NO: 12104 - protein, 7 aa, synthetic construct
WISTNGV

SEQ ID NO: 12105 - protein, 7 aa, synthetic construct
HGSTNGI

SEQ ID NO: 12106 - protein, 7 aa, synthetic construct
YARGGGN

SEQ ID NO: 12107 - protein, 7 aa, synthetic construct
LDSTNGI

SEQ ID NO: 12108 - protein, 7 aa, synthetic construct
YSREGPN

SEQ ID NO: 12109 - protein, 7 aa, synthetic construct
LSKMNYN

SEQ ID NO: 12110 - protein, 7 aa, synthetic construct
YSRSNEN

SEQ ID NO: 12111 - protein, 7 aa, synthetic construct
YARPGLN

SEQ ID NO: 12112 - protein, 7 aa, synthetic construct
LAKAGNN

SEQ ID NO: 12113 - protein, 7 aa, synthetic construct
SDSTNGR

SEQ ID NO: 12114 - protein, 7 aa, synthetic construct
YSKTNFN

SEQ ID NO: 12115 - protein, 7 aa, synthetic construct
LARAGTN

SEQ ID NO: 12116 - protein, 7 aa, synthetic construct
RYDGSSA

SEQ ID NO: 12117 - protein, 7 aa, synthetic construct
TNSSNGV

SEQ ID NO: 12118 - protein, 7 aa, synthetic construct
QNSTNGI

SEQ ID NO: 12119 - protein, 7 aa, synthetic construct
YSKNGIN

SEQ ID NO: 12120 - protein, 7 aa, synthetic construct
FTSTNGI

SEQ ID NO: 12121 - protein, 7 aa, synthetic construct
TADNYTV

SEQ ID NO: 12122 - protein, 7 aa, synthetic construct
SISTNGV

SEQ ID NO: 12123 - protein, 7 aa, synthetic construct
GNNGNVW

SEQ ID NO: 12124 - protein, 7 aa, synthetic construct
SLSTNGV

SEQ ID NO: 12125 - protein, 7 aa, synthetic construct
YSKSGCN

SEQ ID NO: 12126 - protein, 7 aa, synthetic construct
ESSTNGI

SEQ ID NO: 12127 - protein, 7 aa, synthetic construct
LSKGNIN

SEQ ID NO: 12128 - protein, 7 aa, synthetic construct
TWSTNGI

SEQ ID NO: 12129 - protein, 7 aa, synthetic construct
QNSTNGV

SEQ ID NO: 12130 - protein, 7 aa, synthetic construct
ENSTNGK

SEQ ID NO: 12131 - protein, 7 aa, synthetic construct
LVSTNGI

SEQ ID NO: 12132 - protein, 7 aa, synthetic construct
FYSTNGV

SEQ ID NO: 12133 - protein, 7 aa, synthetic construct
MNSTNGI

SEQ ID NO: 12134 - protein, 7 aa, synthetic construct
PDSTNGR

SEQ ID NO: 12135 - protein, 7 aa, synthetic construct
YAKAGCN

SEQ ID NO: 12136 - protein, 7 aa, synthetic construct
YSKQNQN

SEQ ID NO: 12137 - protein, 7 aa, synthetic construct
LRSSNGV

SEQ ID NO: 12138 - protein, 7 aa, synthetic construct
YSKVNDN

SEQ ID NO: 12139 - protein, 7 aa, synthetic construct
RDGNSTY

SEQ ID NO: 12140 - protein, 7 aa, synthetic construct
SSGSSSW

SEQ ID NO: 12141 - protein, 7 aa, synthetic construct
MESTNGI

SEQ ID NO: 12142 - protein, 7 aa, synthetic construct
YSRQGDN

SEQ ID NO: 12143 - protein, 7 aa, synthetic construct
YARTNEN

SEQ ID NO: 12144 - protein, 7 aa, synthetic construct
TASTNGV

SEQ ID NO: 12145 - protein, 7 aa, synthetic construct
ILSTNGV

SEQ ID NO: 12146 - protein, 7 aa, synthetic construct
LSRLGEN

SEQ ID NO: 12147 - protein, 7 aa, synthetic construct
LASTNGV

SEQ ID NO: 12148 - protein, 7 aa, synthetic construct
YSKVGEN

SEQ ID NO: 12149 - protein, 7 aa, synthetic construct
YARSNQN

SEQ ID NO: 12150 - protein, 7 aa, synthetic construct
NQSTNGR

SEQ ID NO: 12151 - protein, 7 aa, synthetic construct
YARGGEN

SEQ ID NO: 12152 - protein, 7 aa, synthetic construct
YSKHNLN

SEQ ID NO: 12153 - protein, 7 aa, synthetic construct
HKSSNGV

SEQ ID NO: 12154 - protein, 7 aa, synthetic construct
LAKMGIN

SEQ ID NO: 12155 - protein, 7 aa, synthetic construct
GQGNSAW

SEQ ID NO: 12156 - protein, 7 aa, synthetic construct
YAKDGPN

SEQ ID NO: 12157 - protein, 7 aa, synthetic construct
NKYGSDV

SEQ ID NO: 12158 - protein, 7 aa, synthetic construct
YARGNEN

SEQ ID NO: 12159 - protein, 7 aa, synthetic construct
GQSTNGR

SEQ ID NO: 12160 - protein, 7 aa, synthetic construct
HFSTNGV

SEQ ID NO: 12161 - protein, 7 aa, synthetic construct
NASTNGV

SEQ ID NO: 12162 - protein, 7 aa, synthetic construct
SASTNGR

SEQ ID NO: 12163 - protein, 7 aa, synthetic construct
RENNVTW

SEQ ID NO: 12164 - protein, 7 aa, synthetic construct
QHSTNGI

SEQ ID NO: 12165 - protein, 7 aa, synthetic construct
LSKIGPN

SEQ ID NO: 12166 - protein, 7 aa, synthetic construct
PMSTNGV

SEQ ID NO: 12167 - protein, 7 aa, synthetic construct
LSRANEN

SEQ ID NO: 12168 - protein, 7 aa, synthetic construct
YSKINDN

SEQ ID NO: 12169 - protein, 7 aa, synthetic construct
LAKNGAN

SEQ ID NO: 12170 - protein, 7 aa, synthetic construct
YSKNGAN

SEQ ID NO: 12171 - protein, 7 aa, synthetic construct
AYSTNGV

SEQ ID NO: 12172 - protein, 7 aa, synthetic construct
YSKQNNN

SEQ ID NO: 12173 - protein, 7 aa, synthetic construct
YNSTNGI

SEQ ID NO: 12174 - protein, 7 aa, synthetic construct
LAKAGQN

SEQ ID NO: 12175 - protein, 7 aa, synthetic construct
LSKENYN

SEQ ID NO: 12176 - protein, 7 aa, synthetic construct
TSSTNGI

SEQ ID NO: 12177 - protein, 7 aa, synthetic construct
FSKIQTE

SEQ ID NO: 12178 - protein, 7 aa, synthetic construct
EDSTNGR

SEQ ID NO: 12179 - protein, 7 aa, synthetic construct
SNSTNGV

SEQ ID NO: 12180 - protein, 7 aa, synthetic construct
RDSNVYP

SEQ ID NO: 12181 - protein, 7 aa, synthetic construct
RPDGTPS

SEQ ID NO: 12182 - protein, 7 aa, synthetic construct
YAKQNPN

SEQ ID NO: 12183 - protein, 7 aa, synthetic construct
LAKGGTN

SEQ ID NO: 12184 - protein, 7 aa, synthetic construct
LSKNNYN

SEQ ID NO: 12185 - protein, 7 aa, synthetic construct
FNSTNGV

SEQ ID NO: 12186 - protein, 7 aa, synthetic construct
NNSTNGV

SEQ ID NO: 12187 - protein, 7 aa, synthetic construct
GSSTNGV

SEQ ID NO: 12188 - protein, 7 aa, synthetic construct
EESTNGR

SEQ ID NO: 12189 - protein, 7 aa, synthetic construct
YSKNGNN

SEQ ID NO: 12190 - protein, 7 aa, synthetic construct
VTSTNGV

SEQ ID NO: 12191 - protein, 7 aa, synthetic construct
LAKNGTN

SEQ ID NO: 12192 - protein, 7 aa, synthetic construct
LYSTNGV

SEQ ID NO: 12193 - protein, 7 aa, synthetic construct
NYRGDNA

SEQ ID NO: 12194 - protein, 7 aa, synthetic construct
ISYDYGN

SEQ ID NO: 12195 - protein, 7 aa, synthetic construct
LAKNGVN

SEQ ID NO: 12196 - protein, 7 aa, synthetic construct
LHASSMN

SEQ ID NO: 12197 - protein, 7 aa, synthetic construct
QISTNGV

SEQ ID NO: 12198 - protein, 7 aa, synthetic construct
VHKQLPN

SEQ ID NO: 12199 - protein, 7 aa, synthetic construct
YESINGR

SEQ ID NO: 12200 - protein, 7 aa, synthetic construct
GMKNKFD

SEQ ID NO: 12201 - protein, 7 aa, synthetic construct
NQSTNGV

SEQ ID NO: 12202 - protein, 7 aa, synthetic construct
QDSTNGR

SEQ ID NO: 12203 - protein, 7 aa, synthetic construct
FSRQGNN

SEQ ID NO: 12204 - protein, 7 aa, synthetic construct
LAKQGAN

SEQ ID NO: 12205 - protein, 7 aa, synthetic construct
FQSTNGV

SEQ ID NO: 12206 - protein, 7 aa, synthetic construct
VDSTNGV

SEQ ID NO: 12207 - protein, 7 aa, synthetic construct
LAKQGNN

SEQ ID NO: 12208 - protein, 7 aa, synthetic construct
KDGVSVW

SEQ ID NO: 12209 - protein, 7 aa, synthetic construct
GESTNGR

SEQ ID NO: 12210 - protein, 7 aa, synthetic construct
WVSTNGV

SEQ ID NO: 12211 - protein, 7 aa, synthetic construct
LSKSGQN

SEQ ID NO: 12212 - protein, 7 aa, synthetic construct
TGGESRW

SEQ ID NO: 12213 - protein, 7 aa, synthetic construct
FARSGEN

SEQ ID NO: 12214 - protein, 7 aa, synthetic construct
RLSTNGV

SEQ ID NO: 12215 - protein, 7 aa, synthetic construct
TWSSNGV

SEQ ID NO: 12216 - protein, 7 aa, synthetic construct
MNSTNGV

SEQ ID NO: 12217 - protein, 7 aa, synthetic construct
KTSREGV

SEQ ID NO: 12218 - protein, 7 aa, synthetic construct
MFSTNGV

SEQ ID NO: 12219 - protein, 7 aa, synthetic construct
LAKPGPN

SEQ ID NO: 12220 - protein, 7 aa, synthetic construct
YSKLQDN

SEQ ID NO: 12221 - protein, 7 aa, synthetic construct
DLDSTKW

SEQ ID NO: 12222 - protein, 7 aa, synthetic construct
HESSNGV

SEQ ID NO: 12223 - protein, 7 aa, synthetic construct
SGSSNGR

SEQ ID NO: 12224 - protein, 7 aa, synthetic construct
YAKTGEN

SEQ ID NO: 12225 - protein, 7 aa, synthetic construct
YAKQGTN

SEQ ID NO: 12226 - protein, 7 aa, synthetic construct
YTRSDTS

SEQ ID NO: 12227 - protein, 7 aa, synthetic construct
LSKAGIN

SEQ ID NO: 12228 - protein, 7 aa, synthetic construct
PHSTNGI

SEQ ID NO: 12229 - protein, 7 aa, synthetic construct
ISSTNGI

SEQ ID NO: 12230 - protein, 7 aa, synthetic construct
KQSDLTW

SEQ ID NO: 12231 - protein, 7 aa, synthetic construct
LSKQGIN

SEQ ID NO: 12232 - protein, 7 aa, synthetic construct
LESSNGV

SEQ ID NO: 12233 - protein, 7 aa, synthetic construct
HWSSNGV

SEQ ID NO: 12234 - protein, 7 aa, synthetic construct
REGAGSW

SEQ ID NO: 12235 - protein, 7 aa, synthetic construct
RLDSNGW

SEQ ID NO: 12236 - protein, 7 aa, synthetic construct
YARPGTN

SEQ ID NO: 12237 - protein, 7 aa, synthetic construct
NYNNVYS

SEQ ID NO: 12238 - protein, 7 aa, synthetic construct
LSKVGGN

SEQ ID NO: 12239 - protein, 7 aa, synthetic construct
HSSTNGV

SEQ ID NO: 12240 - protein, 7 aa, synthetic construct
LSKMNTN

SEQ ID NO: 12241 - protein, 7 aa, synthetic construct
LSKSGTN

SEQ ID NO: 12242 - protein, 7 aa, synthetic construct
TISSNGV

SEQ ID NO: 12243 - protein, 7 aa, synthetic construct
PVSTNGV

SEQ ID NO: 12244 - protein, 7 aa, synthetic construct
YSKMGEN

SEQ ID NO: 12245 - protein, 7 aa, synthetic construct
RGENHAW

SEQ ID NO: 12246 - protein, 7 aa, synthetic construct
NSSTNGV

SEQ ID NO: 12247 - protein, 7 aa, synthetic construct
VDSREGR

SEQ ID NO: 12248 - protein, 7 aa, synthetic construct
FSRANEN

SEQ ID NO: 12249 - protein, 7 aa, synthetic construct
QGSGLFI

SEQ ID NO: 12250 - protein, 7 aa, synthetic construct
LSKSANN

SEQ ID NO: 12251 - protein, 7 aa, synthetic construct
WTSSNGV

SEQ ID NO: 12252 - protein, 7 aa, synthetic construct
LHSSNGV

SEQ ID NO: 12253 - protein, 7 aa, synthetic construct
YSKVNEN

SEQ ID NO: 12254 - protein, 7 aa, synthetic construct
TMSSNGV

SEQ ID NO: 12255 - protein, 7 aa, synthetic construct
HDSTNGR

SEQ ID NO: 12256 - protein, 7 aa, synthetic construct
LAKQGQN

SEQ ID NO: 12257 - protein, 7 aa, synthetic construct
EKSTNGV

SEQ ID NO: 12258 - protein, 7 aa, synthetic construct
LSRMGEN

SEQ ID NO: 12259 - protein, 7 aa, synthetic construct
FAKMGPN

SEQ ID NO: 12260 - protein, 7 aa, synthetic construct
PYSTNGV

SEQ ID NO: 12261 - protein, 7 aa, synthetic construct
WHSSNGV

SEQ ID NO: 12262 - protein, 7 aa, synthetic construct
NESTNGI

SEQ ID NO: 12263 - protein, 7 aa, synthetic construct
SNASSNW

SEQ ID NO: 12264 - protein, 7 aa, synthetic construct
YSKSNMN

SEQ ID NO: 12265 - protein, 7 aa, synthetic construct
LHKNLPD

SEQ ID NO: 12266 - protein, 7 aa, synthetic construct
AQSSNGV

SEQ ID NO: 12267 - protein, 7 aa, synthetic construct
NHSGRSA

SEQ ID NO: 12268 - protein, 7 aa, synthetic construct
FSKFNPN

SEQ ID NO: 12269 - protein, 7 aa, synthetic construct
NTSTNGI

SEQ ID NO: 12270 - protein, 7 aa, synthetic construct
RQDHVMY

SEQ ID NO: 12271 - protein, 7 aa, synthetic construct
NTGNSHW

SEQ ID NO: 12272 - protein, 7 aa, synthetic construct
PWEGGPR

SEQ ID NO: 12273 - protein, 7 aa, synthetic construct
IQSSNGV

SEQ ID NO: 12274 - protein, 7 aa, synthetic construct
LSRHNEN

SEQ ID NO: 12275 - protein, 7 aa, synthetic construct
MSDNKHW

SEQ ID NO: 12276 - protein, 7 aa, synthetic construct
LSKSNIN

SEQ ID NO: 12277 - protein, 7 aa, synthetic construct
YSRQGEN

SEQ ID NO: 12278 - protein, 7 aa, synthetic construct
YARLNIN

SEQ ID NO: 12279 - protein, 7 aa, synthetic construct
IDGNSPY

SEQ ID NO: 12280 - protein, 7 aa, synthetic construct
MDSTNGV

SEQ ID NO: 12281 - protein, 7 aa, synthetic construct
LSKSGSN

SEQ ID NO: 12282 - protein, 7 aa, synthetic construct
ASSSNGV

SEQ ID NO: 12283 - protein, 7 aa, synthetic construct
MLSTNGV

SEQ ID NO: 12284 - protein, 7 aa, synthetic construct
FSRTNVN

SEQ ID NO: 12285 - protein, 7 aa, synthetic construct
LDSTNGV

SEQ ID NO: 12286 - protein, 7 aa, synthetic construct
YSRINMN

SEQ ID NO: 12287 - protein, 7 aa, synthetic construct
FSRLGEN

SEQ ID NO: 12288 - protein, 7 aa, synthetic construct
YYTGIND

SEQ ID NO: 12289 - protein, 7 aa, synthetic construct
HSSTNGI

SEQ ID NO: 12290 - protein, 7 aa, synthetic construct
MTSTNGI

SEQ ID NO: 12291 - protein, 7 aa, synthetic construct
PGSTNGR

SEQ ID NO: 12292 - protein, 7 aa, synthetic construct
YASSNGV

SEQ ID NO: 12293 - protein, 7 aa, synthetic construct
MVSTNGI

SEQ ID NO: 12294 - protein, 7 aa, synthetic construct
LESTNGI

SEQ ID NO: 12295 - protein, 7 aa, synthetic construct
ISSSNGV

SEQ ID NO: 12296 - protein, 7 aa, synthetic construct
YSKNGVN

SEQ ID NO: 12297 - protein, 7 aa, synthetic construct
WQSSNGV

SEQ ID NO: 12298 - protein, 7 aa, synthetic construct
FSKLGLN

SEQ ID NO: 12299 - protein, 7 aa, synthetic construct
NKSTNGV

SEQ ID NO: 12300 - protein, 7 aa, synthetic construct
YFTGTNN

SEQ ID NO: 12301 - protein, 7 aa, synthetic construct
PKSTNGI

SEQ ID NO: 12302 - protein, 7 aa, synthetic construct
WASTNGI

SEQ ID NO: 12303 - protein, 7 aa, synthetic construct
MGGSSNW

SEQ ID NO: 12304 - protein, 7 aa, synthetic construct
ATDYMAY

SEQ ID NO: 12305 - protein, 7 aa, synthetic construct
FSRAGEN

SEQ ID NO: 12306 - protein, 7 aa, synthetic construct
RNDGTSW

SEQ ID NO: 12307 - protein, 7 aa, synthetic construct
LSKTGQN

SEQ ID NO: 12308 - protein, 7 aa, synthetic construct
YAKQNHN

SEQ ID NO: 12309 - protein, 7 aa, synthetic construct
FYSTNGI

SEQ ID NO: 12310 - protein, 7 aa, synthetic construct
WASSNGV

SEQ ID NO: 12311 - protein, 7 aa, synthetic construct
TVSSNGV

SEQ ID NO: 12312 - protein, 7 aa, synthetic construct
VDSTNGI

SEQ ID NO: 12313 - protein, 7 aa, synthetic construct
LAKIGFN

SEQ ID NO: 12314 - protein, 7 aa, synthetic construct
RSGESAW

SEQ ID NO: 12315 - protein, 7 aa, synthetic construct
MRTGMGP

SEQ ID NO: 12316 - protein, 7 aa, synthetic construct
FMSTNGI

SEQ ID NO: 12317 - protein, 7 aa, synthetic construct
YAKGNSN

SEQ ID NO: 12318 - protein, 7 aa, synthetic construct
HVSSNGV

SEQ ID NO: 12319 - protein, 7 aa, synthetic construct
NLKGTGA

SEQ ID NO: 12320 - protein, 7 aa, synthetic construct
GHAGSTW

SEQ ID NO: 12321 - protein, 7 aa, synthetic construct
VAGRGYD

SEQ ID NO: 12322 - protein, 7 aa, synthetic construct
NHSTNGI

SEQ ID NO: 12323 - protein, 7 aa, synthetic construct
YSRYNEN

SEQ ID NO: 12324 - protein, 7 aa, synthetic construct
NQSTNGI

SEQ ID NO: 12325 - protein, 7 aa, synthetic construct
TSDYESY

SEQ ID NO: 12326 - protein, 7 aa, synthetic construct
YSKQGGN

SEQ ID NO: 12327 - protein, 7 aa, synthetic construct
LAKSGCN

SEQ ID NO: 12328 - protein, 7 aa, synthetic construct
HSSTHGQ

SEQ ID NO: 12329 - protein, 7 aa, synthetic construct
SFSSNGV

SEQ ID NO: 12330 - protein, 7 aa, synthetic construct
YYTGTTM

SEQ ID NO: 12331 - protein, 7 aa, synthetic construct
AFSTNGV

SEQ ID NO: 12332 - protein, 7 aa, synthetic construct
IISSNGV

SEQ ID NO: 12333 - protein, 7 aa, synthetic construct
VSSTNGV

SEQ ID NO: 12334 - protein, 7 aa, synthetic construct
LSKMNAN

SEQ ID NO: 12335 - protein, 7 aa, synthetic construct
RANGDNA

SEQ ID NO: 12336 - protein, 7 aa, synthetic construct
YSKHGSN

SEQ ID NO: 12337 - protein, 7 aa, synthetic construct
LSKHNDN

SEQ ID NO: 12338 - protein, 7 aa, synthetic construct
ADGISTY

SEQ ID NO: 12339 - protein, 7 aa, synthetic construct
YSKNGDN

SEQ ID NO: 12340 - protein, 7 aa, synthetic construct
STSSNGV

SEQ ID NO: 12341 - protein, 7 aa, synthetic construct
LAKGNYN

SEQ ID NO: 12342 - protein, 7 aa, synthetic construct
VNSSNGV

SEQ ID NO: 12343 - protein, 7 aa, synthetic construct
IYSTNGV

SEQ ID NO: 12344 - protein, 7 aa, synthetic construct
YSDFNGR

SEQ ID NO: 12345 - protein, 7 aa, synthetic construct
HDSTNGI

SEQ ID NO: 12346 - protein, 7 aa, synthetic construct
YAKHGLN

SEQ ID NO: 12347 - protein, 7 aa, synthetic construct
YAKLGVN

SEQ ID NO: 12348 - protein, 7 aa, synthetic construct
KNDGNPW

SEQ ID NO: 12349 - protein, 7 aa, synthetic construct
LAKNGQN

SEQ ID NO: 12350 - protein, 7 aa, synthetic construct
AHSTNGI

SEQ ID NO: 12351 - protein, 7 aa, synthetic construct
NTDGWRD

SEQ ID NO: 12352 - protein, 7 aa, synthetic construct
RDGASVY

SEQ ID NO: 12353 - protein, 7 aa, synthetic construct
WISSNGV

SEQ ID NO: 12354 - protein, 7 aa, synthetic construct
RDSSNGV

SEQ ID NO: 12355 - protein, 7 aa, synthetic construct
YAKPGVN

SEQ ID NO: 12356 - protein, 7 aa, synthetic construct
SQSSNGV

SEQ ID NO: 12357 - protein, 7 aa, synthetic construct
AWSTNGI

SEQ ID NO: 12358 - protein, 7 aa, synthetic construct
ANSTNGI

SEQ ID NO: 12359 - protein, 7 aa, synthetic construct
PTSTNGI

SEQ ID NO: 12360 - protein, 7 aa, synthetic construct
IYSTNGI

SEQ ID NO: 12361 - protein, 7 aa, synthetic construct
FESTNGR

SEQ ID NO: 12362 - protein, 7 aa, synthetic construct
LMSSNGV

SEQ ID NO: 12363 - protein, 7 aa, synthetic construct
QMSTNGI

SEQ ID NO: 12364 - protein, 7 aa, synthetic construct
FSKIGQN

SEQ ID NO: 12365 - protein, 7 aa, synthetic construct
YSKNGQN

SEQ ID NO: 12366 - protein, 7 aa, synthetic construct
YSKGGNN

SEQ ID NO: 12367 - protein, 7 aa, synthetic construct
THSGFGP

SEQ ID NO: 12368 - protein, 7 aa, synthetic construct
NASQGWD

SEQ ID NO: 12369 - protein, 7 aa, synthetic construct
AGGANVW

SEQ ID NO: 12370 - protein, 7 aa, synthetic construct
YSKINFN

SEQ ID NO: 12371 - protein, 7 aa, synthetic construct
EWSTNGV

SEQ ID NO: 12372 - protein, 7 aa, synthetic construct
NVSTNGV

SEQ ID NO: 12373 - protein, 7 aa, synthetic construct
YSRNGEN

SEQ ID NO: 12374 - protein, 7 aa, synthetic construct
WVSSNGV

SEQ ID NO: 12375 - protein, 7 aa, synthetic construct
MYDGTRS

SEQ ID NO: 12376 - protein, 7 aa, synthetic construct
FSKGNIN

SEQ ID NO: 12377 - protein, 7 aa, synthetic construct
GDSTNGR

SEQ ID NO: 12378 - protein, 7 aa, synthetic construct
YSKINVN

SEQ ID NO: 12379 - protein, 7 aa, synthetic construct
YSKAGEN

SEQ ID NO: 12380 - protein, 7 aa, synthetic construct
FHSTNGV

SEQ ID NO: 12381 - protein, 7 aa, synthetic construct
SESTNGV

SEQ ID NO: 12382 - protein, 7 aa, synthetic construct
LSKNGHN

SEQ ID NO: 12383 - protein, 7 aa, synthetic construct
MDSTNGI

SEQ ID NO: 12384 - protein, 7 aa, synthetic construct
YAKMGSN

SEQ ID NO: 12385 - protein, 7 aa, synthetic construct
YSRQNEN

SEQ ID NO: 12386 - protein, 7 aa, synthetic construct
DSSTWRD

SEQ ID NO: 12387 - protein, 7 aa, synthetic construct
YSRSGDN

SEQ ID NO: 12388 - protein, 7 aa, synthetic construct
WESTNGI

SEQ ID NO: 12389 - protein, 7 aa, synthetic construct
NSSSNGV

SEQ ID NO: 12390 - protein, 7 aa, synthetic construct
LSKQGVN

SEQ ID NO: 12391 - protein, 7 aa, synthetic construct
IDSTNGR

SEQ ID NO: 12392 - protein, 7 aa, synthetic construct
TSSSNGV

SEQ ID NO: 12393 - protein, 7 aa, synthetic construct
WDSTNGI

SEQ ID NO: 12394 - protein, 7 aa, synthetic construct
QESTNGI

SEQ ID NO: 12395 - protein, 7 aa, synthetic construct
YAKMGVN

SEQ ID NO: 12396 - protein, 7 aa, synthetic construct
LSSSNGV

SEQ ID NO: 12397 - protein, 7 aa, synthetic construct
LSKSGNN

SEQ ID NO: 12398 - protein, 7 aa, synthetic construct
RTNTNGI

SEQ ID NO: 12399 - protein, 7 aa, synthetic construct
WNSTNGI

SEQ ID NO: 12400 - protein, 7 aa, synthetic construct
DTNAMKY

SEQ ID NO: 12401 - protein, 7 aa, synthetic construct
AVSTNGI

SEQ ID NO: 12402 - protein, 7 aa, synthetic construct
SGSSNPW

SEQ ID NO: 12403 - protein, 7 aa, synthetic construct
IASSNGV

SEQ ID NO: 12404 - protein, 7 aa, synthetic construct
KNGGSAW

SEQ ID NO: 12405 - protein, 7 aa, synthetic construct
QWSSNGV

SEQ ID NO: 12406 - protein, 7 aa, synthetic construct
YSKSGEN

SEQ ID NO: 12407 - protein, 7 aa, synthetic construct
IVSSNGV

SEQ ID NO: 12408 - protein, 7 aa, synthetic construct
HLSTNGV

SEQ ID NO: 12409 - protein, 7 aa, synthetic construct
FAKGGLN

SEQ ID NO: 12410 - protein, 7 aa, synthetic construct
YSKNGTN

SEQ ID NO: 12411 - protein, 7 aa, synthetic construct
HHSTNGI

SEQ ID NO: 12412 - protein, 7 aa, synthetic construct
KLPEYGH

SEQ ID NO: 12413 - protein, 7 aa, synthetic construct
NSKGTGA

SEQ ID NO: 12414 - protein, 7 aa, synthetic construct
TDSTSGR

SEQ ID NO: 12415 - protein, 7 aa, synthetic construct
YGSTNGI

SEQ ID NO: 12416 - protein, 7 aa, synthetic construct
LGGASLY

SEQ ID NO: 12417 - protein, 7 aa, synthetic construct
LNSTNGI

SEQ ID NO: 12418 - protein, 7 aa, synthetic construct
LSRQGEN

SEQ ID NO: 12419 - protein, 7 aa, synthetic construct
YAKLNPN

SEQ ID NO: 12420 - protein, 7 aa, synthetic construct
QASTNGI

SEQ ID NO: 12421 - protein, 7 aa, synthetic construct
GVKGTMF

SEQ ID NO: 12422 - protein, 7 aa, synthetic construct
YAKQNVN

SEQ ID NO: 12423 - protein, 7 aa, synthetic construct
SSSTTGR

SEQ ID NO: 12424 - protein, 7 aa, synthetic construct
HGGNSHY

SEQ ID NO: 12425 - protein, 7 aa, synthetic construct
RDERTTY

SEQ ID NO: 12426 - protein, 7 aa, synthetic construct
RLSDAYP

SEQ ID NO: 12427 - protein, 7 aa, synthetic construct
IARTGHD

SEQ ID NO: 12428 - protein, 7 aa, synthetic construct
SDSSNGV

SEQ ID NO: 12429 - protein, 7 aa, synthetic construct
NDSTNGV

SEQ ID NO: 12430 - protein, 7 aa, synthetic construct
RSNETFP

SEQ ID NO: 12431 - protein, 7 aa, synthetic construct
SLSTNGI

SEQ ID NO: 12432 - protein, 7 aa, synthetic construct
RDSTPHW

SEQ ID NO: 12433 - protein, 7 aa, synthetic construct
VNATNGV

SEQ ID NO: 12434 - protein, 7 aa, synthetic construct
VVSTNGI

SEQ ID NO: 12435 - protein, 7 aa, synthetic construct
YAKTNVN

SEQ ID NO: 12436 - protein, 7 aa, synthetic construct
HISSNGV

SEQ ID NO: 12437 - protein, 7 aa, synthetic construct
GNSTNGI

SEQ ID NO: 12438 - protein, 7 aa, synthetic construct
YARNGEN

SEQ ID NO: 12439 - protein, 7 aa, synthetic construct
YSKNNPN

SEQ ID NO: 12440 - protein, 7 aa, synthetic construct
KNGQSTY

SEQ ID NO: 12441 - protein, 7 aa, synthetic construct
VVSTNGR

SEQ ID NO: 12442 - protein, 7 aa, synthetic construct
LAKSGDN

SEQ ID NO: 12443 - protein, 7 aa, synthetic construct
LAKLGAN

SEQ ID NO: 12444 - protein, 7 aa, synthetic construct
LFSTNGI

SEQ ID NO: 12445 - protein, 7 aa, synthetic construct
DTSTNGR

SEQ ID NO: 12446 - protein, 7 aa, synthetic construct
LGSTNGV

SEQ ID NO: 12447 - protein, 7 aa, synthetic construct
MISTNGV

SEQ ID NO: 12448 - protein, 7 aa, synthetic construct
YSKTNNN

SEQ ID NO: 12449 - protein, 7 aa, synthetic construct
ELNDVKW

SEQ ID NO: 12450 - protein, 7 aa, synthetic construct
AESTNGI

SEQ ID NO: 12451 - protein, 7 aa, synthetic construct
RGATIMP

SEQ ID NO: 12452 - protein, 7 aa, synthetic construct
VRDTNGM

SEQ ID NO: 12453 - protein, 7 aa, synthetic construct
LRSGAAP

SEQ ID NO: 12454 - protein, 7 aa, synthetic construct
WNSTNGV

SEQ ID NO: 12455 - protein, 7 aa, synthetic construct
EWSTNGI

SEQ ID NO: 12456 - protein, 7 aa, synthetic construct
WQRGEIN

SEQ ID NO: 12457 - protein, 7 aa, synthetic construct
LARGNVN

SEQ ID NO: 12458 - protein, 7 aa, synthetic construct
SWSTNGV

SEQ ID NO: 12459 - protein, 7 aa, synthetic construct
FMSSNGV

SEQ ID NO: 12460 - protein, 7 aa, synthetic construct
PISTNGV

SEQ ID NO: 12461 - protein, 7 aa, synthetic construct
SRFGDSA

SEQ ID NO: 12462 - protein, 7 aa, synthetic construct
SGDGSRY

SEQ ID NO: 12463 - protein, 7 aa, synthetic construct
YSKYGDN

SEQ ID NO: 12464 - protein, 7 aa, synthetic construct
LSKNGIN

SEQ ID NO: 12465 - protein, 7 aa, synthetic construct
SGSSNGV

SEQ ID NO: 12466 - protein, 7 aa, synthetic construct
NISTNGV

SEQ ID NO: 12467 - protein, 7 aa, synthetic construct
NAGTSNW

SEQ ID NO: 12468 - protein, 7 aa, synthetic construct
RREDSYS

SEQ ID NO: 12469 - protein, 7 aa, synthetic construct
NKSTNGI

SEQ ID NO: 12470 - protein, 7 aa, synthetic construct
LSRVNEN

SEQ ID NO: 12471 - protein, 7 aa, synthetic construct
RISSNGV

SEQ ID NO: 12472 - protein, 7 aa, synthetic construct
THSSNGV

SEQ ID NO: 12473 - protein, 7 aa, synthetic construct
YISTNGV

SEQ ID NO: 12474 - protein, 7 aa, synthetic construct
LARMGDN

SEQ ID NO: 12475 - protein, 7 aa, synthetic construct
TAYGQNA

SEQ ID NO: 12476 - protein, 7 aa, synthetic construct
YSRPGLN

SEQ ID NO: 12477 - protein, 7 aa, synthetic construct
MISTNGI

SEQ ID NO: 12478 - protein, 7 aa, synthetic construct
FSKNGPN

SEQ ID NO: 12479 - protein, 7 aa, synthetic construct
LSKANTN

SEQ ID NO: 12480 - protein, 7 aa, synthetic construct
LAKGNFN

SEQ ID NO: 12481 - protein, 7 aa, synthetic construct
VQSSNGV

SEQ ID NO: 12482 - protein, 7 aa, synthetic construct
YSKANEN

SEQ ID NO: 12483 - protein, 7 aa, synthetic construct
YARAGEN

SEQ ID NO: 12484 - protein, 7 aa, synthetic construct
LNSSNGV

SEQ ID NO: 12485 - protein, 7 aa, synthetic construct
YISTNGR

SEQ ID NO: 12486 - protein, 7 aa, synthetic construct
INSSNGV

SEQ ID NO: 12487 - protein, 7 aa, synthetic construct
YSKNNNN

SEQ ID NO: 12488 - protein, 7 aa, synthetic construct
GGHMSTY

SEQ ID NO: 12489 - protein, 7 aa, synthetic construct
PWSTNGV

SEQ ID NO: 12490 - protein, 7 aa, synthetic construct
QESSNGV

SEQ ID NO: 12491 - protein, 7 aa, synthetic construct
LRDGTGS

SEQ ID NO: 12492 - protein, 7 aa, synthetic construct
IKSSNGV

SEQ ID NO: 12493 - protein, 7 aa, synthetic construct
IKWESGD

SEQ ID NO: 12494 - protein, 7 aa, synthetic construct
YSKNNAN

SEQ ID NO: 12495 - protein, 7 aa, synthetic construct
PNSSNGV

SEQ ID NO: 12496 - protein, 7 aa, synthetic construct
LSRQNEN

SEQ ID NO: 12497 - protein, 7 aa, synthetic construct
YARMGGN

SEQ ID NO: 12498 - protein, 7 aa, synthetic construct
QNSTNGR

SEQ ID NO: 12499 - protein, 7 aa, synthetic construct
KNESTLW

SEQ ID NO: 12500 - protein, 7 aa, synthetic construct
YHKSDFN

SEQ ID NO: 12501 - protein, 7 aa, synthetic construct
IDSTNGI

SEQ ID NO: 12502 - protein, 7 aa, synthetic construct
FESTNGI

SEQ ID NO: 12503 - protein, 7 aa, synthetic construct
YSKMNSN

SEQ ID NO: 12504 - protein, 7 aa, synthetic construct
VPSTNGR

SEQ ID NO: 12505 - protein, 7 aa, synthetic construct
LAKTGEN

SEQ ID NO: 12506 - protein, 7 aa, synthetic construct
HNNSSSW

SEQ ID NO: 12507 - protein, 7 aa, synthetic construct
LTSSNGV

SEQ ID NO: 12508 - protein, 7 aa, synthetic construct
YAKGNCN

SEQ ID NO: 12509 - protein, 7 aa, synthetic construct
AGGGSTY

SEQ ID NO: 12510 - protein, 7 aa, synthetic construct
FLSTNGV

SEQ ID NO: 12511 - protein, 7 aa, synthetic construct
TESSEGR

SEQ ID NO: 12512 - protein, 7 aa, synthetic construct
ATETGPK

SEQ ID NO: 12513 - protein, 7 aa, synthetic construct
VDSSNGV

SEQ ID NO: 12514 - protein, 7 aa, synthetic construct
YARANEN

SEQ ID NO: 12515 - protein, 7 aa, synthetic construct
YSRGGDN

SEQ ID NO: 12516 - protein, 7 aa, synthetic construct
QSSTNGI

SEQ ID NO: 12517 - protein, 7 aa, synthetic construct
YSKMNEN

SEQ ID NO: 12518 - protein, 7 aa, synthetic construct
YSRHGPN

SEQ ID NO: 12519 - protein, 7 aa, synthetic construct
PSSSNGV

SEQ ID NO: 12520 - protein, 7 aa, synthetic construct
ENSTNGV

SEQ ID NO: 12521 - protein, 7 aa, synthetic construct
ANSTNGV

SEQ ID NO: 12522 - protein, 7 aa, synthetic construct
DNGLSKY

SEQ ID NO: 12523 - protein, 7 aa, synthetic construct
HESTNGR

SEQ ID NO: 12524 - protein, 7 aa, synthetic construct
QTSREGI

SEQ ID NO: 12525 - protein, 7 aa, synthetic construct
FYTGHAD

SEQ ID NO: 12526 - protein, 7 aa, synthetic construct
RNDLTFP

SEQ ID NO: 12527 - protein, 7 aa, synthetic construct
DTGTSRY

SEQ ID NO: 12528 - protein, 7 aa, synthetic construct
MASTNGI

SEQ ID NO: 12529 - protein, 7 aa, synthetic construct
YSKVNPN

SEQ ID NO: 12530 - protein, 7 aa, synthetic construct
YSKENYN

SEQ ID NO: 12531 - protein, 7 aa, synthetic construct
VAYTSSD

SEQ ID NO: 12532 - protein, 7 aa, synthetic construct
YSKHGDN

SEQ ID NO: 12533 - protein, 7 aa, synthetic construct
QTSTNGI

SEQ ID NO: 12534 - protein, 7 aa, synthetic construct
YSKHNQN

SEQ ID NO: 12535 - protein, 7 aa, synthetic construct
IRSSNGV

SEQ ID NO: 12536 - protein, 7 aa, synthetic construct
YSKSNEN

SEQ ID NO: 12537 - protein, 7 aa, synthetic construct
RVTENWL

SEQ ID NO: 12538 - protein, 7 aa, synthetic construct
KESTSKW

SEQ ID NO: 12539 - protein, 7 aa, synthetic construct
YDSTNGI

SEQ ID NO: 12540 - protein, 7 aa, synthetic construct
YAKHGVN

SEQ ID NO: 12541 - protein, 7 aa, synthetic construct
VNESVAW

SEQ ID NO: 12542 - protein, 7 aa, synthetic construct
FSKQNIN

SEQ ID NO: 12543 - protein, 7 aa, synthetic construct
YSKQNDN

SEQ ID NO: 12544 - protein, 7 aa, synthetic construct
MRSSNGV

SEQ ID NO: 12545 - protein, 7 aa, synthetic construct
VPHKGSG

SEQ ID NO: 12546 - protein, 7 aa, synthetic construct
TFSGTMA

SEQ ID NO: 12547 - protein, 7 aa, synthetic construct
YDSSNGV

SEQ ID NO: 12548 - protein, 7 aa, synthetic construct
FSKQGHN

SEQ ID NO: 12549 - protein, 7 aa, synthetic construct
MKDGTAS

SEQ ID NO: 12550 - protein, 7 aa, synthetic construct
AWSSNGV

SEQ ID NO: 12551 - protein, 7 aa, synthetic construct
LSKQGAN

SEQ ID NO: 12552 - protein, 7 aa, synthetic construct
YSRVNGN

SEQ ID NO: 12553 - protein, 7 aa, synthetic construct
LARMGYN

SEQ ID NO: 12554 - protein, 7 aa, synthetic construct
YVSSNGV

SEQ ID NO: 12555 - protein, 7 aa, synthetic construct
LARLGEN

SEQ ID NO: 12556 - protein, 7 aa, synthetic construct
LAKMGQN

SEQ ID NO: 12557 - protein, 7 aa, synthetic construct
LSKMNNN

SEQ ID NO: 12558 - protein, 7 aa, synthetic construct
FASSNGV

SEQ ID NO: 12559 - protein, 7 aa, synthetic construct
FSRQGFN

SEQ ID NO: 12560 - protein, 7 aa, synthetic construct
NQSSVTW

SEQ ID NO: 12561 - protein, 7 aa, synthetic construct
EMSTNGR

SEQ ID NO: 12562 - protein, 7 aa, synthetic construct
LISSNGV

SEQ ID NO: 12563 - protein, 7 aa, synthetic construct
YSKVNQN

SEQ ID NO: 12564 - protein, 7 aa, synthetic construct
LAKHGLN

SEQ ID NO: 12565 - protein, 7 aa, synthetic construct
LAKSGGN

SEQ ID NO: 12566 - protein, 7 aa, synthetic construct
YARMNDN

SEQ ID NO: 12567 - protein, 7 aa, synthetic construct
YTHGTNH

SEQ ID NO: 12568 - protein, 7 aa, synthetic construct
VERSGWD

SEQ ID NO: 12569 - protein, 7 aa, synthetic construct
ESYNGRN

SEQ ID NO: 12570 - protein, 7 aa, synthetic construct
YSSTNGV

SEQ ID NO: 12571 - protein, 7 aa, synthetic construct
YSKNNIN

SEQ ID NO: 12572 - protein, 7 aa, synthetic construct
LSKNNIN

SEQ ID NO: 12573 - protein, 7 aa, synthetic construct
EMAHKNW

SEQ ID NO: 12574 - protein, 7 aa, synthetic construct
YAKYNPN

SEQ ID NO: 12575 - protein, 7 aa, synthetic construct
SSSSNGV

SEQ ID NO: 12576 - protein, 7 aa, synthetic construct
FARNGDN

SEQ ID NO: 12577 - protein, 7 aa, synthetic construct
YDSTNGV

SEQ ID NO: 12578 - protein, 7 aa, synthetic construct
TGSSHGW

SEQ ID NO: 12579 - protein, 7 aa, synthetic construct
FSRVNDN

SEQ ID NO: 12580 - protein, 7 aa, synthetic construct
TYSGDPA

SEQ ID NO: 12581 - protein, 7 aa, synthetic construct
GDMVVRY

SEQ ID NO: 12582 - protein, 7 aa, synthetic construct
FAKSGTN

SEQ ID NO: 12583 - protein, 7 aa, synthetic construct
NSGVSIY

SEQ ID NO: 12584 - protein, 7 aa, synthetic construct
DGGHSHY

SEQ ID NO: 12585 - protein, 7 aa, synthetic construct
WTDTNGA

SEQ ID NO: 12586 - protein, 7 aa, synthetic construct
LSRSGND

SEQ ID NO: 12587 - protein, 7 aa, synthetic construct
LAKQGTN

SEQ ID NO: 12588 - protein, 7 aa, synthetic construct
GDDFTKF

SEQ ID NO: 12589 - protein, 7 aa, synthetic construct
GHSTNGI

SEQ ID NO: 12590 - protein, 7 aa, synthetic construct
YFQGVIN

SEQ ID NO: 12591 - protein, 7 aa, synthetic construct
QGSTNGI

SEQ ID NO: 12592 - protein, 7 aa, synthetic construct
AGSTNGI

SEQ ID NO: 12593 - protein, 7 aa, synthetic construct
FAKGNVN

SEQ ID NO: 12594 - protein, 7 aa, synthetic construct
LSKGNLN

SEQ ID NO: 12595 - protein, 7 aa, synthetic construct
GDYPVKY

SEQ ID NO: 12596 - protein, 7 aa, synthetic construct
MESTNGV

SEQ ID NO: 12597 - protein, 7 aa, synthetic construct
MSSTNGI

SEQ ID NO: 12598 - protein, 7 aa, synthetic construct
NLGSNTW

SEQ ID NO: 12599 - protein, 7 aa, synthetic construct
HSRANTD

SEQ ID NO: 12600 - protein, 7 aa, synthetic construct
GRNGNPA

SEQ ID NO: 12601 - protein, 7 aa, synthetic construct
YSKHGQN

SEQ ID NO: 12602 - protein, 7 aa, synthetic construct
YSKMGTN

SEQ ID NO: 12603 - protein, 7 aa, synthetic construct
LDSTNGR

SEQ ID NO: 12604 - protein, 7 aa, synthetic construct
DRYGRSP

SEQ ID NO: 12605 - protein, 7 aa, synthetic construct
NSSTNGI

SEQ ID NO: 12606 - protein, 7 aa, synthetic construct
FSKMNTN

SEQ ID NO: 12607 - protein, 7 aa, synthetic construct
YSRFNEN

SEQ ID NO: 12608 - protein, 7 aa, synthetic construct
GGSGTTW

SEQ ID NO: 12609 - protein, 7 aa, synthetic construct
TVGYSTY

SEQ ID NO: 12610 - protein, 7 aa, synthetic construct
SESSNGV

SEQ ID NO: 12611 - protein, 7 aa, synthetic construct
RGPAEYP

SEQ ID NO: 12612 - protein, 7 aa, synthetic construct
YAKTNPN

SEQ ID NO: 12613 - protein, 7 aa, synthetic construct
NHSTNGV

SEQ ID NO: 12614 - protein, 7 aa, synthetic construct
LYSSNGV

SEQ ID NO: 12615 - protein, 7 aa, synthetic construct
QNQSHTW

SEQ ID NO: 12616 - protein, 7 aa, synthetic construct
YSKPGLN

SEQ ID NO: 12617 - protein, 7 aa, synthetic construct
LARAGDN

SEQ ID NO: 12618 - protein, 7 aa, synthetic construct
SNSSHGW

SEQ ID NO: 12619 - protein, 7 aa, synthetic construct
YSKTNDN

SEQ ID NO: 12620 - protein, 7 aa, synthetic construct
NMSTNGR

SEQ ID NO: 12621 - protein, 7 aa, synthetic construct
YAKIGTN

SEQ ID NO: 12622 - protein, 7 aa, synthetic construct
YSKTNHN

SEQ ID NO: 12623 - protein, 7 aa, synthetic construct
YAKLGDN

SEQ ID NO: 12624 - protein, 7 aa, synthetic construct
YTKSGSN

SEQ ID NO: 12625 - protein, 7 aa, synthetic construct
LSKMNEN

SEQ ID NO: 12626 - protein, 7 aa, synthetic construct
SYSTNGV

SEQ ID NO: 12627 - protein, 7 aa, synthetic construct
DSHSHTW

SEQ ID NO: 12628 - protein, 7 aa, synthetic construct
LTRSSYD

SEQ ID NO: 12629 - protein, 7 aa, synthetic construct
FSKTGLN

SEQ ID NO: 12630 - protein, 7 aa, synthetic construct
HGSSNGV

SEQ ID NO: 12631 - protein, 7 aa, synthetic construct
LAKLGNN

SEQ ID NO: 12632 - protein, 7 aa, synthetic construct
YAKTNHN

SEQ ID NO: 12633 - protein, 7 aa, synthetic construct
QEHTVYR

SEQ ID NO: 12634 - protein, 7 aa, synthetic construct
ANSSNGV

SEQ ID NO: 12635 - protein, 7 aa, synthetic construct
FESKVAY

SEQ ID NO: 12636 - protein, 7 aa, synthetic construct
SASSNGI

SEQ ID NO: 12637 - protein, 7 aa, synthetic construct
YSKDGPN

SEQ ID NO: 12638 - protein, 7 aa, synthetic construct
GQGSSTW

SEQ ID NO: 12639 - protein, 7 aa, synthetic construct
QQSTNGR

SEQ ID NO: 12640 - protein, 7 aa, synthetic construct
RNDSNGV

SEQ ID NO: 12641 - protein, 7 aa, synthetic construct
YSRHGDN

SEQ ID NO: 12642 - protein, 7 aa, synthetic construct
YFSSNGV

SEQ ID NO: 12643 - protein, 7 aa, synthetic construct
HMSSNGV

SEQ ID NO: 12644 - protein, 7 aa, synthetic construct
LSKMGSN

SEQ ID NO: 12645 - protein, 7 aa, synthetic construct
NNSSNGV

SEQ ID NO: 12646 - protein, 7 aa, synthetic construct
LASSNGV

SEQ ID NO: 12647 - protein, 7 aa, synthetic construct
QHSREGV

SEQ ID NO: 12648 - protein, 7 aa, synthetic construct
LSKMGTN

SEQ ID NO: 12649 - protein, 7 aa, synthetic construct
FDGKSPY

SEQ ID NO: 12650 - protein, 7 aa, synthetic construct
YSVKNTN

SEQ ID NO: 12651 - protein, 7 aa, synthetic construct
LSKQNLN

SEQ ID NO: 12652 - protein, 7 aa, synthetic construct
GANQSSW

SEQ ID NO: 12653 - protein, 7 aa, synthetic construct
LARDGPN

SEQ ID NO: 12654 - protein, 7 aa, synthetic construct
ITSDNGR

SEQ ID NO: 12655 - protein, 7 aa, synthetic construct
MHSSNGV

SEQ ID NO: 12656 - protein, 7 aa, synthetic construct
YAKQNLN

SEQ ID NO: 12657 - protein, 7 aa, synthetic construct
TRNGTPA

SEQ ID NO: 12658 - protein, 7 aa, synthetic construct
YSKGGIN

SEQ ID NO: 12659 - protein, 7 aa, synthetic construct
TNDAVKW

SEQ ID NO: 12660 - protein, 7 aa, synthetic construct
TKSGDLP

SEQ ID NO: 12661 - protein, 7 aa, synthetic construct
YSRNNQN

SEQ ID NO: 12662 - protein, 7 aa, synthetic construct
GQSTNGV

SEQ ID NO: 12663 - protein, 7 aa, synthetic construct
DSYSGQD

SEQ ID NO: 12664 - protein, 7 aa, synthetic construct
FSKANTN

SEQ ID NO: 12665 - protein, 7 aa, synthetic construct
TLSSNGV

SEQ ID NO: 12666 - protein, 7 aa, synthetic construct
YSREGFN

SEQ ID NO: 12667 - protein, 7 aa, synthetic construct
YLKSQTV

SEQ ID NO: 12668 - protein, 7 aa, synthetic construct
FDSSNGV

SEQ ID NO: 12669 - protein, 7 aa, synthetic construct
QESQNGR

SEQ ID NO: 12670 - protein, 7 aa, synthetic construct
MTSSNGV

SEQ ID NO: 12671 - protein, 7 aa, synthetic construct
RGNESGW

SEQ ID NO: 12672 - protein, 7 aa, synthetic construct
YAKEGYN

SEQ ID NO: 12673 - protein, 7 aa, synthetic construct
YAKSNQN

SEQ ID NO: 12674 - protein, 7 aa, synthetic construct
AMSTNGI

SEQ ID NO: 12675 - protein, 7 aa, synthetic construct
YARYGEN

SEQ ID NO: 12676 - protein, 7 aa, synthetic construct
VASSGAG

SEQ ID NO: 12677 - protein, 7 aa, synthetic construct
NISTNGI

SEQ ID NO: 12678 - protein, 7 aa, synthetic construct
FSRVNEN

SEQ ID NO: 12679 - protein, 7 aa, synthetic construct
LSKLGEN

SEQ ID NO: 12680 - protein, 7 aa, synthetic construct
DHKGQIA

SEQ ID NO: 12681 - protein, 7 aa, synthetic construct
YAKLNAN

SEQ ID NO: 12682 - protein, 7 aa, synthetic construct
YAKANQN

SEQ ID NO: 12683 - protein, 7 aa, synthetic construct
GESTNGV

SEQ ID NO: 12684 - protein, 7 aa, synthetic construct
YAKQNTN

SEQ ID NO: 12685 - protein, 7 aa, synthetic construct
YSKANGN

SEQ ID NO: 12686 - protein, 7 aa, synthetic construct
IDSSNGV

SEQ ID NO: 12687 - protein, 7 aa, synthetic construct
FFSTNGI

SEQ ID NO: 12688 - protein, 7 aa, synthetic construct
YSKINTN

SEQ ID NO: 12689 - protein, 7 aa, synthetic construct
DNSTNGR

SEQ ID NO: 12690 - protein, 7 aa, synthetic construct
VEYSFGD

SEQ ID NO: 12691 - protein, 7 aa, synthetic construct
FAKTGVN

SEQ ID NO: 12692 - protein, 7 aa, synthetic construct
TESSNGV

SEQ ID NO: 12693 - protein, 7 aa, synthetic construct
NYSTNGI

SEQ ID NO: 12694 - protein, 7 aa, synthetic construct
IMSSNGV

SEQ ID NO: 12695 - protein, 7 aa, synthetic construct
LARIGSN

SEQ ID NO: 12696 - protein, 7 aa, synthetic construct
NDSTNGI

SEQ ID NO: 12697 - protein, 7 aa, synthetic construct
FSKVGEN

SEQ ID NO: 12698 - protein, 7 aa, synthetic construct
LSKLGDN

SEQ ID NO: 12699 - protein, 7 aa, synthetic construct
VTDFNGK

SEQ ID NO: 12700 - protein, 7 aa, synthetic construct
YSKPNFN

SEQ ID NO: 12701 - protein, 7 aa, synthetic construct
QGSTNGV

SEQ ID NO: 12702 - protein, 7 aa, synthetic construct
FSKMGHN

SEQ ID NO: 12703 - protein, 7 aa, synthetic construct
DFRGNDA

SEQ ID NO: 12704 - protein, 7 aa, synthetic construct
FAKNGLN

SEQ ID NO: 12705 - protein, 7 aa, synthetic construct
YSKGNEN

SEQ ID NO: 12706 - protein, 7 aa, synthetic construct
YSKTNVN

SEQ ID NO: 12707 - protein, 7 aa, synthetic construct
VDSTNGR

SEQ ID NO: 12708 - protein, 7 aa, synthetic construct
RGGYETF

SEQ ID NO: 12709 - protein, 7 aa, synthetic construct
VPQRGDF

SEQ ID NO: 12710 - protein, 7 aa, synthetic construct
PWSTNGI

SEQ ID NO: 12711 - protein, 7 aa, synthetic construct
HANTSNW

SEQ ID NO: 12712 - protein, 7 aa, synthetic construct
AFSTNGI

SEQ ID NO: 12713 - protein, 7 aa, synthetic construct
MLSTNGI

SEQ ID NO: 12714 - protein, 7 aa, synthetic construct
EQSTNGI

SEQ ID NO: 12715 - protein, 7 aa, synthetic construct
SKSSNGV

SEQ ID NO: 12716 - protein, 7 aa, synthetic construct
YAKLNNN

SEQ ID NO: 12717 - protein, 7 aa, synthetic construct
YSKNNMN

SEQ ID NO: 12718 - protein, 7 aa, synthetic construct
YAHAGIG

SEQ ID NO: 12719 - protein, 7 aa, synthetic construct
GPQSSTW

SEQ ID NO: 12720 - protein, 7 aa, synthetic construct
NQDYVKY

SEQ ID NO: 12721 - protein, 7 aa, synthetic construct
YFDGKVS

SEQ ID NO: 12722 - protein, 7 aa, synthetic construct
FARFGPN

SEQ ID NO: 12723 - protein, 7 aa, synthetic construct
SNGNSSY

SEQ ID NO: 12724 - protein, 7 aa, synthetic construct
GNSTNGV

SEQ ID NO: 12725 - protein, 7 aa, synthetic construct
DNRGRAA

SEQ ID NO: 12726 - protein, 7 aa, synthetic construct
YSKSNSN

SEQ ID NO: 12727 - protein, 7 aa, synthetic construct
LARAGSN

SEQ ID NO: 12728 - protein, 7 aa, synthetic construct
YAKFGFN

SEQ ID NO: 12729 - protein, 7 aa, synthetic construct
YARPGMN

SEQ ID NO: 12730 - protein, 7 aa, synthetic construct
YAKAGGN

SEQ ID NO: 12731 - protein, 7 aa, synthetic construct
QNSSNGV

SEQ ID NO: 12732 - protein, 7 aa, synthetic construct
TDSSNGV

SEQ ID NO: 12733 - protein, 7 aa, synthetic construct
FSRSGQN

SEQ ID NO: 12734 - protein, 7 aa, synthetic construct
YAKGNEN

SEQ ID NO: 12735 - protein, 7 aa, synthetic construct
YSRDNFN

SEQ ID NO: 12736 - protein, 7 aa, synthetic construct
YSAANAN

SEQ ID NO: 12737 - protein, 7 aa, synthetic construct
IESTNGR

SEQ ID NO: 12738 - protein, 7 aa, synthetic construct
NDGGSAW

SEQ ID NO: 12739 - protein, 7 aa, synthetic construct
YSKYGEN

SEQ ID NO: 12740 - protein, 7 aa, synthetic construct
YAKQGEN

SEQ ID NO: 12741 - protein, 7 aa, synthetic construct
LSKNGVN

SEQ ID NO: 12742 - protein, 7 aa, synthetic construct
LAKAGTN

SEQ ID NO: 12743 - protein, 7 aa, synthetic construct
NASTNGI

SEQ ID NO: 12744 - protein, 7 aa, synthetic construct
YAKTNTN

SEQ ID NO: 12745 - protein, 7 aa, synthetic construct
LSKANQN

SEQ ID NO: 12746 - protein, 7 aa, synthetic construct
EVSTNGV

SEQ ID NO: 12747 - protein, 7 aa, synthetic construct
LAKVGPN

SEQ ID NO: 12748 - protein, 7 aa, synthetic construct
SRDTNGR

SEQ ID NO: 12749 - protein, 7 aa, synthetic construct
YSKGGVN

SEQ ID NO: 12750 - protein, 7 aa, synthetic construct
YAKLNVN

SEQ ID NO: 12751 - protein, 7 aa, synthetic construct
TYSGDSA

SEQ ID NO: 12752 - protein, 7 aa, synthetic construct
LSRYNDN

SEQ ID NO: 12753 - protein, 7 aa, synthetic construct
PNGRSAY

SEQ ID NO: 12754 - protein, 7 aa, synthetic construct
YSRENFN

SEQ ID NO: 12755 - protein, 7 aa, synthetic construct
GWRGEPS

SEQ ID NO: 12756 - protein, 7 aa, synthetic construct
YAKSNAN

SEQ ID NO: 12757 - protein, 7 aa, synthetic construct
LSRFNDN

SEQ ID NO: 12758 - protein, 7 aa, synthetic construct
RGDRTFP

SEQ ID NO: 12759 - protein, 7 aa, synthetic construct
AYSTNGI

SEQ ID NO: 12760 - protein, 7 aa, synthetic construct
SSGASTW

SEQ ID NO: 12761 - protein, 7 aa, synthetic construct
YAKQNAN

SEQ ID NO: 12762 - protein, 7 aa, synthetic construct
DGNGSHW

SEQ ID NO: 12763 - protein, 7 aa, synthetic construct
FSRNGMN

SEQ ID NO: 12764 - protein, 7 aa, synthetic construct
ADSTNGI

SEQ ID NO: 12765 - protein, 7 aa, synthetic construct
GTGANPW

SEQ ID NO: 12766 - protein, 7 aa, synthetic construct
TKNGNSA

SEQ ID NO: 12767 - protein, 7 aa, synthetic construct
FSKAGDN

SEQ ID NO: 12768 - protein, 7 aa, synthetic construct
GQKGIPY

SEQ ID NO: 12769 - protein, 7 aa, synthetic construct
ATSSNGV

SEQ ID NO: 12770 - protein, 7 aa, synthetic construct
RPDTVQW

SEQ ID NO: 12771 - protein, 7 aa, synthetic construct
PDSTNGV

SEQ ID NO: 12772 - protein, 7 aa, synthetic construct
LARIGEN

SEQ ID NO: 12773 - protein, 7 aa, synthetic construct
LDSSNGV

SEQ ID NO: 12774 - protein, 7 aa, synthetic construct
GSSTNGI

SEQ ID NO: 12775 - protein, 7 aa, synthetic construct
YAKGGAG

SEQ ID NO: 12776 - protein, 7 aa, synthetic construct
FSRSNDN

SEQ ID NO: 12777 - protein, 7 aa, synthetic construct
YAKAGEN

SEQ ID NO: 12778 - protein, 7 aa, synthetic construct
YARDGWN

SEQ ID NO: 12779 - protein, 7 aa, synthetic construct
YSKVGGD

SEQ ID NO: 12780 - protein, 7 aa, synthetic construct
NDRKTGE

SEQ ID NO: 12781 - protein, 7 aa, synthetic construct
APSTHTW

SEQ ID NO: 12782 - protein, 7 aa, synthetic construct
NVSTNGI

SEQ ID NO: 12783 - protein, 7 aa, synthetic construct
PTSSNGV

SEQ ID NO: 12784 - protein, 7 aa, synthetic construct
FVSSNGV

SEQ ID NO: 12785 - protein, 7 aa, synthetic construct
FSKMNDN

SEQ ID NO: 12786 - protein, 7 aa, synthetic construct
QSGSSPY

SEQ ID NO: 12787 - protein, 7 aa, synthetic construct
LAKGGEN

SEQ ID NO: 12788 - protein, 7 aa, synthetic construct
FARGGDN

SEQ ID NO: 12789 - protein, 7 aa, synthetic construct
LAREGPN

SEQ ID NO: 12790 - protein, 7 aa, synthetic construct
ASGNSMW

SEQ ID NO: 12791 - protein, 7 aa, synthetic construct
GHADQKW

SEQ ID NO: 12792 - protein, 7 aa, synthetic construct
IDSVNGR

SEQ ID NO: 12793 - protein, 7 aa, synthetic construct
LAKVGHN

SEQ ID NO: 12794 - protein, 7 aa, synthetic construct
FSRYNEN

SEQ ID NO: 12795 - protein, 7 aa, synthetic construct
YSRHGYN

SEQ ID NO: 12796 - protein, 7 aa, synthetic construct
FDSTNGR

SEQ ID NO: 12797 - protein, 7 aa, synthetic construct
GGSSTVW

SEQ ID NO: 12798 - protein, 7 aa, synthetic construct
YLSTNGI

SEQ ID NO: 12799 - protein, 7 aa, synthetic construct
FSRQNEN

SEQ ID NO: 12800 - protein, 7 aa, synthetic construct
YARPNFN

SEQ ID NO: 12801 - protein, 7 aa, synthetic construct
YSKINLN

SEQ ID NO: 12802 - protein, 7 aa, synthetic construct
YAKGGEN

SEQ ID NO: 12803 - protein, 7 aa, synthetic construct
LARAGEN

SEQ ID NO: 12804 - protein, 7 aa, synthetic construct
VTDGMRY

SEQ ID NO: 12805 - protein, 7 aa, synthetic construct
QSSSNGV

SEQ ID NO: 12806 - protein, 7 aa, synthetic construct
DGGSASW

SEQ ID NO: 12807 - protein, 7 aa, synthetic construct
LAKIGIN

SEQ ID NO: 12808 - protein, 7 aa, synthetic construct
QQSSNGV

SEQ ID NO: 12809 - protein, 7 aa, synthetic construct
GNGKSSY

SEQ ID NO: 12810 - protein, 7 aa, synthetic construct
LAKVGIN

SEQ ID NO: 12811 - protein, 7 aa, synthetic construct
GVPGTMF

SEQ ID NO: 12812 - protein, 7 aa, synthetic construct
LSRSSQD

SEQ ID NO: 12813 - protein, 7 aa, synthetic construct
YSKINEN

SEQ ID NO: 12814 - protein, 7 aa, synthetic construct
GYSTNGR

SEQ ID NO: 12815 - protein, 7 aa, synthetic construct
IRSGSAG

SEQ ID NO: 12816 - protein, 7 aa, synthetic construct
YARHGEN

SEQ ID NO: 12817 - protein, 7 aa, synthetic construct
LSRSNEN

SEQ ID NO: 12818 - protein, 7 aa, synthetic construct
TDAQSRY

SEQ ID NO: 12819 - protein, 7 aa, synthetic construct
YSKNNTN

SEQ ID NO: 12820 - protein, 7 aa, synthetic construct
KNGESNW

SEQ ID NO: 12821 - protein, 7 aa, synthetic construct
LARIGDN

SEQ ID NO: 12822 - protein, 7 aa, synthetic construct
GHSTNGV

SEQ ID NO: 12823 - protein, 7 aa, synthetic construct
YSKMNGN

SEQ ID NO: 12824 - protein, 7 aa, synthetic construct
FSKSGLN

SEQ ID NO: 12825 - protein, 7 aa, synthetic construct
RETNVGW

SEQ ID NO: 12826 - protein, 7 aa, synthetic construct
GASTNGR

SEQ ID NO: 12827 - protein, 7 aa, synthetic construct
YSKTGCN

SEQ ID NO: 12828 - protein, 7 aa, synthetic construct
FARGGEN

SEQ ID NO: 12829 - protein, 7 aa, synthetic construct
YAKLGIN

SEQ ID NO: 12830 - protein, 7 aa, synthetic construct
DSTGMKY

SEQ ID NO: 12831 - protein, 7 aa, synthetic construct
MNSSNGV

SEQ ID NO: 12832 - protein, 7 aa, synthetic construct
FSKTGMN

SEQ ID NO: 12833 - protein, 7 aa, synthetic construct
FARNGEN

SEQ ID NO: 12834 - protein, 7 aa, synthetic construct
TWTGVGP

SEQ ID NO: 12835 - protein, 7 aa, synthetic construct
SHGASTW

SEQ ID NO: 12836 - protein, 7 aa, synthetic construct
SISSNGV

SEQ ID NO: 12837 - protein, 7 aa, synthetic construct
KNDSILW

SEQ ID NO: 12838 - protein, 7 aa, synthetic construct
YAKEGWN

SEQ ID NO: 12839 - protein, 7 aa, synthetic construct
KSSTNGV

SEQ ID NO: 12840 - protein, 7 aa, synthetic construct
FAKTGQN

SEQ ID NO: 12841 - protein, 7 aa, synthetic construct
YSKEGPN

SEQ ID NO: 12842 - protein, 7 aa, synthetic construct
GWSTNGI

SEQ ID NO: 12843 - protein, 7 aa, synthetic construct
NPSSSAW

SEQ ID NO: 12844 - protein, 7 aa, synthetic construct
ALSTNGV

SEQ ID NO: 12845 - protein, 7 aa, synthetic construct
YFAGVPA

SEQ ID NO: 12846 - protein, 7 aa, synthetic construct
YHASTPN

SEQ ID NO: 12847 - protein, 7 aa, synthetic construct
YSKNNDN

SEQ ID NO: 12848 - protein, 7 aa, synthetic construct
FYSSNGV

SEQ ID NO: 12849 - protein, 7 aa, synthetic construct
YAKEGPN

SEQ ID NO: 12850 - protein, 7 aa, synthetic construct
YFSGSMT

SEQ ID NO: 12851 - protein, 7 aa, synthetic construct
TEGQSKW

SEQ ID NO: 12852 - protein, 7 aa, synthetic construct
LAKIGLN

SEQ ID NO: 12853 - protein, 7 aa, synthetic construct
LSKQNAN

SEQ ID NO: 12854 - protein, 7 aa, synthetic construct
FAKNGMN

SEQ ID NO: 12855 - protein, 7 aa, synthetic construct
ESSTNGV

SEQ ID NO: 12856 - protein, 7 aa, synthetic construct
SNATTGW

SEQ ID NO: 12857 - protein, 7 aa, synthetic construct
LRNGVNA

SEQ ID NO: 12858 - protein, 7 aa, synthetic construct
LSRTNEN

SEQ ID NO: 12859 - protein, 7 aa, synthetic construct
WMSSNGV

SEQ ID NO: 12860 - protein, 7 aa, synthetic construct
PHSSNGV

SEQ ID NO: 12861 - protein, 7 aa, synthetic construct
FSRDNYN

SEQ ID NO: 12862 - protein, 7 aa, synthetic construct
PYSTNGI

SEQ ID NO: 12863 - protein, 7 aa, synthetic construct
YAKGGGN

SEQ ID NO: 12864 - protein, 7 aa, synthetic construct
LALRGMD

SEQ ID NO: 12865 - protein, 7 aa, synthetic construct
LSKANNN

SEQ ID NO: 12866 - protein, 7 aa, synthetic construct
YSKINMN

SEQ ID NO: 12867 - protein, 7 aa, synthetic construct
MGSTNGI

SEQ ID NO: 12868 - protein, 7 aa, synthetic construct
QTSTNGR

SEQ ID NO: 12869 - protein, 7 aa, synthetic construct
YARPGFN

SEQ ID NO: 12870 - protein, 7 aa, synthetic construct
VPPYHHS

SEQ ID NO: 12871 - protein, 7 aa, synthetic construct
YAKLNTN

SEQ ID NO: 12872 - protein, 7 aa, synthetic construct
KDSHVAW

SEQ ID NO: 12873 - protein, 7 aa, synthetic construct
MYSTNGI

SEQ ID NO: 12874 - protein, 7 aa, synthetic construct
GGAGVGW

SEQ ID NO: 12875 - protein, 7 aa, synthetic construct
TGGTSAY

SEQ ID NO: 12876 - protein, 7 aa, synthetic construct
FSRSGDN

SEQ ID NO: 12877 - protein, 7 aa, synthetic construct
KRSGENA

SEQ ID NO: 12878 - protein, 7 aa, synthetic construct
LNGRGYD

SEQ ID NO: 12879 - protein, 7 aa, synthetic construct
AGSGNAW

SEQ ID NO: 12880 - protein, 7 aa, synthetic construct
PFSTNGI

SEQ ID NO: 12881 - protein, 7 aa, synthetic construct
LAKIGVN

SEQ ID NO: 12882 - protein, 7 aa, synthetic construct
LARHGEN

SEQ ID NO: 12883 - protein, 7 aa, synthetic construct
IGLSGFD

SEQ ID NO: 12884 - protein, 7 aa, synthetic construct
LSKANDN

SEQ ID NO: 12885 - protein, 7 aa, synthetic construct
LKLNPNS

SEQ ID NO: 12886 - protein, 7 aa, synthetic construct
LARVGEN

SEQ ID NO: 12887 - protein, 7 aa, synthetic construct
FARPGPN

SEQ ID NO: 12888 - protein, 7 aa, synthetic construct
YAKQGGN

SEQ ID NO: 12889 - protein, 7 aa, synthetic construct
YAKDGWN

SEQ ID NO: 12890 - protein, 7 aa, synthetic construct
YYSGHVT

SEQ ID NO: 12891 - protein, 7 aa, synthetic construct
MESNVRW

SEQ ID NO: 12892 - protein, 7 aa, synthetic construct
YAKVGQN

SEQ ID NO: 12893 - protein, 7 aa, synthetic construct
LAKHGMN

SEQ ID NO: 12894 - protein, 7 aa, synthetic construct
GTSTNGV

SEQ ID NO: 12895 - protein, 7 aa, synthetic construct
NNRGRDA

SEQ ID NO: 12896 - protein, 7 aa, synthetic construct
STSTDGR

SEQ ID NO: 12897 - protein, 7 aa, synthetic construct
YAKHGDN

SEQ ID NO: 12898 - protein, 7 aa, synthetic construct
MSSSNGV

SEQ ID NO: 12899 - protein, 7 aa, synthetic construct
EFSTNGR

SEQ ID NO: 12900 - protein, 7 aa, synthetic construct
SVSSNGV

SEQ ID NO: 12901 - protein, 7 aa, synthetic construct
LAKTGGN

SEQ ID NO: 12902 - protein, 7 aa, synthetic construct
PDSTNGI

SEQ ID NO: 12903 - protein, 7 aa, synthetic construct
FAKNGVN

SEQ ID NO: 12904 - protein, 7 aa, synthetic construct
LARPGVN

SEQ ID NO: 12905 - protein, 7 aa, synthetic construct
GSVQVKY

SEQ ID NO: 12906 - protein, 7 aa, synthetic construct
YSREGWN

SEQ ID NO: 12907 - protein, 7 aa, synthetic construct
GNTVVSW

SEQ ID NO: 12908 - protein, 7 aa, synthetic construct
EYSTNGR

SEQ ID NO: 12909 - protein, 7 aa, synthetic construct
LSRFNEN

SEQ ID NO: 12910 - protein, 7 aa, synthetic construct
YWNNNES

SEQ ID NO: 12911 - protein, 7 aa, synthetic construct
FSKSGMN

SEQ ID NO: 12912 - protein, 7 aa, synthetic construct
LAREGYN

SEQ ID NO: 12913 - protein, 7 aa, synthetic construct
LESTNGV

SEQ ID NO: 12914 - protein, 7 aa, synthetic construct
YSRPGIN

SEQ ID NO: 12915 - protein, 7 aa, synthetic construct
FSRINEN

SEQ ID NO: 12916 - protein, 7 aa, synthetic construct
NISTNGR

SEQ ID NO: 12917 - protein, 7 aa, synthetic construct
LVRSVNE

SEQ ID NO: 12918 - protein, 7 aa, synthetic construct
YSRFGSN

SEQ ID NO: 12919 - protein, 7 aa, synthetic construct
FSRLGYN

SEQ ID NO: 12920 - protein, 7 aa, synthetic construct
YSRYGMN

SEQ ID NO: 12921 - protein, 7 aa, synthetic construct
YSKYNEN

SEQ ID NO: 12922 - protein, 7 aa, synthetic construct
FFSGETL

SEQ ID NO: 12923 - protein, 7 aa, synthetic construct
FSKMGLN

SEQ ID NO: 12924 - protein, 7 aa, synthetic construct
DNHGNRY

SEQ ID NO: 12925 - protein, 7 aa, synthetic construct
YAKMGDN

SEQ ID NO: 12926 - protein, 7 aa, synthetic construct
VPNKGDF

SEQ ID NO: 12927 - protein, 7 aa, synthetic construct
STGSSNW

SEQ ID NO: 12928 - protein, 7 aa, synthetic construct
YSRGGEN

SEQ ID NO: 12929 - protein, 7 aa, synthetic construct
YSKNGEN

SEQ ID NO: 12930 - protein, 7 aa, synthetic construct
FSRQGDN

SEQ ID NO: 12931 - protein, 7 aa, synthetic construct
LVSSNGV

SEQ ID NO: 12932 - protein, 7 aa, synthetic construct
NSSGRSA

SEQ ID NO: 12933 - protein, 7 aa, synthetic construct
NPKGSGE

SEQ ID NO: 12934 - protein, 7 aa, synthetic construct
FAKGGVN

SEQ ID NO: 12935 - protein, 7 aa, synthetic construct
YAKLGEN

SEQ ID NO: 12936 - protein, 7 aa, synthetic construct
YSKHGEN

SEQ ID NO: 12937 - protein, 7 aa, synthetic construct
NEKRMYE

SEQ ID NO: 12938 - protein, 7 aa, synthetic construct
LAKEGRN

SEQ ID NO: 12939 - protein, 7 aa, synthetic construct
YEYGYGN

SEQ ID NO: 12940 - protein, 7 aa, synthetic construct
LARYGEN

SEQ ID NO: 12941 - protein, 7 aa, synthetic construct
FTRLDDR

SEQ ID NO: 12942 - protein, 7 aa, synthetic construct
YNRLGYD

SEQ ID NO: 12943 - protein, 7 aa, synthetic construct
TREGDVP

SEQ ID NO: 12944 - protein, 7 aa, synthetic construct
EASTNGV

SEQ ID NO: 12945 - protein, 7 aa, synthetic construct
HNAMSSY

SEQ ID NO: 12946 - protein, 7 aa, synthetic construct
LHKVLYD

SEQ ID NO: 12947 - protein, 7 aa, synthetic construct
FSKANNN

SEQ ID NO: 12948 - protein, 7 aa, synthetic construct
MSETSGW

SEQ ID NO: 12949 - protein, 7 aa, synthetic construct
TWNGQNA

SEQ ID NO: 12950 - protein, 7 aa, synthetic construct
LAKHGSN

SEQ ID NO: 12951 - protein, 7 aa, synthetic construct
PGSSNGV

SEQ ID NO: 12952 - protein, 7 aa, synthetic construct
FSKTGAN

SEQ ID NO: 12953 - protein, 7 aa, synthetic construct
NGMNGRD

SEQ ID NO: 12954 - protein, 7 aa, synthetic construct
DARTDRN

SEQ ID NO: 12955 - protein, 7 aa, synthetic construct
SSSSNGM

SEQ ID NO: 12956 - protein, 7 aa, synthetic construct
QHSSNGV

SEQ ID NO: 12957 - protein, 7 aa, synthetic construct
FSKIGDN

SEQ ID NO: 12958 - protein, 7 aa, synthetic construct
FSKSGVN

SEQ ID NO: 12959 - protein, 7 aa, synthetic construct
ETSTNGI

SEQ ID NO: 12960 - protein, 7 aa, synthetic construct
ESSSNGV

SEQ ID NO: 12961 - protein, 7 aa, synthetic construct
NKYGMDT

SEQ ID NO: 12962 - protein, 7 aa, synthetic construct
YAKIGDN

SEQ ID NO: 12963 - protein, 7 aa, synthetic construct
SNGRNPY

SEQ ID NO: 12964 - protein, 7 aa, synthetic construct
LAKGGDN

SEQ ID NO: 12965 - protein, 7 aa, synthetic construct
TPSTNGR

SEQ ID NO: 12966 - protein, 7 aa, synthetic construct
GEGIHKW

SEQ ID NO: 12967 - protein, 7 aa, synthetic construct
NHRLAEN

SEQ ID NO: 12968 - protein, 7 aa, synthetic construct
LSRGNDN

SEQ ID NO: 12969 - protein, 7 aa, synthetic construct
YVRTDTS

SEQ ID NO: 12970 - protein, 7 aa, synthetic construct
YAKSNSN

SEQ ID NO: 12971 - protein, 7 aa, synthetic construct
LARGSND

SEQ ID NO: 12972 - protein, 7 aa, synthetic construct
PFSSNGV

SEQ ID NO: 12973 - protein, 7 aa, synthetic construct
YSRDGPN

SEQ ID NO: 12974 - protein, 7 aa, synthetic construct
LAKGNPN

SEQ ID NO: 12975 - protein, 7 aa, synthetic construct
YAKVGVN

SEQ ID NO: 12976 - protein, 7 aa, synthetic construct
DSSTNGR

SEQ ID NO: 12977 - protein, 7 aa, synthetic construct
AKSSNGV

SEQ ID NO: 12978 - protein, 7 aa, synthetic construct
EKGYNVY

SEQ ID NO: 12979 - protein, 7 aa, synthetic construct
EAPDIRY

SEQ ID NO: 12980 - protein, 7 aa, synthetic construct
HSATSKY

SEQ ID NO: 12981 - protein, 7 aa, synthetic construct
LSRNGEN

SEQ ID NO: 12982 - protein, 7 aa, synthetic construct
FAKTGDN

SEQ ID NO: 12983 - protein, 7 aa, synthetic construct
GPTEVRY

SEQ ID NO: 12984 - protein, 7 aa, synthetic construct
LAKLGQN

SEQ ID NO: 12985 - protein, 7 aa, synthetic construct
TQSTHGN

SEQ ID NO: 12986 - protein, 7 aa, synthetic construct
NGSTNGV

SEQ ID NO: 12987 - protein, 7 aa, synthetic construct
LSRHGDN

SEQ ID NO: 12988 - protein, 7 aa, synthetic construct
EGSTNGV

SEQ ID NO: 12989 - protein, 7 aa, synthetic construct
EEARGRL

SEQ ID NO: 12990 - protein, 7 aa, synthetic construct
FSRHNDN

SEQ ID NO: 12991 - protein, 7 aa, synthetic construct
RQSSNGE

SEQ ID NO: 12992 - protein, 7 aa, synthetic construct
NARTGHD

SEQ ID NO: 12993 - protein, 7 aa, synthetic construct
YSREGHN

SEQ ID NO: 12994 - protein, 7 aa, synthetic construct
TSSTVGR

SEQ ID NO: 12995 - protein, 7 aa, synthetic construct
YAKENWN

SEQ ID NO: 12996 - protein, 7 aa, synthetic construct
STNGMSY

SEQ ID NO: 12997 - protein, 7 aa, synthetic construct
PNAGVSW

SEQ ID NO: 12998 - protein, 7 aa, synthetic construct
ENGKGMN

SEQ ID NO: 12999 - protein, 7 aa, synthetic construct
YAAASLY

SEQ ID NO: 13000 - protein, 7 aa, synthetic construct
GVSGSSW

SEQ ID NO: 13001 - protein, 7 aa, synthetic construct
LSKMGQN

SEQ ID NO: 13002 - protein, 7 aa, synthetic construct
KESTNGV

SEQ ID NO: 13003 - protein, 7 aa, synthetic construct
NMSTNGV

SEQ ID NO: 13004 - protein, 7 aa, synthetic construct
FSKSGAN

SEQ ID NO: 13005 - protein, 7 aa, synthetic construct
YSKNNQN

SEQ ID NO: 13006 - protein, 7 aa, synthetic construct
YSKNNEN

SEQ ID NO: 13007 - protein, 7 aa, synthetic construct
YAKLNMN

SEQ ID NO: 13008 - protein, 7 aa, synthetic construct
SGTTGWD

SEQ ID NO: 13009 - protein, 7 aa, synthetic construct
QYSTNGV

SEQ ID NO: 13010 - protein, 7 aa, synthetic construct
FSKANDN

SEQ ID NO: 13011 - protein, 7 aa, synthetic construct
YARHNPN

SEQ ID NO: 13012 - protein, 7 aa, synthetic construct
YSRRGDN

SEQ ID NO: 13013 - protein, 7 aa, synthetic construct
LSKMNSN

SEQ ID NO: 13014 - protein, 7 aa, synthetic construct
FSRTNDN

SEQ ID NO: 13015 - protein, 7 aa, synthetic construct
NHTGKMA

SEQ ID NO: 13016 - protein, 7 aa, synthetic construct
VPYKGDF

SEQ ID NO: 13017 - protein, 7 aa, synthetic construct
LFSSNGV

SEQ ID NO: 13018 - protein, 7 aa, synthetic construct
VNSNSSW

SEQ ID NO: 13019 - protein, 7 aa, synthetic construct
PVSTNGR

SEQ ID NO: 13020 - protein, 7 aa, synthetic construct
LHASTVN

SEQ ID NO: 13021 - protein, 7 aa, synthetic construct
LSRNGDN

SEQ ID NO: 13022 - protein, 7 aa, synthetic construct
FSRMGFN

SEQ ID NO: 13023 - protein, 7 aa, synthetic construct
TSPNLSW

SEQ ID NO: 13024 - protein, 7 aa, synthetic construct
DAYRGSD

SEQ ID NO: 13025 - protein, 7 aa, synthetic construct
SGQSTGW

SEQ ID NO: 13026 - protein, 7 aa, synthetic construct
LSKQGTN

SEQ ID NO: 13027 - protein, 7 aa, synthetic construct
YAKPGTN

SEQ ID NO: 13028 - protein, 7 aa, synthetic construct
SSSSATW

SEQ ID NO: 13029 - protein, 7 aa, synthetic construct
PASTNGI

SEQ ID NO: 13030 - protein, 7 aa, synthetic construct
QFSTNGV

SEQ ID NO: 13031 - protein, 7 aa, synthetic construct
LSKASGN

SEQ ID NO: 13032 - protein, 7 aa, synthetic construct
LDGNSMY

SEQ ID NO: 13033 - protein, 7 aa, synthetic construct
YAKMGEN

SEQ ID NO: 13034 - protein, 7 aa, synthetic construct
SMSSNGV

SEQ ID NO: 13035 - protein, 7 aa, synthetic construct
WSSAYPV

SEQ ID NO: 13036 - protein, 7 aa, synthetic construct
YSRHNSN

SEQ ID NO: 13037 - protein, 7 aa, synthetic construct
LAKIGAN

SEQ ID NO: 13038 - protein, 7 aa, synthetic construct
TGQTTSW

SEQ ID NO: 13039 - protein, 7 aa, synthetic construct
DHSTNGR

SEQ ID NO: 13040 - protein, 7 aa, synthetic construct
GDSTNGV

SEQ ID NO: 13041 - protein, 7 aa, synthetic construct
ERSSNGV

SEQ ID NO: 13042 - protein, 7 aa, synthetic construct
YSKTNLN

SEQ ID NO: 13043 - protein, 7 aa, synthetic construct
SNGASSY

SEQ ID NO: 13044 - protein, 7 aa, synthetic construct
YAKLNLN

SEQ ID NO: 13045 - protein, 7 aa, synthetic construct
LSKNGLN

SEQ ID NO: 13046 - protein, 7 aa, synthetic construct
EGGGGRY

SEQ ID NO: 13047 - protein, 7 aa, synthetic construct
WRSDGYA

SEQ ID NO: 13048 - protein, 7 aa, synthetic construct
YSKFNEN

SEQ ID NO: 13049 - protein, 7 aa, synthetic construct
SSTGMSF

SEQ ID NO: 13050 - protein, 7 aa, synthetic construct
MTDGTKY

SEQ ID NO: 13051 - protein, 7 aa, synthetic construct
VQDYDRN

SEQ ID NO: 13052 - protein, 7 aa, synthetic construct
NQDGYMV

SEQ ID NO: 13053 - protein, 7 aa, synthetic construct
NTATNGR

SEQ ID NO: 13054 - protein, 7 aa, synthetic construct
LSKSNLN

SEQ ID NO: 13055 - protein, 7 aa, synthetic construct
VPSTNGV

SEQ ID NO: 13056 - protein, 7 aa, synthetic construct
NFQGYGQ

SEQ ID NO: 13057 - protein, 7 aa, synthetic construct
NAYEARN

SEQ ID NO: 13058 - protein, 7 aa, synthetic construct
KESSNGV

SEQ ID NO: 13059 - protein, 7 aa, synthetic construct
DRGNSTY

SEQ ID NO: 13060 - protein, 7 aa, synthetic construct
YAKANEN

SEQ ID NO: 13061 - protein, 7 aa, synthetic construct
DLRGTGA

SEQ ID NO: 13062 - protein, 7 aa, synthetic construct
YARPNEN

SEQ ID NO: 13063 - protein, 7 aa, synthetic construct
YSKWGDN

SEQ ID NO: 13064 - protein, 7 aa, synthetic construct
YSRFNPN

SEQ ID NO: 13065 - protein, 7 aa, synthetic construct
LAKAGEN

SEQ ID NO: 13066 - protein, 7 aa, synthetic construct
HLSTNGR

SEQ ID NO: 13067 - protein, 7 aa, synthetic construct
NHSSNGV

SEQ ID NO: 13068 - protein, 7 aa, synthetic construct
GPPDFMR

SEQ ID NO: 13069 - protein, 7 aa, synthetic construct
TGSSHDW

SEQ ID NO: 13070 - protein, 7 aa, synthetic construct
EISTNGR

SEQ ID NO: 13071 - protein, 7 aa, synthetic construct
FSRSGEN

SEQ ID NO: 13072 - protein, 7 aa, synthetic construct
LSKQNTN

SEQ ID NO: 13073 - protein, 7 aa, synthetic construct
YSRDGHN

SEQ ID NO: 13074 - protein, 7 aa, synthetic construct
LSRGNEN

SEQ ID NO: 13075 - protein, 7 aa, synthetic construct
GSGEVRY

SEQ ID NO: 13076 - protein, 7 aa, synthetic construct
PYSSNGV

SEQ ID NO: 13077 - protein, 7 aa, synthetic construct
YSRPGVN

SEQ ID NO: 13078 - protein, 7 aa, synthetic construct
GLGSVTW

SEQ ID NO: 13079 - protein, 7 aa, synthetic construct
RQSDSFE

SEQ ID NO: 13080 - protein, 7 aa, synthetic construct
YFSGANV

SEQ ID NO: 13081 - protein, 7 aa, synthetic construct
DSEGTRN

SEQ ID NO: 13082 - protein, 7 aa, synthetic construct
SGSPNRY

SEQ ID NO: 13083 - protein, 7 aa, synthetic construct
RESVNGW

SEQ ID NO: 13084 - protein, 7 aa, synthetic construct
LAKLGTN

SEQ ID NO: 13085 - protein, 7 aa, synthetic construct
MMSSNGV

SEQ ID NO: 13086 - protein, 7 aa, synthetic construct
GGPQVLY

SEQ ID NO: 13087 - protein, 7 aa, synthetic construct
YFASQRE

SEQ ID NO: 13088 - protein, 7 aa, synthetic construct
GRGENHY

SEQ ID NO: 13089 - protein, 7 aa, synthetic construct
YSREGKN

SEQ ID NO: 13090 - protein, 7 aa, synthetic construct
EGLIGKD

SEQ ID NO: 13091 - protein, 7 aa, synthetic construct
LSKAGGN

SEQ ID NO: 13092 - protein, 7 aa, synthetic construct
PESTNGI

SEQ ID NO: 13093 - protein, 7 aa, synthetic construct
YSREGAN

SEQ ID NO: 13094 - protein, 7 aa, synthetic construct
GIGNSAW

SEQ ID NO: 13095 - protein, 7 aa, synthetic construct
YAKVGDN

SEQ ID NO: 13096 - protein, 7 aa, synthetic construct
PMSTNGI

SEQ ID NO: 13097 - protein, 7 aa, synthetic construct
GNEMESW

SEQ ID NO: 13098 - protein, 7 aa, synthetic construct
PESSNGV

SEQ ID NO: 13099 - protein, 7 aa, synthetic construct
RTSSTGV

SEQ ID NO: 13100 - protein, 7 aa, synthetic construct
IKYTSSD

SEQ ID NO: 13101 - protein, 7 aa, synthetic construct
TRSDPNS

SEQ ID NO: 13102 - protein, 7 aa, synthetic construct
SDGISPY

SEQ ID NO: 13103 - protein, 7 aa, synthetic construct
YSRTNGN

SEQ ID NO: 13104 - protein, 7 aa, synthetic construct
YSKTNMN

SEQ ID NO: 13105 - protein, 7 aa, synthetic construct
CSVPSLP

SEQ ID NO: 13106 - protein, 7 aa, synthetic construct
YAKSNEN

SEQ ID NO: 13107 - protein, 7 aa, synthetic construct
TGGHSTW

SEQ ID NO: 13108 - protein, 7 aa, synthetic construct
YGGHTMY

SEQ ID NO: 13109 - protein, 7 aa, synthetic construct
FSKMNEN

SEQ ID NO: 13110 - protein, 7 aa, synthetic construct
FSKLGDN

SEQ ID NO: 13111 - protein, 7 aa, synthetic construct
TPRGAAA

SEQ ID NO: 13112 - protein, 7 aa, synthetic construct
HHEHGPR

SEQ ID NO: 13113 - protein, 7 aa, synthetic construct
YSREGMN

SEQ ID NO: 13114 - protein, 7 aa, synthetic construct
DYRGTLP

SEQ ID NO: 13115 - protein, 7 aa, synthetic construct
YAKPGMN

SEQ ID NO: 13116 - protein, 7 aa, synthetic construct
IGGSSTY

SEQ ID NO: 13117 - protein, 7 aa, synthetic construct
DHANSRY

SEQ ID NO: 13118 - protein, 7 aa, synthetic construct
YARDGMN

SEQ ID NO: 13119 - protein, 7 aa, synthetic construct
YAREGHN

SEQ ID NO: 13120 - protein, 7 aa, synthetic construct
FNGRTSY

SEQ ID NO: 13121 - protein, 7 aa, synthetic construct
YNRLSDN

SEQ ID NO: 13122 - protein, 7 aa, synthetic construct
FAKGGTN

SEQ ID NO: 13123 - protein, 7 aa, synthetic construct
ASGTSPW

SEQ ID NO: 13124 - protein, 7 aa, synthetic construct
FSRSNEN

SEQ ID NO: 13125 - protein, 7 aa, synthetic construct
GRSGNAA

SEQ ID NO: 13126 - protein, 7 aa, synthetic construct
FSRHGFN

SEQ ID NO: 13127 - protein, 7 aa, synthetic construct
YNSTEGR

SEQ ID NO: 13128 - protein, 7 aa, synthetic construct
QQPSHLW

SEQ ID NO: 13129 - protein, 7 aa, synthetic construct
DGDRGGW

SEQ ID NO: 13130 - protein, 7 aa, synthetic construct
FAKSGDN

SEQ ID NO: 13131 - protein, 7 aa, synthetic construct
YAKEGCN

SEQ ID NO: 13132 - protein, 7 aa, synthetic construct
MRNDGYG

SEQ ID NO: 13133 - protein, 7 aa, synthetic construct
VNGGSKY

SEQ ID NO: 13134 - protein, 7 aa, synthetic construct
ITEGLKW

SEQ ID NO: 13135 - protein, 7 aa, synthetic construct
WLAGPSA

SEQ ID NO: 13136 - protein, 7 aa, synthetic construct
NGQGSTW

SEQ ID NO: 13137 - protein, 7 aa, synthetic construct
FARTNDN

SEQ ID NO: 13138 - protein, 7 aa, synthetic construct
RYHDSYA

SEQ ID NO: 13139 - protein, 7 aa, synthetic construct
RQSINGY

SEQ ID NO: 13140 - protein, 7 aa, synthetic construct
QAERGYD

SEQ ID NO: 13141 - protein, 7 aa, synthetic construct
FARFGAN

SEQ ID NO: 13142 - protein, 7 aa, synthetic construct
TRQGISA

SEQ ID NO: 13143 - protein, 7 aa, synthetic construct
YVRNDHS

SEQ ID NO: 13144 - protein, 7 aa, synthetic construct
DMNNNKW

SEQ ID NO: 13145 - protein, 7 aa, synthetic construct
FVRSDSN

SEQ ID NO: 13146 - protein, 7 aa, synthetic construct
YSRDGFN

SEQ ID NO: 13147 - protein, 7 aa, synthetic construct
YARDGHN

SEQ ID NO: 13148 - protein, 7 aa, synthetic construct
FSKAGEN

SEQ ID NO: 13149 - protein, 7 aa, synthetic construct
GNEGYWD

SEQ ID NO: 13150 - protein, 7 aa, synthetic construct
NSLGTGA

SEQ ID NO: 13151 - protein, 7 aa, synthetic construct
YAKHGEN

SEQ ID NO: 13152 - protein, 7 aa, synthetic construct
WGSSSSY

SEQ ID NO: 13153 - protein, 7 aa, synthetic construct
YSREGLN

SEQ ID NO: 13154 - protein, 7 aa, synthetic construct
YSRENWN

SEQ ID NO: 13155 - protein, 7 aa, synthetic construct
LTSTHGM

SEQ ID NO: 13156 - protein, 7 aa, synthetic construct
NTGTSSY

SEQ ID NO: 13157 - protein, 7 aa, synthetic construct
YAKDGFN

SEQ ID NO: 13158 - protein, 7 aa, synthetic construct
QPLGGYD

SEQ ID NO: 13159 - protein, 7 aa, synthetic construct
EYGGGKY

SEQ ID NO: 13160 - protein, 7 aa, synthetic construct
FSRQGEN

SEQ ID NO: 13161 - protein, 7 aa, synthetic construct
LWNATAP

SEQ ID NO: 13162 - protein, 7 aa, synthetic construct
YAKQNEN

SEQ ID NO: 13163 - protein, 7 aa, synthetic construct
NFSGQNA

SEQ ID NO: 13164 - protein, 7 aa, synthetic construct
NNGHMAY

SEQ ID NO: 13165 - protein, 7 aa, synthetic construct
FSKIGEN

SEQ ID NO: 13166 - protein, 7 aa, synthetic construct
FSKINPN

SEQ ID NO: 13167 - protein, 7 aa, synthetic construct
GGGTSPY

SEQ ID NO: 13168 - protein, 7 aa, synthetic construct
GNGGTHW

SEQ ID NO: 13169 - protein, 7 aa, synthetic construct
YSRDNWN

SEQ ID NO: 13170 - protein, 7 aa, synthetic construct
IGSANGV

SEQ ID NO: 13171 - protein, 7 aa, synthetic construct
WSRLENN

SEQ ID NO: 13172 - protein, 7 aa, synthetic construct
GSSNEKW

SEQ ID NO: 13173 - protein, 7 aa, synthetic construct
YSRENHN

SEQ ID NO: 13174 - protein, 7 aa, synthetic construct
YARPGQN

SEQ ID NO: 13175 - protein, 7 aa, synthetic construct
NEGRGYA

SEQ ID NO: 13176 - protein, 7 aa, synthetic construct
LSKSSLD

SEQ ID NO: 13177 - protein, 7 aa, synthetic construct
YSKEGWN

SEQ ID NO: 13178 - protein, 7 aa, synthetic construct
ESSGSSW

SEQ ID NO: 13179 - protein, 7 aa, synthetic construct
YARDGAN

SEQ ID NO: 13180 - protein, 7 aa, synthetic construct
FAKEGWN

SEQ ID NO: 13181 - protein, 7 aa, synthetic construct
YSRLGEN

SEQ ID NO: 13182 - protein, 7 aa, synthetic construct
FAREGFN

SEQ ID NO: 13183 - protein, 7 aa, synthetic construct
GIYDTMP

SEQ ID NO: 13184 - protein, 7 aa, synthetic construct
EALSDRG

SEQ ID NO: 13185 - protein, 7 aa, synthetic construct
YFELRSN

SEQ ID NO: 13186 - protein, 7 aa, synthetic construct
HGTGTHF

SEQ ID NO: 13187 - protein, 7 aa, synthetic construct
IQGTTYA

SEQ ID NO: 13188 - protein, 7 aa, synthetic construct
FSKHNDN

SEQ ID NO: 13189 - protein, 7 aa, synthetic construct
GSASTQW

SEQ ID NO: 13190 - protein, 7 aa, synthetic construct
YSKTNEN

SEQ ID NO: 13191 - protein, 7 aa, synthetic construct
MPSPNFG

SEQ ID NO: 13192 - protein, 7 aa, synthetic construct
YKTGTMY

SEQ ID NO: 13193 - protein, 7 aa, synthetic construct
FSKLGEN

SEQ ID NO: 13194 - protein, 7 aa, synthetic construct
VSGTHGV

SEQ ID NO: 13195 - protein, 7 aa, synthetic construct
YVHSNSN

SEQ ID NO: 13196 - protein, 7 aa, synthetic construct
YSRLDET

SEQ ID NO: 13197 - protein, 7 aa, synthetic construct
YAKLGTN

SEQ ID NO: 13198 - protein, 7 aa, synthetic construct
NMNGYGQ

SEQ ID NO: 13199 - protein, 7 aa, synthetic construct
YARMGTN

SEQ ID NO: 13200 - protein, 7 aa, synthetic construct
YARDGNN

SEQ ID NO: 13201 - protein, 7 aa, synthetic construct
GEERSKW

SEQ ID NO: 13202 - protein, 7 aa, synthetic construct
MANHVTY

SEQ ID NO: 13203 - protein, 7 aa, synthetic construct
YASGSNG

SEQ ID NO: 13204 - protein, 7 aa, synthetic construct
RDHTSTY

SEQ ID NO: 13205 - protein, 7 aa, synthetic construct
VGGNSTY

SEQ ID NO: 13206 - protein, 7 aa, synthetic construct
YAREGMN

SEQ ID NO: 13207 - protein, 7 aa, synthetic construct
NSGNSSY

SEQ ID NO: 13208 - protein, 7 aa, synthetic construct
VSNKSAG

SEQ ID NO: 13209 - protein, 7 aa, synthetic construct
INGVHMV

SEQ ID NO: 13210 - protein, 7 aa, synthetic construct
YHGGAPV

SEQ ID NO: 13211 - protein, 7 aa, synthetic construct
YHRSFDP

SEQ ID NO: 13212 - protein, 7 aa, synthetic construct
YYTGLQA

SEQ ID NO: 13213 - protein, 7 aa, synthetic construct
FDGTRPY

SEQ ID NO: 13214 - protein, 7 aa, synthetic construct
KSEYYSD

SEQ ID NO: 13215 - protein, 7 aa, synthetic construct
NVDYARN

SEQ ID NO: 13216 - protein, 7 aa, synthetic construct
NAIGVTW

SEQ ID NO: 13217 - protein, 7 aa, synthetic construct
INGHSNY

SEQ ID NO: 13218 - protein, 7 aa, synthetic construct
ITGYAQF

SEQ ID NO: 13219 - protein, 7 aa, synthetic construct
FSRYNDN

SEQ ID NO: 13220 - protein, 7 aa, synthetic construct
FAKFGTN

SEQ ID NO: 13221 - protein, 7 aa, synthetic construct
YSRFGPN

SEQ ID NO: 13222 - protein, 7 aa, synthetic construct
YSRYNPN

SEQ ID NO: 13223 - protein, 7 aa, synthetic construct
FARYGPN

SEQ ID NO: 13224 - protein, 7 aa, synthetic construct
YARFGMN

SEQ ID NO: 13225 - protein, 7 aa, synthetic construct
GSYNTTY

SEQ ID NO: 13226 - protein, 7 aa, synthetic construct
LAQSGPN

SEQ ID NO: 13227 - protein, 7 aa, synthetic construct
TSGNSTY

SEQ ID NO: 13228 - protein, 7 aa, synthetic construct
RENNGSW

SEQ ID NO: 13229 - protein, 7 aa, synthetic construct
MQYDSGD

SEQ ID NO: 13230 - protein, 7 aa, synthetic construct
YAKYGEN

SEQ ID NO: 13231 - protein, 7 aa, synthetic construct
IDGRNYA

SEQ ID NO: 13232 - protein, 7 aa, synthetic construct
LWNGEQA

SEQ ID NO: 13233 - protein, 7 aa, synthetic construct
QEGGSRY

SEQ ID NO: 13234 - protein, 7 aa, synthetic construct
YFTHTGE

SEQ ID NO: 13235 - protein, 7 aa, synthetic construct
FSRMGEN

SEQ ID NO: 13236 - protein, 7 aa, synthetic construct
HDNQSKY

SEQ ID NO: 13237 - protein, 7 aa, synthetic construct
YVSGTMN

SEQ ID NO: 13238 - protein, 7 aa, synthetic construct
WYAGTHE

SEQ ID NO: 13239 - protein, 7 aa, synthetic construct
AGSSVGW

SEQ ID NO: 13240 - protein, 7 aa, synthetic construct
LPRAGDF

SEQ ID NO: 13241 - protein, 7 aa, synthetic construct
EAQGMRN

SEQ ID NO: 13242 - protein, 7 aa, synthetic construct
EGSMTKW

SEQ ID NO: 13243 - protein, 7 aa, synthetic construct
YAKTNEN

SEQ ID NO: 13244 - protein, 7 aa, synthetic construct
YAREGLN

SEQ ID NO: 13245 - protein, 7 aa, synthetic construct
SQGNTNW

SEQ ID NO: 13246 - protein, 7 aa, synthetic construct
LDSSVRY

SEQ ID NO: 13247 - protein, 7 aa, synthetic construct
FARLGYN

SEQ ID NO: 13248 - protein, 7 aa, synthetic construct
NIKWDPH

SEQ ID NO: 13249 - protein, 7 aa, synthetic construct
EGNGTRN

SEQ ID NO: 13250 - protein, 7 aa, synthetic construct
NIPGLIY

SEQ ID NO: 13251 - protein, 7 aa, synthetic construct
YARMNEN

SEQ ID NO: 13252 - protein, 7 aa, synthetic construct
ADAYKTY

SEQ ID NO: 13253 - protein, 7 aa, synthetic construct
FSKNGWN

SEQ ID NO: 13254 - protein, 7 aa, synthetic construct
GISTNGR

SEQ ID NO: 13255 - protein, 7 aa, synthetic construct
YSRFGDN

SEQ ID NO: 13256 - protein, 7 aa, synthetic construct
YSRFGGN

SEQ ID NO: 13257 - protein, 7 aa, synthetic construct
FSKNNWN

SEQ ID NO: 13258 - protein, 7 aa, synthetic construct
YSKFGYN

SEQ ID NO: 13259 - protein, 7 aa, synthetic construct
YARWGEN

SEQ ID NO: 13260 - protein, 7 aa, synthetic construct
FARFGSN

SEQ ID NO: 13261 - protein, 7 aa, synthetic construct
QTGTSPY

SEQ ID NO: 13262 - protein, 7 aa, synthetic construct
NNIDVRW

SEQ ID NO: 13263 - protein, 7 aa, synthetic construct
YSRENIN

SEQ ID NO: 13264 - protein, 7 aa, synthetic construct
QNNGSPY

SEQ ID NO: 13265 - protein, 7 aa, synthetic construct
LNSLAAY

SEQ ID NO: 13266 - protein, 7 aa, synthetic construct
SNGGTTW

SEQ ID NO: 13267 - protein, 7 aa, synthetic construct
YSNIGPN

SEQ ID NO: 13268 - protein, 7 aa, synthetic construct
SGGTALY

SEQ ID NO: 13269 - protein, 7 aa, synthetic construct
RAGMPGA

SEQ ID NO: 13270 - protein, 7 aa, synthetic construct
YSKENWN

SEQ ID NO: 13271 - protein, 7 aa, synthetic construct
TRAGNGA

SEQ ID NO: 13272 - protein, 7 aa, synthetic construct
NQGNNTW

SEQ ID NO: 13273 - protein, 7 aa, synthetic construct
IEYHSGN

SEQ ID NO: 13274 - protein, 7 aa, synthetic construct
VSGSSAY

SEQ ID NO: 13275 - protein, 7 aa, synthetic construct
YARENYN

SEQ ID NO: 13276 - protein, 7 aa, synthetic construct
RQADTYP

SEQ ID NO: 13277 - protein, 7 aa, synthetic construct
DSSGQRY

SEQ ID NO: 13278 - protein, 7 aa, synthetic construct
GIQNQSW

SEQ ID NO: 13279 - protein, 7 aa, synthetic construct
VGGNSGY

SEQ ID NO: 13280 - protein, 7 aa, synthetic construct
VGNGSLY

SEQ ID NO: 13281 - protein, 7 aa, synthetic construct
GGGVAHY

SEQ ID NO: 13282 - protein, 7 aa, synthetic construct
TGSSTSW

SEQ ID NO: 13283 - protein, 7 aa, synthetic construct
YSRDNHN

SEQ ID NO: 13284 - protein, 7 aa, synthetic construct
VQYESRD

SEQ ID NO: 13285 - protein, 7 aa, synthetic construct
SGNGSFI

SEQ ID NO: 13286 - protein, 7 aa, synthetic construct
YTSNTKY

SEQ ID NO: 13287 - protein, 7 aa, synthetic construct
YSKGGDN

SEQ ID NO: 13288 - protein, 7 aa, synthetic construct
YHDNGRN

SEQ ID NO: 13289 - protein, 7 aa, synthetic construct
SAGNSTY

SEQ ID NO: 13290 - protein, 7 aa, synthetic construct
SGTGNGW

SEQ ID NO: 13291 - protein, 7 aa, synthetic construct
YSRPNEN

SEQ ID NO: 13292 - protein, 7 aa, synthetic construct
TNEWGGH

SEQ ID NO: 13293 - protein, 7 aa, synthetic construct
RPPEYNS

SEQ ID NO: 13294 - protein, 7 aa, synthetic construct
ITNYHHE

SEQ ID NO: 13295 - protein, 7 aa, synthetic construct
NGTSSGW

SEQ ID NO: 13296 - protein, 7 aa, synthetic construct
TMSNTYS

SEQ ID NO: 13297 - protein, 7 aa, synthetic construct
YSGSQHY

SEQ ID NO: 13298 - protein, 7 aa, synthetic construct
YSREGIN

SEQ ID NO: 13299 - protein, 7 aa, synthetic construct
RNETSAY

SEQ ID NO: 13300 - protein, 7 aa, synthetic construct
RDGYNGF

SEQ ID NO: 13301 - protein, 7 aa, synthetic construct
YAREGIN

SEQ ID NO: 13302 - protein, 7 aa, synthetic construct
GLGGNPY

SEQ ID NO: 13303 - protein, 7 aa, synthetic construct
VNINTAW

SEQ ID NO: 13304 - protein, 7 aa, synthetic construct
YWDSTHS

SEQ ID NO: 13305 - protein, 7 aa, synthetic construct
YSKDNMN

SEQ ID NO: 13306 - protein, 7 aa, synthetic construct
DKNTSNW

SEQ ID NO: 13307 - protein, 7 aa, synthetic construct
FSKHNEN

SEQ ID NO: 13308 - protein, 7 aa, synthetic construct
FSSTNGT

SEQ ID NO: 13309 - protein, 7 aa, synthetic construct
YAKVGEN

SEQ ID NO: 13310 - protein, 7 aa, synthetic construct
FSRLGAN

SEQ ID NO: 13311 - protein, 7 aa, synthetic construct
STGISSY

SEQ ID NO: 13312 - protein, 7 aa, synthetic construct
YSKENCN

SEQ ID NO: 13313 - protein, 7 aa, synthetic construct
NSGAASW

SEQ ID NO: 13314 - protein, 7 aa, synthetic construct
YARDGLN

SEQ ID NO: 13315 - protein, 7 aa, synthetic construct
LLSNQTW

SEQ ID NO: 13316 - protein, 7 aa, synthetic construct
YSRDGNN

SEQ ID NO: 13317 - protein, 7 aa, synthetic construct
YSKEGFN

SEQ ID NO: 13318 - protein, 7 aa, synthetic construct
YAKEGFN

SEQ ID NO: 13319 - protein, 7 aa, synthetic construct
YSRTNSD

SEQ ID NO: 13320 - protein, 7 aa, synthetic construct
VASDHGR

SEQ ID NO: 13321 - protein, 7 aa, synthetic construct
TNEGSAW

SEQ ID NO: 13322 - protein, 7 aa, synthetic construct
NDKGYGS

SEQ ID NO: 13323 - protein, 7 aa, synthetic construct
NNYGTPF

SEQ ID NO: 13324 - protein, 7 aa, synthetic construct
EISRGHM

SEQ ID NO: 13325 - protein, 7 aa, synthetic construct
EEFGQRN

SEQ ID NO: 13326 - protein, 7 aa, synthetic construct
TMTGFGA

SEQ ID NO: 13327 - protein, 7 aa, synthetic construct
NINGTGR

SEQ ID NO: 13328 - protein, 7 aa, synthetic construct
GAGSSSY

SEQ ID NO: 13329 - protein, 7 aa, synthetic construct
RNDEAKW

SEQ ID NO: 13330 - protein, 7 aa, synthetic construct
LHATQPN

SEQ ID NO: 13331 - protein, 7 aa, synthetic construct
WNTGVHY

SEQ ID NO: 13332 - protein, 7 aa, synthetic construct
SAGTSSY

SEQ ID NO: 13333 - protein, 7 aa, synthetic construct
TGEAPRN

SEQ ID NO: 13334 - protein, 7 aa, synthetic construct
DYQGTNP

SEQ ID NO: 13335 - protein, 7 aa, synthetic construct
GISMIMP

SEQ ID NO: 13336 - protein, 7 aa, synthetic construct
EKNTGWD

SEQ ID NO: 13337 - protein, 7 aa, synthetic construct
YSKFGNN

SEQ ID NO: 13338 - protein, 7 aa, synthetic construct
YSRENVN

SEQ ID NO: 13339 - protein, 7 aa, synthetic construct
SSEGTRY

SEQ ID NO: 13340 - protein, 7 aa, synthetic construct
TPKSNYA

SEQ ID NO: 13341 - protein, 7 aa, synthetic construct
DNRGTGS

SEQ ID NO: 13342 - protein, 7 aa, synthetic construct
LANSHWD

SEQ ID NO: 13343 - protein, 7 aa, synthetic construct
EGGKSPY

SEQ ID NO: 13344 - protein, 7 aa, synthetic construct
HGESAGW

SEQ ID NO: 13345 - protein, 7 aa, synthetic construct
ISQERYG

SEQ ID NO: 13346 - protein, 7 aa, synthetic construct
YSKDNYN

SEQ ID NO: 13347 - protein, 7 aa, synthetic construct
FSRDNPN

SEQ ID NO: 13348 - protein, 7 aa, synthetic construct
FARDNFN

SEQ ID NO: 13349 - protein, 7 aa, synthetic construct
FAKFGAN

SEQ ID NO: 13350 - protein, 7 aa, synthetic construct
NMYPTPG

SEQ ID NO: 13351 - protein, 7 aa, synthetic construct
YSRFGAN

SEQ ID NO: 13352 - protein, 7 aa, synthetic construct
FSRFGNN

SEQ ID NO: 13353 - protein, 7 aa, synthetic construct
YSKWGTN

SEQ ID NO: 13354 - protein, 7 aa, synthetic construct
YSRWGEN

SEQ ID NO: 13355 - protein, 7 aa, synthetic construct
FAKWGQN

SEQ ID NO: 13356 - protein, 7 aa, synthetic construct
NQSPIPV

SEQ ID NO: 13357 - protein, 7 aa, synthetic construct
GGNTSTY

SEQ ID NO: 13358 - protein, 7 aa, synthetic construct
RAVDAYS

SEQ ID NO: 13359 - protein, 7 aa, synthetic construct
TMGTNPY

SEQ ID NO: 13360 - protein, 7 aa, synthetic construct
DNRNVAW

SEQ ID NO: 13361 - protein, 7 aa, synthetic construct
KSVDYGS

SEQ ID NO: 13362 - protein, 7 aa, synthetic construct
GNSGANW

SEQ ID NO: 13363 - protein, 7 aa, synthetic construct
YEQGWRD

SEQ ID NO: 13364 - protein, 7 aa, synthetic construct
DNGNARY

SEQ ID NO: 13365 - protein, 7 aa, synthetic construct
YMGGEMV

SEQ ID NO: 13366 - protein, 7 aa, synthetic construct
DFGSNGR

SEQ ID NO: 13367 - protein, 7 aa, synthetic construct
GQDYSTY

SEQ ID NO: 13368 - protein, 7 aa, synthetic construct
NAYGVPR

SEQ ID NO: 13369 - protein, 7 aa, synthetic construct
SAESYRN

SEQ ID NO: 13370 - protein, 7 aa, synthetic construct
YTHFEFD

SEQ ID NO: 13371 - protein, 7 aa, synthetic construct
RSQDTAW

SEQ ID NO: 13372 - protein, 7 aa, synthetic construct
ISGATAG

SEQ ID NO: 13373 - protein, 7 aa, synthetic construct
YSRDGAN

SEQ ID NO: 13374 - protein, 7 aa, synthetic construct
YAKWGQN

SEQ ID NO: 13375 - protein, 7 aa, synthetic construct
GGGATAY

SEQ ID NO: 13376 - protein, 7 aa, synthetic construct
FSRENPN

SEQ ID NO: 13377 - protein, 7 aa, synthetic construct
LKYEHAD

SEQ ID NO: 13378 - protein, 7 aa, synthetic construct
NVSELRW

SEQ ID NO: 13379 - protein, 7 aa, synthetic construct
YQSGEMN

SEQ ID NO: 13380 - protein, 7 aa, synthetic construct
YSRENDN

SEQ ID NO: 13381 - protein, 7 aa, synthetic construct
TRTGDGA

SEQ ID NO: 13382 - protein, 7 aa, synthetic construct
WRQGEME

SEQ ID NO: 13383 - protein, 7 aa, synthetic construct
VGTIGRD

SEQ ID NO: 13384 - protein, 7 aa, synthetic construct
SSTGNGW

SEQ ID NO: 13385 - protein, 7 aa, synthetic construct
RGETSTY

SEQ ID NO: 13386 - protein, 7 aa, synthetic construct
YSKWGEN

SEQ ID NO: 13387 - protein, 7 aa, synthetic construct
HDAKSMY

SEQ ID NO: 13388 - protein, 7 aa, synthetic construct
DTDHMRF

SEQ ID NO: 13389 - protein, 7 aa, synthetic construct
RSDGGYG

SEQ ID NO: 13390 - protein, 7 aa, synthetic construct
FSRDGPN

SEQ ID NO: 13391 - protein, 7 aa, synthetic construct
TTGSNPF

SEQ ID NO: 13392 - protein, 7 aa, synthetic construct
FARAGEN

SEQ ID NO: 13393 - protein, 7 aa, synthetic construct
HSKNNDN

SEQ ID NO: 13394 - protein, 7 aa, synthetic construct
YIRHETQ

SEQ ID NO: 13395 - protein, 7 aa, synthetic construct
NGSQSSY

SEQ ID NO: 13396 - protein, 7 aa, synthetic construct
YSGGGMP

SEQ ID NO: 13397 - protein, 7 aa, synthetic construct
MGSSNAW

SEQ ID NO: 13398 - protein, 7 aa, synthetic construct
NLQASSW

SEQ ID NO: 13399 - protein, 7 aa, synthetic construct
FSRYNAN

SEQ ID NO: 13400 - protein, 7 aa, synthetic construct
KGADVYP

SEQ ID NO: 13401 - protein, 7 aa, synthetic construct
VDSTSGR

SEQ ID NO: 13402 - protein, 7 aa, synthetic construct
NMHGIPM

SEQ ID NO: 13403 - protein, 7 aa, synthetic construct
LATTTNW

SEQ ID NO: 13404 - protein, 7 aa, synthetic construct
YVMENRN

SEQ ID NO: 13405 - protein, 7 aa, synthetic construct
YSRDGWN

SEQ ID NO: 13406 - protein, 7 aa, synthetic construct
YSRDGDN

SEQ ID NO: 13407 - protein, 7 aa, synthetic construct
VHDSGGR

SEQ ID NO: 13408 - protein, 7 aa, synthetic construct
FARDGPN

SEQ ID NO: 13409 - protein, 7 aa, synthetic construct
FSRENIN

SEQ ID NO: 13410 - protein, 7 aa, synthetic construct
GLKNYPA

SEQ ID NO: 13411 - protein, 7 aa, synthetic construct
YSREGTN

SEQ ID NO: 13412 - protein, 7 aa, synthetic construct
VSPSSVW

SEQ ID NO: 13413 - protein, 7 aa, synthetic construct
GIPNIAY

SEQ ID NO: 13414 - protein, 7 aa, synthetic construct
EGHNGRD

SEQ ID NO: 13415 - protein, 7 aa, synthetic construct
DSTSVTW

SEQ ID NO: 13416 - protein, 7 aa, synthetic construct
GSGLVAY

SEQ ID NO: 13417 - protein, 7 aa, synthetic construct
MSGQGAG

SEQ ID NO: 13418 - protein, 7 aa, synthetic construct
MKNGDAS

SEQ ID NO: 13419 - protein, 7 aa, synthetic construct
RDDVSAY

SEQ ID NO: 13420 - protein, 7 aa, synthetic construct
HWASNGM

SEQ ID NO: 13421 - protein, 7 aa, synthetic construct
YAVSGAG

SEQ ID NO: 13422 - protein, 7 aa, synthetic construct
LDGFSAR

SEQ ID NO: 13423 - protein, 7 aa, synthetic construct
EQWGNGD

SEQ ID NO: 13424 - protein, 7 aa, synthetic construct
YAKFGHN

SEQ ID NO: 13425 - protein, 7 aa, synthetic construct
NVDGMAW

SEQ ID NO: 13426 - protein, 7 aa, synthetic construct
SNPGSVY

SEQ ID NO: 13427 - protein, 7 aa, synthetic construct
YSNLSMP

SEQ ID NO: 13428 - protein, 7 aa, synthetic construct
RQVDVYA

SEQ ID NO: 13429 - protein, 7 aa, synthetic construct
IDGTNGR

SEQ ID NO: 13430 - protein, 7 aa, synthetic construct
LHGGPAP

SEQ ID NO: 13431 - protein, 7 aa, synthetic construct
YAKDGMN

SEQ ID NO: 13432 - protein, 7 aa, synthetic construct
SSGESLY

SEQ ID NO: 13433 - protein, 7 aa, synthetic construct
RDPGYVV

SEQ ID NO: 13434 - protein, 7 aa, synthetic construct
QGGTTSY

SEQ ID NO: 13435 - protein, 7 aa, synthetic construct
FSREGWN

SEQ ID NO: 13436 - protein, 7 aa, synthetic construct
YARFGAN

SEQ ID NO: 13437 - protein, 7 aa, synthetic construct
TSASNGV

SEQ ID NO: 13438 - protein, 7 aa, synthetic construct
TNPNVAW

SEQ ID NO: 13439 - protein, 7 aa, synthetic construct
YARDNYN

SEQ ID NO: 13440 - protein, 7 aa, synthetic construct
FSRFGQN

SEQ ID NO: 13441 - protein, 7 aa, synthetic construct
GERLVTY

SEQ ID NO: 13442 - protein, 7 aa, synthetic construct
TPLSPSW

SEQ ID NO: 13443 - protein, 7 aa, synthetic construct
FSRYGEN

SEQ ID NO: 13444 - protein, 7 aa, synthetic construct
FARLGDN

SEQ ID NO: 13445 - protein, 7 aa, synthetic construct
YSRENEN

SEQ ID NO: 13446 - protein, 7 aa, synthetic construct
FARDNMN

SEQ ID NO: 13447 - protein, 7 aa, synthetic construct
VGEAGYF

SEQ ID NO: 13448 - protein, 7 aa, synthetic construct
YARFGQN

SEQ ID NO: 13449 - protein, 7 aa, synthetic construct
FSRFGEN

SEQ ID NO: 13450 - protein, 7 aa, synthetic construct
LKDGRSA

SEQ ID NO: 13451 - protein, 7 aa, synthetic construct
IATRGID

SEQ ID NO: 13452 - protein, 7 aa, synthetic construct
ADSASSW

SEQ ID NO: 13453 - protein, 7 aa, synthetic construct
NQPGSHM

SEQ ID NO: 13454 - protein, 7 aa, synthetic construct
FARPGHN

SEQ ID NO: 13455 - protein, 7 aa, synthetic construct
FSRYGDN

SEQ ID NO: 13456 - protein, 7 aa, synthetic construct
YARDGGN

SEQ ID NO: 13457 - protein, 7 aa, synthetic construct
SGSSTGY

SEQ ID NO: 13458 - protein, 7 aa, synthetic construct
GNGAGYS

SEQ ID NO: 13459 - protein, 7 aa, synthetic construct
NHSGDPS

SEQ ID NO: 13460 - protein, 7 aa, synthetic construct
EDGKGGW

SEQ ID NO: 13461 - protein, 7 aa, synthetic construct
YSKDNGN

SEQ ID NO: 13462 - protein, 7 aa, synthetic construct
YSRFGVN

SEQ ID NO: 13463 - protein, 7 aa, synthetic construct
NTYGTGE

SEQ ID NO: 13464 - protein, 7 aa, synthetic construct
FSPNVVF

SEQ ID NO: 13465 - protein, 7 aa, synthetic construct
YSKEGMN

SEQ ID NO: 13466 - protein, 7 aa, synthetic construct
NGEAGRY

SEQ ID NO: 13467 - protein, 7 aa, synthetic construct
LEGQYGN

SEQ ID NO: 13468 - protein, 7 aa, synthetic construct
FSKENGN

SEQ ID NO: 13469 - protein, 7 aa, synthetic construct
ALEGHSW

SEQ ID NO: 13470 - protein, 7 aa, synthetic construct
YAKENPN

SEQ ID NO: 13471 - protein, 7 aa, synthetic construct
YAKFGAN

SEQ ID NO: 13472 - protein, 7 aa, synthetic construct
FSKDNAN

SEQ ID NO: 13473 - protein, 7 aa, synthetic construct
ANHDVGW

SEQ ID NO: 13474 - protein, 7 aa, synthetic construct
EPPSLRY

SEQ ID NO: 13475 - protein, 7 aa, synthetic construct
GSNDSRY

SEQ ID NO: 13476 - protein, 7 aa, synthetic construct
FSKFGSN

SEQ ID NO: 13477 - protein, 7 aa, synthetic construct
GLKDSAW

SEQ ID NO: 13478 - protein, 7 aa, synthetic construct
SKEHGYA

SEQ ID NO: 13479 - protein, 7 aa, synthetic construct
YSRDNLN

SEQ ID NO: 13480 - protein, 7 aa, synthetic construct
FSKFGLN

SEQ ID NO: 13481 - protein, 7 aa, synthetic construct
IQYENGG

SEQ ID NO: 13482 - protein, 7 aa, synthetic construct
GYNYSGA

SEQ ID NO: 13483 - protein, 7 aa, synthetic construct
IMSADAW

SEQ ID NO: 13484 - protein, 7 aa, synthetic construct
YSRFGEN

SEQ ID NO: 13485 - protein, 7 aa, synthetic construct
DMKGNVA

SEQ ID NO: 13486 - protein, 7 aa, synthetic construct
FAKFGSN

SEQ ID NO: 13487 - protein, 7 aa, synthetic construct
TSDRDGR

SEQ ID NO: 13488 - protein, 7 aa, synthetic construct
NHAGNGA

SEQ ID NO: 13489 - protein, 7 aa, synthetic construct
NEASGGW

SEQ ID NO: 13490 - protein, 7 aa, synthetic construct
FSKFGQN

SEQ ID NO: 13491 - protein, 7 aa, synthetic construct
NMTGNGA

SEQ ID NO: 13492 - protein, 7 aa, synthetic construct
NGTGATY

SEQ ID NO: 13493 - protein, 7 aa, synthetic construct
YSKFGTN

SEQ ID NO: 13494 - protein, 7 aa, synthetic construct
ASIDGPK

SEQ ID NO: 13495 - protein, 7 aa, synthetic construct
SDRGSGA

SEQ ID NO: 13496 - protein, 7 aa, synthetic construct
YSKFGEN

SEQ ID NO: 13497 - protein, 7 aa, synthetic construct
FMSSNGA

SEQ ID NO: 13498 - protein, 7 aa, synthetic construct
FSKENYN

SEQ ID NO: 13499 - protein, 7 aa, synthetic construct
YTNYNGA

SEQ ID NO: 13500 - protein, 7 aa, synthetic construct
WRDSNGA

SEQ ID NO: 13501 - protein, 7 aa, synthetic construct
YAKWGTN

SEQ ID NO: 13502 - protein, 7 aa, synthetic construct
FAKWGEN

SEQ ID NO: 13503 - protein, 7 aa, synthetic construct
YFRDHAP

SEQ ID NO: 13504 - protein, 7 aa, synthetic construct
YARFGDN

SEQ ID NO: 13505 - protein, 7 aa, synthetic construct
TAYGDGA

SEQ ID NO: 13506 - protein, 7 aa, synthetic construct
YSRQNYN

SEQ ID NO: 13507 - protein, 7 aa, synthetic construct
YARMGYN

SEQ ID NO: 13508 - protein, 7 aa, synthetic construct
YARGNYN

SEQ ID NO: 13509 - protein, 7 aa, synthetic construct
YSRSNYN

SEQ ID NO: 13510 - protein, 7 aa, synthetic construct
YSRLNYN

SEQ ID NO: 13511 - protein, 7 aa, synthetic construct
FSRVNIN

SEQ ID NO: 13512 - protein, 7 aa, synthetic construct
YSRHGQN

SEQ ID NO: 13513 - protein, 7 aa, synthetic construct
YSRQGYN

SEQ ID NO: 13514 - protein, 7 aa, synthetic construct
FSRLGIN

SEQ ID NO: 13515 - protein, 7 aa, synthetic construct
YARMNIN

SEQ ID NO: 13516 - protein, 7 aa, synthetic construct
YSRANYN

SEQ ID NO: 13517 - protein, 7 aa, synthetic construct
YSRLNIN

SEQ ID NO: 13518 - protein, 7 aa, synthetic construct
FARGGYN

SEQ ID NO: 13519 - protein, 7 aa, synthetic construct
FSRANHN

SEQ ID NO: 13520 - protein, 7 aa, synthetic construct
FSRAGYN

SEQ ID NO: 13521 - protein, 7 aa, synthetic construct
FSKMNYN

SEQ ID NO: 13522 - protein, 7 aa, synthetic construct
FARLNIN

SEQ ID NO: 13523 - protein, 7 aa, synthetic construct
YSKQNIN

SEQ ID NO: 13524 - protein, 7 aa, synthetic construct
FARTNYN

SEQ ID NO: 13525 - protein, 7 aa, synthetic construct
YARIGYN

SEQ ID NO: 13526 - protein, 7 aa, synthetic construct
YSKLNNN

SEQ ID NO: 13527 - protein, 7 aa, synthetic construct
YAKFNYN

SEQ ID NO: 13528 - protein, 7 aa, synthetic construct
YARQNYN

SEQ ID NO: 13529 - protein, 7 aa, synthetic construct
FSRANYN

SEQ ID NO: 13530 - protein, 7 aa, synthetic construct
YAKAGYN

SEQ ID NO: 13531 - protein, 7 aa, synthetic construct
YSRTNIN

SEQ ID NO: 13532 - protein, 7 aa, synthetic construct
YSKMGYN

SEQ ID NO: 13533 - protein, 7 aa, synthetic construct
FSRINNN

SEQ ID NO: 13534 - protein, 7 aa, synthetic construct
FSRANIN

SEQ ID NO: 13535 - protein, 7 aa, synthetic construct
YSRLNNN

SEQ ID NO: 13536 - protein, 7 aa, synthetic construct
YARAGNN

SEQ ID NO: 13537 - protein, 7 aa, synthetic construct
YSKLNIN

SEQ ID NO: 13538 - protein, 7 aa, synthetic construct
FSRLNHN

SEQ ID NO: 13539 - protein, 7 aa, synthetic construct
YSRQNNN

SEQ ID NO: 13540 - protein, 7 aa, synthetic construct
FARIGPN

SEQ ID NO: 13541 - protein, 7 aa, synthetic construct
YSRGNYN

SEQ ID NO: 13542 - protein, 7 aa, synthetic construct
YARYGVN

SEQ ID NO: 13543 - protein, 7 aa, synthetic construct
YSRLNFN

SEQ ID NO: 13544 - protein, 7 aa, synthetic construct
YAKYGYN

SEQ ID NO: 13545 - protein, 7 aa, synthetic construct
YARMGFN

SEQ ID NO: 13546 - protein, 7 aa, synthetic construct
YSKANMN

SEQ ID NO: 13547 - protein, 7 aa, synthetic construct
FSKININ

SEQ ID NO: 13548 - protein, 7 aa, synthetic construct
YSRYNAN

SEQ ID NO: 13549 - protein, 7 aa, synthetic construct
YARAGYN

SEQ ID NO: 13550 - protein, 7 aa, synthetic construct
FSRAGNN

SEQ ID NO: 13551 - protein, 7 aa, synthetic construct
FSKIGYN

SEQ ID NO: 13552 - protein, 7 aa, synthetic construct
YSKHNYN

SEQ ID NO: 13553 - protein, 7 aa, synthetic construct
YARTGYN

SEQ ID NO: 13554 - protein, 7 aa, synthetic construct
YSRNGNN

SEQ ID NO: 13555 - protein, 7 aa, synthetic construct
YARGGYN

SEQ ID NO: 13556 - protein, 7 aa, synthetic construct
YSRAGYN

SEQ ID NO: 13557 - protein, 7 aa, synthetic construct
YAKTGYN

SEQ ID NO: 13558 - protein, 7 aa, synthetic construct
YSKGNCN

SEQ ID NO: 13559 - protein, 7 aa, synthetic construct
YAKMGYN

SEQ ID NO: 13560 - protein, 7 aa, synthetic construct
FARNGYN

SEQ ID NO: 13561 - protein, 7 aa, synthetic construct
FSRNNMN

SEQ ID NO: 13562 - protein, 7 aa, synthetic construct
YSRQNMN

SEQ ID NO: 13563 - protein, 7 aa, synthetic construct
YSRNNMN

SEQ ID NO: 13564 - protein, 7 aa, synthetic construct
YSKRNEN

SEQ ID NO: 13565 - protein, 7 aa, synthetic construct
YSKAGWN

SEQ ID NO: 13566 - protein, 7 aa, synthetic construct
YARHNFN

SEQ ID NO: 13567 - protein, 7 aa, synthetic construct
YARANYN

SEQ ID NO: 13568 - protein, 7 aa, synthetic construct
YARYGPN

SEQ ID NO: 13569 - protein, 7 aa, synthetic construct
FSRSGHN

SEQ ID NO: 13570 - protein, 7 aa, synthetic construct
YAKVGKN

SEQ ID NO: 13571 - protein, 7 aa, synthetic construct
YSRQNHN

SEQ ID NO: 13572 - protein, 7 aa, synthetic construct
FSRMNLN

SEQ ID NO: 13573 - protein, 7 aa, synthetic construct
FARSGYN

SEQ ID NO: 13574 - protein, 7 aa, synthetic construct
YAKHGHN

SEQ ID NO: 13575 - protein, 7 aa, synthetic construct
YARGGIN

SEQ ID NO: 13576 - protein, 7 aa, synthetic construct
FSKVGYN

SEQ ID NO: 13577 - protein, 7 aa, synthetic construct
YARQGYN

SEQ ID NO: 13578 - protein, 7 aa, synthetic construct
YAKYGPN

SEQ ID NO: 13579 - protein, 7 aa, synthetic construct
YSRHNPN

SEQ ID NO: 13580 - protein, 7 aa, synthetic construct
YSRVGIN

SEQ ID NO: 13581 - protein, 7 aa, synthetic construct
SGSYTNY

SEQ ID NO: 13582 - protein, 7 aa, synthetic construct
YARGNNN

SEQ ID NO: 13583 - protein, 7 aa, synthetic construct
YARVGNN

SEQ ID NO: 13584 - protein, 7 aa, synthetic construct
FSKSGYN

SEQ ID NO: 13585 - protein, 7 aa, synthetic construct
YAKVGYN

SEQ ID NO: 13586 - protein, 7 aa, synthetic construct
FSRLGHN

SEQ ID NO: 13587 - protein, 7 aa, synthetic construct
CAPAGRD

SEQ ID NO: 13588 - protein, 7 aa, synthetic construct
YSRSGFN

SEQ ID NO: 13589 - protein, 7 aa, synthetic construct
FSRVGPN

SEQ ID NO: 13590 - protein, 7 aa, synthetic construct
FSKFGPN

SEQ ID NO: 13591 - protein, 7 aa, synthetic construct
YSRHNFN

SEQ ID NO: 13592 - protein, 7 aa, synthetic construct
YARQGIN

SEQ ID NO: 13593 - protein, 7 aa, synthetic construct
YSKTGYN

SEQ ID NO: 13594 - protein, 7 aa, synthetic construct
YSRSGHN

SEQ ID NO: 13595 - protein, 7 aa, synthetic construct
FSRIGHN

SEQ ID NO: 13596 - protein, 7 aa, synthetic construct
YSRKNDN

SEQ ID NO: 13597 - protein, 7 aa, synthetic construct
YARNGYN

SEQ ID NO: 13598 - protein, 7 aa, synthetic construct
RGDGHYN

SEQ ID NO: 13599 - protein, 7 aa, synthetic construct
YSRTGYN

SEQ ID NO: 13600 - protein, 7 aa, synthetic construct
YSRHGIN

SEQ ID NO: 13601 - protein, 7 aa, synthetic construct
YSRANPN

SEQ ID NO: 13602 - protein, 7 aa, synthetic construct
YSRTNMN

SEQ ID NO: 13603 - protein, 7 aa, synthetic construct
YARSGIN

SEQ ID NO: 13604 - protein, 7 aa, synthetic construct
FSRLGNN

SEQ ID NO: 13605 - protein, 7 aa, synthetic construct
YHRLGID

SEQ ID NO: 13606 - protein, 7 aa, synthetic construct
YSRNGIN

SEQ ID NO: 13607 - protein, 7 aa, synthetic construct
YARLNNN

SEQ ID NO: 13608 - protein, 7 aa, synthetic construct
FSRANMN

SEQ ID NO: 13609 - protein, 7 aa, synthetic construct
YARGNMN

SEQ ID NO: 13610 - protein, 7 aa, synthetic construct
YARSNPN

SEQ ID NO: 13611 - protein, 7 aa, synthetic construct
YARYGNN

SEQ ID NO: 13612 - protein, 7 aa, synthetic construct
YSKHGYN

SEQ ID NO: 13613 - protein, 7 aa, synthetic construct
FARQGNN

SEQ ID NO: 13614 - protein, 7 aa, synthetic construct
LHKLLVG

SEQ ID NO: 13615 - protein, 7 aa, synthetic construct
FARTGIN

SEQ ID NO: 13616 - protein, 7 aa, synthetic construct
FARAGYN

SEQ ID NO: 13617 - protein, 7 aa, synthetic construct
FARQGPN

SEQ ID NO: 13618 - protein, 7 aa, synthetic construct
FARGGIN

SEQ ID NO: 13619 - protein, 7 aa, synthetic construct
FSRKNEN

SEQ ID NO: 13620 - protein, 7 aa, synthetic construct
YARLGNN

SEQ ID NO: 13621 - protein, 7 aa, synthetic construct
FARQGIN

SEQ ID NO: 13622 - protein, 7 aa, synthetic construct
YSKFNNN

SEQ ID NO: 13623 - protein, 7 aa, synthetic construct
FSRIGPN

SEQ ID NO: 13624 - protein, 7 aa, synthetic construct
YSRGGPN

SEQ ID NO: 13625 - protein, 7 aa, synthetic construct
YARFGPN

SEQ ID NO: 13626 - protein, 7 aa, synthetic construct
FSKMGYN

SEQ ID NO: 13627 - protein, 7 aa, synthetic construct
YSRSNHN

SEQ ID NO: 13628 - protein, 7 aa, synthetic construct
YARHNYN

SEQ ID NO: 13629 - protein, 7 aa, synthetic construct
YSKHGPN

SEQ ID NO: 13630 - protein, 7 aa, synthetic construct
FARVGYN

SEQ ID NO: 13631 - protein, 7 aa, synthetic construct
YARYGIN

SEQ ID NO: 13632 - protein, 7 aa, synthetic construct
YSRMGHN

SEQ ID NO: 13633 - protein, 7 aa, synthetic construct
YSRGNAN

SEQ ID NO: 13634 - protein, 7 aa, synthetic construct
FAKYGPN

SEQ ID NO: 13635 - protein, 7 aa, synthetic construct
YSRAGIN

SEQ ID NO: 13636 - protein, 7 aa, synthetic construct
YARTGIN

SEQ ID NO: 13637 - protein, 7 aa, synthetic construct
FSRTGYN

SEQ ID NO: 13638 - protein, 7 aa, synthetic construct
YSRAGFN

SEQ ID NO: 13639 - protein, 7 aa, synthetic construct
FSRANTN

SEQ ID NO: 13640 - protein, 7 aa, synthetic construct
YSRIGYN

SEQ ID NO: 13641 - protein, 7 aa, synthetic construct
YARMNNN

SEQ ID NO: 13642 - protein, 7 aa, synthetic construct
YSKRNDN

SEQ ID NO: 13643 - protein, 7 aa, synthetic construct
YAKVGWN

SEQ ID NO: 13644 - protein, 7 aa, synthetic construct
YARNANN

SEQ ID NO: 13645 - protein, 7 aa, synthetic construct
YARAGMN

SEQ ID NO: 13646 - protein, 7 aa, synthetic construct
YAKLNYN

SEQ ID NO: 13647 - protein, 7 aa, synthetic construct
YSRYGTN

SEQ ID NO: 13648 - protein, 7 aa, synthetic construct
FARGGHN

SEQ ID NO: 13649 - protein, 7 aa, synthetic construct
YSRVNYN

SEQ ID NO: 13650 - protein, 7 aa, synthetic construct
FSRHGSN

SEQ ID NO: 13651 - protein, 7 aa, synthetic construct
YIKSDKM

SEQ ID NO: 13652 - protein, 7 aa, synthetic construct
FARSGNN

SEQ ID NO: 13653 - protein, 7 aa, synthetic construct
FARSGIN

SEQ ID NO: 13654 - protein, 7 aa, synthetic construct
YSRTNFN

SEQ ID NO: 13655 - protein, 7 aa, synthetic construct
YARIGSN

SEQ ID NO: 13656 - protein, 7 aa, synthetic construct
FSKGNYN

SEQ ID NO: 13657 - protein, 7 aa, synthetic construct
YSKAGDN

SEQ ID NO: 13658 - protein, 7 aa, synthetic construct
TVDHVKW

SEQ ID NO: 13659 - protein, 7 aa, synthetic construct
YSRMGIN

SEQ ID NO: 13660 - protein, 7 aa, synthetic construct
YSKGGWN

SEQ ID NO: 13661 - protein, 7 aa, synthetic construct
YARGANN

SEQ ID NO: 13662 - protein, 7 aa, synthetic construct
YSRVNMN

SEQ ID NO: 13663 - protein, 7 aa, synthetic construct
FARQGHN

SEQ ID NO: 13664 - protein, 7 aa, synthetic construct
YSRIGIN

SEQ ID NO: 13665 - protein, 7 aa, synthetic construct
YSKHGIN

SEQ ID NO: 13666 - protein, 7 aa, synthetic construct
YARGNHN

SEQ ID NO: 13667 - protein, 7 aa, synthetic construct
YSRMNYN

SEQ ID NO: 13668 - protein, 7 aa, synthetic construct
YSRHNMN

SEQ ID NO: 13669 - protein, 7 aa, synthetic construct
YARHGIN

SEQ ID NO: 13670 - protein, 7 aa, synthetic construct
YSRMGSN

SEQ ID NO: 13671 - protein, 7 aa, synthetic construct
YSRINNN

SEQ ID NO: 13672 - protein, 7 aa, synthetic construct
FSKVGNN

SEQ ID NO: 13673 - protein, 7 aa, synthetic construct
YSKHGLN

SEQ ID NO: 13674 - protein, 7 aa, synthetic construct
YSRMGFN

SEQ ID NO: 13675 - protein, 7 aa, synthetic construct
YSRNNVN

SEQ ID NO: 13676 - protein, 7 aa, synthetic construct
YSRNNIN

SEQ ID NO: 13677 - protein, 7 aa, synthetic construct
YSRYGVN

SEQ ID NO: 13678 - protein, 7 aa, synthetic construct
FARHNIN

SEQ ID NO: 13679 - protein, 7 aa, synthetic construct
YSRHGSN

SEQ ID NO: 13680 - protein, 7 aa, synthetic construct
FSKHNNN

SEQ ID NO: 13681 - protein, 7 aa, synthetic construct
YARIGIN

SEQ ID NO: 13682 - protein, 7 aa, synthetic construct
YARHGHN

SEQ ID NO: 13683 - protein, 7 aa, synthetic construct
FSRQNNN

SEQ ID NO: 13684 - protein, 7 aa, synthetic construct
YSRHNVN

SEQ ID NO: 13685 - protein, 7 aa, synthetic construct
FARGNNN

SEQ ID NO: 13686 - protein, 7 aa, synthetic construct
FAKGGYN

SEQ ID NO: 13687 - protein, 7 aa, synthetic construct
FARQNIN

SEQ ID NO: 13688 - protein, 7 aa, synthetic construct
FSRLNVN

SEQ ID NO: 13689 - protein, 7 aa, synthetic construct
YSRTNPN

SEQ ID NO: 13690 - protein, 7 aa, synthetic construct
FSRAGIN

SEQ ID NO: 13691 - protein, 7 aa, synthetic construct
YSRINHN

SEQ ID NO: 13692 - protein, 7 aa, synthetic construct
YAASGRN

SEQ ID NO: 13693 - protein, 7 aa, synthetic construct
FSRQNYN

SEQ ID NO: 13694 - protein, 7 aa, synthetic construct
FSRMNVN

SEQ ID NO: 13695 - protein, 7 aa, synthetic construct
FARYGQN

SEQ ID NO: 13696 - protein, 7 aa, synthetic construct
FSRLNSN

SEQ ID NO: 13697 - protein, 7 aa, synthetic construct
YSKVNWN

SEQ ID NO: 13698 - protein, 7 aa, synthetic construct
YAKFGPN

SEQ ID NO: 13699 - protein, 7 aa, synthetic construct
YARGNLN

SEQ ID NO: 13700 - protein, 7 aa, synthetic construct
FSRTNNN

SEQ ID NO: 13701 - protein, 7 aa, synthetic construct
FSRSGYN

SEQ ID NO: 13702 - protein, 7 aa, synthetic construct
LHRAAGN

SEQ ID NO: 13703 - protein, 7 aa, synthetic construct
FARHGPN

SEQ ID NO: 13704 - protein, 7 aa, synthetic construct
YAKFNNN

SEQ ID NO: 13705 - protein, 7 aa, synthetic construct
NVAERKW

SEQ ID NO: 13706 - protein, 7 aa, synthetic construct
FARANNN

SEQ ID NO: 13707 - protein, 7 aa, synthetic construct
FSKIGNN

SEQ ID NO: 13708 - protein, 7 aa, synthetic construct
YARAGSN

SEQ ID NO: 13709 - protein, 7 aa, synthetic construct
YSRQGHN

SEQ ID NO: 13710 - protein, 7 aa, synthetic construct
FSRANSN

SEQ ID NO: 13711 - protein, 7 aa, synthetic construct
FARSANN

SEQ ID NO: 13712 - protein, 7 aa, synthetic construct
YSRQNLN

SEQ ID NO: 13713 - protein, 7 aa, synthetic construct
YAKGGIN

SEQ ID NO: 13714 - protein, 7 aa, synthetic construct
YARANHN

SEQ ID NO: 13715 - protein, 7 aa, synthetic construct
YSRLNHN

SEQ ID NO: 13716 - protein, 7 aa, synthetic construct
YSRANHN

SEQ ID NO: 13717 - protein, 7 aa, synthetic construct
YARHGSN

SEQ ID NO: 13718 - protein, 7 aa, synthetic construct
YARIGVN

SEQ ID NO: 13719 - protein, 7 aa, synthetic construct
YSRANFN

SEQ ID NO: 13720 - protein, 7 aa, synthetic construct
FSRLNMN

SEQ ID NO: 13721 - protein, 7 aa, synthetic construct
YSRSNTN

SEQ ID NO: 13722 - protein, 7 aa, synthetic construct
YARIGQN

SEQ ID NO: 13723 - protein, 7 aa, synthetic construct
YSRSGMN

SEQ ID NO: 13724 - protein, 7 aa, synthetic construct
YARHGYN

SEQ ID NO: 13725 - protein, 7 aa, synthetic construct
YAKHGIN

SEQ ID NO: 13726 - protein, 7 aa, synthetic construct
YARLGYN

SEQ ID NO: 13727 - protein, 7 aa, synthetic construct
FARHGFN

SEQ ID NO: 13728 - protein, 7 aa, synthetic construct
YSRSGQN

SEQ ID NO: 13729 - protein, 7 aa, synthetic construct
YSRNGHN

SEQ ID NO: 13730 - protein, 7 aa, synthetic construct
YSRMGVN

SEQ ID NO: 13731 - protein, 7 aa, synthetic construct
YAKSGWN

SEQ ID NO: 13732 - protein, 7 aa, synthetic construct
FSRVGTN

SEQ ID NO: 13733 - protein, 7 aa, synthetic construct
FARLGIN

SEQ ID NO: 13734 - protein, 7 aa, synthetic construct
FSKLGPN

SEQ ID NO: 13735 - protein, 7 aa, synthetic construct
FSRNNHN

SEQ ID NO: 13736 - protein, 7 aa, synthetic construct
YARNNYN

SEQ ID NO: 13737 - protein, 7 aa, synthetic construct
FSRIGIN

SEQ ID NO: 13738 - protein, 7 aa, synthetic construct
FSRLNQN

SEQ ID NO: 13739 - protein, 7 aa, synthetic construct
YSRIGMN

SEQ ID NO: 13740 - protein, 7 aa, synthetic construct
YSRNGFN

SEQ ID NO: 13741 - protein, 7 aa, synthetic construct
YARLNHN

SEQ ID NO: 13742 - protein, 7 aa, synthetic construct
YARQGSN

SEQ ID NO: 13743 - protein, 7 aa, synthetic construct
YSKWNTN

SEQ ID NO: 13744 - protein, 7 aa, synthetic construct
FARSNMN

SEQ ID NO: 13745 - protein, 7 aa, synthetic construct
YSRVGYN

SEQ ID NO: 13746 - protein, 7 aa, synthetic construct
YVRSQNL

SEQ ID NO: 13747 - protein, 7 aa, synthetic construct
FSRINMN

SEQ ID NO: 13748 - protein, 7 aa, synthetic construct
YSKMNPN

SEQ ID NO: 13749 - protein, 7 aa, synthetic construct
YSRGNMN

SEQ ID NO: 13750 - protein, 7 aa, synthetic construct
FSKYNIN

SEQ ID NO: 13751 - protein, 7 aa, synthetic construct
YSRVGNN

SEQ ID NO: 13752 - protein, 7 aa, synthetic construct
FAKSGPN

SEQ ID NO: 13753 - protein, 7 aa, synthetic construct
FARSGFN

SEQ ID NO: 13754 - protein, 7 aa, synthetic construct
YSRMNQN

SEQ ID NO: 13755 - protein, 7 aa, synthetic construct
YARMGNN

SEQ ID NO: 13756 - protein, 7 aa, synthetic construct
FSRGGIN

SEQ ID NO: 13757 - protein, 7 aa, synthetic construct
YSRSGNN

SEQ ID NO: 13758 - protein, 7 aa, synthetic construct
YSRSNAN

SEQ ID NO: 13759 - protein, 7 aa, synthetic construct
YSRGNPN

SEQ ID NO: 13760 - protein, 7 aa, synthetic construct
FSRAGLN

SEQ ID NO: 13761 - protein, 7 aa, synthetic construct
YARGGMN

SEQ ID NO: 13762 - protein, 7 aa, synthetic construct
FSKLNYN

SEQ ID NO: 13763 - protein, 7 aa, synthetic construct
FSRIGQN

SEQ ID NO: 13764 - protein, 7 aa, synthetic construct
YARSGLN

SEQ ID NO: 13765 - protein, 7 aa, synthetic construct
YARQNHN

SEQ ID NO: 13766 - protein, 7 aa, synthetic construct
YSRGNHN

SEQ ID NO: 13767 - protein, 7 aa, synthetic construct
FSRVGIN

SEQ ID NO: 13768 - protein, 7 aa, synthetic construct
YSRVNHN

SEQ ID NO: 13769 - protein, 7 aa, synthetic construct
FSRMGPN

SEQ ID NO: 13770 - protein, 7 aa, synthetic construct
YSKVGWN

SEQ ID NO: 13771 - protein, 7 aa, synthetic construct
YSRQGFN

SEQ ID NO: 13772 - protein, 7 aa, synthetic construct
YSRQGPN

SEQ ID NO: 13773 - protein, 7 aa, synthetic construct
FSRLGLN

SEQ ID NO: 13774 - protein, 7 aa, synthetic construct
FSRTGHN

SEQ ID NO: 13775 - protein, 7 aa, synthetic construct
YSKWNAN

SEQ ID NO: 13776 - protein, 7 aa, synthetic construct
FARTGLN

SEQ ID NO: 13777 - protein, 7 aa, synthetic construct
YAKIGPN

SEQ ID NO: 13778 - protein, 7 aa, synthetic construct
FSRIGLN

SEQ ID NO: 13779 - protein, 7 aa, synthetic construct
YAKIGFN

SEQ ID NO: 13780 - protein, 7 aa, synthetic construct
YSKIGDN

SEQ ID NO: 13781 - protein, 7 aa, synthetic construct
FARFNTN

SEQ ID NO: 13782 - protein, 7 aa, synthetic construct
YSRVNFN

SEQ ID NO: 13783 - protein, 7 aa, synthetic construct
YARTNTN

SEQ ID NO: 13784 - protein, 7 aa, synthetic construct
FARNGLN

SEQ ID NO: 13785 - protein, 7 aa, synthetic construct
YAKYGIN

SEQ ID NO: 13786 - protein, 7 aa, synthetic construct
YARHGMN

SEQ ID NO: 13787 - protein, 7 aa, synthetic construct
YARGNFN

SEQ ID NO: 13788 - protein, 7 aa, synthetic construct
FSKLNSN

SEQ ID NO: 13789 - protein, 7 aa, synthetic construct
YARVGHN

SEQ ID NO: 13790 - protein, 7 aa, synthetic construct
TNATSKW

SEQ ID NO: 13791 - protein, 7 aa, synthetic construct
YSRANVN

SEQ ID NO: 13792 - protein, 7 aa, synthetic construct
YSRAGGN

SEQ ID NO: 13793 - protein, 7 aa, synthetic construct
YSRKGEN

SEQ ID NO: 13794 - protein, 7 aa, synthetic construct
FARLGHN

SEQ ID NO: 13795 - protein, 7 aa, synthetic construct
RDDFTAY

SEQ ID NO: 13796 - protein, 7 aa, synthetic construct
FARSGPN

SEQ ID NO: 13797 - protein, 7 aa, synthetic construct
FSKLGNN

SEQ ID NO: 13798 - protein, 7 aa, synthetic construct
YARTNIN

SEQ ID NO: 13799 - protein, 7 aa, synthetic construct
FSRLGVN

SEQ ID NO: 13800 - protein, 7 aa, synthetic construct
YAKSGCN

SEQ ID NO: 13801 - protein, 7 aa, synthetic construct
YSRYNQN

SEQ ID NO: 13802 - protein, 7 aa, synthetic construct
YSRIGQN

SEQ ID NO: 13803 - protein, 7 aa, synthetic construct
YSRMNSN

SEQ ID NO: 13804 - protein, 7 aa, synthetic construct
YSRSGVN

SEQ ID NO: 13805 - protein, 7 aa, synthetic construct
YARAGVN

SEQ ID NO: 13806 - protein, 7 aa, synthetic construct
FSKVGPN

SEQ ID NO: 13807 - protein, 7 aa, synthetic construct
LSKLGHN

SEQ ID NO: 13808 - protein, 7 aa, synthetic construct
YARHGQN

SEQ ID NO: 13809 - protein, 7 aa, synthetic construct
YARTNLN

SEQ ID NO: 13810 - protein, 7 aa, synthetic construct
YSRHNTN

SEQ ID NO: 13811 - protein, 7 aa, synthetic construct
RSGNSSY

SEQ ID NO: 13812 - protein, 7 aa, synthetic construct
YARTNVN

SEQ ID NO: 13813 - protein, 7 aa, synthetic construct
FARSGLN

SEQ ID NO: 13814 - protein, 7 aa, synthetic construct
YSKANFN

SEQ ID NO: 13815 - protein, 7 aa, synthetic construct
YSKHNHN

SEQ ID NO: 13816 - protein, 7 aa, synthetic construct
YSRLNPN

SEQ ID NO: 13817 - protein, 7 aa, synthetic construct
YSRQNVN

SEQ ID NO: 13818 - protein, 7 aa, synthetic construct
YSRLNVN

SEQ ID NO: 13819 - protein, 7 aa, synthetic construct
FARAGAN

SEQ ID NO: 13820 - protein, 7 aa, synthetic construct
YSRTNHN

SEQ ID NO: 13821 - protein, 7 aa, synthetic construct
YARQNVN

SEQ ID NO: 13822 - protein, 7 aa, synthetic construct
YARQGHN

SEQ ID NO: 13823 - protein, 7 aa, synthetic construct
YAKYNHN

SEQ ID NO: 13824 - protein, 7 aa, synthetic construct
FSRVGSN

SEQ ID NO: 13825 - protein, 7 aa, synthetic construct
YSRQNQN

SEQ ID NO: 13826 - protein, 7 aa, synthetic construct
YARVGLN

SEQ ID NO: 13827 - protein, 7 aa, synthetic construct
FARTGVN

SEQ ID NO: 13828 - protein, 7 aa, synthetic construct
YARSGYN

SEQ ID NO: 13829 - protein, 7 aa, synthetic construct
YSKYGNN

SEQ ID NO: 13830 - protein, 7 aa, synthetic construct
YSRVGHN

SEQ ID NO: 13831 - protein, 7 aa, synthetic construct
FAKMGYN

SEQ ID NO: 13832 - protein, 7 aa, synthetic construct
YAKYGHN

SEQ ID NO: 13833 - protein, 7 aa, synthetic construct
YSKSGHN

SEQ ID NO: 13834 - protein, 7 aa, synthetic construct
YARIGMN

SEQ ID NO: 13835 - protein, 7 aa, synthetic construct
YSRINLN

SEQ ID NO: 13836 - protein, 7 aa, synthetic construct
YARMNFN

SEQ ID NO: 13837 - protein, 7 aa, synthetic construct
YSKVGFN

SEQ ID NO: 13838 - protein, 7 aa, synthetic construct
FSRMGNN

SEQ ID NO: 13839 - protein, 7 aa, synthetic construct
YSRNNHN

SEQ ID NO: 13840 - protein, 7 aa, synthetic construct
FSRGNIN

SEQ ID NO: 13841 - protein, 7 aa, synthetic construct
LHRMTPN

SEQ ID NO: 13842 - protein, 7 aa, synthetic construct
YSRSNQN

SEQ ID NO: 13843 - protein, 7 aa, synthetic construct
LSKLGFN

SEQ ID NO: 13844 - protein, 7 aa, synthetic construct
YSRLNTN

SEQ ID NO: 13845 - protein, 7 aa, synthetic construct
YARGNSN

SEQ ID NO: 13846 - protein, 7 aa, synthetic construct
YARANFN

SEQ ID NO: 13847 - protein, 7 aa, synthetic construct
YSRSNVN

SEQ ID NO: 13848 - protein, 7 aa, synthetic construct
YSRLNLN

SEQ ID NO: 13849 - protein, 7 aa, synthetic construct
YARMGHN

SEQ ID NO: 13850 - protein, 7 aa, synthetic construct
YSRANDN

SEQ ID NO: 13851 - protein, 7 aa, synthetic construct
YARTGFN

SEQ ID NO: 13852 - protein, 7 aa, synthetic construct
FARSGQN

SEQ ID NO: 13853 - protein, 7 aa, synthetic construct
FSRANVN

SEQ ID NO: 13854 - protein, 7 aa, synthetic construct
YSRMNVN

SEQ ID NO: 13855 - protein, 7 aa, synthetic construct
YAKAGQN

SEQ ID NO: 13856 - protein, 7 aa, synthetic construct
YSRTGHN

SEQ ID NO: 13857 - protein, 7 aa, synthetic construct
YARSGFN

SEQ ID NO: 13858 - protein, 7 aa, synthetic construct
YARTGSN

SEQ ID NO: 13859 - protein, 7 aa, synthetic construct
YAKQGWN

SEQ ID NO: 13860 - protein, 7 aa, synthetic construct
FARTGFN

SEQ ID NO: 13861 - protein, 7 aa, synthetic construct
FSKANFN

SEQ ID NO: 13862 - protein, 7 aa, synthetic construct
YSRLNGN

SEQ ID NO: 13863 - protein, 7 aa, synthetic construct
YSRLGKD

SEQ ID NO: 13864 - protein, 7 aa, synthetic construct
YARSGPN

SEQ ID NO: 13865 - protein, 7 aa, synthetic construct
YSRINQN

SEQ ID NO: 13866 - protein, 7 aa, synthetic construct
FAKQGYN

SEQ ID NO: 13867 - protein, 7 aa, synthetic construct
FSRTGTN

SEQ ID NO: 13868 - protein, 7 aa, synthetic construct
YAKIGHN

SEQ ID NO: 13869 - protein, 7 aa, synthetic construct
LSRMNYN

SEQ ID NO: 13870 - protein, 7 aa, synthetic construct
FSRMNTN

SEQ ID NO: 13871 - protein, 7 aa, synthetic construct
YSRGNQN

SEQ ID NO: 13872 - protein, 7 aa, synthetic construct
YSRMNPN

SEQ ID NO: 13873 - protein, 7 aa, synthetic construct
YARQNPN

SEQ ID NO: 13874 - protein, 7 aa, synthetic construct
YSRLGLN

SEQ ID NO: 13875 - protein, 7 aa, synthetic construct
YARAGLN

SEQ ID NO: 13876 - protein, 7 aa, synthetic construct
YARGNQN

SEQ ID NO: 13877 - protein, 7 aa, synthetic construct
YSKMGFN

SEQ ID NO: 13878 - protein, 7 aa, synthetic construct
YARVGYN

SEQ ID NO: 13879 - protein, 7 aa, synthetic construct
FSRAGQN

SEQ ID NO: 13880 - protein, 7 aa, synthetic construct
LAKLGHN

SEQ ID NO: 13881 - protein, 7 aa, synthetic construct
IRSMNGV

SEQ ID NO: 13882 - protein, 7 aa, synthetic construct
YAKAGPN

SEQ ID NO: 13883 - protein, 7 aa, synthetic construct
YSKGNWN

SEQ ID NO: 13884 - protein, 7 aa, synthetic construct
TNSTNGI

SEQ ID NO: 13885 - protein, 7 aa, synthetic construct
YSRVNTN

SEQ ID NO: 13886 - protein, 7 aa, synthetic construct
FHKLGSN

SEQ ID NO: 13887 - protein, 7 aa, synthetic construct
YSRTGQN

SEQ ID NO: 13888 - protein, 7 aa, synthetic construct
YSRSGSN

SEQ ID NO: 13889 - protein, 7 aa, synthetic construct
FSRANFN

SEQ ID NO: 13890 - protein, 7 aa, synthetic construct
YARMGSN

SEQ ID NO: 13891 - protein, 7 aa, synthetic construct
FARVGIN

SEQ ID NO: 13892 - protein, 7 aa, synthetic construct
YARTGMN

SEQ ID NO: 13893 - protein, 7 aa, synthetic construct
FARTGQN

SEQ ID NO: 13894 - protein, 7 aa, synthetic construct
FSRVGHN

SEQ ID NO: 13895 - protein, 7 aa, synthetic construct
YAKMNIN

SEQ ID NO: 13896 - protein, 7 aa, synthetic construct
YARMGAN

SEQ ID NO: 13897 - protein, 7 aa, synthetic construct
YARIGFN

SEQ ID NO: 13898 - protein, 7 aa, synthetic construct
YSRLNQN

SEQ ID NO: 13899 - protein, 7 aa, synthetic construct
YSKMNYN

SEQ ID NO: 13900 - protein, 7 aa, synthetic construct
YSRQGAN

SEQ ID NO: 13901 - protein, 7 aa, synthetic construct
YSRVGMN

SEQ ID NO: 13902 - protein, 7 aa, synthetic construct
FSRTGFN

SEQ ID NO: 13903 - protein, 7 aa, synthetic construct
YSRMNFN

SEQ ID NO: 13904 - protein, 7 aa, synthetic construct
YSKIGNN

SEQ ID NO: 13905 - protein, 7 aa, synthetic construct
YARVGMN

SEQ ID NO: 13906 - protein, 7 aa, synthetic construct
YARKGEN

SEQ ID NO: 13907 - protein, 7 aa, synthetic construct
FSRMNSN

SEQ ID NO: 13908 - protein, 7 aa, synthetic construct
YSKSGWN

SEQ ID NO: 13909 - protein, 7 aa, synthetic construct
YAKLGYN

SEQ ID NO: 13910 - protein, 7 aa, synthetic construct
FARMGLN

SEQ ID NO: 13911 - protein, 7 aa, synthetic construct
FSRLGSN

SEQ ID NO: 13912 - protein, 7 aa, synthetic construct
YSRVNAN

SEQ ID NO: 13913 - protein, 7 aa, synthetic construct
YSKAGFN

SEQ ID NO: 13914 - protein, 7 aa, synthetic construct
YARGGSN

SEQ ID NO: 13915 - protein, 7 aa, synthetic construct
YAKSNWN

SEQ ID NO: 13916 - protein, 7 aa, synthetic construct
YAKMGFN

SEQ ID NO: 13917 - protein, 7 aa, synthetic construct
FSRLGMN

SEQ ID NO: 13918 - protein, 7 aa, synthetic construct
YSRANMN

SEQ ID NO: 13919 - protein, 7 aa, synthetic construct
YAKQNYN

SEQ ID NO: 13920 - protein, 7 aa, synthetic construct
YSRQGQN

SEQ ID NO: 13921 - protein, 7 aa, synthetic construct
FARMGPN

SEQ ID NO: 13922 - protein, 7 aa, synthetic construct
YSRGNLN

SEQ ID NO: 13923 - protein, 7 aa, synthetic construct
YSRTGFN

SEQ ID NO: 13924 - protein, 7 aa, synthetic construct
FAKNGPN

SEQ ID NO: 13925 - protein, 7 aa, synthetic construct
FARHGYN

SEQ ID NO: 13926 - protein, 7 aa, synthetic construct
FARFNQN

SEQ ID NO: 13927 - protein, 7 aa, synthetic construct
FARSGAN

SEQ ID NO: 13928 - protein, 7 aa, synthetic construct
YARIGPN

SEQ ID NO: 13929 - protein, 7 aa, synthetic construct
LSRHNDN

SEQ ID NO: 13930 - protein, 7 aa, synthetic construct
YARTGLN

SEQ ID NO: 13931 - protein, 7 aa, synthetic construct
YSKHGHN

SEQ ID NO: 13932 - protein, 7 aa, synthetic construct
FSRQGYN

SEQ ID NO: 13933 - protein, 7 aa, synthetic construct
YARGGNN

SEQ ID NO: 13934 - protein, 7 aa, synthetic construct
FARTGPN

SEQ ID NO: 13935 - protein, 7 aa, synthetic construct
YSRVNSN

SEQ ID NO: 13936 - protein, 7 aa, synthetic construct
FSRLNGN

SEQ ID NO: 13937 - protein, 7 aa, synthetic construct
YSRMNIN

SEQ ID NO: 13938 - protein, 7 aa, synthetic construct
YSKMGPN

SEQ ID NO: 13939 - protein, 7 aa, synthetic construct
YSRIGTN

SEQ ID NO: 13940 - protein, 7 aa, synthetic construct
YARMGVN

SEQ ID NO: 13941 - protein, 7 aa, synthetic construct
VSGRSAY

SEQ ID NO: 13942 - protein, 7 aa, synthetic construct
YSRTNTN

SEQ ID NO: 13943 - protein, 7 aa, synthetic construct
YSRVGTN

SEQ ID NO: 13944 - protein, 7 aa, synthetic construct
YSRSGYN

SEQ ID NO: 13945 - protein, 7 aa, synthetic construct
YAKAGWN

SEQ ID NO: 13946 - protein, 7 aa, synthetic construct
YSRTGLN

SEQ ID NO: 13947 - protein, 7 aa, synthetic construct
FARTGAN

SEQ ID NO: 13948 - protein, 7 aa, synthetic construct
FSRLNAN

SEQ ID NO: 13949 - protein, 7 aa, synthetic construct
YSRIGVN

SEQ ID NO: 13950 - protein, 7 aa, synthetic construct
FSRIGVN

SEQ ID NO: 13951 - protein, 7 aa, synthetic construct
YAKGGCN

SEQ ID NO: 13952 - protein, 7 aa, synthetic construct
YAKSGMN

SEQ ID NO: 13953 - protein, 7 aa, synthetic construct
YARLNSN

SEQ ID NO: 13954 - protein, 7 aa, synthetic construct
YSRVNVN

SEQ ID NO: 13955 - protein, 7 aa, synthetic construct
YSRNNPN

SEQ ID NO: 13956 - protein, 7 aa, synthetic construct
YSRMNAN

SEQ ID NO: 13957 - protein, 7 aa, synthetic construct
YAKGGHN

SEQ ID NO: 13958 - protein, 7 aa, synthetic construct
FARGGSN

SEQ ID NO: 13959 - protein, 7 aa, synthetic construct
YSKHGFN

SEQ ID NO: 13960 - protein, 7 aa, synthetic construct
YARSGMN

SEQ ID NO: 13961 - protein, 7 aa, synthetic construct
FSRVGQN

SEQ ID NO: 13962 - protein, 7 aa, synthetic construct
FSRAGHN

SEQ ID NO: 13963 - protein, 7 aa, synthetic construct
YARMNYN

SEQ ID NO: 13964 - protein, 7 aa, synthetic construct
YSRSGAN

SEQ ID NO: 13965 - protein, 7 aa, synthetic construct
YARQGGN

SEQ ID NO: 13966 - protein, 7 aa, synthetic construct
FSRIGSN

SEQ ID NO: 13967 - protein, 7 aa, synthetic construct
YSRANTN

SEQ ID NO: 13968 - protein, 7 aa, synthetic construct
YARAGTN

SEQ ID NO: 13969 - protein, 7 aa, synthetic construct
YARMNHN

SEQ ID NO: 13970 - protein, 7 aa, synthetic construct
FSRLGQN

SEQ ID NO: 13971 - protein, 7 aa, synthetic construct
FSKIGHN

SEQ ID NO: 13972 - protein, 7 aa, synthetic construct
YSRIGHN

SEQ ID NO: 13973 - protein, 7 aa, synthetic construct
YARNGFN

SEQ ID NO: 13974 - protein, 7 aa, synthetic construct
YARLNTN

SEQ ID NO: 13975 - protein, 7 aa, synthetic construct
YARNGMN

SEQ ID NO: 13976 - protein, 7 aa, synthetic construct
YSRANIN

SEQ ID NO: 13977 - protein, 7 aa, synthetic construct
FARVGPN

SEQ ID NO: 13978 - protein, 7 aa, synthetic construct
LSKLNAN

SEQ ID NO: 13979 - protein, 7 aa, synthetic construct
LAKIGYN

SEQ ID NO: 13980 - protein, 7 aa, synthetic construct
YSRINAN

SEQ ID NO: 13981 - protein, 7 aa, synthetic construct
YSKIGLN

SEQ ID NO: 13982 - protein, 7 aa, synthetic construct
FSRLNPN

SEQ ID NO: 13983 - protein, 7 aa, synthetic construct
YAKTGHN

SEQ ID NO: 13984 - protein, 7 aa, synthetic construct
YSRMGMN

SEQ ID NO: 13985 - protein, 7 aa, synthetic construct
YSKQGYN

SEQ ID NO: 13986 - protein, 7 aa, synthetic construct
FAKAGPN

SEQ ID NO: 13987 - protein, 7 aa, synthetic construct
YSRANGN

SEQ ID NO: 13988 - protein, 7 aa, synthetic construct
FAKTGWN

SEQ ID NO: 13989 - protein, 7 aa, synthetic construct
YARVGAN

SEQ ID NO: 13990 - protein, 7 aa, synthetic construct
YARQGPN

SEQ ID NO: 13991 - protein, 7 aa, synthetic construct
YSKVGAN

SEQ ID NO: 13992 - protein, 7 aa, synthetic construct
YSRAGAN

SEQ ID NO: 13993 - protein, 7 aa, synthetic construct
FSRHGNN

SEQ ID NO: 13994 - protein, 7 aa, synthetic construct
FARYGSN

SEQ ID NO: 13995 - protein, 7 aa, synthetic construct
FSRLNDN

SEQ ID NO: 13996 - protein, 7 aa, synthetic construct
VFSSNGV

SEQ ID NO: 13997 - protein, 7 aa, synthetic construct
YSRANAN

SEQ ID NO: 13998 - protein, 7 aa, synthetic construct
YSKMNMN

SEQ ID NO: 13999 - protein, 7 aa, synthetic construct
YSKGNFN

SEQ ID NO: 14000 - protein, 7 aa, synthetic construct
FSRAGSN

SEQ ID NO: 14001 - protein, 7 aa, synthetic construct
YSRAGQN

SEQ ID NO: 14002 - protein, 7 aa, synthetic construct
YSRSATN

SEQ ID NO: 14003 - protein, 7 aa, synthetic construct
YARGGLN

SEQ ID NO: 14004 - protein, 7 aa, synthetic construct
YAKTGVN

SEQ ID NO: 14005 - protein, 7 aa, synthetic construct
YSKLGPN

SEQ ID NO: 14006 - protein, 7 aa, synthetic construct
YARQGVN

SEQ ID NO: 14007 - protein, 7 aa, synthetic construct
YSKVGCN

SEQ ID NO: 14008 - protein, 7 aa, synthetic construct
LSRSGTN

SEQ ID NO: 14009 - protein, 7 aa, synthetic construct
FARQGLN

SEQ ID NO: 14010 - protein, 7 aa, synthetic construct
YSRVGLN

SEQ ID NO: 14011 - protein, 7 aa, synthetic construct
YARMGMN

SEQ ID NO: 14012 - protein, 7 aa, synthetic construct
FARGGVN

SEQ ID NO: 14013 - protein, 7 aa, synthetic construct
YAKAGFN

SEQ ID NO: 14014 - protein, 7 aa, synthetic construct
FRSTNGI

SEQ ID NO: 14015 - protein, 7 aa, synthetic construct
FSRANNN

SEQ ID NO: 14016 - protein, 7 aa, synthetic construct
IRSTNGI

SEQ ID NO: 14017 - protein, 7 aa, synthetic construct
FSKMGNN

SEQ ID NO: 14018 - protein, 7 aa, synthetic construct
FSKLNVN

SEQ ID NO: 14019 - protein, 7 aa, synthetic construct
YSRSGGN

SEQ ID NO: 14020 - protein, 7 aa, synthetic construct
YARGNPN

SEQ ID NO: 14021 - protein, 7 aa, synthetic construct
FSRPNNN

SEQ ID NO: 14022 - protein, 7 aa, synthetic construct
FARTGSN

SEQ ID NO: 14023 - protein, 7 aa, synthetic construct
YARVGPN

SEQ ID NO: 14024 - protein, 7 aa, synthetic construct
YSRKNEN

SEQ ID NO: 14025 - protein, 7 aa, synthetic construct
YARGGAN

SEQ ID NO: 14026 - protein, 7 aa, synthetic construct
YSKMNFN

SEQ ID NO: 14027 - protein, 7 aa, synthetic construct
LSKQNFN

SEQ ID NO: 14028 - protein, 7 aa, synthetic construct
TKSTNGI

SEQ ID NO: 14029 - protein, 7 aa, synthetic construct
YSRHNIN

SEQ ID NO: 14030 - protein, 7 aa, synthetic construct
FARTGYN

SEQ ID NO: 14031 - protein, 7 aa, synthetic construct
FSRINVN

SEQ ID NO: 14032 - protein, 7 aa, synthetic construct
YARAGHN

SEQ ID NO: 14033 - protein, 7 aa, synthetic construct
YSRQGLN

SEQ ID NO: 14034 - protein, 7 aa, synthetic construct
YSRLGHN

SEQ ID NO: 14035 - protein, 7 aa, synthetic construct
FSKLNNN

SEQ ID NO: 14036 - protein, 7 aa, synthetic construct
YSKLNPN

SEQ ID NO: 14037 - protein, 7 aa, synthetic construct
YSRTNSN

SEQ ID NO: 14038 - protein, 7 aa, synthetic construct
YSRAGTN

SEQ ID NO: 14039 - protein, 7 aa, synthetic construct
ITGMSKY

SEQ ID NO: 14040 - protein, 7 aa, synthetic construct
YSKVGPN

SEQ ID NO: 14041 - protein, 7 aa, synthetic construct
YARGNVN

SEQ ID NO: 14042 - protein, 7 aa, synthetic construct
YARTGGN

SEQ ID NO: 14043 - protein, 7 aa, synthetic construct
YSRMNHN

SEQ ID NO: 14044 - protein, 7 aa, synthetic construct
FARNGIN

SEQ ID NO: 14045 - protein, 7 aa, synthetic construct
YSKQGCN

SEQ ID NO: 14046 - protein, 7 aa, synthetic construct
YSRLGMN

SEQ ID NO: 14047 - protein, 7 aa, synthetic construct
FSRAGMN

SEQ ID NO: 14048 - protein, 7 aa, synthetic construct
YARNGPN

SEQ ID NO: 14049 - protein, 7 aa, synthetic construct
FSRIGGN

SEQ ID NO: 14050 - protein, 7 aa, synthetic construct
YSKLNAN

SEQ ID NO: 14051 - protein, 7 aa, synthetic construct
FARGGFN

SEQ ID NO: 14052 - protein, 7 aa, synthetic construct
YSKHGAN

SEQ ID NO: 14053 - protein, 7 aa, synthetic construct
YARSGQN

SEQ ID NO: 14054 - protein, 7 aa, synthetic construct
LAKTGPN

SEQ ID NO: 14055 - protein, 7 aa, synthetic construct
YAKYGMN

SEQ ID NO: 14056 - protein, 7 aa, synthetic construct
YSRMNNN

SEQ ID NO: 14057 - protein, 7 aa, synthetic construct
LHKTTHN

SEQ ID NO: 14058 - protein, 7 aa, synthetic construct
FSRVGMN

SEQ ID NO: 14059 - protein, 7 aa, synthetic construct
YSRVGPN

SEQ ID NO: 14060 - protein, 7 aa, synthetic construct
LHAALPN

SEQ ID NO: 14061 - protein, 7 aa, synthetic construct
YSRAGHN

SEQ ID NO: 14062 - protein, 7 aa, synthetic construct
YARTNPN

SEQ ID NO: 14063 - protein, 7 aa, synthetic construct
FSKMNFN

SEQ ID NO: 14064 - protein, 7 aa, synthetic construct
FARNGHN

SEQ ID NO: 14065 - protein, 7 aa, synthetic construct
YSRINPN

SEQ ID NO: 14066 - protein, 7 aa, synthetic construct
FSKLNHN

SEQ ID NO: 14067 - protein, 7 aa, synthetic construct
YARTNQN

SEQ ID NO: 14068 - protein, 7 aa, synthetic construct
YARQNQN

SEQ ID NO: 14069 - protein, 7 aa, synthetic construct
YARIGHN

SEQ ID NO: 14070 - protein, 7 aa, synthetic construct
YSRPNYN

SEQ ID NO: 14071 - protein, 7 aa, synthetic construct
YSKWNNN

SEQ ID NO: 14072 - protein, 7 aa, synthetic construct
FARGGAN

SEQ ID NO: 14073 - protein, 7 aa, synthetic construct
FSRTGLN

SEQ ID NO: 14074 - protein, 7 aa, synthetic construct
YSRIGGN

SEQ ID NO: 14075 - protein, 7 aa, synthetic construct
YSKIGIN

SEQ ID NO: 14076 - protein, 7 aa, synthetic construct
YARPGAN

SEQ ID NO: 14077 - protein, 7 aa, synthetic construct
FARTGMN

SEQ ID NO: 14078 - protein, 7 aa, synthetic construct
YSRSNMN

SEQ ID NO: 14079 - protein, 7 aa, synthetic construct
YSKLNQN

SEQ ID NO: 14080 - protein, 7 aa, synthetic construct
YAKGNWN

SEQ ID NO: 14081 - protein, 7 aa, synthetic construct
LSKIGHN

SEQ ID NO: 14082 - protein, 7 aa, synthetic construct
YSKANYN

SEQ ID NO: 14083 - protein, 7 aa, synthetic construct
YSRVGVN

SEQ ID NO: 14084 - protein, 7 aa, synthetic construct
FARGGPN

SEQ ID NO: 14085 - protein, 7 aa, synthetic construct
YSKVGHN

SEQ ID NO: 14086 - protein, 7 aa, synthetic construct
YAKQGSN

SEQ ID NO: 14087 - protein, 7 aa, synthetic construct
YARSGTN

SEQ ID NO: 14088 - protein, 7 aa, synthetic construct
FSRQGPN

SEQ ID NO: 14089 - protein, 7 aa, synthetic construct
YARNGHN

SEQ ID NO: 14090 - protein, 7 aa, synthetic construct
YARQGTN

SEQ ID NO: 14091 - protein, 7 aa, synthetic construct
YSRGGMN

SEQ ID NO: 14092 - protein, 7 aa, synthetic construct
FSRVGAN

SEQ ID NO: 14093 - protein, 7 aa, synthetic construct
YSKMGVN

SEQ ID NO: 14094 - protein, 7 aa, synthetic construct
YSKVGSN

SEQ ID NO: 14095 - protein, 7 aa, synthetic construct
YARANPN

SEQ ID NO: 14096 - protein, 7 aa, synthetic construct
FARGNIN

SEQ ID NO: 14097 - protein, 7 aa, synthetic construct
YSKLNHN

SEQ ID NO: 14098 - protein, 7 aa, synthetic construct
YSRVGFN

SEQ ID NO: 14099 - protein, 7 aa, synthetic construct
YSRMNMN

SEQ ID NO: 14100 - protein, 7 aa, synthetic construct
YARHNSN

SEQ ID NO: 14101 - protein, 7 aa, synthetic construct
YARGGTN

SEQ ID NO: 14102 - protein, 7 aa, synthetic construct
LSRQGPN

SEQ ID NO: 14103 - protein, 7 aa, synthetic construct
YSRAGLN

SEQ ID NO: 14104 - protein, 7 aa, synthetic construct
YSKTGFN

SEQ ID NO: 14105 - protein, 7 aa, synthetic construct
YARSGGN

SEQ ID NO: 14106 - protein, 7 aa, synthetic construct
YSRGNIN

SEQ ID NO: 14107 - protein, 7 aa, synthetic construct
YARGGFN

SEQ ID NO: 14108 - protein, 7 aa, synthetic construct
LRSTNGV

SEQ ID NO: 14109 - protein, 7 aa, synthetic construct
YARSGVN

SEQ ID NO: 14110 - protein, 7 aa, synthetic construct
YSRFNMN

SEQ ID NO: 14111 - protein, 7 aa, synthetic construct
YVKSNNN

SEQ ID NO: 14112 - protein, 7 aa, synthetic construct
YAKLGHN

SEQ ID NO: 14113 - protein, 7 aa, synthetic construct
YARHGLN

SEQ ID NO: 14114 - protein, 7 aa, synthetic construct
YARIGGN

SEQ ID NO: 14115 - protein, 7 aa, synthetic construct
YSRVGSN

SEQ ID NO: 14116 - protein, 7 aa, synthetic construct
YSRQGVN

SEQ ID NO: 14117 - protein, 7 aa, synthetic construct
FAKYNPN

SEQ ID NO: 14118 - protein, 7 aa, synthetic construct
YSKWNQN

SEQ ID NO: 14119 - protein, 7 aa, synthetic construct
FSRMGAN

SEQ ID NO: 14120 - protein, 7 aa, synthetic construct
FSRSGLN

SEQ ID NO: 14121 - protein, 7 aa, synthetic construct
YSKSGFN

SEQ ID NO: 14122 - protein, 7 aa, synthetic construct
YARTGVN

SEQ ID NO: 14123 - protein, 7 aa, synthetic construct
YSKNGCN

SEQ ID NO: 14124 - protein, 7 aa, synthetic construct
YAKVGHN

SEQ ID NO: 14125 - protein, 7 aa, synthetic construct
IFSTNGI

SEQ ID NO: 14126 - protein, 7 aa, synthetic construct
YSRIGFN

SEQ ID NO: 14127 - protein, 7 aa, synthetic construct
YSKYGLN

SEQ ID NO: 14128 - protein, 7 aa, synthetic construct
YAKTNWN

SEQ ID NO: 14129 - protein, 7 aa, synthetic construct
HSRTGSN

SEQ ID NO: 14130 - protein, 7 aa, synthetic construct
YSRMNLN

SEQ ID NO: 14131 - protein, 7 aa, synthetic construct
FARGGTN

SEQ ID NO: 14132 - protein, 7 aa, synthetic construct
YSRINVN

SEQ ID NO: 14133 - protein, 7 aa, synthetic construct
YTRLNQN

SEQ ID NO: 14134 - protein, 7 aa, synthetic construct
PRSTNGI

SEQ ID NO: 14135 - protein, 7 aa, synthetic construct
FARIGNN

SEQ ID NO: 14136 - protein, 7 aa, synthetic construct
YSRLGAN

SEQ ID NO: 14137 - protein, 7 aa, synthetic construct
YSRAGVN

SEQ ID NO: 14138 - protein, 7 aa, synthetic construct
LSKLGVN

SEQ ID NO: 14139 - protein, 7 aa, synthetic construct
YAKQGYN

SEQ ID NO: 14140 - protein, 7 aa, synthetic construct
YARSGSN

SEQ ID NO: 14141 - protein, 7 aa, synthetic construct
YSRTNVN

SEQ ID NO: 14142 - protein, 7 aa, synthetic construct
YSRANSN

SEQ ID NO: 14143 - protein, 7 aa, synthetic construct
YSRGGFN

SEQ ID NO: 14144 - protein, 7 aa, synthetic construct
YSRGGYN

SEQ ID NO: 14145 - protein, 7 aa, synthetic construct
YARTGTN

SEQ ID NO: 14146 - protein, 7 aa, synthetic construct
YARLGHN

SEQ ID NO: 14147 - protein, 7 aa, synthetic construct
YARTNAN

SEQ ID NO: 14148 - protein, 7 aa, synthetic construct
YSRTNNN

SEQ ID NO: 14149 - protein, 7 aa, synthetic construct
YSRSGLN

SEQ ID NO: 14150 - protein, 7 aa, synthetic construct
YSKQGFN

SEQ ID NO: 14151 - protein, 7 aa, synthetic construct
YARVGTN

SEQ ID NO: 14152 - protein, 7 aa, synthetic construct
YSRPNHN

SEQ ID NO: 14153 - protein, 7 aa, synthetic construct
LAKAGMN

SEQ ID NO: 14154 - protein, 7 aa, synthetic construct
YARHGDN

SEQ ID NO: 14155 - protein, 7 aa, synthetic construct
FSRININ

SEQ ID NO: 14156 - protein, 7 aa, synthetic construct
YSRGGNN

SEQ ID NO: 14157 - protein, 7 aa, synthetic construct
YARMGLN

SEQ ID NO: 14158 - protein, 7 aa, synthetic construct
YAKGNVN

SEQ ID NO: 14159 - protein, 7 aa, synthetic construct
YAKTGMN

SEQ ID NO: 14160 - protein, 7 aa, synthetic construct
YSRWNEN

SEQ ID NO: 14161 - protein, 7 aa, synthetic construct
IDASSRW

SEQ ID NO: 14162 - protein, 7 aa, synthetic construct
YARQNLN

SEQ ID NO: 14163 - protein, 7 aa, synthetic construct
FARGGLN

SEQ ID NO: 14164 - protein, 7 aa, synthetic construct
FSKYGHN

SEQ ID NO: 14165 - protein, 7 aa, synthetic construct
FAKYGYN

SEQ ID NO: 14166 - protein, 7 aa, synthetic construct
YARYGSN

SEQ ID NO: 14167 - protein, 7 aa, synthetic construct
FSRVGNN

SEQ ID NO: 14168 - protein, 7 aa, synthetic construct
YSRVNIN

SEQ ID NO: 14169 - protein, 7 aa, synthetic construct
LSKMNVN

SEQ ID NO: 14170 - protein, 7 aa, synthetic construct
YARQGFN

SEQ ID NO: 14171 - protein, 7 aa, synthetic construct
FSRANQN

SEQ ID NO: 14172 - protein, 7 aa, synthetic construct
YARFNGN

SEQ ID NO: 14173 - protein, 7 aa, synthetic construct
YAKRGEN

SEQ ID NO: 14174 - protein, 7 aa, synthetic construct
YSKLGAN

SEQ ID NO: 14175 - protein, 7 aa, synthetic construct
YSRAGMN

SEQ ID NO: 14176 - protein, 7 aa, synthetic construct
YSKIGPN

SEQ ID NO: 14177 - protein, 7 aa, synthetic construct
FARGGNN

SEQ ID NO: 14178 - protein, 7 aa, synthetic construct
YSRMGLN

SEQ ID NO: 14179 - protein, 7 aa, synthetic construct
FSRVGVN

SEQ ID NO: 14180 - protein, 7 aa, synthetic construct
YAKIGIN

SEQ ID NO: 14181 - protein, 7 aa, synthetic construct
YSKMNVN

SEQ ID NO: 14182 - protein, 7 aa, synthetic construct
YAKMGHN

SEQ ID NO: 14183 - protein, 7 aa, synthetic construct
YSRAGNN

SEQ ID NO: 14184 - protein, 7 aa, synthetic construct
YSRPNFN

SEQ ID NO: 14185 - protein, 7 aa, synthetic construct
YAKTGWN

SEQ ID NO: 14186 - protein, 7 aa, synthetic construct
YVRSGGN

SEQ ID NO: 14187 - protein, 7 aa, synthetic construct
YARLGAN

SEQ ID NO: 14188 - protein, 7 aa, synthetic construct
YSKFNMN

SEQ ID NO: 14189 - protein, 7 aa, synthetic construct
QGEERKW

SEQ ID NO: 14190 - protein, 7 aa, synthetic construct
YSRAGPN

SEQ ID NO: 14191 - protein, 7 aa, synthetic construct
YARTGHN

SEQ ID NO: 14192 - protein, 7 aa, synthetic construct
FSRLNIN

SEQ ID NO: 14193 - protein, 7 aa, synthetic construct
YARGNTN

SEQ ID NO: 14194 - protein, 7 aa, synthetic construct
YSRHGLN

SEQ ID NO: 14195 - protein, 7 aa, synthetic construct
YARLNQN

SEQ ID NO: 14196 - protein, 7 aa, synthetic construct
YSRMGAN

SEQ ID NO: 14197 - protein, 7 aa, synthetic construct
YARTNYN

SEQ ID NO: 14198 - protein, 7 aa, synthetic construct
YAKNGPN

SEQ ID NO: 14199 - protein, 7 aa, synthetic construct
YAGRGPN

SEQ ID NO: 14200 - protein, 7 aa, synthetic construct
YSKLNFN

SEQ ID NO: 14201 - protein, 7 aa, synthetic construct
FSRSGVN

SEQ ID NO: 14202 - protein, 7 aa, synthetic construct
FSKNNYN

SEQ ID NO: 14203 - protein, 7 aa, synthetic construct
YSRQNAN

SEQ ID NO: 14204 - protein, 7 aa, synthetic construct
FSRIGTN

SEQ ID NO: 14205 - protein, 7 aa, synthetic construct
LAKLGFN

SEQ ID NO: 14206 - protein, 7 aa, synthetic construct
YSRQGIN

SEQ ID NO: 14207 - protein, 7 aa, synthetic construct
YSKLNTN

SEQ ID NO: 14208 - protein, 7 aa, synthetic construct
YSKMNNN

SEQ ID NO: 14209 - protein, 7 aa, synthetic construct
FSRQNAN

SEQ ID NO: 14210 - protein, 7 aa, synthetic construct
FAKSGWN

SEQ ID NO: 14211 - protein, 7 aa, synthetic construct
YSRTGSN

SEQ ID NO: 14212 - protein, 7 aa, synthetic construct
NWSSNGV

SEQ ID NO: 14213 - protein, 7 aa, synthetic construct
FARMGTN

SEQ ID NO: 14214 - protein, 7 aa, synthetic construct
FAKHNYN

SEQ ID NO: 14215 - protein, 7 aa, synthetic construct
FARMGHN

SEQ ID NO: 14216 - protein, 7 aa, synthetic construct
YARSGAN

SEQ ID NO: 14217 - protein, 7 aa, synthetic construct
YARGGHN

SEQ ID NO: 14218 - protein, 7 aa, synthetic construct
YSRTGIN

SEQ ID NO: 14219 - protein, 7 aa, synthetic construct
YARLGPN

SEQ ID NO: 14220 - protein, 7 aa, synthetic construct
MKSTNGI

SEQ ID NO: 14221 - protein, 7 aa, synthetic construct
YSKYGVN

SEQ ID NO: 14222 - protein, 7 aa, synthetic construct
YSKSGPN

SEQ ID NO: 14223 - protein, 7 aa, synthetic construct
FSRQGLN

SEQ ID NO: 14224 - protein, 7 aa, synthetic construct
YSKIGYN

SEQ ID NO: 14225 - protein, 7 aa, synthetic construct
YARIGNN

SEQ ID NO: 14226 - protein, 7 aa, synthetic construct
FSKLNAN

SEQ ID NO: 14227 - protein, 7 aa, synthetic construct
LAKAGPN

SEQ ID NO: 14228 - protein, 7 aa, synthetic construct
FAKNGFN

SEQ ID NO: 14229 - protein, 7 aa, synthetic construct
YSKLGVN

SEQ ID NO: 14230 - protein, 7 aa, synthetic construct
LAKTGLN

SEQ ID NO: 14231 - protein, 7 aa, synthetic construct
FSRIGMN

SEQ ID NO: 14232 - protein, 7 aa, synthetic construct
YARANAN

SEQ ID NO: 14233 - protein, 7 aa, synthetic construct
YSRGGIN

SEQ ID NO: 14234 - protein, 7 aa, synthetic construct
YSKLGMN

SEQ ID NO: 14235 - protein, 7 aa, synthetic construct
FAKSGMN

SEQ ID NO: 14236 - protein, 7 aa, synthetic construct
YARSNTN

SEQ ID NO: 14237 - protein, 7 aa, synthetic construct
YSRTNLN

SEQ ID NO: 14238 - protein, 7 aa, synthetic construct
YSKLGSN

SEQ ID NO: 14239 - protein, 7 aa, synthetic construct
FARGNVN

SEQ ID NO: 14240 - protein, 7 aa, synthetic construct
CGGIGRS

SEQ ID NO: 14241 - protein, 7 aa, synthetic construct
WMSTNGV

SEQ ID NO: 14242 - protein, 7 aa, synthetic construct
YSKMGHN

SEQ ID NO: 14243 - protein, 7 aa, synthetic construct
YSRLNSN

SEQ ID NO: 14244 - protein, 7 aa, synthetic construct
EMDNVRW

SEQ ID NO: 14245 - protein, 7 aa, synthetic construct
FSRQNLN

SEQ ID NO: 14246 - protein, 7 aa, synthetic construct
QYGKVYI

SEQ ID NO: 14247 - protein, 7 aa, synthetic construct
YSKQGLN

SEQ ID NO: 14248 - protein, 7 aa, synthetic construct
YVRSSQN

SEQ ID NO: 14249 - protein, 7 aa, synthetic construct
YSRMNTN

SEQ ID NO: 14250 - protein, 7 aa, synthetic construct
YSRYGEN

SEQ ID NO: 14251 - protein, 7 aa, synthetic construct
FSRMNQN

SEQ ID NO: 14252 - protein, 7 aa, synthetic construct
YSKYGAN

SEQ ID NO: 14253 - protein, 7 aa, synthetic construct
YSKTGWN

SEQ ID NO: 14254 - protein, 7 aa, synthetic construct
FSRSNYN

SEQ ID NO: 14255 - protein, 7 aa, synthetic construct
RGGSSPY

SEQ ID NO: 14256 - protein, 7 aa, synthetic construct
LSKMNFN

SEQ ID NO: 14257 - protein, 7 aa, synthetic construct
FSKVNYN

SEQ ID NO: 14258 - protein, 7 aa, synthetic construct
FSRQNIN

SEQ ID NO: 14259 - protein, 7 aa, synthetic construct
YSKLNVN

SEQ ID NO: 14260 - protein, 7 aa, synthetic construct
YSRVNQN

SEQ ID NO: 14261 - protein, 7 aa, synthetic construct
YSRSGTN

SEQ ID NO: 14262 - protein, 7 aa, synthetic construct
YSRIGAN

SEQ ID NO: 14263 - protein, 7 aa, synthetic construct
YSRTGGN

SEQ ID NO: 14264 - protein, 7 aa, synthetic construct
YARTGAN

SEQ ID NO: 14265 - protein, 7 aa, synthetic construct
YARSGHN

SEQ ID NO: 14266 - protein, 7 aa, synthetic construct
LSKMGVN

SEQ ID NO: 14267 - protein, 7 aa, synthetic construct
YSRTGMN

SEQ ID NO: 14268 - protein, 7 aa, synthetic construct
FSKMGPN

SEQ ID NO: 14269 - protein, 7 aa, synthetic construct
YARTGPN

SEQ ID NO: 14270 - protein, 7 aa, synthetic construct
YAKGGYN

SEQ ID NO: 14271 - protein, 7 aa, synthetic construct
FARANYN

SEQ ID NO: 14272 - protein, 7 aa, synthetic construct
YAKTNFN

SEQ ID NO: 14273 - protein, 7 aa, synthetic construct
YARMGPN

SEQ ID NO: 14274 - protein, 7 aa, synthetic construct
YAKTGPN

SEQ ID NO: 14275 - protein, 7 aa, synthetic construct
YVRTGVN

SEQ ID NO: 14276 - protein, 7 aa, synthetic construct
YARTSGN

SEQ ID NO: 14277 - protein, 7 aa, synthetic construct
YARKGDN

SEQ ID NO: 14278 - protein, 7 aa, synthetic construct
MHNGTNA

SEQ ID NO: 14279 - protein, 7 aa, synthetic construct
YARGNAN

SEQ ID NO: 14280 - protein, 7 aa, synthetic construct
YAKMGAN

SEQ ID NO: 14281 - protein, 7 aa, synthetic construct
LARTGEN

SEQ ID NO: 14282 - protein, 7 aa, synthetic construct
FSRLNTN

SEQ ID NO: 14283 - protein, 7 aa, synthetic construct
YSRNNSN

SEQ ID NO: 14284 - protein, 7 aa, synthetic construct
LKSTNGV

SEQ ID NO: 14285 - protein, 7 aa, synthetic construct
YVRSNVG

SEQ ID NO: 14286 - protein, 7 aa, synthetic construct
YTSTNGI

SEQ ID NO: 14287 - protein, 7 aa, synthetic construct
YSKMNHN

SEQ ID NO: 14288 - protein, 7 aa, synthetic construct
YSRSNLN

SEQ ID NO: 14289 - protein, 7 aa, synthetic construct
YSKLNMN

SEQ ID NO: 14290 - protein, 7 aa, synthetic construct
YSKVGYN

SEQ ID NO: 14291 - protein, 7 aa, synthetic construct
YSKLGTN

SEQ ID NO: 14292 - protein, 7 aa, synthetic construct
YSKRGDN

SEQ ID NO: 14293 - protein, 7 aa, synthetic construct
YSRTGNN

SEQ ID NO: 14294 - protein, 7 aa, synthetic construct
FSRVNVN

SEQ ID NO: 14295 - protein, 7 aa, synthetic construct
YFTGRTS

SEQ ID NO: 14296 - protein, 7 aa, synthetic construct
FARLNNN

SEQ ID NO: 14297 - protein, 7 aa, synthetic construct
FAKIGFN

SEQ ID NO: 14298 - protein, 7 aa, synthetic construct
YSRIGSN

SEQ ID NO: 14299 - protein, 7 aa, synthetic construct
FARMGNN

SEQ ID NO: 14300 - protein, 7 aa, synthetic construct
YSRGNFN

SEQ ID NO: 14301 - protein, 7 aa, synthetic construct
YSRLNMN

SEQ ID NO: 14302 - protein, 7 aa, synthetic construct
YTSAYPR

SEQ ID NO: 14303 - protein, 7 aa, synthetic construct
YSRLNEN

SEQ ID NO: 14304 - protein, 7 aa, synthetic construct
YSKIGSN

SEQ ID NO: 14305 - protein, 7 aa, synthetic construct
FSRVGYN

SEQ ID NO: 14306 - protein, 7 aa, synthetic construct
YARHGVN

SEQ ID NO: 14307 - protein, 7 aa, synthetic construct
YSRINSN

SEQ ID NO: 14308 - protein, 7 aa, synthetic construct
YSRNGAN

SEQ ID NO: 14309 - protein, 7 aa, synthetic construct
YARTNMN

SEQ ID NO: 14310 - protein, 7 aa, synthetic construct
YSRPNVN

SEQ ID NO: 14311 - protein, 7 aa, synthetic construct
FARQGMN

SEQ ID NO: 14312 - protein, 7 aa, synthetic construct
YSRTNAN

SEQ ID NO: 14313 - protein, 7 aa, synthetic construct
YSKHGTN

SEQ ID NO: 14314 - protein, 7 aa, synthetic construct
LAKLGYN

SEQ ID NO: 14315 - protein, 7 aa, synthetic construct
FSRANAN

SEQ ID NO: 14316 - protein, 7 aa, synthetic construct
YSRINYN

SEQ ID NO: 14317 - protein, 7 aa, synthetic construct
LAKMGHN

SEQ ID NO: 14318 - protein, 7 aa, synthetic construct
LSKLGMN

SEQ ID NO: 14319 - protein, 7 aa, synthetic construct
LAKHGIN

SEQ ID NO: 14320 - protein, 7 aa, synthetic construct
YSKKGDN

SEQ ID NO: 14321 - protein, 7 aa, synthetic construct
FSRLNNN

SEQ ID NO: 14322 - protein, 7 aa, synthetic construct
FSRHNQN

SEQ ID NO: 14323 - protein, 7 aa, synthetic construct
FSRVGGN

SEQ ID NO: 14324 - protein, 7 aa, synthetic construct
YSRVNPN

SEQ ID NO: 14325 - protein, 7 aa, synthetic construct
YSRTGVN

SEQ ID NO: 14326 - protein, 7 aa, synthetic construct
SWSTNGI

SEQ ID NO: 14327 - protein, 7 aa, synthetic construct
LSRLNDN

SEQ ID NO: 14328 - protein, 7 aa, synthetic construct
YSRINTN

SEQ ID NO: 14329 - protein, 7 aa, synthetic construct
LNTSVKW

SEQ ID NO: 14330 - protein, 7 aa, synthetic construct
YSKNGYN

SEQ ID NO: 14331 - protein, 7 aa, synthetic construct
YTHSNKQ

SEQ ID NO: 14332 - protein, 7 aa, synthetic construct
FARSGMN

SEQ ID NO: 14333 - protein, 7 aa, synthetic construct
YSKINYN

SEQ ID NO: 14334 - protein, 7 aa, synthetic construct
FARTGGN

SEQ ID NO: 14335 - protein, 7 aa, synthetic construct
FSKIGMN

SEQ ID NO: 14336 - protein, 7 aa, synthetic construct
YSRTNQN

SEQ ID NO: 14337 - protein, 7 aa, synthetic construct
FSKGNFN

SEQ ID NO: 14338 - protein, 7 aa, synthetic construct
YARNGTN

SEQ ID NO: 14339 - protein, 7 aa, synthetic construct
YAREGRN

SEQ ID NO: 14340 - protein, 7 aa, synthetic construct
YSRTNYN

SEQ ID NO: 14341 - protein, 7 aa, synthetic construct
ILSSNGV

SEQ ID NO: 14342 - protein, 7 aa, synthetic construct
YSKLGYN

SEQ ID NO: 14343 - protein, 7 aa, synthetic construct
YSKLNSN

SEQ ID NO: 14344 - protein, 7 aa, synthetic construct
YSRVGQN

SEQ ID NO: 14345 - protein, 7 aa, synthetic construct
LSRQNFN

SEQ ID NO: 14346 - protein, 7 aa, synthetic construct
YSRTGAN

SEQ ID NO: 14347 - protein, 7 aa, synthetic construct
YSRMGNN

SEQ ID NO: 14348 - protein, 7 aa, synthetic construct
RESGLAW

SEQ ID NO: 14349 - protein, 7 aa, synthetic construct
FARNGSN

SEQ ID NO: 14350 - protein, 7 aa, synthetic construct
YSRLNAN

SEQ ID NO: 14351 - protein, 7 aa, synthetic construct
FSKIGAN

SEQ ID NO: 14352 - protein, 7 aa, synthetic construct
FARGNYN

SEQ ID NO: 14353 - protein, 7 aa, synthetic construct
FARVGLN

SEQ ID NO: 14354 - protein, 7 aa, synthetic construct
YSKHNPN

SEQ ID NO: 14355 - protein, 7 aa, synthetic construct
YARTNFN

SEQ ID NO: 14356 - protein, 7 aa, synthetic construct
LARVGLN

SEQ ID NO: 14357 - protein, 7 aa, synthetic construct
NQRGYGN

SEQ ID NO: 14358 - protein, 7 aa, synthetic construct
YSKSNTN

SEQ ID NO: 14359 - protein, 7 aa, synthetic construct
YSKAGHN

SEQ ID NO: 14360 - protein, 7 aa, synthetic construct
YSRQNIN

SEQ ID NO: 14361 - protein, 7 aa, synthetic construct
HYSSNGV

SEQ ID NO: 14362 - protein, 7 aa, synthetic construct
YARAGGN

SEQ ID NO: 14363 - protein, 7 aa, synthetic construct
FARSGTN

SEQ ID NO: 14364 - protein, 7 aa, synthetic construct
FAKVGYN

SEQ ID NO: 14365 - protein, 7 aa, synthetic construct
YSRYGIN

SEQ ID NO: 14366 - protein, 7 aa, synthetic construct
FSRLNLN

SEQ ID NO: 14367 - protein, 7 aa, synthetic construct
FSRLGPN

SEQ ID NO: 14368 - protein, 7 aa, synthetic construct
YAKNNWN

SEQ ID NO: 14369 - protein, 7 aa, synthetic construct
YFVGSRA

SEQ ID NO: 14370 - protein, 7 aa, synthetic construct
YSKLGFN

SEQ ID NO: 14371 - protein, 7 aa, synthetic construct
FSKAGYN

SEQ ID NO: 14372 - protein, 7 aa, synthetic construct
YARKNDN

SEQ ID NO: 14373 - protein, 7 aa, synthetic construct
YARSNIN

SEQ ID NO: 14374 - protein, 7 aa, synthetic construct
YSRVGGN

SEQ ID NO: 14375 - protein, 7 aa, synthetic construct
FSRGNVN

SEQ ID NO: 14376 - protein, 7 aa, synthetic construct
MWDGTSP

SEQ ID NO: 14377 - protein, 7 aa, synthetic construct
FSRQGAN

SEQ ID NO: 14378 - protein, 7 aa, synthetic construct
YSRVGAN

SEQ ID NO: 14379 - protein, 7 aa, synthetic construct
YSKAGPN

SEQ ID NO: 14380 - protein, 7 aa, synthetic construct
YAKMGIN

SEQ ID NO: 14381 - protein, 7 aa, synthetic construct
FSKMNHN

SEQ ID NO: 14382 - protein, 7 aa, synthetic construct
FSRMGIN

SEQ ID NO: 14383 - protein, 7 aa, synthetic construct
YAKVGFN

SEQ ID NO: 14384 - protein, 7 aa, synthetic construct
YSRLGSN

SEQ ID NO: 14385 - protein, 7 aa, synthetic construct
RSGYGAG

SEQ ID NO: 14386 - protein, 7 aa, synthetic construct
YAKGNMN

SEQ ID NO: 14387 - protein, 7 aa, synthetic construct
YSRHNAN

SEQ ID NO: 14388 - protein, 7 aa, synthetic construct
YSKLNLN

SEQ ID NO: 14389 - protein, 7 aa, synthetic construct
FSRLGTN

SEQ ID NO: 14390 - protein, 7 aa, synthetic construct
FSRTNYN

SEQ ID NO: 14391 - protein, 7 aa, synthetic construct
FSRVGLN

SEQ ID NO: 14392 - protein, 7 aa, synthetic construct
IHSTNGV

SEQ ID NO: 14393 - protein, 7 aa, synthetic construct
YSKTGQN

SEQ ID NO: 14394 - protein, 7 aa, synthetic construct
INSTNGV

SEQ ID NO: 14395 - protein, 7 aa, synthetic construct
YSRMNGN

SEQ ID NO: 14396 - protein, 7 aa, synthetic construct
YSRGGAN

SEQ ID NO: 14397 - protein, 7 aa, synthetic construct
YARHGFN

SEQ ID NO: 14398 - protein, 7 aa, synthetic construct
YSRHNGN

SEQ ID NO: 14399 - protein, 7 aa, synthetic construct
YARTGNN

SEQ ID NO: 14400 - protein, 7 aa, synthetic construct
YSKQNWN

SEQ ID NO: 14401 - protein, 7 aa, synthetic construct
YSRGGLN

SEQ ID NO: 14402 - protein, 7 aa, synthetic construct
RGHDVSW

SEQ ID NO: 14403 - protein, 7 aa, synthetic construct
YSRNNTN

SEQ ID NO: 14404 - protein, 7 aa, synthetic construct
YSRSNNN

SEQ ID NO: 14405 - protein, 7 aa, synthetic construct
YARIGAN

SEQ ID NO: 14406 - protein, 7 aa, synthetic construct
FSRNGLN

SEQ ID NO: 14407 - protein, 7 aa, synthetic construct
YSRNNFN

SEQ ID NO: 14408 - protein, 7 aa, synthetic construct
YSRGGQN

SEQ ID NO: 14409 - protein, 7 aa, synthetic construct
YSRGNNN

SEQ ID NO: 14410 - protein, 7 aa, synthetic construct
YSRMGQN

SEQ ID NO: 14411 - protein, 7 aa, synthetic construct
LSKIGEN

SEQ ID NO: 14412 - protein, 7 aa, synthetic construct
LSRANFN

SEQ ID NO: 14413 - protein, 7 aa, synthetic construct
FARVGAN

SEQ ID NO: 14414 - protein, 7 aa, synthetic construct
YSKYGHN

SEQ ID NO: 14415 - protein, 7 aa, synthetic construct
KAASHGW

SEQ ID NO: 14416 - protein, 7 aa, synthetic construct
YSKIGHN

SEQ ID NO: 14417 - protein, 7 aa, synthetic construct
YSRHGVN

SEQ ID NO: 14418 - protein, 7 aa, synthetic construct
YSKQNFN

SEQ ID NO: 14419 - protein, 7 aa, synthetic construct
YARGGVN

SEQ ID NO: 14420 - protein, 7 aa, synthetic construct
FSRTNIN

SEQ ID NO: 14421 - protein, 7 aa, synthetic construct
YARQNNN

SEQ ID NO: 14422 - protein, 7 aa, synthetic construct
YARYGMN

SEQ ID NO: 14423 - protein, 7 aa, synthetic construct
PYAKSVD

SEQ ID NO: 14424 - protein, 7 aa, synthetic construct
YARANSN

SEQ ID NO: 14425 - protein, 7 aa, synthetic construct
FARMNNN

SEQ ID NO: 14426 - protein, 7 aa, synthetic construct
FARSGHN

SEQ ID NO: 14427 - protein, 7 aa, synthetic construct
YAKWGPN

SEQ ID NO: 14428 - protein, 7 aa, synthetic construct
YTHTQRN

SEQ ID NO: 14429 - protein, 7 aa, synthetic construct
YAKSNPN

SEQ ID NO: 14430 - protein, 7 aa, synthetic construct
NWSTNGI

SEQ ID NO: 14431 - protein, 7 aa, synthetic construct
YARQNMN

SEQ ID NO: 14432 - protein, 7 aa, synthetic construct
YARQNIN

SEQ ID NO: 14433 - protein, 7 aa, synthetic construct
YARAGFN

SEQ ID NO: 14434 - protein, 7 aa, synthetic construct
YSKYGQN

SEQ ID NO: 14435 - protein, 7 aa, synthetic construct
YAKIGKN

SEQ ID NO: 14436 - protein, 7 aa, synthetic construct
FSKIGVN

SEQ ID NO: 14437 - protein, 7 aa, synthetic construct
LSRVNDN

SEQ ID NO: 14438 - protein, 7 aa, synthetic construct
FAREGRN

SEQ ID NO: 14439 - protein, 7 aa, synthetic construct
TARGDRA

SEQ ID NO: 14440 - protein, 7 aa, synthetic construct
FSRMNIN

SEQ ID NO: 14441 - protein, 7 aa, synthetic construct
YAKSGPN

SEQ ID NO: 14442 - protein, 7 aa, synthetic construct
FSKLGIN

SEQ ID NO: 14443 - protein, 7 aa, synthetic construct
YSRIGLN

SEQ ID NO: 14444 - protein, 7 aa, synthetic construct
YARSGNN

SEQ ID NO: 14445 - protein, 7 aa, synthetic construct
YARTGQN

SEQ ID NO: 14446 - protein, 7 aa, synthetic construct
VRSGSIG

SEQ ID NO: 14447 - protein, 7 aa, synthetic construct
YSRAGSN

SEQ ID NO: 14448 - protein, 7 aa, synthetic construct
YSKYGTN

SEQ ID NO: 14449 - protein, 7 aa, synthetic construct
YARQNEN

SEQ ID NO: 14450 - protein, 7 aa, synthetic construct
YSKYNVN

SEQ ID NO: 14451 - protein, 7 aa, synthetic construct
YSRHNLN

SEQ ID NO: 14452 - protein, 7 aa, synthetic construct
YSKIGFN

SEQ ID NO: 14453 - protein, 7 aa, synthetic construct
LSRVGAS

SEQ ID NO: 14454 - protein, 7 aa, synthetic construct
FSRSNVN

SEQ ID NO: 14455 - protein, 7 aa, synthetic construct
YSRFNNN

SEQ ID NO: 14456 - protein, 7 aa, synthetic construct
FAKQGFN

SEQ ID NO: 14457 - protein, 7 aa, synthetic construct
FSKHNFN

SEQ ID NO: 14458 - protein, 7 aa, synthetic construct
YARPGHN

SEQ ID NO: 14459 - protein, 7 aa, synthetic construct
NRSTNGV

SEQ ID NO: 14460 - protein, 7 aa, synthetic construct
WMSTNGI

SEQ ID NO: 14461 - protein, 7 aa, synthetic construct
YSKLNYN

SEQ ID NO: 14462 - protein, 7 aa, synthetic construct
LRGKGYD

SEQ ID NO: 14463 - protein, 7 aa, synthetic construct
YSKYGSN

SEQ ID NO: 14464 - protein, 7 aa, synthetic construct
FSRAGPN

SEQ ID NO: 14465 - protein, 7 aa, synthetic construct
KDNTPYW

SEQ ID NO: 14466 - protein, 7 aa, synthetic construct
FARGGGN

SEQ ID NO: 14467 - protein, 7 aa, synthetic construct
LSKTGLN

SEQ ID NO: 14468 - protein, 7 aa, synthetic construct
YSRSNDN

SEQ ID NO: 14469 - protein, 7 aa, synthetic construct
YSRPNIN

SEQ ID NO: 14470 - protein, 7 aa, synthetic construct
YAKLNHN

SEQ ID NO: 14471 - protein, 7 aa, synthetic construct
YTRMHQN

SEQ ID NO: 14472 - protein, 7 aa, synthetic construct
FSRSGFN

SEQ ID NO: 14473 - protein, 7 aa, synthetic construct
FARNGPN

SEQ ID NO: 14474 - protein, 7 aa, synthetic construct
YSKNNVN

SEQ ID NO: 14475 - protein, 7 aa, synthetic construct
RGSQTSY

SEQ ID NO: 14476 - protein, 7 aa, synthetic construct
YARVGGN

SEQ ID NO: 14477 - protein, 7 aa, synthetic construct
YSRINGN

SEQ ID NO: 14478 - protein, 7 aa, synthetic construct
YSKWNEN

SEQ ID NO: 14479 - protein, 7 aa, synthetic construct
YSRIGNN

SEQ ID NO: 14480 - protein, 7 aa, synthetic construct
YAKYGSN

SEQ ID NO: 14481 - protein, 7 aa, synthetic construct
PTSTNGV

SEQ ID NO: 14482 - protein, 7 aa, synthetic construct
FARAGHN

SEQ ID NO: 14483 - protein, 7 aa, synthetic construct
LSKVGAN

SEQ ID NO: 14484 - protein, 7 aa, synthetic construct
YSRPGMN

SEQ ID NO: 14485 - protein, 7 aa, synthetic construct
YAKHGSN

SEQ ID NO: 14486 - protein, 7 aa, synthetic construct
FARYNGN

SEQ ID NO: 14487 - protein, 7 aa, synthetic construct
YARINNN

SEQ ID NO: 14488 - protein, 7 aa, synthetic construct
KLDRSNW

SEQ ID NO: 14489 - protein, 7 aa, synthetic construct
LHRAGIS

SEQ ID NO: 14490 - protein, 7 aa, synthetic construct
FSRAGVN

SEQ ID NO: 14491 - protein, 7 aa, synthetic construct
FSRMNAN

SEQ ID NO: 14492 - protein, 7 aa, synthetic construct
FSRMNMN

SEQ ID NO: 14493 - protein, 7 aa, synthetic construct
FSRVNTN

SEQ ID NO: 14494 - protein, 7 aa, synthetic construct
YNSTNGV

SEQ ID NO: 14495 - protein, 7 aa, synthetic construct
RLYDAYE

SEQ ID NO: 14496 - protein, 7 aa, synthetic construct
YARIGTN

SEQ ID NO: 14497 - protein, 7 aa, synthetic construct
YSKGGMN

SEQ ID NO: 14498 - protein, 7 aa, synthetic construct
LAKMGNN

SEQ ID NO: 14499 - protein, 7 aa, synthetic construct
VISTNGV

SEQ ID NO: 14500 - protein, 7 aa, synthetic construct
YAKHGWN

SEQ ID NO: 14501 - protein, 7 aa, synthetic construct
YARGNIN

SEQ ID NO: 14502 - protein, 7 aa, synthetic construct
VWSTNGI

SEQ ID NO: 14503 - protein, 7 aa, synthetic construct
YSKIGAN

SEQ ID NO: 14504 - protein, 7 aa, synthetic construct
YSRSNPN

SEQ ID NO: 14505 - protein, 7 aa, synthetic construct
YSRQNFN

SEQ ID NO: 14506 - protein, 7 aa, synthetic construct
WGSTNGI

SEQ ID NO: 14507 - protein, 7 aa, synthetic construct
YARLGMN

SEQ ID NO: 14508 - protein, 7 aa, synthetic construct
FSKAGAN

SEQ ID NO: 14509 - protein, 7 aa, synthetic construct
FSKSNWN

SEQ ID NO: 14510 - protein, 7 aa, synthetic construct
LSKNNHN

SEQ ID NO: 14511 - protein, 7 aa, synthetic construct
YAKSNLN

SEQ ID NO: 14512 - protein, 7 aa, synthetic construct
YARNNPN

SEQ ID NO: 14513 - protein, 7 aa, synthetic construct
FSKAGLN

SEQ ID NO: 14514 - protein, 7 aa, synthetic construct
YSRVNNN

SEQ ID NO: 14515 - protein, 7 aa, synthetic construct
FSRTGAN

SEQ ID NO: 14516 - protein, 7 aa, synthetic construct
FARTNMN

SEQ ID NO: 14517 - protein, 7 aa, synthetic construct
NTSMNGR

SEQ ID NO: 14518 - protein, 7 aa, synthetic construct
YSKNGWN

SEQ ID NO: 14519 - protein, 7 aa, synthetic construct
FSRSNMN

SEQ ID NO: 14520 - protein, 7 aa, synthetic construct
FSKSGFN

SEQ ID NO: 14521 - protein, 7 aa, synthetic construct
FSKLNIN

SEQ ID NO: 14522 - protein, 7 aa, synthetic construct
FARAGLN

SEQ ID NO: 14523 - protein, 7 aa, synthetic construct
LNATSSW

SEQ ID NO: 14524 - protein, 7 aa, synthetic construct
YSKYNMN

SEQ ID NO: 14525 - protein, 7 aa, synthetic construct
THKLSVN

SEQ ID NO: 14526 - protein, 7 aa, synthetic construct
YARSNVN

SEQ ID NO: 14527 - protein, 7 aa, synthetic construct
YARNGIN

SEQ ID NO: 14528 - protein, 7 aa, synthetic construct
FAKSGVN

SEQ ID NO: 14529 - protein, 7 aa, synthetic construct
YARNGLN

SEQ ID NO: 14530 - protein, 7 aa, synthetic construct
YARHGAN

SEQ ID NO: 14531 - protein, 7 aa, synthetic construct
YSRNGPN

SEQ ID NO: 14532 - protein, 7 aa, synthetic construct
YARLNPN

SEQ ID NO: 14533 - protein, 7 aa, synthetic construct
YAKNGWN

SEQ ID NO: 14534 - protein, 7 aa, synthetic construct
RGGSSNY

SEQ ID NO: 14535 - protein, 7 aa, synthetic construct
YAKHGQN

SEQ ID NO: 14536 - protein, 7 aa, synthetic construct
YARYGQN

SEQ ID NO: 14537 - protein, 7 aa, synthetic construct
FSKQNFN

SEQ ID NO: 14538 - protein, 7 aa, synthetic construct
FARIGIN

SEQ ID NO: 14539 - protein, 7 aa, synthetic construct
YSKGGLN

SEQ ID NO: 14540 - protein, 7 aa, synthetic construct
LSKIGAN

SEQ ID NO: 14541 - protein, 7 aa, synthetic construct
YSKNNSN

SEQ ID NO: 14542 - protein, 7 aa, synthetic construct
YARLGLN

SEQ ID NO: 14543 - protein, 7 aa, synthetic construct
FSRANLN

SEQ ID NO: 14544 - protein, 7 aa, synthetic construct
YAKLGSN

SEQ ID NO: 14545 - protein, 7 aa, synthetic construct
YSRVSDT

SEQ ID NO: 14546 - protein, 7 aa, synthetic construct
FTAGTRN

SEQ ID NO: 14547 - protein, 7 aa, synthetic construct
YSRNGSN

SEQ ID NO: 14548 - protein, 7 aa, synthetic construct
LAKLGVN

SEQ ID NO: 14549 - protein, 7 aa, synthetic construct
YSKKNDN

SEQ ID NO: 14550 - protein, 7 aa, synthetic construct
FSRTNTN

SEQ ID NO: 14551 - protein, 7 aa, synthetic construct
MSAHVKY

SEQ ID NO: 14552 - protein, 7 aa, synthetic construct
YSKAGYN

SEQ ID NO: 14553 - protein, 7 aa, synthetic construct
FSKRNDN

SEQ ID NO: 14554 - protein, 7 aa, synthetic construct
YSKKGEN

SEQ ID NO: 14555 - protein, 7 aa, synthetic construct
FARVGMN

SEQ ID NO: 14556 - protein, 7 aa, synthetic construct
YSRLGYN

SEQ ID NO: 14557 - protein, 7 aa, synthetic construct
FSKTGWN

SEQ ID NO: 14558 - protein, 7 aa, synthetic construct
YSRYNDN

SEQ ID NO: 14559 - protein, 7 aa, synthetic construct
FAKNGIN

SEQ ID NO: 14560 - protein, 7 aa, synthetic construct
FAKHGPN

SEQ ID NO: 14561 - protein, 7 aa, synthetic construct
IALRGAG

SEQ ID NO: 14562 - protein, 7 aa, synthetic construct
FSRGGYN

SEQ ID NO: 14563 - protein, 7 aa, synthetic construct
FSRMGHN

SEQ ID NO: 14564 - protein, 7 aa, synthetic construct
YAKNGEN

SEQ ID NO: 14565 - protein, 7 aa, synthetic construct
YARPGVN

SEQ ID NO: 14566 - protein, 7 aa, synthetic construct
YARYNVN

SEQ ID NO: 14567 - protein, 7 aa, synthetic construct
YSKVNAN

SEQ ID NO: 14568 - protein, 7 aa, synthetic construct
YSKYGIN

SEQ ID NO: 14569 - protein, 7 aa, synthetic construct
YSRGGSN

SEQ ID NO: 14570 - protein, 7 aa, synthetic construct
FSKYNAN

SEQ ID NO: 14571 - protein, 7 aa, synthetic construct
FSRQGIN

SEQ ID NO: 14572 - protein, 7 aa, synthetic construct
YHKLNPA

SEQ ID NO: 14573 - protein, 7 aa, synthetic construct
LARMGEN

SEQ ID NO: 14574 - protein, 7 aa, synthetic construct
YSRLGPN

SEQ ID NO: 14575 - protein, 7 aa, synthetic construct
YARMGIN

SEQ ID NO: 14576 - protein, 7 aa, synthetic construct
YSRIGDN

SEQ ID NO: 14577 - protein, 7 aa, synthetic construct
LSKLGAN

SEQ ID NO: 14578 - protein, 7 aa, synthetic construct
YAKANHN

SEQ ID NO: 14579 - protein, 7 aa, synthetic construct
FSKVNFN

SEQ ID NO: 14580 - protein, 7 aa, synthetic construct
YARSNHN

SEQ ID NO: 14581 - protein, 7 aa, synthetic construct
YSKLNDN

SEQ ID NO: 14582 - protein, 7 aa, synthetic construct
YAKGGWN

SEQ ID NO: 14583 - protein, 7 aa, synthetic construct
LSRASVI

SEQ ID NO: 14584 - protein, 7 aa, synthetic construct
FNSTNGI

SEQ ID NO: 14585 - protein, 7 aa, synthetic construct
YSRLGNN

SEQ ID NO: 14586 - protein, 7 aa, synthetic construct
YSKYNTN

SEQ ID NO: 14587 - protein, 7 aa, synthetic construct
YSKINAN

SEQ ID NO: 14588 - protein, 7 aa, synthetic construct
HWSTNGV

SEQ ID NO: 14589 - protein, 7 aa, synthetic construct
YSRGNSN

SEQ ID NO: 14590 - protein, 7 aa, synthetic construct
FSRTGMN

SEQ ID NO: 14591 - protein, 7 aa, synthetic construct
VRYESGN

SEQ ID NO: 14592 - protein, 7 aa, synthetic construct
FARHGNN

SEQ ID NO: 14593 - protein, 7 aa, synthetic construct
YSRSGPN

SEQ ID NO: 14594 - protein, 7 aa, synthetic construct
FARIGVN

SEQ ID NO: 14595 - protein, 7 aa, synthetic construct
FSKAGVN

SEQ ID NO: 14596 - protein, 7 aa, synthetic construct
LAKNGSN

SEQ ID NO: 14597 - protein, 7 aa, synthetic construct
FSRMNNN

SEQ ID NO: 14598 - protein, 7 aa, synthetic construct
FSKAGSN

SEQ ID NO: 14599 - protein, 7 aa, synthetic construct
YSRGGTN

SEQ ID NO: 14600 - protein, 7 aa, synthetic construct
IQSTNGV

SEQ ID NO: 14601 - protein, 7 aa, synthetic construct
YARYGAN

SEQ ID NO: 14602 - protein, 7 aa, synthetic construct
YAKQGPN

SEQ ID NO: 14603 - protein, 7 aa, synthetic construct
FARMGMN

SEQ ID NO: 14604 - protein, 7 aa, synthetic construct
YSKINNN

SEQ ID NO: 14605 - protein, 7 aa, synthetic construct
FSRSGNN

SEQ ID NO: 14606 - protein, 7 aa, synthetic construct
YQPNSYG

SEQ ID NO: 14607 - protein, 7 aa, synthetic construct
YSRAGDN

SEQ ID NO: 14608 - protein, 7 aa, synthetic construct
YARRNDN

SEQ ID NO: 14609 - protein, 7 aa, synthetic construct
FSRSGIN

SEQ ID NO: 14610 - protein, 7 aa, synthetic construct
FARLGSN

SEQ ID NO: 14611 - protein, 7 aa, synthetic construct
FARTNTN

SEQ ID NO: 14612 - protein, 7 aa, synthetic construct
FSKMGFN

SEQ ID NO: 14613 - protein, 7 aa, synthetic construct
YIRTQIN

SEQ ID NO: 14614 - protein, 7 aa, synthetic construct
YSRTGTN

SEQ ID NO: 14615 - protein, 7 aa, synthetic construct
FSKAGWN

SEQ ID NO: 14616 - protein, 7 aa, synthetic construct
FARAGFN

SEQ ID NO: 14617 - protein, 7 aa, synthetic construct
YSRHGGN

SEQ ID NO: 14618 - protein, 7 aa, synthetic construct
YSKVGKN

SEQ ID NO: 14619 - protein, 7 aa, synthetic construct
YSKAGAN

SEQ ID NO: 14620 - protein, 7 aa, synthetic construct
YSRMGPN

SEQ ID NO: 14621 - protein, 7 aa, synthetic construct
FSRQNFN

SEQ ID NO: 14622 - protein, 7 aa, synthetic construct
FARQGVN

SEQ ID NO: 14623 - protein, 7 aa, synthetic construct
YAKIGNN

SEQ ID NO: 14624 - protein, 7 aa, synthetic construct
FARQGAN

SEQ ID NO: 14625 - protein, 7 aa, synthetic construct
LSKANAN

SEQ ID NO: 14626 - protein, 7 aa, synthetic construct
PGSTNGI

SEQ ID NO: 14627 - protein, 7 aa, synthetic construct
YARNNLN

SEQ ID NO: 14628 - protein, 7 aa, synthetic construct
YSRLNDN

SEQ ID NO: 14629 - protein, 7 aa, synthetic construct
FARVGHN

SEQ ID NO: 14630 - protein, 7 aa, synthetic construct
FSKMNAN

SEQ ID NO: 14631 - protein, 7 aa, synthetic construct
LSKMGAN

SEQ ID NO: 14632 - protein, 7 aa, synthetic construct
YSRIGPN

SEQ ID NO: 14633 - protein, 7 aa, synthetic construct
FSRQNQN

SEQ ID NO: 14634 - protein, 7 aa, synthetic construct
FSRSGSN

SEQ ID NO: 14635 - protein, 7 aa, synthetic construct
YSRLGGN

SEQ ID NO: 14636 - protein, 7 aa, synthetic construct
RFNGLNA

SEQ ID NO: 14637 - protein, 7 aa, synthetic construct
YARYNMN

SEQ ID NO: 14638 - protein, 7 aa, synthetic construct
YSRNNYN

SEQ ID NO: 14639 - protein, 7 aa, synthetic construct
PFSTNGV

SEQ ID NO: 14640 - protein, 7 aa, synthetic construct
WVKSSPG

SEQ ID NO: 14641 - protein, 7 aa, synthetic construct
FAKEGRN

SEQ ID NO: 14642 - protein, 7 aa, synthetic construct
YSRFNAN

SEQ ID NO: 14643 - protein, 7 aa, synthetic construct
ESYVGRN

SEQ ID NO: 14644 - protein, 7 aa, synthetic construct
YAKYGQN

SEQ ID NO: 14645 - protein, 7 aa, synthetic construct
FARIGLN

SEQ ID NO: 14646 - protein, 7 aa, synthetic construct
PNSTNGI

SEQ ID NO: 14647 - protein, 7 aa, synthetic construct
YSRQNSN

SEQ ID NO: 14648 - protein, 7 aa, synthetic construct
FAKMGFN

SEQ ID NO: 14649 - protein, 7 aa, synthetic construct
FSRNNAN

SEQ ID NO: 14650 - protein, 7 aa, synthetic construct
FSRQGHN

SEQ ID NO: 14651 - protein, 7 aa, synthetic construct
WSKLHAN

SEQ ID NO: 14652 - protein, 7 aa, synthetic construct
NYSTNGV

SEQ ID NO: 14653 - protein, 7 aa, synthetic construct
YSKYNAN

SEQ ID NO: 14654 - protein, 7 aa, synthetic construct
YSRNNAN

SEQ ID NO: 14655 - protein, 7 aa, synthetic construct
YSKHNEN

SEQ ID NO: 14656 - protein, 7 aa, synthetic construct
FSRQNMN

SEQ ID NO: 14657 - protein, 7 aa, synthetic construct
YAKIGVN

SEQ ID NO: 14658 - protein, 7 aa, synthetic construct
HHSSNGV

SEQ ID NO: 14659 - protein, 7 aa, synthetic construct
YSRYNVN

SEQ ID NO: 14660 - protein, 7 aa, synthetic construct
FSRGGPN

SEQ ID NO: 14661 - protein, 7 aa, synthetic construct
FSKANPN

SEQ ID NO: 14662 - protein, 7 aa, synthetic construct
YHSTNGI

SEQ ID NO: 14663 - protein, 7 aa, synthetic construct
TRTGVSA

SEQ ID NO: 14664 - protein, 7 aa, synthetic construct
YSRSNFN

SEQ ID NO: 14665 - protein, 7 aa, synthetic construct
YSKHGGN

SEQ ID NO: 14666 - protein, 7 aa, synthetic construct
YSRYGQN

SEQ ID NO: 14667 - protein, 7 aa, synthetic construct
FARHGMN

SEQ ID NO: 14668 - protein, 7 aa, synthetic construct
FSRSNIN

SEQ ID NO: 14669 - protein, 7 aa, synthetic construct
FARQGTN

SEQ ID NO: 14670 - protein, 7 aa, synthetic construct
YARLGTN

SEQ ID NO: 14671 - protein, 7 aa, synthetic construct
YSKNNWN

SEQ ID NO: 14672 - protein, 7 aa, synthetic construct
FARGNLN

SEQ ID NO: 14673 - protein, 7 aa, synthetic construct
FSKLNDN

SEQ ID NO: 14674 - protein, 7 aa, synthetic construct
YSRINEN

SEQ ID NO: 14675 - protein, 7 aa, synthetic construct
FSRHNEN

SEQ ID NO: 14676 - protein, 7 aa, synthetic construct
FSKVGQN

SEQ ID NO: 14677 - protein, 7 aa, synthetic construct
FARHNNN

SEQ ID NO: 14678 - protein, 7 aa, synthetic construct
YSRYNMN

SEQ ID NO: 14679 - protein, 7 aa, synthetic construct
YAKYGAN

SEQ ID NO: 14680 - protein, 7 aa, synthetic construct
FAKHGYN

SEQ ID NO: 14681 - protein, 7 aa, synthetic construct
YARNGAN

SEQ ID NO: 14682 - protein, 7 aa, synthetic construct
FSKANLN

SEQ ID NO: 14683 - protein, 7 aa, synthetic construct
GGASKGW

SEQ ID NO: 14684 - protein, 7 aa, synthetic construct
FSRVNHN

SEQ ID NO: 14685 - protein, 7 aa, synthetic construct
YARTNHN

SEQ ID NO: 14686 - protein, 7 aa, synthetic construct
YSRPNLN

SEQ ID NO: 14687 - protein, 7 aa, synthetic construct
PSSTNGI

SEQ ID NO: 14688 - protein, 7 aa, synthetic construct
LARVGQN

SEQ ID NO: 14689 - protein, 7 aa, synthetic construct
YHKMSLG

SEQ ID NO: 14690 - protein, 7 aa, synthetic construct
FSRGNYN

SEQ ID NO: 14691 - protein, 7 aa, synthetic construct
YSRSNSN

SEQ ID NO: 14692 - protein, 7 aa, synthetic construct
LSRSGWN

SEQ ID NO: 14693 - protein, 7 aa, synthetic construct
YARMGEN

SEQ ID NO: 14694 - protein, 7 aa, synthetic construct
YSKYNQN

SEQ ID NO: 14695 - protein, 7 aa, synthetic construct
YARLGIN

SEQ ID NO: 14696 - protein, 7 aa, synthetic construct
YSKFNIN

SEQ ID NO: 14697 - protein, 7 aa, synthetic construct
YARNNHN

SEQ ID NO: 14698 - protein, 7 aa, synthetic construct
FSRANDN

SEQ ID NO: 14699 - protein, 7 aa, synthetic construct
FSRHNIN

SEQ ID NO: 14700 - protein, 7 aa, synthetic construct
YAKGGTN

SEQ ID NO: 14701 - protein, 7 aa, synthetic construct
YSRQNGN

SEQ ID NO: 14702 - protein, 7 aa, synthetic construct
ETSTNGV

SEQ ID NO: 14703 - protein, 7 aa, synthetic construct
RDRYSAG

SEQ ID NO: 14704 - protein, 7 aa, synthetic construct
YSRLGQN

SEQ ID NO: 14705 - protein, 7 aa, synthetic construct
YARANQN

SEQ ID NO: 14706 - protein, 7 aa, synthetic construct
MQSSNGV

SEQ ID NO: 14707 - protein, 7 aa, synthetic construct
LSKHNLN

SEQ ID NO: 14708 - protein, 7 aa, synthetic construct
MSRVSVL

SEQ ID NO: 14709 - protein, 7 aa, synthetic construct
LSKHNTN

SEQ ID NO: 14710 - protein, 7 aa, synthetic construct
RGPNSYP

SEQ ID NO: 14711 - protein, 7 aa, synthetic construct
FAKAGHN

SEQ ID NO: 14712 - protein, 7 aa, synthetic construct
FSRMGLN

SEQ ID NO: 14713 - protein, 7 aa, synthetic construct
FSKHGNN

SEQ ID NO: 14714 - protein, 7 aa, synthetic construct
YHKLQNG

SEQ ID NO: 14715 - protein, 7 aa, synthetic construct
FSRYGTN

SEQ ID NO: 14716 - protein, 7 aa, synthetic construct
DKYDRYT

SEQ ID NO: 14717 - protein, 7 aa, synthetic construct
YSKFNVN

SEQ ID NO: 14718 - protein, 7 aa, synthetic construct
LSKMNQN

SEQ ID NO: 14719 - protein, 7 aa, synthetic construct
YSKFNYN

SEQ ID NO: 14720 - protein, 7 aa, synthetic construct
FSKANAN

SEQ ID NO: 14721 - protein, 7 aa, synthetic construct
YARVGVN

SEQ ID NO: 14722 - protein, 7 aa, synthetic construct
YSRYNTN

SEQ ID NO: 14723 - protein, 7 aa, synthetic construct
FAREGWN

SEQ ID NO: 14724 - protein, 7 aa, synthetic construct
MYSTNGV

SEQ ID NO: 14725 - protein, 7 aa, synthetic construct
NYSTNGR

SEQ ID NO: 14726 - protein, 7 aa, synthetic construct
YAKANTN

SEQ ID NO: 14727 - protein, 7 aa, synthetic construct
YARVNYN

SEQ ID NO: 14728 - protein, 7 aa, synthetic construct
YSKYNHN

SEQ ID NO: 14729 - protein, 7 aa, synthetic construct
YSRNNDN

SEQ ID NO: 14730 - protein, 7 aa, synthetic construct
QDSTNGV

SEQ ID NO: 14731 - protein, 7 aa, synthetic construct
YARNNVN

SEQ ID NO: 14732 - protein, 7 aa, synthetic construct
FARHGAN

SEQ ID NO: 14733 - protein, 7 aa, synthetic construct
FVKSNSG

SEQ ID NO: 14734 - protein, 7 aa, synthetic construct
FSKQNWN

SEQ ID NO: 14735 - protein, 7 aa, synthetic construct
YAKPNWN

SEQ ID NO: 14736 - protein, 7 aa, synthetic construct
FSKGNWN

SEQ ID NO: 14737 - protein, 7 aa, synthetic construct
YSRYGSN

SEQ ID NO: 14738 - protein, 7 aa, synthetic construct
YAKSNTN

SEQ ID NO: 14739 - protein, 7 aa, synthetic construct
VAYTNGY

SEQ ID NO: 14740 - protein, 7 aa, synthetic construct
YSKWNSN

SEQ ID NO: 14741 - protein, 7 aa, synthetic construct
FSKHGPN

SEQ ID NO: 14742 - protein, 7 aa, synthetic construct
GANEWRD

SEQ ID NO: 14743 - protein, 7 aa, synthetic construct
YARPGPN

SEQ ID NO: 14744 - protein, 7 aa, synthetic construct
YAKRGDN

SEQ ID NO: 14745 - protein, 7 aa, synthetic construct
LPNQWRD

SEQ ID NO: 14746 - protein, 7 aa, synthetic construct
YFSQRTE

SEQ ID NO: 14747 - protein, 7 aa, synthetic construct
FARTNFN

SEQ ID NO: 14748 - protein, 7 aa, synthetic construct
ATSTNGI

SEQ ID NO: 14749 - protein, 7 aa, synthetic construct
NTSSNGV

SEQ ID NO: 14750 - protein, 7 aa, synthetic construct
YGRVTSN

SEQ ID NO: 14751 - protein, 7 aa, synthetic construct
YAKLGQN

SEQ ID NO: 14752 - protein, 7 aa, synthetic construct
FSKGGFN

SEQ ID NO: 14753 - protein, 7 aa, synthetic construct
LAKLGMN

SEQ ID NO: 14754 - protein, 7 aa, synthetic construct
FSRQGTN

SEQ ID NO: 14755 - protein, 7 aa, synthetic construct
FARSNTN

SEQ ID NO: 14756 - protein, 7 aa, synthetic construct
FSRMGSN

SEQ ID NO: 14757 - protein, 7 aa, synthetic construct
LARVGNN

SEQ ID NO: 14758 - protein, 7 aa, synthetic construct
FARLGNN

SEQ ID NO: 14759 - protein, 7 aa, synthetic construct
YSRSNGN

SEQ ID NO: 14760 - protein, 7 aa, synthetic construct
FSRQNSN

SEQ ID NO: 14761 - protein, 7 aa, synthetic construct
YARDGRN

SEQ ID NO: 14762 - protein, 7 aa, synthetic construct
YAKYGGN

SEQ ID NO: 14763 - protein, 7 aa, synthetic construct
YSRNNLN

SEQ ID NO: 14764 - protein, 7 aa, synthetic construct
FSKAGTN

SEQ ID NO: 14765 - protein, 7 aa, synthetic construct
YSRHNQN

SEQ ID NO: 14766 - protein, 7 aa, synthetic construct
FAKHGHN

SEQ ID NO: 14767 - protein, 7 aa, synthetic construct
WKHLSMG

SEQ ID NO: 14768 - protein, 7 aa, synthetic construct
YARAGAN

SEQ ID NO: 14769 - protein, 7 aa, synthetic construct
ERNIGRL

SEQ ID NO: 14770 - protein, 7 aa, synthetic construct
CKGGCMV

SEQ ID NO: 14771 - protein, 7 aa, synthetic construct
YAKQGDN

SEQ ID NO: 14772 - protein, 7 aa, synthetic construct
WFSGTTN

SEQ ID NO: 14773 - protein, 7 aa, synthetic construct
FSKRNEN

SEQ ID NO: 14774 - protein, 7 aa, synthetic construct
FSRGNAN

SEQ ID NO: 14775 - protein, 7 aa, synthetic construct
LARVGIN

SEQ ID NO: 14776 - protein, 7 aa, synthetic construct
YSRLGTN

SEQ ID NO: 14777 - protein, 7 aa, synthetic construct
FSRVNAN

SEQ ID NO: 14778 - protein, 7 aa, synthetic construct
FSRNGFN

SEQ ID NO: 14779 - protein, 7 aa, synthetic construct
YARPGSN

SEQ ID NO: 14780 - protein, 7 aa, synthetic construct
YSKNNCN

SEQ ID NO: 14781 - protein, 7 aa, synthetic construct
YARQNSN

SEQ ID NO: 14782 - protein, 7 aa, synthetic construct
YAKIGSN

SEQ ID NO: 14783 - protein, 7 aa, synthetic construct
FSKIGTN

SEQ ID NO: 14784 - protein, 7 aa, synthetic construct
FSRVNYN

SEQ ID NO: 14785 - protein, 7 aa, synthetic construct
FARGNFN

SEQ ID NO: 14786 - protein, 7 aa, synthetic construct
FARTNHN

SEQ ID NO: 14787 - protein, 7 aa, synthetic construct
DAAYVKY

SEQ ID NO: 14788 - protein, 7 aa, synthetic construct
YSKYNDN

SEQ ID NO: 14789 - protein, 7 aa, synthetic construct
FARQNMN

SEQ ID NO: 14790 - protein, 7 aa, synthetic construct
RLTDITW

SEQ ID NO: 14791 - protein, 7 aa, synthetic construct
YARYGTN

SEQ ID NO: 14792 - protein, 7 aa, synthetic construct
FNGSNRY

SEQ ID NO: 14793 - protein, 7 aa, synthetic construct
TNWGGPA

SEQ ID NO: 14794 - protein, 7 aa, synthetic construct
FARAGGN

SEQ ID NO: 14795 - protein, 7 aa, synthetic construct
YSKYNSN

SEQ ID NO: 14796 - protein, 7 aa, synthetic construct
FAKVGFN

SEQ ID NO: 14797 - protein, 7 aa, synthetic construct
FSRNGIN

SEQ ID NO: 14798 - protein, 7 aa, synthetic construct
FSKAGHN

SEQ ID NO: 14799 - protein, 7 aa, synthetic construct
LAKNGCN

SEQ ID NO: 14800 - protein, 7 aa, synthetic construct
YAKYNMN

SEQ ID NO: 14801 - protein, 7 aa, synthetic construct
GGGSVRY

SEQ ID NO: 14802 - protein, 7 aa, synthetic construct
FSRQNHN

SEQ ID NO: 14803 - protein, 7 aa, synthetic construct
QHYNGLG

SEQ ID NO: 14804 - protein, 7 aa, synthetic construct
YAKANWN

SEQ ID NO: 14805 - protein, 7 aa, synthetic construct
YARHGTN

SEQ ID NO: 14806 - protein, 7 aa, synthetic construct
FARHGLN

SEQ ID NO: 14807 - protein, 7 aa, synthetic construct
YSKQGPN

SEQ ID NO: 14808 - protein, 7 aa, synthetic construct
FARSGGN

SEQ ID NO: 14809 - protein, 7 aa, synthetic construct
FSRNNVN

SEQ ID NO: 14810 - protein, 7 aa, synthetic construct
FSRLGGN

SEQ ID NO: 14811 - protein, 7 aa, synthetic construct
YARMNTN

SEQ ID NO: 14812 - protein, 7 aa, synthetic construct
EQSTNGV

SEQ ID NO: 14813 - protein, 7 aa, synthetic construct
RAAEVYP

SEQ ID NO: 14814 - protein, 7 aa, synthetic construct
LSKGGFN

SEQ ID NO: 14815 - protein, 7 aa, synthetic construct
NKWGMSP

SEQ ID NO: 14816 - protein, 7 aa, synthetic construct
YARFNPN

SEQ ID NO: 14817 - protein, 7 aa, synthetic construct
YARSSQS

SEQ ID NO: 14818 - protein, 7 aa, synthetic construct
YAKTNNN

SEQ ID NO: 14819 - protein, 7 aa, synthetic construct
YYQGTSA

SEQ ID NO: 14820 - protein, 7 aa, synthetic construct
FSRHGIN

SEQ ID NO: 14821 - protein, 7 aa, synthetic construct
FSRVNLN

SEQ ID NO: 14822 - protein, 7 aa, synthetic construct
YSKFNAN

SEQ ID NO: 14823 - protein, 7 aa, synthetic construct
YARMNPN

SEQ ID NO: 14824 - protein, 7 aa, synthetic construct
YARSSQI

SEQ ID NO: 14825 - protein, 7 aa, synthetic construct
FAKGGAN

SEQ ID NO: 14826 - protein, 7 aa, synthetic construct
YSRYNSN

SEQ ID NO: 14827 - protein, 7 aa, synthetic construct
FARMGVN

SEQ ID NO: 14828 - protein, 7 aa, synthetic construct
FARSNLN

SEQ ID NO: 14829 - protein, 7 aa, synthetic construct
FARQGYN

SEQ ID NO: 14830 - protein, 7 aa, synthetic construct
YAKTNLN

SEQ ID NO: 14831 - protein, 7 aa, synthetic construct
FSRSNFN

SEQ ID NO: 14832 - protein, 7 aa, synthetic construct
FAKNGNN

SEQ ID NO: 14833 - protein, 7 aa, synthetic construct
YAKPGLN

SEQ ID NO: 14834 - protein, 7 aa, synthetic construct
IFSSNGV

SEQ ID NO: 14835 - protein, 7 aa, synthetic construct
FSRSNHN

SEQ ID NO: 14836 - protein, 7 aa, synthetic construct
FARSGDN

SEQ ID NO: 14837 - protein, 7 aa, synthetic construct
YARENKN

SEQ ID NO: 14838 - protein, 7 aa, synthetic construct
YAKYGTN

SEQ ID NO: 14839 - protein, 7 aa, synthetic construct
FSRSNLN

SEQ ID NO: 14840 - protein, 7 aa, synthetic construct
REVSRSY

SEQ ID NO: 14841 - protein, 7 aa, synthetic construct
MNSSSGW

SEQ ID NO: 14842 - protein, 7 aa, synthetic construct
YSRMGGN

SEQ ID NO: 14843 - protein, 7 aa, synthetic construct
FSRQGQN

SEQ ID NO: 14844 - protein, 7 aa, synthetic construct
FARIGQN

SEQ ID NO: 14845 - protein, 7 aa, synthetic construct
YAKYGVN

SEQ ID NO: 14846 - protein, 7 aa, synthetic construct
YSRPNNN

SEQ ID NO: 14847 - protein, 7 aa, synthetic construct
YSKINPN

SEQ ID NO: 14848 - protein, 7 aa, synthetic construct
IGSSNGV

SEQ ID NO: 14849 - protein, 7 aa, synthetic construct
FSKQGFN

SEQ ID NO: 14850 - protein, 7 aa, synthetic construct
YSKSNWN

SEQ ID NO: 14851 - protein, 7 aa, synthetic construct
LAKHGTN

SEQ ID NO: 14852 - protein, 7 aa, synthetic construct
FSRMGMN

SEQ ID NO: 14853 - protein, 7 aa, synthetic construct
FARMGIN

SEQ ID NO: 14854 - protein, 7 aa, synthetic construct
LSRQGWN

SEQ ID NO: 14855 - protein, 7 aa, synthetic construct
FSRTNLN

SEQ ID NO: 14856 - protein, 7 aa, synthetic construct
YARMNAN

SEQ ID NO: 14857 - protein, 7 aa, synthetic construct
LSKHGYN

SEQ ID NO: 14858 - protein, 7 aa, synthetic construct
YARAGPN

SEQ ID NO: 14859 - protein, 7 aa, synthetic construct
AQAAKNW

SEQ ID NO: 14860 - protein, 7 aa, synthetic construct
LSRTSTN

SEQ ID NO: 14861 - protein, 7 aa, synthetic construct
YSRLGVN

SEQ ID NO: 14862 - protein, 7 aa, synthetic construct
YSKYNFN

SEQ ID NO: 14863 - protein, 7 aa, synthetic construct
YTHSTYG

SEQ ID NO: 14864 - protein, 7 aa, synthetic construct
YARVNHN

SEQ ID NO: 14865 - protein, 7 aa, synthetic construct
YSRPGNN

SEQ ID NO: 14866 - protein, 7 aa, synthetic construct
YAKVGLN

SEQ ID NO: 14867 - protein, 7 aa, synthetic construct
YSRHGMN

SEQ ID NO: 14868 - protein, 7 aa, synthetic construct
YHKLLSG

SEQ ID NO: 14869 - protein, 7 aa, synthetic construct
FARQGQN

SEQ ID NO: 14870 - protein, 7 aa, synthetic construct
YARHGGN

SEQ ID NO: 14871 - protein, 7 aa, synthetic construct
LARLGSN

SEQ ID NO: 14872 - protein, 7 aa, synthetic construct
FSKYNNN

SEQ ID NO: 14873 - protein, 7 aa, synthetic construct
YSKLNKN

SEQ ID NO: 14874 - protein, 7 aa, synthetic construct
FSRGGAN

SEQ ID NO: 14875 - protein, 7 aa, synthetic construct
FARMGAN

SEQ ID NO: 14876 - protein, 7 aa, synthetic construct
ENRPERK

SEQ ID NO: 14877 - protein, 7 aa, synthetic construct
FSRNGYN

SEQ ID NO: 14878 - protein, 7 aa, synthetic construct
FARLGVN

SEQ ID NO: 14879 - protein, 7 aa, synthetic construct
RNESSFP

SEQ ID NO: 14880 - protein, 7 aa, synthetic construct
FSRHNVN

SEQ ID NO: 14881 - protein, 7 aa, synthetic construct
YFAHVQE

SEQ ID NO: 14882 - protein, 7 aa, synthetic construct
LARGGSY

SEQ ID NO: 14883 - protein, 7 aa, synthetic construct
FSKHNTN

SEQ ID NO: 14884 - protein, 7 aa, synthetic construct
IDGHSYY

SEQ ID NO: 14885 - protein, 7 aa, synthetic construct
YSKFNSN

SEQ ID NO: 14886 - protein, 7 aa, synthetic construct
YAKYNIN

SEQ ID NO: 14887 - protein, 7 aa, synthetic construct
YSKYNNN

SEQ ID NO: 14888 - protein, 7 aa, synthetic construct
YARTNGN

SEQ ID NO: 14889 - protein, 7 aa, synthetic construct
LNSMSKY

SEQ ID NO: 14890 - protein, 7 aa, synthetic construct
TGGTSYY

SEQ ID NO: 14891 - protein, 7 aa, synthetic construct
YARNNMN

SEQ ID NO: 14892 - protein, 7 aa, synthetic construct
YAKHGGN

SEQ ID NO: 14893 - protein, 7 aa, synthetic construct
RANAGAG

SEQ ID NO: 14894 - protein, 7 aa, synthetic construct
FSRTNAN

SEQ ID NO: 14895 - protein, 7 aa, synthetic construct
FSRVNMN

SEQ ID NO: 14896 - protein, 7 aa, synthetic construct
FAKHGFN

SEQ ID NO: 14897 - protein, 7 aa, synthetic construct
YARANIN

SEQ ID NO: 14898 - protein, 7 aa, synthetic construct
NQYGSGR

SEQ ID NO: 14899 - protein, 7 aa, synthetic construct
FSRVNQN

SEQ ID NO: 14900 - protein, 7 aa, synthetic construct
FARVGNN

SEQ ID NO: 14901 - protein, 7 aa, synthetic construct
FSRSNAN

SEQ ID NO: 14902 - protein, 7 aa, synthetic construct
YAKKGDN

SEQ ID NO: 14903 - protein, 7 aa, synthetic construct
FSRINSN

SEQ ID NO: 14904 - protein, 7 aa, synthetic construct
YSRFNTN

SEQ ID NO: 14905 - protein, 7 aa, synthetic construct
FARSNYN

SEQ ID NO: 14906 - protein, 7 aa, synthetic construct
LSRINEN

SEQ ID NO: 14907 - protein, 7 aa, synthetic construct
GNTSKSW

SEQ ID NO: 14908 - protein, 7 aa, synthetic construct
FARQNNN

SEQ ID NO: 14909 - protein, 7 aa, synthetic construct
LSKPGPN

SEQ ID NO: 14910 - protein, 7 aa, synthetic construct
YARNNFN

SEQ ID NO: 14911 - protein, 7 aa, synthetic construct
FARVNNN

SEQ ID NO: 14912 - protein, 7 aa, synthetic construct
FARTNVN

SEQ ID NO: 14913 - protein, 7 aa, synthetic construct
VDGRSMY

SEQ ID NO: 14914 - protein, 7 aa, synthetic construct
FSRTNHN

SEQ ID NO: 14915 - protein, 7 aa, synthetic construct
YSKINSN

SEQ ID NO: 14916 - protein, 7 aa, synthetic construct
VQGRSSY

SEQ ID NO: 14917 - protein, 7 aa, synthetic construct
FAKRNDN

SEQ ID NO: 14918 - protein, 7 aa, synthetic construct
FARLGTN

SEQ ID NO: 14919 - protein, 7 aa, synthetic construct
YSKFNPN

SEQ ID NO: 14920 - protein, 7 aa, synthetic construct
FAKQGMN

SEQ ID NO: 14921 - protein, 7 aa, synthetic construct
FAKLGPN

SEQ ID NO: 14922 - protein, 7 aa, synthetic construct
YSKINQN

SEQ ID NO: 14923 - protein, 7 aa, synthetic construct
FAKMGHN

SEQ ID NO: 14924 - protein, 7 aa, synthetic construct
YSKMGKN

SEQ ID NO: 14925 - protein, 7 aa, synthetic construct
FSRTGPN

SEQ ID NO: 14926 - protein, 7 aa, synthetic construct
NARGMGN

SEQ ID NO: 14927 - protein, 7 aa, synthetic construct
YYQYKTA

SEQ ID NO: 14928 - protein, 7 aa, synthetic construct
FSKGNNN

SEQ ID NO: 14929 - protein, 7 aa, synthetic construct
YAKYNFN

SEQ ID NO: 14930 - protein, 7 aa, synthetic construct
LAKQGSN

SEQ ID NO: 14931 - protein, 7 aa, synthetic construct
YSKPNWN

SEQ ID NO: 14932 - protein, 7 aa, synthetic construct
YAKPNYN

SEQ ID NO: 14933 - protein, 7 aa, synthetic construct
YSKFNHN

SEQ ID NO: 14934 - protein, 7 aa, synthetic construct
FSRSNPN

SEQ ID NO: 14935 - protein, 7 aa, synthetic construct
FSRPNHN

SEQ ID NO: 14936 - protein, 7 aa, synthetic construct
NQLPTPK

SEQ ID NO: 14937 - protein, 7 aa, synthetic construct
MPRSTYG

SEQ ID NO: 14938 - protein, 7 aa, synthetic construct
FAKYNNN

SEQ ID NO: 14939 - protein, 7 aa, synthetic construct
FSRFNTN

SEQ ID NO: 14940 - protein, 7 aa, synthetic construct
YAKYNYN

SEQ ID NO: 14941 - protein, 7 aa, synthetic construct
YSRGGHN

SEQ ID NO: 14942 - protein, 7 aa, synthetic construct
YARPNPN

SEQ ID NO: 14943 - protein, 7 aa, synthetic construct
YSKGGTN

SEQ ID NO: 14944 - protein, 7 aa, synthetic construct
FARHGIN

SEQ ID NO: 14945 - protein, 7 aa, synthetic construct
FARAGQN

SEQ ID NO: 14946 - protein, 7 aa, synthetic construct
FSKIGSN

SEQ ID NO: 14947 - protein, 7 aa, synthetic construct
RNTSTNW

SEQ ID NO: 14948 - protein, 7 aa, synthetic construct
FARMGSN

SEQ ID NO: 14949 - protein, 7 aa, synthetic construct
LSKWNEN

SEQ ID NO: 14950 - protein, 7 aa, synthetic construct
FSRPNYN

SEQ ID NO: 14951 - protein, 7 aa, synthetic construct
YAKTNDN

SEQ ID NO: 14952 - protein, 7 aa, synthetic construct
FSRGNNN

SEQ ID NO: 14953 - protein, 7 aa, synthetic construct
LSKNNLN

SEQ ID NO: 14954 - protein, 7 aa, synthetic construct
RTSSYGV

SEQ ID NO: 14955 - protein, 7 aa, synthetic construct
LAKIGMN

SEQ ID NO: 14956 - protein, 7 aa, synthetic construct
FARAGVN

SEQ ID NO: 14957 - protein, 7 aa, synthetic construct
FAKPNIN

SEQ ID NO: 14958 - protein, 7 aa, synthetic construct
YSRTGPN

SEQ ID NO: 14959 - protein, 7 aa, synthetic construct
YAREGWN

SEQ ID NO: 14960 - protein, 7 aa, synthetic construct
YRPRVPD

SEQ ID NO: 14961 - protein, 7 aa, synthetic construct
LAKGHYG

SEQ ID NO: 14962 - protein, 7 aa, synthetic construct
AGNSRDW

SEQ ID NO: 14963 - protein, 7 aa, synthetic construct
YARPNMN

SEQ ID NO: 14964 - protein, 7 aa, synthetic construct
YAREGFN

SEQ ID NO: 14965 - protein, 7 aa, synthetic construct
YAKQNQN

SEQ ID NO: 14966 - protein, 7 aa, synthetic construct
LSRMGGN

SEQ ID NO: 14967 - protein, 7 aa, synthetic construct
LSKWNDN

SEQ ID NO: 14968 - protein, 7 aa, synthetic construct
FSKRGDN

SEQ ID NO: 14969 - protein, 7 aa, synthetic construct
YSRKGDN

SEQ ID NO: 14970 - protein, 7 aa, synthetic construct
FSKHGFN

SEQ ID NO: 14971 - protein, 7 aa, synthetic construct
FARTNQN

SEQ ID NO: 14972 - protein, 7 aa, synthetic construct
FARSNVN

SEQ ID NO: 14973 - protein, 7 aa, synthetic construct
FAKIGPN

SEQ ID NO: 14974 - protein, 7 aa, synthetic construct
FSRSNSN

SEQ ID NO: 14975 - protein, 7 aa, synthetic construct
YAKLGGN

SEQ ID NO: 14976 - protein, 7 aa, synthetic construct
FSKLGQN

SEQ ID NO: 14977 - protein, 7 aa, synthetic construct
FARHNAN

SEQ ID NO: 14978 - protein, 7 aa, synthetic construct
FARSNHN

SEQ ID NO: 14979 - protein, 7 aa, synthetic construct
FARMGYN

SEQ ID NO: 14980 - protein, 7 aa, synthetic construct
FAKNGWN

SEQ ID NO: 14981 - protein, 7 aa, synthetic construct
FAKFGPN

SEQ ID NO: 14982 - protein, 7 aa, synthetic construct
FSRTNSN

SEQ ID NO: 14983 - protein, 7 aa, synthetic construct
FARANAN

SEQ ID NO: 14984 - protein, 7 aa, synthetic construct
YSKTNAN

SEQ ID NO: 14985 - protein, 7 aa, synthetic construct
YSKFNLN

SEQ ID NO: 14986 - protein, 7 aa, synthetic construct
YARKNEN

SEQ ID NO: 14987 - protein, 7 aa, synthetic construct
NYGNMKN

SEQ ID NO: 14988 - protein, 7 aa, synthetic construct
YSKFNTN

SEQ ID NO: 14989 - protein, 7 aa, synthetic construct
TKFGLSA

SEQ ID NO: 14990 - protein, 7 aa, synthetic construct
YAREGKN

SEQ ID NO: 14991 - protein, 7 aa, synthetic construct
FARMNHN

SEQ ID NO: 14992 - protein, 7 aa, synthetic construct
FAKGGQN

SEQ ID NO: 14993 - protein, 7 aa, synthetic construct
YSRNNGN

SEQ ID NO: 14994 - protein, 7 aa, synthetic construct
FARSNSN

SEQ ID NO: 14995 - protein, 7 aa, synthetic construct
YSREGRN

SEQ ID NO: 14996 - protein, 7 aa, synthetic construct
FARHGVN

SEQ ID NO: 14997 - protein, 7 aa, synthetic construct
FARIGAN

SEQ ID NO: 14998 - protein, 7 aa, synthetic construct
YSKTNWN

SEQ ID NO: 14999 - protein, 7 aa, synthetic construct
MWSSNGV

SEQ ID NO: 15000 - protein, 7 aa, synthetic construct
YSKYGMN

SEQ ID NO: 15001 - protein, 7 aa, synthetic construct
FSRGNPN

SEQ ID NO: 15002 - protein, 7 aa, synthetic construct
FSKMGAN

SEQ ID NO: 15003 - protein, 7 aa, synthetic construct
FARSNFN

SEQ ID NO: 15004 - protein, 7 aa, synthetic construct
YAKWNAN

SEQ ID NO: 15005 - protein, 7 aa, synthetic construct
LSKINFN

SEQ ID NO: 15006 - protein, 7 aa, synthetic construct
YAKIGGN

SEQ ID NO: 15007 - protein, 7 aa, synthetic construct
MGTSRGW

SEQ ID NO: 15008 - protein, 7 aa, synthetic construct
YFGGKQA

SEQ ID NO: 15009 - protein, 7 aa, synthetic construct
YARSSQD

SEQ ID NO: 15010 - protein, 7 aa, synthetic construct
WLKSQAS

SEQ ID NO: 15011 - protein, 7 aa, synthetic construct
FSRNNNN

SEQ ID NO: 15012 - protein, 7 aa, synthetic construct
RSNSAYP

SEQ ID NO: 15013 - protein, 7 aa, synthetic construct
GNSTSKF

SEQ ID NO: 15014 - protein, 7 aa, synthetic construct
FAKQGIN

SEQ ID NO: 15015 - protein, 7 aa, synthetic construct
LSRYGDN

SEQ ID NO: 15016 - protein, 7 aa, synthetic construct
FSRINAN

SEQ ID NO: 15017 - protein, 7 aa, synthetic construct
SKGTSYY

SEQ ID NO: 15018 - protein, 7 aa, synthetic construct
FAKGNPN

SEQ ID NO: 15019 - protein, 7 aa, synthetic construct
FSRGNTN

SEQ ID NO: 15020 - protein, 7 aa, synthetic construct
LKSSNGV

SEQ ID NO: 15021 - protein, 7 aa, synthetic construct
KHSTNGV

SEQ ID NO: 15022 - protein, 7 aa, synthetic construct
FSKPNYN

SEQ ID NO: 15023 - protein, 7 aa, synthetic construct
NRYKSGE

SEQ ID NO: 15024 - protein, 7 aa, synthetic construct
FSRNNLN

SEQ ID NO: 15025 - protein, 7 aa, synthetic construct
YPGKSSF

SEQ ID NO: 15026 - protein, 7 aa, synthetic construct
YSKYNYN

SEQ ID NO: 15027 - protein, 7 aa, synthetic construct
YAKWNPN

SEQ ID NO: 15028 - protein, 7 aa, synthetic construct
YARHNHN

SEQ ID NO: 15029 - protein, 7 aa, synthetic construct
FAKGNAN

SEQ ID NO: 15030 - protein, 7 aa, synthetic construct
GRLKSDQ

SEQ ID NO: 15031 - protein, 7 aa, synthetic construct
FARTNAN

SEQ ID NO: 15032 - protein, 7 aa, synthetic construct
YAKFNPN

SEQ ID NO: 15033 - protein, 7 aa, synthetic construct
FSRVNSN

SEQ ID NO: 15034 - protein, 7 aa, synthetic construct
RNNTVYM

SEQ ID NO: 15035 - protein, 7 aa, synthetic construct
FSKHGHN

SEQ ID NO: 15036 - protein, 7 aa, synthetic construct
LSKFNYN

SEQ ID NO: 15037 - protein, 7 aa, synthetic construct
FSKHGLN

SEQ ID NO: 15038 - protein, 7 aa, synthetic construct
SRYGDAA

SEQ ID NO: 15039 - protein, 7 aa, synthetic construct
NKSSSSW

SEQ ID NO: 15040 - protein, 7 aa, synthetic construct
FSRGGVN

SEQ ID NO: 15041 - protein, 7 aa, synthetic construct
YARSNYN

SEQ ID NO: 15042 - protein, 7 aa, synthetic construct
TPYGKMA

SEQ ID NO: 15043 - protein, 7 aa, synthetic construct
FSKKNDN

SEQ ID NO: 15044 - protein, 7 aa, synthetic construct
FSRNNSN

SEQ ID NO: 15045 - protein, 7 aa, synthetic construct
FARTNLN

SEQ ID NO: 15046 - protein, 7 aa, synthetic construct
FSKSNYN

SEQ ID NO: 15047 - protein, 7 aa, synthetic construct
FSKSGWN

SEQ ID NO: 15048 - protein, 7 aa, synthetic construct
YAKPNFN

SEQ ID NO: 15049 - protein, 7 aa, synthetic construct
FARGNPN

SEQ ID NO: 15050 - protein, 7 aa, synthetic construct
YARPNIN

SEQ ID NO: 15051 - protein, 7 aa, synthetic construct
CVKTDRN

SEQ ID NO: 15052 - protein, 7 aa, synthetic construct
FARQNTN

SEQ ID NO: 15053 - protein, 7 aa, synthetic construct
YARFNMN

SEQ ID NO: 15054 - protein, 7 aa, synthetic construct
FSKQNAN

SEQ ID NO: 15055 - protein, 7 aa, synthetic construct
FSRVNFN

SEQ ID NO: 15056 - protein, 7 aa, synthetic construct
FSRKGEN

SEQ ID NO: 15057 - protein, 7 aa, synthetic construct
YAKDGRN

SEQ ID NO: 15058 - protein, 7 aa, synthetic construct
FSRHNTN

SEQ ID NO: 15059 - protein, 7 aa, synthetic construct
LSKQGSN

SEQ ID NO: 15060 - protein, 7 aa, synthetic construct
YARRNEN

SEQ ID NO: 15061 - protein, 7 aa, synthetic construct
LRGGADR

SEQ ID NO: 15062 - protein, 7 aa, synthetic construct
YSRYNNN

SEQ ID NO: 15063 - protein, 7 aa, synthetic construct
FSRGNHN

SEQ ID NO: 15064 - protein, 7 aa, synthetic construct
FARVGQN

SEQ ID NO: 15065 - protein, 7 aa, synthetic construct
TSNNVYH

SEQ ID NO: 15066 - protein, 7 aa, synthetic construct
YSKPGYN

SEQ ID NO: 15067 - protein, 7 aa, synthetic construct
FARANHN

SEQ ID NO: 15068 - protein, 7 aa, synthetic construct
FARYNQN

SEQ ID NO: 15069 - protein, 7 aa, synthetic construct
YAKMGKN

SEQ ID NO: 15070 - protein, 7 aa, synthetic construct
YAKMNYN

SEQ ID NO: 15071 - protein, 7 aa, synthetic construct
FARSNAN

SEQ ID NO: 15072 - protein, 7 aa, synthetic construct
FSKMNSN

SEQ ID NO: 15073 - protein, 7 aa, synthetic construct
FSRPGPN

SEQ ID NO: 15074 - protein, 7 aa, synthetic construct
LARHGDN

SEQ ID NO: 15075 - protein, 7 aa, synthetic construct
LSKYNDN

SEQ ID NO: 15076 - protein, 7 aa, synthetic construct
TNARSSY

SEQ ID NO: 15077 - protein, 7 aa, synthetic construct
YARYNAN

SEQ ID NO: 15078 - protein, 7 aa, synthetic construct
YSRGGGN

SEQ ID NO: 15079 - protein, 7 aa, synthetic construct
RYTGTPA

SEQ ID NO: 15080 - protein, 7 aa, synthetic construct
YSRDNRN

SEQ ID NO: 15081 - protein, 7 aa, synthetic construct
FAKLNMN

SEQ ID NO: 15082 - protein, 7 aa, synthetic construct
YARFNNN

SEQ ID NO: 15083 - protein, 7 aa, synthetic construct
NIPYSMP

SEQ ID NO: 15084 - protein, 7 aa, synthetic construct
FSKHGYN

SEQ ID NO: 15085 - protein, 7 aa, synthetic construct
FAKNGAN

SEQ ID NO: 15086 - protein, 7 aa, synthetic construct
FSKMGVN

SEQ ID NO: 15087 - protein, 7 aa, synthetic construct
YARINSN

SEQ ID NO: 15088 - protein, 7 aa, synthetic construct
FSKHGIN

SEQ ID NO: 15089 - protein, 7 aa, synthetic construct
SESTHGM

SEQ ID NO: 15090 - protein, 7 aa, synthetic construct
GASGSIY

SEQ ID NO: 15091 - protein, 7 aa, synthetic construct
YARINLN

SEQ ID NO: 15092 - protein, 7 aa, synthetic construct
LSKIGGN

SEQ ID NO: 15093 - protein, 7 aa, synthetic construct
FSKYGMN

SEQ ID NO: 15094 - protein, 7 aa, synthetic construct
FSRSNQN

SEQ ID NO: 15095 - protein, 7 aa, synthetic construct
VRSTSGI

SEQ ID NO: 15096 - protein, 7 aa, synthetic construct
FSRGNSN

SEQ ID NO: 15097 - protein, 7 aa, synthetic construct
FARIGTN

SEQ ID NO: 15098 - protein, 7 aa, synthetic construct
YSKRGEN

SEQ ID NO: 15099 - protein, 7 aa, synthetic construct
YAKHGTN

SEQ ID NO: 15100 - protein, 7 aa, synthetic construct
FARQNAN

SEQ ID NO: 15101 - protein, 7 aa, synthetic construct
YRNAVIG

SEQ ID NO: 15102 - protein, 7 aa, synthetic construct
YSKPGNN

SEQ ID NO: 15103 - protein, 7 aa, synthetic construct
FAKSNFN

SEQ ID NO: 15104 - protein, 7 aa, synthetic construct
FARHGQN

SEQ ID NO: 15105 - protein, 7 aa, synthetic construct
FARAGSN

SEQ ID NO: 15106 - protein, 7 aa, synthetic construct
FARVGSN

SEQ ID NO: 15107 - protein, 7 aa, synthetic construct
FSKTGQN

SEQ ID NO: 15108 - protein, 7 aa, synthetic construct
FSRTNMN

SEQ ID NO: 15109 - protein, 7 aa, synthetic construct
YTYGIKA

SEQ ID NO: 15110 - protein, 7 aa, synthetic construct
YARMNSN

SEQ ID NO: 15111 - protein, 7 aa, synthetic construct
FARMNLN

SEQ ID NO: 15112 - protein, 7 aa, synthetic construct
MTGHSLY

SEQ ID NO: 15113 - protein, 7 aa, synthetic construct
FSRINPN

SEQ ID NO: 15114 - protein, 7 aa, synthetic construct
FSKYNVN

SEQ ID NO: 15115 - protein, 7 aa, synthetic construct
YARLNGN

SEQ ID NO: 15116 - protein, 7 aa, synthetic construct
GIVTVRH

SEQ ID NO: 15117 - protein, 7 aa, synthetic construct
FAKAGAN

SEQ ID NO: 15118 - protein, 7 aa, synthetic construct
YAKQNDN

SEQ ID NO: 15119 - protein, 7 aa, synthetic construct
FARQNHN

SEQ ID NO: 15120 - protein, 7 aa, synthetic construct
FARINNN

SEQ ID NO: 15121 - protein, 7 aa, synthetic construct
FARVGTN

SEQ ID NO: 15122 - protein, 7 aa, synthetic construct
FARYGNN

SEQ ID NO: 15123 - protein, 7 aa, synthetic construct
YAKINNN

SEQ ID NO: 15124 - protein, 7 aa, synthetic construct
FSKQNVN

SEQ ID NO: 15125 - protein, 7 aa, synthetic construct
FAKRGEN

SEQ ID NO: 15126 - protein, 7 aa, synthetic construct
YAKYNNN

SEQ ID NO: 15127 - protein, 7 aa, synthetic construct
FSKFNHN

SEQ ID NO: 15128 - protein, 7 aa, synthetic construct
FAKQNWN

SEQ ID NO: 15129 - protein, 7 aa, synthetic construct
FSKSGTN

SEQ ID NO: 15130 - protein, 7 aa, synthetic construct
SRTGLNA

SEQ ID NO: 15131 - protein, 7 aa, synthetic construct
YSRFNVN

SEQ ID NO: 15132 - protein, 7 aa, synthetic construct
FSRHGLN

SEQ ID NO: 15133 - protein, 7 aa, synthetic construct
YARSNGN

SEQ ID NO: 15134 - protein, 7 aa, synthetic construct
YARINAN

SEQ ID NO: 15135 - protein, 7 aa, synthetic construct
FARLGQN

SEQ ID NO: 15136 - protein, 7 aa, synthetic construct
FSRGGSN

SEQ ID NO: 15137 - protein, 7 aa, synthetic construct
FSRYGVN

SEQ ID NO: 15138 - protein, 7 aa, synthetic construct
YSKINKN

SEQ ID NO: 15139 - protein, 7 aa, synthetic construct
FARYGVN

SEQ ID NO: 15140 - protein, 7 aa, synthetic construct
YARINVN

SEQ ID NO: 15141 - protein, 7 aa, synthetic construct
YAKWNSN

SEQ ID NO: 15142 - protein, 7 aa, synthetic construct
VYDRKGT

SEQ ID NO: 15143 - protein, 7 aa, synthetic construct
FSRGNMN

SEQ ID NO: 15144 - protein, 7 aa, synthetic construct
FARQNQN

SEQ ID NO: 15145 - protein, 7 aa, synthetic construct
FSKYNSN

SEQ ID NO: 15146 - protein, 7 aa, synthetic construct
YARVNPN

SEQ ID NO: 15147 - protein, 7 aa, synthetic construct
YARHGNN

SEQ ID NO: 15148 - protein, 7 aa, synthetic construct
YSRYGGN

SEQ ID NO: 15149 - protein, 7 aa, synthetic construct
YAKMNKN

SEQ ID NO: 15150 - protein, 7 aa, synthetic construct
FSRTNFN

SEQ ID NO: 15151 - protein, 7 aa, synthetic construct
VGRWGSD

SEQ ID NO: 15152 - protein, 7 aa, synthetic construct
FSKYNGN

SEQ ID NO: 15153 - protein, 7 aa, synthetic construct
QYGTAKF

SEQ ID NO: 15154 - protein, 7 aa, synthetic construct
FAKYNHN

SEQ ID NO: 15155 - protein, 7 aa, synthetic construct
YKSNSNY

SEQ ID NO: 15156 - protein, 7 aa, synthetic construct
FAKSGEN

SEQ ID NO: 15157 - protein, 7 aa, synthetic construct
FAKHGLN

SEQ ID NO: 15158 - protein, 7 aa, synthetic construct
YARVNLN

SEQ ID NO: 15159 - protein, 7 aa, synthetic construct
CKSGGQT

SEQ ID NO: 15160 - protein, 7 aa, synthetic construct
TRTGVMA

SEQ ID NO: 15161 - protein, 7 aa, synthetic construct
FARHNQN

SEQ ID NO: 15162 - protein, 7 aa, synthetic construct
YARHNAN

SEQ ID NO: 15163 - protein, 7 aa, synthetic construct
YSKLATN

SEQ ID NO: 15164 - protein, 7 aa, synthetic construct
FARGNQN

SEQ ID NO: 15165 - protein, 7 aa, synthetic construct
FSRGGNN

SEQ ID NO: 15166 - protein, 7 aa, synthetic construct
FSKVGGN

SEQ ID NO: 15167 - protein, 7 aa, synthetic construct
YAKMNPN

SEQ ID NO: 15168 - protein, 7 aa, synthetic construct
FSRDNRN

SEQ ID NO: 15169 - protein, 7 aa, synthetic construct
YARDNRN

SEQ ID NO: 15170 - protein, 7 aa, synthetic construct
FARINHN

SEQ ID NO: 15171 - protein, 7 aa, synthetic construct
VKYTGSN

SEQ ID NO: 15172 - protein, 7 aa, synthetic construct
TQYNTYH

SEQ ID NO: 15173 - protein, 7 aa, synthetic construct
YARPGGN

SEQ ID NO: 15174 - protein, 7 aa, synthetic construct
VRQLSAG

SEQ ID NO: 15175 - protein, 7 aa, synthetic construct
NVRRNGE

SEQ ID NO: 15176 - protein, 7 aa, synthetic construct
FSRSNNN

SEQ ID NO: 15177 - protein, 7 aa, synthetic construct
FARHGHN

SEQ ID NO: 15178 - protein, 7 aa, synthetic construct
FSKYGVN

SEQ ID NO: 15179 - protein, 7 aa, synthetic construct
FSKHGAN

SEQ ID NO: 15180 - protein, 7 aa, synthetic construct
YAKWNTN

SEQ ID NO: 15181 - protein, 7 aa, synthetic construct
FAKANHN

SEQ ID NO: 15182 - protein, 7 aa, synthetic construct
FARLNSN

SEQ ID NO: 15183 - protein, 7 aa, synthetic construct
YAKWGSN

SEQ ID NO: 15184 - protein, 7 aa, synthetic construct
FSKHNPN

SEQ ID NO: 15185 - protein, 7 aa, synthetic construct
MHKLQVA

SEQ ID NO: 15186 - protein, 7 aa, synthetic construct
FSKGGHN

SEQ ID NO: 15187 - protein, 7 aa, synthetic construct
FSRFNAN

SEQ ID NO: 15188 - protein, 7 aa, synthetic construct
IPSKSAG

SEQ ID NO: 15189 - protein, 7 aa, synthetic construct
YAKWNNN

SEQ ID NO: 15190 - protein, 7 aa, synthetic construct
VSASTKW

SEQ ID NO: 15191 - protein, 7 aa, synthetic construct
YSREGNN

SEQ ID NO: 15192 - protein, 7 aa, synthetic construct
FARQNFN

SEQ ID NO: 15193 - protein, 7 aa, synthetic construct
FAKQNMN

SEQ ID NO: 15194 - protein, 7 aa, synthetic construct
RASGVSY

SEQ ID NO: 15195 - protein, 7 aa, synthetic construct
FSKGGWN

SEQ ID NO: 15196 - protein, 7 aa, synthetic construct
TRHGGSP

SEQ ID NO: 15197 - protein, 7 aa, synthetic construct
RDRQSTY

SEQ ID NO: 15198 - protein, 7 aa, synthetic construct
YARVNVN

SEQ ID NO: 15199 - protein, 7 aa, synthetic construct
MNAKSHY

SEQ ID NO: 15200 - protein, 7 aa, synthetic construct
FSKINNN

SEQ ID NO: 15201 - protein, 7 aa, synthetic construct
FSKNGYN

SEQ ID NO: 15202 - protein, 7 aa, synthetic construct
FAKANFN

SEQ ID NO: 15203 - protein, 7 aa, synthetic construct
HAGDRWI

SEQ ID NO: 15204 - protein, 7 aa, synthetic construct
FSRIGYN

SEQ ID NO: 15205 - protein, 7 aa, synthetic construct
FAKYNAN

SEQ ID NO: 15206 - protein, 7 aa, synthetic construct
FSRINQN

SEQ ID NO: 15207 - protein, 7 aa, synthetic construct
YARVNAN

SEQ ID NO: 15208 - protein, 7 aa, synthetic construct
YSRPGFN

SEQ ID NO: 15209 - protein, 7 aa, synthetic construct
SRGSGYA

SEQ ID NO: 15210 - protein, 7 aa, synthetic construct
NLRGNGG

SEQ ID NO: 15211 - protein, 7 aa, synthetic construct
FAKYGAN

SEQ ID NO: 15212 - protein, 7 aa, synthetic construct
FSKFNMN

SEQ ID NO: 15213 - protein, 7 aa, synthetic construct
FSRHGVN

SEQ ID NO: 15214 - protein, 7 aa, synthetic construct
FSKTNFN

SEQ ID NO: 15215 - protein, 7 aa, synthetic construct
YSKYNPN

SEQ ID NO: 15216 - protein, 7 aa, synthetic construct
FSKLGTN

SEQ ID NO: 15217 - protein, 7 aa, synthetic construct
FARINTN

SEQ ID NO: 15218 - protein, 7 aa, synthetic construct
YARHNVN

SEQ ID NO: 15219 - protein, 7 aa, synthetic construct
FSRGGMN

SEQ ID NO: 15220 - protein, 7 aa, synthetic construct
YVRNIAS

SEQ ID NO: 15221 - protein, 7 aa, synthetic construct
TRSGASS

SEQ ID NO: 15222 - protein, 7 aa, synthetic construct
FARQNLN

SEQ ID NO: 15223 - protein, 7 aa, synthetic construct
FSKSNMN

SEQ ID NO: 15224 - protein, 7 aa, synthetic construct
SGSPTKW

SEQ ID NO: 15225 - protein, 7 aa, synthetic construct
FARLGAN

SEQ ID NO: 15226 - protein, 7 aa, synthetic construct
NSSGARY

SEQ ID NO: 15227 - protein, 7 aa, synthetic construct
FSKINHN

SEQ ID NO: 15228 - protein, 7 aa, synthetic construct
FARSNNN

SEQ ID NO: 15229 - protein, 7 aa, synthetic construct
FSKMGIN

SEQ ID NO: 15230 - protein, 7 aa, synthetic construct
FSKFNSN

SEQ ID NO: 15231 - protein, 7 aa, synthetic construct
YMRGSLN

SEQ ID NO: 15232 - protein, 7 aa, synthetic construct
FSKHNSN

SEQ ID NO: 15233 - protein, 7 aa, synthetic construct
YARFNAN

SEQ ID NO: 15234 - protein, 7 aa, synthetic construct
YSRVSGL

SEQ ID NO: 15235 - protein, 7 aa, synthetic construct
FSRGGHN

SEQ ID NO: 15236 - protein, 7 aa, synthetic construct
FAKYGMN

SEQ ID NO: 15237 - protein, 7 aa, synthetic construct
FAKHGVN

SEQ ID NO: 15238 - protein, 7 aa, synthetic construct
FRMGGAG

SEQ ID NO: 15239 - protein, 7 aa, synthetic construct
QALSGKN

SEQ ID NO: 15240 - protein, 7 aa, synthetic construct
ISNAVKY

SEQ ID NO: 15241 - protein, 7 aa, synthetic construct
FAKYGTN

SEQ ID NO: 15242 - protein, 7 aa, synthetic construct
FARNNHN

SEQ ID NO: 15243 - protein, 7 aa, synthetic construct
FSRANGN

SEQ ID NO: 15244 - protein, 7 aa, synthetic construct
TKGMSSY

SEQ ID NO: 15245 - protein, 7 aa, synthetic construct
YAKHNHN

SEQ ID NO: 15246 - protein, 7 aa, synthetic construct
FAKQGTN

SEQ ID NO: 15247 - protein, 7 aa, synthetic construct
FARMGQN

SEQ ID NO: 15248 - protein, 7 aa, synthetic construct
LPKGNYG

SEQ ID NO: 15249 - protein, 7 aa, synthetic construct
FSKYGAN

SEQ ID NO: 15250 - protein, 7 aa, synthetic construct
YVKSAMS

SEQ ID NO: 15251 - protein, 7 aa, synthetic construct
FAKHGNN

SEQ ID NO: 15252 - protein, 7 aa, synthetic construct
TSTGRMA

SEQ ID NO: 15253 - protein, 7 aa, synthetic construct
YARPNLN

SEQ ID NO: 15254 - protein, 7 aa, synthetic construct
LARVAKD

SEQ ID NO: 15255 - protein, 7 aa, synthetic construct
FAKWNQN

SEQ ID NO: 15256 - protein, 7 aa, synthetic construct
FSKYNMN

SEQ ID NO: 15257 - protein, 7 aa, synthetic construct
FARANIN

SEQ ID NO: 15258 - protein, 7 aa, synthetic construct
LPRSGNV

SEQ ID NO: 15259 - protein, 7 aa, synthetic construct
FARVNHN

SEQ ID NO: 15260 - protein, 7 aa, synthetic construct
YVRNGQG

SEQ ID NO: 15261 - protein, 7 aa, synthetic construct
FSRHNAN

SEQ ID NO: 15262 - protein, 7 aa, synthetic construct
FSRFGGN

SEQ ID NO: 15263 - protein, 7 aa, synthetic construct
FARNNAN

SEQ ID NO: 15264 - protein, 7 aa, synthetic construct
RNGTNGY

SEQ ID NO: 15265 - protein, 7 aa, synthetic construct
FSKHGVN

SEQ ID NO: 15266 - protein, 7 aa, synthetic construct
FARLNGN

SEQ ID NO: 15267 - protein, 7 aa, synthetic construct
FAKYGHN

SEQ ID NO: 15268 - protein, 7 aa, synthetic construct
TKYGHTA

SEQ ID NO: 15269 - protein, 7 aa, synthetic construct
FAKRGDN

SEQ ID NO: 15270 - protein, 7 aa, synthetic construct
RSHNTVV

SEQ ID NO: 15271 - protein, 7 aa, synthetic construct
FAKMNNN

SEQ ID NO: 15272 - protein, 7 aa, synthetic construct
YARLGGN

SEQ ID NO: 15273 - protein, 7 aa, synthetic construct
IIMVKNA

SEQ ID NO: 15274 - protein, 7 aa, synthetic construct
YARHNQN

SEQ ID NO: 15275 - protein, 7 aa, synthetic construct
LHTRTYD

SEQ ID NO: 15276 - protein, 7 aa, synthetic construct
FAKHGAN

SEQ ID NO: 15277 - protein, 7 aa, synthetic construct
YKPFTTN

SEQ ID NO: 15278 - protein, 7 aa, synthetic construct
FSRMGQN

SEQ ID NO: 15279 - protein, 7 aa, synthetic construct
YAKYNTN

SEQ ID NO: 15280 - protein, 7 aa, synthetic construct
FSKQGIN

SEQ ID NO: 15281 - protein, 7 aa, synthetic construct
YAKWNQN

SEQ ID NO: 15282 - protein, 7 aa, synthetic construct
FSRPGYN

SEQ ID NO: 15283 - protein, 7 aa, synthetic construct
FSRGNFN

SEQ ID NO: 15284 - protein, 7 aa, synthetic construct
VNMARAL

SEQ ID NO: 15285 - protein, 7 aa, synthetic construct
FSRSGGN

SEQ ID NO: 15286 - protein, 7 aa, synthetic construct
TGAGMKY

SEQ ID NO: 15287 - protein, 7 aa, synthetic construct
FARHNSN

SEQ ID NO: 15288 - protein, 7 aa, synthetic construct
FARPNIN

SEQ ID NO: 15289 - protein, 7 aa, synthetic construct
FAKPNNN

SEQ ID NO: 15290 - protein, 7 aa, synthetic construct
RQMDTYG

SEQ ID NO: 15291 - protein, 7 aa, synthetic construct
TARGVSA

SEQ ID NO: 15292 - protein, 7 aa, synthetic construct
FVRTINN

SEQ ID NO: 15293 - protein, 7 aa, synthetic construct
FARIGGN

SEQ ID NO: 15294 - protein, 7 aa, synthetic construct
FSKQGVN

SEQ ID NO: 15295 - protein, 7 aa, synthetic construct
FARANFN

SEQ ID NO: 15296 - protein, 7 aa, synthetic construct
RANHSGG

SEQ ID NO: 15297 - protein, 7 aa, synthetic construct
FARGNDN

SEQ ID NO: 15298 - protein, 7 aa, synthetic construct
FARYGAN

SEQ ID NO: 15299 - protein, 7 aa, synthetic construct
YAKWNGN

SEQ ID NO: 15300 - protein, 7 aa, synthetic construct
FARLNHN

SEQ ID NO: 15301 - protein, 7 aa, synthetic construct
FARLGLN

SEQ ID NO: 15302 - protein, 7 aa, synthetic construct
YAKWGAN

SEQ ID NO: 15303 - protein, 7 aa, synthetic construct
FSRHGQN

SEQ ID NO: 15304 - protein, 7 aa, synthetic construct
FSRHGAN

SEQ ID NO: 15305 - protein, 7 aa, synthetic construct
YSRENRN

SEQ ID NO: 15306 - protein, 7 aa, synthetic construct
FAKQGAN

SEQ ID NO: 15307 - protein, 7 aa, synthetic construct
FSKRGEN

SEQ ID NO: 15308 - protein, 7 aa, synthetic construct
YAREGAN

SEQ ID NO: 15309 - protein, 7 aa, synthetic construct
FSKFNAN

SEQ ID NO: 15310 - protein, 7 aa, synthetic construct
FARKGEN

SEQ ID NO: 15311 - protein, 7 aa, synthetic construct
NVPSSMY

SEQ ID NO: 15312 - protein, 7 aa, synthetic construct
GLKYTPH

SEQ ID NO: 15313 - protein, 7 aa, synthetic construct
FSRQGGN

SEQ ID NO: 15314 - protein, 7 aa, synthetic construct
FSKYGLN

SEQ ID NO: 15315 - protein, 7 aa, synthetic construct
FSRHGMN

SEQ ID NO: 15316 - protein, 7 aa, synthetic construct
FARLGGN

SEQ ID NO: 15317 - protein, 7 aa, synthetic construct
FAKYGSN

SEQ ID NO: 15318 - protein, 7 aa, synthetic construct
WSKLNAI

SEQ ID NO: 15319 - protein, 7 aa, synthetic construct
FSKNGMN

SEQ ID NO: 15320 - protein, 7 aa, synthetic construct
FARINAN

SEQ ID NO: 15321 - protein, 7 aa, synthetic construct
SGNGYVR

SEQ ID NO: 15322 - protein, 7 aa, synthetic construct
FAKYGIN

SEQ ID NO: 15323 - protein, 7 aa, synthetic construct
FARMNMN

SEQ ID NO: 15324 - protein, 7 aa, synthetic construct
FARKGDN

SEQ ID NO: 15325 - protein, 7 aa, synthetic construct
RNSSSTY

SEQ ID NO: 15326 - protein, 7 aa, synthetic construct
YSKYGGN

SEQ ID NO: 15327 - protein, 7 aa, synthetic construct
FARINSN

SEQ ID NO: 15328 - protein, 7 aa, synthetic construct
FSKYNTN

SEQ ID NO: 15329 - protein, 7 aa, synthetic construct
YAKYNSN

SEQ ID NO: 15330 - protein, 7 aa, synthetic construct
RRADSGG

SEQ ID NO: 15331 - protein, 7 aa, synthetic construct
FARQNSN

SEQ ID NO: 15332 - protein, 7 aa, synthetic construct
YSKGGGN

SEQ ID NO: 15333 - protein, 7 aa, synthetic construct
YARDGFN

SEQ ID NO: 15334 - protein, 7 aa, synthetic construct
FARPGNN

SEQ ID NO: 15335 - protein, 7 aa, synthetic construct
YARINHN

SEQ ID NO: 15336 - protein, 7 aa, synthetic construct
FAREGKN

SEQ ID NO: 15337 - protein, 7 aa, synthetic construct
FRNGTGA

SEQ ID NO: 15338 - protein, 7 aa, synthetic construct
RGSNLYP

SEQ ID NO: 15339 - protein, 7 aa, synthetic construct
YARVNTN

SEQ ID NO: 15340 - protein, 7 aa, synthetic construct
GNQTSRN

SEQ ID NO: 15341 - protein, 7 aa, synthetic construct
FSRGNQN

SEQ ID NO: 15342 - protein, 7 aa, synthetic construct
YSKPGAN

SEQ ID NO: 15343 - protein, 7 aa, synthetic construct
FSKYGQN

SEQ ID NO: 15344 - protein, 7 aa, synthetic construct
YSKPGIN

SEQ ID NO: 15345 - protein, 7 aa, synthetic construct
YAKPNHN

SEQ ID NO: 15346 - protein, 7 aa, synthetic construct
TRTHDKL

SEQ ID NO: 15347 - protein, 7 aa, synthetic construct
FARRNEN

SEQ ID NO: 15348 - protein, 7 aa, synthetic construct
FSRRNEN

SEQ ID NO: 15349 - protein, 7 aa, synthetic construct
YSRYGNN

SEQ ID NO: 15350 - protein, 7 aa, synthetic construct
FAKANWN

SEQ ID NO: 15351 - protein, 7 aa, synthetic construct
YAKINKN

SEQ ID NO: 15352 - protein, 7 aa, synthetic construct
YSKIGKN

SEQ ID NO: 15353 - protein, 7 aa, synthetic construct
YAKWGGN

SEQ ID NO: 15354 - protein, 7 aa, synthetic construct
YSKWGNN

SEQ ID NO: 15355 - protein, 7 aa, synthetic construct
YAKYNAN

SEQ ID NO: 15356 - protein, 7 aa, synthetic construct
KSGLSSY

SEQ ID NO: 15357 - protein, 7 aa, synthetic construct
FARMNQN

SEQ ID NO: 15358 - protein, 7 aa, synthetic construct
FAKNGSN

SEQ ID NO: 15359 - protein, 7 aa, synthetic construct
IPTMKYA

SEQ ID NO: 15360 - protein, 7 aa, synthetic construct
SRTGREA

SEQ ID NO: 15361 - protein, 7 aa, synthetic construct
FARNNVN

SEQ ID NO: 15362 - protein, 7 aa, synthetic construct
YARQNAM

SEQ ID NO: 15363 - protein, 7 aa, synthetic construct
YSKFNGN

SEQ ID NO: 15364 - protein, 7 aa, synthetic construct
ISGYGGG

SEQ ID NO: 15365 - protein, 7 aa, synthetic construct
FAKFNPN

SEQ ID NO: 15366 - protein, 7 aa, synthetic construct
KSEYGPF

SEQ ID NO: 15367 - protein, 7 aa, synthetic construct
YARANGN

SEQ ID NO: 15368 - protein, 7 aa, synthetic construct
LSYSGRD

SEQ ID NO: 15369 - protein, 7 aa, synthetic construct
YSRPNQN

SEQ ID NO: 15370 - protein, 7 aa, synthetic construct
YYSNTKV

SEQ ID NO: 15371 - protein, 7 aa, synthetic construct
FAKSNWN

SEQ ID NO: 15372 - protein, 7 aa, synthetic construct
FARSNPN

SEQ ID NO: 15373 - protein, 7 aa, synthetic construct
YSRSNIQ

SEQ ID NO: 15374 - protein, 7 aa, synthetic construct
EIRTGHL

SEQ ID NO: 15375 - protein, 7 aa, synthetic construct
EKGMGRL

SEQ ID NO: 15376 - protein, 7 aa, synthetic construct
LSRAAGI

SEQ ID NO: 15377 - protein, 7 aa, synthetic construct
VDKKYYA

SEQ ID NO: 15378 - protein, 7 aa, synthetic construct
RNLPMLN

SEQ ID NO: 15379 - protein, 7 aa, synthetic construct
YAKPGQN

SEQ ID NO: 15380 - protein, 7 aa, synthetic construct
FARANTN

SEQ ID NO: 15381 - protein, 7 aa, synthetic construct
LRNGFSP

SEQ ID NO: 15382 - protein, 7 aa, synthetic construct
FARNNTN

SEQ ID NO: 15383 - protein, 7 aa, synthetic construct
LAGTSRF

SEQ ID NO: 15384 - protein, 7 aa, synthetic construct
FARINVN

SEQ ID NO: 15385 - protein, 7 aa, synthetic construct
VLGRGVN

SEQ ID NO: 15386 - protein, 7 aa, synthetic construct
LRGDGYG

SEQ ID NO: 15387 - protein, 7 aa, synthetic construct
FARANMN

SEQ ID NO: 15388 - protein, 7 aa, synthetic construct
FSRHGGN

SEQ ID NO: 15389 - protein, 7 aa, synthetic construct
RGEWSSP

SEQ ID NO: 15390 - protein, 7 aa, synthetic construct
FSKANEN

SEQ ID NO: 15391 - protein, 7 aa, synthetic construct
QPMRGGG

SEQ ID NO: 15392 - protein, 7 aa, synthetic construct
YGPQPKL

SEQ ID NO: 15393 - protein, 7 aa, synthetic construct
FSRHGTN

SEQ ID NO: 15394 - protein, 7 aa, synthetic construct
YSKDGWN

SEQ ID NO: 15395 - protein, 7 aa, synthetic construct
YSKYGFN

SEQ ID NO: 15396 - protein, 7 aa, synthetic construct
FAKYNSN

SEQ ID NO: 15397 - protein, 7 aa, synthetic construct
FAKYNMN

SEQ ID NO: 15398 - protein, 7 aa, synthetic construct
DVRLRGQ

SEQ ID NO: 15399 - protein, 7 aa, synthetic construct
FSKYGSN

SEQ ID NO: 15400 - protein, 7 aa, synthetic construct
WLKSTPN

SEQ ID NO: 15401 - protein, 7 aa, synthetic construct
NMFGSGM

SEQ ID NO: 15402 - protein, 7 aa, synthetic construct
NHGYMRD

SEQ ID NO: 15403 - protein, 7 aa, synthetic construct
FAKYNLN

SEQ ID NO: 15404 - protein, 7 aa, synthetic construct
YAKKNDN

SEQ ID NO: 15405 - protein, 7 aa, synthetic construct
YAKYNQN

SEQ ID NO: 15406 - protein, 7 aa, synthetic construct
FSRANPN

SEQ ID NO: 15407 - protein, 7 aa, synthetic construct
RGSNSMP

SEQ ID NO: 15408 - protein, 7 aa, synthetic construct
YKVSSTY

SEQ ID NO: 15409 - protein, 7 aa, synthetic construct
NSSSGPR

SEQ ID NO: 15410 - protein, 7 aa, synthetic construct
FARMNVN

SEQ ID NO: 15411 - protein, 7 aa, synthetic construct
LSRSGTD

SEQ ID NO: 15412 - protein, 7 aa, synthetic construct
FARYNAN

SEQ ID NO: 15413 - protein, 7 aa, synthetic construct
YAKFNQN

SEQ ID NO: 15414 - protein, 7 aa, synthetic construct
MKNGGAA

SEQ ID NO: 15415 - protein, 7 aa, synthetic construct
MDYGWSD

SEQ ID NO: 15416 - protein, 7 aa, synthetic construct
FSRGGTN

SEQ ID NO: 15417 - protein, 7 aa, synthetic construct
FARHGGN

SEQ ID NO: 15418 - protein, 7 aa, synthetic construct
FARIGDN

SEQ ID NO: 15419 - protein, 7 aa, synthetic construct
YSAGKIN

SEQ ID NO: 15420 - protein, 7 aa, synthetic construct
YARFNTN

SEQ ID NO: 15421 - protein, 7 aa, synthetic construct
YARYNTN

SEQ ID NO: 15422 - protein, 7 aa, synthetic construct
FSRPGHN

SEQ ID NO: 15423 - protein, 7 aa, synthetic construct
SYAVSRD

SEQ ID NO: 15424 - protein, 7 aa, synthetic construct
YARYNNN

SEQ ID NO: 15425 - protein, 7 aa, synthetic construct
YSRFNGN

SEQ ID NO: 15426 - protein, 7 aa, synthetic construct
RGTTGAG

SEQ ID NO: 15427 - protein, 7 aa, synthetic construct
RSHASAG

SEQ ID NO: 15428 - protein, 7 aa, synthetic construct
FAKYGVN

SEQ ID NO: 15429 - protein, 7 aa, synthetic construct
GMGSTKY

SEQ ID NO: 15430 - protein, 7 aa, synthetic construct
YAKFNVN

SEQ ID NO: 15431 - protein, 7 aa, synthetic construct
YMKSGPN

SEQ ID NO: 15432 - protein, 7 aa, synthetic construct
RNSGSVF

SEQ ID NO: 15433 - protein, 7 aa, synthetic construct
TENTVRK

SEQ ID NO: 15434 - protein, 7 aa, synthetic construct
YARFNVN

SEQ ID NO: 15435 - protein, 7 aa, synthetic construct
YARPNAN

SEQ ID NO: 15436 - protein, 7 aa, synthetic construct
NYNRGAG

SEQ ID NO: 15437 - protein, 7 aa, synthetic construct
YMKHSPN

SEQ ID NO: 15438 - protein, 7 aa, synthetic construct
FAKIGAN

SEQ ID NO: 15439 - protein, 7 aa, synthetic construct
FARPNNN

SEQ ID NO: 15440 - protein, 7 aa, synthetic construct
YARINQN

SEQ ID NO: 15441 - protein, 7 aa, synthetic construct
FARNNSN

SEQ ID NO: 15442 - protein, 7 aa, synthetic construct
WKGGTSN

SEQ ID NO: 15443 - protein, 7 aa, synthetic construct
YAKRNDN

SEQ ID NO: 15444 - protein, 7 aa, synthetic construct
FSRMNPN

SEQ ID NO: 15445 - protein, 7 aa, synthetic construct
NSSDGPR

SEQ ID NO: 15446 - protein, 7 aa, synthetic construct
YAKWGNN

SEQ ID NO: 15447 - protein, 7 aa, synthetic construct
FAKFNHN

SEQ ID NO: 15448 - protein, 7 aa, synthetic construct
FSRMGGN

SEQ ID NO: 15449 - protein, 7 aa, synthetic construct
FARMNAN

SEQ ID NO: 15450 - protein, 7 aa, synthetic construct
YYAKVLP

SEQ ID NO: 15451 - protein, 7 aa, synthetic construct
FSKFNQN

SEQ ID NO: 15452 - protein, 7 aa, synthetic construct
FARLNAN

SEQ ID NO: 15453 - protein, 7 aa, synthetic construct
FARVGGN

SEQ ID NO: 15454 - protein, 7 aa, synthetic construct
YAKFNSN

SEQ ID NO: 15455 - protein, 7 aa, synthetic construct
TRGGGSG

SEQ ID NO: 15456 - protein, 7 aa, synthetic construct
FARNNFN

SEQ ID NO: 15457 - protein, 7 aa, synthetic construct
SAPPTKF

SEQ ID NO: 15458 - protein, 7 aa, synthetic construct
WNQFTGN

SEQ ID NO: 15459 - protein, 7 aa, synthetic construct
DANHNRN

SEQ ID NO: 15460 - protein, 7 aa, synthetic construct
FSRLGDN

SEQ ID NO: 15461 - protein, 7 aa, synthetic construct
YTKGTVN

SEQ ID NO: 15462 - protein, 7 aa, synthetic construct
YAKMGTN

SEQ ID NO: 15463 - protein, 7 aa, synthetic construct
FARHNGN

SEQ ID NO: 15464 - protein, 7 aa, synthetic construct
FARVNQN

SEQ ID NO: 15465 - protein, 7 aa, synthetic construct
THALVNA

SEQ ID NO: 15466 - protein, 7 aa, synthetic construct
FAKFNVN

SEQ ID NO: 15467 - protein, 7 aa, synthetic construct
YMKREIS

SEQ ID NO: 15468 - protein, 7 aa, synthetic construct
TPPTFKV

SEQ ID NO: 15469 - protein, 7 aa, synthetic construct
FAKYGNN

SEQ ID NO: 15470 - protein, 7 aa, synthetic construct
YTRYGLD

SEQ ID NO: 15471 - protein, 7 aa, synthetic construct
YARVNNN

SEQ ID NO: 15472 - protein, 7 aa, synthetic construct
TPTGRPA

SEQ ID NO: 15473 - protein, 7 aa, synthetic construct
FSKYGNN

SEQ ID NO: 15474 - protein, 7 aa, synthetic construct
FAKHGQN

SEQ ID NO: 15475 - protein, 7 aa, synthetic construct
WRGNGVN

SEQ ID NO: 15476 - protein, 7 aa, synthetic construct
YAKFNHN

SEQ ID NO: 15477 - protein, 7 aa, synthetic construct
FSKQGWN

SEQ ID NO: 15478 - protein, 7 aa, synthetic construct
FSKFNVN

SEQ ID NO: 15479 - protein, 7 aa, synthetic construct
FSKYGGN

SEQ ID NO: 15480 - protein, 7 aa, synthetic construct
YSKFGPN

SEQ ID NO: 15481 - protein, 7 aa, synthetic construct
FSKYNLN

SEQ ID NO: 15482 - protein, 7 aa, synthetic construct
FAKYNTN

SEQ ID NO: 15483 - protein, 7 aa, synthetic construct
GNRNYSE

SEQ ID NO: 15484 - protein, 7 aa, synthetic construct
FARMNPN

SEQ ID NO: 15485 - protein, 7 aa, synthetic construct
YAKVSSN

SEQ ID NO: 15486 - protein, 7 aa, synthetic construct
FSKGGSN

SEQ ID NO: 15487 - protein, 7 aa, synthetic construct
FAKYGLN

SEQ ID NO: 15488 - protein, 7 aa, synthetic construct
FARMNTN

SEQ ID NO: 15489 - protein, 7 aa, synthetic construct
FAKAGSN

SEQ ID NO: 15490 - protein, 7 aa, synthetic construct
YARVNSN

SEQ ID NO: 15491 - protein, 7 aa, synthetic construct
YARHGPN

SEQ ID NO: 15492 - protein, 7 aa, synthetic construct
IVHLKNS

SEQ ID NO: 15493 - protein, 7 aa, synthetic construct
GRANHSG

SEQ ID NO: 15494 - protein, 7 aa, synthetic construct
FSKNNFN

SEQ ID NO: 15495 - protein, 7 aa, synthetic construct
YAKYNVN

SEQ ID NO: 15496 - protein, 7 aa, synthetic construct
FARVGDN

SEQ ID NO: 15497 - protein, 7 aa, synthetic construct
FSRPNPN

SEQ ID NO: 15498 - protein, 7 aa, synthetic construct
FAKYNVN

SEQ ID NO: 15499 - protein, 7 aa, synthetic construct
NNRGTSE

SEQ ID NO: 15500 - protein, 7 aa, synthetic construct
HRSGGYD

SEQ ID NO: 15501 - protein, 7 aa, synthetic construct
FARHNVN

SEQ ID NO: 15502 - protein, 7 aa, synthetic construct
YARHNDN

SEQ ID NO: 15503 - protein, 7 aa, synthetic construct
TLTGRNS

SEQ ID NO: 15504 - protein, 7 aa, synthetic construct
FAKMGSN

SEQ ID NO: 15505 - protein, 7 aa, synthetic construct
FARVNSN

SEQ ID NO: 15506 - protein, 7 aa, synthetic construct
VYRPVTN

SEQ ID NO: 15507 - protein, 7 aa, synthetic construct
FSRNNQN

SEQ ID NO: 15508 - protein, 7 aa, synthetic construct
MKSYGVG

SEQ ID NO: 15509 - protein, 7 aa, synthetic construct
FSKYGIN

SEQ ID NO: 15510 - protein, 7 aa, synthetic construct
FARANQN

SEQ ID NO: 15511 - protein, 7 aa, synthetic construct
FARHGSN

SEQ ID NO: 15512 - protein, 7 aa, synthetic construct
RSNGSGP

SEQ ID NO: 15513 - protein, 7 aa, synthetic construct
NNSRGSY

SEQ ID NO: 15514 - protein, 7 aa, synthetic construct
YTKLTGN

SEQ ID NO: 15515 - protein, 7 aa, synthetic construct
FAKHNQN

SEQ ID NO: 15516 - protein, 7 aa, synthetic construct
YSRFNSN

SEQ ID NO: 15517 - protein, 7 aa, synthetic construct
FSKKGDN

SEQ ID NO: 15518 - protein, 7 aa, synthetic construct
YARPNQN

SEQ ID NO: 15519 - protein, 7 aa, synthetic construct
FARVNYN

SEQ ID NO: 15520 - protein, 7 aa, synthetic construct
RTEYQVG

SEQ ID NO: 15521 - protein, 7 aa, synthetic construct
FARYNNN

SEQ ID NO: 15522 - protein, 7 aa, synthetic construct
FSRYNGN

SEQ ID NO: 15523 - protein, 7 aa, synthetic construct
FARFGGN

SEQ ID NO: 15524 - protein, 7 aa, synthetic construct
FSKENCN

SEQ ID NO: 15525 - protein, 7 aa, synthetic construct
DSGYNRN

SEQ ID NO: 15526 - protein, 7 aa, synthetic construct
FAKIGVN

SEQ ID NO: 15527 - protein, 7 aa, synthetic construct
YARPNGN

SEQ ID NO: 15528 - protein, 7 aa, synthetic construct
NRSGTSA

SEQ ID NO: 15529 - protein, 7 aa, synthetic construct
FAKYNIN

SEQ ID NO: 15530 - protein, 7 aa, synthetic construct
FAKLGMN

SEQ ID NO: 15531 - protein, 7 aa, synthetic construct
YARFNSN

SEQ ID NO: 15532 - protein, 7 aa, synthetic construct
FAKKGEN

SEQ ID NO: 15533 - protein, 7 aa, synthetic construct
FAKLGLN

SEQ ID NO: 15534 - protein, 7 aa, synthetic construct
FAKVGPN

SEQ ID NO: 15535 - protein, 7 aa, synthetic construct
RGSSRDS

SEQ ID NO: 15536 - protein, 7 aa, synthetic construct
FARVNVN

SEQ ID NO: 15537 - protein, 7 aa, synthetic construct
SGYGMMN

SEQ ID NO: 15538 - protein, 7 aa, synthetic construct
FAKLGAN

SEQ ID NO: 15539 - protein, 7 aa, synthetic construct
DRNTRMV

SEQ ID NO: 15540 - protein, 7 aa, synthetic construct
AQKDTMY

SEQ ID NO: 15541 - protein, 7 aa, synthetic construct
YSRFNQN

SEQ ID NO: 15542 - protein, 7 aa, synthetic construct
FSKYGTN

SEQ ID NO: 15543 - protein, 7 aa, synthetic construct
YARPNTN

SEQ ID NO: 15544 - protein, 7 aa, synthetic construct
FKGTTPY

SEQ ID NO: 15545 - protein, 7 aa, synthetic construct
RWAKEVG

SEQ ID NO: 15546 - protein, 7 aa, synthetic construct
WYQNQKD

SEQ ID NO: 15547 - protein, 7 aa, synthetic construct
TMLGARN

SEQ ID NO: 15548 - protein, 7 aa, synthetic construct
FAKYGQN

SEQ ID NO: 15549 - protein, 7 aa, synthetic construct
DRGDRFS

SEQ ID NO: 15550 - protein, 7 aa, synthetic construct
YAKFNTN

SEQ ID NO: 15551 - protein, 7 aa, synthetic construct
FSKGGAN

SEQ ID NO: 15552 - protein, 7 aa, synthetic construct
FARKNDN

SEQ ID NO: 15553 - protein, 7 aa, synthetic construct
FARVNLN

SEQ ID NO: 15554 - protein, 7 aa, synthetic construct
GPPAFKA

SEQ ID NO: 15555 - protein, 7 aa, synthetic construct
QPRRIEV

SEQ ID NO: 15556 - protein, 7 aa, synthetic construct
RSRNESG

SEQ ID NO: 15557 - protein, 7 aa, synthetic construct
LRTAGAG

SEQ ID NO: 15558 - protein, 7 aa, synthetic construct
FARVNMN

SEQ ID NO: 15559 - protein, 7 aa, synthetic construct
FAKRNEN

SEQ ID NO: 15560 - protein, 7 aa, synthetic construct
FAKHGGN

SEQ ID NO: 15561 - protein, 7 aa, synthetic construct
SWTGATA

SEQ ID NO: 15562 - protein, 7 aa, synthetic construct
FSKYNQN

SEQ ID NO: 15563 - protein, 7 aa, synthetic construct
FARVNAN

SEQ ID NO: 15564 - protein, 7 aa, synthetic construct
YAKINTN

SEQ ID NO: 15565 - protein, 7 aa, synthetic construct
FAKTNAN

SEQ ID NO: 15566 - protein, 7 aa, synthetic construct
TRTGIAS

SEQ ID NO: 15567 - protein, 7 aa, synthetic construct
FAKANPN

SEQ ID NO: 15568 - protein, 7 aa, synthetic construct
YMKRGVD

SEQ ID NO: 15569 - protein, 7 aa, synthetic construct
FARRNDN

SEQ ID NO: 15570 - protein, 7 aa, synthetic construct
INLSKLQ

SEQ ID NO: 15571 - protein, 7 aa, synthetic construct
FSRYGQN

SEQ ID NO: 15572 - protein, 7 aa, synthetic construct
LWKNAMD

SEQ ID NO: 15573 - protein, 7 aa, synthetic construct
FARNNLN

SEQ ID NO: 15574 - protein, 7 aa, synthetic construct
FAKHNHN

SEQ ID NO: 15575 - protein, 7 aa, synthetic construct
YAKNNSN

SEQ ID NO: 15576 - protein, 7 aa, synthetic construct
WHSPNGI

SEQ ID NO: 15577 - protein, 7 aa, synthetic construct
YARPGEN

SEQ ID NO: 15578 - protein, 7 aa, synthetic construct
EKYKGHM

SEQ ID NO: 15579 - protein, 7 aa, synthetic construct
YQRNNMV

SEQ ID NO: 15580 - protein, 7 aa, synthetic construct
FSKIGGN

SEQ ID NO: 15581 - protein, 7 aa, synthetic construct
FARMNSN

SEQ ID NO: 15582 - protein, 7 aa, synthetic construct
FAKIGSN

SEQ ID NO: 15583 - protein, 7 aa, synthetic construct
RSSNSAY

SEQ ID NO: 15584 - protein, 7 aa, synthetic construct
FAKSNSN

SEQ ID NO: 15585 - protein, 7 aa, synthetic construct
FSKQNQN

SEQ ID NO: 15586 - protein, 7 aa, synthetic construct
YAKNSNI

SEQ ID NO: 15587 - protein, 7 aa, synthetic construct
RSGTIYP

SEQ ID NO: 15588 - protein, 7 aa, synthetic construct
FARINQN

SEQ ID NO: 15589 - protein, 7 aa, synthetic construct
TSHGRSA

SEQ ID NO: 15590 - protein, 7 aa, synthetic construct
FARYNSN

SEQ ID NO: 15591 - protein, 7 aa, synthetic construct
NNRGTQA

SEQ ID NO: 15592 - protein, 7 aa, synthetic construct
FARMGGN

SEQ ID NO: 15593 - protein, 7 aa, synthetic construct
FARANSN

SEQ ID NO: 15594 - protein, 7 aa, synthetic construct
FARENKN

SEQ ID NO: 15595 - protein, 7 aa, synthetic construct
FSRGGQN

SEQ ID NO: 15596 - protein, 7 aa, synthetic construct
FSRSNGN

SEQ ID NO: 15597 - protein, 7 aa, synthetic construct
FSRGNGN

SEQ ID NO: 15598 - protein, 7 aa, synthetic construct
YARMNGN

SEQ ID NO: 15599 - protein, 7 aa, synthetic construct
GIIRSPV

SEQ ID NO: 15600 - protein, 7 aa, synthetic construct
WKEHAKN

SEQ ID NO: 15601 - protein, 7 aa, synthetic construct
YSKPNTN

SEQ ID NO: 15602 - protein, 7 aa, synthetic construct
YAKPNIN

SEQ ID NO: 15603 - protein, 7 aa, synthetic construct
FAKLGSN

SEQ ID NO: 15604 - protein, 7 aa, synthetic construct
GKGNTLY

SEQ ID NO: 15605 - protein, 7 aa, synthetic construct
FSRPGTN

SEQ ID NO: 15606 - protein, 7 aa, synthetic construct
FAKANMN

SEQ ID NO: 15607 - protein, 7 aa, synthetic construct
FSRAGNE

SEQ ID NO: 15608 - protein, 7 aa, synthetic construct
FNGRGIN

SEQ ID NO: 15609 - protein, 7 aa, synthetic construct
TQYSSGY

SEQ ID NO: 15610 - protein, 7 aa, synthetic construct
NLRSRGE

SEQ ID NO: 15611 - protein, 7 aa, synthetic construct
LHRNMTD

SEQ ID NO: 15612 - protein, 7 aa, synthetic construct
GIRRQVD

SEQ ID NO: 15613 - protein, 7 aa, synthetic construct
FAKYGGN

SEQ ID NO: 15614 - protein, 7 aa, synthetic construct
AGSTSRA

SEQ ID NO: 15615 - protein, 7 aa, synthetic construct
KRSAGLD

SEQ ID NO: 15616 - protein, 7 aa, synthetic construct
FSKFNTN

SEQ ID NO: 15617 - protein, 7 aa, synthetic construct
HKNGSGQ

SEQ ID NO: 15618 - protein, 7 aa, synthetic construct
YAKINPN

SEQ ID NO: 15619 - protein, 7 aa, synthetic construct
NPRKNEM

SEQ ID NO: 15620 - protein, 7 aa, synthetic construct
FAKLNIN

SEQ ID NO: 15621 - protein, 7 aa, synthetic construct
QDTNKYW

SEQ ID NO: 15622 - protein, 7 aa, synthetic construct
HSMKVSY

SEQ ID NO: 15623 - protein, 7 aa, synthetic construct
WSPGRPN

SEQ ID NO: 15624 - protein, 7 aa, synthetic construct
FSKKGEN

SEQ ID NO: 15625 - protein, 7 aa, synthetic construct
FSKVNSN

SEQ ID NO: 15626 - protein, 7 aa, synthetic construct
TYIGNKA

SEQ ID NO: 15627 - protein, 7 aa, synthetic construct
EGSSWKN

SEQ ID NO: 15628 - protein, 7 aa, synthetic construct
YARHNNN

SEQ ID NO: 15629 - protein, 7 aa, synthetic construct
NSGKTMY

SEQ ID NO: 15630 - protein, 7 aa, synthetic construct
FAKLNHN

SEQ ID NO: 15631 - protein, 7 aa, synthetic construct
YAKFNLN

SEQ ID NO: 15632 - protein, 7 aa, synthetic construct
FSRENRN

SEQ ID NO: 15633 - protein, 7 aa, synthetic construct
MGHLSSY

SEQ ID NO: 15634 - protein, 7 aa, synthetic construct
RGGMYTG

SEQ ID NO: 15635 - protein, 7 aa, synthetic construct
YAKVNVN

SEQ ID NO: 15636 - protein, 7 aa, synthetic construct
TRDGRVA

SEQ ID NO: 15637 - protein, 7 aa, synthetic construct
ARQVKEL

SEQ ID NO: 15638 - protein, 7 aa, synthetic construct
FAKFNNN

SEQ ID NO: 15639 - protein, 7 aa, synthetic construct
TNGHGRN

SEQ ID NO: 15640 - protein, 7 aa, synthetic construct
FAKYNQN

SEQ ID NO: 15641 - protein, 7 aa, synthetic construct
YARFGGN

SEQ ID NO: 15642 - protein, 7 aa, synthetic construct
YAKFGGN

SEQ ID NO: 15643 - protein, 7 aa, synthetic construct
FSKINLN

SEQ ID NO: 15644 - protein, 7 aa, synthetic construct
YARHNTN

SEQ ID NO: 15645 - protein, 7 aa, synthetic construct
FARPNAN

SEQ ID NO: 15646 - protein, 7 aa, synthetic construct
YARHNGN

SEQ ID NO: 15647 - protein, 7 aa, synthetic construct
FAKEGCN

SEQ ID NO: 15648 - protein, 7 aa, synthetic construct
FAKHNNN

SEQ ID NO: 15649 - protein, 7 aa, synthetic construct
FAKHNLN

SEQ ID NO: 15650 - protein, 7 aa, synthetic construct
YNKGIPY

SEQ ID NO: 15651 - protein, 7 aa, synthetic construct
FSKFNNN

SEQ ID NO: 15652 - protein, 7 aa, synthetic construct
TDKYSTF

SEQ ID NO: 15653 - protein, 7 aa, synthetic construct
FARVNIN

SEQ ID NO: 15654 - protein, 7 aa, synthetic construct
YMSETWS

SEQ ID NO: 15655 - protein, 7 aa, synthetic construct
YIKNQRD

SEQ ID NO: 15656 - protein, 7 aa, synthetic construct
NQGTVRF

SEQ ID NO: 15657 - protein, 7 aa, synthetic construct
FARPNGN

SEQ ID NO: 15658 - protein, 7 aa, synthetic construct
WQAKVMS

SEQ ID NO: 15659 - protein, 7 aa, synthetic construct
IHAKQLN

SEQ ID NO: 15660 - protein, 7 aa, synthetic construct
VSATRFG

SEQ ID NO: 15661 - protein, 7 aa, synthetic construct
YLKKDLS

SEQ ID NO: 15662 - protein, 7 aa, synthetic construct
VHPEYHA

SEQ ID NO: 15663 - protein, 7 aa, synthetic construct
KGGGHPF

SEQ ID NO: 15664 - protein, 7 aa, synthetic construct
FAKQGGN

SEQ ID NO: 15665 - protein, 7 aa, synthetic construct
FSKINAN

SEQ ID NO: 15666 - protein, 7 aa, synthetic construct
MRGPVSP

SEQ ID NO: 15667 - protein, 7 aa, synthetic construct
FARINPN

SEQ ID NO: 15668 - protein, 7 aa, synthetic construct
FAKFNTN

SEQ ID NO: 15669 - protein, 7 aa, synthetic construct
SMRSPNS

SEQ ID NO: 15670 - protein, 7 aa, synthetic construct
FARMGEN

SEQ ID NO: 15671 - protein, 7 aa, synthetic construct
YTKTSPS

SEQ ID NO: 15672 - protein, 7 aa, synthetic construct
FLKSNTG

SEQ ID NO: 15673 - protein, 7 aa, synthetic construct
KANGSYA

SEQ ID NO: 15674 - protein, 7 aa, synthetic construct
FAKDNYN

SEQ ID NO: 15675 - protein, 7 aa, synthetic construct
KGDPPWG

SEQ ID NO: 15676 - protein, 7 aa, synthetic construct
FARNNMN

SEQ ID NO: 15677 - protein, 7 aa, synthetic construct
YAAKSNN

SEQ ID NO: 15678 - protein, 7 aa, synthetic construct
YRPGKNE

SEQ ID NO: 15679 - protein, 7 aa, synthetic construct
FARMNGN

SEQ ID NO: 15680 - protein, 7 aa, synthetic construct
FAKVGGN

SEQ ID NO: 15681 - protein, 7 aa, synthetic construct
FAKMNAN

SEQ ID NO: 15682 - protein, 7 aa, synthetic construct
YAKYNDN

SEQ ID NO: 15683 - protein, 7 aa, synthetic construct
FAKFGGN

SEQ ID NO: 15684 - protein, 7 aa, synthetic construct
FSKHGGN

SEQ ID NO: 15685 - protein, 7 aa, synthetic construct
KPYHNDI

SEQ ID NO: 15686 - protein, 7 aa, synthetic construct
VQGVGKN

SEQ ID NO: 15687 - protein, 7 aa, synthetic construct
FARVNFN

SEQ ID NO: 15688 - protein, 7 aa, synthetic construct
FAKLGGN

SEQ ID NO: 15689 - protein, 7 aa, synthetic construct
FAKYNGN

SEQ ID NO: 15690 - protein, 7 aa, synthetic construct
QKQREIG

SEQ ID NO: 15691 - protein, 7 aa, synthetic construct
FAKIGTN

SEQ ID NO: 15692 - protein, 7 aa, synthetic construct
FAKANVN

SEQ ID NO: 15693 - protein, 7 aa, synthetic construct
FARQNPN

SEQ ID NO: 15694 - protein, 7 aa, synthetic construct
TNRNDIR

SEQ ID NO: 15695 - protein, 7 aa, synthetic construct
YKHGPLA

SEQ ID NO: 15696 - protein, 7 aa, synthetic construct
TSVGTRN

SEQ ID NO: 15697 - protein, 7 aa, synthetic construct
FARVNTN

SEQ ID NO: 15698 - protein, 7 aa, synthetic construct
VANYGRD

SEQ ID NO: 15699 - protein, 7 aa, synthetic construct
HSKGTRD

SEQ ID NO: 15700 - protein, 7 aa, synthetic construct
FSRVNPN

SEQ ID NO: 15701 - protein, 7 aa, synthetic construct
FAKTNVN

SEQ ID NO: 15702 - protein, 7 aa, synthetic construct
RDATNYP

SEQ ID NO: 15703 - protein, 7 aa, synthetic construct
KSGGVGY

SEQ ID NO: 15704 - protein, 7 aa, synthetic construct
FARINGN

SEQ ID NO: 15705 - protein, 7 aa, synthetic construct
FAKFNGN

SEQ ID NO: 15706 - protein, 7 aa, synthetic construct
WNKNIHS

SEQ ID NO: 15707 - protein, 7 aa, synthetic construct
FARPGGN

SEQ ID NO: 15708 - protein, 7 aa, synthetic construct
FAKINHN

SEQ ID NO: 15709 - protein, 7 aa, synthetic construct
GFTNSVY

SEQ ID NO: 15710 - protein, 7 aa, synthetic construct
FSRHNSN

SEQ ID NO: 15711 - protein, 7 aa, synthetic construct
FAKFNIN

SEQ ID NO: 15712 - protein, 7 aa, synthetic construct
YKGWTAA

SEQ ID NO: 15713 - protein, 7 aa, synthetic construct
RPYTDMD

SEQ ID NO: 15714 - protein, 7 aa, synthetic construct
YAKINSN

SEQ ID NO: 15715 - protein, 7 aa, synthetic construct
FAKINMN

SEQ ID NO: 15716 - protein, 7 aa, synthetic construct
FARPGSN

SEQ ID NO: 15717 - protein, 7 aa, synthetic construct
YAKINHN

SEQ ID NO: 15718 - protein, 7 aa, synthetic construct
NGDGGSY

SEQ ID NO: 15719 - protein, 7 aa, synthetic construct
FARHNPN

SEQ ID NO: 15720 - protein, 7 aa, synthetic construct
FSKGGQN

SEQ ID NO: 15721 - protein, 7 aa, synthetic construct
RAGGASG

SEQ ID NO: 15722 - protein, 7 aa, synthetic construct
PIKSQSG

SEQ ID NO: 15723 - protein, 7 aa, synthetic construct
FARYGGN

SEQ ID NO: 15724 - protein, 7 aa, synthetic construct
FSKPGFN

SEQ ID NO: 15725 - protein, 7 aa, synthetic construct
HWSGANP

SEQ ID NO: 15726 - protein, 7 aa, synthetic construct
FSKFNIN

SEQ ID NO: 15727 - protein, 7 aa, synthetic construct
NWGNKSD

SEQ ID NO: 15728 - protein, 7 aa, synthetic construct
FARFNSN

SEQ ID NO: 15729 - protein, 7 aa, synthetic construct
YQASMAN

SEQ ID NO: 15730 - protein, 7 aa, synthetic construct
FAKINFN

SEQ ID NO: 15731 - protein, 7 aa, synthetic construct
YSRPNGN

SEQ ID NO: 15732 - protein, 7 aa, synthetic construct
IKGYGLD

SEQ ID NO: 15733 - protein, 7 aa, synthetic construct
FSKLSQQ

SEQ ID NO: 15734 - protein, 7 aa, synthetic construct
FAKIGDN

SEQ ID NO: 15735 - protein, 7 aa, synthetic construct
FARHNFN

SEQ ID NO: 15736 - protein, 7 aa, synthetic construct
FSKINSN

SEQ ID NO: 15737 - protein, 7 aa, synthetic construct
FAKPGIN

SEQ ID NO: 15738 - protein, 7 aa, synthetic construct
YSKWNPN

SEQ ID NO: 15739 - protein, 7 aa, synthetic construct
FSKWNQN

SEQ ID NO: 15740 - protein, 7 aa, synthetic construct
WTPSAYS

SEQ ID NO: 15741 - protein, 7 aa, synthetic construct
DPRSRAS

SEQ ID NO: 15742 - protein, 7 aa, synthetic construct
FARKNEN

SEQ ID NO: 15743 - protein, 7 aa, synthetic construct
YMVRTGG

SEQ ID NO: 15744 - protein, 7 aa, synthetic construct
FAKFNQN

SEQ ID NO: 15745 - protein, 7 aa, synthetic construct
GYKGTMP

SEQ ID NO: 15746 - protein, 7 aa, synthetic construct
FVGGPMT

SEQ ID NO: 15747 - protein, 7 aa, synthetic construct
QSLKGAG

SEQ ID NO: 15748 - protein, 7 aa, synthetic construct
LLREGDW

SEQ ID NO: 15749 - protein, 7 aa, synthetic construct
FARPNSN

SEQ ID NO: 15750 - protein, 7 aa, synthetic construct
YKSASPN

SEQ ID NO: 15751 - protein, 7 aa, synthetic construct
FSKPNAN

SEQ ID NO: 15752 - protein, 7 aa, synthetic construct
EHGRGHD

SEQ ID NO: 15753 - protein, 7 aa, synthetic construct
GQVRTPT

SEQ ID NO: 15754 - protein, 7 aa, synthetic construct
YIAGPVK

SEQ ID NO: 15755 - protein, 7 aa, synthetic construct
WHTSIPN

SEQ ID NO: 15756 - protein, 7 aa, synthetic construct
DKGKGMY

SEQ ID NO: 15757 - protein, 7 aa, synthetic construct
HRSWGDA

SEQ ID NO: 15758 - protein, 7 aa, synthetic construct
FAKNNLN

SEQ ID NO: 15759 - protein, 7 aa, synthetic construct
FSRKGDN

SEQ ID NO: 15760 - protein, 7 aa, synthetic construct
WRNGEAN

SEQ ID NO: 15761 - protein, 7 aa, synthetic construct
HGHGTYT

SEQ ID NO: 15762 - protein, 7 aa, synthetic construct
NSKVGRD

SEQ ID NO: 15763 - protein, 7 aa, synthetic construct
FAKHNAN

SEQ ID NO: 15764 - protein, 7 aa, synthetic construct
FARPNTN

SEQ ID NO: 15765 - protein, 7 aa, synthetic construct
RSTGGAG

SEQ ID NO: 15766 - protein, 7 aa, synthetic construct
YGSGTQY

SEQ ID NO: 15767 - protein, 7 aa, synthetic construct
QGSTNSY

SEQ ID NO: 15768 - protein, 7 aa, synthetic construct
YNNTSMR

SEQ ID NO: 15769 - protein, 7 aa, synthetic construct
NNYGSPG

SEQ ID NO: 15770 - protein, 7 aa, synthetic construct
FAKNNGN

SEQ ID NO: 15771 - protein, 7 aa, synthetic construct
YVSYQVN

SEQ ID NO: 15772 - protein, 7 aa, synthetic construct
EMKHGHM

SEQ ID NO: 15773 - protein, 7 aa, synthetic construct
VRANHTN

SEQ ID NO: 15774 - protein, 7 aa, synthetic construct
YRPGAHA

SEQ ID NO: 15775 - protein, 7 aa, synthetic construct
FARNNDN

SEQ ID NO: 15776 - protein, 7 aa, synthetic construct
YQRDVMQ

SEQ ID NO: 15777 - protein, 7 aa, synthetic construct
WRSAAVP

SEQ ID NO: 15778 - protein, 7 aa, synthetic construct
FAKYGDN

SEQ ID NO: 15779 - protein, 7 aa, synthetic construct
YARENFN

SEQ ID NO: 15780 - protein, 7 aa, synthetic construct
CKNVTAE

SEQ ID NO: 15781 - protein, 7 aa, synthetic construct
LKSRIIE

SEQ ID NO: 15782 - protein, 7 aa, synthetic construct
FSKFNDN

SEQ ID NO: 15783 - protein, 7 aa, synthetic construct
MQPYGSG

SEQ ID NO: 15784 - protein, 7 aa, synthetic construct
FARPNLN

SEQ ID NO: 15785 - protein, 7 aa, synthetic construct
YSRPGDN

SEQ ID NO: 15786 - protein, 7 aa, synthetic construct
FSKPGNN

SEQ ID NO: 15787 - protein, 7 aa, synthetic construct
YNKTGAN

SEQ ID NO: 15788 - protein, 7 aa, synthetic construct
FAKYGEN

SEQ ID NO: 15789 - protein, 7 aa, synthetic construct
FAKHNFN

SEQ ID NO: 15790 - protein, 7 aa, synthetic construct
FARPGIN

SEQ ID NO: 15791 - protein, 7 aa, synthetic construct
FSRGGEN

SEQ ID NO: 15792 - protein, 7 aa, synthetic construct
PDINKRS

SEQ ID NO: 15793 - protein, 7 aa, synthetic construct
NAKYSGE

SEQ ID NO: 15794 - protein, 7 aa, synthetic construct
FSRPNVN

SEQ ID NO: 15795 - protein, 7 aa, synthetic construct
YAKVNLN

SEQ ID NO: 15796 - protein, 7 aa, synthetic construct
RGDVQAW

SEQ ID NO: 15797 - protein, 7 aa, synthetic construct
FAKINNN

SEQ ID NO: 15798 - protein, 7 aa, synthetic construct
FAKNGEN

SEQ ID NO: 15799 - protein, 7 aa, synthetic construct
YSKTNGN

SEQ ID NO: 15800 - protein, 7 aa, synthetic construct
LNINFHG

SEQ ID NO: 15801 - protein, 7 aa, synthetic construct
SYHDMRD

SEQ ID NO: 15802 - protein, 7 aa, synthetic construct
FSKPNVN

SEQ ID NO: 15803 - protein, 7 aa, synthetic construct
FAKNNMN

SEQ ID NO: 15804 - protein, 7 aa, synthetic construct
FAKWNEN

SEQ ID NO: 15805 - protein, 7 aa, synthetic construct
NVKGTTY

SEQ ID NO: 15806 - protein, 7 aa, synthetic construct
LTYGDRS

SEQ ID NO: 15807 - protein, 7 aa, synthetic construct
KSSSMGV

SEQ ID NO: 15808 - protein, 7 aa, synthetic construct
SVYGGAG

SEQ ID NO: 15809 - protein, 7 aa, synthetic construct
FAKVNPN

SEQ ID NO: 15810 - protein, 7 aa, synthetic construct
FSRDNAN

SEQ ID NO: 15811 - protein, 7 aa, synthetic construct
FARPGYN

SEQ ID NO: 15812 - protein, 7 aa, synthetic construct
YARENPN

SEQ ID NO: 15813 - protein, 7 aa, synthetic construct
NMNNSYS

SEQ ID NO: 15814 - protein, 7 aa, synthetic construct
TSYGQGS

SEQ ID NO: 15815 - protein, 7 aa, synthetic construct
FARHGTN

SEQ ID NO: 15816 - protein, 7 aa, synthetic construct
FSKPNWN

SEQ ID NO: 15817 - protein, 7 aa, synthetic construct
SRDNQHW

SEQ ID NO: 15818 - protein, 7 aa, synthetic construct
YSNFSHS

SEQ ID NO: 15819 - protein, 7 aa, synthetic construct
TKSGDKA

SEQ ID NO: 15820 - protein, 7 aa, synthetic construct
RDGRDSV

SEQ ID NO: 15821 - protein, 7 aa, synthetic construct
RSHAGSD

SEQ ID NO: 15822 - protein, 7 aa, synthetic construct
YLLNSHS

SEQ ID NO: 15823 - protein, 7 aa, synthetic construct
NVLGVPV

SEQ ID NO: 15824 - protein, 7 aa, synthetic construct
FAKMNQN

SEQ ID NO: 15825 - protein, 7 aa, synthetic construct
YAKNNDN

SEQ ID NO: 15826 - protein, 7 aa, synthetic construct
FAKHNTN

SEQ ID NO: 15827 - protein, 7 aa, synthetic construct
FSRFNGN

SEQ ID NO: 15828 - protein, 7 aa, synthetic construct
YAKINQN

SEQ ID NO: 15829 - protein, 7 aa, synthetic construct
FAKTNDN

SEQ ID NO: 15830 - protein, 7 aa, synthetic construct
HGKTSRE

SEQ ID NO: 15831 - protein, 7 aa, synthetic construct
YSKPNSN

SEQ ID NO: 15832 - protein, 7 aa, synthetic construct
TPMSTHF

SEQ ID NO: 15833 - protein, 7 aa, synthetic construct
LSQTVSY

SEQ ID NO: 15834 - protein, 7 aa, synthetic construct
RRAEPQS

SEQ ID NO: 15835 - protein, 7 aa, synthetic construct
YSKPGWN

SEQ ID NO: 15836 - protein, 7 aa, synthetic construct
YAKFGNN

SEQ ID NO: 15837 - protein, 7 aa, synthetic construct
FAKPGLN

SEQ ID NO: 15838 - protein, 7 aa, synthetic construct
SKTTTQY

SEQ ID NO: 15839 - protein, 7 aa, synthetic construct
MKNVSNF

SEQ ID NO: 15840 - protein, 7 aa, synthetic construct
YHRSHEL

SEQ ID NO: 15841 - protein, 7 aa, synthetic construct
RITGSST

SEQ ID NO: 15842 - protein, 7 aa, synthetic construct
FSRPGSN

SEQ ID NO: 15843 - protein, 7 aa, synthetic construct
LASNGVN

SEQ ID NO: 15844 - protein, 7 aa, synthetic construct
FAKINQN

SEQ ID NO: 15845 - protein, 7 aa, synthetic construct
FAREGTN

SEQ ID NO: 15846 - protein, 7 aa, synthetic construct
VMTRNEW

SEQ ID NO: 15847 - protein, 7 aa, synthetic construct
FAKVNIN

SEQ ID NO: 15848 - protein, 7 aa, synthetic construct
FAKKNDN

SEQ ID NO: 15849 - protein, 7 aa, synthetic construct
FSRMGTN

SEQ ID NO: 15850 - protein, 7 aa, synthetic construct
YAKFGIN

SEQ ID NO: 15851 - protein, 7 aa, synthetic construct
NTDYGYA

SEQ ID NO: 15852 - protein, 7 aa, synthetic construct
KHANIIG

SEQ ID NO: 15853 - protein, 7 aa, synthetic construct
NTRMTGA

SEQ ID NO: 15854 - protein, 7 aa, synthetic construct
FAKKNEN

SEQ ID NO: 15855 - protein, 7 aa, synthetic construct
HSRNYTD

SEQ ID NO: 15856 - protein, 7 aa, synthetic construct
FAKHGTN

SEQ ID NO: 15857 - protein, 7 aa, synthetic construct
FAKINAN

SEQ ID NO: 15858 - protein, 7 aa, synthetic construct
YAKDGLN

SEQ ID NO: 15859 - protein, 7 aa, synthetic construct
FAKINPN

SEQ ID NO: 15860 - protein, 7 aa, synthetic construct
GRMEKST

SEQ ID NO: 15861 - protein, 7 aa, synthetic construct
YAKDGTN

SEQ ID NO: 15862 - protein, 7 aa, synthetic construct
FAKPGGN

SEQ ID NO: 15863 - protein, 7 aa, synthetic construct
WTKSNTA

SEQ ID NO: 15864 - protein, 7 aa, synthetic construct
IRNITGE

SEQ ID NO: 15865 - protein, 7 aa, synthetic construct
WTKANDH

SEQ ID NO: 15866 - protein, 7 aa, synthetic construct
YAKDNPN

SEQ ID NO: 15867 - protein, 7 aa, synthetic construct
FARDNHN

SEQ ID NO: 15868 - protein, 7 aa, synthetic construct
SPTGRAA

SEQ ID NO: 15869 - protein, 7 aa, synthetic construct
GVSNMMV

SEQ ID NO: 15870 - protein, 7 aa, synthetic construct
GDNKPNW

SEQ ID NO: 15871 - protein, 7 aa, synthetic construct
IMVRDTK

SEQ ID NO: 15872 - protein, 7 aa, synthetic construct
LESSRGY

SEQ ID NO: 15873 - protein, 7 aa, synthetic construct
FSKPGQN

SEQ ID NO: 15874 - protein, 7 aa, synthetic construct
SRGLNPS

SEQ ID NO: 15875 - protein, 7 aa, synthetic construct
IAGLNKA

SEQ ID NO: 15876 - protein, 7 aa, synthetic construct
KVNGGSG

SEQ ID NO: 15877 - protein, 7 aa, synthetic construct
VSNNIRG

SEQ ID NO: 15878 - protein, 7 aa, synthetic construct
SSKGTNA

SEQ ID NO: 15879 - protein, 7 aa, synthetic construct
FSRDGVN

SEQ ID NO: 15880 - protein, 7 aa, synthetic construct
FSKPNMN

SEQ ID NO: 15881 - protein, 7 aa, synthetic construct
FAKDNIN

SEQ ID NO: 15882 - protein, 7 aa, synthetic construct
TKHGADV

SEQ ID NO: 15883 - protein, 7 aa, synthetic construct
DQNKNTW

SEQ ID NO: 15884 - protein, 7 aa, synthetic construct
YSKENVN

SEQ ID NO: 15885 - protein, 7 aa, synthetic construct
HGPNSYG

SEQ ID NO: 15886 - protein, 7 aa, synthetic construct
GNSNTAH

SEQ ID NO: 15887 - protein, 7 aa, synthetic construct
HYGDKYQ

SEQ ID NO: 15888 - protein, 7 aa, synthetic construct
YRSTVAD

SEQ ID NO: 15889 - protein, 7 aa, synthetic construct
FSRNNPN

SEQ ID NO: 15890 - protein, 7 aa, synthetic construct
YRPGSGD

SEQ ID NO: 15891 - protein, 7 aa, synthetic construct
NKTWGDA

SEQ ID NO: 15892 - protein, 7 aa, synthetic construct
TGTNTTY

SEQ ID NO: 15893 - protein, 7 aa, synthetic construct
EAPANRN

SEQ ID NO: 15894 - protein, 7 aa, synthetic construct
FSKEGMN

SEQ ID NO: 15895 - protein, 7 aa, synthetic construct
GDESRYY

SEQ ID NO: 15896 - protein, 7 aa, synthetic construct
FSRHNMN

SEQ ID NO: 15897 - protein, 7 aa, synthetic construct
YLNKSYD

SEQ ID NO: 15898 - protein, 7 aa, synthetic construct
FSKPGTN

SEQ ID NO: 15899 - protein, 7 aa, synthetic construct
FAKFNEN

SEQ ID NO: 15900 - protein, 7 aa, synthetic construct
FSKPNNN

SEQ ID NO: 15901 - protein, 7 aa, synthetic construct
GFRGDGA

SEQ ID NO: 15902 - protein, 7 aa, synthetic construct
FARHNMN

SEQ ID NO: 15903 - protein, 7 aa, synthetic construct
YSGSSYA

SEQ ID NO: 15904 - protein, 7 aa, synthetic construct
WLKHEAS

SEQ ID NO: 15905 - protein, 7 aa, synthetic construct
FAKPGMN

SEQ ID NO: 15906 - protein, 7 aa, synthetic construct
KTESDNR

SEQ ID NO: 15907 - protein, 7 aa, synthetic construct
VKRSEPI

SEQ ID NO: 15908 - protein, 7 aa, synthetic construct
FSRDNQN

SEQ ID NO: 15909 - protein, 7 aa, synthetic construct
FSRPGQN

SEQ ID NO: 15910 - protein, 7 aa, synthetic construct
FARDNAN

SEQ ID NO: 15911 - protein, 7 aa, synthetic construct
YYKNGAA

SEQ ID NO: 15912 - protein, 7 aa, synthetic construct
FARENWN

SEQ ID NO: 15913 - protein, 7 aa, synthetic construct
FSKPGWN

SEQ ID NO: 15914 - protein, 7 aa, synthetic construct
FAKDNAN

SEQ ID NO: 15915 - protein, 7 aa, synthetic construct
KPNGYPA

SEQ ID NO: 15916 - protein, 7 aa, synthetic construct
FAKLGEN

SEQ ID NO: 15917 - protein, 7 aa, synthetic construct
FAKDGEN

SEQ ID NO: 15918 - protein, 7 aa, synthetic construct
FARENDN

SEQ ID NO: 15919 - protein, 7 aa, synthetic construct
RKSETGG

SEQ ID NO: 15920 - protein, 7 aa, synthetic construct
RNEGAAG

SEQ ID NO: 15921 - protein, 7 aa, synthetic construct
FAKDGSN

SEQ ID NO: 15922 - protein, 7 aa, synthetic construct
WENKQAW

SEQ ID NO: 15923 - protein, 7 aa, synthetic construct
FSKDNQN

SEQ ID NO: 15924 - protein, 7 aa, synthetic construct
DGGRGRD

SEQ ID NO: 15925 - protein, 7 aa, synthetic construct
FSKYNPN

SEQ ID NO: 15926 - protein, 7 aa, synthetic construct
FSRRGDN

SEQ ID NO: 15927 - protein, 7 aa, synthetic construct
FSKFGHN

SEQ ID NO: 15928 - protein, 7 aa, synthetic construct
YSRYGPN

SEQ ID NO: 15929 - protein, 7 aa, synthetic construct
FARFNNN

SEQ ID NO: 15930 - protein, 7 aa, synthetic construct
FARFNAN

SEQ ID NO: 15931 - protein, 7 aa, synthetic construct
YSKWGQN

SEQ ID NO: 15932 - protein, 7 aa, synthetic construct
YSKWNGN

SEQ ID NO: 15933 - protein, 7 aa, synthetic construct
FSRYNQN

SEQ ID NO: 15934 - protein, 7 aa, synthetic construct
YARPNYN

SEQ ID NO: 15935 - protein, 7 aa, synthetic construct
YSRRNEN

SEQ ID NO: 15936 - protein, 7 aa, synthetic construct
FSKANWN

SEQ ID NO: 15937 - protein, 7 aa, synthetic construct
FARENYN

SEQ ID NO: 15938 - protein, 7 aa, synthetic construct
YARFGNN

SEQ ID NO: 15939 - protein, 7 aa, synthetic construct
FSRPGFN

SEQ ID NO: 15940 - protein, 7 aa, synthetic construct
FSKANYN

SEQ ID NO: 15941 - protein, 7 aa, synthetic construct
YSKININ

SEQ ID NO: 15942 - protein, 7 aa, synthetic construct
YAKSNYN

SEQ ID NO: 15943 - protein, 7 aa, synthetic construct
LHARNIN

SEQ ID NO: 15944 - protein, 7 aa, synthetic construct
YAKTNIN

SEQ ID NO: 15945 - protein, 7 aa, synthetic construct
YAKSGYN

SEQ ID NO: 15946 - protein, 7 aa, synthetic construct
FSKVGIN

SEQ ID NO: 15947 - protein, 7 aa, synthetic construct
YAKNGNN

SEQ ID NO: 15948 - protein, 7 aa, synthetic construct
YARPGNN

SEQ ID NO: 15949 - protein, 7 aa, synthetic construct
YAKPGIN

SEQ ID NO: 15950 - protein, 7 aa, synthetic construct
YSRHGAN

SEQ ID NO: 15951 - protein, 7 aa, synthetic construct
YAKMGNN

SEQ ID NO: 15952 - protein, 7 aa, synthetic construct
FARNGNN

SEQ ID NO: 15953 - protein, 7 aa, synthetic construct
FAKGGPN

SEQ ID NO: 15954 - protein, 7 aa, synthetic construct
YSKTGIN

SEQ ID NO: 15955 - protein, 7 aa, synthetic construct
YAKVGNN

SEQ ID NO: 15956 - protein, 7 aa, synthetic construct
YSKAGSN

SEQ ID NO: 15957 - protein, 7 aa, synthetic construct
YSRANLN

SEQ ID NO: 15958 - protein, 7 aa, synthetic construct
YSRPGPN

SEQ ID NO: 15959 - protein, 7 aa, synthetic construct
FARTGHN

SEQ ID NO: 15960 - protein, 7 aa, synthetic construct
VAMRGIG

SEQ ID NO: 15961 - protein, 7 aa, synthetic construct
LSKVGQN

SEQ ID NO: 15962 - protein, 7 aa, synthetic construct
TNYGRPS

SEQ ID NO: 15963 - protein, 7 aa, synthetic construct
YARQNFN

SEQ ID NO: 15964 - protein, 7 aa, synthetic construct
YARQGAN

SEQ ID NO: 15965 - protein, 7 aa, synthetic construct
YARINYN

SEQ ID NO: 15966 - protein, 7 aa, synthetic construct
YAKQGHN

SEQ ID NO: 15967 - protein, 7 aa, synthetic construct
LHKSGMN

SEQ ID NO: 15968 - protein, 7 aa, synthetic construct
STSSSGR

SEQ ID NO: 15969 - protein, 7 aa, synthetic construct
YARENRN

SEQ ID NO: 15970 - protein, 7 aa, synthetic construct
FSRVGFN

SEQ ID NO: 15971 - protein, 7 aa, synthetic construct
FSKIGFN

SEQ ID NO: 15972 - protein, 7 aa, synthetic construct
FSRIGAN

SEQ ID NO: 15973 - protein, 7 aa, synthetic construct
YAKMGPN

SEQ ID NO: 15974 - protein, 7 aa, synthetic construct
YSKLGQN

SEQ ID NO: 15975 - protein, 7 aa, synthetic construct
LSKANVN

SEQ ID NO: 15976 - protein, 7 aa, synthetic construct
YSKQGNN

SEQ ID NO: 15977 - protein, 7 aa, synthetic construct
YSKANLN

SEQ ID NO: 15978 - protein, 7 aa, synthetic construct
HQSSNGV

SEQ ID NO: 15979 - protein, 7 aa, synthetic construct
FAKGNFN

SEQ ID NO: 15980 - protein, 7 aa, synthetic construct
FSKLNFN

SEQ ID NO: 15981 - protein, 7 aa, synthetic construct
YSRGNTN

SEQ ID NO: 15982 - protein, 7 aa, synthetic construct
FAKGGFN

SEQ ID NO: 15983 - protein, 7 aa, synthetic construct
YARSNSN

SEQ ID NO: 15984 - protein, 7 aa, synthetic construct
LSKIGSN

SEQ ID NO: 15985 - protein, 7 aa, synthetic construct
GSSTSIW

SEQ ID NO: 15986 - protein, 7 aa, synthetic construct
YSKQGQN

SEQ ID NO: 15987 - protein, 7 aa, synthetic construct
FSRSGMN

SEQ ID NO: 15988 - protein, 7 aa, synthetic construct
YAKLGAN

SEQ ID NO: 15989 - protein, 7 aa, synthetic construct
YARMNLN

SEQ ID NO: 15990 - protein, 7 aa, synthetic construct
FARSGSN

SEQ ID NO: 15991 - protein, 7 aa, synthetic construct
YAKYGNN

SEQ ID NO: 15992 - protein, 7 aa, synthetic construct
YSKMGIN

SEQ ID NO: 15993 - protein, 7 aa, synthetic construct
FARENRN

SEQ ID NO: 15994 - protein, 7 aa, synthetic construct
YSRTGEN

SEQ ID NO: 15995 - protein, 7 aa, synthetic construct
YSKGNYN

SEQ ID NO: 15996 - protein, 7 aa, synthetic construct
YSKVGQN

SEQ ID NO: 15997 - protein, 7 aa, synthetic construct
LSKNGPN

SEQ ID NO: 15998 - protein, 7 aa, synthetic construct
YARANTN

SEQ ID NO: 15999 - protein, 7 aa, synthetic construct
YARQNAN

SEQ ID NO: 16000 - protein, 7 aa, synthetic construct
AMSTNGR

SEQ ID NO: 16001 - protein, 7 aa, synthetic construct
LAKMGAN

SEQ ID NO: 16002 - protein, 7 aa, synthetic construct
PYAKSEL

SEQ ID NO: 16003 - protein, 7 aa, synthetic construct
YAKANFN

SEQ ID NO: 16004 - protein, 7 aa, synthetic construct
TQSTNGI

SEQ ID NO: 16005 - protein, 7 aa, synthetic construct
YARIGLN

SEQ ID NO: 16006 - protein, 7 aa, synthetic construct
YARLGEN

SEQ ID NO: 16007 - protein, 7 aa, synthetic construct
YSRANQN

SEQ ID NO: 16008 - protein, 7 aa, synthetic construct
YAKPGPN

SEQ ID NO: 16009 - protein, 7 aa, synthetic construct
YAKAGHN

SEQ ID NO: 16010 - protein, 7 aa, synthetic construct
FAKGGNN

SEQ ID NO: 16011 - protein, 7 aa, synthetic construct
PASTNGV

SEQ ID NO: 16012 - protein, 7 aa, synthetic construct
VLSSNGV

SEQ ID NO: 16013 - protein, 7 aa, synthetic construct
YSKTGPN

SEQ ID NO: 16014 - protein, 7 aa, synthetic construct
YSKMNDN

SEQ ID NO: 16015 - protein, 7 aa, synthetic construct
YARSNAN

SEQ ID NO: 16016 - protein, 7 aa, synthetic construct
YSRLGDN

SEQ ID NO: 16017 - protein, 7 aa, synthetic construct
YAKGGPN

SEQ ID NO: 16018 - protein, 7 aa, synthetic construct
YSKNGPN

SEQ ID NO: 16019 - protein, 7 aa, synthetic construct
YSKQGAN

SEQ ID NO: 16020 - protein, 7 aa, synthetic construct
LSKANIN

SEQ ID NO: 16021 - protein, 7 aa, synthetic construct
QVSTNGI

SEQ ID NO: 16022 - protein, 7 aa, synthetic construct
YSKNGMN

SEQ ID NO: 16023 - protein, 7 aa, synthetic construct
YSKMNAN

SEQ ID NO: 16024 - protein, 7 aa, synthetic construct
FSKIGLN

SEQ ID NO: 16025 - protein, 7 aa, synthetic construct
YSKVGLN

SEQ ID NO: 16026 - protein, 7 aa, synthetic construct
YAKQGMN

SEQ ID NO: 16027 - protein, 7 aa, synthetic construct
TVSTNGV

SEQ ID NO: 16028 - protein, 7 aa, synthetic construct
LAKAGAN

SEQ ID NO: 16029 - protein, 7 aa, synthetic construct
YSKQGHN

SEQ ID NO: 16030 - protein, 7 aa, synthetic construct
YAKSGDN

SEQ ID NO: 16031 - protein, 7 aa, synthetic construct
LSKAGNN

SEQ ID NO: 16032 - protein, 7 aa, synthetic construct
SKSTNGV

SEQ ID NO: 16033 - protein, 7 aa, synthetic construct
FSKVGFN

SEQ ID NO: 16034 - protein, 7 aa, synthetic construct
FSRIGEN

SEQ ID NO: 16035 - protein, 7 aa, synthetic construct
YSRVNLN

SEQ ID NO: 16036 - protein, 7 aa, synthetic construct
YAKMGMN

SEQ ID NO: 16037 - protein, 7 aa, synthetic construct
FAKSGYN

SEQ ID NO: 16038 - protein, 7 aa, synthetic construct
YAKNGFN

SEQ ID NO: 16039 - protein, 7 aa, synthetic construct
FAKSGQN

SEQ ID NO: 16040 - protein, 7 aa, synthetic construct
LSKLNTN

SEQ ID NO: 16041 - protein, 7 aa, synthetic construct
LAKAGFN

SEQ ID NO: 16042 - protein, 7 aa, synthetic construct
YMSTNGV

SEQ ID NO: 16043 - protein, 7 aa, synthetic construct
LSRTGQN

SEQ ID NO: 16044 - protein, 7 aa, synthetic construct
MRNGTMS

SEQ ID NO: 16045 - protein, 7 aa, synthetic construct
YAKSGFN

SEQ ID NO: 16046 - protein, 7 aa, synthetic construct
YSKIGGN

SEQ ID NO: 16047 - protein, 7 aa, synthetic construct
YAKGGLN

SEQ ID NO: 16048 - protein, 7 aa, synthetic construct
LSKSGVN

SEQ ID NO: 16049 - protein, 7 aa, synthetic construct
HVSTNGI

SEQ ID NO: 16050 - protein, 7 aa, synthetic construct
LSKVAVN

SEQ ID NO: 16051 - protein, 7 aa, synthetic construct
LARVGAN

SEQ ID NO: 16052 - protein, 7 aa, synthetic construct
LSRAGPL

SEQ ID NO: 16053 - protein, 7 aa, synthetic construct
FSKQNHN

SEQ ID NO: 16054 - protein, 7 aa, synthetic construct
IISTNGV

SEQ ID NO: 16055 - protein, 7 aa, synthetic construct
YSRQGGN

SEQ ID NO: 16056 - protein, 7 aa, synthetic construct
TLSTNGV

SEQ ID NO: 16057 - protein, 7 aa, synthetic construct
YSKSNFN

SEQ ID NO: 16058 - protein, 7 aa, synthetic construct
YAKTGTN

SEQ ID NO: 16059 - protein, 7 aa, synthetic construct
VYSTNGI

SEQ ID NO: 16060 - protein, 7 aa, synthetic construct
FSKVGSN

SEQ ID NO: 16061 - protein, 7 aa, synthetic construct
YMSSNGV

SEQ ID NO: 16062 - protein, 7 aa, synthetic construct
LSKHNFN

SEQ ID NO: 16063 - protein, 7 aa, synthetic construct
FSKLGMN

SEQ ID NO: 16064 - protein, 7 aa, synthetic construct
FSRLNEN

SEQ ID NO: 16065 - protein, 7 aa, synthetic construct
YAKQNFN

SEQ ID NO: 16066 - protein, 7 aa, synthetic construct
LSKANLN

SEQ ID NO: 16067 - protein, 7 aa, synthetic construct
QISTNGR

SEQ ID NO: 16068 - protein, 7 aa, synthetic construct
YAKGNAN

SEQ ID NO: 16069 - protein, 7 aa, synthetic construct
LAKVGFN

SEQ ID NO: 16070 - protein, 7 aa, synthetic construct
FRSTNGV

SEQ ID NO: 16071 - protein, 7 aa, synthetic construct
YSRAGEN

SEQ ID NO: 16072 - protein, 7 aa, synthetic construct
LSKTGTN

SEQ ID NO: 16073 - protein, 7 aa, synthetic construct
TRSGLNA

SEQ ID NO: 16074 - protein, 7 aa, synthetic construct
YSKLGLN

SEQ ID NO: 16075 - protein, 7 aa, synthetic construct
YSKVNTN

SEQ ID NO: 16076 - protein, 7 aa, synthetic construct
YSKLAPN

SEQ ID NO: 16077 - protein, 7 aa, synthetic construct
YSRMNEN

SEQ ID NO: 16078 - protein, 7 aa, synthetic construct
LSKSGIN

SEQ ID NO: 16079 - protein, 7 aa, synthetic construct
TFSTNGI

SEQ ID NO: 16080 - protein, 7 aa, synthetic construct
YAKTGSN

SEQ ID NO: 16081 - protein, 7 aa, synthetic construct
YSKFNDN

SEQ ID NO: 16082 - protein, 7 aa, synthetic construct
YSSTNGI

SEQ ID NO: 16083 - protein, 7 aa, synthetic construct
YSRNGGN

SEQ ID NO: 16084 - protein, 7 aa, synthetic construct
FARGNTN

SEQ ID NO: 16085 - protein, 7 aa, synthetic construct
YAKHGNN

SEQ ID NO: 16086 - protein, 7 aa, synthetic construct
LSRMNMN

SEQ ID NO: 16087 - protein, 7 aa, synthetic construct
YSKLGGN

SEQ ID NO: 16088 - protein, 7 aa, synthetic construct
FSRVGEN

SEQ ID NO: 16089 - protein, 7 aa, synthetic construct
LAKHGVN

SEQ ID NO: 16090 - protein, 7 aa, synthetic construct
LSKLNEN

SEQ ID NO: 16091 - protein, 7 aa, synthetic construct
FAKQGPN

SEQ ID NO: 16092 - protein, 7 aa, synthetic construct
HSSSNGV

SEQ ID NO: 16093 - protein, 7 aa, synthetic construct
LSRANDN

SEQ ID NO: 16094 - protein, 7 aa, synthetic construct
FARDNRN

SEQ ID NO: 16095 - protein, 7 aa, synthetic construct
LSRTNDN

SEQ ID NO: 16096 - protein, 7 aa, synthetic construct
MQSTNGI

SEQ ID NO: 16097 - protein, 7 aa, synthetic construct
YSKMNQN

SEQ ID NO: 16098 - protein, 7 aa, synthetic construct
FSRNGVN

SEQ ID NO: 16099 - protein, 7 aa, synthetic construct
YAKNGDN

SEQ ID NO: 16100 - protein, 7 aa, synthetic construct
YSKVQTN

SEQ ID NO: 16101 - protein, 7 aa, synthetic construct
LARQGSN

SEQ ID NO: 16102 - protein, 7 aa, synthetic construct
YAKQGIN

SEQ ID NO: 16103 - protein, 7 aa, synthetic construct
YARGGQN

SEQ ID NO: 16104 - protein, 7 aa, synthetic construct
YASTNGI

SEQ ID NO: 16105 - protein, 7 aa, synthetic construct
FSKLGVN

SEQ ID NO: 16106 - protein, 7 aa, synthetic construct
YSKQGWN

SEQ ID NO: 16107 - protein, 7 aa, synthetic construct
TWSTNGV

SEQ ID NO: 16108 - protein, 7 aa, synthetic construct
YAKNGAN

SEQ ID NO: 16109 - protein, 7 aa, synthetic construct
FSKMNIN

SEQ ID NO: 16110 - protein, 7 aa, synthetic construct
YSKNNLN

SEQ ID NO: 16111 - protein, 7 aa, synthetic construct
YSKHGMN

SEQ ID NO: 16112 - protein, 7 aa, synthetic construct
VQSTNGR

SEQ ID NO: 16113 - protein, 7 aa, synthetic construct
THSTNGV

SEQ ID NO: 16114 - protein, 7 aa, synthetic construct
FAKQNYN

SEQ ID NO: 16115 - protein, 7 aa, synthetic construct
MLSTNGR

SEQ ID NO: 16116 - protein, 7 aa, synthetic construct
YSKSGAN

SEQ ID NO: 16117 - protein, 7 aa, synthetic construct
FSKANMN

SEQ ID NO: 16118 - protein, 7 aa, synthetic construct
YSKHGVN

SEQ ID NO: 16119 - protein, 7 aa, synthetic construct
FSKAGMN

SEQ ID NO: 16120 - protein, 7 aa, synthetic construct
FARQGFN

SEQ ID NO: 16121 - protein, 7 aa, synthetic construct
YSKLGEN

SEQ ID NO: 16122 - protein, 7 aa, synthetic construct
LSKSGMN

SEQ ID NO: 16123 - protein, 7 aa, synthetic construct
YKSSNGV

SEQ ID NO: 16124 - protein, 7 aa, synthetic construct
QWSTNGV

SEQ ID NO: 16125 - protein, 7 aa, synthetic construct
YAKQGQN

SEQ ID NO: 16126 - protein, 7 aa, synthetic construct
YAKYGLN

SEQ ID NO: 16127 - protein, 7 aa, synthetic construct
SASTNGV

SEQ ID NO: 16128 - protein, 7 aa, synthetic construct
LSRMNEN

SEQ ID NO: 16129 - protein, 7 aa, synthetic construct
FSRSGAN

SEQ ID NO: 16130 - protein, 7 aa, synthetic construct
WVKSSPN

SEQ ID NO: 16131 - protein, 7 aa, synthetic construct
YARLNEN

SEQ ID NO: 16132 - protein, 7 aa, synthetic construct
YRSTNGI

SEQ ID NO: 16133 - protein, 7 aa, synthetic construct
LAKNGLN

SEQ ID NO: 16134 - protein, 7 aa, synthetic construct
VHSTNGI

SEQ ID NO: 16135 - protein, 7 aa, synthetic construct
DYTGKSA

SEQ ID NO: 16136 - protein, 7 aa, synthetic construct
YSKSGDN

SEQ ID NO: 16137 - protein, 7 aa, synthetic construct
YSRVNDN

SEQ ID NO: 16138 - protein, 7 aa, synthetic construct
YSKQNSN

SEQ ID NO: 16139 - protein, 7 aa, synthetic construct
LSKMGMN

SEQ ID NO: 16140 - protein, 7 aa, synthetic construct
FAKTGLN

SEQ ID NO: 16141 - protein, 7 aa, synthetic construct
DKYNDYK

SEQ ID NO: 16142 - protein, 7 aa, synthetic construct
YSKGGAN

SEQ ID NO: 16143 - protein, 7 aa, synthetic construct
YAKHGMN

SEQ ID NO: 16144 - protein, 7 aa, synthetic construct
FKSSNGV

SEQ ID NO: 16145 - protein, 7 aa, synthetic construct
YSRLNDA

SEQ ID NO: 16146 - protein, 7 aa, synthetic construct
FAKFNMN

SEQ ID NO: 16147 - protein, 7 aa, synthetic construct
YSKGGQN

SEQ ID NO: 16148 - protein, 7 aa, synthetic construct
LSKTGSN

SEQ ID NO: 16149 - protein, 7 aa, synthetic construct
YFTGIHG

SEQ ID NO: 16150 - protein, 7 aa, synthetic construct
YAKANAN

SEQ ID NO: 16151 - protein, 7 aa, synthetic construct
YTKSNTH

SEQ ID NO: 16152 - protein, 7 aa, synthetic construct
FSKTGHN

SEQ ID NO: 16153 - protein, 7 aa, synthetic construct
FARIGMN

SEQ ID NO: 16154 - protein, 7 aa, synthetic construct
YAKSNVN

SEQ ID NO: 16155 - protein, 7 aa, synthetic construct
FSRQGVN

SEQ ID NO: 16156 - protein, 7 aa, synthetic construct
FAKSGSN

SEQ ID NO: 16157 - protein, 7 aa, synthetic construct
YSRMGTN

SEQ ID NO: 16158 - protein, 7 aa, synthetic construct
VMSTNGV

SEQ ID NO: 16159 - protein, 7 aa, synthetic construct
NNSTNGI

SEQ ID NO: 16160 - protein, 7 aa, synthetic construct
YSRPGAN

SEQ ID NO: 16161 - protein, 7 aa, synthetic construct
YAKIGQN

SEQ ID NO: 16162 - protein, 7 aa, synthetic construct
YAKYGFN

SEQ ID NO: 16163 - protein, 7 aa, synthetic construct
LSKVNFN

SEQ ID NO: 16164 - protein, 7 aa, synthetic construct
YSKSNQN

SEQ ID NO: 16165 - protein, 7 aa, synthetic construct
YISSNGV

SEQ ID NO: 16166 - protein, 7 aa, synthetic construct
FAKANYN

SEQ ID NO: 16167 - protein, 7 aa, synthetic construct
GGSGMKY

SEQ ID NO: 16168 - protein, 7 aa, synthetic construct
SNTGRNA

SEQ ID NO: 16169 - protein, 7 aa, synthetic construct
YARMNVN

SEQ ID NO: 16170 - protein, 7 aa, synthetic construct
KQSTNGV

SEQ ID NO: 16171 - protein, 7 aa, synthetic construct
YESGPMR

SEQ ID NO: 16172 - protein, 7 aa, synthetic construct
KGEATTW

SEQ ID NO: 16173 - protein, 7 aa, synthetic construct
FAKTGAN

SEQ ID NO: 16174 - protein, 7 aa, synthetic construct
FAKGNWN

SEQ ID NO: 16175 - protein, 7 aa, synthetic construct
YSKVNHN

SEQ ID NO: 16176 - protein, 7 aa, synthetic construct
FSKSGIN

SEQ ID NO: 16177 - protein, 7 aa, synthetic construct
YAKTNAN

SEQ ID NO: 16178 - protein, 7 aa, synthetic construct
YSRNNEN

SEQ ID NO: 16179 - protein, 7 aa, synthetic construct
FSKMNLN

SEQ ID NO: 16180 - protein, 7 aa, synthetic construct
RESSNGV

SEQ ID NO: 16181 - protein, 7 aa, synthetic construct
LSKHNEN

SEQ ID NO: 16182 - protein, 7 aa, synthetic construct
QFSTNGI

SEQ ID NO: 16183 - protein, 7 aa, synthetic construct
FARVGFN

SEQ ID NO: 16184 - protein, 7 aa, synthetic construct
FAKNGHN

SEQ ID NO: 16185 - protein, 7 aa, synthetic construct
FSRMGVN

SEQ ID NO: 16186 - protein, 7 aa, synthetic construct
HHSTNGV

SEQ ID NO: 16187 - protein, 7 aa, synthetic construct
LSKNGFN

SEQ ID NO: 16188 - protein, 7 aa, synthetic construct
YSRPNAN

SEQ ID NO: 16189 - protein, 7 aa, synthetic construct
YAKQNWN

SEQ ID NO: 16190 - protein, 7 aa, synthetic construct
YSKVNNN

SEQ ID NO: 16191 - protein, 7 aa, synthetic construct
LAKIGHN

SEQ ID NO: 16192 - protein, 7 aa, synthetic construct
TTDFNGF

SEQ ID NO: 16193 - protein, 7 aa, synthetic construct
IYSSNGV

SEQ ID NO: 16194 - protein, 7 aa, synthetic construct
RDSQTTW

SEQ ID NO: 16195 - protein, 7 aa, synthetic construct
RVSSNGV

SEQ ID NO: 16196 - protein, 7 aa, synthetic construct
FAKGNNN

SEQ ID NO: 16197 - protein, 7 aa, synthetic construct
FSRMGDN

SEQ ID NO: 16198 - protein, 7 aa, synthetic construct
MHVKSPN

SEQ ID NO: 16199 - protein, 7 aa, synthetic construct
VGSINGI

SEQ ID NO: 16200 - protein, 7 aa, synthetic construct
YSKVNLN

SEQ ID NO: 16201 - protein, 7 aa, synthetic construct
TGSAVKW

SEQ ID NO: 16202 - protein, 7 aa, synthetic construct
YYTKVPT

SEQ ID NO: 16203 - protein, 7 aa, synthetic construct
YSKNGGN

SEQ ID NO: 16204 - protein, 7 aa, synthetic construct
MYGGVNP

SEQ ID NO: 16205 - protein, 7 aa, synthetic construct
RPNTANF

SEQ ID NO: 16206 - protein, 7 aa, synthetic construct
YYSSNGV

SEQ ID NO: 16207 - protein, 7 aa, synthetic construct
FAKQGHN

SEQ ID NO: 16208 - protein, 7 aa, synthetic construct
NGSTNGR

SEQ ID NO: 16209 - protein, 7 aa, synthetic construct
LSKHNQN

SEQ ID NO: 16210 - protein, 7 aa, synthetic construct
YARMNMN

SEQ ID NO: 16211 - protein, 7 aa, synthetic construct
LSKSNHN

SEQ ID NO: 16212 - protein, 7 aa, synthetic construct
YARNNDN

SEQ ID NO: 16213 - protein, 7 aa, synthetic construct
IERERYA

SEQ ID NO: 16214 - protein, 7 aa, synthetic construct
SMTGTSY

SEQ ID NO: 16215 - protein, 7 aa, synthetic construct
FSKTGIN

SEQ ID NO: 16216 - protein, 7 aa, synthetic construct
YSREGYN

SEQ ID NO: 16217 - protein, 7 aa, synthetic construct
YTKSQTD

SEQ ID NO: 16218 - protein, 7 aa, synthetic construct
LNRLGPT

SEQ ID NO: 16219 - protein, 7 aa, synthetic construct
RYSTNGV

SEQ ID NO: 16220 - protein, 7 aa, synthetic construct
FAKLGFN

SEQ ID NO: 16221 - protein, 7 aa, synthetic construct
LSKTNFN

SEQ ID NO: 16222 - protein, 7 aa, synthetic construct
YAKNNYN

SEQ ID NO: 16223 - protein, 7 aa, synthetic construct
SDGNSSY

SEQ ID NO: 16224 - protein, 7 aa, synthetic construct
RGSPTLY

SEQ ID NO: 16225 - protein, 7 aa, synthetic construct
FAKTGTN

SEQ ID NO: 16226 - protein, 7 aa, synthetic construct
FSKHNLN

SEQ ID NO: 16227 - protein, 7 aa, synthetic construct
FSKMNMN

SEQ ID NO: 16228 - protein, 7 aa, synthetic construct
FARIGSN

SEQ ID NO: 16229 - protein, 7 aa, synthetic construct
NPGRSSY

SEQ ID NO: 16230 - protein, 7 aa, synthetic construct
NMTGKSA

SEQ ID NO: 16231 - protein, 7 aa, synthetic construct
LAKMGTN

SEQ ID NO: 16232 - protein, 7 aa, synthetic construct
ERKPGNI

SEQ ID NO: 16233 - protein, 7 aa, synthetic construct
PLSTNGV

SEQ ID NO: 16234 - protein, 7 aa, synthetic construct
SYSSNGV

SEQ ID NO: 16235 - protein, 7 aa, synthetic construct
LSKQGLN

SEQ ID NO: 16236 - protein, 7 aa, synthetic construct
YSRPGSN

SEQ ID NO: 16237 - protein, 7 aa, synthetic construct
LSRNNEN

SEQ ID NO: 16238 - protein, 7 aa, synthetic construct
FSKMNQN

SEQ ID NO: 16239 - protein, 7 aa, synthetic construct
TPGRSGF

SEQ ID NO: 16240 - protein, 7 aa, synthetic construct
AHSSNGV

SEQ ID NO: 16241 - protein, 7 aa, synthetic construct
RGDQSTW

SEQ ID NO: 16242 - protein, 7 aa, synthetic construct
FSKMGMN

SEQ ID NO: 16243 - protein, 7 aa, synthetic construct
RGDHAGF

SEQ ID NO: 16244 - protein, 7 aa, synthetic construct
FAKENRN

SEQ ID NO: 16245 - protein, 7 aa, synthetic construct
FSKGNVN

SEQ ID NO: 16246 - protein, 7 aa, synthetic construct
YAKLNDN

SEQ ID NO: 16247 - protein, 7 aa, synthetic construct
NNRGTPA

SEQ ID NO: 16248 - protein, 7 aa, synthetic construct
YSRPNPN

SEQ ID NO: 16249 - protein, 7 aa, synthetic construct
FAKHGMN

SEQ ID NO: 16250 - protein, 7 aa, synthetic construct
YARPNHN

SEQ ID NO: 16251 - protein, 7 aa, synthetic construct
FAKPNWN

SEQ ID NO: 16252 - protein, 7 aa, synthetic construct
FSRNGQN

SEQ ID NO: 16253 - protein, 7 aa, synthetic construct
KSGGYPY

SEQ ID NO: 16254 - protein, 7 aa, synthetic construct
YARSSDS

SEQ ID NO: 16255 - protein, 7 aa, synthetic construct
LSRVNMN

SEQ ID NO: 16256 - protein, 7 aa, synthetic construct
KSGNSSY

SEQ ID NO: 16257 - protein, 7 aa, synthetic construct
YSRPGTN

SEQ ID NO: 16258 - protein, 7 aa, synthetic construct
MSRLNAT

SEQ ID NO: 16259 - protein, 7 aa, synthetic construct
YAKKGEN

SEQ ID NO: 16260 - protein, 7 aa, synthetic construct
YAKVGTN

SEQ ID NO: 16261 - protein, 7 aa, synthetic construct
FSRINHN

SEQ ID NO: 16262 - protein, 7 aa, synthetic construct
YTRSQEM

SEQ ID NO: 16263 - protein, 7 aa, synthetic construct
LSKLNGN

SEQ ID NO: 16264 - protein, 7 aa, synthetic construct
YARMNQN

SEQ ID NO: 16265 - protein, 7 aa, synthetic construct
YNAVIMK

SEQ ID NO: 16266 - protein, 7 aa, synthetic construct
YARPNVN

SEQ ID NO: 16267 - protein, 7 aa, synthetic construct
LARPGNN

SEQ ID NO: 16268 - protein, 7 aa, synthetic construct
FARLNTN

SEQ ID NO: 16269 - protein, 7 aa, synthetic construct
RNSQSVF

SEQ ID NO: 16270 - protein, 7 aa, synthetic construct
LWRNAEN

SEQ ID NO: 16271 - protein, 7 aa, synthetic construct
FAKTGSN

SEQ ID NO: 16272 - protein, 7 aa, synthetic construct
RGTSSNY

SEQ ID NO: 16273 - protein, 7 aa, synthetic construct
LSRAQSI

SEQ ID NO: 16274 - protein, 7 aa, synthetic construct
GPVHVNY

SEQ ID NO: 16275 - protein, 7 aa, synthetic construct
YSVRHPN

SEQ ID NO: 16276 - protein, 7 aa, synthetic construct
FAKDNRN

SEQ ID NO: 16277 - protein, 7 aa, synthetic construct
SRNGGNA

SEQ ID NO: 16278 - protein, 7 aa, synthetic construct
WAKLSLN

SEQ ID NO: 16279 - protein, 7 aa, synthetic construct
FAKQGNN

SEQ ID NO: 16280 - protein, 7 aa, synthetic construct
YAKIGEN

SEQ ID NO: 16281 - protein, 7 aa, synthetic construct
FSRQNTN

SEQ ID NO: 16282 - protein, 7 aa, synthetic construct
FSKSNHN

SEQ ID NO: 16283 - protein, 7 aa, synthetic construct
YARVNIN

SEQ ID NO: 16284 - protein, 7 aa, synthetic construct
YARINMN

SEQ ID NO: 16285 - protein, 7 aa, synthetic construct
FSKSGSN

SEQ ID NO: 16286 - protein, 7 aa, synthetic construct
NVRNQMA

SEQ ID NO: 16287 - protein, 7 aa, synthetic construct
YSKPGFN

SEQ ID NO: 16288 - protein, 7 aa, synthetic construct
FARANLN

SEQ ID NO: 16289 - protein, 7 aa, synthetic construct
YAKDGYN

SEQ ID NO: 16290 - protein, 7 aa, synthetic construct
YARPGDN

SEQ ID NO: 16291 - protein, 7 aa, synthetic construct
GDKVIRY

SEQ ID NO: 16292 - protein, 7 aa, synthetic construct
YAKYNLN

SEQ ID NO: 16293 - protein, 7 aa, synthetic construct
FAKMNIN

SEQ ID NO: 16294 - protein, 7 aa, synthetic construct
FSKMGSN

SEQ ID NO: 16295 - protein, 7 aa, synthetic construct
NSRLNDN

SEQ ID NO: 16296 - protein, 7 aa, synthetic construct
VSNKGAG

SEQ ID NO: 16297 - protein, 7 aa, synthetic construct
RGEHNAW

SEQ ID NO: 16298 - protein, 7 aa, synthetic construct
YERFIPN

SEQ ID NO: 16299 - protein, 7 aa, synthetic construct
TKSGTNA

SEQ ID NO: 16300 - protein, 7 aa, synthetic construct
YALKGMN

SEQ ID NO: 16301 - protein, 7 aa, synthetic construct
FAKSGGN

SEQ ID NO: 16302 - protein, 7 aa, synthetic construct
FARSNQN

SEQ ID NO: 16303 - protein, 7 aa, synthetic construct
FAKIGNN

SEQ ID NO: 16304 - protein, 7 aa, synthetic construct
SSGSNHW

SEQ ID NO: 16305 - protein, 7 aa, synthetic construct
MTGTSSY

SEQ ID NO: 16306 - protein, 7 aa, synthetic construct
YSRPGQN

SEQ ID NO: 16307 - protein, 7 aa, synthetic construct
FSKGNTN

SEQ ID NO: 16308 - protein, 7 aa, synthetic construct
RRDGVNA

SEQ ID NO: 16309 - protein, 7 aa, synthetic construct
YHKYSTD

SEQ ID NO: 16310 - protein, 7 aa, synthetic construct
YSKPNNN

SEQ ID NO: 16311 - protein, 7 aa, synthetic construct
FAKMGIN

SEQ ID NO: 16312 - protein, 7 aa, synthetic construct
FAKHNIN

SEQ ID NO: 16313 - protein, 7 aa, synthetic construct
TRSGGVA

SEQ ID NO: 16314 - protein, 7 aa, synthetic construct
NRSGMAA

SEQ ID NO: 16315 - protein, 7 aa, synthetic construct
YRQGLSN

SEQ ID NO: 16316 - protein, 7 aa, synthetic construct
FARINMN

SEQ ID NO: 16317 - protein, 7 aa, synthetic construct
FAKLGHN

SEQ ID NO: 16318 - protein, 7 aa, synthetic construct
FAKQNNN

SEQ ID NO: 16319 - protein, 7 aa, synthetic construct
FAKHGSN

SEQ ID NO: 16320 - protein, 7 aa, synthetic construct
FSKQGQN

SEQ ID NO: 16321 - protein, 7 aa, synthetic construct
DMRRMGE

SEQ ID NO: 16322 - protein, 7 aa, synthetic construct
GPGISKY

SEQ ID NO: 16323 - protein, 7 aa, synthetic construct
NTVNTMR

SEQ ID NO: 16324 - protein, 7 aa, synthetic construct
FSKVNQN

SEQ ID NO: 16325 - protein, 7 aa, synthetic construct
YSKTNQN

SEQ ID NO: 16326 - protein, 7 aa, synthetic construct
YAKFNAN

SEQ ID NO: 16327 - protein, 7 aa, synthetic construct
LAKSSPI

SEQ ID NO: 16328 - protein, 7 aa, synthetic construct
TRSGGSP

SEQ ID NO: 16329 - protein, 7 aa, synthetic construct
YAKGNGN

SEQ ID NO: 16330 - protein, 7 aa, synthetic construct
FAKQGSN

SEQ ID NO: 16331 - protein, 7 aa, synthetic construct
FSKNNSN

SEQ ID NO: 16332 - protein, 7 aa, synthetic construct
FSKVNPN

SEQ ID NO: 16333 - protein, 7 aa, synthetic construct
YGAIGRN

SEQ ID NO: 16334 - protein, 7 aa, synthetic construct
FSKSNNN

SEQ ID NO: 16335 - protein, 7 aa, synthetic construct
FARLNQN

SEQ ID NO: 16336 - protein, 7 aa, synthetic construct
MRNQPNA

SEQ ID NO: 16337 - protein, 7 aa, synthetic construct
YTRVDSN

SEQ ID NO: 16338 - protein, 7 aa, synthetic construct
YSRPGGN

SEQ ID NO: 16339 - protein, 7 aa, synthetic construct
HSRLTDN

SEQ ID NO: 16340 - protein, 7 aa, synthetic construct
VGSNHSW

SEQ ID NO: 16341 - protein, 7 aa, synthetic construct
LHDSRTY

SEQ ID NO: 16342 - protein, 7 aa, synthetic construct
YAKYNGN

SEQ ID NO: 16343 - protein, 7 aa, synthetic construct
TYSKPNS

SEQ ID NO: 16344 - protein, 7 aa, synthetic construct
YSRENAN

SEQ ID NO: 16345 - protein, 7 aa, synthetic construct
KAEYGAG

SEQ ID NO: 16346 - protein, 7 aa, synthetic construct
FAKVGNN

SEQ ID NO: 16347 - protein, 7 aa, synthetic construct
GTSSAAW

SEQ ID NO: 16348 - protein, 7 aa, synthetic construct
FSKHGSN

SEQ ID NO: 16349 - protein, 7 aa, synthetic construct
YARGSDL

SEQ ID NO: 16350 - protein, 7 aa, synthetic construct
FSRPNIN

SEQ ID NO: 16351 - protein, 7 aa, synthetic construct
FAKMGAN

SEQ ID NO: 16352 - protein, 7 aa, synthetic construct
FSKTNHN

SEQ ID NO: 16353 - protein, 7 aa, synthetic construct
RFSGEPS

SEQ ID NO: 16354 - protein, 7 aa, synthetic construct
KSDGSTW

SEQ ID NO: 16355 - protein, 7 aa, synthetic construct
ITNVNYG

SEQ ID NO: 16356 - protein, 7 aa, synthetic construct
YVQNRPN

SEQ ID NO: 16357 - protein, 7 aa, synthetic construct
YLPGHMN

SEQ ID NO: 16358 - protein, 7 aa, synthetic construct
YIRGNTN

SEQ ID NO: 16359 - protein, 7 aa, synthetic construct
FSRHNGN

SEQ ID NO: 16360 - protein, 7 aa, synthetic construct
RGGNTMP

SEQ ID NO: 16361 - protein, 7 aa, synthetic construct
FARIGEN

SEQ ID NO: 16362 - protein, 7 aa, synthetic construct
RSNGSGS

SEQ ID NO: 16363 - protein, 7 aa, synthetic construct
GGNKSNY

SEQ ID NO: 16364 - protein, 7 aa, synthetic construct
YSRSAKD

SEQ ID NO: 16365 - protein, 7 aa, synthetic construct
FARHGDN

SEQ ID NO: 16366 - protein, 7 aa, synthetic construct
YARDGIN

SEQ ID NO: 16367 - protein, 7 aa, synthetic construct
YARHNIN

SEQ ID NO: 16368 - protein, 7 aa, synthetic construct
YAREGVN

SEQ ID NO: 16369 - protein, 7 aa, synthetic construct
TRDVAGR

SEQ ID NO: 16370 - protein, 7 aa, synthetic construct
SLGSSKY

SEQ ID NO: 16371 - protein, 7 aa, synthetic construct
FAKGGGN

SEQ ID NO: 16372 - protein, 7 aa, synthetic construct
GRDRGPG

SEQ ID NO: 16373 - protein, 7 aa, synthetic construct
IKGGSSG

SEQ ID NO: 16374 - protein, 7 aa, synthetic construct
YKGGYNN

SEQ ID NO: 16375 - protein, 7 aa, synthetic construct
FARRGEN

SEQ ID NO: 16376 - protein, 7 aa, synthetic construct
FARYNTN

SEQ ID NO: 16377 - protein, 7 aa, synthetic construct
YSRPNSN

SEQ ID NO: 16378 - protein, 7 aa, synthetic construct
YSKEGYN

SEQ ID NO: 16379 - protein, 7 aa, synthetic construct
FAKMGQN

SEQ ID NO: 16380 - protein, 7 aa, synthetic construct
FAKSNNN

SEQ ID NO: 16381 - protein, 7 aa, synthetic construct
FSREGRN

SEQ ID NO: 16382 - protein, 7 aa, synthetic construct
MTGNSAY

SEQ ID NO: 16383 - protein, 7 aa, synthetic construct
FAKLGNN

SEQ ID NO: 16384 - protein, 7 aa, synthetic construct
QEYGGYQ

SEQ ID NO: 16385 - protein, 7 aa, synthetic construct
NTRGNGS

SEQ ID NO: 16386 - protein, 7 aa, synthetic construct
AESSRTY

SEQ ID NO: 16387 - protein, 7 aa, synthetic construct
KNHGGSY

SEQ ID NO: 16388 - protein, 7 aa, synthetic construct
YKADTRN

SEQ ID NO: 16389 - protein, 7 aa, synthetic construct
YAKLNEN

SEQ ID NO: 16390 - protein, 7 aa, synthetic construct
YNQRGQN

SEQ ID NO: 16391 - protein, 7 aa, synthetic construct
FAKTNQN

SEQ ID NO: 16392 - protein, 7 aa, synthetic construct
WTSGYSN

SEQ ID NO: 16393 - protein, 7 aa, synthetic construct
YSKINGN

SEQ ID NO: 16394 - protein, 7 aa, synthetic construct
DQSSTTW

SEQ ID NO: 16395 - protein, 7 aa, synthetic construct
YAKHNGN

SEQ ID NO: 16396 - protein, 7 aa, synthetic construct
FAKSNAN

SEQ ID NO: 16397 - protein, 7 aa, synthetic construct
FAKQNTN

SEQ ID NO: 16398 - protein, 7 aa, synthetic construct
FARMGDN

SEQ ID NO: 16399 - protein, 7 aa, synthetic construct
FSKVNTN

SEQ ID NO: 16400 - protein, 7 aa, synthetic construct
YTDHMRN

SEQ ID NO: 16401 - protein, 7 aa, synthetic construct
YRSNAIV

SEQ ID NO: 16402 - protein, 7 aa, synthetic construct
FARNNQN

SEQ ID NO: 16403 - protein, 7 aa, synthetic construct
FSKMGGN

SEQ ID NO: 16404 - protein, 7 aa, synthetic construct
FAKMNFN

SEQ ID NO: 16405 - protein, 7 aa, synthetic construct
FAKQNSN

SEQ ID NO: 16406 - protein, 7 aa, synthetic construct
NARGANA

SEQ ID NO: 16407 - protein, 7 aa, synthetic construct
FSRVNGN

SEQ ID NO: 16408 - protein, 7 aa, synthetic construct
NTRGTSA

SEQ ID NO: 16409 - protein, 7 aa, synthetic construct
YAKPNNN

SEQ ID NO: 16410 - protein, 7 aa, synthetic construct
FAKMNPN

SEQ ID NO: 16411 - protein, 7 aa, synthetic construct
FVKSANG

SEQ ID NO: 16412 - protein, 7 aa, synthetic construct
FARQNGN

SEQ ID NO: 16413 - protein, 7 aa, synthetic construct
LSSNLKY

SEQ ID NO: 16414 - protein, 7 aa, synthetic construct
RSSGTPA

SEQ ID NO: 16415 - protein, 7 aa, synthetic construct
FARLNDN

SEQ ID NO: 16416 - protein, 7 aa, synthetic construct
YAKMNQN

SEQ ID NO: 16417 - protein, 7 aa, synthetic construct
YSKDGRN

SEQ ID NO: 16418 - protein, 7 aa, synthetic construct
LYGGTNP

SEQ ID NO: 16419 - protein, 7 aa, synthetic construct
RDHMARG

SEQ ID NO: 16420 - protein, 7 aa, synthetic construct
RPYGGSD

SEQ ID NO: 16421 - protein, 7 aa, synthetic construct
FARININ

SEQ ID NO: 16422 - protein, 7 aa, synthetic construct
VNMGKAY

SEQ ID NO: 16423 - protein, 7 aa, synthetic construct
FAKPGWN

SEQ ID NO: 16424 - protein, 7 aa, synthetic construct
FAKFGNN

SEQ ID NO: 16425 - protein, 7 aa, synthetic construct
KADSSRY

SEQ ID NO: 16426 - protein, 7 aa, synthetic construct
RGNGTGS

SEQ ID NO: 16427 - protein, 7 aa, synthetic construct
GGVASSY

SEQ ID NO: 16428 - protein, 7 aa, synthetic construct
DTYGTKH

SEQ ID NO: 16429 - protein, 7 aa, synthetic construct
DSGVGRY

SEQ ID NO: 16430 - protein, 7 aa, synthetic construct
YSREGGN

SEQ ID NO: 16431 - protein, 7 aa, synthetic construct
YWGGEKQ

SEQ ID NO: 16432 - protein, 7 aa, synthetic construct
FAKFNAN

SEQ ID NO: 16433 - protein, 7 aa, synthetic construct
TISSSNW

SEQ ID NO: 16434 - protein, 7 aa, synthetic construct
IKYSSSD

SEQ ID NO: 16435 - protein, 7 aa, synthetic construct
FARPGTN

SEQ ID NO: 16436 - protein, 7 aa, synthetic construct
RSGGAGG

SEQ ID NO: 16437 - protein, 7 aa, synthetic construct
KDNATRY

SEQ ID NO: 16438 - protein, 7 aa, synthetic construct
YAKPNSN

SEQ ID NO: 16439 - protein, 7 aa, synthetic construct
YARYNQN

SEQ ID NO: 16440 - protein, 7 aa, synthetic construct
NARDIRY

SEQ ID NO: 16441 - protein, 7 aa, synthetic construct
IGHMGSD

SEQ ID NO: 16442 - protein, 7 aa, synthetic construct
YSRGDHN

SEQ ID NO: 16443 - protein, 7 aa, synthetic construct
YKNGMSN

SEQ ID NO: 16444 - protein, 7 aa, synthetic construct
FSRPGAN

SEQ ID NO: 16445 - protein, 7 aa, synthetic construct
FSKPGYN

SEQ ID NO: 16446 - protein, 7 aa, synthetic construct
FSHASSY

SEQ ID NO: 16447 - protein, 7 aa, synthetic construct
KGDKITW

SEQ ID NO: 16448 - protein, 7 aa, synthetic construct
YSQGKTN

SEQ ID NO: 16449 - protein, 7 aa, synthetic construct
FAKLGVN

SEQ ID NO: 16450 - protein, 7 aa, synthetic construct
FSKEGKN

SEQ ID NO: 16451 - protein, 7 aa, synthetic construct
IVNSRNS

SEQ ID NO: 16452 - protein, 7 aa, synthetic construct
FAKINYN

SEQ ID NO: 16453 - protein, 7 aa, synthetic construct
IGYSGAD

SEQ ID NO: 16454 - protein, 7 aa, synthetic construct
FAKYNEN

SEQ ID NO: 16455 - protein, 7 aa, synthetic construct
FSKVNNN

SEQ ID NO: 16456 - protein, 7 aa, synthetic construct
HTNVTAW

SEQ ID NO: 16457 - protein, 7 aa, synthetic construct
YHSSSGN

SEQ ID NO: 16458 - protein, 7 aa, synthetic construct
FFQGGHH

SEQ ID NO: 16459 - protein, 7 aa, synthetic construct
FAKMNVN

SEQ ID NO: 16460 - protein, 7 aa, synthetic construct
YAKVNMN

SEQ ID NO: 16461 - protein, 7 aa, synthetic construct
YRYDAVV

SEQ ID NO: 16462 - protein, 7 aa, synthetic construct
WKPGVPS

SEQ ID NO: 16463 - protein, 7 aa, synthetic construct
FSKPNSN

SEQ ID NO: 16464 - protein, 7 aa, synthetic construct
FAKLNSN

SEQ ID NO: 16465 - protein, 7 aa, synthetic construct
FSKGGGN

SEQ ID NO: 16466 - protein, 7 aa, synthetic construct
FARINDN

SEQ ID NO: 16467 - protein, 7 aa, synthetic construct
FAKTNLN

SEQ ID NO: 16468 - protein, 7 aa, synthetic construct
VSGFTKQ

SEQ ID NO: 16469 - protein, 7 aa, synthetic construct
FSRFNEN

SEQ ID NO: 16470 - protein, 7 aa, synthetic construct
VSLGTRN

SEQ ID NO: 16471 - protein, 7 aa, synthetic construct
FSRGGGN

SEQ ID NO: 16472 - protein, 7 aa, synthetic construct
QKIMRGD

SEQ ID NO: 16473 - protein, 7 aa, synthetic construct
YQRDGYG

SEQ ID NO: 16474 - protein, 7 aa, synthetic construct
FSKTNTN

SEQ ID NO: 16475 - protein, 7 aa, synthetic construct
HSHGGRD

SEQ ID NO: 16476 - protein, 7 aa, synthetic construct
HDRTSTY

SEQ ID NO: 16477 - protein, 7 aa, synthetic construct
TSDSRGW

SEQ ID NO: 16478 - protein, 7 aa, synthetic construct
WRTDGMG

SEQ ID NO: 16479 - protein, 7 aa, synthetic construct
GVKSAYQ

SEQ ID NO: 16480 - protein, 7 aa, synthetic construct
FARMNEN

SEQ ID NO: 16481 - protein, 7 aa, synthetic construct
YSKHNAS

SEQ ID NO: 16482 - protein, 7 aa, synthetic construct
FAKMNTN

SEQ ID NO: 16483 - protein, 7 aa, synthetic construct
KADRNPY

SEQ ID NO: 16484 - protein, 7 aa, synthetic construct
FSRDGKN

SEQ ID NO: 16485 - protein, 7 aa, synthetic construct
SNGKWSG

SEQ ID NO: 16486 - protein, 7 aa, synthetic construct
NNFGTRD

SEQ ID NO: 16487 - protein, 7 aa, synthetic construct
FAKVNAN

SEQ ID NO: 16488 - protein, 7 aa, synthetic construct
YFPGTMP

SEQ ID NO: 16489 - protein, 7 aa, synthetic construct
YAQQGLN

SEQ ID NO: 16490 - protein, 7 aa, synthetic construct
YARDGTN

SEQ ID NO: 16491 - protein, 7 aa, synthetic construct
FAKHNGN

SEQ ID NO: 16492 - protein, 7 aa, synthetic construct
RNMESMY

SEQ ID NO: 16493 - protein, 7 aa, synthetic construct
FAKIGGN

SEQ ID NO: 16494 - protein, 7 aa, synthetic construct
FAKPGSN

SEQ ID NO: 16495 - protein, 7 aa, synthetic construct
FAKAGDN

SEQ ID NO: 16496 - protein, 7 aa, synthetic construct
DFGVSRH

SEQ ID NO: 16497 - protein, 7 aa, synthetic construct
FAKSNTN

SEQ ID NO: 16498 - protein, 7 aa, synthetic construct
YHGHTLH

SEQ ID NO: 16499 - protein, 7 aa, synthetic construct
FAKAGGN

SEQ ID NO: 16500 - protein, 7 aa, synthetic construct
ANMNRTE

SEQ ID NO: 16501 - protein, 7 aa, synthetic construct
FSRENSN

SEQ ID NO: 16502 - protein, 7 aa, synthetic construct
FSKGNEN

SEQ ID NO: 16503 - protein, 7 aa, synthetic construct
YAKMNEN

SEQ ID NO: 16504 - protein, 7 aa, synthetic construct
YAKPNMN

SEQ ID NO: 16505 - protein, 7 aa, synthetic construct
GNQNSNY

SEQ ID NO: 16506 - protein, 7 aa, synthetic construct
YSRDGEN

SEQ ID NO: 16507 - protein, 7 aa, synthetic construct
YNQNTYK

SEQ ID NO: 16508 - protein, 7 aa, synthetic construct
FAKLNAN

SEQ ID NO: 16509 - protein, 7 aa, synthetic construct
FSKTNQN

SEQ ID NO: 16510 - protein, 7 aa, synthetic construct
FSRPNEN

SEQ ID NO: 16511 - protein, 7 aa, synthetic construct
FSRPGVN

SEQ ID NO: 16512 - protein, 7 aa, synthetic construct
FAREGVN

SEQ ID NO: 16513 - protein, 7 aa, synthetic construct
FSKDGRN

SEQ ID NO: 16514 - protein, 7 aa, synthetic construct
NHKSTAN

SEQ ID NO: 16515 - protein, 7 aa, synthetic construct
FARPGQN

SEQ ID NO: 16516 - protein, 7 aa, synthetic construct
NSQDTKW

SEQ ID NO: 16517 - protein, 7 aa, synthetic construct
NLSHGHG

SEQ ID NO: 16518 - protein, 7 aa, synthetic construct
FARFNEN

SEQ ID NO: 16519 - protein, 7 aa, synthetic construct
YMRNTVP

SEQ ID NO: 16520 - protein, 7 aa, synthetic construct
YEKYTNS

SEQ ID NO: 16521 - protein, 7 aa, synthetic construct
HGGTKNG

SEQ ID NO: 16522 - protein, 7 aa, synthetic construct
FSRDGHN

SEQ ID NO: 16523 - protein, 7 aa, synthetic construct
FSKPGIN

SEQ ID NO: 16524 - protein, 7 aa, synthetic construct
FAKQGDN

SEQ ID NO: 16525 - protein, 7 aa, synthetic construct
FAKINTN

SEQ ID NO: 16526 - protein, 7 aa, synthetic construct
YSRDGSN

SEQ ID NO: 16527 - protein, 7 aa, synthetic construct
FSKPNPN

SEQ ID NO: 16528 - protein, 7 aa, synthetic construct
RPTGPNG

SEQ ID NO: 16529 - protein, 7 aa, synthetic construct
WSGGSGG

SEQ ID NO: 16530 - protein, 7 aa, synthetic construct
NSDRGKN

SEQ ID NO: 16531 - protein, 7 aa, synthetic construct
DKGNNAY

SEQ ID NO: 16532 - protein, 7 aa, synthetic construct
VVAMHKQ

SEQ ID NO: 16533 - protein, 7 aa, synthetic construct
IGGKQGL

SEQ ID NO: 16534 - protein, 7 aa, synthetic construct
RIKDTPE

SEQ ID NO: 16535 - protein, 7 aa, synthetic construct
YYKTDSS

SEQ ID NO: 16536 - protein, 7 aa, synthetic construct
FSKINGN

SEQ ID NO: 16537 - protein, 7 aa, synthetic construct
LGDGWGK

SEQ ID NO: 16538 - protein, 7 aa, synthetic construct
FSKNNEN

SEQ ID NO: 16539 - protein, 7 aa, synthetic construct
FARDGAN

SEQ ID NO: 16540 - protein, 7 aa, synthetic construct
YAKDNLN

SEQ ID NO: 16541 - protein, 7 aa, synthetic construct
FAKENSN

SEQ ID NO: 16542 - protein, 7 aa, synthetic construct
DYKGFPS

SEQ ID NO: 16543 - protein, 7 aa, synthetic construct
FAKLGDN

SEQ ID NO: 16544 - protein, 7 aa, synthetic construct
FAKDGYN

SEQ ID NO: 16545 - protein, 7 aa, synthetic construct
FAKDGMN

SEQ ID NO: 16546 - protein, 7 aa, synthetic construct
FAKANEN

SEQ ID NO: 16547 - protein, 7 aa, synthetic construct
FAKEGGN

SEQ ID NO: 16548 - protein, 7 aa, synthetic construct
YPGSGGL

SEQ ID NO: 16549 - protein, 7 aa, synthetic construct
NSSGMRE

SEQ ID NO: 16550 - protein, 7 aa, synthetic construct
FSKPNLN

SEQ ID NO: 16551 - protein, 7 aa, synthetic construct
YSKFGVN

SEQ ID NO: 16552 - protein, 7 aa, synthetic construct
IASLGRD

SEQ ID NO: 16553 - protein, 7 aa, synthetic construct
FSKINDN

SEQ ID NO: 16554 - protein, 7 aa, synthetic construct
VRIDQAQ

SEQ ID NO: 16555 - protein, 7 aa, synthetic construct
YAKENLN

SEQ ID NO: 16556 - protein, 7 aa, synthetic construct
FARPNHN

SEQ ID NO: 16557 - protein, 7 aa, synthetic construct
NIHGYVT

SEQ ID NO: 16558 - protein, 7 aa, synthetic construct
YAKDNQN

SEQ ID NO: 16559 - protein, 7 aa, synthetic construct
FSKENQN

SEQ ID NO: 16560 - protein, 7 aa, synthetic construct
FAKNNYN

SEQ ID NO: 16561 - protein, 7 aa, synthetic construct
FSKFGIN

SEQ ID NO: 16562 - protein, 7 aa, synthetic construct
YSRLSAI

SEQ ID NO: 16563 - protein, 7 aa, synthetic construct
WPPPVNS

SEQ ID NO: 16564 - protein, 7 aa, synthetic construct
RTALVFP

SEQ ID NO: 16565 - protein, 7 aa, synthetic construct
IHRLLPS

SEQ ID NO: 16566 - protein, 7 aa, synthetic construct
YFTGVVA

SEQ ID NO: 16567 - protein, 7 aa, synthetic construct
RNDMVFP

SEQ ID NO: 16568 - protein, 7 aa, synthetic construct
LHRLLKD

SEQ ID NO: 16569 - protein, 7 aa, synthetic construct
YLKSQSY

SEQ ID NO: 16570 - protein, 7 aa, synthetic construct
YTKSDVR

SEQ ID NO: 16571 - protein, 7 aa, synthetic construct
KTYDAFV

SEQ ID NO: 16572 - protein, 7 aa, synthetic construct
YLKSERN

SEQ ID NO: 16573 - protein, 7 aa, synthetic construct
RSEHVFP

SEQ ID NO: 16574 - protein, 7 aa, synthetic construct
SYAKSLL

SEQ ID NO: 16575 - protein, 7 aa, synthetic construct
LSKLSAN

SEQ ID NO: 16576 - protein, 7 aa, synthetic construct
YSRLSGN

SEQ ID NO: 16577 - protein, 7 aa, synthetic construct
YSRLNKD

SEQ ID NO: 16578 - protein, 7 aa, synthetic construct
YSAIGMN

SEQ ID NO: 16579 - protein, 7 aa, synthetic construct
YLKSQGN

SEQ ID NO: 16580 - protein, 7 aa, synthetic construct
YSKLNDK

SEQ ID NO: 16581 - protein, 7 aa, synthetic construct
YLKSQAM

SEQ ID NO: 16582 - protein, 7 aa, synthetic construct
YVKSSNN

SEQ ID NO: 16583 - protein, 7 aa, synthetic construct
YVKSDHH

SEQ ID NO: 16584 - protein, 7 aa, synthetic construct
RGIDFYP

SEQ ID NO: 16585 - protein, 7 aa, synthetic construct
YVRSDVR

SEQ ID NO: 16586 - protein, 7 aa, synthetic construct
YHKLANN

SEQ ID NO: 16587 - protein, 7 aa, synthetic construct
YHILGKN

SEQ ID NO: 16588 - protein, 7 aa, synthetic construct
LSRVGID

SEQ ID NO: 16589 - protein, 7 aa, synthetic construct
MSRIGVN

SEQ ID NO: 16590 - protein, 7 aa, synthetic construct
LSRSGNN

SEQ ID NO: 16591 - protein, 7 aa, synthetic construct
YSKAQPN

SEQ ID NO: 16592 - protein, 7 aa, synthetic construct
YHKSQSN

SEQ ID NO: 16593 - protein, 7 aa, synthetic construct
DMSSRIW

SEQ ID NO: 16594 - protein, 7 aa, synthetic construct
HSRLNVS

SEQ ID NO: 16595 - protein, 7 aa, synthetic construct
RTPTVYP

SEQ ID NO: 16596 - protein, 7 aa, synthetic construct
YTRLSMN

SEQ ID NO: 16597 - protein, 7 aa, synthetic construct
YLKSDKS

SEQ ID NO: 16598 - protein, 7 aa, synthetic construct
YTRSQTE

SEQ ID NO: 16599 - protein, 7 aa, synthetic construct
FVKSDTK

SEQ ID NO: 16600 - protein, 7 aa, synthetic construct
RALECCY

SEQ ID NO: 16601 - protein, 7 aa, synthetic construct
LHRDGIN

SEQ ID NO: 16602 - protein, 7 aa, synthetic construct
VHRLQDK

SEQ ID NO: 16603 - protein, 7 aa, synthetic construct
YVRSDRN

SEQ ID NO: 16604 - protein, 7 aa, synthetic construct
YSSTHGV

SEQ ID NO: 16605 - protein, 7 aa, synthetic construct
SMESRLW

SEQ ID NO: 16606 - protein, 7 aa, synthetic construct
LHRLASS

SEQ ID NO: 16607 - protein, 7 aa, synthetic construct
DLSSHNW

SEQ ID NO: 16608 - protein, 7 aa, synthetic construct
LHALSHN

SEQ ID NO: 16609 - protein, 7 aa, synthetic construct
LHVRSLN

SEQ ID NO: 16610 - protein, 7 aa, synthetic construct
YVKYEDK

SEQ ID NO: 16611 - protein, 7 aa, synthetic construct
YSRLQEN

SEQ ID NO: 16612 - protein, 7 aa, synthetic construct
LSRVGFN

SEQ ID NO: 16613 - protein, 7 aa, synthetic construct
YARGGPN

SEQ ID NO: 16614 - protein, 7 aa, synthetic construct
HCGKCLN

SEQ ID NO: 16615 - protein, 7 aa, synthetic construct
LHRSGDN

SEQ ID NO: 16616 - protein, 7 aa, synthetic construct
NCKPCFD

SEQ ID NO: 16617 - protein, 7 aa, synthetic construct
HSRMNEN

SEQ ID NO: 16618 - protein, 7 aa, synthetic construct
LHRLSPY

SEQ ID NO: 16619 - protein, 7 aa, synthetic construct
LHKAGYN

SEQ ID NO: 16620 - protein, 7 aa, synthetic construct
LSRISVN

SEQ ID NO: 16621 - protein, 7 aa, synthetic construct
YSRMNDN

SEQ ID NO: 16622 - protein, 7 aa, synthetic construct
LWRTGIN

SEQ ID NO: 16623 - protein, 7 aa, synthetic construct
YFMGRSD

SEQ ID NO: 16624 - protein, 7 aa, synthetic construct
LHRASSN

SEQ ID NO: 16625 - protein, 7 aa, synthetic construct
YSRVDDR

SEQ ID NO: 16626 - protein, 7 aa, synthetic construct
YSRNSDN

SEQ ID NO: 16627 - protein, 7 aa, synthetic construct
YSARGPN

SEQ ID NO: 16628 - protein, 7 aa, synthetic construct
LTRISHN

SEQ ID NO: 16629 - protein, 7 aa, synthetic construct
LCRPCSE

SEQ ID NO: 16630 - protein, 7 aa, synthetic construct
LSRLNHN

SEQ ID NO: 16631 - protein, 7 aa, synthetic construct
LHVLGPN

SEQ ID NO: 16632 - protein, 7 aa, synthetic construct
YFTGIWA

SEQ ID NO: 16633 - protein, 7 aa, synthetic construct
YMKYDTQ

SEQ ID NO: 16634 - protein, 7 aa, synthetic construct
MSRLSQN

SEQ ID NO: 16635 - protein, 7 aa, synthetic construct
LHRSSNN

SEQ ID NO: 16636 - protein, 7 aa, synthetic construct
YHRLSNN

SEQ ID NO: 16637 - protein, 7 aa, synthetic construct
YHARAPN

SEQ ID NO: 16638 - protein, 7 aa, synthetic construct
NEDWVKW

SEQ ID NO: 16639 - protein, 7 aa, synthetic construct
IMSSRSW

SEQ ID NO: 16640 - protein, 7 aa, synthetic construct
YARTSHN

SEQ ID NO: 16641 - protein, 7 aa, synthetic construct
NGPHGWN

SEQ ID NO: 16642 - protein, 7 aa, synthetic construct
WVRSDTK

SEQ ID NO: 16643 - protein, 7 aa, synthetic construct
YQRQGWD

SEQ ID NO: 16644 - protein, 7 aa, synthetic construct
RLYDAYQ

SEQ ID NO: 16645 - protein, 7 aa, synthetic construct
GPGYVNW

SEQ ID NO: 16646 - protein, 7 aa, synthetic construct
LHRNTQN

SEQ ID NO: 16647 - protein, 7 aa, synthetic construct
MPNEGWF

SEQ ID NO: 16648 - protein, 7 aa, synthetic construct
YLDRVVY

SEQ ID NO: 16649 - protein, 7 aa, synthetic construct
SYARSVN

SEQ ID NO: 16650 - protein, 7 aa, synthetic construct
LTRLSHN

SEQ ID NO: 16651 - protein, 7 aa, synthetic construct
YRSLVVG

SEQ ID NO: 16652 - protein, 7 aa, synthetic construct
YVKSDRC

SEQ ID NO: 16653 - protein, 7 aa, synthetic construct
YHRAQMN

SEQ ID NO: 16654 - protein, 7 aa, synthetic construct
DGGRSAW

SEQ ID NO: 16655 - protein, 7 aa, synthetic construct
LSRSSYN

SEQ ID NO: 16656 - protein, 7 aa, synthetic construct
RVLANWP

SEQ ID NO: 16657 - protein, 7 aa, synthetic construct
LMIDAFP

SEQ ID NO: 16658 - protein, 7 aa, synthetic construct
YHRTGNN

SEQ ID NO: 16659 - protein, 7 aa, synthetic construct
MTYDSYD

SEQ ID NO: 16660 - protein, 7 aa, synthetic construct
RNLYDTQ

SEQ ID NO: 16661 - protein, 7 aa, synthetic construct
FKQLVNY

SEQ ID NO: 16662 - protein, 7 aa, synthetic construct
QPYELPW

SEQ ID NO: 16663 - protein, 7 aa, synthetic construct
EMESFNW

SEQ ID NO: 16664 - protein, 7 aa, synthetic construct
MHRLAVN

SEQ ID NO: 16665 - protein, 7 aa, synthetic construct
RVSVLWP

SEQ ID NO: 16666 - protein, 7 aa, synthetic construct
YKNLIQG

SEQ ID NO: 16667 - protein, 7 aa, synthetic construct
LHRLAAN

SEQ ID NO: 16668 - protein, 7 aa, synthetic construct
YFNVVKG

SEQ ID NO: 16669 - protein, 7 aa, synthetic construct
QYVRSSI

SEQ ID NO: 16670 - protein, 7 aa, synthetic construct
MSRFDIH

SEQ ID NO: 16671 - protein, 7 aa, synthetic construct
LTYDAYE

SEQ ID NO: 16672 - protein, 7 aa, synthetic construct
WGLWRLD

SEQ ID NO: 16673 - protein, 7 aa, synthetic construct
YRDIISG

SEQ ID NO: 16674 - protein, 7 aa, synthetic construct
SYTRLQT

SEQ ID NO: 16675 - protein, 7 aa, synthetic construct
QYTRNVS

SEQ ID NO: 16676 - protein, 7 aa, synthetic construct
LHVRLNN

SEQ ID NO: 16677 - protein, 7 aa, synthetic construct
RTREVWP

SEQ ID NO: 16678 - protein, 7 aa, synthetic construct
NAPLWFS

SEQ ID NO: 16679 - protein, 7 aa, synthetic construct
RNAFDHM

SEQ ID NO: 16680 - protein, 7 aa, synthetic construct
FSGRVLF

SEQ ID NO: 16681 - protein, 7 aa, synthetic construct
KHGTMWG

SEQ ID NO: 16682 - protein, 7 aa, synthetic construct
SRKTGYP

SEQ ID NO: 16683 - protein, 7 aa, synthetic construct
IQNKLWS

SEQ ID NO: 16684 - protein, 7 aa, synthetic construct
SYTRLTL

SEQ ID NO: 16685 - protein, 7 aa, synthetic construct
NDLVHWP

SEQ ID NO: 16686 - protein, 7 aa, synthetic construct
AYSRLMS

SEQ ID NO: 16687 - protein, 7 aa, synthetic construct
WPSITTY

SEQ ID NO: 16688 - protein, 7 aa, synthetic construct
QLSGLWP

SEQ ID NO: 16689 - protein, 7 aa, synthetic construct
NSPFDTY

SEQ ID NO: 16690 - protein, 7 aa, synthetic construct
MSPLVWT

SEQ ID NO: 16691 - protein, 7 aa, synthetic construct
RQGTYFP

SEQ ID NO: 16692 - protein, 7 aa, synthetic construct
TNTIRWP

SEQ ID NO: 16693 - protein, 7 aa, synthetic construct
YAIYSTH

SEQ ID NO: 16694 - protein, 7 aa, synthetic construct
SALHGYP

SEQ ID NO: 16695 - protein, 7 aa, synthetic construct
IYVRSIS

SEQ ID NO: 16696 - protein, 7 aa, synthetic construct
TRGMDWP

SEQ ID NO: 16697 - protein, 7 aa, synthetic construct
YKQWHFD

SEQ ID NO: 16698 - protein, 7 aa, synthetic construct
VYVRSQS

SEQ ID NO: 16699 - protein, 7 aa, synthetic construct
LINGSWP

SEQ ID NO: 16700 - protein, 7 aa, synthetic construct
VPIWHNG

SEQ ID NO: 16701 - protein, 7 aa, synthetic construct
VVHGVWP

SEQ ID NO: 16702 - protein, 7 aa, synthetic construct
SYVRSTQ

SEQ ID NO: 16703 - protein, 7 aa, synthetic construct
GSPINWA

SEQ ID NO: 16704 - protein, 7 aa, synthetic construct
IYSKLQH

SEQ ID NO: 16705 - protein, 7 aa, synthetic construct
EESFWRA

SEQ ID NO: 16706 - protein, 7 aa, synthetic construct
VWVKSSI

SEQ ID NO: 16707 - protein, 7 aa, synthetic construct
TYVRSIT

SEQ ID NO: 16708 - protein, 7 aa, synthetic construct
KTGGIWP

SEQ ID NO: 16709 - protein, 7 aa, synthetic construct
PGSLRYG

SEQ ID NO: 16710 - protein, 7 aa, synthetic construct
LVSNDWP

SEQ ID NO: 16711 - protein, 7 aa, synthetic construct
GRSVSTW

SEQ ID NO: 16712 - protein, 7 aa, synthetic construct
GSTYSRA

SEQ ID NO: 16713 - protein, 7 aa, synthetic construct
KISGSWP

SEQ ID NO: 16714 - protein, 7 aa, synthetic construct
KLGTAWP

SEQ ID NO: 16715 - protein, 7 aa, synthetic construct
VYSRIDI

SEQ ID NO: 16716 - protein, 7 aa, synthetic construct
IYVRSAS

SEQ ID NO: 16717 - protein, 7 aa, synthetic construct
RSLYDTL

SEQ ID NO: 16718 - protein, 7 aa, synthetic construct
YYDLVEY

SEQ ID NO: 16719 - protein, 7 aa, synthetic construct
MLEYYNN

SEQ ID NO: 16720 - protein, 7 aa, synthetic construct
TNMYDTY

SEQ ID NO: 16721 - protein, 7 aa, synthetic construct
KILTVWP

SEQ ID NO: 16722 - protein, 7 aa, synthetic construct
LYTRLDI

SEQ ID NO: 16723 - protein, 7 aa, synthetic construct
RDEANWP

SEQ ID NO: 16724 - protein, 7 aa, synthetic construct
KSPNTPW

SEQ ID NO: 16725 - protein, 7 aa, synthetic construct
GFITVYP

SEQ ID NO: 16726 - protein, 7 aa, synthetic construct
TRSMWSE

SEQ ID NO: 16727 - protein, 7 aa, synthetic construct
YKTNNWP

SEQ ID NO: 16728 - protein, 7 aa, synthetic construct
KNATVWP

SEQ ID NO: 16729 - protein, 7 aa, synthetic construct
VVKDYWP

SEQ ID NO: 16730 - protein, 7 aa, synthetic construct
GLGWING

SEQ ID NO: 16731 - protein, 7 aa, synthetic construct
QYVRTAT

SEQ ID NO: 16732 - protein, 7 aa, synthetic construct
RNTYDSY

SEQ ID NO: 16733 - protein, 7 aa, synthetic construct
VPTMWSA

SEQ ID NO: 16734 - protein, 7 aa, synthetic construct
IVGEAWP

SEQ ID NO: 16735 - protein, 7 aa, synthetic construct
TVTEVWP

SEQ ID NO: 16736 - protein, 7 aa, synthetic construct
KQPVWLA

SEQ ID NO: 16737 - protein, 7 aa, synthetic construct
KYTRTEI

SEQ ID NO: 16738 - protein, 7 aa, synthetic construct
PMPNMVW

SEQ ID NO: 16739 - protein, 7 aa, synthetic construct
ARGQLPW

SEQ ID NO: 16740 - protein, 7 aa, synthetic construct
LQGSNWP

SEQ ID NO: 16741 - protein, 7 aa, synthetic construct
TQALNWP

SEQ ID NO: 16742 - protein, 7 aa, synthetic construct
MYVRSVE

SEQ ID NO: 16743 - protein, 7 aa, synthetic construct
ALTRLQM

SEQ ID NO: 16744 - protein, 7 aa, synthetic construct
DPKGYFF

SEQ ID NO: 16745 - protein, 7 aa, synthetic construct
SYVRTLS

SEQ ID NO: 16746 - protein, 7 aa, synthetic construct
RQNSVWP

SEQ ID NO: 16747 - protein, 7 aa, synthetic construct
AFVRSVP

SEQ ID NO: 16748 - protein, 7 aa, synthetic construct
NKNGNWP

SEQ ID NO: 16749 - protein, 7 aa, synthetic construct
QYTRLQL

SEQ ID NO: 16750 - protein, 7 aa, synthetic construct
VKPNIMW

SEQ ID NO: 16751 - protein, 7 aa, synthetic construct
KSGDHWP

SEQ ID NO: 16752 - protein, 7 aa, synthetic construct
IYIKSAV

SEQ ID NO: 16753 - protein, 7 aa, synthetic construct
RLNDTWP

SEQ ID NO: 16754 - protein, 7 aa, synthetic construct
MVNKTWP

SEQ ID NO: 16755 - protein, 7 aa, synthetic construct
VYSRLDT

SEQ ID NO: 16756 - protein, 7 aa, synthetic construct
LKDHNWP

SEQ ID NO: 16757 - protein, 7 aa, synthetic construct
SAPIYFN

SEQ ID NO: 16758 - protein, 7 aa, synthetic construct
LVHDAWP

SEQ ID NO: 16759 - protein, 7 aa, synthetic construct
RWDPHDQ

SEQ ID NO: 16760 - protein, 7 aa, synthetic construct
LNVWKQP

SEQ ID NO: 16761 - protein, 7 aa, synthetic construct
RLTDTWP

SEQ ID NO: 16762 - protein, 7 aa, synthetic construct
IYVKSVS

SEQ ID NO: 16763 - protein, 7 aa, synthetic construct
MKGNNWP

SEQ ID NO: 16764 - protein, 7 aa, synthetic construct
RNVYDGY

SEQ ID NO: 16765 - protein, 7 aa, synthetic construct
IYIKSST

SEQ ID NO: 16766 - protein, 7 aa, synthetic construct
TKHYTFP

SEQ ID NO: 16767 - protein, 7 aa, synthetic construct
WKMTQLG

SEQ ID NO: 16768 - protein, 7 aa, synthetic construct
QYIRSSS

SEQ ID NO: 16769 - protein, 7 aa, synthetic construct
SMILDWK

SEQ ID NO: 16770 - protein, 7 aa, synthetic construct
REFEQWP

SEQ ID NO: 16771 - protein, 7 aa, synthetic construct
YTVYSTF

SEQ ID NO: 16772 - protein, 7 aa, synthetic construct
NKPLDWK

SEQ ID NO: 16773 - protein, 7 aa, synthetic construct
ATWPLMG

SEQ ID NO: 16774 - protein, 7 aa, synthetic construct
GNEFWSP

SEQ ID NO: 16775 - protein, 7 aa, synthetic construct
LMNNDWP

SEQ ID NO: 16776 - protein, 7 aa, synthetic construct
VTGAVWP

SEQ ID NO: 16777 - protein, 7 aa, synthetic construct
SGPIWLA

SEQ ID NO: 16778 - protein, 7 aa, synthetic construct
HKNPLWG

SEQ ID NO: 16779 - protein, 7 aa, synthetic construct
SNGRLNW

SEQ ID NO: 16780 - protein, 7 aa, synthetic construct
IRGNEWP

SEQ ID NO: 16781 - protein, 7 aa, synthetic construct
RGPVYLS

SEQ ID NO: 16782 - protein, 7 aa, synthetic construct
RNKGDWP

SEQ ID NO: 16783 - protein, 7 aa, synthetic construct
VSLFSNH

SEQ ID NO: 16784 - protein, 7 aa, synthetic construct
QGLWRDA

SEQ ID NO: 16785 - protein, 7 aa, synthetic construct
FVASEWP

SEQ ID NO: 16786 - protein, 7 aa, synthetic construct
VYHKFQI

SEQ ID NO: 16787 - protein, 7 aa, synthetic construct
GRPNLLW

SEQ ID NO: 16788 - protein, 7 aa, synthetic construct
WRSTSFG

SEQ ID NO: 16789 - protein, 7 aa, synthetic construct
NNIFATY

SEQ ID NO: 16790 - protein, 7 aa, synthetic construct
SRLTLFP

SEQ ID NO: 16791 - protein, 7 aa, synthetic construct
RYLKSQE

SEQ ID NO: 16792 - protein, 7 aa, synthetic construct
TFVRSVL

SEQ ID NO: 16793 - protein, 7 aa, synthetic construct
TRMAMFP

SEQ ID NO: 16794 - protein, 7 aa, synthetic construct
QYTHKVL

SEQ ID NO: 16795 - protein, 7 aa, synthetic construct
MAQGNWP

SEQ ID NO: 16796 - protein, 7 aa, synthetic construct
VYSKLMT

SEQ ID NO: 16797 - protein, 7 aa, synthetic construct
MMSDAWP

SEQ ID NO: 16798 - protein, 7 aa, synthetic construct
RKESMWP

SEQ ID NO: 16799 - protein, 7 aa, synthetic construct
SGWLTEV

SEQ ID NO: 16800 - protein, 7 aa, synthetic construct
VLSGMWP

SEQ ID NO: 16801 - protein, 7 aa, synthetic construct
SYSRVQV

SEQ ID NO: 16802 - protein, 7 aa, synthetic construct
DGLAGYY

SEQ ID NO: 16803 - protein, 7 aa, synthetic construct
DPVNVWG

SEQ ID NO: 16804 - protein, 7 aa, synthetic construct
VYTRMDI

SEQ ID NO: 16805 - protein, 7 aa, synthetic construct
VEHNNWP

SEQ ID NO: 16806 - protein, 7 aa, synthetic construct
SYARSVP

SEQ ID NO: 16807 - protein, 7 aa, synthetic construct
QRATLFP

SEQ ID NO: 16808 - protein, 7 aa, synthetic construct
TYSRLQL

SEQ ID NO: 16809 - protein, 7 aa, synthetic construct
MDKDAWP

SEQ ID NO: 16810 - protein, 7 aa, synthetic construct
EKGMWTP

SEQ ID NO: 16811 - protein, 7 aa, synthetic construct
LYVKSTV

SEQ ID NO: 16812 - protein, 7 aa, synthetic construct
AMGSLWP

SEQ ID NO: 16813 - protein, 7 aa, synthetic construct
MMGQQWP

SEQ ID NO: 16814 - protein, 7 aa, synthetic construct
SYVKSST

SEQ ID NO: 16815 - protein, 7 aa, synthetic construct
LILENWP

SEQ ID NO: 16816 - protein, 7 aa, synthetic construct
RNGDNWP

SEQ ID NO: 16817 - protein, 7 aa, synthetic construct
VFSKIQH

SEQ ID NO: 16818 - protein, 7 aa, synthetic construct
VMKDLWP

SEQ ID NO: 16819 - protein, 7 aa, synthetic construct
KRLQEWP

SEQ ID NO: 16820 - protein, 7 aa, synthetic construct
PMNGNWP

SEQ ID NO: 16821 - protein, 7 aa, synthetic construct
INLKEWP

SEQ ID NO: 16822 - protein, 7 aa, synthetic construct
QYVLSMK

SEQ ID NO: 16823 - protein, 7 aa, synthetic construct
NLMGTWP

SEQ ID NO: 16824 - protein, 7 aa, synthetic construct
VFSKSMY

SEQ ID NO: 16825 - protein, 7 aa, synthetic construct
QYVKSTT

SEQ ID NO: 16826 - protein, 7 aa, synthetic construct
KPMYLGT

SEQ ID NO: 16827 - protein, 7 aa, synthetic construct
QYTKSVP

SEQ ID NO: 16828 - protein, 7 aa, synthetic construct
QFVKSIS

SEQ ID NO: 16829 - protein, 7 aa, synthetic construct
DGFTNLW

SEQ ID NO: 16830 - protein, 7 aa, synthetic construct
KNAEVWP

SEQ ID NO: 16831 - protein, 7 aa, synthetic construct
SRSSLFP

SEQ ID NO: 16832 - protein, 7 aa, synthetic construct
VYHKLTT

SEQ ID NO: 16833 - protein, 7 aa, synthetic construct
GGMFMSP

SEQ ID NO: 16834 - protein, 7 aa, synthetic construct
QYVRSEP

SEQ ID NO: 16835 - protein, 7 aa, synthetic construct
RNNYDNY

SEQ ID NO: 16836 - protein, 7 aa, synthetic construct
VYVRSAE

SEQ ID NO: 16837 - protein, 7 aa, synthetic construct
QYVISQK

SEQ ID NO: 16838 - protein, 7 aa, synthetic construct
KNPLQFH

SEQ ID NO: 16839 - protein, 7 aa, synthetic construct
RGTFDVY

SEQ ID NO: 16840 - protein, 7 aa, synthetic construct
HRGELNW

SEQ ID NO: 16841 - protein, 7 aa, synthetic construct
MRVIDWS

SEQ ID NO: 16842 - protein, 7 aa, synthetic construct
IHDGVWP

SEQ ID NO: 16843 - protein, 7 aa, synthetic construct
GTAKHPW

SEQ ID NO: 16844 - protein, 7 aa, synthetic construct
WRGTSMQ

SEQ ID NO: 16845 - protein, 7 aa, synthetic construct
WKGTTFH

SEQ ID NO: 16846 - protein, 7 aa, synthetic construct
VYTKSTS

SEQ ID NO: 16847 - protein, 7 aa, synthetic construct
NNKGNWP

SEQ ID NO: 16848 - protein, 7 aa, synthetic construct
TGVWMQT

SEQ ID NO: 16849 - protein, 7 aa, synthetic construct
DRINYLG

SEQ ID NO: 16850 - protein, 7 aa, synthetic construct
TYSRLDS

SEQ ID NO: 16851 - protein, 7 aa, synthetic construct
SYIYDGD

SEQ ID NO: 16852 - protein, 7 aa, synthetic construct
AYVKSIT

SEQ ID NO: 16853 - protein, 7 aa, synthetic construct
QYTKHVS

SEQ ID NO: 16854 - protein, 7 aa, synthetic construct
RQHVLFP

SEQ ID NO: 16855 - protein, 7 aa, synthetic construct
GKSITHW

SEQ ID NO: 16856 - protein, 7 aa, synthetic construct
SYAKSVI

SEQ ID NO: 16857 - protein, 7 aa, synthetic construct
GRITLFP

SEQ ID NO: 16858 - protein, 7 aa, synthetic construct
IYSALQT

SEQ ID NO: 16859 - protein, 7 aa, synthetic construct
KVQQQWP

SEQ ID NO: 16860 - protein, 7 aa, synthetic construct
AYVKSMS

SEQ ID NO: 16861 - protein, 7 aa, synthetic construct
KRDSMWP

SEQ ID NO: 16862 - protein, 7 aa, synthetic construct
MLAENWP

SEQ ID NO: 16863 - protein, 7 aa, synthetic construct
PMRGHLF

SEQ ID NO: 16864 - protein, 7 aa, synthetic construct
YQRADWP

SEQ ID NO: 16865 - protein, 7 aa, synthetic construct
AYVKSSI

SEQ ID NO: 16866 - protein, 7 aa, synthetic construct
FLKYSDY

SEQ ID NO: 16867 - protein, 7 aa, synthetic construct
RISNDWP

SEQ ID NO: 16868 - protein, 7 aa, synthetic construct
KFESNWP

SEQ ID NO: 16869 - protein, 7 aa, synthetic construct
VKGEAWP

SEQ ID NO: 16870 - protein, 7 aa, synthetic construct
QYVKHLS

SEQ ID NO: 16871 - protein, 7 aa, synthetic construct
KVGALWP

SEQ ID NO: 16872 - protein, 7 aa, synthetic construct
VYTRTEK

SEQ ID NO: 16873 - protein, 7 aa, synthetic construct
DTWNMGG

SEQ ID NO: 16874 - protein, 7 aa, synthetic construct
YNHPLNW

SEQ ID NO: 16875 - protein, 7 aa, synthetic construct
VHHKSMT

SEQ ID NO: 16876 - protein, 7 aa, synthetic construct
WQGEHPW

SEQ ID NO: 16877 - protein, 7 aa, synthetic construct
DRNKLIW

SEQ ID NO: 16878 - protein, 7 aa, synthetic construct
WQPDPFP

SEQ ID NO: 16879 - protein, 7 aa, synthetic construct
WTTHNIV

SEQ ID NO: 16880 - protein, 7 aa, synthetic construct
DMPNWSW

SEQ ID NO: 16881 - protein, 7 aa, synthetic construct
IYVKFES

SEQ ID NO: 16882 - protein, 7 aa, synthetic construct
YVADDWP

SEQ ID NO: 16883 - protein, 7 aa, synthetic construct
RERNEWP

SEQ ID NO: 16884 - protein, 7 aa, synthetic construct
KIEGSWP

SEQ ID NO: 16885 - protein, 7 aa, synthetic construct
SYVKSQT

SEQ ID NO: 16886 - protein, 7 aa, synthetic construct
YLDLDWP

SEQ ID NO: 16887 - protein, 7 aa, synthetic construct
KVEYNWP

SEQ ID NO: 16888 - protein, 7 aa, synthetic construct
SEQEFNW

SEQ ID NO: 16889 - protein, 7 aa, synthetic construct
VYTKNER

SEQ ID NO: 16890 - protein, 7 aa, synthetic construct
IYSKLQT

SEQ ID NO: 16891 - protein, 7 aa, synthetic construct
GIYATFP

SEQ ID NO: 16892 - protein, 7 aa, synthetic construct
NHPLAWE

SEQ ID NO: 16893 - protein, 7 aa, synthetic construct
RRSDNWP

SEQ ID NO: 16894 - protein, 7 aa, synthetic construct
RHTTEWP

SEQ ID NO: 16895 - protein, 7 aa, synthetic construct
NKPLYFS

SEQ ID NO: 16896 - protein, 7 aa, synthetic construct
VYVKTQS

SEQ ID NO: 16897 - protein, 7 aa, synthetic construct
GQQYSYS

SEQ ID NO: 16898 - protein, 7 aa, synthetic construct
SYSRIAP

SEQ ID NO: 16899 - protein, 7 aa, synthetic construct
SRDVTWP

SEQ ID NO: 16900 - protein, 7 aa, synthetic construct
RDTFWSG

SEQ ID NO: 16901 - protein, 7 aa, synthetic construct
TSRPLNW

SEQ ID NO: 16902 - protein, 7 aa, synthetic construct
QYHKSES

SEQ ID NO: 16903 - protein, 7 aa, synthetic construct
KNEDIWP

SEQ ID NO: 16904 - protein, 7 aa, synthetic construct
YNEGSWP

SEQ ID NO: 16905 - protein, 7 aa, synthetic construct
SSIHDRY

SEQ ID NO: 16906 - protein, 7 aa, synthetic construct
RNNYDSM

SEQ ID NO: 16907 - protein, 7 aa, synthetic construct
MQDIKWP

SEQ ID NO: 16908 - protein, 7 aa, synthetic construct
RNVFDTS

SEQ ID NO: 16909 - protein, 7 aa, synthetic construct
EANFSNW

SEQ ID NO: 16910 - protein, 7 aa, synthetic construct
TYSRLVL

SEQ ID NO: 16911 - protein, 7 aa, synthetic construct
TYVRSEV

SEQ ID NO: 16912 - protein, 7 aa, synthetic construct
QYTKSSI

SEQ ID NO: 16913 - protein, 7 aa, synthetic construct
WSTREMI

SEQ ID NO: 16914 - protein, 7 aa, synthetic construct
GSTDPWP

SEQ ID NO: 16915 - protein, 7 aa, synthetic construct
YFTDEWP

SEQ ID NO: 16916 - protein, 7 aa, synthetic construct
VMSEVWP

SEQ ID NO: 16917 - protein, 7 aa, synthetic construct
RDRAEWP

SEQ ID NO: 16918 - protein, 7 aa, synthetic construct
SYSRLIE

SEQ ID NO: 16919 - protein, 7 aa, synthetic construct
VNRLVDW

SEQ ID NO: 16920 - protein, 7 aa, synthetic construct
TVKIQWP

SEQ ID NO: 16921 - protein, 7 aa, synthetic construct
TYTKSQT

SEQ ID NO: 16922 - protein, 7 aa, synthetic construct
RNHYDTQ

SEQ ID NO: 16923 - protein, 7 aa, synthetic construct
LKVLQWD

SEQ ID NO: 16924 - protein, 7 aa, synthetic construct
FVSSDWP

SEQ ID NO: 16925 - protein, 7 aa, synthetic construct
GFGEKWP

SEQ ID NO: 16926 - protein, 7 aa, synthetic construct
AYVKSNT

SEQ ID NO: 16927 - protein, 7 aa, synthetic construct
SKYHDVF

SEQ ID NO: 16928 - protein, 7 aa, synthetic construct
VYTKSEW

SEQ ID NO: 16929 - protein, 7 aa, synthetic construct
YMSPDWP

SEQ ID NO: 16930 - protein, 7 aa, synthetic construct
KKSLDWP

SEQ ID NO: 16931 - protein, 7 aa, synthetic construct
SRNVLGW

SEQ ID NO: 16932 - protein, 7 aa, synthetic construct
VKDGTWP

SEQ ID NO: 16933 - protein, 7 aa, synthetic construct
ITVDGWP

SEQ ID NO: 16934 - protein, 7 aa, synthetic construct
FSGDTWP

SEQ ID NO: 16935 - protein, 7 aa, synthetic construct
VYSKLNT

SEQ ID NO: 16936 - protein, 7 aa, synthetic construct
TSRFDTY

SEQ ID NO: 16937 - protein, 7 aa, synthetic construct
KVNDTWP

SEQ ID NO: 16938 - protein, 7 aa, synthetic construct
WKFQTEI

SEQ ID NO: 16939 - protein, 7 aa, synthetic construct
GTFQLFP

SEQ ID NO: 16940 - protein, 7 aa, synthetic construct
VYVRTEM

SEQ ID NO: 16941 - protein, 7 aa, synthetic construct
QVVKYLP

SEQ ID NO: 16942 - protein, 7 aa, synthetic construct
TFVKSLT

SEQ ID NO: 16943 - protein, 7 aa, synthetic construct
KVEYDWP

SEQ ID NO: 16944 - protein, 7 aa, synthetic construct
QWTKTVP

SEQ ID NO: 16945 - protein, 7 aa, synthetic construct
SFVRSVE

SEQ ID NO: 16946 - protein, 7 aa, synthetic construct
FKEGIWP

SEQ ID NO: 16947 - protein, 7 aa, synthetic construct
GKNVLWP

SEQ ID NO: 16948 - protein, 7 aa, synthetic construct
VVRFSNH

SEQ ID NO: 16949 - protein, 7 aa, synthetic construct
VQAESWP

SEQ ID NO: 16950 - protein, 7 aa, synthetic construct
VHEELWP

SEQ ID NO: 16951 - protein, 7 aa, synthetic construct
AFTRLEV

SEQ ID NO: 16952 - protein, 7 aa, synthetic construct
RYTKLEE

SEQ ID NO: 16953 - protein, 7 aa, synthetic construct
RYEADWP

SEQ ID NO: 16954 - protein, 7 aa, synthetic construct
LYEDVWP

SEQ ID NO: 16955 - protein, 7 aa, synthetic construct
KQGSEWP

SEQ ID NO: 16956 - protein, 7 aa, synthetic construct
MLFKYEA

SEQ ID NO: 16957 - protein, 7 aa, synthetic construct
ILFKRES

SEQ ID NO: 16958 - protein, 7 aa, synthetic construct
YDMPDWP

SEQ ID NO: 16959 - protein, 7 aa, synthetic construct
ILDRNWP

SEQ ID NO: 16960 - protein, 7 aa, synthetic construct
TQVEHWP

SEQ ID NO: 16961 - protein, 7 aa, synthetic construct
RLIENWP

SEQ ID NO: 16962 - protein, 7 aa, synthetic construct
AYSRLES

SEQ ID NO: 16963 - protein, 7 aa, synthetic construct
YAEEDWP

SEQ ID NO: 16964 - protein, 7 aa, synthetic construct
RNAFDTL

SEQ ID NO: 16965 - protein, 7 aa, synthetic construct
WKDTRFE

SEQ ID NO: 16966 - protein, 7 aa, synthetic construct
KEFYVGS

SEQ ID NO: 16967 - protein, 7 aa, synthetic construct
KPLYDGS

SEQ ID NO: 16968 - protein, 7 aa, synthetic construct
TGVELWP

SEQ ID NO: 16969 - protein, 7 aa, synthetic construct
QLTRLES

SEQ ID NO: 16970 - protein, 7 aa, synthetic construct
MNDRIWP

SEQ ID NO: 16971 - protein, 7 aa, synthetic construct
VVSEIWP

SEQ ID NO: 16972 - protein, 7 aa, synthetic construct
IIDAEWP

SEQ ID NO: 16973 - protein, 7 aa, synthetic construct
VYTKHEF

SEQ ID NO: 16974 - protein, 7 aa, synthetic construct
VDNNEWP

SEQ ID NO: 16975 - protein, 7 aa, synthetic construct
VYSKSQE

SEQ ID NO: 16976 - protein, 7 aa, synthetic construct
WPSELGW

SEQ ID NO: 16977 - protein, 7 aa, synthetic construct
AYVKSES

SEQ ID NO: 16978 - protein, 7 aa, synthetic construct
QPRALFP

SEQ ID NO: 16979 - protein, 7 aa, synthetic construct
VYVKSES

SEQ ID NO: 16980 - protein, 7 aa, synthetic construct
HGPSLWP

SEQ ID NO: 16981 - protein, 7 aa, synthetic construct
GWMNRIA

SEQ ID NO: 16982 - protein, 7 aa, synthetic construct
MTGPVWP

SEQ ID NO: 16983 - protein, 7 aa, synthetic construct
KVEQEWP

SEQ ID NO: 16984 - protein, 7 aa, synthetic construct
GWVNRID

SEQ ID NO: 16985 - protein, 7 aa, synthetic construct
LMQDVWP

SEQ ID NO: 16986 - protein, 7 aa, synthetic construct
VEEMSWP

SEQ ID NO: 16987 - protein, 7 aa, synthetic construct
IWIKSQT

SEQ ID NO: 16988 - protein, 7 aa, synthetic construct
YFDDEFP

SEQ ID NO: 16989 - protein, 7 aa, synthetic construct
RNQWDTA

SEQ ID NO: 16990 - protein, 7 aa, synthetic construct
FYDPDWP

SEQ ID NO: 16991 - protein, 7 aa, synthetic construct
NETMWSP

SEQ ID NO: 16992 - protein, 7 aa, synthetic construct
RDSIEWP

SEQ ID NO: 16993 - protein, 7 aa, synthetic construct
VHVKFEY

SEQ ID NO: 16994 - protein, 7 aa, synthetic construct
KLELEWP

SEQ ID NO: 16995 - protein, 7 aa, synthetic construct
LFNGNWP

SEQ ID NO: 16996 - protein, 7 aa, synthetic construct
TYVRFEQ

SEQ ID NO: 16997 - protein, 7 aa, synthetic construct
RMNFDWP

SEQ ID NO: 16998 - protein, 7 aa, synthetic construct
YKVLDWT

SEQ ID NO: 16999 - protein, 7 aa, synthetic construct
HRHVLFP

SEQ ID NO: 17000 - protein, 7 aa, synthetic construct
YKMMEWP

SEQ ID NO: 17001 - protein, 7 aa, synthetic construct
SETWVFP

SEQ ID NO: 17002 - protein, 7 aa, synthetic construct
YLGELWP

SEQ ID NO: 17003 - protein, 7 aa, synthetic construct
ANVLNWA

SEQ ID NO: 17004 - protein, 7 aa, synthetic construct
RISISPW

SEQ ID NO: 17005 - protein, 7 aa, synthetic construct
HNGFWTG

SEQ ID NO: 17006 - protein, 7 aa, synthetic construct
RLFRLEA

SEQ ID NO: 17007 - protein, 7 aa, synthetic construct
KYFTFEP

SEQ ID NO: 17008 - protein, 7 aa, synthetic construct
TNDFDVY

SEQ ID NO: 17009 - protein, 7 aa, synthetic construct
KEKPDKR

SEQ ID NO: 17010 - protein, 7 aa, synthetic construct
GLCPSTK

SEQ ID NO: 17011 - protein, 7 aa, synthetic construct
SCAVSHR

SEQ ID NO: 17012 - protein, 7 aa, synthetic construct
SCPKNDL

SEQ ID NO: 17013 - protein, 7 aa, synthetic construct
RNEYTTY

SEQ ID NO: 17014 - protein, 7 aa, synthetic construct
FYRSDNC

SEQ ID NO: 17015 - protein, 7 aa, synthetic construct
CNYDSFP

SEQ ID NO: 17016 - protein, 7 aa, synthetic construct
YVKNDAR

SEQ ID NO: 17017 - protein, 7 aa, synthetic construct
RNENRKG

SEQ ID NO: 17018 - protein, 7 aa, synthetic construct
HSRVGHN

SEQ ID NO: 17019 - protein, 7 aa, synthetic construct
RQAKQKN

SEQ ID NO: 17020 - protein, 7 aa, synthetic construct
KMSSSTW

SEQ ID NO: 17021 - protein, 7 aa, synthetic construct
STNCYKS

SEQ ID NO: 17022 - protein, 7 aa, synthetic construct
LDCERYQ

SEQ ID NO: 17023 - protein, 7 aa, synthetic construct
VSSSNGR

SEQ ID NO: 17024 - protein, 7 aa, synthetic construct
CDYISYA

SEQ ID NO: 17025 - protein, 7 aa, synthetic construct
VESSNGR

SEQ ID NO: 17026 - protein, 7 aa, synthetic construct
RVNTRAN

SEQ ID NO: 17027 - protein, 7 aa, synthetic construct
CAFTGTR

SEQ ID NO: 17028 - protein, 7 aa, synthetic construct
HYCPNKL

SEQ ID NO: 17029 - protein, 7 aa, synthetic construct
PRMCANN

SEQ ID NO: 17030 - protein, 7 aa, synthetic construct
RNKDRNS

SEQ ID NO: 17031 - protein, 7 aa, synthetic construct
HRQDSRR

SEQ ID NO: 17032 - protein, 7 aa, synthetic construct
KMDSRLW

SEQ ID NO: 17033 - protein, 7 aa, synthetic construct
RNMSVYP

SEQ ID NO: 17034 - protein, 7 aa, synthetic construct
SAEWVSY

SEQ ID NO: 17035 - protein, 7 aa, synthetic construct
LRSECCV

SEQ ID NO: 17036 - protein, 7 aa, synthetic construct
QLEARTW

SEQ ID NO: 17037 - protein, 7 aa, synthetic construct
EMQSRAW

SEQ ID NO: 17038 - protein, 7 aa, synthetic construct
TMSDRTW

SEQ ID NO: 17039 - protein, 7 aa, synthetic construct
REDGLRW

SEQ ID NO: 17040 - protein, 7 aa, synthetic construct
HSRLNLQ

SEQ ID NO: 17041 - protein, 7 aa, synthetic construct
LCRSCAK

SEQ ID NO: 17042 - protein, 7 aa, synthetic construct
RGNGGHK

SEQ ID NO: 17043 - protein, 7 aa, synthetic construct
YTFLGRN

SEQ ID NO: 17044 - protein, 7 aa, synthetic construct
LCRYSGG

SEQ ID NO: 17045 - protein, 7 aa, synthetic construct
SSNCLHY

SEQ ID NO: 17046 - protein, 7 aa, synthetic construct
RTFDSFE

SEQ ID NO: 17047 - protein, 7 aa, synthetic construct
VPGDCCV

SEQ ID NO: 17048 - protein, 7 aa, synthetic construct
TESSSGR

SEQ ID NO: 17049 - protein, 7 aa, synthetic construct
KMSSANW

SEQ ID NO: 17050 - protein, 7 aa, synthetic construct
RETYVYP

SEQ ID NO: 17051 - protein, 7 aa, synthetic construct
YNSTHGR

SEQ ID NO: 17052 - protein, 7 aa, synthetic construct
VYVRTDR

SEQ ID NO: 17053 - protein, 7 aa, synthetic construct
DDGRSRY

SEQ ID NO: 17054 - protein, 7 aa, synthetic construct
CSGFERR

SEQ ID NO: 17055 - protein, 7 aa, synthetic construct
FFYNKPT

SEQ ID NO: 17056 - protein, 7 aa, synthetic construct
KPYILHK

SEQ ID NO: 17057 - protein, 7 aa, synthetic construct
KRPPEAR

SEQ ID NO: 17058 - protein, 7 aa, synthetic construct
KREPERR

SEQ ID NO: 17059 - protein, 7 aa, synthetic construct
LSRVAMN

SEQ ID NO: 17060 - protein, 7 aa, synthetic construct
RMSDHNW

SEQ ID NO: 17061 - protein, 7 aa, synthetic construct
RVDQPKK

SEQ ID NO: 17062 - protein, 7 aa, synthetic construct
NYASHSW

SEQ ID NO: 17063 - protein, 7 aa, synthetic construct
HGSTNGK

SEQ ID NO: 17064 - protein, 7 aa, synthetic construct
RNGTSSW

SEQ ID NO: 17065 - protein, 7 aa, synthetic construct
KMPSRDW

SEQ ID NO: 17066 - protein, 7 aa, synthetic construct
GGDGNHY

SEQ ID NO: 17067 - protein, 7 aa, synthetic construct
MYNDCCV

SEQ ID NO: 17068 - protein, 7 aa, synthetic construct
VREYMSY

SEQ ID NO: 17069 - protein, 7 aa, synthetic construct
SLLKPAK

SEQ ID NO: 17070 - protein, 7 aa, synthetic construct
FEGRGWN

SEQ ID NO: 17071 - protein, 7 aa, synthetic construct
KLEPPKR

SEQ ID NO: 17072 - protein, 7 aa, synthetic construct
RNYDTYP

SEQ ID NO: 17073 - protein, 7 aa, synthetic construct
QSVCTTK

SEQ ID NO: 17074 - protein, 7 aa, synthetic construct
RNHETFP

SEQ ID NO: 17075 - protein, 7 aa, synthetic construct
GLIGVWP

SEQ ID NO: 17076 - protein, 7 aa, synthetic construct
DKGHCHP

SEQ ID NO: 17077 - protein, 7 aa, synthetic construct
AQRVRSI

SEQ ID NO: 17078 - protein, 7 aa, synthetic construct
KTINPGK

SEQ ID NO: 17079 - protein, 7 aa, synthetic construct
HSSTNGA

SEQ ID NO: 17080 - protein, 7 aa, synthetic construct
ENHPLWG

SEQ ID NO: 17081 - protein, 7 aa, synthetic construct
FHKLMSN

SEQ ID NO: 17082 - protein, 7 aa, synthetic construct
HDFNFRG

SEQ ID NO: 17083 - protein, 7 aa, synthetic construct
DCQTNRS

SEQ ID NO: 17084 - protein, 7 aa, synthetic construct
IPNCYKH

SEQ ID NO: 17085 - protein, 7 aa, synthetic construct
RTDCVYP

SEQ ID NO: 17086 - protein, 7 aa, synthetic construct
CDKEAYQ

SEQ ID NO: 17087 - protein, 7 aa, synthetic construct
DCKYFKA

SEQ ID NO: 17088 - protein, 7 aa, synthetic construct
YLLRGCA

SEQ ID NO: 17089 - protein, 7 aa, synthetic construct
QRGVPNW

SEQ ID NO: 17090 - protein, 7 aa, synthetic construct
ASTHCTR

SEQ ID NO: 17091 - protein, 7 aa, synthetic construct
QMNPIKK

SEQ ID NO: 17092 - protein, 7 aa, synthetic construct
CGVDKSR

SEQ ID NO: 17093 - protein, 7 aa, synthetic construct
GRMAVRV

SEQ ID NO: 17094 - protein, 7 aa, synthetic construct
CHREHSL

SEQ ID NO: 17095 - protein, 7 aa, synthetic construct
LWRNCDA

SEQ ID NO: 17096 - protein, 7 aa, synthetic construct
LVRYENV

SEQ ID NO: 17097 - protein, 7 aa, synthetic construct
HGSGNFV

SEQ ID NO: 17098 - protein, 7 aa, synthetic construct
TETKFCN

SEQ ID NO: 17099 - protein, 7 aa, synthetic construct
KENNAKK

SEQ ID NO: 17100 - protein, 7 aa, synthetic construct
YAAGSWN

SEQ ID NO: 17101 - protein, 7 aa, synthetic construct
ERNSCMH

SEQ ID NO: 17102 - protein, 7 aa, synthetic construct
DAYELCA

SEQ ID NO: 17103 - protein, 7 aa, synthetic construct
RTPDSYC

SEQ ID NO: 17104 - protein, 7 aa, synthetic construct
RGNECWS

SEQ ID NO: 17105 - protein, 7 aa, synthetic construct
SNNAYWG

SEQ ID NO: 17106 - protein, 7 aa, synthetic construct
RVDCGSR

SEQ ID NO: 17107 - protein, 7 aa, synthetic construct
GNQNYKK

SEQ ID NO: 17108 - protein, 7 aa, synthetic construct
CGYTNHV

SEQ ID NO: 17109 - protein, 7 aa, synthetic construct
HKCQISG

SEQ ID NO: 17110 - protein, 7 aa, synthetic construct
CEFFQRE

SEQ ID NO: 17111 - protein, 7 aa, synthetic construct
RKDNPPR

SEQ ID NO: 17112 - protein, 7 aa, synthetic construct
GYAGKRN

SEQ ID NO: 17113 - protein, 7 aa, synthetic construct
GKYPPQG

SEQ ID NO: 17114 - protein, 7 aa, synthetic construct
YSKAGYD

SEQ ID NO: 17115 - protein, 7 aa, synthetic construct
CGPHWNA

SEQ ID NO: 17116 - protein, 7 aa, synthetic construct
RVTHCTG

SEQ ID NO: 17117 - protein, 7 aa, synthetic construct
FKAGTWN

SEQ ID NO: 17118 - protein, 7 aa, synthetic construct
HWTEYNS

SEQ ID NO: 17119 - protein, 7 aa, synthetic construct
LHRLIAD

SEQ ID NO: 17120 - protein, 7 aa, synthetic construct
MNCAAMR

SEQ ID NO: 17121 - protein, 7 aa, synthetic construct
SEKKLKF

SEQ ID NO: 17122 - protein, 7 aa, synthetic construct
ACDRSHT

SEQ ID NO: 17123 - protein, 7 aa, synthetic construct
NPHTCNN

SEQ ID NO: 17124 - protein, 7 aa, synthetic construct
SKNSIWT

SEQ ID NO: 17125 - protein, 7 aa, synthetic construct
YGCQSGF

SEQ ID NO: 17126 - protein, 7 aa, synthetic construct
SCRISEK

SEQ ID NO: 17127 - protein, 7 aa, synthetic construct
KMSSSVW

SEQ ID NO: 17128 - protein, 7 aa, synthetic construct
LHKGCTN

SEQ ID NO: 17129 - protein, 7 aa, synthetic construct
WIFQSHT

SEQ ID NO: 17130 - protein, 7 aa, synthetic construct
CRGTVFP

SEQ ID NO: 17131 - protein, 7 aa, synthetic construct
LPVRGKH

SEQ ID NO: 17132 - protein, 7 aa, synthetic construct
IMMITRG

SEQ ID NO: 17133 - protein, 7 aa, synthetic construct
GQCGPKS

SEQ ID NO: 17134 - protein, 7 aa, synthetic construct
TTIHSRW

SEQ ID NO: 17135 - protein, 7 aa, synthetic construct
KSIWTDD

SEQ ID NO: 17136 - protein, 7 aa, synthetic construct
CTGNSSK

SEQ ID NO: 17137 - protein, 7 aa, synthetic construct
CDRSNGG

SEQ ID NO: 17138 - protein, 7 aa, synthetic construct
CNPSVYR

SEQ ID NO: 17139 - protein, 7 aa, synthetic construct
CKSYGSS

SEQ ID NO: 17140 - protein, 7 aa, synthetic construct
NIVNYRQ

SEQ ID NO: 17141 - protein, 7 aa, synthetic construct
CTRMDYG

SEQ ID NO: 17142 - protein, 7 aa, synthetic construct
ISEYSKW

SEQ ID NO: 17143 - protein, 7 aa, synthetic construct
TNWESYL

SEQ ID NO: 17144 - protein, 7 aa, synthetic construct
WTCSRKQ

SEQ ID NO: 17145 - protein, 7 aa, synthetic construct
FHHRQNH

SEQ ID NO: 17146 - protein, 7 aa, synthetic construct
FKVWDGG

SEQ ID NO: 17147 - protein, 7 aa, synthetic construct
KIPINWS

SEQ ID NO: 17148 - protein, 7 aa, synthetic construct
GYRSLYP

SEQ ID NO: 17149 - protein, 7 aa, synthetic construct
RQEKHLR

SEQ ID NO: 17150 - protein, 7 aa, synthetic construct
YARETWN

SEQ ID NO: 17151 - protein, 7 aa, synthetic construct
CWDTSNA

SEQ ID NO: 17152 - protein, 7 aa, synthetic construct
DSPWSNW

SEQ ID NO: 17153 - protein, 7 aa, synthetic construct
NSTSCTP

SEQ ID NO: 17154 - protein, 7 aa, synthetic construct
HKCGDTR

SEQ ID NO: 17155 - protein, 7 aa, synthetic construct
LARNASN

SEQ ID NO: 17156 - protein, 7 aa, synthetic construct
RMKDVYP

SEQ ID NO: 17157 - protein, 7 aa, synthetic construct
RCEINAT

SEQ ID NO: 17158 - protein, 7 aa, synthetic construct
YSEYDTY

SEQ ID NO: 17159 - protein, 7 aa, synthetic construct
YICSNAK

SEQ ID NO: 17160 - protein, 7 aa, synthetic construct
TLMGKCT

SEQ ID NO: 17161 - protein, 7 aa, synthetic construct
STMECSS

SEQ ID NO: 17162 - protein, 7 aa, synthetic construct
KWVRSAV

SEQ ID NO: 17163 - protein, 7 aa, synthetic construct
RWSERDC

SEQ ID NO: 17164 - protein, 7 aa, synthetic construct
DKMCFAK

SEQ ID NO: 17165 - protein, 7 aa, synthetic construct
VHDSSHC

SEQ ID NO: 17166 - protein, 7 aa, synthetic construct
CDYGSRS

SEQ ID NO: 17167 - protein, 7 aa, synthetic construct
SCKSGNA

SEQ ID NO: 17168 - protein, 7 aa, synthetic construct
LGLWTES

SEQ ID NO: 17169 - protein, 7 aa, synthetic construct
TCRTLKT

SEQ ID NO: 17170 - protein, 7 aa, synthetic construct
CTENRGV

SEQ ID NO: 17171 - protein, 7 aa, synthetic construct
GPGTCKS

SEQ ID NO: 17172 - protein, 7 aa, synthetic construct
CQYVKWE

SEQ ID NO: 17173 - protein, 7 aa, synthetic construct
NSSACRT

SEQ ID NO: 17174 - protein, 7 aa, synthetic construct
SGCSRTD

SEQ ID NO: 17175 - protein, 7 aa, synthetic construct
MCSMRNA

SEQ ID NO: 17176 - protein, 7 aa, synthetic construct
RSCLGSN

SEQ ID NO: 17177 - protein, 7 aa, synthetic construct
KNNCTFG

SEQ ID NO: 17178 - protein, 7 aa, synthetic construct
CNNSGYS

SEQ ID NO: 17179 - protein, 7 aa, synthetic construct
LKLCAHN

SEQ ID NO: 17180 - protein, 7 aa, synthetic construct
RCDKILT

SEQ ID NO: 17181 - protein, 7 aa, synthetic construct
SKTYSCP

SEQ ID NO: 17182 - protein, 7 aa, synthetic construct
KMLPGNR

SEQ ID NO: 17183 - protein, 7 aa, synthetic construct
YQRQCES

SEQ ID NO: 17184 - protein, 7 aa, synthetic construct
NTYRCDG

SEQ ID NO: 17185 - protein, 7 aa, synthetic construct
SCGGLHG

SEQ ID NO: 17186 - protein, 7 aa, synthetic construct
LSKLSCN

SEQ ID NO: 17187 - protein, 7 aa, synthetic construct
YWSQTPS

SEQ ID NO: 17188 - protein, 7 aa, synthetic construct
TVWTSDC

SEQ ID NO: 17189 - protein, 7 aa, synthetic construct
SCMNVAP

SEQ ID NO: 17190 - protein, 7 aa, synthetic construct
AFCTNKT

SEQ ID NO: 17191 - protein, 7 aa, synthetic construct
TQCKEHY

SEQ ID NO: 17192 - protein, 7 aa, synthetic construct
CTYKWSE

SEQ ID NO: 17193 - protein, 7 aa, synthetic construct
ISVCKQQ

SEQ ID NO: 17194 - protein, 7 aa, synthetic construct
SHWSDCD

SEQ ID NO: 17195 - protein, 7 aa, synthetic construct
SCRLVDV

SEQ ID NO: 17196 - protein, 7 aa, synthetic construct
CQSEGRT

SEQ ID NO: 17197 - protein, 7 aa, synthetic construct
LCRPCRE

SEQ ID NO: 17198 - protein, 7 aa, synthetic construct
SWTYEEC

SEQ ID NO: 17199 - protein, 7 aa, synthetic construct
TCQRLSG

SEQ ID NO: 17200 - protein, 7 aa, synthetic construct
CDGTGRR

SEQ ID NO: 17201 - protein, 7 aa, synthetic construct
REVLKWS

SEQ ID NO: 17202 - protein, 7 aa, synthetic construct
TCGMRGA

SEQ ID NO: 17203 - protein, 7 aa, synthetic construct
CGRGAGI

SEQ ID NO: 17204 - protein, 7 aa, synthetic construct
YFEKICE

SEQ ID NO: 17205 - protein, 7 aa, synthetic construct
GCSGFKT

SEQ ID NO: 17206 - protein, 7 aa, synthetic construct
CKWIREG

SEQ ID NO: 17207 - protein, 7 aa, synthetic construct
MKITGPR

SEQ ID NO: 17208 - protein, 7 aa, synthetic construct
RTYDTYI

SEQ ID NO: 17209 - protein, 7 aa, synthetic construct
RYEASNW

SEQ ID NO: 17210 - protein, 7 aa, synthetic construct
YFAHFSH

SEQ ID NO: 17211 - protein, 7 aa, synthetic construct
GCNRSTA

SEQ ID NO: 17212 - protein, 7 aa, synthetic construct
KLCPNLI

SEQ ID NO: 17213 - protein, 7 aa, synthetic construct
WPTAFYA

SEQ ID NO: 17214 - protein, 7 aa, synthetic construct
CLIRDVK

SEQ ID NO: 17215 - protein, 7 aa, synthetic construct
HDSAWSW

SEQ ID NO: 17216 - protein, 7 aa, synthetic construct
RAKINWP

SEQ ID NO: 17217 - protein, 7 aa, synthetic construct
YSRTGSD

SEQ ID NO: 17218 - protein, 7 aa, synthetic construct
CNIGDKR

SEQ ID NO: 17219 - protein, 7 aa, synthetic construct
GEWCVKN

SEQ ID NO: 17220 - protein, 7 aa, synthetic construct
YHKHSLN

SEQ ID NO: 17221 - protein, 7 aa, synthetic construct
ICRGYTS

SEQ ID NO: 17222 - protein, 7 aa, synthetic construct
QYHIYSG

SEQ ID NO: 17223 - protein, 7 aa, synthetic construct
CIIKNQV

SEQ ID NO: 17224 - protein, 7 aa, synthetic construct
ELGRFGC

SEQ ID NO: 17225 - protein, 7 aa, synthetic construct
EYQTRPC

SEQ ID NO: 17226 - protein, 7 aa, synthetic construct
TSGIWNV

SEQ ID NO: 17227 - protein, 7 aa, synthetic construct
CAVQGVK

SEQ ID NO: 17228 - protein, 7 aa, synthetic construct
EWCNTDK

SEQ ID NO: 17229 - protein, 7 aa, synthetic construct
MRTPVIR

SEQ ID NO: 17230 - protein, 7 aa, synthetic construct
SCKSSYT

SEQ ID NO: 17231 - protein, 7 aa, synthetic construct
MLCVAGD

SEQ ID NO: 17232 - protein, 7 aa, synthetic construct
SYSNPWI

SEQ ID NO: 17233 - protein, 7 aa, synthetic construct
YGAGTWH

SEQ ID NO: 17234 - protein, 7 aa, synthetic construct
STCNMQA

SEQ ID NO: 17235 - protein, 7 aa, synthetic construct
TKRQQWP

SEQ ID NO: 17236 - protein, 7 aa, synthetic construct
CTSDSFP

SEQ ID NO: 17237 - protein, 7 aa, synthetic construct
CTNNGNR

SEQ ID NO: 17238 - protein, 7 aa, synthetic construct
RHPSLNF

SEQ ID NO: 17239 - protein, 7 aa, synthetic construct
YFPNFIS

SEQ ID NO: 17240 - protein, 7 aa, synthetic construct
SSKYSPW

SEQ ID NO: 17241 - protein, 7 aa, synthetic construct
TPYCNLR

SEQ ID NO: 17242 - protein, 7 aa, synthetic construct
AYVSSTC

SEQ ID NO: 17243 - protein, 7 aa, synthetic construct
CYRHVTA

SEQ ID NO: 17244 - protein, 7 aa, synthetic construct
DQWCKKV

SEQ ID NO: 17245 - protein, 7 aa, synthetic construct
NCNFVGK

SEQ ID NO: 17246 - protein, 7 aa, synthetic construct
CVDWGLD

SEQ ID NO: 17247 - protein, 7 aa, synthetic construct
RMSASNW

SEQ ID NO: 17248 - protein, 7 aa, synthetic construct
YSRYNIN

SEQ ID NO: 17249 - protein, 7 aa, synthetic construct
CHQVLLP

SEQ ID NO: 17250 - protein, 7 aa, synthetic construct
PCGPCTY

SEQ ID NO: 17251 - protein, 7 aa, synthetic construct
YFSGKTL

SEQ ID NO: 17252 - protein, 7 aa, synthetic construct
NLGWLKP

SEQ ID NO: 17253 - protein, 7 aa, synthetic construct
DWSTREW

SEQ ID NO: 17254 - protein, 7 aa, synthetic construct
NYVKSTC

SEQ ID NO: 17255 - protein, 7 aa, synthetic construct
MHWDALH

SEQ ID NO: 17256 - protein, 7 aa, synthetic construct
LFRSGPN

SEQ ID NO: 17257 - protein, 7 aa, synthetic construct
NKNWVIG

SEQ ID NO: 17258 - protein, 7 aa, synthetic construct
LPIYSLT

SEQ ID NO: 17259 - protein, 7 aa, synthetic construct
SCEIKHI

SEQ ID NO: 17260 - protein, 7 aa, synthetic construct
MCSNYGS

SEQ ID NO: 17261 - protein, 7 aa, synthetic construct
NTMWLNP

SEQ ID NO: 17262 - protein, 7 aa, synthetic construct
WMNINDC

SEQ ID NO: 17263 - protein, 7 aa, synthetic construct
YFSGQIC

SEQ ID NO: 17264 - protein, 7 aa, synthetic construct
YHKGNNN

SEQ ID NO: 17265 - protein, 7 aa, synthetic construct
GCQAGMK

SEQ ID NO: 17266 - protein, 7 aa, synthetic construct
NHWVRDH

SEQ ID NO: 17267 - protein, 7 aa, synthetic construct
VMSNWNR

SEQ ID NO: 17268 - protein, 7 aa, synthetic construct
YHVADRC

SEQ ID NO: 17269 - protein, 7 aa, synthetic construct
RDHDCYA

SEQ ID NO: 17270 - protein, 7 aa, synthetic construct
SPNGCNG

SEQ ID NO: 17271 - protein, 7 aa, synthetic construct
ACERKMT

SEQ ID NO: 17272 - protein, 7 aa, synthetic construct
IYLKKQV

SEQ ID NO: 17273 - protein, 7 aa, synthetic construct
KHRTIVN

SEQ ID NO: 17274 - protein, 7 aa, synthetic construct
NSCNMTR

SEQ ID NO: 17275 - protein, 7 aa, synthetic construct
RDWIQFE

SEQ ID NO: 17276 - protein, 7 aa, synthetic construct
HETCVRG

SEQ ID NO: 17277 - protein, 7 aa, synthetic construct
DKYLNTC

SEQ ID NO: 17278 - protein, 7 aa, synthetic construct
VFSRSMC

SEQ ID NO: 17279 - protein, 7 aa, synthetic construct
TQVYSNW

SEQ ID NO: 17280 - protein, 7 aa, synthetic construct
RTQPPAR

SEQ ID NO: 17281 - protein, 7 aa, synthetic construct
LARSAVN

SEQ ID NO: 17282 - protein, 7 aa, synthetic construct
EGYHDWA

SEQ ID NO: 17283 - protein, 7 aa, synthetic construct
DNTFSNW

SEQ ID NO: 17284 - protein, 7 aa, synthetic construct
WHRLSVN

SEQ ID NO: 17285 - protein, 7 aa, synthetic construct
VMCDAYP

SEQ ID NO: 17286 - protein, 7 aa, synthetic construct
SRRFYEE

SEQ ID NO: 17287 - protein, 7 aa, synthetic construct
ERGYLDY

SEQ ID NO: 17288 - protein, 7 aa, synthetic construct
SEYSSWP

SEQ ID NO: 17289 - protein, 7 aa, synthetic construct
LCYPCNS

SEQ ID NO: 17290 - protein, 7 aa, synthetic construct
ISNKHWS

SEQ ID NO: 17291 - protein, 7 aa, synthetic construct
CYGTSMY

SEQ ID NO: 17292 - protein, 7 aa, synthetic construct
PRPNVYS

SEQ ID NO: 17293 - protein, 7 aa, synthetic construct
HSHYTNY

SEQ ID NO: 17294 - protein, 7 aa, synthetic construct
MTTCENV

SEQ ID NO: 17295 - protein, 7 aa, synthetic construct
MYSQHEC

SEQ ID NO: 17296 - protein, 7 aa, synthetic construct
NTWARDY

SEQ ID NO: 17297 - protein, 7 aa, synthetic construct
RLFNTIQ

SEQ ID NO: 17298 - protein, 7 aa, synthetic construct
RGGFSPF

SEQ ID NO: 17299 - protein, 7 aa, synthetic construct
SRLMFVG

SEQ ID NO: 17300 - protein, 7 aa, synthetic construct
YSKSNCN

SEQ ID NO: 17301 - protein, 7 aa, synthetic construct
KDMLRWD

SEQ ID NO: 17302 - protein, 7 aa, synthetic construct
LWKTGHN

SEQ ID NO: 17303 - protein, 7 aa, synthetic construct
SRYTYSE

SEQ ID NO: 17304 - protein, 7 aa, synthetic construct
FNYSTLP

SEQ ID NO: 17305 - protein, 7 aa, synthetic construct
KAMCGSG

SEQ ID NO: 17306 - protein, 7 aa, synthetic construct
NRKSQSV

SEQ ID NO: 17307 - protein, 7 aa, synthetic construct
KYFNTFP

SEQ ID NO: 17308 - protein, 7 aa, synthetic construct
YHKMQCN

SEQ ID NO: 17309 - protein, 7 aa, synthetic construct
IHRFTTN

SEQ ID NO: 17310 - protein, 7 aa, synthetic construct
NYIKANC

SEQ ID NO: 17311 - protein, 7 aa, synthetic construct
RNQECES

SEQ ID NO: 17312 - protein, 7 aa, synthetic construct
QNTKWAC

SEQ ID NO: 17313 - protein, 7 aa, synthetic construct
YYTGRTN

SEQ ID NO: 17314 - protein, 7 aa, synthetic construct
VYWVGEV

SEQ ID NO: 17315 - protein, 7 aa, synthetic construct
VSAYRGA

SEQ ID NO: 17316 - protein, 7 aa, synthetic construct
TNEFYGW

SEQ ID NO: 17317 - protein, 7 aa, synthetic construct
CLRTDIA

SEQ ID NO: 17318 - protein, 7 aa, synthetic construct
RVSDYSW

SEQ ID NO: 17319 - protein, 7 aa, synthetic construct
MEIDPIF

SEQ ID NO: 17320 - protein, 7 aa, synthetic construct
KYDHLGS

SEQ ID NO: 17321 - protein, 7 aa, synthetic construct
GNTGICY

SEQ ID NO: 17322 - protein, 7 aa, synthetic construct
AGVATYS

SEQ ID NO: 17323 - protein, 7 aa, synthetic construct
SNMYDSY

SEQ ID NO: 17324 - protein, 7 aa, synthetic construct
LAYNVST

SEQ ID NO: 17325 - protein, 7 aa, synthetic construct
YSGQGCV

SEQ ID NO: 17326 - protein, 7 aa, synthetic construct
KSPYATF

SEQ ID NO: 17327 - protein, 7 aa, synthetic construct
CNGFYCE

SEQ ID NO: 17328 - protein, 7 aa, synthetic construct
CNGEAAS

SEQ ID NO: 17329 - protein, 7 aa, synthetic construct
QTDCVNQ

SEQ ID NO: 17330 - protein, 7 aa, synthetic construct
CVATKDR

SEQ ID NO: 17331 - protein, 7 aa, synthetic construct
TMVESCR

SEQ ID NO: 17332 - protein, 7 aa, synthetic construct
THQDWSS

SEQ ID NO: 17333 - protein, 7 aa, synthetic construct
SACNVKH

SEQ ID NO: 17334 - protein, 7 aa, synthetic construct
SAAQVWP

SEQ ID NO: 17335 - protein, 7 aa, synthetic construct
WCRECMN

SEQ ID NO: 17336 - protein, 7 aa, synthetic construct
HNKYSNY

SEQ ID NO: 17337 - protein, 7 aa, synthetic construct
TYASSNW

SEQ ID NO: 17338 - protein, 7 aa, synthetic construct
YVRSGDC

SEQ ID NO: 17339 - protein, 7 aa, synthetic construct
LYIKSAL

SEQ ID NO: 17340 - protein, 7 aa, synthetic construct
AKSVFQS

SEQ ID NO: 17341 - protein, 7 aa, synthetic construct
GETNWRF

SEQ ID NO: 17342 - protein, 7 aa, synthetic construct
NGWGYGP

SEQ ID NO: 17343 - protein, 7 aa, synthetic construct
VRGATCE

SEQ ID NO: 17344 - protein, 7 aa, synthetic construct
IHRMMVN

SEQ ID NO: 17345 - protein, 7 aa, synthetic construct
LVRGLNW

SEQ ID NO: 17346 - protein, 7 aa, synthetic construct
GMRIREK

SEQ ID NO: 17347 - protein, 7 aa, synthetic construct
KVYGYNP

SEQ ID NO: 17348 - protein, 7 aa, synthetic construct
LRMWDEA

SEQ ID NO: 17349 - protein, 7 aa, synthetic construct
TWKGPPC

SEQ ID NO: 17350 - protein, 7 aa, synthetic construct
KGNWYSE

SEQ ID NO: 17351 - protein, 7 aa, synthetic construct
FGLSDRW

SEQ ID NO: 17352 - protein, 7 aa, synthetic construct
VCSSNLV

SEQ ID NO: 17353 - protein, 7 aa, synthetic construct
IYYKGNL

SEQ ID NO: 17354 - protein, 7 aa, synthetic construct
YFTRQVN

SEQ ID NO: 17355 - protein, 7 aa, synthetic construct
CNKTSVT

SEQ ID NO: 17356 - protein, 7 aa, synthetic construct
CRWSDCS

SEQ ID NO: 17357 - protein, 7 aa, synthetic construct
YARSDCC

SEQ ID NO: 17358 - protein, 7 aa, synthetic construct
LHKSTCD

SEQ ID NO: 17359 - protein, 7 aa, synthetic construct
RIKFDTY

SEQ ID NO: 17360 - protein, 7 aa, synthetic construct
VRYTDSK

SEQ ID NO: 17361 - protein, 7 aa, synthetic construct
LWRNDNQ

SEQ ID NO: 17362 - protein, 7 aa, synthetic construct
KHHDVNC

SEQ ID NO: 17363 - protein, 7 aa, synthetic construct
NKSCSSM

SEQ ID NO: 17364 - protein, 7 aa, synthetic construct
GIAPCGS

SEQ ID NO: 17365 - protein, 7 aa, synthetic construct
SRFVSWD

SEQ ID NO: 17366 - protein, 7 aa, synthetic construct
NRIDAKC

SEQ ID NO: 17367 - protein, 7 aa, synthetic construct
TGCMAGK

SEQ ID NO: 17368 - protein, 7 aa, synthetic construct
ASCNGLR

SEQ ID NO: 17369 - protein, 7 aa, synthetic construct
VSTNNPC

SEQ ID NO: 17370 - protein, 7 aa, synthetic construct
RDIWRDA

SEQ ID NO: 17371 - protein, 7 aa, synthetic construct
SPCSTGN

SEQ ID NO: 17372 - protein, 7 aa, synthetic construct
NNCADNF

SEQ ID NO: 17373 - protein, 7 aa, synthetic construct
GGWNHLV

SEQ ID NO: 17374 - protein, 7 aa, synthetic construct
KNVGRNN

SEQ ID NO: 17375 - protein, 7 aa, synthetic construct
NRARNVS

SEQ ID NO: 17376 - protein, 7 aa, synthetic construct
ANCDVVD

SEQ ID NO: 17377 - protein, 7 aa, synthetic construct
SCDSGKA

SEQ ID NO: 17378 - protein, 7 aa, synthetic construct
KWRGDES

SEQ ID NO: 17379 - protein, 7 aa, synthetic construct
IYGRVIN

SEQ ID NO: 17380 - protein, 7 aa, synthetic construct
SQNAYAM

SEQ ID NO: 17381 - protein, 7 aa, synthetic construct
SLCPRLS

SEQ ID NO: 17382 - protein, 7 aa, synthetic construct
YLNCMKP

SEQ ID NO: 17383 - protein, 7 aa, synthetic construct
GMIKPTR

SEQ ID NO: 17384 - protein, 7 aa, synthetic construct
EWMRPGQ

SEQ ID NO: 17385 - protein, 7 aa, synthetic construct
SNWRTDL

SEQ ID NO: 17386 - protein, 7 aa, synthetic construct
EHMWHTE

SEQ ID NO: 17387 - protein, 7 aa, synthetic construct
CVYAIGS

SEQ ID NO: 17388 - protein, 7 aa, synthetic construct
SICANGE

SEQ ID NO: 17389 - protein, 7 aa, synthetic construct
DRPIYYS

SEQ ID NO: 17390 - protein, 7 aa, synthetic construct
NTQFTCV

SEQ ID NO: 17391 - protein, 7 aa, synthetic construct
TYTRLVN

SEQ ID NO: 17392 - protein, 7 aa, synthetic construct
CVNLIRN

SEQ ID NO: 17393 - protein, 7 aa, synthetic construct
RKPEATR

SEQ ID NO: 17394 - protein, 7 aa, synthetic construct
YRPCNAS

SEQ ID NO: 17395 - protein, 7 aa, synthetic construct
FVCDPSK

SEQ ID NO: 17396 - protein, 7 aa, synthetic construct
RTPNYNY

SEQ ID NO: 17397 - protein, 7 aa, synthetic construct
VPTRQWP

SEQ ID NO: 17398 - protein, 7 aa, synthetic construct
FSIRLGT

SEQ ID NO: 17399 - protein, 7 aa, synthetic construct
LSRIQTN

SEQ ID NO: 17400 - protein, 7 aa, synthetic construct
TTRWAGP

SEQ ID NO: 17401 - protein, 7 aa, synthetic construct
QYYNSAS

SEQ ID NO: 17402 - protein, 7 aa, synthetic construct
RYDWPHN

SEQ ID NO: 17403 - protein, 7 aa, synthetic construct
KVCSATD

SEQ ID NO: 17404 - protein, 7 aa, synthetic construct
MEWQERY

SEQ ID NO: 17405 - protein, 7 aa, synthetic construct
YFSGVPS

SEQ ID NO: 17406 - protein, 7 aa, synthetic construct
WIPGMGT

SEQ ID NO: 17407 - protein, 7 aa, synthetic construct
GPINCKS

SEQ ID NO: 17408 - protein, 7 aa, synthetic construct
NRWNNHG

SEQ ID NO: 17409 - protein, 7 aa, synthetic construct
THRLIVA

SEQ ID NO: 17410 - protein, 7 aa, synthetic construct
YFAGQFS

SEQ ID NO: 17411 - protein, 7 aa, synthetic construct
YVKSNHG

SEQ ID NO: 17412 - protein, 7 aa, synthetic construct
YVKSDNA

SEQ ID NO: 17413 - protein, 7 aa, synthetic construct
WFTGYNA

SEQ ID NO: 17414 - protein, 7 aa, synthetic construct
YYTGVKG

SEQ ID NO: 17415 - protein, 7 aa, synthetic construct
YYHGMLA

SEQ ID NO: 17416 - protein, 7 aa, synthetic construct
YTKSDSK

SEQ ID NO: 17417 - protein, 7 aa, synthetic construct
YTKSNHL

SEQ ID NO: 17418 - protein, 7 aa, synthetic construct
IHPTRYG

SEQ ID NO: 17419 - protein, 7 aa, synthetic construct
YFHATRD

SEQ ID NO: 17420 - protein, 7 aa, synthetic construct
NYAKSYA

SEQ ID NO: 17421 - protein, 7 aa, synthetic construct
YFSGTEN

SEQ ID NO: 17422 - protein, 7 aa, synthetic construct
MSRAGNN

SEQ ID NO: 17423 - protein, 7 aa, synthetic construct
YWEGTRH

SEQ ID NO: 17424 - protein, 7 aa, synthetic construct
YWQGVNE

SEQ ID NO: 17425 - protein, 7 aa, synthetic construct
LYSRLDK

SEQ ID NO: 17426 - protein, 7 aa, synthetic construct
HTDDSYP

SEQ ID NO: 17427 - protein, 7 aa, synthetic construct
YVRNDDK

SEQ ID NO: 17428 - protein, 7 aa, synthetic construct
QKHAPNA

SEQ ID NO: 17429 - protein, 7 aa, synthetic construct
TWSDNGV

SEQ ID NO: 17430 - protein, 7 aa, synthetic construct
RTNNEYP

SEQ ID NO: 17431 - protein, 7 aa, synthetic construct
YIKSDYQ

SEQ ID NO: 17432 - protein, 7 aa, synthetic construct
YARLGPS

SEQ ID NO: 17433 - protein, 7 aa, synthetic construct
RNGTSVW

SEQ ID NO: 17434 - protein, 7 aa, synthetic construct
YYTGMNN

SEQ ID NO: 17435 - protein, 7 aa, synthetic construct
YYSGERN

SEQ ID NO: 17436 - protein, 7 aa, synthetic construct
YWADKHA

SEQ ID NO: 17437 - protein, 7 aa, synthetic construct
DYAKSLL

SEQ ID NO: 17438 - protein, 7 aa, synthetic construct
LRRKPDL

SEQ ID NO: 17439 - protein, 7 aa, synthetic construct
FVKFQVN

SEQ ID NO: 17440 - protein, 7 aa, synthetic construct
QSKLSTW

SEQ ID NO: 17441 - protein, 7 aa, synthetic construct
YWVDKVA

SEQ ID NO: 17442 - protein, 7 aa, synthetic construct
YAKMGWN

SEQ ID NO: 17443 - protein, 7 aa, synthetic construct
RTDQYFP

SEQ ID NO: 17444 - protein, 7 aa, synthetic construct
YIKGDLF

SEQ ID NO: 17445 - protein, 7 aa, synthetic construct
YHRYGID

SEQ ID NO: 17446 - protein, 7 aa, synthetic construct
YLISDTK

SEQ ID NO: 17447 - protein, 7 aa, synthetic construct
EHGKSLW

SEQ ID NO: 17448 - protein, 7 aa, synthetic construct
WFSGEHS

SEQ ID NO: 17449 - protein, 7 aa, synthetic construct
FVRSQIS

SEQ ID NO: 17450 - protein, 7 aa, synthetic construct
YKDGTWY

SEQ ID NO: 17451 - protein, 7 aa, synthetic construct
CKKGCFE

SEQ ID NO: 17452 - protein, 7 aa, synthetic construct
NYARSNN

SEQ ID NO: 17453 - protein, 7 aa, synthetic construct
IERVSYG

SEQ ID NO: 17454 - protein, 7 aa, synthetic construct
HHKGNMN

SEQ ID NO: 17455 - protein, 7 aa, synthetic construct
CGAYWTE

SEQ ID NO: 17456 - protein, 7 aa, synthetic construct
YTHSNLH

SEQ ID NO: 17457 - protein, 7 aa, synthetic construct
SNAHSSW

SEQ ID NO: 17458 - protein, 7 aa, synthetic construct
LHRMGTS

SEQ ID NO: 17459 - protein, 7 aa, synthetic construct
YARYGLN

SEQ ID NO: 17460 - protein, 7 aa, synthetic construct
ISELSRW

SEQ ID NO: 17461 - protein, 7 aa, synthetic construct
YHRLDNP

SEQ ID NO: 17462 - protein, 7 aa, synthetic construct
YASGHWN

SEQ ID NO: 17463 - protein, 7 aa, synthetic construct
NQKHLMY

SEQ ID NO: 17464 - protein, 7 aa, synthetic construct
YWKNTPD

SEQ ID NO: 17465 - protein, 7 aa, synthetic construct
YTRTQAY

SEQ ID NO: 17466 - protein, 7 aa, synthetic construct
LCGSCRS

SEQ ID NO: 17467 - protein, 7 aa, synthetic construct
NSPYRPF

SEQ ID NO: 17468 - protein, 7 aa, synthetic construct
LWRSGVN

SEQ ID NO: 17469 - protein, 7 aa, synthetic construct
RCGDCVF

SEQ ID NO: 17470 - protein, 7 aa, synthetic construct
YWKGDNG

SEQ ID NO: 17471 - protein, 7 aa, synthetic construct
YSRNADN

SEQ ID NO: 17472 - protein, 7 aa, synthetic construct
RGEWQFA

SEQ ID NO: 17473 - protein, 7 aa, synthetic construct
YVYSNTH

SEQ ID NO: 17474 - protein, 7 aa, synthetic construct
SKYAPNS

SEQ ID NO: 17475 - protein, 7 aa, synthetic construct
YHRLGST

SEQ ID NO: 17476 - protein, 7 aa, synthetic construct
YHRSSSN

SEQ ID NO: 17477 - protein, 7 aa, synthetic construct
SSPNLSW

SEQ ID NO: 17478 - protein, 7 aa, synthetic construct
RNDFQVY

SEQ ID NO: 17479 - protein, 7 aa, synthetic construct
KNMWQNS

SEQ ID NO: 17480 - protein, 7 aa, synthetic construct
QHGHSQW

SEQ ID NO: 17481 - protein, 7 aa, synthetic construct
YWKSQTD

SEQ ID NO: 17482 - protein, 7 aa, synthetic construct
SSPYSQF

SEQ ID NO: 17483 - protein, 7 aa, synthetic construct
YYHGMAV

SEQ ID NO: 17484 - protein, 7 aa, synthetic construct
SPFMRRE

SEQ ID NO: 17485 - protein, 7 aa, synthetic construct
NALVGRD

SEQ ID NO: 17486 - protein, 7 aa, synthetic construct
YVVTHRN

SEQ ID NO: 17487 - protein, 7 aa, synthetic construct
GRFSEGR

SEQ ID NO: 17488 - protein, 7 aa, synthetic construct
TKWGAHV

SEQ ID NO: 17489 - protein, 7 aa, synthetic construct
LRYSRTE

SEQ ID NO: 17490 - protein, 7 aa, synthetic construct
FRGNCGP

SEQ ID NO: 17491 - protein, 7 aa, synthetic construct
GPGAGCN

SEQ ID NO: 17492 - protein, 7 aa, synthetic construct
YFSKQIA

SEQ ID NO: 17493 - protein, 7 aa, synthetic construct
DLSDRRW

SEQ ID NO: 17494 - protein, 7 aa, synthetic construct
RKLPGVA

SEQ ID NO: 17495 - protein, 7 aa, synthetic construct
GRVVSKP

SEQ ID NO: 17496 - protein, 7 aa, synthetic construct
LRDGTPS

SEQ ID NO: 17497 - protein, 7 aa, synthetic construct
FDEKVRR

SEQ ID NO: 17498 - protein, 7 aa, synthetic construct
VQVGRAC

SEQ ID NO: 17499 - protein, 7 aa, synthetic construct
VMEARAW

SEQ ID NO: 17500 - protein, 7 aa, synthetic construct
GVAGCVA

SEQ ID NO: 17501 - protein, 7 aa, synthetic construct
NSYSRAF

SEQ ID NO: 17502 - protein, 7 aa, synthetic construct
MRLSRQD

SEQ ID NO: 17503 - protein, 7 aa, synthetic construct
LLESSKW

SEQ ID NO: 17504 - protein, 7 aa, synthetic construct
SSLCLRE

SEQ ID NO: 17505 - protein, 7 aa, synthetic construct
GGPGSIW

SEQ ID NO: 17506 - protein, 7 aa, synthetic construct
YYRGPSG

SEQ ID NO: 17507 - protein, 7 aa, synthetic construct
GLGSTCS

SEQ ID NO: 17508 - protein, 7 aa, synthetic construct
YVRSSMG

SEQ ID NO: 17509 - protein, 7 aa, synthetic construct
CGGLSRG

SEQ ID NO: 17510 - protein, 7 aa, synthetic construct
WALRRME

SEQ ID NO: 17511 - protein, 7 aa, synthetic construct
CMSDKRA

SEQ ID NO: 17512 - protein, 7 aa, synthetic construct
CSMINKS

SEQ ID NO: 17513 - protein, 7 aa, synthetic construct
DPVARSW

SEQ ID NO: 17514 - protein, 7 aa, synthetic construct
ESSSRTW

SEQ ID NO: 17515 - protein, 7 aa, synthetic construct
LSRASVN

SEQ ID NO: 17516 - protein, 7 aa, synthetic construct
DPSWKRV

SEQ ID NO: 17517 - protein, 7 aa, synthetic construct
YGQGYGR

SEQ ID NO: 17518 - protein, 7 aa, synthetic construct
LDAKCMP

SEQ ID NO: 17519 - protein, 7 aa, synthetic construct
YFAGRID

SEQ ID NO: 17520 - protein, 7 aa, synthetic construct
YFSGRVA

SEQ ID NO: 17521 - protein, 7 aa, synthetic construct
YSRLLPM

SEQ ID NO: 17522 - protein, 7 aa, synthetic construct
YSRIMAN

SEQ ID NO: 17523 - protein, 7 aa, synthetic construct
VRHRSEL

SEQ ID NO: 17524 - protein, 7 aa, synthetic construct
DMESAVW

SEQ ID NO: 17525 - protein, 7 aa, synthetic construct
WTTRISH

SEQ ID NO: 17526 - protein, 7 aa, synthetic construct
HRFLKGE

SEQ ID NO: 17527 - protein, 7 aa, synthetic construct
WVGGRSN

SEQ ID NO: 17528 - protein, 7 aa, synthetic construct
LHRQLPL

SEQ ID NO: 17529 - protein, 7 aa, synthetic construct
CEKLSSR

SEQ ID NO: 17530 - protein, 7 aa, synthetic construct
LRHISHT

SEQ ID NO: 17531 - protein, 7 aa, synthetic construct
AWERKLM

SEQ ID NO: 17532 - protein, 7 aa, synthetic construct
FVARVRD

SEQ ID NO: 17533 - protein, 7 aa, synthetic construct
WGHPSRA

SEQ ID NO: 17534 - protein, 7 aa, synthetic construct
AERGCCG

SEQ ID NO: 17535 - protein, 7 aa, synthetic construct
RMESSVW

SEQ ID NO: 17536 - protein, 7 aa, synthetic construct
CVSVGRA

SEQ ID NO: 17537 - protein, 7 aa, synthetic construct
DSDFTSW

SEQ ID NO: 17538 - protein, 7 aa, synthetic construct
AHRLLPS

SEQ ID NO: 17539 - protein, 7 aa, synthetic construct
GQDSRRN

SEQ ID NO: 17540 - protein, 7 aa, synthetic construct
DLNSRSW

SEQ ID NO: 17541 - protein, 7 aa, synthetic construct
ASITTCR

SEQ ID NO: 17542 - protein, 7 aa, synthetic construct
AFTHRVQ

SEQ ID NO: 17543 - protein, 7 aa, synthetic construct
YLKSQTS

SEQ ID NO: 17544 - protein, 7 aa, synthetic construct
CGSWQRE

SEQ ID NO: 17545 - protein, 7 aa, synthetic construct
YSRLHVD

SEQ ID NO: 17546 - protein, 7 aa, synthetic construct
RVSCPPP

SEQ ID NO: 17547 - protein, 7 aa, synthetic construct
RSDFVTY

SEQ ID NO: 17548 - protein, 7 aa, synthetic construct
QYARSLE

SEQ ID NO: 17549 - protein, 7 aa, synthetic construct
GMEPVRW

SEQ ID NO: 17550 - protein, 7 aa, synthetic construct
DMRMGTW

SEQ ID NO: 17551 - protein, 7 aa, synthetic construct
QPPSCKA

SEQ ID NO: 17552 - protein, 7 aa, synthetic construct
AQGADSW

SEQ ID NO: 17553 - protein, 7 aa, synthetic construct
GGHYMLK

SEQ ID NO: 17554 - protein, 7 aa, synthetic construct
YSVIGPN

SEQ ID NO: 17555 - protein, 7 aa, synthetic construct
RDVTVFP

SEQ ID NO: 17556 - protein, 7 aa, synthetic construct
RNRDVYP

SEQ ID NO: 17557 - protein, 7 aa, synthetic construct
GMADRAW

SEQ ID NO: 17558 - protein, 7 aa, synthetic construct
TESTNGR

SEQ ID NO: 17559 - protein, 7 aa, synthetic construct
SVRQERY

SEQ ID NO: 17560 - protein, 7 aa, synthetic construct
GVDQVRW

SEQ ID NO: 17561 - protein, 7 aa, synthetic construct
NLMGCTG

SEQ ID NO: 17562 - protein, 7 aa, synthetic construct
GAEGVRW

SEQ ID NO: 17563 - protein, 7 aa, synthetic construct
VMEDRIW

SEQ ID NO: 17564 - protein, 7 aa, synthetic construct
LTSREGI

SEQ ID NO: 17565 - protein, 7 aa, synthetic construct
WSTHKAF

SEQ ID NO: 17566 - protein, 7 aa, synthetic construct
REEVSIW

SEQ ID NO: 17567 - protein, 7 aa, synthetic construct
NMASAGW

SEQ ID NO: 17568 - protein, 7 aa, synthetic construct
LISGDGP

SEQ ID NO: 17569 - protein, 7 aa, synthetic construct
SAYSAKY

SEQ ID NO: 17570 - protein, 7 aa, synthetic construct
YARAGPD

SEQ ID NO: 17571 - protein, 7 aa, synthetic construct
VESSRLW

SEQ ID NO: 17572 - protein, 7 aa, synthetic construct
DMSSVAW

SEQ ID NO: 17573 - protein, 7 aa, synthetic construct
DSFRGYD

SEQ ID NO: 17574 - protein, 7 aa, synthetic construct
DLASPDW

SEQ ID NO: 17575 - protein, 7 aa, synthetic construct
VSTHCCA

SEQ ID NO: 17576 - protein, 7 aa, synthetic construct
VLSSNVW

SEQ ID NO: 17577 - protein, 7 aa, synthetic construct
VMPDRVW

SEQ ID NO: 17578 - protein, 7 aa, synthetic construct
KMEDRSW

SEQ ID NO: 17579 - protein, 7 aa, synthetic construct
RSMVGCD

SEQ ID NO: 17580 - protein, 7 aa, synthetic construct
SLSDRGW

SEQ ID NO: 17581 - protein, 7 aa, synthetic construct
TFAHTNR

SEQ ID NO: 17582 - protein, 7 aa, synthetic construct
SGNYTAR

SEQ ID NO: 17583 - protein, 7 aa, synthetic construct
YHRAAAL

SEQ ID NO: 17584 - protein, 7 aa, synthetic construct
NMSAGTW

SEQ ID NO: 17585 - protein, 7 aa, synthetic construct
AKGWVRD

SEQ ID NO: 17586 - protein, 7 aa, synthetic construct
VMASQGW

SEQ ID NO: 17587 - protein, 7 aa, synthetic construct
DLSSGNW

SEQ ID NO: 17588 - protein, 7 aa, synthetic construct
KLDDYGW

SEQ ID NO: 17589 - protein, 7 aa, synthetic construct
YSRLDVL

SEQ ID NO: 17590 - protein, 7 aa, synthetic construct
ILSDRSW

SEQ ID NO: 17591 - protein, 7 aa, synthetic construct
YSRVGSG

SEQ ID NO: 17592 - protein, 7 aa, synthetic construct
GFARLRD

SEQ ID NO: 17593 - protein, 7 aa, synthetic construct
LSRIGTN

SEQ ID NO: 17594 - protein, 7 aa, synthetic construct
GGESSIW

SEQ ID NO: 17595 - protein, 7 aa, synthetic construct
ISEFSGY

SEQ ID NO: 17596 - protein, 7 aa, synthetic construct
RLADAYP

SEQ ID NO: 17597 - protein, 7 aa, synthetic construct
WFSGQIA

SEQ ID NO: 17598 - protein, 7 aa, synthetic construct
CTSKTGH

SEQ ID NO: 17599 - protein, 7 aa, synthetic construct
RTNRVEW

SEQ ID NO: 17600 - protein, 7 aa, synthetic construct
VEASRSW

SEQ ID NO: 17601 - protein, 7 aa, synthetic construct
VLSASSW

SEQ ID NO: 17602 - protein, 7 aa, synthetic construct
VLSERSW

SEQ ID NO: 17603 - protein, 7 aa, synthetic construct
LSALSVN

SEQ ID NO: 17604 - protein, 7 aa, synthetic construct
RGGGLFV

SEQ ID NO: 17605 - protein, 7 aa, synthetic construct
TESTHGR

SEQ ID NO: 17606 - protein, 7 aa, synthetic construct
YVRSDTA

SEQ ID NO: 17607 - protein, 7 aa, synthetic construct
REAVSTW

SEQ ID NO: 17608 - protein, 7 aa, synthetic construct
YYSGVKL

SEQ ID NO: 17609 - protein, 7 aa, synthetic construct
YRMSLER

SEQ ID NO: 17610 - protein, 7 aa, synthetic construct
LMEQRTW

SEQ ID NO: 17611 - protein, 7 aa, synthetic construct
GCRHGDI

SEQ ID NO: 17612 - protein, 7 aa, synthetic construct
WRGSQHV

SEQ ID NO: 17613 - protein, 7 aa, synthetic construct
GSEFVSY

SEQ ID NO: 17614 - protein, 7 aa, synthetic construct
YWHGKPE

SEQ ID NO: 17615 - protein, 7 aa, synthetic construct
FFRGNMG

SEQ ID NO: 17616 - protein, 7 aa, synthetic construct
VESSSRW

SEQ ID NO: 17617 - protein, 7 aa, synthetic construct
CGKAHSS

SEQ ID NO: 17618 - protein, 7 aa, synthetic construct
DMSVGKW

SEQ ID NO: 17619 - protein, 7 aa, synthetic construct
LLSSHDW

SEQ ID NO: 17620 - protein, 7 aa, synthetic construct
MRDGTSS

SEQ ID NO: 17621 - protein, 7 aa, synthetic construct
YVKSDVG

SEQ ID NO: 17622 - protein, 7 aa, synthetic construct
WSRVGVN

SEQ ID NO: 17623 - protein, 7 aa, synthetic construct
WSYKSNG

SEQ ID NO: 17624 - protein, 7 aa, synthetic construct
YWGGVVS

SEQ ID NO: 17625 - protein, 7 aa, synthetic construct
KMEAMTW

SEQ ID NO: 17626 - protein, 7 aa, synthetic construct
LSRLGGG

SEQ ID NO: 17627 - protein, 7 aa, synthetic construct
LMEAATW

SEQ ID NO: 17628 - protein, 7 aa, synthetic construct
KLDYLGT

SEQ ID NO: 17629 - protein, 7 aa, synthetic construct
LSRASHD

SEQ ID NO: 17630 - protein, 7 aa, synthetic construct
YFSGVQP

SEQ ID NO: 17631 - protein, 7 aa, synthetic construct
LSRVSPD

SEQ ID NO: 17632 - protein, 7 aa, synthetic construct
WRAGKDY

SEQ ID NO: 17633 - protein, 7 aa, synthetic construct
RLESVQW

SEQ ID NO: 17634 - protein, 7 aa, synthetic construct
YFSGRDE

SEQ ID NO: 17635 - protein, 7 aa, synthetic construct
ILKCTNN

SEQ ID NO: 17636 - protein, 7 aa, synthetic construct
YSRVAPD

SEQ ID NO: 17637 - protein, 7 aa, synthetic construct
RLESTHW

SEQ ID NO: 17638 - protein, 7 aa, synthetic construct
YWSGTVT

SEQ ID NO: 17639 - protein, 7 aa, synthetic construct
YARLSIN

SEQ ID NO: 17640 - protein, 7 aa, synthetic construct
RGEYHYP

SEQ ID NO: 17641 - protein, 7 aa, synthetic construct
FAAKWSS

SEQ ID NO: 17642 - protein, 7 aa, synthetic construct
YVKSQTI

SEQ ID NO: 17643 - protein, 7 aa, synthetic construct
SLCKTTS

SEQ ID NO: 17644 - protein, 7 aa, synthetic construct
PLSSGVW

SEQ ID NO: 17645 - protein, 7 aa, synthetic construct
LMGGGTW

SEQ ID NO: 17646 - protein, 7 aa, synthetic construct
GSPGVSW

SEQ ID NO: 17647 - protein, 7 aa, synthetic construct
QDDYLTW

SEQ ID NO: 17648 - protein, 7 aa, synthetic construct
YVKSQQS

SEQ ID NO: 17649 - protein, 7 aa, synthetic construct
QNEYVIY

SEQ ID NO: 17650 - protein, 7 aa, synthetic construct
VPGRSGF

SEQ ID NO: 17651 - protein, 7 aa, synthetic construct
FWSGKAA

SEQ ID NO: 17652 - protein, 7 aa, synthetic construct
STYDSFP

SEQ ID NO: 17653 - protein, 7 aa, synthetic construct
YFSGRHE

SEQ ID NO: 17654 - protein, 7 aa, synthetic construct
HSKSGGW

SEQ ID NO: 17655 - protein, 7 aa, synthetic construct
GGPGSNW

SEQ ID NO: 17656 - protein, 7 aa, synthetic construct
GSPGSIW

SEQ ID NO: 17657 - protein, 7 aa, synthetic construct
VSEFASY

SEQ ID NO: 17658 - protein, 7 aa, synthetic construct
LHKLSNN

SEQ ID NO: 17659 - protein, 7 aa, synthetic construct
LCKPCLT

SEQ ID NO: 17660 - protein, 7 aa, synthetic construct
RSLDSYP

SEQ ID NO: 17661 - protein, 7 aa, synthetic construct
CAPRVSS

SEQ ID NO: 17662 - protein, 7 aa, synthetic construct
PYAKSPL

SEQ ID NO: 17663 - protein, 7 aa, synthetic construct
SLSSRDW

SEQ ID NO: 17664 - protein, 7 aa, synthetic construct
WVDRTRG

SEQ ID NO: 17665 - protein, 7 aa, synthetic construct
IMPDRSW

SEQ ID NO: 17666 - protein, 7 aa, synthetic construct
INSREGI

SEQ ID NO: 17667 - protein, 7 aa, synthetic construct
LSDGTSP

SEQ ID NO: 17668 - protein, 7 aa, synthetic construct
YVRSQPL

SEQ ID NO: 17669 - protein, 7 aa, synthetic construct
YFSGVRE

SEQ ID NO: 17670 - protein, 7 aa, synthetic construct
YSAYRSV

SEQ ID NO: 17671 - protein, 7 aa, synthetic construct
GGEHSTW

SEQ ID NO: 17672 - protein, 7 aa, synthetic construct
VMLDRGW

SEQ ID NO: 17673 - protein, 7 aa, synthetic construct
GGGVVKY

SEQ ID NO: 17674 - protein, 7 aa, synthetic construct
YWSEVRA

SEQ ID NO: 17675 - protein, 7 aa, synthetic construct
IMSDRLW

SEQ ID NO: 17676 - protein, 7 aa, synthetic construct
LHSKLPN

SEQ ID NO: 17677 - protein, 7 aa, synthetic construct
YWSHVKE

SEQ ID NO: 17678 - protein, 7 aa, synthetic construct
APADRGW

SEQ ID NO: 17679 - protein, 7 aa, synthetic construct
YYSGQHA

SEQ ID NO: 17680 - protein, 7 aa, synthetic construct
DLRMATW

SEQ ID NO: 17681 - protein, 7 aa, synthetic construct
LSRVGQN

SEQ ID NO: 17682 - protein, 7 aa, synthetic construct
YFTGREK

SEQ ID NO: 17683 - protein, 7 aa, synthetic construct
YWSQVRE

SEQ ID NO: 17684 - protein, 7 aa, synthetic construct
LSRLSPV

SEQ ID NO: 17685 - protein, 7 aa, synthetic construct
SMSSAMW

SEQ ID NO: 17686 - protein, 7 aa, synthetic construct
IGESRLW

SEQ ID NO: 17687 - protein, 7 aa, synthetic construct
VRSTNGV

SEQ ID NO: 17688 - protein, 7 aa, synthetic construct
CMGALPE

SEQ ID NO: 17689 - protein, 7 aa, synthetic construct
VLSSVSW

SEQ ID NO: 17690 - protein, 7 aa, synthetic construct
ITSSNGI

SEQ ID NO: 17691 - protein, 7 aa, synthetic construct
LSRTSID

SEQ ID NO: 17692 - protein, 7 aa, synthetic construct
YWSQVVE

SEQ ID NO: 17693 - protein, 7 aa, synthetic construct
SEALTRR

SEQ ID NO: 17694 - protein, 7 aa, synthetic construct
MRDGTNA

SEQ ID NO: 17695 - protein, 7 aa, synthetic construct
KLDVGNW

SEQ ID NO: 17696 - protein, 7 aa, synthetic construct
DNASSVW

SEQ ID NO: 17697 - protein, 7 aa, synthetic construct
ILSSSGW

SEQ ID NO: 17698 - protein, 7 aa, synthetic construct
LYESRAW

SEQ ID NO: 17699 - protein, 7 aa, synthetic construct
YYGRTSS

SEQ ID NO: 17700 - protein, 7 aa, synthetic construct
FSRIGGG

SEQ ID NO: 17701 - protein, 7 aa, synthetic construct
VALKGWD

SEQ ID NO: 17702 - protein, 7 aa, synthetic construct
MSRASYN

SEQ ID NO: 17703 - protein, 7 aa, synthetic construct
CGVGRIA

SEQ ID NO: 17704 - protein, 7 aa, synthetic construct
KDDFSVY

SEQ ID NO: 17705 - protein, 7 aa, synthetic construct
FVSKNGV

SEQ ID NO: 17706 - protein, 7 aa, synthetic construct
TWTGNNA

SEQ ID NO: 17707 - protein, 7 aa, synthetic construct
RGDSPSW

SEQ ID NO: 17708 - protein, 7 aa, synthetic construct
DMVSRSW

SEQ ID NO: 17709 - protein, 7 aa, synthetic construct
YFTGSQN

SEQ ID NO: 17710 - protein, 7 aa, synthetic construct
VTSTMGR

SEQ ID NO: 17711 - protein, 7 aa, synthetic construct
VMADRAW

SEQ ID NO: 17712 - protein, 7 aa, synthetic construct
AYRTDSR

SEQ ID NO: 17713 - protein, 7 aa, synthetic construct
YFAGRLA

SEQ ID NO: 17714 - protein, 7 aa, synthetic construct
QLESRSW

SEQ ID NO: 17715 - protein, 7 aa, synthetic construct
KMDYSTR

SEQ ID NO: 17716 - protein, 7 aa, synthetic construct
GESSVRW

SEQ ID NO: 17717 - protein, 7 aa, synthetic construct
HSRLNVV

SEQ ID NO: 17718 - protein, 7 aa, synthetic construct
LPDGDGP

SEQ ID NO: 17719 - protein, 7 aa, synthetic construct
YFTGAWD

SEQ ID NO: 17720 - protein, 7 aa, synthetic construct
RESGVSW

SEQ ID NO: 17721 - protein, 7 aa, synthetic construct
YEPGCKE

SEQ ID NO: 17722 - protein, 7 aa, synthetic construct
LARGGPD

SEQ ID NO: 17723 - protein, 7 aa, synthetic construct
YARQSNN

SEQ ID NO: 17724 - protein, 7 aa, synthetic construct
WKAGGKV

SEQ ID NO: 17725 - protein, 7 aa, synthetic construct
EPERGWF

SEQ ID NO: 17726 - protein, 7 aa, synthetic construct
RGESHSW

SEQ ID NO: 17727 - protein, 7 aa, synthetic construct
YWNANLE

SEQ ID NO: 17728 - protein, 7 aa, synthetic construct
YWSGVTE

SEQ ID NO: 17729 - protein, 7 aa, synthetic construct
SRSTNGV

SEQ ID NO: 17730 - protein, 7 aa, synthetic construct
YFTGRLD

SEQ ID NO: 17731 - protein, 7 aa, synthetic construct
WWSGYVE

SEQ ID NO: 17732 - protein, 7 aa, synthetic construct
YFTGVSS

SEQ ID NO: 17733 - protein, 7 aa, synthetic construct
RPVCPTG

SEQ ID NO: 17734 - protein, 7 aa, synthetic construct
YWSSVRE

SEQ ID NO: 17735 - protein, 7 aa, synthetic construct
LHVAMPN

SEQ ID NO: 17736 - protein, 7 aa, synthetic construct
LHRLSVD

SEQ ID NO: 17737 - protein, 7 aa, synthetic construct
RTYDSFA

SEQ ID NO: 17738 - protein, 7 aa, synthetic construct
RSLEGSD

SEQ ID NO: 17739 - protein, 7 aa, synthetic construct
LHRLGDS

SEQ ID NO: 17740 - protein, 7 aa, synthetic construct
TRDSPMF

SEQ ID NO: 17741 - protein, 7 aa, synthetic construct
LRSGMGP

SEQ ID NO: 17742 - protein, 7 aa, synthetic construct
GSGEERW

SEQ ID NO: 17743 - protein, 7 aa, synthetic construct
WTPMCKA

SEQ ID NO: 17744 - protein, 7 aa, synthetic construct
FWHGVSD

SEQ ID NO: 17745 - protein, 7 aa, synthetic construct
LTKLSNN

SEQ ID NO: 17746 - protein, 7 aa, synthetic construct
VGYRNQV

SEQ ID NO: 17747 - protein, 7 aa, synthetic construct
LRERYSN

SEQ ID NO: 17748 - protein, 7 aa, synthetic construct
SYAKSVL

SEQ ID NO: 17749 - protein, 7 aa, synthetic construct
NMASSGW

SEQ ID NO: 17750 - protein, 7 aa, synthetic construct
RTYDAIA

SEQ ID NO: 17751 - protein, 7 aa, synthetic construct
LSRVSFD

SEQ ID NO: 17752 - protein, 7 aa, synthetic construct
RSEFVSF

SEQ ID NO: 17753 - protein, 7 aa, synthetic construct
GGSLLMS

SEQ ID NO: 17754 - protein, 7 aa, synthetic construct
DPSSHSW

SEQ ID NO: 17755 - protein, 7 aa, synthetic construct
VLASVTW

SEQ ID NO: 17756 - protein, 7 aa, synthetic construct
APASATW

SEQ ID NO: 17757 - protein, 7 aa, synthetic construct
EVRTYPK

SEQ ID NO: 17758 - protein, 7 aa, synthetic construct
GWGSNNK

SEQ ID NO: 17759 - protein, 7 aa, synthetic construct
RNSTVYP

SEQ ID NO: 17760 - protein, 7 aa, synthetic construct
YWSGLND

SEQ ID NO: 17761 - protein, 7 aa, synthetic construct
AQGLSAG

SEQ ID NO: 17762 - protein, 7 aa, synthetic construct
LGSWRNS

SEQ ID NO: 17763 - protein, 7 aa, synthetic construct
RTSTMGV

SEQ ID NO: 17764 - protein, 7 aa, synthetic construct
YFTGTLT

SEQ ID NO: 17765 - protein, 7 aa, synthetic construct
CEGKLHP

SEQ ID NO: 17766 - protein, 7 aa, synthetic construct
AYAYSAA

SEQ ID NO: 17767 - protein, 7 aa, synthetic construct
SMASNTW

SEQ ID NO: 17768 - protein, 7 aa, synthetic construct
GSSTSNW

SEQ ID NO: 17769 - protein, 7 aa, synthetic construct
LARGGFD

SEQ ID NO: 17770 - protein, 7 aa, synthetic construct
YVRFDNN

SEQ ID NO: 17771 - protein, 7 aa, synthetic construct
WGVRERG

SEQ ID NO: 17772 - protein, 7 aa, synthetic construct
FGKQQML

SEQ ID NO: 17773 - protein, 7 aa, synthetic construct
YVRSGPM

SEQ ID NO: 17774 - protein, 7 aa, synthetic construct
RGDSPLW

SEQ ID NO: 17775 - protein, 7 aa, synthetic construct
LHRLSSD

SEQ ID NO: 17776 - protein, 7 aa, synthetic construct
LSKASSN

SEQ ID NO: 17777 - protein, 7 aa, synthetic construct
VALEGAD

SEQ ID NO: 17778 - protein, 7 aa, synthetic construct
YSRVGPV

SEQ ID NO: 17779 - protein, 7 aa, synthetic construct
QPQDRSW

SEQ ID NO: 17780 - protein, 7 aa, synthetic construct
FSRLSPL

SEQ ID NO: 17781 - protein, 7 aa, synthetic construct
YSRIQLD

SEQ ID NO: 17782 - protein, 7 aa, synthetic construct
CEKGIRC

SEQ ID NO: 17783 - protein, 7 aa, synthetic construct
RGNSPLT

SEQ ID NO: 17784 - protein, 7 aa, synthetic construct
VLQSSVW

SEQ ID NO: 17785 - protein, 7 aa, synthetic construct
TWDGLVA

SEQ ID NO: 17786 - protein, 7 aa, synthetic construct
RMSDAYA

SEQ ID NO: 17787 - protein, 7 aa, synthetic construct
GSYGGSR

SEQ ID NO: 17788 - protein, 7 aa, synthetic construct
LVRGGTN

SEQ ID NO: 17789 - protein, 7 aa, synthetic construct
GGGAQMW

SEQ ID NO: 17790 - protein, 7 aa, synthetic construct
GSSGVAW

SEQ ID NO: 17791 - protein, 7 aa, synthetic construct
KWERSPI

SEQ ID NO: 17792 - protein, 7 aa, synthetic construct
YHALNLD

SEQ ID NO: 17793 - protein, 7 aa, synthetic construct
GDALSHW

SEQ ID NO: 17794 - protein, 7 aa, synthetic construct
DTLLHLR

SEQ ID NO: 17795 - protein, 7 aa, synthetic construct
SDGVSKW

SEQ ID NO: 17796 - protein, 7 aa, synthetic construct
LSRVGPD

SEQ ID NO: 17797 - protein, 7 aa, synthetic construct
DLSSTSW

SEQ ID NO: 17798 - protein, 7 aa, synthetic construct
GADFVKW

SEQ ID NO: 17799 - protein, 7 aa, synthetic construct
HDSTHGR

SEQ ID NO: 17800 - protein, 7 aa, synthetic construct
PSRLENR

SEQ ID NO: 17801 - protein, 7 aa, synthetic construct
LSKVGHN

SEQ ID NO: 17802 - protein, 7 aa, synthetic construct
VGVKGWD

SEQ ID NO: 17803 - protein, 7 aa, synthetic construct
YGTGTWS

SEQ ID NO: 17804 - protein, 7 aa, synthetic construct
SLSSSVW

SEQ ID NO: 17805 - protein, 7 aa, synthetic construct
YFTARME

SEQ ID NO: 17806 - protein, 7 aa, synthetic construct
RVPSKWD

SEQ ID NO: 17807 - protein, 7 aa, synthetic construct
EDEFTGF

SEQ ID NO: 17808 - protein, 7 aa, synthetic construct
GGEGSFW

SEQ ID NO: 17809 - protein, 7 aa, synthetic construct
LHANLPN

SEQ ID NO: 17810 - protein, 7 aa, synthetic construct
FGGGLFV

SEQ ID NO: 17811 - protein, 7 aa, synthetic construct
VMGARDW

SEQ ID NO: 17812 - protein, 7 aa, synthetic construct
WTSTHGV

SEQ ID NO: 17813 - protein, 7 aa, synthetic construct
YSRAGGS

SEQ ID NO: 17814 - protein, 7 aa, synthetic construct
YYTGKLD

SEQ ID NO: 17815 - protein, 7 aa, synthetic construct
RSDWKIS

SEQ ID NO: 17816 - protein, 7 aa, synthetic construct
NMNSSTW

SEQ ID NO: 17817 - protein, 7 aa, synthetic construct
RGDLVYP

SEQ ID NO: 17818 - protein, 7 aa, synthetic construct
DLRAGNW

SEQ ID NO: 17819 - protein, 7 aa, synthetic construct
APGNISW

SEQ ID NO: 17820 - protein, 7 aa, synthetic construct
VKYNVHL

SEQ ID NO: 17821 - protein, 7 aa, synthetic construct
RGDDRGW

SEQ ID NO: 17822 - protein, 7 aa, synthetic construct
YFSGIHS

SEQ ID NO: 17823 - protein, 7 aa, synthetic construct
TPSTIYF

SEQ ID NO: 17824 - protein, 7 aa, synthetic construct
EMESSVW

SEQ ID NO: 17825 - protein, 7 aa, synthetic construct
WTEGTRY

SEQ ID NO: 17826 - protein, 7 aa, synthetic construct
EGIARTW

SEQ ID NO: 17827 - protein, 7 aa, synthetic construct
MYAFSIE

SEQ ID NO: 17828 - protein, 7 aa, synthetic construct
YVYSDSR

SEQ ID NO: 17829 - protein, 7 aa, synthetic construct
DSVYQLR

SEQ ID NO: 17830 - protein, 7 aa, synthetic construct
RLLDVYP

SEQ ID NO: 17831 - protein, 7 aa, synthetic construct
GRSYIPS

SEQ ID NO: 17832 - protein, 7 aa, synthetic construct
YFQGKIA

SEQ ID NO: 17833 - protein, 7 aa, synthetic construct
YVRSDGM

SEQ ID NO: 17834 - protein, 7 aa, synthetic construct
IPPLFNV

SEQ ID NO: 17835 - protein, 7 aa, synthetic construct
QGVSREW

SEQ ID NO: 17836 - protein, 7 aa, synthetic construct
RLEAANW

SEQ ID NO: 17837 - protein, 7 aa, synthetic construct
WWSEIRS

SEQ ID NO: 17838 - protein, 7 aa, synthetic construct
YSRLSAD

SEQ ID NO: 17839 - protein, 7 aa, synthetic construct
APGDIRW

SEQ ID NO: 17840 - protein, 7 aa, synthetic construct
RSDQWRG

SEQ ID NO: 17841 - protein, 7 aa, synthetic construct
HYPLSAK

SEQ ID NO: 17842 - protein, 7 aa, synthetic construct
MDDFTVY

SEQ ID NO: 17843 - protein, 7 aa, synthetic construct
GGLGSQW

SEQ ID NO: 17844 - protein, 7 aa, synthetic construct
LSRTAYD

SEQ ID NO: 17845 - protein, 7 aa, synthetic construct
RYGDVMR

SEQ ID NO: 17846 - protein, 7 aa, synthetic construct
DLRGTSA

SEQ ID NO: 17847 - protein, 7 aa, synthetic construct
SYRGARE

SEQ ID NO: 17848 - protein, 7 aa, synthetic construct
MHRLLSD

SEQ ID NO: 17849 - protein, 7 aa, synthetic construct
DLQSSSW

SEQ ID NO: 17850 - protein, 7 aa, synthetic construct
NRYGVVS

SEQ ID NO: 17851 - protein, 7 aa, synthetic construct
VVMTRDR

SEQ ID NO: 17852 - protein, 7 aa, synthetic construct
YSRIGAG

SEQ ID NO: 17853 - protein, 7 aa, synthetic construct
CGEGSKA

SEQ ID NO: 17854 - protein, 7 aa, synthetic construct
GSEFLGW

SEQ ID NO: 17855 - protein, 7 aa, synthetic construct
RDSDNGI

SEQ ID NO: 17856 - protein, 7 aa, synthetic construct
WRRESSS

SEQ ID NO: 17857 - protein, 7 aa, synthetic construct
LSRLSQD

SEQ ID NO: 17858 - protein, 7 aa, synthetic construct
YFAGIAQ

SEQ ID NO: 17859 - protein, 7 aa, synthetic construct
SSPRGSD

SEQ ID NO: 17860 - protein, 7 aa, synthetic construct
FGLIMKA

SEQ ID NO: 17861 - protein, 7 aa, synthetic construct
KSIASPG

SEQ ID NO: 17862 - protein, 7 aa, synthetic construct
VLHSSNW

SEQ ID NO: 17863 - protein, 7 aa, synthetic construct
VADHLRW

SEQ ID NO: 17864 - protein, 7 aa, synthetic construct
YPPMLIA

SEQ ID NO: 17865 - protein, 7 aa, synthetic construct
GCKGSCG

SEQ ID NO: 17866 - protein, 7 aa, synthetic construct
HYEKTGR

SEQ ID NO: 17867 - protein, 7 aa, synthetic construct
LARTGWD

SEQ ID NO: 17868 - protein, 7 aa, synthetic construct
GGGYGRN

SEQ ID NO: 17869 - protein, 7 aa, synthetic construct
WRLHKGD

SEQ ID NO: 17870 - protein, 7 aa, synthetic construct
LSRIANN

SEQ ID NO: 17871 - protein, 7 aa, synthetic construct
ALGDRTW

SEQ ID NO: 17872 - protein, 7 aa, synthetic construct
DFRGARL

SEQ ID NO: 17873 - protein, 7 aa, synthetic construct
LAKTAHN

SEQ ID NO: 17874 - protein, 7 aa, synthetic construct
PMASLQW

SEQ ID NO: 17875 - protein, 7 aa, synthetic construct
GSELSSW

SEQ ID NO: 17876 - protein, 7 aa, synthetic construct
YFHSTKT

SEQ ID NO: 17877 - protein, 7 aa, synthetic construct
RMSSDYR

SEQ ID NO: 17878 - protein, 7 aa, synthetic construct
VMADAFP

SEQ ID NO: 17879 - protein, 7 aa, synthetic construct
WKGRETT

SEQ ID NO: 17880 - protein, 7 aa, synthetic construct
LGSRERF

SEQ ID NO: 17881 - protein, 7 aa, synthetic construct
MGKVCNS

SEQ ID NO: 17882 - protein, 7 aa, synthetic construct
DGSSRSW

SEQ ID NO: 17883 - protein, 7 aa, synthetic construct
LSRLNAD

SEQ ID NO: 17884 - protein, 7 aa, synthetic construct
LFSGVGP

SEQ ID NO: 17885 - protein, 7 aa, synthetic construct
VASVCKG

SEQ ID NO: 17886 - protein, 7 aa, synthetic construct
YYDLKRS

SEQ ID NO: 17887 - protein, 7 aa, synthetic construct
WVASRSS

SEQ ID NO: 17888 - protein, 7 aa, synthetic construct
VMTARDW

SEQ ID NO: 17889 - protein, 7 aa, synthetic construct
LSKLSSN

SEQ ID NO: 17890 - protein, 7 aa, synthetic construct
RGLEGMD

SEQ ID NO: 17891 - protein, 7 aa, synthetic construct
WAMRRVE

SEQ ID NO: 17892 - protein, 7 aa, synthetic construct
YRGASNH

SEQ ID NO: 17893 - protein, 7 aa, synthetic construct
QGNGLYR

SEQ ID NO: 17894 - protein, 7 aa, synthetic construct
TRSFSHG

SEQ ID NO: 17895 - protein, 7 aa, synthetic construct
YWTGLHE

SEQ ID NO: 17896 - protein, 7 aa, synthetic construct
VLSDITW

SEQ ID NO: 17897 - protein, 7 aa, synthetic construct
LLDSAKW

SEQ ID NO: 17898 - protein, 7 aa, synthetic construct
VPDWVDR

SEQ ID NO: 17899 - protein, 7 aa, synthetic construct
SGYRGAV

SEQ ID NO: 17900 - protein, 7 aa, synthetic construct
LKDGTSA

SEQ ID NO: 17901 - protein, 7 aa, synthetic construct
YSRAGDD

SEQ ID NO: 17902 - protein, 7 aa, synthetic construct
LSRSSMN

SEQ ID NO: 17903 - protein, 7 aa, synthetic construct
YSKLSDR

SEQ ID NO: 17904 - protein, 7 aa, synthetic construct
DGYSGRD

SEQ ID NO: 17905 - protein, 7 aa, synthetic construct
YSRLNVG

SEQ ID NO: 17906 - protein, 7 aa, synthetic construct
EAWTDRG

SEQ ID NO: 17907 - protein, 7 aa, synthetic construct
VSNKSTG

SEQ ID NO: 17908 - protein, 7 aa, synthetic construct
WSRGAAT

SEQ ID NO: 17909 - protein, 7 aa, synthetic construct
DTYETRW

SEQ ID NO: 17910 - protein, 7 aa, synthetic construct
VMSSAGW

SEQ ID NO: 17911 - protein, 7 aa, synthetic construct
YTRVQEN

SEQ ID NO: 17912 - protein, 7 aa, synthetic construct
ELESWSW

SEQ ID NO: 17913 - protein, 7 aa, synthetic construct
RDGVSAW

SEQ ID NO: 17914 - protein, 7 aa, synthetic construct
SFGPPYG

SEQ ID NO: 17915 - protein, 7 aa, synthetic construct
TFYGQNA

SEQ ID NO: 17916 - protein, 7 aa, synthetic construct
RMEVGDW

SEQ ID NO: 17917 - protein, 7 aa, synthetic construct
YSKAQGV

SEQ ID NO: 17918 - protein, 7 aa, synthetic construct
HSKLNPM

SEQ ID NO: 17919 - protein, 7 aa, synthetic construct
LFDATPS

SEQ ID NO: 17920 - protein, 7 aa, synthetic construct
REGYRGY

SEQ ID NO: 17921 - protein, 7 aa, synthetic construct
LARSGGG

SEQ ID NO: 17922 - protein, 7 aa, synthetic construct
FWGGVVD

SEQ ID NO: 17923 - protein, 7 aa, synthetic construct
VSSDNGM

SEQ ID NO: 17924 - protein, 7 aa, synthetic construct
YVRSDSS

SEQ ID NO: 17925 - protein, 7 aa, synthetic construct
ISKTCRE

SEQ ID NO: 17926 - protein, 7 aa, synthetic construct
SMQDRSW

SEQ ID NO: 17927 - protein, 7 aa, synthetic construct
WSNRARD

SEQ ID NO: 17928 - protein, 7 aa, synthetic construct
YVISDRN

SEQ ID NO: 17929 - protein, 7 aa, synthetic construct
LRLHGRD

SEQ ID NO: 17930 - protein, 7 aa, synthetic construct
NQRYGSS

SEQ ID NO: 17931 - protein, 7 aa, synthetic construct
SGGGLFP

SEQ ID NO: 17932 - protein, 7 aa, synthetic construct
DIAHKRY

SEQ ID NO: 17933 - protein, 7 aa, synthetic construct
VALKGAG

SEQ ID NO: 17934 - protein, 7 aa, synthetic construct
CTNVCNA

SEQ ID NO: 17935 - protein, 7 aa, synthetic construct
MWNGTPS

SEQ ID NO: 17936 - protein, 7 aa, synthetic construct
LYGSRQT

SEQ ID NO: 17937 - protein, 7 aa, synthetic construct
AGDGLWV

SEQ ID NO: 17938 - protein, 7 aa, synthetic construct
VLSHATW

SEQ ID NO: 17939 - protein, 7 aa, synthetic construct
YHAKGDN

SEQ ID NO: 17940 - protein, 7 aa, synthetic construct
ETDGWRN

SEQ ID NO: 17941 - protein, 7 aa, synthetic construct
LLSSADW

SEQ ID NO: 17942 - protein, 7 aa, synthetic construct
KDGFSTY

SEQ ID NO: 17943 - protein, 7 aa, synthetic construct
GSEVTRR

SEQ ID NO: 17944 - protein, 7 aa, synthetic construct
AEPPVMW

SEQ ID NO: 17945 - protein, 7 aa, synthetic construct
FAHIHGK

SEQ ID NO: 17946 - protein, 7 aa, synthetic construct
IQSTNGR

SEQ ID NO: 17947 - protein, 7 aa, synthetic construct
GTKWSDR

SEQ ID NO: 17948 - protein, 7 aa, synthetic construct
VWPGRST

SEQ ID NO: 17949 - protein, 7 aa, synthetic construct
LARLGPD

SEQ ID NO: 17950 - protein, 7 aa, synthetic construct
HCPTIPM

SEQ ID NO: 17951 - protein, 7 aa, synthetic construct
YARGSLN

SEQ ID NO: 17952 - protein, 7 aa, synthetic construct
YVKSAGS

SEQ ID NO: 17953 - protein, 7 aa, synthetic construct
WDAIRRN

SEQ ID NO: 17954 - protein, 7 aa, synthetic construct
LGENLRW

SEQ ID NO: 17955 - protein, 7 aa, synthetic construct
WFSGVQL

SEQ ID NO: 17956 - protein, 7 aa, synthetic construct
WWTGMIA

SEQ ID NO: 17957 - protein, 7 aa, synthetic construct
DHRGTGW

SEQ ID NO: 17958 - protein, 7 aa, synthetic construct
FFSGTKV

SEQ ID NO: 17959 - protein, 7 aa, synthetic construct
NGADGRW

SEQ ID NO: 17960 - protein, 7 aa, synthetic construct
SYRLVDK

SEQ ID NO: 17961 - protein, 7 aa, synthetic construct
WPYGNDA

SEQ ID NO: 17962 - protein, 7 aa, synthetic construct
RGGGLYV

SEQ ID NO: 17963 - protein, 7 aa, synthetic construct
YSYAGGG

SEQ ID NO: 17964 - protein, 7 aa, synthetic construct
VYVKAHN

SEQ ID NO: 17965 - protein, 7 aa, synthetic construct
YWSGTQG

SEQ ID NO: 17966 - protein, 7 aa, synthetic construct
EMAAYDW

SEQ ID NO: 17967 - protein, 7 aa, synthetic construct
RSDTTYP

SEQ ID NO: 17968 - protein, 7 aa, synthetic construct
REDFSAW

SEQ ID NO: 17969 - protein, 7 aa, synthetic construct
MSSEYER

SEQ ID NO: 17970 - protein, 7 aa, synthetic construct
WRKTDGG

SEQ ID NO: 17971 - protein, 7 aa, synthetic construct
WDNGVTG

SEQ ID NO: 17972 - protein, 7 aa, synthetic construct
KWQSVSA

SEQ ID NO: 17973 - protein, 7 aa, synthetic construct
VEYRGIG

SEQ ID NO: 17974 - protein, 7 aa, synthetic construct
SLNDHLL

SEQ ID NO: 17975 - protein, 7 aa, synthetic construct
YVRSDRV

SEQ ID NO: 17976 - protein, 7 aa, synthetic construct
CRPVCTP

SEQ ID NO: 17977 - protein, 7 aa, synthetic construct
NFRSDLR

SEQ ID NO: 17978 - protein, 7 aa, synthetic construct
PMRETLW

SEQ ID NO: 17979 - protein, 7 aa, synthetic construct
LWNGVGP

SEQ ID NO: 17980 - protein, 7 aa, synthetic construct
LAETRRY

SEQ ID NO: 17981 - protein, 7 aa, synthetic construct
SQSSRCA

SEQ ID NO: 17982 - protein, 7 aa, synthetic construct
ISKTCGS

SEQ ID NO: 17983 - protein, 7 aa, synthetic construct
LAGRGWD

SEQ ID NO: 17984 - protein, 7 aa, synthetic construct
ARHHTSS

SEQ ID NO: 17985 - protein, 7 aa, synthetic construct
WLKIGKA

SEQ ID NO: 17986 - protein, 7 aa, synthetic construct
MLSSQTW

SEQ ID NO: 17987 - protein, 7 aa, synthetic construct
WWTGYVD

SEQ ID NO: 17988 - protein, 7 aa, synthetic construct
EWSSLDD

SEQ ID NO: 17989 - protein, 7 aa, synthetic construct
LRDGTLR

SEQ ID NO: 17990 - protein, 7 aa, synthetic construct
FQRVYKD

SEQ ID NO: 17991 - protein, 7 aa, synthetic construct
GGATSNW

SEQ ID NO: 17992 - protein, 7 aa, synthetic construct
KFHSNSL

SEQ ID NO: 17993 - protein, 7 aa, synthetic construct
LSALNRN

SEQ ID NO: 17994 - protein, 7 aa, synthetic construct
GGESSVW

SEQ ID NO: 17995 - protein, 7 aa, synthetic construct
RLDAHDW

SEQ ID NO: 17996 - protein, 7 aa, synthetic construct
GVDVVRW

SEQ ID NO: 17997 - protein, 7 aa, synthetic construct
AQGISAG

SEQ ID NO: 17998 - protein, 7 aa, synthetic construct
NGVNGLW

SEQ ID NO: 17999 - protein, 7 aa, synthetic construct
DLRSSDW

SEQ ID NO: 18000 - protein, 7 aa, synthetic construct
GGESSLW

SEQ ID NO: 18001 - protein, 7 aa, synthetic construct
LARGGWD

SEQ ID NO: 18002 - protein, 7 aa, synthetic construct
GNSERRW

SEQ ID NO: 18003 - protein, 7 aa, synthetic construct
YFTRTMA

SEQ ID NO: 18004 - protein, 7 aa, synthetic construct
GGEGSAW

SEQ ID NO: 18005 - protein, 7 aa, synthetic construct
SGKCAAT

SEQ ID NO: 18006 - protein, 7 aa, synthetic construct
DGPVFNR

SEQ ID NO: 18007 - protein, 7 aa, synthetic construct
LPQSSNW

SEQ ID NO: 18008 - protein, 7 aa, synthetic construct
VDEFLSW

SEQ ID NO: 18009 - protein, 7 aa, synthetic construct
FHGNARV

SEQ ID NO: 18010 - protein, 7 aa, synthetic construct
RAFDSYS

SEQ ID NO: 18011 - protein, 7 aa, synthetic construct
LHRLMPD

SEQ ID NO: 18012 - protein, 7 aa, synthetic construct
YVKSQPG

SEQ ID NO: 18013 - protein, 7 aa, synthetic construct
YSKLNTH

SEQ ID NO: 18014 - protein, 7 aa, synthetic construct
LARSGYD

SEQ ID NO: 18015 - protein, 7 aa, synthetic construct
LSRVGAD

SEQ ID NO: 18016 - protein, 7 aa, synthetic construct
ELVTKRY

SEQ ID NO: 18017 - protein, 7 aa, synthetic construct
NAFEGAD

SEQ ID NO: 18018 - protein, 7 aa, synthetic construct
MFDGSSA

SEQ ID NO: 18019 - protein, 7 aa, synthetic construct
WASRTRD

SEQ ID NO: 18020 - protein, 7 aa, synthetic construct
WGSRREG

SEQ ID NO: 18021 - protein, 7 aa, synthetic construct
FSRLHID

SEQ ID NO: 18022 - protein, 7 aa, synthetic construct
AYRRPDA

SEQ ID NO: 18023 - protein, 7 aa, synthetic construct
DGSTSTW

SEQ ID NO: 18024 - protein, 7 aa, synthetic construct
AQGNWKG

SEQ ID NO: 18025 - protein, 7 aa, synthetic construct
CCGGRGP

SEQ ID NO: 18026 - protein, 7 aa, synthetic construct
VSESLYW

SEQ ID NO: 18027 - protein, 7 aa, synthetic construct
SYAVRRE

SEQ ID NO: 18028 - protein, 7 aa, synthetic construct
GGDFEHW

SEQ ID NO: 18029 - protein, 7 aa, synthetic construct
TSYGANA

SEQ ID NO: 18030 - protein, 7 aa, synthetic construct
FGNGSSY

SEQ ID NO: 18031 - protein, 7 aa, synthetic construct
FFTGVVG

SEQ ID NO: 18032 - protein, 7 aa, synthetic construct
LGGTSRY

SEQ ID NO: 18033 - protein, 7 aa, synthetic construct
TYEGAVA

SEQ ID NO: 18034 - protein, 7 aa, synthetic construct
ADLTVRR

SEQ ID NO: 18035 - protein, 7 aa, synthetic construct
LARSGPD

SEQ ID NO: 18036 - protein, 7 aa, synthetic construct
TDETVYR

SEQ ID NO: 18037 - protein, 7 aa, synthetic construct
DDGSSRY

SEQ ID NO: 18038 - protein, 7 aa, synthetic construct
DSPEWRD

SEQ ID NO: 18039 - protein, 7 aa, synthetic construct
KVALLST

SEQ ID NO: 18040 - protein, 7 aa, synthetic construct
LHKLGDD

SEQ ID NO: 18041 - protein, 7 aa, synthetic construct
YYTGMIS

SEQ ID NO: 18042 - protein, 7 aa, synthetic construct
FEAPNSW

SEQ ID NO: 18043 - protein, 7 aa, synthetic construct
DEGGYPW

SEQ ID NO: 18044 - protein, 7 aa, synthetic construct
WVREANR

SEQ ID NO: 18045 - protein, 7 aa, synthetic construct
RYNMSRE

SEQ ID NO: 18046 - protein, 7 aa, synthetic construct
YNFKRDG

SEQ ID NO: 18047 - protein, 7 aa, synthetic construct
WWTGTVS

SEQ ID NO: 18048 - protein, 7 aa, synthetic construct
YWAGIPD

SEQ ID NO: 18049 - protein, 7 aa, synthetic construct
LWGGIPS

SEQ ID NO: 18050 - protein, 7 aa, synthetic construct
VVDYMSH

SEQ ID NO: 18051 - protein, 7 aa, synthetic construct
FFSGIID

SEQ ID NO: 18052 - protein, 7 aa, synthetic construct
YVRFDSG

SEQ ID NO: 18053 - protein, 7 aa, synthetic construct
RVGHTAW

SEQ ID NO: 18054 - protein, 7 aa, synthetic construct
WSHMGKG

SEQ ID NO: 18055 - protein, 7 aa, synthetic construct
YYTGFTN

SEQ ID NO: 18056 - protein, 7 aa, synthetic construct
VIEDAYP

SEQ ID NO: 18057 - protein, 7 aa, synthetic construct
GVINVAW

SEQ ID NO: 18058 - protein, 7 aa, synthetic construct
IESFNGR

SEQ ID NO: 18059 - protein, 7 aa, synthetic construct
GMGSERW

SEQ ID NO: 18060 - protein, 7 aa, synthetic construct
SAYRGGG

SEQ ID NO: 18061 - protein, 7 aa, synthetic construct
HWAKSLE

SEQ ID NO: 18062 - protein, 7 aa, synthetic construct
DLGSASW

SEQ ID NO: 18063 - protein, 7 aa, synthetic construct
GFRHPGS

SEQ ID NO: 18064 - protein, 7 aa, synthetic construct
RMSSGVW

SEQ ID NO: 18065 - protein, 7 aa, synthetic construct
AESSRLW

SEQ ID NO: 18066 - protein, 7 aa, synthetic construct
LWDGTGA

SEQ ID NO: 18067 - protein, 7 aa, synthetic construct
SSDYSSY

SEQ ID NO: 18068 - protein, 7 aa, synthetic construct
ENGGGRW

SEQ ID NO: 18069 - protein, 7 aa, synthetic construct
YDRLSDN

SEQ ID NO: 18070 - protein, 7 aa, synthetic construct
RNEFTGF

SEQ ID NO: 18071 - protein, 7 aa, synthetic construct
SDSTNGM

SEQ ID NO: 18072 - protein, 7 aa, synthetic construct
ERMNCHS

SEQ ID NO: 18073 - protein, 7 aa, synthetic construct
YSRLGGD

SEQ ID NO: 18074 - protein, 7 aa, synthetic construct
LLQSSTW

SEQ ID NO: 18075 - protein, 7 aa, synthetic construct
WARGSGL

SEQ ID NO: 18076 - protein, 7 aa, synthetic construct
GADAVRW

SEQ ID NO: 18077 - protein, 7 aa, synthetic construct
DFYGRPA

SEQ ID NO: 18078 - protein, 7 aa, synthetic construct
SGATSNW

SEQ ID NO: 18079 - protein, 7 aa, synthetic construct
RALEGRD

SEQ ID NO: 18080 - protein, 7 aa, synthetic construct
QWKVTDR

SEQ ID NO: 18081 - protein, 7 aa, synthetic construct
GGVPPKY

SEQ ID NO: 18082 - protein, 7 aa, synthetic construct
GRSGGVW

SEQ ID NO: 18083 - protein, 7 aa, synthetic construct
YSRLSVD

SEQ ID NO: 18084 - protein, 7 aa, synthetic construct
FFAGVKD

SEQ ID NO: 18085 - protein, 7 aa, synthetic construct
WCEGVMT

SEQ ID NO: 18086 - protein, 7 aa, synthetic construct
WRVSDQK

SEQ ID NO: 18087 - protein, 7 aa, synthetic construct
YVKSDSH

SEQ ID NO: 18088 - protein, 7 aa, synthetic construct
GMGSSVW

SEQ ID NO: 18089 - protein, 7 aa, synthetic construct
AGESRGW

SEQ ID NO: 18090 - protein, 7 aa, synthetic construct
WARSPGS

SEQ ID NO: 18091 - protein, 7 aa, synthetic construct
KSVKFLG

SEQ ID NO: 18092 - protein, 7 aa, synthetic construct
TLVRTTG

SEQ ID NO: 18093 - protein, 7 aa, synthetic construct
YYTGRLE

SEQ ID NO: 18094 - protein, 7 aa, synthetic construct
KWTSNSG

SEQ ID NO: 18095 - protein, 7 aa, synthetic construct
VRAYATG

SEQ ID NO: 18096 - protein, 7 aa, synthetic construct
HSRLNES

SEQ ID NO: 18097 - protein, 7 aa, synthetic construct
TRYTGQH

SEQ ID NO: 18098 - protein, 7 aa, synthetic construct
RFHAGTM

SEQ ID NO: 18099 - protein, 7 aa, synthetic construct
YRVRDIG

SEQ ID NO: 18100 - protein, 7 aa, synthetic construct
VDSTCHA

SEQ ID NO: 18101 - protein, 7 aa, synthetic construct
KYSSFSA

SEQ ID NO: 18102 - protein, 7 aa, synthetic construct
RDGNSAW

SEQ ID NO: 18103 - protein, 7 aa, synthetic construct
WFSGETD

SEQ ID NO: 18104 - protein, 7 aa, synthetic construct
RSAFEPF

SEQ ID NO: 18105 - protein, 7 aa, synthetic construct
HHFSGKQ

SEQ ID NO: 18106 - protein, 7 aa, synthetic construct
SRWGDAA

SEQ ID NO: 18107 - protein, 7 aa, synthetic construct
LWRSDNN

SEQ ID NO: 18108 - protein, 7 aa, synthetic construct
GSEFHTW

SEQ ID NO: 18109 - protein, 7 aa, synthetic construct
GAGTSSW

SEQ ID NO: 18110 - protein, 7 aa, synthetic construct
YVRSQVD

SEQ ID NO: 18111 - protein, 7 aa, synthetic construct
PNRFTKD

SEQ ID NO: 18112 - protein, 7 aa, synthetic construct
ASSTNGR

SEQ ID NO: 18113 - protein, 7 aa, synthetic construct
RVEDAFP

SEQ ID NO: 18114 - protein, 7 aa, synthetic construct
LHRESPN

SEQ ID NO: 18115 - protein, 7 aa, synthetic construct
FFSTNGV

SEQ ID NO: 18116 - protein, 7 aa, synthetic construct
LTRISSN

SEQ ID NO: 18117 - protein, 7 aa, synthetic construct
RVPYKGD

SEQ ID NO: 18118 - protein, 7 aa, synthetic construct
VSSQWRG

SEQ ID NO: 18119 - protein, 7 aa, synthetic construct
RSADAFP

SEQ ID NO: 18120 - protein, 7 aa, synthetic construct
YVGGAYS

SEQ ID NO: 18121 - protein, 7 aa, synthetic construct
TSYDSGW

SEQ ID NO: 18122 - protein, 7 aa, synthetic construct
GADHVTW

SEQ ID NO: 18123 - protein, 7 aa, synthetic construct
YVRSMNT

SEQ ID NO: 18124 - protein, 7 aa, synthetic construct
LSRVSAD

SEQ ID NO: 18125 - protein, 7 aa, synthetic construct
SCTPCKA

SEQ ID NO: 18126 - protein, 7 aa, synthetic construct
VATHGAG

SEQ ID NO: 18127 - protein, 7 aa, synthetic construct
FPGSCCA

SEQ ID NO: 18128 - protein, 7 aa, synthetic construct
VESSRAW

SEQ ID NO: 18129 - protein, 7 aa, synthetic construct
FYGHPYD

SEQ ID NO: 18130 - protein, 7 aa, synthetic construct
RLESTGW

SEQ ID NO: 18131 - protein, 7 aa, synthetic construct
VARTYRE

SEQ ID NO: 18132 - protein, 7 aa, synthetic construct
YSKIGRD

SEQ ID NO: 18133 - protein, 7 aa, synthetic construct
KDDYTTF

SEQ ID NO: 18134 - protein, 7 aa, synthetic construct
WYSGIIA

SEQ ID NO: 18135 - protein, 7 aa, synthetic construct
RDVGCCG

SEQ ID NO: 18136 - protein, 7 aa, synthetic construct
LFTGFGP

SEQ ID NO: 18137 - protein, 7 aa, synthetic construct
YFAGTHT

SEQ ID NO: 18138 - protein, 7 aa, synthetic construct
RTNVVFP

SEQ ID NO: 18139 - protein, 7 aa, synthetic construct
LVYGKNV

SEQ ID NO: 18140 - protein, 7 aa, synthetic construct
LTRLHAV

SEQ ID NO: 18141 - protein, 7 aa, synthetic construct
LHVSLEN

SEQ ID NO: 18142 - protein, 7 aa, synthetic construct
MVRNQPN

SEQ ID NO: 18143 - protein, 7 aa, synthetic construct
HFPRSTG

SEQ ID NO: 18144 - protein, 7 aa, synthetic construct
DFTDRKW

SEQ ID NO: 18145 - protein, 7 aa, synthetic construct
LPRTGDW

SEQ ID NO: 18146 - protein, 7 aa, synthetic construct
NDGHIKG

SEQ ID NO: 18147 - protein, 7 aa, synthetic construct
WGGHRGV

SEQ ID NO: 18148 - protein, 7 aa, synthetic construct
ATDSGPR

SEQ ID NO: 18149 - protein, 7 aa, synthetic construct
SWSGGTK

SEQ ID NO: 18150 - protein, 7 aa, synthetic construct
FMPGHRT

SEQ ID NO: 18151 - protein, 7 aa, synthetic construct
VAMSGAG

SEQ ID NO: 18152 - protein, 7 aa, synthetic construct
KLPNYGY

SEQ ID NO: 18153 - protein, 7 aa, synthetic construct
EMLSVSW

SEQ ID NO: 18154 - protein, 7 aa, synthetic construct
FLKHNNY

SEQ ID NO: 18155 - protein, 7 aa, synthetic construct
RSEHAYP

SEQ ID NO: 18156 - protein, 7 aa, synthetic construct
IGVKGWD

SEQ ID NO: 18157 - protein, 7 aa, synthetic construct
EALNGWD

SEQ ID NO: 18158 - protein, 7 aa, synthetic construct
HWSQNGV

SEQ ID NO: 18159 - protein, 7 aa, synthetic construct
SFGPRTS

SEQ ID NO: 18160 - protein, 7 aa, synthetic construct
YFERKPD

SEQ ID NO: 18161 - protein, 7 aa, synthetic construct
GSPGVAW

SEQ ID NO: 18162 - protein, 7 aa, synthetic construct
TGGGMFV

SEQ ID NO: 18163 - protein, 7 aa, synthetic construct
GELMGIE

SEQ ID NO: 18164 - protein, 7 aa, synthetic construct
LWSGIGP

SEQ ID NO: 18165 - protein, 7 aa, synthetic construct
KDDYNTY

SEQ ID NO: 18166 - protein, 7 aa, synthetic construct
QGEARIW

SEQ ID NO: 18167 - protein, 7 aa, synthetic construct
IDASSIW

SEQ ID NO: 18168 - protein, 7 aa, synthetic construct
AFDGTSA

SEQ ID NO: 18169 - protein, 7 aa, synthetic construct
ARYGGRE

SEQ ID NO: 18170 - protein, 7 aa, synthetic construct
DNRGLIA

SEQ ID NO: 18171 - protein, 7 aa, synthetic construct
RSEVSVW

SEQ ID NO: 18172 - protein, 7 aa, synthetic construct
REGTSAW

SEQ ID NO: 18173 - protein, 7 aa, synthetic construct
DPASRAW

SEQ ID NO: 18174 - protein, 7 aa, synthetic construct
CCTALSP

SEQ ID NO: 18175 - protein, 7 aa, synthetic construct
VVGVCPA

SEQ ID NO: 18176 - protein, 7 aa, synthetic construct
SPGYPSF

SEQ ID NO: 18177 - protein, 7 aa, synthetic construct
FFSGKLD

SEQ ID NO: 18178 - protein, 7 aa, synthetic construct
YWTGRPD

SEQ ID NO: 18179 - protein, 7 aa, synthetic construct
FESDNGV

SEQ ID NO: 18180 - protein, 7 aa, synthetic construct
LSKLSLN

SEQ ID NO: 18181 - protein, 7 aa, synthetic construct
VGERGWD

SEQ ID NO: 18182 - protein, 7 aa, synthetic construct
GSALSSW

SEQ ID NO: 18183 - protein, 7 aa, synthetic construct
VSDFLVY

SEQ ID NO: 18184 - protein, 7 aa, synthetic construct
CLGELAA

SEQ ID NO: 18185 - protein, 7 aa, synthetic construct
GCGTKCG

SEQ ID NO: 18186 - protein, 7 aa, synthetic construct
GCRHSPV

SEQ ID NO: 18187 - protein, 7 aa, synthetic construct
GGLTCCG

SEQ ID NO: 18188 - protein, 7 aa, synthetic construct
IESTNGA

SEQ ID NO: 18189 - protein, 7 aa, synthetic construct
KNRDMSW

SEQ ID NO: 18190 - protein, 7 aa, synthetic construct
READAYA

SEQ ID NO: 18191 - protein, 7 aa, synthetic construct
RLIDVYP

SEQ ID NO: 18192 - protein, 7 aa, synthetic construct
CGSVQVN

SEQ ID NO: 18193 - protein, 7 aa, synthetic construct
GYQHMKM

SEQ ID NO: 18194 - protein, 7 aa, synthetic construct
AAKYSDR

SEQ ID NO: 18195 - protein, 7 aa, synthetic construct
MRDGTVA

SEQ ID NO: 18196 - protein, 7 aa, synthetic construct
GTEWQPF

SEQ ID NO: 18197 - protein, 7 aa, synthetic construct
DAINGRN

SEQ ID NO: 18198 - protein, 7 aa, synthetic construct
LHRLNPS

SEQ ID NO: 18199 - protein, 7 aa, synthetic construct
WIGYVKN

SEQ ID NO: 18200 - protein, 7 aa, synthetic construct
VMMLPNS

SEQ ID NO: 18201 - protein, 7 aa, synthetic construct
PGRAGYL

SEQ ID NO: 18202 - protein, 7 aa, synthetic construct
VMSTHGV

SEQ ID NO: 18203 - protein, 7 aa, synthetic construct
NVKGISL

SEQ ID NO: 18204 - protein, 7 aa, synthetic construct
EVIGRRA

SEQ ID NO: 18205 - protein, 7 aa, synthetic construct
GHEPGWA

SEQ ID NO: 18206 - protein, 7 aa, synthetic construct
TRSDYLR

SEQ ID NO: 18207 - protein, 7 aa, synthetic construct
GTPRRDW

SEQ ID NO: 18208 - protein, 7 aa, synthetic construct
FFAGKVS

SEQ ID NO: 18209 - protein, 7 aa, synthetic construct
RSLEGYF

SEQ ID NO: 18210 - protein, 7 aa, synthetic construct
VNSTNGM

SEQ ID NO: 18211 - protein, 7 aa, synthetic construct
YFSGAVD

SEQ ID NO: 18212 - protein, 7 aa, synthetic construct
GDEWEHF

SEQ ID NO: 18213 - protein, 7 aa, synthetic construct
DLSAVDW

SEQ ID NO: 18214 - protein, 7 aa, synthetic construct
SAQGKYS

SEQ ID NO: 18215 - protein, 7 aa, synthetic construct
GYRSASL

SEQ ID NO: 18216 - protein, 7 aa, synthetic construct
KYAFSSE

SEQ ID NO: 18217 - protein, 7 aa, synthetic construct
GIRNVMH

SEQ ID NO: 18218 - protein, 7 aa, synthetic construct
DGRVNFR

SEQ ID NO: 18219 - protein, 7 aa, synthetic construct
RENHPRA

SEQ ID NO: 18220 - protein, 7 aa, synthetic construct
VGSCARA

SEQ ID NO: 18221 - protein, 7 aa, synthetic construct
RVGKGDW

SEQ ID NO: 18222 - protein, 7 aa, synthetic construct
NVSEWRN

SEQ ID NO: 18223 - protein, 7 aa, synthetic construct
NRGNCRG

SEQ ID NO: 18224 - protein, 7 aa, synthetic construct
YVKSSNI

SEQ ID NO: 18225 - protein, 7 aa, synthetic construct
DLASSAW

SEQ ID NO: 18226 - protein, 7 aa, synthetic construct
NSWGKGS

SEQ ID NO: 18227 - protein, 7 aa, synthetic construct
GFRLGHG

SEQ ID NO: 18228 - protein, 7 aa, synthetic construct
QDGRSSY

SEQ ID NO: 18229 - protein, 7 aa, synthetic construct
SWARSEL

SEQ ID NO: 18230 - protein, 7 aa, synthetic construct
DSVEFLR

SEQ ID NO: 18231 - protein, 7 aa, synthetic construct
PLDSYKW

SEQ ID NO: 18232 - protein, 7 aa, synthetic construct
LSRASAN

SEQ ID NO: 18233 - protein, 7 aa, synthetic construct
GYRTGNT

SEQ ID NO: 18234 - protein, 7 aa, synthetic construct
VSRDSYR

SEQ ID NO: 18235 - protein, 7 aa, synthetic construct
GKYQDKY

SEQ ID NO: 18236 - protein, 7 aa, synthetic construct
HNNKYRD

SEQ ID NO: 18237 - protein, 7 aa, synthetic construct
YFQGTYN

SEQ ID NO: 18238 - protein, 7 aa, synthetic construct
CGPRNPE

SEQ ID NO: 18239 - protein, 7 aa, synthetic construct
FTGVLCA

SEQ ID NO: 18240 - protein, 7 aa, synthetic construct
AGGGLYI

SEQ ID NO: 18241 - protein, 7 aa, synthetic construct
SLAAHDW

SEQ ID NO: 18242 - protein, 7 aa, synthetic construct
FVSSHSR

SEQ ID NO: 18243 - protein, 7 aa, synthetic construct
DLSTYDW

SEQ ID NO: 18244 - protein, 7 aa, synthetic construct
LARNLPN

SEQ ID NO: 18245 - protein, 7 aa, synthetic construct
HTIDSFP

SEQ ID NO: 18246 - protein, 7 aa, synthetic construct
GSQGSSW

SEQ ID NO: 18247 - protein, 7 aa, synthetic construct
THHPRLS

SEQ ID NO: 18248 - protein, 7 aa, synthetic construct
CEKRQAS

SEQ ID NO: 18249 - protein, 7 aa, synthetic construct
WGSLHRT

SEQ ID NO: 18250 - protein, 7 aa, synthetic construct
GGTTSTW

SEQ ID NO: 18251 - protein, 7 aa, synthetic construct
LHRMQTD

SEQ ID NO: 18252 - protein, 7 aa, synthetic construct
DKLPAYK

SEQ ID NO: 18253 - protein, 7 aa, synthetic construct
DYAYSKE

SEQ ID NO: 18254 - protein, 7 aa, synthetic construct
NLLSAQW

SEQ ID NO: 18255 - protein, 7 aa, synthetic construct
GPEGIRW

SEQ ID NO: 18256 - protein, 7 aa, synthetic construct
HKYGSNV

SEQ ID NO: 18257 - protein, 7 aa, synthetic construct
PHASGPV

SEQ ID NO: 18258 - protein, 7 aa, synthetic construct
RDQGVSW

SEQ ID NO: 18259 - protein, 7 aa, synthetic construct
DTVARRL

SEQ ID NO: 18260 - protein, 7 aa, synthetic construct
NATVCCG

SEQ ID NO: 18261 - protein, 7 aa, synthetic construct
LSRLTVN

SEQ ID NO: 18262 - protein, 7 aa, synthetic construct
TSEYHVY

SEQ ID NO: 18263 - protein, 7 aa, synthetic construct
GGETSQW

SEQ ID NO: 18264 - protein, 7 aa, synthetic construct
DMRSPNW

SEQ ID NO: 18265 - protein, 7 aa, synthetic construct
REENVRW

SEQ ID NO: 18266 - protein, 7 aa, synthetic construct
LHDATGP

SEQ ID NO: 18267 - protein, 7 aa, synthetic construct
GHLRERT

SEQ ID NO: 18268 - protein, 7 aa, synthetic construct
FHSTSRT

SEQ ID NO: 18269 - protein, 7 aa, synthetic construct
WSGPVRS

SEQ ID NO: 18270 - protein, 7 aa, synthetic construct
VSDWAPF

SEQ ID NO: 18271 - protein, 7 aa, synthetic construct
APSGIMA

SEQ ID NO: 18272 - protein, 7 aa, synthetic construct
TWTGMNA

SEQ ID NO: 18273 - protein, 7 aa, synthetic construct
YYSGVTS

SEQ ID NO: 18274 - protein, 7 aa, synthetic construct
SFGSDHD

SEQ ID NO: 18275 - protein, 7 aa, synthetic construct
SYLADRK

SEQ ID NO: 18276 - protein, 7 aa, synthetic construct
VYVKSTS

SEQ ID NO: 18277 - protein, 7 aa, synthetic construct
ISEFRSY

SEQ ID NO: 18278 - protein, 7 aa, synthetic construct
LWDGSAS

SEQ ID NO: 18279 - protein, 7 aa, synthetic construct
LARSSSN

SEQ ID NO: 18280 - protein, 7 aa, synthetic construct
RGDDRSW

SEQ ID NO: 18281 - protein, 7 aa, synthetic construct
YFSGSLS

SEQ ID NO: 18282 - protein, 7 aa, synthetic construct
PYARDAG

SEQ ID NO: 18283 - protein, 7 aa, synthetic construct
YFSNVAA

SEQ ID NO: 18284 - protein, 7 aa, synthetic construct
DLRDRAW

SEQ ID NO: 18285 - protein, 7 aa, synthetic construct
QSGMLRC

SEQ ID NO: 18286 - protein, 7 aa, synthetic construct
VLGQGNW

SEQ ID NO: 18287 - protein, 7 aa, synthetic construct
TQLHGSN

SEQ ID NO: 18288 - protein, 7 aa, synthetic construct
ERYPSQR

SEQ ID NO: 18289 - protein, 7 aa, synthetic construct
VYHNKSV

SEQ ID NO: 18290 - protein, 7 aa, synthetic construct
GSGLSSW

SEQ ID NO: 18291 - protein, 7 aa, synthetic construct
EALRGWD

SEQ ID NO: 18292 - protein, 7 aa, synthetic construct
GVVNVSW

SEQ ID NO: 18293 - protein, 7 aa, synthetic construct
WPTSRGT

SEQ ID NO: 18294 - protein, 7 aa, synthetic construct
FTVPGMD

SEQ ID NO: 18295 - protein, 7 aa, synthetic construct
LHRLSGD

SEQ ID NO: 18296 - protein, 7 aa, synthetic construct
DGDWTVF

SEQ ID NO: 18297 - protein, 7 aa, synthetic construct
GHGTNSF

SEQ ID NO: 18298 - protein, 7 aa, synthetic construct
GGKFHSG

SEQ ID NO: 18299 - protein, 7 aa, synthetic construct
CDGTKVS

SEQ ID NO: 18300 - protein, 7 aa, synthetic construct
VHGMGWD

SEQ ID NO: 18301 - protein, 7 aa, synthetic construct
IDDWNAW

SEQ ID NO: 18302 - protein, 7 aa, synthetic construct
GYSERVR

SEQ ID NO: 18303 - protein, 7 aa, synthetic construct
VAHAGAG

SEQ ID NO: 18304 - protein, 7 aa, synthetic construct
RSEGYLK

SEQ ID NO: 18305 - protein, 7 aa, synthetic construct
YYSGQVL

SEQ ID NO: 18306 - protein, 7 aa, synthetic construct
KEYGGSR

SEQ ID NO: 18307 - protein, 7 aa, synthetic construct
DWAKRSV

SEQ ID NO: 18308 - protein, 7 aa, synthetic construct
VSGGTAG

SEQ ID NO: 18309 - protein, 7 aa, synthetic construct
RDLDAYP

SEQ ID NO: 18310 - protein, 7 aa, synthetic construct
NWKSGSG

SEQ ID NO: 18311 - protein, 7 aa, synthetic construct
SYGMPRS

SEQ ID NO: 18312 - protein, 7 aa, synthetic construct
NALGCAG

SEQ ID NO: 18313 - protein, 7 aa, synthetic construct
WRGKPES

SEQ ID NO: 18314 - protein, 7 aa, synthetic construct
DGAIYLR

SEQ ID NO: 18315 - protein, 7 aa, synthetic construct
CGSYRQA

SEQ ID NO: 18316 - protein, 7 aa, synthetic construct
VARMESV

SEQ ID NO: 18317 - protein, 7 aa, synthetic construct
GVLAKVV

SEQ ID NO: 18318 - protein, 7 aa, synthetic construct
GGDRFRT

SEQ ID NO: 18319 - protein, 7 aa, synthetic construct
VRSHFSA

SEQ ID NO: 18320 - protein, 7 aa, synthetic construct
YFSGTNN

SEQ ID NO: 18321 - protein, 7 aa, synthetic construct
VSTGSPP

SEQ ID NO: 18322 - protein, 7 aa, synthetic construct
SGGRWVG

SEQ ID NO: 18323 - protein, 7 aa, synthetic construct
SRFESVR

SEQ ID NO: 18324 - protein, 7 aa, synthetic construct
RGSERIC

SEQ ID NO: 18325 - protein, 7 aa, synthetic construct
REDGSYW

SEQ ID NO: 18326 - protein, 7 aa, synthetic construct
WNPIRHA

SEQ ID NO: 18327 - protein, 7 aa, synthetic construct
AHSRPFV

SEQ ID NO: 18328 - protein, 7 aa, synthetic construct
WKGHSGH

SEQ ID NO: 18329 - protein, 7 aa, synthetic construct
IRMDAYP

SEQ ID NO: 18330 - protein, 7 aa, synthetic construct
ELRFSKN

SEQ ID NO: 18331 - protein, 7 aa, synthetic construct
RDELTTY

SEQ ID NO: 18332 - protein, 7 aa, synthetic construct
VATLGWD

SEQ ID NO: 18333 - protein, 7 aa, synthetic construct
SSPRWKD

SEQ ID NO: 18334 - protein, 7 aa, synthetic construct
GWSSKNS

SEQ ID NO: 18335 - protein, 7 aa, synthetic construct
WFTGIRD

SEQ ID NO: 18336 - protein, 7 aa, synthetic construct
MDGNSLW

SEQ ID NO: 18337 - protein, 7 aa, synthetic construct
DLTLSSW

SEQ ID NO: 18338 - protein, 7 aa, synthetic construct
TGQGYRS

SEQ ID NO: 18339 - protein, 7 aa, synthetic construct
WDKGAGR

SEQ ID NO: 18340 - protein, 7 aa, synthetic construct
VVSGSSA

SEQ ID NO: 18341 - protein, 7 aa, synthetic construct
VGGGTWN

SEQ ID NO: 18342 - protein, 7 aa, synthetic construct
YVRSSTG

SEQ ID NO: 18343 - protein, 7 aa, synthetic construct
WGRQGIG

SEQ ID NO: 18344 - protein, 7 aa, synthetic construct
YWSQVAQ

SEQ ID NO: 18345 - protein, 7 aa, synthetic construct
RSEFSTY

SEQ ID NO: 18346 - protein, 7 aa, synthetic construct
MYKTSSH

SEQ ID NO: 18347 - protein, 7 aa, synthetic construct
YPFPQVS

SEQ ID NO: 18348 - protein, 7 aa, synthetic construct
WFSGQTE

SEQ ID NO: 18349 - protein, 7 aa, synthetic construct
WDRGKQL

SEQ ID NO: 18350 - protein, 7 aa, synthetic construct
GVNEVRW

SEQ ID NO: 18351 - protein, 7 aa, synthetic construct
HGSACGM

SEQ ID NO: 18352 - protein, 7 aa, synthetic construct
WSSGRER

SEQ ID NO: 18353 - protein, 7 aa, synthetic construct
CRPVKDG

SEQ ID NO: 18354 - protein, 7 aa, synthetic construct
GDEYHSW

SEQ ID NO: 18355 - protein, 7 aa, synthetic construct
YSRAGSS

SEQ ID NO: 18356 - protein, 7 aa, synthetic construct
GYLKRPP

SEQ ID NO: 18357 - protein, 7 aa, synthetic construct
TYNPRSS

SEQ ID NO: 18358 - protein, 7 aa, synthetic construct
LHKLTTD

SEQ ID NO: 18359 - protein, 7 aa, synthetic construct
TKDGWLP

SEQ ID NO: 18360 - protein, 7 aa, synthetic construct
FFSGERS

SEQ ID NO: 18361 - protein, 7 aa, synthetic construct
LAGTQTE

SEQ ID NO: 18362 - protein, 7 aa, synthetic construct
FARSGGG

SEQ ID NO: 18363 - protein, 7 aa, synthetic construct
GDVEVRW

SEQ ID NO: 18364 - protein, 7 aa, synthetic construct
VWEKARM

SEQ ID NO: 18365 - protein, 7 aa, synthetic construct
WFSGKVD

SEQ ID NO: 18366 - protein, 7 aa, synthetic construct
RYEGALR

SEQ ID NO: 18367 - protein, 7 aa, synthetic construct
AGFDRQW

SEQ ID NO: 18368 - protein, 7 aa, synthetic construct
YVRSNDL

SEQ ID NO: 18369 - protein, 7 aa, synthetic construct
FGRAYGA

SEQ ID NO: 18370 - protein, 7 aa, synthetic construct
RFGDMTR

SEQ ID NO: 18371 - protein, 7 aa, synthetic construct
GLYDYVA

SEQ ID NO: 18372 - protein, 7 aa, synthetic construct
SMPSSQW

SEQ ID NO: 18373 - protein, 7 aa, synthetic construct
LRSGVGP

SEQ ID NO: 18374 - protein, 7 aa, synthetic construct
GSGDSKW

SEQ ID NO: 18375 - protein, 7 aa, synthetic construct
YWSGVSA

SEQ ID NO: 18376 - protein, 7 aa, synthetic construct
WPGQSGF

SEQ ID NO: 18377 - protein, 7 aa, synthetic construct
LYHKSSS

SEQ ID NO: 18378 - protein, 7 aa, synthetic construct
RYPNQTN

SEQ ID NO: 18379 - protein, 7 aa, synthetic construct
RIFNKGE

SEQ ID NO: 18380 - protein, 7 aa, synthetic construct
LASRGWD

SEQ ID NO: 18381 - protein, 7 aa, synthetic construct
GEGVARW

SEQ ID NO: 18382 - protein, 7 aa, synthetic construct
DLTSAEW

SEQ ID NO: 18383 - protein, 7 aa, synthetic construct
QNDSVRW

SEQ ID NO: 18384 - protein, 7 aa, synthetic construct
VLQSASW

SEQ ID NO: 18385 - protein, 7 aa, synthetic construct
TREGDPA

SEQ ID NO: 18386 - protein, 7 aa, synthetic construct
WVARTKD

SEQ ID NO: 18387 - protein, 7 aa, synthetic construct
SLPPSYG

SEQ ID NO: 18388 - protein, 7 aa, synthetic construct
NVARAAV

SEQ ID NO: 18389 - protein, 7 aa, synthetic construct
HHKWPNA

SEQ ID NO: 18390 - protein, 7 aa, synthetic construct
GWRVREG

SEQ ID NO: 18391 - protein, 7 aa, synthetic construct
THGTSTC

SEQ ID NO: 18392 - protein, 7 aa, synthetic construct
SFRSVHQ

SEQ ID NO: 18393 - protein, 7 aa, synthetic construct
GCAKLCD

SEQ ID NO: 18394 - protein, 7 aa, synthetic construct
FGRIGWD

SEQ ID NO: 18395 - protein, 7 aa, synthetic construct
RKSDVYP

SEQ ID NO: 18396 - protein, 7 aa, synthetic construct
VADGLRW

SEQ ID NO: 18397 - protein, 7 aa, synthetic construct
FDGHSAW

SEQ ID NO: 18398 - protein, 7 aa, synthetic construct
SYAHRSP

SEQ ID NO: 18399 - protein, 7 aa, synthetic construct
GVETSRW

SEQ ID NO: 18400 - protein, 7 aa, synthetic construct
FSGKYGH

SEQ ID NO: 18401 - protein, 7 aa, synthetic construct
MLDGTSA

SEQ ID NO: 18402 - protein, 7 aa, synthetic construct
HAPTDRR

SEQ ID NO: 18403 - protein, 7 aa, synthetic construct
LRNGNAA

SEQ ID NO: 18404 - protein, 7 aa, synthetic construct
DMGAGSW

SEQ ID NO: 18405 - protein, 7 aa, synthetic construct
QEKWGKG

SEQ ID NO: 18406 - protein, 7 aa, synthetic construct
YFSGETR

SEQ ID NO: 18407 - protein, 7 aa, synthetic construct
FIEARRN

SEQ ID NO: 18408 - protein, 7 aa, synthetic construct
GSMSSTW

SEQ ID NO: 18409 - protein, 7 aa, synthetic construct
SDGSSKW

SEQ ID NO: 18410 - protein, 7 aa, synthetic construct
GARSADY

SEQ ID NO: 18411 - protein, 7 aa, synthetic construct
VFRTQGG

SEQ ID NO: 18412 - protein, 7 aa, synthetic construct
VIYPSGA

SEQ ID NO: 18413 - protein, 7 aa, synthetic construct
KLVESDG

SEQ ID NO: 18414 - protein, 7 aa, synthetic construct
SFDRQRS

SEQ ID NO: 18415 - protein, 7 aa, synthetic construct
RFAHKEN

SEQ ID NO: 18416 - protein, 7 aa, synthetic construct
RYPDRAL

SEQ ID NO: 18417 - protein, 7 aa, synthetic construct
YSALQRN

SEQ ID NO: 18418 - protein, 7 aa, synthetic construct
NSEFMSY

SEQ ID NO: 18419 - protein, 7 aa, synthetic construct
GQGNSVW

SEQ ID NO: 18420 - protein, 7 aa, synthetic construct
VDEWSTF

SEQ ID NO: 18421 - protein, 7 aa, synthetic construct
YYAGQRE

SEQ ID NO: 18422 - protein, 7 aa, synthetic construct
CQKVGMI

SEQ ID NO: 18423 - protein, 7 aa, synthetic construct
RDGQSSY

SEQ ID NO: 18424 - protein, 7 aa, synthetic construct
PLSTSNW

SEQ ID NO: 18425 - protein, 7 aa, synthetic construct
GCVHGGA

SEQ ID NO: 18426 - protein, 7 aa, synthetic construct
YECCKQT

SEQ ID NO: 18427 - protein, 7 aa, synthetic construct
RSEKGYH

SEQ ID NO: 18428 - protein, 7 aa, synthetic construct
WWHGVSA

SEQ ID NO: 18429 - protein, 7 aa, synthetic construct
AVIPSRG

SEQ ID NO: 18430 - protein, 7 aa, synthetic construct
TYTKSAV

SEQ ID NO: 18431 - protein, 7 aa, synthetic construct
REQMVSW

SEQ ID NO: 18432 - protein, 7 aa, synthetic construct
AYGSVRS

SEQ ID NO: 18433 - protein, 7 aa, synthetic construct
RLSESTW

SEQ ID NO: 18434 - protein, 7 aa, synthetic construct
DEEGALS

SEQ ID NO: 18435 - protein, 7 aa, synthetic construct
KHDSSRY

SEQ ID NO: 18436 - protein, 7 aa, synthetic construct
WRSGNMG

SEQ ID NO: 18437 - protein, 7 aa, synthetic construct
KYDSSSW

SEQ ID NO: 18438 - protein, 7 aa, synthetic construct
LWDGTFA

SEQ ID NO: 18439 - protein, 7 aa, synthetic construct
RAPDTRW

SEQ ID NO: 18440 - protein, 7 aa, synthetic construct
YRPDGYG

SEQ ID NO: 18441 - protein, 7 aa, synthetic construct
VHSDRSW

SEQ ID NO: 18442 - protein, 7 aa, synthetic construct
YLGQPYF

SEQ ID NO: 18443 - protein, 7 aa, synthetic construct
ILHDSSE

SEQ ID NO: 18444 - protein, 7 aa, synthetic construct
TVERARF

SEQ ID NO: 18445 - protein, 7 aa, synthetic construct
YFSGVAA

SEQ ID NO: 18446 - protein, 7 aa, synthetic construct
FFTGIAD

SEQ ID NO: 18447 - protein, 7 aa, synthetic construct
WQSANGV

SEQ ID NO: 18448 - protein, 7 aa, synthetic construct
VDDFNSF

SEQ ID NO: 18449 - protein, 7 aa, synthetic construct
KAFHAGA

SEQ ID NO: 18450 - protein, 7 aa, synthetic construct
RGGSYGS

SEQ ID NO: 18451 - protein, 7 aa, synthetic construct
TDAFCAP

SEQ ID NO: 18452 - protein, 7 aa, synthetic construct
WNAPHRA

SEQ ID NO: 18453 - protein, 7 aa, synthetic construct
CLGMCSE

SEQ ID NO: 18454 - protein, 7 aa, synthetic construct
TRPGSHV

SEQ ID NO: 18455 - protein, 7 aa, synthetic construct
TDAMSSW

SEQ ID NO: 18456 - protein, 7 aa, synthetic construct
HHPRMGL

SEQ ID NO: 18457 - protein, 7 aa, synthetic construct
YGVGTWS

SEQ ID NO: 18458 - protein, 7 aa, synthetic construct
WQKRPTE

SEQ ID NO: 18459 - protein, 7 aa, synthetic construct
QRYASPQ

SEQ ID NO: 18460 - protein, 7 aa, synthetic construct
LSRASDN

SEQ ID NO: 18461 - protein, 7 aa, synthetic construct
ADGSVRW

SEQ ID NO: 18462 - protein, 7 aa, synthetic construct
RVVNVMP

SEQ ID NO: 18463 - protein, 7 aa, synthetic construct
YPSGSAG

SEQ ID NO: 18464 - protein, 7 aa, synthetic construct
IKSSWHA

SEQ ID NO: 18465 - protein, 7 aa, synthetic construct
YTRLDND

SEQ ID NO: 18466 - protein, 7 aa, synthetic construct
YFAGVSD

SEQ ID NO: 18467 - protein, 7 aa, synthetic construct
NANFERR

SEQ ID NO: 18468 - protein, 7 aa, synthetic construct
WKPNSKS

SEQ ID NO: 18469 - protein, 7 aa, synthetic construct
YTRLNFD

SEQ ID NO: 18470 - protein, 7 aa, synthetic construct
VHKLSLN

SEQ ID NO: 18471 - protein, 7 aa, synthetic construct
GSYRGLG

SEQ ID NO: 18472 - protein, 7 aa, synthetic construct
FRSDRYG

SEQ ID NO: 18473 - protein, 7 aa, synthetic construct
GSWIPHG

SEQ ID NO: 18474 - protein, 7 aa, synthetic construct
RGGGISA

SEQ ID NO: 18475 - protein, 7 aa, synthetic construct
GQLRYDK

SEQ ID NO: 18476 - protein, 7 aa, synthetic construct
RGGTYHS

SEQ ID NO: 18477 - protein, 7 aa, synthetic construct
PFAVSIE

SEQ ID NO: 18478 - protein, 7 aa, synthetic construct
ENDQLPP

SEQ ID NO: 18479 - protein, 7 aa, synthetic construct
GLSDNRR

SEQ ID NO: 18480 - protein, 7 aa, synthetic construct
ALGREYR

SEQ ID NO: 18481 - protein, 7 aa, synthetic construct
VGGSRFS

SEQ ID NO: 18482 - protein, 7 aa, synthetic construct
LFRMRDG

SEQ ID NO: 18483 - protein, 7 aa, synthetic construct
FFVGHHD

SEQ ID NO: 18484 - protein, 7 aa, synthetic construct
TESTVYS

SEQ ID NO: 18485 - protein, 7 aa, synthetic construct
CVNRCVV

SEQ ID NO: 18486 - protein, 7 aa, synthetic construct
NYSHIKS

SEQ ID NO: 18487 - protein, 7 aa, synthetic construct
WDRMSAK

SEQ ID NO: 18488 - protein, 7 aa, synthetic construct
DRASSSW

SEQ ID NO: 18489 - protein, 7 aa, synthetic construct
REDSSMW

SEQ ID NO: 18490 - protein, 7 aa, synthetic construct
VAWQGTG

SEQ ID NO: 18491 - protein, 7 aa, synthetic construct
YGTHRFT

SEQ ID NO: 18492 - protein, 7 aa, synthetic construct
TRCVGEI

SEQ ID NO: 18493 - protein, 7 aa, synthetic construct
LEDHLRW

SEQ ID NO: 18494 - protein, 7 aa, synthetic construct
VYGTSRS

SEQ ID NO: 18495 - protein, 7 aa, synthetic construct
WQGGQRG

SEQ ID NO: 18496 - protein, 7 aa, synthetic construct
VPPLFAV

SEQ ID NO: 18497 - protein, 7 aa, synthetic construct
TVTHHRL

SEQ ID NO: 18498 - protein, 7 aa, synthetic construct
GGPGTWN

SEQ ID NO: 18499 - protein, 7 aa, synthetic construct
DRWGSSA

SEQ ID NO: 18500 - protein, 7 aa, synthetic construct
SGYRAQA

SEQ ID NO: 18501 - protein, 7 aa, synthetic construct
DLSSLEW

SEQ ID NO: 18502 - protein, 7 aa, synthetic construct
RGDYQVF

SEQ ID NO: 18503 - protein, 7 aa, synthetic construct
FNPPAMY

SEQ ID NO: 18504 - protein, 7 aa, synthetic construct
VFDNRRS

SEQ ID NO: 18505 - protein, 7 aa, synthetic construct
GWRGVSA

SEQ ID NO: 18506 - protein, 7 aa, synthetic construct
WWQGITE

SEQ ID NO: 18507 - protein, 7 aa, synthetic construct
RCCGHFY

SEQ ID NO: 18508 - protein, 7 aa, synthetic construct
GARTPTW

SEQ ID NO: 18509 - protein, 7 aa, synthetic construct
YFGARRE

SEQ ID NO: 18510 - protein, 7 aa, synthetic construct
WSSNRSS

SEQ ID NO: 18511 - protein, 7 aa, synthetic construct
WWTGEVE

SEQ ID NO: 18512 - protein, 7 aa, synthetic construct
VGSSKCV

SEQ ID NO: 18513 - protein, 7 aa, synthetic construct
TDDWSTW

SEQ ID NO: 18514 - protein, 7 aa, synthetic construct
TWSGMNA

SEQ ID NO: 18515 - protein, 7 aa, synthetic construct
VSTSKHW

SEQ ID NO: 18516 - protein, 7 aa, synthetic construct
NRYGAAH

SEQ ID NO: 18517 - protein, 7 aa, synthetic construct
WNASYKQ

SEQ ID NO: 18518 - protein, 7 aa, synthetic construct
TDEWSPY

SEQ ID NO: 18519 - protein, 7 aa, synthetic construct
GQVGRYN

SEQ ID NO: 18520 - protein, 7 aa, synthetic construct
CKPCTAN

SEQ ID NO: 18521 - protein, 7 aa, synthetic construct
GGRGYNM

SEQ ID NO: 18522 - protein, 7 aa, synthetic construct
GVANTMW

SEQ ID NO: 18523 - protein, 7 aa, synthetic construct
LLDSRDW

SEQ ID NO: 18524 - protein, 7 aa, synthetic construct
HKEGCGL

SEQ ID NO: 18525 - protein, 7 aa, synthetic construct
DLQAHDW

SEQ ID NO: 18526 - protein, 7 aa, synthetic construct
SGITCCP

SEQ ID NO: 18527 - protein, 7 aa, synthetic construct
RGVYRSE

SEQ ID NO: 18528 - protein, 7 aa, synthetic construct
GGFGADK

SEQ ID NO: 18529 - protein, 7 aa, synthetic construct
YSRVDYN

SEQ ID NO: 18530 - protein, 7 aa, synthetic construct
GTHTSAC

SEQ ID NO: 18531 - protein, 7 aa, synthetic construct
GSPSSSW

SEQ ID NO: 18532 - protein, 7 aa, synthetic construct
WWSGVSV

SEQ ID NO: 18533 - protein, 7 aa, synthetic construct
SRFRVTD

SEQ ID NO: 18534 - protein, 7 aa, synthetic construct
VNEYSRY

SEQ ID NO: 18535 - protein, 7 aa, synthetic construct
YFTAQLD

SEQ ID NO: 18536 - protein, 7 aa, synthetic construct
CESVCLY

SEQ ID NO: 18537 - protein, 7 aa, synthetic construct
CVQVKSG

SEQ ID NO: 18538 - protein, 7 aa, synthetic construct
WADARRT

SEQ ID NO: 18539 - protein, 7 aa, synthetic construct
YHSRPFA

SEQ ID NO: 18540 - protein, 7 aa, synthetic construct
SQCTSSP

SEQ ID NO: 18541 - protein, 7 aa, synthetic construct
ISEFLGW

SEQ ID NO: 18542 - protein, 7 aa, synthetic construct
IDEWASY

SEQ ID NO: 18543 - protein, 7 aa, synthetic construct
LIASVSA

SEQ ID NO: 18544 - protein, 7 aa, synthetic construct
LLSDVKW

SEQ ID NO: 18545 - protein, 7 aa, synthetic construct
SGSRFNS

SEQ ID NO: 18546 - protein, 7 aa, synthetic construct
SGNRGVW

SEQ ID NO: 18547 - protein, 7 aa, synthetic construct
DKVPARF

SEQ ID NO: 18548 - protein, 7 aa, synthetic construct
IERRGWD

SEQ ID NO: 18549 - protein, 7 aa, synthetic construct
SWLKDDV

SEQ ID NO: 18550 - protein, 7 aa, synthetic construct
RGREFRE

SEQ ID NO: 18551 - protein, 7 aa, synthetic construct
HGSDRRF

SEQ ID NO: 18552 - protein, 7 aa, synthetic construct
TPGNTSS

SEQ ID NO: 18553 - protein, 7 aa, synthetic construct
CDGSCKA

SEQ ID NO: 18554 - protein, 7 aa, synthetic construct
GTRPSEP

SEQ ID NO: 18555 - protein, 7 aa, synthetic construct
SKYHGSG

SEQ ID NO: 18556 - protein, 7 aa, synthetic construct
ARYSTGA

SEQ ID NO: 18557 - protein, 7 aa, synthetic construct
QGNGSFI

SEQ ID NO: 18558 - protein, 7 aa, synthetic construct
GGEGSSW

SEQ ID NO: 18559 - protein, 7 aa, synthetic construct
CCKGQPM

SEQ ID NO: 18560 - protein, 7 aa, synthetic construct
VFRGHVG

SEQ ID NO: 18561 - protein, 7 aa, synthetic construct
KRDGTSA

SEQ ID NO: 18562 - protein, 7 aa, synthetic construct
FPGSICV

SEQ ID NO: 18563 - protein, 7 aa, synthetic construct
NGDSGKW

SEQ ID NO: 18564 - protein, 7 aa, synthetic construct
NFGPRAT

SEQ ID NO: 18565 - protein, 7 aa, synthetic construct
CEDVCHG

SEQ ID NO: 18566 - protein, 7 aa, synthetic construct
TLSTNGR

SEQ ID NO: 18567 - protein, 7 aa, synthetic construct
LSDFKIY

SEQ ID NO: 18568 - protein, 7 aa, synthetic construct
DVCCTRV

SEQ ID NO: 18569 - protein, 7 aa, synthetic construct
GSMTSSW

SEQ ID NO: 18570 - protein, 7 aa, synthetic construct
GNGEIRW

SEQ ID NO: 18571 - protein, 7 aa, synthetic construct
DSVVHLR

SEQ ID NO: 18572 - protein, 7 aa, synthetic construct
EYKTYGK

SEQ ID NO: 18573 - protein, 7 aa, synthetic construct
RALDGWD

SEQ ID NO: 18574 - protein, 7 aa, synthetic construct
GSGDSLW

SEQ ID NO: 18575 - protein, 7 aa, synthetic construct
QGQPSKW

SEQ ID NO: 18576 - protein, 7 aa, synthetic construct
GGSSSTW

SEQ ID NO: 18577 - protein, 7 aa, synthetic construct
GSYQNTR

SEQ ID NO: 18578 - protein, 7 aa, synthetic construct
MWKDKSN

SEQ ID NO: 18579 - protein, 7 aa, synthetic construct
GSPGSHW

SEQ ID NO: 18580 - protein, 7 aa, synthetic construct
VHRLQLD

SEQ ID NO: 18581 - protein, 7 aa, synthetic construct
ERPSSKY

SEQ ID NO: 18582 - protein, 7 aa, synthetic construct
GGNGVSW

SEQ ID NO: 18583 - protein, 7 aa, synthetic construct
YHGKYQL

SEQ ID NO: 18584 - protein, 7 aa, synthetic construct
FMRGMGS

SEQ ID NO: 18585 - protein, 7 aa, synthetic construct
REGSSSW

SEQ ID NO: 18586 - protein, 7 aa, synthetic construct
PSWGDHL

SEQ ID NO: 18587 - protein, 7 aa, synthetic construct
FSKEWRP

SEQ ID NO: 18588 - protein, 7 aa, synthetic construct
VEFEMSY

SEQ ID NO: 18589 - protein, 7 aa, synthetic construct
DDVVSRR

SEQ ID NO: 18590 - protein, 7 aa, synthetic construct
VFRSVEK

SEQ ID NO: 18591 - protein, 7 aa, synthetic construct
LTRLSPD

SEQ ID NO: 18592 - protein, 7 aa, synthetic construct
NWARSIE

SEQ ID NO: 18593 - protein, 7 aa, synthetic construct
DMGDHGW

SEQ ID NO: 18594 - protein, 7 aa, synthetic construct
RESAVSW

SEQ ID NO: 18595 - protein, 7 aa, synthetic construct
NLESHVW

SEQ ID NO: 18596 - protein, 7 aa, synthetic construct
YIKYDTG

SEQ ID NO: 18597 - protein, 7 aa, synthetic construct
WWSGVIE

SEQ ID NO: 18598 - protein, 7 aa, synthetic construct
GMSIEAR

SEQ ID NO: 18599 - protein, 7 aa, synthetic construct
RDAEVFP

SEQ ID NO: 18600 - protein, 7 aa, synthetic construct
EKKFVPA

SEQ ID NO: 18601 - protein, 7 aa, synthetic construct
LVKSTNY

SEQ ID NO: 18602 - protein, 7 aa, synthetic construct
DWAVSIE

SEQ ID NO: 18603 - protein, 7 aa, synthetic construct
WVRERAS

SEQ ID NO: 18604 - protein, 7 aa, synthetic construct
LRDGTYA

SEQ ID NO: 18605 - protein, 7 aa, synthetic construct
DWTGNAA

SEQ ID NO: 18606 - protein, 7 aa, synthetic construct
EVDGLRW

SEQ ID NO: 18607 - protein, 7 aa, synthetic construct
VWSANGI

SEQ ID NO: 18608 - protein, 7 aa, synthetic construct
PLADRMW

SEQ ID NO: 18609 - protein, 7 aa, synthetic construct
CGDIGSV

SEQ ID NO: 18610 - protein, 7 aa, synthetic construct
LSRLGID

SEQ ID NO: 18611 - protein, 7 aa, synthetic construct
RYRDGAA

SEQ ID NO: 18612 - protein, 7 aa, synthetic construct
IESSSGR

SEQ ID NO: 18613 - protein, 7 aa, synthetic construct
DVMRSRS

SEQ ID NO: 18614 - protein, 7 aa, synthetic construct
HDGSSQW

SEQ ID NO: 18615 - protein, 7 aa, synthetic construct
NGFKDRG

SEQ ID NO: 18616 - protein, 7 aa, synthetic construct
YFTGMTV

SEQ ID NO: 18617 - protein, 7 aa, synthetic construct
CATRLAH

SEQ ID NO: 18618 - protein, 7 aa, synthetic construct
GLGHQQC

SEQ ID NO: 18619 - protein, 7 aa, synthetic construct
ERTSVAA

SEQ ID NO: 18620 - protein, 7 aa, synthetic construct
CGSGCSI

SEQ ID NO: 18621 - protein, 7 aa, synthetic construct
CTISRCP

SEQ ID NO: 18622 - protein, 7 aa, synthetic construct
RTSMHPG

SEQ ID NO: 18623 - protein, 7 aa, synthetic construct
CLAKHVA

SEQ ID NO: 18624 - protein, 7 aa, synthetic construct
YSRTGQG

SEQ ID NO: 18625 - protein, 7 aa, synthetic construct
ETDSGYW

SEQ ID NO: 18626 - protein, 7 aa, synthetic construct
YSTNWKS

SEQ ID NO: 18627 - protein, 7 aa, synthetic construct
WVRASAS

SEQ ID NO: 18628 - protein, 7 aa, synthetic construct
RRDGSPA

SEQ ID NO: 18629 - protein, 7 aa, synthetic construct
GDTVVRW

SEQ ID NO: 18630 - protein, 7 aa, synthetic construct
VFRSTPA

SEQ ID NO: 18631 - protein, 7 aa, synthetic construct
SFKRANE

SEQ ID NO: 18632 - protein, 7 aa, synthetic construct
CDSVCAY

SEQ ID NO: 18633 - protein, 7 aa, synthetic construct
GCSGNSC

SEQ ID NO: 18634 - protein, 7 aa, synthetic construct
FPLRRVD

SEQ ID NO: 18635 - protein, 7 aa, synthetic construct
NLGSSTW

SEQ ID NO: 18636 - protein, 7 aa, synthetic construct
LARLAYD

SEQ ID NO: 18637 - protein, 7 aa, synthetic construct
ACRHNPA

SEQ ID NO: 18638 - protein, 7 aa, synthetic construct
SWKSTSA

SEQ ID NO: 18639 - protein, 7 aa, synthetic construct
AGPDYGW

SEQ ID NO: 18640 - protein, 7 aa, synthetic construct
APPDVRW

SEQ ID NO: 18641 - protein, 7 aa, synthetic construct
VLSSTTW

SEQ ID NO: 18642 - protein, 7 aa, synthetic construct
RLYDTFA

SEQ ID NO: 18643 - protein, 7 aa, synthetic construct
WAGAGRT

SEQ ID NO: 18644 - protein, 7 aa, synthetic construct
QYARQNH

SEQ ID NO: 18645 - protein, 7 aa, synthetic construct
TRYKPTD

SEQ ID NO: 18646 - protein, 7 aa, synthetic construct
NVGKANC

SEQ ID NO: 18647 - protein, 7 aa, synthetic construct
VGKYAVH

SEQ ID NO: 18648 - protein, 7 aa, synthetic construct
VGTRAAW

SEQ ID NO: 18649 - protein, 7 aa, synthetic construct
LGDAVCR

SEQ ID NO: 18650 - protein, 7 aa, synthetic construct
AHNRSTY

SEQ ID NO: 18651 - protein, 7 aa, synthetic construct
YVAGCKE

SEQ ID NO: 18652 - protein, 7 aa, synthetic construct
VGINCKE

SEQ ID NO: 18653 - protein, 7 aa, synthetic construct
KGVYAHG

SEQ ID NO: 18654 - protein, 7 aa, synthetic construct
GGPGYSR

SEQ ID NO: 18655 - protein, 7 aa, synthetic construct
NAGVFTG

SEQ ID NO: 18656 - protein, 7 aa, synthetic construct
TLGSPDR

SEQ ID NO: 18657 - protein, 7 aa, synthetic construct
YWQGLAS

SEQ ID NO: 18658 - protein, 7 aa, synthetic construct
GATVYRG

SEQ ID NO: 18659 - protein, 7 aa, synthetic construct
RGDNIFP

SEQ ID NO: 18660 - protein, 7 aa, synthetic construct
YVRHDTL

SEQ ID NO: 18661 - protein, 7 aa, synthetic construct
GSGMNAW

SEQ ID NO: 18662 - protein, 7 aa, synthetic construct
SRDEWRD

SEQ ID NO: 18663 - protein, 7 aa, synthetic construct
LARTALN

SEQ ID NO: 18664 - protein, 7 aa, synthetic construct
RLAGECN

SEQ ID NO: 18665 - protein, 7 aa, synthetic construct
LLSANTW

SEQ ID NO: 18666 - protein, 7 aa, synthetic construct
DLASMVW

SEQ ID NO: 18667 - protein, 7 aa, synthetic construct
NYAKSQN

SEQ ID NO: 18668 - protein, 7 aa, synthetic construct
WRGNATV

SEQ ID NO: 18669 - protein, 7 aa, synthetic construct
AYNGPRA

SEQ ID NO: 18670 - protein, 7 aa, synthetic construct
CTRVVVD

SEQ ID NO: 18671 - protein, 7 aa, synthetic construct
FDEHEPP

SEQ ID NO: 18672 - protein, 7 aa, synthetic construct
PHLHRGA

SEQ ID NO: 18673 - protein, 7 aa, synthetic construct
YFTGVVG

SEQ ID NO: 18674 - protein, 7 aa, synthetic construct
WSGTRMQ

SEQ ID NO: 18675 - protein, 7 aa, synthetic construct
WSVKRET

SEQ ID NO: 18676 - protein, 7 aa, synthetic construct
LSKAATN

SEQ ID NO: 18677 - protein, 7 aa, synthetic construct
YFSGVSD

SEQ ID NO: 18678 - protein, 7 aa, synthetic construct
DLESARW

SEQ ID NO: 18679 - protein, 7 aa, synthetic construct
HFAGTWD

SEQ ID NO: 18680 - protein, 7 aa, synthetic construct
VPVGCCG

SEQ ID NO: 18681 - protein, 7 aa, synthetic construct
GLGASRY

SEQ ID NO: 18682 - protein, 7 aa, synthetic construct
VTDTNGV

SEQ ID NO: 18683 - protein, 7 aa, synthetic construct
YTRSDHN

SEQ ID NO: 18684 - protein, 7 aa, synthetic construct
VRSVNGV

SEQ ID NO: 18685 - protein, 7 aa, synthetic construct
WRAVRAE

SEQ ID NO: 18686 - protein, 7 aa, synthetic construct
GSGTNAW

SEQ ID NO: 18687 - protein, 7 aa, synthetic construct
FSERRGL

SEQ ID NO: 18688 - protein, 7 aa, synthetic construct
VLASVSW

SEQ ID NO: 18689 - protein, 7 aa, synthetic construct
WRGGGGS

SEQ ID NO: 18690 - protein, 7 aa, synthetic construct
STYDAIV

SEQ ID NO: 18691 - protein, 7 aa, synthetic construct
YHRTASL

SEQ ID NO: 18692 - protein, 7 aa, synthetic construct
RDNGYPW

SEQ ID NO: 18693 - protein, 7 aa, synthetic construct
LSRLGPI

SEQ ID NO: 18694 - protein, 7 aa, synthetic construct
DLRVQTW

SEQ ID NO: 18695 - protein, 7 aa, synthetic construct
TYRDGGR

SEQ ID NO: 18696 - protein, 7 aa, synthetic construct
AGGSRDW

SEQ ID NO: 18697 - protein, 7 aa, synthetic construct
YFSGAHS

SEQ ID NO: 18698 - protein, 7 aa, synthetic construct
FMDGTAA

SEQ ID NO: 18699 - protein, 7 aa, synthetic construct
LVRFENV

SEQ ID NO: 18700 - protein, 7 aa, synthetic construct
GSATSGW

SEQ ID NO: 18701 - protein, 7 aa, synthetic construct
RCGECGV

SEQ ID NO: 18702 - protein, 7 aa, synthetic construct
WGSSRAT

SEQ ID NO: 18703 - protein, 7 aa, synthetic construct
GDGESRW

SEQ ID NO: 18704 - protein, 7 aa, synthetic construct
LSRAANN

SEQ ID NO: 18705 - protein, 7 aa, synthetic construct
AMLSSTW

SEQ ID NO: 18706 - protein, 7 aa, synthetic construct
SAYRSGT

SEQ ID NO: 18707 - protein, 7 aa, synthetic construct
SLGDRTW

SEQ ID NO: 18708 - protein, 7 aa, synthetic construct
RDGSSSW

SEQ ID NO: 18709 - protein, 7 aa, synthetic construct
FRLPRET

SEQ ID NO: 18710 - protein, 7 aa, synthetic construct
RMDSAAW

SEQ ID NO: 18711 - protein, 7 aa, synthetic construct
WINGMVA

SEQ ID NO: 18712 - protein, 7 aa, synthetic construct
SLSDRTW

SEQ ID NO: 18713 - protein, 7 aa, synthetic construct
VSEFEIF

SEQ ID NO: 18714 - protein, 7 aa, synthetic construct
WPNGVNG

SEQ ID NO: 18715 - protein, 7 aa, synthetic construct
GDGASRY

SEQ ID NO: 18716 - protein, 7 aa, synthetic construct
RYVNKES

SEQ ID NO: 18717 - protein, 7 aa, synthetic construct
RDQFSTY

SEQ ID NO: 18718 - protein, 7 aa, synthetic construct
GGMLVER

SEQ ID NO: 18719 - protein, 7 aa, synthetic construct
IASEGAG

SEQ ID NO: 18720 - protein, 7 aa, synthetic construct
AITAIGC

SEQ ID NO: 18721 - protein, 7 aa, synthetic construct
YYSGQLA

SEQ ID NO: 18722 - protein, 7 aa, synthetic construct
GTCGVEK

SEQ ID NO: 18723 - protein, 7 aa, synthetic construct
NHLHARS

SEQ ID NO: 18724 - protein, 7 aa, synthetic construct
SASALSW

SEQ ID NO: 18725 - protein, 7 aa, synthetic construct
RWLKNEP

SEQ ID NO: 18726 - protein, 7 aa, synthetic construct
YVRSDST

SEQ ID NO: 18727 - protein, 7 aa, synthetic construct
CVTGCRD

SEQ ID NO: 18728 - protein, 7 aa, synthetic construct
FFSGAIE

SEQ ID NO: 18729 - protein, 7 aa, synthetic construct
TDDFLAW

SEQ ID NO: 18730 - protein, 7 aa, synthetic construct
FGGVSAY

SEQ ID NO: 18731 - protein, 7 aa, synthetic construct
CCGSKNA

SEQ ID NO: 18732 - protein, 7 aa, synthetic construct
WYSGVLS

SEQ ID NO: 18733 - protein, 7 aa, synthetic construct
DRHPDRR

SEQ ID NO: 18734 - protein, 7 aa, synthetic construct
YSRLNGS

SEQ ID NO: 18735 - protein, 7 aa, synthetic construct
NEDFVAW

SEQ ID NO: 18736 - protein, 7 aa, synthetic construct
SRSYGSG

SEQ ID NO: 18737 - protein, 7 aa, synthetic construct
WFSGEVA

SEQ ID NO: 18738 - protein, 7 aa, synthetic construct
RDHHPRV

SEQ ID NO: 18739 - protein, 7 aa, synthetic construct
VEATNGV

SEQ ID NO: 18740 - protein, 7 aa, synthetic construct
RAGARYD

SEQ ID NO: 18741 - protein, 7 aa, synthetic construct
IEIYKAN

SEQ ID NO: 18742 - protein, 7 aa, synthetic construct
HWMGNKE

SEQ ID NO: 18743 - protein, 7 aa, synthetic construct
VYGSSGR

SEQ ID NO: 18744 - protein, 7 aa, synthetic construct
GSGASAW

SEQ ID NO: 18745 - protein, 7 aa, synthetic construct
GSDHVMW

SEQ ID NO: 18746 - protein, 7 aa, synthetic construct
GSYRSVG

SEQ ID NO: 18747 - protein, 7 aa, synthetic construct
DADEVHG

SEQ ID NO: 18748 - protein, 7 aa, synthetic construct
GIETSKW

SEQ ID NO: 18749 - protein, 7 aa, synthetic construct
GSEGSTW

SEQ ID NO: 18750 - protein, 7 aa, synthetic construct
TTVPTGL

SEQ ID NO: 18751 - protein, 7 aa, synthetic construct
FNSTVAY

SEQ ID NO: 18752 - protein, 7 aa, synthetic construct
CRHPVTA

SEQ ID NO: 18753 - protein, 7 aa, synthetic construct
GDNAFGG

SEQ ID NO: 18754 - protein, 7 aa, synthetic construct
YWRGTMD

SEQ ID NO: 18755 - protein, 7 aa, synthetic construct
ATSALEN

SEQ ID NO: 18756 - protein, 7 aa, synthetic construct
GGGASTW

SEQ ID NO: 18757 - protein, 7 aa, synthetic construct
DENAFPY

SEQ ID NO: 18758 - protein, 7 aa, synthetic construct
CLKNERG

SEQ ID NO: 18759 - protein, 7 aa, synthetic construct
YMSDRTW

SEQ ID NO: 18760 - protein, 7 aa, synthetic construct
TNCAINA

SEQ ID NO: 18761 - protein, 7 aa, synthetic construct
NMSQGSW

SEQ ID NO: 18762 - protein, 7 aa, synthetic construct
YGAMCLE

SEQ ID NO: 18763 - protein, 7 aa, synthetic construct
GSSTSHW

SEQ ID NO: 18764 - protein, 7 aa, synthetic construct
VMNASDS

SEQ ID NO: 18765 - protein, 7 aa, synthetic construct
VNDYLSY

SEQ ID NO: 18766 - protein, 7 aa, synthetic construct
LTRLSPV

SEQ ID NO: 18767 - protein, 7 aa, synthetic construct
KDSYHVF

SEQ ID NO: 18768 - protein, 7 aa, synthetic construct
WSLERTW

SEQ ID NO: 18769 - protein, 7 aa, synthetic construct
LFDGTES

SEQ ID NO: 18770 - protein, 7 aa, synthetic construct
WTSSNVA

SEQ ID NO: 18771 - protein, 7 aa, synthetic construct
REDTSTW

SEQ ID NO: 18772 - protein, 7 aa, synthetic construct
LRTDCCV

SEQ ID NO: 18773 - protein, 7 aa, synthetic construct
VHSFNGV

SEQ ID NO: 18774 - protein, 7 aa, synthetic construct
AQGGQSF

SEQ ID NO: 18775 - protein, 7 aa, synthetic construct
GVERAKW

SEQ ID NO: 18776 - protein, 7 aa, synthetic construct
FGKGEWA

SEQ ID NO: 18777 - protein, 7 aa, synthetic construct
KMDAVSW

SEQ ID NO: 18778 - protein, 7 aa, synthetic construct
WFTGTVA

SEQ ID NO: 18779 - protein, 7 aa, synthetic construct
GGGSSLW

SEQ ID NO: 18780 - protein, 7 aa, synthetic construct
YFTGAPD

SEQ ID NO: 18781 - protein, 7 aa, synthetic construct
WTGTKDP

SEQ ID NO: 18782 - protein, 7 aa, synthetic construct
HTMRGGY

SEQ ID NO: 18783 - protein, 7 aa, synthetic construct
VDDDVWG

SEQ ID NO: 18784 - protein, 7 aa, synthetic construct
LARSSTN

SEQ ID NO: 18785 - protein, 7 aa, synthetic construct
GVTTSGW

SEQ ID NO: 18786 - protein, 7 aa, synthetic construct
PEYGKSV

SEQ ID NO: 18787 - protein, 7 aa, synthetic construct
YFSGYTS

SEQ ID NO: 18788 - protein, 7 aa, synthetic construct
DARVVRH

SEQ ID NO: 18789 - protein, 7 aa, synthetic construct
SDEYSTY

SEQ ID NO: 18790 - protein, 7 aa, synthetic construct
LFSGEAA

SEQ ID NO: 18791 - protein, 7 aa, synthetic construct
WQSHTRN

SEQ ID NO: 18792 - protein, 7 aa, synthetic construct
CVSACER

SEQ ID NO: 18793 - protein, 7 aa, synthetic construct
YFTDIRE

SEQ ID NO: 18794 - protein, 7 aa, synthetic construct
PVASRDW

SEQ ID NO: 18795 - protein, 7 aa, synthetic construct
TYRGQGG

SEQ ID NO: 18796 - protein, 7 aa, synthetic construct
WSRDAQK

SEQ ID NO: 18797 - protein, 7 aa, synthetic construct
FGGLCCS

SEQ ID NO: 18798 - protein, 7 aa, synthetic construct
AGSIDGS

SEQ ID NO: 18799 - protein, 7 aa, synthetic construct
IPDTCCV

SEQ ID NO: 18800 - protein, 7 aa, synthetic construct
TTDYVMY

SEQ ID NO: 18801 - protein, 7 aa, synthetic construct
YAIECSK

SEQ ID NO: 18802 - protein, 7 aa, synthetic construct
ISWSQVD

SEQ ID NO: 18803 - protein, 7 aa, synthetic construct
TDGTSMW

SEQ ID NO: 18804 - protein, 7 aa, synthetic construct
VMISASW

SEQ ID NO: 18805 - protein, 7 aa, synthetic construct
KHDFTGS

SEQ ID NO: 18806 - protein, 7 aa, synthetic construct
TVGTTML

SEQ ID NO: 18807 - protein, 7 aa, synthetic construct
SYGKVMV

SEQ ID NO: 18808 - protein, 7 aa, synthetic construct
GQWRTSA

SEQ ID NO: 18809 - protein, 7 aa, synthetic construct
GIVSVSW

SEQ ID NO: 18810 - protein, 7 aa, synthetic construct
DAVLHLR

SEQ ID NO: 18811 - protein, 7 aa, synthetic construct
VGRDNLT

SEQ ID NO: 18812 - protein, 7 aa, synthetic construct
IASKGAG

SEQ ID NO: 18813 - protein, 7 aa, synthetic construct
VASHGAG

SEQ ID NO: 18814 - protein, 7 aa, synthetic construct
DKRQPGW

SEQ ID NO: 18815 - protein, 7 aa, synthetic construct
APVAQDG

SEQ ID NO: 18816 - protein, 7 aa, synthetic construct
KHDEGNG

SEQ ID NO: 18817 - protein, 7 aa, synthetic construct
QYRASAA

SEQ ID NO: 18818 - protein, 7 aa, synthetic construct
WSSKAEE

SEQ ID NO: 18819 - protein, 7 aa, synthetic construct
YDVGTWS

SEQ ID NO: 18820 - protein, 7 aa, synthetic construct
IGALGWD

SEQ ID NO: 18821 - protein, 7 aa, synthetic construct
CNKPMTA

SEQ ID NO: 18822 - protein, 7 aa, synthetic construct
AGSFSRS

SEQ ID NO: 18823 - protein, 7 aa, synthetic construct
LHARGVD

SEQ ID NO: 18824 - protein, 7 aa, synthetic construct
IMSGHDW

SEQ ID NO: 18825 - protein, 7 aa, synthetic construct
GASSRNW

SEQ ID NO: 18826 - protein, 7 aa, synthetic construct
YFSARLD

SEQ ID NO: 18827 - protein, 7 aa, synthetic construct
SAPGTHC

SEQ ID NO: 18828 - protein, 7 aa, synthetic construct
KSSVNHD

SEQ ID NO: 18829 - protein, 7 aa, synthetic construct
RTADSFI

SEQ ID NO: 18830 - protein, 7 aa, synthetic construct
LPERLGS

SEQ ID NO: 18831 - protein, 7 aa, synthetic construct
VNSSNGR

SEQ ID NO: 18832 - protein, 7 aa, synthetic construct
YPNCPGV

SEQ ID NO: 18833 - protein, 7 aa, synthetic construct
ISLKCSE

SEQ ID NO: 18834 - protein, 7 aa, synthetic construct
VLDSVRW

SEQ ID NO: 18835 - protein, 7 aa, synthetic construct
VLSSKTW

SEQ ID NO: 18836 - protein, 7 aa, synthetic construct
NRELGSS

SEQ ID NO: 18837 - protein, 7 aa, synthetic construct
DSLPVDK

SEQ ID NO: 18838 - protein, 7 aa, synthetic construct
SYGNRTT

SEQ ID NO: 18839 - protein, 7 aa, synthetic construct
FTKSGPN

SEQ ID NO: 18840 - protein, 7 aa, synthetic construct
YSKLDSM

SEQ ID NO: 18841 - protein, 7 aa, synthetic construct
RTEGTFP

SEQ ID NO: 18842 - protein, 7 aa, synthetic construct
GERVDRR

SEQ ID NO: 18843 - protein, 7 aa, synthetic construct
VNSRWHA

SEQ ID NO: 18844 - protein, 7 aa, synthetic construct
GSIGALW

SEQ ID NO: 18845 - protein, 7 aa, synthetic construct
CKAQSCG

SEQ ID NO: 18846 - protein, 7 aa, synthetic construct
YWSGNAA

SEQ ID NO: 18847 - protein, 7 aa, synthetic construct
LMNDAYV

SEQ ID NO: 18848 - protein, 7 aa, synthetic construct
YVRHDVM

SEQ ID NO: 18849 - protein, 7 aa, synthetic construct
YFSGTNM

SEQ ID NO: 18850 - protein, 7 aa, synthetic construct
EPGERSG

SEQ ID NO: 18851 - protein, 7 aa, synthetic construct
AMSASNW

SEQ ID NO: 18852 - protein, 7 aa, synthetic construct
VWDANGV

SEQ ID NO: 18853 - protein, 7 aa, synthetic construct
CGGLCSS

SEQ ID NO: 18854 - protein, 7 aa, synthetic construct
WFSGHVE

SEQ ID NO: 18855 - protein, 7 aa, synthetic construct
KFDYSSI

SEQ ID NO: 18856 - protein, 7 aa, synthetic construct
VYAKSQV

SEQ ID NO: 18857 - protein, 7 aa, synthetic construct
LLSSATW

SEQ ID NO: 18858 - protein, 7 aa, synthetic construct
ARVEAFP

SEQ ID NO: 18859 - protein, 7 aa, synthetic construct
VEVARVR

SEQ ID NO: 18860 - protein, 7 aa, synthetic construct
VGTGPCG

SEQ ID NO: 18861 - protein, 7 aa, synthetic construct
YYSGTYV

SEQ ID NO: 18862 - protein, 7 aa, synthetic construct
NERGCCG

SEQ ID NO: 18863 - protein, 7 aa, synthetic construct
YFMGERE

SEQ ID NO: 18864 - protein, 7 aa, synthetic construct
NSPACKA

SEQ ID NO: 18865 - protein, 7 aa, synthetic construct
FFTGVLN

SEQ ID NO: 18866 - protein, 7 aa, synthetic construct
GGNGSSW

SEQ ID NO: 18867 - protein, 7 aa, synthetic construct
SAYRQGT

SEQ ID NO: 18868 - protein, 7 aa, synthetic construct
AGLDSRP

SEQ ID NO: 18869 - protein, 7 aa, synthetic construct
SDLRCCA

SEQ ID NO: 18870 - protein, 7 aa, synthetic construct
VVKQTAT

SEQ ID NO: 18871 - protein, 7 aa, synthetic construct
ACTTALI

SEQ ID NO: 18872 - protein, 7 aa, synthetic construct
LKYSETR

SEQ ID NO: 18873 - protein, 7 aa, synthetic construct
LTRVGLN

SEQ ID NO: 18874 - protein, 7 aa, synthetic construct
GGIASTW

SEQ ID NO: 18875 - protein, 7 aa, synthetic construct
GWSSAGK

SEQ ID NO: 18876 - protein, 7 aa, synthetic construct
IDDGSWA

SEQ ID NO: 18877 - protein, 7 aa, synthetic construct
CCKLETP

SEQ ID NO: 18878 - protein, 7 aa, synthetic construct
VVYDAFV

SEQ ID NO: 18879 - protein, 7 aa, synthetic construct
CGACSPN

SEQ ID NO: 18880 - protein, 7 aa, synthetic construct
GSATSTW

SEQ ID NO: 18881 - protein, 7 aa, synthetic construct
CRGPCTG

SEQ ID NO: 18882 - protein, 7 aa, synthetic construct
EIPPIRR

SEQ ID NO: 18883 - protein, 7 aa, synthetic construct
CKANRVE

SEQ ID NO: 18884 - protein, 7 aa, synthetic construct
IGTSREW

SEQ ID NO: 18885 - protein, 7 aa, synthetic construct
CNLSPTS

SEQ ID NO: 18886 - protein, 7 aa, synthetic construct
GRSTDNT

SEQ ID NO: 18887 - protein, 7 aa, synthetic construct
SEFYAAV

SEQ ID NO: 18888 - protein, 7 aa, synthetic construct
PGGTSGW

SEQ ID NO: 18889 - protein, 7 aa, synthetic construct
CCAGRTA

SEQ ID NO: 18890 - protein, 7 aa, synthetic construct
VDSTHGV

SEQ ID NO: 18891 - protein, 7 aa, synthetic construct
TVGGCCL

SEQ ID NO: 18892 - protein, 7 aa, synthetic construct
GSEGSLW

SEQ ID NO: 18893 - protein, 7 aa, synthetic construct
KYLHADF

SEQ ID NO: 18894 - protein, 7 aa, synthetic construct
VGGASTW

SEQ ID NO: 18895 - protein, 7 aa, synthetic construct
MEGCCAG

SEQ ID NO: 18896 - protein, 7 aa, synthetic construct
ERSAEAH

SEQ ID NO: 18897 - protein, 7 aa, synthetic construct
RSQDSFP

SEQ ID NO: 18898 - protein, 7 aa, synthetic construct
RPNESDW

SEQ ID NO: 18899 - protein, 7 aa, synthetic construct
RLESHGW

SEQ ID NO: 18900 - protein, 7 aa, synthetic construct
MVQQCCG

SEQ ID NO: 18901 - protein, 7 aa, synthetic construct
ARADGWG

SEQ ID NO: 18902 - protein, 7 aa, synthetic construct
WARGSNG

SEQ ID NO: 18903 - protein, 7 aa, synthetic construct
LARLGAN

SEQ ID NO: 18904 - protein, 7 aa, synthetic construct
HVTTHCS

SEQ ID NO: 18905 - protein, 7 aa, synthetic construct
WPFGESA

SEQ ID NO: 18906 - protein, 7 aa, synthetic construct
GRPPLKP

SEQ ID NO: 18907 - protein, 7 aa, synthetic construct
YSRLDSV

SEQ ID NO: 18908 - protein, 7 aa, synthetic construct
LTGQAEL

SEQ ID NO: 18909 - protein, 7 aa, synthetic construct
QGLGCCV

SEQ ID NO: 18910 - protein, 7 aa, synthetic construct
YSRVSEL

SEQ ID NO: 18911 - protein, 7 aa, synthetic construct
ECGGCRP

SEQ ID NO: 18912 - protein, 7 aa, synthetic construct
YVRSDGT

SEQ ID NO: 18913 - protein, 7 aa, synthetic construct
CDAEMRE

SEQ ID NO: 18914 - protein, 7 aa, synthetic construct
HRKVAYD

SEQ ID NO: 18915 - protein, 7 aa, synthetic construct
GTSAYRG

SEQ ID NO: 18916 - protein, 7 aa, synthetic construct
LWIEKPT

SEQ ID NO: 18917 - protein, 7 aa, synthetic construct
SRYKEVL

SEQ ID NO: 18918 - protein, 7 aa, synthetic construct
YSRLGVQ

SEQ ID NO: 18919 - protein, 7 aa, synthetic construct
YFTGSTD

SEQ ID NO: 18920 - protein, 7 aa, synthetic construct
NLSDVRW

SEQ ID NO: 18921 - protein, 7 aa, synthetic construct
KGNSGNL

SEQ ID NO: 18922 - protein, 7 aa, synthetic construct
WEGMKRN

SEQ ID NO: 18923 - protein, 7 aa, synthetic construct
GVGSYIV

SEQ ID NO: 18924 - protein, 7 aa, synthetic construct
PLSASSW

SEQ ID NO: 18925 - protein, 7 aa, synthetic construct
CEGVSRE

SEQ ID NO: 18926 - protein, 7 aa, synthetic construct
FPDGKRF

SEQ ID NO: 18927 - protein, 7 aa, synthetic construct
GWRAGGA

SEQ ID NO: 18928 - protein, 7 aa, synthetic construct
LCADPSR

SEQ ID NO: 18929 - protein, 7 aa, synthetic construct
RNFGRDG

SEQ ID NO: 18930 - protein, 7 aa, synthetic construct
MTTVVTA

SEQ ID NO: 18931 - protein, 7 aa, synthetic construct
FQTESSV

SEQ ID NO: 18932 - protein, 7 aa, synthetic construct
LLASATW

SEQ ID NO: 18933 - protein, 7 aa, synthetic construct
DLRTASW

SEQ ID NO: 18934 - protein, 7 aa, synthetic construct
GKGLEHI

SEQ ID NO: 18935 - protein, 7 aa, synthetic construct
QAQTSGW

SEQ ID NO: 18936 - protein, 7 aa, synthetic construct
NGDAGSW

SEQ ID NO: 18937 - protein, 7 aa, synthetic construct
YVRSDSA

SEQ ID NO: 18938 - protein, 7 aa, synthetic construct
CGGGCPS

SEQ ID NO: 18939 - protein, 7 aa, synthetic construct
WRTGLGG

SEQ ID NO: 18940 - protein, 7 aa, synthetic construct
ASTWNDP

SEQ ID NO: 18941 - protein, 7 aa, synthetic construct
EKLCCHG

SEQ ID NO: 18942 - protein, 7 aa, synthetic construct
CQLNCSV

SEQ ID NO: 18943 - protein, 7 aa, synthetic construct
TSGPPHR

SEQ ID NO: 18944 - protein, 7 aa, synthetic construct
SFDGTPS

SEQ ID NO: 18945 - protein, 7 aa, synthetic construct
AGAAKTW

SEQ ID NO: 18946 - protein, 7 aa, synthetic construct
DRVVSTV

SEQ ID NO: 18947 - protein, 7 aa, synthetic construct
RGGDSAW

SEQ ID NO: 18948 - protein, 7 aa, synthetic construct
GWGDWKD

SEQ ID NO: 18949 - protein, 7 aa, synthetic construct
TYSGDLP

SEQ ID NO: 18950 - protein, 7 aa, synthetic construct
VEYDWQD

SEQ ID NO: 18951 - protein, 7 aa, synthetic construct
KCTYEQN

SEQ ID NO: 18952 - protein, 7 aa, synthetic construct
PGGSGTW

SEQ ID NO: 18953 - protein, 7 aa, synthetic construct
LAHGPYN

SEQ ID NO: 18954 - protein, 7 aa, synthetic construct
RDPSSSW

SEQ ID NO: 18955 - protein, 7 aa, synthetic construct
SGPERSW

SEQ ID NO: 18956 - protein, 7 aa, synthetic construct
RSIDAYP

SEQ ID NO: 18957 - protein, 7 aa, synthetic construct
LWRGSDL

SEQ ID NO: 18958 - protein, 7 aa, synthetic construct
GSWCTVP

SEQ ID NO: 18959 - protein, 7 aa, synthetic construct
EVVSRAG

SEQ ID NO: 18960 - protein, 7 aa, synthetic construct
GGLCCPS

SEQ ID NO: 18961 - protein, 7 aa, synthetic construct
YMVDAFV

SEQ ID NO: 18962 - protein, 7 aa, synthetic construct
WNHSPAA

SEQ ID NO: 18963 - protein, 7 aa, synthetic construct
IVSDSRG

SEQ ID NO: 18964 - protein, 7 aa, synthetic construct
ASNTRFH

SEQ ID NO: 18965 - protein, 7 aa, synthetic construct
VSLEGRN

SEQ ID NO: 18966 - protein, 7 aa, synthetic construct
AHEFGPV

SEQ ID NO: 18967 - protein, 7 aa, synthetic construct
QLERGNW

SEQ ID NO: 18968 - protein, 7 aa, synthetic construct
YDLCSKR

SEQ ID NO: 18969 - protein, 7 aa, synthetic construct
VLTSQIW

SEQ ID NO: 18970 - protein, 7 aa, synthetic construct
GGPGVGW

SEQ ID NO: 18971 - protein, 7 aa, synthetic construct
VEEGWSW

SEQ ID NO: 18972 - protein, 7 aa, synthetic construct
VAGGSAG

SEQ ID NO: 18973 - protein, 7 aa, synthetic construct
CGALRIS

SEQ ID NO: 18974 - protein, 7 aa, synthetic construct
GLYAATL

SEQ ID NO: 18975 - protein, 7 aa, synthetic construct
EGASVLW

SEQ ID NO: 18976 - protein, 7 aa, synthetic construct
GGAERRY

SEQ ID NO: 18977 - protein, 7 aa, synthetic construct
GMFGRRD

SEQ ID NO: 18978 - protein, 7 aa, synthetic construct
DSEGMRY

SEQ ID NO: 18979 - protein, 7 aa, synthetic construct
GMADPTW

SEQ ID NO: 18980 - protein, 7 aa, synthetic construct
FYNQHSC

SEQ ID NO: 18981 - protein, 7 aa, synthetic construct
FVKYDPS

SEQ ID NO: 18982 - protein, 7 aa, synthetic construct
YQRYGTA

SEQ ID NO: 18983 - protein, 7 aa, synthetic construct
RGSDTYP

SEQ ID NO: 18984 - protein, 7 aa, synthetic construct
LLDSYDW

SEQ ID NO: 18985 - protein, 7 aa, synthetic construct
HSRAASF

SEQ ID NO: 18986 - protein, 7 aa, synthetic construct
GGAGSLW

SEQ ID NO: 18987 - protein, 7 aa, synthetic construct
TNVPSLN

SEQ ID NO: 18988 - protein, 7 aa, synthetic construct
VDLYVSW

SEQ ID NO: 18989 - protein, 7 aa, synthetic construct
SKGCCDS

SEQ ID NO: 18990 - protein, 7 aa, synthetic construct
FSDVDTL

SEQ ID NO: 18991 - protein, 7 aa, synthetic construct
YHKLSVV

SEQ ID NO: 18992 - protein, 7 aa, synthetic construct
GVYSMKT

SEQ ID NO: 18993 - protein, 7 aa, synthetic construct
LMSGEGP

SEQ ID NO: 18994 - protein, 7 aa, synthetic construct
GDAAGRR

SEQ ID NO: 18995 - protein, 7 aa, synthetic construct
TVYAGEP

SEQ ID NO: 18996 - protein, 7 aa, synthetic construct
LHRLGVS

SEQ ID NO: 18997 - protein, 7 aa, synthetic construct
CGTKCSL

SEQ ID NO: 18998 - protein, 7 aa, synthetic construct
WLADKGS

SEQ ID NO: 18999 - protein, 7 aa, synthetic construct
GGAHSNF

SEQ ID NO: 19000 - protein, 7 aa, synthetic construct
KFEMNAL

SEQ ID NO: 19001 - protein, 7 aa, synthetic construct
ADQRMRV

SEQ ID NO: 19002 - protein, 7 aa, synthetic construct
WWAGVVS

SEQ ID NO: 19003 - protein, 7 aa, synthetic construct
KFVAVSD

SEQ ID NO: 19004 - protein, 7 aa, synthetic construct
IYADRTW

SEQ ID NO: 19005 - protein, 7 aa, synthetic construct
QGEARSW

SEQ ID NO: 19006 - protein, 7 aa, synthetic construct
CGFACPS

SEQ ID NO: 19007 - protein, 7 aa, synthetic construct
YYSGVTH

SEQ ID NO: 19008 - protein, 7 aa, synthetic construct
YPSGSIG

SEQ ID NO: 19009 - protein, 7 aa, synthetic construct
VLSQSLW

SEQ ID NO: 19010 - protein, 7 aa, synthetic construct
QGGSGAW

SEQ ID NO: 19011 - protein, 7 aa, synthetic construct
FLASRDW

SEQ ID NO: 19012 - protein, 7 aa, synthetic construct
LMSPCCG

SEQ ID NO: 19013 - protein, 7 aa, synthetic construct
CSGACAA

SEQ ID NO: 19014 - protein, 7 aa, synthetic construct
ASESLRR

SEQ ID NO: 19015 - protein, 7 aa, synthetic construct
VQDGLRW

SEQ ID NO: 19016 - protein, 7 aa, synthetic construct
VWKPEPG

SEQ ID NO: 19017 - protein, 7 aa, synthetic construct
TTDYTMF

SEQ ID NO: 19018 - protein, 7 aa, synthetic construct
CNDSTKS

SEQ ID NO: 19019 - protein, 7 aa, synthetic construct
WAELRRA

SEQ ID NO: 19020 - protein, 7 aa, synthetic construct
CCSGVGI

SEQ ID NO: 19021 - protein, 7 aa, synthetic construct
MVFEDRV

SEQ ID NO: 19022 - protein, 7 aa, synthetic construct
YSRLSNV

SEQ ID NO: 19023 - protein, 7 aa, synthetic construct
SLVKDAP

SEQ ID NO: 19024 - protein, 7 aa, synthetic construct
ERGAGEV

SEQ ID NO: 19025 - protein, 7 aa, synthetic construct
GPERMSV

SEQ ID NO: 19026 - protein, 7 aa, synthetic construct
RGESSIW

SEQ ID NO: 19027 - protein, 7 aa, synthetic construct
CRSGAAL

SEQ ID NO: 19028 - protein, 7 aa, synthetic construct
PTADSIG

SEQ ID NO: 19029 - protein, 7 aa, synthetic construct
LSRLLPD

SEQ ID NO: 19030 - protein, 7 aa, synthetic construct
CGPSSAA

SEQ ID NO: 19031 - protein, 7 aa, synthetic construct
VVGAEST

SEQ ID NO: 19032 - protein, 7 aa, synthetic construct
CKLPCGL

SEQ ID NO: 19033 - protein, 7 aa, synthetic construct
LLCKAQG

SEQ ID NO: 19034 - protein, 7 aa, synthetic construct
TWSGDNP

SEQ ID NO: 19035 - protein, 7 aa, synthetic construct
GGGSQSW

SEQ ID NO: 19036 - protein, 7 aa, synthetic construct
LGGAAYK

SEQ ID NO: 19037 - protein, 7 aa, synthetic construct
YDSSNGI

SEQ ID NO: 19038 - protein, 7 aa, synthetic construct
FHVRGPD

SEQ ID NO: 19039 - protein, 7 aa, synthetic construct
GVPYTMP

SEQ ID NO: 19040 - protein, 7 aa, synthetic construct
GKSALNG

SEQ ID NO: 19041 - protein, 7 aa, synthetic construct
QDGSSTW

SEQ ID NO: 19042 - protein, 7 aa, synthetic construct
WAAGGAR

SEQ ID NO: 19043 - protein, 7 aa, synthetic construct
RCPDCHL

SEQ ID NO: 19044 - protein, 7 aa, synthetic construct
TRSGENA

SEQ ID NO: 19045 - protein, 7 aa, synthetic construct
RLESVAW

SEQ ID NO: 19046 - protein, 7 aa, synthetic construct
YYTGHSL

SEQ ID NO: 19047 - protein, 7 aa, synthetic construct
CQTVCAA

SEQ ID NO: 19048 - protein, 7 aa, synthetic construct
YWSATTA

SEQ ID NO: 19049 - protein, 7 aa, synthetic construct
ELSVVIH

SEQ ID NO: 19050 - protein, 7 aa, synthetic construct
SVGSSER

SEQ ID NO: 19051 - protein, 7 aa, synthetic construct
WLEGESV

SEQ ID NO: 19052 - protein, 7 aa, synthetic construct
YARTSTP

SEQ ID NO: 19053 - protein, 7 aa, synthetic construct
GGMSSTW

SEQ ID NO: 19054 - protein, 7 aa, synthetic construct
PNGEATW

SEQ ID NO: 19055 - protein, 7 aa, synthetic construct
WDSDNGR

SEQ ID NO: 19056 - protein, 7 aa, synthetic construct
RGVGPDS

SEQ ID NO: 19057 - protein, 7 aa, synthetic construct
CYLTKCD

SEQ ID NO: 19058 - protein, 7 aa, synthetic construct
LYVRWCG

SEQ ID NO: 19059 - protein, 7 aa, synthetic construct
VASACCG

SEQ ID NO: 19060 - protein, 7 aa, synthetic construct
TIGGACI

SEQ ID NO: 19061 - protein, 7 aa, synthetic construct
YYAGVLS

SEQ ID NO: 19062 - protein, 7 aa, synthetic construct
LEYGMSG

SEQ ID NO: 19063 - protein, 7 aa, synthetic construct
TYRGKPD

SEQ ID NO: 19064 - protein, 7 aa, synthetic construct
GGRNGIE

SEQ ID NO: 19065 - protein, 7 aa, synthetic construct
LLGENPD

SEQ ID NO: 19066 - protein, 7 aa, synthetic construct
GGDFSSY

SEQ ID NO: 19067 - protein, 7 aa, synthetic construct
RDEGSTW

SEQ ID NO: 19068 - protein, 7 aa, synthetic construct
SGASHLW

SEQ ID NO: 19069 - protein, 7 aa, synthetic construct
GSSTSVW

SEQ ID NO: 19070 - protein, 7 aa, synthetic construct
YVQGNKY

SEQ ID NO: 19071 - protein, 7 aa, synthetic construct
VDSTEGV

SEQ ID NO: 19072 - protein, 7 aa, synthetic construct
SSDAVRW

SEQ ID NO: 19073 - protein, 7 aa, synthetic construct
TEGKRFT

SEQ ID NO: 19074 - protein, 7 aa, synthetic construct
VASMGIG

SEQ ID NO: 19075 - protein, 7 aa, synthetic construct
WYSGIQM

SEQ ID NO: 19076 - protein, 7 aa, synthetic construct
CGLGSEA

SEQ ID NO: 19077 - protein, 7 aa, synthetic construct
WGARAER

SEQ ID NO: 19078 - protein, 7 aa, synthetic construct
SSEYLVY

SEQ ID NO: 19079 - protein, 7 aa, synthetic construct
SYHLKMG

SEQ ID NO: 19080 - protein, 7 aa, synthetic construct
IGFVCSE

SEQ ID NO: 19081 - protein, 7 aa, synthetic construct
YSSLNIN

SEQ ID NO: 19082 - protein, 7 aa, synthetic construct
YFAGMVQ

SEQ ID NO: 19083 - protein, 7 aa, synthetic construct
VGWRGRS

SEQ ID NO: 19084 - protein, 7 aa, synthetic construct
SMSDVRW

SEQ ID NO: 19085 - protein, 7 aa, synthetic construct
RLSDVAW

SEQ ID NO: 19086 - protein, 7 aa, synthetic construct
SSGMSSW

SEQ ID NO: 19087 - protein, 7 aa, synthetic construct
TSENVYF

SEQ ID NO: 19088 - protein, 7 aa, synthetic construct
GDEYVAF

SEQ ID NO: 19089 - protein, 7 aa, synthetic construct
YWSGIKE

SEQ ID NO: 19090 - protein, 7 aa, synthetic construct
SAFVHCV

SEQ ID NO: 19091 - protein, 7 aa, synthetic construct
GEGQSSW

SEQ ID NO: 19092 - protein, 7 aa, synthetic construct
LVSGEDV

SEQ ID NO: 19093 - protein, 7 aa, synthetic construct
RADSKQS

SEQ ID NO: 19094 - protein, 7 aa, synthetic construct
NALDWRD

SEQ ID NO: 19095 - protein, 7 aa, synthetic construct
GLASSAW

SEQ ID NO: 19096 - protein, 7 aa, synthetic construct
SLGKYGH

SEQ ID NO: 19097 - protein, 7 aa, synthetic construct
TLVLCRE

SEQ ID NO: 19098 - protein, 7 aa, synthetic construct
SDGACCA

SEQ ID NO: 19099 - protein, 7 aa, synthetic construct
LDDGRFQ

SEQ ID NO: 19100 - protein, 7 aa, synthetic construct
AGMENKM

SEQ ID NO: 19101 - protein, 7 aa, synthetic construct
GSDNSRW

SEQ ID NO: 19102 - protein, 7 aa, synthetic construct
RRLSMSL

SEQ ID NO: 19103 - protein, 7 aa, synthetic construct
KLDHMGM

SEQ ID NO: 19104 - protein, 7 aa, synthetic construct
DMMGNPA

SEQ ID NO: 19105 - protein, 7 aa, synthetic construct
GDSSVRK

SEQ ID NO: 19106 - protein, 7 aa, synthetic construct
GYMEGGG

SEQ ID NO: 19107 - protein, 7 aa, synthetic construct
WGRQALG

SEQ ID NO: 19108 - protein, 7 aa, synthetic construct
DNSGRLY

SEQ ID NO: 19109 - protein, 7 aa, synthetic construct
GFALPGG

SEQ ID NO: 19110 - protein, 7 aa, synthetic construct
GSGSALW

SEQ ID NO: 19111 - protein, 7 aa, synthetic construct
YWLDNVG

SEQ ID NO: 19112 - protein, 7 aa, synthetic construct
WGSQGRG

SEQ ID NO: 19113 - protein, 7 aa, synthetic construct
RLDDRSW

SEQ ID NO: 19114 - protein, 7 aa, synthetic construct
CCKVAMS

SEQ ID NO: 19115 - protein, 7 aa, synthetic construct
MNCGMQC

SEQ ID NO: 19116 - protein, 7 aa, synthetic construct
VGTDRGW

SEQ ID NO: 19117 - protein, 7 aa, synthetic construct
STSSRYS

SEQ ID NO: 19118 - protein, 7 aa, synthetic construct
SWGAKQS

SEQ ID NO: 19119 - protein, 7 aa, synthetic construct
APSHIAW

SEQ ID NO: 19120 - protein, 7 aa, synthetic construct
DPMSLGW

SEQ ID NO: 19121 - protein, 7 aa, synthetic construct
LNTRWQG

SEQ ID NO: 19122 - protein, 7 aa, synthetic construct
CKRGWSE

SEQ ID NO: 19123 - protein, 7 aa, synthetic construct
MTVRTSL

SEQ ID NO: 19124 - protein, 7 aa, synthetic construct
DLRAVSW

SEQ ID NO: 19125 - protein, 7 aa, synthetic construct
LLESRSW

SEQ ID NO: 19126 - protein, 7 aa, synthetic construct
YYSGVSE

SEQ ID NO: 19127 - protein, 7 aa, synthetic construct
SYRSAVL

SEQ ID NO: 19128 - protein, 7 aa, synthetic construct
YYSGVRD

SEQ ID NO: 19129 - protein, 7 aa, synthetic construct
MRLGGLT

SEQ ID NO: 19130 - protein, 7 aa, synthetic construct
IAGAERA

SEQ ID NO: 19131 - protein, 7 aa, synthetic construct
NHKNTPP

SEQ ID NO: 19132 - protein, 7 aa, synthetic construct
FIEQLPQ

SEQ ID NO: 19133 - protein, 7 aa, synthetic construct
SVVSQKS

SEQ ID NO: 19134 - protein, 7 aa, synthetic construct
CSLKDRC

SEQ ID NO: 19135 - protein, 7 aa, synthetic construct
FCIRLWL

SEQ ID NO: 19136 - protein, 7 aa, synthetic construct
AMVARDW

SEQ ID NO: 19137 - protein, 7 aa, synthetic construct
ILAERTA

SEQ ID NO: 19138 - protein, 7 aa, synthetic construct
YNEVSIA

SEQ ID NO: 19139 - protein, 7 aa, synthetic construct
GIGCTKL

SEQ ID NO: 19140 - protein, 7 aa, synthetic construct
GSGVSNW

SEQ ID NO: 19141 - protein, 7 aa, synthetic construct
SVRLQSE

SEQ ID NO: 19142 - protein, 7 aa, synthetic construct
VMKSVST

SEQ ID NO: 19143 - protein, 7 aa, synthetic construct
VPGRGAG

SEQ ID NO: 19144 - protein, 7 aa, synthetic construct
LWDGTRA

SEQ ID NO: 19145 - protein, 7 aa, synthetic construct
FSGYSSS

SEQ ID NO: 19146 - protein, 7 aa, synthetic construct
DMESNRW

SEQ ID NO: 19147 - protein, 7 aa, synthetic construct
LDDWSHF

SEQ ID NO: 19148 - protein, 7 aa, synthetic construct
YARGALN

SEQ ID NO: 19149 - protein, 7 aa, synthetic construct
YRSTSHL

SEQ ID NO: 19150 - protein, 7 aa, synthetic construct
CRPEHGP

SEQ ID NO: 19151 - protein, 7 aa, synthetic construct
MYKSRVD

SEQ ID NO: 19152 - protein, 7 aa, synthetic construct
LSNAPVG

SEQ ID NO: 19153 - protein, 7 aa, synthetic construct
SAPERLL

SEQ ID NO: 19154 - protein, 7 aa, synthetic construct
AGEGVKW

SEQ ID NO: 19155 - protein, 7 aa, synthetic construct
GTLPAYR

SEQ ID NO: 19156 - protein, 7 aa, synthetic construct
WSRDTDN

SEQ ID NO: 19157 - protein, 7 aa, synthetic construct
RGSGFHG

SEQ ID NO: 19158 - protein, 7 aa, synthetic construct
CGTPCSA

SEQ ID NO: 19159 - protein, 7 aa, synthetic construct
IGSAVLR

SEQ ID NO: 19160 - protein, 7 aa, synthetic construct
RMADSVW

SEQ ID NO: 19161 - protein, 7 aa, synthetic construct
DFFGHDA

SEQ ID NO: 19162 - protein, 7 aa, synthetic construct
TGATVGC

SEQ ID NO: 19163 - protein, 7 aa, synthetic construct
ERYGLCA

SEQ ID NO: 19164 - protein, 7 aa, synthetic construct
RDERPGG

SEQ ID NO: 19165 - protein, 7 aa, synthetic construct
ARFDAFP

SEQ ID NO: 19166 - protein, 7 aa, synthetic construct
YDPRSNN

SEQ ID NO: 19167 - protein, 7 aa, synthetic construct
ELDSIQW

SEQ ID NO: 19168 - protein, 7 aa, synthetic construct
YVRAPLS

SEQ ID NO: 19169 - protein, 7 aa, synthetic construct
YSRIGDH

SEQ ID NO: 19170 - protein, 7 aa, synthetic construct
ITFRCGK

SEQ ID NO: 19171 - protein, 7 aa, synthetic construct
VETVRYK

SEQ ID NO: 19172 - protein, 7 aa, synthetic construct
DLMSLSW

SEQ ID NO: 19173 - protein, 7 aa, synthetic construct
ASDYQTF

SEQ ID NO: 19174 - protein, 7 aa, synthetic construct
MSDGTGP

SEQ ID NO: 19175 - protein, 7 aa, synthetic construct
ASDEWRD

SEQ ID NO: 19176 - protein, 7 aa, synthetic construct
YLGGDHW

SEQ ID NO: 19177 - protein, 7 aa, synthetic construct
LPTGWGP

SEQ ID NO: 19178 - protein, 7 aa, synthetic construct
GPETVKW

SEQ ID NO: 19179 - protein, 7 aa, synthetic construct
YSSVVAE

SEQ ID NO: 19180 - protein, 7 aa, synthetic construct
YFEGVKG

SEQ ID NO: 19181 - protein, 7 aa, synthetic construct
GPNLHPS

SEQ ID NO: 19182 - protein, 7 aa, synthetic construct
REDYVYP

SEQ ID NO: 19183 - protein, 7 aa, synthetic construct
CSKPSAV

SEQ ID NO: 19184 - protein, 7 aa, synthetic construct
YGCNGCS

SEQ ID NO: 19185 - protein, 7 aa, synthetic construct
DMSSTKW

SEQ ID NO: 19186 - protein, 7 aa, synthetic construct
GAGNSLW

SEQ ID NO: 19187 - protein, 7 aa, synthetic construct
MIADGGA

SEQ ID NO: 19188 - protein, 7 aa, synthetic construct
WYSGRTE

SEQ ID NO: 19189 - protein, 7 aa, synthetic construct
CKYGAEA

SEQ ID NO: 19190 - protein, 7 aa, synthetic construct
VVPLCDP

SEQ ID NO: 19191 - protein, 7 aa, synthetic construct
TRSGSNA

SEQ ID NO: 19192 - protein, 7 aa, synthetic construct
LASACLS

SEQ ID NO: 19193 - protein, 7 aa, synthetic construct
AGACDAS

SEQ ID NO: 19194 - protein, 7 aa, synthetic construct
CNSGCSV

SEQ ID NO: 19195 - protein, 7 aa, synthetic construct
WSRGGSA

SEQ ID NO: 19196 - protein, 7 aa, synthetic construct
EISKTQI

SEQ ID NO: 19197 - protein, 7 aa, synthetic construct
FDRKPQI

SEQ ID NO: 19198 - protein, 7 aa, synthetic construct
YTSDNGL

SEQ ID NO: 19199 - protein, 7 aa, synthetic construct
NGANGVW

SEQ ID NO: 19200 - protein, 7 aa, synthetic construct
LEAVSRA

SEQ ID NO: 19201 - protein, 7 aa, synthetic construct
EMLPYRG

SEQ ID NO: 19202 - protein, 7 aa, synthetic construct
SADTWRD

SEQ ID NO: 19203 - protein, 7 aa, synthetic construct
LTVATVE

SEQ ID NO: 19204 - protein, 7 aa, synthetic construct
LTEKLAS

SEQ ID NO: 19205 - protein, 7 aa, synthetic construct
YFSGSSA

SEQ ID NO: 19206 - protein, 7 aa, synthetic construct
MFGSTAG

SEQ ID NO: 19207 - protein, 7 aa, synthetic construct
YDYDAYP

SEQ ID NO: 19208 - protein, 7 aa, synthetic construct
SNPAPHS

SEQ ID NO: 19209 - protein, 7 aa, synthetic construct
YFVGERE

SEQ ID NO: 19210 - protein, 7 aa, synthetic construct
WGKNMGL

SEQ ID NO: 19211 - protein, 7 aa, synthetic construct
VAHVPLC

SEQ ID NO: 19212 - protein, 7 aa, synthetic construct
YARTGTS

SEQ ID NO: 19213 - protein, 7 aa, synthetic construct
GGGTSSW

SEQ ID NO: 19214 - protein, 7 aa, synthetic construct
GNLDNGG

SEQ ID NO: 19215 - protein, 7 aa, synthetic construct
RTYDSMP

SEQ ID NO: 19216 - protein, 7 aa, synthetic construct
GGESTSW

SEQ ID NO: 19217 - protein, 7 aa, synthetic construct
YRLRISD

SEQ ID NO: 19218 - protein, 7 aa, synthetic construct
IAATCCN

SEQ ID NO: 19219 - protein, 7 aa, synthetic construct
GGEGLRW

SEQ ID NO: 19220 - protein, 7 aa, synthetic construct
CAPDYRE

SEQ ID NO: 19221 - protein, 7 aa, synthetic construct
ILSDRVW

SEQ ID NO: 19222 - protein, 7 aa, synthetic construct
AQGIGTW

SEQ ID NO: 19223 - protein, 7 aa, synthetic construct
DESVRTW

SEQ ID NO: 19224 - protein, 7 aa, synthetic construct
WLKSQAG

SEQ ID NO: 19225 - protein, 7 aa, synthetic construct
KSTTSEP

SEQ ID NO: 19226 - protein, 7 aa, synthetic construct
GEMSVRW

SEQ ID NO: 19227 - protein, 7 aa, synthetic construct
LSALSNN

SEQ ID NO: 19228 - protein, 7 aa, synthetic construct
GGDYIGT

SEQ ID NO: 19229 - protein, 7 aa, synthetic construct
DMGSADW

SEQ ID NO: 19230 - protein, 7 aa, synthetic construct
VADHVRW

SEQ ID NO: 19231 - protein, 7 aa, synthetic construct
REGTVYW

SEQ ID NO: 19232 - protein, 7 aa, synthetic construct
SLSSQEW

SEQ ID NO: 19233 - protein, 7 aa, synthetic construct
DQGYSTW

SEQ ID NO: 19234 - protein, 7 aa, synthetic construct
LARLGYD

SEQ ID NO: 19235 - protein, 7 aa, synthetic construct
TATGCCP

SEQ ID NO: 19236 - protein, 7 aa, synthetic construct
TYSVDLG

SEQ ID NO: 19237 - protein, 7 aa, synthetic construct
LGAYSLH

SEQ ID NO: 19238 - protein, 7 aa, synthetic construct
CKMGRDE

SEQ ID NO: 19239 - protein, 7 aa, synthetic construct
LRGDDCA

SEQ ID NO: 19240 - protein, 7 aa, synthetic construct
LPSGDSP

SEQ ID NO: 19241 - protein, 7 aa, synthetic construct
CGKDLLH

SEQ ID NO: 19242 - protein, 7 aa, synthetic construct
EMGGREW

SEQ ID NO: 19243 - protein, 7 aa, synthetic construct
YVKFESG

SEQ ID NO: 19244 - protein, 7 aa, synthetic construct
GTGGDTG

SEQ ID NO: 19245 - protein, 7 aa, synthetic construct
VTGACCS

SEQ ID NO: 19246 - protein, 7 aa, synthetic construct
DYASIKW

SEQ ID NO: 19247 - protein, 7 aa, synthetic construct
GDESSVW

SEQ ID NO: 19248 - protein, 7 aa, synthetic construct
QSSVFND

SEQ ID NO: 19249 - protein, 7 aa, synthetic construct
GDKETAA

SEQ ID NO: 19250 - protein, 7 aa, synthetic construct
SAYSPLS

SEQ ID NO: 19251 - protein, 7 aa, synthetic construct
NPLASNW

SEQ ID NO: 19252 - protein, 7 aa, synthetic construct
REDVSLW

SEQ ID NO: 19253 - protein, 7 aa, synthetic construct
YFTGHLE

SEQ ID NO: 19254 - protein, 7 aa, synthetic construct
GLNVVAW

SEQ ID NO: 19255 - protein, 7 aa, synthetic construct
MMTSSQW

SEQ ID NO: 19256 - protein, 7 aa, synthetic construct
PDFSTRY

SEQ ID NO: 19257 - protein, 7 aa, synthetic construct
CIVTANC

SEQ ID NO: 19258 - protein, 7 aa, synthetic construct
VNDGVKW

SEQ ID NO: 19259 - protein, 7 aa, synthetic construct
LCKSCGS

SEQ ID NO: 19260 - protein, 7 aa, synthetic construct
TVWGDAA

SEQ ID NO: 19261 - protein, 7 aa, synthetic construct
DLESSYW

SEQ ID NO: 19262 - protein, 7 aa, synthetic construct
VDSTNGL

SEQ ID NO: 19263 - protein, 7 aa, synthetic construct
RLESAVW

SEQ ID NO: 19264 - protein, 7 aa, synthetic construct
PMSAVGW

SEQ ID NO: 19265 - protein, 7 aa, synthetic construct
RDPSVFP

SEQ ID NO: 19266 - protein, 7 aa, synthetic construct
TNAQILT

SEQ ID NO: 19267 - protein, 7 aa, synthetic construct
FSVRGNL

SEQ ID NO: 19268 - protein, 7 aa, synthetic construct
CLAMSKP

SEQ ID NO: 19269 - protein, 7 aa, synthetic construct
TREGDAP

SEQ ID NO: 19270 - protein, 7 aa, synthetic construct
VLSHTDL

SEQ ID NO: 19271 - protein, 7 aa, synthetic construct
YTRLDSS

SEQ ID NO: 19272 - protein, 7 aa, synthetic construct
QDEWTYV

SEQ ID NO: 19273 - protein, 7 aa, synthetic construct
VIGMGRD

SEQ ID NO: 19274 - protein, 7 aa, synthetic construct
GDEYISY

SEQ ID NO: 19275 - protein, 7 aa, synthetic construct
SNSSLNC

SEQ ID NO: 19276 - protein, 7 aa, synthetic construct
TSLEFGA

SEQ ID NO: 19277 - protein, 7 aa, synthetic construct
GVTEVSW

SEQ ID NO: 19278 - protein, 7 aa, synthetic construct
SFDADRW

SEQ ID NO: 19279 - protein, 7 aa, synthetic construct
FFSGAVE

SEQ ID NO: 19280 - protein, 7 aa, synthetic construct
MRFCKDS

SEQ ID NO: 19281 - protein, 7 aa, synthetic construct
YSDFAPF

SEQ ID NO: 19282 - protein, 7 aa, synthetic construct
GSTVCKD

SEQ ID NO: 19283 - protein, 7 aa, synthetic construct
GEPRSGN

SEQ ID NO: 19284 - protein, 7 aa, synthetic construct
FGYRQGS

SEQ ID NO: 19285 - protein, 7 aa, synthetic construct
SMCKDDC

SEQ ID NO: 19286 - protein, 7 aa, synthetic construct
GYSDFRN

SEQ ID NO: 19287 - protein, 7 aa, synthetic construct
GLYVEAG

SEQ ID NO: 19288 - protein, 7 aa, synthetic construct
NIPGMMY

SEQ ID NO: 19289 - protein, 7 aa, synthetic construct
LSVDICA

SEQ ID NO: 19290 - protein, 7 aa, synthetic construct
VSMGSAG

SEQ ID NO: 19291 - protein, 7 aa, synthetic construct
TRQGDEA

SEQ ID NO: 19292 - protein, 7 aa, synthetic construct
GGINYDL

SEQ ID NO: 19293 - protein, 7 aa, synthetic construct
WNAGGAF

SEQ ID NO: 19294 - protein, 7 aa, synthetic construct
RMDHTNF

SEQ ID NO: 19295 - protein, 7 aa, synthetic construct
IMSDLAW

SEQ ID NO: 19296 - protein, 7 aa, synthetic construct
CGEAILM

SEQ ID NO: 19297 - protein, 7 aa, synthetic construct
SSTQSSF

SEQ ID NO: 19298 - protein, 7 aa, synthetic construct
GLSSATW

SEQ ID NO: 19299 - protein, 7 aa, synthetic construct
VSAGYQW

SEQ ID NO: 19300 - protein, 7 aa, synthetic construct
YFAGIPA

SEQ ID NO: 19301 - protein, 7 aa, synthetic construct
ELMAHSW

SEQ ID NO: 19302 - protein, 7 aa, synthetic construct
GGTPVNV

SEQ ID NO: 19303 - protein, 7 aa, synthetic construct
GVTAVAW

SEQ ID NO: 19304 - protein, 7 aa, synthetic construct
EPESRSW

SEQ ID NO: 19305 - protein, 7 aa, synthetic construct
CDGVPRG

SEQ ID NO: 19306 - protein, 7 aa, synthetic construct
RDGGRIG

SEQ ID NO: 19307 - protein, 7 aa, synthetic construct
NGQGGHW

SEQ ID NO: 19308 - protein, 7 aa, synthetic construct
VESSSLW

SEQ ID NO: 19309 - protein, 7 aa, synthetic construct
TCTGTCS

SEQ ID NO: 19310 - protein, 7 aa, synthetic construct
VDSDNGR

SEQ ID NO: 19311 - protein, 7 aa, synthetic construct
IVSICAA

SEQ ID NO: 19312 - protein, 7 aa, synthetic construct
DHANPPD

SEQ ID NO: 19313 - protein, 7 aa, synthetic construct
FSGMSPS

SEQ ID NO: 19314 - protein, 7 aa, synthetic construct
CMTGLKC

SEQ ID NO: 19315 - protein, 7 aa, synthetic construct
NCNASCV

SEQ ID NO: 19316 - protein, 7 aa, synthetic construct
KVGDLRA

SEQ ID NO: 19317 - protein, 7 aa, synthetic construct
EFDARTW

SEQ ID NO: 19318 - protein, 7 aa, synthetic construct
ICSRVNG

SEQ ID NO: 19319 - protein, 7 aa, synthetic construct
HVKCCPP

SEQ ID NO: 19320 - protein, 7 aa, synthetic construct
SSMVSCA

SEQ ID NO: 19321 - protein, 7 aa, synthetic construct
LSAGELW

SEQ ID NO: 19322 - protein, 7 aa, synthetic construct
VMNSSGA

SEQ ID NO: 19323 - protein, 7 aa, synthetic construct
LDGCCSA

SEQ ID NO: 19324 - protein, 7 aa, synthetic construct
FRDGTAA

SEQ ID NO: 19325 - protein, 7 aa, synthetic construct
CDTACTR

SEQ ID NO: 19326 - protein, 7 aa, synthetic construct
GELTVRW

SEQ ID NO: 19327 - protein, 7 aa, synthetic construct
LEGREEG

SEQ ID NO: 19328 - protein, 7 aa, synthetic construct
CLKICTP

SEQ ID NO: 19329 - protein, 7 aa, synthetic construct
MERNSSS

SEQ ID NO: 19330 - protein, 7 aa, synthetic construct
GGERSTW

SEQ ID NO: 19331 - protein, 7 aa, synthetic construct
WHSTNGL

SEQ ID NO: 19332 - protein, 7 aa, synthetic construct
GGSDRIW

SEQ ID NO: 19333 - protein, 7 aa, synthetic construct
CAVVCSS

SEQ ID NO: 19334 - protein, 7 aa, synthetic construct
VFSRLDT

SEQ ID NO: 19335 - protein, 7 aa, synthetic construct
GHCGATV

SEQ ID NO: 19336 - protein, 7 aa, synthetic construct
GVAGASF

SEQ ID NO: 19337 - protein, 7 aa, synthetic construct
AGEWVTY

SEQ ID NO: 19338 - protein, 7 aa, synthetic construct
LEHRLVN

SEQ ID NO: 19339 - protein, 7 aa, synthetic construct
DSASRAW

SEQ ID NO: 19340 - protein, 7 aa, synthetic construct
GCCTNEV

SEQ ID NO: 19341 - protein, 7 aa, synthetic construct
YSRASDD

SEQ ID NO: 19342 - protein, 7 aa, synthetic construct
MWNGINP

SEQ ID NO: 19343 - protein, 7 aa, synthetic construct
GGMGVSW

SEQ ID NO: 19344 - protein, 7 aa, synthetic construct
CCDPSNV

SEQ ID NO: 19345 - protein, 7 aa, synthetic construct
GIPNCRE

SEQ ID NO: 19346 - protein, 7 aa, synthetic construct
LCKLAQP

SEQ ID NO: 19347 - protein, 7 aa, synthetic construct
PRSTHGV

SEQ ID NO: 19348 - protein, 7 aa, synthetic construct
EMHADVI

SEQ ID NO: 19349 - protein, 7 aa, synthetic construct
LITKPGY

SEQ ID NO: 19350 - protein, 7 aa, synthetic construct
TIADAYP

SEQ ID NO: 19351 - protein, 7 aa, synthetic construct
TMRDAFP

SEQ ID NO: 19352 - protein, 7 aa, synthetic construct
ATNWRLA

SEQ ID NO: 19353 - protein, 7 aa, synthetic construct
SAQSWTD

SEQ ID NO: 19354 - protein, 7 aa, synthetic construct
LHASQMN

SEQ ID NO: 19355 - protein, 7 aa, synthetic construct
MHRLSMD

SEQ ID NO: 19356 - protein, 7 aa, synthetic construct
VAQAGAG

SEQ ID NO: 19357 - protein, 7 aa, synthetic construct
GAPDSIR

SEQ ID NO: 19358 - protein, 7 aa, synthetic construct
REDFSTF

SEQ ID NO: 19359 - protein, 7 aa, synthetic construct
HEDSCSA

SEQ ID NO: 19360 - protein, 7 aa, synthetic construct
YYSGRSE

SEQ ID NO: 19361 - protein, 7 aa, synthetic construct
FFNTAHS

SEQ ID NO: 19362 - protein, 7 aa, synthetic construct
YVKSQGV

SEQ ID NO: 19363 - protein, 7 aa, synthetic construct
CTKNVNA

SEQ ID NO: 19364 - protein, 7 aa, synthetic construct
MVSCGGC

SEQ ID NO: 19365 - protein, 7 aa, synthetic construct
SASTAKS

SEQ ID NO: 19366 - protein, 7 aa, synthetic construct
VMSEASW

SEQ ID NO: 19367 - protein, 7 aa, synthetic construct
LGAATCQ

SEQ ID NO: 19368 - protein, 7 aa, synthetic construct
CCGNVKI

SEQ ID NO: 19369 - protein, 7 aa, synthetic construct
SGEYTPF

SEQ ID NO: 19370 - protein, 7 aa, synthetic construct
CKVSANL

SEQ ID NO: 19371 - protein, 7 aa, synthetic construct
GSDTSRW

SEQ ID NO: 19372 - protein, 7 aa, synthetic construct
RCPFVET

SEQ ID NO: 19373 - protein, 7 aa, synthetic construct
MLSLCCA

SEQ ID NO: 19374 - protein, 7 aa, synthetic construct
QNCVDRC

SEQ ID NO: 19375 - protein, 7 aa, synthetic construct
FEVPGDK

SEQ ID NO: 19376 - protein, 7 aa, synthetic construct
PGASSVW

SEQ ID NO: 19377 - protein, 7 aa, synthetic construct
GFGDFQN

SEQ ID NO: 19378 - protein, 7 aa, synthetic construct
STAGTSC

SEQ ID NO: 19379 - protein, 7 aa, synthetic construct
GMVPRDM

SEQ ID NO: 19380 - protein, 7 aa, synthetic construct
CSNKCTV

SEQ ID NO: 19381 - protein, 7 aa, synthetic construct
WWSGTPD

SEQ ID NO: 19382 - protein, 7 aa, synthetic construct
ECLASCR

SEQ ID NO: 19383 - protein, 7 aa, synthetic construct
FDASTLS

SEQ ID NO: 19384 - protein, 7 aa, synthetic construct
ITERVNT

SEQ ID NO: 19385 - protein, 7 aa, synthetic construct
YSKAAPL

SEQ ID NO: 19386 - protein, 7 aa, synthetic construct
GLSSSSW

SEQ ID NO: 19387 - protein, 7 aa, synthetic construct
RLENPHT

SEQ ID NO: 19388 - protein, 7 aa, synthetic construct
KLDEVYP

SEQ ID NO: 19389 - protein, 7 aa, synthetic construct
PSAKNLG

SEQ ID NO: 19390 - protein, 7 aa, synthetic construct
EGPPPRN

SEQ ID NO: 19391 - protein, 7 aa, synthetic construct
VGQQVVL

SEQ ID NO: 19392 - protein, 7 aa, synthetic construct
VSDFDIF

SEQ ID NO: 19393 - protein, 7 aa, synthetic construct
GSFRQGG

SEQ ID NO: 19394 - protein, 7 aa, synthetic construct
HEPSRTW

SEQ ID NO: 19395 - protein, 7 aa, synthetic construct
TGVHVTP

SEQ ID NO: 19396 - protein, 7 aa, synthetic construct
CMQLKSH

SEQ ID NO: 19397 - protein, 7 aa, synthetic construct
HDAFSSW

SEQ ID NO: 19398 - protein, 7 aa, synthetic construct
TWHGDGP

SEQ ID NO: 19399 - protein, 7 aa, synthetic construct
WGSQGGT

SEQ ID NO: 19400 - protein, 7 aa, synthetic construct
IEGLRAS

SEQ ID NO: 19401 - protein, 7 aa, synthetic construct
LSRISMD

SEQ ID NO: 19402 - protein, 7 aa, synthetic construct
CERNECP

SEQ ID NO: 19403 - protein, 7 aa, synthetic construct
DYESACV

SEQ ID NO: 19404 - protein, 7 aa, synthetic construct
AWDNEAM

SEQ ID NO: 19405 - protein, 7 aa, synthetic construct
KNGSSSW

SEQ ID NO: 19406 - protein, 7 aa, synthetic construct
TDSEWRD

SEQ ID NO: 19407 - protein, 7 aa, synthetic construct
CCGPGKS

SEQ ID NO: 19408 - protein, 7 aa, synthetic construct
VSDTNGI

SEQ ID NO: 19409 - protein, 7 aa, synthetic construct
MGLGLHI

SEQ ID NO: 19410 - protein, 7 aa, synthetic construct
CVIVKQV

SEQ ID NO: 19411 - protein, 7 aa, synthetic construct
SEICSSP

SEQ ID NO: 19412 - protein, 7 aa, synthetic construct
CAAGTSP

SEQ ID NO: 19413 - protein, 7 aa, synthetic construct
ICGAPCV

SEQ ID NO: 19414 - protein, 7 aa, synthetic construct
DSMATER

SEQ ID NO: 19415 - protein, 7 aa, synthetic construct
FCLGNSG

SEQ ID NO: 19416 - protein, 7 aa, synthetic construct
NDGRSGW

SEQ ID NO: 19417 - protein, 7 aa, synthetic construct
GPTSVLW

SEQ ID NO: 19418 - protein, 7 aa, synthetic construct
DRIFLSA

SEQ ID NO: 19419 - protein, 7 aa, synthetic construct
MDNAAQR

SEQ ID NO: 19420 - protein, 7 aa, synthetic construct
ADGGTVY

SEQ ID NO: 19421 - protein, 7 aa, synthetic construct
YWSRVSE

SEQ ID NO: 19422 - protein, 7 aa, synthetic construct
WSERLRS

SEQ ID NO: 19423 - protein, 7 aa, synthetic construct
YWEGVTS

SEQ ID NO: 19424 - protein, 7 aa, synthetic construct
VKGIAVS

SEQ ID NO: 19425 - protein, 7 aa, synthetic construct
CVASYTC

SEQ ID NO: 19426 - protein, 7 aa, synthetic construct
KEFLSDR

SEQ ID NO: 19427 - protein, 7 aa, synthetic construct
WEFKHLG

SEQ ID NO: 19428 - protein, 7 aa, synthetic construct
PMHATSW

SEQ ID NO: 19429 - protein, 7 aa, synthetic construct
DKKSDLV

SEQ ID NO: 19430 - protein, 7 aa, synthetic construct
RVELSPL

SEQ ID NO: 19431 - protein, 7 aa, synthetic construct
SACKTTE

SEQ ID NO: 19432 - protein, 7 aa, synthetic construct
IPNRCEA

SEQ ID NO: 19433 - protein, 7 aa, synthetic construct
CNPSSEK

SEQ ID NO: 19434 - protein, 7 aa, synthetic construct
LSHCCDS

SEQ ID NO: 19435 - protein, 7 aa, synthetic construct
GINVPTG

SEQ ID NO: 19436 - protein, 7 aa, synthetic construct
CGVKCQL

SEQ ID NO: 19437 - protein, 7 aa, synthetic construct
SGTFSGE

SEQ ID NO: 19438 - protein, 7 aa, synthetic construct
LVICRGH

SEQ ID NO: 19439 - protein, 7 aa, synthetic construct
LSVNSSG

SEQ ID NO: 19440 - protein, 7 aa, synthetic construct
LHKLSVT

SEQ ID NO: 19441 - protein, 7 aa, synthetic construct
YFSGQAE

SEQ ID NO: 19442 - protein, 7 aa, synthetic construct
YVLSDSR

SEQ ID NO: 19443 - protein, 7 aa, synthetic construct
ELIGGGS

SEQ ID NO: 19444 - protein, 7 aa, synthetic construct
MTVDCSR

SEQ ID NO: 19445 - protein, 7 aa, synthetic construct
LEYHKVP

SEQ ID NO: 19446 - protein, 7 aa, synthetic construct
VGTFREG

SEQ ID NO: 19447 - protein, 7 aa, synthetic construct
VPDAVRW

SEQ ID NO: 19448 - protein, 7 aa, synthetic construct
IGGSSGW

SEQ ID NO: 19449 - protein, 7 aa, synthetic construct
EMFLNGV

SEQ ID NO: 19450 - protein, 7 aa, synthetic construct
SGKGWSA

SEQ ID NO: 19451 - protein, 7 aa, synthetic construct
GASAGTF

SEQ ID NO: 19452 - protein, 7 aa, synthetic construct
RGVYSNV

SEQ ID NO: 19453 - protein, 7 aa, synthetic construct
GGGDQRW

SEQ ID NO: 19454 - protein, 7 aa, synthetic construct
DLDHEGV

SEQ ID NO: 19455 - protein, 7 aa, synthetic construct
PGNSHAW

SEQ ID NO: 19456 - protein, 7 aa, synthetic construct
CSLGSDR

SEQ ID NO: 19457 - protein, 7 aa, synthetic construct
VTASGCA

SEQ ID NO: 19458 - protein, 7 aa, synthetic construct
LGLKGWD

SEQ ID NO: 19459 - protein, 7 aa, synthetic construct
VEGVTGH

SEQ ID NO: 19460 - protein, 7 aa, synthetic construct
IGHVSDW

SEQ ID NO: 19461 - protein, 7 aa, synthetic construct
GRNFGTP

SEQ ID NO: 19462 - protein, 7 aa, synthetic construct
YFSAVTA

SEQ ID NO: 19463 - protein, 7 aa, synthetic construct
SGGTSLW

SEQ ID NO: 19464 - protein, 7 aa, synthetic construct
GLMHEHL

SEQ ID NO: 19465 - protein, 7 aa, synthetic construct
SQDCCGP

SEQ ID NO: 19466 - protein, 7 aa, synthetic construct
LWTGAGP

SEQ ID NO: 19467 - protein, 7 aa, synthetic construct
VTGDRIV

SEQ ID NO: 19468 - protein, 7 aa, synthetic construct
RSMDIFP

SEQ ID NO: 19469 - protein, 7 aa, synthetic construct
FFSGTLE

SEQ ID NO: 19470 - protein, 7 aa, synthetic construct
CEFQKCP

SEQ ID NO: 19471 - protein, 7 aa, synthetic construct
VEMGRTG

SEQ ID NO: 19472 - protein, 7 aa, synthetic construct
TSLVRVS

SEQ ID NO: 19473 - protein, 7 aa, synthetic construct
SMLKYPS

SEQ ID NO: 19474 - protein, 7 aa, synthetic construct
YFSLERD

SEQ ID NO: 19475 - protein, 7 aa, synthetic construct
GGDLRQQ

SEQ ID NO: 19476 - protein, 7 aa, synthetic construct
IRGGGAG

SEQ ID NO: 19477 - protein, 7 aa, synthetic construct
AWTEANR

SEQ ID NO: 19478 - protein, 7 aa, synthetic construct
GGNGSSY

SEQ ID NO: 19479 - protein, 7 aa, synthetic construct
GVTEIKC

SEQ ID NO: 19480 - protein, 7 aa, synthetic construct
LVTHGSL

SEQ ID NO: 19481 - protein, 7 aa, synthetic construct
GMRDSVT

SEQ ID NO: 19482 - protein, 7 aa, synthetic construct
GDLFLAV

SEQ ID NO: 19483 - protein, 7 aa, synthetic construct
ELTSDPG

SEQ ID NO: 19484 - protein, 7 aa, synthetic construct
ALGMPLQ

SEQ ID NO: 19485 - protein, 7 aa, synthetic construct
FSRLNDD

SEQ ID NO: 19486 - protein, 7 aa, synthetic construct
FSVGICS

SEQ ID NO: 19487 - protein, 7 aa, synthetic construct
SRVTYRE

SEQ ID NO: 19488 - protein, 7 aa, synthetic construct
LCLGACT

SEQ ID NO: 19489 - protein, 7 aa, synthetic construct
GGAGSAW

SEQ ID NO: 19490 - protein, 7 aa, synthetic construct
DSSPSCP

SEQ ID NO: 19491 - protein, 7 aa, synthetic construct
GLSSPLW

SEQ ID NO: 19492 - protein, 7 aa, synthetic construct
CITREHV

SEQ ID NO: 19493 - protein, 7 aa, synthetic construct
NAPVGAG

SEQ ID NO: 19494 - protein, 7 aa, synthetic construct
VPSSVTW

SEQ ID NO: 19495 - protein, 7 aa, synthetic construct
YSRVQGD

SEQ ID NO: 19496 - protein, 7 aa, synthetic construct
LSKIGYN

SEQ ID NO: 19497 - protein, 7 aa, synthetic construct
RGEGRLY

SEQ ID NO: 19498 - protein, 7 aa, synthetic construct
KVGEQTR

SEQ ID NO: 19499 - protein, 7 aa, synthetic construct
SLSTENL

SEQ ID NO: 19500 - protein, 7 aa, synthetic construct
ACSTIHL

SEQ ID NO: 19501 - protein, 7 aa, synthetic construct
DQAVRVS

SEQ ID NO: 19502 - protein, 7 aa, synthetic construct
DSTSQLS

SEQ ID NO: 19503 - protein, 7 aa, synthetic construct
GAGTSGW

SEQ ID NO: 19504 - protein, 7 aa, synthetic construct
DPSTQLW

SEQ ID NO: 19505 - protein, 7 aa, synthetic construct
QGASSSW

SEQ ID NO: 19506 - protein, 7 aa, synthetic construct
LVKCVVG

SEQ ID NO: 19507 - protein, 7 aa, synthetic construct
WSSTKTH

SEQ ID NO: 19508 - protein, 7 aa, synthetic construct
VPYETPV

SEQ ID NO: 19509 - protein, 7 aa, synthetic construct
VGADRQW

SEQ ID NO: 19510 - protein, 7 aa, synthetic construct
WRAEVSR

SEQ ID NO: 19511 - protein, 7 aa, synthetic construct
IVAGYSF

SEQ ID NO: 19512 - protein, 7 aa, synthetic construct
TRTGENA

SEQ ID NO: 19513 - protein, 7 aa, synthetic construct
VCSGAEG

SEQ ID NO: 19514 - protein, 7 aa, synthetic construct
DFKALGT

SEQ ID NO: 19515 - protein, 7 aa, synthetic construct
DSFGNAA

SEQ ID NO: 19516 - protein, 7 aa, synthetic construct
DPFAPSW

SEQ ID NO: 19517 - protein, 7 aa, synthetic construct
LWDAQGK

SEQ ID NO: 19518 - protein, 7 aa, synthetic construct
FNSSVGF

SEQ ID NO: 19519 - protein, 7 aa, synthetic construct
IGNGTWN

SEQ ID NO: 19520 - protein, 7 aa, synthetic construct
KSGTVGE

SEQ ID NO: 19521 - protein, 7 aa, synthetic construct
VAMSSCC

SEQ ID NO: 19522 - protein, 7 aa, synthetic construct
VDTIVCE

SEQ ID NO: 19523 - protein, 7 aa, synthetic construct
FGGHSSY

SEQ ID NO: 19524 - protein, 7 aa, synthetic construct
FGRCDIT

SEQ ID NO: 19525 - protein, 7 aa, synthetic construct
YYTAVVG

SEQ ID NO: 19526 - protein, 7 aa, synthetic construct
YVFSGPV

SEQ ID NO: 19527 - protein, 7 aa, synthetic construct
PGQIMTA

SEQ ID NO: 19528 - protein, 7 aa, synthetic construct
IDYAPGE

SEQ ID NO: 19529 - protein, 7 aa, synthetic construct
ESATLVL

SEQ ID NO: 19530 - protein, 7 aa, synthetic construct
SDPKIVA

SEQ ID NO: 19531 - protein, 7 aa, synthetic construct
LQKFDRS

SEQ ID NO: 19532 - protein, 7 aa, synthetic construct
CCKSVTA

SEQ ID NO: 19533 - protein, 7 aa, synthetic construct
GLSSAVW

SEQ ID NO: 19534 - protein, 7 aa, synthetic construct
NGVWTNP

SEQ ID NO: 19535 - protein, 7 aa, synthetic construct
VTTRGPN

SEQ ID NO: 19536 - protein, 7 aa, synthetic construct
STEWIPY

SEQ ID NO: 19537 - protein, 7 aa, synthetic construct
DVSSRTW

SEQ ID NO: 19538 - protein, 7 aa, synthetic construct
SDGVSVR

SEQ ID NO: 19539 - protein, 7 aa, synthetic construct
FESNEPW

SEQ ID NO: 19540 - protein, 7 aa, synthetic construct
GSVGNAW

SEQ ID NO: 19541 - protein, 7 aa, synthetic construct
VPGIPVN

SEQ ID NO: 19542 - protein, 7 aa, synthetic construct
VCNGNIC

SEQ ID NO: 19543 - protein, 7 aa, synthetic construct
VATEGRD

SEQ ID NO: 19544 - protein, 7 aa, synthetic construct
REGIESW

SEQ ID NO: 19545 - protein, 7 aa, synthetic construct
AVEGCCG

SEQ ID NO: 19546 - protein, 7 aa, synthetic construct
ISGISMY

SEQ ID NO: 19547 - protein, 7 aa, synthetic construct
DWSRCSK

SEQ ID NO: 19548 - protein, 7 aa, synthetic construct
YWAGVES

SEQ ID NO: 19549 - protein, 7 aa, synthetic construct
FYSGVLS

SEQ ID NO: 19550 - protein, 7 aa, synthetic construct
RVADCAP

SEQ ID NO: 19551 - protein, 7 aa, synthetic construct
YIAGCGN

SEQ ID NO: 19552 - protein, 7 aa, synthetic construct
GSGQSIW

SEQ ID NO: 19553 - protein, 7 aa, synthetic construct
SLSSTTW

SEQ ID NO: 19554 - protein, 7 aa, synthetic construct
SLGGSTW

SEQ ID NO: 19555 - protein, 7 aa, synthetic construct
PIRVSDV

SEQ ID NO: 19556 - protein, 7 aa, synthetic construct
SCSTGYP

SEQ ID NO: 19557 - protein, 7 aa, synthetic construct
VGVSSSG

SEQ ID NO: 19558 - protein, 7 aa, synthetic construct
GLVSSAM

SEQ ID NO: 19559 - protein, 7 aa, synthetic construct
VGCAHLP

SEQ ID NO: 19560 - protein, 7 aa, synthetic construct
LHALSTD

SEQ ID NO: 19561 - protein, 7 aa, synthetic construct
ELDSRDW

SEQ ID NO: 19562 - protein, 7 aa, synthetic construct
DVRTDSN

SEQ ID NO: 19563 - protein, 7 aa, synthetic construct
VAGQITI

SEQ ID NO: 19564 - protein, 7 aa, synthetic construct
GVDRHMP

SEQ ID NO: 19565 - protein, 7 aa, synthetic construct
GCIIPGV

SEQ ID NO: 19566 - protein, 7 aa, synthetic construct
RLDDVLW

SEQ ID NO: 19567 - protein, 7 aa, synthetic construct
GGSTSVW

SEQ ID NO: 19568 - protein, 7 aa, synthetic construct
YFSGRES

SEQ ID NO: 19569 - protein, 7 aa, synthetic construct
GSSSSAW

SEQ ID NO: 19570 - protein, 7 aa, synthetic construct
RDRNSYV

SEQ ID NO: 19571 - protein, 7 aa, synthetic construct
LGGVLTV

SEQ ID NO: 19572 - protein, 7 aa, synthetic construct
MVACGCG

SEQ ID NO: 19573 - protein, 7 aa, synthetic construct
CDGVGVA

SEQ ID NO: 19574 - protein, 7 aa, synthetic construct
SGSTSGW

SEQ ID NO: 19575 - protein, 7 aa, synthetic construct
ELSSREW

SEQ ID NO: 19576 - protein, 7 aa, synthetic construct
GVKMNCS

SEQ ID NO: 19577 - protein, 7 aa, synthetic construct
WLKQTLL

SEQ ID NO: 19578 - protein, 7 aa, synthetic construct
RDIDCLS

SEQ ID NO: 19579 - protein, 7 aa, synthetic construct
RIYDAVP

SEQ ID NO: 19580 - protein, 7 aa, synthetic construct
GRAYAHP

SEQ ID NO: 19581 - protein, 7 aa, synthetic construct
VAGRCCR

SEQ ID NO: 19582 - protein, 7 aa, synthetic construct
GSAGVSW

SEQ ID NO: 19583 - protein, 7 aa, synthetic construct
MEVRESG

SEQ ID NO: 19584 - protein, 7 aa, synthetic construct
REGVSAW

SEQ ID NO: 19585 - protein, 7 aa, synthetic construct
TWEGSPA

SEQ ID NO: 19586 - protein, 7 aa, synthetic construct
GSHGVSW

SEQ ID NO: 19587 - protein, 7 aa, synthetic construct
GVRNVMP

SEQ ID NO: 19588 - protein, 7 aa, synthetic construct
DDSFYPS

SEQ ID NO: 19589 - protein, 7 aa, synthetic construct
LDICCKV

SEQ ID NO: 19590 - protein, 7 aa, synthetic construct
VGVSPLW

SEQ ID NO: 19591 - protein, 7 aa, synthetic construct
ALLAARS

SEQ ID NO: 19592 - protein, 7 aa, synthetic construct
DAYSGRD

SEQ ID NO: 19593 - protein, 7 aa, synthetic construct
GQDGNAW

SEQ ID NO: 19594 - protein, 7 aa, synthetic construct
SSGTSLW

SEQ ID NO: 19595 - protein, 7 aa, synthetic construct
SGASPLW

SEQ ID NO: 19596 - protein, 7 aa, synthetic construct
LLGVCDA

SEQ ID NO: 19597 - protein, 7 aa, synthetic construct
FVDPRCT

SEQ ID NO: 19598 - protein, 7 aa, synthetic construct
LASRDAA

SEQ ID NO: 19599 - protein, 7 aa, synthetic construct
TVHSLSD

SEQ ID NO: 19600 - protein, 7 aa, synthetic construct
GLKVGAI

SEQ ID NO: 19601 - protein, 7 aa, synthetic construct
QSSPLVR

SEQ ID NO: 19602 - protein, 7 aa, synthetic construct
VDDWSMY

SEQ ID NO: 19603 - protein, 7 aa, synthetic construct
DALEWRD

SEQ ID NO: 19604 - protein, 7 aa, synthetic construct
LSRAGFD

SEQ ID NO: 19605 - protein, 7 aa, synthetic construct
IFAGPGP

SEQ ID NO: 19606 - protein, 7 aa, synthetic construct
AMESTQW

SEQ ID NO: 19607 - protein, 7 aa, synthetic construct
HNIGRDV

SEQ ID NO: 19608 - protein, 7 aa, synthetic construct
RSETVYV

SEQ ID NO: 19609 - protein, 7 aa, synthetic construct
DEGNFRS

SEQ ID NO: 19610 - protein, 7 aa, synthetic construct
SRCEKVV

SEQ ID NO: 19611 - protein, 7 aa, synthetic construct
RTGSFCI

SEQ ID NO: 19612 - protein, 7 aa, synthetic construct
CGRSGTH

SEQ ID NO: 19613 - protein, 7 aa, synthetic construct
GELTVKW

SEQ ID NO: 19614 - protein, 7 aa, synthetic construct
YARNAPS

SEQ ID NO: 19615 - protein, 7 aa, synthetic construct
VDDWSLY

SEQ ID NO: 19616 - protein, 7 aa, synthetic construct
VTDYVTY

SEQ ID NO: 19617 - protein, 7 aa, synthetic construct
CTSGNEA

SEQ ID NO: 19618 - protein, 7 aa, synthetic construct
NESTSSW

SEQ ID NO: 19619 - protein, 7 aa, synthetic construct
CDSPCTA

SEQ ID NO: 19620 - protein, 7 aa, synthetic construct
RMMSGDW

SEQ ID NO: 19621 - protein, 7 aa, synthetic construct
LHGGCCA

SEQ ID NO: 19622 - protein, 7 aa, synthetic construct
VVNPGHD

SEQ ID NO: 19623 - protein, 7 aa, synthetic construct
SHDSCQN

SEQ ID NO: 19624 - protein, 7 aa, synthetic construct
VPPELHA

SEQ ID NO: 19625 - protein, 7 aa, synthetic construct
LLHTGNW

SEQ ID NO: 19626 - protein, 7 aa, synthetic construct
YNASGGN

SEQ ID NO: 19627 - protein, 7 aa, synthetic construct
DMTSSVW

SEQ ID NO: 19628 - protein, 7 aa, synthetic construct
ISGQSGW

SEQ ID NO: 19629 - protein, 7 aa, synthetic construct
VCCGPRG

SEQ ID NO: 19630 - protein, 7 aa, synthetic construct
LYEFDHT

SEQ ID NO: 19631 - protein, 7 aa, synthetic construct
LVNSVAR

SEQ ID NO: 19632 - protein, 7 aa, synthetic construct
LAASCCV

SEQ ID NO: 19633 - protein, 7 aa, synthetic construct
QLPGNCG

SEQ ID NO: 19634 - protein, 7 aa, synthetic construct
WHHGTNV

SEQ ID NO: 19635 - protein, 7 aa, synthetic construct
LSKLSYD

SEQ ID NO: 19636 - protein, 7 aa, synthetic construct
VHREDGV

SEQ ID NO: 19637 - protein, 7 aa, synthetic construct
GMDSNSV

SEQ ID NO: 19638 - protein, 7 aa, synthetic construct
ELGSHTW

SEQ ID NO: 19639 - protein, 7 aa, synthetic construct
SHALAPG

SEQ ID NO: 19640 - protein, 7 aa, synthetic construct
RGESVSW

SEQ ID NO: 19641 - protein, 7 aa, synthetic construct
RAIDSPM

SEQ ID NO: 19642 - protein, 7 aa, synthetic construct
GGSASTW

SEQ ID NO: 19643 - protein, 7 aa, synthetic construct
RMDDSYA

SEQ ID NO: 19644 - protein, 7 aa, synthetic construct
SFWGDLP

SEQ ID NO: 19645 - protein, 7 aa, synthetic construct
DEWTLSP

SEQ ID NO: 19646 - protein, 7 aa, synthetic construct
SWTGQAA

SEQ ID NO: 19647 - protein, 7 aa, synthetic construct
VANAGWD

SEQ ID NO: 19648 - protein, 7 aa, synthetic construct
DLSSNSW

SEQ ID NO: 19649 - protein, 7 aa, synthetic construct
VGYVGIG

SEQ ID NO: 19650 - protein, 7 aa, synthetic construct
VPQSVHW

SEQ ID NO: 19651 - protein, 7 aa, synthetic construct
MESQVRW

SEQ ID NO: 19652 - protein, 7 aa, synthetic construct
DGSARLW

SEQ ID NO: 19653 - protein, 7 aa, synthetic construct
RALSGAG

SEQ ID NO: 19654 - protein, 7 aa, synthetic construct
KFDFNAV

SEQ ID NO: 19655 - protein, 7 aa, synthetic construct
ANDYMSY

SEQ ID NO: 19656 - protein, 7 aa, synthetic construct
PARGETW

SEQ ID NO: 19657 - protein, 7 aa, synthetic construct
WLAASDK

SEQ ID NO: 19658 - protein, 7 aa, synthetic construct
GSREVAW

SEQ ID NO: 19659 - protein, 7 aa, synthetic construct
MLLESCG

SEQ ID NO: 19660 - protein, 7 aa, synthetic construct
VAHEGIG

SEQ ID NO: 19661 - protein, 7 aa, synthetic construct
MERGGST

SEQ ID NO: 19662 - protein, 7 aa, synthetic construct
YPNGNAG

SEQ ID NO: 19663 - protein, 7 aa, synthetic construct
YLKNDPL

SEQ ID NO: 19664 - protein, 7 aa, synthetic construct
DQSAHSW

SEQ ID NO: 19665 - protein, 7 aa, synthetic construct
VSTRPYS

SEQ ID NO: 19666 - protein, 7 aa, synthetic construct
REHTSNW

SEQ ID NO: 19667 - protein, 7 aa, synthetic construct
GRGQTGE

SEQ ID NO: 19668 - protein, 7 aa, synthetic construct
SVRPSHE

SEQ ID NO: 19669 - protein, 7 aa, synthetic construct
FASSMCC

SEQ ID NO: 19670 - protein, 7 aa, synthetic construct
PYSSIME

SEQ ID NO: 19671 - protein, 7 aa, synthetic construct
GSEVSSW

SEQ ID NO: 19672 - protein, 7 aa, synthetic construct
SEAGNTF

SEQ ID NO: 19673 - protein, 7 aa, synthetic construct
GQSTSSW

SEQ ID NO: 19674 - protein, 7 aa, synthetic construct
CVVDVRC

SEQ ID NO: 19675 - protein, 7 aa, synthetic construct
EPNGRGV

SEQ ID NO: 19676 - protein, 7 aa, synthetic construct
YFMGVRE

SEQ ID NO: 19677 - protein, 7 aa, synthetic construct
EGAETTP

SEQ ID NO: 19678 - protein, 7 aa, synthetic construct
CGCVMSP

SEQ ID NO: 19679 - protein, 7 aa, synthetic construct
ITGFSTD

SEQ ID NO: 19680 - protein, 7 aa, synthetic construct
ADGSQGA

SEQ ID NO: 19681 - protein, 7 aa, synthetic construct
YSANGPN

SEQ ID NO: 19682 - protein, 7 aa, synthetic construct
VDQASRA

SEQ ID NO: 19683 - protein, 7 aa, synthetic construct
SKFQRMD

SEQ ID NO: 19684 - protein, 7 aa, synthetic construct
ISCGTCD

SEQ ID NO: 19685 - protein, 7 aa, synthetic construct
ITSTNGA

SEQ ID NO: 19686 - protein, 7 aa, synthetic construct
TLGGNGC

SEQ ID NO: 19687 - protein, 7 aa, synthetic construct
DGSSSKW

SEQ ID NO: 19688 - protein, 7 aa, synthetic construct
REGYSHW

SEQ ID NO: 19689 - protein, 7 aa, synthetic construct
DRLPASH

SEQ ID NO: 19690 - protein, 7 aa, synthetic construct
GLPDRTW

SEQ ID NO: 19691 - protein, 7 aa, synthetic construct
SGFSESN

SEQ ID NO: 19692 - protein, 7 aa, synthetic construct
TVGVEWT

SEQ ID NO: 19693 - protein, 7 aa, synthetic construct
GGSTSGW

SEQ ID NO: 19694 - protein, 7 aa, synthetic construct
GELCCVG

SEQ ID NO: 19695 - protein, 7 aa, synthetic construct
PLASGSW

SEQ ID NO: 19696 - protein, 7 aa, synthetic construct
CKPSGVM

SEQ ID NO: 19697 - protein, 7 aa, synthetic construct
YVRSSDQ

SEQ ID NO: 19698 - protein, 7 aa, synthetic construct
VMSVSSW

SEQ ID NO: 19699 - protein, 7 aa, synthetic construct
SSDLASG

SEQ ID NO: 19700 - protein, 7 aa, synthetic construct
GCCDKPM

SEQ ID NO: 19701 - protein, 7 aa, synthetic construct
ELEGFQY

SEQ ID NO: 19702 - protein, 7 aa, synthetic construct
LDYLPPE

SEQ ID NO: 19703 - protein, 7 aa, synthetic construct
CQGLRLC

SEQ ID NO: 19704 - protein, 7 aa, synthetic construct
RFDGTPP

SEQ ID NO: 19705 - protein, 7 aa, synthetic construct
GESSHNL

SEQ ID NO: 19706 - protein, 7 aa, synthetic construct
RSEFTEY

SEQ ID NO: 19707 - protein, 7 aa, synthetic construct
APVSREW

SEQ ID NO: 19708 - protein, 7 aa, synthetic construct
GLPCCSA

SEQ ID NO: 19709 - protein, 7 aa, synthetic construct
YGPSTCN

SEQ ID NO: 19710 - protein, 7 aa, synthetic construct
IESREGI

SEQ ID NO: 19711 - protein, 7 aa, synthetic construct
GHCGRDC

SEQ ID NO: 19712 - protein, 7 aa, synthetic construct
IGSPTGV

SEQ ID NO: 19713 - protein, 7 aa, synthetic construct
WWSAMPN

SEQ ID NO: 19714 - protein, 7 aa, synthetic construct
HGDPMRW

SEQ ID NO: 19715 - protein, 7 aa, synthetic construct
CERRCVD

SEQ ID NO: 19716 - protein, 7 aa, synthetic construct
FVLLGDG

SEQ ID NO: 19717 - protein, 7 aa, synthetic construct
KCQGGCA

SEQ ID NO: 19718 - protein, 7 aa, synthetic construct
ITSFNGV

SEQ ID NO: 19719 - protein, 7 aa, synthetic construct
ISGGGAG

SEQ ID NO: 19720 - protein, 7 aa, synthetic construct
VNNSCLT

SEQ ID NO: 19721 - protein, 7 aa, synthetic construct
LDDYSMY

SEQ ID NO: 19722 - protein, 7 aa, synthetic construct
AGGTSLW

SEQ ID NO: 19723 - protein, 7 aa, synthetic construct
LETCCTA

SEQ ID NO: 19724 - protein, 7 aa, synthetic construct
WYSNIKD

SEQ ID NO: 19725 - protein, 7 aa, synthetic construct
SPSRTRP

SEQ ID NO: 19726 - protein, 7 aa, synthetic construct
WFSNIQA

SEQ ID NO: 19727 - protein, 7 aa, synthetic construct
SGAYMRA

SEQ ID NO: 19728 - protein, 7 aa, synthetic construct
RVTWVVG

SEQ ID NO: 19729 - protein, 7 aa, synthetic construct
SADAVRW

SEQ ID NO: 19730 - protein, 7 aa, synthetic construct
SWARSVE

SEQ ID NO: 19731 - protein, 7 aa, synthetic construct
GYAVSEC

SEQ ID NO: 19732 - protein, 7 aa, synthetic construct
QDVKGKW

SEQ ID NO: 19733 - protein, 7 aa, synthetic construct
CNQGGTV

SEQ ID NO: 19734 - protein, 7 aa, synthetic construct
ACRHGGP

SEQ ID NO: 19735 - protein, 7 aa, synthetic construct
NGRGGEW

SEQ ID NO: 19736 - protein, 7 aa, synthetic construct
REGGHLN

SEQ ID NO: 19737 - protein, 7 aa, synthetic construct
QSSLTQD

SEQ ID NO: 19738 - protein, 7 aa, synthetic construct
IQSSSGI

SEQ ID NO: 19739 - protein, 7 aa, synthetic construct
PYAVSPL

SEQ ID NO: 19740 - protein, 7 aa, synthetic construct
SKDCCIG

SEQ ID NO: 19741 - protein, 7 aa, synthetic construct
DHSAGSG

SEQ ID NO: 19742 - protein, 7 aa, synthetic construct
CINLWVQ

SEQ ID NO: 19743 - protein, 7 aa, synthetic construct
GTVPPGS

SEQ ID NO: 19744 - protein, 7 aa, synthetic construct
KVQDAYP

SEQ ID NO: 19745 - protein, 7 aa, synthetic construct
QFAYSRE

SEQ ID NO: 19746 - protein, 7 aa, synthetic construct
SDGFRIS

SEQ ID NO: 19747 - protein, 7 aa, synthetic construct
GSRAMYP

SEQ ID NO: 19748 - protein, 7 aa, synthetic construct
YSLVSTK

SEQ ID NO: 19749 - protein, 7 aa, synthetic construct
CAPSMEK

SEQ ID NO: 19750 - protein, 7 aa, synthetic construct
GSGPCCA

SEQ ID NO: 19751 - protein, 7 aa, synthetic construct
CLERSTL

SEQ ID NO: 19752 - protein, 7 aa, synthetic construct
NGFDGSW

SEQ ID NO: 19753 - protein, 7 aa, synthetic construct
PIDETCS

SEQ ID NO: 19754 - protein, 7 aa, synthetic construct
WDVGTWN

SEQ ID NO: 19755 - protein, 7 aa, synthetic construct
IMESATW

SEQ ID NO: 19756 - protein, 7 aa, synthetic construct
RDVVNGT

SEQ ID NO: 19757 - protein, 7 aa, synthetic construct
FGGNGLQ

SEQ ID NO: 19758 - protein, 7 aa, synthetic construct
GGDGSAY

SEQ ID NO: 19759 - protein, 7 aa, synthetic construct
GGGFVAY

SEQ ID NO: 19760 - protein, 7 aa, synthetic construct
FAKCSVV

SEQ ID NO: 19761 - protein, 7 aa, synthetic construct
STDYVSW

SEQ ID NO: 19762 - protein, 7 aa, synthetic construct
CGGACAS

SEQ ID NO: 19763 - protein, 7 aa, synthetic construct
CQTSDRP

SEQ ID NO: 19764 - protein, 7 aa, synthetic construct
LCAPAKC

SEQ ID NO: 19765 - protein, 7 aa, synthetic construct
AYRPLSG

SEQ ID NO: 19766 - protein, 7 aa, synthetic construct
WLKGLTD

SEQ ID NO: 19767 - protein, 7 aa, synthetic construct
ELLSSHW

SEQ ID NO: 19768 - protein, 7 aa, synthetic construct
TMGQGVP

SEQ ID NO: 19769 - protein, 7 aa, synthetic construct
CAPAFRE

SEQ ID NO: 19770 - protein, 7 aa, synthetic construct
DWHGLIA

SEQ ID NO: 19771 - protein, 7 aa, synthetic construct
LMGSCCP

SEQ ID NO: 19772 - protein, 7 aa, synthetic construct
NGMTERW

SEQ ID NO: 19773 - protein, 7 aa, synthetic construct
SMCWLLV

SEQ ID NO: 19774 - protein, 7 aa, synthetic construct
SIGVHRA

SEQ ID NO: 19775 - protein, 7 aa, synthetic construct
DSSRAYP

SEQ ID NO: 19776 - protein, 7 aa, synthetic construct
LSRAAHD

SEQ ID NO: 19777 - protein, 7 aa, synthetic construct
TGLATSC

SEQ ID NO: 19778 - protein, 7 aa, synthetic construct
NSDFKVF

SEQ ID NO: 19779 - protein, 7 aa, synthetic construct
GWLKELH

SEQ ID NO: 19780 - protein, 7 aa, synthetic construct
TSDYKTY

SEQ ID NO: 19781 - protein, 7 aa, synthetic construct
TYDNVFR

SEQ ID NO: 19782 - protein, 7 aa, synthetic construct
CIPCVPR

SEQ ID NO: 19783 - protein, 7 aa, synthetic construct
HWDGSAA

SEQ ID NO: 19784 - protein, 7 aa, synthetic construct
TDGKCCM

SEQ ID NO: 19785 - protein, 7 aa, synthetic construct
CIDSCVR

SEQ ID NO: 19786 - protein, 7 aa, synthetic construct
VPGYGAG

SEQ ID NO: 19787 - protein, 7 aa, synthetic construct
PNTTHGG

SEQ ID NO: 19788 - protein, 7 aa, synthetic construct
ASGQSAW

SEQ ID NO: 19789 - protein, 7 aa, synthetic construct
GRIAPHS

SEQ ID NO: 19790 - protein, 7 aa, synthetic construct
CLPGNAC

SEQ ID NO: 19791 - protein, 7 aa, synthetic construct
DSLSGRN

SEQ ID NO: 19792 - protein, 7 aa, synthetic construct
CAGECRA

SEQ ID NO: 19793 - protein, 7 aa, synthetic construct
RDGAVSW

SEQ ID NO: 19794 - protein, 7 aa, synthetic construct
YFAGQAE

SEQ ID NO: 19795 - protein, 7 aa, synthetic construct
WEGGLSG

SEQ ID NO: 19796 - protein, 7 aa, synthetic construct
VDASCSA

SEQ ID NO: 19797 - protein, 7 aa, synthetic construct
HETKVPA

SEQ ID NO: 19798 - protein, 7 aa, synthetic construct
KRDRLYG

SEQ ID NO: 19799 - protein, 7 aa, synthetic construct
RETGVEW

SEQ ID NO: 19800 - protein, 7 aa, synthetic construct
VPMRGAD

SEQ ID NO: 19801 - protein, 7 aa, synthetic construct
LVSKVSC

SEQ ID NO: 19802 - protein, 7 aa, synthetic construct
REPDVRY

SEQ ID NO: 19803 - protein, 7 aa, synthetic construct
LHRTSVD

SEQ ID NO: 19804 - protein, 7 aa, synthetic construct
YWSDKMA

SEQ ID NO: 19805 - protein, 7 aa, synthetic construct
MSRVSNN

SEQ ID NO: 19806 - protein, 7 aa, synthetic construct
KENHVTW

SEQ ID NO: 19807 - protein, 7 aa, synthetic construct
NLGSAHW

SEQ ID NO: 19808 - protein, 7 aa, synthetic construct
GLTGCCG

SEQ ID NO: 19809 - protein, 7 aa, synthetic construct
VPCGLVR

SEQ ID NO: 19810 - protein, 7 aa, synthetic construct
YFQGVAL

SEQ ID NO: 19811 - protein, 7 aa, synthetic construct
SSSSSTW

SEQ ID NO: 19812 - protein, 7 aa, synthetic construct
SVAKMTG

SEQ ID NO: 19813 - protein, 7 aa, synthetic construct
YVRSALN

SEQ ID NO: 19814 - protein, 7 aa, synthetic construct
HKWLDTD

SEQ ID NO: 19815 - protein, 7 aa, synthetic construct
TAGMPGA

SEQ ID NO: 19816 - protein, 7 aa, synthetic construct
AYYLKDS

SEQ ID NO: 19817 - protein, 7 aa, synthetic construct
GGELRTW

SEQ ID NO: 19818 - protein, 7 aa, synthetic construct
LGHGTWD

SEQ ID NO: 19819 - protein, 7 aa, synthetic construct
FPISGCG

SEQ ID NO: 19820 - protein, 7 aa, synthetic construct
FSHVDNG

SEQ ID NO: 19821 - protein, 7 aa, synthetic construct
ESSTHGV

SEQ ID NO: 19822 - protein, 7 aa, synthetic construct
FVCVMLV

SEQ ID NO: 19823 - protein, 7 aa, synthetic construct
YFEGKQS

SEQ ID NO: 19824 - protein, 7 aa, synthetic construct
EWARSLM

SEQ ID NO: 19825 - protein, 7 aa, synthetic construct
NDSTSKW

SEQ ID NO: 19826 - protein, 7 aa, synthetic construct
AADFVRY

SEQ ID NO: 19827 - protein, 7 aa, synthetic construct
LSGSCCA

SEQ ID NO: 19828 - protein, 7 aa, synthetic construct
LFSGEAP

SEQ ID NO: 19829 - protein, 7 aa, synthetic construct
RTADSFA

SEQ ID NO: 19830 - protein, 7 aa, synthetic construct
YTKLNDN

SEQ ID NO: 19831 - protein, 7 aa, synthetic construct
CELPCCE

SEQ ID NO: 19832 - protein, 7 aa, synthetic construct
YIKSDVG

SEQ ID NO: 19833 - protein, 7 aa, synthetic construct
NLLSLAH

SEQ ID NO: 19834 - protein, 7 aa, synthetic construct
GSHDSHW

SEQ ID NO: 19835 - protein, 7 aa, synthetic construct
GSAESCA

SEQ ID NO: 19836 - protein, 7 aa, synthetic construct
TINVAMA

SEQ ID NO: 19837 - protein, 7 aa, synthetic construct
FWNGNSP

SEQ ID NO: 19838 - protein, 7 aa, synthetic construct
AEISRSW

SEQ ID NO: 19839 - protein, 7 aa, synthetic construct
VTDGVRW

SEQ ID NO: 19840 - protein, 7 aa, synthetic construct
YFSAVAA

SEQ ID NO: 19841 - protein, 7 aa, synthetic construct
GEGTSHW

SEQ ID NO: 19842 - protein, 7 aa, synthetic construct
VIDRSLS

SEQ ID NO: 19843 - protein, 7 aa, synthetic construct
INESSKD

SEQ ID NO: 19844 - protein, 7 aa, synthetic construct
EMKAVHA

SEQ ID NO: 19845 - protein, 7 aa, synthetic construct
SGGGSSW

SEQ ID NO: 19846 - protein, 7 aa, synthetic construct
RDEINHW

SEQ ID NO: 19847 - protein, 7 aa, synthetic construct
YVRTDMY

SEQ ID NO: 19848 - protein, 7 aa, synthetic construct
CMSSPCS

SEQ ID NO: 19849 - protein, 7 aa, synthetic construct
WGSVCCA

SEQ ID NO: 19850 - protein, 7 aa, synthetic construct
RDVEVFP

SEQ ID NO: 19851 - protein, 7 aa, synthetic construct
VTFGNPL

SEQ ID NO: 19852 - protein, 7 aa, synthetic construct
LCRNYLT

SEQ ID NO: 19853 - protein, 7 aa, synthetic construct
PMGTALW

SEQ ID NO: 19854 - protein, 7 aa, synthetic construct
FFTHKMD

SEQ ID NO: 19855 - protein, 7 aa, synthetic construct
VRVMSSE

SEQ ID NO: 19856 - protein, 7 aa, synthetic construct
GSHVSSW

SEQ ID NO: 19857 - protein, 7 aa, synthetic construct
GASDSRW

SEQ ID NO: 19858 - protein, 7 aa, synthetic construct
GDGSSLW

SEQ ID NO: 19859 - protein, 7 aa, synthetic construct
FTRLHAD

SEQ ID NO: 19860 - protein, 7 aa, synthetic construct
RDGNSAY

SEQ ID NO: 19861 - protein, 7 aa, synthetic construct
RLSTNGI

SEQ ID NO: 19862 - protein, 7 aa, synthetic construct
SRSGSVV

SEQ ID NO: 19863 - protein, 7 aa, synthetic construct
LHRLSEG

SEQ ID NO: 19864 - protein, 7 aa, synthetic construct
TLADRGW

SEQ ID NO: 19865 - protein, 7 aa, synthetic construct
VGIASEA

SEQ ID NO: 19866 - protein, 7 aa, synthetic construct
TAGMILG

SEQ ID NO: 19867 - protein, 7 aa, synthetic construct
PLYDGPR

SEQ ID NO: 19868 - protein, 7 aa, synthetic construct
NDGSSSY

SEQ ID NO: 19869 - protein, 7 aa, synthetic construct
FTGTSGT

SEQ ID NO: 19870 - protein, 7 aa, synthetic construct
DLSKAMW

SEQ ID NO: 19871 - protein, 7 aa, synthetic construct
LSVVCCA

SEQ ID NO: 19872 - protein, 7 aa, synthetic construct
FDGNSAY

SEQ ID NO: 19873 - protein, 7 aa, synthetic construct
TMSSSAW

SEQ ID NO: 19874 - protein, 7 aa, synthetic construct
WPSGGQG

SEQ ID NO: 19875 - protein, 7 aa, synthetic construct
YSRGGPD

SEQ ID NO: 19876 - protein, 7 aa, synthetic construct
PSRAEAD

SEQ ID NO: 19877 - protein, 7 aa, synthetic construct
FEGQYKV

SEQ ID NO: 19878 - protein, 7 aa, synthetic construct
CLEVKIA

SEQ ID NO: 19879 - protein, 7 aa, synthetic construct
ASSLIIL

SEQ ID NO: 19880 - protein, 7 aa, synthetic construct
CGGSCAA

SEQ ID NO: 19881 - protein, 7 aa, synthetic construct
WTKDAAW

SEQ ID NO: 19882 - protein, 7 aa, synthetic construct
DRGFLQS

SEQ ID NO: 19883 - protein, 7 aa, synthetic construct
ALTSQSW

SEQ ID NO: 19884 - protein, 7 aa, synthetic construct
HGSGMMI

SEQ ID NO: 19885 - protein, 7 aa, synthetic construct
WARSSSG

SEQ ID NO: 19886 - protein, 7 aa, synthetic construct
VPTKGIG

SEQ ID NO: 19887 - protein, 7 aa, synthetic construct
TLLNSPN

SEQ ID NO: 19888 - protein, 7 aa, synthetic construct
LASRVTA

SEQ ID NO: 19889 - protein, 7 aa, synthetic construct
YARLGYD

SEQ ID NO: 19890 - protein, 7 aa, synthetic construct
CGHSCVS

SEQ ID NO: 19891 - protein, 7 aa, synthetic construct
VNKVCAD

SEQ ID NO: 19892 - protein, 7 aa, synthetic construct
DGLSGSD

SEQ ID NO: 19893 - protein, 7 aa, synthetic construct
YFSGSVF

SEQ ID NO: 19894 - protein, 7 aa, synthetic construct
MWSENHG

SEQ ID NO: 19895 - protein, 7 aa, synthetic construct
VNVVPTL

SEQ ID NO: 19896 - protein, 7 aa, synthetic construct
RTLTQGT

SEQ ID NO: 19897 - protein, 7 aa, synthetic construct
VLGSSNW

SEQ ID NO: 19898 - protein, 7 aa, synthetic construct
SVVGYGS

SEQ ID NO: 19899 - protein, 7 aa, synthetic construct
DLRGQAA

SEQ ID NO: 19900 - protein, 7 aa, synthetic construct
GDGSVRY

SEQ ID NO: 19901 - protein, 7 aa, synthetic construct
AFQTSMM

SEQ ID NO: 19902 - protein, 7 aa, synthetic construct
DYGGRLL

SEQ ID NO: 19903 - protein, 7 aa, synthetic construct
HPPLLVV

SEQ ID NO: 19904 - protein, 7 aa, synthetic construct
YFSNIPT

SEQ ID NO: 19905 - protein, 7 aa, synthetic construct
RDPMTSY

SEQ ID NO: 19906 - protein, 7 aa, synthetic construct
VSEFTTY

SEQ ID NO: 19907 - protein, 7 aa, synthetic construct
WRNPDIV

SEQ ID NO: 19908 - protein, 7 aa, synthetic construct
MVMLQSA

SEQ ID NO: 19909 - protein, 7 aa, synthetic construct
FGELREG

SEQ ID NO: 19910 - protein, 7 aa, synthetic construct
DYESRVW

SEQ ID NO: 19911 - protein, 7 aa, synthetic construct
APNTVSW

SEQ ID NO: 19912 - protein, 7 aa, synthetic construct
REVAVSW

SEQ ID NO: 19913 - protein, 7 aa, synthetic construct
TVNNVYH

SEQ ID NO: 19914 - protein, 7 aa, synthetic construct
VESVNGI

SEQ ID NO: 19915 - protein, 7 aa, synthetic construct
IATLGIG

SEQ ID NO: 19916 - protein, 7 aa, synthetic construct
GDVAGFS

SEQ ID NO: 19917 - protein, 7 aa, synthetic construct
YSKLDPL

SEQ ID NO: 19918 - protein, 7 aa, synthetic construct
STPSSPT

SEQ ID NO: 19919 - protein, 7 aa, synthetic construct
GCCPMEA

SEQ ID NO: 19920 - protein, 7 aa, synthetic construct
GSNLLPV

SEQ ID NO: 19921 - protein, 7 aa, synthetic construct
PGEVREW

SEQ ID NO: 19922 - protein, 7 aa, synthetic construct
FYTGVSA

SEQ ID NO: 19923 - protein, 7 aa, synthetic construct
SDPLSRP

SEQ ID NO: 19924 - protein, 7 aa, synthetic construct
LHRLQDD

SEQ ID NO: 19925 - protein, 7 aa, synthetic construct
GVDSVKW

SEQ ID NO: 19926 - protein, 7 aa, synthetic construct
SGSTSTW

SEQ ID NO: 19927 - protein, 7 aa, synthetic construct
KFDNSGS

SEQ ID NO: 19928 - protein, 7 aa, synthetic construct
YPSGGAG

SEQ ID NO: 19929 - protein, 7 aa, synthetic construct
CRCFRGI

SEQ ID NO: 19930 - protein, 7 aa, synthetic construct
DAGLAEV

SEQ ID NO: 19931 - protein, 7 aa, synthetic construct
KFDNTGS

SEQ ID NO: 19932 - protein, 7 aa, synthetic construct
CAPYLHE

SEQ ID NO: 19933 - protein, 7 aa, synthetic construct
FAAYVST

SEQ ID NO: 19934 - protein, 7 aa, synthetic construct
DVGLRPW

SEQ ID NO: 19935 - protein, 7 aa, synthetic construct
YYQGTVD

SEQ ID NO: 19936 - protein, 7 aa, synthetic construct
GNRDAVE

SEQ ID NO: 19937 - protein, 7 aa, synthetic construct
CGGPCQS

SEQ ID NO: 19938 - protein, 7 aa, synthetic construct
ASVAGVR

SEQ ID NO: 19939 - protein, 7 aa, synthetic construct
NVSHERG

SEQ ID NO: 19940 - protein, 7 aa, synthetic construct
IKMTGRD

SEQ ID NO: 19941 - protein, 7 aa, synthetic construct
GGTDRTW

SEQ ID NO: 19942 - protein, 7 aa, synthetic construct
CSPMRDC

SEQ ID NO: 19943 - protein, 7 aa, synthetic construct
DVYGGFA

SEQ ID NO: 19944 - protein, 7 aa, synthetic construct
NMGDRVW

SEQ ID NO: 19945 - protein, 7 aa, synthetic construct
EGPSRGW

SEQ ID NO: 19946 - protein, 7 aa, synthetic construct
GYGSPHS

SEQ ID NO: 19947 - protein, 7 aa, synthetic construct
DCRAACK

SEQ ID NO: 19948 - protein, 7 aa, synthetic construct
LPPLYQV

SEQ ID NO: 19949 - protein, 7 aa, synthetic construct
ATAVPKT

SEQ ID NO: 19950 - protein, 7 aa, synthetic construct
TPVKGAM

SEQ ID NO: 19951 - protein, 7 aa, synthetic construct
SDGSSNW

SEQ ID NO: 19952 - protein, 7 aa, synthetic construct
GQVADGW

SEQ ID NO: 19953 - protein, 7 aa, synthetic construct
GSGSSPW

SEQ ID NO: 19954 - protein, 7 aa, synthetic construct
LGHDYFP

SEQ ID NO: 19955 - protein, 7 aa, synthetic construct
LVGLKQL

SEQ ID NO: 19956 - protein, 7 aa, synthetic construct
SKDWSGS

SEQ ID NO: 19957 - protein, 7 aa, synthetic construct
YVRYDTG

SEQ ID NO: 19958 - protein, 7 aa, synthetic construct
EAHNPVY

SEQ ID NO: 19959 - protein, 7 aa, synthetic construct
ISDERCC

SEQ ID NO: 19960 - protein, 7 aa, synthetic construct
GVDYNTG

SEQ ID NO: 19961 - protein, 7 aa, synthetic construct
RDDSSSW

SEQ ID NO: 19962 - protein, 7 aa, synthetic construct
VHESVHW

SEQ ID NO: 19963 - protein, 7 aa, synthetic construct
VWADHSW

SEQ ID NO: 19964 - protein, 7 aa, synthetic construct
WKMGCAD

SEQ ID NO: 19965 - protein, 7 aa, synthetic construct
TPQSPMF

SEQ ID NO: 19966 - protein, 7 aa, synthetic construct
PLSSNLW

SEQ ID NO: 19967 - protein, 7 aa, synthetic construct
NGDDQSM

SEQ ID NO: 19968 - protein, 7 aa, synthetic construct
GPPESMI

SEQ ID NO: 19969 - protein, 7 aa, synthetic construct
VDREATA

SEQ ID NO: 19970 - protein, 7 aa, synthetic construct
CCSPQKV

SEQ ID NO: 19971 - protein, 7 aa, synthetic construct
TSSACCS

SEQ ID NO: 19972 - protein, 7 aa, synthetic construct
GWNSTLG

SEQ ID NO: 19973 - protein, 7 aa, synthetic construct
TNYGVGA

SEQ ID NO: 19974 - protein, 7 aa, synthetic construct
CGKQTCI

SEQ ID NO: 19975 - protein, 7 aa, synthetic construct
GNEGSSL

SEQ ID NO: 19976 - protein, 7 aa, synthetic construct
FDGTVPF

SEQ ID NO: 19977 - protein, 7 aa, synthetic construct
CGSSSNC

SEQ ID NO: 19978 - protein, 7 aa, synthetic construct
WLKDSTI

SEQ ID NO: 19979 - protein, 7 aa, synthetic construct
GGGSSGW

SEQ ID NO: 19980 - protein, 7 aa, synthetic construct
RLEVGSW

SEQ ID NO: 19981 - protein, 7 aa, synthetic construct
APGHVGW

SEQ ID NO: 19982 - protein, 7 aa, synthetic construct
LHRAGID

SEQ ID NO: 19983 - protein, 7 aa, synthetic construct
QLYDAGV

SEQ ID NO: 19984 - protein, 7 aa, synthetic construct
PMGANTW

SEQ ID NO: 19985 - protein, 7 aa, synthetic construct
LDAFSGW

SEQ ID NO: 19986 - protein, 7 aa, synthetic construct
YVRFEDP

SEQ ID NO: 19987 - protein, 7 aa, synthetic construct
SVTCTLP

SEQ ID NO: 19988 - protein, 7 aa, synthetic construct
KDSFTSW

SEQ ID NO: 19989 - protein, 7 aa, synthetic construct
GGPATTG

SEQ ID NO: 19990 - protein, 7 aa, synthetic construct
TSGPSRL

SEQ ID NO: 19991 - protein, 7 aa, synthetic construct
NRMDGDP

SEQ ID NO: 19992 - protein, 7 aa, synthetic construct
SNSTSGW

SEQ ID NO: 19993 - protein, 7 aa, synthetic construct
NVHSEPC

SEQ ID NO: 19994 - protein, 7 aa, synthetic construct
YAGEMIV

SEQ ID NO: 19995 - protein, 7 aa, synthetic construct
YWSGQGA

SEQ ID NO: 19996 - protein, 7 aa, synthetic construct
PANGVVG

SEQ ID NO: 19997 - protein, 7 aa, synthetic construct
LSAHTTP

SEQ ID NO: 19998 - protein, 7 aa, synthetic construct
VSDYASY

SEQ ID NO: 19999 - protein, 7 aa, synthetic construct
DWTGVMA

SEQ ID NO: 20000 - protein, 7 aa, synthetic construct
AYAPEVS

SEQ ID NO: 20001 - protein, 7 aa, synthetic construct
YDPTLTN

SEQ ID NO: 20002 - protein, 7 aa, synthetic construct
LLTPACD

SEQ ID NO: 20003 - protein, 7 aa, synthetic construct
IAHLGSG

SEQ ID NO: 20004 - protein, 7 aa, synthetic construct
SLDTVRW

SEQ ID NO: 20005 - protein, 7 aa, synthetic construct
WLIAEAD

SEQ ID NO: 20006 - protein, 7 aa, synthetic construct
GMSNSSW

SEQ ID NO: 20007 - protein, 7 aa, synthetic construct
GEDQVRW

SEQ ID NO: 20008 - protein, 7 aa, synthetic construct
RPGGSAG

SEQ ID NO: 20009 - protein, 7 aa, synthetic construct
ACSDCMV

SEQ ID NO: 20010 - protein, 7 aa, synthetic construct
CGIGSCH

SEQ ID NO: 20011 - protein, 7 aa, synthetic construct
VGSITQW

SEQ ID NO: 20012 - protein, 7 aa, synthetic construct
GAHTSTW

SEQ ID NO: 20013 - protein, 7 aa, synthetic construct
TVKGAAL

SEQ ID NO: 20014 - protein, 7 aa, synthetic construct
QPESRSW

SEQ ID NO: 20015 - protein, 7 aa, synthetic construct
GASSSSW

SEQ ID NO: 20016 - protein, 7 aa, synthetic construct
CGGCVGV

SEQ ID NO: 20017 - protein, 7 aa, synthetic construct
VVRCDGC

SEQ ID NO: 20018 - protein, 7 aa, synthetic construct
MEGRCCS

SEQ ID NO: 20019 - protein, 7 aa, synthetic construct
LVGLKSL

SEQ ID NO: 20020 - protein, 7 aa, synthetic construct
GDGVSLW

SEQ ID NO: 20021 - protein, 7 aa, synthetic construct
SVAPLCA

SEQ ID NO: 20022 - protein, 7 aa, synthetic construct
YSKLDAT

SEQ ID NO: 20023 - protein, 7 aa, synthetic construct
VWDAMGV

SEQ ID NO: 20024 - protein, 7 aa, synthetic construct
MPALDLG

SEQ ID NO: 20025 - protein, 7 aa, synthetic construct
LWDGQSA

SEQ ID NO: 20026 - protein, 7 aa, synthetic construct
TAWLKQD

SEQ ID NO: 20027 - protein, 7 aa, synthetic construct
HLASANW

SEQ ID NO: 20028 - protein, 7 aa, synthetic construct
YVRSSNE

SEQ ID NO: 20029 - protein, 7 aa, synthetic construct
LSSSNGR

SEQ ID NO: 20030 - protein, 7 aa, synthetic construct
AMADTTW

SEQ ID NO: 20031 - protein, 7 aa, synthetic construct
CGVMEKC

SEQ ID NO: 20032 - protein, 7 aa, synthetic construct
VSSTCTA

SEQ ID NO: 20033 - protein, 7 aa, synthetic construct
ICASRLS

SEQ ID NO: 20034 - protein, 7 aa, synthetic construct
SSQFVSY

SEQ ID NO: 20035 - protein, 7 aa, synthetic construct
SVSHEGG

SEQ ID NO: 20036 - protein, 7 aa, synthetic construct
LWNGVSS

SEQ ID NO: 20037 - protein, 7 aa, synthetic construct
FDSSNGR

SEQ ID NO: 20038 - protein, 7 aa, synthetic construct
TESSQGR

SEQ ID NO: 20039 - protein, 7 aa, synthetic construct
YFHGLPD

SEQ ID NO: 20040 - protein, 7 aa, synthetic construct
VGSSSSW

SEQ ID NO: 20041 - protein, 7 aa, synthetic construct
VVGCSPD

SEQ ID NO: 20042 - protein, 7 aa, synthetic construct
ASGNSSW

SEQ ID NO: 20043 - protein, 7 aa, synthetic construct
LKNGTPA

SEQ ID NO: 20044 - protein, 7 aa, synthetic construct
MEGKGWD

SEQ ID NO: 20045 - protein, 7 aa, synthetic construct
HPPDYSA

SEQ ID NO: 20046 - protein, 7 aa, synthetic construct
ETRLGAG

SEQ ID NO: 20047 - protein, 7 aa, synthetic construct
LTYDAGI

SEQ ID NO: 20048 - protein, 7 aa, synthetic construct
LPSAYPF

SEQ ID NO: 20049 - protein, 7 aa, synthetic construct
GGPTSQW

SEQ ID NO: 20050 - protein, 7 aa, synthetic construct
ITGVSGN

SEQ ID NO: 20051 - protein, 7 aa, synthetic construct
NCSIKPC

SEQ ID NO: 20052 - protein, 7 aa, synthetic construct
DRAPASA

SEQ ID NO: 20053 - protein, 7 aa, synthetic construct
VDRGSTI

SEQ ID NO: 20054 - protein, 7 aa, synthetic construct
YVRTDKG

SEQ ID NO: 20055 - protein, 7 aa, synthetic construct
GVDAGVR

SEQ ID NO: 20056 - protein, 7 aa, synthetic construct
DQSPVKW

SEQ ID NO: 20057 - protein, 7 aa, synthetic construct
PYAQSPM

SEQ ID NO: 20058 - protein, 7 aa, synthetic construct
CQDGSGA

SEQ ID NO: 20059 - protein, 7 aa, synthetic construct
KTDHVFP

SEQ ID NO: 20060 - protein, 7 aa, synthetic construct
GGDYSSF

SEQ ID NO: 20061 - protein, 7 aa, synthetic construct
VCRQSCE

SEQ ID NO: 20062 - protein, 7 aa, synthetic construct
WSAITDN

SEQ ID NO: 20063 - protein, 7 aa, synthetic construct
GGGSASW

SEQ ID NO: 20064 - protein, 7 aa, synthetic construct
REDSRSW

SEQ ID NO: 20065 - protein, 7 aa, synthetic construct
LATGDGP

SEQ ID NO: 20066 - protein, 7 aa, synthetic construct
VSHGSAG

SEQ ID NO: 20067 - protein, 7 aa, synthetic construct
ASETSTW

SEQ ID NO: 20068 - protein, 7 aa, synthetic construct
IMLPGHG

SEQ ID NO: 20069 - protein, 7 aa, synthetic construct
LSVAGRM

SEQ ID NO: 20070 - protein, 7 aa, synthetic construct
KWDSQGT

SEQ ID NO: 20071 - protein, 7 aa, synthetic construct
GLDSRAA

SEQ ID NO: 20072 - protein, 7 aa, synthetic construct
IMNSGVW

SEQ ID NO: 20073 - protein, 7 aa, synthetic construct
FSAPNAF

SEQ ID NO: 20074 - protein, 7 aa, synthetic construct
GSGQHGA

SEQ ID NO: 20075 - protein, 7 aa, synthetic construct
CNECPHP

SEQ ID NO: 20076 - protein, 7 aa, synthetic construct
SFNPKCE

SEQ ID NO: 20077 - protein, 7 aa, synthetic construct
SGVTDAR

SEQ ID NO: 20078 - protein, 7 aa, synthetic construct
EVERRAP

SEQ ID NO: 20079 - protein, 7 aa, synthetic construct
RGDSVHW

SEQ ID NO: 20080 - protein, 7 aa, synthetic construct
YQPLLTV

SEQ ID NO: 20081 - protein, 7 aa, synthetic construct
RPACTVC

SEQ ID NO: 20082 - protein, 7 aa, synthetic construct
GIHQEPH

SEQ ID NO: 20083 - protein, 7 aa, synthetic construct
VADPSAA

SEQ ID NO: 20084 - protein, 7 aa, synthetic construct
GPSSSLW

SEQ ID NO: 20085 - protein, 7 aa, synthetic construct
VAERGAG

SEQ ID NO: 20086 - protein, 7 aa, synthetic construct
TNESVYV

SEQ ID NO: 20087 - protein, 7 aa, synthetic construct
TSPVAVN

SEQ ID NO: 20088 - protein, 7 aa, synthetic construct
VERCCVA

SEQ ID NO: 20089 - protein, 7 aa, synthetic construct
CLDACNR

SEQ ID NO: 20090 - protein, 7 aa, synthetic construct
NGARLPG

SEQ ID NO: 20091 - protein, 7 aa, synthetic construct
DMSKSCV

SEQ ID NO: 20092 - protein, 7 aa, synthetic construct
AMTGAST

SEQ ID NO: 20093 - protein, 7 aa, synthetic construct
CLSCPKS

SEQ ID NO: 20094 - protein, 7 aa, synthetic construct
GSNTSGW

SEQ ID NO: 20095 - protein, 7 aa, synthetic construct
EPGSVRW

SEQ ID NO: 20096 - protein, 7 aa, synthetic construct
FYTGRSE

SEQ ID NO: 20097 - protein, 7 aa, synthetic construct
GSDRSGS

SEQ ID NO: 20098 - protein, 7 aa, synthetic construct
GRGDSGW

SEQ ID NO: 20099 - protein, 7 aa, synthetic construct
WNSNADN

SEQ ID NO: 20100 - protein, 7 aa, synthetic construct
SPSEVNS

SEQ ID NO: 20101 - protein, 7 aa, synthetic construct
LMDNVSH

SEQ ID NO: 20102 - protein, 7 aa, synthetic construct
LSDGWRD

SEQ ID NO: 20103 - protein, 7 aa, synthetic construct
GLEGSKW

SEQ ID NO: 20104 - protein, 7 aa, synthetic construct
DGAAIMS

SEQ ID NO: 20105 - protein, 7 aa, synthetic construct
WTKSQEW

SEQ ID NO: 20106 - protein, 7 aa, synthetic construct
RPESSQW

SEQ ID NO: 20107 - protein, 7 aa, synthetic construct
VEGRMWS

SEQ ID NO: 20108 - protein, 7 aa, synthetic construct
IDGTSMW

SEQ ID NO: 20109 - protein, 7 aa, synthetic construct
VPHDREW

SEQ ID NO: 20110 - protein, 7 aa, synthetic construct
GGSSSVW

SEQ ID NO: 20111 - protein, 7 aa, synthetic construct
RLPESTD

SEQ ID NO: 20112 - protein, 7 aa, synthetic construct
LGDSNMV

SEQ ID NO: 20113 - protein, 7 aa, synthetic construct
REEVGVW

SEQ ID NO: 20114 - protein, 7 aa, synthetic construct
DLDSYLD

SEQ ID NO: 20115 - protein, 7 aa, synthetic construct
LAKGGYD

SEQ ID NO: 20116 - protein, 7 aa, synthetic construct
LDGVSLY

SEQ ID NO: 20117 - protein, 7 aa, synthetic construct
REAQSGW

SEQ ID NO: 20118 - protein, 7 aa, synthetic construct
GLSSASW

SEQ ID NO: 20119 - protein, 7 aa, synthetic construct
YFEGMFD

SEQ ID NO: 20120 - protein, 7 aa, synthetic construct
GAPGDAK

SEQ ID NO: 20121 - protein, 7 aa, synthetic construct
CCGLKSG

SEQ ID NO: 20122 - protein, 7 aa, synthetic construct
GGHVSSW

SEQ ID NO: 20123 - protein, 7 aa, synthetic construct
NASTSSW

SEQ ID NO: 20124 - protein, 7 aa, synthetic construct
WSMTTDN

SEQ ID NO: 20125 - protein, 7 aa, synthetic construct
TQIAPDR

SEQ ID NO: 20126 - protein, 7 aa, synthetic construct
YLVMSSS

SEQ ID NO: 20127 - protein, 7 aa, synthetic construct
REEAERG

SEQ ID NO: 20128 - protein, 7 aa, synthetic construct
VGGTSLY

SEQ ID NO: 20129 - protein, 7 aa, synthetic construct
GVIQGCC

SEQ ID NO: 20130 - protein, 7 aa, synthetic construct
YWSAMAE

SEQ ID NO: 20131 - protein, 7 aa, synthetic construct
GSPSSGW

SEQ ID NO: 20132 - protein, 7 aa, synthetic construct
WSRLNSD

SEQ ID NO: 20133 - protein, 7 aa, synthetic construct
YFHAMQS

SEQ ID NO: 20134 - protein, 7 aa, synthetic construct
RSDTSSW

SEQ ID NO: 20135 - protein, 7 aa, synthetic construct
MSPMSQN

SEQ ID NO: 20136 - protein, 7 aa, synthetic construct
ELLAATW

SEQ ID NO: 20137 - protein, 7 aa, synthetic construct
YSKSSPL

SEQ ID NO: 20138 - protein, 7 aa, synthetic construct
EDRGLEG

SEQ ID NO: 20139 - protein, 7 aa, synthetic construct
RTPSEYP

SEQ ID NO: 20140 - protein, 7 aa, synthetic construct
GRVDMYD

SEQ ID NO: 20141 - protein, 7 aa, synthetic construct
CGRDYCP

SEQ ID NO: 20142 - protein, 7 aa, synthetic construct
SGGSHTW

SEQ ID NO: 20143 - protein, 7 aa, synthetic construct
DRCVQPC

SEQ ID NO: 20144 - protein, 7 aa, synthetic construct
CLSSPCS

SEQ ID NO: 20145 - protein, 7 aa, synthetic construct
VPDTVRY

SEQ ID NO: 20146 - protein, 7 aa, synthetic construct
CKGSCEQ

SEQ ID NO: 20147 - protein, 7 aa, synthetic construct
EWSAICK

SEQ ID NO: 20148 - protein, 7 aa, synthetic construct
REMSVHW

SEQ ID NO: 20149 - protein, 7 aa, synthetic construct
FLNGCCS

SEQ ID NO: 20150 - protein, 7 aa, synthetic construct
SPWGDPS

SEQ ID NO: 20151 - protein, 7 aa, synthetic construct
SEEAFPY

SEQ ID NO: 20152 - protein, 7 aa, synthetic construct
CFLSDCL

SEQ ID NO: 20153 - protein, 7 aa, synthetic construct
GSLDSRW

SEQ ID NO: 20154 - protein, 7 aa, synthetic construct
YFSREIS

SEQ ID NO: 20155 - protein, 7 aa, synthetic construct
VEPCCRM

SEQ ID NO: 20156 - protein, 7 aa, synthetic construct
VGPVLCS

SEQ ID NO: 20157 - protein, 7 aa, synthetic construct
AQSVGTW

SEQ ID NO: 20158 - protein, 7 aa, synthetic construct
LHKLSVG

SEQ ID NO: 20159 - protein, 7 aa, synthetic construct
ARADLGS

SEQ ID NO: 20160 - protein, 7 aa, synthetic construct
GSPSASW

SEQ ID NO: 20161 - protein, 7 aa, synthetic construct
VPGFGAG

SEQ ID NO: 20162 - protein, 7 aa, synthetic construct
GGAIREW

SEQ ID NO: 20163 - protein, 7 aa, synthetic construct
TAQSYTF

SEQ ID NO: 20164 - protein, 7 aa, synthetic construct
WLLKSDV

SEQ ID NO: 20165 - protein, 7 aa, synthetic construct
GPPHVAW

SEQ ID NO: 20166 - protein, 7 aa, synthetic construct
CSQVACP

SEQ ID NO: 20167 - protein, 7 aa, synthetic construct
VRSGSAG

SEQ ID NO: 20168 - protein, 7 aa, synthetic construct
CAITGCR

SEQ ID NO: 20169 - protein, 7 aa, synthetic construct
VMTSAGW

SEQ ID NO: 20170 - protein, 7 aa, synthetic construct
INSSSVW

SEQ ID NO: 20171 - protein, 7 aa, synthetic construct
CGSSCAA

SEQ ID NO: 20172 - protein, 7 aa, synthetic construct
GLESREW

SEQ ID NO: 20173 - protein, 7 aa, synthetic construct
TWTGDGA

SEQ ID NO: 20174 - protein, 7 aa, synthetic construct
DWLEKGI

SEQ ID NO: 20175 - protein, 7 aa, synthetic construct
PLMSGPI

SEQ ID NO: 20176 - protein, 7 aa, synthetic construct
WARGHDN

SEQ ID NO: 20177 - protein, 7 aa, synthetic construct
CGSSTCS

SEQ ID NO: 20178 - protein, 7 aa, synthetic construct
YANVAHN

SEQ ID NO: 20179 - protein, 7 aa, synthetic construct
VASMYGI

SEQ ID NO: 20180 - protein, 7 aa, synthetic construct
GSAASAW

SEQ ID NO: 20181 - protein, 7 aa, synthetic construct
SDGESSW

SEQ ID NO: 20182 - protein, 7 aa, synthetic construct
YWSGSIA

SEQ ID NO: 20183 - protein, 7 aa, synthetic construct
IAGRGAG

SEQ ID NO: 20184 - protein, 7 aa, synthetic construct
RGTEVYP

SEQ ID NO: 20185 - protein, 7 aa, synthetic construct
SSGSSTW

SEQ ID NO: 20186 - protein, 7 aa, synthetic construct
DDGDSRW

SEQ ID NO: 20187 - protein, 7 aa, synthetic construct
DMNVGAW

SEQ ID NO: 20188 - protein, 7 aa, synthetic construct
REGGGSW

SEQ ID NO: 20189 - protein, 7 aa, synthetic construct
VSGGALA

SEQ ID NO: 20190 - protein, 7 aa, synthetic construct
VGVSGNG

SEQ ID NO: 20191 - protein, 7 aa, synthetic construct
GELCCET

SEQ ID NO: 20192 - protein, 7 aa, synthetic construct
GGSGVSW

SEQ ID NO: 20193 - protein, 7 aa, synthetic construct
RSSVNGV

SEQ ID NO: 20194 - protein, 7 aa, synthetic construct
GVESSPQ

SEQ ID NO: 20195 - protein, 7 aa, synthetic construct
RDSGSAW

SEQ ID NO: 20196 - protein, 7 aa, synthetic construct
SSGSSMW

SEQ ID NO: 20197 - protein, 7 aa, synthetic construct
RTVDLFP

SEQ ID NO: 20198 - protein, 7 aa, synthetic construct
ASSGNLM

SEQ ID NO: 20199 - protein, 7 aa, synthetic construct
YSSSNGL

SEQ ID NO: 20200 - protein, 7 aa, synthetic construct
RENTPGW

SEQ ID NO: 20201 - protein, 7 aa, synthetic construct
ILSERAW

SEQ ID NO: 20202 - protein, 7 aa, synthetic construct
NERGGVV

SEQ ID NO: 20203 - protein, 7 aa, synthetic construct
TDEWQSY

SEQ ID NO: 20204 - protein, 7 aa, synthetic construct
VAASSTW

SEQ ID NO: 20205 - protein, 7 aa, synthetic construct
IHRALHD

SEQ ID NO: 20206 - protein, 7 aa, synthetic construct
CGVRCQD

SEQ ID NO: 20207 - protein, 7 aa, synthetic construct
GVPGTMP

SEQ ID NO: 20208 - protein, 7 aa, synthetic construct
LYGGSIG

SEQ ID NO: 20209 - protein, 7 aa, synthetic construct
DYSGRSA

SEQ ID NO: 20210 - protein, 7 aa, synthetic construct
SGLAYAM

SEQ ID NO: 20211 - protein, 7 aa, synthetic construct
GHSCCTL

SEQ ID NO: 20212 - protein, 7 aa, synthetic construct
CMPNCLV

SEQ ID NO: 20213 - protein, 7 aa, synthetic construct
AGGGYIL

SEQ ID NO: 20214 - protein, 7 aa, synthetic construct
NLRGSGA

SEQ ID NO: 20215 - protein, 7 aa, synthetic construct
GYSACSH

SEQ ID NO: 20216 - protein, 7 aa, synthetic construct
VLVDAYV

SEQ ID NO: 20217 - protein, 7 aa, synthetic construct
FEADAYP

SEQ ID NO: 20218 - protein, 7 aa, synthetic construct
NQLGDRL

SEQ ID NO: 20219 - protein, 7 aa, synthetic construct
GEVMSLT

SEQ ID NO: 20220 - protein, 7 aa, synthetic construct
WMAKVVE

SEQ ID NO: 20221 - protein, 7 aa, synthetic construct
NKWGDPS

SEQ ID NO: 20222 - protein, 7 aa, synthetic construct
GLIAPHS

SEQ ID NO: 20223 - protein, 7 aa, synthetic construct
RGIDEFP

SEQ ID NO: 20224 - protein, 7 aa, synthetic construct
IGLTGDW

SEQ ID NO: 20225 - protein, 7 aa, synthetic construct
GGGQTSW

SEQ ID NO: 20226 - protein, 7 aa, synthetic construct
PSSLMAS

SEQ ID NO: 20227 - protein, 7 aa, synthetic construct
MTGLSIV

SEQ ID NO: 20228 - protein, 7 aa, synthetic construct
GMSEVLW

SEQ ID NO: 20229 - protein, 7 aa, synthetic construct
TQVSSYK

SEQ ID NO: 20230 - protein, 7 aa, synthetic construct
WKSGGAL

SEQ ID NO: 20231 - protein, 7 aa, synthetic construct
QKGLGIA

SEQ ID NO: 20232 - protein, 7 aa, synthetic construct
WALATIH

SEQ ID NO: 20233 - protein, 7 aa, synthetic construct
SLIEKLR

SEQ ID NO: 20234 - protein, 7 aa, synthetic construct
LTLTNIK

SEQ ID NO: 20235 - protein, 7 aa, synthetic construct
YKLGLLG

SEQ ID NO: 20236 - protein, 7 aa, synthetic construct
YKSLSAA

SEQ ID NO: 20237 - protein, 7 aa, synthetic construct
SGLSTTK

SEQ ID NO: 20238 - protein, 7 aa, synthetic construct
ASLTSQH

SEQ ID NO: 20239 - protein, 7 aa, synthetic construct
NSLATFK

SEQ ID NO: 20240 - protein, 7 aa, synthetic construct
GKMGALS

SEQ ID NO: 20241 - protein, 7 aa, synthetic construct
TLMTKVG

SEQ ID NO: 20242 - protein, 7 aa, synthetic construct
STIASPH

SEQ ID NO: 20243 - protein, 7 aa, synthetic construct
ASLSSRS

SEQ ID NO: 20244 - protein, 7 aa, synthetic construct
SKGLGAV

SEQ ID NO: 20245 - protein, 7 aa, synthetic construct
TNVSNGK

SEQ ID NO: 20246 - protein, 7 aa, synthetic construct
MMTISTK

SEQ ID NO: 20247 - protein, 7 aa, synthetic construct
HSLSSSG

SEQ ID NO: 20248 - protein, 7 aa, synthetic construct
TTTSSHA

SEQ ID NO: 20249 - protein, 7 aa, synthetic construct
QAIKLMP

SEQ ID NO: 20250 - protein, 7 aa, synthetic construct
VITIGSK

SEQ ID NO: 20251 - protein, 7 aa, synthetic construct
DGMSMNR

SEQ ID NO: 20252 - protein, 7 aa, synthetic construct
SKLSLSG

SEQ ID NO: 20253 - protein, 7 aa, synthetic construct
TVPTQTK

SEQ ID NO: 20254 - protein, 7 aa, synthetic construct
SIGLVKP

SEQ ID NO: 20255 - protein, 7 aa, synthetic construct
WSLASTG

SEQ ID NO: 20256 - protein, 7 aa, synthetic construct
LKGSHAD

SEQ ID NO: 20257 - protein, 7 aa, synthetic construct
SKVPLMP

SEQ ID NO: 20258 - protein, 7 aa, synthetic construct
LSKMPFG

SEQ ID NO: 20259 - protein, 7 aa, synthetic construct
QWSSKLF

SEQ ID NO: 20260 - protein, 7 aa, synthetic construct
MSLKGVN

SEQ ID NO: 20261 - protein, 7 aa, synthetic construct
TLVSNTK

SEQ ID NO: 20262 - protein, 10 aa, synthetic construct
VGWSRLDLTT

SEQ ID NO: 20263 - protein, 10 aa, synthetic construct
GGLGNLRHCV

SEQ ID NO: 20264 - protein, 10 aa, synthetic construct
LGYVSIGAAC

SEQ ID NO: 20265 - protein, 10 aa, synthetic construct
REAGRIVSQE

SEQ ID NO: 20266 - protein, 10 aa, synthetic construct
LRYSKTQGES

SEQ ID NO: 20267 - protein, 10 aa, synthetic construct
KPYALNGREV

SEQ ID NO: 20268 - protein, 10 aa, synthetic construct
YSLTGGSICL

SEQ ID NO: 20269 - protein, 10 aa, synthetic construct
LGPPPAIGKC

SEQ ID NO: 20270 - protein, 10 aa, synthetic construct
LGFTKSSGSD

SEQ ID NO: 20271 - protein, 10 aa, synthetic construct
SPYARSSAGV

SEQ ID NO: 20272 - protein, 10 aa, synthetic construct
LGWASNSVAS

SEQ ID NO: 20273 - protein, 10 aa, synthetic construct
SSINGPPKWS

SEQ ID NO: 20274 - protein, 10 aa, synthetic construct
LGFARTGAAD

SEQ ID NO: 20275 - protein, 10 aa, synthetic construct
KTMNGMSRAI

SEQ ID NO: 20276 - protein, 10 aa, synthetic construct
KPLHALGSVL

SEQ ID NO: 20277 - protein, 10 aa, synthetic construct
FWPNSSLPIR

SEQ ID NO: 20278 - protein, 10 aa, synthetic construct
QRFSAASVSP

SEQ ID NO: 20279 - protein, 10 aa, synthetic construct
GNMLARQSAF

SEQ ID NO: 20280 - protein, 10 aa, synthetic construct
LRYSVAGSSV

SEQ ID NO: 20281 - protein, 10 aa, synthetic construct
IGMVPATGFC

SEQ ID NO: 20282 - protein, 10 aa, synthetic construct
SALLGVPKCT

SEQ ID NO: 20283 - protein, 10 aa, synthetic construct
DPHRVHLGLG

SEQ ID NO: 20284 - protein, 10 aa, synthetic construct
GVLKSLTWTG

SEQ ID NO: 20285 - protein, 10 aa, synthetic construct
IPFSRVNPDT

SEQ ID NO: 20286 - protein, 10 aa, synthetic construct
NLIVGFDPMA

SEQ ID NO: 20287 - protein, 10 aa, synthetic construct
LLPNLVGSRA

SEQ ID NO: 20288 - protein, 10 aa, synthetic construct
AGGHPEGYVN

SEQ ID NO: 20289 - protein, 7 aa, synthetic construct
YWTQRYA

SEQ ID NO: 20290 - protein, 7 aa, synthetic construct
YWGQRAV

SEQ ID NO: 20291 - protein, 7 aa, synthetic construct
YYSQQSR

SEQ ID NO: 20292 - protein, 7 aa, synthetic construct
FWTQKGS

SEQ ID NO: 20293 - protein, 7 aa, synthetic construct
YWSQRAF

SEQ ID NO: 20294 - protein, 7 aa, synthetic construct
YFGQSCR

SEQ ID NO: 20295 - protein, 7 aa, synthetic construct
FMYQKGC

SEQ ID NO: 20296 - protein, 7 aa, synthetic construct
ATRDLHR

SEQ ID NO: 20297 - protein, 7 aa, synthetic construct
FMRQSSC

SEQ ID NO: 20298 - protein, 7 aa, synthetic construct
YWGQGRC

SEQ ID NO: 20299 - protein, 7 aa, synthetic construct
FWGQRTG

SEQ ID NO: 20300 - protein, 7 aa, synthetic construct
FSHQRSL

SEQ ID NO: 20301 - protein, 7 aa, synthetic construct
FTLQRCL

SEQ ID NO: 20302 - protein, 7 aa, synthetic construct
YFAQHGF

SEQ ID NO: 20303 - protein, 7 aa, synthetic construct
YFGQGRS

SEQ ID NO: 20304 - protein, 7 aa, synthetic construct
RLFVKEA

SEQ ID NO: 20305 - protein, 7 aa, synthetic construct
FRSQQRT

SEQ ID NO: 20306 - protein, 7 aa, synthetic construct
FLSQRCA

SEQ ID NO: 20307 - protein, 7 aa, synthetic construct
FFKQVGK

SEQ ID NO: 20308 - protein, 7 aa, synthetic construct
FGFQKSQ

SEQ ID NO: 20309 - protein, 7 aa, synthetic construct
FIAQQRR

SEQ ID NO: 20310 - protein, 7 aa, synthetic construct
FSLQKRW

SEQ ID NO: 20311 - protein, 7 aa, synthetic construct
FVGQRGC

SEQ ID NO: 20312 - protein, 7 aa, synthetic construct
FRSQQFC

SEQ ID NO: 20313 - protein, 7 aa, synthetic construct
FIHQRNQ

SEQ ID NO: 20314 - protein, 7 aa, synthetic construct
FSAQRCA

SEQ ID NO: 20315 - protein, 7 aa, synthetic construct
FLSQKCH

SEQ ID NO: 20316 - protein, 7 aa, synthetic construct
FHSQGRS

SEQ ID NO: 20317 - protein, 7 aa, synthetic construct
WYSQMKG

SEQ ID NO: 20318 - protein, 7 aa, synthetic construct
CDGGVRM

SEQ ID NO: 20319 - protein, 7 aa, synthetic construct
VGYKGVG

SEQ ID NO: 20320 - protein, 7 aa, synthetic construct
FFKQVHC

SEQ ID NO: 20321 - protein, 7 aa, synthetic construct
FAYQRAS

SEQ ID NO: 20322 - protein, 7 aa, synthetic construct
FGAQKVY

SEQ ID NO: 20323 - protein, 7 aa, synthetic construct
ACNDSAR

SEQ ID NO: 20324 - protein, 7 aa, synthetic construct
YFLQKPC

SEQ ID NO: 20325 - protein, 7 aa, synthetic construct
NCAHVSG

SEQ ID NO: 20326 - protein, 7 aa, synthetic construct
ATKPALS

SEQ ID NO: 20327 - protein, 7 aa, synthetic construct
QDPIKAR

SEQ ID NO: 20328 - protein, 7 aa, synthetic construct
LSNTKCV

SEQ ID NO: 20329 - protein, 7 aa, synthetic construct
GLKSLTP

SEQ ID NO: 20330 - protein, 10 aa, synthetic construct
RLVTNKLVQL

SEQ ID NO: 20331 - protein, 10 aa, synthetic construct
RLAYMTDTLL

SEQ ID NO: 20332 - protein, 10 aa, synthetic construct
YRRMDMDRVV

SEQ ID NO: 20333 - protein, 10 aa, synthetic construct
LTGGQPRNRL

SEQ ID NO: 20334 - protein, 10 aa, synthetic construct
WWMGSDNSGI

SEQ ID NO: 20335 - protein, 10 aa, synthetic construct
VMGYLTEGCT

SEQ ID NO: 20336 - protein, 10 aa, synthetic construct
CPGDSQGSVG

SEQ ID NO: 20337 - protein, 10 aa, synthetic construct
SKTAREAFPF

SEQ ID NO: 20338 - protein, 10 aa, synthetic construct
VREGFEGYGL

SEQ ID NO: 20339 - protein, 10 aa, synthetic construct
ENFDRTRPRS

SEQ ID NO: 20340 - protein, 10 aa, synthetic construct
SYADAFCDRC

SEQ ID NO: 20341 - protein, 10 aa, synthetic construct
TYSGDGDVAC

SEQ ID NO: 20342 - protein, 10 aa, synthetic construct
RLRVDMGSWA

SEQ ID NO: 20343 - protein, 10 aa, synthetic construct
NYDSRSCSRC

SEQ ID NO: 20344 - protein, 10 aa, synthetic construct
AFPNLVSSRF

SEQ ID NO: 20345 - protein, 10 aa, synthetic construct
SYVSSSSTCI

SEQ ID NO: 20346 - protein, 10 aa, synthetic construct
QYLSGRVGQC

SEQ ID NO: 20347 - protein, 10 aa, synthetic construct
GISLNTRNHL

SEQ ID NO: 20348 - protein, 10 aa, synthetic construct
LSNDSNWVNC

SEQ ID NO: 20349 - protein, 10 aa, synthetic construct
REAWKRESGL

SEQ ID NO: 20350 - protein, 10 aa, synthetic construct
STVSVDRPRV

SEQ ID NO: 20351 - protein, 10 aa, synthetic construct
LMKTSYLESD

SEQ ID NO: 20352 - protein, 10 aa, synthetic construct
SRSTASMVCC

SEQ ID NO: 20353 - protein, 10 aa, synthetic construct
CPERSHSSVD

SEQ ID NO: 20354 - protein, 10 aa, synthetic construct
FFPNHNKSAQ

SEQ ID NO: 20355 - protein, 10 aa, synthetic construct
MDRLDRFTAC

SEQ ID NO: 20356 - protein, 10 aa, synthetic construct
ELFSQSRSGY

SEQ ID NO: 20357 - protein, 10 aa, synthetic construct
MYHLNVPKGV

SEQ ID NO: 20358 - protein, 10 aa, synthetic construct
LLPNGRGLVT

SEQ ID NO: 20359 - protein, 10 aa, synthetic construct
YFPNKLVEVA

SEQ ID NO: 20360 - protein, 7 aa, synthetic construct
YHKAMQN

SEQ ID NO: 20361 - protein, 7 aa, synthetic construct
YPSGMRL

SEQ ID NO: 20362 - protein, 7 aa, synthetic construct
YHKNMPN

SEQ ID NO: 20363 - protein, 7 aa, synthetic construct
YPFPTEA

SEQ ID NO: 20364 - protein, 7 aa, synthetic construct
VLGRPSY

SEQ ID NO: 20365 - protein, 7 aa, synthetic construct
NAREGRN

SEQ ID NO: 20366 - protein, 7 aa, synthetic construct
CRANCVP

SEQ ID NO: 20367 - protein, 7 aa, synthetic construct
LHRSGID

SEQ ID NO: 20368 - protein, 7 aa, synthetic construct
YFSGIQS

SEQ ID NO: 20369 - protein, 7 aa, synthetic construct
MIRDAYP

SEQ ID NO: 20370 - protein, 7 aa, synthetic construct
DHKGNIA

SEQ ID NO: 20371 - protein, 7 aa, synthetic construct
HHKLQTL

SEQ ID NO: 20372 - protein, 7 aa, synthetic construct
KPASTSW

SEQ ID NO: 20373 - protein, 7 aa, synthetic construct
YWSGIPE

SEQ ID NO: 20374 - protein, 7 aa, synthetic construct
RSKADDH

SEQ ID NO: 20375 - protein, 7 aa, synthetic construct
FPYGQKM

SEQ ID NO: 20376 - protein, 7 aa, synthetic construct
TDLTVYR

SEQ ID NO: 20377 - protein, 7 aa, synthetic construct
DMSTRTW

SEQ ID NO: 20378 - protein, 7 aa, synthetic construct
CKQGCMT

SEQ ID NO: 20379 - protein, 7 aa, synthetic construct
LHKFAEN

SEQ ID NO: 20380 - protein, 7 aa, synthetic construct
YVKSQVI

SEQ ID NO: 20381 - protein, 7 aa, synthetic construct
CNQKCAA

SEQ ID NO: 20382 - protein, 7 aa, synthetic construct
CNKLCTP

SEQ ID NO: 20383 - protein, 7 aa, synthetic construct
SYDGTAA

SEQ ID NO: 20384 - protein, 7 aa, synthetic construct
TFKHNPF

SEQ ID NO: 20385 - protein, 7 aa, synthetic construct
RESPYKL

SEQ ID NO: 20386 - protein, 7 aa, synthetic construct
CPRLGCA

SEQ ID NO: 20387 - protein, 7 aa, synthetic construct
PHVRQTI

SEQ ID NO: 20388 - protein, 7 aa, synthetic construct
CKQTCMM

SEQ ID NO: 20389 - protein, 7 aa, synthetic construct
RVNGDWP

SEQ ID NO: 20390 - protein, 7 aa, synthetic construct
CDKKCTT

SEQ ID NO: 20391 - protein, 7 aa, synthetic construct
CGQACKP

SEQ ID NO: 20392 - protein, 7 aa, synthetic construct
YHASGPK

SEQ ID NO: 20393 - protein, 7 aa, synthetic construct
KEGPVWP

SEQ ID NO: 20394 - protein, 7 aa, synthetic construct
HTRLSNG

SEQ ID NO: 20395 - protein, 7 aa, synthetic construct
LLASSEW

SEQ ID NO: 20396 - protein, 7 aa, synthetic construct
CTKTRDC

SEQ ID NO: 20397 - protein, 7 aa, synthetic construct
CEGRHTC

SEQ ID NO: 20398 - protein, 7 aa, synthetic construct
CNQRCAP

SEQ ID NO: 20399 - protein, 7 aa, synthetic construct
CNVTRNC

SEQ ID NO: 20400 - protein, 7 aa, synthetic construct
LRNGTNP

SEQ ID NO: 20401 - protein, 7 aa, synthetic construct
CSGSQKC

SEQ ID NO: 20402 - protein, 7 aa, synthetic construct
PCKTGGE

SEQ ID NO: 20403 - protein, 7 aa, synthetic construct
EPVARSW

SEQ ID NO: 20404 - protein, 7 aa, synthetic construct
VAYDAIV

SEQ ID NO: 20405 - protein, 7 aa, synthetic construct
CRADCHP

SEQ ID NO: 20406 - protein, 7 aa, synthetic construct
CALKNCP

SEQ ID NO: 20407 - protein, 7 aa, synthetic construct
QDVRQTK

SEQ ID NO: 20408 - protein, 7 aa, synthetic construct
CRGVTGC

SEQ ID NO: 20409 - protein, 7 aa, synthetic construct
CEKVLKP

SEQ ID NO: 20410 - protein, 7 aa, synthetic construct
YWHAKVE

SEQ ID NO: 20411 - protein, 7 aa, synthetic construct
QFVRSEP

SEQ ID NO: 20412 - protein, 7 aa, synthetic construct
DPVSPKW

SEQ ID NO: 20413 - protein, 7 aa, synthetic construct
CRTTCHE

SEQ ID NO: 20414 - protein, 7 aa, synthetic construct
CKSACHE

SEQ ID NO: 20415 - protein, 7 aa, synthetic construct
NLRGQAA

SEQ ID NO: 20416 - protein, 7 aa, synthetic construct
CARNSTC

SEQ ID NO: 20417 - protein, 7 aa, synthetic construct
VYHRTQE

SEQ ID NO: 20418 - protein, 7 aa, synthetic construct
CKDGPML

SEQ ID NO: 20419 - protein, 7 aa, synthetic construct
WYDGTGP

SEQ ID NO: 20420 - protein, 7 aa, synthetic construct
IMSSSAW

SEQ ID NO: 20421 - protein, 7 aa, synthetic construct
CKGQTMD

SEQ ID NO: 20422 - protein, 7 aa, synthetic construct
YSKSGPG

SEQ ID NO: 20423 - protein, 7 aa, synthetic construct
NMESRDW

SEQ ID NO: 20424 - protein, 7 aa, synthetic construct
CRIGVCP

SEQ ID NO: 20425 - protein, 7 aa, synthetic construct
RNDYNYP

SEQ ID NO: 20426 - protein, 7 aa, synthetic construct
PCKNGMA

SEQ ID NO: 20427 - protein, 7 aa, synthetic construct
CHKLNCA

SEQ ID NO: 20428 - protein, 7 aa, synthetic construct
CALQKCA

SEQ ID NO: 20429 - protein, 7 aa, synthetic construct
AGDDCKK

SEQ ID NO: 20430 - protein, 7 aa, synthetic construct
YNGGPMQ

SEQ ID NO: 20431 - protein, 7 aa, synthetic construct
PEDFHQL

SEQ ID NO: 20432 - protein, 7 aa, synthetic construct
CANHTKP

SEQ ID NO: 20433 - protein, 7 aa, synthetic construct
YKSDCCV

SEQ ID NO: 20434 - protein, 7 aa, synthetic construct
FTKTNCN

SEQ ID NO: 20435 - protein, 7 aa, synthetic construct
YTRTSPI

SEQ ID NO: 20436 - protein, 7 aa, synthetic construct
CIKNTAC

SEQ ID NO: 20437 - protein, 7 aa, synthetic construct
MYMSGKG

SEQ ID NO: 20438 - protein, 7 aa, synthetic construct
PDHDKCK

SEQ ID NO: 20439 - protein, 7 aa, synthetic construct
RAEDYFP

SEQ ID NO: 20440 - protein, 7 aa, synthetic construct
TKGGTYG

SEQ ID NO: 20441 - protein, 7 aa, synthetic construct
CMSTRCE

SEQ ID NO: 20442 - protein, 7 aa, synthetic construct
PGDTYPA

SEQ ID NO: 20443 - protein, 7 aa, synthetic construct
CGKLCSH

SEQ ID NO: 20444 - protein, 7 aa, synthetic construct
YHKASIG

SEQ ID NO: 20445 - protein, 7 aa, synthetic construct
TRNGMNA

SEQ ID NO: 20446 - protein, 7 aa, synthetic construct
CRANSGC

SEQ ID NO: 20447 - protein, 7 aa, synthetic construct
YKQGVMN

SEQ ID NO: 20448 - protein, 7 aa, synthetic construct
MKGGSAG

SEQ ID NO: 20449 - protein, 7 aa, synthetic construct
RDGMRGF

SEQ ID NO: 20450 - protein, 7 aa, synthetic construct
RMDTGKW

SEQ ID NO: 20451 - protein, 7 aa, synthetic construct
HHRAQDN

SEQ ID NO: 20452 - protein, 7 aa, synthetic construct
CNAMKCA

SEQ ID NO: 20453 - protein, 7 aa, synthetic construct
QLQSQQW

SEQ ID NO: 20454 - protein, 7 aa, synthetic construct
VLEDRSW

SEQ ID NO: 20455 - protein, 7 aa, synthetic construct
YARGSAL

SEQ ID NO: 20456 - protein, 7 aa, synthetic construct
CTQKGCS

SEQ ID NO: 20457 - protein, 7 aa, synthetic construct
NEAASTW

SEQ ID NO: 20458 - protein, 7 aa, synthetic construct
WLVKTSG

SEQ ID NO: 20459 - protein, 7 aa, synthetic construct
CGSKVCN

SEQ ID NO: 20460 - protein, 7 aa, synthetic construct
CSKSCMV

SEQ ID NO: 20461 - protein, 7 aa, synthetic construct
CSSVKCM

SEQ ID NO: 20462 - protein, 7 aa, synthetic construct
LWRTEPD

SEQ ID NO: 20463 - protein, 7 aa, synthetic construct
CGQKCSH

SEQ ID NO: 20464 - protein, 7 aa, synthetic construct
CADRCNS

SEQ ID NO: 20465 - protein, 7 aa, synthetic construct
YSKSMPN

SEQ ID NO: 20466 - protein, 7 aa, synthetic construct
IMAHNNW

SEQ ID NO: 20467 - protein, 7 aa, synthetic construct
CPKQLCI

SEQ ID NO: 20468 - protein, 7 aa, synthetic construct
CRLGECH

SEQ ID NO: 20469 - protein, 7 aa, synthetic construct
DLRASQW

SEQ ID NO: 20470 - protein, 7 aa, synthetic construct
CRDQCMQ

SEQ ID NO: 20471 - protein, 7 aa, synthetic construct
YAKSSPS

SEQ ID NO: 20472 - protein, 7 aa, synthetic construct
QSDYKYF

SEQ ID NO: 20473 - protein, 7 aa, synthetic construct
LSRSGRD

SEQ ID NO: 20474 - protein, 7 aa, synthetic construct
YHRLDAM

SEQ ID NO: 20475 - protein, 7 aa, synthetic construct
MRSGSGP

SEQ ID NO: 20476 - protein, 7 aa, synthetic construct
HPLASGW

SEQ ID NO: 20477 - protein, 7 aa, synthetic construct
GGTRGNT

SEQ ID NO: 20478 - protein, 7 aa, synthetic construct
YAKSAQN

SEQ ID NO: 20479 - protein, 7 aa, synthetic construct
TVGSRTA

SEQ ID NO: 20480 - protein, 7 aa, synthetic construct
YQKNMMN

SEQ ID NO: 20481 - protein, 7 aa, synthetic construct
WKDWMPN

SEQ ID NO: 20482 - protein, 15 aa, synthetic construct
GGGGGGGGGGGGGGG

SEQ ID NO: 20483 - protein, 15 aa, synthetic construct
GGGGSGGGGSGGGGS

SEQ ID NO: 20484 - protein, 12 aa, synthetic construct
YFLASRKXNGXN

SEQ ID NO: 20485 - protein, 10 aa, synthetic construct
XXSSTNGIVR

SEQ ID NO: 20486 - protein, 7 aa, synthetic construct
PSATNGV

SEQ ID NO: 20487 - protein, 8 aa, synthetic construct
  source 1..8: note = Adeno-associated virus
  VARIANT 1: note = X is any amino acid residue other than D, K, R
  VARIANT 2: note = X is any amino acid residue other than P
  VARIANT 8: note = X is V, I, or R
XXSTSNGX

SEQ ID NO: 20488 - protein, 7 aa, synthetic construct
  VARIANT 5: note = X is D, E, Q, N, or A
  VARIANT 6: note = X is N, V, T, P, G, S, M, or A
  VARIANT 7: note = X is C, G, I, A, N, R, K, S, or T
YVKSXXX

SEQ ID NO: 20489 - protein, 7 aa, synthetic construct
  VARIANT 5: note = X is D, E, Q, N, or A
  VARIANT 6: note = X is N, V, T, P, G, S, M, or A
  VARIANT 7: note = X is C, G, I, A, N, R, K, S, or T
YVKTXXX

SEQ ID NO: 20490 - protein, 7 aa, synthetic construct
  VARIANT 5: note = X is D, E, Q, N, or A
  VARIANT 6: note = X is N, V, T, P, G, S, M, or A
  VARIANT 7: note = X is C, G, I, A, N, R, K, S, or T
YVRTXXX

SEQ ID NO: 20491 - protein, 7 aa, synthetic construct
  VARIANT 5: note = X is A, V, F, T, or S
RXXDXYP

SEQ ID NO: 20492 - protein, 9 aa, synthetic construct
YWFLASTRK

SEQ ID NO: 20493 - DNA, 57 bp, synthetic construct
  source 1..57: mol_type = other DNA; mol_type = other DNA
atggagtttgggctgagctgggttttcctcgttgctctttttagaggtgtccagtgt

SEQ ID NO: 20494 - protein, 83 aa, synthetic construct
GTATTCCTTGGTTTTGAACCCAACCGGTCTGCGCCTGTGCMNNMNNMNNMNNMNNMNNMNNTTGGGCACTCTGGTGGTTTGTG

SEQ ID NO: 20495 - DNA, 30 bp, synthetic construct
  source 1..30: mol_type = other DNA; mol_type = other DNA
cactcatcgaccaatacttgtactatctct

SEQ ID NO: 20496 - protein, 86 aa, synthetic construct
ATCGACCAATACTTGTACTATCTCTCTAGAACTNNKNNKNNKNNKNNKNNKNNKNNKNNKNNKCTAAAATTCAGTGTGGCCGGACC

SEQ ID NO: 20497 - DNA, 77 bp, synthetic construct
  source 1..77: mol_type = other DNA; mol_type = other DNA
atcgaccaatacttgtactatctctctagaactnnknnknnknnknnknnknnkctaaaattcagtgtggccggacc

SEQ ID NO: 20498 - DNA, 25 bp, synthetic construct
  source 1..25: mol_type = other DNA; mol_type = other DNA
ttgtccttgttgaaggccgttggag

SEQ ID NO: 20499 - DNA, 26 bp, synthetic construct
  source 1..26: mol_type = other DNA; mol_type = other DNA
gtattccttggttttgaacccaaccg

SEQ ID NO: 20500 - protein, 12 aa, synthetic construct
FLYASKRXGNXN

SEQ ID NO: 20501 - protein, 7 aa, synthetic construct
  VARIANT 1: note = X is S, Y, D, N, or A
  VARIANT 6: note = X is L, Y, V, A, Q, or E
  VARIANT 7: note = X is L, A, P, D, N, or I
XYAKSXX

SEQ ID NO: 20502 - protein, 8 aa, synthetic construct
RSVSSNGV

SEQ ID NO: 20503 - protein, 7 aa, synthetic construct
  VARIANT 1: note = X is V, P, D, S, or L
  VARIANT 5: note = X is N, G, V, S, H, A, or R
  VARIANT 6: note = X is V, N, S, H, D, or R
XKSSXXW

SEQ ID NO: 20504 - protein, 7 aa, synthetic construct
  VARIANT 5: note = X is D, E, Q, N, or A
  VARIANT 6: note = X is N, V, T, P, G, S, M, or A
  VARIANT 7: note = X is C, G, I, A, N, R, K, S, or T
YVRSXXX

SEQ ID NO: 20505 - protein, 10 aa, synthetic construct
XXSSTNGVIR

SEQ ID NO: 20506 - protein, 736 aa, synthetic construct
MAADGYLPDWLEDNLSEGIREWWALKPGAPQPKANQQHQDNARGLVLPGYKYLGPGNGLDKGEPVNAADAAALEHDKAYDQQLKAGDNPYLKYNHADAEFQERLKEDTSFGGNLGRAVFQAKKRLLEPLGLVEEAAKTAPGKKRPVEQSPQEPDSSAGIGKSGAQPAKKRLNFGQTGDTESVPDPQPIGEPPAAPSGVGSLTMASGGGAPVADNNEGADGVGSSSGNWHCDSQWLGDRVITTSTRTWALPTYNNHLYKQISNSTSGGSSNDNAYFGYSTPWGYFDFNRFHCHFSPRDWQRLINNNWGFRPKRLNFKLFNIQVKEVTDNNGVKTIANNLTSTVQVFTDSDYQLPYVLGSAHEGCLPPFPADVFMIPQYGYLTLNDGSQAVGRSSFYCLEYFPSQMLRTGNNFQFSYEFENVPFHSSYAHSQSLDRLMNPLIDQYLYYLSKTINGSGQNQQTLKFSVAGPSNMAVQGRNYIPGPSYRQQRVSTTVTQNNNSEFAWPGASSWALNGRNSLMNPGPAMASHKEGEDRFFPLSGSLIFGKQGTGRDNVDADKVMITNEEEIKTTNPVATESYGQVATNHQSAQAQAQTGWVQNQGILPGMVWQDRDVYLQGPIWAKIPHTDGNFHPSPLMGGFGMKHPPPQILIKNTPVPADPPTAFNKDKLNSFITQYSTGQVSVEIEWELQKENSKRWNPEIQYTSNYYKSNNVEFAVNTEGVYSEPRPIGTRYLTRNL

SEQ ID NO: 20507 - protein, 736 aa, synthetic construct
MAADGYLPDWLEDNLSEGIREWWALKPGAPQPKANQQHQDNARGLVLPGYKYLGPGNGLDKGEPVNAADAAALEHDKAYDQQLKAGDNPYLKYNHADAEFQERLKEDTSFGGNLGRAVFQAKKRLLEPLGLVEEAAKTAPGKKRPVEQSPQEPDSSAGIGKSGAQPAKKRLNFGQTGDTESVPDPQPIGEPPAAPSGVGSLTMASGGGAPVADNNEGADGVGSSSGNWHCDSQWLGDRVITTSTRTWALPTYNNHLYKQISNSTSGGSSNDNAYFGYSTPWGYFDFNRFHCHFSPRDWQRLINNNWGFRPKRLNFKLFNIQVKEVTDNNGVKTIANNLTSTVQVFTDSDYQLPYVLGSAHEGCLPPFPADVFMIPQYGYLTLNDGSQAVGRSSFYCLEYFPSQMLRTGNNFQFSYEFENVPFHSSYAHSQSLDRLMNPLIDQYLYYLSRTINGSGQNQQTLKFSVAGPSNMAVQGRNYIPGPSYRQQRVSTTVTQNNNSEFAWPGASSWALNGRNSLMNPGPAMASHKEGEDRFFPLSGSLIFGKQGTGRDNVDADKVMITNEEEIKTTNPVATESYGQVATNHQSAQAQAQTGWVQNQGILPGMVWQDRDVYLQGPIWAKIPHTDGNFHPSPLMGGFGMKHPPPQILIKNTPVPADPPTAFNKDKLNSFITQYSTGQVSVEIEWELQKENSKRWNPEIQYTSNYYKSNNVEFAVNTEGVYSEPRPIGTRYLTRNL

SEQ ID NO: 20508 - protein, 743 aa, synthetic construct
MAADGYLPDWLEDNLSEGIREWWALKPGAPQPKANQQHQDNARGLVLPGYKYLGPGNGLDKGEPVNAADAAALEHDKAYDQQLKAGDNPYLKYNHADAEFQERLKEDTSFGGNLGRAVFQAKKRLLEPLGLVEEAAKTAPGKKRPVEQSPQEPDSSAGIGKSGAQPAKKRLNFGQTGDTESVPDPQPIGEPPAAPSGVGSLTMASGGGAPVADNNEGADGVGSSSGNWHCDSQWLGDRVITTSTRTWALPTYNNHLYKQISNSTSGGSSNDNAYFGYSTPWGYFDFNRFHCHFSPRDWQRLINNNWGFRPKRLNFKLFNIQVKEVTDNNGVKTIANNLTSTVQVFTDSDYQLPYVLGSAHEGCLPPFPADVFMIPQYGYLTLNDGSQAVGRSSFYCLEYFPSQMLRTGNNFQFSYEFENVPFHSSYAHSQSLDRLMNPLIDQYLYYLSRTINGSGQNQQTLKFSVAGPSNMAVQGRNYIPGPSYRQQRVSTTVTQNNNSEFAWPGASSWALNGRNSLMNPGPAMASHKEGEDRFFPLSGSLIFGKQGTGRDNVDADKVMITNEEEIKTTNPVATESYGQVATNHQSAQYSRIGPNAQAQTGWVQNQGILPGMVWQDRDVYLQGPIWAKIPHTDGNFHPSPLMGGFGMKHPPPQILIKNTPVPADPPTAFNKDKLNSFITQYSTGQVSVEIEWELQKENSKRWNPEIQYTSNYYKSNNVEFAVNTEGVYSEPRPIGTRYLTRNL

SEQ ID NO: 20509 - protein, 743 aa, synthetic construct
MAADGYLPDWLEDNLSEGIREWWALKPGAPQPKANQQHQDNARGLVLPGYKYLGPGNGLDKGEPVNAADAAALEHDKAYDQQLKAGDNPYLKYNHADAEFQERLKEDTSFGGNLGRAVFQAKKRLLEPLGLVEEAAKTAPGKKRPVEQSPQEPDSSAGIGKSGAQPAKKRLNFGQTGDTESVPDPQPIGEPPAAPSGVGSLTMASGGGAPVADNNEGADGVGSSSGNWHCDSQWLGDRVITTSTRTWALPTYNNHLYKQISNSTSGGSSNDNAYFGYSTPWGYFDFNRFHCHFSPRDWQRLINNNWGFRPKRLNFKLFNIQVKEVTDNNGVKTIANNLTSTVQVFTDSDYQLPYVLGSAHEGCLPPFPADVFMIPQYGYLTLNDGSQAVGRSSFYCLEYFPSQMLRTGNNFQFSYEFENVPFHSSYAHSQSLDRLMNPLIDQYLYYLSRTINGSGQNQQTLKFSVAGPSNMAVQGRNYIPGPSYRQQRVSTTVTQNNNSEFAWPGASSWALNGRNSLMNPGPAMASHKEGEDRFFPLSGSLIFGKQGTGRDNVDADKVMITNEEEIKTTNPVATESYGQVATNHQSAQYSRLNMNAQAQTGWVQNQGILPGMVWQDRDVYLQGPIWAKIPHTDGNFHPSPLMGGFGMKHPPPQILIKNTPVPADPPTAFNKDKLNSFITQYSTGQVSVEIEWELQKENSKRWNPEIQYTSNYYKSNNVEFAVNTEGVYSEPRPIGTRYLTRNL

SEQ ID NO: 20510 - protein, 743 aa, synthetic construct
MAADGYLPDWLEDNLSEGIREWWALKPGAPQPKANQQHQDNARGLVLPGYKYLGPGNGLDKGEPVNAADAAALEHDKAYDQQLKAGDNPYLKYNHADAEFQERLKEDTSFGGNLGRAVFQAKKRLLEPLGLVEEAAKTAPGKKRPVEQSPQEPDSSAGIGKSGAQPAKKRLNFGQTGDTESVPDPQPIGEPPAAPSGVGSLTMASGGGAPVADNNEGADGVGSSSGNWHCDSQWLGDRVITTSTRTWALPTYNNHLYKQISNSTSGGSSNDNAYFGYSTPWGYFDFNRFHCHFSPRDWQRLINNNWGFRPKRLNFKLFNIQVKEVTDNNGVKTIANNLTSTVQVFTDSDYQLPYVLGSAHEGCLPPFPADVFMIPQYGYLTLNDGSQAVGRSSFYCLEYFPSQMLRTGNNFQFSYEFENVPFHSSYAHSQSLDRLMNPLIDQYLYYLSRTINGSGQNQQTLKFSVAGPSNMAVQGRNYIPGPSYRQQRVSTTVTQNNNSEFAWPGASSWALNGRNSLMNPGPAMASHKEGEDRFFPLSGSLIFGKQGTGRDNVDADKVMITNEEEIKTTNPVATESYGQVATNHQSAQYSRLNKDAQAQTGWVQNQGILPGMVWQDRDVYLQGPIWAKIPHTDGNFHPSPLMGGFGMKHPPPQILIKNTPVPADPPTAFNKDKLNSFITQYSTGQVSVEIEWELQKENSKRWNPEIQYTSNYYKSNNVEFAVNTEGVYSEPRPIGTRYLTRNL

SEQ ID NO: 20511 - protein, 743 aa, synthetic construct
MAADGYLPDWLEDNLSEGIREWWALKPGAPQPKANQQHQDNARGLVLPGYKYLGPGNGLDKGEPVNAADAAALEHDKAYDQQLKAGDNPYLKYNHADAEFQERLKEDTSFGGNLGRAVFQAKKRLLEPLGLVEEAAKTAPGKKRPVEQSPQEPDSSAGIGKSGAQPAKKRLNFGQTGDTESVPDPQPIGEPPAAPSGVGSLTMASGGGAPVADNNEGADGVGSSSGNWHCDSQWLGDRVITTSTRTWALPTYNNHLYKQISNSTSGGSSNDNAYFGYSTPWGYFDFNRFHCHFSPRDWQRLINNNWGFRPKRLNFKLFNIQVKEVTDNNGVKTIANNLTSTVQVFTDSDYQLPYVLGSAHEGCLPPFPADVFMIPQYGYLTLNDGSQAVGRSSFYCLEYFPSQMLRTGNNFQFSYEFENVPFHSSYAHSQSLDRLMNPLIDQYLYYLSRTINGSGQNQQTLKFSVAGPSNMAVQGRNYIPGPSYRQQRVSTTVTQNNNSEFAWPGASSWALNGRNSLMNPGPAMASHKEGEDRFFPLSGSLIFGKQGTGRDNVDADKVMITNEEEIKTTNPVATESYGQVATNHQSAQVHRLQDKAQAQTGWVQNQGILPGMVWQDRDVYLQGPIWAKIPHTDGNFHPSPLMGGFGMKHPPPQILIKNTPVPADPPTAFNKDKLNSFITQYSTGQVSVEIEWELQKENSKRWNPEIQYTSNYYKSNNVEFAVNTEGVYSEPRPIGTRYLTRNL

SEQ ID NO: 20512 - protein, 743 aa, synthetic construct
MAADGYLPDWLEDNLSEGIREWWALKPGAPQPKANQQHQDNARGLVLPGYKYLGPGNGLDKGEPVNAADAAALEHDKAYDQQLKAGDNPYLKYNHADAEFQERLKEDTSFGGNLGRAVFQAKKRLLEPLGLVEEAAKTAPGKKRPVEQSPQEPDSSAGIGKSGAQPAKKRLNFGQTGDTESVPDPQPIGEPPAAPSGVGSLTMASGGGAPVADNNEGADGVGSSSGNWHCDSQWLGDRVITTSTRTWALPTYNNHLYKQISNSTSGGSSNDNAYFGYSTPWGYFDFNRFHCHFSPRDWQRLINNNWGFRPKRLNFKLFNIQVKEVTDNNGVKTIANNLTSTVQVFTDSDYQLPYVLGSAHEGCLPPFPADVFMIPQYGYLTLNDGSQAVGRSSFYCLEYFPSQMLRTGNNFQFSYEFENVPFHSSYAHSQSLDRLMNPLIDQYLYYLSRTINGSGQNQQTLKFSVAGPSNMAVQGRNYIPGPSYRQQRVSTTVTQNNNSEFAWPGASSWALNGRNSLMNPGPAMASHKEGEDRFFPLSGSLIFGKQGTGRDNVDADKVMITNEEEIKTTNPVATESYGQVATNHQSAQYHRLSNNAQAQTGWVQNQGILPGMVWQDRDVYLQGPIWAKIPHTDGNFHPSPLMGGFGMKHPPPQILIKNTPVPADPPTAFNKDKLNSFITQYSTGQVSVEIEWELQKENSKRWNPEIQYTSNYYKSNNVEFAVNTEGVYSEPRPIGTRYLTRNL

SEQ ID NO: 20513 - protein, 743 aa, synthetic construct
MAADGYLPDWLEDNLSEGIREWWALKPGAPQPKANQQHQDNARGLVLPGYKYLGPGNGLDKGEPVNAADAAALEHDKAYDQQLKAGDNPYLKYNHADAEFQERLKEDTSFGGNLGRAVFQAKKRLLEPLGLVEEAAKTAPGKKRPVEQSPQEPDSSAGIGKSGAQPAKKRLNFGQTGDTESVPDPQPIGEPPAAPSGVGSLTMASGGGAPVADNNEGADGVGSSSGNWHCDSQWLGDRVITTSTRTWALPTYNNHLYKQISNSTSGGSSNDNAYFGYSTPWGYFDFNRFHCHFSPRDWQRLINNNWGFRPKRLNFKLFNIQVKEVTDNNGVKTIANNLTSTVQVFTDSDYQLPYVLGSAHEGCLPPFPADVFMIPQYGYLTLNDGSQAVGRSSFYCLEYFPSQMLRTGNNFQFSYEFENVPFHSSYAHSQSLDRLMNPLIDQYLYYLSRTINGSGQNQQTLKFSVAGPSNMAVQGRNYIPGPSYRQQRVSTTVTQNNNSEFAWPGASSWALNGRNSLMNPGPAMASHKEGEDRFFPLSGSLIFGKQGTGRDNVDADKVMITNEEEIKTTNPVATESYGQVATNHQSAQLHALSHNAQAQTGWVQNQGILPGMVWQDRDVYLQGPIWAKIPHTDGNFHPSPLMGGFGMKHPPPQILIKNTPVPADPPTAFNKDKLNSFITQYSTGQVSVEIEWELQKENSKRWNPEIQYTSNYYKSNNVEFAVNTEGVYSEPRPIGTRYLTRNL

SEQ ID NO: 20514 - DNA, 21 bp, synthetic construct
  source 1..21: mol_type = other DNA; mol_type = other DNA
tgtagaccaccgccaaggctt

SEQ ID NO: 20515 - DNA, 21 bp, synthetic construct
  source 1..21: mol_type = other DNA; mol_type = other DNA
tgttccaaaaaggctacaaac

SEQ ID NO: 20516 - DNA, 21 bp, synthetic construct
  source 1..21: mol_type = other DNA; mol_type = other DNA
cttcataaactcgcgaacaat

SEQ ID NO: 20517 - DNA, 21 bp, synthetic construct
  source 1..21: mol_type = other DNA; mol_type = other DNA
atgaccggattatcttgcctc

SEQ ID NO: 20518 - DNA, 21 bp, synthetic construct
  source 1..21: mol_type = other DNA; mol_type = other DNA
ttatgcaaaccttgtttgcat

SEQ ID NO: 20519 - DNA, 21 bp, synthetic construct
  source 1..21: mol_type = other DNA; mol_type = other DNA
acgccttactgcaatctccgt

SEQ ID NO: 20520 - DNA, 21 bp, synthetic construct
  source 1..21: mol_type = other DNA; mol_type = other DNA
ctgcacaagctatctattaat

SEQ ID NO: 20521 - DNA, 21 bp, synthetic construct
  source 1..21: mol_type = other DNA; mol_type = other DNA
ctatctaaactcagttttaat

SEQ ID NO: 20522 - DNA, 21 bp, synthetic construct
  source 1..21: mol_type = other DNA; mol_type = other DNA
atagcattgaagggttgggat

SEQ ID NO: 20523 - DNA, 21 bp, synthetic construct
  source 1..21: mol_type = other DNA; mol_type = other DNA
ctgagcaagttgtcattcaat

SEQ ID NO: 20524 - DNA, 21 bp, synthetic construct
  source 1..21: mol_type = other DNA; mol_type = other DNA
ttacataaattgagcatcaac

SEQ ID NO: 20525 - DNA, 21 bp, synthetic construct
  source 1..21: mol_type = other DNA; mol_type = other DNA
ctgtcgaaactatcgatcaac

SEQ ID NO: 20526 - DNA, 21 bp, synthetic construct
  source 1..21: mol_type = other DNA; mol_type = other DNA
atcgctctcaagggttgggac

SEQ ID NO: 20527 - DNA, 21 bp, synthetic construct
  source 1..21: mol_type = other DNA; mol_type = other DNA
cttcacaagctgaccgtgaac

SEQ ID NO: 20528 - DNA, 21 bp, synthetic construct
  source 1..21: mol_type = other DNA; mol_type = other DNA
cttcacaaattgggagataac

SEQ ID NO: 20529 - DNA, 21 bp, synthetic construct
  source 1..21: mol_type = other DNA; mol_type = other DNA
ttgcataaactcggcgacaac

SEQ ID NO: 20530 - DNA, 21 bp, synthetic construct
  source 1..21: mol_type = other DNA; mol_type = other DNA
ttgcacaagttgtcagtgaac

SEQ ID NO: 20531 - DNA, 21 bp, synthetic construct
  source 1..21: mol_type = other DNA; mol_type = other DNA
ttgcataaattaacagttaat

SEQ ID NO: 20532 - DNA, 21 bp, synthetic construct
  source 1..21: mol_type = other DNA; mol_type = other DNA
atagcgttaaaagggtgggat

SEQ ID NO: 20533 - DNA, 21 bp, synthetic construct
  source 1..21: mol_type = other DNA; mol_type = other DNA
ttgcacaagttatcaccaaac

SEQ ID NO: 20534 - DNA, 21 bp, synthetic construct
  source 1..21: mol_type = other DNA; mol_type = other DNA
ttacataagttggccaataac

SEQ ID NO: 20535 - DNA, 21 bp, synthetic construct
  source 1..21: mol_type = other DNA; mol_type = other DNA
tgcaaaagcggttgctgtcct

SEQ ID NO: 20536 - DNA, 21 bp, synthetic construct
  source 1..21: mol_type = other DNA; mol_type = other DNA
ctacataagcttatgcccgac

SEQ ID NO: 20537 - DNA, 21 bp, synthetic construct
  source 1..21: mol_type = other DNA; mol_type = other DNA
agacttgtcgacgtgttccct

SEQ ID NO: 20538 - DNA, 21 bp, synthetic construct
  source 1..21: mol_type = other DNA; mol_type = other DNA
ttgcacaaactaagcgaaaac

SEQ ID NO: 20539 - DNA, 21 bp, synthetic construct
  source 1..21: mol_type = other DNA; mol_type = other DNA
ttattatccagcgcgacttgg

SEQ ID NO: 20540 - DNA, 21 bp, synthetic construct
  source 1..21: mol_type = other DNA; mol_type = other DNA
tattctaaattaggtcccgac

SEQ ID NO: 20541 - DNA, 21 bp, synthetic construct
  source 1..21: mol_type = other DNA; mol_type = other DNA
ttgcatagattattggacgac

SEQ ID NO: 20542 - DNA, 21 bp, synthetic construct
  source 1..21: mol_type = other DNA; mol_type = other DNA
ctacataaactaagcgttaat

SEQ ID NO: 20543 - DNA, 21 bp, synthetic construct
  source 1..21: mol_type = other DNA; mol_type = other DNA
cttcacaaattaagtatgaat

SEQ ID NO: 20544 - DNA, 21 bp, synthetic construct
  source 1..21: mol_type = other DNA; mol_type = other DNA
ttgtcaaagttgtcttataat

SEQ ID NO: 20545 - DNA, 21 bp, synthetic construct
  source 1..21: mol_type = other DNA; mol_type = other DNA
cttcacaagttagctcaaaat

SEQ ID NO: 20546 - DNA, 21 bp, synthetic construct
  source 1..21: mol_type = other DNA; mol_type = other DNA
ctaactcgcttaagtgccaac

SEQ ID NO: 20547 - DNA, 21 bp, synthetic construct
  source 1..21: mol_type = other DNA; mol_type = other DNA
ctccaccggctacttgatgac

SEQ ID NO: 20548 - DNA, 21 bp, synthetic construct
  source 1..21: mol_type = other DNA; mol_type = other DNA
aggctcgaagacgtttttcca

SEQ ID NO: 20549 - DNA, 21 bp, synthetic construct
  source 1..21: mol_type = other DNA; mol_type = other DNA
ctccataagttaagttttgat

SEQ ID NO: 20550 - DNA, 21 bp, synthetic construct
  source 1..21: mol_type = other DNA; mol_type = other DNA
cttcacaagcttatgccggat

SEQ ID NO: 20551 - DNA, 21 bp, synthetic construct
  source 1..21: mol_type = other DNA; mol_type = other DNA
cttagcaaaatcggtcccaac

SEQ ID NO: 20552 - DNA, 21 bp, synthetic construct
  source 1..21: mol_type = other DNA; mol_type = other DNA
ctccacaagctcgctaataat

SEQ ID NO: 20553 - DNA, 21 bp, synthetic construct
  source 1..21: mol_type = other DNA; mol_type = other DNA
ttacacaaattgatgaataat

SEQ ID NO: 20554 - DNA, 21 bp, synthetic construct
  source 1..21: mol_type = other DNA; mol_type = other DNA
ttaagtaagcttagcattaat

SEQ ID NO: 20555 - DNA, 21 bp, synthetic construct
  source 1..21: mol_type = other DNA; mol_type = other DNA
ttatctaagctgaacttaaat

SEQ ID NO: 20556 - DNA, 21 bp, synthetic construct
  source 1..21: mol_type = other DNA; mol_type = other DNA
ttgcacaaactgtcatttgac

SEQ ID NO: 20557 - DNA, 21 bp, synthetic construct
  source 1..21: mol_type = other DNA; mol_type = other DNA
ttgcacaaattgatgcctgat

SEQ ID NO: 20558 - DNA, 21 bp, synthetic construct
  source 1..21: mol_type = other DNA; mol_type = other DNA
agagaagacttcgtgcagtgg

SEQ ID NO: 20559 - DNA, 21 bp, synthetic construct
  source 1..21: mol_type = other DNA; mol_type = other DNA
ctgcacaaattaagcacgaac

SEQ ID NO: 20560 - DNA, 21 bp, synthetic construct
  source 1..21: mol_type = other DNA; mol_type = other DNA
ttagcgaagacgggctataat

SEQ ID NO: 20561 - DNA, 21 bp, synthetic construct
  source 1..21: mol_type = other DNA; mol_type = other DNA
atcgccctcaaaggatgggac

SEQ ID NO: 20562 - DNA, 21 bp, synthetic construct
  source 1..21: mol_type = other DNA; mol_type = other DNA
ctaagcaaactcagctacaat

SEQ ID NO: 20563 - DNA, 21 bp, synthetic construct
  source 1..21: mol_type = other DNA; mol_type = other DNA
cttcataagttgtcggagaat

SEQ ID NO: 20564 - DNA, 21 bp, synthetic construct
  source 1..21: mol_type = other DNA; mol_type = other DNA
ttgtcgaggctaggaccagat

SEQ ID NO: 20565 - DNA, 21 bp, synthetic construct
  source 1..21: mol_type = other DNA; mol_type = other DNA
aggctcgagtcggctatttgg

SEQ ID NO: 20566 - DNA, 21 bp, synthetic construct
  source 1..21: mol_type = other DNA; mol_type = other DNA
gttctctctgcctcgacgtgg

SEQ ID NO: 20567 - DNA, 21 bp, synthetic construct
  source 1..21: mol_type = other DNA; mol_type = other DNA
cgtttggaggatgtgttcccc

SEQ ID NO: 20568 - DNA, 21 bp, synthetic construct
  source 1..21: mol_type = other DNA; mol_type = other DNA
cttcataaactaagtccgaat

SEQ ID NO: 20569 - DNA, 21 bp, synthetic construct
  source 1..21: mol_type = other DNA; mol_type = other DNA
gttaacgattatacaatcttc

SEQ ID NO: 20570 - DNA, 21 bp, synthetic construct
  source 1..21: mol_type = other DNA; mol_type = other DNA
ttgagtagaattgggccggac

SEQ ID NO: 20571 - DNA, 21 bp, synthetic construct
  source 1..21: mol_type = other DNA; mol_type = other DNA
cttcataagctgggcgagaat

SEQ ID NO: 20572 - DNA, 21 bp, synthetic construct
  source 1..21: mol_type = other DNA; mol_type = other DNA
cccatggaagccagatcctgg

SEQ ID NO: 20573 - DNA, 21 bp, synthetic construct
  source 1..21: mol_type = other DNA; mol_type = other DNA
cttcacaagttgagtccatta

SEQ ID NO: 20574 - DNA, 21 bp, synthetic construct
  source 1..21: mol_type = other DNA; mol_type = other DNA
ttgcataaattggccaacaac

SEQ ID NO: 20575 - DNA, 21 bp, synthetic construct
  source 1..21: mol_type = other DNA; mol_type = other DNA
ctccacaaattgagcctcaat

SEQ ID NO: 20576 - DNA, 21 bp, synthetic construct
  source 1..21: mol_type = other DNA; mol_type = other DNA
ctacacaaattaagcactaat

SEQ ID NO: 20577 - DNA, 21 bp, synthetic construct
  source 1..21: mol_type = other DNA; mol_type = other DNA
ttgcataagttgttgaacgac

SEQ ID NO: 20578 - DNA, 21 bp, synthetic construct
  source 1..21: mol_type = other DNA; mol_type = other DNA
ctacataaactttctatcgac

SEQ ID NO: 20579 - DNA, 21 bp, synthetic construct
  source 1..21: mol_type = other DNA; mol_type = other DNA
cttcacaagttgatgcctaat

SEQ ID NO: 20580 - DNA, 21 bp, synthetic construct
  source 1..21: mol_type = other DNA; mol_type = other DNA
ttgcataagctctcgacaaac

SEQ ID NO: 20581 - DNA, 21 bp, synthetic construct
  source 1..21: mol_type = other DNA; mol_type = other DNA
tatagcaaattaggaccggat

SEQ ID NO: 20582 - DNA, 21 bp, synthetic construct
  source 1..21: mol_type = other DNA; mol_type = other DNA
atattatcgtctacgacctgg

SEQ ID NO: 20583 - DNA, 21 bp, synthetic construct
  source 1..21: mol_type = other DNA; mol_type = other DNA
ttacataaactctcgttgaac

SEQ ID NO: 20584 - DNA, 21 bp, synthetic construct
  source 1..21: mol_type = other DNA; mol_type = other DNA
aggactcctacctgtaaacca

SEQ ID NO: 20585 - DNA, 21 bp, synthetic construct
  source 1..21: mol_type = other DNA; mol_type = other DNA
tgtgctcccgatcatagagag

SEQ ID NO: 20586 - DNA, 21 bp, synthetic construct
  source 1..21: mol_type = other DNA; mol_type = other DNA
ctacataagttgagcgtcgac

SEQ ID NO: 20587 - DNA, 21 bp, synthetic construct
  source 1..21: mol_type = other DNA; mol_type = other DNA
ttacacaaactggcgcagaac

SEQ ID NO: 20588 - DNA, 21 bp, synthetic construct
  source 1..21: mol_type = other DNA; mol_type = other DNA
ttgcataagctgacggttaat

SEQ ID NO: 20589 - DNA, 21 bp, synthetic construct
  source 1..21: mol_type = other DNA; mol_type = other DNA
ttgcacaagctgaataacaat

SEQ ID NO: 20590 - DNA, 21 bp, synthetic construct
  source 1..21: mol_type = other DNA; mol_type = other DNA
ttgcacaagctaagcattgat

SEQ ID NO: 20591 - DNA, 21 bp, synthetic construct
  source 1..21: mol_type = other DNA; mol_type = other DNA
ttttcaaagttagggccgaac

SEQ ID NO: 20592 - DNA, 21 bp, synthetic construct
  source 1..21: mol_type = other DNA; mol_type = other DNA
ctggcaaaaagcggcccaaat

SEQ ID NO: 20593 - DNA, 21 bp, synthetic construct
  source 1..21: mol_type = other DNA; mol_type = other DNA
ttacataagctttcgacgaat

SEQ ID NO: 20594 - DNA, 21 bp, synthetic construct
  source 1..21: mol_type = other DNA; mol_type = other DNA
ttatcaaaactgtccccaaac

SEQ ID NO: 20595 - DNA, 21 bp, synthetic construct
  source 1..21: mol_type = other DNA; mol_type = other DNA
aggaccattgatgtattccct

SEQ ID NO: 20596 - DNA, 21 bp, synthetic construct
  source 1..21: mol_type = other DNA; mol_type = other DNA
ttacataaattgtcacccgac

SEQ ID NO: 20597 - DNA, 21 bp, synthetic construct
  source 1..21: mol_type = other DNA; mol_type = other DNA
tatgctaagaacgggcccaat

SEQ ID NO: 20598 - DNA, 21 bp, synthetic construct
  source 1..21: mol_type = other DNA; mol_type = other DNA
ttgcataaactaatgccgaac

SEQ ID NO: 20599 - DNA, 21 bp, synthetic construct
  source 1..21: mol_type = other DNA; mol_type = other DNA
ttaactaagttgagtcctaat

SEQ ID NO: 20600 - DNA, 21 bp, synthetic construct
  source 1..21: mol_type = other DNA; mol_type = other DNA
cgtttgctcgacgtgtatccg

SEQ ID NO: 20601 - DNA, 21 bp, synthetic construct
  source 1..21: mol_type = other DNA; mol_type = other DNA
ttacatcgtttgctcgatgat

SEQ ID NO: 20602 - DNA, 21 bp, synthetic construct
  source 1..21: mol_type = other DNA; mol_type = other DNA
ttacacaagcttagtgagaac

SEQ ID NO: 20603 - DNA, 21 bp, synthetic construct
  source 1..21: mol_type = other DNA; mol_type = other DNA
cttacgaggcttagccctaac

SEQ ID NO: 20604 - DNA, 21 bp, synthetic construct
  source 1..21: mol_type = other DNA; mol_type = other DNA
cttcataaattgtccgaaaat

SEQ ID NO: 20605 - DNA, 21 bp, synthetic construct
  source 1..21: mol_type = other DNA; mol_type = other DNA
ctccacaaattaactgtaaac

SEQ ID NO: 20606 - DNA, 21 bp, synthetic construct
  source 1..21: mol_type = other DNA; mol_type = other DNA
ctacacaaattgaatccagat

SEQ ID NO: 20607 - DNA, 21 bp, synthetic construct
  source 1..21: mol_type = other DNA; mol_type = other DNA
ctacataagttgtcccacgac

SEQ ID NO: 20608 - DNA, 21 bp, synthetic construct
  source 1..21: mol_type = other DNA; mol_type = other DNA
tatagtaaacttcaggataac

SEQ ID NO: 20609 - DNA, 21 bp, synthetic construct
  source 1..21: mol_type = other DNA; mol_type = other DNA
ttgcataaactctcgatgaac

SEQ ID NO: 20610 - DNA, 21 bp, synthetic construct
  source 1..21: mol_type = other DNA; mol_type = other DNA
ctccacaagcttatgaacaac

SEQ ID NO: 20611 - DNA, 21 bp, synthetic construct
  source 1..21: mol_type = other DNA; mol_type = other DNA
ttacataaactttcaatagac

SEQ ID NO: 20612 - DNA, 21 bp, synthetic construct
  source 1..21: mol_type = other DNA; mol_type = other DNA
ctccatagacttttagacgac

SEQ ID NO: 20613 - DNA, 21 bp, synthetic construct
  source 1..21: mol_type = other DNA; mol_type = other DNA
atgcacaaactttcaccaaat

SEQ ID NO: 20614 - DNA, 21 bp, synthetic construct
  source 1..21: mol_type = other DNA; mol_type = other DNA
cggacacctgaagtgtttcca

SEQ ID NO: 20615 - DNA, 21 bp, synthetic construct
  source 1..21: mol_type = other DNA; mol_type = other DNA
tacttgaaatccgacacgaat

SEQ ID NO: 20616 - DNA, 21 bp, synthetic construct
  source 1..21: mol_type = other DNA; mol_type = other DNA
ctctgcaaaccctgcttgata

SEQ ID NO: 20617 - DNA, 21 bp, synthetic construct
  source 1..21: mol_type = other DNA; mol_type = other DNA
ttacataagctaggggacaat

SEQ ID NO: 20618 - DNA, 21 bp, synthetic construct
  source 1..21: mol_type = other DNA; mol_type = other DNA
ttccacaagctaggcattaat

SEQ ID NO: 20619 - DNA, 21 bp, synthetic construct
  source 1..21: mol_type = other DNA; mol_type = other DNA
tacgttaaaagcgacgtgaat

SEQ ID NO: 20620 - DNA, 21 bp, synthetic construct
  source 1..21: mol_type = other DNA; mol_type = other DNA
tttcacaaattagggcctgat

SEQ ID NO: 20621 - DNA, 21 bp, synthetic construct
  source 1..21: mol_type = other DNA; mol_type = other DNA
aacgcacttaagggatgggat

SEQ ID NO: 20622 - DNA, 21 bp, synthetic construct
  source 1..21: mol_type = other DNA; mol_type = other DNA
cttcacaagttacagcagaac

SEQ ID NO: 20623 - DNA, 21 bp, synthetic construct
  source 1..21: mol_type = other DNA; mol_type = other DNA
ttatctaagatagggccaaat

SEQ ID NO: 20624 - DNA, 21 bp, synthetic construct
  source 1..21: mol_type = other DNA; mol_type = other DNA
ttgcacaagcttagtcatgat

SEQ ID NO: 20625 - DNA, 21 bp, synthetic construct
  source 1..21: mol_type = other DNA; mol_type = other DNA
ttaagtaaattatcccaaaat

SEQ ID NO: 20626 - DNA, 21 bp, synthetic construct
  source 1..21: mol_type = other DNA; mol_type = other DNA
ttacacaaggctggtcccaac

SEQ ID NO: 20627 - DNA, 21 bp, synthetic construct
  source 1..21: mol_type = other DNA; mol_type = other DNA
tattccaaagtcgggccgaaa

SEQ ID NO: 20628 - DNA, 21 bp, synthetic construct
  source 1..21: mol_type = other DNA; mol_type = other DNA
cctttaatgtccagggactgg

SEQ ID NO: 20629 - DNA, 21 bp, synthetic construct
  source 1..21: mol_type = other DNA; mol_type = other DNA
ttaagcaaattgggtccgaac

SEQ ID NO: 20630 - DNA, 21 bp, synthetic construct
  source 1..21: mol_type = other DNA; mol_type = other DNA
aaggacgaattcaccacattc

SEQ ID NO: 20631 - DNA, 21 bp, synthetic construct
  source 1..21: mol_type = other DNA; mol_type = other DNA
tacgttaagtcccaaaccggg

SEQ ID NO: 20632 - DNA, 21 bp, synthetic construct
  source 1..21: mol_type = other DNA; mol_type = other DNA
agaacactcgatgtgttccca

SEQ ID NO: 20633 - DNA, 21 bp, synthetic construct
  source 1..21: mol_type = other DNA; mol_type = other DNA
ttacacaaattgatgcctgac

SEQ ID NO: 20634 - DNA, 21 bp, synthetic construct
  source 1..21: mol_type = other DNA; mol_type = other DNA
cttcacaaactcctcaatgat

SEQ ID NO: 20635 - DNA, 21 bp, synthetic construct
  source 1..21: mol_type = other DNA; mol_type = other DNA
ctaagtcgtttggggcctgac

SEQ ID NO: 20636 - DNA, 21 bp, synthetic construct
  source 1..21: mol_type = other DNA; mol_type = other DNA
ctttctaaactgaacgagaac

SEQ ID NO: 20637 - DNA, 21 bp, synthetic construct
  source 1..21: mol_type = other DNA; mol_type = other DNA
atgcataagttgagtccgaac

SEQ ID NO: 20638 - DNA, 21 bp, synthetic construct
  source 1..21: mol_type = other DNA; mol_type = other DNA
ctgaccaggataagccccgac

SEQ ID NO: 20639 - DNA, 21 bp, synthetic construct
  source 1..21: mol_type = other DNA; mol_type = other DNA
atgcataagttgtcagtgaat

SEQ ID NO: 20640 - DNA, 21 bp, synthetic construct
  source 1..21: mol_type = other DNA; mol_type = other DNA
ttccataagctgggtccagac

SEQ ID NO: 20641 - DNA, 21 bp, synthetic construct
  source 1..21: mol_type = other DNA; mol_type = other DNA
tactttacaggcatagttgcg

SEQ ID NO: 20642 - DNA, 21 bp, synthetic construct
  source 1..21: mol_type = other DNA; mol_type = other DNA
ttgcataaacttcaacaaaac

SEQ ID NO: 20643 - DNA, 21 bp, synthetic construct
  source 1..21: mol_type = other DNA; mol_type = other DNA
tatgtcaaaagccaacttggt

SEQ ID NO: 20644 - DNA, 21 bp, synthetic construct
  source 1..21: mol_type = other DNA; mol_type = other DNA
cttcacaaattaggagataat

SEQ ID NO: 20645 - DNA, 21 bp, synthetic construct
  source 1..21: mol_type = other DNA; mol_type = other DNA
ttgcacaagttgtccccctta

SEQ ID NO: 20646 - DNA, 21 bp, synthetic construct
  source 1..21: mol_type = other DNA; mol_type = other DNA
ttgcataagctgtcaactgat

SEQ ID NO: 20647 - DNA, 21 bp, synthetic construct
  source 1..21: mol_type = other DNA; mol_type = other DNA
ctacacgccaagctaccgaat

SEQ ID NO: 20648 - DNA, 21 bp, synthetic construct
  source 1..21: mol_type = other DNA; mol_type = other DNA
ctgcacaagttgagtatcgat

SEQ ID NO: 20649 - DNA, 21 bp, synthetic construct
  source 1..21: mol_type = other DNA; mol_type = other DNA
ctacatcgcttgaaccccgac

SEQ ID NO: 20650 - DNA, 21 bp, synthetic construct
  source 1..21: mol_type = other DNA; mol_type = other DNA
ttagctcgaaccggaccggac

SEQ ID NO: 20651 - DNA, 21 bp, synthetic construct
  source 1..21: mol_type = other DNA; mol_type = other DNA
cttcacaagctcaataacaac

SEQ ID NO: 20652 - DNA, 21 bp, synthetic construct
  source 1..21: mol_type = other DNA; mol_type = other DNA
tatagcaagctgggacctgat

SEQ ID NO: 20653 - DNA, 21 bp, synthetic construct
  source 1..21: mol_type = other DNA; mol_type = other DNA
cgtgatgaaacggttttcccc

SEQ ID NO: 20654 - DNA, 21 bp, synthetic construct
  source 1..21: mol_type = other DNA; mol_type = other DNA
tacagcaaaataggagccaac

SEQ ID NO: 20655 - DNA, 21 bp, synthetic construct
  source 1..21: mol_type = other DNA; mol_type = other DNA
ttgcacgtcttgggtcctaat

SEQ ID NO: 20656 - DNA, 21 bp, synthetic construct
  source 1..21: mol_type = other DNA; mol_type = other DNA
tatagcaaggtaggcccagac

SEQ ID NO: 20657 - DNA, 21 bp, synthetic construct
  source 1..21: mol_type = other DNA; mol_type = other DNA
ttgtcaaagctgagcgataac

SEQ ID NO: 20658 - DNA, 21 bp, synthetic construct
  source 1..21: mol_type = other DNA; mol_type = other DNA
ttacataaactatcccctctg

SEQ ID NO: 20659 - DNA, 21 bp, synthetic construct
  source 1..21: mol_type = other DNA; mol_type = other DNA
ctcagcaaggttggcttaaac

SEQ ID NO: 20660 - DNA, 21 bp, synthetic construct
  source 1..21: mol_type = other DNA; mol_type = other DNA
ttgcataagctcaaccctgac

SEQ ID NO: 20661 - DNA, 21 bp, synthetic construct
  source 1..21: mol_type = other DNA; mol_type = other DNA
ttgcatgctaaattgccaaac

SEQ ID NO: 20662 - DNA, 21 bp, synthetic construct
  source 1..21: mol_type = other DNA; mol_type = other DNA
atactttctagcagtaattgg

SEQ ID NO: 20663 - DNA, 21 bp, synthetic construct
  source 1..21: mol_type = other DNA; mol_type = other DNA
ttgcacaaattaggagaaaat

SEQ ID NO: 20664 - DNA, 21 bp, synthetic construct
  source 1..21: mol_type = other DNA; mol_type = other DNA
ttgacccgtttgtctccaaat

SEQ ID NO: 20665 - DNA, 21 bp, synthetic construct
  source 1..21: mol_type = other DNA; mol_type = other DNA
aaagatgacttctcgacgtgg

SEQ ID NO: 20666 - DNA, 21 bp, synthetic construct
  source 1..21: mol_type = other DNA; mol_type = other DNA
ttgcatagaaaagggatcgat

SEQ ID NO: 20667 - DNA, 21 bp, synthetic construct
  source 1..21: mol_type = other DNA; mol_type = other DNA
tacgtcaagagtgacccgggc

SEQ ID NO: 20668 - DNA, 21 bp, synthetic construct
  source 1..21: mol_type = other DNA; mol_type = other DNA
tatgtgaagtcggatgttaac

SEQ ID NO: 20669 - DNA, 21 bp, synthetic construct
  source 1..21: mol_type = other DNA; mol_type = other DNA
ttattcgatggaactggccct

SEQ ID NO: 20670 - DNA, 21 bp, synthetic construct
  source 1..21: mol_type = other DNA; mol_type = other DNA
ctatctaagctttctgccaac

SEQ ID NO: 20671 - DNA, 21 bp, synthetic construct
  source 1..21: mol_type = other DNA
ttaactcgtatctcaccagat

SEQ ID NO: 20672 - DNA, 21 bp, synthetic construct
  source 1..21: mol_type = other DNA
gagatggcctcacacggctgg

SEQ ID NO: 20673 - DNA, 21 bp, synthetic construct
  source 1..21: mol_type = other DNA; mol_type = other DNA
aaagatgattttaccagcttt

SEQ ID NO: 20674 - DNA, 21 bp, synthetic construct
  source 1..21: mol_type = other DNA; mol_type = other DNA
gttgatagtacgaacggtatt

SEQ ID NO: 20675 - DNA, 21 bp, synthetic construct
  source 1..21: mol_type = other DNA; mol_type = other DNA
atgcacaaactcagtgtcaac

SEQ ID NO: 20676 - DNA, 21 bp, synthetic construct
  source 1..21: mol_type = other DNA; mol_type = other DNA
atcctaacgtcggctacttgg

SEQ ID NO: 20677 - DNA, 21 bp, synthetic construct
  source 1..21: mol_type = other DNA; mol_type = other DNA
tattctaaactgaatcctctc

SEQ ID NO: 20678 - DNA, 21 bp, synthetic construct
  source 1..21: mol_type = other DNA; mol_type = other DNA
ctcgcgaggacagggcccgat

SEQ ID NO: 20679 - DNA, 21 bp, synthetic construct
  source 1..21: mol_type = other DNA; mol_type = other DNA
gttggttgcgcccatttaccc

SEQ ID NO: 20680 - DNA, 21 bp, synthetic construct
  source 1..21: mol_type = other DNA; mol_type = other DNA
ctgaccaaactttcgccaaac

SEQ ID NO: 20681 - DNA, 21 bp, synthetic construct
  source 1..21: mol_type = other DNA; mol_type = other DNA
ttagcgcgattggggccgaat

SEQ ID NO: 20682 - DNA, 21 bp, synthetic construct
  source 1..21: mol_type = other DNA; mol_type = other DNA
ttgtcgagaataggtccagac

SEQ ID NO: 20683 - DNA, 21 bp, synthetic construct
  source 1..21: mol_type = other DNA; mol_type = other DNA
ggaggtataggcagtgtatgg

SEQ ID NO: 20684 - DNA, 21 bp, synthetic construct
  source 1..21: mol_type = other DNA; mol_type = other DNA
ctgagtaagttaaatctgaac

SEQ ID NO: 20685 - DNA, 21 bp, synthetic construct
  source 1..21: mol_type = other DNA; mol_type = other DNA
cgaatcatagatgctttcccg

SEQ ID NO: 20686 - DNA, 21 bp, synthetic construct
  source 1..21: mol_type = other DNA; mol_type = other DNA
ttaagtaaaattggccccaat

SEQ ID NO: 20687 - DNA, 21 bp, synthetic construct
  source 1..21: mol_type = other DNA; mol_type = other DNA
ctttctaaagttgggatgaat

SEQ ID NO: 20688 - DNA, 21 bp, synthetic construct
  source 1..21: mol_type = other DNA; mol_type = other DNA
cgaacgatagacgtttttcca

SEQ ID NO: 20689 - DNA, 21 bp, synthetic construct
  source 1..21: mol_type = other DNA; mol_type = other DNA
gtgttgtcgagcgccaactgg

SEQ ID NO: 20690 - DNA, 21 bp, synthetic construct
  source 1..21: mol_type = other DNA; mol_type = other DNA
cgtctggctgatgtattcccg

SEQ ID NO: 20691 - DNA, 21 bp, synthetic construct
  source 1..21: mol_type = other DNA; mol_type = other DNA
ttagctaagtcaggtccgaac

SEQ ID NO: 20692 - DNA, 21 bp, synthetic construct
  source 1..21: mol_type = other DNA; mol_type = other DNA
aaggacgactttacaacctat

SEQ ID NO: 20693 - DNA, 21 bp, synthetic construct
  source 1..21: mol_type = other DNA; mol_type = other DNA
cgacttgaggatgtttttccc

SEQ ID NO: 20694 - DNA, 21 bp, synthetic construct
  source 1..21: mol_type = other DNA; mol_type = other DNA
ctttttgacggcacagcctca

SEQ ID NO: 20695 - DNA, 21 bp, synthetic construct
  source 1..21: mol_type = other DNA; mol_type = other DNA
tacgcaaagttaggtccaaac

SEQ ID NO: 20696 - DNA, 21 bp, synthetic construct
  source 1..21: mol_type = other DNA; mol_type = other DNA
ttaacgagactgtcagcaaat

SEQ ID NO: 20697 - DNA, 21 bp, synthetic construct
  source 1..21: mol_type = other DNA; mol_type = other DNA
aaagacgattttacgacattt

SEQ ID NO: 20698 - DNA, 21 bp, synthetic construct
  source 1..21: mol_type = other DNA; mol_type = other DNA
attgcaacgttgggatgggat

SEQ ID NO: 20699 - DNA, 21 bp, synthetic construct
  source 1..21: mol_type = other DNA; mol_type = other DNA
tatgtgaaaagtgacagaggc

SEQ ID NO: 20700 - DNA, 21 bp, synthetic construct
  source 1..21: mol_type = other DNA; mol_type = other DNA
ctctccaaagtgggcaacaat

SEQ ID NO: 20701 - DNA, 21 bp, synthetic construct
  source 1..21: mol_type = other DNA; mol_type = other DNA
gtagactctactaatggtgtt

SEQ ID NO: 20702 - DNA, 21 bp, synthetic construct
  source 1..21: mol_type = other DNA; mol_type = other DNA
gtaatcagtacaaatggtatt

SEQ ID NO: 20703 - DNA, 21 bp, synthetic construct
  source 1..21: mol_type = other DNA; mol_type = other DNA
tacttcacgggcatattagct

SEQ ID NO: 20704 - DNA, 21 bp, synthetic construct
  source 1..21: mol_type = other DNA; mol_type = other DNA
gttctttcgtctagcatgtgg

SEQ ID NO: 20705 - DNA, 21 bp, synthetic construct
  source 1..21: mol_type = other DNA; mol_type = other DNA
tatgtcaagagccagaccaat

SEQ ID NO: 20706 - DNA, 21 bp, synthetic construct
  source 1..21: mol_type = other DNA; mol_type = other DNA
tattcaaaagcaggagggggt

SEQ ID NO: 20707 - DNA, 21 bp, synthetic construct
  source 1..21: mol_type = other DNA; mol_type = other DNA
tatgtaaaaagtcagacggga

SEQ ID NO: 20708 - DNA, 21 bp, synthetic construct
  source 1..21: mol_type = other DNA; mol_type = other DNA
cggttaattgatgcgttcccc

SEQ ID NO: 20709 - DNA, 21 bp, synthetic construct
  source 1..21: mol_type = other DNA; mol_type = other DNA
ttaagtaaggtgggtatgaac

SEQ ID NO: 20710 - DNA, 21 bp, synthetic construct
  source 1..21: mol_type = other DNA; mol_type = other DNA
tgcacgtcaaagacgttgcat

SEQ ID NO: 20711 - DNA, 21 bp, synthetic construct
  source 1..21: mol_type = other DNA; mol_type = other DNA
tatgcgaaggccgggcctaat

SEQ ID NO: 20712 - DNA, 21 bp, synthetic construct
  source 1..21: mol_type = other DNA; mol_type = other DNA
agggacgagaccgtgtttccg

SEQ ID NO: 20713 - DNA, 21 bp, synthetic construct
  source 1..21: mol_type = other DNA; mol_type = other DNA
ctccacaagctcagcccagac

SEQ ID NO: 20714 - DNA, 21 bp, synthetic construct
  source 1..21: mol_type = other DNA; mol_type = other DNA
ttgagtagaattgggccgaat

SEQ ID NO: 20715 - DNA, 21 bp, synthetic construct
  source 1..21: mol_type = other DNA; mol_type = other DNA
ctcgccaggcttggcccaaac

SEQ ID NO: 20716 - DNA, 21 bp, synthetic construct
  source 1..21: mol_type = other DNA; mol_type = other DNA
tattttaccgggattctagag

SEQ ID NO: 20717 - DNA, 21 bp, synthetic construct
  source 1..21: mol_type = other DNA; mol_type = other DNA
ttgatgatcgacgcgttcccc

SEQ ID NO: 20718 - DNA, 21 bp, synthetic construct
  source 1..21: mol_type = other DNA; mol_type = other DNA
cgacttgaggatgcgtttccg

SEQ ID NO: 20719 - DNA, 21 bp, synthetic construct
  source 1..21: mol_type = other DNA; mol_type = other DNA
ctatcccggatcggtcccaat

SEQ ID NO: 20720 - DNA, 21 bp, synthetic construct
  source 1..21: mol_type = other DNA; mol_type = other DNA
gtcgctcttaaggggtgggac

SEQ ID NO: 20721 - DNA, 21 bp, synthetic construct
  source 1..21: mol_type = other DNA; mol_type = other DNA
cttcacaagttaaatgagaac

SEQ ID NO: 20722 - DNA, 21 bp, synthetic construct
  source 1..21: mol_type = other DNA; mol_type = other DNA
tactcaaaagtcggacctgat

SEQ ID NO: 20723 - DNA, 21 bp, synthetic construct
  source 1..21: mol_type = other DNA; mol_type = other DNA
atacttagctcgtcaacatgg

SEQ ID NO: 20724 - DNA, 21 bp, synthetic construct
  source 1..21: mol_type = other DNA; mol_type = other DNA
agactgatcgacgcctttccg

SEQ ID NO: 20725 - DNA, 21 bp, synthetic construct
  source 1..21: mol_type = other DNA; mol_type = other DNA
agggacgacttcgtgacctgg

SEQ ID NO: 20726 - DNA, 21 bp, synthetic construct
  source 1..21: mol_type = other DNA; mol_type = other DNA
gttgcaacgaaaggatgggat

SEQ ID NO: 20727 - DNA, 21 bp, synthetic construct
  source 1..21: mol_type = other DNA; mol_type = other DNA
ttacataagttgaacaataat

SEQ ID NO: 20728 - DNA, 21 bp, synthetic construct
  source 1..21: mol_type = other DNA; mol_type = other DNA
atgcataaattaggggtcaat

SEQ ID NO: 20729 - DNA, 21 bp, synthetic construct
  source 1..21: mol_type = other DNA; mol_type = other DNA
attatggagagtgctgtgtgg

SEQ ID NO: 20730 - DNA, 21 bp, synthetic construct
  source 1..21: mol_type = other DNA; mol_type = other DNA
aggggattagaggggtttgac

SEQ ID NO: 20731 - DNA, 21 bp, synthetic construct
  source 1..21: mol_type = other DNA; mol_type = other DNA
tatgtgaaatcagatcatggg

SEQ ID NO: 20732 - DNA, 21 bp, synthetic construct
  source 1..21: mol_type = other DNA; mol_type = other DNA
cttagtcgtattgggcctgat

SEQ ID NO: 20733 - DNA, 21 bp, synthetic construct
  source 1..21: mol_type = other DNA; mol_type = other DNA
ctacatgttctcggacccaac

SEQ ID NO: 20734 - DNA, 21 bp, synthetic construct
  source 1..21: mol_type = other DNA; mol_type = other DNA
tatgtaaaatcggatccagga

SEQ ID NO: 20735 - DNA, 21 bp, synthetic construct
  source 1..21: mol_type = other DNA; mol_type = other DNA
tacgttaagtcacaggccgga

SEQ ID NO: 20736 - DNA, 21 bp, synthetic construct
  source 1..21: mol_type = other DNA; mol_type = other DNA
tactttaccggcatactcgcg

SEQ ID NO: 20737 - DNA, 21 bp, synthetic construct
  source 1..21: mol_type = other DNA; mol_type = other DNA
ctacacaaacttagtacggac

SEQ ID NO: 20738 - DNA, 21 bp, synthetic construct
  source 1..21: mol_type = other DNA; mol_type = other DNA
aaagatgagtttacaactttt

SEQ ID NO: 20739 - DNA, 21 bp, synthetic construct
  source 1..21: mol_type = other DNA; mol_type = other DNA
ctctcacgcatcggaccagat

SEQ ID NO: 20740 - DNA, 21 bp, synthetic construct
  source 1..21: mol_type = other DNA; mol_type = other DNA
tttcataagctcgggataaac

SEQ ID NO: 20741 - DNA, 21 bp, synthetic construct
  source 1..21: mol_type = other DNA; mol_type = other DNA
ctgagcaagttgagtccgaat

SEQ ID NO: 20742 - DNA, 21 bp, synthetic construct
  source 1..21: mol_type = other DNA; mol_type = other DNA
ctgagtcgtgttggctttgat

SEQ ID NO: 20743 - DNA, 21 bp, synthetic construct
  source 1..21: mol_type = other DNA; mol_type = other DNA
ttacacaaggcagggcacaat

SEQ ID NO: 20744 - DNA, 21 bp, synthetic construct
  source 1..21: mol_type = other DNA; mol_type = other DNA
tacttcactggaatattggaa

SEQ ID NO: 20745 - DNA, 21 bp, synthetic construct
  source 1..21: mol_type = other DNA; mol_type = other DNA
aaagatgagtttagctcgtgg

SEQ ID NO: 20746 - DNA, 21 bp, synthetic construct
  source 1..21: mol_type = other DNA; mol_type = other DNA
cttcataaattaaacaataac

SEQ ID NO: 20747 - DNA, 21 bp, synthetic construct
  source 1..21: mol_type = other DNA; mol_type = other DNA
ttccacaaattaggaatcaat

SEQ ID NO: 20748 - DNA, 21 bp, synthetic construct
  source 1..21: mol_type = other DNA; mol_type = other DNA
ctttcaaaggtaggtaacaac

SEQ ID NO: 20749 - DNA, 21 bp, synthetic construct
  source 1..21: mol_type = other DNA; mol_type = other DNA
ctgcataaagcaggaccgaat

SEQ ID NO: 20750 - DNA, 21 bp, synthetic construct
  source 1..21: mol_type = other DNA; mol_type = other DNA
ttatcaaagctctcctacgat

SEQ ID NO: 20751 - DNA, 21 bp, synthetic construct
  source 1..21: mol_type = other DNA; mol_type = other DNA
cttagtaaagtaggtataaat

SEQ ID NO: 20752 - DNA, 21 bp, synthetic construct
  source 1..21: mol_type = other DNA; mol_type = other DNA
cgcactttagacgtttttcct

SEQ ID NO: 20753 - DNA, 21 bp, synthetic construct
  source 1..21: mol_type = other DNA; mol_type = other DNA
gtgttaagcgctagtacctgg

SEQ ID NO: 20754 - DNA, 21 bp, synthetic construct
  source 1..21: mol_type = other DNA; mol_type = other DNA
ctacataaactctcgccactc

SEQ ID NO: 20755 - DNA, 21 bp, synthetic construct
  source 1..21: mol_type = other DNA; mol_type = other DNA
tacgtaaaatcacaaactaac

SEQ ID NO: 20756 - DNA, 21 bp, synthetic construct
  source 1..21: mol_type = other DNA; mol_type = other DNA
gtcaaaagcacgaacggggtg

SEQ ID NO: 20757 - DNA, 21 bp, synthetic construct
  source 1..21: mol_type = other DNA; mol_type = other DNA
ctttcgaagcttagccagaac

SEQ ID NO: 20758 - DNA, 21 bp, synthetic construct
  source 1..21: mol_type = other DNA; mol_type = other DNA
atacttagtagtcagagttgg

SEQ ID NO: 20759 - DNA, 21 bp, synthetic construct
  source 1..21: mol_type = other DNA; mol_type = other DNA
ctgtgcaaaccgtgcctacaa

SEQ ID NO: 20760 - DNA, 21 bp, synthetic construct
  source 1..21: mol_type = other DNA; mol_type = other DNA
gacctgagtagtgcgaagtgg

SEQ ID NO: 20761 - DNA, 21 bp, synthetic construct
  source 1..21: mol_type = other DNA; mol_type = other DNA
gttgcgtctaaaggctgggac

SEQ ID NO: 20762 - DNA, 21 bp, synthetic construct
  source 1..21: mol_type = other DNA; mol_type = other DNA
aaagatgatttcaccacatgg

SEQ ID NO: 20763 - DNA, 21 bp, synthetic construct
  source 1..21: mol_type = other DNA; mol_type = other DNA
aatttagcctccgccacgtgg

SEQ ID NO: 20764 - DNA, 21 bp, synthetic construct
  source 1..21: mol_type = other DNA; mol_type = other DNA
ctacacaggttaggattagac

SEQ ID NO: 20765 - DNA, 21 bp, synthetic construct
  source 1..21: mol_type = other DNA; mol_type = other DNA
tactcaaagctcggtccagac

SEQ ID NO: 20766 - DNA, 21 bp, synthetic construct
  source 1..21: mol_type = other DNA; mol_type = other DNA
tattccaaaatgggaccgaat

SEQ ID NO: 20767 - DNA, 21 bp, synthetic construct
  source 1..21: mol_type = other DNA; mol_type = other DNA
atgcacaagctgggtgttaac

SEQ ID NO: 20768 - DNA, 21 bp, synthetic construct
  source 1..21: mol_type = other DNA; mol_type = other DNA
gaaatggcctctataaagtgg

SEQ ID NO: 20769 - DNA, 21 bp, synthetic construct
  source 1..21: mol_type = other DNA; mol_type = other DNA
ctaagtaaactttctgacaac

SEQ ID NO: 20770 - DNA, 21 bp, synthetic construct
  source 1..21: mol_type = other DNA; mol_type = other DNA
attgcccatttaggttgggat

SEQ ID NO: 20771 - DNA, 21 bp, synthetic construct
  source 1..21: mol_type = other DNA; mol_type = other DNA
tatttcacgggtattattgaa

SEQ ID NO: 20772 - DNA, 21 bp, synthetic construct
  source 1..21: mol_type = other DNA; mol_type = other DNA
tacgccaaaagtggtccgaat

SEQ ID NO: 20773 - DNA, 21 bp, synthetic construct
  source 1..21: mol_type = other DNA; mol_type = other DNA
tatacaaagacgcagactaac

SEQ ID NO: 20774 - DNA, 21 bp, synthetic construct
  source 1..21: mol_type = other DNA; mol_type = other DNA
ctgtcgaagttgcacaccaac

SEQ ID NO: 20775 - DNA, 21 bp, synthetic construct
  source 1..21: mol_type = other DNA; mol_type = other DNA
tacactaaaacacaaacaaat

SEQ ID NO: 20776 - DNA, 21 bp, synthetic construct
  source 1..21: mol_type = other DNA; mol_type = other DNA
ctctctaaagcaagtcataac

SEQ ID NO: 20777 - DNA, 21 bp, synthetic construct
  source 1..21: mol_type = other DNA; mol_type = other DNA
aaagacgagtttttatcgtgg

SEQ ID NO: 20778 - DNA, 21 bp, synthetic construct
  source 1..21: mol_type = other DNA; mol_type = other DNA
ctggccaaaactggttttaat

SEQ ID NO: 20779 - DNA, 21 bp, synthetic construct
  source 1..21: mol_type = other DNA; mol_type = other DNA
tatagcaaattaaacccaatg

SEQ ID NO: 20780 - DNA, 21 bp, synthetic construct
  source 1..21: mol_type = other DNA; mol_type = other DNA
aaagacgacttcaccagcttc

SEQ ID NO: 20781 - DNA, 21 bp, synthetic construct
  source 1..21: mol_type = other DNA; mol_type = other DNA
ttatctagagtcggtcttaac

SEQ ID NO: 20782 - DNA, 21 bp, synthetic construct
  source 1..21: mol_type = other DNA; mol_type = other DNA
gtcgctactaaggggtgggac

SEQ ID NO: 20783 - DNA, 21 bp, synthetic construct
  source 1..21: mol_type = other DNA; mol_type = other DNA
tatttcaccggcattgtggag

SEQ ID NO: 20784 - DNA, 21 bp, synthetic construct
  source 1..21: mol_type = other DNA; mol_type = other DNA
aatgctttgaaagggtgggac

SEQ ID NO: 20785 - DNA, 21 bp, synthetic construct
  source 1..21: mol_type = other DNA; mol_type = other DNA
tacgctaagataggacccaac

SEQ ID NO: 20786 - DNA, 21 bp, synthetic construct
  source 1..21: mol_type = other DNA; mol_type = other DNA
ttgtcgaaagttgggcttaat

SEQ ID NO: 20787 - DNA, 21 bp, synthetic construct
  source 1..21: mol_type = other DNA; mol_type = other DNA
aggttagaagacgtcttcccg

SEQ ID NO: 20788 - DNA, 21 bp, synthetic construct
  source 1..21: mol_type = other DNA; mol_type = other DNA
tacagcaaggccggtggaggg

SEQ ID NO: 20789 - DNA, 21 bp, synthetic construct
  source 1..21: mol_type = other DNA; mol_type = other DNA
ttatcgaaggttggcatcaac

SEQ ID NO: 20790 - DNA, 21 bp, synthetic construct
  source 1..21: mol_type = other DNA; mol_type = other DNA
tatgtaaaaagtgatacatcg

SEQ ID NO: 20791 - DNA, 21 bp, synthetic construct
  source 1..21: mol_type = other DNA; mol_type = other DNA
ccccttgcgagctcgacttgg

SEQ ID NO: 20792 - DNA, 21 bp, synthetic construct
  source 1..21: mol_type = other DNA; mol_type = other DNA
ttaagtaaactccatactaat

SEQ ID NO: 20793 - DNA, 21 bp, synthetic construct
  source 1..21: mol_type = other DNA; mol_type = other DNA
aaggacgattttagcacatgg

SEQ ID NO: 20794 - DNA, 21 bp, synthetic construct
  source 1..21: mol_type = other DNA; mol_type = other DNA
ctctgtaaaccttgcttgggc

SEQ ID NO: 20795 - DNA, 21 bp, synthetic construct
  source 1..21: mol_type = other DNA; mol_type = other DNA
tacgcaaagagtggtataaat

SEQ ID NO: 20796 - DNA, 21 bp, synthetic construct
  source 1..21: mol_type = other DNA; mol_type = other DNA
ctttcaaaacttggccctaac

SEQ ID NO: 20797 - DNA, 21 bp, synthetic construct
  source 1..21: mol_type = other DNA; mol_type = other DNA
tatgttaaaagtcagacaggg

SEQ ID NO: 20798 - DNA, 21 bp, synthetic construct
  source 1..21: mol_type = other DNA; mol_type = other DNA
tattccaagttaaatccaacc

SEQ ID NO: 20799 - DNA, 21 bp, synthetic construct
  source 1..21: mol_type = other DNA; mol_type = other DNA
tactctaaattaaatgataat

SEQ ID NO: 20800 - DNA, 21 bp, synthetic construct
  source 1..21: mol_type = other DNA; mol_type = other DNA
tttcataaattggggatcaac

SEQ ID NO: 20801 - DNA, 21 bp, synthetic construct
  source 1..21: mol_type = other DNA; mol_type = other DNA
tacgtaaagtcgcaaacggga

SEQ ID NO: 20802 - DNA, 21 bp, synthetic construct
  source 1..21: mol_type = other DNA; mol_type = other DNA
aaagacgactttgtgtcctgg

SEQ ID NO: 20803 - DNA, 21 bp, synthetic construct
  source 1..21: mol_type = other DNA; mol_type = other DNA
tacgtaaagtctcagctagga

SEQ ID NO: 20804 - DNA, 21 bp, synthetic construct
  source 1..21: mol_type = other DNA; mol_type = other DNA
tatcataaattaaatccggat

SEQ ID NO: 20805 - DNA, 21 bp, synthetic construct
  source 1..21: mol_type = other DNA; mol_type = other DNA
tacagtaagatagggccgaac

SEQ ID NO: 20806 - DNA, 21 bp, synthetic construct
  source 1..21: mol_type = other DNA; mol_type = other DNA
aaggacgagttcactggttat

SEQ ID NO: 20807 - DNA, 21 bp, synthetic construct
  source 1..21: mol_type = other DNA; mol_type = other DNA
tactcgaaagtgggcgtgaat

SEQ ID NO: 20808 - DNA, 21 bp, synthetic construct
  source 1..21: mol_type = other DNA; mol_type = other DNA
cttcataaagcgggtcataac

SEQ ID NO: 20809 - DNA, 21 bp, synthetic construct
  source 1..21: mol_type = other DNA; mol_type = other DNA
tacgttaagagtcaacccgga

SEQ ID NO: 20810 - DNA, 21 bp, synthetic construct
  source 1..21: mol_type = other DNA
ttccacaagttaagtccgaac

SEQ ID NO: 20811 - DNA, 21 bp, synthetic construct
  source 1..21: mol_type = other DNA; mol_type = other DNA
atcgccaataaaggctgggat

SEQ ID NO: 20812 - DNA, 21 bp, synthetic construct
  source 1..21: mol_type = other DNA; mol_type = other DNA
ttcagcaaacttaacgtgaat

SEQ ID NO: 20813 - DNA, 21 bp, synthetic construct
  source 1..21: mol_type = other DNA; mol_type = other DNA
cgcacggagacagtatttccc

SEQ ID NO: 20814 - DNA, 21 bp, synthetic construct
  source 1..21: mol_type = other DNA; mol_type = other DNA
tattcaaagttggggccaaat

SEQ ID NO: 20815 - DNA, 21 bp, synthetic construct
  source 1..21: mol_type = other DNA; mol_type = other DNA
aaggatgaattttctacttat

SEQ ID NO: 20816 - DNA, 21 bp, synthetic construct
  source 1..21: mol_type = other DNA; mol_type = other DNA
cttgcaaaaaccggatacaac

SEQ ID NO: 20817 - DNA, 21 bp, synthetic construct
  source 1..21: mol_type = other DNA; mol_type = other DNA
ttccataaattatcactcaac

SEQ ID NO: 20818 - DNA, 21 bp, synthetic construct
  source 1..21: mol_type = other DNA; mol_type = other DNA
atcctggaaagccgcacgtgg

SEQ ID NO: 20819 - DNA, 21 bp, synthetic construct
  source 1..21: mol_type = other DNA; mol_type = other DNA
cgagaaatagacgtctacccg

SEQ ID NO: 20820 - DNA, 21 bp, synthetic construct
  source 1..21: mol_type = other DNA; mol_type = other DNA
tacagcaagctgcaggccaac

SEQ ID NO: 20821 - DNA, 21 bp, synthetic construct
  source 1..21: mol_type = other DNA; mol_type = other DNA
aaggatgagttcagcacatat

SEQ ID NO: 20822 - DNA, 21 bp, synthetic construct
  source 1..21: mol_type = other DNA; mol_type = other DNA
ttctcgaaactcaatgtcaat

SEQ ID NO: 20823 - DNA, 21 bp, synthetic construct
  source 1..21: mol_type = other DNA; mol_type = other DNA
aaggatgaattcagcagttgg

SEQ ID NO: 20824 - DNA, 21 bp, synthetic construct
  source 1..21: mol_type = other DNA; mol_type = other DNA
cttacgcggttacatccagac

SEQ ID NO: 20825 - DNA, 21 bp, synthetic construct
  source 1..21: mol_type = other DNA; mol_type = other DNA
atcttgtcaagtagcacgtgg

SEQ ID NO: 20826 - DNA, 21 bp, synthetic construct
  source 1..21: mol_type = other DNA; mol_type = other DNA
gtggccaataaggggtgggac

SEQ ID NO: 20827 - DNA, 21 bp, synthetic construct
  source 1..21: mol_type = other DNA; mol_type = other DNA
ttttcgaagctgaatgtaaac

SEQ ID NO: 20828 - DNA, 21 bp, synthetic construct
  source 1..21: mol_type = other DNA; mol_type = other DNA
gtttcagagttcctcagctac

SEQ ID NO: 20829 - DNA, 21 bp, synthetic construct
  source 1..21: mol_type = other DNA; mol_type = other DNA
ctgtccaagctaagtagtaat

SEQ ID NO: 20830 - DNA, 21 bp, synthetic construct
  source 1..21: mol_type = other DNA; mol_type = other DNA
ttgagtaagttgaatttgaac

SEQ ID NO: 20831 - DNA, 21 bp, synthetic construct
  source 1..21: mol_type = other DNA; mol_type = other DNA
tatagtaaaattggattgaat

SEQ ID NO: 20832 - DNA, 21 bp, synthetic construct
  source 1..21: mol_type = other DNA; mol_type = other DNA
tactttacgggtaaaatagca

SEQ ID NO: 20833 - DNA, 21 bp, synthetic construct
  source 1..21: mol_type = other DNA; mol_type = other DNA
aaggatgatttcgtcagttgg

SEQ ID NO: 20834 - DNA, 21 bp, synthetic construct
  source 1..21: mol_type = other DNA; mol_type = other DNA
aggctcattgacgtttatcca

SEQ ID NO: 20835 - DNA, 21 bp, synthetic construct
  source 1..21: mol_type = other DNA; mol_type = other DNA
tatcataagttggccaataat

SEQ ID NO: 20836 - DNA, 21 bp, synthetic construct
  source 1..21: mol_type = other DNA; mol_type = other DNA
ccaatggcaagtagcacatgg

SEQ ID NO: 20837 - DNA, 21 bp, synthetic construct
  source 1..21: mol_type = other DNA; mol_type = other DNA
gaagcgttggaaggtcgtgat

SEQ ID NO: 20838 - DNA, 21 bp, synthetic construct
  source 1..21: mol_type = other DNA; mol_type = other DNA
aaagatgaatttacaggctac

SEQ ID NO: 20839 - DNA, 21 bp, synthetic construct
  source 1..21: mol_type = other DNA; mol_type = other DNA
tatataaaatcacaacccgga

SEQ ID NO: 20840 - DNA, 21 bp, synthetic construct
  source 1..21: mol_type = other DNA; mol_type = other DNA
ttacataagctgagcaataat

SEQ ID NO: 20841 - DNA, 21 bp, synthetic construct
  source 1..21: mol_type = other DNA; mol_type = other DNA
aaggatgattttacttcattt

SEQ ID NO: 20842 - DNA, 21 bp, synthetic construct
  source 1..21: mol_type = other DNA; mol_type = other DNA
agggggttggaagggtatgac

SEQ ID NO: 20843 - DNA, 21 bp, synthetic construct
  source 1..21: mol_type = other DNA; mol_type = other DNA
cgcacaccgctcgtgttccct

SEQ ID NO: 20844 - DNA, 21 bp, synthetic construct
  source 1..21: mol_type = other DNA; mol_type = other DNA
ctatctaaagtaggtcctaat

SEQ ID NO: 20845 - DNA, 21 bp, synthetic construct
  source 1..21: mol_type = other DNA; mol_type = other DNA
tggaccccgtattgcaaggca

SEQ ID NO: 20846 - DNA, 21 bp, synthetic construct
  source 1..21: mol_type = other DNA; mol_type = other DNA
cgtggtctggaaggcttcgat

SEQ ID NO: 20847 - DNA, 21 bp, synthetic construct
  source 1..21: mol_type = other DNA; mol_type = other DNA
tatgtaaagtcagattcaatg

SEQ ID NO: 20848 - DNA, 21 bp, synthetic construct
  source 1..21: mol_type = other DNA; mol_type = other DNA
aaggacgacttcgtcgcatgg

SEQ ID NO: 20849 - DNA, 21 bp, synthetic construct
  source 1..21: mol_type = other DNA; mol_type = other DNA
aacgcgcttgagggcagagac

SEQ ID NO: 20850 - DNA, 21 bp, synthetic construct
  source 1..21: mol_type = other DNA; mol_type = other DNA
gttgaatcgagcaacggcgtg

SEQ ID NO: 20851 - DNA, 21 bp, synthetic construct
  source 1..21: mol_type = other DNA; mol_type = other DNA
gttgaatccaccaatggggtt

SEQ ID NO: 20852 - DNA, 21 bp, synthetic construct
  source 1..21: mol_type = other DNA; mol_type = other DNA
tatgctaaaactggacctaat

SEQ ID NO: 20853 - DNA, 21 bp, synthetic construct
  source 1..21: mol_type = other DNA; mol_type = other DNA
tatttcacgggtattgtggcc

SEQ ID NO: 20854 - DNA, 21 bp, synthetic construct
  source 1..21: mol_type = other DNA; mol_type = other DNA
aaagacgagttccattcgttc

SEQ ID NO: 20855 - DNA, 21 bp, synthetic construct
  source 1..21: mol_type = other DNA; mol_type = other DNA
cgtggcgaacatgtgttccca

SEQ ID NO: 20856 - DNA, 21 bp, synthetic construct
  source 1..21: mol_type = other DNA; mol_type = other DNA
ttgagtaaggtcgggaataac

SEQ ID NO: 20857 - DNA, 21 bp, synthetic construct
  source 1..21: mol_type = other DNA; mol_type = other DNA
ctgtcaaaacttaaccttaac

SEQ ID NO: 20858 - DNA, 21 bp, synthetic construct
  source 1..21: mol_type = other DNA; mol_type = other DNA
ctttttgatggaacacctgct

SEQ ID NO: 20859 - DNA, 21 bp, synthetic construct
  source 1..21: mol_type = other DNA; mol_type = other DNA
tatcataaacttaatttggac

SEQ ID NO: 20860 - DNA, 21 bp, synthetic construct
  source 1..21: mol_type = other DNA; mol_type = other DNA
aagatggatagtgtcagatgg

SEQ ID NO: 20861 - DNA, 21 bp, synthetic construct
  source 1..21: mol_type = other DNA; mol_type = other DNA
ctacatcgcttgggccccgac

SEQ ID NO: 20862 - DNA, 21 bp, synthetic construct
  source 1..21: mol_type = other DNA; mol_type = other DNA
ctgagcaaggttggaccgaac

SEQ ID NO: 20863 - DNA, 21 bp, synthetic construct
  source 1..21: mol_type = other DNA; mol_type = other DNA
tattcgaaagttggcgaaaat

SEQ ID NO: 20864 - DNA, 21 bp, synthetic construct
  source 1..21: mol_type = other DNA; mol_type = other DNA
tacgtgaaatccgacgccttg

SEQ ID NO: 20865 - DNA, 21 bp, synthetic construct
  source 1..21: mol_type = other DNA; mol_type = other DNA
gtagcaagcaagggatgggat

SEQ ID NO: 20866 - DNA, 21 bp, synthetic construct
  source 1..21: mol_type = other DNA; mol_type = other DNA
ttatgcaagccatgtttgacc

SEQ ID NO: 20867 - DNA, 21 bp, synthetic construct
  source 1..21: mol_type = other DNA; mol_type = other DNA
ttcagtaaactaaacatcaat

SEQ ID NO: 20868 - DNA, 21 bp, synthetic construct
  source 1..21: mol_type = other DNA; mol_type = other DNA
tatgcaaagaccggattgaat

SEQ ID NO: 20869 - DNA, 21 bp, synthetic construct
  source 1..21: mol_type = other DNA; mol_type = other DNA
ttgttcgacggcacgcccgcg

SEQ ID NO: 20870 - DNA, 21 bp, synthetic construct
  source 1..21: mol_type = other DNA; mol_type = other DNA
ttgagtcgggtaggttacgac

SEQ ID NO: 20871 - DNA, 21 bp, synthetic construct
  source 1..21: mol_type = other DNA; mol_type = other DNA
ttatctaaggtgggggccaat

SEQ ID NO: 20872 - DNA, 21 bp, synthetic construct
  source 1..21: mol_type = other DNA; mol_type = other DNA
aaagatgattttaccagctgg

SEQ ID NO: 20873 - DNA, 21 bp, synthetic construct
  source 1..21: mol_type = other DNA; mol_type = other DNA
tgtaaaccaagagaaggcaca

SEQ ID NO: 20874 - DNA, 21 bp, synthetic construct
  source 1..21: mol_type = other DNA; mol_type = other DNA
aggctagaagacgccttccct

SEQ ID NO: 20875 - DNA, 21 bp, synthetic construct
  source 1..21: mol_type = other DNA; mol_type = other DNA
aaggacgacttcacatcttgg

SEQ ID NO: 20876 - DNA, 21 bp, synthetic construct
  source 1..21: mol_type = other DNA; mol_type = other DNA
ttgcacaagaaaggtccagac

SEQ ID NO: 20877 - DNA, 21 bp, synthetic construct
  source 1..21: mol_type = other DNA; mol_type = other DNA
ttacacaaactaaatcctttg

SEQ ID NO: 20878 - DNA, 21 bp, synthetic construct
  source 1..21: mol_type = other DNA; mol_type = other DNA
aaagatgatttcactgtctat

SEQ ID NO: 20879 - DNA, 21 bp, synthetic construct
  source 1..21: mol_type = other DNA; mol_type = other DNA
ctcatggcagatgcctatccg

SEQ ID NO: 20880 - DNA, 21 bp, synthetic construct
  source 1..21: mol_type = other DNA; mol_type = other DNA
taccacaagcttaacccagac

SEQ ID NO: 20881 - DNA, 21 bp, synthetic construct
  source 1..21: mol_type = other DNA; mol_type = other DNA
tattccaagttgagtgataat

SEQ ID NO: 20882 - DNA, 21 bp, synthetic construct
  source 1..21: mol_type = other DNA; mol_type = other DNA
aggattattgacgcatttcct

SEQ ID NO: 20883 - DNA, 21 bp, synthetic construct
  source 1..21: mol_type = other DNA; mol_type = other DNA
gttcaatctactaatggcgtt

SEQ ID NO: 20884 - DNA, 21 bp, synthetic construct
  source 1..21: mol_type = other DNA; mol_type = other DNA
tacgtcaagtcagatcggggt

SEQ ID NO: 20885 - DNA, 21 bp, synthetic construct
  source 1..21: mol_type = other DNA; mol_type = other DNA
agactcttggatgcctatccc

SEQ ID NO: 20886 - DNA, 21 bp, synthetic construct
  source 1..21: mol_type = other DNA; mol_type = other DNA
aaggacgatttcacaatgttc

SEQ ID NO: 20887 - DNA, 21 bp, synthetic construct
  source 1..21: mol_type = other DNA; mol_type = other DNA
tacagtaagatgggccccaac

SEQ ID NO: 20888 - DNA, 21 bp, synthetic construct
  source 1..21: mol_type = other DNA; mol_type = other DNA
ttgcacagactagggccggat

SEQ ID NO: 20889 - DNA, 21 bp, synthetic construct
  source 1..21: mol_type = other DNA; mol_type = other DNA
ctccataagttacttgtgggg

SEQ ID NO: 20890 - DNA, 21 bp, synthetic construct
  source 1..21: mol_type = other DNA; mol_type = other DNA
ctcagcaagttgaacactaac

SEQ ID NO: 20891 - DNA, 21 bp, synthetic construct
  source 1..21: mol_type = other DNA; mol_type = other DNA
tatgttaaatcagatatgaag

SEQ ID NO: 20892 - DNA, 21 bp, synthetic construct
  source 1..21: mol_type = other DNA; mol_type = other DNA
tttagtaaattgaatacgaac

SEQ ID NO: 20893 - DNA, 21 bp, synthetic construct
  source 1..21: mol_type = other DNA; mol_type = other DNA
agggaagatgccgtgagatgg

SEQ ID NO: 20894 - DNA, 21 bp, synthetic construct
  source 1..21: mol_type = other DNA; mol_type = other DNA
cgagaggagggagtgtcttgg

SEQ ID NO: 20895 - DNA, 21 bp, synthetic construct
  source 1..21: mol_type = other DNA; mol_type = other DNA
tacgcgaaaatcgggcctaat

SEQ ID NO: 20896 - DNA, 21 bp, synthetic construct
  source 1..21: mol_type = other DNA; mol_type = other DNA
ttgagtaagttaagcttaaac

SEQ ID NO: 20897 - DNA, 21 bp, synthetic construct
  source 1..21: mol_type = other DNA; mol_type = other DNA
gtaaagagcacgaacgggata

SEQ ID NO: 20898 - DNA, 21 bp, synthetic construct
  source 1..21: mol_type = other DNA; mol_type = other DNA
ttgcgcatgagtggatgtccc

SEQ ID NO: 20899 - DNA, 21 bp, synthetic construct
  source 1..21: mol_type = other DNA; mol_type = other DNA
ttgcacaaactctcggttgat

SEQ ID NO: 20900 - DNA, 21 bp, synthetic construct
  source 1..21: mol_type = other DNA; mol_type = other DNA
gtaaaaagcaccaacgggatt

SEQ ID NO: 20901 - DNA, 21 bp, synthetic construct
  source 1..21: mol_type = other DNA; mol_type = other DNA
tatctcaagagtgataccaac

SEQ ID NO: 20902 - DNA, 21 bp, synthetic construct
  source 1..21: mol_type = other DNA; mol_type = other DNA
tttcataaactgtcacccaac

SEQ ID NO: 20903 - DNA, 21 bp, synthetic construct
  source 1..21: mol_type = other DNA; mol_type = other DNA
tacgtaaagagcgaccacggg

SEQ ID NO: 20904 - DNA, 21 bp, synthetic construct
  source 1..21: mol_type = other DNA; mol_type = other DNA
gtagagtcaacgaatgggagg

SEQ ID NO: 20905 - DNA, 21 bp, synthetic construct
  source 1..21: mol_type = other DNA; mol_type = other DNA
gtggatagcacgaacggcgta

SEQ ID NO: 20906 - DNA, 21 bp, synthetic construct
  source 1..21: mol_type = other DNA; mol_type = other DNA
aaagacgaattttctacgtac

SEQ ID NO: 20907 - DNA, 21 bp, synthetic construct
  source 1..21: mol_type = other DNA; mol_type = other DNA
gtcaactcgacaaacggggtt

SEQ ID NO: 20908 - DNA, 21 bp, synthetic construct
  source 1..21: mol_type = other DNA; mol_type = other DNA
ttcagcaagctcaatgataat

SEQ ID NO: 20909 - DNA, 21 bp, synthetic construct
  source 1..21: mol_type = other DNA; mol_type = other DNA
gttctaagctcagctaattgg

SEQ ID NO: 20910 - DNA, 21 bp, synthetic construct
  source 1..21: mol_type = other DNA; mol_type = other DNA
ttgttcgatggcactgcggca

SEQ ID NO: 20911 - DNA, 21 bp, synthetic construct
  source 1..21: mol_type = other DNA; mol_type = other DNA
tactcggcgataggacccaat

SEQ ID NO: 20912 - DNA, 21 bp, synthetic construct
  source 1..21: mol_type = other DNA; mol_type = other DNA
ctctcacgtattgggcccaat

SEQ ID NO: 20913 - DNA, 21 bp, synthetic construct
  source 1..21: mol_type = other DNA; mol_type = other DNA
gtcatatccacgaacggaata

SEQ ID NO: 20914 - DNA, 21 bp, synthetic construct
  source 1..21: mol_type = other DNA; mol_type = other DNA
ttgcatcgtctcggtcttgat

SEQ ID NO: 20915 - DNA, 21 bp, synthetic construct
  source 1..21: mol_type = other DNA; mol_type = other DNA
tttagcaaattgaacgttaac

SEQ ID NO: 20916 - DNA, 21 bp, synthetic construct
  source 1..21: mol_type = other DNA; mol_type = other DNA
cttcataaaaagggccctgat

SEQ ID NO: 20917 - DNA, 21 bp, synthetic construct
  source 1..21: mol_type = other DNA; mol_type = other DNA
ctgtgcaaaccatgcgataca

SEQ ID NO: 20918 - DNA, 21 bp, synthetic construct
  source 1..21: mol_type = other DNA; mol_type = other DNA
ttatgtaaaccctgcgtaacg

SEQ ID NO: 20919 - DNA, 21 bp, synthetic construct
  source 1..21: mol_type = other DNA; mol_type = other DNA
aaggatgaatttcacagtttt

SEQ ID NO: 20920 - DNA, 21 bp, synthetic construct
  source 1..21: mol_type = other DNA; mol_type = other DNA
aaagatgattttgtggcttgg

SEQ ID NO: 20921 - DNA, 21 bp, synthetic construct
  source 1..21: mol_type = other DNA; mol_type = other DNA
cgccttgatgatgtcttcccg

SEQ ID NO: 20922 - DNA, 21 bp, synthetic construct
  source 1..21: mol_type = other DNA; mol_type = other DNA
ctatgcaaaccttgcttagat

SEQ ID NO: 20923 - DNA, 21 bp, synthetic construct
  source 1..21: mol_type = other DNA; mol_type = other DNA
ttacatgctgcgctcccgaac

SEQ ID NO: 20924 - DNA, 21 bp, synthetic construct
  source 1..21: mol_type = other DNA; mol_type = other DNA
gttatgagcacaaacggagta

SEQ ID NO: 20925 - DNA, 21 bp, synthetic construct
  source 1..21: mol_type = other DNA; mol_type = other DNA
aacctggctagtgcgacttgg

SEQ ID NO: 20926 - DNA, 21 bp, synthetic construct
  source 1..21: mol_type = other DNA; mol_type = other DNA
atattgacaagcgcgacgtgg

SEQ ID NO: 20927 - DNA, 21 bp, synthetic construct
  source 1..21: mol_type = other DNA; mol_type = other DNA
ctgtgcaagccctgtccgacc

SEQ ID NO: 20928 - DNA, 21 bp, synthetic construct
  source 1..21: mol_type = other DNA; mol_type = other DNA
attctcagcagcaccacgtgg

SEQ ID NO: 20929 - DNA, 21 bp, synthetic construct
  source 1..21: mol_type = other DNA; mol_type = other DNA
tatgtgaaaagccaaatgggc

SEQ ID NO: 20930 - DNA, 21 bp, synthetic construct
  source 1..21: mol_type = other DNA; mol_type = other DNA
agtacaagtactaacggggtg

SEQ ID NO: 20931 - DNA, 21 bp, synthetic construct
  source 1..21: mol_type = other DNA; mol_type = other DNA
gtcctctccgatcgcatctgg

SEQ ID NO: 20932 - DNA, 21 bp, synthetic construct
  source 1..21: mol_type = other DNA; mol_type = other DNA
ctgtgcaaaccctgtacgacg

SEQ ID NO: 20933 - DNA, 21 bp, synthetic construct
  source 1..21: mol_type = other DNA; mol_type = other DNA
tacgtaaagtctcagatgggg

SEQ ID NO: 20934 - DNA, 21 bp, synthetic construct
  source 1..21: mol_type = other DNA; mol_type = other DNA
ttaagtcgcgtcggtcctaac

SEQ ID NO: 20935 - DNA, 21 bp, synthetic construct
  source 1..21: mol_type = other DNA; mol_type = other DNA
agaacagatgacgtgtttcct

SEQ ID NO: 20936 - DNA, 21 bp, synthetic construct
  source 1..21: mol_type = other DNA; mol_type = other DNA
gacatggcgtcggcaagttgg

SEQ ID NO: 20937 - DNA, 21 bp, synthetic construct
  source 1..21: mol_type = other DNA; mol_type = other DNA
taccacgctaaattgccgaat

SEQ ID NO: 20938 - DNA, 21 bp, synthetic construct
  source 1..21: mol_type = other DNA; mol_type = other DNA
atactagcaagtagagactgg

SEQ ID NO: 20939 - DNA, 21 bp, synthetic construct
  source 1..21: mol_type = other DNA; mol_type = other DNA
aaagatgatttcaccacgtac

SEQ ID NO: 20940 - DNA, 21 bp, synthetic construct
  source 1..21: mol_type = other DNA; mol_type = other DNA
aggaccgaaacggtcttcccg

SEQ ID NO: 20941 - DNA, 21 bp, synthetic construct
  source 1..21: mol_type = other DNA; mol_type = other DNA
caactgagtagctccacctgg

SEQ ID NO: 20942 - DNA, 21 bp, synthetic construct
  source 1..21: mol_type = other DNA; mol_type = other DNA
tgcacgaaatcgtgttgccca

SEQ ID NO: 20943 - DNA, 21 bp, synthetic construct
  source 1..21: mol_type = other DNA; mol_type = other DNA
cttcaccgcttgagcccgccc

SEQ ID NO: 20944 - DNA, 21 bp, synthetic construct
  source 1..21: mol_type = other DNA; mol_type = other DNA
acactgtcaagcgccacctgg

SEQ ID NO: 20945 - DNA, 21 bp, synthetic construct
  source 1..21: mol_type = other DNA; mol_type = other DNA
gtcgctactaagggcgcgggt

SEQ ID NO: 20946 - DNA, 21 bp, synthetic construct
  source 1..21: mol_type = other DNA; mol_type = other DNA
tatttcactggagtggtggcg

SEQ ID NO: 20947 - DNA, 21 bp, synthetic construct
  source 1..21: mol_type = other DNA; mol_type = other DNA
ctgtcgcgtgtagggcccaat

SEQ ID NO: 20948 - DNA, 21 bp, synthetic construct
  source 1..21: mol_type = other DNA; mol_type = other DNA
aatgctttagaaggtcgtgat

SEQ ID NO: 20949 - DNA, 21 bp, synthetic construct
  source 1..21: mol_type = other DNA; mol_type = other DNA
cgcggcctagagggatacgat

SEQ ID NO: 20950 - DNA, 21 bp, synthetic construct
  source 1..21: mol_type = other DNA; mol_type = other DNA
tttcacaagctgagcttaaat

SEQ ID NO: 20951 - DNA, 21 bp, synthetic construct
  source 1..21: mol_type = other DNA; mol_type = other DNA
ggcgggatcgggtcggtctgg

SEQ ID NO: 20952 - DNA, 21 bp, synthetic construct
  source 1..21: mol_type = other DNA; mol_type = other DNA
ctccatgtcaagcttccagac

SEQ ID NO: 20953 - DNA, 21 bp, synthetic construct
  source 1..21: mol_type = other DNA; mol_type = other DNA
aaggacgatttcaccgcatgg

SEQ ID NO: 20954 - DNA, 21 bp, synthetic construct
  source 1..21: mol_type = other DNA; mol_type = other DNA
ataatgtcgagtgccacgtgg

SEQ ID NO: 20955 - DNA, 21 bp, synthetic construct
  source 1..21: mol_type = other DNA; mol_type = other DNA
attatgagctcggcgacctgg

SEQ ID NO: 20956 - DNA, 21 bp, synthetic construct
  source 1..21: mol_type = other DNA; mol_type = other DNA
ctgagccgtgttggcctcaat

SEQ ID NO: 20957 - DNA, 21 bp, synthetic construct
  source 1..21: mol_type = other DNA; mol_type = other DNA
gatatggcatcgaagacttgg

SEQ ID NO: 20958 - DNA, 21 bp, synthetic construct
  source 1..21: mol_type = other DNA; mol_type = other DNA
tacgtaaagtcggataagatg

SEQ ID NO: 20959 - DNA, 21 bp, synthetic construct
  source 1..21: mol_type = other DNA; mol_type = other DNA
ctccacaaactatcaaacaac

SEQ ID NO: 20960 - DNA, 21 bp, synthetic construct
  source 1..21: mol_type = other DNA; mol_type = other DNA
tacgttaagagtgacgtcagg

SEQ ID NO: 20961 - DNA, 21 bp, synthetic construct
  source 1..21: mol_type = other DNA; mol_type = other DNA
ttgcataaggctggatacaac

SEQ ID NO: 20962 - DNA, 21 bp, synthetic construct
  source 1..21: mol_type = other DNA; mol_type = other DNA
tacgtaaaaagtgacagccgt

SEQ ID NO: 20963 - DNA, 21 bp, synthetic construct
  source 1..21: mol_type = other DNA; mol_type = other DNA
ctagccagatcaggcccaaac

SEQ ID NO: 20964 - DNA, 21 bp, synthetic construct
  source 1..21: mol_type = other DNA; mol_type = other DNA
gtagaatctacgaatggtgta

SEQ ID NO: 20965 - DNA, 21 bp, synthetic construct
  source 1..21: mol_type = other DNA; mol_type = other DNA
gtaacaagtaccaatggaatc

SEQ ID NO: 20966 - DNA, 21 bp, synthetic construct
  source 1..21: mol_type = other DNA; mol_type = other DNA
gacttatcatcagctaaatgg

SEQ ID NO: 20967 - DNA, 21 bp, synthetic construct
  source 1..21: mol_type = other DNA; mol_type = other DNA
tatgtgaaatcgcagacgatg

SEQ ID NO: 20968 - DNA, 21 bp, synthetic construct
  source 1..21: mol_type = other DNA; mol_type = other DNA
aaggatgagttttccacatgg

SEQ ID NO: 20969 - DNA, 21 bp, synthetic construct
  source 1..21: mol_type = other DNA; mol_type = other DNA
tacgtgaagtcagacactagc

SEQ ID NO: 20970 - DNA, 21 bp, synthetic construct
  source 1..21: mol_type = other DNA; mol_type = other DNA
gatttgtcatcgagcaaatgg

SEQ ID NO: 20971 - DNA, 21 bp, synthetic construct
  source 1..21: mol_type = other DNA; mol_type = other DNA
gtcacttccacgaacggtata

SEQ ID NO: 20972 - DNA, 21 bp, synthetic construct
  source 1..21: mol_type = other DNA; mol_type = other DNA
tatagcgctatcgggccaaat

SEQ ID NO: 20973 - DNA, 21 bp, synthetic construct
  source 1..21: mol_type = other DNA; mol_type = other DNA
tatagcaaggtcggtgtaaac

SEQ ID NO: 20974 - DNA, 21 bp, synthetic construct
  source 1..21: mol_type = other DNA; mol_type = other DNA
agaggggaaactgtattccca

SEQ ID NO: 20975 - DNA, 21 bp, synthetic construct
  source 1..21: mol_type = other DNA; mol_type = other DNA
aaggacgactttacgacttat

SEQ ID NO: 20976 - DNA, 21 bp, synthetic construct
  source 1..21: mol_type = other DNA; mol_type = other DNA
gtgaactccacgaacggcatt

SEQ ID NO: 20977 - DNA, 21 bp, synthetic construct
  source 1..21: mol_type = other DNA; mol_type = other DNA
cttctcagttctgctacatgg

SEQ ID NO: 20978 - DNA, 21 bp, synthetic construct
  source 1..21: mol_type = other DNA; mol_type = other DNA
aaggatgactttacacatttc

SEQ ID NO: 20979 - DNA, 21 bp, synthetic construct
  source 1..21: mol_type = other DNA; mol_type = other DNA
aaagacgacttcacaagttgg

SEQ ID NO: 20980 - DNA, 21 bp, synthetic construct
  source 1..21: mol_type = other DNA; mol_type = other DNA
atcgagtccaccaacgggagg

SEQ ID NO: 20981 - DNA, 21 bp, synthetic construct
  source 1..21: mol_type = other DNA; mol_type = other DNA
tatgtaaagagtcagcctacc

SEQ ID NO: 20982 - DNA, 21 bp, synthetic construct
  source 1..21: mol_type = other DNA; mol_type = other DNA
ttatgccgtccttgttcccat

SEQ ID NO: 20983 - DNA, 21 bp, synthetic construct
  source 1..21: mol_type = other DNA; mol_type = other DNA
tatgtgaaaagccagatgttg

SEQ ID NO: 20984 - DNA, 21 bp, synthetic construct
  source 1..21: mol_type = other DNA; mol_type = other DNA
tatgtcaaaagtgacaaaatg

SEQ ID NO: 20985 - DNA, 21 bp, synthetic construct
  source 1..21: mol_type = other DNA; mol_type = other DNA
ggtgggttgggaagtcattgg

SEQ ID NO: 20986 - DNA, 21 bp, synthetic construct
  source 1..21: mol_type = other DNA; mol_type = other DNA
aaggacgactttacgacttgg

SEQ ID NO: 20987 - DNA, 21 bp, synthetic construct
  source 1..21: mol_type = other DNA; mol_type = other DNA
tattcgaaagcccagccaaat

SEQ ID NO: 20988 - DNA, 21 bp, synthetic construct
  source 1..21: mol_type = other DNA; mol_type = other DNA
ctctccaagctgaacgccaat

SEQ ID NO: 20989 - DNA, 21 bp, synthetic construct
  source 1..21: mol_type = other DNA; mol_type = other DNA
taccacgtcaagtcaccgaac

SEQ ID NO: 20990 - DNA, 21 bp, synthetic construct
  source 1..21: mol_type = other DNA; mol_type = other DNA
tactttactgggatcatcgag

SEQ ID NO: 20991 - DNA, 21 bp, synthetic construct
  source 1..21: mol_type = other DNA; mol_type = other DNA
aggacggacgacacattccca

SEQ ID NO: 20992 - DNA, 21 bp, synthetic construct
  source 1..21: mol_type = other DNA; mol_type = other DNA
aaggatgattttacttcgtgg

SEQ ID NO: 20993 - DNA, 21 bp, synthetic construct
  source 1..21: mol_type = other DNA; mol_type = other DNA
tatagtaaagtgggggcaaac

SEQ ID NO: 20994 - DNA, 21 bp, synthetic construct
  source 1..21: mol_type = other DNA; mol_type = other DNA
tactttacgggggtagcgcta

SEQ ID NO: 20995 - DNA, 21 bp, synthetic construct
  source 1..21: mol_type = other DNA; mol_type = other DNA
attgaaagtacgaatggtcgt

SEQ ID NO: 20996 - DNA, 21 bp, synthetic construct
  source 1..21: mol_type = other DNA
gatatgagtgcatctacttgg

SEQ ID NO: 20997 - DNA, 21 bp, synthetic construct
  source 1..21: mol_type = other DNA
taccataagttaggcccacag

SEQ ID NO: 20998 - DNA, 21 bp, synthetic construct
  source 1..21: mol_type = other DNA
atcatggcgtcagcaaactgg

SEQ ID NO: 20999 - DNA, 21 bp, synthetic construct
  source 1..21: mol_type = other DNA
attttatcatcccaatcgtgg

SEQ ID NO: 21000 - DNA, 21 bp, synthetic construct
  source 1..21: mol_type = other DNA
tactttaccggcttcatagaa

SEQ ID NO: 21001 - DNA, 21 bp, synthetic construct
  source 1..21: mol_type = other DNA; mol_type = other DNA
accagtgaaaatgtgtatttt

SEQ ID NO: 21002 - DNA, 21 bp, synthetic construct
  source 1..21: mol_type = other DNA; mol_type = other DNA
tactttactggcgtgaaggag

SEQ ID NO: 21003 - DNA, 21 bp, synthetic construct
  source 1..21: mol_type = other DNA; mol_type = other DNA
cgcactgacgatgtcttccca

SEQ ID NO: 21004 - DNA, 21 bp, synthetic construct
  source 1..21: mol_type = other DNA; mol_type = other DNA
tactcaaaggtgggaacgaat

SEQ ID NO: 21005 - DNA, 21 bp, synthetic construct
  source 1..21: mol_type = other DNA; mol_type = other DNA
gtcatgagtacgaacggtgta

SEQ ID NO: 21006 - DNA, 21 bp, synthetic construct
  source 1..21: mol_type = other DNA; mol_type = other DNA
ctctccaaactgtcacttaac

SEQ ID NO: 21007 - DNA, 21 bp, synthetic construct
  source 1..21: mol_type = other DNA; mol_type = other DNA
tacgtaaagtcgcagacgagt

SEQ ID NO: 21008 - DNA, 21 bp, synthetic construct
  source 1..21: mol_type = other DNA; mol_type = other DNA
ctctgcaagccgtgcactaca

SEQ ID NO: 21009 - DNA, 21 bp, synthetic construct
  source 1..21: mol_type = other DNA; mol_type = other DNA
tatgttaaaagtgatgcactc

SEQ ID NO: 21010 - DNA, 21 bp, synthetic construct
  source 1..21: mol_type = other DNA; mol_type = other DNA
tacgtgaaaagtgacagcatg

SEQ ID NO: 21011 - DNA, 21 bp, synthetic construct
  source 1..21: mol_type = other DNA; mol_type = other DNA
tatcatgtaaaaagcccaaat

SEQ ID NO: 21012 - DNA, 21 bp, synthetic construct
  source 1..21: mol_type = other DNA; mol_type = other DNA
ctgtttgacggtaccgggccc

SEQ ID NO: 21013 - DNA, 21 bp, synthetic construct
  source 1..21: mol_type = other DNA; mol_type = other DNA
tatagcaaactttccgacaac

SEQ ID NO: 21014 - DNA, 21 bp, synthetic construct
  source 1..21: mol_type = other DNA; mol_type = other DNA
aaggacgagttcagcacctac

SEQ ID NO: 21015 - DNA, 21 bp, synthetic construct
  source 1..21: mol_type = other DNA; mol_type = other DNA
aggaccgataccgtatatcca

SEQ ID NO: 21016 - DNA, 21 bp, synthetic construct
  source 1..21: mol_type = other DNA; mol_type = other DNA
aggatgttagacgcattccca

SEQ ID NO: 21017 - DNA, 21 bp, synthetic construct
  source 1..21: mol_type = other DNA; mol_type = other DNA
tacgcgaagtcgggcccaaac

SEQ ID NO: 21018 - DNA, 21 bp, synthetic construct
  source 1..21: mol_type = other DNA; mol_type = other DNA
aaggacgacttcagtacgtat

SEQ ID NO: 21019 - DNA, 21 bp, synthetic construct
  source 1..21: mol_type = other DNA; mol_type = other DNA
gttaagtctacgaatggtatc

SEQ ID NO: 21020 - DNA, 21 bp, synthetic construct
  source 1..21: mol_type = other DNA; mol_type = other DNA
tatttaaaatctcagatgacg

SEQ ID NO: 21021 - DNA, 21 bp, synthetic construct
  source 1..21: mol_type = other DNA; mol_type = other DNA
tacttcagcggcatcatagaa

SEQ ID NO: 21022 - DNA, 21 bp, synthetic construct
  source 1..21: mol_type = other DNA; mol_type = other DNA
atgtttgacggaaccgctgca

SEQ ID NO: 21023 - DNA, 21 bp, synthetic construct
  source 1..21: mol_type = other DNA; mol_type = other DNA
ataatggaatcagcggtttgg

SEQ ID NO: 21024 - DNA, 21 bp, synthetic construct
  source 1..21: mol_type = other DNA; mol_type = other DNA
gtagacagcaccaatggcagg

SEQ ID NO: 21025 - DNA, 21 bp, synthetic construct
  source 1..21: mol_type = other DNA; mol_type = other DNA
tacacaaagttgcaatataac

SEQ ID NO: 21026 - DNA, 21 bp, synthetic construct
  source 1..21: mol_type = other DNA; mol_type = other DNA
ctaagcaaagtaggagcaaac

SEQ ID NO: 21027 - DNA, 21 bp, synthetic construct
  source 1..21: mol_type = other DNA; mol_type = other DNA
aggacagaaaccgtgtatcct

SEQ ID NO: 21028 - DNA, 21 bp, synthetic construct
  source 1..21: mol_type = other DNA; mol_type = other DNA
tacagtaaattgtctcttaac

SEQ ID NO: 21029 - DNA, 21 bp, synthetic construct
  source 1..21: mol_type = other DNA; mol_type = other DNA
tatagcaagataggcgaaaac

SEQ ID NO: 21030 - DNA, 21 bp, synthetic construct
  source 1..21: mol_type = other DNA; mol_type = other DNA
tatgttaagtcggacaggcac

SEQ ID NO: 21031 - DNA, 21 bp, synthetic construct
  source 1..21: mol_type = other DNA; mol_type = other DNA
tacagcaagctaaacccatta

SEQ ID NO: 21032 - DNA, 21 bp, synthetic construct
  source 1..21: mol_type = other DNA; mol_type = other DNA
ctctcgaaactcaatgataat

SEQ ID NO: 21033 - DNA, 21 bp, synthetic construct
  source 1..21: mol_type = other DNA; mol_type = other DNA
cggttggtggatgtttttccg

SEQ ID NO: 21034 - DNA, 21 bp, synthetic construct
  source 1..21: mol_type = other DNA; mol_type = other DNA
tatgtgaaatccgacatgagg

SEQ ID NO: 21035 - DNA, 21 bp, synthetic construct
  source 1..21: mol_type = other DNA; mol_type = other DNA
tttcacaagctgtcaaccaat

SEQ ID NO: 21036 - DNA, 21 bp, synthetic construct
  source 1..21: mol_type = other DNA; mol_type = other DNA
tttgtaaaatccgacactaag

SEQ ID NO: 21037 - DNA, 21 bp, synthetic construct
  source 1..21: mol_type = other DNA; mol_type = other DNA
tatttcaccggagtcgctttg

SEQ ID NO: 21038 - DNA, 21 bp, synthetic construct
  source 1..21: mol_type = other DNA; mol_type = other DNA
aaggacgactttaccgtatac

SEQ ID NO: 21039 - DNA, 21 bp, synthetic construct
  source 1..21: mol_type = other DNA; mol_type = other DNA
cttgctagaacaggcctgaat

SEQ ID NO: 21040 - DNA, 21 bp, synthetic construct
  source 1..21: mol_type = other DNA; mol_type = other DNA
tatgtaaagagcgactcgatg

SEQ ID NO: 21041 - DNA, 21 bp, synthetic construct
  source 1..21: mol_type = other DNA; mol_type = other DNA
ttatgtagaccgtgcttcgaa

SEQ ID NO: 21042 - DNA, 21 bp, synthetic construct
  source 1..21: mol_type = other DNA; mol_type = other DNA
ctatgcaagccttgtgcaaca

SEQ ID NO: 21043 - DNA, 21 bp, synthetic construct
  source 1..21: mol_type = other DNA; mol_type = other DNA
gtggaaagtacgaacggtagg

SEQ ID NO: 21044 - DNA, 21 bp, synthetic construct
  source 1..21: mol_type = other DNA; mol_type = other DNA
tacgccaagagtgggatgaat

SEQ ID NO: 21045 - DNA, 21 bp, synthetic construct
  source 1..21: mol_type = other DNA; mol_type = other DNA
aggggtgagcacgtatttccc

SEQ ID NO: 21046 - DNA, 21 bp, synthetic construct
  source 1..21: mol_type = other DNA; mol_type = other DNA
cgagaggacatggtgaggtgg

SEQ ID NO: 21047 - DNA, 21 bp, synthetic construct
  source 1..21: mol_type = other DNA; mol_type = other DNA
ctctcgagggtttcaatcaat

SEQ ID NO: 21048 - DNA, 21 bp, synthetic construct
  source 1..21: mol_type = other DNA; mol_type = other DNA
ctaagcaaggtaggcatgaat

SEQ ID NO: 21049 - DNA, 21 bp, synthetic construct
  source 1..21: mol_type = other DNA; mol_type = other DNA
tacgttaaaagtgacacaagg

SEQ ID NO: 21050 - DNA, 21 bp, synthetic construct
  source 1..21: mol_type = other DNA; mol_type = other DNA
gtaaatagcaccaatggcgtc

SEQ ID NO: 21051 - DNA, 21 bp, synthetic construct
  source 1..21: mol_type = other DNA; mol_type = other DNA
tacactaaaagccagaccaac

SEQ ID NO: 21052 - DNA, 21 bp, synthetic construct
  source 1..21: mol_type = other DNA; mol_type = other DNA
tatttcacaggcattatggaa

SEQ ID NO: 21053 - DNA, 21 bp, synthetic construct
  source 1..21: mol_type = other DNA; mol_type = other DNA
ctcgctagatcagggcccaac

SEQ ID NO: 21054 - DNA, 21 bp, synthetic construct
  source 1..21: mol_type = other DNA; mol_type = other DNA
cgtaacttagacgtattccct

SEQ ID NO: 21055 - DNA, 21 bp, synthetic construct
  source 1..21: mol_type = other DNA; mol_type = other DNA
ccgttggcatcgagtacgtgg

SEQ ID NO: 21056 - DNA, 21 bp, synthetic construct
  source 1..21: mol_type = other DNA; mol_type = other DNA
gttatggagtcatcaaagtgg

SEQ ID NO: 21057 - DNA, 21 bp, synthetic construct
  source 1..21: mol_type = other DNA; mol_type = other DNA
ccactgatgagtcgtgattgg

SEQ ID NO: 21058 - DNA, 21 bp, synthetic construct
  source 1..21: mol_type = other DNA; mol_type = other DNA
tttagtaaattgggcccaaat

SEQ ID NO: 21059 - DNA, 21 bp, synthetic construct
  source 1..21: mol_type = other DNA; mol_type = other DNA
ctcgcgaaaaccgggcctaat

SEQ ID NO: 21060 - DNA, 21 bp, synthetic construct
  source 1..21: mol_type = other DNA; mol_type = other DNA
gaccttagctcgagctcgtgg

SEQ ID NO: 21061 - DNA, 21 bp, synthetic construct
  source 1..21: mol_type = other DNA; mol_type = other DNA
ttgtttagcggagaagggccg

SEQ ID NO: 21062 - DNA, 21 bp, synthetic construct
  source 1..21: mol_type = other DNA; mol_type = other DNA
tatgtgaaaagtgataacggt

SEQ ID NO: 21063 - DNA, 21 bp, synthetic construct
  source 1..21: mol_type = other DNA; mol_type = other DNA
tattcgaaattacaagccaat

SEQ ID NO: 21064 - DNA, 21 bp, synthetic construct
  source 1..21: mol_type = other DNA; mol_type = other DNA
ttaagtaggcttgctataaac

SEQ ID NO: 21065 - DNA, 21 bp, synthetic construct
  source 1..21: mol_type = other DNA; mol_type = other DNA
tatagtaaagtgggaccgaat

SEQ ID NO: 21066 - DNA, 21 bp, synthetic construct
  source 1..21: mol_type = other DNA; mol_type = other DNA
tactttactggaatagttgaa

SEQ ID NO: 21067 - DNA, 21 bp, synthetic construct
  source 1..21: mol_type = other DNA; mol_type = other DNA
gttatatccacgaatggaatt

SEQ ID NO: 21068 - DNA, 21 bp, synthetic construct
  source 1..21: mol_type = other DNA; mol_type = other DNA
taccacaaaatgctgccggac

SEQ ID NO: 21069 - DNA, 21 bp, synthetic construct
  source 1..21: mol_type = other DNA; mol_type = other DNA
aatctcagcagtagcacgtgg

SEQ ID NO: 21070 - DNA, 21 bp, synthetic construct
  source 1..21: mol_type = other DNA; mol_type = other DNA
ctcgcgaagggggggccaaac

SEQ ID NO: 21071 - DNA, 21 bp, synthetic construct
  source 1..21: mol_type = other DNA; mol_type = other DNA
aggatgatcgatgtctatcca

SEQ ID NO: 21072 - DNA, 21 bp, synthetic construct
  source 1..21: mol_type = other DNA; mol_type = other DNA
tatcacaaactgggaccccaa

SEQ ID NO: 21073 - DNA, 21 bp, synthetic construct
  source 1..21: mol_type = other DNA; mol_type = other DNA
gacttgcaagccagatcatgg

SEQ ID NO: 21074 - DNA, 21 bp, synthetic construct
  source 1..21: mol_type = other DNA; mol_type = other DNA
ctatcgagagtcggttttgac

SEQ ID NO: 21075 - DNA, 21 bp, synthetic construct
  source 1..21: mol_type = other DNA; mol_type = other DNA
ttcgttaaatcagacaataga

SEQ ID NO: 21076 - DNA, 21 bp, synthetic construct
  source 1..21: mol_type = other DNA; mol_type = other DNA
atagctaacaaggggtgggac

SEQ ID NO: 21077 - DNA, 21 bp, synthetic construct
  source 1..21: mol_type = other DNA; mol_type = other DNA
gttatgtccaccaatggagtt

SEQ ID NO: 21078 - DNA, 21 bp, synthetic construct
  source 1..21: mol_type = other DNA; mol_type = other DNA
agagatgagactgtgttcccc

SEQ ID NO: 21079 - DNA, 21 bp, synthetic construct
  source 1..21: mol_type = other DNA; mol_type = other DNA
cgaggggaaaatgtgttcccc

SEQ ID NO: 21080 - DNA, 21 bp, synthetic construct
  source 1..21: mol_type = other DNA; mol_type = other DNA
tatcataagctccagttcgat

SEQ ID NO: 21081 - DNA, 21 bp, synthetic construct
  source 1..21: mol_type = other DNA; mol_type = other DNA
taccacaaattgcaatttgac

SEQ ID NO: 21082 - DNA, 21 bp, synthetic construct
  source 1..21: mol_type = other DNA; mol_type = other DNA
ttagccaagacgggtcccaat

SEQ ID NO: 21083 - DNA, 21 bp, synthetic construct
  source 1..21: mol_type = other DNA; mol_type = other DNA
aagtcggagttcacgacctac

SEQ ID NO: 21084 - DNA, 21 bp, synthetic construct
  source 1..21: mol_type = other DNA; mol_type = other DNA
ttgtgtaagccgtgtcttgac

SEQ ID NO: 21085 - DNA, 21 bp, synthetic construct
  source 1..21: mol_type = other DNA; mol_type = other DNA
agattagccgatgcgttccct

SEQ ID NO: 21086 - DNA, 21 bp, synthetic construct
  source 1..21: mol_type = other DNA; mol_type = other DNA
tatgtcaaatcacaagcgggc

SEQ ID NO: 21087 - DNA, 21 bp, synthetic construct
  source 1..21: mol_type = other DNA; mol_type = other DNA
tttgcctgcatgaatagcaat

SEQ ID NO: 21088 - DNA, 21 bp, synthetic construct
  source 1..21: mol_type = other DNA; mol_type = other DNA
ctccatcgtctgttgaaggat

SEQ ID NO: 21089 - DNA, 21 bp, synthetic construct
  source 1..21: mol_type = other DNA; mol_type = other DNA
ttgatggctgacgcgtacccc

SEQ ID NO: 21090 - DNA, 21 bp, synthetic construct
  source 1..21: mol_type = other DNA; mol_type = other DNA
ttgaccagagttgccccgaac

SEQ ID NO: 21091 - DNA, 21 bp, synthetic construct
  source 1..21: mol_type = other DNA; mol_type = other DNA
tatttcacgggacaggtagaa

SEQ ID NO: 21092 - DNA, 21 bp, synthetic construct
  source 1..21: mol_type = other DNA; mol_type = other DNA
tattctaaaaagaatgacaat

SEQ ID NO: 21093 - DNA, 21 bp, synthetic construct
  source 1..21: mol_type = other DNA; mol_type = other DNA
aggaatgaattttgtacattt

SEQ ID NO: 21094 - DNA, 21 bp, synthetic construct
  source 1..21: mol_type = other DNA; mol_type = other DNA
ctatgtaaaagttgtcttact

SEQ ID NO: 21095 - DNA, 21 bp, synthetic construct
  source 1..21: mol_type = other DNA; mol_type = other DNA
tacttcagtggaatacccctt

SEQ ID NO: 21096 - DNA, 21 bp, synthetic construct
  source 1..21: mol_type = other DNA; mol_type = other DNA
tatagtaagctcggacttaac

SEQ ID NO: 21097 - DNA, 21 bp, synthetic construct
  source 1..21: mol_type = other DNA; mol_type = other DNA
ctcagtaaaattggctataat

SEQ ID NO: 21098 - DNA, 21 bp, synthetic construct
  source 1..21: mol_type = other DNA; mol_type = other DNA
ttagcacgtagcggcccgaat

SEQ ID NO: 21099 - DNA, 21 bp, synthetic construct
  source 1..21: mol_type = other DNA; mol_type = other DNA
tatgtgaagagccaggctggc

SEQ ID NO: 21100 - DNA, 21 bp, synthetic construct
  source 1..21: mol_type = other DNA; mol_type = other DNA
ttgcaccgtcttttacacgat

SEQ ID NO: 21101 - DNA, 21 bp, synthetic construct
  source 1..21: mol_type = other DNA; mol_type = other DNA
acgttaagttctgctacatgg

SEQ ID NO: 21102 - DNA, 21 bp, synthetic construct
  source 1..21: mol_type = other DNA; mol_type = other DNA
taccacaagcttaaccctcca

SEQ ID NO: 21103 - DNA, 21 bp, synthetic construct
  source 1..21: mol_type = other DNA; mol_type = other DNA
atgttcgatggcactgcagcc

SEQ ID NO: 21104 - DNA, 21 bp, synthetic construct
  source 1..21: mol_type = other DNA; mol_type = other DNA
gtcgccagcacgaacgggatt

SEQ ID NO: 21105 - DNA, 21 bp, synthetic construct
  source 1..21: mol_type = other DNA; mol_type = other DNA
tatgctaagcacggaccgaat

SEQ ID NO: 21106 - DNA, 21 bp, synthetic construct
  source 1..21: mol_type = other DNA; mol_type = other DNA
gtgcagagcaccaacggagta

SEQ ID NO: 21107 - DNA, 21 bp, synthetic construct
  source 1..21: mol_type = other DNA; mol_type = other DNA
cgggaggatcacgtatattgg

SEQ ID NO: 21108 - DNA, 21 bp, synthetic construct
  source 1..21: mol_type = other DNA; mol_type = other DNA
taccacaagttgaatgataac

SEQ ID NO: 21109 - DNA, 21 bp, synthetic construct
  source 1..21: mol_type = other DNA; mol_type = other DNA
ctccacaaaaagagtccggat

SEQ ID NO: 21110 - DNA, 21 bp, synthetic construct
  source 1..21: mol_type = other DNA; mol_type = other DNA
ttgcataaagccggctataat

SEQ ID NO: 21111 - DNA, 21 bp, synthetic construct
  source 1..21: mol_type = other DNA; mol_type = other DNA
tatgcgaagtcaggacctaac

SEQ ID NO: 21112 - DNA, 21 bp, synthetic construct
  source 1..21: mol_type = other DNA; mol_type = other DNA
atgttcgatggcacagccgca

SEQ ID NO: 21113 - DNA, 21 bp, synthetic construct
  source 1..21: mol_type = other DNA; mol_type = other DNA
ctttccaaattaagcgcaaat

SEQ ID NO: 21114 - DNA, 21 bp, synthetic construct
  source 1..21: mol_type = other DNA; mol_type = other DNA
gttatgagcaccaacggagtg

SEQ ID NO: 21115 - DNA, 21 bp, synthetic construct
  source 1..21: mol_type = other DNA; mol_type = other DNA
tattccaaaatcggtcctaat

SEQ ID NO: 21116 - DNA, 21 bp, synthetic construct
  source 1..21: mol_type = other DNA; mol_type = other DNA
gtagagagcagagaagggatt

SEQ ID NO: 21117 - DNA, 21 bp, synthetic construct
  source 1..21: mol_type = other DNA; mol_type = other DNA
tacgtcaagtctgatcatatg

SEQ ID NO: 21118 - DNA, 21 bp, synthetic construct
  source 1..21: mol_type = other DNA; mol_type = other DNA
tatgagccgggctgcgatgaa

SEQ ID NO: 21119 - DNA, 21 bp, synthetic construct
  source 1..21: mol_type = other DNA; mol_type = other DNA
gtaatgccggatgcgttcccc

SEQ ID NO: 21120 - DNA, 21 bp, synthetic construct
  source 1..21: mol_type = other DNA; mol_type = other DNA
ttgaccagacttcaccccgat

SEQ ID NO: 21121 - DNA, 21 bp, synthetic construct
  source 1..21: mol_type = other DNA; mol_type = other DNA
attatgtcatcgaacatttgg

SEQ ID NO: 21122 - DNA, 21 bp, synthetic construct
  source 1..21: mol_type = other DNA; mol_type = other DNA
cttatgattgatgcattccct

SEQ ID NO: 21123 - DNA, 21 bp, synthetic construct
  source 1..21: mol_type = other DNA; mol_type = other DNA
ttgcacaaaaatcttccggac

SEQ ID NO: 21124 - DNA, 21 bp, synthetic construct
  source 1..21: mol_type = other DNA; mol_type = other DNA
tatagtaaagttggcaccaac

SEQ ID NO: 21125 - DNA, 21 bp, synthetic construct
  source 1..21: mol_type = other DNA; mol_type = other DNA
gtcataagcacaaatggagtc

SEQ ID NO: 21126 - DNA, 21 bp, synthetic construct
  source 1..21: mol_type = other DNA; mol_type = other DNA
ttacacgtaaaattgcccgat

SEQ ID NO: 21127 - DNA, 21 bp, synthetic construct
  source 1..21: mol_type = other DNA; mol_type = other DNA
ttcgttaagtctgacacaaaa

SEQ ID NO: 21128 - DNA, 21 bp, synthetic construct
  source 1..21: mol_type = other DNA; mol_type = other DNA
ctcagtcgtatcggagacaat

SEQ ID NO: 21129 - DNA, 21 bp, synthetic construct
  source 1..21: mol_type = other DNA; mol_type = other DNA
tacagtaaactcaacccgacg

SEQ ID NO: 21130 - DNA, 21 bp, synthetic construct
  source 1..21: mol_type = other DNA; mol_type = other DNA
cttacgagactgtcgcacaac

SEQ ID NO: 21131 - DNA, 21 bp, synthetic construct
  source 1..21: mol_type = other DNA; mol_type = other DNA
ctgatcaatgatgcgtatccg

SEQ ID NO: 21132 - DNA, 21 bp, synthetic construct
  source 1..21: mol_type = other DNA; mol_type = other DNA
cgcatgcttgatgcttttcct

SEQ ID NO: 21133 - DNA, 21 bp, synthetic construct
  source 1..21: mol_type = other DNA; mol_type = other DNA
aggacatcagatgtctaccca

SEQ ID NO: 21134 - DNA, 21 bp, synthetic construct
  source 1..21: mol_type = other DNA; mol_type = other DNA
aggttggagagcaccttgtgg

SEQ ID NO: 21135 - DNA, 21 bp, synthetic construct
  source 1..21: mol_type = other DNA; mol_type = other DNA
ataatggcaagccatggctgg

SEQ ID NO: 21136 - DNA, 21 bp, synthetic construct
  source 1..21: mol_type = other DNA; mol_type = other DNA
ctacacaggttaagtttggat

SEQ ID NO: 21137 - DNA, 21 bp, synthetic construct
  source 1..21: mol_type = other DNA; mol_type = other DNA
aatggcgctggttgctgcaga

SEQ ID NO: 21138 - DNA, 21 bp, synthetic construct
  source 1..21: mol_type = other DNA
taccacaaacttgataataac

SEQ ID NO: 21139 - DNA, 21 bp, synthetic construct
  source 1..21: mol_type = other DNA
tattttacggggaaggtggcg

SEQ ID NO: 21140 - DNA, 21 bp, synthetic construct
  source 1..21: mol_type = other DNA
cggttgctagacgcataccct

SEQ ID NO: 21141 - DNA, 21 bp, synthetic construct
  source 1..21: mol_type = other DNA; mol_type = other DNA
gtagcgacgaaaggtgctggg

SEQ ID NO: 21142 - DNA, 21 bp, synthetic construct
  source 1..21: mol_type = other DNA; mol_type = other DNA
ttgtgtaaaccgtgcgccacg

SEQ ID NO: 21143 - DNA, 21 bp, synthetic construct
  source 1..21: mol_type = other DNA; mol_type = other DNA
gtggagagtactaacggcgta

SEQ ID NO: 21144 - DNA, 21 bp, synthetic construct
  source 1..21: mol_type = other DNA; mol_type = other DNA
tatgtgaaaagcgattctttc

SEQ ID NO: 21145 - DNA, 21 bp, synthetic construct
  source 1..21: mol_type = other DNA; mol_type = other DNA
atcgctaccctcgggtgggac

SEQ ID NO: 21146 - DNA, 21 bp, synthetic construct
  source 1..21: mol_type = other DNA; mol_type = other DNA
cgcatgatagacgtgtacccg

SEQ ID NO: 21147 - DNA, 21 bp, synthetic construct
  source 1..21: mol_type = other DNA; mol_type = other DNA
ttgcataggctgtcagcggat

SEQ ID NO: 21148 - DNA, 21 bp, synthetic construct
  source 1..21: mol_type = other DNA; mol_type = other DNA
ttacataagatgtcgatgaac

SEQ ID NO: 21149 - DNA, 21 bp, synthetic construct
  source 1..21: mol_type = other DNA; mol_type = other DNA
cgggacatagatgtttttcct

SEQ ID NO: 21150 - DNA, 21 bp, synthetic construct
  source 1..21: mol_type = other DNA; mol_type = other DNA
ttagcacgcactggattaaat

SEQ ID NO: 21151 - DNA, 21 bp, synthetic construct
  source 1..21: mol_type = other DNA; mol_type = other DNA
tatgtcaagtcggattctcgg

SEQ ID NO: 21152 - DNA, 21 bp, synthetic construct
  source 1..21: mol_type = other DNA; mol_type = other DNA
tggtggtctggtgttatggag

SEQ ID NO: 21153 - DNA, 21 bp, synthetic construct
  source 1..21: mol_type = other DNA; mol_type = other DNA
ccaatggaatcgcactcttgg

SEQ ID NO: 21154 - DNA, 21 bp, synthetic construct
  source 1..21: mol_type = other DNA; mol_type = other DNA
cttcacgcggctttgcctaat

SEQ ID NO: 21155 - DNA, 21 bp, synthetic construct
  source 1..21: mol_type = other DNA; mol_type = other DNA
cctatgggatcttccacgtgg

SEQ ID NO: 21156 - DNA, 21 bp, synthetic construct
  source 1..21: mol_type = other DNA; mol_type = other DNA
gacctgtccagtcaaacttgg

SEQ ID NO: 21157 - DNA, 21 bp, synthetic construct
  source 1..21: mol_type = other DNA
ctacacagacttggaatggat

SEQ ID NO: 21158 - DNA, 21 bp, synthetic construct
  source 1..21: mol_type = other DNA
aaagatgactttactgcctgg

SEQ ID NO: 21159 - DNA, 21 bp, synthetic construct
  source 1..21: mol_type = other DNA
ttctccaaactcaatttcaac

SEQ ID NO: 21160 - DNA, 21 bp, synthetic construct
  source 1..21: mol_type = other DNA
tactcaaaggtaggtccaaac

SEQ ID NO: 21161 - DNA, 21 bp, synthetic construct
  source 1..21: mol_type = other DNA
atagaatccaccaatggagtg

SEQ ID NO: 21162 - DNA, 21 bp, synthetic construct
  source 1..21: mol_type = other DNA
tacagcaaactcaattccaat

SEQ ID NO: 21163 - DNA, 21 bp, synthetic construct
  source 1..21: mol_type = other DNA; mol_type = other DNA
tacgtaaagtctgacagtttt

SEQ ID NO: 21164 - DNA, 21 bp, synthetic construct
  source 1..21: mol_type = other DNA; mol_type = other DNA
ggatcggaattccagacatac

SEQ ID NO: 21165 - DNA, 21 bp, synthetic construct
  source 1..21: mol_type = other DNA; mol_type = other DNA
ttcagcaaaatcggccctaat

SEQ ID NO: 21166 - DNA, 21 bp, synthetic construct
  source 1..21: mol_type = other DNA; mol_type = other DNA
gtcgaaagcacaaacggtcga

SEQ ID NO: 21167 - DNA, 21 bp, synthetic construct
  source 1..21: mol_type = other DNA; mol_type = other DNA
ctaagtaaagtgggtgtaaat

SEQ ID NO: 21168 - DNA, 21 bp, synthetic construct
  source 1..21: mol_type = other DNA; mol_type = other DNA
ctcgcacgtagcgggccgaat

SEQ ID NO: 21169 - DNA, 21 bp, synthetic construct
  source 1..21: mol_type = other DNA; mol_type = other DNA
tatgtgaagcacgacgtaaag

SEQ ID NO: 21170 - DNA, 21 bp, synthetic construct
  source 1..21: mol_type = other DNA; mol_type = other DNA
tacgtcaagtcacaaatgctc

SEQ ID NO: 21171 - DNA, 21 bp, synthetic construct
  source 1..21: mol_type = other DNA; mol_type = other DNA
tgtggtaaacgttgtgtgccg

SEQ ID NO: 21172 - DNA, 21 bp, synthetic construct
  source 1..21: mol_type = other DNA; mol_type = other DNA
aggaccccccaggtgttccca

SEQ ID NO: 21173 - DNA, 21 bp, synthetic construct
  source 1..21: mol_type = other DNA; mol_type = other DNA
aggggacccgaagtgttcccg

SEQ ID NO: 21174 - DNA, 21 bp, synthetic construct
  source 1..21: mol_type = other DNA; mol_type = other DNA
ttgtgtaaaccttgtttacag

SEQ ID NO: 21175 - DNA, 21 bp, synthetic construct
  source 1..21: mol_type = other DNA; mol_type = other DNA
aaggacgacttcacgtcgttc

SEQ ID NO: 21176 - DNA, 21 bp, synthetic construct
  source 1..21: mol_type = other DNA; mol_type = other DNA
gtgctcagcactaatggtgta

SEQ ID NO: 21177 - DNA, 21 bp, synthetic construct
  source 1..21: mol_type = other DNA; mol_type = other DNA
agggagatcgatgtttatcca

SEQ ID NO: 21178 - DNA, 21 bp, synthetic construct
  source 1..21: mol_type = other DNA; mol_type = other DNA
tacagtaagataggagataac

SEQ ID NO: 21179 - DNA, 21 bp, synthetic construct
  source 1..21: mol_type = other DNA; mol_type = other DNA
ctctcgcgtgtggggcccgat

SEQ ID NO: 21180 - DNA, 21 bp, synthetic construct
  source 1..21: mol_type = other DNA; mol_type = other DNA
ttgtcaagaattggtgataac

SEQ ID NO: 21181 - DNA, 21 bp, synthetic construct
  source 1..21: mol_type = other DNA; mol_type = other DNA
tattcgaagctaagcctaaat

SEQ ID NO: 21182 - DNA, 21 bp, synthetic construct
  source 1..21: mol_type = other DNA; mol_type = other DNA
atcctaagctcgtcaaactgg

SEQ ID NO: 21183 - DNA, 21 bp, synthetic construct
  source 1..21: mol_type = other DNA; mol_type = other DNA
tatgctaagagcggtagcaac

SEQ ID NO: 21184 - DNA, 21 bp, synthetic construct
  source 1..21: mol_type = other DNA; mol_type = other DNA
tatcatgccaagctccctaac

SEQ ID NO: 21185 - DNA, 21 bp, synthetic construct
  source 1..21: mol_type = other DNA; mol_type = other DNA
ttagcacgcacggggtatgat

SEQ ID NO: 21186 - DNA, 21 bp, synthetic construct
  source 1..21: mol_type = other DNA; mol_type = other DNA
ttatgcaaaccatgccaaact

SEQ ID NO: 21187 - DNA, 21 bp, synthetic construct
  source 1..21: mol_type = other DNA; mol_type = other DNA
tatcataaattgaacctggat

SEQ ID NO: 21188 - DNA, 21 bp, synthetic construct
  source 1..21: mol_type = other DNA; mol_type = other DNA
gtcgagagcaccaatggagta

SEQ ID NO: 21189 - DNA, 21 bp, synthetic construct
  source 1..21: mol_type = other DNA; mol_type = other DNA
ctccatcggcttagcatagac

SEQ ID NO: 21190 - DNA, 21 bp, synthetic construct
  source 1..21: mol_type = other DNA; mol_type = other DNA
ctgtcgagggtgggacatgat

SEQ ID NO: 21191 - DNA, 21 bp, synthetic construct
  source 1..21: mol_type = other DNA; mol_type = other DNA
gtgatgcctgacgcgtatccc

SEQ ID NO: 21192 - DNA, 21 bp, synthetic construct
  source 1..21: mol_type = other DNA; mol_type = other DNA
cgcgaggagcacgtctttcct

SEQ ID NO: 21193 - DNA, 21 bp, synthetic construct
  source 1..21: mol_type = other DNA; mol_type = other DNA
tattcaaagagtggacccaac

SEQ ID NO: 21194 - DNA, 21 bp, synthetic construct
  source 1..21: mol_type = other DNA; mol_type = other DNA
gtgttcagcacaaatggcgtg

SEQ ID NO: 21195 - DNA, 21 bp, synthetic construct
  source 1..21: mol_type = other DNA; mol_type = other DNA
cgcggtgagacagtgtttccg

SEQ ID NO: 21196 - DNA, 21 bp, synthetic construct
  source 1..21: mol_type = other DNA; mol_type = other DNA
atcttgagttcgtcttcatgg

SEQ ID NO: 21197 - DNA, 21 bp, synthetic construct
  source 1..21: mol_type = other DNA; mol_type = other DNA
gtaacgtctacgaatggtgtt

SEQ ID NO: 21198 - DNA, 21 bp, synthetic construct
  source 1..21: mol_type = other DNA; mol_type = other DNA
tatagtaaactcggacccaat

SEQ ID NO: 21199 - DNA, 21 bp, synthetic construct
  source 1..21: mol_type = other DNA; mol_type = other DNA
ctccataagaacttacccgat

SEQ ID NO: 21200 - DNA, 21 bp, synthetic construct
  source 1..21: mol_type = other DNA; mol_type = other DNA
atagcacacctcgggtgggac

SEQ ID NO: 21201 - DNA, 21 bp, synthetic construct
  source 1..21: mol_type = other DNA; mol_type = other DNA
tacgttaaacatgatgttaaa

SEQ ID NO: 21202 - DNA, 21 bp, synthetic construct
  source 1..21: mol_type = other DNA; mol_type = other DNA
tttgtaaagagtgacaaccgc

SEQ ID NO: 21203 - DNA, 21 bp, synthetic construct
  source 1..21: mol_type = other DNA; mol_type = other DNA
tactttacaggtatcaaggac

SEQ ID NO: 21204 - DNA, 21 bp, synthetic construct
  source 1..21: mol_type = other DNA; mol_type = other DNA
ctctccaagataggttacaac

SEQ ID NO: 21205 - DNA, 21 bp, synthetic construct
  source 1..21: mol_type = other DNA; mol_type = other DNA
ttgtttgatggaacgtcggcc

SEQ ID NO: 21206 - DNA, 21 bp, synthetic construct
  source 1..21: mol_type = other DNA; mol_type = other DNA
tactttaccggaataactgag

SEQ ID NO: 21207 - DNA, 21 bp, synthetic construct
  source 1..21: mol_type = other DNA; mol_type = other DNA
gtaatttcaacgaacggtgta

SEQ ID NO: 21208 - DNA, 21 bp, synthetic construct
  source 1..21: mol_type = other DNA; mol_type = other DNA
cgcactgaaaccgtatatccg

SEQ ID NO: 21209 - DNA, 21 bp, synthetic construct
  source 1..21: mol_type = other DNA; mol_type = other DNA
aggactgaccatgtatttccg

SEQ ID NO: 21210 - DNA, 21 bp, synthetic construct
  source 1..21: mol_type = other DNA; mol_type = other DNA
atgcatcgcctattacccgat

SEQ ID NO: 21211 - DNA, 21 bp, synthetic construct
  source 1..21: mol_type = other DNA; mol_type = other DNA
ctattcgacggcaccagtgct

SEQ ID NO: 21212 - DNA, 21 bp, synthetic construct
  source 1..21: mol_type = other DNA; mol_type = other DNA
cgaaccaatgaggtatttccg

SEQ ID NO: 21213 - DNA, 21 bp, synthetic construct
  source 1..21: mol_type = other DNA; mol_type = other DNA
ttgtgtaagccttgtgacacc

SEQ ID NO: 21214 - DNA, 21 bp, synthetic construct
  source 1..21: mol_type = other DNA; mol_type = other DNA
accgaaagtactaacggtgtt

SEQ ID NO: 21215 - DNA, 21 bp, synthetic construct
  source 1..21: mol_type = other DNA; mol_type = other DNA
ttgactaggttgcatgcggac

SEQ ID NO: 21216 - DNA, 21 bp, synthetic construct
  source 1..21: mol_type = other DNA; mol_type = other DNA
gtgttgtcatccacaacgtgg

SEQ ID NO: 21217 - DNA, 21 bp, synthetic construct
  source 1..21: mol_type = other DNA; mol_type = other DNA
tacactaaattaagccctaat

SEQ ID NO: 21218 - DNA, 21 bp, synthetic construct
  source 1..21: mol_type = other DNA; mol_type = other DNA
atgtttgatgggacgagtgca

SEQ ID NO: 21219 - DNA, 21 bp, synthetic construct
  source 1..21: mol_type = other DNA; mol_type = other DNA
ttgcacgccttgtcacacaac

SEQ ID NO: 21220 - DNA, 21 bp, synthetic construct
  source 1..21: mol_type = other DNA; mol_type = other DNA
tatttcacaggcaccatagag

SEQ ID NO: 21221 - DNA, 21 bp, synthetic construct
  source 1..21: mol_type = other DNA; mol_type = other DNA
gtcgactccaccaatggtatc

SEQ ID NO: 21222 - DNA, 21 bp, synthetic construct
  source 1..21: mol_type = other DNA; mol_type = other DNA
cgcctcatggacgcctttccc

SEQ ID NO: 21223 - DNA, 21 bp, synthetic construct
  source 1..21: mol_type = other DNA; mol_type = other DNA
tacttcaccggtgtcttagcg

SEQ ID NO: 21224 - DNA, 21 bp, synthetic construct
  source 1..21: mol_type = other DNA; mol_type = other DNA
ttccataaattaagcacaaac

SEQ ID NO: 21225 - DNA, 21 bp, synthetic construct
  source 1..21: mol_type = other DNA; mol_type = other DNA
taccataagatgttacccgat

SEQ ID NO: 21226 - DNA, 21 bp, synthetic construct
  source 1..21: mol_type = other DNA; mol_type = other DNA
aaggatgacttcacaacgttc

SEQ ID NO: 21227 - DNA, 21 bp, synthetic construct
  source 1..21: mol_type = other DNA; mol_type = other DNA
tacgtgaaatctcagactatg

SEQ ID NO: 21228 - DNA, 21 bp, synthetic construct
  source 1..21: mol_type = other DNA; mol_type = other DNA
tactccaaagtccaaacaaat

SEQ ID NO: 21229 - DNA, 21 bp, synthetic construct
  source 1..21: mol_type = other DNA; mol_type = other DNA
ttatcacgtattgggatgaac

SEQ ID NO: 21230 - DNA, 21 bp, synthetic construct
  source 1..21: mol_type = other DNA; mol_type = other DNA
cgtgaggatacagttaaatgg

SEQ ID NO: 21231 - DNA, 21 bp, synthetic construct
  source 1..21: mol_type = other DNA; mol_type = other DNA
ttttctaaattgaatataaac

SEQ ID NO: 21232 - DNA, 21 bp, synthetic construct
  source 1..21: mol_type = other DNA; mol_type = other DNA
tatacgaagctttcacccaac

SEQ ID NO: 21233 - DNA, 21 bp, synthetic construct
  source 1..21: mol_type = other DNA; mol_type = other DNA
gagatggcaagtcatagctgg

SEQ ID NO: 21234 - DNA, 21 bp, synthetic construct
  source 1..21: mol_type = other DNA; mol_type = other DNA
tatttcactggacaggtcgaa

SEQ ID NO: 21235 - DNA, 21 bp, synthetic construct
  source 1..21: mol_type = other DNA; mol_type = other DNA
tattccaaggttggatcgaat

SEQ ID NO: 21236 - DNA, 21 bp, synthetic construct
  source 1..21: mol_type = other DNA; mol_type = other DNA
tacgtaaagtcggatacggcg

SEQ ID NO: 21237 - DNA, 21 bp, synthetic construct
  source 1..21: mol_type = other DNA; mol_type = other DNA
tatacgaagtcacaaactaat

SEQ ID NO: 21238 - DNA, 21 bp, synthetic construct
  source 1..21: mol_type = other DNA; mol_type = other DNA
atgtacaacgactgttgtgtg

SEQ ID NO: 21239 - DNA, 21 bp, synthetic construct
  source 1..21: mol_type = other DNA; mol_type = other DNA
tatgttaaatctcagttatca

SEQ ID NO: 21240 - DNA, 21 bp, synthetic construct
  source 1..21: mol_type = other DNA; mol_type = other DNA
ttatgcaaaccttgccctaca

SEQ ID NO: 21241 - DNA, 21 bp, synthetic construct
  source 1..21: mol_type = other DNA; mol_type = other DNA
tatgtcaaaagccaaacttcc

SEQ ID NO: 21242 - DNA, 21 bp, synthetic construct
  source 1..21: mol_type = other DNA; mol_type = other DNA
ttgagccgtctttcgttcgat

SEQ ID NO: 21243 - DNA, 21 bp, synthetic construct
  source 1..21: mol_type = other DNA; mol_type = other DNA
cgtttggacaacgtataccct

SEQ ID NO: 21244 - DNA, 21 bp, synthetic construct
  source 1..21: mol_type = other DNA; mol_type = other DNA
ctcttctcaggcgagggtcct

SEQ ID NO: 21245 - DNA, 21 bp, synthetic construct
  source 1..21: mol_type = other DNA; mol_type = other DNA
cgggaagagaatgtatacccg

SEQ ID NO: 21246 - DNA, 21 bp, synthetic construct
  source 1..21: mol_type = other DNA; mol_type = other DNA
tattctaaacagggtcctaac

SEQ ID NO: 21247 - DNA, 21 bp, synthetic construct
  source 1..21: mol_type = other DNA; mol_type = other DNA
tactccaaaaacggcccaaac

SEQ ID NO: 21248 - DNA, 21 bp, synthetic construct
  source 1..21: mol_type = other DNA; mol_type = other DNA
agggctttagaggggtacgat

SEQ ID NO: 21249 - DNA, 21 bp, synthetic construct
  source 1..21: mol_type = other DNA; mol_type = other DNA
acggagtcaacaaatggggtg

SEQ ID NO: 21250 - DNA, 21 bp, synthetic construct
  source 1..21: mol_type = other DNA; mol_type = other DNA
ttgagccgtttgtcctttgat

SEQ ID NO: 21251 - DNA, 21 bp, synthetic construct
  source 1..21: mol_type = other DNA; mol_type = other DNA
gatttgagagcggctacgtgg

SEQ ID NO: 21252 - DNA, 21 bp, synthetic construct
  source 1..21: mol_type = other DNA; mol_type = other DNA
tatgtaaaaagcgatactcgc

SEQ ID NO: 21253 - DNA, 21 bp, synthetic construct
  source 1..21: mol_type = other DNA; mol_type = other DNA
tatctcaaatcccagcagtct

SEQ ID NO: 21254 - DNA, 21 bp, synthetic construct
  source 1..21: mol_type = other DNA; mol_type = other DNA
cgcgggccagaggtcttcccc

SEQ ID NO: 21255 - DNA, 21 bp, synthetic construct
  source 1..21: mol_type = other DNA; mol_type = other DNA
aaagacgatttcacccacttt

SEQ ID NO: 21256 - DNA, 21 bp, synthetic construct
  source 1..21: mol_type = other DNA; mol_type = other DNA
tatgtgaaaagtgacactgcc

SEQ ID NO: 21257 - DNA, 21 bp, synthetic construct
  source 1..21: mol_type = other DNA; mol_type = other DNA
tatagcaaggcgggtccaaat

SEQ ID NO: 21258 - DNA, 21 bp, synthetic construct
  source 1..21: mol_type = other DNA; mol_type = other DNA
agaacggagacagtgtaccct

SEQ ID NO: 21259 - DNA, 21 bp, synthetic construct
  source 1..21: mol_type = other DNA; mol_type = other DNA
tacttcacaggcaaagttgaa

SEQ ID NO: 21260 - DNA, 21 bp, synthetic construct
  source 1..21: mol_type = other DNA; mol_type = other DNA
tatagcaagacgggccctaat

SEQ ID NO: 21261 - DNA, 21 bp, synthetic construct
  source 1..21: mol_type = other DNA; mol_type = other DNA
taccacaagttaaacctcgat

SEQ ID NO: 21262 - DNA, 21 bp, synthetic construct
  source 1..21: mol_type = other DNA; mol_type = other DNA
gtccccggtgactgttgtgtg

SEQ ID NO: 21263 - DNA, 21 bp, synthetic construct
  source 1..21: mol_type = other DNA; mol_type = other DNA
ataatgatggacgcttacccc

SEQ ID NO: 21264 - DNA, 21 bp, synthetic construct
  source 1..21: mol_type = other DNA; mol_type = other DNA
ctacacaaattacataccaat

SEQ ID NO: 21265 - DNA, 21 bp, synthetic construct
  source 1..21: mol_type = other DNA; mol_type = other DNA
tggtggagcggtgttaaagaa

SEQ ID NO: 21266 - DNA, 21 bp, synthetic construct
  source 1..21: mol_type = other DNA; mol_type = other DNA
ttatcgaaattgtcctcaaac

SEQ ID NO: 21267 - DNA, 21 bp, synthetic construct
  source 1..21: mol_type = other DNA; mol_type = other DNA
ataatgagcagcgctaattgg

SEQ ID NO: 21268 - DNA, 21 bp, synthetic construct
  source 1..21: mol_type = other DNA; mol_type = other DNA
ctcttctcaggggatgggcca

SEQ ID NO: 21269 - DNA, 21 bp, synthetic construct
  source 1..21: mol_type = other DNA; mol_type = other DNA
cttagcaagctcaatcctaac

SEQ ID NO: 21270 - DNA, 21 bp, synthetic construct
  source 1..21: mol_type = other DNA; mol_type = other DNA
attgagtctactaacggtgtc

SEQ ID NO: 21271 - DNA, 21 bp, synthetic construct
  source 1..21: mol_type = other DNA; mol_type = other DNA
tatagtaaattaggattcaac

SEQ ID NO: 21272 - DNA, 21 bp, synthetic construct
  source 1..21: mol_type = other DNA; mol_type = other DNA
gacctggcgagctacaagtgg

SEQ ID NO: 21273 - DNA, 21 bp, synthetic construct
  source 1..21: mol_type = other DNA; mol_type = other DNA
aaagatgaattcagtacgtgg

SEQ ID NO: 21274 - DNA, 21 bp, synthetic construct
  source 1..21: mol_type = other DNA; mol_type = other DNA
gatatgtcaagcagtaagtgg

SEQ ID NO: 21275 - DNA, 21 bp, synthetic construct
  source 1..21: mol_type = other DNA; mol_type = other DNA
ggctgtaggccgggatgtggc

SEQ ID NO: 21276 - DNA, 21 bp, synthetic construct
  source 1..21: mol_type = other DNA; mol_type = other DNA
cggacggtggacacttacccg

SEQ ID NO: 21277 - DNA, 21 bp, synthetic construct
  source 1..21: mol_type = other DNA
cagttatcttcaagtacatgg

SEQ ID NO: 21278 - DNA, 21 bp, synthetic construct
  source 1..21: mol_type = other DNA
tatttcacgggtgtaaaagaa

SEQ ID NO: 21279 - DNA, 21 bp, synthetic construct
  source 1..21: mol_type = other DNA; mol_type = other DNA
tacgtgaagtcagacacaagg

SEQ ID NO: 21280 - DNA, 21 bp, synthetic construct
  source 1..21: mol_type = other DNA; mol_type = other DNA
ctacatcgtttactcccggac

SEQ ID NO: 21281 - DNA, 21 bp, synthetic construct
  source 1..21: mol_type = other DNA; mol_type = other DNA
aaagatgactttactatgttt

SEQ ID NO: 21282 - DNA, 21 bp, synthetic construct
  source 1..21: mol_type = other DNA; mol_type = other DNA
cgcacgaatgatgttttcccc

SEQ ID NO: 21283 - DNA, 21 bp, synthetic construct
  source 1..21: mol_type = other DNA; mol_type = other DNA
ttacataggttaggtgctgat

SEQ ID NO: 21284 - DNA, 21 bp, synthetic construct
  source 1..21: mol_type = other DNA; mol_type = other DNA
tatattaagagtcagttgaac

SEQ ID NO: 21285 - DNA, 21 bp, synthetic construct
  source 1..21: mol_type = other DNA; mol_type = other DNA
tactcaaaacttgaccgcaat

SEQ ID NO: 21286 - DNA, 21 bp, synthetic construct
  source 1..21: mol_type = other DNA; mol_type = other DNA
aggttgatggatgcattccca

SEQ ID NO: 21287 - DNA, 21 bp, synthetic construct
  source 1..21: mol_type = other DNA; mol_type = other DNA
gtggccagtacgaatggggtt

SEQ ID NO: 21288 - DNA, 21 bp, synthetic construct
  source 1..21: mol_type = other DNA; mol_type = other DNA
agaaccccggaggttttcccc

SEQ ID NO: 21289 - DNA, 21 bp, synthetic construct
  source 1..21: mol_type = other DNA; mol_type = other DNA
tacgtaaaaagtgacacaagg

SEQ ID NO: 21290 - DNA, 21 bp, synthetic construct
  source 1..21: mol_type = other DNA; mol_type = other DNA
atcgaaagcagcaacgggagg

SEQ ID NO: 21291 - DNA, 21 bp, synthetic construct
  source 1..21: mol_type = other DNA; mol_type = other DNA
ctgcatagattgtcgccgctc

SEQ ID NO: 21292 - DNA, 21 bp, synthetic construct
  source 1..21: mol_type = other DNA; mol_type = other DNA
cccatggaatcatcaaaatgg

SEQ ID NO: 21293 - DNA, 21 bp, synthetic construct
  source 1..21: mol_type = other DNA; mol_type = other DNA
atgcacaaattgagtgaaaac

SEQ ID NO: 21294 - DNA, 21 bp, synthetic construct
  source 1..21: mol_type = other DNA; mol_type = other DNA
cgaacggagacagtgtatcct

SEQ ID NO: 21295 - DNA, 21 bp, synthetic construct
  source 1..21: mol_type = other DNA; mol_type = other DNA
atccataaacttagtgccaac

SEQ ID NO: 21296 - DNA, 21 bp, synthetic construct
  source 1..21: mol_type = other DNA; mol_type = other DNA
gttatggcgtcgtcaagttgg

SEQ ID NO: 21297 - DNA, 21 bp, synthetic construct
  source 1..21: mol_type = other DNA; mol_type = other DNA
cgtacagagcatgtattccca

SEQ ID NO: 21298 - DNA, 21 bp, synthetic construct
  source 1..21: mol_type = other DNA; mol_type = other DNA
gtcgcgttggaaggccgggac

SEQ ID NO: 21299 - DNA, 21 bp, synthetic construct
  source 1..21: mol_type = other DNA; mol_type = other DNA
cgtgaagtcgatgtctttcca

SEQ ID NO: 21300 - DNA, 21 bp, synthetic construct
  source 1..21: mol_type = other DNA; mol_type = other DNA
ttaagcaaactaaatgcaaat

SEQ ID NO: 21301 - DNA, 21 bp, synthetic construct
  source 1..21: mol_type = other DNA; mol_type = other DNA
taccataagctcaatttagac

SEQ ID NO: 21302 - DNA, 21 bp, synthetic construct
  source 1..21: mol_type = other DNA; mol_type = other DNA
tactcaaagatagggcaaaat

SEQ ID NO: 21303 - DNA, 21 bp, synthetic construct
  source 1..21: mol_type = other DNA; mol_type = other DNA
gttacctctactaatggtata

SEQ ID NO: 21304 - DNA, 21 bp, synthetic construct
  source 1..21: mol_type = other DNA; mol_type = other DNA
cgcctcgcggacgcttttccc

SEQ ID NO: 21305 - DNA, 21 bp, synthetic construct
  source 1..21: mol_type = other DNA; mol_type = other DNA
attcatcggcttggaccggat

SEQ ID NO: 21306 - DNA, 21 bp, synthetic construct
  source 1..21: mol_type = other DNA; mol_type = other DNA
tacgtcaagagcgacatgaaa

SEQ ID NO: 21307 - DNA, 21 bp, synthetic construct
  source 1..21: mol_type = other DNA; mol_type = other DNA
tacttgaaatcgcagccatac

SEQ ID NO: 21308 - DNA, 21 bp, synthetic construct
  source 1..21: mol_type = other DNA; mol_type = other DNA
aaggacgagttcagcgggtac

SEQ ID NO: 21309 - DNA, 21 bp, synthetic construct
  source 1..21: mol_type = other DNA; mol_type = other DNA
cttcataaaatgtcgatgaat

SEQ ID NO: 21310 - DNA, 21 bp, synthetic construct
  source 1..21: mol_type = other DNA; mol_type = other DNA
ttaagtaaaataggcgttaac

SEQ ID NO: 21311 - DNA, 21 bp, synthetic construct
  source 1..21: mol_type = other DNA; mol_type = other DNA
ttagcaaagactgccccaaat

SEQ ID NO: 21312 - DNA, 21 bp, synthetic construct
  source 1..21: mol_type = other DNA; mol_type = other DNA
atagaaagtactcatggccgg

SEQ ID NO: 21313 - DNA, 21 bp, synthetic construct
  source 1..21: mol_type = other DNA; mol_type = other DNA
ttgcacagattgttgccagat

SEQ ID NO: 21314 - DNA, 21 bp, synthetic construct
  source 1..21: mol_type = other DNA; mol_type = other DNA
gtagcattaaaaggatgggat

SEQ ID NO: 21315 - DNA, 21 bp, synthetic construct
  source 1..21: mol_type = other DNA; mol_type = other DNA
tacgtgaagagccaggcagga

SEQ ID NO: 21316 - DNA, 21 bp, synthetic construct
  source 1..21: mol_type = other DNA; mol_type = other DNA
gtaagcgaatttttgtcgtat

SEQ ID NO: 21317 - DNA, 21 bp, synthetic construct
  source 1..21: mol_type = other DNA; mol_type = other DNA
gtcgcatcaacaaacggggtg

SEQ ID NO: 21318 - DNA, 21 bp, synthetic construct
  source 1..21: mol_type = other DNA; mol_type = other DNA
ttggccaagagcgggcataat

SEQ ID NO: 21319 - DNA, 21 bp, synthetic construct
  source 1..21: mol_type = other DNA; mol_type = other DNA
ttgcaccgccttaatccctta

SEQ ID NO: 21320 - DNA, 21 bp, synthetic construct
  source 1..21: mol_type = other DNA; mol_type = other DNA
agggaagagggcgtaagttgg

SEQ ID NO: 21321 - DNA, 21 bp, synthetic construct
  source 1..21: mol_type = other DNA; mol_type = other DNA
tacataaagtcgcaactaaat

SEQ ID NO: 21322 - DNA, 21 bp, synthetic construct
  source 1..21: mol_type = other DNA; mol_type = other DNA
agggatgatttcaccagttac

SEQ ID NO: 21323 - DNA, 21 bp, synthetic construct
  source 1..21: mol_type = other DNA; mol_type = other DNA
cttagcagaatcggcatgaat

SEQ ID NO: 21324 - DNA, 21 bp, synthetic construct
  source 1..21: mol_type = other DNA; mol_type = other DNA
agaggagaaacagtctatcca

SEQ ID NO: 21325 - DNA, 21 bp, synthetic construct
  source 1..21: mol_type = other DNA; mol_type = other DNA
cgtgacgaaacagtttatccg

SEQ ID NO: 21326 - DNA, 21 bp, synthetic construct
  source 1..21: mol_type = other DNA; mol_type = other DNA
cgtgacgagtttacaacgtat

SEQ ID NO: 21327 - DNA, 21 bp, synthetic construct
  source 1..21: mol_type = other DNA; mol_type = other DNA
gttgaatcgcgggagggaatc

SEQ ID NO: 21328 - DNA, 21 bp, synthetic construct
  source 1..21: mol_type = other DNA; mol_type = other DNA
tatagtaaattggataggaac

SEQ ID NO: 21329 - DNA, 21 bp, synthetic construct
  source 1..21: mol_type = other DNA; mol_type = other DNA
ttatcgaaagcagcatttaat

SEQ ID NO: 21330 - DNA, 21 bp, synthetic construct
  source 1..21: mol_type = other DNA; mol_type = other DNA
ctttcgagggtcggcttcaac

SEQ ID NO: 21331 - DNA, 21 bp, synthetic construct
  source 1..21: mol_type = other DNA; mol_type = other DNA
ttacaccgtctaggtggtgac

SEQ ID NO: 21332 - DNA, 21 bp, synthetic construct
  source 1..21: mol_type = other DNA; mol_type = other DNA
tatttcacaggaaaaattgcg

SEQ ID NO: 21333 - DNA, 21 bp, synthetic construct
  source 1..21: mol_type = other DNA; mol_type = other DNA
gttgagtcaactaatggggcg

SEQ ID NO: 21334 - DNA, 21 bp, synthetic construct
  source 1..21: mol_type = other DNA; mol_type = other DNA
ttcggcggtggactgtttgtg

SEQ ID NO: 21335 - DNA, 21 bp, synthetic construct
  source 1..21: mol_type = other DNA; mol_type = other DNA
ctgtgcaagccgtgtgttacg

SEQ ID NO: 21336 - DNA, 21 bp, synthetic construct
  source 1..21: mol_type = other DNA; mol_type = other DNA
tacgtgaaaagtgatcgccat

SEQ ID NO: 21337 - DNA, 21 bp, synthetic construct
  source 1..21: mol_type = other DNA; mol_type = other DNA
tatttcacggggattacagaa

SEQ ID NO: 21338 - DNA, 21 bp, synthetic construct
  source 1..21: mol_type = other DNA; mol_type = other DNA
ctacaccgattgagcgacaat

SEQ ID NO: 21339 - DNA, 21 bp, synthetic construct
  source 1..21: mol_type = other DNA; mol_type = other DNA
aggggcccagacgtttttccg

SEQ ID NO: 21340 - DNA, 21 bp, synthetic construct
  source 1..21: mol_type = other DNA; mol_type = other DNA
ctaagtaggctttcgcatgat

SEQ ID NO: 21341 - DNA, 21 bp, synthetic construct
  source 1..21: mol_type = other DNA; mol_type = other DNA
ttggctaaaggcggccccaat

SEQ ID NO: 21342 - DNA, 21 bp, synthetic construct
  source 1..21: mol_type = other DNA; mol_type = other DNA
cttacacgggtgagcccggac

SEQ ID NO: 21343 - DNA, 21 bp, synthetic construct
  source 1..21: mol_type = other DNA; mol_type = other DNA
ttttctaagttgaactttaac

SEQ ID NO: 21344 - DNA, 21 bp, synthetic construct
  source 1..21: mol_type = other DNA; mol_type = other DNA
aggactgaaaccgtctacccg

SEQ ID NO: 21345 - DNA, 21 bp, synthetic construct
  source 1..21: mol_type = other DNA; mol_type = other DNA
tattcaaaagcggggcctaac

SEQ ID NO: 21346 - DNA, 21 bp, synthetic construct
  source 1..21: mol_type = other DNA; mol_type = other DNA
ttaagtaagcttaacatgaac

SEQ ID NO: 21347 - DNA, 21 bp, synthetic construct
  source 1..21: mol_type = other DNA; mol_type = other DNA
cgcctcgagagtgctgcatgg

SEQ ID NO: 21348 - DNA, 21 bp, synthetic construct
  source 1..21: mol_type = other DNA; mol_type = other DNA
gtggctcttgaggggagagat

SEQ ID NO: 21349 - DNA, 21 bp, synthetic construct
  source 1..21: mol_type = other DNA; mol_type = other DNA
ataatgacggaccgcatctgg

SEQ ID NO: 21350 - DNA, 21 bp, synthetic construct
  source 1..21: mol_type = other DNA; mol_type = other DNA
ttgcgtgacggaactccagcc

SEQ ID NO: 21351 - DNA, 21 bp, synthetic construct
  source 1..21: mol_type = other DNA; mol_type = other DNA
ttgagcaggatagggcagaat

SEQ ID NO: 21352 - DNA, 21 bp, synthetic construct
  source 1..21: mol_type = other DNA; mol_type = other DNA
agggaagactcagtaaggtgg

SEQ ID NO: 21353 - DNA, 21 bp, synthetic construct
  source 1..21: mol_type = other DNA; mol_type = other DNA
ctagaaagcagagagggtatt

SEQ ID NO: 21354 - DNA, 21 bp, synthetic construct
  source 1..21: mol_type = other DNA; mol_type = other DNA
gttatgcccgatgcataccct

SEQ ID NO: 21355 - DNA, 21 bp, synthetic construct
  source 1..21: mol_type = other DNA; mol_type = other DNA
gtgaaatctactaatggtatc

SEQ ID NO: 21356 - DNA, 21 bp, synthetic construct
  source 1..21: mol_type = other DNA; mol_type = other DNA
ttgtgtcgtccatgtgctgag

SEQ ID NO: 21357 - DNA, 21 bp, synthetic construct
  source 1..21: mol_type = other DNA; mol_type = other DNA
aattctcttgaaggtagagac

SEQ ID NO: 21358 - DNA, 21 bp, synthetic construct
  source 1..21: mol_type = other DNA; mol_type = other DNA
gtctctgaattcttgagtttc

SEQ ID NO: 21359 - DNA, 21 bp, synthetic construct
  source 1..21: mol_type = other DNA; mol_type = other DNA
ttacaccgtctcggtgacgat

SEQ ID NO: 21360 - DNA, 21 bp, synthetic construct
  source 1..21: mol_type = other DNA; mol_type = other DNA
cgcggagttgatgtgtacccc

SEQ ID NO: 21361 - DNA, 21 bp, synthetic construct
  source 1..21: mol_type = other DNA; mol_type = other DNA
agattagcagacgtttttcct

SEQ ID NO: 21362 - DNA, 21 bp, synthetic construct
  source 1..21: mol_type = other DNA; mol_type = other DNA
tatagtaagctcaacgataac

SEQ ID NO: 21363 - DNA, 21 bp, synthetic construct
  source 1..21: mol_type = other DNA; mol_type = other DNA
tatttcactgggcattgggaa

SEQ ID NO: 21364 - DNA, 21 bp, synthetic construct
  source 1..21: mol_type = other DNA; mol_type = other DNA
tatgtcaagtcggaccgcatg

SEQ ID NO: 21365 - DNA, 21 bp, synthetic construct
  source 1..21: mol_type = other DNA; mol_type = other DNA
cgaggtgacaatgttttcccc

SEQ ID NO: 21366 - DNA, 21 bp, synthetic construct
  source 1..21: mol_type = other DNA; mol_type = other DNA
ctacaccgacttagtgcagac

SEQ ID NO: 21367 - DNA, 21 bp, synthetic construct
  source 1..21: mol_type = other DNA; mol_type = other DNA
ttacacaagcttagtagtgat

SEQ ID NO: 21368 - DNA, 21 bp, synthetic construct
  source 1..21: mol_type = other DNA; mol_type = other DNA
atgtttgacggcacacctgct

SEQ ID NO: 21369 - DNA, 21 bp, synthetic construct
  source 1..21: mol_type = other DNA; mol_type = other DNA
ctatgcaagccctgcatgact

SEQ ID NO: 21370 - DNA, 21 bp, synthetic construct
  source 1..21: mol_type = other DNA; mol_type = other DNA
ctttcaaagttgaacgacaac

SEQ ID NO: 21371 - DNA, 21 bp, synthetic construct
  source 1..21: mol_type = other DNA; mol_type = other DNA
cgcttgatggacgcgtacccc

SEQ ID NO: 21372 - DNA, 21 bp, synthetic construct
  source 1..21: mol_type = other DNA; mol_type = other DNA
tacgcaaaacatgggcctaac

SEQ ID NO: 21373 - DNA, 21 bp, synthetic construct
  source 1..21: mol_type = other DNA; mol_type = other DNA
gaaagcgatttcaagatatgg

SEQ ID NO: 21374 - DNA, 21 bp, synthetic construct
  source 1..21: mol_type = other DNA; mol_type = other DNA
atgcacagattgctcccagac

SEQ ID NO: 21375 - DNA, 21 bp, synthetic construct
  source 1..21: mol_type = other DNA; mol_type = other DNA
cgagaaatagacgtgtacccc

SEQ ID NO: 21376 - DNA, 21 bp, synthetic construct
  source 1..21: mol_type = other DNA; mol_type = other DNA
tatgcgaagtcagggattaac

SEQ ID NO: 21377 - DNA, 21 bp, synthetic construct
  source 1..21: mol_type = other DNA; mol_type = other DNA
gtcatggaagcacggaactgg

SEQ ID NO: 21378 - DNA, 21 bp, synthetic construct
  source 1..21: mol_type = other DNA; mol_type = other DNA
tacagtaaagtgggcgtgaac

SEQ ID NO: 21379 - DNA, 21 bp, synthetic construct
  source 1..21: mol_type = other DNA; mol_type = other DNA
agaggtcctgaagtgtttcct

SEQ ID NO: 21380 - DNA, 21 bp, synthetic construct
  source 1..21: mol_type = other DNA; mol_type = other DNA
tactcaaagacgggagctaat

SEQ ID NO: 21381 - DNA, 21 bp, synthetic construct
  source 1..21: mol_type = other DNA; mol_type = other DNA
ttctcgaagctaaacaccaat

SEQ ID NO: 21382 - DNA, 21 bp, synthetic construct
  source 1..21: mol_type = other DNA; mol_type = other DNA
ctctcacggattggtcaaaac

SEQ ID NO: 21383 - DNA, 21 bp, synthetic construct
  source 1..21: mol_type = other DNA; mol_type = other DNA
tactcgaagattggacagaat

SEQ ID NO: 21384 - DNA, 21 bp, synthetic construct
  source 1..21: mol_type = other DNA; mol_type = other DNA
gtcctctcagatcgcctatgg

SEQ ID NO: 21385 - DNA, 21 bp, synthetic construct
  source 1..21: mol_type = other DNA; mol_type = other DNA
tattttagcggcgtggtagag

SEQ ID NO: 21386 - DNA, 21 bp, synthetic construct
  source 1..21: mol_type = other DNA; mol_type = other DNA
tactttaccggcaagatagca

SEQ ID NO: 21387 - DNA, 21 bp, synthetic construct
  source 1..21: mol_type = other DNA; mol_type = other DNA
gggagtattacgtctacttgg

SEQ ID NO: 21388 - DNA, 21 bp, synthetic construct
  source 1..21: mol_type = other DNA; mol_type = other DNA
tatgcaaagacgggtccgaac

SEQ ID NO: 21389 - DNA, 21 bp, synthetic construct
  source 1..21: mol_type = other DNA; mol_type = other DNA
aggaccgaacatgtttttccg

SEQ ID NO: 21390 - DNA, 21 bp, synthetic construct
  source 1..21: mol_type = other DNA; mol_type = other DNA
tacgcgaaaactggtatgaac

SEQ ID NO: 21391 - DNA, 21 bp, synthetic construct
  source 1..21: mol_type = other DNA; mol_type = other DNA
ctccaccgcctaggcgcagac

SEQ ID NO: 21392 - DNA, 21 bp, synthetic construct
  source 1..21: mol_type = other DNA; mol_type = other DNA
ctctgtaagccctgccaaacc

SEQ ID NO: 21393 - DNA, 21 bp, synthetic construct
  source 1..21: mol_type = other DNA; mol_type = other DNA
attgaaagcagcaacggtcgt

SEQ ID NO: 21394 - DNA, 21 bp, synthetic construct
  source 1..21: mol_type = other DNA; mol_type = other DNA
tatgtgaaatcacaggtatcc

SEQ ID NO: 21395 - DNA, 21 bp, synthetic construct
  source 1..21: mol_type = other DNA; mol_type = other DNA
aggggacctcaggtatttccg

SEQ ID NO: 21396 - DNA, 21 bp, synthetic construct
  source 1..21: mol_type = other DNA; mol_type = other DNA
aaagatgatttcactacatac

SEQ ID NO: 21397 - DNA, 21 bp, synthetic construct
  source 1..21: mol_type = other DNA; mol_type = other DNA
agaggtgacaacattttcccc

SEQ ID NO: 21398 - DNA, 21 bp, synthetic construct
  source 1..21: mol_type = other DNA; mol_type = other DNA
tacgccaagaccggtactaac

SEQ ID NO: 21399 - DNA, 21 bp, synthetic construct
  source 1..21: mol_type = other DNA; mol_type = other DNA
tatgaaccggggtgtcatgag

SEQ ID NO: 21400 - DNA, 21 bp, synthetic construct
  source 1..21: mol_type = other DNA; mol_type = other DNA
gtaatgtcaactaatggaata

SEQ ID NO: 21401 - DNA, 21 bp, synthetic construct
  source 1..21: mol_type = other DNA; mol_type = other DNA
aaggacgaattctctagttgg

SEQ ID NO: 21402 - DNA, 21 bp, synthetic construct
  source 1..21: mol_type = other DNA; mol_type = other DNA
cgcctcatggacgtctatccg

SEQ ID NO: 21403 - DNA, 21 bp, synthetic construct
  source 1..21: mol_type = other DNA; mol_type = other DNA
cttgctaaaggggggttcaat

SEQ ID NO: 21404 - DNA, 21 bp, synthetic construct
  source 1..21: mol_type = other DNA; mol_type = other DNA
ccctatgctaagagcccgatg

SEQ ID NO: 21405 - DNA, 21 bp, synthetic construct
  source 1..21: mol_type = other DNA; mol_type = other DNA
gttatggctgatgcctttccc

SEQ ID NO: 21406 - DNA, 21 bp, synthetic construct
  source 1..21: mol_type = other DNA; mol_type = other DNA
tatagcaagctgggggtaaac

SEQ ID NO: 21407 - DNA, 21 bp, synthetic construct
  source 1..21: mol_type = other DNA; mol_type = other DNA
atagagagtaccaacggtata

SEQ ID NO: 21408 - DNA, 21 bp, synthetic construct
  source 1..21: mol_type = other DNA; mol_type = other DNA
ttgcataaactccagactgac

SEQ ID NO: 21409 - DNA, 21 bp, synthetic construct
  source 1..21: mol_type = other DNA; mol_type = other DNA
ctcgcgcgaacgggaatgaac

SEQ ID NO: 21410 - DNA, 21 bp, synthetic construct
  source 1..21: mol_type = other DNA; mol_type = other DNA
gttatgtcatccacgacttgg

SEQ ID NO: 21411 - DNA, 21 bp, synthetic construct
  source 1..21: mol_type = other DNA; mol_type = other DNA
aggactatagatgcgttccct

SEQ ID NO: 21412 - DNA, 21 bp, synthetic construct
  source 1..21: mol_type = other DNA; mol_type = other DNA
gtccctggagattgctgcgtc

SEQ ID NO: 21413 - DNA, 21 bp, synthetic construct
  source 1..21: mol_type = other DNA; mol_type = other DNA
tacgctaaaacaggagcgaac

SEQ ID NO: 21414 - DNA, 21 bp, synthetic construct
  source 1..21: mol_type = other DNA; mol_type = other DNA
aaagacgattttcatacttac

SEQ ID NO: 21415 - DNA, 21 bp, synthetic construct
  source 1..21: mol_type = other DNA
ccgtatgcaaaatccgtggag

SEQ ID NO: 21416 - DNA, 21 bp, synthetic construct
  source 1..21: mol_type = other DNA; mol_type = other DNA
ctcacgcgccttcaaattaat

SEQ ID NO: 21417 - DNA, 21 bp, synthetic construct
  source 1..21: mol_type = other DNA; mol_type = other DNA
tattttacgggtgtgttgcag

SEQ ID NO: 21418 - DNA, 21 bp, synthetic construct
  source 1..21: mol_type = other DNA; mol_type = other DNA
ttgtgtaagccgtgtctcatg

SEQ ID NO: 21419 - DNA, 21 bp, synthetic construct
  source 1..21: mol_type = other DNA; mol_type = other DNA
ccaatgtcatccagcagctgg

SEQ ID NO: 21420 - DNA, 21 bp, synthetic construct
  source 1..21: mol_type = other DNA; mol_type = other DNA
ctttcaaaggctagtgtgaat

SEQ ID NO: 21421 - DNA, 21 bp, synthetic construct
  source 1..21: mol_type = other DNA; mol_type = other DNA
tattcaaaactgaacatgaat

SEQ ID NO: 21422 - DNA, 21 bp, synthetic construct
  source 1..21: mol_type = other DNA; mol_type = other DNA
aacttatcatcgtcaacctgg

SEQ ID NO: 21423 - DNA, 21 bp, synthetic construct
  source 1..21: mol_type = other DNA; mol_type = other DNA
tatgtaaaacacgatccccat

SEQ ID NO: 21424 - DNA, 21 bp, synthetic construct
  source 1..21: mol_type = other DNA; mol_type = other DNA
taccataagttaaacccgatg

SEQ ID NO: 21425 - DNA, 21 bp, synthetic construct
  source 1..21: mol_type = other DNA; mol_type = other DNA
tactcgaagctcaatcctatg

SEQ ID NO: 21426 - DNA, 21 bp, synthetic construct
  source 1..21: mol_type = other DNA; mol_type = other DNA
atcatgatggatgcgtatcca

SEQ ID NO: 21427 - DNA, 21 bp, synthetic construct
  source 1..21: mol_type = other DNA; mol_type = other DNA
ctgagtagaattggaccgaac

SEQ ID NO: 21428 - DNA, 21 bp, synthetic construct
  source 1..21: mol_type = other DNA; mol_type = other DNA
ttaaccaggttgagcccggat

SEQ ID NO: 21429 - DNA, 21 bp, synthetic construct
  source 1..21: mol_type = other DNA; mol_type = other DNA
tacagcaagatggggccaaac

SEQ ID NO: 21430 - DNA, 21 bp, synthetic construct
  source 1..21: mol_type = other DNA; mol_type = other DNA
cgtggtgagaacgtatttcca

SEQ ID NO: 21431 - DNA, 21 bp, synthetic construct
  source 1..21: mol_type = other DNA; mol_type = other DNA
tatttgaaaagccagcctttc

SEQ ID NO: 21432 - DNA, 21 bp, synthetic construct
  source 1..21: mol_type = other DNA; mol_type = other DNA
gttgcgaacaaaggctgggat

SEQ ID NO: 21433 - DNA, 21 bp, synthetic construct
  source 1..21: mol_type = other DNA; mol_type = other DNA
atcagtagcacgaatggtatc

SEQ ID NO: 21434 - DNA, 21 bp, synthetic construct
  source 1..21: mol_type = other DNA; mol_type = other DNA
caaaacgactttgtattcccc

SEQ ID NO: 21435 - DNA, 21 bp, synthetic construct
  source 1..21: mol_type = other DNA; mol_type = other DNA
tatgtcaaatcagactctcgt

SEQ ID NO: 21436 - DNA, 21 bp, synthetic construct
  source 1..21: mol_type = other DNA; mol_type = other DNA
tattcaaagatgaatgagaat

SEQ ID NO: 21437 - DNA, 21 bp, synthetic construct
  source 1..21: mol_type = other DNA; mol_type = other DNA
cgtacagagcacgtgttcccc

SEQ ID NO: 21438 - DNA, 21 bp, synthetic construct
  source 1..21: mol_type = other DNA; mol_type = other DNA
cttcatgcctcgggtcccaat

SEQ ID NO: 21439 - DNA, 21 bp, synthetic construct
  source 1..21: mol_type = other DNA; mol_type = other DNA
tttgagggacatgtcaggttt

SEQ ID NO: 21440 - DNA, 21 bp, synthetic construct
  source 1..21: mol_type = other DNA; mol_type = other DNA
gatatgtcatcgtctgtgtgg

SEQ ID NO: 21441 - DNA, 21 bp, synthetic construct
  source 1..21: mol_type = other DNA; mol_type = other DNA
gaactggcatcgagagagtgg

SEQ ID NO: 21442 - DNA, 21 bp, synthetic construct
  source 1..21: mol_type = other DNA; mol_type = other DNA
ttgagtaaggcctcgcacaat

SEQ ID NO: 21443 - DNA, 21 bp, synthetic construct
  source 1..21: mol_type = other DNA; mol_type = other DNA
agggatattgacgtttatccg

SEQ ID NO: 21444 - DNA, 21 bp, synthetic construct
  source 1..21: mol_type = other DNA; mol_type = other DNA
ttgcataagctgcatactaac

SEQ ID NO: 21445 - DNA, 21 bp, synthetic construct
  source 1..21: mol_type = other DNA; mol_type = other DNA
cgcgaagactccgtatactgg

SEQ ID NO: 21446 - DNA, 21 bp, synthetic construct
  source 1..21: mol_type = other DNA; mol_type = other DNA
agggagattgatgtttaccct

SEQ ID NO: 21447 - DNA, 21 bp, synthetic construct
  source 1..21: mol_type = other DNA; mol_type = other DNA
cttcataaacactcacagaat

SEQ ID NO: 21448 - DNA, 21 bp, synthetic construct
  source 1..21: mol_type = other DNA; mol_type = other DNA
ggggacgaatttgtacactgg

SEQ ID NO: 21449 - DNA, 21 bp, synthetic construct
  source 1..21: mol_type = other DNA; mol_type = other DNA
ttaactagggttgcaccgaat

SEQ ID NO: 21450 - DNA, 21 bp, synthetic construct
  source 1..21: mol_type = other DNA; mol_type = other DNA
ttttcaaagctgaatgtgaat

SEQ ID NO: 21451 - DNA, 21 bp, synthetic construct
  source 1..21: mol_type = other DNA; mol_type = other DNA
gtaatgtcgtcagcgaactgg

SEQ ID NO: 21452 - DNA, 21 bp, synthetic construct
  source 1..21: mol_type = other DNA; mol_type = other DNA
aggggagataacgtgttccca

SEQ ID NO: 21453 - DNA, 21 bp, synthetic construct
  source 1..21: mol_type = other DNA; mol_type = other DNA
gtaaattcaactaacggagta

SEQ ID NO: 21454 - DNA, 21 bp, synthetic construct
  source 1..21: mol_type = other DNA; mol_type = other DNA
tacgccaaatcgggagataac

SEQ ID NO: 21455 - DNA, 21 bp, synthetic construct
  source 1..21: mol_type = other DNA; mol_type = other DNA
gttgattcgacgaacggacga

SEQ ID NO: 21456 - DNA, 21 bp, synthetic construct
  source 1..21: mol_type = other DNA; mol_type = other DNA
ttacacgctagcggaccgaac

SEQ ID NO: 21457 - DNA, 21 bp, synthetic construct
  source 1..21: mol_type = other DNA; mol_type = other DNA
cgactcgaatcaacgctttgg

SEQ ID NO: 21458 - DNA, 21 bp, synthetic construct
  source 1..21: mol_type = other DNA; mol_type = other DNA
ctttttgacgggacggcagcc

SEQ ID NO: 21459 - DNA, 21 bp, synthetic construct
  source 1..21: mol_type = other DNA; mol_type = other DNA
ttgatgaatgatgcgtatccg

SEQ ID NO: 21460 - DNA, 21 bp, synthetic construct
  source 1..21: mol_type = other DNA; mol_type = other DNA
atgttcgatgggaccccagcg

SEQ ID NO: 21461 - DNA, 21 bp, synthetic construct
  source 1..21: mol_type = other DNA; mol_type = other DNA
gtgagtacccattgcagggct

SEQ ID NO: 21462 - DNA, 21 bp, synthetic construct
  source 1..21: mol_type = other DNA; mol_type = other DNA
tatagtaaggccggtgacaat

SEQ ID NO: 21463 - DNA, 21 bp, synthetic construct
  source 1..21: mol_type = other DNA; mol_type = other DNA
ctgagcaagctaaaccaaaac

SEQ ID NO: 21464 - DNA, 21 bp, synthetic construct
  source 1..21: mol_type = other DNA; mol_type = other DNA
tacttcagtggcattgtggaa

SEQ ID NO: 21465 - DNA, 21 bp, synthetic construct
  source 1..21: mol_type = other DNA; mol_type = other DNA
tatttctcggggattattgag

SEQ ID NO: 21466 - DNA, 21 bp, synthetic construct
  source 1..21: mol_type = other DNA; mol_type = other DNA
ctcacccgcctacacgctgac

SEQ ID NO: 21467 - DNA, 21 bp, synthetic construct
  source 1..21: mol_type = other DNA; mol_type = other DNA
tacgccaaatcaggctcgaat

SEQ ID NO: 21468 - DNA, 21 bp, synthetic construct
  source 1..21: mol_type = other DNA; mol_type = other DNA
gtcgagtcgaccaatggcaga

SEQ ID NO: 21469 - DNA, 21 bp, synthetic construct
  source 1..21: mol_type = other DNA; mol_type = other DNA
tggtggtcgggagtaaaggag

SEQ ID NO: 21470 - DNA, 21 bp, synthetic construct
  source 1..21: mol_type = other DNA; mol_type = other DNA
ccgatggcctcgtctacgtgg

SEQ ID NO: 21471 - DNA, 21 bp, synthetic construct
  source 1..21: mol_type = other DNA; mol_type = other DNA
ttgcaccgcctaggagaggac

SEQ ID NO: 21472 - DNA, 21 bp, synthetic construct
  source 1..21: mol_type = other DNA; mol_type = other DNA
tacagcaagatcggtcaaaat

SEQ ID NO: 21473 - DNA, 21 bp, synthetic construct
  source 1..21: mol_type = other DNA; mol_type = other DNA
tacctcaagtacgacccactg

SEQ ID NO: 21474 - DNA, 21 bp, synthetic construct
  source 1..21: mol_type = other DNA; mol_type = other DNA
attatgagcgcctccaattgg

SEQ ID NO: 21475 - DNA, 21 bp, synthetic construct
  source 1..21: mol_type = other DNA; mol_type = other DNA
tactctaagatagggcataat

SEQ ID NO: 21476 - DNA, 21 bp, synthetic construct
  source 1..21: mol_type = other DNA; mol_type = other DNA
tattttacgggcaaagtggcg

SEQ ID NO: 21477 - DNA, 21 bp, synthetic construct
  source 1..21: mol_type = other DNA; mol_type = other DNA
ttgtgcaaaccgtgtgagaca

SEQ ID NO: 21478 - DNA, 21 bp, synthetic construct
  source 1..21: mol_type = other DNA; mol_type = other DNA
tatagcaaaattggccacaac

SEQ ID NO: 21479 - DNA, 21 bp, synthetic construct
  source 1..21: mol_type = other DNA; mol_type = other DNA
gatatggcaagtgcgtcctgg

SEQ ID NO: 21480 - DNA, 21 bp, synthetic construct
  source 1..21: mol_type = other DNA; mol_type = other DNA
atgttgagcagtcaaacctgg

SEQ ID NO: 21481 - DNA, 21 bp, synthetic construct
  source 1..21: mol_type = other DNA; mol_type = other DNA
tccgagtctacaaatggtcgt

SEQ ID NO: 21482 - DNA, 21 bp, synthetic construct
  source 1..21: mol_type = other DNA; mol_type = other DNA
cgagaggatagtgtgcgttgg

SEQ ID NO: 21483 - DNA, 21 bp, synthetic construct
  source 1..21: mol_type = other DNA; mol_type = other DNA
atgtttgacggaaccgcggct

SEQ ID NO: 21484 - DNA, 21 bp, synthetic construct
  source 1..21: mol_type = other DNA; mol_type = other DNA
ctcagtaaattaagttacgac

SEQ ID NO: 21485 - DNA, 21 bp, synthetic construct
  source 1..21: mol_type = other DNA; mol_type = other DNA
ctgtgtaagccttgcctttcc

SEQ ID NO: 21486 - DNA, 21 bp, synthetic construct
  source 1..21: mol_type = other DNA; mol_type = other DNA
tatactagattagacccgctg

SEQ ID NO: 21487 - DNA, 21 bp, synthetic construct
  source 1..21: mol_type = other DNA; mol_type = other DNA
tattttaccgggaaggtcgag

SEQ ID NO: 21488 - DNA, 21 bp, synthetic construct
  source 1..21: mol_type = other DNA; mol_type = other DNA
tactcgaaactcgggattaac

SEQ ID NO: 21489 - DNA, 21 bp, synthetic construct
  source 1..21: mol_type = other DNA; mol_type = other DNA
ccgatggcttcctctaactgg

SEQ ID NO: 21490 - DNA, 21 bp, synthetic construct
  source 1..21: mol_type = other DNA; mol_type = other DNA
tatagtaaagttggaattaac

SEQ ID NO: 21491 - DNA, 21 bp, synthetic construct
  source 1..21: mol_type = other DNA; mol_type = other DNA
agaaccgtagatacctatcct

SEQ ID NO: 21492 - DNA, 21 bp, synthetic construct
  source 1..21: mol_type = other DNA; mol_type = other DNA
tatgtcaagtctcaaccgttt

SEQ ID NO: 21493 - DNA, 21 bp, synthetic construct
  source 1..21: mol_type = other DNA; mol_type = other DNA
tactcacgactattgccggac

SEQ ID NO: 21494 - DNA, 21 bp, synthetic construct
  source 1..21: mol_type = other DNA; mol_type = other DNA
gtgttaagtgaccgaatatgg

SEQ ID NO: 21495 - DNA, 21 bp, synthetic construct
  source 1..21: mol_type = other DNA; mol_type = other DNA
gtagctgagaaggggtgggat

SEQ ID NO: 21496 - DNA, 21 bp, synthetic construct
  source 1..21: mol_type = other DNA; mol_type = other DNA
ttgtgcaaaccctgttcaact

SEQ ID NO: 21497 - DNA, 21 bp, synthetic construct
  source 1..21: mol_type = other DNA; mol_type = other DNA
tatcataaagcccaaatgaat

SEQ ID NO: 21498 - DNA, 21 bp, synthetic construct
  source 1..21: mol_type = other DNA; mol_type = other DNA
tattttacaggtatccttgcg

SEQ ID NO: 21499 - DNA, 21 bp, synthetic construct
  source 1..21: mol_type = other DNA; mol_type = other DNA
cccatggattcctccagatgg

SEQ ID NO: 21500 - DNA, 21 bp, synthetic construct
  source 1..21: mol_type = other DNA; mol_type = other DNA
aggaaactggatgtctatccg

SEQ ID NO: 21501 - DNA, 21 bp, synthetic construct
  source 1..21: mol_type = other DNA; mol_type = other DNA
cgtactgacgacgtgtaccca

SEQ ID NO: 21502 - DNA, 21 bp, synthetic construct
  source 1..21: mol_type = other DNA; mol_type = other DNA
tacgcgaagcagggccctaat

SEQ ID NO: 21503 - DNA, 21 bp, synthetic construct
  source 1..21: mol_type = other DNA; mol_type = other DNA
ttacacaagcatagtcaaaat

SEQ ID NO: 21504 - DNA, 21 bp, synthetic construct
  source 1..21: mol_type = other DNA; mol_type = other DNA
tatagtaaggccaatttcaac

SEQ ID NO: 21505 - DNA, 21 bp, synthetic construct
  source 1..21: mol_type = other DNA; mol_type = other DNA
ggatcagaattcgtgagttat

SEQ ID NO: 21506 - DNA, 21 bp, synthetic construct
  source 1..21: mol_type = other DNA; mol_type = other DNA
tatcacgcagccggtccaaat

SEQ ID NO: 21507 - DNA, 21 bp, synthetic construct
  source 1..21: mol_type = other DNA; mol_type = other DNA
tatgcgaagacgggttttaac

SEQ ID NO: 21508 - DNA, 21 bp, synthetic construct
  source 1..21: mol_type = other DNA; mol_type = other DNA
tacgttaaatctcaagccggg

SEQ ID NO: 21509 - DNA, 21 bp, synthetic construct
  source 1..21: mol_type = other DNA; mol_type = other DNA
aggacgccgcaagtttatccg

SEQ ID NO: 21510 - DNA, 21 bp, synthetic construct
  source 1..21: mol_type = other DNA; mol_type = other DNA
tacagcaaggtcggatacaac

SEQ ID NO: 21511 - DNA, 21 bp, synthetic construct
  source 1..21: mol_type = other DNA; mol_type = other DNA
aaagatgatttttcaacctac

SEQ ID NO: 21512 - DNA, 21 bp, synthetic construct
  source 1..21: mol_type = other DNA; mol_type = other DNA
cgcggaccggacgtttaccca

SEQ ID NO: 21513 - DNA, 21 bp, synthetic construct
  source 1..21: mol_type = other DNA; mol_type = other DNA
tatttcacgggcgtggtggca

SEQ ID NO: 21514 - DNA, 21 bp, synthetic construct
  source 1..21: mol_type = other DNA; mol_type = other DNA
ttgtttagtggcgacggacct

SEQ ID NO: 21515 - DNA, 21 bp, synthetic construct
  source 1..21: mol_type = other DNA; mol_type = other DNA
attatgtcgtcctcaagctgg

SEQ ID NO: 21516 - DNA, 21 bp, synthetic construct
  source 1..21: mol_type = other DNA; mol_type = other DNA
gtattttctacgaacggtgtc

SEQ ID NO: 21517 - DNA, 21 bp, synthetic construct
  source 1..21: mol_type = other DNA; mol_type = other DNA
cgaactgagacagtctaccca

SEQ ID NO: 21518 - DNA, 21 bp, synthetic construct
  source 1..21: mol_type = other DNA; mol_type = other DNA
tactcaaaaaccggtcccaac

SEQ ID NO: 21519 - DNA, 21 bp, synthetic construct
  source 1..21: mol_type = other DNA; mol_type = other DNA
ttccacaaattgtcgaataac

SEQ ID NO: 21520 - DNA, 21 bp, synthetic construct
  source 1..21: mol_type = other DNA; mol_type = other DNA
ccgatggctagtgcgacatgg

SEQ ID NO: 21521 - DNA, 21 bp, synthetic construct
  source 1..21: mol_type = other DNA; mol_type = other DNA
ttggctaagaatggtccgaac

SEQ ID NO: 21522 - DNA, 21 bp, synthetic construct
  source 1..21: mol_type = other DNA; mol_type = other DNA
atcatggagagcagaaattgg

SEQ ID NO: 21523 - DNA, 21 bp, synthetic construct
  source 1..21: mol_type = other DNA; mol_type = other DNA
aggctcatggatgcttacccg

SEQ ID NO: 21524 - DNA, 21 bp, synthetic construct
  source 1..21: mol_type = other DNA; mol_type = other DNA
gtgagtagcaccaatggaatt

SEQ ID NO: 21525 - DNA, 21 bp, synthetic construct
  source 1..21: mol_type = other DNA; mol_type = other DNA
gatttacggtctagtacttgg

SEQ ID NO: 21526 - DNA, 21 bp, synthetic construct
  source 1..21: mol_type = other DNA; mol_type = other DNA
ttaattaacgacgcttaccca

SEQ ID NO: 21527 - DNA, 21 bp, synthetic construct
  source 1..21: mol_type = other DNA; mol_type = other DNA
cgggatgaattcacaagtttt

SEQ ID NO: 21528 - DNA, 21 bp, synthetic construct
  source 1..21: mol_type = other DNA; mol_type = other DNA
ctcgccaaaacagcacccaac

SEQ ID NO: 21529 - DNA, 21 bp, synthetic construct
  source 1..21: mol_type = other DNA; mol_type = other DNA
ctatgtgccccgtgcctcaca

SEQ ID NO: 21530 - DNA, 21 bp, synthetic construct
  source 1..21: mol_type = other DNA; mol_type = other DNA
ttctccaagctcaatatgaat

SEQ ID NO: 21531 - DNA, 21 bp, synthetic construct
  source 1..21: mol_type = other DNA; mol_type = other DNA
tttcacaagctcagtaacaat

SEQ ID NO: 21532 - DNA, 21 bp, synthetic construct
  source 1..21: mol_type = other DNA; mol_type = other DNA
tactcgaaagcgaatgataat

SEQ ID NO: 21533 - DNA, 21 bp, synthetic construct
  source 1..21: mol_type = other DNA; mol_type = other DNA
tattctaaaatagggatcaat

SEQ ID NO: 21534 - DNA, 21 bp, synthetic construct
  source 1..21: mol_type = other DNA; mol_type = other DNA
cccatggcgagtagcaattgg

SEQ ID NO: 21535 - DNA, 21 bp, synthetic construct
  source 1..21: mol_type = other DNA; mol_type = other DNA
ataacaagcactaatggtata

SEQ ID NO: 21536 - DNA, 21 bp, synthetic construct
  source 1..21: mol_type = other DNA; mol_type = other DNA
gtgatgcctgacgcatttccg

SEQ ID NO: 21537 - DNA, 21 bp, synthetic construct
  source 1..21: mol_type = other DNA; mol_type = other DNA
tatagcaaaatgaacgacaat

SEQ ID NO: 21538 - DNA, 21 bp, synthetic construct
  source 1..21: mol_type = other DNA; mol_type = other DNA
aacctcgccagcgcgtcttgg

SEQ ID NO: 21539 - DNA, 21 bp, synthetic construct
  source 1..21: mol_type = other DNA; mol_type = other DNA
tacgtgaaatcgcagcagtta

SEQ ID NO: 21540 - DNA, 21 bp, synthetic construct
  source 1..21: mol_type = other DNA; mol_type = other DNA
ctacataagttaaatcacgat

SEQ ID NO: 21541 - DNA, 21 bp, synthetic construct
  source 1..21: mol_type = other DNA; mol_type = other DNA
tactttacgggcattcatgaa

SEQ ID NO: 21542 - DNA, 21 bp, synthetic construct
  source 1..21: mol_type = other DNA; mol_type = other DNA
gtgagcgagttcgaaatatat

SEQ ID NO: 21543 - DNA, 21 bp, synthetic construct
  source 1..21: mol_type = other DNA; mol_type = other DNA
ttaacacgcttacatatagat

SEQ ID NO: 21544 - DNA, 21 bp, synthetic construct
  source 1..21: mol_type = other DNA; mol_type = other DNA
cgcgaggactttgtttcttgg

SEQ ID NO: 21545 - DNA, 21 bp, synthetic construct
  source 1..21: mol_type = other DNA; mol_type = other DNA
aaagacgagttttcgtcatgg

SEQ ID NO: 21546 - DNA, 21 bp, synthetic construct
  source 1..21: mol_type = other DNA; mol_type = other DNA
tatagtaaagcaggtactaat

SEQ ID NO: 21547 - DNA, 21 bp, synthetic construct
  source 1..21: mol_type = other DNA; mol_type = other DNA
cagcttgaagcacgcacatgg

SEQ ID NO: 21548 - DNA, 21 bp, synthetic construct
  source 1..21: mol_type = other DNA; mol_type = other DNA
tatgtcaagtccgatactcga

SEQ ID NO: 21549 - DNA, 21 bp, synthetic construct
  source 1..21: mol_type = other DNA; mol_type = other DNA
tattcgaaagctaacatcaat

SEQ ID NO: 21550 - DNA, 21 bp, synthetic construct
  source 1..21: mol_type = other DNA; mol_type = other DNA
atgagtcgtatcgggccaaat

SEQ ID NO: 21551 - DNA, 21 bp, synthetic construct
  source 1..21: mol_type = other DNA; mol_type = other DNA
gatttaagctcgcagacatgg

SEQ ID NO: 21552 - DNA, 21 bp, synthetic construct
  source 1..21: mol_type = other DNA; mol_type = other DNA
tacgccaagaccggtaacaac

SEQ ID NO: 21553 - DNA, 21 bp, synthetic construct
  source 1..21: mol_type = other DNA; mol_type = other DNA
gcacccggatcagtaaggtgg

SEQ ID NO: 21554 - DNA, 21 bp, synthetic construct
  source 1..21: mol_type = other DNA; mol_type = other DNA
tatcataaactcaacgacaat

SEQ ID NO: 21555 - DNA, 21 bp, synthetic construct
  source 1..21: mol_type = other DNA; mol_type = other DNA
tactcaaagttagccccaaat

SEQ ID NO: 21556 - DNA, 21 bp, synthetic construct
  source 1..21: mol_type = other DNA; mol_type = other DNA
gatttggcctcccgggaatgg

SEQ ID NO: 21557 - DNA, 21 bp, synthetic construct
  source 1..21: mol_type = other DNA; mol_type = other DNA
gaaatggctagtcatgggtgg

SEQ ID NO: 21558 - DNA, 21 bp, synthetic construct
  source 1..21: mol_type = other DNA; mol_type = other DNA
agaggtcccgatgtctatcct

SEQ ID NO: 21559 - DNA, 21 bp, synthetic construct
  source 1..21: mol_type = other DNA; mol_type = other DNA
aggaatgatgacgtttttcct

SEQ ID NO: 21560 - DNA, 21 bp, synthetic construct
  source 1..21: mol_type = other DNA; mol_type = other DNA
ctcagccgtgttagcgataac

SEQ ID NO: 21561 - DNA, 21 bp, synthetic construct
  source 1..21: mol_type = other DNA; mol_type = other DNA
gtgatgtcaaccaatggcgtc

SEQ ID NO: 21562 - DNA, 21 bp, synthetic construct
  source 1..21: mol_type = other DNA; mol_type = other DNA
taccacgcgaaaggattgaac

SEQ ID NO: 21563 - DNA, 21 bp, synthetic construct
  source 1..21: mol_type = other DNA; mol_type = other DNA
ttgtcaaaattgaatcaaaat

SEQ ID NO: 21564 - DNA, 21 bp, synthetic construct
  source 1..21: mol_type = other DNA; mol_type = other DNA
tacgcgaaaggtggacctaat

SEQ ID NO: 21565 - DNA, 21 bp, synthetic construct
  source 1..21: mol_type = other DNA; mol_type = other DNA
tacagtaagacggggactaat

SEQ ID NO: 21566 - DNA, 21 bp, synthetic construct
  source 1..21: mol_type = other DNA; mol_type = other DNA
tacgttaagagtgatcgatgt

SEQ ID NO: 21567 - DNA, 21 bp, synthetic construct
  source 1..21: mol_type = other DNA; mol_type = other DNA
ctcatgaatgacgcttaccct

SEQ ID NO: 21568 - DNA, 21 bp, synthetic construct
  source 1..21: mol_type = other DNA; mol_type = other DNA
ctttcgaagttgaacatgaat

SEQ ID NO: 21569 - DNA, 21 bp, synthetic construct
  source 1..21: mol_type = other DNA; mol_type = other DNA
tatagtaaattaaaccctaac

SEQ ID NO: 21570 - DNA, 21 bp, synthetic construct
  source 1..21: mol_type = other DNA; mol_type = other DNA
tacgttaaatcggatagcatg

SEQ ID NO: 21571 - DNA, 21 bp, synthetic construct
  source 1..21: mol_type = other DNA; mol_type = other DNA
agtatgagttctgcaatctgg

SEQ ID NO: 21572 - DNA, 21 bp, synthetic construct
  source 1..21: mol_type = other DNA; mol_type = other DNA
ttacgagatgggacttcggcc

SEQ ID NO: 21573 - DNA, 21 bp, synthetic construct
  source 1..21: mol_type = other DNA; mol_type = other DNA
atgcatcgccttttaccagat

SEQ ID NO: 21574 - DNA, 21 bp, synthetic construct
  source 1..21: mol_type = other DNA; mol_type = other DNA
cgcaccccacaggtgtaccca

SEQ ID NO: 21575 - DNA, 21 bp, synthetic construct
  source 1..21: mol_type = other DNA; mol_type = other DNA
atcatgagcagtaatatctgg

SEQ ID NO: 21576 - DNA, 21 bp, synthetic construct
  source 1..21: mol_type = other DNA; mol_type = other DNA
atattagagtcgagaacttgg

SEQ ID NO: 21577 - DNA, 21 bp, synthetic construct
  source 1..21: mol_type = other DNA; mol_type = other DNA
tatttcacgggaattttggcc

SEQ ID NO: 21578 - DNA, 21 bp, synthetic construct
  source 1..21: mol_type = other DNA; mol_type = other DNA
ttgaccagggtctcaccagat

SEQ ID NO: 21579 - DNA, 21 bp, synthetic construct
  source 1..21: mol_type = other DNA; mol_type = other DNA
tatgtaaagagccaaacgatg

SEQ ID NO: 21580 - DNA, 21 bp, synthetic construct
  source 1..21: mol_type = other DNA; mol_type = other DNA
tacttcacgggaaaattagaa

SEQ ID NO: 21581 - DNA, 21 bp, synthetic construct
  source 1..21: mol_type = other DNA; mol_type = other DNA
tattcggtgataggaccgaat

SEQ ID NO: 21582 - DNA, 21 bp, synthetic construct
  source 1..21: mol_type = other DNA; mol_type = other DNA
gaggcactccggggctgggac

SEQ ID NO: 21583 - DNA, 21 bp, synthetic construct
  source 1..21: mol_type = other DNA; mol_type = other DNA
cgactcacagacgcctatcca

SEQ ID NO: 21584 - DNA, 21 bp, synthetic construct
  source 1..21: mol_type = other DNA; mol_type = other DNA
ttatgcaagccgtgtctaggg

SEQ ID NO: 21585 - DNA, 21 bp, synthetic construct
  source 1..21: mol_type = other DNA; mol_type = other DNA
caaatggcaagcgtcaaatgg

SEQ ID NO: 21586 - DNA, 21 bp, synthetic construct
  source 1..21: mol_type = other DNA; mol_type = other DNA
tatgccaagagtggtgcaaat

SEQ ID NO: 21587 - DNA, 21 bp, synthetic construct
  source 1..21: mol_type = other DNA; mol_type = other DNA
tacagcaagattggtataaac

SEQ ID NO: 21588 - DNA, 21 bp, synthetic construct
  source 1..21: mol_type = other DNA; mol_type = other DNA
agaacgtcggacgtctttcca

SEQ ID NO: 21589 - DNA, 21 bp, synthetic construct
  source 1..21: mol_type = other DNA; mol_type = other DNA
tggtgcgaaggggtgatgacg

SEQ ID NO: 21590 - DNA, 21 bp, synthetic construct
  source 1..21: mol_type = other DNA; mol_type = other DNA
tatcacaagttagacaacaat

SEQ ID NO: 21591 - DNA, 21 bp, synthetic construct
  source 1..21: mol_type = other DNA; mol_type = other DNA
ttatcgaagttgaacccgaat

SEQ ID NO: 21592 - DNA, 21 bp, synthetic construct
  source 1..21: mol_type = other DNA; mol_type = other DNA
ttgtcgaagctaaatgaaaat

SEQ ID NO: 21593 - DNA, 21 bp, synthetic construct
  source 1..21: mol_type = other DNA; mol_type = other DNA
gttctttccagctccgcgtgg

SEQ ID NO: 21594 - DNA, 21 bp, synthetic construct
  source 1..21: mol_type = other DNA; mol_type = other DNA
ctcagcaaagtgggcaataat

SEQ ID NO: 21595 - DNA, 21 bp, synthetic construct
  source 1..21: mol_type = other DNA; mol_type = other DNA
ctccatagattgggtgataac

SEQ ID NO: 21596 - DNA, 21 bp, synthetic construct
  source 1..21: mol_type = other DNA; mol_type = other DNA
aattgtaaaccttgtttcgac

SEQ ID NO: 21597 - DNA, 21 bp, synthetic construct
  source 1..21: mol_type = other DNA; mol_type = other DNA
cgaaccccttctgtatacccc

SEQ ID NO: 21598 - DNA, 21 bp, synthetic construct
  source 1..21: mol_type = other DNA; mol_type = other DNA
ctatccaggatcggggagaac

SEQ ID NO: 21599 - DNA, 21 bp, synthetic construct
  source 1..21: mol_type = other DNA; mol_type = other DNA
ttagccaggacaggcatgaat

SEQ ID NO: 21600 - DNA, 21 bp, synthetic construct
  source 1..21: mol_type = other DNA; mol_type = other DNA
ctttcaaaactaaatacgaac

SEQ ID NO: 21601 - DNA, 21 bp, synthetic construct
  source 1..21: mol_type = other DNA; mol_type = other DNA
tactttacgggtacaattgaa

SEQ ID NO: 21602 - DNA, 21 bp, synthetic construct
  source 1..21: mol_type = other DNA; mol_type = other DNA
attatggcctcacaaacttgg

SEQ ID NO: 21603 - DNA, 21 bp, synthetic construct
  source 1..21: mol_type = other DNA; mol_type = other DNA
tatgcgaaactgggcccgaat

SEQ ID NO: 21604 - DNA, 21 bp, synthetic construct
  source 1..21: mol_type = other DNA; mol_type = other DNA
cttagtagggtaggtcctgac

SEQ ID NO: 21605 - DNA, 21 bp, synthetic construct
  source 1..21: mol_type = other DNA; mol_type = other DNA
tatttcaccgggattaaagat

SEQ ID NO: 21606 - DNA, 21 bp, synthetic construct
  source 1..21: mol_type = other DNA; mol_type = other DNA
ttgcacaaactgaaccatgac

SEQ ID NO: 21607 - DNA, 21 bp, synthetic construct
  source 1..21: mol_type = other DNA; mol_type = other DNA
tatttcaccggaaaattggag

SEQ ID NO: 21608 - DNA, 21 bp, synthetic construct
  source 1..21: mol_type = other DNA; mol_type = other DNA
tatcacaaactgaatcccatg

SEQ ID NO: 21609 - DNA, 21 bp, synthetic construct
  source 1..21: mol_type = other DNA; mol_type = other DNA
acccagtcgacgaatggggtg

SEQ ID NO: 21610 - DNA, 21 bp, synthetic construct
  source 1..21: mol_type = other DNA; mol_type = other DNA
ctgacgcgtgtgagtccggat

SEQ ID NO: 21611 - DNA, 21 bp, synthetic construct
  source 1..21: mol_type = other DNA; mol_type = other DNA
tacgtcaagtcagacaatggg

SEQ ID NO: 21612 - DNA, 21 bp, synthetic construct
  source 1..21: mol_type = other DNA; mol_type = other DNA
tacttcaccggtaaggttgcc

SEQ ID NO: 21613 - DNA, 21 bp, synthetic construct
  source 1..21: mol_type = other DNA; mol_type = other DNA
gacatggccagtaaaacatgg

SEQ ID NO: 21614 - DNA, 21 bp, synthetic construct
  source 1..21: mol_type = other DNA; mol_type = other DNA
tattccaaggtcggtataaat

SEQ ID NO: 21615 - DNA, 21 bp, synthetic construct
  source 1..21: mol_type = other DNA; mol_type = other DNA
tatgtcaagtcagatacccga

SEQ ID NO: 21616 - DNA, 21 bp, synthetic construct
  source 1..21: mol_type = other DNA; mol_type = other DNA
gtgttatcgacgaatggaatt

SEQ ID NO: 21617 - DNA, 21 bp, synthetic construct
  source 1..21: mol_type = other DNA; mol_type = other DNA
tacgttaagtctcaagttatg

SEQ ID NO: 21618 - DNA, 21 bp, synthetic construct
  source 1..21: mol_type = other DNA; mol_type = other DNA
tacttttcgggtattccttta

SEQ ID NO: 21619 - DNA, 21 bp, synthetic construct
  source 1..21: mol_type = other DNA; mol_type = other DNA
ttagcccgctcgggtcctgac

SEQ ID NO: 21620 - DNA, 21 bp, synthetic construct
  source 1..21: mol_type = other DNA; mol_type = other DNA
gatctcagtagctcaaagtgg

SEQ ID NO: 21621 - DNA, 21 bp, synthetic construct
  source 1..21: mol_type = other DNA; mol_type = other DNA
ttcagtaaattgaatgtcaac

SEQ ID NO: 21622 - DNA, 21 bp, synthetic construct
  source 1..21: mol_type = other DNA; mol_type = other DNA
aaaatgagcagttcagtttgg

SEQ ID NO: 21623 - DNA, 21 bp, synthetic construct
  source 1..21: mol_type = other DNA; mol_type = other DNA
ctctgcaagccgtgtataaca

SEQ ID NO: 21624 - DNA, 21 bp, synthetic construct
  source 1..21: mol_type = other DNA; mol_type = other DNA
cgcgcgctcgagggggcagat

SEQ ID NO: 21625 - DNA, 21 bp, synthetic construct
  source 1..21: mol_type = other DNA; mol_type = other DNA
cagatggcctctgttaagtgg

SEQ ID NO: 21626 - DNA, 21 bp, synthetic construct
  source 1..21: mol_type = other DNA; mol_type = other DNA
tacttttcaggggtgaaggag

SEQ ID NO: 21627 - DNA, 21 bp, synthetic construct
  source 1..21: mol_type = other DNA; mol_type = other DNA
aggactgaacacgtgtttcct

SEQ ID NO: 21628 - DNA, 21 bp, synthetic construct
  source 1..21: mol_type = other DNA; mol_type = other DNA
tacctaaagagccaaccttat

SEQ ID NO: 21629 - DNA, 21 bp, synthetic construct
  source 1..21: mol_type = other DNA; mol_type = other DNA
ttgtctagattgagctttgac

SEQ ID NO: 21630 - DNA, 21 bp, synthetic construct
  source 1..21: mol_type = other DNA; mol_type = other DNA
taccacaaattacaggtattt

SEQ ID NO: 21631 - DNA, 21 bp, synthetic construct
  source 1..21: mol_type = other DNA; mol_type = other DNA
tactcgaagctaaatcccaac

SEQ ID NO: 21632 - DNA, 21 bp, synthetic construct
  source 1..21: mol_type = other DNA; mol_type = other DNA
cgtgatgattttacgactttc

SEQ ID NO: 21633 - DNA, 21 bp, synthetic construct
  source 1..21: mol_type = other DNA; mol_type = other DNA
atcgagagtcgcgagggcata

SEQ ID NO: 21634 - DNA, 21 bp, synthetic construct
  source 1..21: mol_type = other DNA; mol_type = other DNA
aggttaatggatgtttaccct

SEQ ID NO: 21635 - DNA, 21 bp, synthetic construct
  source 1..21: mol_type = other DNA; mol_type = other DNA
agggaggactttactacatgg

SEQ ID NO: 21636 - DNA, 21 bp, synthetic construct
  source 1..21: mol_type = other DNA; mol_type = other DNA
aaggatgatttcgtttcttat

SEQ ID NO: 21637 - DNA, 21 bp, synthetic construct
  source 1..21: mol_type = other DNA; mol_type = other DNA
ttacaccgtctttccgtagtg

SEQ ID NO: 21638 - DNA, 21 bp, synthetic construct
  source 1..21: mol_type = other DNA; mol_type = other DNA
cgcgcgcttgaaggttatgac

SEQ ID NO: 21639 - DNA, 21 bp, synthetic construct
  source 1..21: mol_type = other DNA; mol_type = other DNA
agggatgaattcacgacatac

SEQ ID NO: 21640 - DNA, 21 bp, synthetic construct
  source 1..21: mol_type = other DNA; mol_type = other DNA
cggggagagacggtttatccc

SEQ ID NO: 21641 - DNA, 21 bp, synthetic construct
  source 1..21: mol_type = other DNA; mol_type = other DNA
agggaagatatggtccgctgg

SEQ ID NO: 21642 - DNA, 21 bp, synthetic construct
  source 1..21: mol_type = other DNA; mol_type = other DNA
gacatggggagccacaagtgg

SEQ ID NO: 21643 - DNA, 21 bp, synthetic construct
  source 1..21: mol_type = other DNA; mol_type = other DNA
tactcaaagcttaataccaac

SEQ ID NO: 21644 - DNA, 21 bp, synthetic construct
  source 1..21: mol_type = other DNA; mol_type = other DNA
tacattaagcatgatccaatg

SEQ ID NO: 21645 - DNA, 21 bp, synthetic construct
  source 1..21: mol_type = other DNA; mol_type = other DNA
tattctaaaattggccaaaat

SEQ ID NO: 21646 - DNA, 21 bp, synthetic construct
  source 1..21: mol_type = other DNA; mol_type = other DNA
tatgttaagagtcaaccatat

SEQ ID NO: 21647 - DNA, 21 bp, synthetic construct
  source 1..21: mol_type = other DNA; mol_type = other DNA
tatgtaaaaagccaggtcatg

SEQ ID NO: 21648 - DNA, 21 bp, synthetic construct
  source 1..21: mol_type = other DNA; mol_type = other DNA
tacagcaaatctggtccgaac

SEQ ID NO: 21649 - DNA, 21 bp, synthetic construct
  source 1..21: mol_type = other DNA; mol_type = other DNA
aggacaccaagcgtgtatccg

SEQ ID NO: 21650 - DNA, 21 bp, synthetic construct
  source 1..21: mol_type = other DNA; mol_type = other DNA
tttagcaagcttaatgccaac

SEQ ID NO: 21651 - DNA, 21 bp, synthetic construct
  source 1..21: mol_type = other DNA; mol_type = other DNA
gtcacttcaagtaacggagtc

SEQ ID NO: 21652 - DNA, 21 bp, synthetic construct
  source 1..21: mol_type = other DNA; mol_type = other DNA
gtccctgaattttgtcgaccg

SEQ ID NO: 21653 - DNA, 21 bp, synthetic construct
  source 1..21: mol_type = other DNA; mol_type = other DNA
ttgcacaggttaagcgcagat

SEQ ID NO: 21654 - DNA, 21 bp, synthetic construct
  source 1..21: mol_type = other DNA; mol_type = other DNA
tattccaaggtgggggtaaat

SEQ ID NO: 21655 - DNA, 21 bp, synthetic construct
  source 1..21: mol_type = other DNA; mol_type = other DNA
agggaagacactgtcaagtgg

SEQ ID NO: 21656 - DNA, 21 bp, synthetic construct
  source 1..21: mol_type = other DNA; mol_type = other DNA
gccccgggcagtgttcgttgg

SEQ ID NO: 21657 - DNA, 21 bp, synthetic construct
  source 1..21: mol_type = other DNA; mol_type = other DNA
ttttcaaagcttaaccagaac

SEQ ID NO: 21658 - DNA, 21 bp, synthetic construct
  source 1..21: mol_type = other DNA; mol_type = other DNA
tatagcaaaataggccaaaac

SEQ ID NO: 21659 - DNA, 21 bp, synthetic construct
  source 1..21: mol_type = other DNA; mol_type = other DNA
tacgtaaagtcggacgtggga

SEQ ID NO: 21660 - DNA, 21 bp, synthetic construct
  source 1..21: mol_type = other DNA; mol_type = other DNA
tatgccaaggggggtccaaac

SEQ ID NO: 21661 - DNA, 21 bp, synthetic construct
  source 1..21: mol_type = other DNA; mol_type = other DNA
ctgcactccaaattaccgaac

SEQ ID NO: 21662 - DNA, 21 bp, synthetic construct
  source 1..21: mol_type = other DNA; mol_type = other DNA
cgaatgatcgacgcgtaccct

SEQ ID NO: 21663 - DNA, 21 bp, synthetic construct
  source 1..21: mol_type = other DNA; mol_type = other DNA
tactcgaagctgcaagataat

SEQ ID NO: 21664 - DNA, 21 bp, synthetic construct
  source 1..21: mol_type = other DNA; mol_type = other DNA
cttcatcgcctctcgctcgac

SEQ ID NO: 21665 - DNA, 21 bp, synthetic construct
  source 1..21: mol_type = other DNA; mol_type = other DNA
aaagatgaattttcgggatat

SEQ ID NO: 21666 - DNA, 21 bp, synthetic construct
  source 1..21: mol_type = other DNA; mol_type = other DNA
aaatcggactttgtgagctgg

SEQ ID NO: 21667 - DNA, 21 bp, synthetic construct
  source 1..21: mol_type = other DNA; mol_type = other DNA
tacgtaaaaagccagcccttc

SEQ ID NO: 21668 - DNA, 21 bp, synthetic construct
  source 1..21: mol_type = other DNA; mol_type = other DNA
tacctaaagtcgcaaccattt

SEQ ID NO: 21669 - DNA, 21 bp, synthetic construct
  source 1..21: mol_type = other DNA; mol_type = other DNA
cgcgacatcgatgtgtacccc

SEQ ID NO: 21670 - DNA, 21 bp, synthetic construct
  source 1..21: mol_type = other DNA; mol_type = other DNA
cgtacaattgacgcttttccc

SEQ ID NO: 21671 - DNA, 21 bp, synthetic construct
  source 1..21: mol_type = other DNA; mol_type = other DNA
cgcacaggcgacgcctacccg

SEQ ID NO: 21672 - DNA, 21 bp, synthetic construct
  source 1..21: mol_type = other DNA; mol_type = other DNA
ttgagtaaagtagggcacaat

SEQ ID NO: 21673 - DNA, 21 bp, synthetic construct
  source 1..21: mol_type = other DNA; mol_type = other DNA
tattttactggtaagctcgag

SEQ ID NO: 21674 - DNA, 21 bp, synthetic construct
  source 1..21: mol_type = other DNA; mol_type = other DNA
tacgccaaaagcggattaaat

SEQ ID NO: 21675 - DNA, 21 bp, synthetic construct
  source 1..21: mol_type = other DNA; mol_type = other DNA
tattcgaaagtagggtataat

SEQ ID NO: 21676 - DNA, 21 bp, synthetic construct
  source 1..21: mol_type = other DNA; mol_type = other DNA
tatcataaactgaatgagaat

SEQ ID NO: 21677 - DNA, 21 bp, synthetic construct
  source 1..21: mol_type = other DNA; mol_type = other DNA
ctacatgcactcagccacaat

SEQ ID NO: 21678 - DNA, 21 bp, synthetic construct
  source 1..21: mol_type = other DNA; mol_type = other DNA
cttagcagggtgggcggcaac

SEQ ID NO: 21679 - DNA, 21 bp, synthetic construct
  source 1..21: mol_type = other DNA; mol_type = other DNA
ttgcatcgcttaggtgataac

SEQ ID NO: 21680 - DNA, 21 bp, synthetic construct
  source 1..21: mol_type = other DNA; mol_type = other DNA
cggatggaggtaagtacgtgg

SEQ ID NO: 21681 - DNA, 21 bp, synthetic construct
  source 1..21: mol_type = other DNA; mol_type = other DNA
tacgtgaagtcgagcaataac

SEQ ID NO: 21682 - DNA, 21 bp, synthetic construct
  source 1..21: mol_type = other DNA; mol_type = other DNA
tatgtgaaatccgatgtacgt

SEQ ID NO: 21683 - DNA, 21 bp, synthetic construct
  source 1..21: mol_type = other DNA; mol_type = other DNA
cggatgttggacgcctatccc

SEQ ID NO: 21684 - DNA, 21 bp, synthetic construct
  source 1..21: mol_type = other DNA; mol_type = other DNA
tactcaaagctagggatgaac

SEQ ID NO: 21685 - DNA, 21 bp, synthetic construct
  source 1..21: mol_type = other DNA; mol_type = other DNA
ctacaccgacttgggcaggac

SEQ ID NO: 21686 - DNA, 21 bp, synthetic construct
  source 1..21: mol_type = other DNA; mol_type = other DNA
ctggcacgtagcggccccgat

SEQ ID NO: 21687 - DNA, 21 bp, synthetic construct
  source 1..21: mol_type = other DNA; mol_type = other DNA
ttaagcaaagcatcggtaaac

SEQ ID NO: 21688 - DNA, 21 bp, synthetic construct
  source 1..21: mol_type = other DNA; mol_type = other DNA
cttcataggctatcggataac

SEQ ID NO: 21689 - DNA, 21 bp, synthetic construct
  source 1..21: mol_type = other DNA; mol_type = other DNA
gacatgtccgcgagcacgtgg

SEQ ID NO: 21690 - DNA, 21 bp, synthetic construct
  source 1..21: mol_type = other DNA; mol_type = other DNA
tacgtgaagagcgacagcagg

SEQ ID NO: 21691 - DNA, 21 bp, synthetic construct
  source 1..21: mol_type = other DNA; mol_type = other DNA
tacagtaaggtcggagagaac

SEQ ID NO: 21692 - DNA, 21 bp, synthetic construct
  source 1..21: mol_type = other DNA; mol_type = other DNA
ttgtcgcgtctaagtcccata

SEQ ID NO: 21693 - DNA, 21 bp, synthetic construct
  source 1..21: mol_type = other DNA; mol_type = other DNA
gtactttccagtacgacatgg

SEQ ID NO: 21694 - DNA, 21 bp, synthetic construct
  source 1..21: mol_type = other DNA; mol_type = other DNA
tacgtaaaatcgaataataat

SEQ ID NO: 21695 - DNA, 21 bp, synthetic construct
  source 1..21: mol_type = other DNA; mol_type = other DNA
gatttagcttcgtataaatgg

SEQ ID NO: 21696 - DNA, 21 bp, synthetic construct
  source 1..21: mol_type = other DNA; mol_type = other DNA
tatagtaaacataatattaat

SEQ ID NO: 21697 - DNA, 21 bp, synthetic construct
  source 1..21: mol_type = other DNA; mol_type = other DNA
tatgtcagaagcgacaaaggg

SEQ ID NO: 21698 - DNA, 21 bp, synthetic construct
  source 1..21: mol_type = other DNA; mol_type = other DNA
tatcataaattaaatccaccg

SEQ ID NO: 21699 - DNA, 21 bp, synthetic construct
  source 1..21: mol_type = other DNA; mol_type = other DNA
agggaagaagtttcgatttgg

SEQ ID NO: 21700 - DNA, 21 bp, synthetic construct
  source 1..21: mol_type = other DNA; mol_type = other DNA
ctgaaagatggtacctgttcg

SEQ ID NO: 21701 - DNA, 21 bp, synthetic construct
  source 1..21: mol_type = other DNA; mol_type = other DNA
gtcatggctagcagttcctgg

SEQ ID NO: 21702 - DNA, 21 bp, synthetic construct
  source 1..21: mol_type = other DNA; mol_type = other DNA
ttgcataaacttaacgaaaac

SEQ ID NO: 21703 - DNA, 21 bp, synthetic construct
  source 1..21: mol_type = other DNA; mol_type = other DNA
ttatgcaagccatgtctactc

SEQ ID NO: 21704 - DNA, 21 bp, synthetic construct
  source 1..21: mol_type = other DNA; mol_type = other DNA
taccacaagttaaacgagaac

SEQ ID NO: 21705 - DNA, 21 bp, synthetic construct
  source 1..21: mol_type = other DNA; mol_type = other DNA
ttgcaccgcttgagcacgccc

SEQ ID NO: 21706 - DNA, 21 bp, synthetic construct
  source 1..21: mol_type = other DNA; mol_type = other DNA
tactcaaagctccaaaaaaac

SEQ ID NO: 21707 - DNA, 21 bp, synthetic construct
  source 1..21: mol_type = other DNA; mol_type = other DNA
ttatctcggcttagtttcgac

SEQ ID NO: 21708 - DNA, 21 bp, synthetic construct
  source 1..21: mol_type = other DNA; mol_type = other DNA
gtattgagtagctctatgtgg

SEQ ID NO: 21709 - DNA, 21 bp, synthetic construct
  source 1..21: mol_type = other DNA; mol_type = other DNA
ttcagcaggatcgggcccgac

SEQ ID NO: 21710 - DNA, 21 bp, synthetic construct
  source 1..21: mol_type = other DNA; mol_type = other DNA
cgtggtcccgatgtcttcccc

SEQ ID NO: 21711 - DNA, 21 bp, synthetic construct
  source 1..21: mol_type = other DNA; mol_type = other DNA
taccacaagctgaatagtaat

SEQ ID NO: 21712 - DNA, 21 bp, synthetic construct
  source 1..21: mol_type = other DNA; mol_type = other DNA
aggaccccgcaggtgtttccg

SEQ ID NO: 21713 - DNA, 21 bp, synthetic construct
  source 1..21: mol_type = other DNA; mol_type = other DNA
gttggctcgacgaatggtgta

SEQ ID NO: 21714 - DNA, 21 bp, synthetic construct
  source 1..21: mol_type = other DNA; mol_type = other DNA
agaacgccgacagtttacccc

SEQ ID NO: 21715 - DNA, 21 bp, synthetic construct
  source 1..21: mol_type = other DNA; mol_type = other DNA
gttgattcgacgaatggtgtg

SEQ ID NO: 21716 - DNA, 21 bp, synthetic construct
  source 1..21: mol_type = other DNA; mol_type = other DNA
tactttacgggaacaaaggaa

SEQ ID NO: 21717 - DNA, 21 bp, synthetic construct
  source 1..21: mol_type = other DNA; mol_type = other DNA
aaatcagattttgtggtctat

SEQ ID NO: 21718 - DNA, 21 bp, synthetic construct
  source 1..21: mol_type = other DNA; mol_type = other DNA
ttaacgagaatttctcataat

SEQ ID NO: 21719 - DNA, 21 bp, synthetic construct
  source 1..21: mol_type = other DNA; mol_type = other DNA
ttacatgccaatctaccgaac

SEQ ID NO: 21720 - DNA, 21 bp, synthetic construct
  source 1..21: mol_type = other DNA; mol_type = other DNA
ttaaccagggtatcacccgac

SEQ ID NO: 21721 - DNA, 21 bp, synthetic construct
  source 1..21: mol_type = other DNA; mol_type = other DNA
gttatggaagctagagattgg

SEQ ID NO: 21722 - DNA, 21 bp, synthetic construct
  source 1..21: mol_type = other DNA; mol_type = other DNA
aagagcgacttcgtagtatac

SEQ ID NO: 21723 - DNA, 21 bp, synthetic construct
  source 1..21: mol_type = other DNA; mol_type = other DNA
aggtcggatttcgtcgtatat

SEQ ID NO: 21724 - DNA, 21 bp, synthetic construct
  source 1..21: mol_type = other DNA; mol_type = other DNA
gtgcaaagtacgaatgggatc

SEQ ID NO: 21725 - DNA, 21 bp, synthetic construct
  source 1..21: mol_type = other DNA; mol_type = other DNA
attcacaaattatccgctaat

SEQ ID NO: 21726 - DNA, 21 bp, synthetic construct
  source 1..21: mol_type = other DNA; mol_type = other DNA
ctagccaaaaacgggccaaac

SEQ ID NO: 21727 - DNA, 21 bp, synthetic construct
  source 1..21: mol_type = other DNA; mol_type = other DNA
ctccacaagttgcaaaccgat

SEQ ID NO: 21728 - DNA, 21 bp, synthetic construct
  source 1..21: mol_type = other DNA; mol_type = other DNA
tattttacgggtcacattgat

SEQ ID NO: 21729 - DNA, 21 bp, synthetic construct
  source 1..21: mol_type = other DNA; mol_type = other DNA
tatttcagcggcgtcaaagag

SEQ ID NO: 21730 - DNA, 21 bp, synthetic construct
  source 1..21: mol_type = other DNA; mol_type = other DNA
gtcgagagtacgaatggaatc

SEQ ID NO: 21731 - DNA, 21 bp, synthetic construct
  source 1..21: mol_type = other DNA; mol_type = other DNA
tgtaccaagccgtgctgtccg

SEQ ID NO: 21732 - DNA, 21 bp, synthetic construct
  source 1..21: mol_type = other DNA; mol_type = other DNA
cttcacaaaatgagcatgaat

SEQ ID NO: 21733 - DNA, 21 bp, synthetic construct
  source 1..21: mol_type = other DNA; mol_type = other DNA
agagaagacggcgttcgatgg

SEQ ID NO: 21734 - DNA, 21 bp, synthetic construct
  source 1..21: mol_type = other DNA; mol_type = other DNA
tatgtgaaaagcgaccatatg

SEQ ID NO: 21735 - DNA, 21 bp, synthetic construct
  source 1..21: mol_type = other DNA; mol_type = other DNA
gatatgggaagttcagtctgg

SEQ ID NO: 21736 - DNA, 21 bp, synthetic construct
  source 1..21: mol_type = other DNA; mol_type = other DNA
cgacttgaatcgagagagtgg

SEQ ID NO: 21737 - DNA, 21 bp, synthetic construct
  source 1..21: mol_type = other DNA; mol_type = other DNA
ctgcataagttgaaccctctt

SEQ ID NO: 21738 - DNA, 21 bp, synthetic construct
  source 1..21: mol_type = other DNA; mol_type = other DNA
tatgctaagactgggtataac

SEQ ID NO: 21739 - DNA, 21 bp, synthetic construct
  source 1..21: mol_type = other DNA; mol_type = other DNA
tatagcaaactggcgcccaat

SEQ ID NO: 21740 - DNA, 21 bp, synthetic construct
  source 1..21: mol_type = other DNA; mol_type = other DNA
tattcaaaaattggagaaaat

SEQ ID NO: 21741 - DNA, 21 bp, synthetic construct
  source 1..21: mol_type = other DNA; mol_type = other DNA
tatagtaaaatgaacttgaac

SEQ ID NO: 21742 - DNA, 21 bp, synthetic construct
  source 1..21: mol_type = other DNA; mol_type = other DNA
tatgcgaagactggggctaat

SEQ ID NO: 21743 - DNA, 21 bp, synthetic construct
  source 1..21: mol_type = other DNA; mol_type = other DNA
tactctaaagtgggtttaaac

SEQ ID NO: 21744 - DNA, 21 bp, synthetic construct
  source 1..21: mol_type = other DNA; mol_type = other DNA
cgagacgagttcatagcatgg

SEQ ID NO: 21745 - DNA, 21 bp, synthetic construct
  source 1..21: mol_type = other DNA; mol_type = other DNA
ttggcgagaactggagaaaat

SEQ ID NO: 21746 - DNA, 21 bp, synthetic construct
  source 1..21: mol_type = other DNA; mol_type = other DNA
tattcaaaattaagtatgaac

SEQ ID NO: 21747 - DNA, 21 bp, synthetic construct
  source 1..21: mol_type = other DNA; mol_type = other DNA
ctgtccaaggtaggggtgaac

SEQ ID NO: 21748 - DNA, 21 bp, synthetic construct
  source 1..21: mol_type = other DNA; mol_type = other DNA
tactccaagcaaggacctaat

SEQ ID NO: 21749 - DNA, 21 bp, synthetic construct
  source 1..21: mol_type = other DNA; mol_type = other DNA
tatataaaacacgacccgatg

SEQ ID NO: 21750 - DNA, 21 bp, synthetic construct
  source 1..21: mol_type = other DNA; mol_type = other DNA
ttgactaggcttagcgtagat

SEQ ID NO: 21751 - DNA, 21 bp, synthetic construct
  source 1..21: mol_type = other DNA; mol_type = other DNA
cgcgacgactttactacttgg

SEQ ID NO: 21752 - DNA, 21 bp, synthetic construct
  source 1..21: mol_type = other DNA; mol_type = other DNA
acggatagtaccaatggggtg

SEQ ID NO: 21753 - DNA, 21 bp, synthetic construct
  source 1..21: mol_type = other DNA; mol_type = other DNA
cctatggcttctcagcaatgg

SEQ ID NO: 21754 - DNA, 21 bp, synthetic construct
  source 1..21: mol_type = other DNA; mol_type = other DNA
aggaatctggatgtctttccc

SEQ ID NO: 21755 - DNA, 21 bp, synthetic construct
  source 1..21: mol_type = other DNA; mol_type = other DNA
ctccacaggctgggcgacaat

SEQ ID NO: 21756 - DNA, 21 bp, synthetic construct
  source 1..21: mol_type = other DNA; mol_type = other DNA
tacagtaaagtcgggagcaac

SEQ ID NO: 21757 - DNA, 21 bp, synthetic construct
  source 1..21: mol_type = other DNA; mol_type = other DNA
cgaggcccggaggtgtacccc

SEQ ID NO: 21758 - DNA, 21 bp, synthetic construct
  source 1..21: mol_type = other DNA; mol_type = other DNA
tatgtcaaatcccagcctggc

SEQ ID NO: 21759 - DNA, 21 bp, synthetic construct
  source 1..21: mol_type = other DNA; mol_type = other DNA
ttaagtcgggtagggattgac

SEQ ID NO: 21760 - DNA, 21 bp, synthetic construct
  source 1..21: mol_type = other DNA; mol_type = other DNA
gtaatgtccacaaatggggtc

SEQ ID NO: 21761 - DNA, 21 bp, synthetic construct
  source 1..21: mol_type = other DNA; mol_type = other DNA
ttgcacaggttgggctacgac

SEQ ID NO: 21762 - DNA, 21 bp, synthetic construct
  source 1..21: mol_type = other DNA; mol_type = other DNA
gatttagagagccggaagtgg

SEQ ID NO: 21763 - DNA, 21 bp, synthetic construct
  source 1..21: mol_type = other DNA; mol_type = other DNA
tactttacagggcaagttgag

SEQ ID NO: 21764 - DNA, 21 bp, synthetic construct
  source 1..21: mol_type = other DNA; mol_type = other DNA
ctcagtaaggtgggtcagaat

SEQ ID NO: 21765 - DNA, 21 bp, synthetic construct
  source 1..21: mol_type = other DNA; mol_type = other DNA
tatgttaagagtgatgttggt

SEQ ID NO: 21766 - DNA, 21 bp, synthetic construct
  source 1..21: mol_type = other DNA; mol_type = other DNA
agaggtccagatgtctatcct

SEQ ID NO: 21767 - DNA, 21 bp, synthetic construct
  source 1..21: mol_type = other DNA; mol_type = other DNA
gttttaagctctaacatctgg

SEQ ID NO: 21768 - DNA, 21 bp, synthetic construct
  source 1..21: mol_type = other DNA; mol_type = other DNA
tattccaaggctggttgtaac

SEQ ID NO: 21769 - DNA, 21 bp, synthetic construct
  source 1..21: mol_type = other DNA; mol_type = other DNA
gacctagctagtagagagtgg

SEQ ID NO: 21770 - DNA, 21 bp, synthetic construct
  source 1..21: mol_type = other DNA; mol_type = other DNA
tatagtaaactaggaagcaat

SEQ ID NO: 21771 - DNA, 21 bp, synthetic construct
  source 1..21: mol_type = other DNA; mol_type = other DNA
ctccatagattgggcgaagat

SEQ ID NO: 21772 - DNA, 21 bp, synthetic construct
  source 1..21: mol_type = other DNA; mol_type = other DNA
tatagcaagctcaatttgaac

SEQ ID NO: 21773 - DNA, 21 bp, synthetic construct
  source 1..21: mol_type = other DNA; mol_type = other DNA
tattttaccgggaagaaggag

SEQ ID NO: 21774 - DNA, 21 bp, synthetic construct
  source 1..21: mol_type = other DNA; mol_type = other DNA
gtgtcagactttaagatctac

SEQ ID NO: 21775 - DNA, 21 bp, synthetic construct
  source 1..21: mol_type = other DNA; mol_type = other DNA
acctcgtcaactaatggcgtc

SEQ ID NO: 21776 - DNA, 21 bp, synthetic construct
  source 1..21: mol_type = other DNA; mol_type = other DNA
aaaagcgaatttacaacttat

SEQ ID NO: 21777 - DNA, 21 bp, synthetic construct
  source 1..21: mol_type = other DNA; mol_type = other DNA
taccacaaactcaatcccatg

SEQ ID NO: 21778 - DNA, 21 bp, synthetic construct
  source 1..21: mol_type = other DNA; mol_type = other DNA
ttgcacaggttgagtttagat

SEQ ID NO: 21779 - DNA, 21 bp, synthetic construct
  source 1..21: mol_type = other DNA; mol_type = other DNA
ttattcgatgggactgcgagc

SEQ ID NO: 21780 - DNA, 21 bp, synthetic construct
  source 1..21: mol_type = other DNA; mol_type = other DNA
tattcgaaaatgggacctaac

SEQ ID NO: 21781 - DNA, 21 bp, synthetic construct
  source 1..21: mol_type = other DNA; mol_type = other DNA
tatgtcaagagtcaacaacta

SEQ ID NO: 21782 - DNA, 21 bp, synthetic construct
  source 1..21: mol_type = other DNA; mol_type = other DNA
gtcatgagcagcgccaattgg

SEQ ID NO: 21783 - DNA, 21 bp, synthetic construct
  source 1..21: mol_type = other DNA; mol_type = other DNA
atacttgcctcggcaacttgg

SEQ ID NO: 21784 - DNA, 21 bp, synthetic construct
  source 1..21: mol_type = other DNA; mol_type = other DNA
ttgagcagggtaggggcggat

SEQ ID NO: 21785 - DNA, 21 bp, synthetic construct
  source 1..21: mol_type = other DNA; mol_type = other DNA
ctgtgtaaaccgtgtcttact

SEQ ID NO: 21786 - DNA, 21 bp, synthetic construct
  source 1..21: mol_type = other DNA; mol_type = other DNA
tatagcaagaatggtcccaat

SEQ ID NO: 21787 - DNA, 21 bp, synthetic construct
  source 1..21: mol_type = other DNA; mol_type = other DNA
ctgtcccgattgagtcacgat

SEQ ID NO: 21788 - DNA, 21 bp, synthetic construct
  source 1..21: mol_type = other DNA; mol_type = other DNA
gttttaagttcaagccaatgg

SEQ ID NO: 21789 - DNA, 21 bp, synthetic construct
  source 1..21: mol_type = other DNA; mol_type = other DNA
tatttcaccggtgttatacaa

SEQ ID NO: 21790 - DNA, 21 bp, synthetic construct
  source 1..21: mol_type = other DNA; mol_type = other DNA
tattttactggaatacgggag

SEQ ID NO: 21791 - DNA, 21 bp, synthetic construct
  source 1..21: mol_type = other DNA; mol_type = other DNA
taccataagctcaataataat

SEQ ID NO: 21792 - DNA, 21 bp, synthetic construct
  source 1..21: mol_type = other DNA; mol_type = other DNA
ctgcacaagatgagcatgaac

SEQ ID NO: 21793 - DNA, 21 bp, synthetic construct
  source 1..21: mol_type = other DNA; mol_type = other DNA
ttgcacagattactaaaggac

SEQ ID NO: 21794 - DNA, 21 bp, synthetic construct
  source 1..21: mol_type = other DNA; mol_type = other DNA
ctacacaaaaatacagaaaat

SEQ ID NO: 21795 - DNA, 21 bp, synthetic construct
  source 1..21: mol_type = other DNA; mol_type = other DNA
ccgtgtggaccctgtacatat

SEQ ID NO: 21796 - DNA, 21 bp, synthetic construct
  source 1..21: mol_type = other DNA; mol_type = other DNA
tactccaagctaaatgccaat

SEQ ID NO: 21797 - DNA, 21 bp, synthetic construct
  source 1..21: mol_type = other DNA; mol_type = other DNA
tgtaaggacccctgctgtggt

SEQ ID NO: 21798 - DNA, 21 bp, synthetic construct
  source 1..21: mol_type = other DNA; mol_type = other DNA
aaaatggactccgtacggtgg

SEQ ID NO: 21799 - DNA, 21 bp, synthetic construct
  source 1..21: mol_type = other DNA; mol_type = other DNA
aggacagatgatgtctatcct

SEQ ID NO: 21800 - DNA, 21 bp, synthetic construct
  source 1..21: mol_type = other DNA; mol_type = other DNA
tactttagcggaattactgcg

SEQ ID NO: 21801 - DNA, 21 bp, synthetic construct
  source 1..21: mol_type = other DNA; mol_type = other DNA
tattcgaaaataggacagaac

SEQ ID NO: 21802 - DNA, 21 bp, synthetic construct
  source 1..21: mol_type = other DNA; mol_type = other DNA
ttatcgaagttgaacagcaac

SEQ ID NO: 21803 - DNA, 21 bp, synthetic construct
  source 1..21: mol_type = other DNA; mol_type = other DNA
tacctgaaaagtcaaggcaac

SEQ ID NO: 21804 - DNA, 21 bp, synthetic construct
  source 1..21: mol_type = other DNA; mol_type = other DNA
tatgttaaaagcgatcatcat

SEQ ID NO: 21805 - DNA, 21 bp, synthetic construct
  source 1..21: mol_type = other DNA; mol_type = other DNA
tatagcaaaattggtcataac

SEQ ID NO: 21806 - DNA, 21 bp, synthetic construct
  source 1..21: mol_type = other DNA; mol_type = other DNA
tatgtaaaaagtcaagcaggc

SEQ ID NO: 21807 - DNA, 21 bp, synthetic construct
  source 1..21: mol_type = other DNA; mol_type = other DNA
ctctcaaaaataggaccgaac

SEQ ID NO: 21808 - DNA, 21 bp, synthetic construct
  source 1..21: mol_type = other DNA; mol_type = other DNA
gatttgagttcttcacagtgg

SEQ ID NO: 21809 - DNA, 21 bp, synthetic construct
  source 1..21: mol_type = other DNA; mol_type = other DNA
ttaacgaggttaagtcataat

SEQ ID NO: 21810 - DNA, 21 bp, synthetic construct
  source 1..21: mol_type = other DNA; mol_type = other DNA
gacatgtccagccacaaatgg

SEQ ID NO: 21811 - DNA, 21 bp, synthetic construct
  source 1..21: mol_type = other DNA; mol_type = other DNA
ctatcgagagttggctatgac

SEQ ID NO: 21812 - DNA, 21 bp, synthetic construct
  source 1..21: mol_type = other DNA; mol_type = other DNA
aacgcactcaggggctgggac

SEQ ID NO: 21813 - DNA, 21 bp, synthetic construct
  source 1..21: mol_type = other DNA; mol_type = other DNA
gagttagctagtcgtgaatgg

SEQ ID NO: 21814 - DNA, 21 bp, synthetic construct
  source 1..21: mol_type = other DNA; mol_type = other DNA
agacttatggatgcttatcca

SEQ ID NO: 21815 - DNA, 21 bp, synthetic construct
  source 1..21: mol_type = other DNA; mol_type = other DNA
gttatggaaagcaggaaatgg

SEQ ID NO: 21816 - DNA, 21 bp, synthetic construct
  source 1..21: mol_type = other DNA; mol_type = other DNA
tattccaagctcaattataat

SEQ ID NO: 21817 - DNA, 21 bp, synthetic construct
  source 1..21: mol_type = other DNA; mol_type = other DNA
tttgccaaatcgggacccaac

SEQ ID NO: 21818 - DNA, 21 bp, synthetic construct
  source 1..21: mol_type = other DNA; mol_type = other DNA
ctgcatcgcctttcgctagac

SEQ ID NO: 21819 - DNA, 21 bp, synthetic construct
  source 1..21: mol_type = other DNA; mol_type = other DNA
ggtgatgaataccatagttac

SEQ ID NO: 21820 - DNA, 21 bp, synthetic construct
  source 1..21: mol_type = other DNA; mol_type = other DNA
ctgacgagactgcacatcgac

SEQ ID NO: 21821 - DNA, 21 bp, synthetic construct
  source 1..21: mol_type = other DNA; mol_type = other DNA
tacagcaagcttaacataaat

SEQ ID NO: 21822 - DNA, 21 bp, synthetic construct
  source 1..21: mol_type = other DNA; mol_type = other DNA
agagatgagacggtctaccct

SEQ ID NO: 21823 - DNA, 21 bp, synthetic construct
  source 1..21: mol_type = other DNA; mol_type = other DNA
cgaactgatacggtctaccct

SEQ ID NO: 21824 - DNA, 21 bp, synthetic construct
  source 1..21: mol_type = other DNA; mol_type = other DNA
agagacgagtttacgtcgttc

SEQ ID NO: 21825 - DNA, 21 bp, synthetic construct
  source 1..21: mol_type = other DNA; mol_type = other DNA
ttcagtaagttaaattacaac

SEQ ID NO: 21826 - DNA, 21 bp, synthetic construct
  source 1..21: mol_type = other DNA; mol_type = other DNA
tatagtaaagcgggggtaaat

SEQ ID NO: 21827 - DNA, 21 bp, synthetic construct
  source 1..21: mol_type = other DNA; mol_type = other DNA
attgctactaggggaataggg

SEQ ID NO: 21828 - DNA, 21 bp, synthetic construct
  source 1..21: mol_type = other DNA; mol_type = other DNA
cacgagagcacgaacggggtt

SEQ ID NO: 21829 - DNA, 21 bp, synthetic construct
  source 1..21: mol_type = other DNA; mol_type = other DNA
ttgcaccggctaggagacaat

SEQ ID NO: 21830 - DNA, 21 bp, synthetic construct
  source 1..21: mol_type = other DNA; mol_type = other DNA
aaggatgaattcaaatcgtgg

SEQ ID NO: 21831 - DNA, 21 bp, synthetic construct
  source 1..21: mol_type = other DNA; mol_type = other DNA
tactccaagttgggcctaaac

SEQ ID NO: 21832 - DNA, 21 bp, synthetic construct
  source 1..21: mol_type = other DNA; mol_type = other DNA
ctccacaggttaacgacggac

SEQ ID NO: 21833 - DNA, 21 bp, synthetic construct
  source 1..21: mol_type = other DNA; mol_type = other DNA
ctctcgagattgtcaagtgac

SEQ ID NO: 21834 - DNA, 21 bp, synthetic construct
  source 1..21: mol_type = other DNA; mol_type = other DNA
taccacaaactgaatcccttg

SEQ ID NO: 21835 - DNA, 21 bp, synthetic construct
  source 1..21: mol_type = other DNA; mol_type = other DNA
cgcacaccacaagtctttccg

SEQ ID NO: 21836 - DNA, 21 bp, synthetic construct
  source 1..21: mol_type = other DNA; mol_type = other DNA
aggggggacgatgtgtacccg

SEQ ID NO: 21837 - DNA, 21 bp, synthetic construct
  source 1..21: mol_type = other DNA; mol_type = other DNA
ttagcaaaaacaggccacaat

SEQ ID NO: 21838 - DNA, 21 bp, synthetic construct
  source 1..21: mol_type = other DNA; mol_type = other DNA
gtggagtcattcaatggtagg

SEQ ID NO: 21839 - DNA, 21 bp, synthetic construct
  source 1..21: mol_type = other DNA; mol_type = other DNA
ttgtcccgcacgtcggtgaat

SEQ ID NO: 21840 - DNA, 21 bp, synthetic construct
  source 1..21: mol_type = other DNA; mol_type = other DNA
ataacgtcaacaaacggaata

SEQ ID NO: 21841 - DNA, 21 bp, synthetic construct
  source 1..21: mol_type = other DNA; mol_type = other DNA
cgcggagacgatgtctttcct

SEQ ID NO: 21842 - DNA, 21 bp, synthetic construct
  source 1..21: mol_type = other DNA; mol_type = other DNA
tacagtaagttgaatgagatg

SEQ ID NO: 21843 - DNA, 21 bp, synthetic construct
  source 1..21: mol_type = other DNA; mol_type = other DNA
ctgagccgtttgtcaccgaat

SEQ ID NO: 21844 - DNA, 21 bp, synthetic construct
  source 1..21: mol_type = other DNA; mol_type = other DNA
gagatggacagtagaatgtgg

SEQ ID NO: 21845 - DNA, 21 bp, synthetic construct
  source 1..21: mol_type = other DNA; mol_type = other DNA
gtaatggagtcaagagactgg

SEQ ID NO: 21846 - DNA, 21 bp, synthetic construct
  source 1..21: mol_type = other DNA; mol_type = other DNA
cggggcgataacgtgtttcca

SEQ ID NO: 21847 - DNA, 21 bp, synthetic construct
  source 1..21: mol_type = other DNA; mol_type = other DNA
agagatgaaacatcccattgg

SEQ ID NO: 21848 - DNA, 21 bp, synthetic construct
  source 1..21: mol_type = other DNA; mol_type = other DNA
ataatgtctgcgagtaactgg

SEQ ID NO: 21849 - DNA, 21 bp, synthetic construct
  source 1..21: mol_type = other DNA; mol_type = other DNA
atgcacagattgctcccggat

SEQ ID NO: 21850 - DNA, 21 bp, synthetic construct
  source 1..21: mol_type = other DNA; mol_type = other DNA
ttacataggctctcccctcct

SEQ ID NO: 21851 - DNA, 21 bp, synthetic construct
  source 1..21: mol_type = other DNA; mol_type = other DNA
cccctcgatagtaggtcctgg

SEQ ID NO: 21852 - DNA, 21 bp, synthetic construct
  source 1..21: mol_type = other DNA; mol_type = other DNA
ataatggccagcgctaattgg

SEQ ID NO: 21853 - DNA, 21 bp, synthetic construct
  source 1..21: mol_type = other DNA; mol_type = other DNA
agagacgatttcacgatgtat

SEQ ID NO: 21854 - DNA, 21 bp, synthetic construct
  source 1..21: mol_type = other DNA; mol_type = other DNA
atccatagactgctctcagat

SEQ ID NO: 21855 - DNA, 21 bp, synthetic construct
  source 1..21: mol_type = other DNA; mol_type = other DNA
ctcacgcgtgtggccccaaac

SEQ ID NO: 21856 - DNA, 21 bp, synthetic construct
  source 1..21: mol_type = other DNA; mol_type = other DNA
ttgcaccggttgatggaagac

SEQ ID NO: 21857 - DNA, 21 bp, synthetic construct
  source 1..21: mol_type = other DNA; mol_type = other DNA
gtaagttccactaatggagta

SEQ ID NO: 21858 - DNA, 21 bp, synthetic construct
  source 1..21: mol_type = other DNA; mol_type = other DNA
ttgcacaaaaagggggagaat

SEQ ID NO: 21859 - DNA, 21 bp, synthetic construct
  source 1..21: mol_type = other DNA; mol_type = other DNA
cgcggggagtcagtttacccc

SEQ ID NO: 21860 - DNA, 21 bp, synthetic construct
  source 1..21: mol_type = other DNA; mol_type = other DNA
tactcaaaacttaacggcaac

SEQ ID NO: 21861 - DNA, 21 bp, synthetic construct
  source 1..21: mol_type = other DNA; mol_type = other DNA
acttcagagaacgtctacttc

SEQ ID NO: 21862 - DNA, 21 bp, synthetic construct
  source 1..21: mol_type = other DNA; mol_type = other DNA
tacttcacaggatttatggac

SEQ ID NO: 21863 - DNA, 21 bp, synthetic construct
  source 1..21: mol_type = other DNA; mol_type = other DNA
tacgtaaaatcacaaatgatg

SEQ ID NO: 21864 - DNA, 21 bp, synthetic construct
  source 1..21: mol_type = other DNA; mol_type = other DNA
cctatggaaagcgttaagtgg

SEQ ID NO: 21865 - DNA, 21 bp, synthetic construct
  source 1..21: mol_type = other DNA; mol_type = other DNA
tattttgcgggtataaaagag

SEQ ID NO: 21866 - DNA, 21 bp, synthetic construct
  source 1..21: mol_type = other DNA; mol_type = other DNA
agaggcgaaacagtataccct

SEQ ID NO: 21867 - DNA, 21 bp, synthetic construct
  source 1..21: mol_type = other DNA; mol_type = other DNA
tatgcaaaatcgggcgagaac

SEQ ID NO: 21868 - DNA, 21 bp, synthetic construct
  source 1..21: mol_type = other DNA; mol_type = other DNA
acaagttctaccaacggtgta

SEQ ID NO: 21869 - DNA, 21 bp, synthetic construct
  source 1..21: mol_type = other DNA; mol_type = other DNA
tatgcaaagacggggatgaat

SEQ ID NO: 21870 - DNA, 21 bp, synthetic construct
  source 1..21: mol_type = other DNA; mol_type = other DNA
gtgatggaaagcagtaaatgg

SEQ ID NO: 21871 - DNA, 21 bp, synthetic construct
  source 1..21: mol_type = other DNA; mol_type = other DNA
tactttacgggcattcatgca

SEQ ID NO: 21872 - DNA, 21 bp, synthetic construct
  source 1..21: mol_type = other DNA; mol_type = other DNA
ctttctagagtgtctgacaat

SEQ ID NO: 21873 - DNA, 21 bp, synthetic construct
  source 1..21: mol_type = other DNA; mol_type = other DNA
tacgcaaaaaacggaccgaat

SEQ ID NO: 21874 - DNA, 21 bp, synthetic construct
  source 1..21: mol_type = other DNA; mol_type = other DNA
ttacaccgtttgagcgacccc

SEQ ID NO: 21875 - DNA, 21 bp, synthetic construct
  source 1..21: mol_type = other DNA; mol_type = other DNA
gatctttcatcacagaagtgg

SEQ ID NO: 21876 - DNA, 21 bp, synthetic construct
  source 1..21: mol_type = other DNA; mol_type = other DNA
cgaacggacacggtttaccct

SEQ ID NO: 21877 - DNA, 21 bp, synthetic construct
  source 1..21: mol_type = other DNA; mol_type = other DNA
tatcataaactcaataataac

SEQ ID NO: 21878 - DNA, 21 bp, synthetic construct
  source 1..21: mol_type = other DNA; mol_type = other DNA
tactcaaaattgaatggtaac

SEQ ID NO: 21879 - DNA, 21 bp, synthetic construct
  source 1..21: mol_type = other DNA; mol_type = other DNA
tactcgaaagtaggagacaac

SEQ ID NO: 21880 - DNA, 21 bp, synthetic construct
  source 1..21: mol_type = other DNA; mol_type = other DNA
ttaactaggttgcatacggat

SEQ ID NO: 21881 - DNA, 21 bp, synthetic construct
  source 1..21: mol_type = other DNA; mol_type = other DNA
atgagagacggtacgccagcc

SEQ ID NO: 21882 - DNA, 21 bp, synthetic construct
  source 1..21: mol_type = other DNA; mol_type = other DNA
cgcgaggatggtgtccggtgg

SEQ ID NO: 21883 - DNA, 21 bp, synthetic construct
  source 1..21: mol_type = other DNA; mol_type = other DNA
cgaaagttagacgtatacccc

SEQ ID NO: 21884 - DNA, 21 bp, synthetic construct
  source 1..21: mol_type = other DNA; mol_type = other DNA
agactagagtctgcagtatgg

SEQ ID NO: 21885 - DNA, 21 bp, synthetic construct
  source 1..21: mol_type = other DNA; mol_type = other DNA
cttcgcgacgggacgcctgct

SEQ ID NO: 21886 - DNA, 21 bp, synthetic construct
  source 1..21: mol_type = other DNA; mol_type = other DNA
tacgtgaaatcccaaccgact

SEQ ID NO: 21887 - DNA, 21 bp, synthetic construct
  source 1..21: mol_type = other DNA; mol_type = other DNA
actaacagtacgaatggcgtt

SEQ ID NO: 21888 - DNA, 21 bp, synthetic construct
  source 1..21: mol_type = other DNA; mol_type = other DNA
cggagccttgatgtctaccct

SEQ ID NO: 21889 - DNA, 21 bp, synthetic construct
  source 1..21: mol_type = other DNA; mol_type = other DNA
ttaagtcgagttggccacgac

SEQ ID NO: 21890 - DNA, 21 bp, synthetic construct
  source 1..21: mol_type = other DNA; mol_type = other DNA
tatttcactggtgtggtcgga

SEQ ID NO: 21891 - DNA, 21 bp, synthetic construct
  source 1..21: mol_type = other DNA; mol_type = other DNA
cgggacgaatttacggcttgg

SEQ ID NO: 21892 - DNA, 21 bp, synthetic construct
  source 1..21: mol_type = other DNA; mol_type = other DNA
tctgagtctactaatggtcgg

SEQ ID NO: 21893 - DNA, 21 bp, synthetic construct
  source 1..21: mol_type = other DNA; mol_type = other DNA
taccacaaaaagcaggagaat

SEQ ID NO: 21894 - DNA, 21 bp, synthetic construct
  source 1..21: mol_type = other DNA; mol_type = other DNA
cgaggtccagaaatatatccc

SEQ ID NO: 21895 - DNA, 21 bp, synthetic construct
  source 1..21: mol_type = other DNA; mol_type = other DNA
gacttaacgagcgctaagtgg

SEQ ID NO: 21896 - DNA, 21 bp, synthetic construct
  source 1..21: mol_type = other DNA; mol_type = other DNA
cccgaaagtacgaacgggaga

SEQ ID NO: 21897 - DNA, 21 bp, synthetic construct
  source 1..21: mol_type = other DNA; mol_type = other DNA
ctatgtaaaccttgcaataca

SEQ ID NO: 21898 - DNA, 21 bp, synthetic construct
  source 1..21: mol_type = other DNA; mol_type = other DNA
gtcgcggaaaaaggatgggac

SEQ ID NO: 21899 - DNA, 21 bp, synthetic construct
  source 1..21: mol_type = other DNA; mol_type = other DNA
gtcgacagtactaatggaaga

SEQ ID NO: 21900 - DNA, 21 bp, synthetic construct
  source 1..21: mol_type = other DNA; mol_type = other DNA
cgcgaggatggagtctcttgg

SEQ ID NO: 21901 - DNA, 21 bp, synthetic construct
  source 1..21: mol_type = other DNA; mol_type = other DNA
cgtactcccgtggtgtatccg

SEQ ID NO: 21902 - DNA, 21 bp, synthetic construct
  source 1..21: mol_type = other DNA; mol_type = other DNA
tacttcagtggtgtaaaagcg

SEQ ID NO: 21903 - DNA, 21 bp, synthetic construct
  source 1..21: mol_type = other DNA; mol_type = other DNA
tacgtcaagagtgatatgcgc

SEQ ID NO: 21904 - DNA, 21 bp, synthetic construct
  source 1..21: mol_type = other DNA; mol_type = other DNA
tactttactgggataatggag

SEQ ID NO: 21905 - DNA, 21 bp, synthetic construct
  source 1..21: mol_type = other DNA; mol_type = other DNA
tacgcgaaaatgggaccaaac

SEQ ID NO: 21906 - DNA, 21 bp, synthetic construct
  source 1..21: mol_type = other DNA; mol_type = other DNA
gttttcagcaccaacggcatc

SEQ ID NO: 21907 - DNA, 21 bp, synthetic construct
  source 1..21: mol_type = other DNA; mol_type = other DNA
gagatggcaagcatcaaatgg

SEQ ID NO: 21908 - DNA, 21 bp, synthetic construct
  source 1..21: mol_type = other DNA; mol_type = other DNA
atgttcgacggaacatccgct

SEQ ID NO: 21909 - DNA, 21 bp, synthetic construct
  source 1..21: mol_type = other DNA; mol_type = other DNA
ggttcagaattttcgacgtgg

SEQ ID NO: 21910 - DNA, 21 bp, synthetic construct
  source 1..21: mol_type = other DNA; mol_type = other DNA
tactccaaactctcgatgaac

SEQ ID NO: 21911 - DNA, 21 bp, synthetic construct
  source 1..21: mol_type = other DNA; mol_type = other DNA
cttgcaagacaatcatacaac

SEQ ID NO: 21912 - DNA, 21 bp, synthetic construct
  source 1..21: mol_type = other DNA; mol_type = other DNA
ctctctcggttatcaccagat

SEQ ID NO: 21913 - DNA, 21 bp, synthetic construct
  source 1..21: mol_type = other DNA; mol_type = other DNA
taccatgccgctggccccaac

SEQ ID NO: 21914 - DNA, 21 bp, synthetic construct
  source 1..21: mol_type = other DNA; mol_type = other DNA
gacctcaggagtgcgaactgg

SEQ ID NO: 21915 - DNA, 21 bp, synthetic construct
  source 1..21: mol_type = other DNA; mol_type = other DNA
tacgtaaagtctgactcgcac

SEQ ID NO: 21916 - DNA, 21 bp, synthetic construct
  source 1..21: mol_type = other DNA; mol_type = other DNA
ttagcgaaaacggctccgaac

SEQ ID NO: 21917 - DNA, 21 bp, synthetic construct
  source 1..21: mol_type = other DNA; mol_type = other DNA
gcaggcggcgggttgtatgta

SEQ ID NO: 21918 - DNA, 21 bp, synthetic construct
  source 1..21: mol_type = other DNA; mol_type = other DNA
tattctaaggccggctctaat

SEQ ID NO: 21919 - DNA, 21 bp, synthetic construct
  source 1..21: mol_type = other DNA; mol_type = other DNA
aggttgacggatgcttacccc

SEQ ID NO: 21920 - DNA, 21 bp, synthetic construct
  source 1..21: mol_type = other DNA; mol_type = other DNA
tatttcactggtcagaaagaa

SEQ ID NO: 21921 - DNA, 21 bp, synthetic construct
  source 1..21: mol_type = other DNA; mol_type = other DNA
gacatgcagagcagcacatgg

SEQ ID NO: 21922 - DNA, 21 bp, synthetic construct
  source 1..21: mol_type = other DNA; mol_type = other DNA
ttatcgcgtattagtttcaat

SEQ ID NO: 21923 - DNA, 21 bp, synthetic construct
  source 1..21: mol_type = other DNA; mol_type = other DNA
tatagcaagctcaacgggaat

SEQ ID NO: 21924 - DNA, 21 bp, synthetic construct
  source 1..21: mol_type = other DNA; mol_type = other DNA
ctttcaagagtgggaatagat

SEQ ID NO: 21925 - DNA, 21 bp, synthetic construct
  source 1..21: mol_type = other DNA; mol_type = other DNA
gatttgaccagccgtgattgg

SEQ ID NO: 21926 - DNA, 21 bp, synthetic construct
  source 1..21: mol_type = other DNA; mol_type = other DNA
tacttcgctggtaagaaggac

SEQ ID NO: 21927 - DNA, 21 bp, synthetic construct
  source 1..21: mol_type = other DNA; mol_type = other DNA
ttacatcgcttgggcccaaac

SEQ ID NO: 21928 - DNA, 21 bp, synthetic construct
  source 1..21: mol_type = other DNA; mol_type = other DNA
aacattcctgggatgatgtat

SEQ ID NO: 21929 - DNA, 21 bp, synthetic construct
  source 1..21: mol_type = other DNA; mol_type = other DNA
ctcatgactgatcgaacttgg

SEQ ID NO: 21930 - DNA, 21 bp, synthetic construct
  source 1..21: mol_type = other DNA; mol_type = other DNA
agggacgacttcaccaccttt

SEQ ID NO: 21931 - DNA, 21 bp, synthetic construct
  source 1..21: mol_type = other DNA; mol_type = other DNA
agagaagaacatgtgttccca

SEQ ID NO: 21932 - DNA, 21 bp, synthetic construct
  source 1..21: mol_type = other DNA; mol_type = other DNA
aggacagacgtagtctatccg

SEQ ID NO: 21933 - DNA, 21 bp, synthetic construct
  source 1..21: mol_type = other DNA; mol_type = other DNA
gatttgaggagtgtcacctgg

SEQ ID NO: 21934 - DNA, 21 bp, synthetic construct
  source 1..21: mol_type = other DNA; mol_type = other DNA
ctatgtaagccgtgtagtacc

SEQ ID NO: 21935 - DNA, 21 bp, synthetic construct
  source 1..21: mol_type = other DNA; mol_type = other DNA
cgtgaagacttttcagcgtgg

SEQ ID NO: 21936 - DNA, 21 bp, synthetic construct
  source 1..21: mol_type = other DNA; mol_type = other DNA
tttcataagttaggctcaaac

SEQ ID NO: 21937 - DNA, 21 bp, synthetic construct
  source 1..21: mol_type = other DNA; mol_type = other DNA
tacttcacgggtattagagaa

SEQ ID NO: 21938 - DNA, 21 bp, synthetic construct
  source 1..21: mol_type = other DNA; mol_type = other DNA
gtcgctgagggattgaggtgg

SEQ ID NO: 21939 - DNA, 21 bp, synthetic construct
  source 1..21: mol_type = other DNA; mol_type = other DNA
aaggatgattatactaccttc

SEQ ID NO: 21940 - DNA, 21 bp, synthetic construct
  source 1..21: mol_type = other DNA; mol_type = other DNA
ttttcaaaactaaacgacaac

SEQ ID NO: 21941 - DNA, 21 bp, synthetic construct
  source 1..21: mol_type = other DNA; mol_type = other DNA
gtaatggaggcacgggactgg

SEQ ID NO: 21942 - DNA, 21 bp, synthetic construct
  source 1..21: mol_type = other DNA; mol_type = other DNA
tatttctcgggtattacagca

SEQ ID NO: 21943 - DNA, 21 bp, synthetic construct
  source 1..21: mol_type = other DNA; mol_type = other DNA
aggacaaacgaagtgtttcca

SEQ ID NO: 21944 - DNA, 21 bp, synthetic construct
  source 1..21: mol_type = other DNA; mol_type = other DNA
tatattaagagtgataaaatg

SEQ ID NO: 21945 - DNA, 21 bp, synthetic construct
  source 1..21: mol_type = other DNA; mol_type = other DNA
agattagacgacgtatttcct

SEQ ID NO: 21946 - DNA, 21 bp, synthetic construct
  source 1..21: mol_type = other DNA; mol_type = other DNA
ttacatagactgcaagataat

SEQ ID NO: 21947 - DNA, 21 bp, synthetic construct
  source 1..21: mol_type = other DNA; mol_type = other DNA
tacttcacaggaaaagtagcc

SEQ ID NO: 21948 - DNA, 21 bp, synthetic construct
  source 1..21: mol_type = other DNA; mol_type = other DNA
tatgctaaaactggcaataat

SEQ ID NO: 21949 - DNA, 21 bp, synthetic construct
  source 1..21: mol_type = other DNA; mol_type = other DNA
aggggtgtcgacgtatatcct

SEQ ID NO: 21950 - DNA, 21 bp, synthetic construct
  source 1..21: mol_type = other DNA; mol_type = other DNA
taccacaagttgaacgcaaat

SEQ ID NO: 21951 - DNA, 21 bp, synthetic construct
  source 1..21: mol_type = other DNA; mol_type = other DNA
ctctcccgaattagtacgaac

SEQ ID NO: 21952 - DNA, 21 bp, synthetic construct
  source 1..21: mol_type = other DNA; mol_type = other DNA
tacagtaagatgaatgtgaac

SEQ ID NO: 21953 - DNA, 21 bp, synthetic construct
  source 1..21: mol_type = other DNA; mol_type = other DNA
tacttttccggtatcgtagag

SEQ ID NO: 21954 - DNA, 21 bp, synthetic construct
  source 1..21: mol_type = other DNA; mol_type = other DNA
tatcatgccaaggggctcaat

SEQ ID NO: 21955 - DNA, 21 bp, synthetic construct
  source 1..21: mol_type = other DNA; mol_type = other DNA
aatgctttacgcggatgggat

SEQ ID NO: 21956 - DNA, 21 bp, synthetic construct
  source 1..21: mol_type = other DNA; mol_type = other DNA
ttctccaaggtgggaccgaat

SEQ ID NO: 21957 - DNA, 21 bp, synthetic construct
  source 1..21: mol_type = other DNA; mol_type = other DNA
aaagatgagttcgtatcatat

SEQ ID NO: 21958 - DNA, 21 bp, synthetic construct
  source 1..21: mol_type = other DNA; mol_type = other DNA
gatctgacttctgcaaaatgg

SEQ ID NO: 21959 - DNA, 21 bp, synthetic construct
  source 1..21: mol_type = other DNA; mol_type = other DNA
cgagacgagttcgtgagttat

SEQ ID NO: 21960 - DNA, 21 bp, synthetic construct
  source 1..21: mol_type = other DNA; mol_type = other DNA
ctccacagattatctgtgaac

SEQ ID NO: 21961 - DNA, 21 bp, synthetic construct
  source 1..21: mol_type = other DNA; mol_type = other DNA
gtaacttcatcgaacggaata

SEQ ID NO: 21962 - DNA, 21 bp, synthetic construct
  source 1..21: mol_type = other DNA; mol_type = other DNA
agggaagaagatgtgtaccct

SEQ ID NO: 21963 - DNA, 21 bp, synthetic construct
  source 1..21: mol_type = other DNA; mol_type = other DNA
tatagcaggcttcttccagat

SEQ ID NO: 21964 - DNA, 21 bp, synthetic construct
  source 1..21: mol_type = other DNA; mol_type = other DNA
agggaggatagcgtttattgg

SEQ ID NO: 21965 - DNA, 21 bp, synthetic construct
  source 1..21: mol_type = other DNA; mol_type = other DNA
acattgggttgtccggatcgg

SEQ ID NO: 21966 - DNA, 21 bp, synthetic construct
  source 1..21: mol_type = other DNA; mol_type = other DNA
tatgcgaggactgggccggat

SEQ ID NO: 21967 - DNA, 21 bp, synthetic construct
  source 1..21: mol_type = other DNA; mol_type = other DNA
attgcacaggtaggatgggat

SEQ ID NO: 21968 - DNA, 21 bp, synthetic construct
  source 1..21: mol_type = other DNA; mol_type = other DNA
gttgccacgaaaggtataggg

SEQ ID NO: 21969 - DNA, 21 bp, synthetic construct
  source 1..21: mol_type = other DNA; mol_type = other DNA
ttgtgcaagccatgccacacg

SEQ ID NO: 21970 - DNA, 21 bp, synthetic construct
  source 1..21: mol_type = other DNA; mol_type = other DNA
ataacatcgactaacgggcgt

SEQ ID NO: 21971 - DNA, 21 bp, synthetic construct
  source 1..21: mol_type = other DNA; mol_type = other DNA
ttttcgaaattgaacgcgaat

SEQ ID NO: 21972 - DNA, 21 bp, synthetic construct
  source 1..21: mol_type = other DNA; mol_type = other DNA
aggctagaatcttccagctgg

SEQ ID NO: 21973 - DNA, 21 bp, synthetic construct
  source 1..21: mol_type = other DNA; mol_type = other DNA
tacatcaagagccagccgggc

SEQ ID NO: 21974 - DNA, 21 bp, synthetic construct
  source 1..21: mol_type = other DNA; mol_type = other DNA
atgcataagctttcagagaat

SEQ ID NO: 21975 - DNA, 21 bp, synthetic construct
  source 1..21: mol_type = other DNA; mol_type = other DNA
tattttaccggagtaaccgag

SEQ ID NO: 21976 - DNA, 21 bp, synthetic construct
  source 1..21: mol_type = other DNA
tatgtgaaaagccaacctcta

SEQ ID NO: 21977 - DNA, 21 bp, synthetic construct
  source 1..21: mol_type = other DNA; mol_type = other DNA
taccacaagttgaacaacaat

SEQ ID NO: 21978 - DNA, 21 bp, synthetic construct
  source 1..21: mol_type = other DNA; mol_type = other DNA
tatttttctggaatagtagct

SEQ ID NO: 21979 - DNA, 21 bp, synthetic construct
  source 1..21: mol_type = other DNA; mol_type = other DNA
gatatgggaagctcgacgtgg

SEQ ID NO: 21980 - DNA, 21 bp, synthetic construct
  source 1..21: mol_type = other DNA; mol_type = other DNA
ttatgtaagccgagccttacc

SEQ ID NO: 21981 - DNA, 21 bp, synthetic construct
  source 1..21: mol_type = other DNA; mol_type = other DNA
tattttagtaagattattgcc

SEQ ID NO: 21982 - DNA, 21 bp, synthetic construct
  source 1..21: mol_type = other DNA; mol_type = other DNA
tactttacgggacaaaaggag

SEQ ID NO: 21983 - DNA, 21 bp, synthetic construct
  source 1..21: mol_type = other DNA; mol_type = other DNA
tacctgaagagtcaacagagc

SEQ ID NO: 21984 - DNA, 21 bp, synthetic construct
  source 1..21: mol_type = other DNA; mol_type = other DNA
tacttaaagagccaaacgagc

SEQ ID NO: 21985 - DNA, 21 bp, synthetic construct
  source 1..21: mol_type = other DNA; mol_type = other DNA
ggaggccttgggtcgcactgg

SEQ ID NO: 21986 - DNA, 21 bp, synthetic construct
  source 1..21: mol_type = other DNA; mol_type = other DNA
tattttacagggcaaaaagag

SEQ ID NO: 21987 - DNA, 21 bp, synthetic construct
  source 1..21: mol_type = other DNA; mol_type = other DNA
agggaagaaggcgtcagctgg

SEQ ID NO: 21988 - DNA, 21 bp, synthetic construct
  source 1..21: mol_type = other DNA; mol_type = other DNA
agatcagatgtcgtttacccg

SEQ ID NO: 21989 - DNA, 21 bp, synthetic construct
  source 1..21: mol_type = other DNA; mol_type = other DNA
tactctaaattgaatctcaat

SEQ ID NO: 21990 - DNA, 21 bp, synthetic construct
  source 1..21: mol_type = other DNA; mol_type = other DNA
tacatcaagggggactataaa

SEQ ID NO: 21991 - DNA, 21 bp, synthetic construct
  source 1..21: mol_type = other DNA; mol_type = other DNA
gacatgggttcgagcacatgg

SEQ ID NO: 21992 - DNA, 21 bp, synthetic construct
  source 1..21: mol_type = other DNA; mol_type = other DNA
tatagtaagttaagcatgaac

SEQ ID NO: 21993 - DNA, 21 bp, synthetic construct
  source 1..21: mol_type = other DNA; mol_type = other DNA
attatggagagtgctacgtgg

SEQ ID NO: 21994 - DNA, 21 bp, synthetic construct
  source 1..21: mol_type = other DNA; mol_type = other DNA
ctgtgtaagccgtgtaacact

SEQ ID NO: 21995 - DNA, 21 bp, synthetic construct
  source 1..21: mol_type = other DNA; mol_type = other DNA
gtgaagtcgacaaatggagtt

SEQ ID NO: 21996 - DNA, 21 bp, synthetic construct
  source 1..21: mol_type = other DNA; mol_type = other DNA
aaattggacgattatggttgg

SEQ ID NO: 21997 - DNA, 21 bp, synthetic construct
  source 1..21: mol_type = other DNA; mol_type = other DNA
tacagtaaggcccaaccgaac

SEQ ID NO: 21998 - DNA, 21 bp, synthetic construct
  source 1..21: mol_type = other DNA; mol_type = other DNA
cgcgaggaggacgtttatccg

SEQ ID NO: 21999 - DNA, 21 bp, synthetic construct
  source 1..21: mol_type = other DNA; mol_type = other DNA
cctatgggaagcagtagttgg

SEQ ID NO: 22000 - DNA, 21 bp, synthetic construct
  source 1..21: mol_type = other DNA; mol_type = other DNA
tactttaccgggcacatggat

SEQ ID NO: 22001 - DNA, 21 bp, synthetic construct
  source 1..21: mol_type = other DNA; mol_type = other DNA
ccgtacgcaaaatctcccatg

SEQ ID NO: 22002 - DNA, 21 bp, synthetic construct
  source 1..21: mol_type = other DNA; mol_type = other DNA
gtgagtagttcaaatggagta

SEQ ID NO: 22003 - DNA, 21 bp, synthetic construct
  source 1..21: mol_type = other DNA; mol_type = other DNA
agaggcgaggatgtatatcca

SEQ ID NO: 22004 - DNA, 21 bp, synthetic construct
  source 1..21: mol_type = other DNA; mol_type = other DNA
ttgcacgtcaggctgaataat

SEQ ID NO: 22005 - DNA, 21 bp, synthetic construct
  source 1..21: mol_type = other DNA; mol_type = other DNA
gtaacgagcacaaatggcatt

SEQ ID NO: 22006 - DNA, 21 bp, synthetic construct
  source 1..21: mol_type = other DNA; mol_type = other DNA
atgttcgatggaacgatggcc

SEQ ID NO: 22007 - DNA, 21 bp, synthetic construct
  source 1..21: mol_type = other DNA; mol_type = other DNA
cgggaagaaaccgtcaggtgg

SEQ ID NO: 22008 - DNA, 21 bp, synthetic construct
  source 1..21: mol_type = other DNA; mol_type = other DNA
ttgcaccgcttaggtatggac

SEQ ID NO: 22009 - DNA, 21 bp, synthetic construct
  source 1..21: mol_type = other DNA; mol_type = other DNA
cgcacggcagatgcgtatccg

SEQ ID NO: 22010 - DNA, 21 bp, synthetic construct
  source 1..21: mol_type = other DNA; mol_type = other DNA
ttacataagttacagccggat

SEQ ID NO: 22011 - DNA, 21 bp, synthetic construct
  source 1..21: mol_type = other DNA; mol_type = other DNA
aacatggcgtcgcatacctgg

SEQ ID NO: 22012 - DNA, 21 bp, synthetic construct
  source 1..21: mol_type = other DNA; mol_type = other DNA
tatttcagcggaatcgtggca

SEQ ID NO: 22013 - DNA, 21 bp, synthetic construct
  source 1..21: mol_type = other DNA; mol_type = other DNA
cgcttagagtctgccatgtgg

SEQ ID NO: 22014 - DNA, 21 bp, synthetic construct
  source 1..21: mol_type = other DNA; mol_type = other DNA
ttgtgtcgtccctgctcagcc

SEQ ID NO: 22015 - DNA, 21 bp, synthetic construct
  source 1..21: mol_type = other DNA; mol_type = other DNA
tatgtcagaagtgacacggga

SEQ ID NO: 22016 - DNA, 21 bp, synthetic construct
  source 1..21: mol_type = other DNA; mol_type = other DNA
cttacgcgtgtagctcctaat

SEQ ID NO: 22017 - DNA, 21 bp, synthetic construct
  source 1..21: mol_type = other DNA; mol_type = other DNA
tattttacaggcgtgaaagat

SEQ ID NO: 22018 - DNA, 21 bp, synthetic construct
  source 1..21: mol_type = other DNA; mol_type = other DNA
agggacgagttcacggggtat

SEQ ID NO: 22019 - DNA, 21 bp, synthetic construct
  source 1..21: mol_type = other DNA; mol_type = other DNA
cttacgcgtctccacacagac

SEQ ID NO: 22020 - DNA, 21 bp, synthetic construct
  source 1..21: mol_type = other DNA; mol_type = other DNA
tacgtgaaaagtcagaatgga

SEQ ID NO: 22021 - DNA, 21 bp, synthetic construct
  source 1..21: mol_type = other DNA; mol_type = other DNA
tattctaaatcagggctaaat

SEQ ID NO: 22022 - DNA, 21 bp, synthetic construct
  source 1..21: mol_type = other DNA; mol_type = other DNA
gatctgactgcacgaaactgg

SEQ ID NO: 22023 - DNA, 21 bp, synthetic construct
  source 1..21: mol_type = other DNA; mol_type = other DNA
tatgtcaagagccagatgatg

SEQ ID NO: 22024 - DNA, 21 bp, synthetic construct
  source 1..21: mol_type = other DNA; mol_type = other DNA
cgtgatgattttacggcctat

SEQ ID NO: 22025 - DNA, 21 bp, synthetic construct
  source 1..21: mol_type = other DNA; mol_type = other DNA
atagagagcacaaacggacga

SEQ ID NO: 22026 - DNA, 21 bp, synthetic construct
  source 1..21: mol_type = other DNA; mol_type = other DNA
attatgagctcgcacggctgg

SEQ ID NO: 22027 - DNA, 21 bp, synthetic construct
  source 1..21: mol_type = other DNA; mol_type = other DNA
gaaatgaaagccaggacctgg

SEQ ID NO: 22028 - DNA, 21 bp, synthetic construct
  source 1..21: mol_type = other DNA; mol_type = other DNA
attctttccagtagtagttgg

SEQ ID NO: 22029 - DNA, 21 bp, synthetic construct
  source 1..21: mol_type = other DNA; mol_type = other DNA
gttaccagcactaacggtgta

SEQ ID NO: 22030 - DNA, 21 bp, synthetic construct
  source 1..21: mol_type = other DNA; mol_type = other DNA
tatgtcaagagtcagccgcta

SEQ ID NO: 22031 - DNA, 21 bp, synthetic construct
  source 1..21: mol_type = other DNA; mol_type = other DNA
tacttttcgggcaaagtcgag

SEQ ID NO: 22032 - DNA, 21 bp, synthetic construct
  source 1..21: mol_type = other DNA; mol_type = other DNA
acagaatcaacccacgggaga

SEQ ID NO: 22033 - DNA, 21 bp, synthetic construct
  source 1..21: mol_type = other DNA; mol_type = other DNA
tatgtgaaaagccagaatatg

SEQ ID NO: 22034 - DNA, 21 bp, synthetic construct
  source 1..21: mol_type = other DNA; mol_type = other DNA
ttgtatgacggcacatcagct

SEQ ID NO: 22035 - DNA, 21 bp, synthetic construct
  source 1..21: mol_type = other DNA; mol_type = other DNA
atagcgtcgctcggatgggat

SEQ ID NO: 22036 - DNA, 21 bp, synthetic construct
  source 1..21: mol_type = other DNA; mol_type = other DNA
gttgggacgaaaggatgggat

SEQ ID NO: 22037 - DNA, 21 bp, synthetic construct
  source 1..21: mol_type = other DNA; mol_type = other DNA
tatcttaaatcacaacagact

SEQ ID NO: 22038 - DNA, 21 bp, synthetic construct
  source 1..21: mol_type = other DNA; mol_type = other DNA
aagatgtcttcgtcgacatgg

SEQ ID NO: 22039 - DNA, 21 bp, synthetic construct
  source 1..21: mol_type = other DNA; mol_type = other DNA
tactcaaaggtgggctttaat

SEQ ID NO: 22040 - DNA, 21 bp, synthetic construct
  source 1..21: mol_type = other DNA; mol_type = other DNA
tatagtaagattggaaacaat

SEQ ID NO: 22041 - DNA, 21 bp, synthetic construct
  source 1..21: mol_type = other DNA; mol_type = other DNA
tatgcgaaaagtggtcaaaac

SEQ ID NO: 22042 - DNA, 21 bp, synthetic construct
  source 1..21: mol_type = other DNA; mol_type = other DNA
attcagtcgactaacggggtc

SEQ ID NO: 22043 - DNA, 21 bp, synthetic construct
  source 1..21: mol_type = other DNA; mol_type = other DNA
ctacatcgactgctccatgac

SEQ ID NO: 22044 - DNA, 21 bp, synthetic construct
  source 1..21: mol_type = other DNA; mol_type = other DNA
gtttcgtccagcaacggcgtc

SEQ ID NO: 22045 - DNA, 21 bp, synthetic construct
  source 1..21: mol_type = other DNA; mol_type = other DNA
ctctctcgtattggtcacgat

SEQ ID NO: 22046 - DNA, 21 bp, synthetic construct
  source 1..21: mol_type = other DNA; mol_type = other DNA
tatgtcaaaagtcaaccaatc

SEQ ID NO: 22047 - DNA, 21 bp, synthetic construct
  source 1..21: mol_type = other DNA; mol_type = other DNA
actgaaagtaccaacggtata

SEQ ID NO: 22048 - DNA, 21 bp, synthetic construct
  source 1..21: mol_type = other DNA; mol_type = other DNA
tacagtaagttggggtataac

SEQ ID NO: 22049 - DNA, 21 bp, synthetic construct
  source 1..21: mol_type = other DNA; mol_type = other DNA
tacgcgaaaagtggagtgaat

SEQ ID NO: 22050 - DNA, 21 bp, synthetic construct
  source 1..21: mol_type = other DNA; mol_type = other DNA
tacgttaagtcacagccgatt

SEQ ID NO: 22051 - DNA, 21 bp, synthetic construct
  source 1..21: mol_type = other DNA; mol_type = other DNA
tacttcacaggtaaaaaagaa

SEQ ID NO: 22052 - DNA, 21 bp, synthetic construct
  source 1..21: mol_type = other DNA; mol_type = other DNA
tactccaaggccaacgtcaat

SEQ ID NO: 22053 - DNA, 21 bp, synthetic construct
  source 1..21: mol_type = other DNA; mol_type = other DNA
tatttcactggtatccacgcg

SEQ ID NO: 22054 - DNA, 21 bp, synthetic construct
  source 1..21: mol_type = other DNA; mol_type = other DNA
aacagcttagagggccgtgat

SEQ ID NO: 22055 - DNA, 21 bp, synthetic construct
  source 1..21: mol_type = other DNA; mol_type = other DNA
agggaagagggtgtcgcatgg

SEQ ID NO: 22056 - DNA, 21 bp, synthetic construct
  source 1..21: mol_type = other DNA; mol_type = other DNA
aaagacgattttacgatgtac

SEQ ID NO: 22057 - DNA, 21 bp, synthetic construct
  source 1..21: mol_type = other DNA; mol_type = other DNA
tatcataaactaaactccaac

SEQ ID NO: 22058 - DNA, 21 bp, synthetic construct
  source 1..21: mol_type = other DNA; mol_type = other DNA
catcacaaattgggggaaaat

SEQ ID NO: 22059 - DNA, 21 bp, synthetic construct
  source 1..21: mol_type = other DNA; mol_type = other DNA
ttgtctcggataggcgacaat

SEQ ID NO: 22060 - DNA, 21 bp, synthetic construct
  source 1..21: mol_type = other DNA; mol_type = other DNA
agggaggtagacgtgttccct

SEQ ID NO: 22061 - DNA, 21 bp, synthetic construct
  source 1..21: mol_type = other DNA; mol_type = other DNA
aggatgattgatgcctatccg

SEQ ID NO: 22062 - DNA, 21 bp, synthetic construct
  source 1..21: mol_type = other DNA; mol_type = other DNA
ttgcacaggttgggccaagat

SEQ ID NO: 22063 - DNA, 21 bp, synthetic construct
  source 1..21: mol_type = other DNA; mol_type = other DNA
ctatgcaaaccctgtttaagt

SEQ ID NO: 22064 - DNA, 21 bp, synthetic construct
  source 1..21: mol_type = other DNA; mol_type = other DNA
gtcatgtcgtcacagctctgg

SEQ ID NO: 22065 - DNA, 21 bp, synthetic construct
  source 1..21: mol_type = other DNA; mol_type = other DNA
tatgttaaaagcgataatgca

SEQ ID NO: 22066 - DNA, 21 bp, synthetic construct
  source 1..21: mol_type = other DNA; mol_type = other DNA
ttccataagttgagccccgtt

SEQ ID NO: 22067 - DNA, 21 bp, synthetic construct
  source 1..21: mol_type = other DNA; mol_type = other DNA
ctcagcaaattaaattctaat

SEQ ID NO: 22068 - DNA, 21 bp, synthetic construct
  source 1..21: mol_type = other DNA; mol_type = other DNA
gttagcgagttcaccacttat

SEQ ID NO: 22069 - DNA, 21 bp, synthetic construct
  source 1..21: mol_type = other DNA; mol_type = other DNA
gtcatgtcgactaatggcaga

SEQ ID NO: 22070 - DNA, 21 bp, synthetic construct
  source 1..21: mol_type = other DNA; mol_type = other DNA
gcacttgagagcaggacgtgg

SEQ ID NO: 22071 - DNA, 21 bp, synthetic construct
  source 1..21: mol_type = other DNA; mol_type = other DNA
ttgcaccgggccggtccggat

SEQ ID NO: 22072 - DNA, 21 bp, synthetic construct
  source 1..21: mol_type = other DNA; mol_type = other DNA
tacgcgaaagctggtccaaac

SEQ ID NO: 22073 - DNA, 21 bp, synthetic construct
  source 1..21: mol_type = other DNA; mol_type = other DNA
agaatggaagacgcgtacccc

SEQ ID NO: 22074 - DNA, 21 bp, synthetic construct
  source 1..21: mol_type = other DNA; mol_type = other DNA
gtaggacacaaggggtgggat

SEQ ID NO: 22075 - DNA, 21 bp, synthetic construct
  source 1..21: mol_type = other DNA; mol_type = other DNA
ttttcaaaacttaatactaat

SEQ ID NO: 22076 - DNA, 21 bp, synthetic construct
  source 1..21: mol_type = other DNA; mol_type = other DNA
gtgagcgaatttaaagtctat

SEQ ID NO: 22077 - DNA, 21 bp, synthetic construct
  source 1..21: mol_type = other DNA; mol_type = other DNA
aggggagctgacgtgtatccc

SEQ ID NO: 22078 - DNA, 21 bp, synthetic construct
  source 1..21: mol_type = other DNA; mol_type = other DNA
cttcataagctccaagttgat

SEQ ID NO: 22079 - DNA, 21 bp, synthetic construct
  source 1..21: mol_type = other DNA; mol_type = other DNA
cttgctaagaccgcccctaat

SEQ ID NO: 22080 - DNA, 21 bp, synthetic construct
  source 1..21: mol_type = other DNA; mol_type = other DNA
tattttacggggcataccgat

SEQ ID NO: 22081 - DNA, 21 bp, synthetic construct
  source 1..21: mol_type = other DNA; mol_type = other DNA
agtgaaagcaccaacggccgg

SEQ ID NO: 22082 - DNA, 21 bp, synthetic construct
  source 1..21: mol_type = other DNA; mol_type = other DNA
tacgtaaagtctcagccattg

SEQ ID NO: 22083 - DNA, 21 bp, synthetic construct
  source 1..21: mol_type = other DNA; mol_type = other DNA
tattcgaaagcaggagagaac

SEQ ID NO: 22084 - DNA, 21 bp, synthetic construct
  source 1..21: mol_type = other DNA; mol_type = other DNA
ttccacaagttgggtagtaat

SEQ ID NO: 22085 - DNA, 21 bp, synthetic construct
  source 1..21: mol_type = other DNA; mol_type = other DNA
ttacaccggctaagccccctg

SEQ ID NO: 22086 - DNA, 21 bp, synthetic construct
  source 1..21: mol_type = other DNA; mol_type = other DNA
tacttcactgggcatatagac

SEQ ID NO: 22087 - DNA, 21 bp, synthetic construct
  source 1..21: mol_type = other DNA; mol_type = other DNA
aaggacgaatttgtgagttac

SEQ ID NO: 22088 - DNA, 21 bp, synthetic construct
  source 1..21: mol_type = other DNA; mol_type = other DNA
ttgtgtaaaccgtgtatgacg

SEQ ID NO: 22089 - DNA, 21 bp, synthetic construct
  source 1..21: mol_type = other DNA; mol_type = other DNA
tactccaaagcggggataaac

SEQ ID NO: 22090 - DNA, 21 bp, synthetic construct
  source 1..21: mol_type = other DNA; mol_type = other DNA
taccacaagttagcgaacaac

SEQ ID NO: 22091 - DNA, 21 bp, synthetic construct
  source 1..21: mol_type = other DNA; mol_type = other DNA
tattccaagattggtactaac

SEQ ID NO: 22092 - DNA, 21 bp, synthetic construct
  source 1..21: mol_type = other DNA; mol_type = other DNA
tcatcctcgacaaatggggta

SEQ ID NO: 22093 - DNA, 21 bp, synthetic construct
  source 1..21: mol_type = other DNA; mol_type = other DNA
ctttctcgcgtaagcatcaat

SEQ ID NO: 22094 - DNA, 21 bp, synthetic construct
  source 1..21: mol_type = other DNA; mol_type = other DNA
tactttaccggcaaactcgat

SEQ ID NO: 22095 - DNA, 21 bp, synthetic construct
  source 1..21: mol_type = other DNA; mol_type = other DNA
gaaatggccagtagagattgg

SEQ ID NO: 22096 - DNA, 21 bp, synthetic construct
  source 1..21: mol_type = other DNA; mol_type = other DNA
tatgtaaagtcgcaacagcat

SEQ ID NO: 22097 - DNA, 21 bp, synthetic construct
  source 1..21: mol_type = other DNA; mol_type = other DNA
ttacacagtaagctccccaat

SEQ ID NO: 22098 - DNA, 21 bp, synthetic construct
  source 1..21: mol_type = other DNA; mol_type = other DNA
tattttagtaaaatcaaagaa

SEQ ID NO: 22099 - DNA, 21 bp, synthetic construct
  source 1..21: mol_type = other DNA; mol_type = other DNA
tatttcatgggcaaaatagca

SEQ ID NO: 22100 - DNA, 21 bp, synthetic construct
  source 1..21: mol_type = other DNA; mol_type = other DNA
ttctccaaactgaacttgaat

SEQ ID NO: 22101 - DNA, 21 bp, synthetic construct
  source 1..21: mol_type = other DNA; mol_type = other DNA
aatatggcaagtgccaaatgg

SEQ ID NO: 22102 - DNA, 21 bp, synthetic construct
  source 1..21: mol_type = other DNA; mol_type = other DNA
cctatgagcagttcgtcttgg

SEQ ID NO: 22103 - DNA, 21 bp, synthetic construct
  source 1..21: mol_type = other DNA; mol_type = other DNA
tatttcaccgggaaaacggaa

SEQ ID NO: 22104 - DNA, 21 bp, synthetic construct
  source 1..21: mol_type = other DNA; mol_type = other DNA
cgtgcccttgacgggtgggac

SEQ ID NO: 22105 - DNA, 21 bp, synthetic construct
  source 1..21: mol_type = other DNA; mol_type = other DNA
gatttgtcgagctcaagctgg

SEQ ID NO: 22106 - DNA, 21 bp, synthetic construct
  source 1..21: mol_type = other DNA; mol_type = other DNA
ttttcgaaattaaacaacaat

SEQ ID NO: 22107 - DNA, 21 bp, synthetic construct
  source 1..21: mol_type = other DNA; mol_type = other DNA
tacgcgaaaaatggggcaaat

SEQ ID NO: 22108 - DNA, 21 bp, synthetic construct
  source 1..21: mol_type = other DNA; mol_type = other DNA
tacttttcagggattgtagcc

SEQ ID NO: 22109 - DNA, 21 bp, synthetic construct
  source 1..21: mol_type = other DNA; mol_type = other DNA
atcgaatcgacgaacgggagg

SEQ ID NO: 22110 - DNA, 21 bp, synthetic construct
  source 1..21: mol_type = other DNA; mol_type = other DNA
tacagtgtaatagggcctaac

SEQ ID NO: 22111 - DNA, 21 bp, synthetic construct
  source 1..21: mol_type = other DNA; mol_type = other DNA
tacgttaagtcagaccaccac

SEQ ID NO: 22112 - DNA, 21 bp, synthetic construct
  source 1..21: mol_type = other DNA; mol_type = other DNA
agagaagaaatggtgcgttgg

SEQ ID NO: 22113 - DNA, 21 bp, synthetic construct
  source 1..21: mol_type = other DNA; mol_type = other DNA
cttagtaggttaaatgataat

SEQ ID NO: 22114 - DNA, 21 bp, synthetic construct
  source 1..21: mol_type = other DNA; mol_type = other DNA
acggctagtacaaatggtgtg

SEQ ID NO: 22115 - DNA, 21 bp, synthetic construct
  source 1..21: mol_type = other DNA; mol_type = other DNA
tatagcaagcttggtacaaat

SEQ ID NO: 22116 - DNA, 21 bp, synthetic construct
  source 1..21: mol_type = other DNA; mol_type = other DNA
gtcttttcaacgaatggtatt

SEQ ID NO: 22117 - DNA, 21 bp, synthetic construct
  source 1..21: mol_type = other DNA; mol_type = other DNA
gcgggaggtggactttacgtg

SEQ ID NO: 22118 - DNA, 21 bp, synthetic construct
  source 1..21: mol_type = other DNA; mol_type = other DNA
ttctcgaaactcaaccccaat

SEQ ID NO: 22119 - DNA, 21 bp, synthetic construct
  source 1..21: mol_type = other DNA; mol_type = other DNA
ttaagccgggctgcccctaat

SEQ ID NO: 22120 - DNA, 21 bp, synthetic construct
  source 1..21: mol_type = other DNA; mol_type = other DNA
tacttcacgggtgtcatggag

SEQ ID NO: 22121 - DNA, 21 bp, synthetic construct
  source 1..21: mol_type = other DNA; mol_type = other DNA
gtgagttcgacgaatggccgg

SEQ ID NO: 22122 - DNA, 21 bp, synthetic construct
  source 1..21: mol_type = other DNA; mol_type = other DNA
cgcagcgaattcctcgcgttt

SEQ ID NO: 22123 - DNA, 21 bp, synthetic construct
  source 1..21: mol_type = other DNA; mol_type = other DNA
gtaatgagcgaccgcatctgg

SEQ ID NO: 22124 - DNA, 21 bp, synthetic construct
  source 1..21: mol_type = other DNA; mol_type = other DNA
ccaatgggtagtgctatgtgg

SEQ ID NO: 22125 - DNA, 21 bp, synthetic construct
  source 1..21: mol_type = other DNA; mol_type = other DNA
tatgttaagtcaaacaataac

SEQ ID NO: 22126 - DNA, 21 bp, synthetic construct
  source 1..21: mol_type = other DNA; mol_type = other DNA
tattccaaacttggggacaat

SEQ ID NO: 22127 - DNA, 21 bp, synthetic construct
  source 1..21: mol_type = other DNA; mol_type = other DNA
tacttcactggacagaaggaa

SEQ ID NO: 22128 - DNA, 21 bp, synthetic construct
  source 1..21: mol_type = other DNA; mol_type = other DNA
ggtgatgagttcgtccattgg

SEQ ID NO: 22129 - DNA, 21 bp, synthetic construct
  source 1..21: mol_type = other DNA; mol_type = other DNA
cgagaggaggacgtttaccct

SEQ ID NO: 22130 - DNA, 21 bp, synthetic construct
  source 1..21: mol_type = other DNA; mol_type = other DNA
tatcataagttaaacccactc

SEQ ID NO: 22131 - DNA, 21 bp, synthetic construct
  source 1..21: mol_type = other DNA; mol_type = other DNA
cgcggacctgacgtatacccc

SEQ ID NO: 22132 - DNA, 21 bp, synthetic construct
  source 1..21: mol_type = other DNA; mol_type = other DNA
aaggacgatttccacgtgtgg

SEQ ID NO: 22133 - DNA, 21 bp, synthetic construct
  source 1..21: mol_type = other DNA; mol_type = other DNA
tatttcactgggatacacgag

SEQ ID NO: 22134 - DNA, 21 bp, synthetic construct
  source 1..21: mol_type = other DNA; mol_type = other DNA
atgcgcgatggaacccccgct

SEQ ID NO: 22135 - DNA, 21 bp, synthetic construct
  source 1..21: mol_type = other DNA; mol_type = other DNA
aaagacgacttttgtacattt

SEQ ID NO: 22136 - DNA, 21 bp, synthetic construct
  source 1..21: mol_type = other DNA; mol_type = other DNA
ataccttcagatagactatgg

SEQ ID NO: 22137 - DNA, 21 bp, synthetic construct
  source 1..21: mol_type = other DNA; mol_type = other DNA
atcatgactagcagggactgg

SEQ ID NO: 22138 - DNA, 21 bp, synthetic construct
  source 1..21: mol_type = other DNA; mol_type = other DNA
ttgtccaggatcagtaccaat

SEQ ID NO: 22139 - DNA, 21 bp, synthetic construct
  source 1..21: mol_type = other DNA; mol_type = other DNA
aggacggacaccgtgtatccc

SEQ ID NO: 22140 - DNA, 21 bp, synthetic construct
  source 1..21: mol_type = other DNA; mol_type = other DNA
aaggatgacttccacacgtat

SEQ ID NO: 22141 - DNA, 21 bp, synthetic construct
  source 1..21: mol_type = other DNA; mol_type = other DNA
cgggaagacttcgtaacctgg

SEQ ID NO: 22142 - DNA, 21 bp, synthetic construct
  source 1..21: mol_type = other DNA; mol_type = other DNA
agtagcagcactaacggagtt

SEQ ID NO: 22143 - DNA, 21 bp, synthetic construct
  source 1..21: mol_type = other DNA; mol_type = other DNA
tatagtaaactcaacacaaat

SEQ ID NO: 22144 - DNA, 21 bp, synthetic construct
  source 1..21: mol_type = other DNA; mol_type = other DNA
tacgtgcgctcggataaggga

SEQ ID NO: 22145 - DNA, 21 bp, synthetic construct
  source 1..21: mol_type = other DNA; mol_type = other DNA
cgtacaccccaagtcttccca

SEQ ID NO: 22146 - DNA, 21 bp, synthetic construct
  source 1..21: mol_type = other DNA; mol_type = other DNA
gatttgagaagtgcggcgtgg

SEQ ID NO: 22147 - DNA, 21 bp, synthetic construct
  source 1..21: mol_type = other DNA; mol_type = other DNA
tacacacgtcttgatccatta

SEQ ID NO: 22148 - DNA, 21 bp, synthetic construct
  source 1..21: mol_type = other DNA; mol_type = other DNA
tattcaaaaatgaatattaat

SEQ ID NO: 22149 - DNA, 21 bp, synthetic construct
  source 1..21: mol_type = other DNA; mol_type = other DNA
tattttagtggaatccaagaa

SEQ ID NO: 22150 - DNA, 21 bp, synthetic construct
  source 1..21: mol_type = other DNA; mol_type = other DNA
tactttactggcaagctcgaa

SEQ ID NO: 22151 - DNA, 21 bp, synthetic construct
  source 1..21: mol_type = other DNA; mol_type = other DNA
gtggcaagcagagggtgggac

SEQ ID NO: 22152 - DNA, 21 bp, synthetic construct
  source 1..21: mol_type = other DNA; mol_type = other DNA
tacttcaccggcaaaatagat

SEQ ID NO: 22153 - DNA, 21 bp, synthetic construct
  source 1..21: mol_type = other DNA; mol_type = other DNA
tatcttaagtcacagatctat

SEQ ID NO: 22154 - DNA, 21 bp, synthetic construct
  source 1..21: mol_type = other DNA; mol_type = other DNA
ctatccaaggtaggacataat

SEQ ID NO: 22155 - DNA, 21 bp, synthetic construct
  source 1..21: mol_type = other DNA; mol_type = other DNA
tattttactgggaagaccgag

SEQ ID NO: 22156 - DNA, 21 bp, synthetic construct
  source 1..21: mol_type = other DNA; mol_type = other DNA
cgcagcgatttcgttgcattt

SEQ ID NO: 22157 - DNA, 21 bp, synthetic construct
  source 1..21: mol_type = other DNA; mol_type = other DNA
atcacgagtacaaatggcaga

SEQ ID NO: 22158 - DNA, 21 bp, synthetic construct
  source 1..21: mol_type = other DNA; mol_type = other DNA
ttctctaagattcagacggaa

SEQ ID NO: 22159 - DNA, 21 bp, synthetic construct
  source 1..21: mol_type = other DNA; mol_type = other DNA
ctaagtcgtctatccccaatt

SEQ ID NO: 22160 - DNA, 21 bp, synthetic construct
  source 1..21: mol_type = other DNA; mol_type = other DNA
gtatcggaatttgagatctac

SEQ ID NO: 22161 - DNA, 21 bp, synthetic construct
  source 1..21: mol_type = other DNA; mol_type = other DNA
cggaccagtgatgtattccct

SEQ ID NO: 22162 - DNA, 21 bp, synthetic construct
  source 1..21: mol_type = other DNA; mol_type = other DNA
cttcatagagcaggccccgac

SEQ ID NO: 22163 - DNA, 21 bp, synthetic construct
  source 1..21: mol_type = other DNA; mol_type = other DNA
cgcttaatggacgcctatcca

SEQ ID NO: 22164 - DNA, 21 bp, synthetic construct
  source 1..21: mol_type = other DNA; mol_type = other DNA
tatttcaccggcatgaaggag

SEQ ID NO: 22165 - DNA, 21 bp, synthetic construct
  source 1..21: mol_type = other DNA; mol_type = other DNA
tactcaaaattgtctatgaat

SEQ ID NO: 22166 - DNA, 21 bp, synthetic construct
  source 1..21: mol_type = other DNA; mol_type = other DNA
gatttgtcaagtcacaactgg

SEQ ID NO: 22167 - DNA, 21 bp, synthetic construct
  source 1..21: mol_type = other DNA; mol_type = other DNA
tacagcaagctgtcaatgaac

SEQ ID NO: 22168 - DNA, 21 bp, synthetic construct
  source 1..21: mol_type = other DNA; mol_type = other DNA
cgtgggacagatgtcttccct

SEQ ID NO: 22169 - DNA, 21 bp, synthetic construct
  source 1..21: mol_type = other DNA; mol_type = other DNA
gttgttagtaccaatgggatt

SEQ ID NO: 22170 - DNA, 21 bp, synthetic construct
  source 1..21: mol_type = other DNA; mol_type = other DNA
tactctaagaagaatgagaat

SEQ ID NO: 22171 - DNA, 21 bp, synthetic construct
  source 1..21: mol_type = other DNA; mol_type = other DNA
cgcgaggaggtcagcatatgg

SEQ ID NO: 22172 - DNA, 21 bp, synthetic construct
  source 1..21: mol_type = other DNA; mol_type = other DNA
gttgcgactgaaggcagagat

SEQ ID NO: 22173 - DNA, 21 bp, synthetic construct
  source 1..21: mol_type = other DNA; mol_type = other DNA
ctgcataaattatcctccgat

SEQ ID NO: 22174 - DNA, 21 bp, synthetic construct
  source 1..21: mol_type = other DNA; mol_type = other DNA
tacgtaaggtctgcgcccggc

SEQ ID NO: 22175 - DNA, 21 bp, synthetic construct
  source 1..21: mol_type = other DNA; mol_type = other DNA
ctctcacgggtcggtcaaaac

SEQ ID NO: 22176 - DNA, 21 bp, synthetic construct
  source 1..21: mol_type = other DNA; mol_type = other DNA
ttttccaagcttaacgaaaat

SEQ ID NO: 22177 - DNA, 21 bp, synthetic construct
  source 1..21: mol_type = other DNA; mol_type = other DNA
aggttgtacgacgcgattcct

SEQ ID NO: 22178 - DNA, 21 bp, synthetic construct
  source 1..21: mol_type = other DNA; mol_type = other DNA
ctcgctaagacaggcttcaac

SEQ ID NO: 22179 - DNA, 21 bp, synthetic construct
  source 1..21: mol_type = other DNA; mol_type = other DNA
tatgccaagaccggtataaat

SEQ ID NO: 22180 - DNA, 21 bp, synthetic construct
  source 1..21: mol_type = other DNA; mol_type = other DNA
tattttactggcgtgatggaa

SEQ ID NO: 22181 - DNA, 21 bp, synthetic construct
  source 1..21: mol_type = other DNA; mol_type = other DNA
aaaatggcagaccgtcaatgg

SEQ ID NO: 22182 - DNA, 21 bp, synthetic construct
  source 1..21: mol_type = other DNA; mol_type = other DNA
gtggttagcacaaatgggagg

SEQ ID NO: 22183 - DNA, 21 bp, synthetic construct
  source 1..21: mol_type = other DNA; mol_type = other DNA
cgggatgagtttcatagttac

SEQ ID NO: 22184 - DNA, 21 bp, synthetic construct
  source 1..21: mol_type = other DNA; mol_type = other DNA
ctatcccgtcttagccaggac

SEQ ID NO: 22185 - DNA, 21 bp, synthetic construct
  source 1..21: mol_type = other DNA; mol_type = other DNA
tatcataagttgaatcataat

SEQ ID NO: 22186 - DNA, 21 bp, synthetic construct
  source 1..21: mol_type = other DNA; mol_type = other DNA
aaggatgacttcaccatgtat

SEQ ID NO: 22187 - DNA, 21 bp, synthetic construct
  source 1..21: mol_type = other DNA; mol_type = other DNA
ctatgtcgcccgtgctcgacc

SEQ ID NO: 22188 - DNA, 21 bp, synthetic construct
  source 1..21: mol_type = other DNA; mol_type = other DNA
agaatgctagatgcgtaccca

SEQ ID NO: 22189 - DNA, 21 bp, synthetic construct
  source 1..21: mol_type = other DNA; mol_type = other DNA
tatagtaaggtacagactaat

SEQ ID NO: 22190 - DNA, 21 bp, synthetic construct
  source 1..21: mol_type = other DNA; mol_type = other DNA
tatgcgaaacagggtccgaac

SEQ ID NO: 22191 - DNA, 21 bp, synthetic construct
  source 1..21: mol_type = other DNA; mol_type = other DNA
gtagggttggagggaagggat

SEQ ID NO: 22192 - DNA, 21 bp, synthetic construct
  source 1..21: mol_type = other DNA; mol_type = other DNA
tattcaaaaataggcgcgaac

SEQ ID NO: 22193 - DNA, 21 bp, synthetic construct
  source 1..21: mol_type = other DNA; mol_type = other DNA
tatttcatgggtgttaaggaa

SEQ ID NO: 22194 - DNA, 21 bp, synthetic construct
  source 1..21: mol_type = other DNA; mol_type = other DNA
ttgtgtaagccctgcctcaac

SEQ ID NO: 22195 - DNA, 21 bp, synthetic construct
  source 1..21: mol_type = other DNA; mol_type = other DNA
attactagcacgaatggtatt

SEQ ID NO: 22196 - DNA, 21 bp, synthetic construct
  source 1..21: mol_type = other DNA; mol_type = other DNA
ctacatcgcctcacaactgat

SEQ ID NO: 22197 - DNA, 21 bp, synthetic construct
  source 1..21: mol_type = other DNA; mol_type = other DNA
tattggaccggacttcatgaa

SEQ ID NO: 22198 - DNA, 21 bp, synthetic construct
  source 1..21: mol_type = other DNA; mol_type = other DNA
ctgtcgaagattggggtgaat

SEQ ID NO: 22199 - DNA, 21 bp, synthetic construct
  source 1..21: mol_type = other DNA; mol_type = other DNA
tatgtgagaagtgatacgggg

SEQ ID NO: 22200 - DNA, 21 bp, synthetic construct
  source 1..21: mol_type = other DNA; mol_type = other DNA
ttttcaaagatacaaaccgag

SEQ ID NO: 22201 - DNA, 21 bp, synthetic construct
  source 1..21: mol_type = other DNA; mol_type = other DNA
cgtggcgatgacgtgtatcca

SEQ ID NO: 22202 - DNA, 21 bp, synthetic construct
  source 1..21: mol_type = other DNA
atcttaagtgatcgtaactgg

SEQ ID NO: 22203 - DNA, 21 bp, synthetic construct
  source 1..21: mol_type = other DNA
gggggagagggttcttcgtgg

SEQ ID NO: 22204 - DNA, 21 bp, synthetic construct
  source 1..21: mol_type = other DNA
attttgagctccagagactgg

SEQ ID NO: 22205 - DNA, 21 bp, synthetic construct
  source 1..21: mol_type = other DNA; mol_type = other DNA
gttcttagcaccaacgggatc

SEQ ID NO: 22206 - DNA, 21 bp, synthetic construct
  source 1..21: mol_type = other DNA; mol_type = other DNA
agagaggactacgtacactgg

SEQ ID NO: 22207 - DNA, 21 bp, synthetic construct
  source 1..21: mol_type = other DNA; mol_type = other DNA
ctccacaggctcgggcctaat

SEQ ID NO: 22208 - DNA, 21 bp, synthetic construct
  source 1..21: mol_type = other DNA; mol_type = other DNA
cgtggtgataccgtctaccca

SEQ ID NO: 22209 - DNA, 21 bp, synthetic construct
  source 1..21: mol_type = other DNA; mol_type = other DNA
agatcattagacgtttatccc

SEQ ID NO: 22210 - DNA, 21 bp, synthetic construct
  source 1..21: mol_type = other DNA; mol_type = other DNA
cgaggcccccaagtcttccca

SEQ ID NO: 22211 - DNA, 21 bp, synthetic construct
  source 1..21: mol_type = other DNA; mol_type = other DNA
atgctaagttcacagacttgg

SEQ ID NO: 22212 - DNA, 21 bp, synthetic construct
  source 1..21: mol_type = other DNA; mol_type = other DNA
taccataaagctggagaaaac

SEQ ID NO: 22213 - DNA, 21 bp, synthetic construct
  source 1..21: mol_type = other DNA; mol_type = other DNA
attatggaatcacgtaactgg

SEQ ID NO: 22214 - DNA, 21 bp, synthetic construct
  source 1..21: mol_type = other DNA; mol_type = other DNA
agaaatgacgttgtatacccg

SEQ ID NO: 22215 - DNA, 21 bp, synthetic construct
  source 1..21: mol_type = other DNA; mol_type = other DNA
tatcacgcgaaacaattaaac

SEQ ID NO: 22216 - DNA, 21 bp, synthetic construct
  source 1..21: mol_type = other DNA; mol_type = other DNA
gtctcatcgactaacggtatc

SEQ ID NO: 22217 - DNA, 21 bp, synthetic construct
  source 1..21: mol_type = other DNA; mol_type = other DNA
ataatgagtagttcgatgtgg

SEQ ID NO: 22218 - DNA, 21 bp, synthetic construct
  source 1..21: mol_type = other DNA; mol_type = other DNA
tgtaacccatctgtgtatcgg

SEQ ID NO: 22219 - DNA, 21 bp, synthetic construct
  source 1..21: mol_type = other DNA; mol_type = other DNA
cgagggatagatttctatccc

SEQ ID NO: 22220 - DNA, 21 bp, synthetic construct
  source 1..21: mol_type = other DNA; mol_type = other DNA
cttaccagattgtcagttgac

SEQ ID NO: 22221 - DNA, 21 bp, synthetic construct
  source 1..21: mol_type = other DNA; mol_type = other DNA
attatggcttcgcacggatgg

SEQ ID NO: 22222 - DNA, 21 bp, synthetic construct
  source 1..21: mol_type = other DNA; mol_type = other DNA
attgaatccagagaggggata

SEQ ID NO: 22223 - DNA, 21 bp, synthetic construct
  source 1..21: mol_type = other DNA; mol_type = other DNA
tacagtaagttgaatcagaac

SEQ ID NO: 22224 - DNA, 21 bp, synthetic construct
  source 1..21: mol_type = other DNA; mol_type = other DNA
agggaggacggtgtcaaatgg

SEQ ID NO: 22225 - DNA, 21 bp, synthetic construct
  source 1..21: mol_type = other DNA; mol_type = other DNA
ttgtgcaaaccttgcggcaca

SEQ ID NO: 22226 - DNA, 21 bp, synthetic construct
  source 1..21: mol_type = other DNA; mol_type = other DNA
tatgcgaagaccggtagcaac

SEQ ID NO: 22227 - DNA, 21 bp, synthetic construct
  source 1..21: mol_type = other DNA; mol_type = other DNA
tatagtaagattggaagcaac

SEQ ID NO: 22228 - DNA, 21 bp, synthetic construct
  source 1..21: mol_type = other DNA; mol_type = other DNA
gttcacagtacgaatggtatt

SEQ ID NO: 22229 - DNA, 21 bp, synthetic construct
  source 1..21: mol_type = other DNA; mol_type = other DNA
tactttacagggcaaaaagag

SEQ ID NO: 22230 - DNA, 21 bp, synthetic construct
  source 1..21: mol_type = other DNA; mol_type = other DNA
ttacttcagtcgtcaacctgg

SEQ ID NO: 22231 - DNA, 21 bp, synthetic construct
  source 1..21: mol_type = other DNA; mol_type = other DNA
cttagcaaaataggaattaat

SEQ ID NO: 22232 - DNA, 21 bp, synthetic construct
  source 1..21: mol_type = other DNA; mol_type = other DNA
ttacatcgcctatcaatggat

SEQ ID NO: 22233 - DNA, 21 bp, synthetic construct
  source 1..21: mol_type = other DNA; mol_type = other DNA
acaaaatacggggaccccgcg

SEQ ID NO: 22234 - DNA, 21 bp, synthetic construct
  source 1..21: mol_type = other DNA; mol_type = other DNA
cgggcgctcgaatgttgttat

SEQ ID NO: 22235 - DNA, 21 bp, synthetic construct
  source 1..21: mol_type = other DNA; mol_type = other DNA
gacctccgttcggcagcatgg

SEQ ID NO: 22236 - DNA, 21 bp, synthetic construct
  source 1..21: mol_type = other DNA; mol_type = other DNA
atcatgactgataggatttgg

SEQ ID NO: 22237 - DNA, 21 bp, synthetic construct
  source 1..21: mol_type = other DNA; mol_type = other DNA
gtttccagtaccaacggacgt

SEQ ID NO: 22238 - DNA, 21 bp, synthetic construct
  source 1..21: mol_type = other DNA; mol_type = other DNA
tattcaaaacttaatgaaatg

SEQ ID NO: 22239 - DNA, 21 bp, synthetic construct
  source 1..21: mol_type = other DNA; mol_type = other DNA
atagagtcatcgaatggccgc

SEQ ID NO: 22240 - DNA, 21 bp, synthetic construct
  source 1..21: mol_type = other DNA; mol_type = other DNA
tacttcacgggagtcattgcg

SEQ ID NO: 22241 - DNA, 21 bp, synthetic construct
  source 1..21: mol_type = other DNA; mol_type = other DNA
ttagctaggaatggtctcaat

SEQ ID NO: 22242 - DNA, 21 bp, synthetic construct
  source 1..21: mol_type = other DNA; mol_type = other DNA
agaatggccgacgcgtttcct

SEQ ID NO: 22243 - DNA, 21 bp, synthetic construct
  source 1..21: mol_type = other DNA; mol_type = other DNA
tatttctcaggaataattgat

SEQ ID NO: 22244 - DNA, 21 bp, synthetic construct
  source 1..21: mol_type = other DNA; mol_type = other DNA
ggttccgaattcatctcgttc

SEQ ID NO: 22245 - DNA, 21 bp, synthetic construct
  source 1..21: mol_type = other DNA; mol_type = other DNA
tattctaaactgggttacaat

SEQ ID NO: 22246 - DNA, 21 bp, synthetic construct
  source 1..21: mol_type = other DNA; mol_type = other DNA
aggatggtagacgtgtttcct

SEQ ID NO: 22247 - DNA, 21 bp, synthetic construct
  source 1..21: mol_type = other DNA; mol_type = other DNA
cgcggtcccgaagtttatcca

SEQ ID NO: 22248 - DNA, 21 bp, synthetic construct
  source 1..21: mol_type = other DNA; mol_type = other DNA
tactctaagttacaaccaacc

SEQ ID NO: 22249 - DNA, 21 bp, synthetic construct
  source 1..21: mol_type = other DNA; mol_type = other DNA
cgcttagaaagtgccatatgg

SEQ ID NO: 22250 - DNA, 21 bp, synthetic construct
  source 1..21: mol_type = other DNA; mol_type = other DNA
ttacataggctacaagtagat

SEQ ID NO: 22251 - DNA, 21 bp, synthetic construct
  source 1..21: mol_type = other DNA; mol_type = other DNA
aaggacgattataccacgtgg

SEQ ID NO: 22252 - DNA, 21 bp, synthetic construct
  source 1..21: mol_type = other DNA; mol_type = other DNA
ctgtcaaagactggacccaat

SEQ ID NO: 22253 - DNA, 21 bp, synthetic construct
  source 1..21: mol_type = other DNA; mol_type = other DNA
ctttctaagatcggtcacaac

SEQ ID NO: 22254 - DNA, 21 bp, synthetic construct
  source 1..21: mol_type = other DNA
tactttacaggtatgaaagaa

SEQ ID NO: 22255 - DNA, 21 bp, synthetic construct
  source 1..21: mol_type = other DNA
tgtaaagagaagtgtcgtccc

SEQ ID NO: 22256 - DNA, 21 bp, synthetic construct
  source 1..21: mol_type = other DNA
cttgctaggactggctacgac

SEQ ID NO: 22257 - DNA, 21 bp, synthetic construct
  source 1..21: mol_type = other DNA; mol_type = other DNA
gaccatggaaagtgtgggcgg

SEQ ID NO: 22258 - DNA, 21 bp, synthetic construct
  source 1..21: mol_type = other DNA; mol_type = other DNA
tattcaaagataggtgtgaac

SEQ ID NO: 22259 - DNA, 21 bp, synthetic construct
  source 1..21: mol_type = other DNA; mol_type = other DNA
gtcgagagcagcaatggtcga

SEQ ID NO: 22260 - DNA, 21 bp, synthetic construct
  source 1..21: mol_type = other DNA; mol_type = other DNA
attatggaaagtaggaagtgg

SEQ ID NO: 22261 - DNA, 21 bp, synthetic construct
  source 1..21: mol_type = other DNA; mol_type = other DNA
gatatgcaatcatcaacgtgg

SEQ ID NO: 22262 - DNA, 21 bp, synthetic construct
  source 1..21: mol_type = other DNA; mol_type = other DNA
tacgtgaaaagcgatagaatg

SEQ ID NO: 22263 - DNA, 21 bp, synthetic construct
  source 1..21: mol_type = other DNA; mol_type = other DNA
tatttcaccgggatcgttgac

SEQ ID NO: 22264 - DNA, 21 bp, synthetic construct
  source 1..21: mol_type = other DNA; mol_type = other DNA
ctctcacgcttagcgatcaat

SEQ ID NO: 22265 - DNA, 21 bp, synthetic construct
  source 1..21: mol_type = other DNA; mol_type = other DNA
agccatagtaccaatggcgta

SEQ ID NO: 22266 - DNA, 21 bp, synthetic construct
  source 1..21: mol_type = other DNA; mol_type = other DNA
tatagtaaagctaacgtaaac

SEQ ID NO: 22267 - DNA, 21 bp, synthetic construct
  source 1..21: mol_type = other DNA; mol_type = other DNA
gttatggaagcgcgcgattgg

SEQ ID NO: 22268 - DNA, 21 bp, synthetic construct
  source 1..21: mol_type = other DNA; mol_type = other DNA
tactccaagctggactggaac

SEQ ID NO: 22269 - DNA, 21 bp, synthetic construct
  source 1..21: mol_type = other DNA; mol_type = other DNA
ccactccaatcgagggattgg

SEQ ID NO: 22270 - DNA, 21 bp, synthetic construct
  source 1..21: mol_type = other DNA; mol_type = other DNA
aggggtgagttcgtctatcct

SEQ ID NO: 22271 - DNA, 21 bp, synthetic construct
  source 1..21: mol_type = other DNA; mol_type = other DNA
ctaacacgtctatccccggtc

SEQ ID NO: 22272 - DNA, 21 bp, synthetic construct
  source 1..21: mol_type = other DNA; mol_type = other DNA
tactcgaagctaggtcaaaac

SEQ ID NO: 22273 - DNA, 21 bp, synthetic construct
  source 1..21: mol_type = other DNA; mol_type = other DNA
tatttcaccggtcagaaggaa

SEQ ID NO: 22274 - DNA, 21 bp, synthetic construct
  source 1..21: mol_type = other DNA; mol_type = other DNA
tattctaaagcgggcttcaac

SEQ ID NO: 22275 - DNA, 21 bp, synthetic construct
  source 1..21: mol_type = other DNA; mol_type = other DNA
tacgtcaagtctgacaacgcg

SEQ ID NO: 22276 - DNA, 21 bp, synthetic construct
  source 1..21: mol_type = other DNA; mol_type = other DNA
attgagtcgtctaatggtcga

SEQ ID NO: 22277 - DNA, 21 bp, synthetic construct
  source 1..21: mol_type = other DNA; mol_type = other DNA
ttgtcgagactcaactttgat

SEQ ID NO: 22278 - DNA, 21 bp, synthetic construct
  source 1..21: mol_type = other DNA; mol_type = other DNA
aggggcagcgacgtattccct

SEQ ID NO: 22279 - DNA, 21 bp, synthetic construct
  source 1..21: mol_type = other DNA; mol_type = other DNA
tacgctaaaactggcatcaac

SEQ ID NO: 22280 - DNA, 21 bp, synthetic construct
  source 1..21: mol_type = other DNA; mol_type = other DNA
agaaccaacgacgtctttcct

SEQ ID NO: 22281 - DNA, 21 bp, synthetic construct
  source 1..21: mol_type = other DNA; mol_type = other DNA
tactcgaagctgggttttaat

SEQ ID NO: 22282 - DNA, 21 bp, synthetic construct
  source 1..21: mol_type = other DNA; mol_type = other DNA
tacgctaagagcggtgaaaac

SEQ ID NO: 22283 - DNA, 21 bp, synthetic construct
  source 1..21: mol_type = other DNA; mol_type = other DNA
agaaaacaggacgtctttcca

SEQ ID NO: 22284 - DNA, 21 bp, synthetic construct
  source 1..21: mol_type = other DNA; mol_type = other DNA
ctccatagactctcggcggac

SEQ ID NO: 22285 - DNA, 21 bp, synthetic construct
  source 1..21: mol_type = other DNA; mol_type = other DNA
tatagtaagctaagcatgaac

SEQ ID NO: 22286 - DNA, 21 bp, synthetic construct
  source 1..21: mol_type = other DNA; mol_type = other DNA
aaagatgactttcactcgtac

SEQ ID NO: 22287 - DNA, 21 bp, synthetic construct
  source 1..21: mol_type = other DNA; mol_type = other DNA
tattttacaggaaagattgac

SEQ ID NO: 22288 - DNA, 21 bp, synthetic construct
  source 1..21: mol_type = other DNA; mol_type = other DNA
cgaatgcccgacgcttatcca

SEQ ID NO: 22289 - DNA, 21 bp, synthetic construct
  source 1..21: mol_type = other DNA; mol_type = other DNA
tatttcacggggcatacagct

SEQ ID NO: 22290 - DNA, 21 bp, synthetic construct
  source 1..21: mol_type = other DNA; mol_type = other DNA
cgcgatgaatttactggctac

SEQ ID NO: 22291 - DNA, 21 bp, synthetic construct
  source 1..21: mol_type = other DNA; mol_type = other DNA
attatggagtcaagaaactgg

SEQ ID NO: 22292 - DNA, 21 bp, synthetic construct
  source 1..21: mol_type = other DNA; mol_type = other DNA
tatgctaaaagcggtcctaat

SEQ ID NO: 22293 - DNA, 21 bp, synthetic construct
  source 1..21: mol_type = other DNA; mol_type = other DNA
aaaacttatgatgcatttgta

SEQ ID NO: 22294 - DNA, 21 bp, synthetic construct
  source 1..21: mol_type = other DNA; mol_type = other DNA
tatagcaaaacgggatacaac

SEQ ID NO: 22295 - DNA, 21 bp, synthetic construct
  source 1..21: mol_type = other DNA; mol_type = other DNA
cccatggagagccaaaaatgg

SEQ ID NO: 22296 - DNA, 21 bp, synthetic construct
  source 1..21: mol_type = other DNA; mol_type = other DNA
cgagatgaatttacttcttat

SEQ ID NO: 22297 - DNA, 21 bp, synthetic construct
  source 1..21: mol_type = other DNA; mol_type = other DNA
aagatggccgatagacagtgg

SEQ ID NO: 22298 - DNA, 21 bp, synthetic construct
  source 1..21: mol_type = other DNA; mol_type = other DNA
aggatgcctgatgcatatcca

SEQ ID NO: 22299 - DNA, 21 bp, synthetic construct
  source 1..21: mol_type = other DNA; mol_type = other DNA
ctggcccgtcagagctacaat

SEQ ID NO: 22300 - DNA, 21 bp, synthetic construct
  source 1..21: mol_type = other DNA; mol_type = other DNA
ctgtcacgagtcggagggaat

SEQ ID NO: 22301 - DNA, 21 bp, synthetic construct
  source 1..21: mol_type = other DNA; mol_type = other DNA
ctccatagattatcacccgtg

SEQ ID NO: 22302 - DNA, 21 bp, synthetic construct
  source 1..21: mol_type = other DNA; mol_type = other DNA
tactggagcggggtattagat

SEQ ID NO: 22303 - DNA, 21 bp, synthetic construct
  source 1..21: mol_type = other DNA; mol_type = other DNA
aaagatgactttcatgtttgg

SEQ ID NO: 22304 - DNA, 21 bp, synthetic construct
  source 1..21: mol_type = other DNA; mol_type = other DNA
ccttacgcgaagagtgtcgaa

SEQ ID NO: 22305 - DNA, 21 bp, synthetic construct
  source 1..21: mol_type = other DNA; mol_type = other DNA
agaggagacactgtgtaccct

SEQ ID NO: 22306 - DNA, 21 bp, synthetic construct
  source 1..21: mol_type = other DNA; mol_type = other DNA
gacgctattcgtggttgggat

SEQ ID NO: 22307 - DNA, 21 bp, synthetic construct
  source 1..21: mol_type = other DNA; mol_type = other DNA
ctccatcgcctctcaaccaac

SEQ ID NO: 22308 - DNA, 21 bp, synthetic construct
  source 1..21: mol_type = other DNA; mol_type = other DNA
gtgatggaaagtcgggattgg

SEQ ID NO: 22309 - DNA, 21 bp, synthetic construct
  source 1..21: mol_type = other DNA; mol_type = other DNA
cgtactgcagatgcatttcct

SEQ ID NO: 22310 - DNA, 21 bp, synthetic construct
  source 1..21: mol_type = other DNA; mol_type = other DNA
tattcaaaattaaacattaac

SEQ ID NO: 22311 - DNA, 21 bp, synthetic construct
  source 1..21: mol_type = other DNA; mol_type = other DNA
tacagcaaactgaacgataag

SEQ ID NO: 22312 - DNA, 21 bp, synthetic construct
  source 1..21: mol_type = other DNA; mol_type = other DNA
agagacgagtttcactcattc

SEQ ID NO: 22313 - DNA, 21 bp, synthetic construct
  source 1..21: mol_type = other DNA; mol_type = other DNA
atagcgagtaggggttgggat

SEQ ID NO: 22314 - DNA, 21 bp, synthetic construct
  source 1..21: mol_type = other DNA; mol_type = other DNA
gtggcagaaggtctccgatgg

SEQ ID NO: 22315 - DNA, 21 bp, synthetic construct
  source 1..21: mol_type = other DNA; mol_type = other DNA
aggggcgaaagcgtatatcct

SEQ ID NO: 22316 - DNA, 21 bp, synthetic construct
  source 1..21: mol_type = other DNA; mol_type = other DNA
tacgtgaagagccagctgagc

SEQ ID NO: 22317 - DNA, 21 bp, synthetic construct
  source 1..21: mol_type = other DNA; mol_type = other DNA
tacttcaccggagtatcgctg

SEQ ID NO: 22318 - DNA, 21 bp, synthetic construct
  source 1..21: mol_type = other DNA; mol_type = other DNA
cgagggcctgaggtctttccc

SEQ ID NO: 22319 - DNA, 21 bp, synthetic construct
  source 1..21: mol_type = other DNA; mol_type = other DNA
cttcaccgcttgagtgaccac

SEQ ID NO: 22320 - DNA, 21 bp, synthetic construct
  source 1..21: mol_type = other DNA; mol_type = other DNA
ctttgtaagccgtgcgaaacc

SEQ ID NO: 22321 - DNA, 21 bp, synthetic construct
  source 1..21: mol_type = other DNA; mol_type = other DNA
gccttggaatctcgtacttgg

SEQ ID NO: 22322 - DNA, 21 bp, synthetic construct
  source 1..21: mol_type = other DNA; mol_type = other DNA
gtcggatccaccaatgggatc

SEQ ID NO: 22323 - DNA, 21 bp, synthetic construct
  source 1..21: mol_type = other DNA; mol_type = other DNA
gacctatccagcagtcagtgg

SEQ ID NO: 22324 - DNA, 21 bp, synthetic construct
  source 1..21: mol_type = other DNA; mol_type = other DNA
agagaggattttgtcacttgg

SEQ ID NO: 22325 - DNA, 21 bp, synthetic construct
  source 1..21: mol_type = other DNA; mol_type = other DNA
aaggacgatttccatagctat

SEQ ID NO: 22326 - DNA, 21 bp, synthetic construct
  source 1..21: mol_type = other DNA; mol_type = other DNA
gatgcaataaggggctgggac

SEQ ID NO: 22327 - DNA, 21 bp, synthetic construct
  source 1..21: mol_type = other DNA; mol_type = other DNA
tactcaaaagcaggaggcaat

SEQ ID NO: 22328 - DNA, 21 bp, synthetic construct
  source 1..21: mol_type = other DNA; mol_type = other DNA
tacgccaagagtggcagcaac

SEQ ID NO: 22329 - DNA, 21 bp, synthetic construct
  source 1..21: mol_type = other DNA; mol_type = other DNA
gtcggtctcgaagggcgagac

SEQ ID NO: 22330 - DNA, 21 bp, synthetic construct
  source 1..21: mol_type = other DNA; mol_type = other DNA
ttgagtcgccaagggcctaat

SEQ ID NO: 22331 - DNA, 21 bp, synthetic construct
  source 1..21: mol_type = other DNA; mol_type = other DNA
atgcgtgacggcacttcggct

SEQ ID NO: 22332 - DNA, 21 bp, synthetic construct
  source 1..21: mol_type = other DNA; mol_type = other DNA
catgaatctaccaatggtgtc

SEQ ID NO: 22333 - DNA, 21 bp, synthetic construct
  source 1..21: mol_type = other DNA; mol_type = other DNA
ctccatagattgggcggcgat

SEQ ID NO: 22334 - DNA, 21 bp, synthetic construct
  source 1..21: mol_type = other DNA; mol_type = other DNA
tacgcccgcacgggaccagac

SEQ ID NO: 22335 - DNA, 21 bp, synthetic construct
  source 1..21: mol_type = other DNA; mol_type = other DNA
ataatggcaagtcagacctgg

SEQ ID NO: 22336 - DNA, 21 bp, synthetic construct
  source 1..21: mol_type = other DNA; mol_type = other DNA
caccataagcttggcgagaac

SEQ ID NO: 22337 - DNA, 21 bp, synthetic construct
  source 1..21: mol_type = other DNA; mol_type = other DNA
ctgagtcgaattggagaaaat

SEQ ID NO: 22338 - DNA, 21 bp, synthetic construct
  source 1..21: mol_type = other DNA; mol_type = other DNA
ttacacagattgtctatcgat

SEQ ID NO: 22339 - DNA, 21 bp, synthetic construct
  source 1..21: mol_type = other DNA; mol_type = other DNA
agagacgattttacagtatat

SEQ ID NO: 22340 - DNA, 21 bp, synthetic construct
  source 1..21: mol_type = other DNA; mol_type = other DNA
tatttcagcggaaaggttgaa

SEQ ID NO: 22341 - DNA, 21 bp, synthetic construct
  source 1..21: mol_type = other DNA; mol_type = other DNA
gtcacgagtagcaatggtatt

SEQ ID NO: 22342 - DNA, 21 bp, synthetic construct
  source 1..21: mol_type = other DNA; mol_type = other DNA
gtatcggatttcatggcgttt

SEQ ID NO: 22343 - DNA, 21 bp, synthetic construct
  source 1..21: mol_type = other DNA; mol_type = other DNA
aggaccggagatgcgtatccc

SEQ ID NO: 22344 - DNA, 21 bp, synthetic construct
  source 1..21: mol_type = other DNA; mol_type = other DNA
aaggatgattttactggctgg

SEQ ID NO: 22345 - DNA, 21 bp, synthetic construct
  source 1..21: mol_type = other DNA; mol_type = other DNA
tacagcaaattaaatatgaat

SEQ ID NO: 22346 - DNA, 21 bp, synthetic construct
  source 1..21: mol_type = other DNA; mol_type = other DNA
ctccatcgcctcctcccggtt

SEQ ID NO: 22347 - DNA, 21 bp, synthetic construct
  source 1..21: mol_type = other DNA; mol_type = other DNA
agaatggaggatgccttccca

SEQ ID NO: 22348 - DNA, 21 bp, synthetic construct
  source 1..21: mol_type = other DNA; mol_type = other DNA
agagaggaaacggtcttccca

SEQ ID NO: 22349 - DNA, 21 bp, synthetic construct
  source 1..21: mol_type = other DNA; mol_type = other DNA
tggttctcgggcattaaggaa

SEQ ID NO: 22350 - DNA, 21 bp, synthetic construct
  source 1..21: mol_type = other DNA; mol_type = other DNA
agagaagattttacgacatgg

SEQ ID NO: 22351 - DNA, 21 bp, synthetic construct
  source 1..21: mol_type = other DNA; mol_type = other DNA
atgtcaaggattggaccgaac

SEQ ID NO: 22352 - DNA, 21 bp, synthetic construct
  source 1..21: mol_type = other DNA; mol_type = other DNA
agggacgagcacgtcttccct

SEQ ID NO: 22353 - DNA, 21 bp, synthetic construct
  source 1..21: mol_type = other DNA; mol_type = other DNA
tacctgaaaagccaatcacag

SEQ ID NO: 22354 - DNA, 21 bp, synthetic construct
  source 1..21: mol_type = other DNA; mol_type = other DNA
tatagcaaggcgggagcaaac

SEQ ID NO: 22355 - DNA, 21 bp, synthetic construct
  source 1..21: mol_type = other DNA; mol_type = other DNA
ctcagtcgtaccagtttaaat

SEQ ID NO: 22356 - DNA, 21 bp, synthetic construct
  source 1..21: mol_type = other DNA; mol_type = other DNA
tactccaaagctggggcgaat

SEQ ID NO: 22357 - DNA, 21 bp, synthetic construct
  source 1..21: mol_type = other DNA; mol_type = other DNA
tttagcaagctcaatctcaac

SEQ ID NO: 22358 - DNA, 21 bp, synthetic construct
  source 1..21: mol_type = other DNA; mol_type = other DNA
tacgttcgctcagatacaggg

SEQ ID NO: 22359 - DNA, 21 bp, synthetic construct
  source 1..21: mol_type = other DNA; mol_type = other DNA
atcgagtccacgcacggtcga

SEQ ID NO: 22360 - DNA, 21 bp, synthetic construct
  source 1..21: mol_type = other DNA; mol_type = other DNA
tattttaccggtcagacagcc

SEQ ID NO: 22361 - DNA, 21 bp, synthetic construct
  source 1..21: mol_type = other DNA; mol_type = other DNA
gacctccgtgctgcgacctgg

SEQ ID NO: 22362 - DNA, 21 bp, synthetic construct
  source 1..21: mol_type = other DNA; mol_type = other DNA
tatttcaccggtactatcgac

SEQ ID NO: 22363 - DNA, 21 bp, synthetic construct
  source 1..21: mol_type = other DNA; mol_type = other DNA
tactcaaaattggggtcgaat

SEQ ID NO: 22364 - DNA, 21 bp, synthetic construct
  source 1..21: mol_type = other DNA; mol_type = other DNA
ataacgtcgactaacggaata

SEQ ID NO: 22365 - DNA, 21 bp, synthetic construct
  source 1..21: mol_type = other DNA; mol_type = other DNA
tacgcgaagagtggctataac

SEQ ID NO: 22366 - DNA, 21 bp, synthetic construct
  source 1..21: mol_type = other DNA; mol_type = other DNA
taccttaagagccagactatc

SEQ ID NO: 22367 - DNA, 21 bp, synthetic construct
  source 1..21: mol_type = other DNA; mol_type = other DNA
tactttactggtacagttgct

SEQ ID NO: 22368 - DNA, 21 bp, synthetic construct
  source 1..21: mol_type = other DNA; mol_type = other DNA
aaagacgattactccatctac

SEQ ID NO: 22369 - DNA, 21 bp, synthetic construct
  source 1..21: mol_type = other DNA; mol_type = other DNA
ctgacgcgcttacatcaggac

SEQ ID NO: 22370 - DNA, 21 bp, synthetic construct
  source 1..21: mol_type = other DNA; mol_type = other DNA
atgatggaaagttcgaaatgg

SEQ ID NO: 22371 - DNA, 21 bp, synthetic construct
  source 1..21: mol_type = other DNA; mol_type = other DNA
atcgcgcaagtggggtgggac

SEQ ID NO: 22372 - DNA, 21 bp, synthetic construct
  source 1..21: mol_type = other DNA; mol_type = other DNA
ggaggcgagtttagtgcctgg

SEQ ID NO: 22373 - DNA, 21 bp, synthetic construct
  source 1..21: mol_type = other DNA; mol_type = other DNA
aaaatgagcagtagcacatgg

SEQ ID NO: 22374 - DNA, 21 bp, synthetic construct
  source 1..21: mol_type = other DNA; mol_type = other DNA
ttgttaacatcttctacgtgg

SEQ ID NO: 22375 - DNA, 21 bp, synthetic construct
  source 1..21: mol_type = other DNA; mol_type = other DNA
cgtatggaggatgcatatcct

SEQ ID NO: 22376 - DNA, 21 bp, synthetic construct
  source 1..21: mol_type = other DNA; mol_type = other DNA
ttaagtcgcgtgagcattaac

SEQ ID NO: 22377 - DNA, 21 bp, synthetic construct
  source 1..21: mol_type = other DNA; mol_type = other DNA
atacactcaaccaatggtata

SEQ ID NO: 22378 - DNA, 21 bp, synthetic construct
  source 1..21: mol_type = other DNA; mol_type = other DNA
cgtatggagtcagtcatgtgg

SEQ ID NO: 22379 - DNA, 21 bp, synthetic construct
  source 1..21: mol_type = other DNA; mol_type = other DNA
atgttggccagctcgacatgg

SEQ ID NO: 22380 - DNA, 21 bp, synthetic construct
  source 1..21: mol_type = other DNA; mol_type = other DNA
tatcataagatgtctcctgtg

SEQ ID NO: 22381 - DNA, 21 bp, synthetic construct
  source 1..21: mol_type = other DNA; mol_type = other DNA
gacatggcaagtaaagactgg

SEQ ID NO: 22382 - DNA, 21 bp, synthetic construct
  source 1..21: mol_type = other DNA; mol_type = other DNA
ctcgcacgcaccgcaccagac

SEQ ID NO: 22383 - DNA, 21 bp, synthetic construct
  source 1..21: mol_type = other DNA
tattggagtggtattttggaa

SEQ ID NO: 22384 - DNA, 21 bp, synthetic construct
  source 1..21: mol_type = other DNA; mol_type = other DNA
cgaaccagtgacgtatatcct

SEQ ID NO: 22385 - DNA, 21 bp, synthetic construct
  source 1..21: mol_type = other DNA; mol_type = other DNA
aaagacgactattccgtattc

SEQ ID NO: 22386 - DNA, 21 bp, synthetic construct
  source 1..21: mol_type = other DNA; mol_type = other DNA
tattcgaaggtcggcagggac

SEQ ID NO: 22387 - DNA, 21 bp, synthetic construct
  source 1..21: mol_type = other DNA; mol_type = other DNA
agggatgggacatcggcctgg

SEQ ID NO: 22388 - DNA, 21 bp, synthetic construct
  source 1..21: mol_type = other DNA; mol_type = other DNA
cggagcgagcacgtcttccct

SEQ ID NO: 22389 - DNA, 21 bp, synthetic construct
  source 1..21: mol_type = other DNA; mol_type = other DNA
aagggggaaagtcgagactgg

SEQ ID NO: 22390 - DNA, 21 bp, synthetic construct
  source 1..21: mol_type = other DNA; mol_type = other DNA
aaggatgagttcatgagttat

SEQ ID NO: 22391 - DNA, 21 bp, synthetic construct
  source 1..21: mol_type = other DNA; mol_type = other DNA
ttcacgaagagtgggcccaat

SEQ ID NO: 22392 - DNA, 21 bp, synthetic construct
  source 1..21: mol_type = other DNA; mol_type = other DNA
tacttcacgggcagattagaa

SEQ ID NO: 22393 - DNA, 21 bp, synthetic construct
  source 1..21: mol_type = other DNA; mol_type = other DNA
ttatattcaggtgaggggcct

SEQ ID NO: 22394 - DNA, 21 bp, synthetic construct
  source 1..21: mol_type = other DNA; mol_type = other DNA
atactttcggatcggatatgg

SEQ ID NO: 22395 - DNA, 21 bp, synthetic construct
  source 1..21: mol_type = other DNA; mol_type = other DNA
tatttcaccggtatacatgcc

SEQ ID NO: 22396 - DNA, 21 bp, synthetic construct
  source 1..21: mol_type = other DNA; mol_type = other DNA
agggaagatggagtatcttgg

SEQ ID NO: 22397 - DNA, 21 bp, synthetic construct
  source 1..21: mol_type = other DNA; mol_type = other DNA
aatgacggaacttcaaaatgg

SEQ ID NO: 22398 - DNA, 21 bp, synthetic construct
  source 1..21: mol_type = other DNA; mol_type = other DNA
ttttgcaaaccgtgtccgggc

SEQ ID NO: 22399 - DNA, 21 bp, synthetic construct
  source 1..21: mol_type = other DNA; mol_type = other DNA
ttagctaaaactggtattaac

SEQ ID NO: 22400 - DNA, 21 bp, synthetic construct
  source 1..21: mol_type = other DNA; mol_type = other DNA
tacgttaagagtcaaactatg

SEQ ID NO: 22401 - DNA, 21 bp, synthetic construct
  source 1..21: mol_type = other DNA; mol_type = other DNA
ttgagtagggtttcaataaac

SEQ ID NO: 22402 - DNA, 21 bp, synthetic construct
  source 1..21: mol_type = other DNA; mol_type = other DNA
cgcggtgcagatgtttaccca

SEQ ID NO: 22403 - DNA, 21 bp, synthetic construct
  source 1..21: mol_type = other DNA; mol_type = other DNA
cgcggggacaatgtttttccc

SEQ ID NO: 22404 - DNA, 21 bp, synthetic construct
  source 1..21: mol_type = other DNA; mol_type = other DNA
cttcaccgcctcagcccggta

SEQ ID NO: 22405 - DNA, 21 bp, synthetic construct
  source 1..21: mol_type = other DNA; mol_type = other DNA
ttgtctaaagtaggtatgaac

SEQ ID NO: 22406 - DNA, 21 bp, synthetic construct
  source 1..21: mol_type = other DNA; mol_type = other DNA
gttatggaggccagaaattgg

SEQ ID NO: 22407 - DNA, 21 bp, synthetic construct
  source 1..21: mol_type = other DNA; mol_type = other DNA
ctagctaagaccggggtgaac

SEQ ID NO: 22408 - DNA, 21 bp, synthetic construct
  source 1..21: mol_type = other DNA; mol_type = other DNA
catgaatcaacgaatggtgtc

SEQ ID NO: 22409 - DNA, 21 bp, synthetic construct
  source 1..21: mol_type = other DNA; mol_type = other DNA
ttgtccagattgagtccctta

SEQ ID NO: 22410 - DNA, 21 bp, synthetic construct
  source 1..21: mol_type = other DNA; mol_type = other DNA
tattcgaaagtagggcacaat

SEQ ID NO: 22411 - DNA, 21 bp, synthetic construct
  source 1..21: mol_type = other DNA; mol_type = other DNA
ctgcacagattgagcatggac

SEQ ID NO: 22412 - DNA, 21 bp, synthetic construct
  source 1..21: mol_type = other DNA; mol_type = other DNA
gtaatggagagccgtgtttgg

SEQ ID NO: 22413 - DNA, 21 bp, synthetic construct
  source 1..21: mol_type = other DNA; mol_type = other DNA
ctgcaccgattgacagccgat

SEQ ID NO: 22414 - DNA, 21 bp, synthetic construct
  source 1..21: mol_type = other DNA; mol_type = other DNA
tatagcaaattaggaatgaat

SEQ ID NO: 22415 - DNA, 21 bp, synthetic construct
  source 1..21: mol_type = other DNA; mol_type = other DNA
gtagtctatgacgcttttgtt

SEQ ID NO: 22416 - DNA, 21 bp, synthetic construct
  source 1..21: mol_type = other DNA; mol_type = other DNA
ctaagtaggatctcaactaat

SEQ ID NO: 22417 - DNA, 21 bp, synthetic construct
  source 1..21: mol_type = other DNA; mol_type = other DNA
tactctagattggaccctgtt

SEQ ID NO: 22418 - DNA, 21 bp, synthetic construct
  source 1..21: mol_type = other DNA; mol_type = other DNA
tacgtcaaaagccagcaacac

SEQ ID NO: 22419 - DNA, 21 bp, synthetic construct
  source 1..21: mol_type = other DNA; mol_type = other DNA
aggggtgaagaggtgtttcca

SEQ ID NO: 22420 - DNA, 21 bp, synthetic construct
  source 1..21: mol_type = other DNA; mol_type = other DNA
gatatgtcggccagggcttgg

SEQ ID NO: 22421 - DNA, 21 bp, synthetic construct
  source 1..21: mol_type = other DNA; mol_type = other DNA
gtgatgaacgatgcatttccg

SEQ ID NO: 22422 - DNA, 21 bp, synthetic construct
  source 1..21: mol_type = other DNA; mol_type = other DNA
ctccatagattgtctccaatg

SEQ ID NO: 22423 - DNA, 21 bp, synthetic construct
  source 1..21: mol_type = other DNA; mol_type = other DNA
tactttactgggaagacagat

SEQ ID NO: 22424 - DNA, 21 bp, synthetic construct
  source 1..21: mol_type = other DNA; mol_type = other DNA
tatactcgattagactataat

SEQ ID NO: 22425 - DNA, 21 bp, synthetic construct
  source 1..21: mol_type = other DNA; mol_type = other DNA
tacttcagcggtaccaaagag

SEQ ID NO: 22426 - DNA, 21 bp, synthetic construct
  source 1..21: mol_type = other DNA; mol_type = other DNA
tactttacaggttacgtggat

SEQ ID NO: 22427 - DNA, 21 bp, synthetic construct
  source 1..21: mol_type = other DNA; mol_type = other DNA
gacatgagctcatcaaaatgg

SEQ ID NO: 22428 - DNA, 21 bp, synthetic construct
  source 1..21: mol_type = other DNA; mol_type = other DNA
tacagtaaaatcggaacaaat

SEQ ID NO: 22429 - DNA, 21 bp, synthetic construct
  source 1..21: mol_type = other DNA; mol_type = other DNA
tacagcaaaattggtcaaaac

SEQ ID NO: 22430 - DNA, 21 bp, synthetic construct
  source 1..21: mol_type = other DNA; mol_type = other DNA
gaccttgaatctcgaaaatgg

SEQ ID NO: 22431 - DNA, 21 bp, synthetic construct
  source 1..21: mol_type = other DNA; mol_type = other DNA
taccacaaacttaaccacaac

SEQ ID NO: 22432 - DNA, 21 bp, synthetic construct
  source 1..21: mol_type = other DNA; mol_type = other DNA
agggaagagaccgttcgatgg

SEQ ID NO: 22433 - DNA, 21 bp, synthetic construct
  source 1..21: mol_type = other DNA; mol_type = other DNA
cgtagcgaatttgtctcttat

SEQ ID NO: 22434 - DNA, 21 bp, synthetic construct
  source 1..21: mol_type = other DNA; mol_type = other DNA
agagacgagtttacgtcatat

SEQ ID NO: 22435 - DNA, 21 bp, synthetic construct
  source 1..21: mol_type = other DNA; mol_type = other DNA
gacctacgttcggtgacgtgg

SEQ ID NO: 22436 - DNA, 21 bp, synthetic construct
  source 1..21: mol_type = other DNA; mol_type = other DNA
ctcagtcgcatttcgacaaac

SEQ ID NO: 22437 - DNA, 21 bp, synthetic construct
  source 1..21: mol_type = other DNA; mol_type = other DNA
ctatgcaaaccttgcttaatg

SEQ ID NO: 22438 - DNA, 21 bp, synthetic construct
  source 1..21: mol_type = other DNA; mol_type = other DNA
ctatcaaaagctgggcctaat

SEQ ID NO: 22439 - DNA, 21 bp, synthetic construct
  source 1..21: mol_type = other DNA; mol_type = other DNA
ctacaccgtctttcgcaggac

SEQ ID NO: 22440 - DNA, 21 bp, synthetic construct
  source 1..21: mol_type = other DNA; mol_type = other DNA
cgagaggaaacagtaaggtgg

SEQ ID NO: 22441 - DNA, 21 bp, synthetic construct
  source 1..21: mol_type = other DNA; mol_type = other DNA
gtcatgagtacgaatggtatt

SEQ ID NO: 22442 - DNA, 21 bp, synthetic construct
  source 1..21: mol_type = other DNA; mol_type = other DNA
tatagtaaagttggggacaat

SEQ ID NO: 22443 - DNA, 21 bp, synthetic construct
  source 1..21: mol_type = other DNA; mol_type = other DNA
cgtagcgacgttgtgtatcct

SEQ ID NO: 22444 - DNA, 21 bp, synthetic construct
  source 1..21: mol_type = other DNA; mol_type = other DNA
ctcagtcggacaagtgtcaac

SEQ ID NO: 22445 - DNA, 21 bp, synthetic construct
  source 1..21: mol_type = other DNA; mol_type = other DNA
cttcacagattaggagtatcc

SEQ ID NO: 22446 - DNA, 21 bp, synthetic construct
  source 1..21: mol_type = other DNA; mol_type = other DNA
ctccatagattgagccacgac

SEQ ID NO: 22447 - DNA, 21 bp, synthetic construct
  source 1..21: mol_type = other DNA; mol_type = other DNA
atgtgtaagccgtgtttaaca

SEQ ID NO: 22448 - DNA, 21 bp, synthetic construct
  source 1..21: mol_type = other DNA; mol_type = other DNA
ttaaccagactgcaccaagat

SEQ ID NO: 22449 - DNA, 21 bp, synthetic construct
  source 1..21: mol_type = other DNA; mol_type = other DNA
tttcacaagttgatgtcgaac

SEQ ID NO: 22450 - DNA, 21 bp, synthetic construct
  source 1..21: mol_type = other DNA; mol_type = other DNA
ctaagccgaacctcgtatgac

SEQ ID NO: 22451 - DNA, 21 bp, synthetic construct
  source 1..21: mol_type = other DNA; mol_type = other DNA
tactcaaaggttggcgccaat

SEQ ID NO: 22452 - DNA, 21 bp, synthetic construct
  source 1..21: mol_type = other DNA; mol_type = other DNA
tacttgaagagtcagagcgac

SEQ ID NO: 22453 - DNA, 21 bp, synthetic construct
  source 1..21: mol_type = other DNA; mol_type = other DNA
ttagctagaacggcatatgat

SEQ ID NO: 22454 - DNA, 21 bp, synthetic construct
  source 1..21: mol_type = other DNA; mol_type = other DNA
atcatggccgatcgtggttgg

SEQ ID NO: 22455 - DNA, 21 bp, synthetic construct
  source 1..21: mol_type = other DNA; mol_type = other DNA
ctacataggctaacggctgac

SEQ ID NO: 22456 - DNA, 21 bp, synthetic construct
  source 1..21: mol_type = other DNA; mol_type = other DNA
caattagaggcaaggacctgg

SEQ ID NO: 22457 - DNA, 21 bp, synthetic construct
  source 1..21: mol_type = other DNA; mol_type = other DNA
cgcagcgacttcgtagtctac

SEQ ID NO: 22458 - DNA, 21 bp, synthetic construct
  source 1..21: mol_type = other DNA; mol_type = other DNA
tatcacaaggcaggggagaat

SEQ ID NO: 22459 - DNA, 21 bp, synthetic construct
  source 1..21: mol_type = other DNA; mol_type = other DNA
ctcttgagtagcgcgagctgg

SEQ ID NO: 22460 - DNA, 21 bp, synthetic construct
  source 1..21: mol_type = other DNA; mol_type = other DNA
aacatcccgggcatgatgtac

SEQ ID NO: 22461 - DNA, 21 bp, synthetic construct
  source 1..21: mol_type = other DNA; mol_type = other DNA
atgttatcttcaagcacttgg

SEQ ID NO: 22462 - DNA, 21 bp, synthetic construct
  source 1..21: mol_type = other DNA; mol_type = other DNA
tttcataaactcaatgagaac

SEQ ID NO: 22463 - DNA, 21 bp, synthetic construct
  source 1..21: mol_type = other DNA; mol_type = other DNA
tacgcaaaaaccggatacaat

SEQ ID NO: 22464 - DNA, 21 bp, synthetic construct
  source 1..21: mol_type = other DNA; mol_type = other DNA
tatttaaagagtgataaatcg

SEQ ID NO: 22465 - DNA, 21 bp, synthetic construct
  source 1..21: mol_type = other DNA; mol_type = other DNA
tatagcaagttgaatgtcaac

SEQ ID NO: 22466 - DNA, 21 bp, synthetic construct
  source 1..21: mol_type = other DNA; mol_type = other DNA
caactagaaagtcgttcgtgg

SEQ ID NO: 22467 - DNA, 21 bp, synthetic construct
  source 1..21: mol_type = other DNA; mol_type = other DNA
tactcgaagctaggagtcaat

SEQ ID NO: 22468 - DNA, 21 bp, synthetic construct
  source 1..21: mol_type = other DNA; mol_type = other DNA
agggaagatttcgtgagctgg

SEQ ID NO: 22469 - DNA, 21 bp, synthetic construct
  source 1..21: mol_type = other DNA; mol_type = other DNA
gagatgaaggctcgtacttgg

SEQ ID NO: 22470 - DNA, 21 bp, synthetic construct
  source 1..21: mol_type = other DNA; mol_type = other DNA
tacttctcaggtgtcaccgag

SEQ ID NO: 22471 - DNA, 21 bp, synthetic construct
  source 1..21: mol_type = other DNA; mol_type = other DNA
tactttgcggggaaaaaagat

SEQ ID NO: 22472 - DNA, 21 bp, synthetic construct
  source 1..21: mol_type = other DNA; mol_type = other DNA
cccatgggctcttcatcctgg

SEQ ID NO: 22473 - DNA, 21 bp, synthetic construct
  source 1..21: mol_type = other DNA; mol_type = other DNA
ttcagcaaattaaaccataac

SEQ ID NO: 22474 - DNA, 21 bp, synthetic construct
  source 1..21: mol_type = other DNA; mol_type = other DNA
gttgtaagcacaaacggtgtg

SEQ ID NO: 22475 - DNA, 21 bp, synthetic construct
  source 1..21: mol_type = other DNA; mol_type = other DNA
ggaggagaaagctcgagctgg

SEQ ID NO: 22476 - DNA, 21 bp, synthetic construct
  source 1..21: mol_type = other DNA; mol_type = other DNA
tggtggtcggggattactgag

SEQ ID NO: 22477 - DNA, 21 bp, synthetic construct
  source 1..21: mol_type = other DNA; mol_type = other DNA
cgaacaggagacgcgtatcct

SEQ ID NO: 22478 - DNA, 21 bp, synthetic construct
  source 1..21: mol_type = other DNA; mol_type = other DNA
agagacgaaaatgtgtttcct

SEQ ID NO: 22479 - DNA, 21 bp, synthetic construct
  source 1..21: mol_type = other DNA; mol_type = other DNA
gtcgcgactcgcggctgggac

SEQ ID NO: 22480 - DNA, 21 bp, synthetic construct
  source 1..21: mol_type = other DNA; mol_type = other DNA
gtgatggaatctagggtatgg

SEQ ID NO: 22481 - DNA, 21 bp, synthetic construct
  source 1..21: mol_type = other DNA; mol_type = other DNA
aaggatgactactccacttat

SEQ ID NO: 22482 - DNA, 21 bp, synthetic construct
  source 1..21: mol_type = other DNA; mol_type = other DNA
tacctgaagtcccagtcgatg

SEQ ID NO: 22483 - DNA, 21 bp, synthetic construct
  source 1..21: mol_type = other DNA; mol_type = other DNA
ccgatgtcctcgcatggttgg

SEQ ID NO: 22484 - DNA, 21 bp, synthetic construct
  source 1..21: mol_type = other DNA; mol_type = other DNA
gaaatgtcgagtattaagtgg

SEQ ID NO: 22485 - DNA, 21 bp, synthetic construct
  source 1..21: mol_type = other DNA; mol_type = other DNA
gttatgagctcacaatcgtgg

SEQ ID NO: 22486 - DNA, 21 bp, synthetic construct
  source 1..21: mol_type = other DNA; mol_type = other DNA
aaaggcgagtccagggattgg

SEQ ID NO: 22487 - DNA, 21 bp, synthetic construct
  source 1..21: mol_type = other DNA; mol_type = other DNA
ctacataggttgtcaatcccc

SEQ ID NO: 22488 - DNA, 21 bp, synthetic construct
  source 1..21: mol_type = other DNA; mol_type = other DNA
ttatccaggttgagtcctata

SEQ ID NO: 22489 - DNA, 21 bp, synthetic construct
  source 1..21: mol_type = other DNA; mol_type = other DNA
tatgctaaaacagggcacaac

SEQ ID NO: 22490 - DNA, 21 bp, synthetic construct
  source 1..21: mol_type = other DNA; mol_type = other DNA
ttgctctcctctgcctcctgg

SEQ ID NO: 22491 - DNA, 21 bp, synthetic construct
  source 1..21: mol_type = other DNA; mol_type = other DNA
agattaccaacagtctttccg

SEQ ID NO: 22492 - DNA, 21 bp, synthetic construct
  source 1..21: mol_type = other DNA; mol_type = other DNA
gagcccgaacgtggctggttt

SEQ ID NO: 22493 - DNA, 21 bp, synthetic construct
  source 1..21: mol_type = other DNA; mol_type = other DNA
agactcaacgacgtataccct

SEQ ID NO: 22494 - DNA, 21 bp, synthetic construct
  source 1..21: mol_type = other DNA; mol_type = other DNA
gatttgcagtcatccacctgg

SEQ ID NO: 22495 - DNA, 21 bp, synthetic construct
  source 1..21: mol_type = other DNA; mol_type = other DNA
tataccaaactacagtacaat

SEQ ID NO: 22496 - DNA, 21 bp, synthetic construct
  source 1..21: mol_type = other DNA; mol_type = other DNA
ttagcacgccaatcttataac

SEQ ID NO: 22497 - DNA, 21 bp, synthetic construct
  source 1..21: mol_type = other DNA; mol_type = other DNA
ttaagtagaacgtcggataat

SEQ ID NO: 22498 - DNA, 21 bp, synthetic construct
  source 1..21: mol_type = other DNA; mol_type = other DNA
ttccacaagaagggacccgat

SEQ ID NO: 22499 - DNA, 21 bp, synthetic construct
  source 1..21: mol_type = other DNA; mol_type = other DNA
agcgaaagcacaaacggaaga

SEQ ID NO: 22500 - DNA, 21 bp, synthetic construct
  source 1..21: mol_type = other DNA; mol_type = other DNA
ctggcccgtcagagctataat

SEQ ID NO: 22501 - DNA, 21 bp, synthetic construct
  source 1..21: mol_type = other DNA; mol_type = other DNA
ttcagtaaagttgggcctaat

SEQ ID NO: 22502 - DNA, 21 bp, synthetic construct
  source 1..21: mol_type = other DNA; mol_type = other DNA
cgagaggaaggggtggcttgg

SEQ ID NO: 22503 - DNA, 21 bp, synthetic construct
  source 1..21: mol_type = other DNA; mol_type = other DNA
tatgtcagaattggtcccaac

SEQ ID NO: 22504 - DNA, 21 bp, synthetic construct
  source 1..21: mol_type = other DNA; mol_type = other DNA
gtgtcgagtaccaacggagtg

SEQ ID NO: 22505 - DNA, 21 bp, synthetic construct
  source 1..21: mol_type = other DNA; mol_type = other DNA
gtagaaagctcaaatggtgta

SEQ ID NO: 22506 - DNA, 21 bp, synthetic construct
  source 1..21: mol_type = other DNA; mol_type = other DNA
cgcctaatcgatgtctacccg

SEQ ID NO: 22507 - DNA, 21 bp, synthetic construct
  source 1..21: mol_type = other DNA; mol_type = other DNA
acccactcaaccaatggggta

SEQ ID NO: 22508 - DNA, 21 bp, synthetic construct
  source 1..21: mol_type = other DNA; mol_type = other DNA
cgcggcgatgacgtctatccc

SEQ ID NO: 22509 - DNA, 21 bp, synthetic construct
  source 1..21: mol_type = other DNA; mol_type = other DNA
ctgcacaaattgcaggtcgac

SEQ ID NO: 22510 - DNA, 21 bp, synthetic construct
  source 1..21: mol_type = other DNA; mol_type = other DNA
cgaggtttagagggcatggac

SEQ ID NO: 22511 - DNA, 21 bp, synthetic construct
  source 1..21: mol_type = other DNA; mol_type = other DNA
cgcatgacggatgcataccca

SEQ ID NO: 22512 - DNA, 21 bp, synthetic construct
  source 1..21: mol_type = other DNA; mol_type = other DNA
agattggagtcgacacattgg

SEQ ID NO: 22513 - DNA, 21 bp, synthetic construct
  source 1..21: mol_type = other DNA; mol_type = other DNA
tacgctaaatcgggatttaac

SEQ ID NO: 22514 - DNA, 21 bp, synthetic construct
  source 1..21: mol_type = other DNA; mol_type = other DNA
ctttacgacgggaccaatgcc

SEQ ID NO: 22515 - DNA, 21 bp, synthetic construct
  source 1..21: mol_type = other DNA; mol_type = other DNA
cgtaacgacgatgtgttcccg

SEQ ID NO: 22516 - DNA, 21 bp, synthetic construct
  source 1..21: mol_type = other DNA; mol_type = other DNA
ctacacaaattgacgacagat

SEQ ID NO: 22517 - DNA, 21 bp, synthetic construct
  source 1..21: mol_type = other DNA; mol_type = other DNA
ttaagccgccttagtcctgac

SEQ ID NO: 22518 - DNA, 21 bp, synthetic construct
  source 1..21: mol_type = other DNA; mol_type = other DNA
tatgtacgttccgatacgggg

SEQ ID NO: 22519 - DNA, 21 bp, synthetic construct
  source 1..21: mol_type = other DNA; mol_type = other DNA
ttgtcgcggacttccctcaac

SEQ ID NO: 22520 - DNA, 21 bp, synthetic construct
  source 1..21: mol_type = other DNA; mol_type = other DNA
tactggtcgggtatcatcgaa

SEQ ID NO: 22521 - DNA, 21 bp, synthetic construct
  source 1..21: mol_type = other DNA; mol_type = other DNA
tacagtaaggccggagaaaat

SEQ ID NO: 22522 - DNA, 21 bp, synthetic construct
  source 1..21: mol_type = other DNA; mol_type = other DNA
tattctaagacaggtatgaac

SEQ ID NO: 22523 - DNA, 21 bp, synthetic construct
  source 1..21: mol_type = other DNA; mol_type = other DNA
aaagatgactacactacgtgg

SEQ ID NO: 22524 - DNA, 21 bp, synthetic construct
  source 1..21: mol_type = other DNA; mol_type = other DNA
ctcacccgtctcagtcctacg

SEQ ID NO: 22525 - DNA, 21 bp, synthetic construct
  source 1..21: mol_type = other DNA; mol_type = other DNA
cgtaccgatcacgttttcccc

SEQ ID NO: 22526 - DNA, 21 bp, synthetic construct
  source 1..21: mol_type = other DNA; mol_type = other DNA
agaaccaaagaggtatacccc

SEQ ID NO: 22527 - DNA, 21 bp, synthetic construct
  source 1..21: mol_type = other DNA; mol_type = other DNA
tattccaaaatcggagacaat

SEQ ID NO: 22528 - DNA, 21 bp, synthetic construct
  source 1..21: mol_type = other DNA; mol_type = other DNA
gttgaaagctttaacggccgt

SEQ ID NO: 22529 - DNA, 21 bp, synthetic construct
  source 1..21: mol_type = other DNA; mol_type = other DNA
aaggatgaattcctcagctgg

SEQ ID NO: 22530 - DNA, 21 bp, synthetic construct
  source 1..21: mol_type = other DNA; mol_type = other DNA
ataactagcaccaatggggtc

SEQ ID NO: 22531 - DNA, 21 bp, synthetic construct
  source 1..21: mol_type = other DNA; mol_type = other DNA
tatttcacaggaaagatcgcg

SEQ ID NO: 22532 - DNA, 21 bp, synthetic construct
  source 1..21: mol_type = other DNA; mol_type = other DNA
ttgtcacgtataagcaataat

SEQ ID NO: 22533 - DNA, 21 bp, synthetic construct
  source 1..21: mol_type = other DNA; mol_type = other DNA
gtcaatagtactaatggaatt

SEQ ID NO: 22534 - DNA, 21 bp, synthetic construct
  source 1..21: mol_type = other DNA; mol_type = other DNA
ctttcaaggctcagccccaac

SEQ ID NO: 22535 - DNA, 21 bp, synthetic construct
  source 1..21: mol_type = other DNA; mol_type = other DNA
ttacacaggctgtcgcctaac

SEQ ID NO: 22536 - DNA, 21 bp, synthetic construct
  source 1..21: mol_type = other DNA; mol_type = other DNA
ctatcgcggacatcccataat

SEQ ID NO: 22537 - DNA, 21 bp, synthetic construct
  source 1..21: mol_type = other DNA; mol_type = other DNA
ttacatcgactcagtatggat

SEQ ID NO: 22538 - DNA, 21 bp, synthetic construct
  source 1..21: mol_type = other DNA; mol_type = other DNA
tatagtaaggcgaataacaat

SEQ ID NO: 22539 - DNA, 21 bp, synthetic construct
  source 1..21: mol_type = other DNA; mol_type = other DNA
tatagcaaactgggggaaaac

SEQ ID NO: 22540 - DNA, 21 bp, synthetic construct
  source 1..21: mol_type = other DNA; mol_type = other DNA
tattttactggaaagcacgag

SEQ ID NO: 22541 - DNA, 21 bp, synthetic construct
  source 1..21: mol_type = other DNA; mol_type = other DNA
tatagtaaaatcgggtataat

SEQ ID NO: 22542 - DNA, 21 bp, synthetic construct
  source 1..21: mol_type = other DNA; mol_type = other DNA
gtcaacagcacaaatggcgtc

SEQ ID NO: 22543 - DNA, 21 bp, synthetic construct
  source 1..21: mol_type = other DNA; mol_type = other DNA
cctatggaatcgttgaaatgg

SEQ ID NO: 22544 - DNA, 21 bp, synthetic construct
  source 1..21: mol_type = other DNA; mol_type = other DNA
cttcaccgtaagggaatagac

SEQ ID NO: 22545 - DNA, 21 bp, synthetic construct
  source 1..21: mol_type = other DNA; mol_type = other DNA
tacttaaaatcacaggcctcg

SEQ ID NO: 22546 - DNA, 21 bp, synthetic construct
  source 1..21: mol_type = other DNA; mol_type = other DNA
cgcgaagatcacgtaagttgg

SEQ ID NO: 22547 - DNA, 21 bp, synthetic construct
  source 1..21: mol_type = other DNA; mol_type = other DNA
tacagtcgcttaaatgatgat

SEQ ID NO: 22548 - DNA, 21 bp, synthetic construct
  source 1..21: mol_type = other DNA; mol_type = other DNA
cggactgtcacagtgtacccg

SEQ ID NO: 22549 - DNA, 21 bp, synthetic construct
  source 1..21: mol_type = other DNA; mol_type = other DNA
tatttcactgggaagttggac

SEQ ID NO: 22550 - DNA, 21 bp, synthetic construct
  source 1..21: mol_type = other DNA; mol_type = other DNA
gtcaatgattacgttacatat

SEQ ID NO: 22551 - DNA, 21 bp, synthetic construct
  source 1..21: mol_type = other DNA; mol_type = other DNA
tatgtaaagagctctaataat

SEQ ID NO: 22552 - DNA, 21 bp, synthetic construct
  source 1..21: mol_type = other DNA; mol_type = other DNA
agagccctcgaggggcgtgac

SEQ ID NO: 22553 - DNA, 21 bp, synthetic construct
  source 1..21: mol_type = other DNA; mol_type = other DNA
aggcctaatgactgtaaaact

SEQ ID NO: 22554 - DNA, 21 bp, synthetic construct
  source 1..21: mol_type = other DNA; mol_type = other DNA
aggacgccggtcgtctaccct

SEQ ID NO: 22555 - DNA, 21 bp, synthetic construct
  source 1..21: mol_type = other DNA; mol_type = other DNA
ctcgccaagacggcgcataac

SEQ ID NO: 22556 - DNA, 21 bp, synthetic construct
  source 1..21: mol_type = other DNA; mol_type = other DNA
acgttgagtagtcagacgtgg

SEQ ID NO: 22557 - DNA, 21 bp, synthetic construct
  source 1..21: mol_type = other DNA; mol_type = other DNA
ttgatgagttcggcgaaatgg

SEQ ID NO: 22558 - DNA, 21 bp, synthetic construct
  source 1..21: mol_type = other DNA; mol_type = other DNA
gagctccagtcctctaagtgg

SEQ ID NO: 22559 - DNA, 21 bp, synthetic construct
  source 1..21: mol_type = other DNA; mol_type = other DNA
ttatcacgcgtaagcgtgaat

SEQ ID NO: 22560 - DNA, 21 bp, synthetic construct
  source 1..21: mol_type = other DNA; mol_type = other DNA
tactttacaggcattcacgct

SEQ ID NO: 22561 - DNA, 21 bp, synthetic construct
  source 1..21: mol_type = other DNA; mol_type = other DNA
ctagcccgtaccgcactcaac

SEQ ID NO: 22562 - DNA, 21 bp, synthetic construct
  source 1..21: mol_type = other DNA; mol_type = other DNA
ctcgctaaaacggggcataac

SEQ ID NO: 22563 - DNA, 21 bp, synthetic construct
  source 1..21: mol_type = other DNA; mol_type = other DNA
catagccgtctggggccggat

SEQ ID NO: 22564 - DNA, 21 bp, synthetic construct
  source 1..21: mol_type = other DNA; mol_type = other DNA
gtggctacgagggggtgggat

SEQ ID NO: 22565 - DNA, 21 bp, synthetic construct
  source 1..21: mol_type = other DNA; mol_type = other DNA
agggatgaggaggtatatccg

SEQ ID NO: 22566 - DNA, 21 bp, synthetic construct
  source 1..21: mol_type = other DNA; mol_type = other DNA
ttgagcaggataggtacgaac

SEQ ID NO: 22567 - DNA, 21 bp, synthetic construct
  source 1..21: mol_type = other DNA; mol_type = other DNA
tacagcaagatcggacagaac

SEQ ID NO: 22568 - DNA, 21 bp, synthetic construct
  source 1..21: mol_type = other DNA; mol_type = other DNA
tacttcgctgggcgtatcgca

SEQ ID NO: 22569 - DNA, 21 bp, synthetic construct
  source 1..21: mol_type = other DNA; mol_type = other DNA
aaagacgactacacgacgtac

SEQ ID NO: 22570 - DNA, 21 bp, synthetic construct
  source 1..21: mol_type = other DNA; mol_type = other DNA
tacagcaaagttggtcaaaat

SEQ ID NO: 22571 - DNA, 21 bp, synthetic construct
  source 1..21: mol_type = other DNA; mol_type = other DNA
tattttacaggagtgattccc

SEQ ID NO: 22572 - DNA, 21 bp, synthetic construct
  source 1..21: mol_type = other DNA; mol_type = other DNA
ttgagcaggatagggcatgac

SEQ ID NO: 22573 - DNA, 21 bp, synthetic construct
  source 1..21: mol_type = other DNA; mol_type = other DNA
tacagcaagatcggagtcaat

SEQ ID NO: 22574 - DNA, 21 bp, synthetic construct
  source 1..21: mol_type = other DNA; mol_type = other DNA
cgtggtgaagacgtctacccc

SEQ ID NO: 22575 - DNA, 21 bp, synthetic construct
  source 1..21: mol_type = other DNA; mol_type = other DNA
ctccatcggctgagttatgac

SEQ ID NO: 22576 - DNA, 21 bp, synthetic construct
  source 1..21: mol_type = other DNA; mol_type = other DNA
ttgtcgaaaataggcaataat

SEQ ID NO: 22577 - DNA, 21 bp, synthetic construct
  source 1..21: mol_type = other DNA; mol_type = other DNA
gtagcgactaagggcatcgga

SEQ ID NO: 22578 - DNA, 21 bp, synthetic construct
  source 1..21: mol_type = other DNA; mol_type = other DNA
tatctaaagtcgcagagttca

SEQ ID NO: 22579 - DNA, 21 bp, synthetic construct
  source 1..21: mol_type = other DNA; mol_type = other DNA
atcatgtcatcagcaaactgg

SEQ ID NO: 22580 - DNA, 21 bp, synthetic construct
  source 1..21: mol_type = other DNA; mol_type = other DNA
atgttgagcagttcgacgtgg

SEQ ID NO: 22581 - DNA, 21 bp, synthetic construct
  source 1..21: mol_type = other DNA; mol_type = other DNA
atggagagcacgaatgggagg

SEQ ID NO: 22582 - DNA, 21 bp, synthetic construct
  source 1..21: mol_type = other DNA; mol_type = other DNA
tactccaaagcaaacgagaat

SEQ ID NO: 22583 - DNA, 21 bp, synthetic construct
  source 1..21: mol_type = other DNA; mol_type = other DNA
tacttcaccggacagttagag

SEQ ID NO: 22584 - DNA, 21 bp, synthetic construct
  source 1..21: mol_type = other DNA; mol_type = other DNA
gaccttaccagccgagagtgg

SEQ ID NO: 22585 - DNA, 21 bp, synthetic construct
  source 1..21: mol_type = other DNA; mol_type = other DNA
tactcgaagatgaacgataac

SEQ ID NO: 22586 - DNA, 21 bp, synthetic construct
  source 1..21: mol_type = other DNA; mol_type = other DNA
ctaagtcgtcttagttcagat

SEQ ID NO: 22587 - DNA, 21 bp, synthetic construct
  source 1..21: mol_type = other DNA; mol_type = other DNA
tatttcagtggtattcagctt

SEQ ID NO: 22588 - DNA, 21 bp, synthetic construct
  source 1..21: mol_type = other DNA; mol_type = other DNA
ctcagtagagtgtcggtaaac

SEQ ID NO: 22589 - DNA, 21 bp, synthetic construct
  source 1..21: mol_type = other DNA; mol_type = other DNA
aaatcggatttcgttacctat

SEQ ID NO: 22590 - DNA, 21 bp, synthetic construct
  source 1..21: mol_type = other DNA; mol_type = other DNA
gacttgcgtgcttctacgtgg

SEQ ID NO: 22591 - DNA, 21 bp, synthetic construct
  source 1..21: mol_type = other DNA; mol_type = other DNA
ctgcataggctctccgatcca

SEQ ID NO: 22592 - DNA, 21 bp, synthetic construct
  source 1..21: mol_type = other DNA; mol_type = other DNA
cgtgacgaaaccgtttttcca

SEQ ID NO: 22593 - DNA, 21 bp, synthetic construct
  source 1..21: mol_type = other DNA; mol_type = other DNA
tatagcaagatagggtttaac

SEQ ID NO: 22594 - DNA, 21 bp, synthetic construct
  source 1..21: mol_type = other DNA; mol_type = other DNA
atcttagcaagcgctacatgg

SEQ ID NO: 22595 - DNA, 21 bp, synthetic construct
  source 1..21: mol_type = other DNA; mol_type = other DNA
agagaggagacggtatactgg

SEQ ID NO: 22596 - DNA, 21 bp, synthetic construct
  source 1..21: mol_type = other DNA; mol_type = other DNA
tatttcagcggcaagaaagaa

SEQ ID NO: 22597 - DNA, 21 bp, synthetic construct
  source 1..21: mol_type = other DNA; mol_type = other DNA
tatcataaacttaatgctaac

SEQ ID NO: 22598 - DNA, 21 bp, synthetic construct
  source 1..21: mol_type = other DNA; mol_type = other DNA
tacgcaaaaactggcttcaat

SEQ ID NO: 22599 - DNA, 21 bp, synthetic construct
  source 1..21: mol_type = other DNA; mol_type = other DNA
ttggcaagaaatggatggaat

SEQ ID NO: 22600 - DNA, 21 bp, synthetic construct
  source 1..21: mol_type = other DNA; mol_type = other DNA
tattttacaggcatcactagt

SEQ ID NO: 22601 - DNA, 21 bp, synthetic construct
  source 1..21: mol_type = other DNA; mol_type = other DNA
tatctaaaaagtcagagcaat

SEQ ID NO: 22602 - DNA, 21 bp, synthetic construct
  source 1..21: mol_type = other DNA; mol_type = other DNA
tatttcactggaaaagctgat

SEQ ID NO: 22603 - DNA, 21 bp, synthetic construct
  source 1..21: mol_type = other DNA; mol_type = other DNA
tacttcaccggaatacaatcc

SEQ ID NO: 22604 - DNA, 21 bp, synthetic construct
  source 1..21: mol_type = other DNA; mol_type = other DNA
ctagatgactacacaacgtgg

SEQ ID NO: 22605 - DNA, 21 bp, synthetic construct
  source 1..21: mol_type = other DNA; mol_type = other DNA
aaagatgattatactgtgttc

SEQ ID NO: 22606 - DNA, 21 bp, synthetic construct
  source 1..21: mol_type = other DNA; mol_type = other DNA
tttagtaagttgaattccaat

SEQ ID NO: 22607 - DNA, 21 bp, synthetic construct
  source 1..21: mol_type = other DNA; mol_type = other DNA
tactccaaagccaatgcaaat

SEQ ID NO: 22608 - DNA, 21 bp, synthetic construct
  source 1..21: mol_type = other DNA; mol_type = other DNA
gacttgagcagtcaaaaatgg

SEQ ID NO: 22609 - DNA, 21 bp, synthetic construct
  source 1..21: mol_type = other DNA; mol_type = other DNA
tactcaaaggctaatttgaat

SEQ ID NO: 22610 - DNA, 21 bp, synthetic construct
  source 1..21: mol_type = other DNA; mol_type = other DNA
ctacaccgcctccagttagat

SEQ ID NO: 22611 - DNA, 21 bp, synthetic construct
  source 1..21: mol_type = other DNA; mol_type = other DNA
taccacaaggcacagatgaac

SEQ ID NO: 22612 - DNA, 21 bp, synthetic construct
  source 1..21: mol_type = other DNA; mol_type = other DNA
cgcatggtggatgttttcccc

SEQ ID NO: 22613 - DNA, 21 bp, synthetic construct
  source 1..21: mol_type = other DNA; mol_type = other DNA
cgtctcgaaagtgcgaactgg

SEQ ID NO: 22614 - DNA, 21 bp, synthetic construct
  source 1..21: mol_type = other DNA; mol_type = other DNA
tatgctaaaatgggccctaat

SEQ ID NO: 22615 - DNA, 21 bp, synthetic construct
  source 1..21: mol_type = other DNA; mol_type = other DNA
tatttctctggtaagattgaa

SEQ ID NO: 22616 - DNA, 21 bp, synthetic construct
  source 1..21: mol_type = other DNA; mol_type = other DNA
gtgctctctagttctcagtgg

SEQ ID NO: 22617 - DNA, 21 bp, synthetic construct
  source 1..21: mol_type = other DNA; mol_type = other DNA
ttgcaccggctctcgcacgat

SEQ ID NO: 22618 - DNA, 21 bp, synthetic construct
  source 1..21: mol_type = other DNA; mol_type = other DNA
tattttagcggcgtcaaagcg

SEQ ID NO: 22619 - DNA, 21 bp, synthetic construct
  source 1..21: mol_type = other DNA; mol_type = other DNA
ctgcaccgcttacaggacaac

SEQ ID NO: 22620 - DNA, 21 bp, synthetic construct
  source 1..21: mol_type = other DNA; mol_type = other DNA
tccgatggatgtagcaagtgg

SEQ ID NO: 22621 - DNA, 21 bp, synthetic construct
  source 1..21: mol_type = other DNA; mol_type = other DNA
tattttgcaggccgcatcgca

SEQ ID NO: 22622 - DNA, 21 bp, synthetic construct
  source 1..21: mol_type = other DNA; mol_type = other DNA
tacagtaaaactggaatgaat

SEQ ID NO: 22623 - DNA, 21 bp, synthetic construct
  source 1..21: mol_type = other DNA; mol_type = other DNA
tatttttccggtgtaaaggat

SEQ ID NO: 22624 - DNA, 21 bp, synthetic construct
  source 1..21: mol_type = other DNA; mol_type = other DNA
tactttacaggtcaaacggaa

SEQ ID NO: 22625 - DNA, 21 bp, synthetic construct
  source 1..21: mol_type = other DNA; mol_type = other DNA
cgaacctacgattcgttcgtg

SEQ ID NO: 22626 - DNA, 21 bp, synthetic construct
  source 1..21: mol_type = other DNA; mol_type = other DNA
ctttgcaggccttgtggcgaa

SEQ ID NO: 22627 - DNA, 21 bp, synthetic construct
  source 1..21: mol_type = other DNA; mol_type = other DNA
tactcgaaaatcgggctaaac

SEQ ID NO: 22628 - DNA, 21 bp, synthetic construct
  source 1..21: mol_type = other DNA; mol_type = other DNA
tacacaaaattaaacccgaac

SEQ ID NO: 22629 - DNA, 21 bp, synthetic construct
  source 1..21: mol_type = other DNA; mol_type = other DNA
tggtttagcgggataaaggaa

SEQ ID NO: 22630 - DNA, 21 bp, synthetic construct
  source 1..21: mol_type = other DNA; mol_type = other DNA
cttcataggttgggcgatgac

SEQ ID NO: 22631 - DNA, 21 bp, synthetic construct
  source 1..21: mol_type = other DNA; mol_type = other DNA
aggttagagtccgctaattgg

SEQ ID NO: 22632 - DNA, 21 bp, synthetic construct
  source 1..21: mol_type = other DNA; mol_type = other DNA
aacatggcgtccgcaaagtgg

SEQ ID NO: 22633 - DNA, 21 bp, synthetic construct
  source 1..21: mol_type = other DNA; mol_type = other DNA
tatttctctaaaatcgttgca

SEQ ID NO: 22634 - DNA, 21 bp, synthetic construct
  source 1..21: mol_type = other DNA; mol_type = other DNA
ctacaccgtttgagtgaggac

SEQ ID NO: 22635 - DNA, 21 bp, synthetic construct
  source 1..21: mol_type = other DNA; mol_type = other DNA
gtatggtcgacaaatggccgt

SEQ ID NO: 22636 - DNA, 21 bp, synthetic construct
  source 1..21: mol_type = other DNA; mol_type = other DNA
gtattgagcgatcgaaattgg

SEQ ID NO: 22637 - DNA, 21 bp, synthetic construct
  source 1..21: mol_type = other DNA; mol_type = other DNA
agggatgaattcacaagctac

SEQ ID NO: 22638 - DNA, 21 bp, synthetic construct
  source 1..21: mol_type = other DNA; mol_type = other DNA
tacagtaagaccgggagcaac

SEQ ID NO: 22639 - DNA, 21 bp, synthetic construct
  source 1..21: mol_type = other DNA; mol_type = other DNA
aaaatgcctagtagggactgg

SEQ ID NO: 22640 - DNA, 21 bp, synthetic construct
  source 1..21: mol_type = other DNA; mol_type = other DNA
acggaaagcactaacggacgt

SEQ ID NO: 22641 - DNA, 21 bp, synthetic construct
  source 1..21: mol_type = other DNA; mol_type = other DNA
cggtccgagtttgtggtttat

SEQ ID NO: 22642 - DNA, 21 bp, synthetic construct
  source 1..21: mol_type = other DNA; mol_type = other DNA
tattttactggagtgctcgcc

SEQ ID NO: 22643 - DNA, 21 bp, synthetic construct
  source 1..21: mol_type = other DNA; mol_type = other DNA
taccataagatgatgcttaac

SEQ ID NO: 22644 - DNA, 21 bp, synthetic construct
  source 1..21: mol_type = other DNA; mol_type = other DNA
gatacttatgatagctaccct

SEQ ID NO: 22645 - DNA, 21 bp, synthetic construct
  source 1..21: mol_type = other DNA; mol_type = other DNA
tactttgcagggaaaattgcg

SEQ ID NO: 22646 - DNA, 21 bp, synthetic construct
  source 1..21: mol_type = other DNA; mol_type = other DNA
aagggagagtcgagagagtgg

SEQ ID NO: 22647 - DNA, 21 bp, synthetic construct
  source 1..21: mol_type = other DNA; mol_type = other DNA
tatagcaagactggagcgaac

SEQ ID NO: 22648 - DNA, 21 bp, synthetic construct
  source 1..21: mol_type = other DNA; mol_type = other DNA
aaattgcaagagcgtacctgg

SEQ ID NO: 22649 - DNA, 21 bp, synthetic construct
  source 1..21: mol_type = other DNA; mol_type = other DNA
cgtgacatggaagtttatccg

SEQ ID NO: 22650 - DNA, 21 bp, synthetic construct
  source 1..21: mol_type = other DNA; mol_type = other DNA
ggtggggagtcgtcatcatgg

SEQ ID NO: 22651 - DNA, 21 bp, synthetic construct
  source 1..21: mol_type = other DNA; mol_type = other DNA
tactttacaggcaagactgag

SEQ ID NO: 22652 - DNA, 21 bp, synthetic construct
  source 1..21: mol_type = other DNA; mol_type = other DNA
ttcagcaaagttggctacaac

SEQ ID NO: 22653 - DNA, 21 bp, synthetic construct
  source 1..21: mol_type = other DNA; mol_type = other DNA
tacagcaagttcggtcccaac

SEQ ID NO: 22654 - DNA, 21 bp, synthetic construct
  source 1..21: mol_type = other DNA; mol_type = other DNA
tatttaaaatatgatccgtta

SEQ ID NO: 22655 - DNA, 21 bp, synthetic construct
  source 1..21: mol_type = other DNA; mol_type = other DNA
aacgatgggtcgagcaagtgg

SEQ ID NO: 22656 - DNA, 21 bp, synthetic construct
  source 1..21: mol_type = other DNA; mol_type = other DNA
tacagcaagagcggcttaaat

SEQ ID NO: 22657 - DNA, 21 bp, synthetic construct
  source 1..21: mol_type = other DNA; mol_type = other DNA
tactttacagggaagcttgac

SEQ ID NO: 22658 - DNA, 21 bp, synthetic construct
  source 1..21: mol_type = other DNA; mol_type = other DNA
tatttcacgggcacagtcgat

SEQ ID NO: 22659 - DNA, 21 bp, synthetic construct
  source 1..21: mol_type = other DNA; mol_type = other DNA
cgagaggaaggagtgtcatgg

SEQ ID NO: 22660 - DNA, 21 bp, synthetic construct
  source 1..21: mol_type = other DNA; mol_type = other DNA
ctaacgcgtctgtctcccgac

SEQ ID NO: 22661 - DNA, 21 bp, synthetic construct
  source 1..21: mol_type = other DNA; mol_type = other DNA
ttgcaccgcttgactgaggac

SEQ ID NO: 22662 - DNA, 21 bp, synthetic construct
  source 1..21: mol_type = other DNA; mol_type = other DNA
aggactggtgatgcataccca

SEQ ID NO: 22663 - DNA, 21 bp, synthetic construct
  source 1..21: mol_type = other DNA; mol_type = other DNA
agagacgattttgtaaagtgg

SEQ ID NO: 22664 - DNA, 21 bp, synthetic construct
  source 1..21: mol_type = other DNA; mol_type = other DNA
ttctccagactgaacgatgat

SEQ ID NO: 22665 - DNA, 21 bp, synthetic construct
  source 1..21: mol_type = other DNA; mol_type = other DNA
aggttgtcatcgcaaacatgg

SEQ ID NO: 22666 - DNA, 21 bp, synthetic construct
  source 1..21: mol_type = other DNA; mol_type = other DNA
cgctcggaatttgtgtcatac

SEQ ID NO: 22667 - DNA, 21 bp, synthetic construct
  source 1..21: mol_type = other DNA; mol_type = other DNA
tatagtaaggctaacgcaaac

SEQ ID NO: 22668 - DNA, 21 bp, synthetic construct
  source 1..21: mol_type = other DNA; mol_type = other DNA
acgcaaagtactaacggtgtt

SEQ ID NO: 22669 - DNA, 21 bp, synthetic construct
  source 1..21: mol_type = other DNA; mol_type = other DNA
tattcaaaagttggcagcaac

SEQ ID NO: 22670 - DNA, 21 bp, synthetic construct
  source 1..21: mol_type = other DNA; mol_type = other DNA
attcatagtactaacgggata

SEQ ID NO: 22671 - DNA, 21 bp, synthetic construct
  source 1..21: mol_type = other DNA; mol_type = other DNA
tacgtcagaagtgacaccggc

SEQ ID NO: 22672 - DNA, 21 bp, synthetic construct
  source 1..21: mol_type = other DNA; mol_type = other DNA
ttgttgcaaagtagtacatgg

SEQ ID NO: 22673 - DNA, 21 bp, synthetic construct
  source 1..21: mol_type = other DNA; mol_type = other DNA
cgtagcgaagagacctatcct

SEQ ID NO: 22674 - DNA, 21 bp, synthetic construct
  source 1..21: mol_type = other DNA; mol_type = other DNA
agaaccgcacaagtctatcca

SEQ ID NO: 22675 - DNA, 21 bp, synthetic construct
  source 1..21: mol_type = other DNA; mol_type = other DNA
tatataaagtcagacaaaatg

SEQ ID NO: 22676 - DNA, 21 bp, synthetic construct
  source 1..21: mol_type = other DNA; mol_type = other DNA
ctacatcgtctgggttatgat

SEQ ID NO: 22677 - DNA, 21 bp, synthetic construct
  source 1..21: mol_type = other DNA; mol_type = other DNA
gtcaaggggtcgtgtgagcaa

SEQ ID NO: 22678 - DNA, 21 bp, synthetic construct
  source 1..21: mol_type = other DNA; mol_type = other DNA
gtcgtgtcaacgaatggagtc

SEQ ID NO: 22679 - DNA, 21 bp, synthetic construct
  source 1..21: mol_type = other DNA; mol_type = other DNA
attttggcctcacgtgattgg

SEQ ID NO: 22680 - DNA, 21 bp, synthetic construct
  source 1..21: mol_type = other DNA; mol_type = other DNA
tactttatgggggtcaaagag

SEQ ID NO: 22681 - DNA, 21 bp, synthetic construct
  source 1..21: mol_type = other DNA; mol_type = other DNA
tggttctctggaatcaaagag

SEQ ID NO: 22682 - DNA, 21 bp, synthetic construct
  source 1..21: mol_type = other DNA; mol_type = other DNA
cggatgagcgacgctttccct

SEQ ID NO: 22683 - DNA, 21 bp, synthetic construct
  source 1..21: mol_type = other DNA; mol_type = other DNA
cggttgagcgacgcttatccg

SEQ ID NO: 22684 - DNA, 21 bp, synthetic construct
  source 1..21: mol_type = other DNA; mol_type = other DNA
cacgagagtacaaacggggtt

SEQ ID NO: 22685 - DNA, 21 bp, synthetic construct
  source 1..21: mol_type = other DNA; mol_type = other DNA
cccatgggatcgagtcaatgg

SEQ ID NO: 22686 - DNA, 21 bp, synthetic construct
  source 1..21: mol_type = other DNA; mol_type = other DNA
tatttcaccggccaactcgac

SEQ ID NO: 22687 - DNA, 21 bp, synthetic construct
  source 1..21: mol_type = other DNA; mol_type = other DNA
cgtgatgaattccatagtttt

SEQ ID NO: 22688 - DNA, 21 bp, synthetic construct
  source 1..21: mol_type = other DNA; mol_type = other DNA
tacctcaagagccaagcgagt

SEQ ID NO: 22689 - DNA, 21 bp, synthetic construct
  source 1..21: mol_type = other DNA; mol_type = other DNA
tactttagcaagattgtcgcg

SEQ ID NO: 22690 - DNA, 21 bp, synthetic construct
  source 1..21: mol_type = other DNA; mol_type = other DNA
tatcacaaattaaacaacaac

SEQ ID NO: 22691 - DNA, 21 bp, synthetic construct
  source 1..21: mol_type = other DNA; mol_type = other DNA
agagaggaatacgtgacgtac

SEQ ID NO: 22692 - DNA, 21 bp, synthetic construct
  source 1..21: mol_type = other DNA; mol_type = other DNA
gtagacagcacaaacggcgta

SEQ ID NO: 22693 - DNA, 21 bp, synthetic construct
  source 1..21: mol_type = other DNA; mol_type = other DNA
tactccaaaataggttcaaat

SEQ ID NO: 22694 - DNA, 21 bp, synthetic construct
  source 1..21: mol_type = other DNA; mol_type = other DNA
aggacacccacaacataccca

SEQ ID NO: 22695 - DNA, 21 bp, synthetic construct
  source 1..21: mol_type = other DNA; mol_type = other DNA
aaggatgactatagcacttgg

SEQ ID NO: 22696 - DNA, 21 bp, synthetic construct
  source 1..21: mol_type = other DNA; mol_type = other DNA
tattcgaagctcggaggtaat

SEQ ID NO: 22697 - DNA, 21 bp, synthetic construct
  source 1..21: mol_type = other DNA; mol_type = other DNA
cgcatgccagacgcttacccc

SEQ ID NO: 22698 - DNA, 21 bp, synthetic construct
  source 1..21: mol_type = other DNA; mol_type = other DNA
cgcgatgaacatgtttttcca

SEQ ID NO: 22699 - DNA, 21 bp, synthetic construct
  source 1..21: mol_type = other DNA; mol_type = other DNA
ctgagtcgtctttcccctctg

SEQ ID NO: 22700 - DNA, 21 bp, synthetic construct
  source 1..21: mol_type = other DNA; mol_type = other DNA
aaagacgaatttatgtcctac

SEQ ID NO: 22701 - DNA, 21 bp, synthetic construct
  source 1..21: mol_type = other DNA; mol_type = other DNA
attgggatcaaggggtgggat

SEQ ID NO: 22702 - DNA, 21 bp, synthetic construct
  source 1..21: mol_type = other DNA; mol_type = other DNA
ttagccagaactgctcccgat

SEQ ID NO: 22703 - DNA, 21 bp, synthetic construct
  source 1..21: mol_type = other DNA; mol_type = other DNA
aaggatgattatactacttat

SEQ ID NO: 22704 - DNA, 21 bp, synthetic construct
  source 1..21: mol_type = other DNA; mol_type = other DNA
taccataaacttaacgttgtg

SEQ ID NO: 22705 - DNA, 21 bp, synthetic construct
  source 1..21: mol_type = other DNA; mol_type = other DNA
tacacaaaatccgacaacagg

SEQ ID NO: 22706 - DNA, 21 bp, synthetic construct
  source 1..21: mol_type = other DNA; mol_type = other DNA
cgtatgtcagacgcctacccc

SEQ ID NO: 22707 - DNA, 21 bp, synthetic construct
  source 1..21: mol_type = other DNA; mol_type = other DNA
ctcagcaaagtcggaacgaat

SEQ ID NO: 22708 - DNA, 21 bp, synthetic construct
  source 1..21: mol_type = other DNA; mol_type = other DNA
ctgtgtcgtccgtgcttggaa

SEQ ID NO: 22709 - DNA, 21 bp, synthetic construct
  source 1..21: mol_type = other DNA; mol_type = other DNA
tattttactggtcatatcgaa

SEQ ID NO: 22710 - DNA, 21 bp, synthetic construct
  source 1..21: mol_type = other DNA; mol_type = other DNA
atggatgattataccatgtat

SEQ ID NO: 22711 - DNA, 21 bp, synthetic construct
  source 1..21: mol_type = other DNA; mol_type = other DNA
gatttggaaagtcgtgattgg

SEQ ID NO: 22712 - DNA, 21 bp, synthetic construct
  source 1..21: mol_type = other DNA; mol_type = other DNA
ctcgaaagtacaaacggaatt

SEQ ID NO: 22713 - DNA, 21 bp, synthetic construct
  source 1..21: mol_type = other DNA; mol_type = other DNA
tactcaaagatcggcaataac

SEQ ID NO: 22714 - DNA, 21 bp, synthetic construct
  source 1..21: mol_type = other DNA; mol_type = other DNA
aaagacgaatttgtgtcattt

SEQ ID NO: 22715 - DNA, 21 bp, synthetic construct
  source 1..21: mol_type = other DNA; mol_type = other DNA
tactttacaggcaccgtcgcg

SEQ ID NO: 22716 - DNA, 21 bp, synthetic construct
  source 1..21: mol_type = other DNA; mol_type = other DNA
gatatggagtcacgcgtttgg

SEQ ID NO: 22717 - DNA, 21 bp, synthetic construct
  source 1..21: mol_type = other DNA; mol_type = other DNA
agggaagaagatgtgtatccc

SEQ ID NO: 22718 - DNA, 21 bp, synthetic construct
  source 1..21: mol_type = other DNA; mol_type = other DNA
ctcagtcgcgttgggagggac

SEQ ID NO: 22719 - DNA, 21 bp, synthetic construct
  source 1..21: mol_type = other DNA; mol_type = other DNA
taccacaaaatgagcccagtt

SEQ ID NO: 22720 - DNA, 21 bp, synthetic construct
  source 1..21: mol_type = other DNA; mol_type = other DNA
gacctcagctcacgcgattgg

SEQ ID NO: 22721 - DNA, 21 bp, synthetic construct
  source 1..21: mol_type = other DNA; mol_type = other DNA
agagaggactttacgtcgtgg

SEQ ID NO: 22722 - DNA, 21 bp, synthetic construct
  source 1..21: mol_type = other DNA; mol_type = other DNA
gaattggaatcacgaagttgg

SEQ ID NO: 22723 - DNA, 21 bp, synthetic construct
  source 1..21: mol_type = other DNA; mol_type = other DNA
acaaattccacaaacggtgtg

SEQ ID NO: 22724 - DNA, 21 bp, synthetic construct
  source 1..21: mol_type = other DNA; mol_type = other DNA
tcagactccactaacggtagg

SEQ ID NO: 22725 - DNA, 21 bp, synthetic construct
  source 1..21: mol_type = other DNA; mol_type = other DNA
ttgcatagattgagccaagat

SEQ ID NO: 22726 - DNA, 21 bp, synthetic construct
  source 1..21: mol_type = other DNA; mol_type = other DNA
cgttccgagtcagtataccct

SEQ ID NO: 22727 - DNA, 21 bp, synthetic construct
  source 1..21: mol_type = other DNA; mol_type = other DNA
tatactaagagtgataatcga

SEQ ID NO: 22728 - DNA, 21 bp, synthetic construct
  source 1..21: mol_type = other DNA; mol_type = other DNA
tactcgaagcttaacaataat

SEQ ID NO: 22729 - DNA, 21 bp, synthetic construct
  source 1..21: mol_type = other DNA; mol_type = other DNA
gatccggcgagcagagagtgg

SEQ ID NO: 22730 - DNA, 21 bp, synthetic construct
  source 1..21: mol_type = other DNA; mol_type = other DNA
tacagcaaagccggttataac

SEQ ID NO: 22731 - DNA, 21 bp, synthetic construct
  source 1..21: mol_type = other DNA; mol_type = other DNA
aaagaagattatttaagttgg

SEQ ID NO: 22732 - DNA, 21 bp, synthetic construct
  source 1..21: mol_type = other DNA; mol_type = other DNA
tacacaagaatcgggcccgat

SEQ ID NO: 22733 - DNA, 21 bp, synthetic construct
  source 1..21: mol_type = other DNA; mol_type = other DNA
tacgcaaagtccggtctgaac

SEQ ID NO: 22734 - DNA, 21 bp, synthetic construct
  source 1..21: mol_type = other DNA; mol_type = other DNA
gatatggcgagcaacaggtgg

SEQ ID NO: 22735 - DNA, 21 bp, synthetic construct
  source 1..21: mol_type = other DNA; mol_type = other DNA
tacgtgaagagccagcaatgc

SEQ ID NO: 22736 - DNA, 21 bp, synthetic construct
  source 1..21: mol_type = other DNA; mol_type = other DNA
tacgcgaagactggtcataat

SEQ ID NO: 22737 - DNA, 21 bp, synthetic construct
  source 1..21: mol_type = other DNA; mol_type = other DNA
tattcaaagatagggcacaac

SEQ ID NO: 22738 - DNA, 21 bp, synthetic construct
  source 1..21: mol_type = other DNA; mol_type = other DNA
cggttggagagccgtgaatgg

SEQ ID NO: 22739 - DNA, 21 bp, synthetic construct
  source 1..21: mol_type = other DNA; mol_type = other DNA
tacttgaagtcacagtcaaat

SEQ ID NO: 22740 - DNA, 21 bp, synthetic construct
  source 1..21: mol_type = other DNA; mol_type = other DNA
attatggaatcggcgacatgg

SEQ ID NO: 22741 - DNA, 21 bp, synthetic construct
  source 1..21: mol_type = other DNA; mol_type = other DNA
cgcacgaaggaagtctatcca

SEQ ID NO: 22742 - DNA, 21 bp, synthetic construct
  source 1..21: mol_type = other DNA; mol_type = other DNA
tactcaaagacgggcaacaac

SEQ ID NO: 22743 - DNA, 21 bp, synthetic construct
  source 1..21: mol_type = other DNA; mol_type = other DNA
ttcagtaagctcaataataat

SEQ ID NO: 22744 - DNA, 21 bp, synthetic construct
  source 1..21: mol_type = other DNA; mol_type = other DNA
tacaccaaatcccaaactgat

SEQ ID NO: 22745 - DNA, 21 bp, synthetic construct
  source 1..21: mol_type = other DNA; mol_type = other DNA
ttgtctaaatcgggaccaaac

SEQ ID NO: 22746 - DNA, 21 bp, synthetic construct
  source 1..21: mol_type = other DNA; mol_type = other DNA
tacttcacggggcgcttggag

SEQ ID NO: 22747 - DNA, 21 bp, synthetic construct
  source 1..21: mol_type = other DNA; mol_type = other DNA
cgcttggatgatgtgtacccc

SEQ ID NO: 22748 - DNA, 21 bp, synthetic construct
  source 1..21: mol_type = other DNA; mol_type = other DNA
tggtttagtggaatcaaagag

SEQ ID NO: 22749 - DNA, 21 bp, synthetic construct
  source 1..21: mol_type = other DNA; mol_type = other DNA
tacttcagcaaggtgaaggaa

SEQ ID NO: 22750 - DNA, 21 bp, synthetic construct
  source 1..21: mol_type = other DNA; mol_type = other DNA
agggacgaattttcaccatat

SEQ ID NO: 22751 - DNA, 21 bp, synthetic construct
  source 1..21: mol_type = other DNA; mol_type = other DNA
tatgtaaagtcccaaaacggg

SEQ ID NO: 22752 - DNA, 21 bp, synthetic construct
  source 1..21: mol_type = other DNA; mol_type = other DNA
tacttcacgggtactgttgat

SEQ ID NO: 22753 - DNA, 21 bp, synthetic construct
  source 1..21: mol_type = other DNA; mol_type = other DNA
cactcaagattaggccccgac

SEQ ID NO: 22754 - DNA, 21 bp, synthetic construct
  source 1..21: mol_type = other DNA; mol_type = other DNA
gtgatggaggcaagatcttgg

SEQ ID NO: 22755 - DNA, 21 bp, synthetic construct
  source 1..21: mol_type = other DNA; mol_type = other DNA
atcacgtcgaccaacgggatc

SEQ ID NO: 22756 - DNA, 21 bp, synthetic construct
  source 1..21: mol_type = other DNA; mol_type = other DNA
ttccataaacttatgagtaac

SEQ ID NO: 22757 - DNA, 21 bp, synthetic construct
  source 1..21: mol_type = other DNA; mol_type = other DNA
agggaagatggcgtcacttgg

SEQ ID NO: 22758 - DNA, 21 bp, synthetic construct
  source 1..21: mol_type = other DNA; mol_type = other DNA
tatgtcaagatagctccgcat

SEQ ID NO: 22759 - DNA, 21 bp, synthetic construct
  source 1..21: mol_type = other DNA; mol_type = other DNA
gctgaatcaactaacggtaga

SEQ ID NO: 22760 - DNA, 21 bp, synthetic construct
  source 1..21: mol_type = other DNA; mol_type = other DNA
taccacgctaaacagattaac

SEQ ID NO: 22761 - DNA, 21 bp, synthetic construct
  source 1..21: mol_type = other DNA; mol_type = other DNA
ttcgctaagagcggtcctaat

SEQ ID NO: 22762 - DNA, 21 bp, synthetic construct
  source 1..21: mol_type = other DNA; mol_type = other DNA
atacacagattgggccctgac

SEQ ID NO: 22763 - DNA, 21 bp, synthetic construct
  source 1..21: mol_type = other DNA; mol_type = other DNA
tattttagcggtgtgaaagat

SEQ ID NO: 22764 - DNA, 21 bp, synthetic construct
  source 1..21: mol_type = other DNA; mol_type = other DNA
ccaatggagtcattgaaatgg

SEQ ID NO: 22765 - DNA, 21 bp, synthetic construct
  source 1..21: mol_type = other DNA; mol_type = other DNA
tactcaaaaattggctttaat

SEQ ID NO: 22766 - DNA, 21 bp, synthetic construct
  source 1..21: mol_type = other DNA; mol_type = other DNA
gaggcactcgagggacgggac

SEQ ID NO: 22767 - DNA, 21 bp, synthetic construct
  source 1..21: mol_type = other DNA; mol_type = other DNA
gatttatcggatcgccggtgg

SEQ ID NO: 22768 - DNA, 21 bp, synthetic construct
  source 1..21: mol_type = other DNA; mol_type = other DNA
tatagcaaagtagggctcaac

SEQ ID NO: 22769 - DNA, 21 bp, synthetic construct
  source 1..21: mol_type = other DNA; mol_type = other DNA
aggatggacgacgtatacccg

SEQ ID NO: 22770 - DNA, 21 bp, synthetic construct
  source 1..21: mol_type = other DNA; mol_type = other DNA
tacgtcaagtcacaaaacatg

SEQ ID NO: 22771 - DNA, 21 bp, synthetic construct
  source 1..21: mol_type = other DNA; mol_type = other DNA
tatttgaaaagtcagagctgt

SEQ ID NO: 22772 - DNA, 21 bp, synthetic construct
  source 1..21: mol_type = other DNA; mol_type = other DNA
gcatcgtccacgaacggtcgg

SEQ ID NO: 22773 - DNA, 21 bp, synthetic construct
  source 1..21: mol_type = other DNA; mol_type = other DNA
tattccaaacttagcaccaat

SEQ ID NO: 22774 - DNA, 21 bp, synthetic construct
  source 1..21: mol_type = other DNA; mol_type = other DNA
aggggcctggaggggatggat

SEQ ID NO: 22775 - DNA, 21 bp, synthetic construct
  source 1..21: mol_type = other DNA; mol_type = other DNA
atggacgattataatcctttt

SEQ ID NO: 22776 - DNA, 21 bp, synthetic construct
  source 1..21: mol_type = other DNA; mol_type = other DNA
ctccacaggttgtccatggac

SEQ ID NO: 22777 - DNA, 21 bp, synthetic construct
  source 1..21: mol_type = other DNA; mol_type = other DNA
cgcctcgaatcacagtcgtgg

SEQ ID NO: 22778 - DNA, 21 bp, synthetic construct
  source 1..21: mol_type = other DNA; mol_type = other DNA
tatcataagttaaacccgatg

SEQ ID NO: 22779 - DNA, 21 bp, synthetic construct
  source 1..21: mol_type = other DNA; mol_type = other DNA
tacagcaaactccagcctacg

SEQ ID NO: 22780 - DNA, 21 bp, synthetic construct
  source 1..21: mol_type = other DNA; mol_type = other DNA
gttaggagtacaaacggagtc

SEQ ID NO: 22781 - DNA, 21 bp, synthetic construct
  source 1..21: mol_type = other DNA; mol_type = other DNA
tattttacgggagtgagttta

SEQ ID NO: 22782 - DNA, 21 bp, synthetic construct
  source 1..21: mol_type = other DNA; mol_type = other DNA
ttacacaggttgttgccggtg

SEQ ID NO: 22783 - DNA, 21 bp, synthetic construct
  source 1..21: mol_type = other DNA; mol_type = other DNA
tatgtgaaatcacagatgtcg

SEQ ID NO: 22784 - DNA, 21 bp, synthetic construct
  source 1..21: mol_type = other DNA; mol_type = other DNA
ttacaccggctaagccaagac

SEQ ID NO: 22785 - DNA, 21 bp, synthetic construct
  source 1..21: mol_type = other DNA; mol_type = other DNA
atgtttgacggcactatggct

SEQ ID NO: 22786 - DNA, 21 bp, synthetic construct
  source 1..21: mol_type = other DNA; mol_type = other DNA
aggacttatgacagttttgta

SEQ ID NO: 22787 - DNA, 21 bp, synthetic construct
  source 1..21: mol_type = other DNA; mol_type = other DNA
aggactctcgacgcatttccg

SEQ ID NO: 22788 - DNA, 21 bp, synthetic construct
  source 1..21: mol_type = other DNA; mol_type = other DNA
gatttgacatctcgggaatgg

SEQ ID NO: 22789 - DNA, 21 bp, synthetic construct
  source 1..21: mol_type = other DNA; mol_type = other DNA
gacatggcctcacagcaatgg

SEQ ID NO: 22790 - DNA, 21 bp, synthetic construct
  source 1..21: mol_type = other DNA; mol_type = other DNA
aacgatggtacaagcaagtgg

SEQ ID NO: 22791 - DNA, 21 bp, synthetic construct
  source 1..21: mol_type = other DNA; mol_type = other DNA
gatatgggatcgcataaatgg

SEQ ID NO: 22792 - DNA, 21 bp, synthetic construct
  source 1..21: mol_type = other DNA; mol_type = other DNA
tactttaccggtaagcaggag

SEQ ID NO: 22793 - DNA, 21 bp, synthetic construct
  source 1..21: mol_type = other DNA; mol_type = other DNA
ggcggcgaaaccagtacctgg

SEQ ID NO: 22794 - DNA, 21 bp, synthetic construct
  source 1..21: mol_type = other DNA; mol_type = other DNA
tactttacaggtcaagtggag

SEQ ID NO: 22795 - DNA, 21 bp, synthetic construct
  source 1..21: mol_type = other DNA; mol_type = other DNA
gatttgctatccagggactgg

SEQ ID NO: 22796 - DNA, 21 bp, synthetic construct
  source 1..21: mol_type = other DNA; mol_type = other DNA
ctcagcagaatcggtgataac

SEQ ID NO: 22797 - DNA, 21 bp, synthetic construct
  source 1..21: mol_type = other DNA; mol_type = other DNA
agaacatttgacgtgtttccg

SEQ ID NO: 22798 - DNA, 21 bp, synthetic construct
  source 1..21: mol_type = other DNA; mol_type = other DNA
tatagtaagttaggcattaat

SEQ ID NO: 22799 - DNA, 21 bp, synthetic construct
  source 1..21: mol_type = other DNA; mol_type = other DNA
accgacgaaacagtgtaccgg

SEQ ID NO: 22800 - DNA, 21 bp, synthetic construct
  source 1..21: mol_type = other DNA; mol_type = other DNA
cgccttagcgatgcctacccg

SEQ ID NO: 22801 - DNA, 21 bp, synthetic construct
  source 1..21: mol_type = other DNA; mol_type = other DNA
acgcaaagtacgaatggaata

SEQ ID NO: 22802 - DNA, 21 bp, synthetic construct
  source 1..21: mol_type = other DNA; mol_type = other DNA
tattttacaggggtgcaggct

SEQ ID NO: 22803 - DNA, 21 bp, synthetic construct
  source 1..21: mol_type = other DNA; mol_type = other DNA
ttcagtaagctcaacacgaac

SEQ ID NO: 22804 - DNA, 21 bp, synthetic construct
  source 1..21: mol_type = other DNA; mol_type = other DNA
tacgtaaagagtgatatggcc

SEQ ID NO: 22805 - DNA, 21 bp, synthetic construct
  source 1..21: mol_type = other DNA; mol_type = other DNA
tatgcaaaatcaggacagaat

SEQ ID NO: 22806 - DNA, 21 bp, synthetic construct
  source 1..21: mol_type = other DNA; mol_type = other DNA
cttagtaaaataggcgtcaat

SEQ ID NO: 22807 - DNA, 21 bp, synthetic construct
  source 1..21: mol_type = other DNA; mol_type = other DNA
tactcaaaactcaacgtgaac

SEQ ID NO: 22808 - DNA, 21 bp, synthetic construct
  source 1..21: mol_type = other DNA; mol_type = other DNA
atcatggagtcacgtaaatgg

SEQ ID NO: 22809 - DNA, 21 bp, synthetic construct
  source 1..21: mol_type = other DNA; mol_type = other DNA
cttcacagattacaagtcagt

SEQ ID NO: 22810 - DNA, 21 bp, synthetic construct
  source 1..21: mol_type = other DNA; mol_type = other DNA
ttttcaaaagtcggatttaac

SEQ ID NO: 22811 - DNA, 21 bp, synthetic construct
  source 1..21: mol_type = other DNA; mol_type = other DNA
tatagtaaagcggggggaaac

SEQ ID NO: 22812 - DNA, 21 bp, synthetic construct
  source 1..21: mol_type = other DNA; mol_type = other DNA
gtggggagtacaaacggaata

SEQ ID NO: 22813 - DNA, 21 bp, synthetic construct
  source 1..21: mol_type = other DNA; mol_type = other DNA
aatatggccagccacacttgg

SEQ ID NO: 22814 - DNA, 21 bp, synthetic construct
  source 1..21: mol_type = other DNA; mol_type = other DNA
ctgagtaaggcatccactaac

SEQ ID NO: 22815 - DNA, 21 bp, synthetic construct
  source 1..21: mol_type = other DNA; mol_type = other DNA
aggagtgagttcgttagttat

SEQ ID NO: 22816 - DNA, 21 bp, synthetic construct
  source 1..21: mol_type = other DNA; mol_type = other DNA
ctagcaaagagcggcaataac

SEQ ID NO: 22817 - DNA, 21 bp, synthetic construct
  source 1..21: mol_type = other DNA; mol_type = other DNA
tatcatgctcaaggacctaat

SEQ ID NO: 22818 - DNA, 21 bp, synthetic construct
  source 1..21: mol_type = other DNA; mol_type = other DNA
ctccatcgcctcatggaggat

SEQ ID NO: 22819 - DNA, 21 bp, synthetic construct
  source 1..21: mol_type = other DNA; mol_type = other DNA
ctgcatagattaagtgtggta

SEQ ID NO: 22820 - DNA, 21 bp, synthetic construct
  source 1..21: mol_type = other DNA; mol_type = other DNA
tacagcaaaatgaatgagaat

SEQ ID NO: 22821 - DNA, 21 bp, synthetic construct
  source 1..21: mol_type = other DNA; mol_type = other DNA
ctccacaggctttcaagcaat

SEQ ID NO: 22822 - DNA, 21 bp, synthetic construct
  source 1..21: mol_type = other DNA; mol_type = other DNA
ataatgagcagtagctcttgg

SEQ ID NO: 22823 - DNA, 21 bp, synthetic construct
  source 1..21: mol_type = other DNA; mol_type = other DNA
ctctcacggatcgggaccaat

SEQ ID NO: 22824 - DNA, 21 bp, synthetic construct
  source 1..21: mol_type = other DNA; mol_type = other DNA
cgcgatgacttcactgtttac

SEQ ID NO: 22825 - DNA, 21 bp, synthetic construct
  source 1..21: mol_type = other DNA; mol_type = other DNA
tgtgccccggactatcgcctc

SEQ ID NO: 22826 - DNA, 21 bp, synthetic construct
  source 1..21: mol_type = other DNA; mol_type = other DNA
ctccataggctaacggaagat

SEQ ID NO: 22827 - DNA, 21 bp, synthetic construct
  source 1..21: mol_type = other DNA; mol_type = other DNA
tattctaagtccgggaacaat

SEQ ID NO: 22828 - DNA, 21 bp, synthetic construct
  source 1..21: mol_type = other DNA; mol_type = other DNA
cgagaagagacggtcttcccc

SEQ ID NO: 22829 - DNA, 21 bp, synthetic construct
  source 1..21: mol_type = other DNA; mol_type = other DNA
tacagtaaactcaataacaat

SEQ ID NO: 22830 - DNA, 21 bp, synthetic construct
  source 1..21: mol_type = other DNA; mol_type = other DNA
ttgcacaagctaaccactgac

SEQ ID NO: 22831 - DNA, 21 bp, synthetic construct
  source 1..21: mol_type = other DNA; mol_type = other DNA
ttaagcagagtaggacgggat

SEQ ID NO: 22832 - DNA, 21 bp, synthetic construct
  source 1..21: mol_type = other DNA; mol_type = other DNA
tattcaaaaagtggcattaat

SEQ ID NO: 22833 - DNA, 21 bp, synthetic construct
  source 1..21: mol_type = other DNA; mol_type = other DNA
tactttactgggcgtgttgaa

SEQ ID NO: 22834 - DNA, 21 bp, synthetic construct
  source 1..21: mol_type = other DNA; mol_type = other DNA
gaaggtatttcacgtgattgg

SEQ ID NO: 22835 - DNA, 21 bp, synthetic construct
  source 1..21: mol_type = other DNA; mol_type = other DNA
tatcataagaaacaagaaaac

SEQ ID NO: 22836 - DNA, 21 bp, synthetic construct
  source 1..21: mol_type = other DNA; mol_type = other DNA
tatagcaagttgaacttcaat

SEQ ID NO: 22837 - DNA, 21 bp, synthetic construct
  source 1..21: mol_type = other DNA; mol_type = other DNA
aaagatgactattcaacgtat

SEQ ID NO: 22838 - DNA, 21 bp, synthetic construct
  source 1..21: mol_type = other DNA; mol_type = other DNA
gtacaaagtacaaatggtcgc

SEQ ID NO: 22839 - DNA, 21 bp, synthetic construct
  source 1..21: mol_type = other DNA; mol_type = other DNA
ataatgagtcatgcaacatgg

SEQ ID NO: 22840 - DNA, 21 bp, synthetic construct
  source 1..21: mol_type = other DNA; mol_type = other DNA
cgagaggacggggtaacgtgg

SEQ ID NO: 22841 - DNA, 21 bp, synthetic construct
  source 1..21: mol_type = other DNA; mol_type = other DNA
tacagtaaggcgaatataaac

SEQ ID NO: 22842 - DNA, 21 bp, synthetic construct
  source 1..21: mol_type = other DNA; mol_type = other DNA
tacgtaaagagtcaaccctgc

SEQ ID NO: 22843 - DNA, 21 bp, synthetic construct
  source 1..21: mol_type = other DNA; mol_type = other DNA
ttatcaaaggttggcacgaac

SEQ ID NO: 22844 - DNA, 21 bp, synthetic construct
  source 1..21: mol_type = other DNA; mol_type = other DNA
actgagtctacaaacggcaga

SEQ ID NO: 22845 - DNA, 21 bp, synthetic construct
  source 1..21: mol_type = other DNA; mol_type = other DNA
gtaatgaatgacgcgttccct

SEQ ID NO: 22846 - DNA, 21 bp, synthetic construct
  source 1..21: mol_type = other DNA; mol_type = other DNA
tacagtaaacacggtcccaac

SEQ ID NO: 22847 - DNA, 21 bp, synthetic construct
  source 1..21: mol_type = other DNA; mol_type = other DNA
tacttctcgggccaagtagaa

SEQ ID NO: 22848 - DNA, 21 bp, synthetic construct
  source 1..21: mol_type = other DNA; mol_type = other DNA
aggactgaaacaacgtaccct

SEQ ID NO: 22849 - DNA, 21 bp, synthetic construct
  source 1..21: mol_type = other DNA; mol_type = other DNA
agagatatcgacgtgttcccc

SEQ ID NO: 22850 - DNA, 21 bp, synthetic construct
  source 1..21: mol_type = other DNA; mol_type = other DNA
gagggaatcagtagagactgg

SEQ ID NO: 22851 - DNA, 21 bp, synthetic construct
  source 1..21: mol_type = other DNA; mol_type = other DNA
aggatggaaagctcggtttgg

SEQ ID NO: 22852 - DNA, 21 bp, synthetic construct
  source 1..21: mol_type = other DNA; mol_type = other DNA
tatttcactggtcaaactgaa

SEQ ID NO: 22853 - DNA, 21 bp, synthetic construct
  source 1..21: mol_type = other DNA; mol_type = other DNA
agagaggagactgtacgttgg

SEQ ID NO: 22854 - DNA, 21 bp, synthetic construct
  source 1..21: mol_type = other DNA; mol_type = other DNA
ctaagcaggttgaatgctgat

SEQ ID NO: 22855 - DNA, 21 bp, synthetic construct
  source 1..21: mol_type = other DNA; mol_type = other DNA
ttttcgaaagtggggtataat

SEQ ID NO: 22856 - DNA, 21 bp, synthetic construct
  source 1..21: mol_type = other DNA; mol_type = other DNA
tactcaaaattaggcaccaac

SEQ ID NO: 22857 - DNA, 21 bp, synthetic construct
  source 1..21: mol_type = other DNA; mol_type = other DNA
ttgcacaagagcggtatgaac

SEQ ID NO: 22858 - DNA, 21 bp, synthetic construct
  source 1..21: mol_type = other DNA; mol_type = other DNA
atccacagtacaaatggtgtc

SEQ ID NO: 22859 - DNA, 21 bp, synthetic construct
  source 1..21: mol_type = other DNA; mol_type = other DNA
aggaatgagagtgtttacccc

SEQ ID NO: 22860 - DNA, 21 bp, synthetic construct
  source 1..21: mol_type = other DNA; mol_type = other DNA
gtcctctctgataggaactgg

SEQ ID NO: 22861 - DNA, 21 bp, synthetic construct
  source 1..21: mol_type = other DNA; mol_type = other DNA
aaagacgattatacgacctac

SEQ ID NO: 22862 - DNA, 21 bp, synthetic construct
  source 1..21: mol_type = other DNA; mol_type = other DNA
attatggcttctcgggactgg

SEQ ID NO: 22863 - DNA, 21 bp, synthetic construct
  source 1..21: mol_type = other DNA; mol_type = other DNA
ttgcacaaactcctcgttggt

SEQ ID NO: 22864 - DNA, 21 bp, synthetic construct
  source 1..21: mol_type = other DNA; mol_type = other DNA
ttcgcgaagaccggtccgaac

SEQ ID NO: 22865 - DNA, 21 bp, synthetic construct
  source 1..21: mol_type = other DNA; mol_type = other DNA
tattcgcgactcaacgacgac

SEQ ID NO: 22866 - DNA, 21 bp, synthetic construct
  source 1..21: mol_type = other DNA; mol_type = other DNA
aggatggaatctgcagtgtgg

SEQ ID NO: 22867 - DNA, 21 bp, synthetic construct
  source 1..21: mol_type = other DNA; mol_type = other DNA
ttggagtcacgtgaagggatt

SEQ ID NO: 22868 - DNA, 21 bp, synthetic construct
  source 1..21: mol_type = other DNA; mol_type = other DNA
cataccagcactaatggaatc

SEQ ID NO: 22869 - DNA, 21 bp, synthetic construct
  source 1..21: mol_type = other DNA; mol_type = other DNA
ttacataaactccaagtcacc

SEQ ID NO: 22870 - DNA, 21 bp, synthetic construct
  source 1..21: mol_type = other DNA; mol_type = other DNA
cttcacagattacaaagcact

SEQ ID NO: 22871 - DNA, 21 bp, synthetic construct
  source 1..21: mol_type = other DNA; mol_type = other DNA
ctgtcgcgcataagtccgaac

SEQ ID NO: 22872 - DNA, 21 bp, synthetic construct
  source 1..21: mol_type = other DNA; mol_type = other DNA
tatgtaaaaagccagttagac

SEQ ID NO: 22873 - DNA, 21 bp, synthetic construct
  source 1..21: mol_type = other DNA; mol_type = other DNA
tattcaaagttaaatgacaag

SEQ ID NO: 22874 - DNA, 21 bp, synthetic construct
  source 1..21: mol_type = other DNA; mol_type = other DNA
ttgagccgcgtaggttttaat

SEQ ID NO: 22875 - DNA, 21 bp, synthetic construct
  source 1..21: mol_type = other DNA; mol_type = other DNA
tacgtgaagcatgaccctcac

SEQ ID NO: 22876 - DNA, 21 bp, synthetic construct
  source 1..21: mol_type = other DNA; mol_type = other DNA
aaagacagtttcactagctgg

SEQ ID NO: 22877 - DNA, 21 bp, synthetic construct
  source 1..21: mol_type = other DNA; mol_type = other DNA
tattttacgggtcaactggaa

SEQ ID NO: 22878 - DNA, 21 bp, synthetic construct
  source 1..21: mol_type = other DNA; mol_type = other DNA
ctacacaaatcaggaatgaat

SEQ ID NO: 22879 - DNA, 21 bp, synthetic construct
  source 1..21: mol_type = other DNA; mol_type = other DNA
tatgctaagagtgggttcaat

SEQ ID NO: 22880 - DNA, 21 bp, synthetic construct
  source 1..21: mol_type = other DNA; mol_type = other DNA
gtatcggagttcaaggtttac

SEQ ID NO: 22881 - DNA, 21 bp, synthetic construct
  source 1..21: mol_type = other DNA; mol_type = other DNA
ttgcacagattgagtactaac

SEQ ID NO: 22882 - DNA, 21 bp, synthetic construct
  source 1..21: mol_type = other DNA; mol_type = other DNA
gcccccggctctattaaatgg

SEQ ID NO: 22883 - DNA, 21 bp, synthetic construct
  source 1..21: mol_type = other DNA; mol_type = other DNA
tacttcgccggcagagtcgaa

SEQ ID NO: 22884 - DNA, 21 bp, synthetic construct
  source 1..21: mol_type = other DNA; mol_type = other DNA
agagatgactttactgtatac

SEQ ID NO: 22885 - DNA, 21 bp, synthetic construct
  source 1..21: mol_type = other DNA; mol_type = other DNA
gtccaatcaagcaacggagtt

SEQ ID NO: 22886 - DNA, 21 bp, synthetic construct
  source 1..21: mol_type = other DNA; mol_type = other DNA
cgagatgactttacttcctat

SEQ ID NO: 22887 - DNA, 21 bp, synthetic construct
  source 1..21: mol_type = other DNA; mol_type = other DNA
tacttgaaaagtcagaattat

SEQ ID NO: 22888 - DNA, 21 bp, synthetic construct
  source 1..21: mol_type = other DNA; mol_type = other DNA
ctctacagcggcgaaggaccg

SEQ ID NO: 22889 - DNA, 21 bp, synthetic construct
  source 1..21: mol_type = other DNA; mol_type = other DNA
cacacatcgacaaatgggata

SEQ ID NO: 22890 - DNA, 21 bp, synthetic construct
  source 1..21: mol_type = other DNA; mol_type = other DNA
cgcatggaagacgcttttccc

SEQ ID NO: 22891 - DNA, 21 bp, synthetic construct
  source 1..21: mol_type = other DNA; mol_type = other DNA
tactctaagttaggagagaat

SEQ ID NO: 22892 - DNA, 21 bp, synthetic construct
  source 1..21: mol_type = other DNA; mol_type = other DNA
tatcacgccttaaacatagac

SEQ ID NO: 22893 - DNA, 21 bp, synthetic construct
  source 1..21: mol_type = other DNA; mol_type = other DNA
tactttagcggtaaaattgca

SEQ ID NO: 22894 - DNA, 21 bp, synthetic construct
  source 1..21: mol_type = other DNA; mol_type = other DNA
ttccacaagttaaacgaaaat

SEQ ID NO: 22895 - DNA, 21 bp, synthetic construct
  source 1..21: mol_type = other DNA; mol_type = other DNA
ctgcaccgattaagcacatcg

SEQ ID NO: 22896 - DNA, 21 bp, synthetic construct
  source 1..21: mol_type = other DNA; mol_type = other DNA
gacatgagcagtagcgtttgg

SEQ ID NO: 22897 - DNA, 21 bp, synthetic construct
  source 1..21: mol_type = other DNA; mol_type = other DNA
attccccgtttctgtgcaccg

SEQ ID NO: 22898 - DNA, 21 bp, synthetic construct
  source 1..21: mol_type = other DNA; mol_type = other DNA
ttagcgaagtcgggcgtgaac

SEQ ID NO: 22899 - DNA, 21 bp, synthetic construct
  source 1..21: mol_type = other DNA; mol_type = other DNA
gtcatagaggatgcataccca

SEQ ID NO: 22900 - DNA, 21 bp, synthetic construct
  source 1..21: mol_type = other DNA; mol_type = other DNA
tacttctcaggagtcaaggac

SEQ ID NO: 22901 - DNA, 21 bp, synthetic construct
  source 1..21: mol_type = other DNA; mol_type = other DNA
tatcatgcgaagcaaataaat

SEQ ID NO: 22902 - DNA, 21 bp, synthetic construct
  source 1..21: mol_type = other DNA; mol_type = other DNA
tattttacgggtgtcactgaa

SEQ ID NO: 22903 - DNA, 21 bp, synthetic construct
  source 1..21: mol_type = other DNA; mol_type = other DNA
aaatcagacttcgtctcttat

SEQ ID NO: 22904 - DNA, 21 bp, synthetic construct
  source 1..21: mol_type = other DNA; mol_type = other DNA
agagatgagttttccacttat

SEQ ID NO: 22905 - DNA, 21 bp, synthetic construct
  source 1..21: mol_type = other DNA; mol_type = other DNA
ctcagcaagagtgggcctaat

SEQ ID NO: 22906 - DNA, 21 bp, synthetic construct
  source 1..21: mol_type = other DNA; mol_type = other DNA
gtgttgagttctagtgcctgg

SEQ ID NO: 22907 - DNA, 21 bp, synthetic construct
  source 1..21: mol_type = other DNA; mol_type = other DNA
tcagacagtactaacggccga

SEQ ID NO: 22908 - DNA, 21 bp, synthetic construct
  source 1..21: mol_type = other DNA; mol_type = other DNA
tacgtaaaatcccagccctac

SEQ ID NO: 22909 - DNA, 21 bp, synthetic construct
  source 1..21: mol_type = other DNA; mol_type = other DNA
tactttacaggggtcgttgct

SEQ ID NO: 22910 - DNA, 21 bp, synthetic construct
  source 1..21: mol_type = other DNA; mol_type = other DNA
gatctacaggcacgcagctgg

SEQ ID NO: 22911 - DNA, 21 bp, synthetic construct
  source 1..21: mol_type = other DNA; mol_type = other DNA
gcgggggacggcttatgggtc

SEQ ID NO: 22912 - DNA, 21 bp, synthetic construct
  source 1..21: mol_type = other DNA; mol_type = other DNA
gttcagagctcaaacggcgtc

SEQ ID NO: 22913 - DNA, 21 bp, synthetic construct
  source 1..21: mol_type = other DNA; mol_type = other DNA
tacttcacaggcacatttgac

SEQ ID NO: 22914 - DNA, 21 bp, synthetic construct
  source 1..21: mol_type = other DNA; mol_type = other DNA
tactttaccggtaccgttgac

SEQ ID NO: 22915 - DNA, 21 bp, synthetic construct
  source 1..21: mol_type = other DNA; mol_type = other DNA
acgatgagcacaaatggtgtg

SEQ ID NO: 22916 - DNA, 21 bp, synthetic construct
  source 1..21: mol_type = other DNA; mol_type = other DNA
atcacaagtacgaatggcatt

SEQ ID NO: 22917 - DNA, 21 bp, synthetic construct
  source 1..21: mol_type = other DNA; mol_type = other DNA
gacttagagtcacgtgaatgg

SEQ ID NO: 22918 - DNA, 21 bp, synthetic construct
  source 1..21: mol_type = other DNA; mol_type = other DNA
tattttagcgggcaggtcgag

SEQ ID NO: 22919 - DNA, 21 bp, synthetic construct
  source 1..21: mol_type = other DNA; mol_type = other DNA
tacgcgaagaatggtttcaac

SEQ ID NO: 22920 - DNA, 21 bp, synthetic construct
  source 1..21: mol_type = other DNA; mol_type = other DNA
agaacaccagatgcgtaccct

SEQ ID NO: 22921 - DNA, 21 bp, synthetic construct
  source 1..21: mol_type = other DNA; mol_type = other DNA
agagaagagcaggtcaggtgg

SEQ ID NO: 22922 - DNA, 21 bp, synthetic construct
  source 1..21: mol_type = other DNA; mol_type = other DNA
ggaagcccgggcgtcggttgg

SEQ ID NO: 22923 - DNA, 21 bp, synthetic construct
  source 1..21: mol_type = other DNA; mol_type = other DNA
ttaagcaaaattggacataac

SEQ ID NO: 22924 - DNA, 21 bp, synthetic construct
  source 1..21: mol_type = other DNA; mol_type = other DNA
gagccagagcggggttggttc

SEQ ID NO: 22925 - DNA, 21 bp, synthetic construct
  source 1..21: mol_type = other DNA; mol_type = other DNA
aaagacggctattccacatac

SEQ ID NO: 22926 - DNA, 21 bp, synthetic construct
  source 1..21: mol_type = other DNA; mol_type = other DNA
tacttttcaggtaagaaggag

SEQ ID NO: 22927 - DNA, 21 bp, synthetic construct
  source 1..21: mol_type = other DNA; mol_type = other DNA
tactttagcgggaaaatcgag

SEQ ID NO: 22928 - DNA, 21 bp, synthetic construct
  source 1..21: mol_type = other DNA; mol_type = other DNA
tacttctcgaagataaaggag

SEQ ID NO: 22929 - DNA, 21 bp, synthetic construct
  source 1..21: mol_type = other DNA; mol_type = other DNA
cgtggcgacaatgtctacccg

SEQ ID NO: 22930 - DNA, 21 bp, synthetic construct
  source 1..21: mol_type = other DNA; mol_type = other DNA
tacttctcaggtgttgtcgaa

SEQ ID NO: 22931 - DNA, 21 bp, synthetic construct
  source 1..21: mol_type = other DNA; mol_type = other DNA
tatacgaaatcccagccgtgt

SEQ ID NO: 22932 - DNA, 21 bp, synthetic construct
  source 1..21: mol_type = other DNA; mol_type = other DNA
tatgcaaagagcggcacgaat

SEQ ID NO: 22933 - DNA, 21 bp, synthetic construct
  source 1..21: mol_type = other DNA; mol_type = other DNA
ggcggaccgtctagctcatgg

SEQ ID NO: 22934 - DNA, 21 bp, synthetic construct
  source 1..21: mol_type = other DNA; mol_type = other DNA
cttcttagctcgagtaattgg

SEQ ID NO: 22935 - DNA, 21 bp, synthetic construct
  source 1..21: mol_type = other DNA; mol_type = other DNA
ctccaccggctccaagctgac

SEQ ID NO: 22936 - DNA, 21 bp, synthetic construct
  source 1..21: mol_type = other DNA; mol_type = other DNA
tactctaaggttgggtataat

SEQ ID NO: 22937 - DNA, 21 bp, synthetic construct
  source 1..21: mol_type = other DNA; mol_type = other DNA
tatttaaaatcgcaggcctat

SEQ ID NO: 22938 - DNA, 21 bp, synthetic construct
  source 1..21: mol_type = other DNA; mol_type = other DNA
tatgtgaagagccagaaaata

SEQ ID NO: 22939 - DNA, 21 bp, synthetic construct
  source 1..21: mol_type = other DNA; mol_type = other DNA
cggcttgaaagtacgcactgg

SEQ ID NO: 22940 - DNA, 21 bp, synthetic construct
  source 1..21: mol_type = other DNA; mol_type = other DNA
aaagacgagtttaagagctgg

SEQ ID NO: 22941 - DNA, 21 bp, synthetic construct
  source 1..21: mol_type = other DNA; mol_type = other DNA
ctcatgcgcgacgctttccct

SEQ ID NO: 22942 - DNA, 21 bp, synthetic construct
  source 1..21: mol_type = other DNA; mol_type = other DNA
aagtctgactatcttacctac

SEQ ID NO: 22943 - DNA, 21 bp, synthetic construct
  source 1..21: mol_type = other DNA; mol_type = other DNA
tatagtaaatcgggtcacaat

SEQ ID NO: 22944 - DNA, 21 bp, synthetic construct
  source 1..21: mol_type = other DNA; mol_type = other DNA
tacttcaccggcaaaacagaa

SEQ ID NO: 22945 - DNA, 21 bp, synthetic construct
  source 1..21: mol_type = other DNA; mol_type = other DNA
ctaagcagaatctcacctaat

SEQ ID NO: 22946 - DNA, 21 bp, synthetic construct
  source 1..21: mol_type = other DNA; mol_type = other DNA
agggatgacttcacgagctgg

SEQ ID NO: 22947 - DNA, 21 bp, synthetic construct
  source 1..21: mol_type = other DNA; mol_type = other DNA
gacatgagcagtcgaatatgg

SEQ ID NO: 22948 - DNA, 21 bp, synthetic construct
  source 1..21: mol_type = other DNA; mol_type = other DNA
ctgcacgcaaacttgcccaat

SEQ ID NO: 22949 - DNA, 21 bp, synthetic construct
  source 1..21: mol_type = other DNA; mol_type = other DNA
ttgcatagactacagagtgat

SEQ ID NO: 22950 - DNA, 21 bp, synthetic construct
  source 1..21: mol_type = other DNA; mol_type = other DNA
tactcaaaacttaactttaac

SEQ ID NO: 22951 - DNA, 21 bp, synthetic construct
  source 1..21: mol_type = other DNA; mol_type = other DNA
cggaacgatacggtgtacccc

SEQ ID NO: 22952 - DNA, 21 bp, synthetic construct
  source 1..21: mol_type = other DNA; mol_type = other DNA
ttgagtcggatcggaagggat

SEQ ID NO: 22953 - DNA, 21 bp, synthetic construct
  source 1..21: mol_type = other DNA; mol_type = other DNA
acaagggaaggcgatcctgcc

SEQ ID NO: 22954 - DNA, 21 bp, synthetic construct
  source 1..21: mol_type = other DNA; mol_type = other DNA
aggaagcacgacgtatacccg

SEQ ID NO: 22955 - DNA, 21 bp, synthetic construct
  source 1..21: mol_type = other DNA; mol_type = other DNA
accgacgggacctctaggtgg

SEQ ID NO: 22956 - DNA, 21 bp, synthetic construct
  source 1..21: mol_type = other DNA; mol_type = other DNA
acgagatccaccaatggcgtg

SEQ ID NO: 22957 - DNA, 21 bp, synthetic construct
  source 1..21: mol_type = other DNA; mol_type = other DNA
ggatcccccggggttggttgg

SEQ ID NO: 22958 - DNA, 21 bp, synthetic construct
  source 1..21: mol_type = other DNA; mol_type = other DNA
tactggaccggcgtggtcgaa

SEQ ID NO: 22959 - DNA, 21 bp, synthetic construct
  source 1..21: mol_type = other DNA; mol_type = other DNA
cggatggattcggtcaagtgg

SEQ ID NO: 22960 - DNA, 21 bp, synthetic construct
  source 1..21: mol_type = other DNA; mol_type = other DNA
tataccaagagccaacagatt

SEQ ID NO: 22961 - DNA, 21 bp, synthetic construct
  source 1..21: mol_type = other DNA; mol_type = other DNA
agaaacgaagacgtttatccg

SEQ ID NO: 22962 - DNA, 21 bp, synthetic construct
  source 1..21: mol_type = other DNA; mol_type = other DNA
cccttacagagtcgagactgg

SEQ ID NO: 22963 - DNA, 21 bp, synthetic construct
  source 1..21: mol_type = other DNA; mol_type = other DNA
gacttgcaaagcagggaatgg

SEQ ID NO: 22964 - DNA, 21 bp, synthetic construct
  source 1..21: mol_type = other DNA; mol_type = other DNA
tatgtgaggtctgataagtta

SEQ ID NO: 22965 - DNA, 21 bp, synthetic construct
  source 1..21: mol_type = other DNA; mol_type = other DNA
catgatgggacgagtgcttgg

SEQ ID NO: 22966 - DNA, 21 bp, synthetic construct
  source 1..21: mol_type = other DNA; mol_type = other DNA
tataccaagagcgactcaaaa

SEQ ID NO: 22967 - DNA, 21 bp, synthetic construct
  source 1..21: mol_type = other DNA; mol_type = other DNA
cctatggcatctttacagtgg

SEQ ID NO: 22968 - DNA, 21 bp, synthetic construct
  source 1..21: mol_type = other DNA; mol_type = other DNA
tattcaaaaccagggcccaat

SEQ ID NO: 22969 - DNA, 21 bp, synthetic construct
  source 1..21: mol_type = other DNA; mol_type = other DNA
tactttactggctcctgggac

SEQ ID NO: 22970 - DNA, 21 bp, synthetic construct
  source 1..21: mol_type = other DNA; mol_type = other DNA
cgggaagacttcgtgagatac

SEQ ID NO: 22971 - DNA, 21 bp, synthetic construct
  source 1..21: mol_type = other DNA; mol_type = other DNA
tatttttccggtatgaaagag

SEQ ID NO: 22972 - DNA, 21 bp, synthetic construct
  source 1..21: mol_type = other DNA; mol_type = other DNA
tctatgagcagtagtacctgg

SEQ ID NO: 22973 - DNA, 21 bp, synthetic construct
  source 1..21: mol_type = other DNA; mol_type = other DNA
tattttactggtaaacaggaa

SEQ ID NO: 22974 - DNA, 21 bp, synthetic construct
  source 1..21: mol_type = other DNA; mol_type = other DNA
gacttgacttctcgtgagtgg

SEQ ID NO: 22975 - DNA, 21 bp, synthetic construct
  source 1..21: mol_type = other DNA; mol_type = other DNA
gttgaatcgacaaacggcatt

SEQ ID NO: 22976 - DNA, 21 bp, synthetic construct
  source 1..21: mol_type = other DNA; mol_type = other DNA
tactttagtggcatcatagac

SEQ ID NO: 22977 - DNA, 21 bp, synthetic construct
  source 1..21: mol_type = other DNA; mol_type = other DNA
accgagagcacacacggtcga

SEQ ID NO: 22978 - DNA, 21 bp, synthetic construct
  source 1..21: mol_type = other DNA; mol_type = other DNA
tacttctccggaattgtgagc

SEQ ID NO: 22979 - DNA, 21 bp, synthetic construct
  source 1..21: mol_type = other DNA; mol_type = other DNA
tatgccaaatcaggaactaac

SEQ ID NO: 22980 - DNA, 21 bp, synthetic construct
  source 1..21: mol_type = other DNA; mol_type = other DNA
tgccttagcaagacagggcac

SEQ ID NO: 22981 - DNA, 21 bp, synthetic construct
  source 1..21: mol_type = other DNA; mol_type = other DNA
acggacgagttttcaacttgg

SEQ ID NO: 22982 - DNA, 21 bp, synthetic construct
  source 1..21: mol_type = other DNA; mol_type = other DNA
ggaagcgactatgtagcgtgg

SEQ ID NO: 22983 - DNA, 21 bp, synthetic construct
  source 1..21: mol_type = other DNA; mol_type = other DNA
tattctaaagttggcgggaat

SEQ ID NO: 22984 - DNA, 21 bp, synthetic construct
  source 1..21: mol_type = other DNA; mol_type = other DNA
ttacatcgcttacaggcggat

SEQ ID NO: 22985 - DNA, 21 bp, synthetic construct
  source 1..21: mol_type = other DNA; mol_type = other DNA
tattttgcgggtcgcgtagag

SEQ ID NO: 22986 - DNA, 21 bp, synthetic construct
  source 1..21: mol_type = other DNA; mol_type = other DNA
tatgtgaagtcgaatcatgga

SEQ ID NO: 22987 - DNA, 21 bp, synthetic construct
  source 1..21: mol_type = other DNA; mol_type = other DNA
ttgtcaagagtgagtcccaat

SEQ ID NO: 22988 - DNA, 21 bp, synthetic construct
  source 1..21: mol_type = other DNA; mol_type = other DNA
ttatcgcgcgcttcggagaac

SEQ ID NO: 22989 - DNA, 21 bp, synthetic construct
  source 1..21: mol_type = other DNA; mol_type = other DNA
tatagcaaagttggcagggac

SEQ ID NO: 22990 - DNA, 21 bp, synthetic construct
  source 1..21: mol_type = other DNA; mol_type = other DNA
tttagtagattgaaccccgac

SEQ ID NO: 22991 - DNA, 21 bp, synthetic construct
  source 1..21: mol_type = other DNA; mol_type = other DNA
aggagcgagtttgtgaccttt

SEQ ID NO: 22992 - DNA, 21 bp, synthetic construct
  source 1..21: mol_type = other DNA; mol_type = other DNA
agaacggatgacgctttcccg

SEQ ID NO: 22993 - DNA, 21 bp, synthetic construct
  source 1..21: mol_type = other DNA; mol_type = other DNA
ctgcacaagttacaggttacg

SEQ ID NO: 22994 - DNA, 21 bp, synthetic construct
  source 1..21: mol_type = other DNA; mol_type = other DNA
tattttacaggcatggtcgaa

SEQ ID NO: 22995 - DNA, 21 bp, synthetic construct
  source 1..21: mol_type = other DNA; mol_type = other DNA
tatcttaaaagccaatcaagc

SEQ ID NO: 22996 - DNA, 21 bp, synthetic construct
  source 1..21: mol_type = other DNA; mol_type = other DNA
tatttcagcggccacatcgat

SEQ ID NO: 22997 - DNA, 21 bp, synthetic construct
  source 1..21: mol_type = other DNA; mol_type = other DNA
taccatgcgaaatcattaaac

SEQ ID NO: 22998 - DNA, 21 bp, synthetic construct
  source 1..21: mol_type = other DNA; mol_type = other DNA
gttggatcaacccatggcgtt

SEQ ID NO: 22999 - DNA, 21 bp, synthetic construct
  source 1..21: mol_type = other DNA; mol_type = other DNA
gacctaacatcgagagactgg

SEQ ID NO: 23000 - DNA, 21 bp, synthetic construct
  source 1..21: mol_type = other DNA; mol_type = other DNA
cgagatgattttgtcacgtgg

SEQ ID NO: 23001 - DNA, 21 bp, synthetic construct
  source 1..21: mol_type = other DNA; mol_type = other DNA
tatcataagagccaaagtaac

SEQ ID NO: 23002 - DNA, 21 bp, synthetic construct
  source 1..21: mol_type = other DNA; mol_type = other DNA
tactggacagggattcaagag

SEQ ID NO: 23003 - DNA, 21 bp, synthetic construct
  source 1..21: mol_type = other DNA; mol_type = other DNA
tacgtacggtcggacactggt

SEQ ID NO: 23004 - DNA, 21 bp, synthetic construct
  source 1..21: mol_type = other DNA; mol_type = other DNA
tacagtaaactcaatcacaac

SEQ ID NO: 23005 - DNA, 21 bp, synthetic construct
  source 1..21: mol_type = other DNA; mol_type = other DNA
cgtgatgaattcagcacttac

SEQ ID NO: 23006 - DNA, 21 bp, synthetic construct
  source 1..21: mol_type = other DNA; mol_type = other DNA
agattgtcagacgcatatcct

SEQ ID NO: 23007 - DNA, 21 bp, synthetic construct
  source 1..21: mol_type = other DNA; mol_type = other DNA
gacctcgcctcctcggcgtgg

SEQ ID NO: 23008 - DNA, 21 bp, synthetic construct
  source 1..21: mol_type = other DNA; mol_type = other DNA
tactctaaagcaggagacaac

SEQ ID NO: 23009 - DNA, 21 bp, synthetic construct
  source 1..21: mol_type = other DNA; mol_type = other DNA
tattttgccggaaaggttgat

SEQ ID NO: 23010 - DNA, 21 bp, synthetic construct
  source 1..21: mol_type = other DNA; mol_type = other DNA
tattttaccggggtggcaaag

SEQ ID NO: 23011 - DNA, 21 bp, synthetic construct
  source 1..21: mol_type = other DNA; mol_type = other DNA
cgcggggataatgtgtaccct

SEQ ID NO: 23012 - DNA, 21 bp, synthetic construct
  source 1..21: mol_type = other DNA; mol_type = other DNA
cgggaggaacaagtacgttgg

SEQ ID NO: 23013 - DNA, 21 bp, synthetic construct
  source 1..21: mol_type = other DNA; mol_type = other DNA
atgcatagattaagcgcggac

SEQ ID NO: 23014 - DNA, 21 bp, synthetic construct
  source 1..21: mol_type = other DNA; mol_type = other DNA
tattttactggggttatagca

SEQ ID NO: 23015 - DNA, 21 bp, synthetic construct
  source 1..21: mol_type = other DNA; mol_type = other DNA
cggaacgatgtcgtctatcct

SEQ ID NO: 23016 - DNA, 21 bp, synthetic construct
  source 1..21: mol_type = other DNA; mol_type = other DNA
ttccaccggttgggacccgat

SEQ ID NO: 23017 - DNA, 21 bp, synthetic construct
  source 1..21: mol_type = other DNA; mol_type = other DNA
ttagccaagggcggttttaac

SEQ ID NO: 23018 - DNA, 21 bp, synthetic construct
  source 1..21: mol_type = other DNA; mol_type = other DNA
agagatcagacagtgtatccg

SEQ ID NO: 23019 - DNA, 21 bp, synthetic construct
  source 1..21: mol_type = other DNA; mol_type = other DNA
tatttcacgggcaaaacggac

SEQ ID NO: 23020 - DNA, 21 bp, synthetic construct
  source 1..21: mol_type = other DNA; mol_type = other DNA
tacttcagtggggttaaagac

SEQ ID NO: 23021 - DNA, 21 bp, synthetic construct
  source 1..21: mol_type = other DNA; mol_type = other DNA
ttatgtcgcccatgcggagag

SEQ ID NO: 23022 - DNA, 21 bp, synthetic construct
  source 1..21: mol_type = other DNA; mol_type = other DNA
tatttcacgggttttatcgag

SEQ ID NO: 23023 - DNA, 21 bp, synthetic construct
  source 1..21: mol_type = other DNA; mol_type = other DNA
aaggatgattacagtgtcttt

SEQ ID NO: 23024 - DNA, 21 bp, synthetic construct
  source 1..21: mol_type = other DNA; mol_type = other DNA
ctgtgccgtccgtgcaaagaa

SEQ ID NO: 23025 - DNA, 21 bp, synthetic construct
  source 1..21: mol_type = other DNA; mol_type = other DNA
tacttcaccggcgtaatccct

SEQ ID NO: 23026 - DNA, 21 bp, synthetic construct
  source 1..21: mol_type = other DNA; mol_type = other DNA
tatcttaagagccaaatgacc

SEQ ID NO: 23027 - DNA, 21 bp, synthetic construct
  source 1..21: mol_type = other DNA; mol_type = other DNA
agggacgagttttcaacatat

SEQ ID NO: 23028 - DNA, 21 bp, synthetic construct
  source 1..21: mol_type = other DNA; mol_type = other DNA
tacgcgaagactggggttaat

SEQ ID NO: 23029 - DNA, 21 bp, synthetic construct
  source 1..21: mol_type = other DNA; mol_type = other DNA
ggaagcgaattctcgagatgg

SEQ ID NO: 23030 - DNA, 21 bp, synthetic construct
  source 1..21: mol_type = other DNA; mol_type = other DNA
gtaggaagtacaaacggggtc

SEQ ID NO: 23031 - DNA, 21 bp, synthetic construct
  source 1..21: mol_type = other DNA; mol_type = other DNA
ttgtcgaggataagtcataat

SEQ ID NO: 23032 - DNA, 21 bp, synthetic construct
  source 1..21: mol_type = other DNA; mol_type = other DNA
tacttcacaggacacatagag

SEQ ID NO: 23033 - DNA, 21 bp, synthetic construct
  source 1..21: mol_type = other DNA; mol_type = other DNA
cgaatggagagcgcggtctgg

SEQ ID NO: 23034 - DNA, 21 bp, synthetic construct
  source 1..21: mol_type = other DNA; mol_type = other DNA
gaaggtattgccaggacatgg

SEQ ID NO: 23035 - DNA, 21 bp, synthetic construct
  source 1..21: mol_type = other DNA; mol_type = other DNA
tatttcaccggcaaactggat

SEQ ID NO: 23036 - DNA, 21 bp, synthetic construct
  source 1..21: mol_type = other DNA; mol_type = other DNA
ccaatggcgtccgctacttgg

SEQ ID NO: 23037 - DNA, 21 bp, synthetic construct
  source 1..21: mol_type = other DNA; mol_type = other DNA
aaggatgacttctcggtctat

SEQ ID NO: 23038 - DNA, 21 bp, synthetic construct
  source 1..21: mol_type = other DNA; mol_type = other DNA
ttctgtaagccttgccctggt

SEQ ID NO: 23039 - DNA, 21 bp, synthetic construct
  source 1..21: mol_type = other DNA; mol_type = other DNA
tacgctagaaccggtccaaac

SEQ ID NO: 23040 - DNA, 21 bp, synthetic construct
  source 1..21: mol_type = other DNA; mol_type = other DNA
aaggacgattataccacttgg

SEQ ID NO: 23041 - DNA, 21 bp, synthetic construct
  source 1..21: mol_type = other DNA; mol_type = other DNA
actgatgagaccgtttacaga

SEQ ID NO: 23042 - DNA, 21 bp, synthetic construct
  source 1..21: mol_type = other DNA; mol_type = other DNA
agaatggaagtgtcgacctgg

SEQ ID NO: 23043 - DNA, 21 bp, synthetic construct
  source 1..21: mol_type = other DNA; mol_type = other DNA
ctcagtcgacttggcgacaat

SEQ ID NO: 23044 - DNA, 21 bp, synthetic construct
  source 1..21: mol_type = other DNA; mol_type = other DNA
tatgccagaaccggacttgat

SEQ ID NO: 23045 - DNA, 21 bp, synthetic construct
  source 1..21: mol_type = other DNA; mol_type = other DNA
ctcagcagggtgagtcccaac

SEQ ID NO: 23046 - DNA, 21 bp, synthetic construct
  source 1..21: mol_type = other DNA; mol_type = other DNA
gttgagtcggttaatggagtt

SEQ ID NO: 23047 - DNA, 21 bp, synthetic construct
  source 1..21: mol_type = other DNA; mol_type = other DNA
tacagtaagatgaacataaac

SEQ ID NO: 23048 - DNA, 21 bp, synthetic construct
  source 1..21: mol_type = other DNA; mol_type = other DNA
accgaaagttcgtctggacgt

SEQ ID NO: 23049 - DNA, 21 bp, synthetic construct
  source 1..21: mol_type = other DNA; mol_type = other DNA
tatcttaagagtcaaagcact

SEQ ID NO: 23050 - DNA, 21 bp, synthetic construct
  source 1..21: mol_type = other DNA; mol_type = other DNA
tacacgaagagccagagttat

SEQ ID NO: 23051 - DNA, 21 bp, synthetic construct
  source 1..21: mol_type = other DNA; mol_type = other DNA
tacttcacggggaagcaagag

SEQ ID NO: 23052 - DNA, 21 bp, synthetic construct
  source 1..21: mol_type = other DNA; mol_type = other DNA
tacgcaaaatcaggatacaat

SEQ ID NO: 23053 - DNA, 21 bp, synthetic construct
  source 1..21: mol_type = other DNA; mol_type = other DNA
cgagaggatagtgtgtattgg

SEQ ID NO: 23054 - DNA, 21 bp, synthetic construct
  source 1..21: mol_type = other DNA
ctcactcggattagctccaac

SEQ ID NO: 23055 - DNA, 21 bp, synthetic construct
  source 1..21: mol_type = other DNA
tcaatgtcaagcgcgatatgg

SEQ ID NO: 23056 - DNA, 21 bp, synthetic construct
  source 1..21: mol_type = other DNA
tacgcccgaacaggaccgaat

SEQ ID NO: 23057 - DNA, 21 bp, synthetic construct
  source 1..21: mol_type = other DNA; mol_type = other DNA
aggactgccgacgcataccct

SEQ ID NO: 23058 - DNA, 21 bp, synthetic construct
  source 1..21: mol_type = other DNA; mol_type = other DNA
tacttcgcgggtaaagtcgac

SEQ ID NO: 23059 - DNA, 21 bp, synthetic construct
  source 1..21: mol_type = other DNA; mol_type = other DNA
cttgctaaatcgggccacaat

SEQ ID NO: 23060 - DNA, 21 bp, synthetic construct
  source 1..21: mol_type = other DNA; mol_type = other DNA
tatctgaagagccaggtttac

SEQ ID NO: 23061 - DNA, 21 bp, synthetic construct
  source 1..21: mol_type = other DNA; mol_type = other DNA
ttgagcaaggcgggcccaaac

SEQ ID NO: 23062 - DNA, 21 bp, synthetic construct
  source 1..21: mol_type = other DNA; mol_type = other DNA
attccaagtgaccggttgtgg

SEQ ID NO: 23063 - DNA, 21 bp, synthetic construct
  source 1..21: mol_type = other DNA; mol_type = other DNA
agattgtctgacgtctaccca

SEQ ID NO: 23064 - DNA, 21 bp, synthetic construct
  source 1..21: mol_type = other DNA; mol_type = other DNA
ttacatcgactgagtgacttt

SEQ ID NO: 23065 - DNA, 21 bp, synthetic construct
  source 1..21: mol_type = other DNA; mol_type = other DNA
cctaggagcaccaatggggtt

SEQ ID NO: 23066 - DNA, 21 bp, synthetic construct
  source 1..21: mol_type = other DNA; mol_type = other DNA
tacttctcgggcatacaggag

SEQ ID NO: 23067 - DNA, 21 bp, synthetic construct
  source 1..21: mol_type = other DNA; mol_type = other DNA
agggatgatttcaccacatgg

SEQ ID NO: 23068 - DNA, 21 bp, synthetic construct
  source 1..21: mol_type = other DNA; mol_type = other DNA
ttaagcagggcttcgaccaac

SEQ ID NO: 23069 - DNA, 21 bp, synthetic construct
  source 1..21: mol_type = other DNA; mol_type = other DNA
agggcattagaaggcgccgac

SEQ ID NO: 23070 - DNA, 21 bp, synthetic construct
  source 1..21: mol_type = other DNA; mol_type = other DNA
gttctatcgacgaatggtagg

SEQ ID NO: 23071 - DNA, 21 bp, synthetic construct
  source 1..21: mol_type = other DNA
tatagcaaggccaacgacaac

SEQ ID NO: 23072 - DNA, 21 bp, synthetic construct
  source 1..21: mol_type = other DNA
tactctaagacggggcacaat

SEQ ID NO: 23073 - DNA, 21 bp, synthetic construct
  source 1..21: mol_type = other DNA; mol_type = other DNA
ccagaatccactaatggtcgg

SEQ ID NO: 23074 - DNA, 21 bp, synthetic construct
  source 1..21: mol_type = other DNA; mol_type = other DNA
gtattctcaaccaatgggatc

SEQ ID NO: 23075 - DNA, 21 bp, synthetic construct
  source 1..21: mol_type = other DNA; mol_type = other DNA
agactcgaaagcgcgatgtgg

SEQ ID NO: 23076 - DNA, 21 bp, synthetic construct
  source 1..21: mol_type = other DNA; mol_type = other DNA
tatctcaagagtcaacagtat

SEQ ID NO: 23077 - DNA, 21 bp, synthetic construct
  source 1..21: mol_type = other DNA; mol_type = other DNA
ttgtgccgtccatgtatggag

SEQ ID NO: 23078 - DNA, 21 bp, synthetic construct
  source 1..21: mol_type = other DNA; mol_type = other DNA
tatgcgaaatccggagccaac

SEQ ID NO: 23079 - DNA, 21 bp, synthetic construct
  source 1..21: mol_type = other DNA; mol_type = other DNA
gttgcgtctcgcggttgggat

SEQ ID NO: 23080 - DNA, 21 bp, synthetic construct
  source 1..21: mol_type = other DNA; mol_type = other DNA
tactttacaggagtaaccgcg

SEQ ID NO: 23081 - DNA, 21 bp, synthetic construct
  source 1..21: mol_type = other DNA; mol_type = other DNA
ctgagcagaacgagtcacaac

SEQ ID NO: 23082 - DNA, 21 bp, synthetic construct
  source 1..21: mol_type = other DNA; mol_type = other DNA
tatagcaagttaagtacaaat

SEQ ID NO: 23083 - DNA, 21 bp, synthetic construct
  source 1..21: mol_type = other DNA; mol_type = other DNA
ttttcgaagattggaccgaac

SEQ ID NO: 23084 - DNA, 21 bp, synthetic construct
  source 1..21: mol_type = other DNA; mol_type = other DNA
tggtggtcaggccgaatcgag

SEQ ID NO: 23085 - DNA, 21 bp, synthetic construct
  source 1..21: mol_type = other DNA; mol_type = other DNA
tatgcaaaaaacgggaataat

SEQ ID NO: 23086 - DNA, 21 bp, synthetic construct
  source 1..21: mol_type = other DNA; mol_type = other DNA
gacatgagttcgcataagtgg

SEQ ID NO: 23087 - DNA, 21 bp, synthetic construct
  source 1..21: mol_type = other DNA; mol_type = other DNA
tatagccgcgtgggggttgat

SEQ ID NO: 23088 - DNA, 21 bp, synthetic construct
  source 1..21: mol_type = other DNA; mol_type = other DNA
tacagtaaagtgggacataac

SEQ ID NO: 23089 - DNA, 21 bp, synthetic construct
  source 1..21: mol_type = other DNA; mol_type = other DNA
gtactttccactaatggtatt

SEQ ID NO: 23090 - DNA, 21 bp, synthetic construct
  source 1..21: mol_type = other DNA; mol_type = other DNA
tactcaaagaccggttacaat

SEQ ID NO: 23091 - DNA, 21 bp, synthetic construct
  source 1..21: mol_type = other DNA; mol_type = other DNA
atacaaagtacgaatggtgta

SEQ ID NO: 23092 - DNA, 21 bp, synthetic construct
  source 1..21: mol_type = other DNA; mol_type = other DNA
tatagcaagatgaattttaat

SEQ ID NO: 23093 - DNA, 21 bp, synthetic construct
  source 1..21: mol_type = other DNA; mol_type = other DNA
ctaagtaagatgaattacaac

SEQ ID NO: 23094 - DNA, 21 bp, synthetic construct
  source 1..21: mol_type = other DNA; mol_type = other DNA
acgaagagcaccaatggagtt

SEQ ID NO: 23095 - DNA, 21 bp, synthetic construct
  source 1..21: mol_type = other DNA; mol_type = other DNA
ttttcacgaattggaccggat

SEQ ID NO: 23096 - DNA, 21 bp, synthetic construct
  source 1..21: mol_type = other DNA; mol_type = other DNA
ttggctaagtctgggaacaat

SEQ ID NO: 23097 - DNA, 21 bp, synthetic construct
  source 1..21: mol_type = other DNA; mol_type = other DNA
agggaatctgttagtacgtgg

SEQ ID NO: 23098 - DNA, 21 bp, synthetic construct
  source 1..21: mol_type = other DNA; mol_type = other DNA
ctaagggatggtacacccgcg

SEQ ID NO: 23099 - DNA, 21 bp, synthetic construct
  source 1..21: mol_type = other DNA; mol_type = other DNA
ttgtcgcgagcatcccccaac

SEQ ID NO: 23100 - DNA, 21 bp, synthetic construct
  source 1..21: mol_type = other DNA; mol_type = other DNA
tacgtgaaaattgcgccccac

SEQ ID NO: 23101 - DNA, 21 bp, synthetic construct
  source 1..21: mol_type = other DNA; mol_type = other DNA
tatttcacgggtagagtcgag

SEQ ID NO: 23102 - DNA, 21 bp, synthetic construct
  source 1..21: mol_type = other DNA; mol_type = other DNA
tattttaccggtcacttggaa

SEQ ID NO: 23103 - DNA, 21 bp, synthetic construct
  source 1..21: mol_type = other DNA; mol_type = other DNA
gatcttagagcgagcacatgg

SEQ ID NO: 23104 - DNA, 21 bp, synthetic construct
  source 1..21: mol_type = other DNA; mol_type = other DNA
tattttgccgggataaaagag

SEQ ID NO: 23105 - DNA, 21 bp, synthetic construct
  source 1..21: mol_type = other DNA; mol_type = other DNA
tattggaccggaatacaggaa

SEQ ID NO: 23106 - DNA, 21 bp, synthetic construct
  source 1..21: mol_type = other DNA; mol_type = other DNA
ctcagccgcgccagtgtaaac

SEQ ID NO: 23107 - DNA, 21 bp, synthetic construct
  source 1..21: mol_type = other DNA; mol_type = other DNA
agggaagaattcgtacattgg

SEQ ID NO: 23108 - DNA, 21 bp, synthetic construct
  source 1..21: mol_type = other DNA; mol_type = other DNA
tacgtgaggtccgatgcgaac

SEQ ID NO: 23109 - DNA, 21 bp, synthetic construct
  source 1..21: mol_type = other DNA; mol_type = other DNA
gacctgcgtagctcgacgtgg

SEQ ID NO: 23110 - DNA, 21 bp, synthetic construct
  source 1..21: mol_type = other DNA; mol_type = other DNA
aagatggatagtcgcctatgg

SEQ ID NO: 23111 - DNA, 21 bp, synthetic construct
  source 1..21: mol_type = other DNA; mol_type = other DNA
tatctaaaaagtcaaagtatg

SEQ ID NO: 23112 - DNA, 21 bp, synthetic construct
  source 1..21: mol_type = other DNA; mol_type = other DNA
tatataaaaggagattacaag

SEQ ID NO: 23113 - DNA, 21 bp, synthetic construct
  source 1..21: mol_type = other DNA; mol_type = other DNA
ttttcacgtctcaacccagat

SEQ ID NO: 23114 - DNA, 21 bp, synthetic construct
  source 1..21: mol_type = other DNA; mol_type = other DNA
gacatgactagtcataagtgg

SEQ ID NO: 23115 - DNA, 21 bp, synthetic construct
  source 1..21: mol_type = other DNA; mol_type = other DNA
ataatggaggcgagggactgg

SEQ ID NO: 23116 - DNA, 21 bp, synthetic construct
  source 1..21: mol_type = other DNA; mol_type = other DNA
tactttgcgggtaaaattgag

SEQ ID NO: 23117 - DNA, 21 bp, synthetic construct
  source 1..21: mol_type = other DNA; mol_type = other DNA
cgtgacgagttcgtgtcatgg

SEQ ID NO: 23118 - DNA, 21 bp, synthetic construct
  source 1..21: mol_type = other DNA; mol_type = other DNA
cgtactccaactgtctacccc

SEQ ID NO: 23119 - DNA, 21 bp, synthetic construct
  source 1..21: mol_type = other DNA; mol_type = other DNA
tacttcacaggcttcaaagag

SEQ ID NO: 23120 - DNA, 21 bp, synthetic construct
  source 1..21: mol_type = other DNA; mol_type = other DNA
tacgtacgaagcgacaaaaac

SEQ ID NO: 23121 - DNA, 21 bp, synthetic construct
  source 1..21: mol_type = other DNA; mol_type = other DNA
gacttaagatcagccagctgg

SEQ ID NO: 23122 - DNA, 21 bp, synthetic construct
  source 1..21: mol_type = other DNA; mol_type = other DNA
cttgcaaggacggctcttaat

SEQ ID NO: 23123 - DNA, 21 bp, synthetic construct
  source 1..21: mol_type = other DNA; mol_type = other DNA
tatgcgaagtcgggcatgaac

SEQ ID NO: 23124 - DNA, 21 bp, synthetic construct
  source 1..21: mol_type = other DNA; mol_type = other DNA
actgagtcatcaagcgggagg

SEQ ID NO: 23125 - DNA, 21 bp, synthetic construct
  source 1..21: mol_type = other DNA; mol_type = other DNA
tacttcgcggggaggattgcg

SEQ ID NO: 23126 - DNA, 21 bp, synthetic construct
  source 1..21: mol_type = other DNA; mol_type = other DNA
tactttacggggatcatagat

SEQ ID NO: 23127 - DNA, 21 bp, synthetic construct
  source 1..21: mol_type = other DNA; mol_type = other DNA
aaagatgattttacaggctgg

SEQ ID NO: 23128 - DNA, 21 bp, synthetic construct
  source 1..21: mol_type = other DNA; mol_type = other DNA
ctcagcagaatctcctttaac

SEQ ID NO: 23129 - DNA, 21 bp, synthetic construct
  source 1..21: mol_type = other DNA; mol_type = other DNA
agcgacggtacttcgagatgg

SEQ ID NO: 23130 - DNA, 21 bp, synthetic construct
  source 1..21: mol_type = other DNA; mol_type = other DNA
aatgacggaagttctaaatgg

SEQ ID NO: 23131 - DNA, 21 bp, synthetic construct
  source 1..21: mol_type = other DNA; mol_type = other DNA
tatgtaaggtcagacttaatg

SEQ ID NO: 23132 - DNA, 21 bp, synthetic construct
  source 1..21: mol_type = other DNA; mol_type = other DNA
tatgctaaatcaggtgttaac

SEQ ID NO: 23133 - DNA, 21 bp, synthetic construct
  source 1..21: mol_type = other DNA; mol_type = other DNA
gacatgagtgctcgtgcctgg

SEQ ID NO: 23134 - DNA, 21 bp, synthetic construct
  source 1..21: mol_type = other DNA; mol_type = other DNA
cgattggagagctcatcttgg

SEQ ID NO: 23135 - DNA, 21 bp, synthetic construct
  source 1..21: mol_type = other DNA; mol_type = other DNA
gagagtgattttaagatttat

SEQ ID NO: 23136 - DNA, 21 bp, synthetic construct
  source 1..21: mol_type = other DNA; mol_type = other DNA
ttaaccagactgcagatcaac

SEQ ID NO: 23137 - DNA, 21 bp, synthetic construct
  source 1..21: mol_type = other DNA; mol_type = other DNA
gtcttaagctcgaacgtttgg

SEQ ID NO: 23138 - DNA, 21 bp, synthetic construct
  source 1..21: mol_type = other DNA; mol_type = other DNA
ttgtcgcgcacaagctacgat

SEQ ID NO: 23139 - DNA, 21 bp, synthetic construct
  source 1..21: mol_type = other DNA; mol_type = other DNA
cgagaaggttactcgcactgg

SEQ ID NO: 23140 - DNA, 21 bp, synthetic construct
  source 1..21: mol_type = other DNA; mol_type = other DNA
gacctattaagtcgcgattgg

SEQ ID NO: 23141 - DNA, 21 bp, synthetic construct
  source 1..21: mol_type = other DNA; mol_type = other DNA
ggcggggaaactagtcggtgg

SEQ ID NO: 23142 - DNA, 21 bp, synthetic construct
  source 1..21: mol_type = other DNA; mol_type = other DNA
cgtatggagagcgcgaattgg

SEQ ID NO: 23143 - DNA, 21 bp, synthetic construct
  source 1..21: mol_type = other DNA; mol_type = other DNA
cgagatgaaacgagttcatgg

SEQ ID NO: 23144 - DNA, 21 bp, synthetic construct
  source 1..21: mol_type = other DNA; mol_type = other DNA
ttgtgcaaaccgtgctacacc

SEQ ID NO: 23145 - DNA, 21 bp, synthetic construct
  source 1..21: mol_type = other DNA; mol_type = other DNA
aggttagagtcccaaagctgg

SEQ ID NO: 23146 - DNA, 21 bp, synthetic construct
  source 1..21: mol_type = other DNA; mol_type = other DNA
ttgacacgtgctgcccccaat

SEQ ID NO: 23147 - DNA, 21 bp, synthetic construct
  source 1..21: mol_type = other DNA; mol_type = other DNA
agtgcaagcacaaatggagta

SEQ ID NO: 23148 - DNA, 21 bp, synthetic construct
  source 1..21: mol_type = other DNA; mol_type = other DNA
tatttcaccggtactgtagca

SEQ ID NO: 23149 - DNA, 21 bp, synthetic construct
  source 1..21: mol_type = other DNA; mol_type = other DNA
tatagtaagcttggtgctaac

SEQ ID NO: 23150 - DNA, 21 bp, synthetic construct
  source 1..21: mol_type = other DNA; mol_type = other DNA
cgcgatgactttagttcatac

SEQ ID NO: 23151 - DNA, 21 bp, synthetic construct
  source 1..21: mol_type = other DNA; mol_type = other DNA
ctcagcaaggcggcgttcaac

SEQ ID NO: 23152 - DNA, 21 bp, synthetic construct
  source 1..21: mol_type = other DNA; mol_type = other DNA
ctttcgcgcttgggtgacaac

SEQ ID NO: 23153 - DNA, 21 bp, synthetic construct
  source 1..21: mol_type = other DNA; mol_type = other DNA
tatagtaaactagggcagaat

SEQ ID NO: 23154 - DNA, 21 bp, synthetic construct
  source 1..21: mol_type = other DNA; mol_type = other DNA
atcatgcacgcgagagattgg

SEQ ID NO: 23155 - DNA, 21 bp, synthetic construct
  source 1..21: mol_type = other DNA; mol_type = other DNA
atattggagtcccgcgggtgg

SEQ ID NO: 23156 - DNA, 21 bp, synthetic construct
  source 1..21: mol_type = other DNA; mol_type = other DNA
gtcagcgatttcaaaatttat

SEQ ID NO: 23157 - DNA, 21 bp, synthetic construct
  source 1..21: mol_type = other DNA; mol_type = other DNA
cgcacagacgatgcgtttcct

SEQ ID NO: 23158 - DNA, 21 bp, synthetic construct
  source 1..21: mol_type = other DNA; mol_type = other DNA
tatcccttcccagagcccgca

SEQ ID NO: 23159 - DNA, 21 bp, synthetic construct
  source 1..21: mol_type = other DNA; mol_type = other DNA
tattttagtggcacagtagca

SEQ ID NO: 23160 - DNA, 21 bp, synthetic construct
  source 1..21: mol_type = other DNA; mol_type = other DNA
cggggtgatacggtttatcca

SEQ ID NO: 23161 - DNA, 21 bp, synthetic construct
  source 1..21: mol_type = other DNA; mol_type = other DNA
aggatgccggatgcctaccct

SEQ ID NO: 23162 - DNA, 21 bp, synthetic construct
  source 1..21: mol_type = other DNA; mol_type = other DNA
tactctaaagctaatacaaac

SEQ ID NO: 23163 - DNA, 21 bp, synthetic construct
  source 1..21: mol_type = other DNA; mol_type = other DNA
ggttcgcctggtgtaggctgg

SEQ ID NO: 23164 - DNA, 21 bp, synthetic construct
  source 1..21: mol_type = other DNA; mol_type = other DNA
tacttcacaggatttagagag

SEQ ID NO: 23165 - DNA, 21 bp, synthetic construct
  source 1..21: mol_type = other DNA; mol_type = other DNA
aaggatgattacgaatacttt

SEQ ID NO: 23166 - DNA, 21 bp, synthetic construct
  source 1..21: mol_type = other DNA; mol_type = other DNA
ctctacgatgggacgagcgca

SEQ ID NO: 23167 - DNA, 21 bp, synthetic construct
  source 1..21: mol_type = other DNA; mol_type = other DNA
agggatgactttacagtctgg

SEQ ID NO: 23168 - DNA, 21 bp, synthetic construct
  source 1..21: mol_type = other DNA; mol_type = other DNA
tatacgaaatcagatagtaaa

SEQ ID NO: 23169 - DNA, 21 bp, synthetic construct
  source 1..21: mol_type = other DNA; mol_type = other DNA
cgcgaggaaaccgtatatcca

SEQ ID NO: 23170 - DNA, 21 bp, synthetic construct
  source 1..21: mol_type = other DNA; mol_type = other DNA
atacattccaccaacggggtg

SEQ ID NO: 23171 - DNA, 21 bp, synthetic construct
  source 1..21: mol_type = other DNA; mol_type = other DNA
gttatggaatcacgggcatgg

SEQ ID NO: 23172 - DNA, 21 bp, synthetic construct
  source 1..21: mol_type = other DNA; mol_type = other DNA
ctgactcgtatcagccacaac

SEQ ID NO: 23173 - DNA, 21 bp, synthetic construct
  source 1..21: mol_type = other DNA; mol_type = other DNA
gggagtgagtttcaaacgtat

SEQ ID NO: 23174 - DNA, 21 bp, synthetic construct
  source 1..21: mol_type = other DNA; mol_type = other DNA
cgtaatgaggatgtgtatccc

SEQ ID NO: 23175 - DNA, 21 bp, synthetic construct
  source 1..21: mol_type = other DNA; mol_type = other DNA
tattcgaaaatgaatgtaaat

SEQ ID NO: 23176 - DNA, 21 bp, synthetic construct
  source 1..21: mol_type = other DNA; mol_type = other DNA
tatttctcgggcataaccgcc

SEQ ID NO: 23177 - DNA, 21 bp, synthetic construct
  source 1..21: mol_type = other DNA; mol_type = other DNA
gtcatggccgacgccttccct

SEQ ID NO: 23178 - DNA, 21 bp, synthetic construct
  source 1..21: mol_type = other DNA; mol_type = other DNA
tatagtgctagcggacccaac

SEQ ID NO: 23179 - DNA, 21 bp, synthetic construct
  source 1..21: mol_type = other DNA; mol_type = other DNA
cgaccggagagtagtagatgg

SEQ ID NO: 23180 - DNA, 21 bp, synthetic construct
  source 1..21: mol_type = other DNA; mol_type = other DNA
tggtggtcaggaatccgtgaa

SEQ ID NO: 23181 - DNA, 21 bp, synthetic construct
  source 1..21: mol_type = other DNA; mol_type = other DNA
gtttatagtaccaacggagtt

SEQ ID NO: 23182 - DNA, 21 bp, synthetic construct
  source 1..21: mol_type = other DNA; mol_type = other DNA
atgcaccggctaagtcccgtg

SEQ ID NO: 23183 - DNA, 21 bp, synthetic construct
  source 1..21: mol_type = other DNA; mol_type = other DNA
actacgagcacgaatggggtc

SEQ ID NO: 23184 - DNA, 21 bp, synthetic construct
  source 1..21: mol_type = other DNA; mol_type = other DNA
ttacgggatggtaccaatgcg

SEQ ID NO: 23185 - DNA, 21 bp, synthetic construct
  source 1..21: mol_type = other DNA; mol_type = other DNA
tacttttcgggtcatatagac

SEQ ID NO: 23186 - DNA, 21 bp, synthetic construct
  source 1..21: mol_type = other DNA; mol_type = other DNA
ttatcgcgtctaaacgcggac

SEQ ID NO: 23187 - DNA, 21 bp, synthetic construct
  source 1..21: mol_type = other DNA; mol_type = other DNA
cgtcttcacgatgcgtaccca

SEQ ID NO: 23188 - DNA, 21 bp, synthetic construct
  source 1..21: mol_type = other DNA; mol_type = other DNA
ttacataagaaatcccccgac

SEQ ID NO: 23189 - DNA, 21 bp, synthetic construct
  source 1..21: mol_type = other DNA; mol_type = other DNA
ctttgcagaccgtgtcccgaa

SEQ ID NO: 23190 - DNA, 21 bp, synthetic construct
  source 1..21: mol_type = other DNA; mol_type = other DNA
tacctaaaatcacagtcgaca

SEQ ID NO: 23191 - DNA, 21 bp, synthetic construct
  source 1..21: mol_type = other DNA; mol_type = other DNA
aggttgcacgatgcttatccc

SEQ ID NO: 23192 - DNA, 21 bp, synthetic construct
  source 1..21: mol_type = other DNA; mol_type = other DNA
tatttcacaggcactgtcgca

SEQ ID NO: 23193 - DNA, 21 bp, synthetic construct
  source 1..21: mol_type = other DNA; mol_type = other DNA
tattcaaagatgaatacgaat

SEQ ID NO: 23194 - DNA, 21 bp, synthetic construct
  source 1..21: mol_type = other DNA; mol_type = other DNA
tactttacaggtcgcacagag

SEQ ID NO: 23195 - DNA, 21 bp, synthetic construct
  source 1..21: mol_type = other DNA; mol_type = other DNA
tacgcccgcctgggaccaaat

SEQ ID NO: 23196 - DNA, 21 bp, synthetic construct
  source 1..21: mol_type = other DNA; mol_type = other DNA
gtcatggagagtagagcttgg

SEQ ID NO: 23197 - DNA, 21 bp, synthetic construct
  source 1..21: mol_type = other DNA; mol_type = other DNA
cttagcaggctctccccaatt

SEQ ID NO: 23198 - DNA, 21 bp, synthetic construct
  source 1..21: mol_type = other DNA; mol_type = other DNA
acagtgagtacaaatggagtg

SEQ ID NO: 23199 - DNA, 21 bp, synthetic construct
  source 1..21: mol_type = other DNA; mol_type = other DNA
agagaggaggatgtgtacccg

SEQ ID NO: 23200 - DNA, 21 bp, synthetic construct
  source 1..21: mol_type = other DNA; mol_type = other DNA
actctatcctcccaaacatgg

SEQ ID NO: 23201 - DNA, 21 bp, synthetic construct
  source 1..21: mol_type = other DNA; mol_type = other DNA
tgcagacctccaacgcgcgac

SEQ ID NO: 23202 - DNA, 21 bp, synthetic construct
  source 1..21: mol_type = other DNA; mol_type = other DNA
gatatggaaagccgcaaatgg

SEQ ID NO: 23203 - DNA, 21 bp, synthetic construct
  source 1..21: mol_type = other DNA; mol_type = other DNA
tatgcaaagccaggtccgaac

SEQ ID NO: 23204 - DNA, 21 bp, synthetic construct
  source 1..21: mol_type = other DNA; mol_type = other DNA
gtggggctcaaaggttgggac

SEQ ID NO: 23205 - DNA, 21 bp, synthetic construct
  source 1..21: mol_type = other DNA; mol_type = other DNA
tattcgcgcgtagggtacaat

SEQ ID NO: 23206 - DNA, 21 bp, synthetic construct
  source 1..21: mol_type = other DNA; mol_type = other DNA
ctcagccgggtctctccaaac

SEQ ID NO: 23207 - DNA, 21 bp, synthetic construct
  source 1..21: mol_type = other DNA; mol_type = other DNA
tactggagtggtatacctatg

SEQ ID NO: 23208 - DNA, 21 bp, synthetic construct
  source 1..21: mol_type = other DNA; mol_type = other DNA
atcctcagttcgcgcgaatgg

SEQ ID NO: 23209 - DNA, 21 bp, synthetic construct
  source 1..21: mol_type = other DNA; mol_type = other DNA
cgcgacggtactagctcttgg

SEQ ID NO: 23210 - DNA, 21 bp, synthetic construct
  source 1..21: mol_type = other DNA; mol_type = other DNA
tatttcgcaggacggatagag

SEQ ID NO: 23211 - DNA, 21 bp, synthetic construct
  source 1..21: mol_type = other DNA; mol_type = other DNA
gatcttcggagtgcttcttgg

SEQ ID NO: 23212 - DNA, 21 bp, synthetic construct
  source 1..21: mol_type = other DNA; mol_type = other DNA
atatcgtcaaccaacggaatt

SEQ ID NO: 23213 - DNA, 21 bp, synthetic construct
  source 1..21: mol_type = other DNA; mol_type = other DNA
aatttagcgtctgcaagctgg

SEQ ID NO: 23214 - DNA, 21 bp, synthetic construct
  source 1..21: mol_type = other DNA; mol_type = other DNA
tttgcgcgtacgggtccgaac

SEQ ID NO: 23215 - DNA, 21 bp, synthetic construct
  source 1..21: mol_type = other DNA; mol_type = other DNA
acggtctccaccaacggcgtg

SEQ ID NO: 23216 - DNA, 21 bp, synthetic construct
  source 1..21: mol_type = other DNA; mol_type = other DNA
tacagtaaacagaatgataac

SEQ ID NO: 23217 - DNA, 21 bp, synthetic construct
  source 1..21: mol_type = other DNA; mol_type = other DNA
agggatggcgtgtcccgatgg

SEQ ID NO: 23218 - DNA, 21 bp, synthetic construct
  source 1..21: mol_type = other DNA; mol_type = other DNA
tacagtaaagtggggcgtgat

SEQ ID NO: 23219 - DNA, 21 bp, synthetic construct
  source 1..21: mol_type = other DNA; mol_type = other DNA
tatagcaaggctaatgaaaac

SEQ ID NO: 23220 - DNA, 21 bp, synthetic construct
  source 1..21: mol_type = other DNA; mol_type = other DNA
aggggtgatgacgtattccca

SEQ ID NO: 23221 - DNA, 21 bp, synthetic construct
  source 1..21: mol_type = other DNA; mol_type = other DNA
gaaatgcagtctcgcgcctgg

SEQ ID NO: 23222 - DNA, 21 bp, synthetic construct
  source 1..21: mol_type = other DNA; mol_type = other DNA
aggactaatgatgtctatcct

SEQ ID NO: 23223 - DNA, 21 bp, synthetic construct
  source 1..21: mol_type = other DNA; mol_type = other DNA
gacttgcagagccgctcgtgg

SEQ ID NO: 23224 - DNA, 21 bp, synthetic construct
  source 1..21: mol_type = other DNA; mol_type = other DNA
ttaagagatggaactccggcg

SEQ ID NO: 23225 - DNA, 21 bp, synthetic construct
  source 1..21: mol_type = other DNA; mol_type = other DNA
ctctgtagaccttgctcttct

SEQ ID NO: 23226 - DNA, 21 bp, synthetic construct
  source 1..21: mol_type = other DNA; mol_type = other DNA
catacatctacgaatggcgtg

SEQ ID NO: 23227 - DNA, 21 bp, synthetic construct
  source 1..21: mol_type = other DNA; mol_type = other DNA
tcagatgggacaagccgttgg

SEQ ID NO: 23228 - DNA, 21 bp, synthetic construct
  source 1..21: mol_type = other DNA; mol_type = other DNA
tattttactggtcatatggag

SEQ ID NO: 23229 - DNA, 21 bp, synthetic construct
  source 1..21: mol_type = other DNA; mol_type = other DNA
tatgcgcgtacaggccctaat

SEQ ID NO: 23230 - DNA, 21 bp, synthetic construct
  source 1..21: mol_type = other DNA; mol_type = other DNA
cgacttgagagtcacgggtgg

SEQ ID NO: 23231 - DNA, 21 bp, synthetic construct
  source 1..21: mol_type = other DNA; mol_type = other DNA
ttgcataggttgcaacttgac

SEQ ID NO: 23232 - DNA, 21 bp, synthetic construct
  source 1..21: mol_type = other DNA; mol_type = other DNA
tgtaaggaagactccaggatc

SEQ ID NO: 23233 - DNA, 21 bp, synthetic construct
  source 1..21: mol_type = other DNA; mol_type = other DNA
ttcgaagggcacgttcgcttc

SEQ ID NO: 23234 - DNA, 21 bp, synthetic construct
  source 1..21: mol_type = other DNA; mol_type = other DNA
tattccaaactaaaccaaaat

SEQ ID NO: 23235 - DNA, 21 bp, synthetic construct
  source 1..21: mol_type = other DNA; mol_type = other DNA
tatagtaaaaataattgcaac

SEQ ID NO: 23236 - DNA, 21 bp, synthetic construct
  source 1..21: mol_type = other DNA; mol_type = other DNA
attatgtcatctcgtggttgg

SEQ ID NO: 23237 - DNA, 21 bp, synthetic construct
  source 1..21: mol_type = other DNA; mol_type = other DNA
aaaatggactcccgattatgg

SEQ ID NO: 23238 - DNA, 21 bp, synthetic construct
  source 1..21: mol_type = other DNA; mol_type = other DNA
ccgctcgactcatacaagtgg

SEQ ID NO: 23239 - DNA, 21 bp, synthetic construct
  source 1..21: mol_type = other DNA; mol_type = other DNA
cttcaccgcttgatgcccgat

SEQ ID NO: 23240 - DNA, 21 bp, synthetic construct
  source 1..21: mol_type = other DNA; mol_type = other DNA
gtgggccataaaggttgggac

SEQ ID NO: 23241 - DNA, 21 bp, synthetic construct
  source 1..21: mol_type = other DNA; mol_type = other DNA
ctcagcaagacaggccctaac

SEQ ID NO: 23242 - DNA, 21 bp, synthetic construct
  source 1..21: mol_type = other DNA; mol_type = other DNA
cgcgacgggacctcaagttgg

SEQ ID NO: 23243 - DNA, 21 bp, synthetic construct
  source 1..21: mol_type = other DNA; mol_type = other DNA
tatctaaaatcgcaaacgatt

SEQ ID NO: 23244 - DNA, 21 bp, synthetic construct
  source 1..21: mol_type = other DNA; mol_type = other DNA
agaatgagcgatgcttatccg

SEQ ID NO: 23245 - DNA, 21 bp, synthetic construct
  source 1..21: mol_type = other DNA; mol_type = other DNA
gtgatgtctgagcgcacgtgg

SEQ ID NO: 23246 - DNA, 21 bp, synthetic construct
  source 1..21: mol_type = other DNA; mol_type = other DNA
acggatggcacgagtaggtgg

SEQ ID NO: 23247 - DNA, 21 bp, synthetic construct
  source 1..21: mol_type = other DNA; mol_type = other DNA
cgggaagatttcactagctgg

SEQ ID NO: 23248 - DNA, 21 bp, synthetic construct
  source 1..21: mol_type = other DNA; mol_type = other DNA
tatcacaaaatgatgttgaat

SEQ ID NO: 23249 - DNA, 21 bp, synthetic construct
  source 1..21: mol_type = other DNA; mol_type = other DNA
acgcatagcaccaacggagtc

SEQ ID NO: 23250 - DNA, 21 bp, synthetic construct
  source 1..21: mol_type = other DNA; mol_type = other DNA
tacctaaaatcccagtctgat

SEQ ID NO: 23251 - DNA, 21 bp, synthetic construct
  source 1..21: mol_type = other DNA; mol_type = other DNA
ccctacgcgaagtcgcccttg

SEQ ID NO: 23252 - DNA, 21 bp, synthetic construct
  source 1..21: mol_type = other DNA; mol_type = other DNA
tcgaacagcaccaatggcgta

SEQ ID NO: 23253 - DNA, 21 bp, synthetic construct
  source 1..21: mol_type = other DNA; mol_type = other DNA
attgcagctttaggatgggac

SEQ ID NO: 23254 - DNA, 21 bp, synthetic construct
  source 1..21: mol_type = other DNA; mol_type = other DNA
cgaaatgatatggtatttccg

SEQ ID NO: 23255 - DNA, 21 bp, synthetic construct
  source 1..21: mol_type = other DNA; mol_type = other DNA
gacccggcatcacgcgcgtgg

SEQ ID NO: 23256 - DNA, 21 bp, synthetic construct
  source 1..21: mol_type = other DNA; mol_type = other DNA
agatatgaacctgtatgtcct

SEQ ID NO: 23257 - DNA, 21 bp, synthetic construct
  source 1..21: mol_type = other DNA; mol_type = other DNA
tacgttcgtagcgacaaactc

SEQ ID NO: 23258 - DNA, 21 bp, synthetic construct
  source 1..21: mol_type = other DNA; mol_type = other DNA
aaagacgaatttaggagtttc

SEQ ID NO: 23259 - DNA, 21 bp, synthetic construct
  source 1..21: mol_type = other DNA; mol_type = other DNA
gtaggcacaaaggggtgggac

SEQ ID NO: 23260 - DNA, 21 bp, synthetic construct
  source 1..21: mol_type = other DNA; mol_type = other DNA
cgtatggaatcatcgcaatgg

SEQ ID NO: 23261 - DNA, 21 bp, synthetic construct
  source 1..21: mol_type = other DNA; mol_type = other DNA
agcagttcgactaacggaatc

SEQ ID NO: 23262 - DNA, 21 bp, synthetic construct
  source 1..21: mol_type = other DNA; mol_type = other DNA
tatagcaaggctcaagggata

SEQ ID NO: 23263 - DNA, 21 bp, synthetic construct
  source 1..21: mol_type = other DNA; mol_type = other DNA
tattttactgggatgcatgaa

SEQ ID NO: 23264 - DNA, 21 bp, synthetic construct
  source 1..21: mol_type = other DNA; mol_type = other DNA
gtattgagcgaccgcaattgg

SEQ ID NO: 23265 - DNA, 21 bp, synthetic construct
  source 1..21: mol_type = other DNA; mol_type = other DNA
acggatgagtttcacgcttac

SEQ ID NO: 23266 - DNA, 21 bp, synthetic construct
  source 1..21: mol_type = other DNA; mol_type = other DNA
attgagtccagccggacgtgg

SEQ ID NO: 23267 - DNA, 21 bp, synthetic construct
  source 1..21: mol_type = other DNA; mol_type = other DNA
attatggaagctcgagattgg

SEQ ID NO: 23268 - DNA, 21 bp, synthetic construct
  source 1..21: mol_type = other DNA; mol_type = other DNA
cgcactgatgatacttttccg

SEQ ID NO: 23269 - DNA, 21 bp, synthetic construct
  source 1..21: mol_type = other DNA; mol_type = other DNA
aggtcagagttcgagacgttc

SEQ ID NO: 23270 - DNA, 21 bp, synthetic construct
  source 1..21: mol_type = other DNA
tacgtaaaatcacagaatata

SEQ ID NO: 23271 - DNA, 21 bp, synthetic construct
  source 1..21: mol_type = other DNA
cagatggccagccgtgactgg

SEQ ID NO: 23272 - DNA, 21 bp, synthetic construct
  source 1..21: mol_type = other DNA
cccatggccgatagaaagtgg

SEQ ID NO: 23273 - DNA, 21 bp, synthetic construct
  source 1..21: mol_type = other DNA; mol_type = other DNA
tactctaaattgggagcgaat

SEQ ID NO: 23274 - DNA, 21 bp, synthetic construct
  source 1..21: mol_type = other DNA; mol_type = other DNA
accctctcgactaatggtcgt

SEQ ID NO: 23275 - DNA, 21 bp, synthetic construct
  source 1..21: mol_type = other DNA; mol_type = other DNA
aaggacgactatgttagttat

SEQ ID NO: 23276 - DNA, 21 bp, synthetic construct
  source 1..21: mol_type = other DNA; mol_type = other DNA
tatttcactgggactaaagag

SEQ ID NO: 23277 - DNA, 21 bp, synthetic construct
  source 1..21: mol_type = other DNA; mol_type = other DNA
tacgcgaaaaatgggcttaat

SEQ ID NO: 23278 - DNA, 21 bp, synthetic construct
  source 1..21: mol_type = other DNA; mol_type = other DNA
ttaatgagcggtgacgggcca

SEQ ID NO: 23279 - DNA, 21 bp, synthetic construct
  source 1..21: mol_type = other DNA; mol_type = other DNA
ttgtgggatggaactggtgcc

SEQ ID NO: 23280 - DNA, 21 bp, synthetic construct
  source 1..21: mol_type = other DNA; mol_type = other DNA
aagttggaaagctcgatgtgg

SEQ ID NO: 23281 - DNA, 21 bp, synthetic construct
  source 1..21: mol_type = other DNA; mol_type = other DNA
atcatggcaagcagagattgg

SEQ ID NO: 23282 - DNA, 21 bp, synthetic construct
  source 1..21: mol_type = other DNA; mol_type = other DNA
tacagcaagttaggggggaac

SEQ ID NO: 23283 - DNA, 21 bp, synthetic construct
  source 1..21: mol_type = other DNA; mol_type = other DNA
ctgcaccgtttgcaggtggac

SEQ ID NO: 23284 - DNA, 21 bp, synthetic construct
  source 1..21: mol_type = other DNA; mol_type = other DNA
tattttaccgggacagtagac

SEQ ID NO: 23285 - DNA, 21 bp, synthetic construct
  source 1..21: mol_type = other DNA; mol_type = other DNA
gtcatgagtgacagagtttgg

SEQ ID NO: 23286 - DNA, 21 bp, synthetic construct
  source 1..21: mol_type = other DNA; mol_type = other DNA
aagatgagctctgcaaattgg

SEQ ID NO: 23287 - DNA, 21 bp, synthetic construct
  source 1..21: mol_type = other DNA; mol_type = other DNA
agagaagacttcacggcatgg

SEQ ID NO: 23288 - DNA, 21 bp, synthetic construct
  source 1..21: mol_type = other DNA; mol_type = other DNA
tattggagcggaataatagag

SEQ ID NO: 23289 - DNA, 21 bp, synthetic construct
  source 1..21: mol_type = other DNA; mol_type = other DNA
ctatcaagggttagtcctaac

SEQ ID NO: 23290 - DNA, 21 bp, synthetic construct
  source 1..21: mol_type = other DNA; mol_type = other DNA
cgtgacgaattcagtacgtac

SEQ ID NO: 23291 - DNA, 21 bp, synthetic construct
  source 1..21: mol_type = other DNA; mol_type = other DNA
tacagcaaagtaggctacaat

SEQ ID NO: 23292 - DNA, 21 bp, synthetic construct
  source 1..21: mol_type = other DNA; mol_type = other DNA
agagaagacggcgtgagctgg

SEQ ID NO: 23293 - DNA, 21 bp, synthetic construct
  source 1..21: mol_type = other DNA; mol_type = other DNA
agaacatatgacagcattccc

SEQ ID NO: 23294 - DNA, 21 bp, synthetic construct
  source 1..21: mol_type = other DNA; mol_type = other DNA
agggacgagtacagttcctat

SEQ ID NO: 23295 - DNA, 21 bp, synthetic construct
  source 1..21: mol_type = other DNA; mol_type = other DNA
tacgtaaaatcgcaacccctc

SEQ ID NO: 23296 - DNA, 21 bp, synthetic construct
  source 1..21: mol_type = other DNA; mol_type = other DNA
tactctaaagctggtaccaac

SEQ ID NO: 23297 - DNA, 21 bp, synthetic construct
  source 1..21: mol_type = other DNA; mol_type = other DNA
agaagcgaaagcgtgtatcca

SEQ ID NO: 23298 - DNA, 21 bp, synthetic construct
  source 1..21: mol_type = other DNA; mol_type = other DNA
aaagattccttcacctcgtgg

SEQ ID NO: 23299 - DNA, 21 bp, synthetic construct
  source 1..21: mol_type = other DNA; mol_type = other DNA
tactctaaggtcggacgagat

SEQ ID NO: 23300 - DNA, 21 bp, synthetic construct
  source 1..21: mol_type = other DNA; mol_type = other DNA
tcaatggagtcgcatggttgg

SEQ ID NO: 23301 - DNA, 21 bp, synthetic construct
  source 1..21: mol_type = other DNA; mol_type = other DNA
tactcaaaggcggggagcaac

SEQ ID NO: 23302 - DNA, 21 bp, synthetic construct
  source 1..21: mol_type = other DNA; mol_type = other DNA
aacatggcgtcaagagattgg

SEQ ID NO: 23303 - DNA, 21 bp, synthetic construct
  source 1..21: mol_type = other DNA; mol_type = other DNA
ctttctcgagcgagtacaaat

SEQ ID NO: 23304 - DNA, 21 bp, synthetic construct
  source 1..21: mol_type = other DNA; mol_type = other DNA
gacatggcatcgaatcgatgg

SEQ ID NO: 23305 - DNA, 21 bp, synthetic construct
  source 1..21: mol_type = other DNA; mol_type = other DNA
ttgagccgtgtatctccgaat

SEQ ID NO: 23306 - DNA, 21 bp, synthetic construct
  source 1..21: mol_type = other DNA; mol_type = other DNA
tacttctccgggattcatgcg

SEQ ID NO: 23307 - DNA, 21 bp, synthetic construct
  source 1..21: mol_type = other DNA; mol_type = other DNA
tattttactggaacgttcgat

SEQ ID NO: 23308 - DNA, 21 bp, synthetic construct
  source 1..21: mol_type = other DNA; mol_type = other DNA
aggggggacgatgtttaccct

SEQ ID NO: 23309 - DNA, 21 bp, synthetic construct
  source 1..21: mol_type = other DNA; mol_type = other DNA
tattttacaggaactactgag

SEQ ID NO: 23310 - DNA, 21 bp, synthetic construct
  source 1..21: mol_type = other DNA; mol_type = other DNA
cgtatgggggatgcgtaccct

SEQ ID NO: 23311 - DNA, 21 bp, synthetic construct
  source 1..21: mol_type = other DNA; mol_type = other DNA
ttgcacaggatgtcgatagat

SEQ ID NO: 23312 - DNA, 21 bp, synthetic construct
  source 1..21: mol_type = other DNA; mol_type = other DNA
cacgacggaacttccgcgtgg

SEQ ID NO: 23313 - DNA, 21 bp, synthetic construct
  source 1..21: mol_type = other DNA; mol_type = other DNA
tatcataagttagatatcaat

SEQ ID NO: 23314 - DNA, 21 bp, synthetic construct
  source 1..21: mol_type = other DNA; mol_type = other DNA
attacttcgaccaacgggata

SEQ ID NO: 23315 - DNA, 21 bp, synthetic construct
  source 1..21: mol_type = other DNA; mol_type = other DNA
tacttcaccggtaaacatgag

SEQ ID NO: 23316 - DNA, 21 bp, synthetic construct
  source 1..21: mol_type = other DNA; mol_type = other DNA
tactttacaggtaaggcggat

SEQ ID NO: 23317 - DNA, 21 bp, synthetic construct
  source 1..21: mol_type = other DNA; mol_type = other DNA
agagaaatgactgtctttccg

SEQ ID NO: 23318 - DNA, 21 bp, synthetic construct
  source 1..21: mol_type = other DNA; mol_type = other DNA
agaaatatggacgtatatcct

SEQ ID NO: 23319 - DNA, 21 bp, synthetic construct
  source 1..21: mol_type = other DNA; mol_type = other DNA
gatatgatgtctcataaatgg

SEQ ID NO: 23320 - DNA, 21 bp, synthetic construct
  source 1..21: mol_type = other DNA; mol_type = other DNA
agcgacggggtttctaggtgg

SEQ ID NO: 23321 - DNA, 21 bp, synthetic construct
  source 1..21: mol_type = other DNA; mol_type = other DNA
tacgtgaagtcacaactcgat

SEQ ID NO: 23322 - DNA, 21 bp, synthetic construct
  source 1..21: mol_type = other DNA; mol_type = other DNA
cgcaacgacgtggtttatccc

SEQ ID NO: 23323 - DNA, 21 bp, synthetic construct
  source 1..21: mol_type = other DNA; mol_type = other DNA
taccacaaattgcagtcattc

SEQ ID NO: 23324 - DNA, 21 bp, synthetic construct
  source 1..21: mol_type = other DNA; mol_type = other DNA
tacttctcgggacaaaaagag

SEQ ID NO: 23325 - DNA, 21 bp, synthetic construct
  source 1..21: mol_type = other DNA; mol_type = other DNA
accgggagcacaaacggggta

SEQ ID NO: 23326 - DNA, 21 bp, synthetic construct
  source 1..21: mol_type = other DNA; mol_type = other DNA
agaacttcggatgtgtacccg

SEQ ID NO: 23327 - DNA, 21 bp, synthetic construct
  source 1..21: mol_type = other DNA; mol_type = other DNA
agagaagaccatgtctcctgg

SEQ ID NO: 23328 - DNA, 21 bp, synthetic construct
  source 1..21: mol_type = other DNA; mol_type = other DNA
tacttcagcgggatcgtcgcc

SEQ ID NO: 23329 - DNA, 21 bp, synthetic construct
  source 1..21: mol_type = other DNA; mol_type = other DNA
agagcactggaaggggcggat

SEQ ID NO: 23330 - DNA, 21 bp, synthetic construct
  source 1..21: mol_type = other DNA; mol_type = other DNA
gtcctaagtgaccgatcctgg

SEQ ID NO: 23331 - DNA, 21 bp, synthetic construct
  source 1..21: mol_type = other DNA; mol_type = other DNA
ctttcgcggataagcgtaaat

SEQ ID NO: 23332 - DNA, 21 bp, synthetic construct
  source 1..21: mol_type = other DNA; mol_type = other DNA
gtgatgttcgatgcttatccg

SEQ ID NO: 23333 - DNA, 21 bp, synthetic construct
  source 1..21: mol_type = other DNA; mol_type = other DNA
tattttagtggtatcgtatca

SEQ ID NO: 23334 - DNA, 21 bp, synthetic construct
  source 1..21: mol_type = other DNA; mol_type = other DNA
ttcagcaaattgaatcaaaac

SEQ ID NO: 23335 - DNA, 21 bp, synthetic construct
  source 1..21: mol_type = other DNA; mol_type = other DNA
tacctcaagagccaggaatgg

SEQ ID NO: 23336 - DNA, 21 bp, synthetic construct
  source 1..21: mol_type = other DNA; mol_type = other DNA
ccgatgatgtcaggcacgtgg

SEQ ID NO: 23337 - DNA, 21 bp, synthetic construct
  source 1..21: mol_type = other DNA; mol_type = other DNA
gtgtttagtacgaacggcatt

SEQ ID NO: 23338 - DNA, 21 bp, synthetic construct
  source 1..21: mol_type = other DNA; mol_type = other DNA
gatttaagcagttcggattgg

SEQ ID NO: 23339 - DNA, 21 bp, synthetic construct
  source 1..21: mol_type = other DNA; mol_type = other DNA
tactttagcgggcagaaagag

SEQ ID NO: 23340 - DNA, 21 bp, synthetic construct
  source 1..21: mol_type = other DNA; mol_type = other DNA
tatttcacgggaatgcgcgag

SEQ ID NO: 23341 - DNA, 21 bp, synthetic construct
  source 1..21: mol_type = other DNA; mol_type = other DNA
tacgcaaaggtagggcctaat

SEQ ID NO: 23342 - DNA, 21 bp, synthetic construct
  source 1..21: mol_type = other DNA; mol_type = other DNA
aaagatggtacaagttattgg

SEQ ID NO: 23343 - DNA, 21 bp, synthetic construct
  source 1..21: mol_type = other DNA; mol_type = other DNA
gatatgagttcaaataagtgg

SEQ ID NO: 23344 - DNA, 21 bp, synthetic construct
  source 1..21: mol_type = other DNA; mol_type = other DNA
ctaagccggttgggtggtggt

SEQ ID NO: 23345 - DNA, 21 bp, synthetic construct
  source 1..21: mol_type = other DNA; mol_type = other DNA
tatttttccggcgtgaaggcc

SEQ ID NO: 23346 - DNA, 21 bp, synthetic construct
  source 1..21: mol_type = other DNA; mol_type = other DNA
cgcctatatgatgccatcccc

SEQ ID NO: 23347 - DNA, 21 bp, synthetic construct
  source 1..21: mol_type = other DNA; mol_type = other DNA
gtaatgagcagtactacatgg

SEQ ID NO: 23348 - DNA, 21 bp, synthetic construct
  source 1..21: mol_type = other DNA; mol_type = other DNA
cgcgaggacgctgtacggtgg

SEQ ID NO: 23349 - DNA, 21 bp, synthetic construct
  source 1..21: mol_type = other DNA; mol_type = other DNA
agaggtgagggtgtgtatccg

SEQ ID NO: 23350 - DNA, 21 bp, synthetic construct
  source 1..21: mol_type = other DNA; mol_type = other DNA
tattttacgggtactttggag

SEQ ID NO: 23351 - DNA, 21 bp, synthetic construct
  source 1..21: mol_type = other DNA; mol_type = other DNA
tattctaaggcgggatacaat

SEQ ID NO: 23352 - DNA, 21 bp, synthetic construct
  source 1..21: mol_type = other DNA; mol_type = other DNA
aggactagtgacgcgtaccca

SEQ ID NO: 23353 - DNA, 21 bp, synthetic construct
  source 1..21: mol_type = other DNA; mol_type = other DNA
tacttcactggtattacgtca

SEQ ID NO: 23354 - DNA, 21 bp, synthetic construct
  source 1..21: mol_type = other DNA; mol_type = other DNA
tattccaaagctaacatgaat

SEQ ID NO: 23355 - DNA, 21 bp, synthetic construct
  source 1..21: mol_type = other DNA; mol_type = other DNA
gttcactctagtaatggagtg

SEQ ID NO: 23356 - DNA, 21 bp, synthetic construct
  source 1..21: mol_type = other DNA; mol_type = other DNA
tattttactggtcgtctcgag

SEQ ID NO: 23357 - DNA, 21 bp, synthetic construct
  source 1..21: mol_type = other DNA; mol_type = other DNA
ttcagcaaggtaggtttcaat

SEQ ID NO: 23358 - DNA, 21 bp, synthetic construct
  source 1..21: mol_type = other DNA; mol_type = other DNA
tacagcaaaatgggcgcaaac

SEQ ID NO: 23359 - DNA, 21 bp, synthetic construct
  source 1..21: mol_type = other DNA; mol_type = other DNA
tacgtcaaaagccagcaaacc

SEQ ID NO: 23360 - DNA, 21 bp, synthetic construct
  source 1..21: mol_type = other DNA; mol_type = other DNA
tacgcaaaaactggcacgaat

SEQ ID NO: 23361 - DNA, 21 bp, synthetic construct
  source 1..21: mol_type = other DNA; mol_type = other DNA
gatttctatggaaagtatgct

SEQ ID NO: 23362 - DNA, 21 bp, synthetic construct
  source 1..21: mol_type = other DNA; mol_type = other DNA
cgtgcattggaaggaagggat

SEQ ID NO: 23363 - DNA, 21 bp, synthetic construct
  source 1..21: mol_type = other DNA; mol_type = other DNA
ctagagtcgactaatggcagg

SEQ ID NO: 23364 - DNA, 21 bp, synthetic construct
  source 1..21: mol_type = other DNA; mol_type = other DNA
gtactctctgaccgtctctgg

SEQ ID NO: 23365 - DNA, 21 bp, synthetic construct
  source 1..21: mol_type = other DNA; mol_type = other DNA
gatatgagcagtaaggtgtgg

SEQ ID NO: 23366 - DNA, 21 bp, synthetic construct
  source 1..21: mol_type = other DNA; mol_type = other DNA
tttcataaaaaaggtccggac

SEQ ID NO: 23367 - DNA, 21 bp, synthetic construct
  source 1..21: mol_type = other DNA; mol_type = other DNA
tatcttaagtctcagagttac

SEQ ID NO: 23368 - DNA, 21 bp, synthetic construct
  source 1..21: mol_type = other DNA; mol_type = other DNA
ctctgcaaaccatgtttaaat

SEQ ID NO: 23369 - DNA, 21 bp, synthetic construct
  source 1..21: mol_type = other DNA; mol_type = other DNA
gtgctttctgcctcttcgtgg

SEQ ID NO: 23370 - DNA, 21 bp, synthetic construct
  source 1..21: mol_type = other DNA; mol_type = other DNA
gtaatggccgatcgcaagtgg

SEQ ID NO: 23371 - DNA, 21 bp, synthetic construct
  source 1..21: mol_type = other DNA; mol_type = other DNA
ctgcacagactttcgcaggat

SEQ ID NO: 23372 - DNA, 21 bp, synthetic construct
  source 1..21: mol_type = other DNA; mol_type = other DNA
tatttttcaaaggtcaaagag

SEQ ID NO: 23373 - DNA, 21 bp, synthetic construct
  source 1..21: mol_type = other DNA; mol_type = other DNA
tactcaaaaatgggattcaat

SEQ ID NO: 23374 - DNA, 21 bp, synthetic construct
  source 1..21: mol_type = other DNA; mol_type = other DNA
tatttcacagggaaacacgac

SEQ ID NO: 23375 - DNA, 21 bp, synthetic construct
  source 1..21: mol_type = other DNA; mol_type = other DNA
cttcaccggctgagtgaattt

SEQ ID NO: 23376 - DNA, 21 bp, synthetic construct
  source 1..21: mol_type = other DNA; mol_type = other DNA
tacagcaaaattgggaagaat

SEQ ID NO: 23377 - DNA, 21 bp, synthetic construct
  source 1..21: mol_type = other DNA; mol_type = other DNA
ttcagtgtgtgtactgggagc

SEQ ID NO: 23378 - DNA, 21 bp, synthetic construct
  source 1..21: mol_type = other DNA; mol_type = other DNA
cgcatggatgatgtctatccc

SEQ ID NO: 23379 - DNA, 21 bp, synthetic construct
  source 1..21: mol_type = other DNA; mol_type = other DNA
cggagtgccgacgcgtaccct

SEQ ID NO: 23380 - DNA, 21 bp, synthetic construct
  source 1..21: mol_type = other DNA; mol_type = other DNA
ttacaccgcttaagccctatg

SEQ ID NO: 23381 - DNA, 21 bp, synthetic construct
  source 1..21: mol_type = other DNA; mol_type = other DNA
ctctcacgcgcagctccgaac

SEQ ID NO: 23382 - DNA, 21 bp, synthetic construct
  source 1..21: mol_type = other DNA; mol_type = other DNA
cgagaagactcggtctactgg

SEQ ID NO: 23383 - DNA, 21 bp, synthetic construct
  source 1..21: mol_type = other DNA; mol_type = other DNA
tatgttaagagtcaaaacatc

SEQ ID NO: 23384 - DNA, 21 bp, synthetic construct
  source 1..21: mol_type = other DNA; mol_type = other DNA
cccatgggtagcgcccaatgg

SEQ ID NO: 23385 - DNA, 21 bp, synthetic construct
  source 1..21: mol_type = other DNA; mol_type = other DNA
ctccatgtacgacttaacaat

SEQ ID NO: 23386 - DNA, 21 bp, synthetic construct
  source 1..21: mol_type = other DNA; mol_type = other DNA
tatcttaaaagtcaggattac

SEQ ID NO: 23387 - DNA, 21 bp, synthetic construct
  source 1..21: mol_type = other DNA; mol_type = other DNA
agggacgagttcaccagctac

SEQ ID NO: 23388 - DNA, 21 bp, synthetic construct
  source 1..21: mol_type = other DNA; mol_type = other DNA
gtcctttcggacaggaattgg

SEQ ID NO: 23389 - DNA, 21 bp, synthetic construct
  source 1..21: mol_type = other DNA; mol_type = other DNA
tacttttcagggcaaattgag

SEQ ID NO: 23390 - DNA, 21 bp, synthetic construct
  source 1..21: mol_type = other DNA; mol_type = other DNA
tacgtgaaaagtcaggcatca

SEQ ID NO: 23391 - DNA, 21 bp, synthetic construct
  source 1..21: mol_type = other DNA; mol_type = other DNA
cgcacattggatgccttccca

SEQ ID NO: 23392 - DNA, 21 bp, synthetic construct
  source 1..21: mol_type = other DNA; mol_type = other DNA
ctatcgcgactgaacgataac

SEQ ID NO: 23393 - DNA, 21 bp, synthetic construct
  source 1..21: mol_type = other DNA; mol_type = other DNA
gtcctatcaacaaacggggtc

SEQ ID NO: 23394 - DNA, 21 bp, synthetic construct
  source 1..21: mol_type = other DNA; mol_type = other DNA
tacgcgaaaccgggtcccaat

SEQ ID NO: 23395 - DNA, 21 bp, synthetic construct
  source 1..21: mol_type = other DNA; mol_type = other DNA
ttgcaccgtctgagtgattcg

SEQ ID NO: 23396 - DNA, 21 bp, synthetic construct
  source 1..21: mol_type = other DNA; mol_type = other DNA
gtactttcgagcaatgtctgg

SEQ ID NO: 23397 - DNA, 21 bp, synthetic construct
  source 1..21: mol_type = other DNA; mol_type = other DNA
tactggtcagctataaaagag

SEQ ID NO: 23398 - DNA, 21 bp, synthetic construct
  source 1..21: mol_type = other DNA; mol_type = other DNA
tactttagcgggatcccaagt

SEQ ID NO: 23399 - DNA, 21 bp, synthetic construct
  source 1..21: mol_type = other DNA; mol_type = other DNA
tactcgaaaaccggcttgaac

SEQ ID NO: 23400 - DNA, 21 bp, synthetic construct
  source 1..21: mol_type = other DNA; mol_type = other DNA
tattccaagctttcaagtaat

SEQ ID NO: 23401 - DNA, 21 bp, synthetic construct
  source 1..21: mol_type = other DNA; mol_type = other DNA
gtcgctatggaggggcgggac

SEQ ID NO: 23402 - DNA, 21 bp, synthetic construct
  source 1..21: mol_type = other DNA; mol_type = other DNA
ttatcgagggtaggacgcgat

SEQ ID NO: 23403 - DNA, 21 bp, synthetic construct
  source 1..21: mol_type = other DNA; mol_type = other DNA
gatgatggctcctcacgttgg

SEQ ID NO: 23404 - DNA, 21 bp, synthetic construct
  source 1..21: mol_type = other DNA; mol_type = other DNA
gacatggaatcacgcacatgg

SEQ ID NO: 23405 - DNA, 21 bp, synthetic construct
  source 1..21: mol_type = other DNA; mol_type = other DNA
ttacatcggctccagtcgacc

SEQ ID NO: 23406 - DNA, 21 bp, synthetic construct
  source 1..21: mol_type = other DNA; mol_type = other DNA
ctcagccgcacgtcgactaac

SEQ ID NO: 23407 - DNA, 21 bp, synthetic construct
  source 1..21: mol_type = other DNA; mol_type = other DNA
aaaggtgaaagtcgcgagtgg

SEQ ID NO: 23408 - DNA, 21 bp, synthetic construct
  source 1..21: mol_type = other DNA; mol_type = other DNA
gacctacaaagcagtacatgg

SEQ ID NO: 23409 - DNA, 21 bp, synthetic construct
  source 1..21: mol_type = other DNA; mol_type = other DNA
aggatggaatcggctaactgg

SEQ ID NO: 23410 - DNA, 21 bp, synthetic construct
  source 1..21: mol_type = other DNA; mol_type = other DNA
ggaagtgagtttattagcttt

SEQ ID NO: 23411 - DNA, 21 bp, synthetic construct
  source 1..21: mol_type = other DNA; mol_type = other DNA
tacttaaagtcacagagtcaa

SEQ ID NO: 23412 - DNA, 21 bp, synthetic construct
  source 1..21: mol_type = other DNA; mol_type = other DNA
ataatgacctctcgtgattgg

SEQ ID NO: 23413 - DNA, 21 bp, synthetic construct
  source 1..21: mol_type = other DNA; mol_type = other DNA
ttacatcgtctgagcgttaac

SEQ ID NO: 23414 - DNA, 21 bp, synthetic construct
  source 1..21: mol_type = other DNA; mol_type = other DNA
tatttcagtggtcagaaggaa

SEQ ID NO: 23415 - DNA, 21 bp, synthetic construct
  source 1..21: mol_type = other DNA; mol_type = other DNA
ttcttcactgggatcatcgag

SEQ ID NO: 23416 - DNA, 21 bp, synthetic construct
  source 1..21: mol_type = other DNA; mol_type = other DNA
aaagatgactacagcacttat

SEQ ID NO: 23417 - DNA, 21 bp, synthetic construct
  source 1..21: mol_type = other DNA; mol_type = other DNA
tatagtaaaacgggactaaat

SEQ ID NO: 23418 - DNA, 21 bp, synthetic construct
  source 1..21: mol_type = other DNA; mol_type = other DNA
gttatgtcggatcgtatatgg

SEQ ID NO: 23419 - DNA, 21 bp, synthetic construct
  source 1..21: mol_type = other DNA; mol_type = other DNA
cgggatagcacagtatttccg

SEQ ID NO: 23420 - DNA, 21 bp, synthetic construct
  source 1..21: mol_type = other DNA; mol_type = other DNA
gatttgtcgagcagggactgg

SEQ ID NO: 23421 - DNA, 21 bp, synthetic construct
  source 1..21: mol_type = other DNA; mol_type = other DNA
ggagctgatcatgttaagtgg

SEQ ID NO: 23422 - DNA, 21 bp, synthetic construct
  source 1..21: mol_type = other DNA; mol_type = other DNA
tatagcaaggcaaataccaat

SEQ ID NO: 23423 - DNA, 21 bp, synthetic construct
  source 1..21: mol_type = other DNA; mol_type = other DNA
tatagcaaagcgggacataac

SEQ ID NO: 23424 - DNA, 21 bp, synthetic construct
  source 1..21: mol_type = other DNA; mol_type = other DNA
cgtcttcatgacgcctacccg

SEQ ID NO: 23425 - DNA, 21 bp, synthetic construct
  source 1..21: mol_type = other DNA; mol_type = other DNA
ttgcataggataggcgccaac

SEQ ID NO: 23426 - DNA, 21 bp, synthetic construct
  source 1..21: mol_type = other DNA; mol_type = other DNA
aaggacgattataccctcttc

SEQ ID NO: 23427 - DNA, 21 bp, synthetic construct
  source 1..21: mol_type = other DNA; mol_type = other DNA
tactcgaagcttgactataat

SEQ ID NO: 23428 - DNA, 21 bp, synthetic construct
  source 1..21: mol_type = other DNA; mol_type = other DNA
aaatgcaagccctgcccgata

SEQ ID NO: 23429 - DNA, 21 bp, synthetic construct
  source 1..21: mol_type = other DNA; mol_type = other DNA
atgcaccgcttaagtccgctt

SEQ ID NO: 23430 - DNA, 21 bp, synthetic construct
  source 1..21: mol_type = other DNA; mol_type = other DNA
gacttaggctcagcgaaatgg

SEQ ID NO: 23431 - DNA, 21 bp, synthetic construct
  source 1..21: mol_type = other DNA; mol_type = other DNA
tactataccggtgtgaaagag

SEQ ID NO: 23432 - DNA, 21 bp, synthetic construct
  source 1..21: mol_type = other DNA; mol_type = other DNA
cgaaacgaatcagtgtatcct

SEQ ID NO: 23433 - DNA, 21 bp, synthetic construct
  source 1..21: mol_type = other DNA; mol_type = other DNA
ctggccaggacaggtgacaat

SEQ ID NO: 23434 - DNA, 21 bp, synthetic construct
  source 1..21: mol_type = other DNA; mol_type = other DNA
taccacgcacagggcccgaac

SEQ ID NO: 23435 - DNA, 21 bp, synthetic construct
  source 1..21: mol_type = other DNA; mol_type = other DNA
tacagcaaggctgggtttaat

SEQ ID NO: 23436 - DNA, 21 bp, synthetic construct
  source 1..21: mol_type = other DNA; mol_type = other DNA
tatttctcgggcaagatagct

SEQ ID NO: 23437 - DNA, 21 bp, synthetic construct
  source 1..21: mol_type = other DNA; mol_type = other DNA
gaaatggcgtcccactcatgg

SEQ ID NO: 23438 - DNA, 21 bp, synthetic construct
  source 1..21: mol_type = other DNA; mol_type = other DNA
atgcgggacggtacaccttcg

SEQ ID NO: 23439 - DNA, 21 bp, synthetic construct
  source 1..21: mol_type = other DNA; mol_type = other DNA
gacatgtcgagcgtccaatgg

SEQ ID NO: 23440 - DNA, 21 bp, synthetic construct
  source 1..21: mol_type = other DNA; mol_type = other DNA
gttcagtcgacaaacggaata

SEQ ID NO: 23441 - DNA, 21 bp, synthetic construct
  source 1..21: mol_type = other DNA; mol_type = other DNA
tactcaaaacaaaacattaat

SEQ ID NO: 23442 - DNA, 21 bp, synthetic construct
  source 1..21: mol_type = other DNA; mol_type = other DNA
gtgaattcgagcaatggggtt

SEQ ID NO: 23443 - DNA, 21 bp, synthetic construct
  source 1..21: mol_type = other DNA; mol_type = other DNA
agagatggcatgtctgcttgg

SEQ ID NO: 23444 - DNA, 21 bp, synthetic construct
  source 1..21: mol_type = other DNA; mol_type = other DNA
ttttcaagagtgggtgagaac

SEQ ID NO: 23445 - DNA, 21 bp, synthetic construct
  source 1..21: mol_type = other DNA; mol_type = other DNA
tactctaagcaaggtgctaat

SEQ ID NO: 23446 - DNA, 21 bp, synthetic construct
  source 1..21: mol_type = other DNA; mol_type = other DNA
ttggctaagacggggaacaat

SEQ ID NO: 23447 - DNA, 21 bp, synthetic construct
  source 1..21: mol_type = other DNA; mol_type = other DNA
ctgcaccgcttaagtccaaat

SEQ ID NO: 23448 - DNA, 21 bp, synthetic construct
  source 1..21: mol_type = other DNA; mol_type = other DNA
tactttagtggaataactgcc

SEQ ID NO: 23449 - DNA, 21 bp, synthetic construct
  source 1..21: mol_type = other DNA; mol_type = other DNA
cgtatggcagatgccttccca

SEQ ID NO: 23450 - DNA, 21 bp, synthetic construct
  source 1..21: mol_type = other DNA; mol_type = other DNA
cgtttggaaagtagcggctgg

SEQ ID NO: 23451 - DNA, 21 bp, synthetic construct
  source 1..21: mol_type = other DNA; mol_type = other DNA
tcgacagactacgtgagttgg

SEQ ID NO: 23452 - DNA, 21 bp, synthetic construct
  source 1..21: mol_type = other DNA; mol_type = other DNA
tactttagcaaggtcatcgct

SEQ ID NO: 23453 - DNA, 21 bp, synthetic construct
  source 1..21: mol_type = other DNA; mol_type = other DNA
atccagagtacgaacggcatt

SEQ ID NO: 23454 - DNA, 21 bp, synthetic construct
  source 1..21: mol_type = other DNA; mol_type = other DNA
gttagttcctcaaatggtcgc

SEQ ID NO: 23455 - DNA, 21 bp, synthetic construct
  source 1..21: mol_type = other DNA; mol_type = other DNA
tactttagcgggcagattgaa

SEQ ID NO: 23456 - DNA, 21 bp, synthetic construct
  source 1..21: mol_type = other DNA; mol_type = other DNA
taccttaagagccagtcgttc

SEQ ID NO: 23457 - DNA, 21 bp, synthetic construct
  source 1..21: mol_type = other DNA; mol_type = other DNA
tattttacaggaagacttgaa

SEQ ID NO: 23458 - DNA, 21 bp, synthetic construct
  source 1..21: mol_type = other DNA; mol_type = other DNA
gtctctgaatttacaacctac

SEQ ID NO: 23459 - DNA, 21 bp, synthetic construct
  source 1..21: mol_type = other DNA; mol_type = other DNA
ggctgcgggacaaaaagcgga

SEQ ID NO: 23460 - DNA, 21 bp, synthetic construct
  source 1..21: mol_type = other DNA; mol_type = other DNA
aagagtgagtttaaaatcttc

SEQ ID NO: 23461 - DNA, 21 bp, synthetic construct
  source 1..21: mol_type = other DNA; mol_type = other DNA
gaaatggagagttccgtctgg

SEQ ID NO: 23462 - DNA, 21 bp, synthetic construct
  source 1..21: mol_type = other DNA; mol_type = other DNA
tactttagtggtaccattgac

SEQ ID NO: 23463 - DNA, 21 bp, synthetic construct
  source 1..21: mol_type = other DNA; mol_type = other DNA
agagactcgaccgttttcccc

SEQ ID NO: 23464 - DNA, 21 bp, synthetic construct
  source 1..21: mol_type = other DNA; mol_type = other DNA
cgcgaagatggggtaaagtgg

SEQ ID NO: 23465 - DNA, 21 bp, synthetic construct
  source 1..21: mol_type = other DNA; mol_type = other DNA
ctaatgtcgagcgccaagtgg

SEQ ID NO: 23466 - DNA, 21 bp, synthetic construct
  source 1..21: mol_type = other DNA; mol_type = other DNA
gttatggctgacagaatatgg

SEQ ID NO: 23467 - DNA, 21 bp, synthetic construct
  source 1..21: mol_type = other DNA; mol_type = other DNA
gacctgaactctcgtagttgg

SEQ ID NO: 23468 - DNA, 21 bp, synthetic construct
  source 1..21: mol_type = other DNA; mol_type = other DNA
agagatatggacgtgtaccct

SEQ ID NO: 23469 - DNA, 21 bp, synthetic construct
  source 1..21: mol_type = other DNA; mol_type = other DNA
cgcgatgaattcagcccgtac

SEQ ID NO: 23470 - DNA, 21 bp, synthetic construct
  source 1..21: mol_type = other DNA; mol_type = other DNA
tacttttccgggagattagaa

SEQ ID NO: 23471 - DNA, 21 bp, synthetic construct
  source 1..21: mol_type = other DNA; mol_type = other DNA
tatctaaagtcgcaaaactac

SEQ ID NO: 23472 - DNA, 21 bp, synthetic construct
  source 1..21: mol_type = other DNA; mol_type = other DNA
ttagctcgcacgggagataac

SEQ ID NO: 23473 - DNA, 21 bp, synthetic construct
  source 1..21: mol_type = other DNA; mol_type = other DNA
agagaggaactagttcgatgg

SEQ ID NO: 23474 - DNA, 21 bp, synthetic construct
  source 1..21: mol_type = other DNA; mol_type = other DNA
tactttacaggctacatcgac

SEQ ID NO: 23475 - DNA, 21 bp, synthetic construct
  source 1..21: mol_type = other DNA; mol_type = other DNA
cgcgacgatttcacggtgtat

SEQ ID NO: 23476 - DNA, 21 bp, synthetic construct
  source 1..21: mol_type = other DNA; mol_type = other DNA
tactttactggcactgtgctg

SEQ ID NO: 23477 - DNA, 21 bp, synthetic construct
  source 1..21: mol_type = other DNA; mol_type = other DNA
tatagcaagaagaacgagaac

SEQ ID NO: 23478 - DNA, 21 bp, synthetic construct
  source 1..21: mol_type = other DNA; mol_type = other DNA
cttagtaaggtagggtacgat

SEQ ID NO: 23479 - DNA, 21 bp, synthetic construct
  source 1..21: mol_type = other DNA; mol_type = other DNA
tacttttcggggaagatagac

SEQ ID NO: 23480 - DNA, 21 bp, synthetic construct
  source 1..21: mol_type = other DNA; mol_type = other DNA
cgagacggcaccagtgcgtgg

SEQ ID NO: 23481 - DNA, 21 bp, synthetic construct
  source 1..21: mol_type = other DNA; mol_type = other DNA
gtaccggactatgtccgatat

SEQ ID NO: 23482 - DNA, 21 bp, synthetic construct
  source 1..21: mol_type = other DNA; mol_type = other DNA
tacacaaaatcgcagcaaata

SEQ ID NO: 23483 - DNA, 21 bp, synthetic construct
  source 1..21: mol_type = other DNA; mol_type = other DNA
cgcggggacgatcactaccct

SEQ ID NO: 23484 - DNA, 21 bp, synthetic construct
  source 1..21: mol_type = other DNA; mol_type = other DNA
ctctgtcgtccatgttcgcag

SEQ ID NO: 23485 - DNA, 21 bp, synthetic construct
  source 1..21: mol_type = other DNA; mol_type = other DNA
ataatggaaagccggaactgg

SEQ ID NO: 23486 - DNA, 21 bp, synthetic construct
  source 1..21: mol_type = other DNA; mol_type = other DNA
gatatgtcagttaggacctgg

SEQ ID NO: 23487 - DNA, 21 bp, synthetic construct
  source 1..21: mol_type = other DNA; mol_type = other DNA
gaaatggggtcggccacgtgg

SEQ ID NO: 23488 - DNA, 21 bp, synthetic construct
  source 1..21: mol_type = other DNA; mol_type = other DNA
ttattggagtctcgctcatgg

SEQ ID NO: 23489 - DNA, 21 bp, synthetic construct
  source 1..21: mol_type = other DNA; mol_type = other DNA
tatgttagatctgataagaat

SEQ ID NO: 23490 - DNA, 21 bp, synthetic construct
  source 1..21: mol_type = other DNA; mol_type = other DNA
cgagatggtacaagctcgtgg

SEQ ID NO: 23491 - DNA, 21 bp, synthetic construct
  source 1..21: mol_type = other DNA; mol_type = other DNA
tatagtaaaatgaacaccaac

SEQ ID NO: 23492 - DNA, 21 bp, synthetic construct
  source 1..21: mol_type = other DNA; mol_type = other DNA
agggaagagacggtctacccg

SEQ ID NO: 23493 - DNA, 21 bp, synthetic construct
  source 1..21: mol_type = other DNA; mol_type = other DNA
agactcgataatgtctatccc

SEQ ID NO: 23494 - DNA, 21 bp, synthetic construct
  source 1..21: mol_type = other DNA; mol_type = other DNA
atctccagcacaaatggtatt

SEQ ID NO: 23495 - DNA, 21 bp, synthetic construct
  source 1..21: mol_type = other DNA; mol_type = other DNA
gtaaattccaccaacggcatg

SEQ ID NO: 23496 - DNA, 21 bp, synthetic construct
  source 1..21: mol_type = other DNA; mol_type = other DNA
cgcatggagagtagcatgtgg

SEQ ID NO: 23497 - DNA, 21 bp, synthetic construct
  source 1..21: mol_type = other DNA; mol_type = other DNA
tatgtgagaagtgatttagga

SEQ ID NO: 23498 - DNA, 21 bp, synthetic construct
  source 1..21: mol_type = other DNA; mol_type = other DNA
aaagacgacttcacaggttgg

SEQ ID NO: 23499 - DNA, 21 bp, synthetic construct
  source 1..21: mol_type = other DNA; mol_type = other DNA
cgtttaaatgatgtttatccc

SEQ ID NO: 23500 - DNA, 21 bp, synthetic construct
  source 1..21: mol_type = other DNA; mol_type = other DNA
atgaaagatggtacaaatcct

SEQ ID NO: 23501 - DNA, 21 bp, synthetic construct
  source 1..21: mol_type = other DNA; mol_type = other DNA
tactttagcggaactaaggaa

SEQ ID NO: 23502 - DNA, 21 bp, synthetic construct
  source 1..21: mol_type = other DNA; mol_type = other DNA
cattcatcgacaaatggagtg

SEQ ID NO: 23503 - DNA, 21 bp, synthetic construct
  source 1..21: mol_type = other DNA; mol_type = other DNA
tactttacgggcgaggtgaat

SEQ ID NO: 23504 - DNA, 21 bp, synthetic construct
  source 1..21: mol_type = other DNA; mol_type = other DNA
tatgcaaagacgggagataat

SEQ ID NO: 23505 - DNA, 21 bp, synthetic construct
  source 1..21: mol_type = other DNA; mol_type = other DNA
cctttggactcgcgcagttgg

SEQ ID NO: 23506 - DNA, 21 bp, synthetic construct
  source 1..21: mol_type = other DNA; mol_type = other DNA
cgttctgtctctgtttttccg

SEQ ID NO: 23507 - DNA, 21 bp, synthetic construct
  source 1..21: mol_type = other DNA; mol_type = other DNA
agaaatgaccacgttttcccg

SEQ ID NO: 23508 - DNA, 21 bp, synthetic construct
  source 1..21: mol_type = other DNA; mol_type = other DNA
ccaatgggcagcagtacatgg

SEQ ID NO: 23509 - DNA, 21 bp, synthetic construct
  source 1..21: mol_type = other DNA; mol_type = other DNA
ctccataagaagggagaaaac

SEQ ID NO: 23510 - DNA, 21 bp, synthetic construct
  source 1..21: mol_type = other DNA; mol_type = other DNA
gtccactcaactaacgggata

SEQ ID NO: 23511 - DNA, 21 bp, synthetic construct
  source 1..21: mol_type = other DNA; mol_type = other DNA
atcatggcagatcgtgtgtgg

SEQ ID NO: 23512 - DNA, 21 bp, synthetic construct
  source 1..21: mol_type = other DNA; mol_type = other DNA
gcccatgagtttggcccggta

SEQ ID NO: 23513 - DNA, 21 bp, synthetic construct
  source 1..21: mol_type = other DNA; mol_type = other DNA
tattggagcggcgtaatagaa

SEQ ID NO: 23514 - DNA, 21 bp, synthetic construct
  source 1..21: mol_type = other DNA; mol_type = other DNA
tacttaaaaagccaatctcta

SEQ ID NO: 23515 - DNA, 21 bp, synthetic construct
  source 1..21: mol_type = other DNA; mol_type = other DNA
cctatggacagtagtcgctgg

SEQ ID NO: 23516 - DNA, 21 bp, synthetic construct
  source 1..21: mol_type = other DNA; mol_type = other DNA
cgtaaacatgatgtgtatcct

SEQ ID NO: 23517 - DNA, 21 bp, synthetic construct
  source 1..21: mol_type = other DNA; mol_type = other DNA
aggtctgaatttatgagttac

SEQ ID NO: 23518 - DNA, 21 bp, synthetic construct
  source 1..21: mol_type = other DNA; mol_type = other DNA
ataatgcatgctcgggactgg

SEQ ID NO: 23519 - DNA, 21 bp, synthetic construct
  source 1..21: mol_type = other DNA; mol_type = other DNA
ttgcacaggttgtcaccaggg

SEQ ID NO: 23520 - DNA, 21 bp, synthetic construct
  source 1..21: mol_type = other DNA; mol_type = other DNA
gtcaacagtacaaatgggatg

SEQ ID NO: 23521 - DNA, 21 bp, synthetic construct
  source 1..21: mol_type = other DNA; mol_type = other DNA
attgctggaagaggctgggat

SEQ ID NO: 23522 - DNA, 21 bp, synthetic construct
  source 1..21: mol_type = other DNA; mol_type = other DNA
tatgccaagacaggcgtcaac

SEQ ID NO: 23523 - DNA, 21 bp, synthetic construct
  source 1..21: mol_type = other DNA; mol_type = other DNA
agactcgacgatgtttatccg

SEQ ID NO: 23524 - DNA, 21 bp, synthetic construct
  source 1..21: mol_type = other DNA; mol_type = other DNA
atagcggggcgtgggtgggac

SEQ ID NO: 23525 - DNA, 21 bp, synthetic construct
  source 1..21: mol_type = other DNA; mol_type = other DNA
ccgcgttcgactaacggagta

SEQ ID NO: 23526 - DNA, 21 bp, synthetic construct
  source 1..21: mol_type = other DNA; mol_type = other DNA
ctccacagactatcgacccct

SEQ ID NO: 23527 - DNA, 21 bp, synthetic construct
  source 1..21: mol_type = other DNA; mol_type = other DNA
atagcggatcatgtacggtgg

SEQ ID NO: 23528 - DNA, 21 bp, synthetic construct
  source 1..21: mol_type = other DNA; mol_type = other DNA
tacttttcgggacaaattgag

SEQ ID NO: 23529 - DNA, 21 bp, synthetic construct
  source 1..21: mol_type = other DNA; mol_type = other DNA
tactctaagcaggggttcaat

SEQ ID NO: 23530 - DNA, 21 bp, synthetic construct
  source 1..21: mol_type = other DNA; mol_type = other DNA
actaagtatggcgatcctgca

SEQ ID NO: 23531 - DNA, 21 bp, synthetic construct
  source 1..21: mol_type = other DNA; mol_type = other DNA
tatttgcggtcccagagttat

SEQ ID NO: 23532 - DNA, 21 bp, synthetic construct
  source 1..21: mol_type = other DNA; mol_type = other DNA
gatctgcagtccagcaagtgg

SEQ ID NO: 23533 - DNA, 21 bp, synthetic construct
  source 1..21: mol_type = other DNA; mol_type = other DNA
cggggtgagactgtgtacccc

SEQ ID NO: 23534 - DNA, 21 bp, synthetic construct
  source 1..21: mol_type = other DNA; mol_type = other DNA
ataatgagcgaccgcgtctgg

SEQ ID NO: 23535 - DNA, 21 bp, synthetic construct
  source 1..21: mol_type = other DNA; mol_type = other DNA
tacagcaagaagaacgataat

SEQ ID NO: 23536 - DNA, 21 bp, synthetic construct
  source 1..21: mol_type = other DNA; mol_type = other DNA
aaagatgactacacgacttgg

SEQ ID NO: 23537 - DNA, 21 bp, synthetic construct
  source 1..21: mol_type = other DNA; mol_type = other DNA
atcgccagcttggggtgggac

SEQ ID NO: 23538 - DNA, 21 bp, synthetic construct
  source 1..21: mol_type = other DNA; mol_type = other DNA
aggggaacggacgtttttccg

SEQ ID NO: 23539 - DNA, 21 bp, synthetic construct
  source 1..21: mol_type = other DNA; mol_type = other DNA
cgaggtgagtttacgtatcct

SEQ ID NO: 23540 - DNA, 21 bp, synthetic construct
  source 1..21: mol_type = other DNA; mol_type = other DNA
agagaaccgcacgtgagctgg

SEQ ID NO: 23541 - DNA, 21 bp, synthetic construct
  source 1..21: mol_type = other DNA; mol_type = other DNA
cgcggagaatttgtttaccca

SEQ ID NO: 23542 - DNA, 21 bp, synthetic construct
  source 1..21: mol_type = other DNA; mol_type = other DNA
ttttgcaaaccatgcctcaca

SEQ ID NO: 23543 - DNA, 21 bp, synthetic construct
  source 1..21: mol_type = other DNA; mol_type = other DNA
tgcggtaccaaatgttgccca

SEQ ID NO: 23544 - DNA, 21 bp, synthetic construct
  source 1..21: mol_type = other DNA; mol_type = other DNA
tactttacgggtatcccggat

SEQ ID NO: 23545 - DNA, 21 bp, synthetic construct
  source 1..21: mol_type = other DNA; mol_type = other DNA
gtgaccagttctaatggcgtt

SEQ ID NO: 23546 - DNA, 21 bp, synthetic construct
  source 1..21: mol_type = other DNA; mol_type = other DNA
tatttctcggggaagatggag

SEQ ID NO: 23547 - DNA, 21 bp, synthetic construct
  source 1..21: mol_type = other DNA; mol_type = other DNA
cacgtatcaacaaatggtgta

SEQ ID NO: 23548 - DNA, 21 bp, synthetic construct
  source 1..21: mol_type = other DNA
tatttcagtggtcagatagaa

SEQ ID NO: 23549 - DNA, 21 bp, synthetic construct
  source 1..21: mol_type = other DNA
tatttcaccgggcagactgag

SEQ ID NO: 23550 - DNA, 21 bp, synthetic construct
  source 1..21: mol_type = other DNA
ctaagccgcttgaatttcgac

SEQ ID NO: 23551 - DNA, 21 bp, synthetic construct
  source 1..21: mol_type = other DNA; mol_type = other DNA
accgcctcgactaatggagtt

SEQ ID NO: 23552 - DNA, 21 bp, synthetic construct
  source 1..21: mol_type = other DNA; mol_type = other DNA
atacaccgccttttaagtgac

SEQ ID NO: 23553 - DNA, 21 bp, synthetic construct
  source 1..21: mol_type = other DNA; mol_type = other DNA
tatacaaaatcacagtcctat

SEQ ID NO: 23554 - DNA, 21 bp, synthetic construct
  source 1..21: mol_type = other DNA; mol_type = other DNA
tatagcaagatgggctataat

SEQ ID NO: 23555 - DNA, 21 bp, synthetic construct
  source 1..21: mol_type = other DNA; mol_type = other DNA
ctatgtcgcccttgttccgag

SEQ ID NO: 23556 - DNA, 21 bp, synthetic construct
  source 1..21: mol_type = other DNA; mol_type = other DNA
cgcgaggattttaccgcctgg

SEQ ID NO: 23557 - DNA, 21 bp, synthetic construct
  source 1..21: mol_type = other DNA; mol_type = other DNA
tactcgaaggtcggtggtaac

SEQ ID NO: 23558 - DNA, 21 bp, synthetic construct
  source 1..21: mol_type = other DNA; mol_type = other DNA
ctccaccgcattggagcgaat

SEQ ID NO: 23559 - DNA, 21 bp, synthetic construct
  source 1..21: mol_type = other DNA; mol_type = other DNA
cgaagtgattttaagatattt

SEQ ID NO: 23560 - DNA, 21 bp, synthetic construct
  source 1..21: mol_type = other DNA; mol_type = other DNA
tatagtaaattaaatggaaat

SEQ ID NO: 23561 - DNA, 21 bp, synthetic construct
  source 1..21: mol_type = other DNA; mol_type = other DNA
ctgttgtccgataggacgtgg

SEQ ID NO: 23562 - DNA, 21 bp, synthetic construct
  source 1..21: mol_type = other DNA; mol_type = other DNA
tcagagagtactaatggacgc

SEQ ID NO: 23563 - DNA, 21 bp, synthetic construct
  source 1..21: mol_type = other DNA; mol_type = other DNA
cgcgacgattttacctcatgg

SEQ ID NO: 23564 - DNA, 21 bp, synthetic construct
  source 1..21: mol_type = other DNA; mol_type = other DNA
attttgtcagcccgggactgg

SEQ ID NO: 23565 - DNA, 21 bp, synthetic construct
  source 1..21: mol_type = other DNA; mol_type = other DNA
tcatcttctaccaatgggatt

SEQ ID NO: 23566 - DNA, 21 bp, synthetic construct
  source 1..21: mol_type = other DNA; mol_type = other DNA
cgttccgaacacgtatttccg

SEQ ID NO: 23567 - DNA, 21 bp, synthetic construct
  source 1..21: mol_type = other DNA; mol_type = other DNA
atgcatagattgtcgccggta

SEQ ID NO: 23568 - DNA, 21 bp, synthetic construct
  source 1..21: mol_type = other DNA; mol_type = other DNA
aaggatgactacacaacgtat

SEQ ID NO: 23569 - DNA, 21 bp, synthetic construct
  source 1..21: mol_type = other DNA; mol_type = other DNA
gacatggaaagccgtggatgg

SEQ ID NO: 23570 - DNA, 21 bp, synthetic construct
  source 1..21: mol_type = other DNA; mol_type = other DNA
aggagcgagtttgagacgttc

SEQ ID NO: 23571 - DNA, 21 bp, synthetic construct
  source 1..21: mol_type = other DNA; mol_type = other DNA
gttgcgtctactaacgggatc

SEQ ID NO: 23572 - DNA, 21 bp, synthetic construct
  source 1..21: mol_type = other DNA; mol_type = other DNA
ctctcgagactcgggggaggt

SEQ ID NO: 23573 - DNA, 21 bp, synthetic construct
  source 1..21: mol_type = other DNA; mol_type = other DNA
aggaacgagttcactccgttc

SEQ ID NO: 23574 - DNA, 21 bp, synthetic construct
  source 1..21: mol_type = other DNA; mol_type = other DNA
acggacggcacttcgcgttgg

SEQ ID NO: 23575 - DNA, 21 bp, synthetic construct
  source 1..21: mol_type = other DNA; mol_type = other DNA
cgcacctacgattctatacct

SEQ ID NO: 23576 - DNA, 21 bp, synthetic construct
  source 1..21: mol_type = other DNA; mol_type = other DNA
tatttcactggggtcacagcc

SEQ ID NO: 23577 - DNA, 21 bp, synthetic construct
  source 1..21: mol_type = other DNA; mol_type = other DNA
tactcgaaaatgaacgcgaac

SEQ ID NO: 23578 - DNA, 21 bp, synthetic construct
  source 1..21: mol_type = other DNA; mol_type = other DNA
ttgacaaggatctctagtaat

SEQ ID NO: 23579 - DNA, 21 bp, synthetic construct
  source 1..21: mol_type = other DNA; mol_type = other DNA
tacgctaaattcggtcccaac

SEQ ID NO: 23580 - DNA, 21 bp, synthetic construct
  source 1..21: mol_type = other DNA; mol_type = other DNA
tacttcacggggacgatggat

SEQ ID NO: 23581 - DNA, 21 bp, synthetic construct
  source 1..21: mol_type = other DNA; mol_type = other DNA
tatcataaagcaagccccatc

SEQ ID NO: 23582 - DNA, 21 bp, synthetic construct
  source 1..21: mol_type = other DNA; mol_type = other DNA
tatttcacggggaaacaagaa

SEQ ID NO: 23583 - DNA, 21 bp, synthetic construct
  source 1..21: mol_type = other DNA; mol_type = other DNA
tgcaagccgggcggccattgg

SEQ ID NO: 23584 - DNA, 21 bp, synthetic construct
  source 1..21: mol_type = other DNA; mol_type = other DNA
tacttcacagggaaacatgaa

SEQ ID NO: 23585 - DNA, 21 bp, synthetic construct
  source 1..21: mol_type = other DNA; mol_type = other DNA
gagctacagagtagcacctgg

SEQ ID NO: 23586 - DNA, 21 bp, synthetic construct
  source 1..21: mol_type = other DNA; mol_type = other DNA
tacagtaaattgtcaacaaac

SEQ ID NO: 23587 - DNA, 21 bp, synthetic construct
  source 1..21: mol_type = other DNA; mol_type = other DNA
atgtgcaaaccctgtctgacc

SEQ ID NO: 23588 - DNA, 21 bp, synthetic construct
  source 1..21: mol_type = other DNA; mol_type = other DNA
ctgagccgtgtttcattcgac

SEQ ID NO: 23589 - DNA, 21 bp, synthetic construct
  source 1..21: mol_type = other DNA; mol_type = other DNA
cgtggtggtggtttattccca

SEQ ID NO: 23590 - DNA, 21 bp, synthetic construct
  source 1..21: mol_type = other DNA; mol_type = other DNA
ctcagcagggctagtgaaaat

SEQ ID NO: 23591 - DNA, 21 bp, synthetic construct
  source 1..21: mol_type = other DNA; mol_type = other DNA
ttacaccggctgatgccggac

SEQ ID NO: 23592 - DNA, 21 bp, synthetic construct
  source 1..21: mol_type = other DNA; mol_type = other DNA
aatcctcatacttgcaacaat

SEQ ID NO: 23593 - DNA, 21 bp, synthetic construct
  source 1..21: mol_type = other DNA; mol_type = other DNA
cttgtcgatggacttagatgg

SEQ ID NO: 23594 - DNA, 21 bp, synthetic construct
  source 1..21: mol_type = other DNA; mol_type = other DNA
cggaccccggacgcttatcca

SEQ ID NO: 23595 - DNA, 21 bp, synthetic construct
  source 1..21: mol_type = other DNA; mol_type = other DNA
tatgttcgaagtggaccaaat

SEQ ID NO: 23596 - DNA, 21 bp, synthetic construct
  source 1..21: mol_type = other DNA; mol_type = other DNA
ctatgccggccatgtagtagt

SEQ ID NO: 23597 - DNA, 21 bp, synthetic construct
  source 1..21: mol_type = other DNA; mol_type = other DNA
aagatgtcttcaagtgtatgg

SEQ ID NO: 23598 - DNA, 21 bp, synthetic construct
  source 1..21: mol_type = other DNA; mol_type = other DNA
gttcactcgacaaatggacgc

SEQ ID NO: 23599 - DNA, 21 bp, synthetic construct
  source 1..21: mol_type = other DNA; mol_type = other DNA
tatgtgaaatccgatcgttgc

SEQ ID NO: 23600 - DNA, 21 bp, synthetic construct
  source 1..21: mol_type = other DNA; mol_type = other DNA
gacccagcctctcgggaatgg

SEQ ID NO: 23601 - DNA, 21 bp, synthetic construct
  source 1..21: mol_type = other DNA; mol_type = other DNA
tacttcaccgggttcgttgag

SEQ ID NO: 23602 - DNA, 21 bp, synthetic construct
  source 1..21: mol_type = other DNA; mol_type = other DNA
tattttacgggcataaattca

SEQ ID NO: 23603 - DNA, 21 bp, synthetic construct
  source 1..21: mol_type = other DNA; mol_type = other DNA
tatagtaaactgaacgctaat

SEQ ID NO: 23604 - DNA, 21 bp, synthetic construct
  source 1..21: mol_type = other DNA; mol_type = other DNA
cgcctcgccgacgcctaccct

SEQ ID NO: 23605 - DNA, 21 bp, synthetic construct
  source 1..21: mol_type = other DNA; mol_type = other DNA
tacttcaccgggtggcccgat

SEQ ID NO: 23606 - DNA, 21 bp, synthetic construct
  source 1..21: mol_type = other DNA; mol_type = other DNA
cgcgatgagtttgtgtcatgg

SEQ ID NO: 23607 - DNA, 21 bp, synthetic construct
  source 1..21: mol_type = other DNA; mol_type = other DNA
atagaaagttcgcgtacatgg

SEQ ID NO: 23608 - DNA, 21 bp, synthetic construct
  source 1..21: mol_type = other DNA; mol_type = other DNA
gtgccagattatgtgaggtac

SEQ ID NO: 23609 - DNA, 21 bp, synthetic construct
  source 1..21: mol_type = other DNA; mol_type = other DNA
ttacatcgcctgtctaccagt

SEQ ID NO: 23610 - DNA, 21 bp, synthetic construct
  source 1..21: mol_type = other DNA; mol_type = other DNA
agaggagacaacgtctatccc

SEQ ID NO: 23611 - DNA, 21 bp, synthetic construct
  source 1..21: mol_type = other DNA; mol_type = other DNA
atgatggagtcgagcaagtgg

SEQ ID NO: 23612 - DNA, 21 bp, synthetic construct
  source 1..21: mol_type = other DNA; mol_type = other DNA
ctccacgtcaggagcttaaac

SEQ ID NO: 23613 - DNA, 21 bp, synthetic construct
  source 1..21: mol_type = other DNA; mol_type = other DNA
acagatagtactaacggaata

SEQ ID NO: 23614 - DNA, 21 bp, synthetic construct
  source 1..21: mol_type = other DNA; mol_type = other DNA
agagaggatgggctaagatgg

SEQ ID NO: 23615 - DNA, 21 bp, synthetic construct
  source 1..21: mol_type = other DNA; mol_type = other DNA
cttcataggcttggtgatcat

SEQ ID NO: 23616 - DNA, 21 bp, synthetic construct
  source 1..21: mol_type = other DNA; mol_type = other DNA
ctccaccggttgcaatcggac

SEQ ID NO: 23617 - DNA, 21 bp, synthetic construct
  source 1..21: mol_type = other DNA; mol_type = other DNA
ccaatgggacaagcgacatgg

SEQ ID NO: 23618 - DNA, 21 bp, synthetic construct
  source 1..21: mol_type = other DNA; mol_type = other DNA
ttgtctcgaacaggacaaaac

SEQ ID NO: 23619 - DNA, 21 bp, synthetic construct
  source 1..21: mol_type = other DNA; mol_type = other DNA
tacagtaaagtaggctggaat

SEQ ID NO: 23620 - DNA, 21 bp, synthetic construct
  source 1..21: mol_type = other DNA; mol_type = other DNA
agagacgaattctcgggttat

SEQ ID NO: 23621 - DNA, 21 bp, synthetic construct
  source 1..21: mol_type = other DNA; mol_type = other DNA
gggagtcccggtgtgcattgg

SEQ ID NO: 23622 - DNA, 21 bp, synthetic construct
  source 1..21: mol_type = other DNA; mol_type = other DNA
gatgcgtttgaggggagggat

SEQ ID NO: 23623 - DNA, 21 bp, synthetic construct
  source 1..21: mol_type = other DNA; mol_type = other DNA
aaaatggattcaataggttgg

SEQ ID NO: 23624 - DNA, 21 bp, synthetic construct
  source 1..21: mol_type = other DNA; mol_type = other DNA
tattctaagataggtaaaaac

SEQ ID NO: 23625 - DNA, 21 bp, synthetic construct
  source 1..21: mol_type = other DNA; mol_type = other DNA
gtgatgtcatctcgggactgg

SEQ ID NO: 23626 - DNA, 21 bp, synthetic construct
  source 1..21: mol_type = other DNA; mol_type = other DNA
cgcgacgatttcaccgtatgg

SEQ ID NO: 23627 - DNA, 21 bp, synthetic construct
  source 1..21: mol_type = other DNA; mol_type = other DNA
tactttgctggtagaattgaa

SEQ ID NO: 23628 - DNA, 21 bp, synthetic construct
  source 1..21: mol_type = other DNA; mol_type = other DNA
ctccgtgacggaacgagcgcg

SEQ ID NO: 23629 - DNA, 21 bp, synthetic construct
  source 1..21: mol_type = other DNA; mol_type = other DNA
ctgagtagaatttcagtaaat

SEQ ID NO: 23630 - DNA, 21 bp, synthetic construct
  source 1..21: mol_type = other DNA; mol_type = other DNA
ttcagtaaactcaatgagaac

SEQ ID NO: 23631 - DNA, 21 bp, synthetic construct
  source 1..21: mol_type = other DNA; mol_type = other DNA
tactttaccggcgtccttgag

SEQ ID NO: 23632 - DNA, 21 bp, synthetic construct
  source 1..21: mol_type = other DNA; mol_type = other DNA
caaatggagtcaaggatgtgg

SEQ ID NO: 23633 - DNA, 21 bp, synthetic construct
  source 1..21: mol_type = other DNA; mol_type = other DNA
tacttcacgggtacgacggaa

SEQ ID NO: 23634 - DNA, 21 bp, synthetic construct
  source 1..21: mol_type = other DNA; mol_type = other DNA
tttttcagcggcattaaagag

SEQ ID NO: 23635 - DNA, 21 bp, synthetic construct
  source 1..21: mol_type = other DNA; mol_type = other DNA
cgcacatccgatgcttatcct

SEQ ID NO: 23636 - DNA, 21 bp, synthetic construct
  source 1..21: mol_type = other DNA; mol_type = other DNA
tataagggtagctgcgaacag

SEQ ID NO: 23637 - DNA, 21 bp, synthetic construct
  source 1..21: mol_type = other DNA; mol_type = other DNA
acaggttctaccaatggcgtg

SEQ ID NO: 23638 - DNA, 21 bp, synthetic construct
  source 1..21: mol_type = other DNA; mol_type = other DNA
attgccaagagggggtgggat

SEQ ID NO: 23639 - DNA, 21 bp, synthetic construct
  source 1..21: mol_type = other DNA; mol_type = other DNA
tatacaagactggacaaagat

SEQ ID NO: 23640 - DNA, 21 bp, synthetic construct
  source 1..21: mol_type = other DNA; mol_type = other DNA
tattcaaagataggcgggaat

SEQ ID NO: 23641 - DNA, 21 bp, synthetic construct
  source 1..21: mol_type = other DNA; mol_type = other DNA
cagccagagtcgaggagctgg

SEQ ID NO: 23642 - DNA, 21 bp, synthetic construct
  source 1..21: mol_type = other DNA; mol_type = other DNA
ttgtcgcggatatcccagaac

SEQ ID NO: 23643 - DNA, 21 bp, synthetic construct
  source 1..21: mol_type = other DNA; mol_type = other DNA
aaagatggctattccgcttac

SEQ ID NO: 23644 - DNA, 21 bp, synthetic construct
  source 1..21: mol_type = other DNA; mol_type = other DNA
atcaccagtacgaatggcatc

SEQ ID NO: 23645 - DNA, 21 bp, synthetic construct
  source 1..21: mol_type = other DNA; mol_type = other DNA
ctgtcgcgcgtgggcagggac

SEQ ID NO: 23646 - DNA, 21 bp, synthetic construct
  source 1..21: mol_type = other DNA; mol_type = other DNA
ctttcgcgcaccagtgataac

SEQ ID NO: 23647 - DNA, 21 bp, synthetic construct
  source 1..21: mol_type = other DNA; mol_type = other DNA
tattcaaaggtgggatgtaat

SEQ ID NO: 23648 - DNA, 21 bp, synthetic construct
  source 1..21: mol_type = other DNA; mol_type = other DNA
tatgtcaaaagcgacagccat

SEQ ID NO: 23649 - DNA, 21 bp, synthetic construct
  source 1..21: mol_type = other DNA; mol_type = other DNA
gatcttagttcacataattgg

SEQ ID NO: 23650 - DNA, 21 bp, synthetic construct
  source 1..21: mol_type = other DNA; mol_type = other DNA
tatgtaaaaagccaacaaacg

SEQ ID NO: 23651 - DNA, 21 bp, synthetic construct
  source 1..21: mol_type = other DNA; mol_type = other DNA
tattcgcgcttaaatgttctg

SEQ ID NO: 23652 - DNA, 21 bp, synthetic construct
  source 1..21: mol_type = other DNA; mol_type = other DNA
ttcgctaggacaggtcctaat

SEQ ID NO: 23653 - DNA, 21 bp, synthetic construct
  source 1..21: mol_type = other DNA; mol_type = other DNA
atagctaaacgaggatgggac

SEQ ID NO: 23654 - DNA, 21 bp, synthetic construct
  source 1..21: mol_type = other DNA; mol_type = other DNA
cgtgatgaatttaatcattgg

SEQ ID NO: 23655 - DNA, 21 bp, synthetic construct
  source 1..21: mol_type = other DNA; mol_type = other DNA
ccgatggggtcagcacagtgg

SEQ ID NO: 23656 - DNA, 21 bp, synthetic construct
  source 1..21: mol_type = other DNA; mol_type = other DNA
tattctaagtcgggcatgaac

SEQ ID NO: 23657 - DNA, 21 bp, synthetic construct
  source 1..21: mol_type = other DNA; mol_type = other DNA
acgcacagcacgaatgggatc

SEQ ID NO: 23658 - DNA, 21 bp, synthetic construct
  source 1..21: mol_type = other DNA; mol_type = other DNA
ttaactaggctagtaaacaat

SEQ ID NO: 23659 - DNA, 21 bp, synthetic construct
  source 1..21: mol_type = other DNA; mol_type = other DNA
tattcgaaggtgggccagaat

SEQ ID NO: 23660 - DNA, 21 bp, synthetic construct
  source 1..21: mol_type = other DNA; mol_type = other DNA
tatttcacaggcaagctaagc

SEQ ID NO: 23661 - DNA, 21 bp, synthetic construct
  source 1..21: mol_type = other DNA; mol_type = other DNA
tatagcaaaatgaacatgaat

SEQ ID NO: 23662 - DNA, 21 bp, synthetic construct
  source 1..21: mol_type = other DNA; mol_type = other DNA
tatttcacgggtaagccagac

SEQ ID NO: 23663 - DNA, 21 bp, synthetic construct
  source 1..21: mol_type = other DNA; mol_type = other DNA
aaagatgattatcatacatat

SEQ ID NO: 23664 - DNA, 21 bp, synthetic construct
  source 1..21: mol_type = other DNA; mol_type = other DNA
tacccatttcccgaaccagct

SEQ ID NO: 23665 - DNA, 21 bp, synthetic construct
  source 1..21: mol_type = other DNA; mol_type = other DNA
tacttcgcgggaattaaggaa

SEQ ID NO: 23666 - DNA, 21 bp, synthetic construct
  source 1..21: mol_type = other DNA; mol_type = other DNA
tatttcacggggcgaacagct

SEQ ID NO: 23667 - DNA, 21 bp, synthetic construct
  source 1..21: mol_type = other DNA; mol_type = other DNA
tactcgcgaacaggtcctaat

SEQ ID NO: 23668 - DNA, 21 bp, synthetic construct
  source 1..21: mol_type = other DNA; mol_type = other DNA
tattctaagatggggcttaat

SEQ ID NO: 23669 - DNA, 21 bp, synthetic construct
  source 1..21: mol_type = other DNA; mol_type = other DNA
tacagtaaatcaggcaataac

SEQ ID NO: 23670 - DNA, 21 bp, synthetic construct
  source 1..21: mol_type = other DNA; mol_type = other DNA
tatgttcgaagcgcacctggg

SEQ ID NO: 23671 - DNA, 21 bp, synthetic construct
  source 1..21: mol_type = other DNA; mol_type = other DNA
gacgctttcgaaggacgagac

SEQ ID NO: 23672 - DNA, 21 bp, synthetic construct
  source 1..21: mol_type = other DNA; mol_type = other DNA
tatttcactgggcagcacgca

SEQ ID NO: 23673 - DNA, 21 bp, synthetic construct
  source 1..21: mol_type = other DNA; mol_type = other DNA
ttgtctcgtgtttcgccaaat

SEQ ID NO: 23674 - DNA, 21 bp, synthetic construct
  source 1..21: mol_type = other DNA; mol_type = other DNA
ttatgtcgcccttgcccggag

SEQ ID NO: 23675 - DNA, 21 bp, synthetic construct
  source 1..21: mol_type = other DNA; mol_type = other DNA
tttcacaaactctctccagtc

SEQ ID NO: 23676 - DNA, 21 bp, synthetic construct
  source 1..21: mol_type = other DNA; mol_type = other DNA
ataatggagagtcgagcgtgg

SEQ ID NO: 23677 - DNA, 21 bp, synthetic construct
  source 1..21: mol_type = other DNA; mol_type = other DNA
tactcgaaagctaatcctaac

SEQ ID NO: 23678 - DNA, 21 bp, synthetic construct
  source 1..21: mol_type = other DNA; mol_type = other DNA
cgttcagaatttttgcctttt

SEQ ID NO: 23679 - DNA, 21 bp, synthetic construct
  source 1..21: mol_type = other DNA; mol_type = other DNA
aaggacgacttcacgggatgg

SEQ ID NO: 23680 - DNA, 21 bp, synthetic construct
  source 1..21: mol_type = other DNA; mol_type = other DNA
tactttaccggacagacagag

SEQ ID NO: 23681 - DNA, 21 bp, synthetic construct
  source 1..21: mol_type = other DNA; mol_type = other DNA
gacatggggtcgtcaagttgg

SEQ ID NO: 23682 - DNA, 21 bp, synthetic construct
  source 1..21: mol_type = other DNA; mol_type = other DNA
tacttcaccggaaagtgcgag

SEQ ID NO: 23683 - DNA, 21 bp, synthetic construct
  source 1..21: mol_type = other DNA; mol_type = other DNA
atgaaggacggcaccaaccca

SEQ ID NO: 23684 - DNA, 21 bp, synthetic construct
  source 1..21: mol_type = other DNA; mol_type = other DNA
ttatgtcgtccaggatcagaa

SEQ ID NO: 23685 - DNA, 21 bp, synthetic construct
  source 1..21: mol_type = other DNA; mol_type = other DNA
aggggggaattcacttacccc

SEQ ID NO: 23686 - DNA, 21 bp, synthetic construct
  source 1..21: mol_type = other DNA; mol_type = other DNA
ttctcaaggctaggaccgaac

SEQ ID NO: 23687 - DNA, 21 bp, synthetic construct
  source 1..21: mol_type = other DNA; mol_type = other DNA
ttgcacagattggtgccggac

SEQ ID NO: 23688 - DNA, 21 bp, synthetic construct
  source 1..21: mol_type = other DNA; mol_type = other DNA
tacttgaagagtcagcaaaca

SEQ ID NO: 23689 - DNA, 21 bp, synthetic construct
  source 1..21: mol_type = other DNA; mol_type = other DNA
tatttcactggcagggcggaa

SEQ ID NO: 23690 - DNA, 21 bp, synthetic construct
  source 1..21: mol_type = other DNA; mol_type = other DNA
tattggagcggtgtgaaagaa

SEQ ID NO: 23691 - DNA, 21 bp, synthetic construct
  source 1..21: mol_type = other DNA; mol_type = other DNA
atgcatagactgtcacccttg

SEQ ID NO: 23692 - DNA, 21 bp, synthetic construct
  source 1..21: mol_type = other DNA; mol_type = other DNA
gtgattagtaccaacggtata

SEQ ID NO: 23693 - DNA, 21 bp, synthetic construct
  source 1..21: mol_type = other DNA; mol_type = other DNA
atgcaccgtttaggctatgac

SEQ ID NO: 23694 - DNA, 21 bp, synthetic construct
  source 1..21: mol_type = other DNA; mol_type = other DNA
ttaagcaggctgggatacgac

SEQ ID NO: 23695 - DNA, 21 bp, synthetic construct
  source 1..21: mol_type = other DNA; mol_type = other DNA
tatagcaaaaccggtcataac

SEQ ID NO: 23696 - DNA, 21 bp, synthetic construct
  source 1..21: mol_type = other DNA; mol_type = other DNA
ttgagaactgactgctgcgtt

SEQ ID NO: 23697 - DNA, 21 bp, synthetic construct
  source 1..21: mol_type = other DNA; mol_type = other DNA
tattacactggagttaaggaa

SEQ ID NO: 23698 - DNA, 21 bp, synthetic construct
  source 1..21: mol_type = other DNA; mol_type = other DNA
tactttagcggtaaaatggaa

SEQ ID NO: 23699 - DNA, 21 bp, synthetic construct
  source 1..21: mol_type = other DNA; mol_type = other DNA
tacgctcgtactggtttagac

SEQ ID NO: 23700 - DNA, 21 bp, synthetic construct
  source 1..21: mol_type = other DNA; mol_type = other DNA
tgcacctctaagtatggccac

SEQ ID NO: 23701 - DNA, 21 bp, synthetic construct
  source 1..21: mol_type = other DNA; mol_type = other DNA
aagctacaggaaagaacttgg

SEQ ID NO: 23702 - DNA, 21 bp, synthetic construct
  source 1..21: mol_type = other DNA; mol_type = other DNA
tatgttaagtcagacgcaggt

SEQ ID NO: 23703 - DNA, 21 bp, synthetic construct
  source 1..21: mol_type = other DNA; mol_type = other DNA
agagacgacttcacagcatac

SEQ ID NO: 23704 - DNA, 21 bp, synthetic construct
  source 1..21: mol_type = other DNA; mol_type = other DNA
tatttaaagtcacaggggaat

SEQ ID NO: 23705 - DNA, 21 bp, synthetic construct
  source 1..21: mol_type = other DNA; mol_type = other DNA
tggtggagtggcataacagaa

SEQ ID NO: 23706 - DNA, 21 bp, synthetic construct
  source 1..21: mol_type = other DNA; mol_type = other DNA
ccaatgggcagctcccagtgg

SEQ ID NO: 23707 - DNA, 21 bp, synthetic construct
  source 1..21: mol_type = other DNA; mol_type = other DNA
cgcgaggagatggttagatgg

SEQ ID NO: 23708 - DNA, 21 bp, synthetic construct
  source 1..21: mol_type = other DNA; mol_type = other DNA
aatgatggcgtaagcaaatgg

SEQ ID NO: 23709 - DNA, 21 bp, synthetic construct
  source 1..21: mol_type = other DNA; mol_type = other DNA
cggaacgatcatgtatttcca

SEQ ID NO: 23710 - DNA, 21 bp, synthetic construct
  source 1..21: mol_type = other DNA; mol_type = other DNA
ccgatggagagcagcaagtgg

SEQ ID NO: 23711 - DNA, 21 bp, synthetic construct
  source 1..21: mol_type = other DNA; mol_type = other DNA
ttgtcgaagatcggtgtgaac

SEQ ID NO: 23712 - DNA, 21 bp, synthetic construct
  source 1..21: mol_type = other DNA; mol_type = other DNA
tattccagggtaggtccggat

SEQ ID NO: 23713 - DNA, 21 bp, synthetic construct
  source 1..21: mol_type = other DNA; mol_type = other DNA
tttcataaaaagggtcctgac

SEQ ID NO: 23714 - DNA, 21 bp, synthetic construct
  source 1..21: mol_type = other DNA; mol_type = other DNA
tacagtaaattgaattacaac

SEQ ID NO: 23715 - DNA, 21 bp, synthetic construct
  source 1..21: mol_type = other DNA; mol_type = other DNA
agaatgactgacgcgtatccg

SEQ ID NO: 23716 - DNA, 21 bp, synthetic construct
  source 1..21: mol_type = other DNA; mol_type = other DNA
acaatcagcactaacggtgta

SEQ ID NO: 23717 - DNA, 21 bp, synthetic construct
  source 1..21: mol_type = other DNA; mol_type = other DNA
gtgcagtcgactaacggcaga

SEQ ID NO: 23718 - DNA, 21 bp, synthetic construct
  source 1..21: mol_type = other DNA; mol_type = other DNA
tatcacgcgaaacagaataat

SEQ ID NO: 23719 - DNA, 21 bp, synthetic construct
  source 1..21: mol_type = other DNA; mol_type = other DNA
tatagtaaatcgggctgcaat

SEQ ID NO: 23720 - DNA, 21 bp, synthetic construct
  source 1..21: mol_type = other DNA; mol_type = other DNA
agagaggattttagtgcgtgg

SEQ ID NO: 23721 - DNA, 21 bp, synthetic construct
  source 1..21: mol_type = other DNA; mol_type = other DNA
tactttactggaaagacggac

SEQ ID NO: 23722 - DNA, 21 bp, synthetic construct
  source 1..21: mol_type = other DNA; mol_type = other DNA
agagatggaacatcaagctgg

SEQ ID NO: 23723 - DNA, 21 bp, synthetic construct
  source 1..21: mol_type = other DNA; mol_type = other DNA
atggatgactacaacccgttc

SEQ ID NO: 23724 - DNA, 21 bp, synthetic construct
  source 1..21: mol_type = other DNA; mol_type = other DNA
tactccaagcacaatatcaac

SEQ ID NO: 23725 - DNA, 21 bp, synthetic construct
  source 1..21: mol_type = other DNA; mol_type = other DNA
aggcccgagtcctcacggtgg

SEQ ID NO: 23726 - DNA, 21 bp, synthetic construct
  source 1..21: mol_type = other DNA
tactttaccggaaggacggcg

SEQ ID NO: 23727 - DNA, 21 bp, synthetic construct
  source 1..21: mol_type = other DNA
gacatggagtcgaggaagtgg

SEQ ID NO: 23728 - DNA, 21 bp, synthetic construct
  source 1..21: mol_type = other DNA
agaaatgacacagtatatccg

SEQ ID NO: 23729 - DNA, 21 bp, synthetic construct
  source 1..21: mol_type = other DNA
gtgaacgactatgtgacctac

SEQ ID NO: 23730 - DNA, 21 bp, synthetic construct
  source 1..21: mol_type = other DNA
tatttcagtggtatcccggcc

SEQ ID NO: 23731 - DNA, 21 bp, synthetic construct
  source 1..21: mol_type = other DNA
tcattagaaagtcggaagtgg

SEQ ID NO: 23732 - DNA, 21 bp, synthetic construct
  source 1..21: mol_type = other DNA
tattgggcaggggtaaaggat

SEQ ID NO: 23733 - DNA, 21 bp, synthetic construct
  source 1..21: mol_type = other DNA
gacgacggcgtaagtagatgg

SEQ ID NO: 23734 - DNA, 21 bp, synthetic construct
  source 1..21: mol_type = other DNA
tatgtgaaatcacagccttgt

SEQ ID NO: 23735 - DNA, 21 bp, synthetic construct
  source 1..21: mol_type = other DNA
tactctaagttaaaccataat

SEQ ID NO: 23736 - DNA, 21 bp, synthetic construct
  source 1..21: mol_type = other DNA
atcatgagcagtgccatgtgg

SEQ ID NO: 23737 - DNA, 21 bp, synthetic construct
  source 1..21: mol_type = other DNA
ttaactagattatccccaact

SEQ ID NO: 23738 - DNA, 21 bp, synthetic construct
  source 1..21: mol_type = other DNA
ttgcacagactctccgaagat

SEQ ID NO: 23739 - DNA, 21 bp, synthetic construct
  source 1..21: mol_type = other DNA
tttagcaggatcggatacaat

SEQ ID NO: 23740 - DNA, 21 bp, synthetic construct
  source 1..21: mol_type = other DNA
gtgatgagagacgcgtacccg

SEQ ID NO: 23741 - DNA, 21 bp, synthetic construct
  source 1..21: mol_type = other DNA
tatagtaagatgaatgcgaat

SEQ ID NO: 23742 - DNA, 21 bp, synthetic construct
  source 1..21: mol_type = other DNA
agggacgatttctcaagttat

SEQ ID NO: 23743 - DNA, 21 bp, synthetic construct
  source 1..21: mol_type = other DNA
tattcgaaaatgaatcataat

SEQ ID NO: 23744 - DNA, 21 bp, synthetic construct
  source 1..21: mol_type = other DNA
tatttcacgggtagagccgag

SEQ ID NO: 23745 - DNA, 21 bp, synthetic construct
  source 1..21: mol_type = other DNA
tacagtaagttagatcataac

SEQ ID NO: 23746 - DNA, 21 bp, synthetic construct
  source 1..21: mol_type = other DNA
tattccaaaagcggctcaaac

SEQ ID NO: 23747 - DNA, 21 bp, synthetic construct
  source 1..21: mol_type = other DNA
ccaatgtcaagttctggttgg

SEQ ID NO: 23748 - DNA, 21 bp, synthetic construct
  source 1..21: mol_type = other DNA
aaagatgagtatcacacttat

SEQ ID NO: 23749 - DNA, 21 bp, synthetic construct
  source 1..21: mol_type = other DNA; mol_type = other DNA
ctacataagaacacggagaac

SEQ ID NO: 23750 - DNA, 21 bp, synthetic construct
  source 1..21: mol_type = other DNA; mol_type = other DNA
tatagtaaaaccggtaataac

SEQ ID NO: 23751 - DNA, 21 bp, synthetic construct
  source 1..21: mol_type = other DNA; mol_type = other DNA
gtcccatctagcgtaaggtgg

SEQ ID NO: 23752 - DNA, 21 bp, synthetic construct
  source 1..21: mol_type = other DNA; mol_type = other DNA
cgcgtggaggatgcttaccca

SEQ ID NO: 23753 - DNA, 21 bp, synthetic construct
  source 1..21: mol_type = other DNA; mol_type = other DNA
tacagcaaggtaggctccaac

SEQ ID NO: 23754 - DNA, 21 bp, synthetic construct
  source 1..21: mol_type = other DNA; mol_type = other DNA
ccaatgggagacagaaaatgg

SEQ ID NO: 23755 - DNA, 21 bp, synthetic construct
  source 1..21: mol_type = other DNA; mol_type = other DNA
cgtgaggagtttgtgcactgg

SEQ ID NO: 23756 - DNA, 21 bp, synthetic construct
  source 1..21: mol_type = other DNA; mol_type = other DNA
atacttagcgcacgagattgg

SEQ ID NO: 23757 - DNA, 21 bp, synthetic construct
  source 1..21: mol_type = other DNA; mol_type = other DNA
cggacaagcgacgtctatccc

SEQ ID NO: 23758 - DNA, 21 bp, synthetic construct
  source 1..21: mol_type = other DNA; mol_type = other DNA
catgactcgaccaatggagtc

SEQ ID NO: 23759 - DNA, 21 bp, synthetic construct
  source 1..21: mol_type = other DNA; mol_type = other DNA
aggggagacactgtttatccg

SEQ ID NO: 23760 - DNA, 21 bp, synthetic construct
  source 1..21: mol_type = other DNA; mol_type = other DNA
tatttcagtggaacgaaggaa

SEQ ID NO: 23761 - DNA, 21 bp, synthetic construct
  source 1..21: mol_type = other DNA; mol_type = other DNA
tatacccgtattggcccagac

SEQ ID NO: 23762 - DNA, 21 bp, synthetic construct
  source 1..21: mol_type = other DNA; mol_type = other DNA
ttttttacaggtattatagaa

SEQ ID NO: 23763 - DNA, 21 bp, synthetic construct
  source 1..21: mol_type = other DNA; mol_type = other DNA
gtgttcagtacgaatggtagg

SEQ ID NO: 23764 - DNA, 21 bp, synthetic construct
  source 1..21: mol_type = other DNA; mol_type = other DNA
aaacttgagtcaagcatgtgg

SEQ ID NO: 23765 - DNA, 21 bp, synthetic construct
  source 1..21: mol_type = other DNA; mol_type = other DNA
agggacgaccacgtgtattgg

SEQ ID NO: 23766 - DNA, 21 bp, synthetic construct
  source 1..21: mol_type = other DNA; mol_type = other DNA
ttcagccgcataggtcttaac

SEQ ID NO: 23767 - DNA, 21 bp, synthetic construct
  source 1..21: mol_type = other DNA; mol_type = other DNA
gggggcaccacatcgtgctgg

SEQ ID NO: 23768 - DNA, 21 bp, synthetic construct
  source 1..21: mol_type = other DNA; mol_type = other DNA
atcatgtcggatagactctgg

SEQ ID NO: 23769 - DNA, 21 bp, synthetic construct
  source 1..21: mol_type = other DNA; mol_type = other DNA
aggggagataacgtatatcca

SEQ ID NO: 23770 - DNA, 21 bp, synthetic construct
  source 1..21: mol_type = other DNA; mol_type = other DNA
tatagcaagaccggatttaac

SEQ ID NO: 23771 - DNA, 21 bp, synthetic construct
  source 1..21: mol_type = other DNA; mol_type = other DNA
tatttcacaggagtagttgat

SEQ ID NO: 23772 - DNA, 21 bp, synthetic construct
  source 1..21: mol_type = other DNA; mol_type = other DNA
gatttgagggcgcacgactgg

SEQ ID NO: 23773 - DNA, 21 bp, synthetic construct
  source 1..21: mol_type = other DNA; mol_type = other DNA
tactttagcggcgtaatggct

SEQ ID NO: 23774 - DNA, 21 bp, synthetic construct
  source 1..21: mol_type = other DNA; mol_type = other DNA
atttgtaaaccttgcctaacc

SEQ ID NO: 23775 - DNA, 21 bp, synthetic construct
  source 1..21: mol_type = other DNA; mol_type = other DNA
tattttgccggggtaaaagag

SEQ ID NO: 23776 - DNA, 21 bp, synthetic construct
  source 1..21: mol_type = other DNA; mol_type = other DNA
atcatgatggatagaggttgg

SEQ ID NO: 23777 - DNA, 21 bp, synthetic construct
  source 1..21: mol_type = other DNA; mol_type = other DNA
gtcttgagcactaacgggcgt

SEQ ID NO: 23778 - DNA, 21 bp, synthetic construct
  source 1..21: mol_type = other DNA; mol_type = other DNA
cgccgtgaggatgtatatccg

SEQ ID NO: 23779 - DNA, 21 bp, synthetic construct
  source 1..21: mol_type = other DNA; mol_type = other DNA
accgatgggacaagcagatgg

SEQ ID NO: 23780 - DNA, 21 bp, synthetic construct
  source 1..21: mol_type = other DNA; mol_type = other DNA
cttgcaaagtcgggtattaac

SEQ ID NO: 23781 - DNA, 21 bp, synthetic construct
  source 1..21: mol_type = other DNA; mol_type = other DNA
ggaagcgagttcagcacctgg

SEQ ID NO: 23782 - DNA, 21 bp, synthetic construct
  source 1..21: mol_type = other DNA; mol_type = other DNA
tatacacggctcgatcccgtt

SEQ ID NO: 23783 - DNA, 21 bp, synthetic construct
  source 1..21: mol_type = other DNA; mol_type = other DNA
tactggagcggcgtcaaagaa

SEQ ID NO: 23784 - DNA, 21 bp, synthetic construct
  source 1..21: mol_type = other DNA; mol_type = other DNA
taccatgcaaaaggagacaac

SEQ ID NO: 23785 - DNA, 21 bp, synthetic construct
  source 1..21: mol_type = other DNA; mol_type = other DNA
ggaggggagttctcccgctgg

SEQ ID NO: 23786 - DNA, 21 bp, synthetic construct
  source 1..21: mol_type = other DNA; mol_type = other DNA
agtcttgaaagcaggagctgg

SEQ ID NO: 23787 - DNA, 21 bp, synthetic construct
  source 1..21: mol_type = other DNA; mol_type = other DNA
ttctcgaaactgaactcgaat

SEQ ID NO: 23788 - DNA, 21 bp, synthetic construct
  source 1..21: mol_type = other DNA; mol_type = other DNA
tacgtaagatcagaccttatg

SEQ ID NO: 23789 - DNA, 21 bp, synthetic construct
  source 1..21: mol_type = other DNA; mol_type = other DNA
gacatgagtgtacgcacgtgg

SEQ ID NO: 23790 - DNA, 21 bp, synthetic construct
  source 1..21: mol_type = other DNA; mol_type = other DNA
tatagcgccattgggatgaac

SEQ ID NO: 23791 - DNA, 21 bp, synthetic construct
  source 1..21: mol_type = other DNA; mol_type = other DNA
cggggagatgaccattatccc

SEQ ID NO: 23792 - DNA, 21 bp, synthetic construct
  source 1..21: mol_type = other DNA; mol_type = other DNA
tactttacgggtgtacaaagc

SEQ ID NO: 23793 - DNA, 21 bp, synthetic construct
  source 1..21: mol_type = other DNA; mol_type = other DNA
aggaatgatgtagtgtacccg

SEQ ID NO: 23794 - DNA, 21 bp, synthetic construct
  source 1..21: mol_type = other DNA; mol_type = other DNA
atcgcaacccgtggtatcggc

SEQ ID NO: 23795 - DNA, 21 bp, synthetic construct
  source 1..21: mol_type = other DNA; mol_type = other DNA
agaaatgagttcaccactttc

SEQ ID NO: 23796 - DNA, 21 bp, synthetic construct
  source 1..21: mol_type = other DNA; mol_type = other DNA
cttgcgaaaaccgcacacaac

SEQ ID NO: 23797 - DNA, 21 bp, synthetic construct
  source 1..21: mol_type = other DNA; mol_type = other DNA
cgaacacatgatacattccct

SEQ ID NO: 23798 - DNA, 21 bp, synthetic construct
  source 1..21: mol_type = other DNA; mol_type = other DNA
gctggagatgggctgtgggtt

SEQ ID NO: 23799 - DNA, 21 bp, synthetic construct
  source 1..21: mol_type = other DNA; mol_type = other DNA
aggttaaacgacgcatatccg

SEQ ID NO: 23800 - DNA, 21 bp, synthetic construct
  source 1..21: mol_type = other DNA; mol_type = other DNA
taccacaggttgcagccagac

SEQ ID NO: 23801 - DNA, 21 bp, synthetic construct
  source 1..21: mol_type = other DNA; mol_type = other DNA
gtgatgcagagtagggattgg

SEQ ID NO: 23802 - DNA, 21 bp, synthetic construct
  source 1..21: mol_type = other DNA; mol_type = other DNA
aggggccccgagatctaccct

SEQ ID NO: 23803 - DNA, 21 bp, synthetic construct
  source 1..21: mol_type = other DNA; mol_type = other DNA
gtcgaaagtacaaacggcgca

SEQ ID NO: 23804 - DNA, 21 bp, synthetic construct
  source 1..21: mol_type = other DNA; mol_type = other DNA
ttatgcaaaccatgcttagtc

SEQ ID NO: 23805 - DNA, 21 bp, synthetic construct
  source 1..21: mol_type = other DNA; mol_type = other DNA
tactttacaggcacgatagat

SEQ ID NO: 23806 - DNA, 21 bp, synthetic construct
  source 1..21: mol_type = other DNA; mol_type = other DNA
ttgcaccgcttgggtgtgtct

SEQ ID NO: 23807 - DNA, 21 bp, synthetic construct
  source 1..21: mol_type = other DNA; mol_type = other DNA
tatgttataagtgacagaaac

SEQ ID NO: 23808 - DNA, 21 bp, synthetic construct
  source 1..21: mol_type = other DNA; mol_type = other DNA
tatagtaaacaaggattaaat

SEQ ID NO: 23809 - DNA, 21 bp, synthetic construct
  source 1..21: mol_type = other DNA; mol_type = other DNA
gacatgatgagtagagactgg

SEQ ID NO: 23810 - DNA, 21 bp, synthetic construct
  source 1..21: mol_type = other DNA; mol_type = other DNA
ctccaccgactcagtataccg

SEQ ID NO: 23811 - DNA, 21 bp, synthetic construct
  source 1..21: mol_type = other DNA; mol_type = other DNA
ctctcacgtcttcaagagaat

SEQ ID NO: 23812 - DNA, 21 bp, synthetic construct
  source 1..21: mol_type = other DNA; mol_type = other DNA
tacgctaaaacagggctcaac

SEQ ID NO: 23813 - DNA, 21 bp, synthetic construct
  source 1..21: mol_type = other DNA; mol_type = other DNA
attatgtcggatagaggctgg

SEQ ID NO: 23814 - DNA, 21 bp, synthetic construct
  source 1..21: mol_type = other DNA; mol_type = other DNA
cgaggttctgatgtctttcca

SEQ ID NO: 23815 - DNA, 21 bp, synthetic construct
  source 1..21: mol_type = other DNA; mol_type = other DNA
gaactcgccagtcatgcgtgg

SEQ ID NO: 23816 - DNA, 21 bp, synthetic construct
  source 1..21: mol_type = other DNA; mol_type = other DNA
tactttacggggacattggcc

SEQ ID NO: 23817 - DNA, 21 bp, synthetic construct
  source 1..21: mol_type = other DNA; mol_type = other DNA
cttcatcgtctgcagtcccat

SEQ ID NO: 23818 - DNA, 21 bp, synthetic construct
  source 1..21: mol_type = other DNA; mol_type = other DNA
gctatggccgacagaacgtgg

SEQ ID NO: 23819 - DNA, 21 bp, synthetic construct
  source 1..21: mol_type = other DNA; mol_type = other DNA
tacagcaagatgaacagcaat

SEQ ID NO: 23820 - DNA, 21 bp, synthetic construct
  source 1..21: mol_type = other DNA; mol_type = other DNA
tattttacaggaaagcacgaa

SEQ ID NO: 23821 - DNA, 21 bp, synthetic construct
  source 1..21: mol_type = other DNA; mol_type = other DNA
agggaggaaagtcgaagttgg

SEQ ID NO: 23822 - DNA, 21 bp, synthetic construct
  source 1..21: mol_type = other DNA; mol_type = other DNA
tacttcacgggccacatggaa

SEQ ID NO: 23823 - DNA, 21 bp, synthetic construct
  source 1..21: mol_type = other DNA; mol_type = other DNA
tatctaaaatcgcagacttac

SEQ ID NO: 23824 - DNA, 21 bp, synthetic construct
  source 1..21: mol_type = other DNA; mol_type = other DNA
acgaggagcaccaatggagta

SEQ ID NO: 23825 - DNA, 21 bp, synthetic construct
  source 1..21: mol_type = other DNA; mol_type = other DNA
tatactaagtcagatgtcaga

SEQ ID NO: 23826 - DNA, 21 bp, synthetic construct
  source 1..21: mol_type = other DNA; mol_type = other DNA
cgaggagaggaaatatacccc

SEQ ID NO: 23827 - DNA, 21 bp, synthetic construct
  source 1..21: mol_type = other DNA; mol_type = other DNA
catgatgggacatctaaatgg

SEQ ID NO: 23828 - DNA, 21 bp, synthetic construct
  source 1..21: mol_type = other DNA; mol_type = other DNA
tttttctcgggaatcaaggag

SEQ ID NO: 23829 - DNA, 21 bp, synthetic construct
  source 1..21: mol_type = other DNA; mol_type = other DNA
ttagctaaaggcgggtttaac

SEQ ID NO: 23830 - DNA, 21 bp, synthetic construct
  source 1..21: mol_type = other DNA; mol_type = other DNA
ccactggacagctataaatgg

SEQ ID NO: 23831 - DNA, 21 bp, synthetic construct
  source 1..21: mol_type = other DNA; mol_type = other DNA
cgcacgaacgacgtatacccg

SEQ ID NO: 23832 - DNA, 21 bp, synthetic construct
  source 1..21: mol_type = other DNA; mol_type = other DNA
attatgtcggacagggtgtgg

SEQ ID NO: 23833 - DNA, 21 bp, synthetic construct
  source 1..21: mol_type = other DNA; mol_type = other DNA
gagatgagctcgataaaatgg

SEQ ID NO: 23834 - DNA, 21 bp, synthetic construct
  source 1..21: mol_type = other DNA; mol_type = other DNA
cacgaaagcaccaatggagtg

SEQ ID NO: 23835 - DNA, 21 bp, synthetic construct
  source 1..21: mol_type = other DNA; mol_type = other DNA
gtagaaagcgccaacggtgtg

SEQ ID NO: 23836 - DNA, 21 bp, synthetic construct
  source 1..21: mol_type = other DNA; mol_type = other DNA
tattttaccggtaaaatcaat

SEQ ID NO: 23837 - DNA, 21 bp, synthetic construct
  source 1..21: mol_type = other DNA; mol_type = other DNA
aggcttagcgatgtatatcct

SEQ ID NO: 23838 - DNA, 21 bp, synthetic construct
  source 1..21: mol_type = other DNA; mol_type = other DNA
taccatgcccttaacttggat

SEQ ID NO: 23839 - DNA, 21 bp, synthetic construct
  source 1..21: mol_type = other DNA; mol_type = other DNA
agattgcatgacgcctatcct

SEQ ID NO: 23840 - DNA, 21 bp, synthetic construct
  source 1..21: mol_type = other DNA; mol_type = other DNA
gtcgtatcaacgaacggaatt

SEQ ID NO: 23841 - DNA, 21 bp, synthetic construct
  source 1..21: mol_type = other DNA; mol_type = other DNA
tactcaaaggcaggcgtgaac

SEQ ID NO: 23842 - DNA, 21 bp, synthetic construct
  source 1..21: mol_type = other DNA; mol_type = other DNA
gttcagagcacgaacggccgg

SEQ ID NO: 23843 - DNA, 21 bp, synthetic construct
  source 1..21: mol_type = other DNA; mol_type = other DNA
tacagcaagagtggtgctaac

SEQ ID NO: 23844 - DNA, 21 bp, synthetic construct
  source 1..21: mol_type = other DNA; mol_type = other DNA
cgcgagtttgacgctttcccg

SEQ ID NO: 23845 - DNA, 21 bp, synthetic construct
  source 1..21: mol_type = other DNA; mol_type = other DNA
cttgcaaaagccggacccaat

SEQ ID NO: 23846 - DNA, 21 bp, synthetic construct
  source 1..21: mol_type = other DNA; mol_type = other DNA
agagatgagttcacgcactac

SEQ ID NO: 23847 - DNA, 21 bp, synthetic construct
  source 1..21: mol_type = other DNA; mol_type = other DNA
ggaagtgaatattccaaatgg

SEQ ID NO: 23848 - DNA, 21 bp, synthetic construct
  source 1..21: mol_type = other DNA; mol_type = other DNA
tggtggagcggagtgcagagc

SEQ ID NO: 23849 - DNA, 21 bp, synthetic construct
  source 1..21: mol_type = other DNA; mol_type = other DNA
tattccaaagcaaattttaat

SEQ ID NO: 23850 - DNA, 21 bp, synthetic construct
  source 1..21: mol_type = other DNA; mol_type = other DNA
tattttcacgggaaattggaa

SEQ ID NO: 23851 - DNA, 21 bp, synthetic construct
  source 1..21: mol_type = other DNA; mol_type = other DNA
ttgcatcggttgcacccaaac

SEQ ID NO: 23852 - DNA, 21 bp, synthetic construct
  source 1..21: mol_type = other DNA; mol_type = other DNA
ctgtctaaaatcggactcaac

SEQ ID NO: 23853 - DNA, 21 bp, synthetic construct
  source 1..21: mol_type = other DNA; mol_type = other DNA
cgagatgaatacactggtttt

SEQ ID NO: 23854 - DNA, 21 bp, synthetic construct
  source 1..21: mol_type = other DNA; mol_type = other DNA
tactccagactaggtttagat

SEQ ID NO: 23855 - DNA, 21 bp, synthetic construct
  source 1..21: mol_type = other DNA; mol_type = other DNA
aactcggaatacctgcccttt

SEQ ID NO: 23856 - DNA, 21 bp, synthetic construct
  source 1..21: mol_type = other DNA; mol_type = other DNA
aagagcgatttcgtatcgtgg

SEQ ID NO: 23857 - DNA, 21 bp, synthetic construct
  source 1..21: mol_type = other DNA; mol_type = other DNA
tatttcactgggaggatagac

SEQ ID NO: 23858 - DNA, 21 bp, synthetic construct
  source 1..21: mol_type = other DNA; mol_type = other DNA
ttatcgagagcttctgtgaat

SEQ ID NO: 23859 - DNA, 21 bp, synthetic construct
  source 1..21: mol_type = other DNA; mol_type = other DNA
ctacacagattggcggcaaac

SEQ ID NO: 23860 - DNA, 21 bp, synthetic construct
  source 1..21: mol_type = other DNA; mol_type = other DNA
tatagcaaacagaatttaaat

SEQ ID NO: 23861 - DNA, 21 bp, synthetic construct
  source 1..21: mol_type = other DNA; mol_type = other DNA
gcaggtggcggactattcatc

SEQ ID NO: 23862 - DNA, 21 bp, synthetic construct
  source 1..21: mol_type = other DNA; mol_type = other DNA
aggttggaatcacatggatgg

SEQ ID NO: 23863 - DNA, 21 bp, synthetic construct
  source 1..21: mol_type = other DNA; mol_type = other DNA
ctgtgcaggccctgtagcacc

SEQ ID NO: 23864 - DNA, 21 bp, synthetic construct
  source 1..21: mol_type = other DNA; mol_type = other DNA
tatctagggcagccctatttc

SEQ ID NO: 23865 - DNA, 21 bp, synthetic construct
  source 1..21: mol_type = other DNA; mol_type = other DNA
gtcccagatcatgtgagatgg

SEQ ID NO: 23866 - DNA, 21 bp, synthetic construct
  source 1..21: mol_type = other DNA; mol_type = other DNA
cccttgagtagcgcatcctgg

SEQ ID NO: 23867 - DNA, 21 bp, synthetic construct
  source 1..21: mol_type = other DNA; mol_type = other DNA
agtgattctacaaatggtgtg

SEQ ID NO: 23868 - DNA, 21 bp, synthetic construct
  source 1..21: mol_type = other DNA; mol_type = other DNA
tattttacaggggagaaggaa

SEQ ID NO: 23869 - DNA, 21 bp, synthetic construct
  source 1..21: mol_type = other DNA; mol_type = other DNA
tgcaagcccaataatggcatc

SEQ ID NO: 23870 - DNA, 21 bp, synthetic construct
  source 1..21: mol_type = other DNA; mol_type = other DNA
ttgcataagatgatgatgaat

SEQ ID NO: 23871 - DNA, 21 bp, synthetic construct
  source 1..21: mol_type = other DNA; mol_type = other DNA
tactttacaggaaaacccgat

SEQ ID NO: 23872 - DNA, 21 bp, synthetic construct
  source 1..21: mol_type = other DNA; mol_type = other DNA
cgcggcgataatatcttcccg

SEQ ID NO: 23873 - DNA, 21 bp, synthetic construct
  source 1..21: mol_type = other DNA; mol_type = other DNA
ctcacccgcccgtgcagtgag

SEQ ID NO: 23874 - DNA, 21 bp, synthetic construct
  source 1..21: mol_type = other DNA; mol_type = other DNA
tatttcgccggaaagatcgaa

SEQ ID NO: 23875 - DNA, 21 bp, synthetic construct
  source 1..21: mol_type = other DNA; mol_type = other DNA
tatgttagatcggatcataac

SEQ ID NO: 23876 - DNA, 21 bp, synthetic construct
  source 1..21: mol_type = other DNA; mol_type = other DNA
agatcagaacatacttatcct

SEQ ID NO: 23877 - DNA, 21 bp, synthetic construct
  source 1..21: mol_type = other DNA; mol_type = other DNA
taccacaagagcaatatgaat

SEQ ID NO: 23878 - DNA, 21 bp, synthetic construct
  source 1..21: mol_type = other DNA; mol_type = other DNA
tatgcaaaaacaggacagaat

SEQ ID NO: 23879 - DNA, 21 bp, synthetic construct
  source 1..21: mol_type = other DNA; mol_type = other DNA
atgccaacgggcgatggacct

SEQ ID NO: 23880 - DNA, 21 bp, synthetic construct
  source 1..21: mol_type = other DNA; mol_type = other DNA
tacgctaagacgggtcaaaac

SEQ ID NO: 23881 - DNA, 21 bp, synthetic construct
  source 1..21: mol_type = other DNA; mol_type = other DNA
ataatgtcgtcacgagaatgg

SEQ ID NO: 23882 - DNA, 21 bp, synthetic construct
  source 1..21: mol_type = other DNA; mol_type = other DNA
gccatggcagatcgtacttgg

SEQ ID NO: 23883 - DNA, 21 bp, synthetic construct
  source 1..21: mol_type = other DNA; mol_type = other DNA
tacttcaccgggaagagggag

SEQ ID NO: 23884 - DNA, 21 bp, synthetic construct
  source 1..21: mol_type = other DNA; mol_type = other DNA
gactacgctaaatcactttta

SEQ ID NO: 23885 - DNA, 21 bp, synthetic construct
  source 1..21: mol_type = other DNA; mol_type = other DNA
tactttcatggtatacacgag

SEQ ID NO: 23886 - DNA, 21 bp, synthetic construct
  source 1..21: mol_type = other DNA; mol_type = other DNA
ctcgcaaaaagtggtgttaac

SEQ ID NO: 23887 - DNA, 21 bp, synthetic construct
  source 1..21: mol_type = other DNA; mol_type = other DNA
gttatgtcaagcagggaatgg

SEQ ID NO: 23888 - DNA, 21 bp, synthetic construct
  source 1..21: mol_type = other DNA; mol_type = other DNA
cgcgaggatggagttacgtgg

SEQ ID NO: 23889 - DNA, 21 bp, synthetic construct
  source 1..21: mol_type = other DNA; mol_type = other DNA
ttcagcaggttaaatccggac

SEQ ID NO: 23890 - DNA, 21 bp, synthetic construct
  source 1..21: mol_type = other DNA; mol_type = other DNA
tatttctctggagtaactgag

SEQ ID NO: 23891 - DNA, 21 bp, synthetic construct
  source 1..21: mol_type = other DNA; mol_type = other DNA
agtgatagtacaaatggacgc

SEQ ID NO: 23892 - DNA, 21 bp, synthetic construct
  source 1..21: mol_type = other DNA; mol_type = other DNA
gctgagagtaccaatggccga

SEQ ID NO: 23893 - DNA, 21 bp, synthetic construct
  source 1..21: mol_type = other DNA; mol_type = other DNA
attatggcagacagagggtgg

SEQ ID NO: 23894 - DNA, 21 bp, synthetic construct
  source 1..21: mol_type = other DNA; mol_type = other DNA
tatttcacggggcacacagag

SEQ ID NO: 23895 - DNA, 21 bp, synthetic construct
  source 1..21: mol_type = other DNA; mol_type = other DNA
cgcgatgagtttagtgggtat

SEQ ID NO: 23896 - DNA, 21 bp, synthetic construct
  source 1..21: mol_type = other DNA; mol_type = other DNA
gatatggcaagtacaaactgg

SEQ ID NO: 23897 - DNA, 21 bp, synthetic construct
  source 1..21: mol_type = other DNA; mol_type = other DNA
tactttacagggcgcgctgaa

SEQ ID NO: 23898 - DNA, 21 bp, synthetic construct
  source 1..21: mol_type = other DNA; mol_type = other DNA
atgcaccggttaagcacgaat

SEQ ID NO: 23899 - DNA, 21 bp, synthetic construct
  source 1..21: mol_type = other DNA; mol_type = other DNA
ttacatcgtctgagttcgaac

SEQ ID NO: 23900 - DNA, 21 bp, synthetic construct
  source 1..21: mol_type = other DNA; mol_type = other DNA
attggccatgaaggatgggac

SEQ ID NO: 23901 - DNA, 21 bp, synthetic construct
  source 1..21: mol_type = other DNA; mol_type = other DNA
cgttctgaattcgtcacgttc

SEQ ID NO: 23902 - DNA, 21 bp, synthetic construct
  source 1..21: mol_type = other DNA; mol_type = other DNA
atactttcagatcgagtctgg

SEQ ID NO: 23903 - DNA, 21 bp, synthetic construct
  source 1..21: mol_type = other DNA; mol_type = other DNA
atcatgtcctcgagcatgtgg

SEQ ID NO: 23904 - DNA, 21 bp, synthetic construct
  source 1..21: mol_type = other DNA; mol_type = other DNA
ggttgccgcccagacccagtc

SEQ ID NO: 23905 - DNA, 21 bp, synthetic construct
  source 1..21: mol_type = other DNA; mol_type = other DNA
gatatgacctcacacaaatgg

SEQ ID NO: 23906 - DNA, 21 bp, synthetic construct
  source 1..21: mol_type = other DNA; mol_type = other DNA
aaggatgattacactagttac

SEQ ID NO: 23907 - DNA, 21 bp, synthetic construct
  source 1..21: mol_type = other DNA; mol_type = other DNA
atcctctcaagtcgcgactgg

SEQ ID NO: 23908 - DNA, 21 bp, synthetic construct
  source 1..21: mol_type = other DNA; mol_type = other DNA
tacttcacgggggtcactgaa

SEQ ID NO: 23909 - DNA, 21 bp, synthetic construct
  source 1..21: mol_type = other DNA; mol_type = other DNA
tattcacggttgcagcccgac

SEQ ID NO: 23910 - DNA, 21 bp, synthetic construct
  source 1..21: mol_type = other DNA; mol_type = other DNA
aggatgtcagatgcctatccg

SEQ ID NO: 23911 - DNA, 21 bp, synthetic construct
  source 1..21: mol_type = other DNA; mol_type = other DNA
aaagatgaattcaagtcatat

SEQ ID NO: 23912 - DNA, 21 bp, synthetic construct
  source 1..21: mol_type = other DNA; mol_type = other DNA
aaggatggatacagtacctat

SEQ ID NO: 23913 - DNA, 21 bp, synthetic construct
  source 1..21: mol_type = other DNA; mol_type = other DNA
tactcgcgcattggggccggt

SEQ ID NO: 23914 - DNA, 21 bp, synthetic construct
  source 1..21: mol_type = other DNA; mol_type = other DNA
agaaccgccgacgcattcccc

SEQ ID NO: 23915 - DNA, 21 bp, synthetic construct
  source 1..21: mol_type = other DNA; mol_type = other DNA
agactactagatgtataccct

SEQ ID NO: 23916 - DNA, 21 bp, synthetic construct
  source 1..21: mol_type = other DNA; mol_type = other DNA
agagacgagtttacttcgtgg

SEQ ID NO: 23917 - DNA, 21 bp, synthetic construct
  source 1..21: mol_type = other DNA; mol_type = other DNA
tatttccatggagtcaaggaa

SEQ ID NO: 23918 - DNA, 21 bp, synthetic construct
  source 1..21: mol_type = other DNA; mol_type = other DNA
ccaatggctgaccgcaaatgg

SEQ ID NO: 23919 - DNA, 21 bp, synthetic construct
  source 1..21: mol_type = other DNA; mol_type = other DNA
tacactaaatcacaagagtgg

SEQ ID NO: 23920 - DNA, 21 bp, synthetic construct
  source 1..21: mol_type = other DNA; mol_type = other DNA
agcgacggcactagtcgatgg

SEQ ID NO: 23921 - DNA, 21 bp, synthetic construct
  source 1..21: mol_type = other DNA; mol_type = other DNA
ctcagcaggatctccaacaac

SEQ ID NO: 23922 - DNA, 21 bp, synthetic construct
  source 1..21: mol_type = other DNA; mol_type = other DNA
tattttaccggaaagcatgag

SEQ ID NO: 23923 - DNA, 21 bp, synthetic construct
  source 1..21: mol_type = other DNA; mol_type = other DNA
cacgctagtactaacggagtt

SEQ ID NO: 23924 - DNA, 21 bp, synthetic construct
  source 1..21: mol_type = other DNA; mol_type = other DNA
tacgtaaaaagcgatgcggga

SEQ ID NO: 23925 - DNA, 21 bp, synthetic construct
  source 1..21: mol_type = other DNA; mol_type = other DNA
tactttcacggcgtaaaagag

SEQ ID NO: 23926 - DNA, 21 bp, synthetic construct
  source 1..21: mol_type = other DNA; mol_type = other DNA
tatagtaagagcggattcaat

SEQ ID NO: 23927 - DNA, 21 bp, synthetic construct
  source 1..21: mol_type = other DNA; mol_type = other DNA
tatttcacgggctatgtcgac

SEQ ID NO: 23928 - DNA, 21 bp, synthetic construct
  source 1..21: mol_type = other DNA; mol_type = other DNA
tggtggtcaggtgtccaatca

SEQ ID NO: 23929 - DNA, 21 bp, synthetic construct
  source 1..21: mol_type = other DNA; mol_type = other DNA
agggatgagttcagtagcttt

SEQ ID NO: 23930 - DNA, 21 bp, synthetic construct
  source 1..21: mol_type = other DNA; mol_type = other DNA
gttatgagtacgcatggggtg

SEQ ID NO: 23931 - DNA, 21 bp, synthetic construct
  source 1..21: mol_type = other DNA; mol_type = other DNA
gtactatctagcaacacatgg

SEQ ID NO: 23932 - DNA, 21 bp, synthetic construct
  source 1..21: mol_type = other DNA; mol_type = other DNA
tacagcaaggttggtttcaac

SEQ ID NO: 23933 - DNA, 21 bp, synthetic construct
  source 1..21: mol_type = other DNA; mol_type = other DNA
tattttacggggatccagagt

SEQ ID NO: 23934 - DNA, 21 bp, synthetic construct
  source 1..21: mol_type = other DNA; mol_type = other DNA
ataatgagcgaccgcggttgg

SEQ ID NO: 23935 - DNA, 21 bp, synthetic construct
  source 1..21: mol_type = other DNA; mol_type = other DNA
gaatcggacttcaaaatctac

SEQ ID NO: 23936 - DNA, 21 bp, synthetic construct
  source 1..21: mol_type = other DNA; mol_type = other DNA
cgggatgagaacgtcttccca

SEQ ID NO: 23937 - DNA, 21 bp, synthetic construct
  source 1..21: mol_type = other DNA; mol_type = other DNA
acagacggtacctcacgatgg

SEQ ID NO: 23938 - DNA, 21 bp, synthetic construct
  source 1..21: mol_type = other DNA; mol_type = other DNA
tatttcacaggggaagtcaac

SEQ ID NO: 23939 - DNA, 21 bp, synthetic construct
  source 1..21: mol_type = other DNA; mol_type = other DNA
tatgtcaagagcgatcccatg

SEQ ID NO: 23940 - DNA, 21 bp, synthetic construct
  source 1..21: mol_type = other DNA; mol_type = other DNA
ttctttagcgggattaaagaa

SEQ ID NO: 23941 - DNA, 21 bp, synthetic construct
  source 1..21: mol_type = other DNA; mol_type = other DNA
atcgcatcccgaggctgggac

SEQ ID NO: 23942 - DNA, 21 bp, synthetic construct
  source 1..21: mol_type = other DNA; mol_type = other DNA
gatatgacatcaagagattgg

SEQ ID NO: 23943 - DNA, 21 bp, synthetic construct
  source 1..21: mol_type = other DNA; mol_type = other DNA
gtgatgactgccagggactgg

SEQ ID NO: 23944 - DNA, 21 bp, synthetic construct
  source 1..21: mol_type = other DNA; mol_type = other DNA
ctacttgaaagcaggagttgg

SEQ ID NO: 23945 - DNA, 21 bp, synthetic construct
  source 1..21: mol_type = other DNA; mol_type = other DNA
tactttacagggcagagggag

SEQ ID NO: 23946 - DNA, 21 bp, synthetic construct
  source 1..21: mol_type = other DNA; mol_type = other DNA
aaagatgattacctttcatgg

SEQ ID NO: 23947 - DNA, 21 bp, synthetic construct
  source 1..21: mol_type = other DNA; mol_type = other DNA
ttttcgcggttgagtgacaac

SEQ ID NO: 23948 - DNA, 21 bp, synthetic construct
  source 1..21: mol_type = other DNA; mol_type = other DNA
tactcgaaggccaacagtaat

SEQ ID NO: 23949 - DNA, 21 bp, synthetic construct
  source 1..21: mol_type = other DNA; mol_type = other DNA
gtgcacagctcgaacggggta

SEQ ID NO: 23950 - DNA, 21 bp, synthetic construct
  source 1..21: mol_type = other DNA; mol_type = other DNA
cgtgacgaagaagtctaccca

SEQ ID NO: 23951 - DNA, 21 bp, synthetic construct
  source 1..21: mol_type = other DNA; mol_type = other DNA
agggaagcggtgagcacgtgg

SEQ ID NO: 23952 - DNA, 21 bp, synthetic construct
  source 1..21: mol_type = other DNA; mol_type = other DNA
ttagatgagtggcatggcttc

SEQ ID NO: 23953 - DNA, 21 bp, synthetic construct
  source 1..21: mol_type = other DNA; mol_type = other DNA
gtcttaagcgacagattgtgg

SEQ ID NO: 23954 - DNA, 21 bp, synthetic construct
  source 1..21: mol_type = other DNA; mol_type = other DNA
tatcacaagttaaatgtagtt

SEQ ID NO: 23955 - DNA, 21 bp, synthetic construct
  source 1..21: mol_type = other DNA; mol_type = other DNA
agagaggattttgtccgttat

SEQ ID NO: 23956 - DNA, 21 bp, synthetic construct
  source 1..21: mol_type = other DNA; mol_type = other DNA
tcggattccacaaacgggagg

SEQ ID NO: 23957 - DNA, 21 bp, synthetic construct
  source 1..21: mol_type = other DNA; mol_type = other DNA
agggacggggtcagcaaatgg

SEQ ID NO: 23958 - DNA, 21 bp, synthetic construct
  source 1..21: mol_type = other DNA; mol_type = other DNA
tcagacggtgtgagtagatgg

SEQ ID NO: 23959 - DNA, 21 bp, synthetic construct
  source 1..21: mol_type = other DNA; mol_type = other DNA
agatcagctgatgcctatccc

SEQ ID NO: 23960 - DNA, 21 bp, synthetic construct
  source 1..21: mol_type = other DNA; mol_type = other DNA
ttcgaatcgacaaatggagtc

SEQ ID NO: 23961 - DNA, 21 bp, synthetic construct
  source 1..21: mol_type = other DNA; mol_type = other DNA
cgtgaagagactgtgtttccc

SEQ ID NO: 23962 - DNA, 21 bp, synthetic construct
  source 1..21: mol_type = other DNA; mol_type = other DNA
gtgcatcgcctccaggataag

SEQ ID NO: 23963 - DNA, 21 bp, synthetic construct
  source 1..21: mol_type = other DNA; mol_type = other DNA
tgtgcgatcgattatcgtgaa

SEQ ID NO: 23964 - DNA, 21 bp, synthetic construct
  source 1..21: mol_type = other DNA; mol_type = other DNA
tattcgcgattaagccccgat

SEQ ID NO: 23965 - DNA, 21 bp, synthetic construct
  source 1..21: mol_type = other DNA; mol_type = other DNA
ttggagtcaactaatggcata

SEQ ID NO: 23966 - DNA, 21 bp, synthetic construct
  source 1..21: mol_type = other DNA; mol_type = other DNA
gcgatggccgaccgccaatgg

SEQ ID NO: 23967 - DNA, 21 bp, synthetic construct
  source 1..21: mol_type = other DNA; mol_type = other DNA
agtactagtacgaatggcata

SEQ ID NO: 23968 - DNA, 21 bp, synthetic construct
  source 1..21: mol_type = other DNA; mol_type = other DNA
tactttaccggaatgatggat

SEQ ID NO: 23969 - DNA, 21 bp, synthetic construct
  source 1..21: mol_type = other DNA; mol_type = other DNA
ttgcaccgtctgcaggtttca

SEQ ID NO: 23970 - DNA, 21 bp, synthetic construct
  source 1..21: mol_type = other DNA; mol_type = other DNA
cacgatagcacaaacggggtt

SEQ ID NO: 23971 - DNA, 21 bp, synthetic construct
  source 1..21: mol_type = other DNA; mol_type = other DNA
tattttacaggacgcactgaa

SEQ ID NO: 23972 - DNA, 21 bp, synthetic construct
  source 1..21: mol_type = other DNA; mol_type = other DNA
ctcagtaggatcagtcaaaat

SEQ ID NO: 23973 - DNA, 21 bp, synthetic construct
  source 1..21: mol_type = other DNA; mol_type = other DNA
tatttcacgggcaggaccgaa

SEQ ID NO: 23974 - DNA, 21 bp, synthetic construct
  source 1..21: mol_type = other DNA; mol_type = other DNA
tattggagtggaatacaggaa

SEQ ID NO: 23975 - DNA, 21 bp, synthetic construct
  source 1..21: mol_type = other DNA; mol_type = other DNA
agactaagtgatgcctaccct

SEQ ID NO: 23976 - DNA, 21 bp, synthetic construct
  source 1..21: mol_type = other DNA; mol_type = other DNA
gacctcgagtccagggactgg

SEQ ID NO: 23977 - DNA, 21 bp, synthetic construct
  source 1..21: mol_type = other DNA; mol_type = other DNA
tatcacaggctctccgtggat

SEQ ID NO: 23978 - DNA, 21 bp, synthetic construct
  source 1..21: mol_type = other DNA; mol_type = other DNA
atccaaagcacgaatggaagg

SEQ ID NO: 23979 - DNA, 21 bp, synthetic construct
  source 1..21: mol_type = other DNA; mol_type = other DNA
tactcaaaacagggcctgaac

SEQ ID NO: 23980 - DNA, 21 bp, synthetic construct
  source 1..21: mol_type = other DNA; mol_type = other DNA
ttggcgaaaaccggtgtcaat

SEQ ID NO: 23981 - DNA, 21 bp, synthetic construct
  source 1..21: mol_type = other DNA; mol_type = other DNA
gtcatgggaagtagcaattgg

SEQ ID NO: 23982 - DNA, 21 bp, synthetic construct
  source 1..21: mol_type = other DNA; mol_type = other DNA
tattttaccggccaacgggag

SEQ ID NO: 23983 - DNA, 21 bp, synthetic construct
  source 1..21: mol_type = other DNA; mol_type = other DNA
tatttcacggggaaagcagac

SEQ ID NO: 23984 - DNA, 21 bp, synthetic construct
  source 1..21: mol_type = other DNA; mol_type = other DNA
agggatgaatttatcgcttgg

SEQ ID NO: 23985 - DNA, 21 bp, synthetic construct
  source 1..21: mol_type = other DNA; mol_type = other DNA
ttgtcaaaagtgggatatgac

SEQ ID NO: 23986 - DNA, 21 bp, synthetic construct
  source 1..21: mol_type = other DNA; mol_type = other DNA
atgccgacaggagacggtcca

SEQ ID NO: 23987 - DNA, 21 bp, synthetic construct
  source 1..21: mol_type = other DNA; mol_type = other DNA
tattcgaggctaggccccaac

SEQ ID NO: 23988 - DNA, 21 bp, synthetic construct
  source 1..21: mol_type = other DNA; mol_type = other DNA
ttgtgccgcccgtgtattgag

SEQ ID NO: 23989 - DNA, 21 bp, synthetic construct
  source 1..21: mol_type = other DNA; mol_type = other DNA
gggagtgatggagtaagatgg

SEQ ID NO: 23990 - DNA, 21 bp, synthetic construct
  source 1..21: mol_type = other DNA; mol_type = other DNA
gatatggagtctaggggctgg

SEQ ID NO: 23991 - DNA, 21 bp, synthetic construct
  source 1..21: mol_type = other DNA; mol_type = other DNA
tacgtacgtagcgatgtgaag

SEQ ID NO: 23992 - DNA, 21 bp, synthetic construct
  source 1..21: mol_type = other DNA; mol_type = other DNA
cgcgatgaattcaagagctgg

SEQ ID NO: 23993 - DNA, 21 bp, synthetic construct
  source 1..21: mol_type = other DNA; mol_type = other DNA
tacgcgaaatcaggttctaac

SEQ ID NO: 23994 - DNA, 21 bp, synthetic construct
  source 1..21: mol_type = other DNA; mol_type = other DNA
ttaagtaaaatcggaatgaac

SEQ ID NO: 23995 - DNA, 21 bp, synthetic construct
  source 1..21: mol_type = other DNA; mol_type = other DNA
cgtctcaatgatgcgtaccct

SEQ ID NO: 23996 - DNA, 21 bp, synthetic construct
  source 1..21: mol_type = other DNA; mol_type = other DNA
attatgagtgaccgcttatgg

SEQ ID NO: 23997 - DNA, 21 bp, synthetic construct
  source 1..21: mol_type = other DNA; mol_type = other DNA
tactcgaaagcccagggcatt

SEQ ID NO: 23998 - DNA, 21 bp, synthetic construct
  source 1..21: mol_type = other DNA; mol_type = other DNA
gaaatggccgcatatgactgg

SEQ ID NO: 23999 - DNA, 21 bp, synthetic construct
  source 1..21: mol_type = other DNA; mol_type = other DNA
tatcataagctgcaaagcttt

SEQ ID NO: 24000 - DNA, 21 bp, synthetic construct
  source 1..21: mol_type = other DNA; mol_type = other DNA
tattgggcgggtgttaaagag

SEQ ID NO: 24001 - DNA, 21 bp, synthetic construct
  source 1..21: mol_type = other DNA; mol_type = other DNA
aaggacgacttctccggctgg

SEQ ID NO: 24002 - DNA, 21 bp, synthetic construct
  source 1..21: mol_type = other DNA; mol_type = other DNA
acgcgagagggcgacccggcg

SEQ ID NO: 24003 - DNA, 21 bp, synthetic construct
  source 1..21: mol_type = other DNA; mol_type = other DNA
gagatggcatcgcgggactgg

SEQ ID NO: 24004 - DNA, 21 bp, synthetic construct
  source 1..21: mol_type = other DNA; mol_type = other DNA
tatagcaaagcgggtcagaat

SEQ ID NO: 24005 - DNA, 21 bp, synthetic construct
  source 1..21: mol_type = other DNA; mol_type = other DNA
ctgtcacgtttagggtatgat

SEQ ID NO: 24006 - DNA, 21 bp, synthetic construct
  source 1..21: mol_type = other DNA; mol_type = other DNA
attttaagtgacagaatttgg

SEQ ID NO: 24007 - DNA, 21 bp, synthetic construct
  source 1..21: mol_type = other DNA; mol_type = other DNA
gctagtagtaccaacggcgtg

SEQ ID NO: 24008 - DNA, 21 bp, synthetic construct
  source 1..21: mol_type = other DNA; mol_type = other DNA
tttagtaaacttaacatgaat

SEQ ID NO: 24009 - DNA, 21 bp, synthetic construct
  source 1..21: mol_type = other DNA; mol_type = other DNA
taccatgccaaacaaaataat

SEQ ID NO: 24010 - DNA, 21 bp, synthetic construct
  source 1..21: mol_type = other DNA; mol_type = other DNA
gtattaagtgacaggttgtgg

SEQ ID NO: 24011 - DNA, 21 bp, synthetic construct
  source 1..21: mol_type = other DNA; mol_type = other DNA
ttgagccgcgccgcaaacaat

SEQ ID NO: 24012 - DNA, 21 bp, synthetic construct
  source 1..21: mol_type = other DNA; mol_type = other DNA
tactttactgggatgagggaa

SEQ ID NO: 24013 - DNA, 21 bp, synthetic construct
  source 1..21: mol_type = other DNA; mol_type = other DNA
ctccaccgccttcatcctaat

SEQ ID NO: 24014 - DNA, 21 bp, synthetic construct
  source 1..21: mol_type = other DNA; mol_type = other DNA
atgagggatgggaccagcgca

SEQ ID NO: 24015 - DNA, 21 bp, synthetic construct
  source 1..21: mol_type = other DNA; mol_type = other DNA
tatttcagcggtaaaatcgat

SEQ ID NO: 24016 - DNA, 21 bp, synthetic construct
  source 1..21: mol_type = other DNA; mol_type = other DNA
cgagacgagtttactagtttt

SEQ ID NO: 24017 - DNA, 21 bp, synthetic construct
  source 1..21: mol_type = other DNA; mol_type = other DNA
atgcatcgcttatcatttgat

SEQ ID NO: 24018 - DNA, 21 bp, synthetic construct
  source 1..21: mol_type = other DNA; mol_type = other DNA
cttcacaaactgcaacctgac

SEQ ID NO: 24019 - DNA, 21 bp, synthetic construct
  source 1..21: mol_type = other DNA; mol_type = other DNA
gacttgagcgatcgtaaatgg

SEQ ID NO: 24020 - DNA, 21 bp, synthetic construct
  source 1..21: mol_type = other DNA; mol_type = other DNA
ttatccaaagcgagtacgaat

SEQ ID NO: 24021 - DNA, 21 bp, synthetic construct
  source 1..21: mol_type = other DNA; mol_type = other DNA
cgcacgtcggacgcataccca

SEQ ID NO: 24022 - DNA, 21 bp, synthetic construct
  source 1..21: mol_type = other DNA; mol_type = other DNA
tacttttcgggtatcccagct

SEQ ID NO: 24023 - DNA, 21 bp, synthetic construct
  source 1..21: mol_type = other DNA; mol_type = other DNA
attatgtctagttcagcctgg

SEQ ID NO: 24024 - DNA, 21 bp, synthetic construct
  source 1..21: mol_type = other DNA; mol_type = other DNA
cgcgatgactttaccgcgtac

SEQ ID NO: 24025 - DNA, 21 bp, synthetic construct
  source 1..21: mol_type = other DNA; mol_type = other DNA
tattcaaaacttgaccacaat

SEQ ID NO: 24026 - DNA, 21 bp, synthetic construct
  source 1..21: mol_type = other DNA; mol_type = other DNA
gattggatccctaaatgtcca

SEQ ID NO: 24027 - DNA, 21 bp, synthetic construct
  source 1..21: mol_type = other DNA; mol_type = other DNA
gtggagtcagcaaatggggtt

SEQ ID NO: 24028 - DNA, 21 bp, synthetic construct
  source 1..21: mol_type = other DNA; mol_type = other DNA
gcaggagaaagtcgtgggtgg

SEQ ID NO: 24029 - DNA, 21 bp, synthetic construct
  source 1..21: mol_type = other DNA; mol_type = other DNA
cgtggtggggatgtctacccc

SEQ ID NO: 24030 - DNA, 21 bp, synthetic construct
  source 1..21: mol_type = other DNA; mol_type = other DNA
tacttttccgggactaaagag

SEQ ID NO: 24031 - DNA, 21 bp, synthetic construct
  source 1..21: mol_type = other DNA; mol_type = other DNA
gatctatctgataggaagtgg

SEQ ID NO: 24032 - DNA, 21 bp, synthetic construct
  source 1..21: mol_type = other DNA; mol_type = other DNA
ttcttctcaggggtaatcgct

SEQ ID NO: 24033 - DNA, 21 bp, synthetic construct
  source 1..21: mol_type = other DNA; mol_type = other DNA
attatgtcggacaggttatgg

SEQ ID NO: 24034 - DNA, 21 bp, synthetic construct
  source 1..21: mol_type = other DNA; mol_type = other DNA
ctatcgaagataggagcaaac

SEQ ID NO: 24035 - DNA, 21 bp, synthetic construct
  source 1..21: mol_type = other DNA; mol_type = other DNA
ttgtctcggctgtctcaagat

SEQ ID NO: 24036 - DNA, 21 bp, synthetic construct
  source 1..21: mol_type = other DNA; mol_type = other DNA
tacagtaagccgggtccgaac

SEQ ID NO: 24037 - DNA, 21 bp, synthetic construct
  source 1..21: mol_type = other DNA; mol_type = other DNA
ttcagtcgggtcggcgaaaat

SEQ ID NO: 24038 - DNA, 21 bp, synthetic construct
  source 1..21: mol_type = other DNA; mol_type = other DNA
tacagtagactgtcaccagac

SEQ ID NO: 24039 - DNA, 21 bp, synthetic construct
  source 1..21: mol_type = other DNA; mol_type = other DNA
tatttctctggagttatggcg

SEQ ID NO: 24040 - DNA, 21 bp, synthetic construct
  source 1..21: mol_type = other DNA; mol_type = other DNA
agaggtgagctcatctttccc

SEQ ID NO: 24041 - DNA, 21 bp, synthetic construct
  source 1..21: mol_type = other DNA; mol_type = other DNA
cccatggaaagtagggaatgg

SEQ ID NO: 24042 - DNA, 21 bp, synthetic construct
  source 1..21: mol_type = other DNA; mol_type = other DNA
ggtgaagatcacgtacgctgg

SEQ ID NO: 24043 - DNA, 21 bp, synthetic construct
  source 1..21: mol_type = other DNA; mol_type = other DNA
tatagtcgggtcagcccggac

SEQ ID NO: 24044 - DNA, 21 bp, synthetic construct
  source 1..21: mol_type = other DNA; mol_type = other DNA
tattttagcggagtgatctca

SEQ ID NO: 24045 - DNA, 21 bp, synthetic construct
  source 1..21: mol_type = other DNA; mol_type = other DNA
tattggagtggactactggag

SEQ ID NO: 24046 - DNA, 21 bp, synthetic construct
  source 1..21: mol_type = other DNA; mol_type = other DNA
cgcgatgactcggtattcccc

SEQ ID NO: 24047 - DNA, 21 bp, synthetic construct
  source 1..21: mol_type = other DNA; mol_type = other DNA
cgcagcgagttcatgtcttat

SEQ ID NO: 24048 - DNA, 21 bp, synthetic construct
  source 1..21: mol_type = other DNA; mol_type = other DNA
cgcgaagaatatacctcatgg

SEQ ID NO: 24049 - DNA, 21 bp, synthetic construct
  source 1..21: mol_type = other DNA; mol_type = other DNA
tacttttcaggcatacacgat

SEQ ID NO: 24050 - DNA, 21 bp, synthetic construct
  source 1..21: mol_type = other DNA; mol_type = other DNA
gttgacgaatatctaagctgg

SEQ ID NO: 24051 - DNA, 21 bp, synthetic construct
  source 1..21: mol_type = other DNA; mol_type = other DNA
tatttctcggggaaaaaggat

SEQ ID NO: 24052 - DNA, 21 bp, synthetic construct
  source 1..21: mol_type = other DNA; mol_type = other DNA
tatttcacaggtatacacgac

SEQ ID NO: 24053 - DNA, 21 bp, synthetic construct
  source 1..21: mol_type = other DNA; mol_type = other DNA
gaatcaagcacaaatgggcgt

SEQ ID NO: 24054 - DNA, 21 bp, synthetic construct
  source 1..21: mol_type = other DNA; mol_type = other DNA
tattttgcgggtataatagcg

SEQ ID NO: 24055 - DNA, 21 bp, synthetic construct
  source 1..21: mol_type = other DNA; mol_type = other DNA
gtcatggaggcaagagactgg

SEQ ID NO: 24056 - DNA, 21 bp, synthetic construct
  source 1..21: mol_type = other DNA; mol_type = other DNA
ttaatggctgatcggacctgg

SEQ ID NO: 24057 - DNA, 21 bp, synthetic construct
  source 1..21: mol_type = other DNA; mol_type = other DNA
cgcacggagacgacctatccc

SEQ ID NO: 24058 - DNA, 21 bp, synthetic construct
  source 1..21: mol_type = other DNA; mol_type = other DNA
cgtggcgaccatgtttatcct

SEQ ID NO: 24059 - DNA, 21 bp, synthetic construct
  source 1..21: mol_type = other DNA; mol_type = other DNA
attgcgagtacgaacggagtt

SEQ ID NO: 24060 - DNA, 21 bp, synthetic construct
  source 1..21: mol_type = other DNA; mol_type = other DNA
gttcccgaccacgtccgctgg

SEQ ID NO: 24061 - DNA, 21 bp, synthetic construct
  source 1..21: mol_type = other DNA; mol_type = other DNA
ctcagtagggcgagtcctaat

SEQ ID NO: 24062 - DNA, 21 bp, synthetic construct
  source 1..21: mol_type = other DNA; mol_type = other DNA
tatttttccggtataccagag

SEQ ID NO: 24063 - DNA, 21 bp, synthetic construct
  source 1..21: mol_type = other DNA; mol_type = other DNA
actaccagtaccaatggtata

SEQ ID NO: 24064 - DNA, 21 bp, synthetic construct
  source 1..21: mol_type = other DNA; mol_type = other DNA
tacgtccgtagcgaccacaac

SEQ ID NO: 24065 - DNA, 21 bp, synthetic construct
  source 1..21: mol_type = other DNA; mol_type = other DNA
atttcctccactaatggagtc

SEQ ID NO: 24066 - DNA, 21 bp, synthetic construct
  source 1..21: mol_type = other DNA; mol_type = other DNA
tacagtaaaatgggattgaat

SEQ ID NO: 24067 - DNA, 21 bp, synthetic construct
  source 1..21: mol_type = other DNA; mol_type = other DNA
tattcgaagacaggcttcaat

SEQ ID NO: 24068 - DNA, 21 bp, synthetic construct
  source 1..21: mol_type = other DNA; mol_type = other DNA
gatttacggactgcgacttgg

SEQ ID NO: 24069 - DNA, 21 bp, synthetic construct
  source 1..21: mol_type = other DNA; mol_type = other DNA
tacagcaagttgagtgatcgt

SEQ ID NO: 24070 - DNA, 21 bp, synthetic construct
  source 1..21: mol_type = other DNA; mol_type = other DNA
cgtgacgaattttcctcgttc

SEQ ID NO: 24071 - DNA, 21 bp, synthetic construct
  source 1..21: mol_type = other DNA; mol_type = other DNA
aaggacgattacagcacctac

SEQ ID NO: 24072 - DNA, 21 bp, synthetic construct
  source 1..21: mol_type = other DNA; mol_type = other DNA
aggacctcgactgtgtacccc

SEQ ID NO: 24073 - DNA, 21 bp, synthetic construct
  source 1..21: mol_type = other DNA; mol_type = other DNA
tactttacgggaaaattgtca

SEQ ID NO: 24074 - DNA, 21 bp, synthetic construct
  source 1..21: mol_type = other DNA; mol_type = other DNA
agaatgtctgatgcatttccc

SEQ ID NO: 24075 - DNA, 21 bp, synthetic construct
  source 1..21: mol_type = other DNA; mol_type = other DNA
tatttttcggggatacaagac

SEQ ID NO: 24076 - DNA, 21 bp, synthetic construct
  source 1..21: mol_type = other DNA; mol_type = other DNA
aaaatggaggaccggtcttgg

SEQ ID NO: 24077 - DNA, 21 bp, synthetic construct
  source 1..21: mol_type = other DNA; mol_type = other DNA
tcagccgagtgggttagctac

SEQ ID NO: 24078 - DNA, 21 bp, synthetic construct
  source 1..21: mol_type = other DNA; mol_type = other DNA
tatgtaaagtctcaacagact

SEQ ID NO: 24079 - DNA, 21 bp, synthetic construct
  source 1..21: mol_type = other DNA; mol_type = other DNA
agaatggaaagtgtaatgtgg

SEQ ID NO: 24080 - DNA, 21 bp, synthetic construct
  source 1..21: mol_type = other DNA; mol_type = other DNA
tccgatggaacaagtaagtgg

SEQ ID NO: 24081 - DNA, 21 bp, synthetic construct
  source 1..21: mol_type = other DNA; mol_type = other DNA
aagatggacagcatcgggtgg

SEQ ID NO: 24082 - DNA, 21 bp, synthetic construct
  source 1..21: mol_type = other DNA; mol_type = other DNA
aatacttatcggtgcgatggc

SEQ ID NO: 24083 - DNA, 21 bp, synthetic construct
  source 1..21: mol_type = other DNA; mol_type = other DNA
tacgccaagaatgggtacaat

SEQ ID NO: 24084 - DNA, 21 bp, synthetic construct
  source 1..21: mol_type = other DNA; mol_type = other DNA
gaagcgttgaggggttgggat

SEQ ID NO: 24085 - DNA, 21 bp, synthetic construct
  source 1..21: mol_type = other DNA; mol_type = other DNA
tacgctagggggggacctaac

SEQ ID NO: 24086 - DNA, 21 bp, synthetic construct
  source 1..21: mol_type = other DNA; mol_type = other DNA
cattcacgaatcgggcccaac

SEQ ID NO: 24087 - DNA, 21 bp, synthetic construct
  source 1..21: mol_type = other DNA; mol_type = other DNA
aaagacgattttagcgtatac

SEQ ID NO: 24088 - DNA, 21 bp, synthetic construct
  source 1..21: mol_type = other DNA; mol_type = other DNA
gatctcggtagcgccaagtgg

SEQ ID NO: 24089 - DNA, 21 bp, synthetic construct
  source 1..21: mol_type = other DNA; mol_type = other DNA
tactctagagtcggtgtcgac

SEQ ID NO: 24090 - DNA, 21 bp, synthetic construct
  source 1..21: mol_type = other DNA; mol_type = other DNA
tatttcagtggcaggctcgaa

SEQ ID NO: 24091 - DNA, 21 bp, synthetic construct
  source 1..21: mol_type = other DNA; mol_type = other DNA
ggagaggaccatgttagatgg

SEQ ID NO: 24092 - DNA, 21 bp, synthetic construct
  source 1..21: mol_type = other DNA; mol_type = other DNA
gtgatggaagcgcgtagctgg

SEQ ID NO: 24093 - DNA, 21 bp, synthetic construct
  source 1..21: mol_type = other DNA; mol_type = other DNA
ggctcggattacgttgcatgg

SEQ ID NO: 24094 - DNA, 21 bp, synthetic construct
  source 1..21: mol_type = other DNA; mol_type = other DNA
tacttcagcggcatccaggat

SEQ ID NO: 24095 - DNA, 21 bp, synthetic construct
  source 1..21: mol_type = other DNA; mol_type = other DNA
aaagatggctattcaacttat

SEQ ID NO: 24096 - DNA, 21 bp, synthetic construct
  source 1..21: mol_type = other DNA; mol_type = other DNA
aaagatgattacacgggtttc

SEQ ID NO: 24097 - DNA, 21 bp, synthetic construct
  source 1..21: mol_type = other DNA; mol_type = other DNA
gtgatggcggatcgcctatgg

SEQ ID NO: 24098 - DNA, 21 bp, synthetic construct
  source 1..21: mol_type = other DNA; mol_type = other DNA
ctaagtaggatatcgcatgat

SEQ ID NO: 24099 - DNA, 21 bp, synthetic construct
  source 1..21: mol_type = other DNA; mol_type = other DNA
agagaagaggtcgtgcggtgg

SEQ ID NO: 24100 - DNA, 21 bp, synthetic construct
  source 1..21: mol_type = other DNA; mol_type = other DNA
ttacacaggttacaaagccac

SEQ ID NO: 24101 - DNA, 21 bp, synthetic construct
  source 1..21: mol_type = other DNA; mol_type = other DNA
tacttcactggcgtccaagcc

SEQ ID NO: 24102 - DNA, 21 bp, synthetic construct
  source 1..21: mol_type = other DNA; mol_type = other DNA
ccgatggagtctgtgaaatgg

SEQ ID NO: 24103 - DNA, 21 bp, synthetic construct
  source 1..21: mol_type = other DNA; mol_type = other DNA
cgaatgcaggatgcttacccg

SEQ ID NO: 24104 - DNA, 21 bp, synthetic construct
  source 1..21: mol_type = other DNA; mol_type = other DNA
ctcgccaagacgggaatcaat

SEQ ID NO: 24105 - DNA, 21 bp, synthetic construct
  source 1..21: mol_type = other DNA; mol_type = other DNA
agaatggagagtcagtcgtgg

SEQ ID NO: 24106 - DNA, 21 bp, synthetic construct
  source 1..21: mol_type = other DNA; mol_type = other DNA
atgtttgacggaaccaacccg

SEQ ID NO: 24107 - DNA, 21 bp, synthetic construct
  source 1..21: mol_type = other DNA; mol_type = other DNA
cgcactgatgtcgtataccct

SEQ ID NO: 24108 - DNA, 21 bp, synthetic construct
  source 1..21: mol_type = other DNA; mol_type = other DNA
gacggcagtagtagactttgg

SEQ ID NO: 24109 - DNA, 21 bp, synthetic construct
  source 1..21: mol_type = other DNA; mol_type = other DNA
tacctaaaatctcaagtatat

SEQ ID NO: 24110 - DNA, 21 bp, synthetic construct
  source 1..21: mol_type = other DNA; mol_type = other DNA
cagggagaagcgcgtacttgg

SEQ ID NO: 24111 - DNA, 21 bp, synthetic construct
  source 1..21: mol_type = other DNA; mol_type = other DNA
tacgcgaagagcggcgacaat

SEQ ID NO: 24112 - DNA, 21 bp, synthetic construct
  source 1..21: mol_type = other DNA; mol_type = other DNA
gggtcggaattcgtttcctac

SEQ ID NO: 24113 - DNA, 21 bp, synthetic construct
  source 1..21: mol_type = other DNA; mol_type = other DNA
aaagacgagtttaaaagctac

SEQ ID NO: 24114 - DNA, 21 bp, synthetic construct
  source 1..21: mol_type = other DNA; mol_type = other DNA
tactgggctggggtgaaggaa

SEQ ID NO: 24115 - DNA, 21 bp, synthetic construct
  source 1..21: mol_type = other DNA; mol_type = other DNA
gtaggattaaaggggtgggat

SEQ ID NO: 24116 - DNA, 21 bp, synthetic construct
  source 1..21: mol_type = other DNA; mol_type = other DNA
gtgcatagtactaacggcagg

SEQ ID NO: 24117 - DNA, 21 bp, synthetic construct
  source 1..21: mol_type = other DNA; mol_type = other DNA
acggatggcacaagccgctgg

SEQ ID NO: 24118 - DNA, 21 bp, synthetic construct
  source 1..21: mol_type = other DNA; mol_type = other DNA
gggtgtgggacaaagcacggt

SEQ ID NO: 24119 - DNA, 21 bp, synthetic construct
  source 1..21: mol_type = other DNA; mol_type = other DNA
tatttcacgggtgtaatcgac

SEQ ID NO: 24120 - DNA, 21 bp, synthetic construct
  source 1..21: mol_type = other DNA; mol_type = other DNA
aagagtgattttgtgagctac

SEQ ID NO: 24121 - DNA, 21 bp, synthetic construct
  source 1..21: mol_type = other DNA; mol_type = other DNA
aggtcagattttgttgtttat

SEQ ID NO: 24122 - DNA, 21 bp, synthetic construct
  source 1..21: mol_type = other DNA; mol_type = other DNA
ggctgtcggtacggcgacatc

SEQ ID NO: 24123 - DNA, 21 bp, synthetic construct
  source 1..21: mol_type = other DNA; mol_type = other DNA
acaaatagcaccaatggcatc

SEQ ID NO: 24124 - DNA, 21 bp, synthetic construct
  source 1..21: mol_type = other DNA; mol_type = other DNA
ctgtcacgtgtcggcgcagac

SEQ ID NO: 24125 - DNA, 21 bp, synthetic construct
  source 1..21: mol_type = other DNA; mol_type = other DNA
ttaagtaaggccggatttaat

SEQ ID NO: 24126 - DNA, 21 bp, synthetic construct
  source 1..21: mol_type = other DNA; mol_type = other DNA
tacgcacgtacggctccagac

SEQ ID NO: 24127 - DNA, 21 bp, synthetic construct
  source 1..21: mol_type = other DNA; mol_type = other DNA
agatcagagttcgtaagctac

SEQ ID NO: 24128 - DNA, 21 bp, synthetic construct
  source 1..21: mol_type = other DNA; mol_type = other DNA
gttaacgattacataagttac

SEQ ID NO: 24129 - DNA, 21 bp, synthetic construct
  source 1..21: mol_type = other DNA; mol_type = other DNA
accgatttgaccgtgtaccgt

SEQ ID NO: 24130 - DNA, 21 bp, synthetic construct
  source 1..21: mol_type = other DNA; mol_type = other DNA
gtcatgagcagcagagattgg

SEQ ID NO: 24131 - DNA, 21 bp, synthetic construct
  source 1..21: mol_type = other DNA; mol_type = other DNA
tcaacctcaaccaatggcgtg

SEQ ID NO: 24132 - DNA, 21 bp, synthetic construct
  source 1..21: mol_type = other DNA; mol_type = other DNA
tacgctaaagccggttacaac

SEQ ID NO: 24133 - DNA, 21 bp, synthetic construct
  source 1..21: mol_type = other DNA; mol_type = other DNA
tactccaaagccaacaataat

SEQ ID NO: 24134 - DNA, 21 bp, synthetic construct
  source 1..21: mol_type = other DNA; mol_type = other DNA
ccaatggaatccagtcaatgg

SEQ ID NO: 24135 - DNA, 21 bp, synthetic construct
  source 1..21: mol_type = other DNA; mol_type = other DNA
tacagccgtttgggaccgaac

SEQ ID NO: 24136 - DNA, 21 bp, synthetic construct
  source 1..21: mol_type = other DNA; mol_type = other DNA
cgcgagagcgtctcaacctgg

SEQ ID NO: 24137 - DNA, 21 bp, synthetic construct
  source 1..21: mol_type = other DNA; mol_type = other DNA
tacagtcgagttggccctgac

SEQ ID NO: 24138 - DNA, 21 bp, synthetic construct
  source 1..21: mol_type = other DNA; mol_type = other DNA
gatatggagagcaggacttgg

SEQ ID NO: 24139 - DNA, 21 bp, synthetic construct
  source 1..21: mol_type = other DNA; mol_type = other DNA
agggaagactacacgacctgg

SEQ ID NO: 24140 - DNA, 21 bp, synthetic construct
  source 1..21: mol_type = other DNA; mol_type = other DNA
ctacatcgtttgaaccctctg

SEQ ID NO: 24141 - DNA, 21 bp, synthetic construct
  source 1..21: mol_type = other DNA; mol_type = other DNA
aggacgatcgactcatatgca

SEQ ID NO: 24142 - DNA, 21 bp, synthetic construct
  source 1..21: mol_type = other DNA; mol_type = other DNA
gtactgacctctgctaagtgg

SEQ ID NO: 24143 - DNA, 21 bp, synthetic construct
  source 1..21: mol_type = other DNA; mol_type = other DNA
aaaagtgattacgtgacgtac

SEQ ID NO: 24144 - DNA, 21 bp, synthetic construct
  source 1..21: mol_type = other DNA; mol_type = other DNA
tactttgcaggtaagatctcc

SEQ ID NO: 24145 - DNA, 21 bp, synthetic construct
  source 1..21: mol_type = other DNA; mol_type = other DNA
tactgggctggcgtcaaagac

SEQ ID NO: 24146 - DNA, 21 bp, synthetic construct
  source 1..21: mol_type = other DNA; mol_type = other DNA
tactggacaggagtcaccgaa

SEQ ID NO: 24147 - DNA, 21 bp, synthetic construct
  source 1..21: mol_type = other DNA; mol_type = other DNA
ctacacagactatcggaccac

SEQ ID NO: 24148 - DNA, 21 bp, synthetic construct
  source 1..21: mol_type = other DNA; mol_type = other DNA
tatttcacaggaattattgac

SEQ ID NO: 24149 - DNA, 21 bp, synthetic construct
  source 1..21: mol_type = other DNA; mol_type = other DNA
tacgtaaggagcgacgtaaag

SEQ ID NO: 24150 - DNA, 21 bp, synthetic construct
  source 1..21: mol_type = other DNA; mol_type = other DNA
tactcaaaaatgaatatgaat

SEQ ID NO: 24151 - DNA, 21 bp, synthetic construct
  source 1..21: mol_type = other DNA; mol_type = other DNA
tactttaccggatatctcgac

SEQ ID NO: 24152 - DNA, 21 bp, synthetic construct
  source 1..21: mol_type = other DNA; mol_type = other DNA
tgtggccctgggtgttgtcct

SEQ ID NO: 24153 - DNA, 21 bp, synthetic construct
  source 1..21: mol_type = other DNA; mol_type = other DNA
tatttctcaggcactatagat

SEQ ID NO: 24154 - DNA, 21 bp, synthetic construct
  source 1..21: mol_type = other DNA; mol_type = other DNA
cttcaccgattatctgtagat

SEQ ID NO: 24155 - DNA, 21 bp, synthetic construct
  source 1..21: mol_type = other DNA; mol_type = other DNA
gttttaacgagcgcaaaatgg

SEQ ID NO: 24156 - DNA, 21 bp, synthetic construct
  source 1..21: mol_type = other DNA; mol_type = other DNA
tactggtcgggcatccaagag

SEQ ID NO: 24157 - DNA, 21 bp, synthetic construct
  source 1..21: mol_type = other DNA; mol_type = other DNA
tactcaaagagcggctgtaat

SEQ ID NO: 24158 - DNA, 21 bp, synthetic construct
  source 1..21: mol_type = other DNA; mol_type = other DNA
ataagttcaacgaacgggatc

SEQ ID NO: 24159 - DNA, 21 bp, synthetic construct
  source 1..21: mol_type = other DNA; mol_type = other DNA
tattcgaaaatgaataataat

SEQ ID NO: 24160 - DNA, 21 bp, synthetic construct
  source 1..21: mol_type = other DNA; mol_type = other DNA
cgcgatgactttaccatgtac

SEQ ID NO: 24161 - DNA, 21 bp, synthetic construct
  source 1..21: mol_type = other DNA; mol_type = other DNA
aaggatgactatagtatctat

SEQ ID NO: 24162 - DNA, 21 bp, synthetic construct
  source 1..21: mol_type = other DNA; mol_type = other DNA
tactttactggggtcattcag

SEQ ID NO: 24163 - DNA, 21 bp, synthetic construct
  source 1..21: mol_type = other DNA; mol_type = other DNA
gtgtggaaacccgaacccgga

SEQ ID NO: 24164 - DNA, 21 bp, synthetic construct
  source 1..21: mol_type = other DNA; mol_type = other DNA
agaagggaagacgtgtaccca

SEQ ID NO: 24165 - DNA, 21 bp, synthetic construct
  source 1..21: mol_type = other DNA; mol_type = other DNA
tacttcacgggcaaacgagag

SEQ ID NO: 24166 - DNA, 21 bp, synthetic construct
  source 1..21: mol_type = other DNA; mol_type = other DNA
agatcagagttcaccacgtat

SEQ ID NO: 24167 - DNA, 21 bp, synthetic construct
  source 1..21: mol_type = other DNA; mol_type = other DNA
cgaagtgagtttaaagtcttt

SEQ ID NO: 24168 - DNA, 21 bp, synthetic construct
  source 1..21: mol_type = other DNA; mol_type = other DNA
gatcttcaatctaggagttgg

SEQ ID NO: 24169 - DNA, 21 bp, synthetic construct
  source 1..21: mol_type = other DNA; mol_type = other DNA
cgtgacgatcatgtctaccct

SEQ ID NO: 24170 - DNA, 21 bp, synthetic construct
  source 1..21: mol_type = other DNA; mol_type = other DNA
gggggagaacactcgacctgg

SEQ ID NO: 24171 - DNA, 21 bp, synthetic construct
  source 1..21: mol_type = other DNA; mol_type = other DNA
tatttctcaggcataccttcg

SEQ ID NO: 24172 - DNA, 21 bp, synthetic construct
  source 1..21: mol_type = other DNA; mol_type = other DNA
ataatggctgacagggtttgg

SEQ ID NO: 24173 - DNA, 21 bp, synthetic construct
  source 1..21: mol_type = other DNA; mol_type = other DNA
ataagtagcacaaatggtgtc

SEQ ID NO: 24174 - DNA, 21 bp, synthetic construct
  source 1..21: mol_type = other DNA; mol_type = other DNA
gacatgatgagccacaagtgg

SEQ ID NO: 24175 - DNA, 21 bp, synthetic construct
  source 1..21: mol_type = other DNA; mol_type = other DNA
tatgctaaaacaggggaaaac

SEQ ID NO: 24176 - DNA, 21 bp, synthetic construct
  source 1..21: mol_type = other DNA; mol_type = other DNA
tactctaaggccggacaaaac

SEQ ID NO: 24177 - DNA, 21 bp, synthetic construct
  source 1..21: mol_type = other DNA; mol_type = other DNA
tactccaaaattggatacaat

SEQ ID NO: 24178 - DNA, 21 bp, synthetic construct
  source 1..21: mol_type = other DNA; mol_type = other DNA
cacaactcaacgaatggtgta

SEQ ID NO: 24179 - DNA, 21 bp, synthetic construct
  source 1..21: mol_type = other DNA; mol_type = other DNA
taccatgcgctgaatatcgat

SEQ ID NO: 24180 - DNA, 21 bp, synthetic construct
  source 1..21: mol_type = other DNA; mol_type = other DNA
ctatcaaaacttggtttcaac

SEQ ID NO: 24181 - DNA, 21 bp, synthetic construct
  source 1..21: mol_type = other DNA; mol_type = other DNA
tacttctcaggggttaaggcc

SEQ ID NO: 24182 - DNA, 21 bp, synthetic construct
  source 1..21: mol_type = other DNA; mol_type = other DNA
accgcgtcaacgaacggcatt

SEQ ID NO: 24183 - DNA, 21 bp, synthetic construct
  source 1..21: mol_type = other DNA; mol_type = other DNA
cagatggaaagccgtatgtgg

SEQ ID NO: 24184 - DNA, 21 bp, synthetic construct
  source 1..21: mol_type = other DNA; mol_type = other DNA
tattctaaaatgaacttcaat

SEQ ID NO: 24185 - DNA, 21 bp, synthetic construct
  source 1..21: mol_type = other DNA; mol_type = other DNA
tactgggcggggataaaggac

SEQ ID NO: 24186 - DNA, 21 bp, synthetic construct
  source 1..21: mol_type = other DNA; mol_type = other DNA
cgtgacatggatgtatatcca

SEQ ID NO: 24187 - DNA, 21 bp, synthetic construct
  source 1..21: mol_type = other DNA; mol_type = other DNA
ctacacaggctcagtagcgat

SEQ ID NO: 24188 - DNA, 21 bp, synthetic construct
  source 1..21: mol_type = other DNA; mol_type = other DNA
tatgtcaaatcgcaacagtgt

SEQ ID NO: 24189 - DNA, 21 bp, synthetic construct
  source 1..21: mol_type = other DNA; mol_type = other DNA
ttgtgccgcccttgctcccag

SEQ ID NO: 24190 - DNA, 21 bp, synthetic construct
  source 1..21: mol_type = other DNA; mol_type = other DNA
cgttcagaattcgaaacattt

SEQ ID NO: 24191 - DNA, 21 bp, synthetic construct
  source 1..21: mol_type = other DNA; mol_type = other DNA
gaacatgcgactagcaattgg

SEQ ID NO: 24192 - DNA, 21 bp, synthetic construct
  source 1..21: mol_type = other DNA; mol_type = other DNA
tactttaccggacactgggag

SEQ ID NO: 24193 - DNA, 21 bp, synthetic construct
  source 1..21: mol_type = other DNA; mol_type = other DNA
tacttttcgggtattcctgcc

SEQ ID NO: 24194 - DNA, 21 bp, synthetic construct
  source 1..21: mol_type = other DNA; mol_type = other DNA
acattgagcacaaatgggagg

SEQ ID NO: 24195 - DNA, 21 bp, synthetic construct
  source 1..21: mol_type = other DNA; mol_type = other DNA
tacttcagtgggattcccgaa

SEQ ID NO: 24196 - DNA, 21 bp, synthetic construct
  source 1..21: mol_type = other DNA; mol_type = other DNA
cgtgacgggatgtctgcgtgg

SEQ ID NO: 24197 - DNA, 21 bp, synthetic construct
  source 1..21: mol_type = other DNA; mol_type = other DNA
attgcagaccacgttagatgg

SEQ ID NO: 24198 - DNA, 21 bp, synthetic construct
  source 1..21: mol_type = other DNA; mol_type = other DNA
tacgtgcggagcgatctcatg

SEQ ID NO: 24199 - DNA, 21 bp, synthetic construct
  source 1..21: mol_type = other DNA; mol_type = other DNA
cgcgacgatcatgtttaccct

SEQ ID NO: 24200 - DNA, 21 bp, synthetic construct
  source 1..21: mol_type = other DNA; mol_type = other DNA
caacccgaaagccgctcgtgg

SEQ ID NO: 24201 - DNA, 21 bp, synthetic construct
  source 1..21: mol_type = other DNA; mol_type = other DNA
cgtgaagagtatgtaacatat

SEQ ID NO: 24202 - DNA, 21 bp, synthetic construct
  source 1..21: mol_type = other DNA; mol_type = other DNA
gtggatgagtacttgtcgtgg

SEQ ID NO: 24203 - DNA, 21 bp, synthetic construct
  source 1..21: mol_type = other DNA; mol_type = other DNA
tatttcacgggcatgatagaa

SEQ ID NO: 24204 - DNA, 21 bp, synthetic construct
  source 1..21: mol_type = other DNA; mol_type = other DNA
gatctaaccagcagagaatgg

SEQ ID NO: 24205 - DNA, 21 bp, synthetic construct
  source 1..21: mol_type = other DNA; mol_type = other DNA
aggagcgaatttacgacatac

SEQ ID NO: 24206 - DNA, 21 bp, synthetic construct
  source 1..21: mol_type = other DNA; mol_type = other DNA
ttacatcgattatcctctgac

SEQ ID NO: 24207 - DNA, 21 bp, synthetic construct
  source 1..21: mol_type = other DNA; mol_type = other DNA
tacttcagtggggtgaaaatg

SEQ ID NO: 24208 - DNA, 21 bp, synthetic construct
  source 1..21: mol_type = other DNA; mol_type = other DNA
gacctggagtcgagttattgg

SEQ ID NO: 24209 - DNA, 21 bp, synthetic construct
  source 1..21: mol_type = other DNA; mol_type = other DNA
aaagatgacttctcaccgtgg

SEQ ID NO: 24210 - DNA, 21 bp, synthetic construct
  source 1..21: mol_type = other DNA; mol_type = other DNA
tattttacaggcaagcctaat

SEQ ID NO: 24211 - DNA, 21 bp, synthetic construct
  source 1..21: mol_type = other DNA; mol_type = other DNA
tatgcaaagttcggcccgaat

SEQ ID NO: 24212 - DNA, 21 bp, synthetic construct
  source 1..21: mol_type = other DNA; mol_type = other DNA
atacagtcaactaacggacgc

SEQ ID NO: 24213 - DNA, 21 bp, synthetic construct
  source 1..21: mol_type = other DNA; mol_type = other DNA
tatgcccgcggtggtcccaat

SEQ ID NO: 24214 - DNA, 21 bp, synthetic construct
  source 1..21: mol_type = other DNA; mol_type = other DNA
gatccaagctcgcactcttgg

SEQ ID NO: 24215 - DNA, 21 bp, synthetic construct
  source 1..21: mol_type = other DNA; mol_type = other DNA
tacagtaagagtggtatgaat

SEQ ID NO: 24216 - DNA, 21 bp, synthetic construct
  source 1..21: mol_type = other DNA; mol_type = other DNA
agaggcgatgatcattatcca

SEQ ID NO: 24217 - DNA, 21 bp, synthetic construct
  source 1..21: mol_type = other DNA; mol_type = other DNA
ataatgaccgatagaatatgg

SEQ ID NO: 24218 - DNA, 21 bp, synthetic construct
  source 1..21: mol_type = other DNA; mol_type = other DNA
tattttagtggcatacatgct

SEQ ID NO: 24219 - DNA, 21 bp, synthetic construct
  source 1..21: mol_type = other DNA; mol_type = other DNA
cgcgaagaaacggtctattgg

SEQ ID NO: 24220 - DNA, 21 bp, synthetic construct
  source 1..21: mol_type = other DNA; mol_type = other DNA
gatatgtcttccaggatttgg

SEQ ID NO: 24221 - DNA, 21 bp, synthetic construct
  source 1..21: mol_type = other DNA; mol_type = other DNA
tatagccgcactggtccgaac

SEQ ID NO: 24222 - DNA, 21 bp, synthetic construct
  source 1..21: mol_type = other DNA; mol_type = other DNA
ttgcatcgactgagcgttgac

SEQ ID NO: 24223 - DNA, 21 bp, synthetic construct
  source 1..21: mol_type = other DNA; mol_type = other DNA
aggggggacgatcactaccca

SEQ ID NO: 24224 - DNA, 21 bp, synthetic construct
  source 1..21: mol_type = other DNA; mol_type = other DNA
tacctgaaaagtcaggccatg

SEQ ID NO: 24225 - DNA, 21 bp, synthetic construct
  source 1..21: mol_type = other DNA; mol_type = other DNA
gatgatggagtgtcacgctgg

SEQ ID NO: 24226 - DNA, 21 bp, synthetic construct
  source 1..21: mol_type = other DNA; mol_type = other DNA
tattctaaaaccggcacaaac

SEQ ID NO: 24227 - DNA, 21 bp, synthetic construct
  source 1..21: mol_type = other DNA; mol_type = other DNA
tactccagattgaaccccgac

SEQ ID NO: 24228 - DNA, 21 bp, synthetic construct
  source 1..21: mol_type = other DNA; mol_type = other DNA
cgggaggaaaccgtttttccg

SEQ ID NO: 24229 - DNA, 21 bp, synthetic construct
  source 1..21: mol_type = other DNA; mol_type = other DNA
acagctagtacaaatggtatc

SEQ ID NO: 24230 - DNA, 21 bp, synthetic construct
  source 1..21: mol_type = other DNA; mol_type = other DNA
gttgattccaccaacgggcgt

SEQ ID NO: 24231 - DNA, 21 bp, synthetic construct
  source 1..21: mol_type = other DNA; mol_type = other DNA
tacacaaggctggattacaac

SEQ ID NO: 24232 - DNA, 21 bp, synthetic construct
  source 1..21: mol_type = other DNA; mol_type = other DNA
tactttagtggagttaaaatg

SEQ ID NO: 24233 - DNA, 21 bp, synthetic construct
  source 1..21: mol_type = other DNA; mol_type = other DNA
aaggacgaatggagtgtttac

SEQ ID NO: 24234 - DNA, 21 bp, synthetic construct
  source 1..21: mol_type = other DNA; mol_type = other DNA
cgaagtgaatttgaaaccttc

SEQ ID NO: 24235 - DNA, 21 bp, synthetic construct
  source 1..21: mol_type = other DNA; mol_type = other DNA
tacttcacgggagtacagctc

SEQ ID NO: 24236 - DNA, 21 bp, synthetic construct
  source 1..21: mol_type = other DNA; mol_type = other DNA
tactccaagagcgggcataac

SEQ ID NO: 24237 - DNA, 21 bp, synthetic construct
  source 1..21: mol_type = other DNA; mol_type = other DNA
agggaagactacgtcaagtgg

SEQ ID NO: 24238 - DNA, 21 bp, synthetic construct
  source 1..21: mol_type = other DNA; mol_type = other DNA
gtgatggctgacagaaaatgg

SEQ ID NO: 24239 - DNA, 21 bp, synthetic construct
  source 1..21: mol_type = other DNA; mol_type = other DNA
tatagcaagatgaatccgaat

SEQ ID NO: 24240 - DNA, 21 bp, synthetic construct
  source 1..21: mol_type = other DNA; mol_type = other DNA
tacagccgattaaatgaagac

SEQ ID NO: 24241 - DNA, 21 bp, synthetic construct
  source 1..21: mol_type = other DNA; mol_type = other DNA
tggagcacgcactgttgtgcg

SEQ ID NO: 24242 - DNA, 21 bp, synthetic construct
  source 1..21: mol_type = other DNA; mol_type = other DNA
ctctgtaaaccttgtctggtg

SEQ ID NO: 24243 - DNA, 21 bp, synthetic construct
  source 1..21: mol_type = other DNA; mol_type = other DNA
gtcatggagtctcgtaagtgg

SEQ ID NO: 24244 - DNA, 21 bp, synthetic construct
  source 1..21: mol_type = other DNA; mol_type = other DNA
gtaatggccgatcggatctgg

SEQ ID NO: 24245 - DNA, 21 bp, synthetic construct
  source 1..21: mol_type = other DNA; mol_type = other DNA
agattggcggatgcgtatccg

SEQ ID NO: 24246 - DNA, 21 bp, synthetic construct
  source 1..21: mol_type = other DNA; mol_type = other DNA
taccatcgtttgctacctgac

SEQ ID NO: 24247 - DNA, 21 bp, synthetic construct
  source 1..21: mol_type = other DNA; mol_type = other DNA
cgcgacgagacttccagttgg

SEQ ID NO: 24248 - DNA, 21 bp, synthetic construct
  source 1..21: mol_type = other DNA; mol_type = other DNA
aaagatgattttagtgggtgg

SEQ ID NO: 24249 - DNA, 21 bp, synthetic construct
  source 1..21: mol_type = other DNA; mol_type = other DNA
tggtggagcggcatacacgag

SEQ ID NO: 24250 - DNA, 21 bp, synthetic construct
  source 1..21: mol_type = other DNA; mol_type = other DNA
ccgatggccagccaacagtgg

SEQ ID NO: 24251 - DNA, 21 bp, synthetic construct
  source 1..21: mol_type = other DNA; mol_type = other DNA
gttgagtcatctaacgggaga

SEQ ID NO: 24252 - DNA, 21 bp, synthetic construct
  source 1..21: mol_type = other DNA; mol_type = other DNA
tatttctctggccaaatcgag

SEQ ID NO: 24253 - DNA, 21 bp, synthetic construct
  source 1..21: mol_type = other DNA; mol_type = other DNA
tattttactggaaagcatgac

SEQ ID NO: 24254 - DNA, 21 bp, synthetic construct
  source 1..21: mol_type = other DNA; mol_type = other DNA
accgacgaattccatgcctat

SEQ ID NO: 24255 - DNA, 21 bp, synthetic construct
  source 1..21: mol_type = other DNA; mol_type = other DNA
tatcacgctaagagcctcaat

SEQ ID NO: 24256 - DNA, 21 bp, synthetic construct
  source 1..21: mol_type = other DNA; mol_type = other DNA
tatctgaaatctcaaacttcg

SEQ ID NO: 24257 - DNA, 21 bp, synthetic construct
  source 1..21: mol_type = other DNA; mol_type = other DNA
ttgtcgaaagtcggtcaaaac

SEQ ID NO: 24258 - DNA, 21 bp, synthetic construct
  source 1..21: mol_type = other DNA; mol_type = other DNA
ataatggctgacagaggctgg

SEQ ID NO: 24259 - DNA, 21 bp, synthetic construct
  source 1..21: mol_type = other DNA; mol_type = other DNA
tattctaaactgtccgataga

SEQ ID NO: 24260 - DNA, 21 bp, synthetic construct
  source 1..21: mol_type = other DNA; mol_type = other DNA
ctaagcaaaataggaatgaac

SEQ ID NO: 24261 - DNA, 21 bp, synthetic construct
  source 1..21: mol_type = other DNA; mol_type = other DNA
atgctatgtgtggcaggcgac

SEQ ID NO: 24262 - DNA, 21 bp, synthetic construct
  source 1..21: mol_type = other DNA; mol_type = other DNA
aaagacgattactctacgtgg

SEQ ID NO: 24263 - DNA, 21 bp, synthetic construct
  source 1..21: mol_type = other DNA; mol_type = other DNA
tatgtaaagagtcaagttagt

SEQ ID NO: 24264 - DNA, 21 bp, synthetic construct
  source 1..21: mol_type = other DNA; mol_type = other DNA
tattttagcggagtaacggaa

SEQ ID NO: 24265 - DNA, 21 bp, synthetic construct
  source 1..21: mol_type = other DNA; mol_type = other DNA
gaaatggaaagtagtatctgg

SEQ ID NO: 24266 - DNA, 21 bp, synthetic construct
  source 1..21: mol_type = other DNA; mol_type = other DNA
ttgcatcggttgagcgaccat

SEQ ID NO: 24267 - DNA, 21 bp, synthetic construct
  source 1..21: mol_type = other DNA; mol_type = other DNA
cgctcggactttgaatacttt

SEQ ID NO: 24268 - DNA, 21 bp, synthetic construct
  source 1..21: mol_type = other DNA; mol_type = other DNA
atgcaccggctgttgagcgat

SEQ ID NO: 24269 - DNA, 21 bp, synthetic construct
  source 1..21: mol_type = other DNA; mol_type = other DNA
ggcgacgagtatcattcctat

SEQ ID NO: 24270 - DNA, 21 bp, synthetic construct
  source 1..21: mol_type = other DNA; mol_type = other DNA
atgcacagactcagtttcgac

SEQ ID NO: 24271 - DNA, 21 bp, synthetic construct
  source 1..21: mol_type = other DNA; mol_type = other DNA
atgcatcgtctctcggtcgac

SEQ ID NO: 24272 - DNA, 21 bp, synthetic construct
  source 1..21: mol_type = other DNA; mol_type = other DNA
tctcactcaacgaatgggagg

SEQ ID NO: 24273 - DNA, 21 bp, synthetic construct
  source 1..21: mol_type = other DNA; mol_type = other DNA
tatttctcgggcattcacgca

SEQ ID NO: 24274 - DNA, 21 bp, synthetic construct
  source 1..21: mol_type = other DNA; mol_type = other DNA
ctcgctaaacagggtcctaat

SEQ ID NO: 24275 - DNA, 21 bp, synthetic construct
  source 1..21: mol_type = other DNA; mol_type = other DNA
ctacacagaatgagtcctgat

SEQ ID NO: 24276 - DNA, 21 bp, synthetic construct
  source 1..21: mol_type = other DNA; mol_type = other DNA
ttctttactggccaagtggat

SEQ ID NO: 24277 - DNA, 21 bp, synthetic construct
  source 1..21: mol_type = other DNA; mol_type = other DNA
tatgtgaggtcagatatgcta

SEQ ID NO: 24278 - DNA, 21 bp, synthetic construct
  source 1..21: mol_type = other DNA; mol_type = other DNA
gttcttgcatcagtgacctgg

SEQ ID NO: 24279 - DNA, 21 bp, synthetic construct
  source 1..21: mol_type = other DNA; mol_type = other DNA
tacagtaaagccggctgcaat

SEQ ID NO: 24280 - DNA, 21 bp, synthetic construct
  source 1..21: mol_type = other DNA; mol_type = other DNA
gaaatggagagcagagtttgg

SEQ ID NO: 24281 - DNA, 21 bp, synthetic construct
  source 1..21: mol_type = other DNA; mol_type = other DNA
tactcagcctcgggtcccaat

SEQ ID NO: 24282 - DNA, 21 bp, synthetic construct
  source 1..21: mol_type = other DNA; mol_type = other DNA
tactggtccggtgtccaagaa

SEQ ID NO: 24283 - DNA, 21 bp, synthetic construct
  source 1..21: mol_type = other DNA; mol_type = other DNA
atcacatcaacaaacggtgta

SEQ ID NO: 24284 - DNA, 21 bp, synthetic construct
  source 1..21: mol_type = other DNA; mol_type = other DNA
cttcaccgtcttagtccgggc

SEQ ID NO: 24285 - DNA, 21 bp, synthetic construct
  source 1..21: mol_type = other DNA; mol_type = other DNA
aaggacgactatacagggttt

SEQ ID NO: 24286 - DNA, 21 bp, synthetic construct
  source 1..21: mol_type = other DNA; mol_type = other DNA
tactttaccgggaaggcagac

SEQ ID NO: 24287 - DNA, 21 bp, synthetic construct
  source 1..21: mol_type = other DNA; mol_type = other DNA
cgttcagaatttttgagttat

SEQ ID NO: 24288 - DNA, 21 bp, synthetic construct
  source 1..21: mol_type = other DNA; mol_type = other DNA
tactttagcggtgtcaccgaa

SEQ ID NO: 24289 - DNA, 21 bp, synthetic construct
  source 1..21: mol_type = other DNA; mol_type = other DNA
gtgatgtctcaagctacttgg

SEQ ID NO: 24290 - DNA, 21 bp, synthetic construct
  source 1..21: mol_type = other DNA; mol_type = other DNA
tatctaaagagccaagcttat

SEQ ID NO: 24291 - DNA, 21 bp, synthetic construct
  source 1..21: mol_type = other DNA; mol_type = other DNA
gacatggaaagcagggtatgg

SEQ ID NO: 24292 - DNA, 21 bp, synthetic construct
  source 1..21: mol_type = other DNA; mol_type = other DNA
gacttgcgaatggcaacatgg

SEQ ID NO: 24293 - DNA, 21 bp, synthetic construct
  source 1..21: mol_type = other DNA; mol_type = other DNA
catgagtctacaaacggcgtt

SEQ ID NO: 24294 - DNA, 21 bp, synthetic construct
  source 1..21: mol_type = other DNA; mol_type = other DNA
ttttttactggacagatcgaa

SEQ ID NO: 24295 - DNA, 21 bp, synthetic construct
  source 1..21: mol_type = other DNA; mol_type = other DNA
caggatgggacctcggcctgg

SEQ ID NO: 24296 - DNA, 21 bp, synthetic construct
  source 1..21: mol_type = other DNA; mol_type = other DNA
actgatgaattcagtacctgg

SEQ ID NO: 24297 - DNA, 21 bp, synthetic construct
  source 1..21: mol_type = other DNA; mol_type = other DNA
tattggtcgggagtgctcgac

SEQ ID NO: 24298 - DNA, 21 bp, synthetic construct
  source 1..21: mol_type = other DNA; mol_type = other DNA
cttagtcggttaggtgaaaac

SEQ ID NO: 24299 - DNA, 21 bp, synthetic construct
  source 1..21: mol_type = other DNA; mol_type = other DNA
tattggtcaggtgtgaaggag

SEQ ID NO: 24300 - DNA, 21 bp, synthetic construct
  source 1..21: mol_type = other DNA; mol_type = other DNA
tacttcactggtaaacacgaa

SEQ ID NO: 24301 - DNA, 21 bp, synthetic construct
  source 1..21: mol_type = other DNA; mol_type = other DNA
tatcataggctacagatcgac

SEQ ID NO: 24302 - DNA, 21 bp, synthetic construct
  source 1..21: mol_type = other DNA; mol_type = other DNA
agagatatggaggtgtaccca

SEQ ID NO: 24303 - DNA, 21 bp, synthetic construct
  source 1..21: mol_type = other DNA; mol_type = other DNA
tactttactggacagttggat

SEQ ID NO: 24304 - DNA, 21 bp, synthetic construct
  source 1..21: mol_type = other DNA; mol_type = other DNA
tactggtccggcatccttgag

SEQ ID NO: 24305 - DNA, 21 bp, synthetic construct
  source 1..21: mol_type = other DNA; mol_type = other DNA
aagtcggactatgtcacatat

SEQ ID NO: 24306 - DNA, 21 bp, synthetic construct
  source 1..21: mol_type = other DNA; mol_type = other DNA
tattggtccgggatccccatg

SEQ ID NO: 24307 - DNA, 21 bp, synthetic construct
  source 1..21: mol_type = other DNA; mol_type = other DNA
tatgtgcgaagtggtccgagt

SEQ ID NO: 24308 - DNA, 21 bp, synthetic construct
  source 1..21: mol_type = other DNA; mol_type = other DNA
gacttaggttcatcaacgtgg

SEQ ID NO: 24309 - DNA, 21 bp, synthetic construct
  source 1..21: mol_type = other DNA; mol_type = other DNA
gtcatggggtctagtaactgg

SEQ ID NO: 24310 - DNA, 21 bp, synthetic construct
  source 1..21: mol_type = other DNA; mol_type = other DNA
gtatggtctacgaacgggatt

SEQ ID NO: 24311 - DNA, 21 bp, synthetic construct
  source 1..21: mol_type = other DNA; mol_type = other DNA
tacgcaaaaacgggatcgaat

SEQ ID NO: 24312 - DNA, 21 bp, synthetic construct
  source 1..21: mol_type = other DNA; mol_type = other DNA
aattacgcaaaaagcttggag

SEQ ID NO: 24313 - DNA, 21 bp, synthetic construct
  source 1..21: mol_type = other DNA; mol_type = other DNA
tcacactcaacgaacggggtt

SEQ ID NO: 24314 - DNA, 21 bp, synthetic construct
  source 1..21: mol_type = other DNA; mol_type = other DNA
tatttcaccggaagttgggat

SEQ ID NO: 24315 - DNA, 21 bp, synthetic construct
  source 1..21: mol_type = other DNA; mol_type = other DNA
tactggagtggcgtgacggaa

SEQ ID NO: 24316 - DNA, 21 bp, synthetic construct
  source 1..21: mol_type = other DNA; mol_type = other DNA
agtctcgagtccaggaaatgg

SEQ ID NO: 24317 - DNA, 21 bp, synthetic construct
  source 1..21: mol_type = other DNA; mol_type = other DNA
tatcacaggcttttgccggat

SEQ ID NO: 24318 - DNA, 21 bp, synthetic construct
  source 1..21: mol_type = other DNA; mol_type = other DNA
tatagcaaggcgaattacaat

SEQ ID NO: 24319 - DNA, 21 bp, synthetic construct
  source 1..21: mol_type = other DNA; mol_type = other DNA
aaagacgaatttaggagctat

SEQ ID NO: 24320 - DNA, 21 bp, synthetic construct
  source 1..21: mol_type = other DNA; mol_type = other DNA
gacatggcttcgacgaattgg

SEQ ID NO: 24321 - DNA, 21 bp, synthetic construct
  source 1..21: mol_type = other DNA; mol_type = other DNA
gtaatgaccgcacgagattgg

SEQ ID NO: 24322 - DNA, 21 bp, synthetic construct
  source 1..21: mol_type = other DNA; mol_type = other DNA
acgacttccactaacgggatt

SEQ ID NO: 24323 - DNA, 21 bp, synthetic construct
  source 1..21: mol_type = other DNA; mol_type = other DNA
aaggacgattatagtacgtac

SEQ ID NO: 24324 - DNA, 21 bp, synthetic construct
  source 1..21: mol_type = other DNA; mol_type = other DNA
tacagcaggttgcagcctgac

SEQ ID NO: 24325 - DNA, 21 bp, synthetic construct
  source 1..21: mol_type = other DNA; mol_type = other DNA
gctgggggtggcttatttata

SEQ ID NO: 24326 - DNA, 21 bp, synthetic construct
  source 1..21: mol_type = other DNA; mol_type = other DNA
tatttgaaaagccaaatctac

SEQ ID NO: 24327 - DNA, 21 bp, synthetic construct
  source 1..21: mol_type = other DNA; mol_type = other DNA
aatatgagctccagctcgtgg

SEQ ID NO: 24328 - DNA, 21 bp, synthetic construct
  source 1..21: mol_type = other DNA; mol_type = other DNA
cgtatggagtctagcgtatgg

SEQ ID NO: 24329 - DNA, 21 bp, synthetic construct
  source 1..21: mol_type = other DNA; mol_type = other DNA
atagatggaaggggatgggat

SEQ ID NO: 24330 - DNA, 21 bp, synthetic construct
  source 1..21: mol_type = other DNA; mol_type = other DNA
agaatggagagtagccagtgg

SEQ ID NO: 24331 - DNA, 21 bp, synthetic construct
  source 1..21: mol_type = other DNA; mol_type = other DNA
ggcagtccgggagtaggctgg

SEQ ID NO: 24332 - DNA, 21 bp, synthetic construct
  source 1..21: mol_type = other DNA; mol_type = other DNA
agggaagacttcgtcaggtgg

SEQ ID NO: 24333 - DNA, 21 bp, synthetic construct
  source 1..21: mol_type = other DNA; mol_type = other DNA
attcaatctactaatggtata

SEQ ID NO: 24334 - DNA, 21 bp, synthetic construct
  source 1..21: mol_type = other DNA; mol_type = other DNA
gggtcccccggagtccattgg

SEQ ID NO: 24335 - DNA, 21 bp, synthetic construct
  source 1..21: mol_type = other DNA; mol_type = other DNA
aggatgggcgacgcctatcca

SEQ ID NO: 24336 - DNA, 21 bp, synthetic construct
  source 1..21: mol_type = other DNA; mol_type = other DNA
tatacgcgcctgagccccgac

SEQ ID NO: 24337 - DNA, 21 bp, synthetic construct
  source 1..21: mol_type = other DNA; mol_type = other DNA
gacatggaaagtcacaagtgg

SEQ ID NO: 24338 - DNA, 21 bp, synthetic construct
  source 1..21: mol_type = other DNA; mol_type = other DNA
tacgtacgctcggacctgggt

SEQ ID NO: 24339 - DNA, 21 bp, synthetic construct
  source 1..21: mol_type = other DNA; mol_type = other DNA
tactttagcaagattagggag

SEQ ID NO: 24340 - DNA, 21 bp, synthetic construct
  source 1..21: mol_type = other DNA; mol_type = other DNA
attttgtccgacaggagttgg

SEQ ID NO: 24341 - DNA, 21 bp, synthetic construct
  source 1..21: mol_type = other DNA; mol_type = other DNA
aaagatgattatcacagttat

SEQ ID NO: 24342 - DNA, 21 bp, synthetic construct
  source 1..21: mol_type = other DNA; mol_type = other DNA
tacgtgaggtctgacgttaaa

SEQ ID NO: 24343 - DNA, 21 bp, synthetic construct
  source 1..21: mol_type = other DNA; mol_type = other DNA
tatctgaaatcgcagagccat

SEQ ID NO: 24344 - DNA, 21 bp, synthetic construct
  source 1..21: mol_type = other DNA; mol_type = other DNA
atcatgtcgtctaggtcctgg

SEQ ID NO: 24345 - DNA, 21 bp, synthetic construct
  source 1..21: mol_type = other DNA; mol_type = other DNA
aatagtactcactgttgtgca

SEQ ID NO: 24346 - DNA, 21 bp, synthetic construct
  source 1..21: mol_type = other DNA; mol_type = other DNA
ttgtgtcggccatgttccgat

SEQ ID NO: 24347 - DNA, 21 bp, synthetic construct
  source 1..21: mol_type = other DNA; mol_type = other DNA
tattttacgggagttagagac

SEQ ID NO: 24348 - DNA, 21 bp, synthetic construct
  source 1..21: mol_type = other DNA; mol_type = other DNA
actcgcagtacgaacggggtc

SEQ ID NO: 24349 - DNA, 21 bp, synthetic construct
  source 1..21: mol_type = other DNA; mol_type = other DNA
tacctgaaaagtgaacgtaac

SEQ ID NO: 24350 - DNA, 21 bp, synthetic construct
  source 1..21: mol_type = other DNA; mol_type = other DNA
ttttcaagaattggaccaaac

SEQ ID NO: 24351 - DNA, 21 bp, synthetic construct
  source 1..21: mol_type = other DNA; mol_type = other DNA
tattctaaactctcaacgaac

SEQ ID NO: 24352 - DNA, 21 bp, synthetic construct
  source 1..21: mol_type = other DNA; mol_type = other DNA
aaggacgactttgtaagctac

SEQ ID NO: 24353 - DNA, 21 bp, synthetic construct
  source 1..21: mol_type = other DNA; mol_type = other DNA
cacagtcgggttggccacaac

SEQ ID NO: 24354 - DNA, 21 bp, synthetic construct
  source 1..21: mol_type = other DNA; mol_type = other DNA
cattgtaaaccgtgcttaacg

SEQ ID NO: 24355 - DNA, 21 bp, synthetic construct
  source 1..21: mol_type = other DNA; mol_type = other DNA
gtcgaaagttctcgactctgg

SEQ ID NO: 24356 - DNA, 21 bp, synthetic construct
  source 1..21: mol_type = other DNA; mol_type = other DNA
tattggagtggcatacaggac

SEQ ID NO: 24357 - DNA, 21 bp, synthetic construct
  source 1..21: mol_type = other DNA; mol_type = other DNA
ctctcgaggcagggtccgaac

SEQ ID NO: 24358 - DNA, 21 bp, synthetic construct
  source 1..21: mol_type = other DNA; mol_type = other DNA
ttggcaagagccggatacaat

SEQ ID NO: 24359 - DNA, 21 bp, synthetic construct
  source 1..21: mol_type = other DNA; mol_type = other DNA
tattttactggcgtgcatcag

SEQ ID NO: 24360 - DNA, 21 bp, synthetic construct
  source 1..21: mol_type = other DNA; mol_type = other DNA
tactttacagggagaatggac

SEQ ID NO: 24361 - DNA, 21 bp, synthetic construct
  source 1..21: mol_type = other DNA; mol_type = other DNA
gatatgggcagtagctcgtgg

SEQ ID NO: 24362 - DNA, 21 bp, synthetic construct
  source 1..21: mol_type = other DNA; mol_type = other DNA
gccccagactcggtccgttgg

SEQ ID NO: 24363 - DNA, 21 bp, synthetic construct
  source 1..21: mol_type = other DNA; mol_type = other DNA
catagtaggataggcccgaat

SEQ ID NO: 24364 - DNA, 21 bp, synthetic construct
  source 1..21: mol_type = other DNA; mol_type = other DNA
tacgtcaggtcaggaccatcc

SEQ ID NO: 24365 - DNA, 21 bp, synthetic construct
  source 1..21: mol_type = other DNA; mol_type = other DNA
tatagcaggttggccccggac

SEQ ID NO: 24366 - DNA, 21 bp, synthetic construct
  source 1..21: mol_type = other DNA; mol_type = other DNA
cgtgagccccatgtctcatgg

SEQ ID NO: 24367 - DNA, 21 bp, synthetic construct
  source 1..21: mol_type = other DNA; mol_type = other DNA
agagatgagttcacagtctat

SEQ ID NO: 24368 - DNA, 21 bp, synthetic construct
  source 1..21: mol_type = other DNA; mol_type = other DNA
agggaggaagaggtatatccc

SEQ ID NO: 24369 - DNA, 21 bp, synthetic construct
  source 1..21: mol_type = other DNA; mol_type = other DNA
ttactaagtgaccgaacctgg

SEQ ID NO: 24370 - DNA, 21 bp, synthetic construct
  source 1..21: mol_type = other DNA; mol_type = other DNA
tactttacgggtgtagctgat

SEQ ID NO: 24371 - DNA, 21 bp, synthetic construct
  source 1..21: mol_type = other DNA; mol_type = other DNA
tatctgaaatcgcagatgtat

SEQ ID NO: 24372 - DNA, 21 bp, synthetic construct
  source 1..21: mol_type = other DNA; mol_type = other DNA
atgcaccgtctttctgctgat

SEQ ID NO: 24373 - DNA, 21 bp, synthetic construct
  source 1..21: mol_type = other DNA; mol_type = other DNA
tatttctctggaatacaatcg

SEQ ID NO: 24374 - DNA, 21 bp, synthetic construct
  source 1..21: mol_type = other DNA; mol_type = other DNA
cgaacaagtaccgtctatccg

SEQ ID NO: 24375 - DNA, 21 bp, synthetic construct
  source 1..21: mol_type = other DNA; mol_type = other DNA
cccatgatgagcgggacttgg

SEQ ID NO: 24376 - DNA, 21 bp, synthetic construct
  source 1..21: mol_type = other DNA; mol_type = other DNA
agcgatggcgtatcacgctgg

SEQ ID NO: 24377 - DNA, 21 bp, synthetic construct
  source 1..21: mol_type = other DNA; mol_type = other DNA
ttatgtcgaccgtgcgtagag

SEQ ID NO: 24378 - DNA, 21 bp, synthetic construct
  source 1..21: mol_type = other DNA; mol_type = other DNA
ttgtcgaagatcggtataaac

SEQ ID NO: 24379 - DNA, 21 bp, synthetic construct
  source 1..21: mol_type = other DNA; mol_type = other DNA
actgactcaacaaatggtatt

SEQ ID NO: 24380 - DNA, 21 bp, synthetic construct
  source 1..21: mol_type = other DNA; mol_type = other DNA
tacttcaccggtcaccctgac

SEQ ID NO: 24381 - DNA, 21 bp, synthetic construct
  source 1..21: mol_type = other DNA; mol_type = other DNA
tactttacaggacagatccaa

SEQ ID NO: 24382 - DNA, 21 bp, synthetic construct
  source 1..21: mol_type = other DNA; mol_type = other DNA
tatttttcgggcgtcattgga

SEQ ID NO: 24383 - DNA, 21 bp, synthetic construct
  source 1..21: mol_type = other DNA; mol_type = other DNA
tatgcgaaagttggaccgaac

SEQ ID NO: 24384 - DNA, 21 bp, synthetic construct
  source 1..21: mol_type = other DNA; mol_type = other DNA
tactttaccgggatgattgag

SEQ ID NO: 24385 - DNA, 21 bp, synthetic construct
  source 1..21: mol_type = other DNA; mol_type = other DNA
tattttactgggatcccggaa

SEQ ID NO: 24386 - DNA, 21 bp, synthetic construct
  source 1..21: mol_type = other DNA; mol_type = other DNA
agactcgaaagctccgcttgg

SEQ ID NO: 24387 - DNA, 21 bp, synthetic construct
  source 1..21: mol_type = other DNA; mol_type = other DNA
cgtgaccccaccgttttcccg

SEQ ID NO: 24388 - DNA, 21 bp, synthetic construct
  source 1..21: mol_type = other DNA; mol_type = other DNA
caaatggcttcgagagattgg

SEQ ID NO: 24389 - DNA, 21 bp, synthetic construct
  source 1..21: mol_type = other DNA; mol_type = other DNA
tacagtaaggcaggcatcaat

SEQ ID NO: 24390 - DNA, 21 bp, synthetic construct
  source 1..21: mol_type = other DNA; mol_type = other DNA
tatagtaaacgcaatgaaaat

SEQ ID NO: 24391 - DNA, 21 bp, synthetic construct
  source 1..21: mol_type = other DNA; mol_type = other DNA
catgcctccactaatggggtg

SEQ ID NO: 24392 - DNA, 21 bp, synthetic construct
  source 1..21: mol_type = other DNA; mol_type = other DNA
tacgtccgcagcgacatgttg

SEQ ID NO: 24393 - DNA, 21 bp, synthetic construct
  source 1..21: mol_type = other DNA; mol_type = other DNA
tatttgaagtcgcaagcgatg

SEQ ID NO: 24394 - DNA, 21 bp, synthetic construct
  source 1..21: mol_type = other DNA; mol_type = other DNA
ctcgcaaagggtggattcaac

SEQ ID NO: 24395 - DNA, 21 bp, synthetic construct
  source 1..21: mol_type = other DNA; mol_type = other DNA
tatagcaagcagaacataaat

SEQ ID NO: 24396 - DNA, 21 bp, synthetic construct
  source 1..21: mol_type = other DNA; mol_type = other DNA
tacgttcgctcaggtccgcta

SEQ ID NO: 24397 - DNA, 21 bp, synthetic construct
  source 1..21: mol_type = other DNA; mol_type = other DNA
tattttaccggcttcatggat

SEQ ID NO: 24398 - DNA, 21 bp, synthetic construct
  source 1..21: mol_type = other DNA; mol_type = other DNA
gcgcacgaatttgggcctgtg

SEQ ID NO: 24399 - DNA, 21 bp, synthetic construct
  source 1..21: mol_type = other DNA; mol_type = other DNA
gaaccagagtcccgctcatgg

SEQ ID NO: 24400 - DNA, 21 bp, synthetic construct
  source 1..21: mol_type = other DNA; mol_type = other DNA
tacgtcaagtcccaagccagt

SEQ ID NO: 24401 - DNA, 21 bp, synthetic construct
  source 1..21: mol_type = other DNA; mol_type = other DNA
aaagacgaatttaaggtatat

SEQ ID NO: 24402 - DNA, 21 bp, synthetic construct
  source 1..21: mol_type = other DNA; mol_type = other DNA
tactccaagtcgggttttaac

SEQ ID NO: 24403 - DNA, 21 bp, synthetic construct
  source 1..21: mol_type = other DNA; mol_type = other DNA
cacgacggcactagcaagtgg

SEQ ID NO: 24404 - DNA, 21 bp, synthetic construct
  source 1..21: mol_type = other DNA; mol_type = other DNA
tattcgaaacatggaccaaat

SEQ ID NO: 24405 - DNA, 21 bp, synthetic construct
  source 1..21: mol_type = other DNA; mol_type = other DNA
tatttcagcggcgtgaagcaa

SEQ ID NO: 24406 - DNA, 21 bp, synthetic construct
  source 1..21: mol_type = other DNA; mol_type = other DNA
tacgtccgtagtgacgccaat

SEQ ID NO: 24407 - DNA, 21 bp, synthetic construct
  source 1..21: mol_type = other DNA; mol_type = other DNA
cgcgacgatttccacatctat

SEQ ID NO: 24408 - DNA, 21 bp, synthetic construct
  source 1..21: mol_type = other DNA; mol_type = other DNA
tattcgaagaccggtgtcaat

SEQ ID NO: 24409 - DNA, 21 bp, synthetic construct
  source 1..21: mol_type = other DNA; mol_type = other DNA
cggactgctcaggtatacccc

SEQ ID NO: 24410 - DNA, 21 bp, synthetic construct
  source 1..21: mol_type = other DNA; mol_type = other DNA
tcattggaatctcgttcatgg

SEQ ID NO: 24411 - DNA, 21 bp, synthetic construct
  source 1..21: mol_type = other DNA; mol_type = other DNA
tattgggctggaattaaagat

SEQ ID NO: 24412 - DNA, 21 bp, synthetic construct
  source 1..21: mol_type = other DNA; mol_type = other DNA
agtggggagagcaggttgtgg

SEQ ID NO: 24413 - DNA, 21 bp, synthetic construct
  source 1..21: mol_type = other DNA; mol_type = other DNA
ttaatgagagatgcctttccc

SEQ ID NO: 24414 - DNA, 21 bp, synthetic construct
  source 1..21: mol_type = other DNA; mol_type = other DNA
aaggacgactaccacacctac

SEQ ID NO: 24415 - DNA, 21 bp, synthetic construct
  source 1..21: mol_type = other DNA; mol_type = other DNA
ctctgccggccctgtgcagaa

SEQ ID NO: 24416 - DNA, 21 bp, synthetic construct
  source 1..21: mol_type = other DNA; mol_type = other DNA
atcatgagtagcagggagtgg

SEQ ID NO: 24417 - DNA, 21 bp, synthetic construct
  source 1..21: mol_type = other DNA; mol_type = other DNA
tatgttaagtcgcagacgtgg

SEQ ID NO: 24418 - DNA, 21 bp, synthetic construct
  source 1..21: mol_type = other DNA; mol_type = other DNA
tatttccacggtaaaattgag

SEQ ID NO: 24419 - DNA, 21 bp, synthetic construct
  source 1..21: mol_type = other DNA; mol_type = other DNA
gtagccgatcacgtccggtgg

SEQ ID NO: 24420 - DNA, 21 bp, synthetic construct
  source 1..21: mol_type = other DNA; mol_type = other DNA
ataaactcccgggagggtata

SEQ ID NO: 24421 - DNA, 21 bp, synthetic construct
  source 1..21: mol_type = other DNA; mol_type = other DNA
tatttcacgggtaaaacagat

SEQ ID NO: 24422 - DNA, 21 bp, synthetic construct
  source 1..21: mol_type = other DNA; mol_type = other DNA
tatatttgttcgaatgcgaaa

SEQ ID NO: 24423 - DNA, 21 bp, synthetic construct
  source 1..21: mol_type = other DNA; mol_type = other DNA
cgtacatttgacgccttccct

SEQ ID NO: 24424 - DNA, 21 bp, synthetic construct
  source 1..21: mol_type = other DNA; mol_type = other DNA
ataatggcagaccgtacttgg

SEQ ID NO: 24425 - DNA, 21 bp, synthetic construct
  source 1..21: mol_type = other DNA; mol_type = other DNA
tacgagtcgactaatgggaag

SEQ ID NO: 24426 - DNA, 21 bp, synthetic construct
  source 1..21: mol_type = other DNA; mol_type = other DNA
tacttcgctgggatcaaggaa

SEQ ID NO: 24427 - DNA, 21 bp, synthetic construct
  source 1..21: mol_type = other DNA; mol_type = other DNA
ataggcataaaaggttgggac

SEQ ID NO: 24428 - DNA, 21 bp, synthetic construct
  source 1..21: mol_type = other DNA; mol_type = other DNA
gttatgagcgaaaggacatgg

SEQ ID NO: 24429 - DNA, 21 bp, synthetic construct
  source 1..21: mol_type = other DNA; mol_type = other DNA
ttcagtcgcatcggtccgaat

SEQ ID NO: 24430 - DNA, 21 bp, synthetic construct
  source 1..21: mol_type = other DNA; mol_type = other DNA
tgcgcgcccgactatgaagag

SEQ ID NO: 24431 - DNA, 21 bp, synthetic construct
  source 1..21: mol_type = other DNA; mol_type = other DNA
cgtggggagcacacgtatccg

SEQ ID NO: 24432 - DNA, 21 bp, synthetic construct
  source 1..21: mol_type = other DNA; mol_type = other DNA
gtattgagctctaatacttgg

SEQ ID NO: 24433 - DNA, 21 bp, synthetic construct
  source 1..21: mol_type = other DNA; mol_type = other DNA
agggatgaccacgtgtatcca

SEQ ID NO: 24434 - DNA, 21 bp, synthetic construct
  source 1..21: mol_type = other DNA; mol_type = other DNA
agggatgatcacgtataccca

SEQ ID NO: 24435 - DNA, 21 bp, synthetic construct
  source 1..21: mol_type = other DNA; mol_type = other DNA
gtattgagtgatagagcgtgg

SEQ ID NO: 24436 - DNA, 21 bp, synthetic construct
  source 1..21: mol_type = other DNA; mol_type = other DNA
ctcagccgtatctctcacaac

SEQ ID NO: 24437 - DNA, 21 bp, synthetic construct
  source 1..21: mol_type = other DNA; mol_type = other DNA
cagcttgagtcccggagctgg

SEQ ID NO: 24438 - DNA, 21 bp, synthetic construct
  source 1..21: mol_type = other DNA; mol_type = other DNA
gacctgggaagcagtacttgg

SEQ ID NO: 24439 - DNA, 21 bp, synthetic construct
  source 1..21: mol_type = other DNA; mol_type = other DNA
ctcgccaaaagtgggataaat

SEQ ID NO: 24440 - DNA, 21 bp, synthetic construct
  source 1..21: mol_type = other DNA; mol_type = other DNA
gttatgagcagcagatcctgg

SEQ ID NO: 24441 - DNA, 21 bp, synthetic construct
  source 1..21: mol_type = other DNA; mol_type = other DNA
aggacgcacgacacctttccc

SEQ ID NO: 24442 - DNA, 21 bp, synthetic construct
  source 1..21: mol_type = other DNA; mol_type = other DNA
taccatgctaagcagaacaac

SEQ ID NO: 24443 - DNA, 21 bp, synthetic construct
  source 1..21: mol_type = other DNA; mol_type = other DNA
gtaatgtccgacagactctgg

SEQ ID NO: 24444 - DNA, 21 bp, synthetic construct
  source 1..21: mol_type = other DNA; mol_type = other DNA
tatcacgctaagcagaacaac

SEQ ID NO: 24445 - DNA, 21 bp, synthetic construct
  source 1..21: mol_type = other DNA; mol_type = other DNA
agagaggaaaacgtgtatcct

SEQ ID NO: 24446 - DNA, 21 bp, synthetic construct
  source 1..21: mol_type = other DNA; mol_type = other DNA
tacttcactggaaagattaac

SEQ ID NO: 24447 - DNA, 21 bp, synthetic construct
  source 1..21: mol_type = other DNA; mol_type = other DNA
tacttcacgggtaaacacgat

SEQ ID NO: 24448 - DNA, 21 bp, synthetic construct
  source 1..21: mol_type = other DNA; mol_type = other DNA
cctctttcatcagcgagttgg

SEQ ID NO: 24449 - DNA, 21 bp, synthetic construct
  source 1..21: mol_type = other DNA; mol_type = other DNA
aaagacgacttcgttacatgg

SEQ ID NO: 24450 - DNA, 21 bp, synthetic construct
  source 1..21: mol_type = other DNA; mol_type = other DNA
atcggagaaagccgtctgtgg

SEQ ID NO: 24451 - DNA, 21 bp, synthetic construct
  source 1..21: mol_type = other DNA; mol_type = other DNA
tatgtaaagaacgatgccaga

SEQ ID NO: 24452 - DNA, 21 bp, synthetic construct
  source 1..21: mol_type = other DNA; mol_type = other DNA
tatttcaccggacaacgcgaa

SEQ ID NO: 24453 - DNA, 21 bp, synthetic construct
  source 1..21: mol_type = other DNA; mol_type = other DNA
tactttaccggacaattagca

SEQ ID NO: 24454 - DNA, 21 bp, synthetic construct
  source 1..21: mol_type = other DNA; mol_type = other DNA
tattttactggtaagcctgat

SEQ ID NO: 24455 - DNA, 21 bp, synthetic construct
  source 1..21: mol_type = other DNA; mol_type = other DNA
tcgacatccactaacggaata

SEQ ID NO: 24456 - DNA, 21 bp, synthetic construct
  source 1..21: mol_type = other DNA; mol_type = other DNA
tatttttcactaaaagtagag

SEQ ID NO: 24457 - DNA, 21 bp, synthetic construct
  source 1..21: mol_type = other DNA; mol_type = other DNA
tattttactgggtttaaggaa

SEQ ID NO: 24458 - DNA, 21 bp, synthetic construct
  source 1..21: mol_type = other DNA; mol_type = other DNA
tattttgcaggagttaagtca

SEQ ID NO: 24459 - DNA, 21 bp, synthetic construct
  source 1..21: mol_type = other DNA; mol_type = other DNA
tatttcagcggcatcccagca

SEQ ID NO: 24460 - DNA, 21 bp, synthetic construct
  source 1..21: mol_type = other DNA; mol_type = other DNA
tataccaggatcggacccaac

SEQ ID NO: 24461 - DNA, 21 bp, synthetic construct
  source 1..21: mol_type = other DNA; mol_type = other DNA
aggggcgagtataccttccca

SEQ ID NO: 24462 - DNA, 21 bp, synthetic construct
  source 1..21: mol_type = other DNA; mol_type = other DNA
ctttgggacggtacggggccc

SEQ ID NO: 24463 - DNA, 21 bp, synthetic construct
  source 1..21: mol_type = other DNA; mol_type = other DNA
atcatggccgatcgtggatgg

SEQ ID NO: 24464 - DNA, 21 bp, synthetic construct
  source 1..21: mol_type = other DNA; mol_type = other DNA
tggctaaagtcacagataggg

SEQ ID NO: 24465 - DNA, 21 bp, synthetic construct
  source 1..21: mol_type = other DNA; mol_type = other DNA
aggaattctaccgtgtaccct

SEQ ID NO: 24466 - DNA, 21 bp, synthetic construct
  source 1..21: mol_type = other DNA; mol_type = other DNA
ctcagtcggatagcgttaaat

SEQ ID NO: 24467 - DNA, 21 bp, synthetic construct
  source 1..21: mol_type = other DNA; mol_type = other DNA
actcagtcaactaacggcatt

SEQ ID NO: 24468 - DNA, 21 bp, synthetic construct
  source 1..21: mol_type = other DNA; mol_type = other DNA
cgtgacgaccatgtctatccg

SEQ ID NO: 24469 - DNA, 21 bp, synthetic construct
  source 1..21: mol_type = other DNA; mol_type = other DNA
ctgtcccgcattgcccacaat

SEQ ID NO: 24470 - DNA, 21 bp, synthetic construct
  source 1..21: mol_type = other DNA; mol_type = other DNA
tattcgagattaagtcctgat

SEQ ID NO: 24471 - DNA, 21 bp, synthetic construct
  source 1..21: mol_type = other DNA; mol_type = other DNA
tacgcaaaacaaggttacaat

SEQ ID NO: 24472 - DNA, 21 bp, synthetic construct
  source 1..21: mol_type = other DNA; mol_type = other DNA
tatacccgccttaatgacaac

SEQ ID NO: 24473 - DNA, 21 bp, synthetic construct
  source 1..21: mol_type = other DNA; mol_type = other DNA
cttgccaggacgggcatagat

SEQ ID NO: 24474 - DNA, 21 bp, synthetic construct
  source 1..21: mol_type = other DNA; mol_type = other DNA
tatttctcaggggtaaagatg

SEQ ID NO: 24475 - DNA, 21 bp, synthetic construct
  source 1..21: mol_type = other DNA; mol_type = other DNA
tacttcactggtaaagcgaac

SEQ ID NO: 24476 - DNA, 21 bp, synthetic construct
  source 1..21: mol_type = other DNA; mol_type = other DNA
tacgtaaagtacgaagataag

SEQ ID NO: 24477 - DNA, 21 bp, synthetic construct
  source 1..21: mol_type = other DNA; mol_type = other DNA
tatgcacgtaccggcccaggg

SEQ ID NO: 24478 - DNA, 21 bp, synthetic construct
  source 1..21: mol_type = other DNA; mol_type = other DNA
tatgtcaggtcgaacccaggg

SEQ ID NO: 24479 - DNA, 21 bp, synthetic construct
  source 1..21: mol_type = other DNA; mol_type = other DNA
tacttcactggcatgattgaa

SEQ ID NO: 24480 - DNA, 21 bp, synthetic construct
  source 1..21: mol_type = other DNA; mol_type = other DNA
ctatgtcgcccctgtgaggaa

SEQ ID NO: 24481 - DNA, 21 bp, synthetic construct
  source 1..21: mol_type = other DNA; mol_type = other DNA
gccttcgaatgtacccctggt

SEQ ID NO: 24482 - DNA, 21 bp, synthetic construct
  source 1..21: mol_type = other DNA; mol_type = other DNA
gtaatgtccgacagaacttgg

SEQ ID NO: 24483 - DNA, 21 bp, synthetic construct
  source 1..21: mol_type = other DNA; mol_type = other DNA
gttatgtccgatcgggtctgg

SEQ ID NO: 24484 - DNA, 21 bp, synthetic construct
  source 1..21: mol_type = other DNA; mol_type = other DNA
agagatgaccacgtttatccg

SEQ ID NO: 24485 - DNA, 21 bp, synthetic construct
  source 1..21: mol_type = other DNA; mol_type = other DNA
tatagcaaaatgggaaacaac

SEQ ID NO: 24486 - DNA, 21 bp, synthetic construct
  source 1..21: mol_type = other DNA; mol_type = other DNA
tacttcactggccaaacggcg

SEQ ID NO: 24487 - DNA, 21 bp, synthetic construct
  source 1..21: mol_type = other DNA; mol_type = other DNA
tactttacaggtaagcaggat

SEQ ID NO: 24488 - DNA, 21 bp, synthetic construct
  source 1..21: mol_type = other DNA; mol_type = other DNA
aggggtgaagagatttatcca

SEQ ID NO: 24489 - DNA, 21 bp, synthetic construct
  source 1..21: mol_type = other DNA; mol_type = other DNA
agagacgatagtgtttttcct

SEQ ID NO: 24490 - DNA, 21 bp, synthetic construct
  source 1..21: mol_type = other DNA; mol_type = other DNA
gatatggcctcgaaggattgg

SEQ ID NO: 24491 - DNA, 21 bp, synthetic construct
  source 1..21: mol_type = other DNA; mol_type = other DNA
ttgcaccggctttcgggtgac

SEQ ID NO: 24492 - DNA, 21 bp, synthetic construct
  source 1..21: mol_type = other DNA; mol_type = other DNA
tacttttcaggggtcaaacag

SEQ ID NO: 24493 - DNA, 21 bp, synthetic construct
  source 1..21: mol_type = other DNA; mol_type = other DNA
taccatgctaagcagctcaat

SEQ ID NO: 24494 - DNA, 21 bp, synthetic construct
  source 1..21: mol_type = other DNA; mol_type = other DNA
tatagtaaaatgggccacaac

SEQ ID NO: 24495 - DNA, 21 bp, synthetic construct
  source 1..21: mol_type = other DNA; mol_type = other DNA
tacttttctggcatccaattg

SEQ ID NO: 24496 - DNA, 21 bp, synthetic construct
  source 1..21: mol_type = other DNA; mol_type = other DNA
atcatgacggaccgcatctgg

SEQ ID NO: 24497 - DNA, 21 bp, synthetic construct
  source 1..21: mol_type = other DNA; mol_type = other DNA
agaaccagtgatgcttatccc

SEQ ID NO: 24498 - DNA, 21 bp, synthetic construct
  source 1..21: mol_type = other DNA; mol_type = other DNA
gtgaatgactatatttcatat

SEQ ID NO: 24499 - DNA, 21 bp, synthetic construct
  source 1..21: mol_type = other DNA; mol_type = other DNA
gacctcttatctgctaagtgg

SEQ ID NO: 24500 - DNA, 21 bp, synthetic construct
  source 1..21: mol_type = other DNA; mol_type = other DNA
gtctggagcacaaatggcata

SEQ ID NO: 24501 - DNA, 21 bp, synthetic construct
  source 1..21: mol_type = other DNA; mol_type = other DNA
ctgagtcgcgttggccagaat

SEQ ID NO: 24502 - DNA, 21 bp, synthetic construct
  source 1..21: mol_type = other DNA; mol_type = other DNA
tatttcacaggccatatggac

SEQ ID NO: 24503 - DNA, 21 bp, synthetic construct
  source 1..21: mol_type = other DNA; mol_type = other DNA
tactttaccggtgttatggat

SEQ ID NO: 24504 - DNA, 21 bp, synthetic construct
  source 1..21: mol_type = other DNA; mol_type = other DNA
gtacgtagcactaatggcgtt

SEQ ID NO: 24505 - DNA, 21 bp, synthetic construct
  source 1..21: mol_type = other DNA; mol_type = other DNA
gagatggaatcgcgggtctgg

SEQ ID NO: 24506 - DNA, 21 bp, synthetic construct
  source 1..21: mol_type = other DNA; mol_type = other DNA
gcccccgaaagcgttcggtgg

SEQ ID NO: 24507 - DNA, 21 bp, synthetic construct
  source 1..21: mol_type = other DNA; mol_type = other DNA
cagggggaaagtcgtttatgg

SEQ ID NO: 24508 - DNA, 21 bp, synthetic construct
  source 1..21: mol_type = other DNA; mol_type = other DNA
tactttaccggacgtgccgag

SEQ ID NO: 24509 - DNA, 21 bp, synthetic construct
  source 1..21: mol_type = other DNA; mol_type = other DNA
agatcagaggaaacttaccca

SEQ ID NO: 24510 - DNA, 21 bp, synthetic construct
  source 1..21: mol_type = other DNA; mol_type = other DNA
tatcataaatcaaacatgaac

SEQ ID NO: 24511 - DNA, 21 bp, synthetic construct
  source 1..21: mol_type = other DNA; mol_type = other DNA
cgtaatatggacgcgtaccca

SEQ ID NO: 24512 - DNA, 21 bp, synthetic construct
  source 1..21: mol_type = other DNA; mol_type = other DNA
tattgcaagccatgtctcacc

SEQ ID NO: 24513 - DNA, 21 bp, synthetic construct
  source 1..21: mol_type = other DNA; mol_type = other DNA
tatttcaccggcacccttgca

SEQ ID NO: 24514 - DNA, 21 bp, synthetic construct
  source 1..21: mol_type = other DNA; mol_type = other DNA
aaatcagaattcaagacgtac

SEQ ID NO: 24515 - DNA, 21 bp, synthetic construct
  source 1..21: mol_type = other DNA; mol_type = other DNA
gtggagtcgaccaacggatgg

SEQ ID NO: 24516 - DNA, 21 bp, synthetic construct
  source 1..21: mol_type = other DNA; mol_type = other DNA
ctttcaagggcagccaataac

SEQ ID NO: 24517 - DNA, 21 bp, synthetic construct
  source 1..21: mol_type = other DNA; mol_type = other DNA
tactttaccggacacaccgcc

SEQ ID NO: 24518 - DNA, 21 bp, synthetic construct
  source 1..21: mol_type = other DNA; mol_type = other DNA
agcgaatccacgaatgggagg

SEQ ID NO: 24519 - DNA, 21 bp, synthetic construct
  source 1..21: mol_type = other DNA; mol_type = other DNA
cgtaacatggatgtctacccc

SEQ ID NO: 24520 - DNA, 21 bp, synthetic construct
  source 1..21: mol_type = other DNA; mol_type = other DNA
tacttcaccggagttaccgag

SEQ ID NO: 24521 - DNA, 21 bp, synthetic construct
  source 1..21: mol_type = other DNA; mol_type = other DNA
tactcgaaggggaatataaat

SEQ ID NO: 24522 - DNA, 21 bp, synthetic construct
  source 1..21: mol_type = other DNA; mol_type = other DNA
tttcatagactcggtccagac

SEQ ID NO: 24523 - DNA, 21 bp, synthetic construct
  source 1..21: mol_type = other DNA; mol_type = other DNA
agggatgaatttagcagttgg

SEQ ID NO: 24524 - DNA, 21 bp, synthetic construct
  source 1..21: mol_type = other DNA; mol_type = other DNA
aggacttcgacgcacgggatc

SEQ ID NO: 24525 - DNA, 21 bp, synthetic construct
  source 1..21: mol_type = other DNA; mol_type = other DNA
tgcaaaggttcaacggagcag

SEQ ID NO: 24526 - DNA, 21 bp, synthetic construct
  source 1..21: mol_type = other DNA; mol_type = other DNA
atagggcacgagggctgggat

SEQ ID NO: 24527 - DNA, 21 bp, synthetic construct
  source 1..21: mol_type = other DNA; mol_type = other DNA
tatttttcgggcacaaaggaa

SEQ ID NO: 24528 - DNA, 21 bp, synthetic construct
  source 1..21: mol_type = other DNA; mol_type = other DNA
tatctaaagagtcaaagcggg

SEQ ID NO: 24529 - DNA, 21 bp, synthetic construct
  source 1..21: mol_type = other DNA; mol_type = other DNA
ggaggccccagctctagctgg

SEQ ID NO: 24530 - DNA, 21 bp, synthetic construct
  source 1..21: mol_type = other DNA; mol_type = other DNA
ctttgtcgaccatgtagcaat

SEQ ID NO: 24531 - DNA, 21 bp, synthetic construct
  source 1..21: mol_type = other DNA; mol_type = other DNA
ctatgtcgtccgtgctcgccc

SEQ ID NO: 24532 - DNA, 21 bp, synthetic construct
  source 1..21: mol_type = other DNA; mol_type = other DNA
aggaacatggatgcatatcct

SEQ ID NO: 24533 - DNA, 21 bp, synthetic construct
  source 1..21: mol_type = other DNA; mol_type = other DNA
aaggatagttttactgcgtgg

SEQ ID NO: 24534 - DNA, 21 bp, synthetic construct
  source 1..21: mol_type = other DNA; mol_type = other DNA
ttcttcacaggccaaatagag

SEQ ID NO: 24535 - DNA, 21 bp, synthetic construct
  source 1..21: mol_type = other DNA; mol_type = other DNA
caggatgggacgagctactgg

SEQ ID NO: 24536 - DNA, 21 bp, synthetic construct
  source 1..21: mol_type = other DNA; mol_type = other DNA
ctccatagattgtctacaggg

SEQ ID NO: 24537 - DNA, 21 bp, synthetic construct
  source 1..21: mol_type = other DNA; mol_type = other DNA
tactggtctgccataaaggag

SEQ ID NO: 24538 - DNA, 21 bp, synthetic construct
  source 1..21: mol_type = other DNA; mol_type = other DNA
cgcccagaggctcgctcatgg

SEQ ID NO: 24539 - DNA, 21 bp, synthetic construct
  source 1..21: mol_type = other DNA; mol_type = other DNA
attatggaatcgagggcctgg

SEQ ID NO: 24540 - DNA, 21 bp, synthetic construct
  source 1..21: mol_type = other DNA; mol_type = other DNA
ataaggagtaccaacggcgta

SEQ ID NO: 24541 - DNA, 21 bp, synthetic construct
  source 1..21: mol_type = other DNA; mol_type = other DNA
tattggacgggggttaccgag

SEQ ID NO: 24542 - DNA, 21 bp, synthetic construct
  source 1..21: mol_type = other DNA; mol_type = other DNA
aaagatgactacacattgttt

SEQ ID NO: 24543 - DNA, 21 bp, synthetic construct
  source 1..21: mol_type = other DNA; mol_type = other DNA
tacttttcgggtaggaaggag

SEQ ID NO: 24544 - DNA, 21 bp, synthetic construct
  source 1..21: mol_type = other DNA; mol_type = other DNA
gatggagcgacgagccgctgg

SEQ ID NO: 24545 - DNA, 21 bp, synthetic construct
  source 1..21: mol_type = other DNA; mol_type = other DNA
tacagtaaaactggtataaac

SEQ ID NO: 24546 - DNA, 21 bp, synthetic construct
  source 1..21: mol_type = other DNA; mol_type = other DNA
ctatgccgcccctgcttaacc

SEQ ID NO: 24547 - DNA, 21 bp, synthetic construct
  source 1..21: mol_type = other DNA; mol_type = other DNA
tacttcacgggtattccagag

SEQ ID NO: 24548 - DNA, 21 bp, synthetic construct
  source 1..21: mol_type = other DNA; mol_type = other DNA
tattttacggggataccggcc

SEQ ID NO: 24549 - DNA, 21 bp, synthetic construct
  source 1..21: mol_type = other DNA; mol_type = other DNA
tactggtctggggtcagtgaa

SEQ ID NO: 24550 - DNA, 21 bp, synthetic construct
  source 1..21: mol_type = other DNA; mol_type = other DNA
atggacgactacactatgtac

SEQ ID NO: 24551 - DNA, 21 bp, synthetic construct
  source 1..21: mol_type = other DNA; mol_type = other DNA
aagacctacgacgcttttgtc

SEQ ID NO: 24552 - DNA, 21 bp, synthetic construct
  source 1..21: mol_type = other DNA; mol_type = other DNA
ctgtgtcgcccatgtaacgaa

SEQ ID NO: 24553 - DNA, 21 bp, synthetic construct
  source 1..21: mol_type = other DNA; mol_type = other DNA
gacgacggtagcagtaggtgg

SEQ ID NO: 24554 - DNA, 21 bp, synthetic construct
  source 1..21: mol_type = other DNA; mol_type = other DNA
atgtcagactttaaaatcttc

SEQ ID NO: 24555 - DNA, 21 bp, synthetic construct
  source 1..21: mol_type = other DNA; mol_type = other DNA
aggagtgagttcgctacttgg

SEQ ID NO: 24556 - DNA, 21 bp, synthetic construct
  source 1..21: mol_type = other DNA; mol_type = other DNA
tatgcaaagaatggtttaaac

SEQ ID NO: 24557 - DNA, 21 bp, synthetic construct
  source 1..21: mol_type = other DNA; mol_type = other DNA
ttgtcgcgtataagtcctgac

SEQ ID NO: 24558 - DNA, 21 bp, synthetic construct
  source 1..21: mol_type = other DNA; mol_type = other DNA
tatgcacgtataggaccgaac

SEQ ID NO: 24559 - DNA, 21 bp, synthetic construct
  source 1..21: mol_type = other DNA; mol_type = other DNA
gatgggtcgtcccggttatgg

SEQ ID NO: 24560 - DNA, 21 bp, synthetic construct
  source 1..21: mol_type = other DNA; mol_type = other DNA
gtaatgagttctcgagagtgg

SEQ ID NO: 24561 - DNA, 21 bp, synthetic construct
  source 1..21: mol_type = other DNA; mol_type = other DNA
aatatggcagacaggacgtgg

SEQ ID NO: 24562 - DNA, 21 bp, synthetic construct
  source 1..21: mol_type = other DNA; mol_type = other DNA
tacttaaagagtcagtcgcat

SEQ ID NO: 24563 - DNA, 21 bp, synthetic construct
  source 1..21: mol_type = other DNA
gctgattcaaccaatggccgt

SEQ ID NO: 24564 - DNA, 21 bp, synthetic construct
  source 1..21: mol_type = other DNA
tactccaagatcggtaagaat

SEQ ID NO: 24565 - DNA, 21 bp, synthetic construct
  source 1..21: mol_type = other DNA; mol_type = other DNA
tacgccaaggcagggtataat

SEQ ID NO: 24566 - DNA, 21 bp, synthetic construct
  source 1..21: mol_type = other DNA; mol_type = other DNA
ctgcaccgcctaagcacgggt

SEQ ID NO: 24567 - DNA, 21 bp, synthetic construct
  source 1..21: mol_type = other DNA; mol_type = other DNA
aagaacgacggaaatccgtgg

SEQ ID NO: 24568 - DNA, 21 bp, synthetic construct
  source 1..21: mol_type = other DNA; mol_type = other DNA
tattttacgggaatacaagga

SEQ ID NO: 24569 - DNA, 21 bp, synthetic construct
  source 1..21: mol_type = other DNA; mol_type = other DNA
tgcatgccaggagtcccactg

SEQ ID NO: 24570 - DNA, 21 bp, synthetic construct
  source 1..21: mol_type = other DNA; mol_type = other DNA
tattggtccggggtcagcgag

SEQ ID NO: 24571 - DNA, 21 bp, synthetic construct
  source 1..21: mol_type = other DNA; mol_type = other DNA
tactttaccggggttgtggac

SEQ ID NO: 24572 - DNA, 21 bp, synthetic construct
  source 1..21: mol_type = other DNA; mol_type = other DNA
cgaatgagtgacgcttaccca

SEQ ID NO: 24573 - DNA, 21 bp, synthetic construct
  source 1..21: mol_type = other DNA; mol_type = other DNA
tatttcacgggagttgcgcag

SEQ ID NO: 24574 - DNA, 21 bp, synthetic construct
  source 1..21: mol_type = other DNA; mol_type = other DNA
cgttccgagttcatgccctat

SEQ ID NO: 24575 - DNA, 21 bp, synthetic construct
  source 1..21: mol_type = other DNA; mol_type = other DNA
cttacgagagcggctcctaac

SEQ ID NO: 24576 - DNA, 21 bp, synthetic construct
  source 1..21: mol_type = other DNA; mol_type = other DNA
ggaggagaaagctcaacgtgg

SEQ ID NO: 24577 - DNA, 21 bp, synthetic construct
  source 1..21: mol_type = other DNA; mol_type = other DNA
aggcttgagtcaagtgcatgg

SEQ ID NO: 24578 - DNA, 21 bp, synthetic construct
  source 1..21: mol_type = other DNA; mol_type = other DNA
gtcatgtcgtcagcaggttgg

SEQ ID NO: 24579 - DNA, 21 bp, synthetic construct
  source 1..21: mol_type = other DNA; mol_type = other DNA
cggaatgaatttacccccttt

SEQ ID NO: 24580 - DNA, 21 bp, synthetic construct
  source 1..21: mol_type = other DNA; mol_type = other DNA
ttgctccaatctgcaacctgg

SEQ ID NO: 24581 - DNA, 21 bp, synthetic construct
  source 1..21: mol_type = other DNA; mol_type = other DNA
ggggccgaccacgtcaaatgg

SEQ ID NO: 24582 - DNA, 21 bp, synthetic construct
  source 1..21: mol_type = other DNA; mol_type = other DNA
tattggactggtgttacggag

SEQ ID NO: 24583 - DNA, 21 bp, synthetic construct
  source 1..21: mol_type = other DNA; mol_type = other DNA
tatgtaaagtcacaggcatgt

SEQ ID NO: 24584 - DNA, 21 bp, synthetic construct
  source 1..21: mol_type = other DNA; mol_type = other DNA
tggactgggactagttgtctt

SEQ ID NO: 24585 - DNA, 21 bp, synthetic construct
  source 1..21: mol_type = other DNA; mol_type = other DNA
tacttcaccggcgaaaaagag

SEQ ID NO: 24586 - DNA, 21 bp, synthetic construct
  source 1..21: mol_type = other DNA; mol_type = other DNA
tactttacaggtatgttcgag

SEQ ID NO: 24587 - DNA, 21 bp, synthetic construct
  source 1..21: mol_type = other DNA; mol_type = other DNA
tatttcaccggggtgaagggc

SEQ ID NO: 24588 - DNA, 21 bp, synthetic construct
  source 1..21: mol_type = other DNA; mol_type = other DNA
gagttggcgtcccacgcctgg

SEQ ID NO: 24589 - DNA, 21 bp, synthetic construct
  source 1..21: mol_type = other DNA; mol_type = other DNA
cgcgacgaattcgttggatac

SEQ ID NO: 24590 - DNA, 21 bp, synthetic construct
  source 1..21: mol_type = other DNA; mol_type = other DNA
aatatgtcagaccgtggttgg

SEQ ID NO: 24591 - DNA, 21 bp, synthetic construct
  source 1..21: mol_type = other DNA; mol_type = other DNA
atcctcgaaagtagaggctgg

SEQ ID NO: 24592 - DNA, 21 bp, synthetic construct
  source 1..21: mol_type = other DNA; mol_type = other DNA
tacttttcgggcataatacag

SEQ ID NO: 24593 - DNA, 21 bp, synthetic construct
  source 1..21: mol_type = other DNA; mol_type = other DNA
tacttcaccggaatgcacgag

SEQ ID NO: 24594 - DNA, 21 bp, synthetic construct
  source 1..21: mol_type = other DNA; mol_type = other DNA
ttttccaagcttaatcacaat

SEQ ID NO: 24595 - DNA, 21 bp, synthetic construct
  source 1..21: mol_type = other DNA; mol_type = other DNA
tactggaccggcgtcgtagat

SEQ ID NO: 24596 - DNA, 21 bp, synthetic construct
  source 1..21: mol_type = other DNA; mol_type = other DNA
cgtacatccactcacggcgta

SEQ ID NO: 24597 - DNA, 21 bp, synthetic construct
  source 1..21: mol_type = other DNA; mol_type = other DNA
agagtagaagacgcgtatccg

SEQ ID NO: 24598 - DNA, 21 bp, synthetic construct
  source 1..21: mol_type = other DNA; mol_type = other DNA
taccacaaggcctcgccgata

SEQ ID NO: 24599 - DNA, 21 bp, synthetic construct
  source 1..21: mol_type = other DNA; mol_type = other DNA
aggagcgaattcaccacatat

SEQ ID NO: 24600 - DNA, 21 bp, synthetic construct
  source 1..21: mol_type = other DNA; mol_type = other DNA
gcgggccccagccgcggttgg

SEQ ID NO: 24601 - DNA, 21 bp, synthetic construct
  source 1..21: mol_type = other DNA; mol_type = other DNA
attttgtcaagcagggagtgg

SEQ ID NO: 24602 - DNA, 21 bp, synthetic construct
  source 1..21: mol_type = other DNA; mol_type = other DNA
cttagtaagatagggctaaat

SEQ ID NO: 24603 - DNA, 21 bp, synthetic construct
  source 1..21: mol_type = other DNA; mol_type = other DNA
agtcaaagcaccaacggagta

SEQ ID NO: 24604 - DNA, 21 bp, synthetic construct
  source 1..21: mol_type = other DNA; mol_type = other DNA
tacttctcaggtactgtcgcc

SEQ ID NO: 24605 - DNA, 21 bp, synthetic construct
  source 1..21: mol_type = other DNA; mol_type = other DNA
tatcacgcaaagggaccatca

SEQ ID NO: 24606 - DNA, 21 bp, synthetic construct
  source 1..21: mol_type = other DNA; mol_type = other DNA
tacacgagattgaacgataat

SEQ ID NO: 24607 - DNA, 21 bp, synthetic construct
  source 1..21: mol_type = other DNA; mol_type = other DNA
cggttggaaagcgctgtctgg

SEQ ID NO: 24608 - DNA, 21 bp, synthetic construct
  source 1..21: mol_type = other DNA; mol_type = other DNA
acaacttctaccaacggagta

SEQ ID NO: 24609 - DNA, 21 bp, synthetic construct
  source 1..21: mol_type = other DNA; mol_type = other DNA
ttaagtcgaattgcgacgaac

SEQ ID NO: 24610 - DNA, 21 bp, synthetic construct
  source 1..21: mol_type = other DNA; mol_type = other DNA
tattggagtggggttcaagag

SEQ ID NO: 24611 - DNA, 21 bp, synthetic construct
  source 1..21: mol_type = other DNA; mol_type = other DNA
catgttagcacgaacggagtt

SEQ ID NO: 24612 - DNA, 21 bp, synthetic construct
  source 1..21: mol_type = other DNA; mol_type = other DNA
tctgatggcgtgagccgctgg

SEQ ID NO: 24613 - DNA, 21 bp, synthetic construct
  source 1..21: mol_type = other DNA; mol_type = other DNA
tactccaaggcgggctggaat

SEQ ID NO: 24614 - DNA, 21 bp, synthetic construct
  source 1..21: mol_type = other DNA; mol_type = other DNA
tacttcagtggcatgaaggaa

SEQ ID NO: 24615 - DNA, 21 bp, synthetic construct
  source 1..21: mol_type = other DNA; mol_type = other DNA
atgagagatgggactccaagc

SEQ ID NO: 24616 - DNA, 21 bp, synthetic construct
  source 1..21: mol_type = other DNA; mol_type = other DNA
tattttagcggaatcccggat

SEQ ID NO: 24617 - DNA, 21 bp, synthetic construct
  source 1..21: mol_type = other DNA; mol_type = other DNA
tttgcaaagtccgggtgcgga

SEQ ID NO: 24618 - DNA, 21 bp, synthetic construct
  source 1..21: mol_type = other DNA; mol_type = other DNA
tgtaagcccgaagcgcctggg

SEQ ID NO: 24619 - DNA, 21 bp, synthetic construct
  source 1..21: mol_type = other DNA; mol_type = other DNA
tacttccatgggaaaattgca

SEQ ID NO: 24620 - DNA, 21 bp, synthetic construct
  source 1..21: mol_type = other DNA; mol_type = other DNA
tacttctcaggcgtcatcagt

SEQ ID NO: 24621 - DNA, 21 bp, synthetic construct
  source 1..21: mol_type = other DNA; mol_type = other DNA
tgcaagaccacgaagtgctgc

SEQ ID NO: 24622 - DNA, 21 bp, synthetic construct
  source 1..21: mol_type = other DNA; mol_type = other DNA
cgcgatgaattcgtctcgtat

SEQ ID NO: 24623 - DNA, 21 bp, synthetic construct
  source 1..21: mol_type = other DNA; mol_type = other DNA
gaaatggattcccggatgtgg

SEQ ID NO: 24624 - DNA, 21 bp, synthetic construct
  source 1..21: mol_type = other DNA; mol_type = other DNA
ctctgccggccgtgtcaagag

SEQ ID NO: 24625 - DNA, 21 bp, synthetic construct
  source 1..21: mol_type = other DNA; mol_type = other DNA
gtactctccgataggagttgg

SEQ ID NO: 24626 - DNA, 21 bp, synthetic construct
  source 1..21: mol_type = other DNA; mol_type = other DNA
tatagtcggttgggactggat

SEQ ID NO: 24627 - DNA, 21 bp, synthetic construct
  source 1..21: mol_type = other DNA; mol_type = other DNA
tggttctccggtatcttggag

SEQ ID NO: 24628 - DNA, 21 bp, synthetic construct
  source 1..21: mol_type = other DNA; mol_type = other DNA
cgagaggattatgtaaaatgg

SEQ ID NO: 24629 - DNA, 21 bp, synthetic construct
  source 1..21: mol_type = other DNA; mol_type = other DNA
tttttttcgggaatcatcgag

SEQ ID NO: 24630 - DNA, 21 bp, synthetic construct
  source 1..21: mol_type = other DNA; mol_type = other DNA
tacgctaagaacggtgccaac

SEQ ID NO: 24631 - DNA, 21 bp, synthetic construct
  source 1..21: mol_type = other DNA; mol_type = other DNA
aagaacgattttgtgacctac

SEQ ID NO: 24632 - DNA, 21 bp, synthetic construct
  source 1..21: mol_type = other DNA; mol_type = other DNA
tacagcaagcttgattcaaac

SEQ ID NO: 24633 - DNA, 21 bp, synthetic construct
  source 1..21: mol_type = other DNA; mol_type = other DNA
caccaaagcactaatggcgtc

SEQ ID NO: 24634 - DNA, 21 bp, synthetic construct
  source 1..21: mol_type = other DNA; mol_type = other DNA
tactttagtggtaagcatgag

SEQ ID NO: 24635 - DNA, 21 bp, synthetic construct
  source 1..21: mol_type = other DNA
ttatgggatgggaccggccca

SEQ ID NO: 24636 - DNA, 21 bp, synthetic construct
  source 1..21: mol_type = other DNA; mol_type = other DNA
tgctttgacggcaggtccgcg

SEQ ID NO: 24637 - DNA, 21 bp, synthetic construct
  source 1..21: mol_type = other DNA
tatttcacgggccaaattcag

SEQ ID NO: 24638 - DNA, 21 bp, synthetic construct
  source 1..21: mol_type = other DNA
tacttctcgaaaatacgagaa

SEQ ID NO: 24639 - DNA, 21 bp, synthetic construct
  source 1..21: mol_type = other DNA
tacgcgcgtcctggcccgaat

SEQ ID NO: 24640 - DNA, 21 bp, synthetic construct
  source 1..21: mol_type = other DNA
gttatgcgcgatgcctatccc

SEQ ID NO: 24641 - DNA, 21 bp, synthetic construct
  source 1..21: mol_type = other DNA
ttagctaagacctcctgtaat

SEQ ID NO: 24642 - DNA, 21 bp, synthetic construct
  source 1..21: mol_type = other DNA
tattttacgggtaaatgtgaa

SEQ ID NO: 24643 - DNA, 21 bp, synthetic construct
  source 1..21: mol_type = other DNA
tacttcacaggctacgtggaa

SEQ ID NO: 24644 - DNA, 21 bp, synthetic construct
  source 1..21: mol_type = other DNA
tacttcaccggacagattgtt

SEQ ID NO: 24645 - DNA, 21 bp, synthetic construct
  source 1..21: mol_type = other DNA
tattcgcggataaatttaaat

SEQ ID NO: 24646 - DNA, 21 bp, synthetic construct
  source 1..21: mol_type = other DNA
tacagtcgcctacaaccggat

SEQ ID NO: 24647 - DNA, 21 bp, synthetic construct
  source 1..21: mol_type = other DNA
ctctgtagaccctgcatagaa

SEQ ID NO: 24648 - DNA, 21 bp, synthetic construct
  source 1..21: mol_type = other DNA
ctcagcagaatctcgcccgat

SEQ ID NO: 24649 - DNA, 21 bp, synthetic construct
  source 1..21: mol_type = other DNA
tacagtaagttaagctcaaac

SEQ ID NO: 24650 - DNA, 21 bp, synthetic construct
  source 1..21: mol_type = other DNA
tatgtgcggagcgatttaatg

SEQ ID NO: 24651 - DNA, 21 bp, synthetic construct
  source 1..21: mol_type = other DNA
aggagttcagatgtgtaccca

SEQ ID NO: 24652 - DNA, 21 bp, synthetic construct
  source 1..21: mol_type = other DNA
cgcatggaagaagtatatccc

SEQ ID NO: 24653 - DNA, 21 bp, synthetic construct
  source 1..21: mol_type = other DNA
ctgagagacgggacgaacgct

SEQ ID NO: 24654 - DNA, 21 bp, synthetic construct
  source 1..21: mol_type = other DNA
ctccatcgccttgttccagat

SEQ ID NO: 24655 - DNA, 21 bp, synthetic construct
  source 1..21: mol_type = other DNA
tattggtcgggtgtaaccgcg

SEQ ID NO: 24656 - DNA, 21 bp, synthetic construct
  source 1..21: mol_type = other DNA
gtaatcgaagatgcgtatcct

SEQ ID NO: 24657 - DNA, 21 bp, synthetic construct
  source 1..21: mol_type = other DNA
cggctcccgaccgtattcccc

SEQ ID NO: 24658 - DNA, 21 bp, synthetic construct
  source 1..21: mol_type = other DNA
tatgtgaggagtcagccgggg

SEQ ID NO: 24659 - DNA, 21 bp, synthetic construct
  source 1..21: mol_type = other DNA
tgcaccagcaaaaatggacat

SEQ ID NO: 24660 - DNA, 21 bp, synthetic construct
  source 1..21: mol_type = other DNA
tacagcaaagttaattataat

SEQ ID NO: 24661 - DNA, 21 bp, synthetic construct
  source 1..21: mol_type = other DNA
gtaggcggaaaatgtcctggt

SEQ ID NO: 24662 - DNA, 21 bp, synthetic construct
  source 1..21: mol_type = other DNA
ataatgagcgatcgtgtctgg

SEQ ID NO: 24663 - DNA, 21 bp, synthetic construct
  source 1..21: mol_type = other DNA
tatacgaagtctcaaacggac

SEQ ID NO: 24664 - DNA, 21 bp, synthetic construct
  source 1..21: mol_type = other DNA
cggacctacgattcttttcca

SEQ ID NO: 24665 - DNA, 21 bp, synthetic construct
  source 1..21: mol_type = other DNA
tatcttaagagccaaccttac

SEQ ID NO: 24666 - DNA, 21 bp, synthetic construct
  source 1..21: mol_type = other DNA
tatagcaaaggaaacataaac

SEQ ID NO: 24667 - DNA, 21 bp, synthetic construct
  source 1..21: mol_type = other DNA
actaaatcgactaacggggta

SEQ ID NO: 24668 - DNA, 21 bp, synthetic construct
  source 1..21: mol_type = other DNA
ctccatcggctcagtcccagt

SEQ ID NO: 24669 - DNA, 21 bp, synthetic construct
  source 1..21: mol_type = other DNA
gacatgacatcatctagttgg

SEQ ID NO: 24670 - DNA, 21 bp, synthetic construct
  source 1..21: mol_type = other DNA
aggtcggactttgtggcgttc

SEQ ID NO: 24671 - DNA, 21 bp, synthetic construct
  source 1..21: mol_type = other DNA
tacttcacggggatggtagag

SEQ ID NO: 24672 - DNA, 21 bp, synthetic construct
  source 1..21: mol_type = other DNA
ccaatggagtcgcgtgagtgg

SEQ ID NO: 24673 - DNA, 21 bp, synthetic construct
  source 1..21: mol_type = other DNA
tatcaccgattgtccgatgac

SEQ ID NO: 24674 - DNA, 21 bp, synthetic construct
  source 1..21: mol_type = other DNA
tacagcaggcttcaacccttg

SEQ ID NO: 24675 - DNA, 21 bp, synthetic construct
  source 1..21: mol_type = other DNA
aactatgcgaagtcactggaa

SEQ ID NO: 24676 - DNA, 21 bp, synthetic construct
  source 1..21: mol_type = other DNA
tacgtcaagagtcaagcctgc

SEQ ID NO: 24677 - DNA, 21 bp, synthetic construct
  source 1..21: mol_type = other DNA
ttttcacgtcttaatcctgat

SEQ ID NO: 24678 - DNA, 21 bp, synthetic construct
  source 1..21: mol_type = other DNA
tactccaagcaagggatgaat

SEQ ID NO: 24679 - DNA, 21 bp, synthetic construct
  source 1..21: mol_type = other DNA
tatttttcgggaaaacaggaa

SEQ ID NO: 24680 - DNA, 21 bp, synthetic construct
  source 1..21: mol_type = other DNA
gtgatgtcttcgcgtagttgg

SEQ ID NO: 24681 - DNA, 21 bp, synthetic construct
  source 1..21: mol_type = other DNA
atgaaagatggcaccaatgcg

SEQ ID NO: 24682 - DNA, 21 bp, synthetic construct
  source 1..21: mol_type = other DNA
aaggatgagttccgatcatac

SEQ ID NO: 24683 - DNA, 21 bp, synthetic construct
  source 1..21: mol_type = other DNA
ttcttcgatggaacaagcgca

SEQ ID NO: 24684 - DNA, 21 bp, synthetic construct
  source 1..21: mol_type = other DNA
tatcataaacatcagactaac

SEQ ID NO: 24685 - DNA, 21 bp, synthetic construct
  source 1..21: mol_type = other DNA
ggcggagattattcatcatgg

SEQ ID NO: 24686 - DNA, 21 bp, synthetic construct
  source 1..21: mol_type = other DNA; mol_type = other DNA
tatttcagtggtaagcaagag

SEQ ID NO: 24687 - DNA, 21 bp, synthetic construct
  source 1..21: mol_type = other DNA; mol_type = other DNA
ttgcacagactatcaccgtcc

SEQ ID NO: 24688 - DNA, 21 bp, synthetic construct
  source 1..21: mol_type = other DNA; mol_type = other DNA
tactttaccgggatacaggac

SEQ ID NO: 24689 - DNA, 21 bp, synthetic construct
  source 1..21: mol_type = other DNA; mol_type = other DNA
aggatggaatctcaaggttgg

SEQ ID NO: 24690 - DNA, 21 bp, synthetic construct
  source 1..21: mol_type = other DNA; mol_type = other DNA
gggggagagacatcgagatgg

SEQ ID NO: 24691 - DNA, 21 bp, synthetic construct
  source 1..21: mol_type = other DNA; mol_type = other DNA
ctgtgcaggccgtgtagcgga

SEQ ID NO: 24692 - DNA, 21 bp, synthetic construct
  source 1..21: mol_type = other DNA; mol_type = other DNA
aaagacgactatgagtatttc

SEQ ID NO: 24693 - DNA, 21 bp, synthetic construct
  source 1..21: mol_type = other DNA; mol_type = other DNA
tacgtcaggtcaggacctaac

SEQ ID NO: 24694 - DNA, 21 bp, synthetic construct
  source 1..21: mol_type = other DNA; mol_type = other DNA
tattttaccggaaagcgcgaa

SEQ ID NO: 24695 - DNA, 21 bp, synthetic construct
  source 1..21: mol_type = other DNA; mol_type = other DNA
tttgcgaagaacggtccaaat

SEQ ID NO: 24696 - DNA, 21 bp, synthetic construct
  source 1..21: mol_type = other DNA; mol_type = other DNA
tatagtaaagccggatggaac

SEQ ID NO: 24697 - DNA, 21 bp, synthetic construct
  source 1..21: mol_type = other DNA; mol_type = other DNA
cgcagtgtggatgcgtacccc

SEQ ID NO: 24698 - DNA, 21 bp, synthetic construct
  source 1..21: mol_type = other DNA; mol_type = other DNA
tacgttcgtagtgaccatggg

SEQ ID NO: 24699 - DNA, 21 bp, synthetic construct
  source 1..21: mol_type = other DNA; mol_type = other DNA
ttatgccgaccttgtaccgaa

SEQ ID NO: 24700 - DNA, 21 bp, synthetic construct
  source 1..21: mol_type = other DNA; mol_type = other DNA
ctttcgcgcatttctatgaac

SEQ ID NO: 24701 - DNA, 21 bp, synthetic construct
  source 1..21: mol_type = other DNA; mol_type = other DNA
tacttcacaggtaaaagggag

SEQ ID NO: 24702 - DNA, 21 bp, synthetic construct
  source 1..21: mol_type = other DNA; mol_type = other DNA
cggagcgatttcgagtatttc

SEQ ID NO: 24703 - DNA, 21 bp, synthetic construct
  source 1..21: mol_type = other DNA; mol_type = other DNA
atgcgcgacggcactaacgcg

SEQ ID NO: 24704 - DNA, 21 bp, synthetic construct
  source 1..21: mol_type = other DNA; mol_type = other DNA
cgagaggccgtttctacatgg

SEQ ID NO: 24705 - DNA, 21 bp, synthetic construct
  source 1..21: mol_type = other DNA; mol_type = other DNA
attatggccgatcgtgcttgg

SEQ ID NO: 24706 - DNA, 21 bp, synthetic construct
  source 1..21: mol_type = other DNA; mol_type = other DNA
ctaagtcgggcatcggcgaac

SEQ ID NO: 24707 - DNA, 21 bp, synthetic construct
  source 1..21: mol_type = other DNA; mol_type = other DNA
tattcacgcgttggtgaaaac

SEQ ID NO: 24708 - DNA, 21 bp, synthetic construct
  source 1..21: mol_type = other DNA; mol_type = other DNA
tacgtgcgaagtaatccggga

SEQ ID NO: 24709 - DNA, 21 bp, synthetic construct
  source 1..21: mol_type = other DNA; mol_type = other DNA
tacagcaaaagtggctataat

SEQ ID NO: 24710 - DNA, 21 bp, synthetic construct
  source 1..21: mol_type = other DNA; mol_type = other DNA
ccgatggggtccgcaatgtgg

SEQ ID NO: 24711 - DNA, 21 bp, synthetic construct
  source 1..21: mol_type = other DNA; mol_type = other DNA
tatttttcaggcattccagag

SEQ ID NO: 24712 - DNA, 21 bp, synthetic construct
  source 1..21: mol_type = other DNA; mol_type = other DNA
ttgtccagagctagtgcgaat

SEQ ID NO: 24713 - DNA, 21 bp, synthetic construct
  source 1..21: mol_type = other DNA; mol_type = other DNA
tactttgccggcgtatgccca

SEQ ID NO: 24714 - DNA, 21 bp, synthetic construct
  source 1..21: mol_type = other DNA; mol_type = other DNA
agggaattcgatgcctttcct

SEQ ID NO: 24715 - DNA, 21 bp, synthetic construct
  source 1..21: mol_type = other DNA; mol_type = other DNA
gtagccgaccatttacgttgg

SEQ ID NO: 24716 - DNA, 21 bp, synthetic construct
  source 1..21: mol_type = other DNA; mol_type = other DNA
tacttcgcaggcgttcgggag

SEQ ID NO: 24717 - DNA, 21 bp, synthetic construct
  source 1..21: mol_type = other DNA; mol_type = other DNA
tactcgaagcagaatttcaat

SEQ ID NO: 24718 - DNA, 21 bp, synthetic construct
  source 1..21: mol_type = other DNA; mol_type = other DNA
cgggaggattttgtatcgtat

SEQ ID NO: 24719 - DNA, 21 bp, synthetic construct
  source 1..21: mol_type = other DNA; mol_type = other DNA
ttttttaccgggagggtggag

SEQ ID NO: 24720 - DNA, 21 bp, synthetic construct
  source 1..21: mol_type = other DNA; mol_type = other DNA
ttgacgcgtataagtcgggac

SEQ ID NO: 24721 - DNA, 21 bp, synthetic construct
  source 1..21: mol_type = other DNA; mol_type = other DNA
ttacatagactatctactcac

SEQ ID NO: 24722 - DNA, 21 bp, synthetic construct
  source 1..21: mol_type = other DNA; mol_type = other DNA
tacagtaggttacaggataat

SEQ ID NO: 24723 - DNA, 21 bp, synthetic construct
  source 1..21: mol_type = other DNA; mol_type = other DNA
tactttcatgggaagatcgaa

SEQ ID NO: 24724 - DNA, 21 bp, synthetic construct
  source 1..21: mol_type = other DNA; mol_type = other DNA
tatagtaggttggaccccgtc

SEQ ID NO: 24725 - DNA, 21 bp, synthetic construct
  source 1..21: mol_type = other DNA; mol_type = other DNA
ttttttacaggcaagatagcc

SEQ ID NO: 24726 - DNA, 21 bp, synthetic construct
  source 1..21: mol_type = other DNA; mol_type = other DNA
aaaggggacagcagatcatgg

SEQ ID NO: 24727 - DNA, 21 bp, synthetic construct
  source 1..21: mol_type = other DNA; mol_type = other DNA
tactatacaggaaagaaggag

SEQ ID NO: 24728 - DNA, 21 bp, synthetic construct
  source 1..21: mol_type = other DNA; mol_type = other DNA
cttgacgaatggcacggattt

SEQ ID NO: 24729 - DNA, 21 bp, synthetic construct
  source 1..21: mol_type = other DNA; mol_type = other DNA
tacttcagtggccagatggaa

SEQ ID NO: 24730 - DNA, 21 bp, synthetic construct
  source 1..21: mol_type = other DNA; mol_type = other DNA
tacttctcaggtatggttgcg

SEQ ID NO: 24731 - DNA, 21 bp, synthetic construct
  source 1..21: mol_type = other DNA; mol_type = other DNA
tacttttcgggggtttcccag

SEQ ID NO: 24732 - DNA, 21 bp, synthetic construct
  source 1..21: mol_type = other DNA; mol_type = other DNA
agagacgaattcgtcagttgg

SEQ ID NO: 24733 - DNA, 21 bp, synthetic construct
  source 1..21: mol_type = other DNA; mol_type = other DNA
cataatagtacaaacggggtg

SEQ ID NO: 24734 - DNA, 21 bp, synthetic construct
  source 1..21: mol_type = other DNA
agggatggaactagtcactgg

SEQ ID NO: 24735 - DNA, 21 bp, synthetic construct
  source 1..21: mol_type = other DNA; mol_type = other DNA
aaaagcgattacttaacttat

SEQ ID NO: 24736 - DNA, 21 bp, synthetic construct
  source 1..21: mol_type = other DNA; mol_type = other DNA
ccatacgcgaagagtagggat

SEQ ID NO: 24737 - DNA, 21 bp, synthetic construct
  source 1..21: mol_type = other DNA; mol_type = other DNA
taccatgccaagggagtaaac

SEQ ID NO: 24738 - DNA, 21 bp, synthetic construct
  source 1..21: mol_type = other DNA; mol_type = other DNA
tacttcacaggcattcagggg

SEQ ID NO: 24739 - DNA, 21 bp, synthetic construct
  source 1..21: mol_type = other DNA; mol_type = other DNA
tacttttcaggcgaaaaggaa

SEQ ID NO: 24740 - DNA, 21 bp, synthetic construct
  source 1..21: mol_type = other DNA; mol_type = other DNA
attttaagtgatcgggtgtgg

SEQ ID NO: 24741 - DNA, 21 bp, synthetic construct
  source 1..21: mol_type = other DNA; mol_type = other DNA
tattggagtggagtcacggcc

SEQ ID NO: 24742 - DNA, 21 bp, synthetic construct
  source 1..21: mol_type = other DNA; mol_type = other DNA
cgcgaagaaaccgtgtattgg

SEQ ID NO: 24743 - DNA, 21 bp, synthetic construct
  source 1..21: mol_type = other DNA; mol_type = other DNA
gaactagagagtagagaatgg

SEQ ID NO: 24744 - DNA, 21 bp, synthetic construct
  source 1..21: mol_type = other DNA; mol_type = other DNA
cacagtaagctaaatcctatg

SEQ ID NO: 24745 - DNA, 21 bp, synthetic construct
  source 1..21: mol_type = other DNA; mol_type = other DNA
cgcgacgagttttgtacgcga

SEQ ID NO: 24746 - DNA, 21 bp, synthetic construct
  source 1..21: mol_type = other DNA; mol_type = other DNA
tatttccacggtaagatagcc

SEQ ID NO: 24747 - DNA, 21 bp, synthetic construct
  source 1..21: mol_type = other DNA; mol_type = other DNA
tactttagcggcatccagagc

SEQ ID NO: 24748 - DNA, 21 bp, synthetic construct
  source 1..21: mol_type = other DNA; mol_type = other DNA
ctttgtcgcccttgtagggag

SEQ ID NO: 24749 - DNA, 21 bp, synthetic construct
  source 1..21: mol_type = other DNA; mol_type = other DNA
aagtcagagtactcaacatat

SEQ ID NO: 24750 - DNA, 21 bp, synthetic construct
  source 1..21: mol_type = other DNA; mol_type = other DNA
tattggaccggaacggtggca

SEQ ID NO: 24751 - DNA, 21 bp, synthetic construct
  source 1..21: mol_type = other DNA; mol_type = other DNA
ctagcgaaaaccggcaataac

SEQ ID NO: 24752 - DNA, 21 bp, synthetic construct
  source 1..21: mol_type = other DNA; mol_type = other DNA
agggacggcgctagcagctgg

SEQ ID NO: 24753 - DNA, 21 bp, synthetic construct
  source 1..21: mol_type = other DNA; mol_type = other DNA
cttgcccgtactgggatcgac

SEQ ID NO: 24754 - DNA, 21 bp, synthetic construct
  source 1..21: mol_type = other DNA; mol_type = other DNA
ttcttttcgggtatcaaggag

SEQ ID NO: 24755 - DNA, 21 bp, synthetic construct
  source 1..21: mol_type = other DNA; mol_type = other DNA
ccgatggagagttcccagtgg

SEQ ID NO: 24756 - DNA, 21 bp, synthetic construct
  source 1..21: mol_type = other DNA; mol_type = other DNA
cgcggtgatgaagtctatccg

SEQ ID NO: 24757 - DNA, 21 bp, synthetic construct
  source 1..21: mol_type = other DNA; mol_type = other DNA
tggtggtcaggcgtaatagaa

SEQ ID NO: 24758 - DNA, 21 bp, synthetic construct
  source 1..21: mol_type = other DNA; mol_type = other DNA
aagatgccgtcgcgcgattgg

SEQ ID NO: 24759 - DNA, 21 bp, synthetic construct
  source 1..21: mol_type = other DNA; mol_type = other DNA
aacgacgggaattcgaagtgg

SEQ ID NO: 24760 - DNA, 21 bp, synthetic construct
  source 1..21: mol_type = other DNA; mol_type = other DNA
atcatgtcggatagggtttgg

SEQ ID NO: 24761 - DNA, 21 bp, synthetic construct
  source 1..21: mol_type = other DNA; mol_type = other DNA
tacttcactggcagaaccgag

SEQ ID NO: 24762 - DNA, 21 bp, synthetic construct
  source 1..21: mol_type = other DNA; mol_type = other DNA
tactttacaggtcaacatgcc

SEQ ID NO: 24763 - DNA, 21 bp, synthetic construct
  source 1..21: mol_type = other DNA; mol_type = other DNA
tttagccgtattgggatgaac

SEQ ID NO: 24764 - DNA, 21 bp, synthetic construct
  source 1..21: mol_type = other DNA; mol_type = other DNA
ataatgagcaccaacggggtg

SEQ ID NO: 24765 - DNA, 21 bp, synthetic construct
  source 1..21: mol_type = other DNA; mol_type = other DNA
tattttagcggaaagatcatg

SEQ ID NO: 24766 - DNA, 21 bp, synthetic construct
  source 1..21: mol_type = other DNA; mol_type = other DNA
actcgatcaacgaacggcgtg

SEQ ID NO: 24767 - DNA, 21 bp, synthetic construct
  source 1..21: mol_type = other DNA; mol_type = other DNA
cgtgacggcagctctgcatgg

SEQ ID NO: 24768 - DNA, 21 bp, synthetic construct
  source 1..21: mol_type = other DNA; mol_type = other DNA
tattttacgggaaaggctaat

SEQ ID NO: 24769 - DNA, 21 bp, synthetic construct
  source 1..21: mol_type = other DNA; mol_type = other DNA
tatgttaaaggtgatacacgg

SEQ ID NO: 24770 - DNA, 21 bp, synthetic construct
  source 1..21: mol_type = other DNA; mol_type = other DNA
agggtaatggacgcgtacgct

SEQ ID NO: 24771 - DNA, 21 bp, synthetic construct
  source 1..21: mol_type = other DNA; mol_type = other DNA
tatttctcgggtactattaat

SEQ ID NO: 24772 - DNA, 21 bp, synthetic construct
  source 1..21: mol_type = other DNA; mol_type = other DNA
catacgagcactaacggtgtc

SEQ ID NO: 24773 - DNA, 21 bp, synthetic construct
  source 1..21: mol_type = other DNA; mol_type = other DNA
atgagtaagcttaacgccaac

SEQ ID NO: 24774 - DNA, 21 bp, synthetic construct
  source 1..21: mol_type = other DNA; mol_type = other DNA
cgtgatgacttcgtcaaatgg

SEQ ID NO: 24775 - DNA, 21 bp, synthetic construct
  source 1..21: mol_type = other DNA; mol_type = other DNA
aaagacgatttcgtctcctac

SEQ ID NO: 24776 - DNA, 21 bp, synthetic construct
  source 1..21: mol_type = other DNA; mol_type = other DNA
aaagacgactttgtgagctac

SEQ ID NO: 24777 - DNA, 21 bp, synthetic construct
  source 1..21: mol_type = other DNA; mol_type = other DNA
tacgtaaggtctgacactaaa

SEQ ID NO: 24778 - DNA, 21 bp, synthetic construct
  source 1..21: mol_type = other DNA; mol_type = other DNA
tacttcaccggacagatggac

SEQ ID NO: 24779 - DNA, 21 bp, synthetic construct
  source 1..21: mol_type = other DNA; mol_type = other DNA
tatttcagtggtgtcgtacgc

SEQ ID NO: 24780 - DNA, 21 bp, synthetic construct
  source 1..21: mol_type = other DNA; mol_type = other DNA
tatagtaaggttggcaagaac

SEQ ID NO: 24781 - DNA, 21 bp, synthetic construct
  source 1..21: mol_type = other DNA; mol_type = other DNA
gttgaatctagcaggttatgg

SEQ ID NO: 24782 - DNA, 21 bp, synthetic construct
  source 1..21: mol_type = other DNA; mol_type = other DNA
cgagaggagttcacggcatgg

SEQ ID NO: 24783 - DNA, 21 bp, synthetic construct
  source 1..21: mol_type = other DNA; mol_type = other DNA
tatttcacgggaatccaagat

SEQ ID NO: 24784 - DNA, 21 bp, synthetic construct
  source 1..21: mol_type = other DNA; mol_type = other DNA
gcgggcgaatcgcgcggttgg

SEQ ID NO: 24785 - DNA, 21 bp, synthetic construct
  source 1..21: mol_type = other DNA; mol_type = other DNA
tacgtcaagtcgcagcagact

SEQ ID NO: 24786 - DNA, 21 bp, synthetic construct
  source 1..21: mol_type = other DNA; mol_type = other DNA
cgagaccaaaccgtttatccg

SEQ ID NO: 24787 - DNA, 21 bp, synthetic construct
  source 1..21: mol_type = other DNA; mol_type = other DNA
gtcttttccacaaacggcgtg

SEQ ID NO: 24788 - DNA, 21 bp, synthetic construct
  source 1..21: mol_type = other DNA; mol_type = other DNA
tacttgaagtcccagtcagga

SEQ ID NO: 24789 - DNA, 21 bp, synthetic construct
  source 1..21: mol_type = other DNA; mol_type = other DNA
tattttacaggcagaatagat

SEQ ID NO: 24790 - DNA, 21 bp, synthetic construct
  source 1..21: mol_type = other DNA; mol_type = other DNA
tattttacaggtgtccaatta

SEQ ID NO: 24791 - DNA, 21 bp, synthetic construct
  source 1..21: mol_type = other DNA; mol_type = other DNA
tactctaagatggggaataac

SEQ ID NO: 24792 - DNA, 21 bp, synthetic construct
  source 1..21: mol_type = other DNA; mol_type = other DNA
taccacaaaatgcagtgcaac

SEQ ID NO: 24793 - DNA, 21 bp, synthetic construct
  source 1..21: mol_type = other DNA; mol_type = other DNA
tatttcagtggtcagatcgaa

SEQ ID NO: 24794 - DNA, 21 bp, synthetic construct
  source 1..21: mol_type = other DNA; mol_type = other DNA
aaaatgtctagcgccaactgg

SEQ ID NO: 24795 - DNA, 21 bp, synthetic construct
  source 1..21: mol_type = other DNA; mol_type = other DNA
tatgctaaggggaacccaaat

SEQ ID NO: 24796 - DNA, 21 bp, synthetic construct
  source 1..21: mol_type = other DNA; mol_type = other DNA
ggcggtatagggtctaactgg

SEQ ID NO: 24797 - DNA, 21 bp, synthetic construct
  source 1..21: mol_type = other DNA; mol_type = other DNA
ttatgtagaccttgtaaggag

SEQ ID NO: 24798 - DNA, 21 bp, synthetic construct
  source 1..21: mol_type = other DNA; mol_type = other DNA
tacagcaaattggattcacgt

SEQ ID NO: 24799 - DNA, 21 bp, synthetic construct
  source 1..21: mol_type = other DNA; mol_type = other DNA
tggtggagtgggatggtggaa

SEQ ID NO: 24800 - DNA, 21 bp, synthetic construct
  source 1..21: mol_type = other DNA; mol_type = other DNA
tttttcacggggaaaatcgca

SEQ ID NO: 24801 - DNA, 21 bp, synthetic construct
  source 1..21: mol_type = other DNA; mol_type = other DNA
cgggaccaaaccgtataccct

SEQ ID NO: 24802 - DNA, 21 bp, synthetic construct
  source 1..21: mol_type = other DNA; mol_type = other DNA
gggagccccggagtgcattgg

SEQ ID NO: 24803 - DNA, 21 bp, synthetic construct
  source 1..21: mol_type = other DNA; mol_type = other DNA
ttaagcagacttaacatggac

SEQ ID NO: 24804 - DNA, 21 bp, synthetic construct
  source 1..21: mol_type = other DNA; mol_type = other DNA
tactggtctggagttatcgag

SEQ ID NO: 24805 - DNA, 21 bp, synthetic construct
  source 1..21: mol_type = other DNA; mol_type = other DNA
cgcggggaaggggtctaccca

SEQ ID NO: 24806 - DNA, 21 bp, synthetic construct
  source 1..21: mol_type = other DNA; mol_type = other DNA
ctttcgcgtttaaatatggat

SEQ ID NO: 24807 - DNA, 21 bp, synthetic construct
  source 1..21: mol_type = other DNA; mol_type = other DNA
tacgccaaaggtaacccgaac

SEQ ID NO: 24808 - DNA, 21 bp, synthetic construct
  source 1..21: mol_type = other DNA
tttcataggttgagccctgac

SEQ ID NO: 24809 - DNA, 21 bp, synthetic construct
  source 1..21: mol_type = other DNA; mol_type = other DNA
tattcccggcttaacttggat

SEQ ID NO: 24810 - DNA, 21 bp, synthetic construct
  source 1..21: mol_type = other DNA; mol_type = other DNA
tatagtaagttgggagataac

SEQ ID NO: 24811 - DNA, 21 bp, synthetic construct
  source 1..21: mol_type = other DNA; mol_type = other DNA
tacagtaagatgaacaataat

SEQ ID NO: 24812 - DNA, 21 bp, synthetic construct
  source 1..21: mol_type = other DNA; mol_type = other DNA
tatagtaaattgcagaagaat

SEQ ID NO: 24813 - DNA, 21 bp, synthetic construct
  source 1..21: mol_type = other DNA; mol_type = other DNA
tttttcactggggtgcgcgag

SEQ ID NO: 24814 - DNA, 21 bp, synthetic construct
  source 1..21: mol_type = other DNA; mol_type = other DNA
tattggagcgcaatcaaagaa

SEQ ID NO: 24815 - DNA, 21 bp, synthetic construct
  source 1..21: mol_type = other DNA; mol_type = other DNA
tatgtcaaatcagacatggct

SEQ ID NO: 24816 - DNA, 21 bp, synthetic construct
  source 1..21: mol_type = other DNA; mol_type = other DNA
ttttcccgcttgagtcctcta

SEQ ID NO: 24817 - DNA, 21 bp, synthetic construct
  source 1..21: mol_type = other DNA; mol_type = other DNA
tatttcacagggcagaccgac

SEQ ID NO: 24818 - DNA, 21 bp, synthetic construct
  source 1..21: mol_type = other DNA; mol_type = other DNA
tacttgaaatcgcagcattat

SEQ ID NO: 24819 - DNA, 21 bp, synthetic construct
  source 1..21: mol_type = other DNA; mol_type = other DNA
tatttcactgggaaacaagac

SEQ ID NO: 24820 - DNA, 21 bp, synthetic construct
  source 1..21: mol_type = other DNA; mol_type = other DNA
gttatggaatctacccgatgg

SEQ ID NO: 24821 - DNA, 21 bp, synthetic construct
  source 1..21: mol_type = other DNA; mol_type = other DNA
tatttcagtggtacaaaactg

SEQ ID NO: 24822 - DNA, 21 bp, synthetic construct
  source 1..21: mol_type = other DNA; mol_type = other DNA
gggggcgagacctcccactgg

SEQ ID NO: 24823 - DNA, 21 bp, synthetic construct
  source 1..21: mol_type = other DNA; mol_type = other DNA
agggagtcagaagtcagatgg

SEQ ID NO: 24824 - DNA, 21 bp, synthetic construct
  source 1..21: mol_type = other DNA; mol_type = other DNA
cgattagaggatcgtctctgg

SEQ ID NO: 24825 - DNA, 21 bp, synthetic construct
  source 1..21: mol_type = other DNA; mol_type = other DNA
ttctttacgggagtaagggag

SEQ ID NO: 24826 - DNA, 21 bp, synthetic construct
  source 1..21: mol_type = other DNA; mol_type = other DNA
tatttcgccgggaaggttgcc

SEQ ID NO: 24827 - DNA, 21 bp, synthetic construct
  source 1..21: mol_type = other DNA; mol_type = other DNA
tacgtgaaaagccaaacctgg

SEQ ID NO: 24828 - DNA, 21 bp, synthetic construct
  source 1..21: mol_type = other DNA; mol_type = other DNA
tacttctcgggccagactgca

SEQ ID NO: 24829 - DNA, 21 bp, synthetic construct
  source 1..21: mol_type = other DNA; mol_type = other DNA
agagatgaatttgttagctgg

SEQ ID NO: 24830 - DNA, 21 bp, synthetic construct
  source 1..21: mol_type = other DNA; mol_type = other DNA
ttatccagaatcgcactcaat

SEQ ID NO: 24831 - DNA, 21 bp, synthetic construct
  source 1..21: mol_type = other DNA; mol_type = other DNA
tactcgaagatgggcgcgaat

SEQ ID NO: 24832 - DNA, 21 bp, synthetic construct
  source 1..21: mol_type = other DNA; mol_type = other DNA
cttcatagactctccgacagc

SEQ ID NO: 24833 - DNA, 21 bp, synthetic construct
  source 1..21: mol_type = other DNA; mol_type = other DNA
attggtgagtcacgactatgg

SEQ ID NO: 24834 - DNA, 21 bp, synthetic construct
  source 1..21: mol_type = other DNA; mol_type = other DNA
tatagtaaacagggtatgaac

SEQ ID NO: 24835 - DNA, 21 bp, synthetic construct
  source 1..21: mol_type = other DNA; mol_type = other DNA
gtaggacaccgtggctgggac

SEQ ID NO: 24836 - DNA, 21 bp, synthetic construct
  source 1..21: mol_type = other DNA; mol_type = other DNA
tccggaagtactaacggtgtg

SEQ ID NO: 24837 - DNA, 21 bp, synthetic construct
  source 1..21: mol_type = other DNA; mol_type = other DNA
tttcatcggcttagcatcgat

SEQ ID NO: 24838 - DNA, 21 bp, synthetic construct
  source 1..21: mol_type = other DNA; mol_type = other DNA
tactggagcggcgtcaaggac

SEQ ID NO: 24839 - DNA, 21 bp, synthetic construct
  source 1..21: mol_type = other DNA; mol_type = other DNA
tatcttaagtctcagaccgtg

SEQ ID NO: 24840 - DNA, 21 bp, synthetic construct
  source 1..21: mol_type = other DNA; mol_type = other DNA
tattttaccggtatgatcgag

SEQ ID NO: 24841 - DNA, 21 bp, synthetic construct
  source 1..21: mol_type = other DNA; mol_type = other DNA
cgggacgaatttacggtgtac

SEQ ID NO: 24842 - DNA, 21 bp, synthetic construct
  source 1..21: mol_type = other DNA; mol_type = other DNA
ttagcacgaactgggattgac

SEQ ID NO: 24843 - DNA, 21 bp, synthetic construct
  source 1..21: mol_type = other DNA; mol_type = other DNA
accatttcgaccaatggagtg

SEQ ID NO: 24844 - DNA, 21 bp, synthetic construct
  source 1..21: mol_type = other DNA; mol_type = other DNA
tacgctagaacgggaccggga

SEQ ID NO: 24845 - DNA, 21 bp, synthetic construct
  source 1..21: mol_type = other DNA; mol_type = other DNA
tgcaaacctgatgctataaga

SEQ ID NO: 24846 - DNA, 21 bp, synthetic construct
  source 1..21: mol_type = other DNA; mol_type = other DNA
gtcaacgactttgtaacttac

SEQ ID NO: 24847 - DNA, 21 bp, synthetic construct
  source 1..21: mol_type = other DNA; mol_type = other DNA
tacttctcgggtcaaaaggaa

SEQ ID NO: 24848 - DNA, 21 bp, synthetic construct
  source 1..21: mol_type = other DNA; mol_type = other DNA
ataatgagcgggagaacgtgg

SEQ ID NO: 24849 - DNA, 21 bp, synthetic construct
  source 1..21: mol_type = other DNA; mol_type = other DNA
tattggacaggagtatcagag

SEQ ID NO: 24850 - DNA, 21 bp, synthetic construct
  source 1..21: mol_type = other DNA; mol_type = other DNA
aggatgcaagacgcatatcca

SEQ ID NO: 24851 - DNA, 21 bp, synthetic construct
  source 1..21: mol_type = other DNA; mol_type = other DNA
tatttttccggtaaagtctca

SEQ ID NO: 24852 - DNA, 21 bp, synthetic construct
  source 1..21: mol_type = other DNA; mol_type = other DNA
tacacgagattagacccggtc

SEQ ID NO: 24853 - DNA, 21 bp, synthetic construct
  source 1..21: mol_type = other DNA; mol_type = other DNA
gatttgcgctccgcaaattgg

SEQ ID NO: 24854 - DNA, 21 bp, synthetic construct
  source 1..21: mol_type = other DNA; mol_type = other DNA
taccatagacttagtatccat

SEQ ID NO: 24855 - DNA, 21 bp, synthetic construct
  source 1..21: mol_type = other DNA; mol_type = other DNA
atactctcagacaggaattgg

SEQ ID NO: 24856 - DNA, 21 bp, synthetic construct
  source 1..21: mol_type = other DNA; mol_type = other DNA
agaacgtatgacagcttcccg

SEQ ID NO: 24857 - DNA, 21 bp, synthetic construct
  source 1..21: mol_type = other DNA; mol_type = other DNA
cgcaagcaagatgtattcccg

SEQ ID NO: 24858 - DNA, 21 bp, synthetic construct
  source 1..21: mol_type = other DNA; mol_type = other DNA
tttttcagtggtgtcttagaa

SEQ ID NO: 24859 - DNA, 21 bp, synthetic construct
  source 1..21: mol_type = other DNA; mol_type = other DNA
tacagcaagtccaattttaat

SEQ ID NO: 24860 - DNA, 21 bp, synthetic construct
  source 1..21: mol_type = other DNA; mol_type = other DNA
taccacgcgaaaggccctagt

SEQ ID NO: 24861 - DNA, 21 bp, synthetic construct
  source 1..21: mol_type = other DNA; mol_type = other DNA
tattttacagggaagagggaa

SEQ ID NO: 24862 - DNA, 21 bp, synthetic construct
  source 1..21: mol_type = other DNA; mol_type = other DNA
gtaatgagccaggcaacctgg

SEQ ID NO: 24863 - DNA, 21 bp, synthetic construct
  source 1..21: mol_type = other DNA; mol_type = other DNA
ctgcatagactgtcggatcat

SEQ ID NO: 24864 - DNA, 21 bp, synthetic construct
  source 1..21: mol_type = other DNA; mol_type = other DNA
tactttaccggcgttatagat

SEQ ID NO: 24865 - DNA, 21 bp, synthetic construct
  source 1..21: mol_type = other DNA; mol_type = other DNA
tacttaaagtccgagaggaat

SEQ ID NO: 24866 - DNA, 21 bp, synthetic construct
  source 1..21: mol_type = other DNA; mol_type = other DNA
attaacagtactaacgggcgc

SEQ ID NO: 24867 - DNA, 21 bp, synthetic construct
  source 1..21: mol_type = other DNA; mol_type = other DNA
tacgtcagatcagacgtcggg

SEQ ID NO: 24868 - DNA, 21 bp, synthetic construct
  source 1..21: mol_type = other DNA; mol_type = other DNA
tatttcaccggttatattgat

SEQ ID NO: 24869 - DNA, 21 bp, synthetic construct
  source 1..21: mol_type = other DNA; mol_type = other DNA
gagaagaagtttaatccattc

SEQ ID NO: 24870 - DNA, 21 bp, synthetic construct
  source 1..21: mol_type = other DNA; mol_type = other DNA
ctctgcagaccgtgtagcgat

SEQ ID NO: 24871 - DNA, 21 bp, synthetic construct
  source 1..21: mol_type = other DNA; mol_type = other DNA
tattttacaggtaccatggac

SEQ ID NO: 24872 - DNA, 21 bp, synthetic construct
  source 1..21: mol_type = other DNA; mol_type = other DNA
tacttgaagtctcagcaatac

SEQ ID NO: 24873 - DNA, 21 bp, synthetic construct
  source 1..21: mol_type = other DNA; mol_type = other DNA
tactttacgggtcatcatgac

SEQ ID NO: 24874 - DNA, 21 bp, synthetic construct
  source 1..21: mol_type = other DNA; mol_type = other DNA
tatgcgaaaaacggaatgaat

SEQ ID NO: 24875 - DNA, 21 bp, synthetic construct
  source 1..21: mol_type = other DNA; mol_type = other DNA
tatttcacaggaatgattagt

SEQ ID NO: 24876 - DNA, 21 bp, synthetic construct
  source 1..21: mol_type = other DNA; mol_type = other DNA
tacttcactggggtaaaggac

SEQ ID NO: 24877 - DNA, 21 bp, synthetic construct
  source 1..21: mol_type = other DNA; mol_type = other DNA
tatctcaagtcccaatcctgc

SEQ ID NO: 24878 - DNA, 21 bp, synthetic construct
  source 1..21: mol_type = other DNA; mol_type = other DNA
tattggacgggggttgtcgac

SEQ ID NO: 24879 - DNA, 21 bp, synthetic construct
  source 1..21: mol_type = other DNA; mol_type = other DNA
taccacaagagcggagacaac

SEQ ID NO: 24880 - DNA, 21 bp, synthetic construct
  source 1..21: mol_type = other DNA; mol_type = other DNA
tattatacagggagagtagaa

SEQ ID NO: 24881 - DNA, 21 bp, synthetic construct
  source 1..21: mol_type = other DNA; mol_type = other DNA
tgcgcaccggattatagatct

SEQ ID NO: 24882 - DNA, 21 bp, synthetic construct
  source 1..21: mol_type = other DNA; mol_type = other DNA
ctcgcccgtaacggcttaaac

SEQ ID NO: 24883 - DNA, 21 bp, synthetic construct
  source 1..21: mol_type = other DNA; mol_type = other DNA
gtcatgtccgataggcactgg

SEQ ID NO: 24884 - DNA, 21 bp, synthetic construct
  source 1..21: mol_type = other DNA; mol_type = other DNA
aaggatgaattcaaagtctac

SEQ ID NO: 24885 - DNA, 21 bp, synthetic construct
  source 1..21: mol_type = other DNA; mol_type = other DNA
ctaagccgcaccggccagaac

SEQ ID NO: 24886 - DNA, 21 bp, synthetic construct
  source 1..21: mol_type = other DNA; mol_type = other DNA
tatcatgccaaaggcgaaaac

SEQ ID NO: 24887 - DNA, 21 bp, synthetic construct
  source 1..21: mol_type = other DNA; mol_type = other DNA
tactggtcaggagttaaggag

SEQ ID NO: 24888 - DNA, 21 bp, synthetic construct
  source 1..21: mol_type = other DNA; mol_type = other DNA
tattcaaaaacagggtcgaat

SEQ ID NO: 24889 - DNA, 21 bp, synthetic construct
  source 1..21: mol_type = other DNA; mol_type = other DNA
tactttacgggagttgtaggc

SEQ ID NO: 24890 - DNA, 21 bp, synthetic construct
  source 1..21: mol_type = other DNA; mol_type = other DNA
atgaaggacgggacgaacgca

SEQ ID NO: 24891 - DNA, 21 bp, synthetic construct
  source 1..21: mol_type = other DNA; mol_type = other DNA
tactataccggcataatcgcc

SEQ ID NO: 24892 - DNA, 21 bp, synthetic construct
  source 1..21: mol_type = other DNA; mol_type = other DNA
aaggatgattttgtgacttgg

SEQ ID NO: 24893 - DNA, 21 bp, synthetic construct
  source 1..21: mol_type = other DNA; mol_type = other DNA
tatcataggttaagtatcccg

SEQ ID NO: 24894 - DNA, 21 bp, synthetic construct
  source 1..21: mol_type = other DNA; mol_type = other DNA
tactcaaaaatgaatctaaac

SEQ ID NO: 24895 - DNA, 21 bp, synthetic construct
  source 1..21: mol_type = other DNA; mol_type = other DNA
aaagacgactattccgcgtac

SEQ ID NO: 24896 - DNA, 21 bp, synthetic construct
  source 1..21: mol_type = other DNA; mol_type = other DNA
aaagatgattttttgagctgg

SEQ ID NO: 24897 - DNA, 21 bp, synthetic construct
  source 1..21: mol_type = other DNA; mol_type = other DNA
aaaagtgaatatagtacgtac

SEQ ID NO: 24898 - DNA, 21 bp, synthetic construct
  source 1..21: mol_type = other DNA; mol_type = other DNA
tatctgattagtgatacaaag

SEQ ID NO: 24899 - DNA, 21 bp, synthetic construct
  source 1..21: mol_type = other DNA; mol_type = other DNA
agtacttatgacagtttcccg

SEQ ID NO: 24900 - DNA, 21 bp, synthetic construct
  source 1..21: mol_type = other DNA; mol_type = other DNA
cttcggactgattgctgtgtc

SEQ ID NO: 24901 - DNA, 21 bp, synthetic construct
  source 1..21: mol_type = other DNA; mol_type = other DNA
agggatcagactgtataccca

SEQ ID NO: 24902 - DNA, 21 bp, synthetic construct
  source 1..21: mol_type = other DNA; mol_type = other DNA
aaggatgggttttcacattac

SEQ ID NO: 24903 - DNA, 21 bp, synthetic construct
  source 1..21: mol_type = other DNA; mol_type = other DNA
ttggcaaagaatgggtttaac

SEQ ID NO: 24904 - DNA, 21 bp, synthetic construct
  source 1..21: mol_type = other DNA; mol_type = other DNA
tattggagtggaatacaactt

SEQ ID NO: 24905 - DNA, 21 bp, synthetic construct
  source 1..21: mol_type = other DNA; mol_type = other DNA
agaatggaagacagaatttgg

SEQ ID NO: 24906 - DNA, 21 bp, synthetic construct
  source 1..21: mol_type = other DNA; mol_type = other DNA
tttagtcggttgaatgacgac

SEQ ID NO: 24907 - DNA, 21 bp, synthetic construct
  source 1..21: mol_type = other DNA; mol_type = other DNA
atgagcagattatctcagaac

SEQ ID NO: 24908 - DNA, 21 bp, synthetic construct
  source 1..21: mol_type = other DNA; mol_type = other DNA
gctagtagtactaatgggcga

SEQ ID NO: 24909 - DNA, 21 bp, synthetic construct
  source 1..21: mol_type = other DNA; mol_type = other DNA
tatttctcaggcgtaattgat

SEQ ID NO: 24910 - DNA, 21 bp, synthetic construct
  source 1..21: mol_type = other DNA; mol_type = other DNA
tatttcagtgggcgtaaagaa

SEQ ID NO: 24911 - DNA, 21 bp, synthetic construct
  source 1..21: mol_type = other DNA; mol_type = other DNA
agaggaggagacgtttatccg

SEQ ID NO: 24912 - DNA, 21 bp, synthetic construct
  source 1..21: mol_type = other DNA; mol_type = other DNA
tcggatgggacatcgaggtgg

SEQ ID NO: 24913 - DNA, 21 bp, synthetic construct
  source 1..21: mol_type = other DNA; mol_type = other DNA
agggacgagttcgtgagctac

SEQ ID NO: 24914 - DNA, 21 bp, synthetic construct
  source 1..21: mol_type = other DNA; mol_type = other DNA
ggaggagaatatagtaagtgg

SEQ ID NO: 24915 - DNA, 21 bp, synthetic construct
  source 1..21: mol_type = other DNA; mol_type = other DNA
ggtgcagagcatgtcaggtgg

SEQ ID NO: 24916 - DNA, 21 bp, synthetic construct
  source 1..21: mol_type = other DNA; mol_type = other DNA
gacatgacgagtcgtgactgg

SEQ ID NO: 24917 - DNA, 21 bp, synthetic construct
  source 1..21: mol_type = other DNA; mol_type = other DNA
cgggatgagacgagtcactgg

SEQ ID NO: 24918 - DNA, 21 bp, synthetic construct
  source 1..21: mol_type = other DNA; mol_type = other DNA
ttggccaaaaccggagctaac

SEQ ID NO: 24919 - DNA, 21 bp, synthetic construct
  source 1..21: mol_type = other DNA; mol_type = other DNA
tacttgaaatcccaggactat

SEQ ID NO: 24920 - DNA, 21 bp, synthetic construct
  source 1..21: mol_type = other DNA; mol_type = other DNA
tacttctcgggcataccagac

SEQ ID NO: 24921 - DNA, 21 bp, synthetic construct
  source 1..21: mol_type = other DNA; mol_type = other DNA
ctccatagggtgggccaaaac

SEQ ID NO: 24922 - DNA, 21 bp, synthetic construct
  source 1..21: mol_type = other DNA; mol_type = other DNA
aatagtttggaaggtagaaac

SEQ ID NO: 24923 - DNA, 21 bp, synthetic construct
  source 1..21: mol_type = other DNA; mol_type = other DNA
tactggtcaggtgtggtggcc

SEQ ID NO: 24924 - DNA, 21 bp, synthetic construct
  source 1..21: mol_type = other DNA; mol_type = other DNA
aatatggctagccgggactgg

SEQ ID NO: 24925 - DNA, 21 bp, synthetic construct
  source 1..21: mol_type = other DNA; mol_type = other DNA
gtaccagaatcagtccgatgg

SEQ ID NO: 24926 - DNA, 21 bp, synthetic construct
  source 1..21: mol_type = other DNA; mol_type = other DNA
tattttacgggccatccagat

SEQ ID NO: 24927 - DNA, 21 bp, synthetic construct
  source 1..21: mol_type = other DNA; mol_type = other DNA
tattcccgactccaaccagat

SEQ ID NO: 24928 - DNA, 21 bp, synthetic construct
  source 1..21: mol_type = other DNA; mol_type = other DNA
cgagacgtctcggtgtttcct

SEQ ID NO: 24929 - DNA, 21 bp, synthetic construct
  source 1..21: mol_type = other DNA; mol_type = other DNA
tacttcacagggcagagcgac

SEQ ID NO: 24930 - DNA, 21 bp, synthetic construct
  source 1..21: mol_type = other DNA; mol_type = other DNA
tatagtcgcgtcggcgggggg

SEQ ID NO: 24931 - DNA, 21 bp, synthetic construct
  source 1..21: mol_type = other DNA; mol_type = other DNA
ctcgcccgcatcggttgggac

SEQ ID NO: 24932 - DNA, 21 bp, synthetic construct
  source 1..21: mol_type = other DNA; mol_type = other DNA
agaagcgaattcgaaacattc

SEQ ID NO: 24933 - DNA, 21 bp, synthetic construct
  source 1..21: mol_type = other DNA; mol_type = other DNA
tacagtagactaggagagaat

SEQ ID NO: 24934 - DNA, 21 bp, synthetic construct
  source 1..21: mol_type = other DNA; mol_type = other DNA
aaggatgagttcaaagtttac

SEQ ID NO: 24935 - DNA, 21 bp, synthetic construct
  source 1..21: mol_type = other DNA; mol_type = other DNA
ctctcgaggatagctacaaat

SEQ ID NO: 24936 - DNA, 21 bp, synthetic construct
  source 1..21: mol_type = other DNA; mol_type = other DNA
tatctgaaatcacagagcttt

SEQ ID NO: 24937 - DNA, 21 bp, synthetic construct
  source 1..21: mol_type = other DNA; mol_type = other DNA
tacagccgcaagaacgacaac

SEQ ID NO: 24938 - DNA, 21 bp, synthetic construct
  source 1..21: mol_type = other DNA; mol_type = other DNA
tacttgaaatccgacaaaagt

SEQ ID NO: 24939 - DNA, 21 bp, synthetic construct
  source 1..21: mol_type = other DNA; mol_type = other DNA
taccacaaactggacattaac

SEQ ID NO: 24940 - DNA, 21 bp, synthetic construct
  source 1..21: mol_type = other DNA; mol_type = other DNA
agaacacatgatgtgtaccca

SEQ ID NO: 24941 - DNA, 21 bp, synthetic construct
  source 1..21: mol_type = other DNA; mol_type = other DNA
cccaggagtaccaatggtgtt

SEQ ID NO: 24942 - DNA, 21 bp, synthetic construct
  source 1..21: mol_type = other DNA; mol_type = other DNA
ctgtcacgtatcagtcacgac

SEQ ID NO: 24943 - DNA, 21 bp, synthetic construct
  source 1..21: mol_type = other DNA; mol_type = other DNA
tgcaaacccttagaacgaccg

SEQ ID NO: 24944 - DNA, 21 bp, synthetic construct
  source 1..21: mol_type = other DNA; mol_type = other DNA
ctcgcccggacaggcgagaac

SEQ ID NO: 24945 - DNA, 21 bp, synthetic construct
  source 1..21: mol_type = other DNA; mol_type = other DNA
agagacggtttctcgtcatac

SEQ ID NO: 24946 - DNA, 21 bp, synthetic construct
  source 1..21: mol_type = other DNA; mol_type = other DNA
ttatcaagggtttctgtggat

SEQ ID NO: 24947 - DNA, 21 bp, synthetic construct
  source 1..21: mol_type = other DNA; mol_type = other DNA
ggtggagagggaagtttttgg

SEQ ID NO: 24948 - DNA, 21 bp, synthetic construct
  source 1..21: mol_type = other DNA; mol_type = other DNA
tattttacaggtatacatgta

SEQ ID NO: 24949 - DNA, 21 bp, synthetic construct
  source 1..21: mol_type = other DNA; mol_type = other DNA
tattttgcgggcaagagggag

SEQ ID NO: 24950 - DNA, 21 bp, synthetic construct
  source 1..21: mol_type = other DNA; mol_type = other DNA
agagacgagtttaaatcgtgg

SEQ ID NO: 24951 - DNA, 21 bp, synthetic construct
  source 1..21: mol_type = other DNA; mol_type = other DNA
tatttcacaggagtgatggac

SEQ ID NO: 24952 - DNA, 21 bp, synthetic construct
  source 1..21: mol_type = other DNA; mol_type = other DNA
tatcacgcgaaaggcgtcaat

SEQ ID NO: 24953 - DNA, 21 bp, synthetic construct
  source 1..21: mol_type = other DNA; mol_type = other DNA
tgcacgtcattaactggacat

SEQ ID NO: 24954 - DNA, 21 bp, synthetic construct
  source 1..21: mol_type = other DNA; mol_type = other DNA
tacagtcgggtcggagagaac

SEQ ID NO: 24955 - DNA, 21 bp, synthetic construct
  source 1..21: mol_type = other DNA; mol_type = other DNA
tacgtaaaatctgacccgatg

SEQ ID NO: 24956 - DNA, 21 bp, synthetic construct
  source 1..21: mol_type = other DNA; mol_type = other DNA
ctggcccgcggggggccggac

SEQ ID NO: 24957 - DNA, 21 bp, synthetic construct
  source 1..21: mol_type = other DNA; mol_type = other DNA
tactttacaggtttcatggag

SEQ ID NO: 24958 - DNA, 21 bp, synthetic construct
  source 1..21: mol_type = other DNA; mol_type = other DNA
ctctcaagaattggccgcgac

SEQ ID NO: 24959 - DNA, 21 bp, synthetic construct
  source 1..21: mol_type = other DNA; mol_type = other DNA
cgggatgaattcgtaagcttt

SEQ ID NO: 24960 - DNA, 21 bp, synthetic construct
  source 1..21: mol_type = other DNA; mol_type = other DNA
tactccaagcagaacctcaac

SEQ ID NO: 24961 - DNA, 21 bp, synthetic construct
  source 1..21: mol_type = other DNA; mol_type = other DNA
tgggttaagagtgacacgcat

SEQ ID NO: 24962 - DNA, 21 bp, synthetic construct
  source 1..21: mol_type = other DNA; mol_type = other DNA
tacttcacgggcaaaaatgag

SEQ ID NO: 24963 - DNA, 21 bp, synthetic construct
  source 1..21: mol_type = other DNA; mol_type = other DNA
tatagcaaagtgggccacgac

SEQ ID NO: 24964 - DNA, 21 bp, synthetic construct
  source 1..21: mol_type = other DNA; mol_type = other DNA
ttagaaagcacaaatggggtg

SEQ ID NO: 24965 - DNA, 21 bp, synthetic construct
  source 1..21: mol_type = other DNA; mol_type = other DNA
ggttcccctggcgtgagatgg

SEQ ID NO: 24966 - DNA, 21 bp, synthetic construct
  source 1..21: mol_type = other DNA; mol_type = other DNA
tggcctcctccagttaattca

SEQ ID NO: 24967 - DNA, 21 bp, synthetic construct
  source 1..21: mol_type = other DNA; mol_type = other DNA
ttggagtccacgaatgggata

SEQ ID NO: 24968 - DNA, 21 bp, synthetic construct
  source 1..21: mol_type = other DNA; mol_type = other DNA
ttaagtaggatcgcacataac

SEQ ID NO: 24969 - DNA, 21 bp, synthetic construct
  source 1..21: mol_type = other DNA; mol_type = other DNA
cgagaggatcacgtattttgg

SEQ ID NO: 24970 - DNA, 21 bp, synthetic construct
  source 1..21: mol_type = other DNA; mol_type = other DNA
tttgcaaaaacaggcccaaat

SEQ ID NO: 24971 - DNA, 21 bp, synthetic construct
  source 1..21: mol_type = other DNA; mol_type = other DNA
tattggagtggagtacaggag

SEQ ID NO: 24972 - DNA, 21 bp, synthetic construct
  source 1..21: mol_type = other DNA; mol_type = other DNA
tattttagtggtgttattcct

SEQ ID NO: 24973 - DNA, 21 bp, synthetic construct
  source 1..21: mol_type = other DNA; mol_type = other DNA
tacagcaagatgggcttcaac

SEQ ID NO: 24974 - DNA, 21 bp, synthetic construct
  source 1..21: mol_type = other DNA; mol_type = other DNA
caggacgggacatcgaaatgg

SEQ ID NO: 24975 - DNA, 21 bp, synthetic construct
  source 1..21: mol_type = other DNA; mol_type = other DNA
acagactcaacgaacggcgtg

SEQ ID NO: 24976 - DNA, 21 bp, synthetic construct
  source 1..21: mol_type = other DNA; mol_type = other DNA
ttagccaaaactggaatgaat

SEQ ID NO: 24977 - DNA, 21 bp, synthetic construct
  source 1..21: mol_type = other DNA; mol_type = other DNA
ttggcgcgagggggctatgat

SEQ ID NO: 24978 - DNA, 21 bp, synthetic construct
  source 1..21: mol_type = other DNA; mol_type = other DNA
aaagacgactatacctcctat

SEQ ID NO: 24979 - DNA, 21 bp, synthetic construct
  source 1..21: mol_type = other DNA; mol_type = other DNA
aaggatgactttgtgagttat

SEQ ID NO: 24980 - DNA, 21 bp, synthetic construct
  source 1..21: mol_type = other DNA; mol_type = other DNA
agggacgggaccagtatgtgg

SEQ ID NO: 24981 - DNA, 21 bp, synthetic construct
  source 1..21: mol_type = other DNA; mol_type = other DNA
tactcgaaaatgggtaaaaat

SEQ ID NO: 24982 - DNA, 21 bp, synthetic construct
  source 1..21: mol_type = other DNA; mol_type = other DNA
tactggaccggggtgagtgaa

SEQ ID NO: 24983 - DNA, 21 bp, synthetic construct
  source 1..21: mol_type = other DNA; mol_type = other DNA
caaggtgaggcaagaacatgg

SEQ ID NO: 24984 - DNA, 21 bp, synthetic construct
  source 1..21: mol_type = other DNA; mol_type = other DNA
tacttcaccggaattaacagt

SEQ ID NO: 24985 - DNA, 21 bp, synthetic construct
  source 1..21: mol_type = other DNA; mol_type = other DNA
tactggtcgggaatcaaggat

SEQ ID NO: 24986 - DNA, 21 bp, synthetic construct
  source 1..21: mol_type = other DNA; mol_type = other DNA
tgggtaaaatcggatacacac

SEQ ID NO: 24987 - DNA, 21 bp, synthetic construct
  source 1..21: mol_type = other DNA; mol_type = other DNA
ggaggcgatggggtcagatgg

SEQ ID NO: 24988 - DNA, 21 bp, synthetic construct
  source 1..21: mol_type = other DNA; mol_type = other DNA
cactcccgcctgaatgtggtt

SEQ ID NO: 24989 - DNA, 21 bp, synthetic construct
  source 1..21: mol_type = other DNA; mol_type = other DNA
ctaagcaagattggaaacaat

SEQ ID NO: 24990 - DNA, 21 bp, synthetic construct
  source 1..21: mol_type = other DNA; mol_type = other DNA
cgttctgagttcagtacatat

SEQ ID NO: 24991 - DNA, 21 bp, synthetic construct
  source 1..21: mol_type = other DNA; mol_type = other DNA
ttttctcgagctggtcccaac

SEQ ID NO: 24992 - DNA, 21 bp, synthetic construct
  source 1..21: mol_type = other DNA; mol_type = other DNA
tccgatgggaccagtaaatgg

SEQ ID NO: 24993 - DNA, 21 bp, synthetic construct
  source 1..21: mol_type = other DNA; mol_type = other DNA
acagagtcgacaaatggcatc

SEQ ID NO: 24994 - DNA, 21 bp, synthetic construct
  source 1..21: mol_type = other DNA; mol_type = other DNA
agagagaacactgtgtattgg

SEQ ID NO: 24995 - DNA, 21 bp, synthetic construct
  source 1..21: mol_type = other DNA; mol_type = other DNA
ttgtcaaggacaagcacaaat

SEQ ID NO: 24996 - DNA, 21 bp, synthetic construct
  source 1..21: mol_type = other DNA; mol_type = other DNA
gtgatgtcggacagggcatgg

SEQ ID NO: 24997 - DNA, 21 bp, synthetic construct
  source 1..21: mol_type = other DNA; mol_type = other DNA
ctaagtcgcgccagtgataac

SEQ ID NO: 24998 - DNA, 21 bp, synthetic construct
  source 1..21: mol_type = other DNA; mol_type = other DNA
tatgtgaggagcggccccttg

SEQ ID NO: 24999 - DNA, 21 bp, synthetic construct
  source 1..21: mol_type = other DNA; mol_type = other DNA
cgtatggaaagcgtcagttgg

SEQ ID NO: 25000 - DNA, 21 bp, synthetic construct
  source 1..21: mol_type = other DNA; mol_type = other DNA
ttcttcaccggaaaaattgca

SEQ ID NO: 25001 - DNA, 21 bp, synthetic construct
  source 1..21: mol_type = other DNA; mol_type = other DNA
agtgacgggacctcgaaatgg

SEQ ID NO: 25002 - DNA, 21 bp, synthetic construct
  source 1..21: mol_type = other DNA; mol_type = other DNA
tatagccggcttgatcccgta

SEQ ID NO: 25003 - DNA, 21 bp, synthetic construct
  source 1..21: mol_type = other DNA; mol_type = other DNA
acgacgagtaccaatggcatc

SEQ ID NO: 25004 - DNA, 21 bp, synthetic construct
  source 1..21: mol_type = other DNA; mol_type = other DNA
cttatgtcaggcgatggaccc

SEQ ID NO: 25005 - DNA, 21 bp, synthetic construct
  source 1..21: mol_type = other DNA; mol_type = other DNA
ctttgcagaccatgcgaagag

SEQ ID NO: 25006 - DNA, 21 bp, synthetic construct
  source 1..21: mol_type = other DNA; mol_type = other DNA
tattttgcgggagtcagagaa

SEQ ID NO: 25007 - DNA, 21 bp, synthetic construct
  source 1..21: mol_type = other DNA; mol_type = other DNA
tatgtgcgtagcgaccatggg

SEQ ID NO: 25008 - DNA, 21 bp, synthetic construct
  source 1..21: mol_type = other DNA; mol_type = other DNA
tacgtacgttctcagaccgac

SEQ ID NO: 25009 - DNA, 21 bp, synthetic construct
  source 1..21: mol_type = other DNA; mol_type = other DNA
ttctttacaggcaagattgac

SEQ ID NO: 25010 - DNA, 21 bp, synthetic construct
  source 1..21: mol_type = other DNA; mol_type = other DNA
tactttactggcgtcaaaggt

SEQ ID NO: 25011 - DNA, 21 bp, synthetic construct
  source 1..21: mol_type = other DNA; mol_type = other DNA
cttatggcagacagaacgtgg

SEQ ID NO: 25012 - DNA, 21 bp, synthetic construct
  source 1..21: mol_type = other DNA; mol_type = other DNA
ggaggggaaactagtcattgg

SEQ ID NO: 25013 - DNA, 21 bp, synthetic construct
  source 1..21: mol_type = other DNA; mol_type = other DNA
ataaattcgacaaatggtaga

SEQ ID NO: 25014 - DNA, 21 bp, synthetic construct
  source 1..21: mol_type = other DNA; mol_type = other DNA
gtttccagtagcaacggacga

SEQ ID NO: 25015 - DNA, 21 bp, synthetic construct
  source 1..21: mol_type = other DNA; mol_type = other DNA
tactcaaagacggggatcaat

SEQ ID NO: 25016 - DNA, 21 bp, synthetic construct
  source 1..21: mol_type = other DNA; mol_type = other DNA
agaagtgagttcctctcctac

SEQ ID NO: 25017 - DNA, 21 bp, synthetic construct
  source 1..21: mol_type = other DNA; mol_type = other DNA
tacttcgcaggcgttaaggaa

SEQ ID NO: 25018 - DNA, 21 bp, synthetic construct
  source 1..21: mol_type = other DNA; mol_type = other DNA
tattttgccggagttaaggaa

SEQ ID NO: 25019 - DNA, 21 bp, synthetic construct
  source 1..21: mol_type = other DNA; mol_type = other DNA
atcaatggcaggggatgggac

SEQ ID NO: 25020 - DNA, 21 bp, synthetic construct
  source 1..21: mol_type = other DNA; mol_type = other DNA
aggacgtacgatagttacccg

SEQ ID NO: 25021 - DNA, 21 bp, synthetic construct
  source 1..21: mol_type = other DNA; mol_type = other DNA
gaccttcgtatggctacctgg

SEQ ID NO: 25022 - DNA, 21 bp, synthetic construct
  source 1..21: mol_type = other DNA; mol_type = other DNA
cggaatgaatttaccacgtac

SEQ ID NO: 25023 - DNA, 21 bp, synthetic construct
  source 1..21: mol_type = other DNA; mol_type = other DNA
tacagtaaacaggggtacaat

SEQ ID NO: 25024 - DNA, 21 bp, synthetic construct
  source 1..21: mol_type = other DNA; mol_type = other DNA
tatttctcaggaaaacacgaa

SEQ ID NO: 25025 - DNA, 21 bp, synthetic construct
  source 1..21: mol_type = other DNA; mol_type = other DNA
tatttcagcgggatccatgac

SEQ ID NO: 25026 - DNA, 21 bp, synthetic construct
  source 1..21: mol_type = other DNA; mol_type = other DNA
tatagcaaacaaaattttaac

SEQ ID NO: 25027 - DNA, 21 bp, synthetic construct
  source 1..21: mol_type = other DNA; mol_type = other DNA
gaaatgacaagccatatgtgg

SEQ ID NO: 25028 - DNA, 21 bp, synthetic construct
  source 1..21: mol_type = other DNA; mol_type = other DNA
tacgccaagaatggtaacaac

SEQ ID NO: 25029 - DNA, 21 bp, synthetic construct
  source 1..21: mol_type = other DNA; mol_type = other DNA
aaggatgagttccgctcattt

SEQ ID NO: 25030 - DNA, 21 bp, synthetic construct
  source 1..21: mol_type = other DNA; mol_type = other DNA
tactcaaagatgggacataat

SEQ ID NO: 25031 - DNA, 21 bp, synthetic construct
  source 1..21: mol_type = other DNA; mol_type = other DNA
agggaatatgacgcattcccc

SEQ ID NO: 25032 - DNA, 21 bp, synthetic construct
  source 1..21: mol_type = other DNA; mol_type = other DNA
agagacgaatttaagtcgtac

SEQ ID NO: 25033 - DNA, 21 bp, synthetic construct
  source 1..21: mol_type = other DNA; mol_type = other DNA
tattttagtggtacggtatcc

SEQ ID NO: 25034 - DNA, 21 bp, synthetic construct
  source 1..21: mol_type = other DNA; mol_type = other DNA
agaatggacagcgttaaatgg

SEQ ID NO: 25035 - DNA, 21 bp, synthetic construct
  source 1..21: mol_type = other DNA; mol_type = other DNA
cgctctgagtttttgccctac

SEQ ID NO: 25036 - DNA, 21 bp, synthetic construct
  source 1..21: mol_type = other DNA; mol_type = other DNA
tacttcacggggagacatgaa

SEQ ID NO: 25037 - DNA, 21 bp, synthetic construct
  source 1..21: mol_type = other DNA; mol_type = other DNA
ttacacgtccaaggtcccaat

SEQ ID NO: 25038 - DNA, 21 bp, synthetic construct
  source 1..21: mol_type = other DNA; mol_type = other DNA
actgacccgtgcaaaccacct

SEQ ID NO: 25039 - DNA, 21 bp, synthetic construct
  source 1..21: mol_type = other DNA; mol_type = other DNA
ttagaaagcacgaacggacga

SEQ ID NO: 25040 - DNA, 21 bp, synthetic construct
  source 1..21: mol_type = other DNA; mol_type = other DNA
tatagtagagtgtcagaccct

SEQ ID NO: 25041 - DNA, 21 bp, synthetic construct
  source 1..21: mol_type = other DNA; mol_type = other DNA
tactccaaacgtaacgagaac

SEQ ID NO: 25042 - DNA, 21 bp, synthetic construct
  source 1..21: mol_type = other DNA; mol_type = other DNA
tactttagcggcgtacagcag

SEQ ID NO: 25043 - DNA, 21 bp, synthetic construct
  source 1..21: mol_type = other DNA; mol_type = other DNA
tggtggagcggtataagggag

SEQ ID NO: 25044 - DNA, 21 bp, synthetic construct
  source 1..21: mol_type = other DNA; mol_type = other DNA
cggacgcacgacgtctatccc

SEQ ID NO: 25045 - DNA, 21 bp, synthetic construct
  source 1..21: mol_type = other DNA; mol_type = other DNA
acgagggacgggtgtatggcc

SEQ ID NO: 25046 - DNA, 21 bp, synthetic construct
  source 1..21: mol_type = other DNA; mol_type = other DNA
aaagatgatttcgtaagtttc

SEQ ID NO: 25047 - DNA, 21 bp, synthetic construct
  source 1..21: mol_type = other DNA; mol_type = other DNA
tactttactggtatagtcgat

SEQ ID NO: 25048 - DNA, 21 bp, synthetic construct
  source 1..21: mol_type = other DNA; mol_type = other DNA
aaggacgacttcactggcttc

SEQ ID NO: 25049 - DNA, 21 bp, synthetic construct
  source 1..21: mol_type = other DNA; mol_type = other DNA
ccccaaagcactaatggtgtg

SEQ ID NO: 25050 - DNA, 21 bp, synthetic construct
  source 1..21: mol_type = other DNA; mol_type = other DNA
cgtgaggacttcactacgtgg

SEQ ID NO: 25051 - DNA, 21 bp, synthetic construct
  source 1..21: mol_type = other DNA; mol_type = other DNA
ttgagtagattgcaggagaac

SEQ ID NO: 25052 - DNA, 21 bp, synthetic construct
  source 1..21: mol_type = other DNA; mol_type = other DNA
gatctttccagtacctcctgg

SEQ ID NO: 25053 - DNA, 21 bp, synthetic construct
  source 1..21: mol_type = other DNA; mol_type = other DNA
tatttcaccggcaaacacgat

SEQ ID NO: 25054 - DNA, 21 bp, synthetic construct
  source 1..21: mol_type = other DNA; mol_type = other DNA
tattttagtggggttcaatca

SEQ ID NO: 25055 - DNA, 21 bp, synthetic construct
  source 1..21: mol_type = other DNA; mol_type = other DNA
tcaacgtacgattcttttccc

SEQ ID NO: 25056 - DNA, 21 bp, synthetic construct
  source 1..21: mol_type = other DNA; mol_type = other DNA
tacttctccaaaattatcgcg

SEQ ID NO: 25057 - DNA, 21 bp, synthetic construct
  source 1..21: mol_type = other DNA; mol_type = other DNA
tactccagggttggtggagga

SEQ ID NO: 25058 - DNA, 21 bp, synthetic construct
  source 1..21: mol_type = other DNA; mol_type = other DNA
aaaatggaagacagaagctgg

SEQ ID NO: 25059 - DNA, 21 bp, synthetic construct
  source 1..21: mol_type = other DNA; mol_type = other DNA
caaatggctgcacatgactgg

SEQ ID NO: 25060 - DNA, 21 bp, synthetic construct
  source 1..21: mol_type = other DNA; mol_type = other DNA
taccaccggctttcaattcca

SEQ ID NO: 25061 - DNA, 21 bp, synthetic construct
  source 1..21: mol_type = other DNA; mol_type = other DNA
tgtgctccagattatcacgag

SEQ ID NO: 25062 - DNA, 21 bp, synthetic construct
  source 1..21: mol_type = other DNA; mol_type = other DNA
tattttcacggcatacaagag

SEQ ID NO: 25063 - DNA, 21 bp, synthetic construct
  source 1..21: mol_type = other DNA; mol_type = other DNA
atcttagcggataggaactgg

SEQ ID NO: 25064 - DNA, 21 bp, synthetic construct
  source 1..21: mol_type = other DNA; mol_type = other DNA
cggactagtacgcatggtatc

SEQ ID NO: 25065 - DNA, 21 bp, synthetic construct
  source 1..21: mol_type = other DNA; mol_type = other DNA
tacagtaggctctcgcccgac

SEQ ID NO: 25066 - DNA, 21 bp, synthetic construct
  source 1..21: mol_type = other DNA; mol_type = other DNA
ctgcaccggttatcggatttc

SEQ ID NO: 25067 - DNA, 21 bp, synthetic construct
  source 1..21: mol_type = other DNA; mol_type = other DNA
tatttttcgggtgtcaagatg

SEQ ID NO: 25068 - DNA, 21 bp, synthetic construct
  source 1..21: mol_type = other DNA; mol_type = other DNA
ttgtgtaagccctgccttgca

SEQ ID NO: 25069 - DNA, 21 bp, synthetic construct
  source 1..21: mol_type = other DNA; mol_type = other DNA
cgtagtgagcatacgtaccca

SEQ ID NO: 25070 - DNA, 21 bp, synthetic construct
  source 1..21: mol_type = other DNA; mol_type = other DNA
tactcgaagcaaaatgcgaat

SEQ ID NO: 25071 - DNA, 21 bp, synthetic construct
  source 1..21: mol_type = other DNA; mol_type = other DNA
tactcccggatagaacctaac

SEQ ID NO: 25072 - DNA, 21 bp, synthetic construct
  source 1..21: mol_type = other DNA; mol_type = other DNA
attgagtccactaacgggatt

SEQ ID NO: 25073 - DNA, 21 bp, synthetic construct
  source 1..21: mol_type = other DNA; mol_type = other DNA
cgcgatgggagtagtctttgg

SEQ ID NO: 25074 - DNA, 21 bp, synthetic construct
  source 1..21: mol_type = other DNA; mol_type = other DNA
tattttgcgggtagaattgcc

SEQ ID NO: 25075 - DNA, 21 bp, synthetic construct
  source 1..21: mol_type = other DNA; mol_type = other DNA
tactggtccgggattccggaa

SEQ ID NO: 25076 - DNA, 21 bp, synthetic construct
  source 1..21: mol_type = other DNA; mol_type = other DNA
acttcaagtagcaacggagtc

SEQ ID NO: 25077 - DNA, 21 bp, synthetic construct
  source 1..21: mol_type = other DNA; mol_type = other DNA
tacgtaaggatcggacccaat

SEQ ID NO: 25078 - DNA, 21 bp, synthetic construct
  source 1..21: mol_type = other DNA; mol_type = other DNA
gtaatgtcaagtcagagctgg

SEQ ID NO: 25079 - DNA, 21 bp, synthetic construct
  source 1..21: mol_type = other DNA; mol_type = other DNA
tattccaagcaaaacgacaat

SEQ ID NO: 25080 - DNA, 21 bp, synthetic construct
  source 1..21: mol_type = other DNA; mol_type = other DNA
actatgtcgacgaatgggata

SEQ ID NO: 25081 - DNA, 21 bp, synthetic construct
  source 1..21: mol_type = other DNA; mol_type = other DNA
ggtgaggactacgtaagatgg

SEQ ID NO: 25082 - DNA, 21 bp, synthetic construct
  source 1..21: mol_type = other DNA; mol_type = other DNA
tttagtcgattgggtcctaat

SEQ ID NO: 25083 - DNA, 21 bp, synthetic construct
  source 1..21: mol_type = other DNA; mol_type = other DNA
taccatgccaacctccccaat

SEQ ID NO: 25084 - DNA, 21 bp, synthetic construct
  source 1..21: mol_type = other DNA; mol_type = other DNA
tatgcgaggctaggtccgaac

SEQ ID NO: 25085 - DNA, 21 bp, synthetic construct
  source 1..21: mol_type = other DNA; mol_type = other DNA
tatagtaaaacaggatgtaac

SEQ ID NO: 25086 - DNA, 21 bp, synthetic construct
  source 1..21: mol_type = other DNA; mol_type = other DNA
tattttactggacacccgaac

SEQ ID NO: 25087 - DNA, 21 bp, synthetic construct
  source 1..21: mol_type = other DNA; mol_type = other DNA
agagaagacggcgtcacctgg

SEQ ID NO: 25088 - DNA, 21 bp, synthetic construct
  source 1..21: mol_type = other DNA; mol_type = other DNA
accgatagcactaatggcatt

SEQ ID NO: 25089 - DNA, 21 bp, synthetic construct
  source 1..21: mol_type = other DNA; mol_type = other DNA
ttgagtaagattggtgccaat

SEQ ID NO: 25090 - DNA, 21 bp, synthetic construct
  source 1..21: mol_type = other DNA; mol_type = other DNA
cgtggtatggacgtatatcca

SEQ ID NO: 25091 - DNA, 21 bp, synthetic construct
  source 1..21: mol_type = other DNA; mol_type = other DNA
gtgatggagttcaatgcattc

SEQ ID NO: 25092 - DNA, 21 bp, synthetic construct
  source 1..21: mol_type = other DNA; mol_type = other DNA
tacgctaaaaacgggtttaac

SEQ ID NO: 25093 - DNA, 21 bp, synthetic construct
  source 1..21: mol_type = other DNA; mol_type = other DNA
tggtggagcggggtcatggaa

SEQ ID NO: 25094 - DNA, 21 bp, synthetic construct
  source 1..21: mol_type = other DNA; mol_type = other DNA
ggatcagaattcgtgcgatgg

SEQ ID NO: 25095 - DNA, 21 bp, synthetic construct
  source 1..21: mol_type = other DNA; mol_type = other DNA
tatttcagcggccgcctggag

SEQ ID NO: 25096 - DNA, 21 bp, synthetic construct
  source 1..21: mol_type = other DNA; mol_type = other DNA
tggtttagtggcatactagaa

SEQ ID NO: 25097 - DNA, 21 bp, synthetic construct
  source 1..21: mol_type = other DNA; mol_type = other DNA
gtccacagactacaagacaaa

SEQ ID NO: 25098 - DNA, 21 bp, synthetic construct
  source 1..21: mol_type = other DNA; mol_type = other DNA
agttcggagtacttggtatat

SEQ ID NO: 25099 - DNA, 21 bp, synthetic construct
  source 1..21: mol_type = other DNA; mol_type = other DNA
cgcatggagtcacgcgactgg

SEQ ID NO: 25100 - DNA, 21 bp, synthetic construct
  source 1..21: mol_type = other DNA; mol_type = other DNA
tatttcgctggaaaaattagt

SEQ ID NO: 25101 - DNA, 21 bp, synthetic construct
  source 1..21: mol_type = other DNA; mol_type = other DNA
cgcctcgaggctgtcacatgg

SEQ ID NO: 25102 - DNA, 21 bp, synthetic construct
  source 1..21: mol_type = other DNA; mol_type = other DNA
tggtggtcaggaattcatgaa

SEQ ID NO: 25103 - DNA, 21 bp, synthetic construct
  source 1..21: mol_type = other DNA; mol_type = other DNA
ttgttatcgagttcaaactgg

SEQ ID NO: 25104 - DNA, 21 bp, synthetic construct
  source 1..21: mol_type = other DNA; mol_type = other DNA
atgcatcgacttctttcggac

SEQ ID NO: 25105 - DNA, 21 bp, synthetic construct
  source 1..21: mol_type = other DNA; mol_type = other DNA
acagaatatatgtgtcggccc

SEQ ID NO: 25106 - DNA, 21 bp, synthetic construct
  source 1..21: mol_type = other DNA; mol_type = other DNA
atgtcacggcttagtcaaaac

SEQ ID NO: 25107 - DNA, 21 bp, synthetic construct
  source 1..21: mol_type = other DNA; mol_type = other DNA
aggacaaatacggtgtaccct

SEQ ID NO: 25108 - DNA, 21 bp, synthetic construct
  source 1..21: mol_type = other DNA; mol_type = other DNA
tattcccggataggagagaac

SEQ ID NO: 25109 - DNA, 21 bp, synthetic construct
  source 1..21: mol_type = other DNA; mol_type = other DNA
tacttccacggaaaggtagaa

SEQ ID NO: 25110 - DNA, 21 bp, synthetic construct
  source 1..21: mol_type = other DNA; mol_type = other DNA
tattcaaggcttaacgaggat

SEQ ID NO: 25111 - DNA, 21 bp, synthetic construct
  source 1..21: mol_type = other DNA; mol_type = other DNA
tacttcaccggcaaacccgac

SEQ ID NO: 25112 - DNA, 21 bp, synthetic construct
  source 1..21: mol_type = other DNA; mol_type = other DNA
tacttcaccggtgtgcgtgat

SEQ ID NO: 25113 - DNA, 21 bp, synthetic construct
  source 1..21: mol_type = other DNA; mol_type = other DNA
tatttcagtggcgttatgtcg

SEQ ID NO: 25114 - DNA, 21 bp, synthetic construct
  source 1..21: mol_type = other DNA; mol_type = other DNA
tatttcagcggaaccaaagac

SEQ ID NO: 25115 - DNA, 21 bp, synthetic construct
  source 1..21: mol_type = other DNA; mol_type = other DNA
gttgtgtacgatgccttcgta

SEQ ID NO: 25116 - DNA, 21 bp, synthetic construct
  source 1..21: mol_type = other DNA; mol_type = other DNA
cgcatggaggatcgcaattgg

SEQ ID NO: 25117 - DNA, 21 bp, synthetic construct
  source 1..21: mol_type = other DNA; mol_type = other DNA
tattggtcagccatccctgct

SEQ ID NO: 25118 - DNA, 21 bp, synthetic construct
  source 1..21: mol_type = other DNA; mol_type = other DNA
ccgatgggcgatcggaagtgg

SEQ ID NO: 25119 - DNA, 21 bp, synthetic construct
  source 1..21: mol_type = other DNA; mol_type = other DNA
tatttcagcggcatacccgca

SEQ ID NO: 25120 - DNA, 21 bp, synthetic construct
  source 1..21: mol_type = other DNA; mol_type = other DNA
agaacagtgacggtttatcca

SEQ ID NO: 25121 - DNA, 21 bp, synthetic construct
  source 1..21: mol_type = other DNA; mol_type = other DNA
gtcatgagtgatcgtacgtgg

SEQ ID NO: 25122 - DNA, 21 bp, synthetic construct
  source 1..21: mol_type = other DNA; mol_type = other DNA
tgtaagccagatagtcgtgta

SEQ ID NO: 25123 - DNA, 21 bp, synthetic construct
  source 1..21: mol_type = other DNA; mol_type = other DNA
cgcatggaatcacaaagttgg

SEQ ID NO: 25124 - DNA, 21 bp, synthetic construct
  source 1..21: mol_type = other DNA; mol_type = other DNA
ttgcaccgactcggcgactct

SEQ ID NO: 25125 - DNA, 21 bp, synthetic construct
  source 1..21: mol_type = other DNA; mol_type = other DNA
tggtcaactcattgctgcgct

SEQ ID NO: 25126 - DNA, 21 bp, synthetic construct
  source 1..21: mol_type = other DNA; mol_type = other DNA
aaggaccagtatactatgttc

SEQ ID NO: 25127 - DNA, 21 bp, synthetic construct
  source 1..21: mol_type = other DNA; mol_type = other DNA
tatagcaaagcgaacctaaac

SEQ ID NO: 25128 - DNA, 21 bp, synthetic construct
  source 1..21: mol_type = other DNA; mol_type = other DNA
atcgcggatcacctaagatgg

SEQ ID NO: 25129 - DNA, 21 bp, synthetic construct
  source 1..21: mol_type = other DNA; mol_type = other DNA
ttgcatgtgcgttccttgaat

SEQ ID NO: 25130 - DNA, 21 bp, synthetic construct
  source 1..21: mol_type = other DNA; mol_type = other DNA
tattactcaggtatagtagcc

SEQ ID NO: 25131 - DNA, 21 bp, synthetic construct
  source 1..21: mol_type = other DNA; mol_type = other DNA
tatttcactgggcaccacgat

SEQ ID NO: 25132 - DNA, 21 bp, synthetic construct
  source 1..21: mol_type = other DNA; mol_type = other DNA
cttagcagggtggcgatgaac

SEQ ID NO: 25133 - DNA, 21 bp, synthetic construct
  source 1..21: mol_type = other DNA; mol_type = other DNA
tattggagtggaatacacgaa

SEQ ID NO: 25134 - DNA, 21 bp, synthetic construct
  source 1..21: mol_type = other DNA; mol_type = other DNA
tatagcaaacataacgtaaac

SEQ ID NO: 25135 - DNA, 21 bp, synthetic construct
  source 1..21: mol_type = other DNA; mol_type = other DNA
ttatgtaaaccgtgccataca

SEQ ID NO: 25136 - DNA, 21 bp, synthetic construct
  source 1..21: mol_type = other DNA; mol_type = other DNA
agcatggaaagtcatcagtgg

SEQ ID NO: 25137 - DNA, 21 bp, synthetic construct
  source 1..21: mol_type = other DNA; mol_type = other DNA
tatcacgcgaatttacctaac

SEQ ID NO: 25138 - DNA, 21 bp, synthetic construct
  source 1..21: mol_type = other DNA; mol_type = other DNA
tattttcatggtaaagtggag

SEQ ID NO: 25139 - DNA, 21 bp, synthetic construct
  source 1..21: mol_type = other DNA; mol_type = other DNA
agagacggcgtctcgaagtgg

SEQ ID NO: 25140 - DNA, 21 bp, synthetic construct
  source 1..21: mol_type = other DNA; mol_type = other DNA
tacgtgaggtctcagatcgga

SEQ ID NO: 25141 - DNA, 21 bp, synthetic construct
  source 1..21: mol_type = other DNA; mol_type = other DNA
cgtgaggagtcaaggtcctgg

SEQ ID NO: 25142 - DNA, 21 bp, synthetic construct
  source 1..21: mol_type = other DNA; mol_type = other DNA
aggatggagtcgtcagtgtgg

SEQ ID NO: 25143 - DNA, 21 bp, synthetic construct
  source 1..21: mol_type = other DNA; mol_type = other DNA
gtgttagaatcacgcgactgg

SEQ ID NO: 25144 - DNA, 21 bp, synthetic construct
  source 1..21: mol_type = other DNA; mol_type = other DNA
ttccatcggctctcggtcgac

SEQ ID NO: 25145 - DNA, 21 bp, synthetic construct
  source 1..21: mol_type = other DNA; mol_type = other DNA
acctcagaatacaaatactat

SEQ ID NO: 25146 - DNA, 21 bp, synthetic construct
  source 1..21: mol_type = other DNA; mol_type = other DNA
tactttaccggtatggtacaa

SEQ ID NO: 25147 - DNA, 21 bp, synthetic construct
  source 1..21: mol_type = other DNA; mol_type = other DNA
tactacaccggtcgggtcgag

SEQ ID NO: 25148 - DNA, 21 bp, synthetic construct
  source 1..21: mol_type = other DNA; mol_type = other DNA
cgtagtctagactcataccct

SEQ ID NO: 25149 - DNA, 21 bp, synthetic construct
  source 1..21: mol_type = other DNA; mol_type = other DNA
tacgcgaagactgcttacaac

SEQ ID NO: 25150 - DNA, 21 bp, synthetic construct
  source 1..21: mol_type = other DNA; mol_type = other DNA
agtgcagaatgggtgtcttac

SEQ ID NO: 25151 - DNA, 21 bp, synthetic construct
  source 1..21: mol_type = other DNA; mol_type = other DNA
gttatgagtgaccgccattgg

SEQ ID NO: 25152 - DNA, 21 bp, synthetic construct
  source 1..21: mol_type = other DNA; mol_type = other DNA
tattttacggggaagctagtt

SEQ ID NO: 25153 - DNA, 21 bp, synthetic construct
  source 1..21: mol_type = other DNA; mol_type = other DNA
agaactttcgatgcttttccc

SEQ ID NO: 25154 - DNA, 21 bp, synthetic construct
  source 1..21: mol_type = other DNA; mol_type = other DNA
ggtgatggaacgagccgctgg

SEQ ID NO: 25155 - DNA, 21 bp, synthetic construct
  source 1..21: mol_type = other DNA; mol_type = other DNA
agaatggaaagtagggactgg

SEQ ID NO: 25156 - DNA, 21 bp, synthetic construct
  source 1..21: mol_type = other DNA; mol_type = other DNA
aaggacgattatagccactat

SEQ ID NO: 25157 - DNA, 21 bp, synthetic construct
  source 1..21: mol_type = other DNA; mol_type = other DNA
tgcaagtcgtacggatcatcg

SEQ ID NO: 25158 - DNA, 21 bp, synthetic construct
  source 1..21: mol_type = other DNA; mol_type = other DNA
tatagccgggcgggggataat

SEQ ID NO: 25159 - DNA, 21 bp, synthetic construct
  source 1..21: mol_type = other DNA; mol_type = other DNA
ctgtgcaagccgtgcttcacc

SEQ ID NO: 25160 - DNA, 21 bp, synthetic construct
  source 1..21: mol_type = other DNA; mol_type = other DNA
tacttcacggggcagcgtgaa

SEQ ID NO: 25161 - DNA, 21 bp, synthetic construct
  source 1..21: mol_type = other DNA; mol_type = other DNA
acaagtacgcactgctgtgct

SEQ ID NO: 25162 - DNA, 21 bp, synthetic construct
  source 1..21: mol_type = other DNA; mol_type = other DNA
tacgtcaagtcgcagagctac

SEQ ID NO: 25163 - DNA, 21 bp, synthetic construct
  source 1..21: mol_type = other DNA; mol_type = other DNA
agggagggaactagtaaatgg

SEQ ID NO: 25164 - DNA, 21 bp, synthetic construct
  source 1..21: mol_type = other DNA; mol_type = other DNA
tattggagtggcattgccgat

SEQ ID NO: 25165 - DNA, 21 bp, synthetic construct
  source 1..21: mol_type = other DNA; mol_type = other DNA
tatttcacaggcgtggccgac

SEQ ID NO: 25166 - DNA, 21 bp, synthetic construct
  source 1..21: mol_type = other DNA; mol_type = other DNA
tattacactggcaaaaaagaa

SEQ ID NO: 25167 - DNA, 21 bp, synthetic construct
  source 1..21: mol_type = other DNA; mol_type = other DNA
tatagccgtgtcggtggaggc

SEQ ID NO: 25168 - DNA, 21 bp, synthetic construct
  source 1..21: mol_type = other DNA; mol_type = other DNA
ttttcaagagttgggcctaac

SEQ ID NO: 25169 - DNA, 21 bp, synthetic construct
  source 1..21: mol_type = other DNA; mol_type = other DNA
ttttggacaggtgtcaaggag

SEQ ID NO: 25170 - DNA, 21 bp, synthetic construct
  source 1..21: mol_type = other DNA; mol_type = other DNA
tacttttcaggggtcatgagc

SEQ ID NO: 25171 - DNA, 21 bp, synthetic construct
  source 1..21: mol_type = other DNA; mol_type = other DNA
atgttcgatggtactaatccc

SEQ ID NO: 25172 - DNA, 21 bp, synthetic construct
  source 1..21: mol_type = other DNA; mol_type = other DNA
aggcgcacagacgtgtacccc

SEQ ID NO: 25173 - DNA, 21 bp, synthetic construct
  source 1..21: mol_type = other DNA; mol_type = other DNA
gtcctccagagtgcgacctgg

SEQ ID NO: 25174 - DNA, 21 bp, synthetic construct
  source 1..21: mol_type = other DNA; mol_type = other DNA
agaagtatggacagctatcct

SEQ ID NO: 25175 - DNA, 21 bp, synthetic construct
  source 1..21: mol_type = other DNA; mol_type = other DNA
tatagtagggtgggtacgggc

SEQ ID NO: 25176 - DNA, 21 bp, synthetic construct
  source 1..21: mol_type = other DNA; mol_type = other DNA
gtagcacgactcggatgggac

SEQ ID NO: 25177 - DNA, 21 bp, synthetic construct
  source 1..21: mol_type = other DNA; mol_type = other DNA
gatcttcagtctcgcgagtgg

SEQ ID NO: 25178 - DNA, 21 bp, synthetic construct
  source 1..21: mol_type = other DNA; mol_type = other DNA
cgggaggatatggtaaaatgg

SEQ ID NO: 25179 - DNA, 21 bp, synthetic construct
  source 1..21: mol_type = other DNA; mol_type = other DNA
agagatgagttcaccagctgg

SEQ ID NO: 25180 - DNA, 21 bp, synthetic construct
  source 1..21: mol_type = other DNA; mol_type = other DNA
tatatgaaggatgcctatccc

SEQ ID NO: 25181 - DNA, 21 bp, synthetic construct
  source 1..21: mol_type = other DNA; mol_type = other DNA
tactttactggtcaaacagat

SEQ ID NO: 25182 - DNA, 21 bp, synthetic construct
  source 1..21: mol_type = other DNA; mol_type = other DNA
gtgggtagcacacacggggta

SEQ ID NO: 25183 - DNA, 21 bp, synthetic construct
  source 1..21: mol_type = other DNA; mol_type = other DNA
tactccagagtgtcgcccgac

SEQ ID NO: 25184 - DNA, 21 bp, synthetic construct
  source 1..21: mol_type = other DNA; mol_type = other DNA
tataccaaaagcaacacacac

SEQ ID NO: 25185 - DNA, 21 bp, synthetic construct
  source 1..21: mol_type = other DNA; mol_type = other DNA
tactggtcaggggtccaagaa

SEQ ID NO: 25186 - DNA, 21 bp, synthetic construct
  source 1..21: mol_type = other DNA; mol_type = other DNA
gggggcgagtactccaaatgg

SEQ ID NO: 25187 - DNA, 21 bp, synthetic construct
  source 1..21: mol_type = other DNA; mol_type = other DNA
agtgacggtacgtcgaagtgg

SEQ ID NO: 25188 - DNA, 21 bp, synthetic construct
  source 1..21: mol_type = other DNA; mol_type = other DNA
atgatggacggaacttccgct

SEQ ID NO: 25189 - DNA, 21 bp, synthetic construct
  source 1..21: mol_type = other DNA; mol_type = other DNA
tatagtagactgggggtggga

SEQ ID NO: 25190 - DNA, 21 bp, synthetic construct
  source 1..21: mol_type = other DNA; mol_type = other DNA
atccgatccacgaatggagtg

SEQ ID NO: 25191 - DNA, 21 bp, synthetic construct
  source 1..21: mol_type = other DNA; mol_type = other DNA
catgagtcaaccaacggaagg

SEQ ID NO: 25192 - DNA, 21 bp, synthetic construct
  source 1..21: mol_type = other DNA; mol_type = other DNA
tatagccggttacaatttgac

SEQ ID NO: 25193 - DNA, 21 bp, synthetic construct
  source 1..21: mol_type = other DNA; mol_type = other DNA
tacttcacagggacccttgaa

SEQ ID NO: 25194 - DNA, 21 bp, synthetic construct
  source 1..21: mol_type = other DNA; mol_type = other DNA
agggatgaatttgtttcgtat

SEQ ID NO: 25195 - DNA, 21 bp, synthetic construct
  source 1..21: mol_type = other DNA; mol_type = other DNA
tacactaaaagcgacgtacgg

SEQ ID NO: 25196 - DNA, 21 bp, synthetic construct
  source 1..21: mol_type = other DNA; mol_type = other DNA
aaatgcattgaagactgctgt

SEQ ID NO: 25197 - DNA, 21 bp, synthetic construct
  source 1..21: mol_type = other DNA; mol_type = other DNA
gacatggtgagtcggagctgg

SEQ ID NO: 25198 - DNA, 21 bp, synthetic construct
  source 1..21: mol_type = other DNA; mol_type = other DNA
tacgctagggtgggtccaaac

SEQ ID NO: 25199 - DNA, 21 bp, synthetic construct
  source 1..21: mol_type = other DNA; mol_type = other DNA
caggatggtaatagcaggtgg

SEQ ID NO: 25200 - DNA, 21 bp, synthetic construct
  source 1..21: mol_type = other DNA; mol_type = other DNA
agggaggagaccgtgtactgg

SEQ ID NO: 25201 - DNA, 21 bp, synthetic construct
  source 1..21: mol_type = other DNA; mol_type = other DNA
ttacacaagctaggggatgac

SEQ ID NO: 25202 - DNA, 21 bp, synthetic construct
  source 1..21: mol_type = other DNA; mol_type = other DNA
tgtaagcctgggactgggcta

SEQ ID NO: 25203 - DNA, 21 bp, synthetic construct
  source 1..21: mol_type = other DNA; mol_type = other DNA
ttccaccgtctttcgccagat

SEQ ID NO: 25204 - DNA, 21 bp, synthetic construct
  source 1..21: mol_type = other DNA; mol_type = other DNA
tacttcacgggtcatcccaat

SEQ ID NO: 25205 - DNA, 21 bp, synthetic construct
  source 1..21: mol_type = other DNA; mol_type = other DNA
tactataccggtaagatagat

SEQ ID NO: 25206 - DNA, 21 bp, synthetic construct
  source 1..21: mol_type = other DNA; mol_type = other DNA
agagatgagtttactcgctgg

SEQ ID NO: 25207 - DNA, 21 bp, synthetic construct
  source 1..21: mol_type = other DNA; mol_type = other DNA
cgtagtgagttcaaaacatac

SEQ ID NO: 25208 - DNA, 21 bp, synthetic construct
  source 1..21: mol_type = other DNA; mol_type = other DNA
cgtgaagaagacgtatatcct

SEQ ID NO: 25209 - DNA, 21 bp, synthetic construct
  source 1..21: mol_type = other DNA; mol_type = other DNA
taccatcgcctcagtgacgat

SEQ ID NO: 25210 - DNA, 21 bp, synthetic construct
  source 1..21: mol_type = other DNA; mol_type = other DNA
tattggtcaggggtcagcgag

SEQ ID NO: 25211 - DNA, 21 bp, synthetic construct
  source 1..21: mol_type = other DNA; mol_type = other DNA
tactttaccggcaagcatgat

SEQ ID NO: 25212 - DNA, 21 bp, synthetic construct
  source 1..21: mol_type = other DNA; mol_type = other DNA
ctcctcgcgtccgctacttgg

SEQ ID NO: 25213 - DNA, 21 bp, synthetic construct
  source 1..21: mol_type = other DNA; mol_type = other DNA
tactggaccggcgtgcccgag

SEQ ID NO: 25214 - DNA, 21 bp, synthetic construct
  source 1..21: mol_type = other DNA; mol_type = other DNA
atcatggcagagagaacctgg

SEQ ID NO: 25215 - DNA, 21 bp, synthetic construct
  source 1..21: mol_type = other DNA; mol_type = other DNA
tatagtagacttagcccaata

SEQ ID NO: 25216 - DNA, 21 bp, synthetic construct
  source 1..21: mol_type = other DNA; mol_type = other DNA
ggtggggcggggtcttgctgg

SEQ ID NO: 25217 - DNA, 21 bp, synthetic construct
  source 1..21: mol_type = other DNA; mol_type = other DNA
tacttctcaggcgtggttagg

SEQ ID NO: 25218 - DNA, 21 bp, synthetic construct
  source 1..21: mol_type = other DNA; mol_type = other DNA
tacagtaaggccaatatgaac

SEQ ID NO: 25219 - DNA, 21 bp, synthetic construct
  source 1..21: mol_type = other DNA; mol_type = other DNA
gatatgaccagtagctcgtgg

SEQ ID NO: 25220 - DNA, 21 bp, synthetic construct
  source 1..21: mol_type = other DNA; mol_type = other DNA
gtgctgcagtccagtgtgtgg

SEQ ID NO: 25221 - DNA, 21 bp, synthetic construct
  source 1..21: mol_type = other DNA; mol_type = other DNA
tttagccgtctcaatgataat

SEQ ID NO: 25222 - DNA, 21 bp, synthetic construct
  source 1..21: mol_type = other DNA; mol_type = other DNA
ggtgagaacgttgtacgatgg

SEQ ID NO: 25223 - DNA, 21 bp, synthetic construct
  source 1..21: mol_type = other DNA; mol_type = other DNA
gggtcggctactagcagctgg

SEQ ID NO: 25224 - DNA, 21 bp, synthetic construct
  source 1..21: mol_type = other DNA; mol_type = other DNA
agaagcgaccacgtgtatccc

SEQ ID NO: 25225 - DNA, 21 bp, synthetic construct
  source 1..21: mol_type = other DNA; mol_type = other DNA
tactttagtggtattccgcaa

SEQ ID NO: 25226 - DNA, 21 bp, synthetic construct
  source 1..21: mol_type = other DNA; mol_type = other DNA
ggcccagatcatgtcagatgg

SEQ ID NO: 25227 - DNA, 21 bp, synthetic construct
  source 1..21: mol_type = other DNA; mol_type = other DNA
tatgatggttcatgtaaggct

SEQ ID NO: 25228 - DNA, 21 bp, synthetic construct
  source 1..21: mol_type = other DNA; mol_type = other DNA
tattggacaggtaagatagaa

SEQ ID NO: 25229 - DNA, 21 bp, synthetic construct
  source 1..21: mol_type = other DNA; mol_type = other DNA
aggttagagagcacttcctgg

SEQ ID NO: 25230 - DNA, 21 bp, synthetic construct
  source 1..21: mol_type = other DNA; mol_type = other DNA
tatttctctaaagtgattgca

SEQ ID NO: 25231 - DNA, 21 bp, synthetic construct
  source 1..21: mol_type = other DNA; mol_type = other DNA
ttatgccgcccttgctcgggg

SEQ ID NO: 25232 - DNA, 21 bp, synthetic construct
  source 1..21: mol_type = other DNA; mol_type = other DNA
tatttcagtggtgtcgctgcc

SEQ ID NO: 25233 - DNA, 21 bp, synthetic construct
  source 1..21: mol_type = other DNA; mol_type = other DNA
tactttacgggagtcagcagt

SEQ ID NO: 25234 - DNA, 21 bp, synthetic construct
  source 1..21: mol_type = other DNA; mol_type = other DNA
agactcgaagaccgcaaatgg

SEQ ID NO: 25235 - DNA, 21 bp, synthetic construct
  source 1..21: mol_type = other DNA; mol_type = other DNA
tactggagtggagtgtctgaa

SEQ ID NO: 25236 - DNA, 21 bp, synthetic construct
  source 1..21: mol_type = other DNA; mol_type = other DNA
ttgcatagactgtcggcaggg

SEQ ID NO: 25237 - DNA, 21 bp, synthetic construct
  source 1..21: mol_type = other DNA; mol_type = other DNA
tactggagcggtgtatcagag

SEQ ID NO: 25238 - DNA, 21 bp, synthetic construct
  source 1..21: mol_type = other DNA; mol_type = other DNA
tactggagcggagtgtctgaa

SEQ ID NO: 25239 - DNA, 21 bp, synthetic construct
  source 1..21: mol_type = other DNA; mol_type = other DNA
tacttttccggcaaacaggaa

SEQ ID NO: 25240 - DNA, 21 bp, synthetic construct
  source 1..21: mol_type = other DNA; mol_type = other DNA
tattcccgactccaagacaat

SEQ ID NO: 25241 - DNA, 21 bp, synthetic construct
  source 1..21: mol_type = other DNA; mol_type = other DNA
tgcatgaaatcaagagagatt

SEQ ID NO: 25242 - DNA, 21 bp, synthetic construct
  source 1..21: mol_type = other DNA; mol_type = other DNA
tacttcagtgggaagcaagag

SEQ ID NO: 25243 - DNA, 21 bp, synthetic construct
  source 1..21: mol_type = other DNA; mol_type = other DNA
tattctaaaatgaattacaac

SEQ ID NO: 25244 - DNA, 21 bp, synthetic construct
  source 1..21: mol_type = other DNA; mol_type = other DNA
ggggacgggacctcgaggtgg

SEQ ID NO: 25245 - DNA, 21 bp, synthetic construct
  source 1..21: mol_type = other DNA; mol_type = other DNA
tacgctaaaggaaatattaac

SEQ ID NO: 25246 - DNA, 21 bp, synthetic construct
  source 1..21: mol_type = other DNA; mol_type = other DNA
ggtggaattggcagcaattgg

SEQ ID NO: 25247 - DNA, 21 bp, synthetic construct
  source 1..21: mol_type = other DNA; mol_type = other DNA
ttctttacgggagtaagagaa

SEQ ID NO: 25248 - DNA, 21 bp, synthetic construct
  source 1..21: mol_type = other DNA; mol_type = other DNA
tatagtaagattaactataac

SEQ ID NO: 25249 - DNA, 21 bp, synthetic construct
  source 1..21: mol_type = other DNA; mol_type = other DNA
ctgcgtagcgaatgctgcgta

SEQ ID NO: 25250 - DNA, 21 bp, synthetic construct
  source 1..21: mol_type = other DNA; mol_type = other DNA
cgaatggagagccagggatgg

SEQ ID NO: 25251 - DNA, 21 bp, synthetic construct
  source 1..21: mol_type = other DNA; mol_type = other DNA
tacgtaaaatcgcaacaatct

SEQ ID NO: 25252 - DNA, 21 bp, synthetic construct
  source 1..21: mol_type = other DNA; mol_type = other DNA
tatagtcgtctcaatcctgat

SEQ ID NO: 25253 - DNA, 21 bp, synthetic construct
  source 1..21: mol_type = other DNA; mol_type = other DNA
tactctagggtaggaggggga

SEQ ID NO: 25254 - DNA, 21 bp, synthetic construct
  source 1..21: mol_type = other DNA; mol_type = other DNA
tactttactggcatccatgat

SEQ ID NO: 25255 - DNA, 21 bp, synthetic construct
  source 1..21: mol_type = other DNA; mol_type = other DNA
tgtggcaaaattaagcccgga

SEQ ID NO: 25256 - DNA, 21 bp, synthetic construct
  source 1..21: mol_type = other DNA; mol_type = other DNA
agagaggaagccgtatcgtgg

SEQ ID NO: 25257 - DNA, 21 bp, synthetic construct
  source 1..21: mol_type = other DNA; mol_type = other DNA
gttgcccacgcaggaatcggc

SEQ ID NO: 25258 - DNA, 21 bp, synthetic construct
  source 1..21: mol_type = other DNA; mol_type = other DNA
tatttcaccggagttcagtct

SEQ ID NO: 25259 - DNA, 21 bp, synthetic construct
  source 1..21: mol_type = other DNA; mol_type = other DNA
tacgcgaagggcaacatcaac

SEQ ID NO: 25260 - DNA, 21 bp, synthetic construct
  source 1..21: mol_type = other DNA; mol_type = other DNA
tatcataggttgagtcctgag

SEQ ID NO: 25261 - DNA, 21 bp, synthetic construct
  source 1..21: mol_type = other DNA; mol_type = other DNA
gaaaaaaaattcaaccctttt

SEQ ID NO: 25262 - DNA, 21 bp, synthetic construct
  source 1..21: mol_type = other DNA; mol_type = other DNA
ggttccccgggggttcactgg

SEQ ID NO: 25263 - DNA, 21 bp, synthetic construct
  source 1..21: mol_type = other DNA; mol_type = other DNA
gtcatggccgaccgagcatgg

SEQ ID NO: 25264 - DNA, 21 bp, synthetic construct
  source 1..21: mol_type = other DNA; mol_type = other DNA
tacttttctgggaaaaccgac

SEQ ID NO: 25265 - DNA, 21 bp, synthetic construct
  source 1..21: mol_type = other DNA; mol_type = other DNA
tattggaccggggtgattgat

SEQ ID NO: 25266 - DNA, 21 bp, synthetic construct
  source 1..21: mol_type = other DNA; mol_type = other DNA
cgctcagatcatgtatatcct

SEQ ID NO: 25267 - DNA, 21 bp, synthetic construct
  source 1..21: mol_type = other DNA; mol_type = other DNA
tattggtcaggagtgaaagat

SEQ ID NO: 25268 - DNA, 21 bp, synthetic construct
  source 1..21: mol_type = other DNA; mol_type = other DNA
cggaaggacgacgttttcccg

SEQ ID NO: 25269 - DNA, 21 bp, synthetic construct
  source 1..21: mol_type = other DNA; mol_type = other DNA
cgcatggagagcatcaagtgg

SEQ ID NO: 25270 - DNA, 21 bp, synthetic construct
  source 1..21: mol_type = other DNA; mol_type = other DNA
cgtgactttgacgtttatccc

SEQ ID NO: 25271 - DNA, 21 bp, synthetic construct
  source 1..21: mol_type = other DNA; mol_type = other DNA
tactggacaggcatgattgaa

SEQ ID NO: 25272 - DNA, 21 bp, synthetic construct
  source 1..21: mol_type = other DNA; mol_type = other DNA
ccgtatgcccggagtgttgag

SEQ ID NO: 25273 - DNA, 21 bp, synthetic construct
  source 1..21: mol_type = other DNA; mol_type = other DNA
tggtggagcggggtgggtgct

SEQ ID NO: 25274 - DNA, 21 bp, synthetic construct
  source 1..21: mol_type = other DNA; mol_type = other DNA
ctggccaggctaggggcaaac

SEQ ID NO: 25275 - DNA, 21 bp, synthetic construct
  source 1..21: mol_type = other DNA; mol_type = other DNA
gacttaagggacagaggttgg

SEQ ID NO: 25276 - DNA, 21 bp, synthetic construct
  source 1..21: mol_type = other DNA; mol_type = other DNA
tatttcagcgggcaaaaggac

SEQ ID NO: 25277 - DNA, 21 bp, synthetic construct
  source 1..21: mol_type = other DNA; mol_type = other DNA
tacctgaagagccaaacttat

SEQ ID NO: 25278 - DNA, 21 bp, synthetic construct
  source 1..21: mol_type = other DNA; mol_type = other DNA
tactggtcggggatagctgac

SEQ ID NO: 25279 - DNA, 21 bp, synthetic construct
  source 1..21: mol_type = other DNA; mol_type = other DNA
cgtccagattcggttagatgg

SEQ ID NO: 25280 - DNA, 21 bp, synthetic construct
  source 1..21: mol_type = other DNA; mol_type = other DNA
agagaagattacgtcaagtat

SEQ ID NO: 25281 - DNA, 21 bp, synthetic construct
  source 1..21: mol_type = other DNA; mol_type = other DNA
tattggacaggggttgttgag

SEQ ID NO: 25282 - DNA, 21 bp, synthetic construct
  source 1..21: mol_type = other DNA; mol_type = other DNA
atagatgattatgttcattgg

SEQ ID NO: 25283 - DNA, 21 bp, synthetic construct
  source 1..21: mol_type = other DNA; mol_type = other DNA
aacggccctgggtgtccatgg

SEQ ID NO: 25284 - DNA, 21 bp, synthetic construct
  source 1..21: mol_type = other DNA; mol_type = other DNA
gatctggaaagtagggagtgg

SEQ ID NO: 25285 - DNA, 21 bp, synthetic construct
  source 1..21: mol_type = other DNA; mol_type = other DNA
cgtgacgatttcgtgagcttt

SEQ ID NO: 25286 - DNA, 21 bp, synthetic construct
  source 1..21: mol_type = other DNA; mol_type = other DNA
ttgcaccgagttggacagaat

SEQ ID NO: 25287 - DNA, 21 bp, synthetic construct
  source 1..21: mol_type = other DNA; mol_type = other DNA
ttccatagacttagtcccaac

SEQ ID NO: 25288 - DNA, 21 bp, synthetic construct
  source 1..21: mol_type = other DNA; mol_type = other DNA
tatttcagtggagagaaagaa

SEQ ID NO: 25289 - DNA, 21 bp, synthetic construct
  source 1..21: mol_type = other DNA; mol_type = other DNA
tattttactggaaaacgcgaa

SEQ ID NO: 25290 - DNA, 21 bp, synthetic construct
  source 1..21: mol_type = other DNA; mol_type = other DNA
gtgcccagtccatgtgatggg

SEQ ID NO: 25291 - DNA, 21 bp, synthetic construct
  source 1..21: mol_type = other DNA; mol_type = other DNA
agggccgtcgatgcgtaccca

SEQ ID NO: 25292 - DNA, 21 bp, synthetic construct
  source 1..21: mol_type = other DNA; mol_type = other DNA
taccacgctaagggggagaat

SEQ ID NO: 25293 - DNA, 21 bp, synthetic construct
  source 1..21: mol_type = other DNA; mol_type = other DNA
cgggacgatttcacagcctac

SEQ ID NO: 25294 - DNA, 21 bp, synthetic construct
  source 1..21: mol_type = other DNA; mol_type = other DNA
tatttctcgggcacgaaagag

SEQ ID NO: 25295 - DNA, 21 bp, synthetic construct
  source 1..21: mol_type = other DNA; mol_type = other DNA
gtaaatgatttcgtcacctat

SEQ ID NO: 25296 - DNA, 21 bp, synthetic construct
  source 1..21: mol_type = other DNA; mol_type = other DNA
agagacgactttgttaagtgg

SEQ ID NO: 25297 - DNA, 21 bp, synthetic construct
  source 1..21: mol_type = other DNA; mol_type = other DNA
tggcgcactggtacttgtgcc

SEQ ID NO: 25298 - DNA, 21 bp, synthetic construct
  source 1..21: mol_type = other DNA; mol_type = other DNA
tatttttcagggaaagcagag

SEQ ID NO: 25299 - DNA, 21 bp, synthetic construct
  source 1..21: mol_type = other DNA; mol_type = other DNA
ccgtatgccagaagtgaaatg

SEQ ID NO: 25300 - DNA, 21 bp, synthetic construct
  source 1..21: mol_type = other DNA; mol_type = other DNA
ctaagtaggagctcatataac

SEQ ID NO: 25301 - DNA, 21 bp, synthetic construct
  source 1..21: mol_type = other DNA; mol_type = other DNA
gggagtccaggagttcggtgg

SEQ ID NO: 25302 - DNA, 21 bp, synthetic construct
  source 1..21: mol_type = other DNA; mol_type = other DNA
gttccggactgggtggaattt

SEQ ID NO: 25303 - DNA, 21 bp, synthetic construct
  source 1..21: mol_type = other DNA; mol_type = other DNA
aagagcgactttgtgacgtac

SEQ ID NO: 25304 - DNA, 21 bp, synthetic construct
  source 1..21: mol_type = other DNA; mol_type = other DNA
cgtgaagaggaagtctaccct

SEQ ID NO: 25305 - DNA, 21 bp, synthetic construct
  source 1..21: mol_type = other DNA; mol_type = other DNA
ttgtgtaggccgtgtcacgag

SEQ ID NO: 25306 - DNA, 21 bp, synthetic construct
  source 1..21: mol_type = other DNA; mol_type = other DNA
attagtgagttctcaggatac

SEQ ID NO: 25307 - DNA, 21 bp, synthetic construct
  source 1..21: mol_type = other DNA; mol_type = other DNA
cgtgcccttgaaggggcagac

SEQ ID NO: 25308 - DNA, 21 bp, synthetic construct
  source 1..21: mol_type = other DNA; mol_type = other DNA
ttagtagacggcttacgctgg

SEQ ID NO: 25309 - DNA, 21 bp, synthetic construct
  source 1..21: mol_type = other DNA; mol_type = other DNA
tattttagtggagtgagcgag

SEQ ID NO: 25310 - DNA, 21 bp, synthetic construct
  source 1..21: mol_type = other DNA; mol_type = other DNA
tatcttaagtcacagagcctc

SEQ ID NO: 25311 - DNA, 21 bp, synthetic construct
  source 1..21: mol_type = other DNA; mol_type = other DNA
tatctgaaatctcaagagtgg

SEQ ID NO: 25312 - DNA, 21 bp, synthetic construct
  source 1..21: mol_type = other DNA; mol_type = other DNA
tatgcgaaaactggctgcaat

SEQ ID NO: 25313 - DNA, 21 bp, synthetic construct
  source 1..21: mol_type = other DNA; mol_type = other DNA
ctatgccgaccctgtcatgaa

SEQ ID NO: 25314 - DNA, 21 bp, synthetic construct
  source 1..21: mol_type = other DNA; mol_type = other DNA
tgcgatggaccatgttgccct

SEQ ID NO: 25315 - DNA, 21 bp, synthetic construct
  source 1..21: mol_type = other DNA; mol_type = other DNA
tactttagcggccaattggaa

SEQ ID NO: 25316 - DNA, 21 bp, synthetic construct
  source 1..21: mol_type = other DNA; mol_type = other DNA
ttgcaccggctcgcagccaac

SEQ ID NO: 25317 - DNA, 21 bp, synthetic construct
  source 1..21: mol_type = other DNA; mol_type = other DNA
cactgccctacgattcccatg

SEQ ID NO: 25318 - DNA, 21 bp, synthetic construct
  source 1..21: mol_type = other DNA; mol_type = other DNA
tattccaaggtggggtggaat

SEQ ID NO: 25319 - DNA, 21 bp, synthetic construct
  source 1..21: mol_type = other DNA; mol_type = other DNA
agaatggagtcggtgtcgtgg

SEQ ID NO: 25320 - DNA, 21 bp, synthetic construct
  source 1..21: mol_type = other DNA; mol_type = other DNA
acgagtgagtataagtattac

SEQ ID NO: 25321 - DNA, 21 bp, synthetic construct
  source 1..21: mol_type = other DNA; mol_type = other DNA
agggtagattgcggaagccgg

SEQ ID NO: 25322 - DNA, 21 bp, synthetic construct
  source 1..21: mol_type = other DNA; mol_type = other DNA
cgggatatctcagtcttcccg

SEQ ID NO: 25323 - DNA, 21 bp, synthetic construct
  source 1..21: mol_type = other DNA; mol_type = other DNA
tattcgaaacagaacgtcaat

SEQ ID NO: 25324 - DNA, 21 bp, synthetic construct
  source 1..21: mol_type = other DNA; mol_type = other DNA
agtagaagtactaacgggatt

SEQ ID NO: 25325 - DNA, 21 bp, synthetic construct
  source 1..21: mol_type = other DNA; mol_type = other DNA
cgagaggacttcgttaaatac

SEQ ID NO: 25326 - DNA, 21 bp, synthetic construct
  source 1..21: mol_type = other DNA; mol_type = other DNA
tactttaccggtaaaaccaac

SEQ ID NO: 25327 - DNA, 21 bp, synthetic construct
  source 1..21: mol_type = other DNA; mol_type = other DNA
tatagcaggctgaacatggac

SEQ ID NO: 25328 - DNA, 21 bp, synthetic construct
  source 1..21: mol_type = other DNA; mol_type = other DNA
taccatcgcctcggtattgac

SEQ ID NO: 25329 - DNA, 21 bp, synthetic construct
  source 1..21: mol_type = other DNA; mol_type = other DNA
tactggtcgggcatacccgaa

SEQ ID NO: 25330 - DNA, 21 bp, synthetic construct
  source 1..21: mol_type = other DNA; mol_type = other DNA
ttcagcagactctcagataat

SEQ ID NO: 25331 - DNA, 21 bp, synthetic construct
  source 1..21: mol_type = other DNA; mol_type = other DNA
tatttcgcgggaaagatcgcc

SEQ ID NO: 25332 - DNA, 21 bp, synthetic construct
  source 1..21: mol_type = other DNA; mol_type = other DNA
tatttcacggggaagacaaat

SEQ ID NO: 25333 - DNA, 21 bp, synthetic construct
  source 1..21: mol_type = other DNA; mol_type = other DNA
ttacacaggcttcacgttgac

SEQ ID NO: 25334 - DNA, 21 bp, synthetic construct
  source 1..21: mol_type = other DNA; mol_type = other DNA
cggaacgaatttacgacgttt

SEQ ID NO: 25335 - DNA, 21 bp, synthetic construct
  source 1..21: mol_type = other DNA; mol_type = other DNA
ctaactagattgcaatcaaat

SEQ ID NO: 25336 - DNA, 21 bp, synthetic construct
  source 1..21: mol_type = other DNA; mol_type = other DNA
gacatgcaaagccgtgattgg

SEQ ID NO: 25337 - DNA, 21 bp, synthetic construct
  source 1..21: mol_type = other DNA; mol_type = other DNA
tacagccgtttggatcctgtt

SEQ ID NO: 25338 - DNA, 21 bp, synthetic construct
  source 1..21: mol_type = other DNA; mol_type = other DNA
caagaagactatgtaacatgg

SEQ ID NO: 25339 - DNA, 21 bp, synthetic construct
  source 1..21: mol_type = other DNA; mol_type = other DNA
tacttttcaggtcagaaagat

SEQ ID NO: 25340 - DNA, 21 bp, synthetic construct
  source 1..21: mol_type = other DNA; mol_type = other DNA
tatgtgcgaagtgatatgcac

SEQ ID NO: 25341 - DNA, 21 bp, synthetic construct
  source 1..21: mol_type = other DNA; mol_type = other DNA
taccatgtagctgacagatgc

SEQ ID NO: 25342 - DNA, 21 bp, synthetic construct
  source 1..21: mol_type = other DNA; mol_type = other DNA
gcacccgatagcgtgagatgg

SEQ ID NO: 25343 - DNA, 21 bp, synthetic construct
  source 1..21: mol_type = other DNA; mol_type = other DNA
agtcgatcaactaatggagtc

SEQ ID NO: 25344 - DNA, 21 bp, synthetic construct
  source 1..21: mol_type = other DNA; mol_type = other DNA
aggatggaggaggtgtaccca

SEQ ID NO: 25345 - DNA, 21 bp, synthetic construct
  source 1..21: mol_type = other DNA; mol_type = other DNA
agaagtgagtttcttcccttc

SEQ ID NO: 25346 - DNA, 21 bp, synthetic construct
  source 1..21: mol_type = other DNA; mol_type = other DNA
gacctccagagtagcagctgg

SEQ ID NO: 25347 - DNA, 21 bp, synthetic construct
  source 1..21: mol_type = other DNA; mol_type = other DNA
aaggacgggtacagtacctac

SEQ ID NO: 25348 - DNA, 21 bp, synthetic construct
  source 1..21: mol_type = other DNA; mol_type = other DNA
tactcccgattaggagagaac

SEQ ID NO: 25349 - DNA, 21 bp, synthetic construct
  source 1..21: mol_type = other DNA; mol_type = other DNA
tatttcacggggcgaccggat

SEQ ID NO: 25350 - DNA, 21 bp, synthetic construct
  source 1..21: mol_type = other DNA; mol_type = other DNA
ctggcaaagcaaggccctaac

SEQ ID NO: 25351 - DNA, 21 bp, synthetic construct
  source 1..21: mol_type = other DNA; mol_type = other DNA
ctgcatcgactgtcggagcac

SEQ ID NO: 25352 - DNA, 21 bp, synthetic construct
  source 1..21: mol_type = other DNA; mol_type = other DNA
tactggacgggcaaaatcgag

SEQ ID NO: 25353 - DNA, 21 bp, synthetic construct
  source 1..21: mol_type = other DNA; mol_type = other DNA
tacacaagattagatcccatg

SEQ ID NO: 25354 - DNA, 21 bp, synthetic construct
  source 1..21: mol_type = other DNA; mol_type = other DNA
gtgcagtctaccaatgggcgc

SEQ ID NO: 25355 - DNA, 21 bp, synthetic construct
  source 1..21: mol_type = other DNA; mol_type = other DNA
tatttttcaggcgtacgtgag

SEQ ID NO: 25356 - DNA, 21 bp, synthetic construct
  source 1..21: mol_type = other DNA; mol_type = other DNA
tggtggaccggggtgtgtgaa

SEQ ID NO: 25357 - DNA, 21 bp, synthetic construct
  source 1..21: mol_type = other DNA; mol_type = other DNA
tactggacaggcgtgacagaa

SEQ ID NO: 25358 - DNA, 21 bp, synthetic construct
  source 1..21: mol_type = other DNA; mol_type = other DNA
cattcgcgtgtgggtcataat

SEQ ID NO: 25359 - DNA, 21 bp, synthetic construct
  source 1..21: mol_type = other DNA; mol_type = other DNA
cttcacaggctgattgctgat

SEQ ID NO: 25360 - DNA, 21 bp, synthetic construct
  source 1..21: mol_type = other DNA; mol_type = other DNA
agaaacgagttcacgacatat

SEQ ID NO: 25361 - DNA, 21 bp, synthetic construct
  source 1..21: mol_type = other DNA; mol_type = other DNA
aatgacgggatcagcaaatgg

SEQ ID NO: 25362 - DNA, 21 bp, synthetic construct
  source 1..21: mol_type = other DNA; mol_type = other DNA
tacgccaagcaagggtataac

SEQ ID NO: 25363 - DNA, 21 bp, synthetic construct
  source 1..21: mol_type = other DNA; mol_type = other DNA
tattttagcggcaagaaagac

SEQ ID NO: 25364 - DNA, 21 bp, synthetic construct
  source 1..21: mol_type = other DNA; mol_type = other DNA
tattggaccggagttccggaa

SEQ ID NO: 25365 - DNA, 21 bp, synthetic construct
  source 1..21: mol_type = other DNA; mol_type = other DNA
tactctcggattggtcccaat

SEQ ID NO: 25366 - DNA, 21 bp, synthetic construct
  source 1..21: mol_type = other DNA; mol_type = other DNA
agagacatggatgcttatccg

SEQ ID NO: 25367 - DNA, 21 bp, synthetic construct
  source 1..21: mol_type = other DNA; mol_type = other DNA
aggggaggaggactgtttccg

SEQ ID NO: 25368 - DNA, 21 bp, synthetic construct
  source 1..21: mol_type = other DNA; mol_type = other DNA
tacttcagcggaatccccgaa

SEQ ID NO: 25369 - DNA, 21 bp, synthetic construct
  source 1..21: mol_type = other DNA; mol_type = other DNA
agaagtgattttaagatctac

SEQ ID NO: 25370 - DNA, 21 bp, synthetic construct
  source 1..21: mol_type = other DNA; mol_type = other DNA
tatttcactggagttttagaa

SEQ ID NO: 25371 - DNA, 21 bp, synthetic construct
  source 1..21: mol_type = other DNA; mol_type = other DNA
tattttgcggggaagcatgat

SEQ ID NO: 25372 - DNA, 21 bp, synthetic construct
  source 1..21: mol_type = other DNA; mol_type = other DNA
agaggcgaacatacatacccc

SEQ ID NO: 25373 - DNA, 21 bp, synthetic construct
  source 1..21: mol_type = other DNA; mol_type = other DNA
atgcatagacttgctgtgaac

SEQ ID NO: 25374 - DNA, 21 bp, synthetic construct
  source 1..21: mol_type = other DNA; mol_type = other DNA
cgatcagaatttacaacttac

SEQ ID NO: 25375 - DNA, 21 bp, synthetic construct
  source 1..21: mol_type = other DNA; mol_type = other DNA
tgtgctcccgtctgttgtgaa

SEQ ID NO: 25376 - DNA, 21 bp, synthetic construct
  source 1..21: mol_type = other DNA; mol_type = other DNA
atgcatagactgtctaccaac

SEQ ID NO: 25377 - DNA, 21 bp, synthetic construct
  source 1..21: mol_type = other DNA; mol_type = other DNA
agaggggacgaggtgtaccca

SEQ ID NO: 25378 - DNA, 21 bp, synthetic construct
  source 1..21: mol_type = other DNA; mol_type = other DNA
cgtctaagcagtcagacttgg

SEQ ID NO: 25379 - DNA, 21 bp, synthetic construct
  source 1..21: mol_type = other DNA; mol_type = other DNA
tatacgaggttagatccacac

SEQ ID NO: 25380 - DNA, 21 bp, synthetic construct
  source 1..21: mol_type = other DNA; mol_type = other DNA
tatagtaaggcaaactccaac

SEQ ID NO: 25381 - DNA, 21 bp, synthetic construct
  source 1..21: mol_type = other DNA; mol_type = other DNA
gtgcctgaacattgcaaggat

SEQ ID NO: 25382 - DNA, 21 bp, synthetic construct
  source 1..21: mol_type = other DNA; mol_type = other DNA
atggagagtacgaacggtgtc

SEQ ID NO: 25383 - DNA, 21 bp, synthetic construct
  source 1..21: mol_type = other DNA; mol_type = other DNA
tactttagcggtgtaatggac

SEQ ID NO: 25384 - DNA, 21 bp, synthetic construct
  source 1..21: mol_type = other DNA; mol_type = other DNA
tattggagcgccattaaggaa

SEQ ID NO: 25385 - DNA, 21 bp, synthetic construct
  source 1..21: mol_type = other DNA; mol_type = other DNA
gatatggtatcccggtcatgg

SEQ ID NO: 25386 - DNA, 21 bp, synthetic construct
  source 1..21: mol_type = other DNA; mol_type = other DNA
tatgattcgacgaacggactc

SEQ ID NO: 25387 - DNA, 21 bp, synthetic construct
  source 1..21: mol_type = other DNA; mol_type = other DNA
tattttcacggcaaggtcgca

SEQ ID NO: 25388 - DNA, 21 bp, synthetic construct
  source 1..21: mol_type = other DNA; mol_type = other DNA
gtatatagtacaaatggaatc

SEQ ID NO: 25389 - DNA, 21 bp, synthetic construct
  source 1..21: mol_type = other DNA; mol_type = other DNA
gatatgcagtctagggactgg

SEQ ID NO: 25390 - DNA, 21 bp, synthetic construct
  source 1..21: mol_type = other DNA; mol_type = other DNA
tattttactggccaatcagat

SEQ ID NO: 25391 - DNA, 21 bp, synthetic construct
  source 1..21: mol_type = other DNA; mol_type = other DNA
tatagtagattaggtttaaac

SEQ ID NO: 25392 - DNA, 21 bp, synthetic construct
  source 1..21: mol_type = other DNA; mol_type = other DNA
ggtgatggcacgagccgttgg

SEQ ID NO: 25393 - DNA, 21 bp, synthetic construct
  source 1..21: mol_type = other DNA; mol_type = other DNA
cgcttagaggatcgtagctgg

SEQ ID NO: 25394 - DNA, 21 bp, synthetic construct
  source 1..21: mol_type = other DNA; mol_type = other DNA
tacgtgaaaaatgacgctagg

SEQ ID NO: 25395 - DNA, 21 bp, synthetic construct
  source 1..21: mol_type = other DNA; mol_type = other DNA
tacagtagacttaacgtgctc

SEQ ID NO: 25396 - DNA, 21 bp, synthetic construct
  source 1..21: mol_type = other DNA; mol_type = other DNA
tactttgcaggcaaagtggcg

SEQ ID NO: 25397 - DNA, 21 bp, synthetic construct
  source 1..21: mol_type = other DNA; mol_type = other DNA
atgcgaaatacgcattgcgat

SEQ ID NO: 25398 - DNA, 21 bp, synthetic construct
  source 1..21: mol_type = other DNA; mol_type = other DNA
cactcaaaactgaatccaatg

SEQ ID NO: 25399 - DNA, 21 bp, synthetic construct
  source 1..21: mol_type = other DNA; mol_type = other DNA
gttttaagtactaacggaatc

SEQ ID NO: 25400 - DNA, 21 bp, synthetic construct
  source 1..21: mol_type = other DNA; mol_type = other DNA
aggatggaagacagaaactgg

SEQ ID NO: 25401 - DNA, 21 bp, synthetic construct
  source 1..21: mol_type = other DNA; mol_type = other DNA
agcatgtcatcctcaacttgg

SEQ ID NO: 25402 - DNA, 21 bp, synthetic construct
  source 1..21: mol_type = other DNA; mol_type = other DNA
tattcaaaactagacagcaat

SEQ ID NO: 25403 - DNA, 21 bp, synthetic construct
  source 1..21: mol_type = other DNA; mol_type = other DNA
aacacttacgatagttatccc

SEQ ID NO: 25404 - DNA, 21 bp, synthetic construct
  source 1..21: mol_type = other DNA; mol_type = other DNA
gtaatgagcacaaacgggcgc

SEQ ID NO: 25405 - DNA, 21 bp, synthetic construct
  source 1..21: mol_type = other DNA; mol_type = other DNA
tactcgcgcatacaaccagac

SEQ ID NO: 25406 - DNA, 21 bp, synthetic construct
  source 1..21: mol_type = other DNA; mol_type = other DNA
tatacgaagcttaatcctaat

SEQ ID NO: 25407 - DNA, 21 bp, synthetic construct
  source 1..21: mol_type = other DNA; mol_type = other DNA
tactttaccggtcgaatcgat

SEQ ID NO: 25408 - DNA, 21 bp, synthetic construct
  source 1..21: mol_type = other DNA; mol_type = other DNA
tatttcactggcatgtttgaa

SEQ ID NO: 25409 - DNA, 21 bp, synthetic construct
  source 1..21: mol_type = other DNA; mol_type = other DNA
tgcagaggcgagcagaagatg

SEQ ID NO: 25410 - DNA, 21 bp, synthetic construct
  source 1..21: mol_type = other DNA; mol_type = other DNA
agtcaaagtacaaacgggata

SEQ ID NO: 25411 - DNA, 21 bp, synthetic construct
  source 1..21: mol_type = other DNA; mol_type = other DNA
gttaacagctcgaacggagtg

SEQ ID NO: 25412 - DNA, 21 bp, synthetic construct
  source 1..21: mol_type = other DNA; mol_type = other DNA
tacagcaggctacaaaacgac

SEQ ID NO: 25413 - DNA, 21 bp, synthetic construct
  source 1..21: mol_type = other DNA; mol_type = other DNA
tcctgtaaatcctcttacaca

SEQ ID NO: 25414 - DNA, 21 bp, synthetic construct
  source 1..21: mol_type = other DNA; mol_type = other DNA
ctgtgtcgaccgtgtagtata

SEQ ID NO: 25415 - DNA, 21 bp, synthetic construct
  source 1..21: mol_type = other DNA; mol_type = other DNA
tattggagtggaattccggag

SEQ ID NO: 25416 - DNA, 21 bp, synthetic construct
  source 1..21: mol_type = other DNA; mol_type = other DNA
tactccaagatcaattacaat

SEQ ID NO: 25417 - DNA, 21 bp, synthetic construct
  source 1..21: mol_type = other DNA
ggcgccgagcatgtacgctgg

SEQ ID NO: 25418 - DNA, 21 bp, synthetic construct
  source 1..21: mol_type = other DNA
tacttttcgggcgaaaaagag

SEQ ID NO: 25419 - DNA, 21 bp, synthetic construct
  source 1..21: mol_type = other DNA
ttgacgaaactatcgaacaat

SEQ ID NO: 25420 - DNA, 21 bp, synthetic construct
  source 1..21: mol_type = other DNA
aaagatgattacgtgtcgtac

SEQ ID NO: 25421 - DNA, 21 bp, synthetic construct
  source 1..21: mol_type = other DNA
tattggagcggtataaaagac

SEQ ID NO: 25422 - DNA, 21 bp, synthetic construct
  source 1..21: mol_type = other DNA
tatctgaaatcgcaatcctgg

SEQ ID NO: 25423 - DNA, 21 bp, synthetic construct
  source 1..21: mol_type = other DNA
tatgagagcacaaacggaaaa

SEQ ID NO: 25424 - DNA, 21 bp, synthetic construct
  source 1..21: mol_type = other DNA
cgcgaggactatgttaaatac

SEQ ID NO: 25425 - DNA, 21 bp, synthetic construct
  source 1..21: mol_type = other DNA
tattttcatggaaaggtagaa

SEQ ID NO: 25426 - DNA, 21 bp, synthetic construct
  source 1..21: mol_type = other DNA
tatagtaaatttggcccgaat

SEQ ID NO: 25427 - DNA, 21 bp, synthetic construct
  source 1..21: mol_type = other DNA
tacactaagagtcaaccttgc

SEQ ID NO: 25428 - DNA, 21 bp, synthetic construct
  source 1..21: mol_type = other DNA
tacacaagactttcacctgat

SEQ ID NO: 25429 - DNA, 21 bp, synthetic construct
  source 1..21: mol_type = other DNA
gtcccgttgaagggttgggat

SEQ ID NO: 25430 - DNA, 21 bp, synthetic construct
  source 1..21: mol_type = other DNA
tacagtaaaatggggatgaat

SEQ ID NO: 25431 - DNA, 21 bp, synthetic construct
  source 1..21: mol_type = other DNA
tacttcaccggtaaaccaaac

SEQ ID NO: 25432 - DNA, 21 bp, synthetic construct
  source 1..21: mol_type = other DNA
tatcatcgtctgggagaggac

SEQ ID NO: 25433 - DNA, 21 bp, synthetic construct
  source 1..21: mol_type = other DNA
tattggagtggaattcaggat

SEQ ID NO: 25434 - DNA, 21 bp, synthetic construct
  source 1..21: mol_type = other DNA
ttacatgctaatggacctaac

SEQ ID NO: 25435 - DNA, 21 bp, synthetic construct
  source 1..21: mol_type = other DNA
ttacatagacaattaccatta

SEQ ID NO: 25436 - DNA, 21 bp, synthetic construct
  source 1..21: mol_type = other DNA
ggtgatggctactcaaagtgg

SEQ ID NO: 25437 - DNA, 21 bp, synthetic construct
  source 1..21: mol_type = other DNA
tattttactggcgtaccctcg

SEQ ID NO: 25438 - DNA, 21 bp, synthetic construct
  source 1..21: mol_type = other DNA
aaaaatgccgaagtataccca

SEQ ID NO: 25439 - DNA, 21 bp, synthetic construct
  source 1..21: mol_type = other DNA
ttacatcgtttgggcgaccac

SEQ ID NO: 25440 - DNA, 21 bp, synthetic construct
  source 1..21: mol_type = other DNA
tactctaaagctaactacaac

SEQ ID NO: 25441 - DNA, 21 bp, synthetic construct
  source 1..21: mol_type = other DNA
tatgtaaaaagtcaatcctac

SEQ ID NO: 25442 - DNA, 21 bp, synthetic construct
  source 1..21: mol_type = other DNA
tactctagacttggatacaac

SEQ ID NO: 25443 - DNA, 21 bp, synthetic construct
  source 1..21: mol_type = other DNA
tcgggcgaatctcgactctgg

SEQ ID NO: 25444 - DNA, 21 bp, synthetic construct
  source 1..21: mol_type = other DNA
gtggatgagtggaagacctac

SEQ ID NO: 25445 - DNA, 21 bp, synthetic construct
  source 1..21: mol_type = other DNA
tacttttccggtcgtttagag

SEQ ID NO: 25446 - DNA, 21 bp, synthetic construct
  source 1..21: mol_type = other DNA
tggaccgacatgtgtaaagct

SEQ ID NO: 25447 - DNA, 21 bp, synthetic construct
  source 1..21: mol_type = other DNA
tactttagcggcataccagtc

SEQ ID NO: 25448 - DNA, 21 bp, synthetic construct
  source 1..21: mol_type = other DNA
atgagagatggtaccaatgca

SEQ ID NO: 25449 - DNA, 21 bp, synthetic construct
  source 1..21: mol_type = other DNA
attagaagtacaaacggggtg

SEQ ID NO: 25450 - DNA, 21 bp, synthetic construct
  source 1..21: mol_type = other DNA
cgagaagattttgtgcgctgg

SEQ ID NO: 25451 - DNA, 21 bp, synthetic construct
  source 1..21: mol_type = other DNA
ggggtcaacggttgcaagccc

SEQ ID NO: 25452 - DNA, 21 bp, synthetic construct
  source 1..21: mol_type = other DNA
tactttagtggtaccgtggac

SEQ ID NO: 25453 - DNA, 21 bp, synthetic construct
  source 1..21: mol_type = other DNA
ctatctaaactcggccataat

SEQ ID NO: 25454 - DNA, 21 bp, synthetic construct
  source 1..21: mol_type = other DNA
ggagacgaatggattccttat

SEQ ID NO: 25455 - DNA, 21 bp, synthetic construct
  source 1..21: mol_type = other DNA
tattttacaggacgtcatgag

SEQ ID NO: 25456 - DNA, 21 bp, synthetic construct
  source 1..21: mol_type = other DNA
ctggccaggatggggtacaat

SEQ ID NO: 25457 - DNA, 21 bp, synthetic construct
  source 1..21: mol_type = other DNA
tatgtacgaagccaaataggg

SEQ ID NO: 25458 - DNA, 21 bp, synthetic construct
  source 1..21: mol_type = other DNA
tacttcagcgggaaaatggat

SEQ ID NO: 25459 - DNA, 21 bp, synthetic construct
  source 1..21: mol_type = other DNA
cgagatggcgtatcgaagtgg

SEQ ID NO: 25460 - DNA, 21 bp, synthetic construct
  source 1..21: mol_type = other DNA
agggacgagttcaagtcgttc

SEQ ID NO: 25461 - DNA, 21 bp, synthetic construct
  source 1..21: mol_type = other DNA
tacttcaccggacacacggac

SEQ ID NO: 25462 - DNA, 21 bp, synthetic construct
  source 1..21: mol_type = other DNA
aaagacgagtttaaagtatat

SEQ ID NO: 25463 - DNA, 21 bp, synthetic construct
  source 1..21: mol_type = other DNA
ttatgtaaaccttgtattacg

SEQ ID NO: 25464 - DNA, 21 bp, synthetic construct
  source 1..21: mol_type = other DNA
tatctcaagtcgcaactttat

SEQ ID NO: 25465 - DNA, 21 bp, synthetic construct
  source 1..21: mol_type = other DNA
tacttttcgggcacaaaggat

SEQ ID NO: 25466 - DNA, 21 bp, synthetic construct
  source 1..21: mol_type = other DNA
cgagaagatttcaccacttgg

SEQ ID NO: 25467 - DNA, 21 bp, synthetic construct
  source 1..21: mol_type = other DNA
cgcacaattgatagttacgcg

SEQ ID NO: 25468 - DNA, 21 bp, synthetic construct
  source 1..21: mol_type = other DNA
tttttcacaggtgtccgagaa

SEQ ID NO: 25469 - DNA, 21 bp, synthetic construct
  source 1..21: mol_type = other DNA
cgacgtaccgatgtgtacccc

SEQ ID NO: 25470 - DNA, 21 bp, synthetic construct
  source 1..21: mol_type = other DNA
gttcctttgcgtggcatcggc

SEQ ID NO: 25471 - DNA, 21 bp, synthetic construct
  source 1..21: mol_type = other DNA
aatacaagcactaacggcgta

SEQ ID NO: 25472 - DNA, 21 bp, synthetic construct
  source 1..21: mol_type = other DNA
tatgtacgttccgacagcatg

SEQ ID NO: 25473 - DNA, 21 bp, synthetic construct
  source 1..21: mol_type = other DNA
tactttactggagagagggag

SEQ ID NO: 25474 - DNA, 21 bp, synthetic construct
  source 1..21: mol_type = other DNA
tatcatagactgggccaggac

SEQ ID NO: 25475 - DNA, 21 bp, synthetic construct
  source 1..21: mol_type = other DNA
cgtaccgaatttacgacgtac

SEQ ID NO: 25476 - DNA, 21 bp, synthetic construct
  source 1..21: mol_type = other DNA
tatagcagagtcgggataaac

SEQ ID NO: 25477 - DNA, 21 bp, synthetic construct
  source 1..21: mol_type = other DNA
tattttgctggagtcagggcc

SEQ ID NO: 25478 - DNA, 21 bp, synthetic construct
  source 1..21: mol_type = other DNA
gctatggcggatagacagtgg

SEQ ID NO: 25479 - DNA, 21 bp, synthetic construct
  source 1..21: mol_type = other DNA
aaggatgattggactccattc

SEQ ID NO: 25480 - DNA, 21 bp, synthetic construct
  source 1..21: mol_type = other DNA; mol_type = other DNA
tacttcgccggggtcaaaagt

SEQ ID NO: 25481 - DNA, 21 bp, synthetic construct
  source 1..21: mol_type = other DNA; mol_type = other DNA
gggggcgagtcaagcacatgg

SEQ ID NO: 25482 - DNA, 21 bp, synthetic construct
  source 1..21: mol_type = other DNA; mol_type = other DNA
tttgaaagtgataacggcgtt

SEQ ID NO: 25483 - DNA, 21 bp, synthetic construct
  source 1..21: mol_type = other DNA; mol_type = other DNA
cgtgatatggacgcataccca

SEQ ID NO: 25484 - DNA, 21 bp, synthetic construct
  source 1..21: mol_type = other DNA; mol_type = other DNA
tggtggtcgggaactaaagaa

SEQ ID NO: 25485 - DNA, 21 bp, synthetic construct
  source 1..21: mol_type = other DNA; mol_type = other DNA
tattttgctggcaagcgtgat

SEQ ID NO: 25486 - DNA, 21 bp, synthetic construct
  source 1..21: mol_type = other DNA
gagacttcgacgaacggacgc

SEQ ID NO: 25487 - DNA, 21 bp, synthetic construct
  source 1..21: mol_type = other DNA; mol_type = other DNA
cgcgtcatggatgcttatgcc

SEQ ID NO: 25488 - DNA, 21 bp, synthetic construct
  source 1..21: mol_type = other DNA; mol_type = other DNA
tatagtaggttacagttcaac

SEQ ID NO: 25489 - DNA, 21 bp, synthetic construct
  source 1..21: mol_type = other DNA; mol_type = other DNA
tatagcaagcagggggcaaac

SEQ ID NO: 25490 - DNA, 21 bp, synthetic construct
  source 1..21: mol_type = other DNA; mol_type = other DNA
tactatacaggggtgagggaa

SEQ ID NO: 25491 - DNA, 21 bp, synthetic construct
  source 1..21: mol_type = other DNA; mol_type = other DNA
tatactcgcatcggcatgaat

SEQ ID NO: 25492 - DNA, 21 bp, synthetic construct
  source 1..21: mol_type = other DNA; mol_type = other DNA
tattttacgggctttgtcgaa

SEQ ID NO: 25493 - DNA, 21 bp, synthetic construct
  source 1..21: mol_type = other DNA; mol_type = other DNA
tactctcgtctcgcacctgat

SEQ ID NO: 25494 - DNA, 21 bp, synthetic construct
  source 1..21: mol_type = other DNA; mol_type = other DNA
taccacaggttagatccagac

SEQ ID NO: 25495 - DNA, 21 bp, synthetic construct
  source 1..21: mol_type = other DNA; mol_type = other DNA
gagatgcaaagcagggcatgg

SEQ ID NO: 25496 - DNA, 21 bp, synthetic construct
  source 1..21: mol_type = other DNA; mol_type = other DNA
atgcatagacttggttacgat

SEQ ID NO: 25497 - DNA, 21 bp, synthetic construct
  source 1..21: mol_type = other DNA; mol_type = other DNA
tatttcaccggtgaattcgag

SEQ ID NO: 25498 - DNA, 21 bp, synthetic construct
  source 1..21: mol_type = other DNA; mol_type = other DNA
aaagatgactactcacattat

SEQ ID NO: 25499 - DNA, 21 bp, synthetic construct
  source 1..21: mol_type = other DNA; mol_type = other DNA
tattttcatggtcaaatcgaa

SEQ ID NO: 25500 - DNA, 21 bp, synthetic construct
  source 1..21: mol_type = other DNA; mol_type = other DNA
tacttccagggtaaaatagat

SEQ ID NO: 25501 - DNA, 21 bp, synthetic construct
  source 1..21: mol_type = other DNA; mol_type = other DNA
tacttttcaggtataatgcaa

SEQ ID NO: 25502 - DNA, 21 bp, synthetic construct
  source 1..21: mol_type = other DNA; mol_type = other DNA
tattttagtggccagcatgaa

SEQ ID NO: 25503 - DNA, 21 bp, synthetic construct
  source 1..21: mol_type = other DNA; mol_type = other DNA
cttctaagctcgcatgactgg

SEQ ID NO: 25504 - DNA, 21 bp, synthetic construct
  source 1..21: mol_type = other DNA; mol_type = other DNA
tatagcaagatcggtggtaac

SEQ ID NO: 25505 - DNA, 21 bp, synthetic construct
  source 1..21: mol_type = other DNA; mol_type = other DNA
agagaagacatggtcaagtgg

SEQ ID NO: 25506 - DNA, 21 bp, synthetic construct
  source 1..21: mol_type = other DNA; mol_type = other DNA
aggtcggaatttctcccctat

SEQ ID NO: 25507 - DNA, 21 bp, synthetic construct
  source 1..21: mol_type = other DNA; mol_type = other DNA
tactcaaagaggaacgataac

SEQ ID NO: 25508 - DNA, 21 bp, synthetic construct
  source 1..21: mol_type = other DNA; mol_type = other DNA
tactcaaggcttggtgcggat

SEQ ID NO: 25509 - DNA, 21 bp, synthetic construct
  source 1..21: mol_type = other DNA; mol_type = other DNA
tactctaagacgggctgcaat

SEQ ID NO: 25510 - DNA, 21 bp, synthetic construct
  source 1..21: mol_type = other DNA; mol_type = other DNA
tatgcccgtgctggccccaat

SEQ ID NO: 25511 - DNA, 21 bp, synthetic construct
  source 1..21: mol_type = other DNA; mol_type = other DNA
caaggcgagtcgaggctttgg

SEQ ID NO: 25512 - DNA, 21 bp, synthetic construct
  source 1..21: mol_type = other DNA; mol_type = other DNA
tattggactggagtctccgag

SEQ ID NO: 25513 - DNA, 21 bp, synthetic construct
  source 1..21: mol_type = other DNA; mol_type = other DNA
ttcgcgaggtccggtccgaat

SEQ ID NO: 25514 - DNA, 21 bp, synthetic construct
  source 1..21: mol_type = other DNA; mol_type = other DNA
tactcaaagatgaactataac

SEQ ID NO: 25515 - DNA, 21 bp, synthetic construct
  source 1..21: mol_type = other DNA; mol_type = other DNA
atagcacgcgaaggatgggac

SEQ ID NO: 25516 - DNA, 21 bp, synthetic construct
  source 1..21: mol_type = other DNA; mol_type = other DNA
tactcccgccttggaatggga

SEQ ID NO: 25517 - DNA, 21 bp, synthetic construct
  source 1..21: mol_type = other DNA; mol_type = other DNA
cgggacttcgacgcgtacccg

SEQ ID NO: 25518 - DNA, 21 bp, synthetic construct
  source 1..21: mol_type = other DNA; mol_type = other DNA
ttgcaccgcttaagcgaacat

SEQ ID NO: 25519 - DNA, 21 bp, synthetic construct
  source 1..21: mol_type = other DNA; mol_type = other DNA
ctctcgaaagcaggttttaac

SEQ ID NO: 25520 - DNA, 21 bp, synthetic construct
  source 1..21: mol_type = other DNA; mol_type = other DNA
catatggcagaccgcgggtgg

SEQ ID NO: 25521 - DNA, 21 bp, synthetic construct
  source 1..21: mol_type = other DNA; mol_type = other DNA
tatgtacgttcgcaattgaat

SEQ ID NO: 25522 - DNA, 21 bp, synthetic construct
  source 1..21: mol_type = other DNA
ctgcacagattatcctacgac

SEQ ID NO: 25523 - DNA, 21 bp, synthetic construct
  source 1..21: mol_type = other DNA; mol_type = other DNA
tattttacgggtgagagggat

SEQ ID NO: 25524 - DNA, 21 bp, synthetic construct
  source 1..21: mol_type = other DNA; mol_type = other DNA
cgggaggaagtggtcagatgg

SEQ ID NO: 25525 - DNA, 21 bp, synthetic construct
  source 1..21: mol_type = other DNA; mol_type = other DNA
tacttcacaggcgtcgccaaa

SEQ ID NO: 25526 - DNA, 21 bp, synthetic construct
  source 1..21: mol_type = other DNA; mol_type = other DNA
ctgtgtaggccttgtgtggaa

SEQ ID NO: 25527 - DNA, 21 bp, synthetic construct
  source 1..21: mol_type = other DNA; mol_type = other DNA
cgcgacgacttcagcgggtgg

SEQ ID NO: 25528 - DNA, 21 bp, synthetic construct
  source 1..21: mol_type = other DNA; mol_type = other DNA
tcaccaaatgggtgcaacggt

SEQ ID NO: 25529 - DNA, 21 bp, synthetic construct
  source 1..21: mol_type = other DNA; mol_type = other DNA
tacgtaaagagccaaatgagc

SEQ ID NO: 25530 - DNA, 21 bp, synthetic construct
  source 1..21: mol_type = other DNA; mol_type = other DNA
tatactcgcctcgacccgatg

SEQ ID NO: 25531 - DNA, 21 bp, synthetic construct
  source 1..21: mol_type = other DNA; mol_type = other DNA
gttttcagtacaaatggtgtc

SEQ ID NO: 25532 - DNA, 21 bp, synthetic construct
  source 1..21: mol_type = other DNA; mol_type = other DNA
cacacgtctactaatgggatt

SEQ ID NO: 25533 - DNA, 21 bp, synthetic construct
  source 1..21: mol_type = other DNA; mol_type = other DNA
ttccacaagaaagggccggat

SEQ ID NO: 25534 - DNA, 21 bp, synthetic construct
  source 1..21: mol_type = other DNA; mol_type = other DNA
tacttcactgggcggattgac

SEQ ID NO: 25535 - DNA, 21 bp, synthetic construct
  source 1..21: mol_type = other DNA; mol_type = other DNA
gtactcagttcgcaaggatgg

SEQ ID NO: 25536 - DNA, 21 bp, synthetic construct
  source 1..21: mol_type = other DNA; mol_type = other DNA
cttaaagacggaaccggacct

SEQ ID NO: 25537 - DNA, 21 bp, synthetic construct
  source 1..21: mol_type = other DNA; mol_type = other DNA
agaacccctttagtatttccg

SEQ ID NO: 25538 - DNA, 21 bp, synthetic construct
  source 1..21: mol_type = other DNA; mol_type = other DNA
gtacacgactatatgagttac

SEQ ID NO: 25539 - DNA, 21 bp, synthetic construct
  source 1..21: mol_type = other DNA; mol_type = other DNA
aggagcgagtttaaaacgtac

SEQ ID NO: 25540 - DNA, 21 bp, synthetic construct
  source 1..21: mol_type = other DNA; mol_type = other DNA
ctacaccgcctacacacctct

SEQ ID NO: 25541 - DNA, 21 bp, synthetic construct
  source 1..21: mol_type = other DNA; mol_type = other DNA
tattttcatgggaagattgat

SEQ ID NO: 25542 - DNA, 21 bp, synthetic construct
  source 1..21: mol_type = other DNA; mol_type = other DNA
tattcacgggtccaaccagac

SEQ ID NO: 25543 - DNA, 21 bp, synthetic construct
  source 1..21: mol_type = other DNA; mol_type = other DNA
tacttcactggccagttagca

SEQ ID NO: 25544 - DNA, 21 bp, synthetic construct
  source 1..21: mol_type = other DNA; mol_type = other DNA
gggggcccagggagtcactgg

SEQ ID NO: 25545 - DNA, 21 bp, synthetic construct
  source 1..21: mol_type = other DNA; mol_type = other DNA
tatttcgcgggcaagcgtgaa

SEQ ID NO: 25546 - DNA, 21 bp, synthetic construct
  source 1..21: mol_type = other DNA; mol_type = other DNA
tatttcagcggggaaaaggaa

SEQ ID NO: 25547 - DNA, 21 bp, synthetic construct
  source 1..21: mol_type = other DNA; mol_type = other DNA
ttttcccggattggagccaac

SEQ ID NO: 25548 - DNA, 21 bp, synthetic construct
  source 1..21: mol_type = other DNA; mol_type = other DNA
tacttttcacgtgtgattgaa

SEQ ID NO: 25549 - DNA, 21 bp, synthetic construct
  source 1..21: mol_type = other DNA; mol_type = other DNA
tacgtcaggtctgatcacggc

SEQ ID NO: 25550 - DNA, 21 bp, synthetic construct
  source 1..21: mol_type = other DNA; mol_type = other DNA
tattacagtggtattcaagcg

SEQ ID NO: 25551 - DNA, 21 bp, synthetic construct
  source 1..21: mol_type = other DNA; mol_type = other DNA
gcccccgaaacggttagatgg

SEQ ID NO: 25552 - DNA, 21 bp, synthetic construct
  source 1..21: mol_type = other DNA; mol_type = other DNA
tgtcgggagggcaccgtaagg

SEQ ID NO: 25553 - DNA, 21 bp, synthetic construct
  source 1..21: mol_type = other DNA; mol_type = other DNA
ttagaagattgggttaagtat

SEQ ID NO: 25554 - DNA, 21 bp, synthetic construct
  source 1..21: mol_type = other DNA; mol_type = other DNA
attaatagtcgtgaaggcata

SEQ ID NO: 25555 - DNA, 21 bp, synthetic construct
  source 1..21: mol_type = other DNA; mol_type = other DNA
ctgcatagattgcatgtcgat

SEQ ID NO: 25556 - DNA, 21 bp, synthetic construct
  source 1..21: mol_type = other DNA; mol_type = other DNA
atgcatcggctggccgtaaat

SEQ ID NO: 25557 - DNA, 21 bp, synthetic construct
  source 1..21: mol_type = other DNA; mol_type = other DNA
tgcacgtcgaagggaggtcac

SEQ ID NO: 25558 - DNA, 21 bp, synthetic construct
  source 1..21: mol_type = other DNA; mol_type = other DNA
gtaatgtttgacgcctacccc

SEQ ID NO: 25559 - DNA, 21 bp, synthetic construct
  source 1..21: mol_type = other DNA; mol_type = other DNA
ctccatcgcttgcaagaatac

SEQ ID NO: 25560 - DNA, 21 bp, synthetic construct
  source 1..21: mol_type = other DNA; mol_type = other DNA
tatagcaagtcgggaataaat

SEQ ID NO: 25561 - DNA, 21 bp, synthetic construct
  source 1..21: mol_type = other DNA; mol_type = other DNA
tactcgaaggtagggcatgat

SEQ ID NO: 25562 - DNA, 21 bp, synthetic construct
  source 1..21: mol_type = other DNA; mol_type = other DNA
tactggaccggcaagatcgag

SEQ ID NO: 25563 - DNA, 21 bp, synthetic construct
  source 1..21: mol_type = other DNA; mol_type = other DNA
cggagtgaattcatgacgtat

SEQ ID NO: 25564 - DNA, 21 bp, synthetic construct
  source 1..21: mol_type = other DNA; mol_type = other DNA
gttgaaagtacgaatggttgg

SEQ ID NO: 25565 - DNA, 21 bp, synthetic construct
  source 1..21: mol_type = other DNA; mol_type = other DNA
tacttcacaggacaccttgag

SEQ ID NO: 25566 - DNA, 21 bp, synthetic construct
  source 1..21: mol_type = other DNA; mol_type = other DNA
aagaatgatgggaacccctgg

SEQ ID NO: 25567 - DNA, 21 bp, synthetic construct
  source 1..21: mol_type = other DNA; mol_type = other DNA
ttttcacggaccgggcctaac

SEQ ID NO: 25568 - DNA, 21 bp, synthetic construct
  source 1..21: mol_type = other DNA; mol_type = other DNA
tttttcactggtaaaatagat

SEQ ID NO: 25569 - DNA, 21 bp, synthetic construct
  source 1..21: mol_type = other DNA; mol_type = other DNA
tatgctaaaacagcctataat

SEQ ID NO: 25570 - DNA, 21 bp, synthetic construct
  source 1..21: mol_type = other DNA; mol_type = other DNA
ctcgccagagggggctacgac

SEQ ID NO: 25571 - DNA, 21 bp, synthetic construct
  source 1..21: mol_type = other DNA; mol_type = other DNA
tacgcacggggcgggccgaat

SEQ ID NO: 25572 - DNA, 21 bp, synthetic construct
  source 1..21: mol_type = other DNA; mol_type = other DNA
tgtgccccgtatcagcatgaa

SEQ ID NO: 25573 - DNA, 21 bp, synthetic construct
  source 1..21: mol_type = other DNA; mol_type = other DNA
tattggtctggagtggccgct

SEQ ID NO: 25574 - DNA, 21 bp, synthetic construct
  source 1..21: mol_type = other DNA; mol_type = other DNA
tactttaccggccgccacgaa

SEQ ID NO: 25575 - DNA, 21 bp, synthetic construct
  source 1..21: mol_type = other DNA; mol_type = other DNA
acaaaatggggagatgccgca

SEQ ID NO: 25576 - DNA, 21 bp, synthetic construct
  source 1..21: mol_type = other DNA; mol_type = other DNA
ctaagtaggttaaatcataac

SEQ ID NO: 25577 - DNA, 21 bp, synthetic construct
  source 1..21: mol_type = other DNA; mol_type = other DNA
gtctactccaccaatggtgtg

SEQ ID NO: 25578 - DNA, 21 bp, synthetic construct
  source 1..21: mol_type = other DNA; mol_type = other DNA
ttatctagaaccgcttttgac

SEQ ID NO: 25579 - DNA, 21 bp, synthetic construct
  source 1..21: mol_type = other DNA; mol_type = other DNA
tattttaccggaactcactcg

SEQ ID NO: 25580 - DNA, 21 bp, synthetic construct
  source 1..21: mol_type = other DNA; mol_type = other DNA
tacagtaaatcgggcacgaat

SEQ ID NO: 25581 - DNA, 21 bp, synthetic construct
  source 1..21: mol_type = other DNA; mol_type = other DNA
tatgtccgatcggatgtgaaa

SEQ ID NO: 25582 - DNA, 21 bp, synthetic construct
  source 1..21: mol_type = other DNA; mol_type = other DNA
tacgcaaagtccggatgcaac

SEQ ID NO: 25583 - DNA, 21 bp, synthetic construct
  source 1..21: mol_type = other DNA; mol_type = other DNA
agagaagattatgtttacccg

SEQ ID NO: 25584 - DNA, 21 bp, synthetic construct
  source 1..21: mol_type = other DNA; mol_type = other DNA
tacttcagcggtgttataggc

SEQ ID NO: 25585 - DNA, 21 bp, synthetic construct
  source 1..21: mol_type = other DNA; mol_type = other DNA
ataatgtcaagtaaactttgg

SEQ ID NO: 25586 - DNA, 21 bp, synthetic construct
  source 1..21: mol_type = other DNA; mol_type = other DNA
tattgggcaggtaaacttgag

SEQ ID NO: 25587 - DNA, 21 bp, synthetic construct
  source 1..21: mol_type = other DNA; mol_type = other DNA
tacttcagtggtaaggcggaa

SEQ ID NO: 25588 - DNA, 21 bp, synthetic construct
  source 1..21: mol_type = other DNA; mol_type = other DNA
aagaacgcggaggtttatccc

SEQ ID NO: 25589 - DNA, 21 bp, synthetic construct
  source 1..21: mol_type = other DNA; mol_type = other DNA
cgcttggaggatcggaagtgg

SEQ ID NO: 25590 - DNA, 21 bp, synthetic construct
  source 1..21: mol_type = other DNA; mol_type = other DNA
agggcctccgatgtttatcct

SEQ ID NO: 25591 - DNA, 21 bp, synthetic construct
  source 1..21: mol_type = other DNA; mol_type = other DNA
tacttaatttcagatacgaaa

SEQ ID NO: 25592 - DNA, 21 bp, synthetic construct
  source 1..21: mol_type = other DNA; mol_type = other DNA
ctcagtcgcgtgagcgtagat

SEQ ID NO: 25593 - DNA, 21 bp, synthetic construct
  source 1..21: mol_type = other DNA; mol_type = other DNA
cgaacgaacacagtctatccc

SEQ ID NO: 25594 - DNA, 21 bp, synthetic construct
  source 1..21: mol_type = other DNA; mol_type = other DNA
aaggacgattattctacctac

SEQ ID NO: 25595 - DNA, 21 bp, synthetic construct
  source 1..21: mol_type = other DNA; mol_type = other DNA
tactacagtgggattgtgtca

SEQ ID NO: 25596 - DNA, 21 bp, synthetic construct
  source 1..21: mol_type = other DNA; mol_type = other DNA
tgcaagcccatatgctgtgag

SEQ ID NO: 25597 - DNA, 21 bp, synthetic construct
  source 1..21: mol_type = other DNA; mol_type = other DNA
atgatggatggcaccagtgca

SEQ ID NO: 25598 - DNA, 21 bp, synthetic construct
  source 1..21: mol_type = other DNA; mol_type = other DNA
gtagcccacgcgggagcaggt

SEQ ID NO: 25599 - DNA, 21 bp, synthetic construct
  source 1..21: mol_type = other DNA; mol_type = other DNA
tatttcaccggcattcccgac

SEQ ID NO: 25600 - DNA, 21 bp, synthetic construct
  source 1..21: mol_type = other DNA; mol_type = other DNA
tgcgtgaagaccgatcgaaat

SEQ ID NO: 25601 - DNA, 21 bp, synthetic construct
  source 1..21: mol_type = other DNA; mol_type = other DNA
gtctggagtaccaacggcatc

SEQ ID NO: 25602 - DNA, 21 bp, synthetic construct
  source 1..21: mol_type = other DNA; mol_type = other DNA
cgtagtcatgatgcgtttccg

SEQ ID NO: 25603 - DNA, 21 bp, synthetic construct
  source 1..21: mol_type = other DNA; mol_type = other DNA
actgacgaatggtccccatac

SEQ ID NO: 25604 - DNA, 21 bp, synthetic construct
  source 1..21: mol_type = other DNA; mol_type = other DNA
tacttccacggcaaagttgag

SEQ ID NO: 25605 - DNA, 21 bp, synthetic construct
  source 1..21: mol_type = other DNA; mol_type = other DNA
tatgtaaggagcgatgtgggc

SEQ ID NO: 25606 - DNA, 21 bp, synthetic construct
  source 1..21: mol_type = other DNA; mol_type = other DNA
ctttgcaaaccgtgcttggcc

SEQ ID NO: 25607 - DNA, 21 bp, synthetic construct
  source 1..21: mol_type = other DNA; mol_type = other DNA
ttttttacgggtaaggtggcg

SEQ ID NO: 25608 - DNA, 21 bp, synthetic construct
  source 1..21: mol_type = other DNA; mol_type = other DNA
attctatcggaccgtatgtgg

SEQ ID NO: 25609 - DNA, 21 bp, synthetic construct
  source 1..21: mol_type = other DNA; mol_type = other DNA
gaaggaatctcacgctcatgg

SEQ ID NO: 25610 - DNA, 21 bp, synthetic construct
  source 1..21: mol_type = other DNA; mol_type = other DNA
tattttagcggaaccatcaac

SEQ ID NO: 25611 - DNA, 21 bp, synthetic construct
  source 1..21: mol_type = other DNA; mol_type = other DNA
tatttcagcggacaacacgaa

SEQ ID NO: 25612 - DNA, 21 bp, synthetic construct
  source 1..21: mol_type = other DNA; mol_type = other DNA
agggatgagttcatgagttat

SEQ ID NO: 25613 - DNA, 21 bp, synthetic construct
  source 1..21: mol_type = other DNA; mol_type = other DNA
cggggcgaattaattttccct

SEQ ID NO: 25614 - DNA, 21 bp, synthetic construct
  source 1..21: mol_type = other DNA; mol_type = other DNA
aaggacgattttagcccttgg

SEQ ID NO: 25615 - DNA, 21 bp, synthetic construct
  source 1..21: mol_type = other DNA; mol_type = other DNA
tactccaaacaaggaaacaac

SEQ ID NO: 25616 - DNA, 21 bp, synthetic construct
  source 1..21: mol_type = other DNA; mol_type = other DNA
tacttcacaggggaacgtgac

SEQ ID NO: 25617 - DNA, 21 bp, synthetic construct
  source 1..21: mol_type = other DNA; mol_type = other DNA
ggttcggaatatctagcatgg

SEQ ID NO: 25618 - DNA, 21 bp, synthetic construct
  source 1..21: mol_type = other DNA; mol_type = other DNA
ggtaatgagtttagtagctgg

SEQ ID NO: 25619 - DNA, 21 bp, synthetic construct
  source 1..21: mol_type = other DNA; mol_type = other DNA
gatctgcgcgatcgggggtgg

SEQ ID NO: 25620 - DNA, 21 bp, synthetic construct
  source 1..21: mol_type = other DNA; mol_type = other DNA
ttcagtcgtgttgggcagaac

SEQ ID NO: 25621 - DNA, 21 bp, synthetic construct
  source 1..21: mol_type = other DNA; mol_type = other DNA
acattttcgaccaatggcgtt

SEQ ID NO: 25622 - DNA, 21 bp, synthetic construct
  source 1..21: mol_type = other DNA; mol_type = other DNA
tacagccgaatacagcctgac

SEQ ID NO: 25623 - DNA, 21 bp, synthetic construct
  source 1..21: mol_type = other DNA; mol_type = other DNA
tacacgaaatcaaatacccat

SEQ ID NO: 25624 - DNA, 21 bp, synthetic construct
  source 1..21: mol_type = other DNA; mol_type = other DNA
tatagtcgcgtgggtgagaat

SEQ ID NO: 25625 - DNA, 21 bp, synthetic construct
  source 1..21: mol_type = other DNA; mol_type = other DNA
ttatcgagggtatcgtttgat

SEQ ID NO: 25626 - DNA, 21 bp, synthetic construct
  source 1..21: mol_type = other DNA; mol_type = other DNA
ttacatagattatcagagttc

SEQ ID NO: 25627 - DNA, 21 bp, synthetic construct
  source 1..21: mol_type = other DNA; mol_type = other DNA
atccttagtgatcgctcctgg

SEQ ID NO: 25628 - DNA, 21 bp, synthetic construct
  source 1..21: mol_type = other DNA; mol_type = other DNA
tatgccaagaatggccacaat

SEQ ID NO: 25629 - DNA, 21 bp, synthetic construct
  source 1..21: mol_type = other DNA; mol_type = other DNA
tactggtccgggatacaagac

SEQ ID NO: 25630 - DNA, 21 bp, synthetic construct
  source 1..21: mol_type = other DNA; mol_type = other DNA
gggtctggccttagtcattgg

SEQ ID NO: 25631 - DNA, 21 bp, synthetic construct
  source 1..21: mol_type = other DNA; mol_type = other DNA
ttttcaagggtgggtcaaaat

SEQ ID NO: 25632 - DNA, 21 bp, synthetic construct
  source 1..21: mol_type = other DNA; mol_type = other DNA
cgagatgatttcgtcagttac

SEQ ID NO: 25633 - DNA, 21 bp, synthetic construct
  source 1..21: mol_type = other DNA; mol_type = other DNA
tatcatcgtctccaacccgat

SEQ ID NO: 25634 - DNA, 21 bp, synthetic construct
  source 1..21: mol_type = other DNA; mol_type = other DNA
tactccaagcaaggttacaat

SEQ ID NO: 25635 - DNA, 21 bp, synthetic construct
  source 1..21: mol_type = other DNA; mol_type = other DNA
agtatggcgtccagcagttgg

SEQ ID NO: 25636 - DNA, 21 bp, synthetic construct
  source 1..21: mol_type = other DNA; mol_type = other DNA
ttctcgaaagcaaattataac

SEQ ID NO: 25637 - DNA, 21 bp, synthetic construct
  source 1..21: mol_type = other DNA; mol_type = other DNA
ttcactagtactaacggagtt

SEQ ID NO: 25638 - DNA, 21 bp, synthetic construct
  source 1..21: mol_type = other DNA; mol_type = other DNA
tacttcagtggcaaggtgagc

SEQ ID NO: 25639 - DNA, 21 bp, synthetic construct
  source 1..21: mol_type = other DNA; mol_type = other DNA
gtcatgagcgatcgcgcttgg

SEQ ID NO: 25640 - DNA, 21 bp, synthetic construct
  source 1..21: mol_type = other DNA; mol_type = other DNA
tatttctcaggggtggtgaac

SEQ ID NO: 25641 - DNA, 21 bp, synthetic construct
  source 1..21: mol_type = other DNA; mol_type = other DNA
atgcacaggttaagcgtggat

SEQ ID NO: 25642 - DNA, 21 bp, synthetic construct
  source 1..21: mol_type = other DNA; mol_type = other DNA
cgggaagatggactgcgatgg

SEQ ID NO: 25643 - DNA, 21 bp, synthetic construct
  source 1..21: mol_type = other DNA; mol_type = other DNA
tactttagcggtcaaattcaa

SEQ ID NO: 25644 - DNA, 21 bp, synthetic construct
  source 1..21: mol_type = other DNA; mol_type = other DNA
aaggatggatacagtatatac

SEQ ID NO: 25645 - DNA, 21 bp, synthetic construct
  source 1..21: mol_type = other DNA; mol_type = other DNA
ctcagagatggcacgcccagt

SEQ ID NO: 25646 - DNA, 21 bp, synthetic construct
  source 1..21: mol_type = other DNA; mol_type = other DNA
catgggagcacaaacggtgtc

SEQ ID NO: 25647 - DNA, 21 bp, synthetic construct
  source 1..21: mol_type = other DNA; mol_type = other DNA
cgtgatggatttagcagctat

SEQ ID NO: 25648 - DNA, 21 bp, synthetic construct
  source 1..21: mol_type = other DNA; mol_type = other DNA
aactctctagaggggcggaat

SEQ ID NO: 25649 - DNA, 21 bp, synthetic construct
  source 1..21: mol_type = other DNA; mol_type = other DNA
aggtccgaatttcatagtttc

SEQ ID NO: 25650 - DNA, 21 bp, synthetic construct
  source 1..21: mol_type = other DNA; mol_type = other DNA
tatgcgaggactgcacctgat

SEQ ID NO: 25651 - DNA, 21 bp, synthetic construct
  source 1..21: mol_type = other DNA; mol_type = other DNA
agacctgaagcgaggagttgg

SEQ ID NO: 25652 - DNA, 21 bp, synthetic construct
  source 1..21: mol_type = other DNA; mol_type = other DNA
tacttctccggtcgaatggag

SEQ ID NO: 25653 - DNA, 21 bp, synthetic construct
  source 1..21: mol_type = other DNA; mol_type = other DNA
tatagcaaatcaaacataaat

SEQ ID NO: 25654 - DNA, 21 bp, synthetic construct
  source 1..21: mol_type = other DNA; mol_type = other DNA
tacttcgcaggtaagcgggac

SEQ ID NO: 25655 - DNA, 21 bp, synthetic construct
  source 1..21: mol_type = other DNA; mol_type = other DNA
cgtgctagcgatgtgtacccc

SEQ ID NO: 25656 - DNA, 21 bp, synthetic construct
  source 1..21: mol_type = other DNA; mol_type = other DNA
cttgcgcggaatggatggaac

SEQ ID NO: 25657 - DNA, 21 bp, synthetic construct
  source 1..21: mol_type = other DNA; mol_type = other DNA
cgtatggactcatcaggctgg

SEQ ID NO: 25658 - DNA, 21 bp, synthetic construct
  source 1..21: mol_type = other DNA; mol_type = other DNA
cgtgaggacggcgttagctgg

SEQ ID NO: 25659 - DNA, 21 bp, synthetic construct
  source 1..21: mol_type = other DNA; mol_type = other DNA
tattttcacgggaagtgcgat

SEQ ID NO: 25660 - DNA, 21 bp, synthetic construct
  source 1..21: mol_type = other DNA; mol_type = other DNA
gatacggctacgtgtctaagg

SEQ ID NO: 25661 - DNA, 21 bp, synthetic construct
  source 1..21: mol_type = other DNA; mol_type = other DNA
accgagtacatgtgcagacca

SEQ ID NO: 25662 - DNA, 21 bp, synthetic construct
  source 1..21: mol_type = other DNA; mol_type = other DNA
agggatggcaatagcagctgg

SEQ ID NO: 25663 - DNA, 21 bp, synthetic construct
  source 1..21: mol_type = other DNA; mol_type = other DNA
tatttctcaggcgtcatggat

SEQ ID NO: 25664 - DNA, 21 bp, synthetic construct
  source 1..21: mol_type = other DNA; mol_type = other DNA
tttgccaaacatggttgcggt

SEQ ID NO: 25665 - DNA, 21 bp, synthetic construct
  source 1..21: mol_type = other DNA; mol_type = other DNA
tactggacaggagtgccggac

SEQ ID NO: 25666 - DNA, 21 bp, synthetic construct
  source 1..21: mol_type = other DNA; mol_type = other DNA
tacacacgtctcggagacggt

SEQ ID NO: 25667 - DNA, 21 bp, synthetic construct
  source 1..21: mol_type = other DNA; mol_type = other DNA
tgcaaatatctaaaatcagat

SEQ ID NO: 25668 - DNA, 21 bp, synthetic construct
  source 1..21: mol_type = other DNA; mol_type = other DNA
aaagatggttactcttcttgg

SEQ ID NO: 25669 - DNA, 21 bp, synthetic construct
  source 1..21: mol_type = other DNA; mol_type = other DNA
ttctcacgggccggcccgaat

SEQ ID NO: 25670 - DNA, 21 bp, synthetic construct
  source 1..21: mol_type = other DNA; mol_type = other DNA
gttatgggaagctcgaattgg

SEQ ID NO: 25671 - DNA, 21 bp, synthetic construct
  source 1..21: mol_type = other DNA; mol_type = other DNA
tacttttcagggcagcatgag

SEQ ID NO: 25672 - DNA, 21 bp, synthetic construct
  source 1..21: mol_type = other DNA; mol_type = other DNA
aaagatgattttaccgggttt

SEQ ID NO: 25673 - DNA, 21 bp, synthetic construct
  source 1..21: mol_type = other DNA; mol_type = other DNA
tatgttcgctcacaagacaac

SEQ ID NO: 25674 - DNA, 21 bp, synthetic construct
  source 1..21: mol_type = other DNA; mol_type = other DNA
tggtggagcggcacaaaggag

SEQ ID NO: 25675 - DNA, 21 bp, synthetic construct
  source 1..21: mol_type = other DNA; mol_type = other DNA
cgagcagtggacgcctatccc

SEQ ID NO: 25676 - DNA, 21 bp, synthetic construct
  source 1..21: mol_type = other DNA; mol_type = other DNA
gaattgcaatcatcgacttgg

SEQ ID NO: 25677 - DNA, 21 bp, synthetic construct
  source 1..21: mol_type = other DNA; mol_type = other DNA
tacacaagacttgattttaat

SEQ ID NO: 25678 - DNA, 21 bp, synthetic construct
  source 1..21: mol_type = other DNA; mol_type = other DNA
tactggagcggcgtcacggcc

SEQ ID NO: 25679 - DNA, 21 bp, synthetic construct
  source 1..21: mol_type = other DNA; mol_type = other DNA
agctggtctaccaacggcatc

SEQ ID NO: 25680 - DNA, 21 bp, synthetic construct
  source 1..21: mol_type = other DNA; mol_type = other DNA
tttagtaaagctggtcctaac

SEQ ID NO: 25681 - DNA, 21 bp, synthetic construct
  source 1..21: mol_type = other DNA; mol_type = other DNA
aatacatatgactcctaccct

SEQ ID NO: 25682 - DNA, 21 bp, synthetic construct
  source 1..21: mol_type = other DNA; mol_type = other DNA
tactcacgtttaaatatggat

SEQ ID NO: 25683 - DNA, 21 bp, synthetic construct
  source 1..21: mol_type = other DNA; mol_type = other DNA
tactggtccggtattcaagat

SEQ ID NO: 25684 - DNA, 21 bp, synthetic construct
  source 1..21: mol_type = other DNA; mol_type = other DNA
ttatcgaagctgtcatgtaac

SEQ ID NO: 25685 - DNA, 21 bp, synthetic construct
  source 1..21: mol_type = other DNA; mol_type = other DNA
actttatctacgaacggagtt

SEQ ID NO: 25686 - DNA, 21 bp, synthetic construct
  source 1..21: mol_type = other DNA; mol_type = other DNA
agagaggacttcgtgagctac

SEQ ID NO: 25687 - DNA, 21 bp, synthetic construct
  source 1..21: mol_type = other DNA; mol_type = other DNA
gcggggggaggtttgtttatt

SEQ ID NO: 25688 - DNA, 21 bp, synthetic construct
  source 1..21: mol_type = other DNA; mol_type = other DNA
tacttcacgggtgtccaccaa

SEQ ID NO: 25689 - DNA, 21 bp, synthetic construct
  source 1..21: mol_type = other DNA; mol_type = other DNA
aggacggagttcaccacttat

SEQ ID NO: 25690 - DNA, 21 bp, synthetic construct
  source 1..21: mol_type = other DNA; mol_type = other DNA
tatgtgaggtcagatcacgga

SEQ ID NO: 25691 - DNA, 21 bp, synthetic construct
  source 1..21: mol_type = other DNA; mol_type = other DNA
cactgcaagccctgtctgacc

SEQ ID NO: 25692 - DNA, 21 bp, synthetic construct
  source 1..21: mol_type = other DNA; mol_type = other DNA
tacagcaaacataatgaaaat

SEQ ID NO: 25693 - DNA, 21 bp, synthetic construct
  source 1..21: mol_type = other DNA; mol_type = other DNA
tacgcaaagaccggagaaaat

SEQ ID NO: 25694 - DNA, 21 bp, synthetic construct
  source 1..21: mol_type = other DNA; mol_type = other DNA
agaagcgagtttatgtcattt

SEQ ID NO: 25695 - DNA, 21 bp, synthetic construct
  source 1..21: mol_type = other DNA; mol_type = other DNA
actatgtcaactaacggggtt

SEQ ID NO: 25696 - DNA, 21 bp, synthetic construct
  source 1..21: mol_type = other DNA; mol_type = other DNA
tttgctcgctctgggcccaac

SEQ ID NO: 25697 - DNA, 21 bp, synthetic construct
  source 1..21: mol_type = other DNA; mol_type = other DNA
tatttcacgggcgaacgtgaa

SEQ ID NO: 25698 - DNA, 21 bp, synthetic construct
  source 1..21: mol_type = other DNA; mol_type = other DNA
gacttgagttcaacgagctgg

SEQ ID NO: 25699 - DNA, 21 bp, synthetic construct
  source 1..21: mol_type = other DNA; mol_type = other DNA
tatttcagcggaacggtatcg

SEQ ID NO: 25700 - DNA, 21 bp, synthetic construct
  source 1..21: mol_type = other DNA; mol_type = other DNA
tattggagcggcgtagtcgcg

SEQ ID NO: 25701 - DNA, 21 bp, synthetic construct
  source 1..21: mol_type = other DNA; mol_type = other DNA
tatttcacgggcatggtggac

SEQ ID NO: 25702 - DNA, 21 bp, synthetic construct
  source 1..21: mol_type = other DNA; mol_type = other DNA
attgcccatcggggttgggac

SEQ ID NO: 25703 - DNA, 21 bp, synthetic construct
  source 1..21: mol_type = other DNA; mol_type = other DNA
ttttcgagggtaggtgagaat

SEQ ID NO: 25704 - DNA, 21 bp, synthetic construct
  source 1..21: mol_type = other DNA; mol_type = other DNA
tacttcaccggcattcacgtc

SEQ ID NO: 25705 - DNA, 21 bp, synthetic construct
  source 1..21: mol_type = other DNA; mol_type = other DNA
tatgcaaagggcggttacaac

SEQ ID NO: 25706 - DNA, 21 bp, synthetic construct
  source 1..21: mol_type = other DNA; mol_type = other DNA
tactggtccggtgtgaccgcg

SEQ ID NO: 25707 - DNA, 21 bp, synthetic construct
  source 1..21: mol_type = other DNA; mol_type = other DNA
tacttcactggcgtccataaa

SEQ ID NO: 25708 - DNA, 21 bp, synthetic construct
  source 1..21: mol_type = other DNA; mol_type = other DNA
tactccgcaatcggtatgaat

SEQ ID NO: 25709 - DNA, 21 bp, synthetic construct
  source 1..21: mol_type = other DNA; mol_type = other DNA
attaactcaactaatggagta

SEQ ID NO: 25710 - DNA, 21 bp, synthetic construct
  source 1..21: mol_type = other DNA; mol_type = other DNA
tattcgaggctcaacgaacag

SEQ ID NO: 25711 - DNA, 21 bp, synthetic construct
  source 1..21: mol_type = other DNA; mol_type = other DNA
atcgagagcttcaatggacgt

SEQ ID NO: 25712 - DNA, 21 bp, synthetic construct
  source 1..21: mol_type = other DNA; mol_type = other DNA
cgcaccagcactcatggaata

SEQ ID NO: 25713 - DNA, 21 bp, synthetic construct
  source 1..21: mol_type = other DNA; mol_type = other DNA
tggtggagtggggtgattgag

SEQ ID NO: 25714 - DNA, 21 bp, synthetic construct
  source 1..21: mol_type = other DNA; mol_type = other DNA
gacatgtcatccaaagtttgg

SEQ ID NO: 25715 - DNA, 21 bp, synthetic construct
  source 1..21: mol_type = other DNA; mol_type = other DNA
ttggccaagaccgcgtgtaat

SEQ ID NO: 25716 - DNA, 21 bp, synthetic construct
  source 1..21: mol_type = other DNA; mol_type = other DNA
gttgcggaccatgtgagatgg

SEQ ID NO: 25717 - DNA, 21 bp, synthetic construct
  source 1..21: mol_type = other DNA; mol_type = other DNA
ttttcgaaacttaattataat

SEQ ID NO: 25718 - DNA, 21 bp, synthetic construct
  source 1..21: mol_type = other DNA; mol_type = other DNA
aatatgaccagccatagttgg

SEQ ID NO: 25719 - DNA, 21 bp, synthetic construct
  source 1..21: mol_type = other DNA; mol_type = other DNA
aaagattacactgtattcccg

SEQ ID NO: 25720 - DNA, 21 bp, synthetic construct
  source 1..21: mol_type = other DNA; mol_type = other DNA
tacttcagcggtgtccgtgaa

SEQ ID NO: 25721 - DNA, 21 bp, synthetic construct
  source 1..21: mol_type = other DNA; mol_type = other DNA
tactggacgggaactgtagca

SEQ ID NO: 25722 - DNA, 21 bp, synthetic construct
  source 1..21: mol_type = other DNA; mol_type = other DNA
cgattggaatccgccgcctgg

SEQ ID NO: 25723 - DNA, 21 bp, synthetic construct
  source 1..21: mol_type = other DNA; mol_type = other DNA
tattacacgggcgttcgcgag

SEQ ID NO: 25724 - DNA, 21 bp, synthetic construct
  source 1..21: mol_type = other DNA; mol_type = other DNA
cgtgagtacgatgcctttcct

SEQ ID NO: 25725 - DNA, 21 bp, synthetic construct
  source 1..21: mol_type = other DNA; mol_type = other DNA
cgttccgagtttgagacgttt

SEQ ID NO: 25726 - DNA, 21 bp, synthetic construct
  source 1..21: mol_type = other DNA; mol_type = other DNA
accagcagtacaaatggaatc

SEQ ID NO: 25727 - DNA, 21 bp, synthetic construct
  source 1..21: mol_type = other DNA; mol_type = other DNA
gtggctatgaaaggggcaggt

SEQ ID NO: 25728 - DNA, 21 bp, synthetic construct
  source 1..21: mol_type = other DNA; mol_type = other DNA
ctagctaaaagcggagctaat

SEQ ID NO: 25729 - DNA, 21 bp, synthetic construct
  source 1..21: mol_type = other DNA; mol_type = other DNA
tatgtgcggagtgatgtaggc

SEQ ID NO: 25730 - DNA, 21 bp, synthetic construct
  source 1..21: mol_type = other DNA; mol_type = other DNA
tattttagcaacattaaagag

SEQ ID NO: 25731 - DNA, 21 bp, synthetic construct
  source 1..21: mol_type = other DNA; mol_type = other DNA
ctcagcaagctaggacacaac

SEQ ID NO: 25732 - DNA, 21 bp, synthetic construct
  source 1..21: mol_type = other DNA; mol_type = other DNA
ggaatagaaaccgtgcgatgg

SEQ ID NO: 25733 - DNA, 21 bp, synthetic construct
  source 1..21: mol_type = other DNA; mol_type = other DNA
tttagccgtattggcataaat

SEQ ID NO: 25734 - DNA, 21 bp, synthetic construct
  source 1..21: mol_type = other DNA; mol_type = other DNA
tatacccgtttggataatggg

SEQ ID NO: 25735 - DNA, 21 bp, synthetic construct
  source 1..21: mol_type = other DNA; mol_type = other DNA
aacatggcggatcgtacatgg

SEQ ID NO: 25736 - DNA, 21 bp, synthetic construct
  source 1..21: mol_type = other DNA; mol_type = other DNA
ttacatagggctggcatagat

SEQ ID NO: 25737 - DNA, 21 bp, synthetic construct
  source 1..21: mol_type = other DNA; mol_type = other DNA
tacagcaaacataatgacaac

SEQ ID NO: 25738 - DNA, 21 bp, synthetic construct
  source 1..21: mol_type = other DNA; mol_type = other DNA
tactcaaaacataatttcaac

SEQ ID NO: 25739 - DNA, 21 bp, synthetic construct
  source 1..21: mol_type = other DNA; mol_type = other DNA
tgtgttcgtcctcagactccg

SEQ ID NO: 25740 - DNA, 21 bp, synthetic construct
  source 1..21: mol_type = other DNA; mol_type = other DNA
tactttacaggtcataccgaa

SEQ ID NO: 25741 - DNA, 21 bp, synthetic construct
  source 1..21: mol_type = other DNA; mol_type = other DNA
gatctaaatagcaggtcgtgg

SEQ ID NO: 25742 - DNA, 21 bp, synthetic construct
  source 1..21: mol_type = other DNA; mol_type = other DNA
ttggcaaagtctggtgcaaac

SEQ ID NO: 25743 - DNA, 21 bp, synthetic construct
  source 1..21: mol_type = other DNA; mol_type = other DNA
tactcgcgtctaggggtgaat

SEQ ID NO: 25744 - DNA, 21 bp, synthetic construct
  source 1..21: mol_type = other DNA; mol_type = other DNA
aaactcgacgtgggtaactgg

SEQ ID NO: 25745 - DNA, 21 bp, synthetic construct
  source 1..21: mol_type = other DNA; mol_type = other DNA
aggtcagaattcgtgagtttc

SEQ ID NO: 25746 - DNA, 21 bp, synthetic construct
  source 1..21: mol_type = other DNA; mol_type = other DNA
tacttttcaggaattggggct

SEQ ID NO: 25747 - DNA, 21 bp, synthetic construct
  source 1..21: mol_type = other DNA; mol_type = other DNA
tacgtgaaatcggggcctatg

SEQ ID NO: 25748 - DNA, 21 bp, synthetic construct
  source 1..21: mol_type = other DNA; mol_type = other DNA
aacgatggtgtttcaaagtgg

SEQ ID NO: 25749 - DNA, 21 bp, synthetic construct
  source 1..21: mol_type = other DNA; mol_type = other DNA
tatttttctggtaagatggac

SEQ ID NO: 25750 - DNA, 21 bp, synthetic construct
  source 1..21: mol_type = other DNA; mol_type = other DNA
tactttagcgggatccatgcc

SEQ ID NO: 25751 - DNA, 21 bp, synthetic construct
  source 1..21: mol_type = other DNA; mol_type = other DNA
tattctaagagtggttggaac

SEQ ID NO: 25752 - DNA, 21 bp, synthetic construct
  source 1..21: mol_type = other DNA; mol_type = other DNA
caggaggattacgtcacctgg

SEQ ID NO: 25753 - DNA, 21 bp, synthetic construct
  source 1..21: mol_type = other DNA; mol_type = other DNA
attgatagcacaaacggtcgc

SEQ ID NO: 25754 - DNA, 21 bp, synthetic construct
  source 1..21: mol_type = other DNA; mol_type = other DNA
tataccaagagtcaggaatgg

SEQ ID NO: 25755 - DNA, 21 bp, synthetic construct
  source 1..21: mol_type = other DNA; mol_type = other DNA
gtgatgagtgaccgtttatgg

SEQ ID NO: 25756 - DNA, 21 bp, synthetic construct
  source 1..21: mol_type = other DNA; mol_type = other DNA
tacttccacggggtggcggct

SEQ ID NO: 25757 - DNA, 21 bp, synthetic construct
  source 1..21: mol_type = other DNA; mol_type = other DNA
ttgtcgaaacataactttaat

SEQ ID NO: 25758 - DNA, 21 bp, synthetic construct
  source 1..21: mol_type = other DNA; mol_type = other DNA
gtaatgcaatcacgcgactgg

SEQ ID NO: 25759 - DNA, 21 bp, synthetic construct
  source 1..21: mol_type = other DNA; mol_type = other DNA
tacttttccaaggtgagggaa

SEQ ID NO: 25760 - DNA, 21 bp, synthetic construct
  source 1..21: mol_type = other DNA; mol_type = other DNA
tattggtcaggagttaccgag

SEQ ID NO: 25761 - DNA, 21 bp, synthetic construct
  source 1..21: mol_type = other DNA; mol_type = other DNA
tacttctcgggagtcatcccc

SEQ ID NO: 25762 - DNA, 21 bp, synthetic construct
  source 1..21: mol_type = other DNA; mol_type = other DNA
aaagacggcttcagtcactat

SEQ ID NO: 25763 - DNA, 21 bp, synthetic construct
  source 1..21: mol_type = other DNA; mol_type = other DNA
tatttcacaggatttcatgag

SEQ ID NO: 25764 - DNA, 21 bp, synthetic construct
  source 1..21: mol_type = other DNA; mol_type = other DNA
tattttcatggtgtagtggaa

SEQ ID NO: 25765 - DNA, 21 bp, synthetic construct
  source 1..21: mol_type = other DNA; mol_type = other DNA
ttagcgaggagtgccgttaat

SEQ ID NO: 25766 - DNA, 21 bp, synthetic construct
  source 1..21: mol_type = other DNA; mol_type = other DNA
cgcactttcgacgcgttccca

SEQ ID NO: 25767 - DNA, 21 bp, synthetic construct
  source 1..21: mol_type = other DNA; mol_type = other DNA
tacttcgccggggttcgagcg

SEQ ID NO: 25768 - DNA, 21 bp, synthetic construct
  source 1..21: mol_type = other DNA; mol_type = other DNA
agatcagagtttaagacttat

SEQ ID NO: 25769 - DNA, 21 bp, synthetic construct
  source 1..21: mol_type = other DNA; mol_type = other DNA
aggagtatagacgcgtatcca

SEQ ID NO: 25770 - DNA, 21 bp, synthetic construct
  source 1..21: mol_type = other DNA; mol_type = other DNA
gagctagagagtcgctcatgg

SEQ ID NO: 25771 - DNA, 21 bp, synthetic construct
  source 1..21: mol_type = other DNA; mol_type = other DNA
aggctggatgatcgtgggtgg

SEQ ID NO: 25772 - DNA, 21 bp, synthetic construct
  source 1..21: mol_type = other DNA; mol_type = other DNA
tataccaggttaggtgatgga

SEQ ID NO: 25773 - DNA, 21 bp, synthetic construct
  source 1..21: mol_type = other DNA; mol_type = other DNA
aaggacgacttcctttcatgg

SEQ ID NO: 25774 - DNA, 21 bp, synthetic construct
  source 1..21: mol_type = other DNA; mol_type = other DNA
acccactctactaacggtatt

SEQ ID NO: 25775 - DNA, 21 bp, synthetic construct
  source 1..21: mol_type = other DNA; mol_type = other DNA
tactggactggagtaatcgac

SEQ ID NO: 25776 - DNA, 21 bp, synthetic construct
  source 1..21: mol_type = other DNA; mol_type = other DNA
gtctcggattgggctccgttc

SEQ ID NO: 25777 - DNA, 21 bp, synthetic construct
  source 1..21: mol_type = other DNA; mol_type = other DNA
agagacgaattccattcgtat

SEQ ID NO: 25778 - DNA, 21 bp, synthetic construct
  source 1..21: mol_type = other DNA; mol_type = other DNA
tatcacgcgaaaggcgataat

SEQ ID NO: 25779 - DNA, 21 bp, synthetic construct
  source 1..21: mol_type = other DNA; mol_type = other DNA
tacgcgaggggaggactaaat

SEQ ID NO: 25780 - DNA, 21 bp, synthetic construct
  source 1..21: mol_type = other DNA; mol_type = other DNA
cgaacctatgactcctatcct

SEQ ID NO: 25781 - DNA, 21 bp, synthetic construct
  source 1..21: mol_type = other DNA; mol_type = other DNA
tacgataagggtacctgggac

SEQ ID NO: 25782 - DNA, 21 bp, synthetic construct
  source 1..21: mol_type = other DNA; mol_type = other DNA
aggaatgaatttgtaacgtat

SEQ ID NO: 25783 - DNA, 21 bp, synthetic construct
  source 1..21: mol_type = other DNA; mol_type = other DNA
tatacacggctgaatccagac

SEQ ID NO: 25784 - DNA, 21 bp, synthetic construct
  source 1..21: mol_type = other DNA; mol_type = other DNA
tacagtcgaatcggaccatac

SEQ ID NO: 25785 - DNA, 21 bp, synthetic construct
  source 1..21: mol_type = other DNA; mol_type = other DNA
gtcctatcggaccgcgcatgg

SEQ ID NO: 25786 - DNA, 21 bp, synthetic construct
  source 1..21: mol_type = other DNA; mol_type = other DNA
atcccgggtttctgtgggccg

SEQ ID NO: 25787 - DNA, 21 bp, synthetic construct
  source 1..21: mol_type = other DNA; mol_type = other DNA
cgcatggagagcgtgatatgg

SEQ ID NO: 25788 - DNA, 21 bp, synthetic construct
  source 1..21: mol_type = other DNA; mol_type = other DNA
tattactcaggcatacgcgaa

SEQ ID NO: 25789 - DNA, 21 bp, synthetic construct
  source 1..21: mol_type = other DNA; mol_type = other DNA
ctatctagacttggggagaat

SEQ ID NO: 25790 - DNA, 21 bp, synthetic construct
  source 1..21: mol_type = other DNA; mol_type = other DNA
ttctcgaggctcggtgctaat

SEQ ID NO: 25791 - DNA, 21 bp, synthetic construct
  source 1..21: mol_type = other DNA; mol_type = other DNA
tctgaatcaacgaatggcgtt

SEQ ID NO: 25792 - DNA, 21 bp, synthetic construct
  source 1..21: mol_type = other DNA; mol_type = other DNA
tacagtagattgaatctagat

SEQ ID NO: 25793 - DNA, 21 bp, synthetic construct
  source 1..21: mol_type = other DNA; mol_type = other DNA
tacgcgcgaacaggtacaaac

SEQ ID NO: 25794 - DNA, 21 bp, synthetic construct
  source 1..21: mol_type = other DNA; mol_type = other DNA
tacagcagagtcggaccaaac

SEQ ID NO: 25795 - DNA, 21 bp, synthetic construct
  source 1..21: mol_type = other DNA; mol_type = other DNA
tacttctctggaaaattgtcc

SEQ ID NO: 25796 - DNA, 21 bp, synthetic construct
  source 1..21: mol_type = other DNA; mol_type = other DNA
tactttaccggtatgagagca

SEQ ID NO: 25797 - DNA, 21 bp, synthetic construct
  source 1..21: mol_type = other DNA; mol_type = other DNA
tactggtcaggaattcctgaa

SEQ ID NO: 25798 - DNA, 21 bp, synthetic construct
  source 1..21: mol_type = other DNA; mol_type = other DNA
agaacatccacacacggcata

SEQ ID NO: 25799 - DNA, 21 bp, synthetic construct
  source 1..21: mol_type = other DNA; mol_type = other DNA
aggatggctgacagagattgg

SEQ ID NO: 25800 - DNA, 21 bp, synthetic construct
  source 1..21: mol_type = other DNA; mol_type = other DNA
ttttcgcgggtcgggattaac

SEQ ID NO: 25801 - DNA, 21 bp, synthetic construct
  source 1..21: mol_type = other DNA; mol_type = other DNA
atcatggctgataggacctgg

SEQ ID NO: 25802 - DNA, 21 bp, synthetic construct
  source 1..21: mol_type = other DNA; mol_type = other DNA
aacatgtcaagttcgagttgg

SEQ ID NO: 25803 - DNA, 21 bp, synthetic construct
  source 1..21: mol_type = other DNA; mol_type = other DNA
cgttcggaattcaaggttttc

SEQ ID NO: 25804 - DNA, 21 bp, synthetic construct
  source 1..21: mol_type = other DNA; mol_type = other DNA
tatgtaaaatacgagaatcct

SEQ ID NO: 25805 - DNA, 21 bp, synthetic construct
  source 1..21: mol_type = other DNA; mol_type = other DNA
ggtggggacggatcgcactgg

SEQ ID NO: 25806 - DNA, 21 bp, synthetic construct
  source 1..21: mol_type = other DNA; mol_type = other DNA
tattcccgtctgggggaaaac

SEQ ID NO: 25807 - DNA, 21 bp, synthetic construct
  source 1..21: mol_type = other DNA; mol_type = other DNA
tattacaccggtaaatgtgag

SEQ ID NO: 25808 - DNA, 21 bp, synthetic construct
  source 1..21: mol_type = other DNA; mol_type = other DNA
tatcatagattgggcattgat

SEQ ID NO: 25809 - DNA, 21 bp, synthetic construct
  source 1..21: mol_type = other DNA; mol_type = other DNA
gagttggaatcccgtgagtgg

SEQ ID NO: 25810 - DNA, 21 bp, synthetic construct
  source 1..21: mol_type = other DNA; mol_type = other DNA
ttcagtagaacgggtccgaat

SEQ ID NO: 25811 - DNA, 21 bp, synthetic construct
  source 1..21: mol_type = other DNA; mol_type = other DNA
tacgtaaaaagtcagccaatg

SEQ ID NO: 25812 - DNA, 21 bp, synthetic construct
  source 1..21: mol_type = other DNA; mol_type = other DNA
tacagtaaggtaggccccaag

SEQ ID NO: 25813 - DNA, 21 bp, synthetic construct
  source 1..21: mol_type = other DNA; mol_type = other DNA
ttgctcgccgatagaacatgg

SEQ ID NO: 25814 - DNA, 21 bp, synthetic construct
  source 1..21: mol_type = other DNA; mol_type = other DNA
tatttctccgggcagctggac

SEQ ID NO: 25815 - DNA, 21 bp, synthetic construct
  source 1..21: mol_type = other DNA; mol_type = other DNA
aagatgtccgatcacacgtgg

SEQ ID NO: 25816 - DNA, 21 bp, synthetic construct
  source 1..21: mol_type = other DNA; mol_type = other DNA
tatgcacgcactggtcccaac

SEQ ID NO: 25817 - DNA, 21 bp, synthetic construct
  source 1..21: mol_type = other DNA; mol_type = other DNA
tatttttcaggcacgcatgag

SEQ ID NO: 25818 - DNA, 21 bp, synthetic construct
  source 1..21: mol_type = other DNA; mol_type = other DNA
tatagcaagcacaatttcaac

SEQ ID NO: 25819 - DNA, 21 bp, synthetic construct
  source 1..21: mol_type = other DNA; mol_type = other DNA
cgatcagaattcaagacctat

SEQ ID NO: 25820 - DNA, 21 bp, synthetic construct
  source 1..21: mol_type = other DNA; mol_type = other DNA
ctctctaaggccggtcacaat

SEQ ID NO: 25821 - DNA, 21 bp, synthetic construct
  source 1..21: mol_type = other DNA; mol_type = other DNA
cagaatgatttcgtttttcct

SEQ ID NO: 25822 - DNA, 21 bp, synthetic construct
  source 1..21: mol_type = other DNA; mol_type = other DNA
tattctaaacaaggctgcaac

SEQ ID NO: 25823 - DNA, 21 bp, synthetic construct
  source 1..21: mol_type = other DNA; mol_type = other DNA
ctacatcgacttcaggacgac

SEQ ID NO: 25824 - DNA, 21 bp, synthetic construct
  source 1..21: mol_type = other DNA; mol_type = other DNA
tttagtcgtgtaggcgcaaat

SEQ ID NO: 25825 - DNA, 21 bp, synthetic construct
  source 1..21: mol_type = other DNA; mol_type = other DNA
taccataagatgcaatgtaat

SEQ ID NO: 25826 - DNA, 21 bp, synthetic construct
  source 1..21: mol_type = other DNA; mol_type = other DNA
tactcgaaacataacactaac

SEQ ID NO: 25827 - DNA, 21 bp, synthetic construct
  source 1..21: mol_type = other DNA; mol_type = other DNA
ctctcaagaattcagacaaat

SEQ ID NO: 25828 - DNA, 21 bp, synthetic construct
  source 1..21: mol_type = other DNA; mol_type = other DNA
tacagtaagatggggacgaac

SEQ ID NO: 25829 - DNA, 21 bp, synthetic construct
  source 1..21: mol_type = other DNA; mol_type = other DNA
tactggtctggaacaattgct

SEQ ID NO: 25830 - DNA, 21 bp, synthetic construct
  source 1..21: mol_type = other DNA; mol_type = other DNA
tacttccacgggcagattgag

SEQ ID NO: 25831 - DNA, 21 bp, synthetic construct
  source 1..21: mol_type = other DNA; mol_type = other DNA
ttatgtcgaccctgccaggaa

SEQ ID NO: 25832 - DNA, 21 bp, synthetic construct
  source 1..21: mol_type = other DNA; mol_type = other DNA
tattccaaaagtggtaccaac

SEQ ID NO: 25833 - DNA, 21 bp, synthetic construct
  source 1..21: mol_type = other DNA; mol_type = other DNA
ctgtcaaagatgaacttcaat

SEQ ID NO: 25834 - DNA, 21 bp, synthetic construct
  source 1..21: mol_type = other DNA; mol_type = other DNA
tattcgaggctacatcctatg

SEQ ID NO: 25835 - DNA, 21 bp, synthetic construct
  source 1..21: mol_type = other DNA; mol_type = other DNA
tatttcacaggttacttagat

SEQ ID NO: 25836 - DNA, 21 bp, synthetic construct
  source 1..21: mol_type = other DNA; mol_type = other DNA
tatttcagtggaatccacgtc

SEQ ID NO: 25837 - DNA, 21 bp, synthetic construct
  source 1..21: mol_type = other DNA; mol_type = other DNA
tatttccacggtaaagtggcc

SEQ ID NO: 25838 - DNA, 21 bp, synthetic construct
  source 1..21: mol_type = other DNA; mol_type = other DNA
tactttagcggtaagataaac

SEQ ID NO: 25839 - DNA, 21 bp, synthetic construct
  source 1..21: mol_type = other DNA; mol_type = other DNA
aggctcgaggacaggtcatgg

SEQ ID NO: 25840 - DNA, 21 bp, synthetic construct
  source 1..21: mol_type = other DNA; mol_type = other DNA
tacttttcaggcaaggccgac

SEQ ID NO: 25841 - DNA, 21 bp, synthetic construct
  source 1..21: mol_type = other DNA; mol_type = other DNA
gctccagagactgtacggtgg

SEQ ID NO: 25842 - DNA, 21 bp, synthetic construct
  source 1..21: mol_type = other DNA; mol_type = other DNA
tatagcaaactcgatagtaga

SEQ ID NO: 25843 - DNA, 21 bp, synthetic construct
  source 1..21: mol_type = other DNA; mol_type = other DNA
tactctaggattggaccagat

SEQ ID NO: 25844 - DNA, 21 bp, synthetic construct
  source 1..21: mol_type = other DNA; mol_type = other DNA
agagatgcaacttcatcatgg

SEQ ID NO: 25845 - DNA, 21 bp, synthetic construct
  source 1..21: mol_type = other DNA; mol_type = other DNA
tatagtcgcataggcggcggt

SEQ ID NO: 25846 - DNA, 21 bp, synthetic construct
  source 1..21: mol_type = other DNA; mol_type = other DNA
tactggagcggcgtcgcggca

SEQ ID NO: 25847 - DNA, 21 bp, synthetic construct
  source 1..21: mol_type = other DNA; mol_type = other DNA
tatagtaggttgggtgatgac

SEQ ID NO: 25848 - DNA, 21 bp, synthetic construct
  source 1..21: mol_type = other DNA; mol_type = other DNA
agggaagaccatgtgttctgg

SEQ ID NO: 25849 - DNA, 21 bp, synthetic construct
  source 1..21: mol_type = other DNA; mol_type = other DNA
tacttccatggtaaatgtgac

SEQ ID NO: 25850 - DNA, 21 bp, synthetic construct
  source 1..21: mol_type = other DNA; mol_type = other DNA
tatttcagtggaaagacagat

SEQ ID NO: 25851 - DNA, 21 bp, synthetic construct
  source 1..21: mol_type = other DNA; mol_type = other DNA
ttttcgcgtataggtatgaac

SEQ ID NO: 25852 - DNA, 21 bp, synthetic construct
  source 1..21: mol_type = other DNA; mol_type = other DNA
tatgttcgtagcgatacgaag

SEQ ID NO: 25853 - DNA, 21 bp, synthetic construct
  source 1..21: mol_type = other DNA; mol_type = other DNA
tattattctgggatcgtagcg

SEQ ID NO: 25854 - DNA, 21 bp, synthetic construct
  source 1..21: mol_type = other DNA; mol_type = other DNA
aaggacgaataccatacctac

SEQ ID NO: 25855 - DNA, 21 bp, synthetic construct
  source 1..21: mol_type = other DNA; mol_type = other DNA
gtaatggagagcacaaggtgg

SEQ ID NO: 25856 - DNA, 21 bp, synthetic construct
  source 1..21: mol_type = other DNA; mol_type = other DNA
tgtgacaaggaaccatgttgt

SEQ ID NO: 25857 - DNA, 21 bp, synthetic construct
  source 1..21: mol_type = other DNA; mol_type = other DNA
cgtgacgaatttatgtcctac

SEQ ID NO: 25858 - DNA, 21 bp, synthetic construct
  source 1..21: mol_type = other DNA; mol_type = other DNA
agaggcattgacttttatcca

SEQ ID NO: 25859 - DNA, 21 bp, synthetic construct
  source 1..21: mol_type = other DNA; mol_type = other DNA
tggtggagcgggctcaaagag

SEQ ID NO: 25860 - DNA, 21 bp, synthetic construct
  source 1..21: mol_type = other DNA; mol_type = other DNA
atgagtaggatcggcgttaat

SEQ ID NO: 25861 - DNA, 21 bp, synthetic construct
  source 1..21: mol_type = other DNA; mol_type = other DNA
tatcaccgaatagggccaaat

SEQ ID NO: 25862 - DNA, 21 bp, synthetic construct
  source 1..21: mol_type = other DNA; mol_type = other DNA
aaagatgagtggtcagtgtat

SEQ ID NO: 25863 - DNA, 21 bp, synthetic construct
  source 1..21: mol_type = other DNA; mol_type = other DNA
agccatagcacaaacggacgt

SEQ ID NO: 25864 - DNA, 21 bp, synthetic construct
  source 1..21: mol_type = other DNA; mol_type = other DNA
ggtggggacggagtgcggtgg

SEQ ID NO: 25865 - DNA, 21 bp, synthetic construct
  source 1..21: mol_type = other DNA; mol_type = other DNA
ttaagcaggataagcatgaat

SEQ ID NO: 25866 - DNA, 21 bp, synthetic construct
  source 1..21: mol_type = other DNA; mol_type = other DNA
aaattcgactattcctcgtgc

SEQ ID NO: 25867 - DNA, 21 bp, synthetic construct
  source 1..21: mol_type = other DNA; mol_type = other DNA
gagaacgacttcaagattttt

SEQ ID NO: 25868 - DNA, 21 bp, synthetic construct
  source 1..21: mol_type = other DNA; mol_type = other DNA
atctggagtactaacggcgta

SEQ ID NO: 25869 - DNA, 21 bp, synthetic construct
  source 1..21: mol_type = other DNA; mol_type = other DNA
tatttcacaggattcgcggag

SEQ ID NO: 25870 - DNA, 21 bp, synthetic construct
  source 1..21: mol_type = other DNA; mol_type = other DNA
cattgtgagggtcgccccgta

SEQ ID NO: 25871 - DNA, 21 bp, synthetic construct
  source 1..21: mol_type = other DNA; mol_type = other DNA
tactttaccggtatgatagca

SEQ ID NO: 25872 - DNA, 21 bp, synthetic construct
  source 1..21: mol_type = other DNA; mol_type = other DNA
cgcgacggcaatagtagttgg

SEQ ID NO: 25873 - DNA, 21 bp, synthetic construct
  source 1..21: mol_type = other DNA; mol_type = other DNA
tgtggtcgcccgcagatggag

SEQ ID NO: 25874 - DNA, 21 bp, synthetic construct
  source 1..21: mol_type = other DNA; mol_type = other DNA
agggacgaaagttcttactgg

SEQ ID NO: 25875 - DNA, 21 bp, synthetic construct
  source 1..21: mol_type = other DNA; mol_type = other DNA
tattcaaaaatgaattctaat

SEQ ID NO: 25876 - DNA, 21 bp, synthetic construct
  source 1..21: mol_type = other DNA; mol_type = other DNA
ggtatggagttctgcagaccg

SEQ ID NO: 25877 - DNA, 21 bp, synthetic construct
  source 1..21: mol_type = other DNA; mol_type = other DNA
tgcggagggggtacggcaggc

SEQ ID NO: 25878 - DNA, 21 bp, synthetic construct
  source 1..21: mol_type = other DNA; mol_type = other DNA
tacttctcagggacagttgat

SEQ ID NO: 25879 - DNA, 21 bp, synthetic construct
  source 1..21: mol_type = other DNA; mol_type = other DNA
ctgtctaaggttggatcaaac

SEQ ID NO: 25880 - DNA, 21 bp, synthetic construct
  source 1..21: mol_type = other DNA; mol_type = other DNA
cacagctcgaccaacggcatt

SEQ ID NO: 25881 - DNA, 21 bp, synthetic construct
  source 1..21: mol_type = other DNA; mol_type = other DNA
tattttacgggcgtcacggat

SEQ ID NO: 25882 - DNA, 21 bp, synthetic construct
  source 1..21: mol_type = other DNA; mol_type = other DNA
tactatagtggaatcagagag

SEQ ID NO: 25883 - DNA, 21 bp, synthetic construct
  source 1..21: mol_type = other DNA; mol_type = other DNA
gggggggagacttcgacttgg

SEQ ID NO: 25884 - DNA, 21 bp, synthetic construct
  source 1..21: mol_type = other DNA; mol_type = other DNA
gagatgacgtcacacatgtgg

SEQ ID NO: 25885 - DNA, 21 bp, synthetic construct
  source 1..21: mol_type = other DNA; mol_type = other DNA
tactttgcgggaataatagag

SEQ ID NO: 25886 - DNA, 21 bp, synthetic construct
  source 1..21: mol_type = other DNA; mol_type = other DNA
ttcagtcgagtcggccagaac

SEQ ID NO: 25887 - DNA, 21 bp, synthetic construct
  source 1..21: mol_type = other DNA; mol_type = other DNA
tactttgaaggaagaaaggaa

SEQ ID NO: 25888 - DNA, 21 bp, synthetic construct
  source 1..21: mol_type = other DNA; mol_type = other DNA
tactcgaaatcgggttacaac

SEQ ID NO: 25889 - DNA, 21 bp, synthetic construct
  source 1..21: mol_type = other DNA; mol_type = other DNA
tattccaagatgggaatgaac

SEQ ID NO: 25890 - DNA, 21 bp, synthetic construct
  source 1..21: mol_type = other DNA; mol_type = other DNA
aatgatggtaacagtaaatgg

SEQ ID NO: 25891 - DNA, 21 bp, synthetic construct
  source 1..21: mol_type = other DNA; mol_type = other DNA
tacctcaaaagtcaagagtat

SEQ ID NO: 25892 - DNA, 21 bp, synthetic construct
  source 1..21: mol_type = other DNA; mol_type = other DNA
tatagtaaattaaatgtcgtt

SEQ ID NO: 25893 - DNA, 21 bp, synthetic construct
  source 1..21: mol_type = other DNA; mol_type = other DNA
ttgtgggacggtactaacccg

SEQ ID NO: 25894 - DNA, 21 bp, synthetic construct
  source 1..21: mol_type = other DNA; mol_type = other DNA
gtcgcaacagagggtcgagac

SEQ ID NO: 25895 - DNA, 21 bp, synthetic construct
  source 1..21: mol_type = other DNA; mol_type = other DNA
gatttagcaagtagcgcctgg

SEQ ID NO: 25896 - DNA, 21 bp, synthetic construct
  source 1..21: mol_type = other DNA; mol_type = other DNA
tttttcagtgggatcctagag

SEQ ID NO: 25897 - DNA, 21 bp, synthetic construct
  source 1..21: mol_type = other DNA; mol_type = other DNA
tactggacaggcgttagtgaa

SEQ ID NO: 25898 - DNA, 21 bp, synthetic construct
  source 1..21: mol_type = other DNA; mol_type = other DNA
cgcctcgaatcgacgagctgg

SEQ ID NO: 25899 - DNA, 21 bp, synthetic construct
  source 1..21: mol_type = other DNA; mol_type = other DNA
gtttcagaatttgcgagctac

SEQ ID NO: 25900 - DNA, 21 bp, synthetic construct
  source 1..21: mol_type = other DNA; mol_type = other DNA
aaaatggaagcgatgacttgg

SEQ ID NO: 25901 - DNA, 21 bp, synthetic construct
  source 1..21: mol_type = other DNA; mol_type = other DNA
gacatgtcgagcaacaaatgg

SEQ ID NO: 25902 - DNA, 21 bp, synthetic construct
  source 1..21: mol_type = other DNA; mol_type = other DNA
tattttagcgcaataaaagaa

SEQ ID NO: 25903 - DNA, 21 bp, synthetic construct
  source 1..21: mol_type = other DNA; mol_type = other DNA
tacagcaagcaaaatgtcaac

SEQ ID NO: 25904 - DNA, 21 bp, synthetic construct
  source 1..21: mol_type = other DNA; mol_type = other DNA
ttttcgagggtaggacaaaat

SEQ ID NO: 25905 - DNA, 21 bp, synthetic construct
  source 1..21: mol_type = other DNA; mol_type = other DNA
tctcggagtacgaatgggata

SEQ ID NO: 25906 - DNA, 21 bp, synthetic construct
  source 1..21: mol_type = other DNA; mol_type = other DNA
tattcggcccgtaacgacaat

SEQ ID NO: 25907 - DNA, 21 bp, synthetic construct
  source 1..21: mol_type = other DNA; mol_type = other DNA
ctccatcgtatgagcatcgac

SEQ ID NO: 25908 - DNA, 21 bp, synthetic construct
  source 1..21: mol_type = other DNA; mol_type = other DNA
tattggacggggaaaatagct

SEQ ID NO: 25909 - DNA, 21 bp, synthetic construct
  source 1..21: mol_type = other DNA; mol_type = other DNA
ttgtgtcgcccctgcgacgag

SEQ ID NO: 25910 - DNA, 21 bp, synthetic construct
  source 1..21: mol_type = other DNA; mol_type = other DNA
ctcgagtcaactaacggagtc

SEQ ID NO: 25911 - DNA, 21 bp, synthetic construct
  source 1..21: mol_type = other DNA; mol_type = other DNA
gcaggaccttcaagaggctgg

SEQ ID NO: 25912 - DNA, 21 bp, synthetic construct
  source 1..21: mol_type = other DNA; mol_type = other DNA
tatgcccgttctgggccgaac

SEQ ID NO: 25913 - DNA, 21 bp, synthetic construct
  source 1..21: mol_type = other DNA; mol_type = other DNA
caagaaagtactaacggacgt

SEQ ID NO: 25914 - DNA, 21 bp, synthetic construct
  source 1..21: mol_type = other DNA; mol_type = other DNA
aaagacgactttgtatcattc

SEQ ID NO: 25915 - DNA, 21 bp, synthetic construct
  source 1..21: mol_type = other DNA; mol_type = other DNA
tacgccaaaactggcgacaat

SEQ ID NO: 25916 - DNA, 21 bp, synthetic construct
  source 1..21: mol_type = other DNA; mol_type = other DNA
tacttttcaggagtagcggca

SEQ ID NO: 25917 - DNA, 21 bp, synthetic construct
  source 1..21: mol_type = other DNA; mol_type = other DNA
tactcaaaacacaatctaaat

SEQ ID NO: 25918 - DNA, 21 bp, synthetic construct
  source 1..21: mol_type = other DNA; mol_type = other DNA
ttttttagcggggtgcgtgaa

SEQ ID NO: 25919 - DNA, 21 bp, synthetic construct
  source 1..21: mol_type = other DNA; mol_type = other DNA
ttcagtcgtatcggacagaat

SEQ ID NO: 25920 - DNA, 21 bp, synthetic construct
  source 1..21: mol_type = other DNA; mol_type = other DNA
gaacccgaaagtcgtaaatgg

SEQ ID NO: 25921 - DNA, 21 bp, synthetic construct
  source 1..21: mol_type = other DNA; mol_type = other DNA
tacagtaaacagggcaataac

SEQ ID NO: 25922 - DNA, 21 bp, synthetic construct
  source 1..21: mol_type = other DNA; mol_type = other DNA
cactcaaagatgaactacaat

SEQ ID NO: 25923 - DNA, 21 bp, synthetic construct
  source 1..21: mol_type = other DNA; mol_type = other DNA
agagacgattttagcgctttc

SEQ ID NO: 25924 - DNA, 21 bp, synthetic construct
  source 1..21: mol_type = other DNA; mol_type = other DNA
tacagcagattgaatgacccc

SEQ ID NO: 25925 - DNA, 21 bp, synthetic construct
  source 1..21: mol_type = other DNA; mol_type = other DNA
tactcaaggcttagttttgat

SEQ ID NO: 25926 - DNA, 21 bp, synthetic construct
  source 1..21: mol_type = other DNA; mol_type = other DNA
tatttcacggggagacatgag

SEQ ID NO: 25927 - DNA, 21 bp, synthetic construct
  source 1..21: mol_type = other DNA; mol_type = other DNA
ggagcggaacacgtacgctgg

SEQ ID NO: 25928 - DNA, 21 bp, synthetic construct
  source 1..21: mol_type = other DNA; mol_type = other DNA
gacgatggcacctcaaaatgg

SEQ ID NO: 25929 - DNA, 21 bp, synthetic construct
  source 1..21: mol_type = other DNA; mol_type = other DNA
gaaactgacagcggttactgg

SEQ ID NO: 25930 - DNA, 21 bp, synthetic construct
  source 1..21: mol_type = other DNA; mol_type = other DNA
tatttcagtaaggtccgcgag

SEQ ID NO: 25931 - DNA, 21 bp, synthetic construct
  source 1..21: mol_type = other DNA; mol_type = other DNA
cgaacgccgaccacttatccg

SEQ ID NO: 25932 - DNA, 21 bp, synthetic construct
  source 1..21: mol_type = other DNA; mol_type = other DNA
gcatcctccacgaatggagtc

SEQ ID NO: 25933 - DNA, 21 bp, synthetic construct
  source 1..21: mol_type = other DNA; mol_type = other DNA
tacttcactggcacgaatagc

SEQ ID NO: 25934 - DNA, 21 bp, synthetic construct
  source 1..21: mol_type = other DNA; mol_type = other DNA
tacgtaaaatacgacaccagc

SEQ ID NO: 25935 - DNA, 21 bp, synthetic construct
  source 1..21: mol_type = other DNA; mol_type = other DNA
tatttcagtggaaaagcggat

SEQ ID NO: 25936 - DNA, 21 bp, synthetic construct
  source 1..21: mol_type = other DNA; mol_type = other DNA
ttgtcccgatctagctacaac

SEQ ID NO: 25937 - DNA, 21 bp, synthetic construct
  source 1..21: mol_type = other DNA; mol_type = other DNA
tatagccgcatcggagaagac

SEQ ID NO: 25938 - DNA, 21 bp, synthetic construct
  source 1..21: mol_type = other DNA; mol_type = other DNA
ttgtcgaagatcgggatgaat

SEQ ID NO: 25939 - DNA, 21 bp, synthetic construct
  source 1..21: mol_type = other DNA; mol_type = other DNA
ttagcgaaggctggaccaaac

SEQ ID NO: 25940 - DNA, 21 bp, synthetic construct
  source 1..21: mol_type = other DNA; mol_type = other DNA
ctggaggactgggtgaaatac

SEQ ID NO: 25941 - DNA, 21 bp, synthetic construct
  source 1..21: mol_type = other DNA; mol_type = other DNA
tactatagtgggatcgcagct

SEQ ID NO: 25942 - DNA, 21 bp, synthetic construct
  source 1..21: mol_type = other DNA; mol_type = other DNA
tacttcatgggagtcagggag

SEQ ID NO: 25943 - DNA, 21 bp, synthetic construct
  source 1..21: mol_type = other DNA; mol_type = other DNA
gggggagcgacatcctcatgg

SEQ ID NO: 25944 - DNA, 21 bp, synthetic construct
  source 1..21: mol_type = other DNA; mol_type = other DNA
tactcaagaattggtggtggc

SEQ ID NO: 25945 - DNA, 21 bp, synthetic construct
  source 1..21: mol_type = other DNA; mol_type = other DNA
aaggatgactatcattcatat

SEQ ID NO: 25946 - DNA, 21 bp, synthetic construct
  source 1..21: mol_type = other DNA; mol_type = other DNA
ccgatgagctcgagcgggtgg

SEQ ID NO: 25947 - DNA, 21 bp, synthetic construct
  source 1..21: mol_type = other DNA; mol_type = other DNA
tatagcaggatccagcctgat

SEQ ID NO: 25948 - DNA, 21 bp, synthetic construct
  source 1..21: mol_type = other DNA; mol_type = other DNA
tacgaaaatggatgcaaggaa

SEQ ID NO: 25949 - DNA, 21 bp, synthetic construct
  source 1..21: mol_type = other DNA; mol_type = other DNA
tactcacgtgttagtgatcca

SEQ ID NO: 25950 - DNA, 21 bp, synthetic construct
  source 1..21: mol_type = other DNA; mol_type = other DNA
tattttagcggtcaaacggcg

SEQ ID NO: 25951 - DNA, 21 bp, synthetic construct
  source 1..21: mol_type = other DNA; mol_type = other DNA
tactcacgtgtaggaactgga

SEQ ID NO: 25952 - DNA, 21 bp, synthetic construct
  source 1..21: mol_type = other DNA; mol_type = other DNA
tacttcagcgggacccacgaa

SEQ ID NO: 25953 - DNA, 21 bp, synthetic construct
  source 1..21: mol_type = other DNA; mol_type = other DNA
tcaaatagtactaatggaatc

SEQ ID NO: 25954 - DNA, 21 bp, synthetic construct
  source 1..21: mol_type = other DNA; mol_type = other DNA
tattttgctgggaaaagagat

SEQ ID NO: 25955 - DNA, 21 bp, synthetic construct
  source 1..21: mol_type = other DNA; mol_type = other DNA
tattcgcgtttgaacgataat

SEQ ID NO: 25956 - DNA, 21 bp, synthetic construct
  source 1..21: mol_type = other DNA; mol_type = other DNA
tatgcaagacttggagctaat

SEQ ID NO: 25957 - DNA, 21 bp, synthetic construct
  source 1..21: mol_type = other DNA; mol_type = other DNA
tattccaggttaaacctgatg

SEQ ID NO: 25958 - DNA, 21 bp, synthetic construct
  source 1..21: mol_type = other DNA; mol_type = other DNA
gcagacagcacaaacgggcga

SEQ ID NO: 25959 - DNA, 21 bp, synthetic construct
  source 1..21: mol_type = other DNA; mol_type = other DNA
gtcccagattacgtaaggtac

SEQ ID NO: 25960 - DNA, 21 bp, synthetic construct
  source 1..21: mol_type = other DNA; mol_type = other DNA
aaggatgagttcacaaaatat

SEQ ID NO: 25961 - DNA, 21 bp, synthetic construct
  source 1..21: mol_type = other DNA; mol_type = other DNA
aggtcgcacgacgccttccca

SEQ ID NO: 25962 - DNA, 21 bp, synthetic construct
  source 1..21: mol_type = other DNA; mol_type = other DNA
gtgtggtcaactaatgggatt

SEQ ID NO: 25963 - DNA, 21 bp, synthetic construct
  source 1..21: mol_type = other DNA; mol_type = other DNA
atgtgggacggcactggtcca

SEQ ID NO: 25964 - DNA, 21 bp, synthetic construct
  source 1..21: mol_type = other DNA; mol_type = other DNA
gactacgcttgtaagaaagag

SEQ ID NO: 25965 - DNA, 21 bp, synthetic construct
  source 1..21: mol_type = other DNA; mol_type = other DNA
ttctttaccggcaagattgct

SEQ ID NO: 25966 - DNA, 21 bp, synthetic construct
  source 1..21: mol_type = other DNA; mol_type = other DNA
tggacgccggtctgcaaggca

SEQ ID NO: 25967 - DNA, 21 bp, synthetic construct
  source 1..21: mol_type = other DNA; mol_type = other DNA
ggttcgcctggtgtacactgg

SEQ ID NO: 25968 - DNA, 21 bp, synthetic construct
  source 1..21: mol_type = other DNA; mol_type = other DNA
gagggaatagctcgcacgtgg

SEQ ID NO: 25969 - DNA, 21 bp, synthetic construct
  source 1..21: mol_type = other DNA; mol_type = other DNA
cgcgatgatttcgtgaaatgg

SEQ ID NO: 25970 - DNA, 21 bp, synthetic construct
  source 1..21: mol_type = other DNA; mol_type = other DNA
cgggatgatttctcagccttt

SEQ ID NO: 25971 - DNA, 21 bp, synthetic construct
  source 1..21: mol_type = other DNA; mol_type = other DNA
ctttgcagaccctgtctagag

SEQ ID NO: 25972 - DNA, 21 bp, synthetic construct
  source 1..21: mol_type = other DNA; mol_type = other DNA
ctcgcccgcactgcctacgac

SEQ ID NO: 25973 - DNA, 21 bp, synthetic construct
  source 1..21: mol_type = other DNA; mol_type = other DNA
atcttgtccgataggtcgtgg

SEQ ID NO: 25974 - DNA, 21 bp, synthetic construct
  source 1..21: mol_type = other DNA; mol_type = other DNA
tattggacaggtacggtggcg

SEQ ID NO: 25975 - DNA, 21 bp, synthetic construct
  source 1..21: mol_type = other DNA; mol_type = other DNA
agagagtgcggtgtgggacca

SEQ ID NO: 25976 - DNA, 21 bp, synthetic construct
  source 1..21: mol_type = other DNA; mol_type = other DNA
gattgcaaatattttaaagct

SEQ ID NO: 25977 - DNA, 21 bp, synthetic construct
  source 1..21: mol_type = other DNA; mol_type = other DNA
gagggcattagcagaagctgg

SEQ ID NO: 25978 - DNA, 21 bp, synthetic construct
  source 1..21: mol_type = other DNA; mol_type = other DNA
tactttaccggtaagcagagt

SEQ ID NO: 25979 - DNA, 21 bp, synthetic construct
  source 1..21: mol_type = other DNA; mol_type = other DNA
tattctaagcacaatgtcaat

SEQ ID NO: 25980 - DNA, 21 bp, synthetic construct
  source 1..21: mol_type = other DNA; mol_type = other DNA
gcgggagggggtctcttcatt

SEQ ID NO: 25981 - DNA, 21 bp, synthetic construct
  source 1..21: mol_type = other DNA; mol_type = other DNA
cgtggaggtgggctttttgtc

SEQ ID NO: 25982 - DNA, 21 bp, synthetic construct
  source 1..21: mol_type = other DNA; mol_type = other DNA
tacgacagcactaatgggttg

SEQ ID NO: 25983 - DNA, 21 bp, synthetic construct
  source 1..21: mol_type = other DNA; mol_type = other DNA
tactatacgggagttgtcgcg

SEQ ID NO: 25984 - DNA, 21 bp, synthetic construct
  source 1..21: mol_type = other DNA; mol_type = other DNA
cgtagccacgatgccttcccc

SEQ ID NO: 25985 - DNA, 21 bp, synthetic construct
  source 1..21: mol_type = other DNA; mol_type = other DNA
gtcctcgagagtagggattgg

SEQ ID NO: 25986 - DNA, 21 bp, synthetic construct
  source 1..21: mol_type = other DNA; mol_type = other DNA
aaggacgagttccgtacctac

SEQ ID NO: 25987 - DNA, 21 bp, synthetic construct
  source 1..21: mol_type = other DNA; mol_type = other DNA
ctcgcccgctccgcggttaac

SEQ ID NO: 25988 - DNA, 21 bp, synthetic construct
  source 1..21: mol_type = other DNA; mol_type = other DNA
taccataggttgggtgacgac

SEQ ID NO: 25989 - DNA, 21 bp, synthetic construct
  source 1..21: mol_type = other DNA; mol_type = other DNA
gtgtggtcgacgaacggaatt

SEQ ID NO: 25990 - DNA, 21 bp, synthetic construct
  source 1..21: mol_type = other DNA; mol_type = other DNA
tttgctagaaatggtcccaat

SEQ ID NO: 25991 - DNA, 21 bp, synthetic construct
  source 1..21: mol_type = other DNA; mol_type = other DNA
ctccatagacttttaccaaac

SEQ ID NO: 25992 - DNA, 21 bp, synthetic construct
  source 1..21: mol_type = other DNA; mol_type = other DNA
atcgcttcaaccaacggtgta

SEQ ID NO: 25993 - DNA, 21 bp, synthetic construct
  source 1..21: mol_type = other DNA; mol_type = other DNA
ggtccggaccatgtcaggtgg

SEQ ID NO: 25994 - DNA, 21 bp, synthetic construct
  source 1..21: mol_type = other DNA; mol_type = other DNA
aatatgagtgcagggacttgg

SEQ ID NO: 25995 - DNA, 21 bp, synthetic construct
  source 1..21: mol_type = other DNA; mol_type = other DNA
agggatgactatacctcgtgg

SEQ ID NO: 25996 - DNA, 21 bp, synthetic construct
  source 1..21: mol_type = other DNA; mol_type = other DNA
ctcgcccgtgcgggctataac

SEQ ID NO: 25997 - DNA, 21 bp, synthetic construct
  source 1..21: mol_type = other DNA; mol_type = other DNA
ctcactcgtttaagtcctgta

SEQ ID NO: 25998 - DNA, 21 bp, synthetic construct
  source 1..21: mol_type = other DNA; mol_type = other DNA
ggagacggtacttctaggtgg

SEQ ID NO: 25999 - DNA, 21 bp, synthetic construct
  source 1..21: mol_type = other DNA; mol_type = other DNA
ataatggcggaacgtacatgg

SEQ ID NO: 26000 - DNA, 21 bp, synthetic construct
  source 1..21: mol_type = other DNA; mol_type = other DNA
tatttcacggggatgatcgcc

SEQ ID NO: 26001 - DNA, 21 bp, synthetic construct
  source 1..21: mol_type = other DNA; mol_type = other DNA
cgcgacgctatgtctagttgg

SEQ ID NO: 26002 - DNA, 21 bp, synthetic construct
  source 1..21: mol_type = other DNA; mol_type = other DNA
tacgtaaggtctgacccccgt

SEQ ID NO: 26003 - DNA, 21 bp, synthetic construct
  source 1..21: mol_type = other DNA; mol_type = other DNA
tatttcactggcacttactcc

SEQ ID NO: 26004 - DNA, 21 bp, synthetic construct
  source 1..21: mol_type = other DNA; mol_type = other DNA
tattttatgggcgtccgtgaa

SEQ ID NO: 26005 - DNA, 21 bp, synthetic construct
  source 1..21: mol_type = other DNA; mol_type = other DNA
tacttcaccggtttccacgaa

SEQ ID NO: 26006 - DNA, 21 bp, synthetic construct
  source 1..21: mol_type = other DNA; mol_type = other DNA
agactagaagaccgagcttgg

SEQ ID NO: 26007 - DNA, 21 bp, synthetic construct
  source 1..21: mol_type = other DNA; mol_type = other DNA
tacttcgccggtaaacacgac

SEQ ID NO: 26008 - DNA, 21 bp, synthetic construct
  source 1..21: mol_type = other DNA; mol_type = other DNA
tatttctcagggcagcttgaa

SEQ ID NO: 26009 - DNA, 21 bp, synthetic construct
  source 1..21: mol_type = other DNA; mol_type = other DNA
tatttcacggggaaacaatca

SEQ ID NO: 26010 - DNA, 21 bp, synthetic construct
  source 1..21: mol_type = other DNA; mol_type = other DNA
tactggcgcctttctgataat

SEQ ID NO: 26011 - DNA, 21 bp, synthetic construct
  source 1..21: mol_type = other DNA; mol_type = other DNA
ctgtgggacgggacaaatgcg

SEQ ID NO: 26012 - DNA, 21 bp, synthetic construct
  source 1..21: mol_type = other DNA; mol_type = other DNA
tactttagcggggtgatcgac

SEQ ID NO: 26013 - DNA, 21 bp, synthetic construct
  source 1..21: mol_type = other DNA; mol_type = other DNA
ttgtcaaaaatgaacattaat

SEQ ID NO: 26014 - DNA, 21 bp, synthetic construct
  source 1..21: mol_type = other DNA; mol_type = other DNA
aaggacgacttcacggggttc

SEQ ID NO: 26015 - DNA, 21 bp, synthetic construct
  source 1..21: mol_type = other DNA; mol_type = other DNA
cttgctaagactgggatgaat

SEQ ID NO: 26016 - DNA, 21 bp, synthetic construct
  source 1..21: mol_type = other DNA; mol_type = other DNA
cgcgaggattatacaacatgg

SEQ ID NO: 26017 - DNA, 21 bp, synthetic construct
  source 1..21: mol_type = other DNA; mol_type = other DNA
agagatgactactcgaccttt

SEQ ID NO: 26018 - DNA, 21 bp, synthetic construct
  source 1..21: mol_type = other DNA; mol_type = other DNA
cactcaaggttaaatatagta

SEQ ID NO: 26019 - DNA, 21 bp, synthetic construct
  source 1..21: mol_type = other DNA; mol_type = other DNA
agatctcatgacgcatttcct

SEQ ID NO: 26020 - DNA, 21 bp, synthetic construct
  source 1..21: mol_type = other DNA; mol_type = other DNA
ttggacgattatacgacatgg

SEQ ID NO: 26021 - DNA, 21 bp, synthetic construct
  source 1..21: mol_type = other DNA; mol_type = other DNA
tattggagcggtatcaaggag

SEQ ID NO: 26022 - DNA, 21 bp, synthetic construct
  source 1..21: mol_type = other DNA; mol_type = other DNA
tatttttccggtcaaaccgcg

SEQ ID NO: 26023 - DNA, 21 bp, synthetic construct
  source 1..21: mol_type = other DNA; mol_type = other DNA
tatagcaaacaaggatttaat

SEQ ID NO: 26024 - DNA, 21 bp, synthetic construct
  source 1..21: mol_type = other DNA; mol_type = other DNA
tactttagcggacgtcaggag

SEQ ID NO: 26025 - DNA, 21 bp, synthetic construct
  source 1..21: mol_type = other DNA; mol_type = other DNA
cgccactctaagctgcccgga

SEQ ID NO: 26026 - DNA, 21 bp, synthetic construct
  source 1..21: mol_type = other DNA; mol_type = other DNA
ttcagccgtgtgggtcccaat

SEQ ID NO: 26027 - DNA, 21 bp, synthetic construct
  source 1..21: mol_type = other DNA; mol_type = other DNA
ctacaccgtttaggagacagc

SEQ ID NO: 26028 - DNA, 21 bp, synthetic construct
  source 1..21: mol_type = other DNA; mol_type = other DNA
gatatggagagctatgattgg

SEQ ID NO: 26029 - DNA, 21 bp, synthetic construct
  source 1..21: mol_type = other DNA; mol_type = other DNA
cagttgagcgatcgcacctgg

SEQ ID NO: 26030 - DNA, 21 bp, synthetic construct
  source 1..21: mol_type = other DNA; mol_type = other DNA
tacgctaagacaggttggaat

SEQ ID NO: 26031 - DNA, 21 bp, synthetic construct
  source 1..21: mol_type = other DNA; mol_type = other DNA
ctctgccgcccctgtagcccg

SEQ ID NO: 26032 - DNA, 21 bp, synthetic construct
  source 1..21: mol_type = other DNA; mol_type = other DNA
cgtgacggtacctcccattgg

SEQ ID NO: 26033 - DNA, 21 bp, synthetic construct
  source 1..21: mol_type = other DNA; mol_type = other DNA
gacctacgagctcatgattgg

SEQ ID NO: 26034 - DNA, 21 bp, synthetic construct
  source 1..21: mol_type = other DNA; mol_type = other DNA
attaacgggcgtggctgggat

SEQ ID NO: 26035 - DNA, 21 bp, synthetic construct
  source 1..21: mol_type = other DNA; mol_type = other DNA
gagagttcgactaacggcaga

SEQ ID NO: 26036 - DNA, 21 bp, synthetic construct
  source 1..21: mol_type = other DNA; mol_type = other DNA
tattccaaaatgaatcaaaac

SEQ ID NO: 26037 - DNA, 21 bp, synthetic construct
  source 1..21: mol_type = other DNA; mol_type = other DNA
tatttctcaggccagatggag

SEQ ID NO: 26038 - DNA, 21 bp, synthetic construct
  source 1..21: mol_type = other DNA; mol_type = other DNA
ataatgatggaccgcggctgg

SEQ ID NO: 26039 - DNA, 21 bp, synthetic construct
  source 1..21: mol_type = other DNA; mol_type = other DNA
aagggagattcacgtagttgg

SEQ ID NO: 26040 - DNA, 21 bp, synthetic construct
  source 1..21: mol_type = other DNA; mol_type = other DNA
ttctggtcaggtgttaaagag

SEQ ID NO: 26041 - DNA, 21 bp, synthetic construct
  source 1..21: mol_type = other DNA; mol_type = other DNA
tacttccatggtaaagtagct

SEQ ID NO: 26042 - DNA, 21 bp, synthetic construct
  source 1..21: mol_type = other DNA; mol_type = other DNA
tatagtaagtcggggagcaat

SEQ ID NO: 26043 - DNA, 21 bp, synthetic construct
  source 1..21: mol_type = other DNA; mol_type = other DNA
tatgtaagaagtgatgcaatg

SEQ ID NO: 26044 - DNA, 21 bp, synthetic construct
  source 1..21: mol_type = other DNA; mol_type = other DNA
aagagcgagttcaaaacatat

SEQ ID NO: 26045 - DNA, 21 bp, synthetic construct
  source 1..21: mol_type = other DNA; mol_type = other DNA
cccatgagtagccacgggtgg

SEQ ID NO: 26046 - DNA, 21 bp, synthetic construct
  source 1..21: mol_type = other DNA; mol_type = other DNA
tattcgaaacataacgataat

SEQ ID NO: 26047 - DNA, 21 bp, synthetic construct
  source 1..21: mol_type = other DNA; mol_type = other DNA
tatttcaccgggacggtaaag

SEQ ID NO: 26048 - DNA, 21 bp, synthetic construct
  source 1..21: mol_type = other DNA; mol_type = other DNA
tttagtcgcgtaggaatgaat

SEQ ID NO: 26049 - DNA, 21 bp, synthetic construct
  source 1..21: mol_type = other DNA; mol_type = other DNA
tatgcgaaaacgggctggaat

SEQ ID NO: 26050 - DNA, 21 bp, synthetic construct
  source 1..21: mol_type = other DNA; mol_type = other DNA
tattcagttgccggatgcaat

SEQ ID NO: 26051 - DNA, 21 bp, synthetic construct
  source 1..21: mol_type = other DNA; mol_type = other DNA
tatttcactggatatccggat

SEQ ID NO: 26052 - DNA, 21 bp, synthetic construct
  source 1..21: mol_type = other DNA; mol_type = other DNA
tatttctcgggacagatacag

SEQ ID NO: 26053 - DNA, 21 bp, synthetic construct
  source 1..21: mol_type = other DNA; mol_type = other DNA
tacttcactggagtccttcaa

SEQ ID NO: 26054 - DNA, 21 bp, synthetic construct
  source 1..21: mol_type = other DNA; mol_type = other DNA
ataatgagcagtgcaggttgg

SEQ ID NO: 26055 - DNA, 21 bp, synthetic construct
  source 1..21: mol_type = other DNA; mol_type = other DNA
tactttacaggtaagcatgac

SEQ ID NO: 26056 - DNA, 21 bp, synthetic construct
  source 1..21: mol_type = other DNA; mol_type = other DNA
ctatgcaggccgtgtgatgaa

SEQ ID NO: 26057 - DNA, 21 bp, synthetic construct
  source 1..21: mol_type = other DNA; mol_type = other DNA
agaggagatcacgtatacccc

SEQ ID NO: 26058 - DNA, 21 bp, synthetic construct
  source 1..21: mol_type = other DNA; mol_type = other DNA
aaagacgagttcaaaacgtac

SEQ ID NO: 26059 - DNA, 21 bp, synthetic construct
  source 1..21: mol_type = other DNA; mol_type = other DNA
tattcacgtatcggggataat

SEQ ID NO: 26060 - DNA, 21 bp, synthetic construct
  source 1..21: mol_type = other DNA; mol_type = other DNA
cgcagcgagtttgtttcattc

SEQ ID NO: 26061 - DNA, 21 bp, synthetic construct
  source 1..21: mol_type = other DNA; mol_type = other DNA
tactcgaagttagactcacgc

SEQ ID NO: 26062 - DNA, 21 bp, synthetic construct
  source 1..21: mol_type = other DNA; mol_type = other DNA
taccaccgtttaggtcaagat

SEQ ID NO: 26063 - DNA, 21 bp, synthetic construct
  source 1..21: mol_type = other DNA; mol_type = other DNA
tacgcgaaatcagggtggaac

SEQ ID NO: 26064 - DNA, 21 bp, synthetic construct
  source 1..21: mol_type = other DNA; mol_type = other DNA
gacatgggcgaccgtaagtgg

SEQ ID NO: 26065 - DNA, 21 bp, synthetic construct
  source 1..21: mol_type = other DNA; mol_type = other DNA
tattttaccggtcaacttgcc

SEQ ID NO: 26066 - DNA, 21 bp, synthetic construct
  source 1..21: mol_type = other DNA; mol_type = other DNA
taccaccgcttgcaaatagat

SEQ ID NO: 26067 - DNA, 21 bp, synthetic construct
  source 1..21: mol_type = other DNA; mol_type = other DNA
gacatgaggagtgcaaattgg

SEQ ID NO: 26068 - DNA, 21 bp, synthetic construct
  source 1..21: mol_type = other DNA; mol_type = other DNA
ccttatgccaagagcccgcta

SEQ ID NO: 26069 - DNA, 21 bp, synthetic construct
  source 1..21: mol_type = other DNA; mol_type = other DNA
cgagatggaacttcaatgtgg

SEQ ID NO: 26070 - DNA, 21 bp, synthetic construct
  source 1..21: mol_type = other DNA; mol_type = other DNA
tactttactggtgtgacggac

SEQ ID NO: 26071 - DNA, 21 bp, synthetic construct
  source 1..21: mol_type = other DNA; mol_type = other DNA
tcgcaatcaacgaatggcgta

SEQ ID NO: 26072 - DNA, 21 bp, synthetic construct
  source 1..21: mol_type = other DNA; mol_type = other DNA
cgcgatggagcctcgtcttgg

SEQ ID NO: 26073 - DNA, 21 bp, synthetic construct
  source 1..21: mol_type = other DNA; mol_type = other DNA
ttcttttcgggcgtactcgag

SEQ ID NO: 26074 - DNA, 21 bp, synthetic construct
  source 1..21: mol_type = other DNA; mol_type = other DNA
cataccgatgactcataccct

SEQ ID NO: 26075 - DNA, 21 bp, synthetic construct
  source 1..21: mol_type = other DNA; mol_type = other DNA
tatagcaagaaaaatgtgaat

SEQ ID NO: 26076 - DNA, 21 bp, synthetic construct
  source 1..21: mol_type = other DNA; mol_type = other DNA
cgtgaagagaatgttcgttgg

SEQ ID NO: 26077 - DNA, 21 bp, synthetic construct
  source 1..21: mol_type = other DNA; mol_type = other DNA
agggagccaggcgttagatgg

SEQ ID NO: 26078 - DNA, 21 bp, synthetic construct
  source 1..21: mol_type = other DNA; mol_type = other DNA
tatgcgaaagccggggcgaat

SEQ ID NO: 26079 - DNA, 21 bp, synthetic construct
  source 1..21: mol_type = other DNA; mol_type = other DNA
cgcgaggatgaggtgtattgg

SEQ ID NO: 26080 - DNA, 21 bp, synthetic construct
  source 1..21: mol_type = other DNA; mol_type = other DNA
cgcggaggagatgtgtacccc

SEQ ID NO: 26081 - DNA, 21 bp, synthetic construct
  source 1..21: mol_type = other DNA; mol_type = other DNA
agaatggaatcaataaaatgg

SEQ ID NO: 26082 - DNA, 21 bp, synthetic construct
  source 1..21: mol_type = other DNA; mol_type = other DNA
tacttccatgggaaacttgag

SEQ ID NO: 26083 - DNA, 21 bp, synthetic construct
  source 1..21: mol_type = other DNA; mol_type = other DNA
tatgctaagcagggttggaat

SEQ ID NO: 26084 - DNA, 21 bp, synthetic construct
  source 1..21: mol_type = other DNA; mol_type = other DNA
tactcgcgcgtggggtttaat

SEQ ID NO: 26085 - DNA, 21 bp, synthetic construct
  source 1..21: mol_type = other DNA; mol_type = other DNA
atagaatcatttaatggcaga

SEQ ID NO: 26086 - DNA, 21 bp, synthetic construct
  source 1..21: mol_type = other DNA; mol_type = other DNA
tactctaaggtcaactacaac

SEQ ID NO: 26087 - DNA, 21 bp, synthetic construct
  source 1..21: mol_type = other DNA; mol_type = other DNA
aacacctcaaccaatggagtc

SEQ ID NO: 26088 - DNA, 21 bp, synthetic construct
  source 1..21: mol_type = other DNA; mol_type = other DNA
tactttacaggaatgacagac

SEQ ID NO: 26089 - DNA, 21 bp, synthetic construct
  source 1..21: mol_type = other DNA; mol_type = other DNA
tacttctctggtaagcacgat

SEQ ID NO: 26090 - DNA, 21 bp, synthetic construct
  source 1..21: mol_type = other DNA; mol_type = other DNA
tattttagtggtacttatgat

SEQ ID NO: 26091 - DNA, 21 bp, synthetic construct
  source 1..21: mol_type = other DNA; mol_type = other DNA
ggaagcgccacctcatcgtgg

SEQ ID NO: 26092 - DNA, 21 bp, synthetic construct
  source 1..21: mol_type = other DNA; mol_type = other DNA
agagaggagaacgtttactgg

SEQ ID NO: 26093 - DNA, 21 bp, synthetic construct
  source 1..21: mol_type = other DNA; mol_type = other DNA
agaagtgatttcgtaacctac

SEQ ID NO: 26094 - DNA, 21 bp, synthetic construct
  source 1..21: mol_type = other DNA; mol_type = other DNA
tatagtaaaatgggaaccaac

SEQ ID NO: 26095 - DNA, 21 bp, synthetic construct
  source 1..21: mol_type = other DNA; mol_type = other DNA
tatttttcagggaggaccgct

SEQ ID NO: 26096 - DNA, 21 bp, synthetic construct
  source 1..21: mol_type = other DNA; mol_type = other DNA
gttatgcaagcaagcaactgg

SEQ ID NO: 26097 - DNA, 21 bp, synthetic construct
  source 1..21: mol_type = other DNA; mol_type = other DNA
tatgcacggacagggatcaat

SEQ ID NO: 26098 - DNA, 21 bp, synthetic construct
  source 1..21: mol_type = other DNA; mol_type = other DNA
aggatggatagtagtgggtgg

SEQ ID NO: 26099 - DNA, 21 bp, synthetic construct
  source 1..21: mol_type = other DNA; mol_type = other DNA
tatttcagcggcaagctaagt

SEQ ID NO: 26100 - DNA, 21 bp, synthetic construct
  source 1..21: mol_type = other DNA; mol_type = other DNA
tacttcaccggagttactgac

SEQ ID NO: 26101 - DNA, 21 bp, synthetic construct
  source 1..21: mol_type = other DNA; mol_type = other DNA
tatttcgcagggaagagggaa

SEQ ID NO: 26102 - DNA, 21 bp, synthetic construct
  source 1..21: mol_type = other DNA; mol_type = other DNA
tactcccgccttcagccttta

SEQ ID NO: 26103 - DNA, 21 bp, synthetic construct
  source 1..21: mol_type = other DNA; mol_type = other DNA
tacgtcaggtcagacatgcat

SEQ ID NO: 26104 - DNA, 21 bp, synthetic construct
  source 1..21: mol_type = other DNA; mol_type = other DNA
tatttcacagggacagtatta

SEQ ID NO: 26105 - DNA, 21 bp, synthetic construct
  source 1..21: mol_type = other DNA; mol_type = other DNA
cgcgaaggaacatcgaagtgg

SEQ ID NO: 26106 - DNA, 21 bp, synthetic construct
  source 1..21: mol_type = other DNA; mol_type = other DNA
tactcgcgtcttcaagagaac

SEQ ID NO: 26107 - DNA, 21 bp, synthetic construct
  source 1..21: mol_type = other DNA; mol_type = other DNA
tactcaaaagctggccacaat

SEQ ID NO: 26108 - DNA, 21 bp, synthetic construct
  source 1..21: mol_type = other DNA; mol_type = other DNA
tatagtcgtttaggagccgac

SEQ ID NO: 26109 - DNA, 21 bp, synthetic construct
  source 1..21: mol_type = other DNA; mol_type = other DNA
agggacgattacagcacatac

SEQ ID NO: 26110 - DNA, 21 bp, synthetic construct
  source 1..21: mol_type = other DNA; mol_type = other DNA
acctgtaaggcacagatgggt

SEQ ID NO: 26111 - DNA, 21 bp, synthetic construct
  source 1..21: mol_type = other DNA; mol_type = other DNA
atggaatccactaatggggtg

SEQ ID NO: 26112 - DNA, 21 bp, synthetic construct
  source 1..21: mol_type = other DNA; mol_type = other DNA
gtattatctagcaagacatgg

SEQ ID NO: 26113 - DNA, 21 bp, synthetic construct
  source 1..21: mol_type = other DNA; mol_type = other DNA
ttgatgaccgacaggacatgg

SEQ ID NO: 26114 - DNA, 21 bp, synthetic construct
  source 1..21: mol_type = other DNA; mol_type = other DNA
atcgaatcgtctaatggcgtc

SEQ ID NO: 26115 - DNA, 21 bp, synthetic construct
  source 1..21: mol_type = other DNA; mol_type = other DNA
ctctccagggcgtccgacaac

SEQ ID NO: 26116 - DNA, 21 bp, synthetic construct
  source 1..21: mol_type = other DNA; mol_type = other DNA
gggagctctacgtctacttgg

SEQ ID NO: 26117 - DNA, 21 bp, synthetic construct
  source 1..21: mol_type = other DNA; mol_type = other DNA
tatagccgcataggtcctgac

SEQ ID NO: 26118 - DNA, 21 bp, synthetic construct
  source 1..21: mol_type = other DNA; mol_type = other DNA
cgaggtgaccgtgtattccca

SEQ ID NO: 26119 - DNA, 21 bp, synthetic construct
  source 1..21: mol_type = other DNA; mol_type = other DNA
cgcaactcgacagtatatcca

SEQ ID NO: 26120 - DNA, 21 bp, synthetic construct
  source 1..21: mol_type = other DNA; mol_type = other DNA
tacttcgcagggaaaagggac

SEQ ID NO: 26121 - DNA, 21 bp, synthetic construct
  source 1..21: mol_type = other DNA; mol_type = other DNA
ctccataagctccaaccgtgt

SEQ ID NO: 26122 - DNA, 21 bp, synthetic construct
  source 1..21: mol_type = other DNA; mol_type = other DNA
aggatgtcagatgcatatgcc

SEQ ID NO: 26123 - DNA, 21 bp, synthetic construct
  source 1..21: mol_type = other DNA; mol_type = other DNA
cggctccaagacgtgacctgg

SEQ ID NO: 26124 - DNA, 21 bp, synthetic construct
  source 1..21: mol_type = other DNA; mol_type = other DNA
tacactcgcttagataaggac

SEQ ID NO: 26125 - DNA, 21 bp, synthetic construct
  source 1..21: mol_type = other DNA; mol_type = other DNA
ttaaaggacggaacatccgcc

SEQ ID NO: 26126 - DNA, 21 bp, synthetic construct
  source 1..21: mol_type = other DNA; mol_type = other DNA
tatagcaggttgggcgttaac

SEQ ID NO: 26127 - DNA, 21 bp, synthetic construct
  source 1..21: mol_type = other DNA; mol_type = other DNA
agggacgactacgttcactgg

SEQ ID NO: 26128 - DNA, 21 bp, synthetic construct
  source 1..21: mol_type = other DNA; mol_type = other DNA
gatatggcaagccaacagtgg

SEQ ID NO: 26129 - DNA, 21 bp, synthetic construct
  source 1..21: mol_type = other DNA; mol_type = other DNA
ctaatgagtgatcgctcttgg

SEQ ID NO: 26130 - DNA, 21 bp, synthetic construct
  source 1..21: mol_type = other DNA; mol_type = other DNA
tactgtaagccttgcttaact

SEQ ID NO: 26131 - DNA, 21 bp, synthetic construct
  source 1..21: mol_type = other DNA; mol_type = other DNA
ctccatagattgagtggggat

SEQ ID NO: 26132 - DNA, 21 bp, synthetic construct
  source 1..21: mol_type = other DNA; mol_type = other DNA
tatagtcgtattgaaccgaat

SEQ ID NO: 26133 - DNA, 21 bp, synthetic construct
  source 1..21: mol_type = other DNA; mol_type = other DNA
tactttaccgggatgatctca

SEQ ID NO: 26134 - DNA, 21 bp, synthetic construct
  source 1..21: mol_type = other DNA; mol_type = other DNA
ttccataagatgaactataac

SEQ ID NO: 26135 - DNA, 21 bp, synthetic construct
  source 1..21: mol_type = other DNA; mol_type = other DNA
aaagacgaatttactaagtac

SEQ ID NO: 26136 - DNA, 21 bp, synthetic construct
  source 1..21: mol_type = other DNA; mol_type = other DNA
tacagcagagtcggcgagaac

SEQ ID NO: 26137 - DNA, 21 bp, synthetic construct
  source 1..21: mol_type = other DNA; mol_type = other DNA
tcgcggtcgacaaatggtatc

SEQ ID NO: 26138 - DNA, 21 bp, synthetic construct
  source 1..21: mol_type = other DNA; mol_type = other DNA
tatgctaggttgggtgccaac

SEQ ID NO: 26139 - DNA, 21 bp, synthetic construct
  source 1..21: mol_type = other DNA; mol_type = other DNA
tatagtcgggtcggcttaaac

SEQ ID NO: 26140 - DNA, 21 bp, synthetic construct
  source 1..21: mol_type = other DNA; mol_type = other DNA
agggatgactacttgtcgtgg

SEQ ID NO: 26141 - DNA, 21 bp, synthetic construct
  source 1..21: mol_type = other DNA; mol_type = other DNA
tattggagtggggtgaaattg

SEQ ID NO: 26142 - DNA, 21 bp, synthetic construct
  source 1..21: mol_type = other DNA; mol_type = other DNA
tacttttcgggaatccttggc

SEQ ID NO: 26143 - DNA, 21 bp, synthetic construct
  source 1..21: mol_type = other DNA; mol_type = other DNA
gtagacgaatggaaaacatat

SEQ ID NO: 26144 - DNA, 21 bp, synthetic construct
  source 1..21: mol_type = other DNA; mol_type = other DNA
tatttcactggtatgatggac

SEQ ID NO: 26145 - DNA, 21 bp, synthetic construct
  source 1..21: mol_type = other DNA; mol_type = other DNA
ttctcgagggtgggtaacaat

SEQ ID NO: 26146 - DNA, 21 bp, synthetic construct
  source 1..21: mol_type = other DNA; mol_type = other DNA
tacagcaaaatggggatcaat

SEQ ID NO: 26147 - DNA, 21 bp, synthetic construct
  source 1..21: mol_type = other DNA; mol_type = other DNA
attgacgactacgtgcactgg

SEQ ID NO: 26148 - DNA, 21 bp, synthetic construct
  source 1..21: mol_type = other DNA; mol_type = other DNA
tatcataagcattccttaaat

SEQ ID NO: 26149 - DNA, 21 bp, synthetic construct
  source 1..21: mol_type = other DNA; mol_type = other DNA
tacttttcagggcaaataatg

SEQ ID NO: 26150 - DNA, 21 bp, synthetic construct
  source 1..21: mol_type = other DNA; mol_type = other DNA
tacttaaaaagtcagatgtac

SEQ ID NO: 26151 - DNA, 21 bp, synthetic construct
  source 1..21: mol_type = other DNA; mol_type = other DNA
aggttagaagaccgatcctgg

SEQ ID NO: 26152 - DNA, 21 bp, synthetic construct
  source 1..21: mol_type = other DNA; mol_type = other DNA
tatttctcgggtacatacgaa

SEQ ID NO: 26153 - DNA, 21 bp, synthetic construct
  source 1..21: mol_type = other DNA; mol_type = other DNA
tcggacggagttagtcgttgg

SEQ ID NO: 26154 - DNA, 21 bp, synthetic construct
  source 1..21: mol_type = other DNA; mol_type = other DNA
aggttggagtcagtgagctgg

SEQ ID NO: 26155 - DNA, 21 bp, synthetic construct
  source 1..21: mol_type = other DNA; mol_type = other DNA
atctggagtacgaatggcatc

SEQ ID NO: 26156 - DNA, 21 bp, synthetic construct
  source 1..21: mol_type = other DNA; mol_type = other DNA
gggtccccatcgtcgtcctgg

SEQ ID NO: 26157 - DNA, 21 bp, synthetic construct
  source 1..21: mol_type = other DNA; mol_type = other DNA
agggacgagtatacagggttc

SEQ ID NO: 26158 - DNA, 21 bp, synthetic construct
  source 1..21: mol_type = other DNA; mol_type = other DNA
tatcacgcgagagggctaaat

SEQ ID NO: 26159 - DNA, 21 bp, synthetic construct
  source 1..21: mol_type = other DNA; mol_type = other DNA
tactcgaagatgaaccctaac

SEQ ID NO: 26160 - DNA, 21 bp, synthetic construct
  source 1..21: mol_type = other DNA; mol_type = other DNA
tgcgctggtatgtgtggcgcc

SEQ ID NO: 26161 - DNA, 21 bp, synthetic construct
  source 1..21: mol_type = other DNA; mol_type = other DNA
agatgtgaaaggcccccggct

SEQ ID NO: 26162 - DNA, 21 bp, synthetic construct
  source 1..21: mol_type = other DNA; mol_type = other DNA
aaggacgacttctcggcttat

SEQ ID NO: 26163 - DNA, 21 bp, synthetic construct
  source 1..21: mol_type = other DNA; mol_type = other DNA
aggatggaagcgctcgattgg

SEQ ID NO: 26164 - DNA, 21 bp, synthetic construct
  source 1..21: mol_type = other DNA; mol_type = other DNA
tattggagcggcacgatagcg

SEQ ID NO: 26165 - DNA, 21 bp, synthetic construct
  source 1..21: mol_type = other DNA; mol_type = other DNA
ggaggcgaatactcaaagtgg

SEQ ID NO: 26166 - DNA, 21 bp, synthetic construct
  source 1..21: mol_type = other DNA; mol_type = other DNA
tacttttcaggcattcccgca

SEQ ID NO: 26167 - DNA, 21 bp, synthetic construct
  source 1..21: mol_type = other DNA; mol_type = other DNA
cttttacagagcgcgacatgg

SEQ ID NO: 26168 - DNA, 21 bp, synthetic construct
  source 1..21: mol_type = other DNA; mol_type = other DNA
tacagtaagcaagggcacaac

SEQ ID NO: 26169 - DNA, 21 bp, synthetic construct
  source 1..21: mol_type = other DNA; mol_type = other DNA
tactttagtggaacttatgag

SEQ ID NO: 26170 - DNA, 21 bp, synthetic construct
  source 1..21: mol_type = other DNA; mol_type = other DNA
atcatgagctcgagtgcatgg

SEQ ID NO: 26171 - DNA, 21 bp, synthetic construct
  source 1..21: mol_type = other DNA; mol_type = other DNA
aggaggacagacgtctatcct

SEQ ID NO: 26172 - DNA, 21 bp, synthetic construct
  source 1..21: mol_type = other DNA; mol_type = other DNA
tgtaaggctaatcctcctgag

SEQ ID NO: 26173 - DNA, 21 bp, synthetic construct
  source 1..21: mol_type = other DNA; mol_type = other DNA
gtgccggatttcgtcaagtgg

SEQ ID NO: 26174 - DNA, 21 bp, synthetic construct
  source 1..21: mol_type = other DNA; mol_type = other DNA
cgttcgatcgatgcttacccg

SEQ ID NO: 26175 - DNA, 21 bp, synthetic construct
  source 1..21: mol_type = other DNA; mol_type = other DNA
tacactcgcatagggcctaat

SEQ ID NO: 26176 - DNA, 21 bp, synthetic construct
  source 1..21: mol_type = other DNA; mol_type = other DNA
tattctaagctgaatacgcat

SEQ ID NO: 26177 - DNA, 21 bp, synthetic construct
  source 1..21: mol_type = other DNA; mol_type = other DNA
tattggtccactattaaggaa

SEQ ID NO: 26178 - DNA, 21 bp, synthetic construct
  source 1..21: mol_type = other DNA; mol_type = other DNA
gggcctgatcacgtacgttgg

SEQ ID NO: 26179 - DNA, 21 bp, synthetic construct
  source 1..21: mol_type = other DNA; mol_type = other DNA
tacagtagaattggcgaaaac

SEQ ID NO: 26180 - DNA, 21 bp, synthetic construct
  source 1..21: mol_type = other DNA; mol_type = other DNA
caaaacgagttttcgacatat

SEQ ID NO: 26181 - DNA, 21 bp, synthetic construct
  source 1..21: mol_type = other DNA; mol_type = other DNA
gactggtacggtaacgctgcc

SEQ ID NO: 26182 - DNA, 21 bp, synthetic construct
  source 1..21: mol_type = other DNA; mol_type = other DNA
atatggtcaacaaacgggata

SEQ ID NO: 26183 - DNA, 21 bp, synthetic construct
  source 1..21: mol_type = other DNA; mol_type = other DNA
gggggtgaagggtccttctgg

SEQ ID NO: 26184 - DNA, 21 bp, synthetic construct
  source 1..21: mol_type = other DNA; mol_type = other DNA
tcaatggagagtcgcacatgg

SEQ ID NO: 26185 - DNA, 21 bp, synthetic construct
  source 1..21: mol_type = other DNA; mol_type = other DNA
aggatggaatcgtcaatgtgg

SEQ ID NO: 26186 - DNA, 21 bp, synthetic construct
  source 1..21: mol_type = other DNA; mol_type = other DNA
aggtgcggaggagattggcct

SEQ ID NO: 26187 - DNA, 21 bp, synthetic construct
  source 1..21: mol_type = other DNA; mol_type = other DNA
tacgcacgagtcgggcccaat

SEQ ID NO: 26188 - DNA, 21 bp, synthetic construct
  source 1..21: mol_type = other DNA; mol_type = other DNA
cacagcagtaccaacggtgtg

SEQ ID NO: 26189 - DNA, 21 bp, synthetic construct
  source 1..21: mol_type = other DNA; mol_type = other DNA
tatgctaggtcgggcttaaac

SEQ ID NO: 26190 - DNA, 21 bp, synthetic construct
  source 1..21: mol_type = other DNA; mol_type = other DNA
atgagcgatttcaagattttt

SEQ ID NO: 26191 - DNA, 21 bp, synthetic construct
  source 1..21: mol_type = other DNA; mol_type = other DNA
ctttgtagaccgtgctacgaa

SEQ ID NO: 26192 - DNA, 21 bp, synthetic construct
  source 1..21: mol_type = other DNA; mol_type = other DNA
tacacaaggttacagaacacg

SEQ ID NO: 26193 - DNA, 21 bp, synthetic construct
  source 1..21: mol_type = other DNA; mol_type = other DNA
tacttccatggtattcaggaa

SEQ ID NO: 26194 - DNA, 21 bp, synthetic construct
  source 1..21: mol_type = other DNA; mol_type = other DNA
tactacacgggagtgattgcc

SEQ ID NO: 26195 - DNA, 21 bp, synthetic construct
  source 1..21: mol_type = other DNA; mol_type = other DNA
atcatgagtacaaacggggta

SEQ ID NO: 26196 - DNA, 21 bp, synthetic construct
  source 1..21: mol_type = other DNA; mol_type = other DNA
tactttacaggcaggccagac

SEQ ID NO: 26197 - DNA, 21 bp, synthetic construct
  source 1..21: mol_type = other DNA; mol_type = other DNA
aggaacgacatggtgttcccc

SEQ ID NO: 26198 - DNA, 21 bp, synthetic construct
  source 1..21: mol_type = other DNA; mol_type = other DNA
tatttcgcggggaggacggaa

SEQ ID NO: 26199 - DNA, 21 bp, synthetic construct
  source 1..21: mol_type = other DNA; mol_type = other DNA
tatttcacggggcagcttgct

SEQ ID NO: 26200 - DNA, 21 bp, synthetic construct
  source 1..21: mol_type = other DNA; mol_type = other DNA
atccaccgtttgtcacctgat

SEQ ID NO: 26201 - DNA, 21 bp, synthetic construct
  source 1..21: mol_type = other DNA; mol_type = other DNA
tatgccagaatggggcctaac

SEQ ID NO: 26202 - DNA, 21 bp, synthetic construct
  source 1..21: mol_type = other DNA; mol_type = other DNA
tactttcaggggattagggag

SEQ ID NO: 26203 - DNA, 21 bp, synthetic construct
  source 1..21: mol_type = other DNA; mol_type = other DNA
ctccatcggctccacccatta

SEQ ID NO: 26204 - DNA, 21 bp, synthetic construct
  source 1..21: mol_type = other DNA; mol_type = other DNA
cgtgaaagtgaagtcaggtgg

SEQ ID NO: 26205 - DNA, 21 bp, synthetic construct
  source 1..21: mol_type = other DNA; mol_type = other DNA
tacgccaaagccggctttaat

SEQ ID NO: 26206 - DNA, 21 bp, synthetic construct
  source 1..21: mol_type = other DNA; mol_type = other DNA
tatagcaaacagaaccataat

SEQ ID NO: 26207 - DNA, 21 bp, synthetic construct
  source 1..21: mol_type = other DNA; mol_type = other DNA
tatagcaagagaggggaaaat

SEQ ID NO: 26208 - DNA, 21 bp, synthetic construct
  source 1..21: mol_type = other DNA; mol_type = other DNA
tatgcgaggataggtcttaac

SEQ ID NO: 26209 - DNA, 21 bp, synthetic construct
  source 1..21: mol_type = other DNA; mol_type = other DNA
ctttcaaaatcgagcatcaac

SEQ ID NO: 26210 - DNA, 21 bp, synthetic construct
  source 1..21: mol_type = other DNA; mol_type = other DNA
ggctcaagtacaagcacgtgg

SEQ ID NO: 26211 - DNA, 21 bp, synthetic construct
  source 1..21: mol_type = other DNA; mol_type = other DNA
tacttttcgggtgtggtacca

SEQ ID NO: 26212 - DNA, 21 bp, synthetic construct
  source 1..21: mol_type = other DNA; mol_type = other DNA
tacttctccggtatcagcaag

SEQ ID NO: 26213 - DNA, 21 bp, synthetic construct
  source 1..21: mol_type = other DNA; mol_type = other DNA
aaaatgcaggatcgtagctgg

SEQ ID NO: 26214 - DNA, 21 bp, synthetic construct
  source 1..21: mol_type = other DNA; mol_type = other DNA
ttcttcaccggcacttttgac

SEQ ID NO: 26215 - DNA, 21 bp, synthetic construct
  source 1..21: mol_type = other DNA; mol_type = other DNA
cttagtcgggcaggcgacaac

SEQ ID NO: 26216 - DNA, 21 bp, synthetic construct
  source 1..21: mol_type = other DNA; mol_type = other DNA
tgcaaggccccatgctgcccc

SEQ ID NO: 26217 - DNA, 21 bp, synthetic construct
  source 1..21: mol_type = other DNA; mol_type = other DNA
tatttcacaggaaggagcgat

SEQ ID NO: 26218 - DNA, 21 bp, synthetic construct
  source 1..21: mol_type = other DNA; mol_type = other DNA
cgatcgagtgatgtatatcct

SEQ ID NO: 26219 - DNA, 21 bp, synthetic construct
  source 1..21: mol_type = other DNA; mol_type = other DNA
gtactaagcgcaagcagttgg

SEQ ID NO: 26220 - DNA, 21 bp, synthetic construct
  source 1..21: mol_type = other DNA; mol_type = other DNA
cgggatgggtcatcagcgtgg

SEQ ID NO: 26221 - DNA, 21 bp, synthetic construct
  source 1..21: mol_type = other DNA; mol_type = other DNA
tacttcacgggccggctggac

SEQ ID NO: 26222 - DNA, 21 bp, synthetic construct
  source 1..21: mol_type = other DNA; mol_type = other DNA
ttttggtcgggagtggtagag

SEQ ID NO: 26223 - DNA, 21 bp, synthetic construct
  source 1..21: mol_type = other DNA; mol_type = other DNA
aggctggaagaccggttgtgg

SEQ ID NO: 26224 - DNA, 21 bp, synthetic construct
  source 1..21: mol_type = other DNA; mol_type = other DNA
tactcgcgtgtaggaatcaat

SEQ ID NO: 26225 - DNA, 21 bp, synthetic construct
  source 1..21: mol_type = other DNA; mol_type = other DNA
ggaggtgagcatagcacatgg

SEQ ID NO: 26226 - DNA, 21 bp, synthetic construct
  source 1..21: mol_type = other DNA; mol_type = other DNA
tatttttccggccgagtggcg

SEQ ID NO: 26227 - DNA, 21 bp, synthetic construct
  source 1..21: mol_type = other DNA; mol_type = other DNA
gatcttaagagcgccagttgg

SEQ ID NO: 26228 - DNA, 21 bp, synthetic construct
  source 1..21: mol_type = other DNA; mol_type = other DNA
tacgtgaggagccaagataat

SEQ ID NO: 26229 - DNA, 21 bp, synthetic construct
  source 1..21: mol_type = other DNA; mol_type = other DNA
tactttcatggaaaggtagcg

SEQ ID NO: 26230 - DNA, 21 bp, synthetic construct
  source 1..21: mol_type = other DNA; mol_type = other DNA
tactccaagatggggacaaat

SEQ ID NO: 26231 - DNA, 21 bp, synthetic construct
  source 1..21: mol_type = other DNA; mol_type = other DNA
agggatggtatgagcgcttgg

SEQ ID NO: 26232 - DNA, 21 bp, synthetic construct
  source 1..21: mol_type = other DNA; mol_type = other DNA
agggaagattttgtaaagtat

SEQ ID NO: 26233 - DNA, 21 bp, synthetic construct
  source 1..21: mol_type = other DNA; mol_type = other DNA
ctacaccgtatgagtccagac

SEQ ID NO: 26234 - DNA, 21 bp, synthetic construct
  source 1..21: mol_type = other DNA; mol_type = other DNA
tacgcacgcacaggcgtcaac

SEQ ID NO: 26235 - DNA, 21 bp, synthetic construct
  source 1..21: mol_type = other DNA; mol_type = other DNA
tattttagcggaattcacagt

SEQ ID NO: 26236 - DNA, 21 bp, synthetic construct
  source 1..21: mol_type = other DNA; mol_type = other DNA
atacataggctaagtccggac

SEQ ID NO: 26237 - DNA, 21 bp, synthetic construct
  source 1..21: mol_type = other DNA; mol_type = other DNA
ttagcgaaaacgggcatgaac

SEQ ID NO: 26238 - DNA, 21 bp, synthetic construct
  source 1..21: mol_type = other DNA; mol_type = other DNA
tacgttagatcagacgtacac

SEQ ID NO: 26239 - DNA, 21 bp, synthetic construct
  source 1..21: mol_type = other DNA; mol_type = other DNA
agaacgagtacacatggagtt

SEQ ID NO: 26240 - DNA, 21 bp, synthetic construct
  source 1..21: mol_type = other DNA; mol_type = other DNA
ttgtgtgctgatccaagccgg

SEQ ID NO: 26241 - DNA, 21 bp, synthetic construct
  source 1..21: mol_type = other DNA; mol_type = other DNA
tggtggtccggtatacccatg

SEQ ID NO: 26242 - DNA, 21 bp, synthetic construct
  source 1..21: mol_type = other DNA; mol_type = other DNA
gtagacgaatggagtaccttc

SEQ ID NO: 26243 - DNA, 21 bp, synthetic construct
  source 1..21: mol_type = other DNA; mol_type = other DNA
ttcttcagcgggatcattgcg

SEQ ID NO: 26244 - DNA, 21 bp, synthetic construct
  source 1..21: mol_type = other DNA; mol_type = other DNA
taccatagactatcaaacgac

SEQ ID NO: 26245 - DNA, 21 bp, synthetic construct
  source 1..21: mol_type = other DNA; mol_type = other DNA
tacagtcgtctcaacaactta

SEQ ID NO: 26246 - DNA, 21 bp, synthetic construct
  source 1..21: mol_type = other DNA; mol_type = other DNA
tgtgctcctaggctccacgag

SEQ ID NO: 26247 - DNA, 21 bp, synthetic construct
  source 1..21: mol_type = other DNA; mol_type = other DNA
tattactccggaatagccgca

SEQ ID NO: 26248 - DNA, 21 bp, synthetic construct
  source 1..21: mol_type = other DNA; mol_type = other DNA
ggaggcgccactagtagttgg

SEQ ID NO: 26249 - DNA, 21 bp, synthetic construct
  source 1..21: mol_type = other DNA; mol_type = other DNA
tactcacgcgttgctccagac

SEQ ID NO: 26250 - DNA, 21 bp, synthetic construct
  source 1..21: mol_type = other DNA; mol_type = other DNA
ttcgttaaaagtcagcctggt

SEQ ID NO: 26251 - DNA, 21 bp, synthetic construct
  source 1..21: mol_type = other DNA; mol_type = other DNA
tattcgaggcttaacgatccg

SEQ ID NO: 26252 - DNA, 21 bp, synthetic construct
  source 1..21: mol_type = other DNA; mol_type = other DNA
ctctgtagaccctgctccgtc

SEQ ID NO: 26253 - DNA, 21 bp, synthetic construct
  source 1..21: mol_type = other DNA; mol_type = other DNA
gacatggcaacaagtacttgg

SEQ ID NO: 26254 - DNA, 21 bp, synthetic construct
  source 1..21: mol_type = other DNA; mol_type = other DNA
aaagatgatttcgtgagtttt

SEQ ID NO: 26255 - DNA, 21 bp, synthetic construct
  source 1..21: mol_type = other DNA; mol_type = other DNA
tatttctcaggtatcactggt

SEQ ID NO: 26256 - DNA, 21 bp, synthetic construct
  source 1..21: mol_type = other DNA; mol_type = other DNA
gacatgggctcaagtaactgg

SEQ ID NO: 26257 - DNA, 21 bp, synthetic construct
  source 1..21: mol_type = other DNA; mol_type = other DNA
tactttagtggcatacagcat

SEQ ID NO: 26258 - DNA, 21 bp, synthetic construct
  source 1..21: mol_type = other DNA; mol_type = other DNA
tacagcaagttaaacacacat

SEQ ID NO: 26259 - DNA, 21 bp, synthetic construct
  source 1..21: mol_type = other DNA; mol_type = other DNA
ttcagcagaattgggatgaat

SEQ ID NO: 26260 - DNA, 21 bp, synthetic construct
  source 1..21: mol_type = other DNA; mol_type = other DNA
catacttcgacgaacggcata

SEQ ID NO: 26261 - DNA, 21 bp, synthetic construct
  source 1..21: mol_type = other DNA; mol_type = other DNA
tattggaccggcgtgagtgat

SEQ ID NO: 26262 - DNA, 21 bp, synthetic construct
  source 1..21: mol_type = other DNA; mol_type = other DNA
ttatgcaagccttgcttggaa

SEQ ID NO: 26263 - DNA, 21 bp, synthetic construct
  source 1..21: mol_type = other DNA; mol_type = other DNA
gagttagacagtcgcgagtgg

SEQ ID NO: 26264 - DNA, 21 bp, synthetic construct
  source 1..21: mol_type = other DNA; mol_type = other DNA
agggacgactgggtgaagtgg

SEQ ID NO: 26265 - DNA, 21 bp, synthetic construct
  source 1..21: mol_type = other DNA; mol_type = other DNA
tatgtgagatcagacttccgc

SEQ ID NO: 26266 - DNA, 21 bp, synthetic construct
  source 1..21: mol_type = other DNA; mol_type = other DNA
tacttctcgggtattccggtg

SEQ ID NO: 26267 - DNA, 21 bp, synthetic construct
  source 1..21: mol_type = other DNA; mol_type = other DNA
tacttcagcggaattatgcca

SEQ ID NO: 26268 - DNA, 21 bp, synthetic construct
  source 1..21: mol_type = other DNA; mol_type = other DNA
tactttactggcgtcgcccaa

SEQ ID NO: 26269 - DNA, 21 bp, synthetic construct
  source 1..21: mol_type = other DNA; mol_type = other DNA
ggctcagctacgagtacttgg

SEQ ID NO: 26270 - DNA, 21 bp, synthetic construct
  source 1..21: mol_type = other DNA; mol_type = other DNA
tattggacagggatgctagat

SEQ ID NO: 26271 - DNA, 21 bp, synthetic construct
  source 1..21: mol_type = other DNA; mol_type = other DNA
taccatagattaggggaagat

SEQ ID NO: 26272 - DNA, 21 bp, synthetic construct
  source 1..21: mol_type = other DNA; mol_type = other DNA
agagggatggatgtgtaccct

SEQ ID NO: 26273 - DNA, 21 bp, synthetic construct
  source 1..21: mol_type = other DNA; mol_type = other DNA
tatagtcgtcttggtgaaaat

SEQ ID NO: 26274 - DNA, 21 bp, synthetic construct
  source 1..21: mol_type = other DNA; mol_type = other DNA
tcgcggtccaccaacggtgta

SEQ ID NO: 26275 - DNA, 21 bp, synthetic construct
  source 1..21: mol_type = other DNA; mol_type = other DNA
tactggacagggatggtggat

SEQ ID NO: 26276 - DNA, 21 bp, synthetic construct
  source 1..21: mol_type = other DNA; mol_type = other DNA
gtagaaagtgtgaacggcgta

SEQ ID NO: 26277 - DNA, 21 bp, synthetic construct
  source 1..21: mol_type = other DNA; mol_type = other DNA
tatgctcgcctaggactaaac

SEQ ID NO: 26278 - DNA, 21 bp, synthetic construct
  source 1..21: mol_type = other DNA; mol_type = other DNA
tacgtgagaagcgacagtctc

SEQ ID NO: 26279 - DNA, 21 bp, synthetic construct
  source 1..21: mol_type = other DNA; mol_type = other DNA
tattggactgggactgtggcg

SEQ ID NO: 26280 - DNA, 21 bp, synthetic construct
  source 1..21: mol_type = other DNA; mol_type = other DNA
actaagtggggggacgcggcc

SEQ ID NO: 26281 - DNA, 21 bp, synthetic construct
  source 1..21: mol_type = other DNA; mol_type = other DNA
tacgtgaaaagtcaaacgatt

SEQ ID NO: 26282 - DNA, 21 bp, synthetic construct
  source 1..21: mol_type = other DNA; mol_type = other DNA
cgtgagggtacctcaaagtgg

SEQ ID NO: 26283 - DNA, 21 bp, synthetic construct
  source 1..21: mol_type = other DNA; mol_type = other DNA
agagaaccgggtgtgcgatgg

SEQ ID NO: 26284 - DNA, 21 bp, synthetic construct
  source 1..21: mol_type = other DNA; mol_type = other DNA
tactcaaaaatgggatacaac

SEQ ID NO: 26285 - DNA, 21 bp, synthetic construct
  source 1..21: mol_type = other DNA; mol_type = other DNA
tacagtagagttcagcctgat

SEQ ID NO: 26286 - DNA, 21 bp, synthetic construct
  source 1..21: mol_type = other DNA; mol_type = other DNA
tgcaaaccacacccgcttctc

SEQ ID NO: 26287 - DNA, 21 bp, synthetic construct
  source 1..21: mol_type = other DNA; mol_type = other DNA
aatatgggaagccgtgattgg

SEQ ID NO: 26288 - DNA, 21 bp, synthetic construct
  source 1..21: mol_type = other DNA; mol_type = other DNA
catagccgactcaatattgtt

SEQ ID NO: 26289 - DNA, 21 bp, synthetic construct
  source 1..21: mol_type = other DNA; mol_type = other DNA
cttgcgaaaaccggaaccaat

SEQ ID NO: 26290 - DNA, 21 bp, synthetic construct
  source 1..21: mol_type = other DNA; mol_type = other DNA
ggggatggaaccaagtgtgga

SEQ ID NO: 26291 - DNA, 21 bp, synthetic construct
  source 1..21: mol_type = other DNA; mol_type = other DNA
tacactcgacttgaccctcat

SEQ ID NO: 26292 - DNA, 21 bp, synthetic construct
  source 1..21: mol_type = other DNA; mol_type = other DNA
tattggtcgggagtacctgag

SEQ ID NO: 26293 - DNA, 21 bp, synthetic construct
  source 1..21: mol_type = other DNA; mol_type = other DNA
tatgtgaggtcacagacggac

SEQ ID NO: 26294 - DNA, 21 bp, synthetic construct
  source 1..21: mol_type = other DNA; mol_type = other DNA
tatgcaagactaggcctgaat

SEQ ID NO: 26295 - DNA, 21 bp, synthetic construct
  source 1..21: mol_type = other DNA; mol_type = other DNA
atggatgattttacagtctac

SEQ ID NO: 26296 - DNA, 21 bp, synthetic construct
  source 1..21: mol_type = other DNA; mol_type = other DNA
tatgtacgatcggatcccaga

SEQ ID NO: 26297 - DNA, 21 bp, synthetic construct
  source 1..21: mol_type = other DNA; mol_type = other DNA
gtggctggtaaaggttgtggc

SEQ ID NO: 26298 - DNA, 21 bp, synthetic construct
  source 1..21: mol_type = other DNA; mol_type = other DNA
tactttagtggacgtgctgag

SEQ ID NO: 26299 - DNA, 21 bp, synthetic construct
  source 1..21: mol_type = other DNA; mol_type = other DNA
tattttgccgggagatttgat

SEQ ID NO: 26300 - DNA, 21 bp, synthetic construct
  source 1..21: mol_type = other DNA; mol_type = other DNA
tacagtagattgcaaccgctc

SEQ ID NO: 26301 - DNA, 21 bp, synthetic construct
  source 1..21: mol_type = other DNA; mol_type = other DNA
aaggatgattatcagacctgg

SEQ ID NO: 26302 - DNA, 21 bp, synthetic construct
  source 1..21: mol_type = other DNA; mol_type = other DNA
cgggaagaggccgtctcctgg

SEQ ID NO: 26303 - DNA, 21 bp, synthetic construct
  source 1..21: mol_type = other DNA; mol_type = other DNA
tacagtaagatgaaccataac

SEQ ID NO: 26304 - DNA, 21 bp, synthetic construct
  source 1..21: mol_type = other DNA; mol_type = other DNA
aaagacggctattccatctat

SEQ ID NO: 26305 - DNA, 21 bp, synthetic construct
  source 1..21: mol_type = other DNA; mol_type = other DNA
cgaaatgaatttacgagttgg

SEQ ID NO: 26306 - DNA, 21 bp, synthetic construct
  source 1..21: mol_type = other DNA; mol_type = other DNA
tactcacggttgggggaagac

SEQ ID NO: 26307 - DNA, 21 bp, synthetic construct
  source 1..21: mol_type = other DNA; mol_type = other DNA
tacagtaggctgtcgccgaac

SEQ ID NO: 26308 - DNA, 21 bp, synthetic construct
  source 1..21: mol_type = other DNA; mol_type = other DNA
gacggtgctacctcgagatgg

SEQ ID NO: 26309 - DNA, 21 bp, synthetic construct
  source 1..21: mol_type = other DNA; mol_type = other DNA
tattggacgggcaaggttgag

SEQ ID NO: 26310 - DNA, 21 bp, synthetic construct
  source 1..21: mol_type = other DNA; mol_type = other DNA
ggtgacgaatacatgccattc

SEQ ID NO: 26311 - DNA, 21 bp, synthetic construct
  source 1..21: mol_type = other DNA; mol_type = other DNA
gtccccgattacgtcaagtac

SEQ ID NO: 26312 - DNA, 21 bp, synthetic construct
  source 1..21: mol_type = other DNA; mol_type = other DNA
tactcccgattacacatcgat

SEQ ID NO: 26313 - DNA, 21 bp, synthetic construct
  source 1..21: mol_type = other DNA; mol_type = other DNA
tactctcgcattggtccttgc

SEQ ID NO: 26314 - DNA, 21 bp, synthetic construct
  source 1..21: mol_type = other DNA; mol_type = other DNA
gggggagatggtagtcattgg

SEQ ID NO: 26315 - DNA, 21 bp, synthetic construct
  source 1..21: mol_type = other DNA; mol_type = other DNA
tattggacggggatgatagag

SEQ ID NO: 26316 - DNA, 21 bp, synthetic construct
  source 1..21: mol_type = other DNA; mol_type = other DNA
ttcggtggcgggttatttgta

SEQ ID NO: 26317 - DNA, 21 bp, synthetic construct
  source 1..21: mol_type = other DNA; mol_type = other DNA
cacatggccgatagaggttgg

SEQ ID NO: 26318 - DNA, 21 bp, synthetic construct
  source 1..21: mol_type = other DNA; mol_type = other DNA
tactcccgagttggcgaaaac

SEQ ID NO: 26319 - DNA, 21 bp, synthetic construct
  source 1..21: mol_type = other DNA; mol_type = other DNA
ctggcgaaggggggccacaat

SEQ ID NO: 26320 - DNA, 21 bp, synthetic construct
  source 1..21: mol_type = other DNA; mol_type = other DNA
tatttttccggaaccgttttc

SEQ ID NO: 26321 - DNA, 21 bp, synthetic construct
  source 1..21: mol_type = other DNA; mol_type = other DNA
gatatgggaagctccaattgg

SEQ ID NO: 26322 - DNA, 21 bp, synthetic construct
  source 1..21: mol_type = other DNA; mol_type = other DNA
tacagtaagatgaaccagaat

SEQ ID NO: 26323 - DNA, 21 bp, synthetic construct
  source 1..21: mol_type = other DNA; mol_type = other DNA
cataatagtacgaacggagtg

SEQ ID NO: 26324 - DNA, 21 bp, synthetic construct
  source 1..21: mol_type = other DNA; mol_type = other DNA
aaggacgactgggttaaatat

SEQ ID NO: 26325 - DNA, 21 bp, synthetic construct
  source 1..21: mol_type = other DNA; mol_type = other DNA
ttacaccgcctccatgttgac

SEQ ID NO: 26326 - DNA, 21 bp, synthetic construct
  source 1..21: mol_type = other DNA; mol_type = other DNA
tatgcaaagagcggaggcaat

SEQ ID NO: 26327 - DNA, 21 bp, synthetic construct
  source 1..21: mol_type = other DNA; mol_type = other DNA
ttttcaagaattggtcaaaat

SEQ ID NO: 26328 - DNA, 21 bp, synthetic construct
  source 1..21: mol_type = other DNA; mol_type = other DNA
tatttttccggacaggtgatg

SEQ ID NO: 26329 - DNA, 21 bp, synthetic construct
  source 1..21: mol_type = other DNA; mol_type = other DNA
attatggcgagtcaatcttgg

SEQ ID NO: 26330 - DNA, 21 bp, synthetic construct
  source 1..21: mol_type = other DNA; mol_type = other DNA
tacttttcgggtaggatggag

SEQ ID NO: 26331 - DNA, 21 bp, synthetic construct
  source 1..21: mol_type = other DNA; mol_type = other DNA
tatagcagggtcggcgatggg

SEQ ID NO: 26332 - DNA, 21 bp, synthetic construct
  source 1..21: mol_type = other DNA; mol_type = other DNA
attatggaagacagaggctgg

SEQ ID NO: 26333 - DNA, 21 bp, synthetic construct
  source 1..21: mol_type = other DNA; mol_type = other DNA
tattttacgggacgtgcggat

SEQ ID NO: 26334 - DNA, 21 bp, synthetic construct
  source 1..21: mol_type = other DNA; mol_type = other DNA
ctttggaacggagaaggaccg

SEQ ID NO: 26335 - DNA, 21 bp, synthetic construct
  source 1..21: mol_type = other DNA; mol_type = other DNA
ttcttcagcgggattattgaa

SEQ ID NO: 26336 - DNA, 21 bp, synthetic construct
  source 1..21: mol_type = other DNA; mol_type = other DNA
tactttacgggttatgtggaa

SEQ ID NO: 26337 - DNA, 21 bp, synthetic construct
  source 1..21: mol_type = other DNA; mol_type = other DNA
tggttttctggtatcaaagac

SEQ ID NO: 26338 - DNA, 21 bp, synthetic construct
  source 1..21: mol_type = other DNA; mol_type = other DNA
gtcgacgattacaatatttac

SEQ ID NO: 26339 - DNA, 21 bp, synthetic construct
  source 1..21: mol_type = other DNA; mol_type = other DNA
cgcacatcaaccaacggagta

SEQ ID NO: 26340 - DNA, 21 bp, synthetic construct
  source 1..21: mol_type = other DNA; mol_type = other DNA
agaagcgttagcgtcttcccc

SEQ ID NO: 26341 - DNA, 21 bp, synthetic construct
  source 1..21: mol_type = other DNA; mol_type = other DNA
tatgccagaggaggacctaat

SEQ ID NO: 26342 - DNA, 21 bp, synthetic construct
  source 1..21: mol_type = other DNA; mol_type = other DNA
agagacgagtacagcccatgg

SEQ ID NO: 26343 - DNA, 21 bp, synthetic construct
  source 1..21: mol_type = other DNA; mol_type = other DNA
tactccaggctcagtcccatg

SEQ ID NO: 26344 - DNA, 21 bp, synthetic construct
  source 1..21: mol_type = other DNA; mol_type = other DNA
tacacaaggcttgacaacgga

SEQ ID NO: 26345 - DNA, 21 bp, synthetic construct
  source 1..21: mol_type = other DNA; mol_type = other DNA
tattttacaggagttactcac

SEQ ID NO: 26346 - DNA, 21 bp, synthetic construct
  source 1..21: mol_type = other DNA; mol_type = other DNA
tgccttcgtgcccgaccagaa

SEQ ID NO: 26347 - DNA, 21 bp, synthetic construct
  source 1..21: mol_type = other DNA; mol_type = other DNA
tattttacagggcaacaggca

SEQ ID NO: 26348 - DNA, 21 bp, synthetic construct
  source 1..21: mol_type = other DNA; mol_type = other DNA
ttctttacgggacgtatagat

SEQ ID NO: 26349 - DNA, 21 bp, synthetic construct
  source 1..21: mol_type = other DNA; mol_type = other DNA
aaagatgatttcgtgtcgtat

SEQ ID NO: 26350 - DNA, 21 bp, synthetic construct
  source 1..21: mol_type = other DNA; mol_type = other DNA
tacttttcgggtatgcgcgat

SEQ ID NO: 26351 - DNA, 21 bp, synthetic construct
  source 1..21: mol_type = other DNA; mol_type = other DNA
atgctacctggctgtaagccg

SEQ ID NO: 26352 - DNA, 21 bp, synthetic construct
  source 1..21: mol_type = other DNA; mol_type = other DNA
cgaaatgaattttcgaccttc

SEQ ID NO: 26353 - DNA, 21 bp, synthetic construct
  source 1..21: mol_type = other DNA; mol_type = other DNA
ggagtggaaacatgcaaaccg

SEQ ID NO: 26354 - DNA, 21 bp, synthetic construct
  source 1..21: mol_type = other DNA; mol_type = other DNA
tacttctcaggaacgaccgaa

SEQ ID NO: 26355 - DNA, 21 bp, synthetic construct
  source 1..21: mol_type = other DNA; mol_type = other DNA
tacgtcagaagccagacgcta

SEQ ID NO: 26356 - DNA, 21 bp, synthetic construct
  source 1..21: mol_type = other DNA; mol_type = other DNA
cttagtaagcacaatttcaac

SEQ ID NO: 26357 - DNA, 21 bp, synthetic construct
  source 1..21: mol_type = other DNA; mol_type = other DNA
gttatgagtagccaattgtgg

SEQ ID NO: 26358 - DNA, 21 bp, synthetic construct
  source 1..21: mol_type = other DNA; mol_type = other DNA
ttcagcagggttggggttaac

SEQ ID NO: 26359 - DNA, 21 bp, synthetic construct
  source 1..21: mol_type = other DNA; mol_type = other DNA
ctctgcaaaccgtgtagcgag

SEQ ID NO: 26360 - DNA, 21 bp, synthetic construct
  source 1..21: mol_type = other DNA; mol_type = other DNA
tattacacagggattatagct

SEQ ID NO: 26361 - DNA, 21 bp, synthetic construct
  source 1..21: mol_type = other DNA; mol_type = other DNA
tacatgaaagacgcgtaccca

SEQ ID NO: 26362 - DNA, 21 bp, synthetic construct
  source 1..21: mol_type = other DNA; mol_type = other DNA
cgggaagaagaagttagatgg

SEQ ID NO: 26363 - DNA, 21 bp, synthetic construct
  source 1..21: mol_type = other DNA; mol_type = other DNA
tacgcccgcatcggcccaaat

SEQ ID NO: 26364 - DNA, 21 bp, synthetic construct
  source 1..21: mol_type = other DNA; mol_type = other DNA
agggatgcaaccagctcttgg

SEQ ID NO: 26365 - DNA, 21 bp, synthetic construct
  source 1..21: mol_type = other DNA; mol_type = other DNA
cgtgacggtgtaagtaggtgg

SEQ ID NO: 26366 - DNA, 21 bp, synthetic construct
  source 1..21: mol_type = other DNA; mol_type = other DNA
gatctccaatccagcgtctgg

SEQ ID NO: 26367 - DNA, 21 bp, synthetic construct
  source 1..21: mol_type = other DNA; mol_type = other DNA
tgcaagccatcaccctacccc

SEQ ID NO: 26368 - DNA, 21 bp, synthetic construct
  source 1..21: mol_type = other DNA; mol_type = other DNA
tatgcaaaaaatggatggaat

SEQ ID NO: 26369 - DNA, 21 bp, synthetic construct
  source 1..21: mol_type = other DNA; mol_type = other DNA
tattttagtggagtggtacgt

SEQ ID NO: 26370 - DNA, 21 bp, synthetic construct
  source 1..21: mol_type = other DNA; mol_type = other DNA
gttatgcagagtcgaacatgg

SEQ ID NO: 26371 - DNA, 21 bp, synthetic construct
  source 1..21: mol_type = other DNA; mol_type = other DNA
tacagtaagcacggtttaaat

SEQ ID NO: 26372 - DNA, 21 bp, synthetic construct
  source 1..21: mol_type = other DNA; mol_type = other DNA
tattattcgggcgtaaagctt

SEQ ID NO: 26373 - DNA, 21 bp, synthetic construct
  source 1..21: mol_type = other DNA; mol_type = other DNA
cgattaccaagcgtgtaccct

SEQ ID NO: 26374 - DNA, 21 bp, synthetic construct
  source 1..21: mol_type = other DNA; mol_type = other DNA
tattacactggaaaaattgac

SEQ ID NO: 26375 - DNA, 21 bp, synthetic construct
  source 1..21: mol_type = other DNA; mol_type = other DNA
agagacataagcgtgtttcct

SEQ ID NO: 26376 - DNA, 21 bp, synthetic construct
  source 1..21: mol_type = other DNA; mol_type = other DNA
aaagacgggtatacaagttgg

SEQ ID NO: 26377 - DNA, 21 bp, synthetic construct
  source 1..21: mol_type = other DNA; mol_type = other DNA
gtctggaagcctgagcctggc

SEQ ID NO: 26378 - DNA, 21 bp, synthetic construct
  source 1..21: mol_type = other DNA; mol_type = other DNA
tactctaggaacagctgtaat

SEQ ID NO: 26379 - DNA, 21 bp, synthetic construct
  source 1..21: mol_type = other DNA; mol_type = other DNA
tatgccagacctggtccaaac

SEQ ID NO: 26380 - DNA, 21 bp, synthetic construct
  source 1..21: mol_type = other DNA; mol_type = other DNA
ctaagcaagatgaatatcaat

SEQ ID NO: 26381 - DNA, 21 bp, synthetic construct
  source 1..21: mol_type = other DNA; mol_type = other DNA
tactggagtaaagtcctggat

SEQ ID NO: 26382 - DNA, 21 bp, synthetic construct
  source 1..21: mol_type = other DNA; mol_type = other DNA
tacttcaccgggctgcgagac

SEQ ID NO: 26383 - DNA, 21 bp, synthetic construct
  source 1..21: mol_type = other DNA; mol_type = other DNA
tactttgccggtaaacgagag

SEQ ID NO: 26384 - DNA, 21 bp, synthetic construct
  source 1..21: mol_type = other DNA; mol_type = other DNA
tacatcaagtacgacccctcg

SEQ ID NO: 26385 - DNA, 21 bp, synthetic construct
  source 1..21: mol_type = other DNA; mol_type = other DNA
ggatcggacggcgtccgctgg

SEQ ID NO: 26386 - DNA, 21 bp, synthetic construct
  source 1..21: mol_type = other DNA; mol_type = other DNA
tatgtccgcagcgatactcgc

SEQ ID NO: 26387 - DNA, 21 bp, synthetic construct
  source 1..21: mol_type = other DNA; mol_type = other DNA
tatttcactggggccttcgat

SEQ ID NO: 26388 - DNA, 21 bp, synthetic construct
  source 1..21: mol_type = other DNA; mol_type = other DNA
atcttgagccacgccacgtgg

SEQ ID NO: 26389 - DNA, 21 bp, synthetic construct
  source 1..21: mol_type = other DNA; mol_type = other DNA
ttagcaagaggtggaccagat

SEQ ID NO: 26390 - DNA, 21 bp, synthetic construct
  source 1..21: mol_type = other DNA; mol_type = other DNA
tttgtcaagtcacaacccggg

SEQ ID NO: 26391 - DNA, 21 bp, synthetic construct
  source 1..21: mol_type = other DNA; mol_type = other DNA
tattcacgactgtcggatccg

SEQ ID NO: 26392 - DNA, 21 bp, synthetic construct
  source 1..21: mol_type = other DNA; mol_type = other DNA
ttgatgtccgacagaagctgg

SEQ ID NO: 26393 - DNA, 21 bp, synthetic construct
  source 1..21: mol_type = other DNA; mol_type = other DNA
tactttaccggtcgagtttcg

SEQ ID NO: 26394 - DNA, 21 bp, synthetic construct
  source 1..21: mol_type = other DNA; mol_type = other DNA
tatagtaaagccaaccagaat

SEQ ID NO: 26395 - DNA, 21 bp, synthetic construct
  source 1..21: mol_type = other DNA; mol_type = other DNA
ttgttagagtcaagcaagtgg

SEQ ID NO: 26396 - DNA, 21 bp, synthetic construct
  source 1..21: mol_type = other DNA; mol_type = other DNA
tattatactggtattagagac

SEQ ID NO: 26397 - DNA, 21 bp, synthetic construct
  source 1..21: mol_type = other DNA; mol_type = other DNA
tggttcagcgggattaaggat

SEQ ID NO: 26398 - DNA, 21 bp, synthetic construct
  source 1..21: mol_type = other DNA; mol_type = other DNA
gtcatggaagctcgcgcctgg

SEQ ID NO: 26399 - DNA, 21 bp, synthetic construct
  source 1..21: mol_type = other DNA; mol_type = other DNA
tattggacgggcgtccaagac

SEQ ID NO: 26400 - DNA, 21 bp, synthetic construct
  source 1..21: mol_type = other DNA; mol_type = other DNA
tacttcagtggggtaatgcat

SEQ ID NO: 26401 - DNA, 21 bp, synthetic construct
  source 1..21: mol_type = other DNA; mol_type = other DNA
atcatgtcgggtcgtacctgg

SEQ ID NO: 26402 - DNA, 21 bp, synthetic construct
  source 1..21: mol_type = other DNA; mol_type = other DNA
aagatgcaagacaggtcttgg

SEQ ID NO: 26403 - DNA, 21 bp, synthetic construct
  source 1..21: mol_type = other DNA; mol_type = other DNA
tacagtcgcctaaatgacaac

SEQ ID NO: 26404 - DNA, 21 bp, synthetic construct
  source 1..21: mol_type = other DNA; mol_type = other DNA
cgtgacgacttcacggggtgg

SEQ ID NO: 26405 - DNA, 21 bp, synthetic construct
  source 1..21: mol_type = other DNA; mol_type = other DNA
ctccatcgtatgtcaccggac

SEQ ID NO: 26406 - DNA, 21 bp, synthetic construct
  source 1..21: mol_type = other DNA; mol_type = other DNA
tacttctctggcgtccaatct

SEQ ID NO: 26407 - DNA, 21 bp, synthetic construct
  source 1..21: mol_type = other DNA; mol_type = other DNA
tacgtcaagagccagcagagt

SEQ ID NO: 26408 - DNA, 21 bp, synthetic construct
  source 1..21: mol_type = other DNA; mol_type = other DNA
tatttcactggaatgaccgac

SEQ ID NO: 26409 - DNA, 21 bp, synthetic construct
  source 1..21: mol_type = other DNA; mol_type = other DNA
tattttcacggcattcgcgaa

SEQ ID NO: 26410 - DNA, 21 bp, synthetic construct
  source 1..21: mol_type = other DNA; mol_type = other DNA
tacttttctggacagagagaa

SEQ ID NO: 26411 - DNA, 21 bp, synthetic construct
  source 1..21: mol_type = other DNA; mol_type = other DNA
tatagtcgtatcggtccacta

SEQ ID NO: 26412 - DNA, 21 bp, synthetic construct
  source 1..21: mol_type = other DNA; mol_type = other DNA
ctccaccggttaagcgcggga

SEQ ID NO: 26413 - DNA, 21 bp, synthetic construct
  source 1..21: mol_type = other DNA; mol_type = other DNA
atcatgtcgtcggctggctgg

SEQ ID NO: 26414 - DNA, 21 bp, synthetic construct
  source 1..21: mol_type = other DNA; mol_type = other DNA
cgcgacgagtatgtccactgg

SEQ ID NO: 26415 - DNA, 21 bp, synthetic construct
  source 1..21: mol_type = other DNA; mol_type = other DNA
tttttttcgggcattatcgct

SEQ ID NO: 26416 - DNA, 21 bp, synthetic construct
  source 1..21: mol_type = other DNA; mol_type = other DNA
tatagccgcatatctgataac

SEQ ID NO: 26417 - DNA, 21 bp, synthetic construct
  source 1..21: mol_type = other DNA; mol_type = other DNA
gacctcagaaccgccacgtgg

SEQ ID NO: 26418 - DNA, 21 bp, synthetic construct
  source 1..21: mol_type = other DNA; mol_type = other DNA
tatagccgggtaggagctaac

SEQ ID NO: 26419 - DNA, 21 bp, synthetic construct
  source 1..21: mol_type = other DNA; mol_type = other DNA
ggagaagattatgttcgttgg

SEQ ID NO: 26420 - DNA, 21 bp, synthetic construct
  source 1..21: mol_type = other DNA; mol_type = other DNA
gacttctacggcaaatacgca

SEQ ID NO: 26421 - DNA, 21 bp, synthetic construct
  source 1..21: mol_type = other DNA; mol_type = other DNA
tacttctctggccagataaag

SEQ ID NO: 26422 - DNA, 21 bp, synthetic construct
  source 1..21: mol_type = other DNA; mol_type = other DNA
agagaggaggaggtccggtgg

SEQ ID NO: 26423 - DNA, 21 bp, synthetic construct
  source 1..21: mol_type = other DNA; mol_type = other DNA
tatgccaagatcggctataac

SEQ ID NO: 26424 - DNA, 21 bp, synthetic construct
  source 1..21: mol_type = other DNA; mol_type = other DNA
gtactccagagctcagtttgg

SEQ ID NO: 26425 - DNA, 21 bp, synthetic construct
  source 1..21: mol_type = other DNA; mol_type = other DNA
tatttctcgggcaaaattaat

SEQ ID NO: 26426 - DNA, 21 bp, synthetic construct
  source 1..21: mol_type = other DNA; mol_type = other DNA
tactttcatgggaaattagac

SEQ ID NO: 26427 - DNA, 21 bp, synthetic construct
  source 1..21: mol_type = other DNA; mol_type = other DNA
ttctctcgcctatcagctaac

SEQ ID NO: 26428 - DNA, 21 bp, synthetic construct
  source 1..21: mol_type = other DNA; mol_type = other DNA
ttgacctcgcgtgaggggatc

SEQ ID NO: 26429 - DNA, 21 bp, synthetic construct
  source 1..21: mol_type = other DNA; mol_type = other DNA
tactttacgggaaggatggat

SEQ ID NO: 26430 - DNA, 21 bp, synthetic construct
  source 1..21: mol_type = other DNA; mol_type = other DNA
agagatgactttcatatttac

SEQ ID NO: 26431 - DNA, 21 bp, synthetic construct
  source 1..21: mol_type = other DNA; mol_type = other DNA
tatagtaagacggggtggaat

SEQ ID NO: 26432 - DNA, 21 bp, synthetic construct
  source 1..21: mol_type = other DNA; mol_type = other DNA
ggggaaaatgtcgtgaggtgg

SEQ ID NO: 26433 - DNA, 21 bp, synthetic construct
  source 1..21: mol_type = other DNA; mol_type = other DNA
tatgtgagaagcgatattggt

SEQ ID NO: 26434 - DNA, 21 bp, synthetic construct
  source 1..21: mol_type = other DNA; mol_type = other DNA
tcacactcgacaaatggaatt

SEQ ID NO: 26435 - DNA, 21 bp, synthetic construct
  source 1..21: mol_type = other DNA; mol_type = other DNA
cgaagtgagttcgctacctat

SEQ ID NO: 26436 - DNA, 21 bp, synthetic construct
  source 1..21: mol_type = other DNA; mol_type = other DNA
tttagtaagttaaacccaaac

SEQ ID NO: 26437 - DNA, 21 bp, synthetic construct
  source 1..21: mol_type = other DNA; mol_type = other DNA
tattttcaggggaggatcgct

SEQ ID NO: 26438 - DNA, 21 bp, synthetic construct
  source 1..21: mol_type = other DNA; mol_type = other DNA
tatgaaccgaactgcaaagag

SEQ ID NO: 26439 - DNA, 21 bp, synthetic construct
  source 1..21: mol_type = other DNA; mol_type = other DNA
ttagcgagaattggctgggat

SEQ ID NO: 26440 - DNA, 21 bp, synthetic construct
  source 1..21: mol_type = other DNA; mol_type = other DNA
tggttgaaaagccaaatcggt

SEQ ID NO: 26441 - DNA, 21 bp, synthetic construct
  source 1..21: mol_type = other DNA; mol_type = other DNA
agagaagaaatggtaagttgg

SEQ ID NO: 26442 - DNA, 21 bp, synthetic construct
  source 1..21: mol_type = other DNA; mol_type = other DNA
agaatggaggagagaagctgg

SEQ ID NO: 26443 - DNA, 21 bp, synthetic construct
  source 1..21: mol_type = other DNA; mol_type = other DNA
caaaacgactatgtcagttat

SEQ ID NO: 26444 - DNA, 21 bp, synthetic construct
  source 1..21: mol_type = other DNA; mol_type = other DNA
gtgcccagctcagttcgctgg

SEQ ID NO: 26445 - DNA, 21 bp, synthetic construct
  source 1..21: mol_type = other DNA; mol_type = other DNA
agggacgggacgtgcaagccc

SEQ ID NO: 26446 - DNA, 21 bp, synthetic construct
  source 1..21: mol_type = other DNA; mol_type = other DNA
tatagtagactacaacctacc

SEQ ID NO: 26447 - DNA, 21 bp, synthetic construct
  source 1..21: mol_type = other DNA; mol_type = other DNA
tatgctaggagcggggaaaac

SEQ ID NO: 26448 - DNA, 21 bp, synthetic construct
  source 1..21: mol_type = other DNA; mol_type = other DNA
gatatgagggatcgcatctgg

SEQ ID NO: 26449 - DNA, 21 bp, synthetic construct
  source 1..21: mol_type = other DNA; mol_type = other DNA
taccacgctcgaggcctaaac

SEQ ID NO: 26450 - DNA, 21 bp, synthetic construct
  source 1..21: mol_type = other DNA; mol_type = other DNA
tgcaaggcaacgattccaggc

SEQ ID NO: 26451 - DNA, 21 bp, synthetic construct
  source 1..21: mol_type = other DNA; mol_type = other DNA
tactttacaggtatgtatgac

SEQ ID NO: 26452 - DNA, 21 bp, synthetic construct
  source 1..21: mol_type = other DNA; mol_type = other DNA
tacgttcgctcggacgccatg

SEQ ID NO: 26453 - DNA, 21 bp, synthetic construct
  source 1..21: mol_type = other DNA; mol_type = other DNA
cacaactcaacaaacggaaga

SEQ ID NO: 26454 - DNA, 21 bp, synthetic construct
  source 1..21: mol_type = other DNA; mol_type = other DNA
gtcccggaggattgtagacct

SEQ ID NO: 26455 - DNA, 21 bp, synthetic construct
  source 1..21: mol_type = other DNA; mol_type = other DNA
agacctttaatggagaaatgc

SEQ ID NO: 26456 - DNA, 21 bp, synthetic construct
  source 1..21: mol_type = other DNA; mol_type = other DNA
tatcttaagtcgcaggaatac

SEQ ID NO: 26457 - DNA, 21 bp, synthetic construct
  source 1..21: mol_type = other DNA; mol_type = other DNA
aaggaggactacctgtcctgg

SEQ ID NO: 26458 - DNA, 21 bp, synthetic construct
  source 1..21: mol_type = other DNA; mol_type = other DNA
tatttcagcggagtgacatcg

SEQ ID NO: 26459 - DNA, 21 bp, synthetic construct
  source 1..21: mol_type = other DNA; mol_type = other DNA
gaaccagaaagcagagcctgg

SEQ ID NO: 26460 - DNA, 21 bp, synthetic construct
  source 1..21: mol_type = other DNA; mol_type = other DNA
aggggtggtgacgtctatccg

SEQ ID NO: 26461 - DNA, 21 bp, synthetic construct
  source 1..21: mol_type = other DNA; mol_type = other DNA
cgagatgagtttgtcacgtac

SEQ ID NO: 26462 - DNA, 21 bp, synthetic construct
  source 1..21: mol_type = other DNA; mol_type = other DNA
ccaatgggttcgcagacctgg

SEQ ID NO: 26463 - DNA, 21 bp, synthetic construct
  source 1..21: mol_type = other DNA; mol_type = other DNA
agtacttacgattcctacccg

SEQ ID NO: 26464 - DNA, 21 bp, synthetic construct
  source 1..21: mol_type = other DNA; mol_type = other DNA
aaagacgactaccattcctac

SEQ ID NO: 26465 - DNA, 21 bp, synthetic construct
  source 1..21: mol_type = other DNA; mol_type = other DNA
ttgtgggacggcacaagcccg

SEQ ID NO: 26466 - DNA, 21 bp, synthetic construct
  source 1..21: mol_type = other DNA; mol_type = other DNA
ttctccaggatgggtcctaat

SEQ ID NO: 26467 - DNA, 21 bp, synthetic construct
  source 1..21: mol_type = other DNA; mol_type = other DNA
tattcaaggattcagatagac

SEQ ID NO: 26468 - DNA, 21 bp, synthetic construct
  source 1..21: mol_type = other DNA; mol_type = other DNA
gaaaacggaggcggccgatgg

SEQ ID NO: 26469 - DNA, 21 bp, synthetic construct
  source 1..21: mol_type = other DNA; mol_type = other DNA
tacattaagtcccagagctgt

SEQ ID NO: 26470 - DNA, 21 bp, synthetic construct
  source 1..21: mol_type = other DNA; mol_type = other DNA
tttagcaagatgaatttcaat

SEQ ID NO: 26471 - DNA, 21 bp, synthetic construct
  source 1..21: mol_type = other DNA; mol_type = other DNA
aggagtgaatttatgccttac

SEQ ID NO: 26472 - DNA, 21 bp, synthetic construct
  source 1..21: mol_type = other DNA; mol_type = other DNA
tacgcacgcttggggttaaac

SEQ ID NO: 26473 - DNA, 21 bp, synthetic construct
  source 1..21: mol_type = other DNA; mol_type = other DNA
tattcacgtttgggcgataac

SEQ ID NO: 26474 - DNA, 21 bp, synthetic construct
  source 1..21: mol_type = other DNA; mol_type = other DNA
tttagtcgcatcggtactaat

SEQ ID NO: 26475 - DNA, 21 bp, synthetic construct
  source 1..21: mol_type = other DNA; mol_type = other DNA
actaagagcactaacgggata

SEQ ID NO: 26476 - DNA, 21 bp, synthetic construct
  source 1..21: mol_type = other DNA; mol_type = other DNA
tacttccaaggtcgcatagcg

SEQ ID NO: 26477 - DNA, 21 bp, synthetic construct
  source 1..21: mol_type = other DNA; mol_type = other DNA
tacagtcgactaggagacaat

SEQ ID NO: 26478 - DNA, 21 bp, synthetic construct
  source 1..21: mol_type = other DNA; mol_type = other DNA
tacgtcaaatcacagtgcagc

SEQ ID NO: 26479 - DNA, 21 bp, synthetic construct
  source 1..21: mol_type = other DNA; mol_type = other DNA
tatttccacggcaagctcgat

SEQ ID NO: 26480 - DNA, 21 bp, synthetic construct
  source 1..21: mol_type = other DNA; mol_type = other DNA
tatgtccgcagtgatgttcat

SEQ ID NO: 26481 - DNA, 21 bp, synthetic construct
  source 1..21: mol_type = other DNA; mol_type = other DNA
cacggttcaacaaatggggtt

SEQ ID NO: 26482 - DNA, 21 bp, synthetic construct
  source 1..21: mol_type = other DNA; mol_type = other DNA
tatcaccggcttagtccggta

SEQ ID NO: 26483 - DNA, 21 bp, synthetic construct
  source 1..21: mol_type = other DNA; mol_type = other DNA
agggatcctacggtgtttccc

SEQ ID NO: 26484 - DNA, 21 bp, synthetic construct
  source 1..21: mol_type = other DNA; mol_type = other DNA
tattttagtggacaaatggaa

SEQ ID NO: 26485 - DNA, 21 bp, synthetic construct
  source 1..21: mol_type = other DNA; mol_type = other DNA
tattttagcgggaaacatgac

SEQ ID NO: 26486 - DNA, 21 bp, synthetic construct
  source 1..21: mol_type = other DNA; mol_type = other DNA
ggtggagaatattcaacttgg

SEQ ID NO: 26487 - DNA, 21 bp, synthetic construct
  source 1..21: mol_type = other DNA; mol_type = other DNA
ctaagtcgcactgcgtatgat

SEQ ID NO: 26488 - DNA, 21 bp, synthetic construct
  source 1..21: mol_type = other DNA; mol_type = other DNA
tatttcagcggtaagcccaac

SEQ ID NO: 26489 - DNA, 21 bp, synthetic construct
  source 1..21: mol_type = other DNA; mol_type = other DNA
tattcgaggctaagtgagctg

SEQ ID NO: 26490 - DNA, 21 bp, synthetic construct
  source 1..21: mol_type = other DNA; mol_type = other DNA
tacttccacggtaaaatcgac

SEQ ID NO: 26491 - DNA, 21 bp, synthetic construct
  source 1..21: mol_type = other DNA; mol_type = other DNA
tactttgcagggcgaatggag

SEQ ID NO: 26492 - DNA, 21 bp, synthetic construct
  source 1..21: mol_type = other DNA; mol_type = other DNA
aaggacgagtacaagtattac

SEQ ID NO: 26493 - DNA, 21 bp, synthetic construct
  source 1..21: mol_type = other DNA; mol_type = other DNA
ggcggacctggctcccattgg

SEQ ID NO: 26494 - DNA, 21 bp, synthetic construct
  source 1..21: mol_type = other DNA; mol_type = other DNA
tatttcagcggaattatgcag

SEQ ID NO: 26495 - DNA, 21 bp, synthetic construct
  source 1..21: mol_type = other DNA; mol_type = other DNA
agatcggaaacggtatatgtc

SEQ ID NO: 26496 - DNA, 21 bp, synthetic construct
  source 1..21: mol_type = other DNA; mol_type = other DNA
tactttacgggagtccgctcg

SEQ ID NO: 26497 - DNA, 21 bp, synthetic construct
  source 1..21: mol_type = other DNA; mol_type = other DNA
ttttcgcgcttaggccttaat

SEQ ID NO: 26498 - DNA, 21 bp, synthetic construct
  source 1..21: mol_type = other DNA; mol_type = other DNA
tatttcgccggtaggatggaa

SEQ ID NO: 26499 - DNA, 21 bp, synthetic construct
  source 1..21: mol_type = other DNA; mol_type = other DNA
cgagaacccggagtccggtgg

SEQ ID NO: 26500 - DNA, 21 bp, synthetic construct
  source 1..21: mol_type = other DNA; mol_type = other DNA
gtagcgatggaaggcagagat

SEQ ID NO: 26501 - DNA, 21 bp, synthetic construct
  source 1..21: mol_type = other DNA; mol_type = other DNA
aagctaccgaattatggctac

SEQ ID NO: 26502 - DNA, 21 bp, synthetic construct
  source 1..21: mol_type = other DNA; mol_type = other DNA
ggagcgggaacttcaagatgg

SEQ ID NO: 26503 - DNA, 21 bp, synthetic construct
  source 1..21: mol_type = other DNA; mol_type = other DNA
gaaggaccgtcgcgtggatgg

SEQ ID NO: 26504 - DNA, 21 bp, synthetic construct
  source 1..21: mol_type = other DNA; mol_type = other DNA
tactttacgggccgcgcagat

SEQ ID NO: 26505 - DNA, 21 bp, synthetic construct
  source 1..21: mol_type = other DNA; mol_type = other DNA
tactttactggaaggcacgac

SEQ ID NO: 26506 - DNA, 21 bp, synthetic construct
  source 1..21: mol_type = other DNA; mol_type = other DNA
tatttcagtggaatatcgaaa

SEQ ID NO: 26507 - DNA, 21 bp, synthetic construct
  source 1..21: mol_type = other DNA; mol_type = other DNA
tgtaaaccgcagactgcgacc

SEQ ID NO: 26508 - DNA, 21 bp, synthetic construct
  source 1..21: mol_type = other DNA; mol_type = other DNA
ttgcaccgctctagcaacaat

SEQ ID NO: 26509 - DNA, 21 bp, synthetic construct
  source 1..21: mol_type = other DNA; mol_type = other DNA
tttactagcactaatggcatt

SEQ ID NO: 26510 - DNA, 21 bp, synthetic construct
  source 1..21: mol_type = other DNA; mol_type = other DNA
aaagatgattacagtgcctat

SEQ ID NO: 26511 - DNA, 21 bp, synthetic construct
  source 1..21: mol_type = other DNA; mol_type = other DNA
tgtgtcgaaggaagggctccc

SEQ ID NO: 26512 - DNA, 21 bp, synthetic construct
  source 1..21: mol_type = other DNA; mol_type = other DNA
cgtggcgaggaagtattcccg

SEQ ID NO: 26513 - DNA, 21 bp, synthetic construct
  source 1..21: mol_type = other DNA; mol_type = other DNA
tactcaaaggcgaatcaaaac

SEQ ID NO: 26514 - DNA, 21 bp, synthetic construct
  source 1..21: mol_type = other DNA; mol_type = other DNA
gcgggtgccgacagaggttgg

SEQ ID NO: 26515 - DNA, 21 bp, synthetic construct
  source 1..21: mol_type = other DNA; mol_type = other DNA
tatttcactggatacgttgag

SEQ ID NO: 26516 - DNA, 21 bp, synthetic construct
  source 1..21: mol_type = other DNA; mol_type = other DNA
tttacatccacaaatggggtg

SEQ ID NO: 26517 - DNA, 21 bp, synthetic construct
  source 1..21: mol_type = other DNA; mol_type = other DNA
gttgctagcaaaggcgcaggg

SEQ ID NO: 26518 - DNA, 21 bp, synthetic construct
  source 1..21: mol_type = other DNA; mol_type = other DNA
tattttagcggccgcatcgac

SEQ ID NO: 26519 - DNA, 21 bp, synthetic construct
  source 1..21: mol_type = other DNA; mol_type = other DNA
aaagatgattttactggcttt

SEQ ID NO: 26520 - DNA, 21 bp, synthetic construct
  source 1..21: mol_type = other DNA; mol_type = other DNA
tatttctcgggaacgcaagat

SEQ ID NO: 26521 - DNA, 21 bp, synthetic construct
  source 1..21: mol_type = other DNA; mol_type = other DNA
tacttttcaggggtagtcagg

SEQ ID NO: 26522 - DNA, 21 bp, synthetic construct
  source 1..21: mol_type = other DNA; mol_type = other DNA
cgggaggactacgtataccca

SEQ ID NO: 26523 - DNA, 21 bp, synthetic construct
  source 1..21: mol_type = other DNA; mol_type = other DNA
cgagacgaattcgtaaaatgg

SEQ ID NO: 26524 - DNA, 21 bp, synthetic construct
  source 1..21: mol_type = other DNA; mol_type = other DNA
aaggatggcacctcatactgg

SEQ ID NO: 26525 - DNA, 21 bp, synthetic construct
  source 1..21: mol_type = other DNA; mol_type = other DNA
tactttaccaatataaaagaa

SEQ ID NO: 26526 - DNA, 21 bp, synthetic construct
  source 1..21: mol_type = other DNA; mol_type = other DNA
atgcccaacgaaggctggttt

SEQ ID NO: 26527 - DNA, 21 bp, synthetic construct
  source 1..21: mol_type = other DNA; mol_type = other DNA
attatgtcgacaaatggtgta

SEQ ID NO: 26528 - DNA, 21 bp, synthetic construct
  source 1..21: mol_type = other DNA; mol_type = other DNA
gtaatgtcaactcacggagta

SEQ ID NO: 26529 - DNA, 21 bp, synthetic construct
  source 1..21: mol_type = other DNA; mol_type = other DNA
cgtgatggtgtgagcaaatgg

SEQ ID NO: 26530 - DNA, 21 bp, synthetic construct
  source 1..21: mol_type = other DNA; mol_type = other DNA
ggcaacgaattctcatcatgg

SEQ ID NO: 26531 - DNA, 21 bp, synthetic construct
  source 1..21: mol_type = other DNA; mol_type = other DNA
aaagaagactacaccacatgg

SEQ ID NO: 26532 - DNA, 21 bp, synthetic construct
  source 1..21: mol_type = other DNA; mol_type = other DNA
cccatggcgagtcttcaatgg

SEQ ID NO: 26533 - DNA, 21 bp, synthetic construct
  source 1..21: mol_type = other DNA; mol_type = other DNA
tattggtcaggaattaaagaa

SEQ ID NO: 26534 - DNA, 21 bp, synthetic construct
  source 1..21: mol_type = other DNA; mol_type = other DNA
tatgtcaaatcaggtcctccg

SEQ ID NO: 26535 - DNA, 21 bp, synthetic construct
  source 1..21: mol_type = other DNA; mol_type = other DNA
tacttctcaggaatcccgcat

SEQ ID NO: 26536 - DNA, 21 bp, synthetic construct
  source 1..21: mol_type = other DNA; mol_type = other DNA
tacgtccgttcagacattgga

SEQ ID NO: 26537 - DNA, 21 bp, synthetic construct
  source 1..21: mol_type = other DNA; mol_type = other DNA
ctcgcaaggacaggcattgat

SEQ ID NO: 26538 - DNA, 21 bp, synthetic construct
  source 1..21: mol_type = other DNA; mol_type = other DNA
tatttcagtggagtagttccc

SEQ ID NO: 26539 - DNA, 21 bp, synthetic construct
  source 1..21: mol_type = other DNA; mol_type = other DNA
tattttacgggagaggttgct

SEQ ID NO: 26540 - DNA, 21 bp, synthetic construct
  source 1..21: mol_type = other DNA; mol_type = other DNA
tacagtcgcttaagtgccatc

SEQ ID NO: 26541 - DNA, 21 bp, synthetic construct
  source 1..21: mol_type = other DNA; mol_type = other DNA
tatagcaagagtggagtcaat

SEQ ID NO: 26542 - DNA, 21 bp, synthetic construct
  source 1..21: mol_type = other DNA; mol_type = other DNA
agaacgtttgatgcctttcct

SEQ ID NO: 26543 - DNA, 21 bp, synthetic construct
  source 1..21: mol_type = other DNA; mol_type = other DNA
ctagcaaggggaggatacgac

SEQ ID NO: 26544 - DNA, 21 bp, synthetic construct
  source 1..21: mol_type = other DNA; mol_type = other DNA
tacaccagattaaaccccgac

SEQ ID NO: 26545 - DNA, 21 bp, synthetic construct
  source 1..21: mol_type = other DNA; mol_type = other DNA
tgtggctctaagacggggcat

SEQ ID NO: 26546 - DNA, 21 bp, synthetic construct
  source 1..21: mol_type = other DNA; mol_type = other DNA
tatttttcaggcacccgtgat

SEQ ID NO: 26547 - DNA, 21 bp, synthetic construct
  source 1..21: mol_type = other DNA; mol_type = other DNA
agcaactcaacaaacggcatt

SEQ ID NO: 26548 - DNA, 21 bp, synthetic construct
  source 1..21: mol_type = other DNA; mol_type = other DNA
tacagcagaatcggcgacaac

SEQ ID NO: 26549 - DNA, 21 bp, synthetic construct
  source 1..21: mol_type = other DNA; mol_type = other DNA
tatcataaatcgggtgataat

SEQ ID NO: 26550 - DNA, 21 bp, synthetic construct
  source 1..21: mol_type = other DNA; mol_type = other DNA
ggagtgccaggggtgatgtgg

SEQ ID NO: 26551 - DNA, 21 bp, synthetic construct
  source 1..21: mol_type = other DNA; mol_type = other DNA
ttctcgcgtttaggaattaat

SEQ ID NO: 26552 - DNA, 21 bp, synthetic construct
  source 1..21: mol_type = other DNA; mol_type = other DNA
tatgtaaagtctcaaggcatg

SEQ ID NO: 26553 - DNA, 21 bp, synthetic construct
  source 1..21: mol_type = other DNA; mol_type = other DNA
ctctgtaaaccttgcctcgag

SEQ ID NO: 26554 - DNA, 21 bp, synthetic construct
  source 1..21: mol_type = other DNA; mol_type = other DNA
tatttctcgggcagggccgaa

SEQ ID NO: 26555 - DNA, 21 bp, synthetic construct
  source 1..21: mol_type = other DNA; mol_type = other DNA
atgtgggacgggactgaggcg

SEQ ID NO: 26556 - DNA, 21 bp, synthetic construct
  source 1..21: mol_type = other DNA; mol_type = other DNA
tatagcaaactgaacaaaaat

SEQ ID NO: 26557 - DNA, 21 bp, synthetic construct
  source 1..21: mol_type = other DNA; mol_type = other DNA
tacgctagaacaagtatcaac

SEQ ID NO: 26558 - DNA, 21 bp, synthetic construct
  source 1..21: mol_type = other DNA; mol_type = other DNA
gtcatggcagacagattgtgg

SEQ ID NO: 26559 - DNA, 21 bp, synthetic construct
  source 1..21: mol_type = other DNA; mol_type = other DNA
tattttacagggaaggcccaa

SEQ ID NO: 26560 - DNA, 21 bp, synthetic construct
  source 1..21: mol_type = other DNA; mol_type = other DNA
tatttcacgaacatcaaggag

SEQ ID NO: 26561 - DNA, 21 bp, synthetic construct
  source 1..21: mol_type = other DNA; mol_type = other DNA
tattccaagatgggtataaac

SEQ ID NO: 26562 - DNA, 21 bp, synthetic construct
  source 1..21: mol_type = other DNA; mol_type = other DNA
tactcaccagggtgcaaagaa

SEQ ID NO: 26563 - DNA, 21 bp, synthetic construct
  source 1..21: mol_type = other DNA; mol_type = other DNA
tacttttctggtaagcatgat

SEQ ID NO: 26564 - DNA, 21 bp, synthetic construct
  source 1..21: mol_type = other DNA; mol_type = other DNA
ttcgcacgtacagggtttaat

SEQ ID NO: 26565 - DNA, 21 bp, synthetic construct
  source 1..21: mol_type = other DNA; mol_type = other DNA
ttctctaggctaggttataat

SEQ ID NO: 26566 - DNA, 21 bp, synthetic construct
  source 1..21: mol_type = other DNA; mol_type = other DNA
tacctaaaaagtcagttatac

SEQ ID NO: 26567 - DNA, 21 bp, synthetic construct
  source 1..21: mol_type = other DNA; mol_type = other DNA
tacgctaagtccaactataac

SEQ ID NO: 26568 - DNA, 21 bp, synthetic construct
  source 1..21: mol_type = other DNA; mol_type = other DNA
acagatgagtggtctccctac

SEQ ID NO: 26569 - DNA, 21 bp, synthetic construct
  source 1..21: mol_type = other DNA; mol_type = other DNA
tattggactggggtccctgat

SEQ ID NO: 26570 - DNA, 21 bp, synthetic construct
  source 1..21: mol_type = other DNA
tggtggtctgggatcactgat

SEQ ID NO: 26571 - DNA, 21 bp, synthetic construct
  source 1..21: mol_type = other DNA; mol_type = other DNA
atgtgggatggtaccggacct

SEQ ID NO: 26572 - DNA, 21 bp, synthetic construct
  source 1..21: mol_type = other DNA; mol_type = other DNA
tttgcaaggcaaggtccgaac

SEQ ID NO: 26573 - DNA, 21 bp, synthetic construct
  source 1..21: mol_type = other DNA; mol_type = other DNA
tacttcaccggggaagtggcc

SEQ ID NO: 26574 - DNA, 21 bp, synthetic construct
  source 1..21: mol_type = other DNA; mol_type = other DNA
aaagacggatatagtgtttac

SEQ ID NO: 26575 - DNA, 21 bp, synthetic construct
  source 1..21: mol_type = other DNA; mol_type = other DNA
aaagacggacattccctatgg

SEQ ID NO: 26576 - DNA, 21 bp, synthetic construct
  source 1..21: mol_type = other DNA; mol_type = other DNA
agagacgccgaagtatatccc

SEQ ID NO: 26577 - DNA, 21 bp, synthetic construct
  source 1..21: mol_type = other DNA; mol_type = other DNA
ttcagtcgaataggcgcaaat

SEQ ID NO: 26578 - DNA, 21 bp, synthetic construct
  source 1..21: mol_type = other DNA; mol_type = other DNA
aatatggaaagccgggattgg

SEQ ID NO: 26579 - DNA, 21 bp, synthetic construct
  source 1..21: mol_type = other DNA; mol_type = other DNA
ttgtgccaaccatgcctcact

SEQ ID NO: 26580 - DNA, 21 bp, synthetic construct
  source 1..21: mol_type = other DNA; mol_type = other DNA
tactttatgggtaaacaagat

SEQ ID NO: 26581 - DNA, 21 bp, synthetic construct
  source 1..21: mol_type = other DNA; mol_type = other DNA
ctgatcagaccttgctctgaa

SEQ ID NO: 26582 - DNA, 21 bp, synthetic construct
  source 1..21: mol_type = other DNA; mol_type = other DNA
acccgagagggggatgcgcct

SEQ ID NO: 26583 - DNA, 21 bp, synthetic construct
  source 1..21: mol_type = other DNA; mol_type = other DNA
tactctagactaggaaaggat

SEQ ID NO: 26584 - DNA, 21 bp, synthetic construct
  source 1..21: mol_type = other DNA; mol_type = other DNA
tgcaaagctccatcggccggt

SEQ ID NO: 26585 - DNA, 21 bp, synthetic construct
  source 1..21: mol_type = other DNA; mol_type = other DNA
catgacagtaccaatggtagg

SEQ ID NO: 26586 - DNA, 21 bp, synthetic construct
  source 1..21: mol_type = other DNA; mol_type = other DNA
tatgtaagatcagatacacat

SEQ ID NO: 26587 - DNA, 21 bp, synthetic construct
  source 1..21: mol_type = other DNA; mol_type = other DNA
tactttacggggcagagagat

SEQ ID NO: 26588 - DNA, 21 bp, synthetic construct
  source 1..21: mol_type = other DNA; mol_type = other DNA
tacttccatgggatcagagag

SEQ ID NO: 26589 - DNA, 21 bp, synthetic construct
  source 1..21: mol_type = other DNA; mol_type = other DNA
gggggtgcaacctcacggtgg

SEQ ID NO: 26590 - DNA, 21 bp, synthetic construct
  source 1..21: mol_type = other DNA; mol_type = other DNA
agattgtacgacgcatatcaa

SEQ ID NO: 26591 - DNA, 21 bp, synthetic construct
  source 1..21: mol_type = other DNA; mol_type = other DNA
tatgacaaaggaacgtgggat

SEQ ID NO: 26592 - DNA, 21 bp, synthetic construct
  source 1..21: mol_type = other DNA; mol_type = other DNA
gggggaccgtcgagtacctgg

SEQ ID NO: 26593 - DNA, 21 bp, synthetic construct
  source 1..21: mol_type = other DNA; mol_type = other DNA
ccttacgcacgttcggagatg

SEQ ID NO: 26594 - DNA, 21 bp, synthetic construct
  source 1..21: mol_type = other DNA; mol_type = other DNA
agtatggaatcgagaacgtgg

SEQ ID NO: 26595 - DNA, 21 bp, synthetic construct
  source 1..21: mol_type = other DNA; mol_type = other DNA
tatgccaaaagtaactataat

SEQ ID NO: 26596 - DNA, 21 bp, synthetic construct
  source 1..21: mol_type = other DNA; mol_type = other DNA
attatggggaagtgccccgga

SEQ ID NO: 26597 - DNA, 21 bp, synthetic construct
  source 1..21: mol_type = other DNA; mol_type = other DNA
agggacgagctaactagttgg

SEQ ID NO: 26598 - DNA, 21 bp, synthetic construct
  source 1..21: mol_type = other DNA; mol_type = other DNA
cgcatggaggatcgtatctgg

SEQ ID NO: 26599 - DNA, 21 bp, synthetic construct
  source 1..21: mol_type = other DNA; mol_type = other DNA
tatgcgcgaaccaacccaaat

SEQ ID NO: 26600 - DNA, 21 bp, synthetic construct
  source 1..21: mol_type = other DNA; mol_type = other DNA
tacagccgccttcaggaaaac

SEQ ID NO: 26601 - DNA, 21 bp, synthetic construct
  source 1..21: mol_type = other DNA; mol_type = other DNA
cgggagagcacccatggtgtg

SEQ ID NO: 26602 - DNA, 21 bp, synthetic construct
  source 1..21: mol_type = other DNA; mol_type = other DNA
tattcaaaacagggtcataat

SEQ ID NO: 26603 - DNA, 21 bp, synthetic construct
  source 1..21: mol_type = other DNA; mol_type = other DNA
tttcacagattgagtgtagat

SEQ ID NO: 26604 - DNA, 21 bp, synthetic construct
  source 1..21: mol_type = other DNA; mol_type = other DNA
tatacaagattgcagacaggc

SEQ ID NO: 26605 - DNA, 21 bp, synthetic construct
  source 1..21: mol_type = other DNA; mol_type = other DNA
gctcggtcgactaatggcgtg

SEQ ID NO: 26606 - DNA, 21 bp, synthetic construct
  source 1..21: mol_type = other DNA; mol_type = other DNA
taccaccgactgagtgagagc

SEQ ID NO: 26607 - DNA, 21 bp, synthetic construct
  source 1..21: mol_type = other DNA; mol_type = other DNA
tactttactaatatacgcgag

SEQ ID NO: 26608 - DNA, 21 bp, synthetic construct
  source 1..21: mol_type = other DNA; mol_type = other DNA
tgtaagcctggcgcagggatt

SEQ ID NO: 26609 - DNA, 21 bp, synthetic construct
  source 1..21: mol_type = other DNA; mol_type = other DNA
tatttctctggtaaacaagat

SEQ ID NO: 26610 - DNA, 21 bp, synthetic construct
  source 1..21: mol_type = other DNA; mol_type = other DNA
tatttctctggtgttcaacaa

SEQ ID NO: 26611 - DNA, 21 bp, synthetic construct
  source 1..21: mol_type = other DNA; mol_type = other DNA
tactttagcgggattacagta

SEQ ID NO: 26612 - DNA, 21 bp, synthetic construct
  source 1..21: mol_type = other DNA; mol_type = other DNA
tactggacagggacaaccgct

SEQ ID NO: 26613 - DNA, 21 bp, synthetic construct
  source 1..21: mol_type = other DNA; mol_type = other DNA
ttgagcagactccagatgaac

SEQ ID NO: 26614 - DNA, 21 bp, synthetic construct
  source 1..21: mol_type = other DNA; mol_type = other DNA
tatagtaggcttcacatagac

SEQ ID NO: 26615 - DNA, 21 bp, synthetic construct
  source 1..21: mol_type = other DNA; mol_type = other DNA
ggagcagaacacgttaggtgg

SEQ ID NO: 26616 - DNA, 21 bp, synthetic construct
  source 1..21: mol_type = other DNA; mol_type = other DNA
catactgacgatagctatccg

SEQ ID NO: 26617 - DNA, 21 bp, synthetic construct
  source 1..21: mol_type = other DNA; mol_type = other DNA
aaggatgaatacttaacgttt

SEQ ID NO: 26618 - DNA, 21 bp, synthetic construct
  source 1..21: mol_type = other DNA; mol_type = other DNA
tactcaaaaagcaatgacaac

SEQ ID NO: 26619 - DNA, 21 bp, synthetic construct
  source 1..21: mol_type = other DNA; mol_type = other DNA
gtcgcaagggaagggtgggat

SEQ ID NO: 26620 - DNA, 21 bp, synthetic construct
  source 1..21: mol_type = other DNA; mol_type = other DNA
tacggaaaaggaacatgggat

SEQ ID NO: 26621 - DNA, 21 bp, synthetic construct
  source 1..21: mol_type = other DNA; mol_type = other DNA
tattggacaggaatgcttgag

SEQ ID NO: 26622 - DNA, 21 bp, synthetic construct
  source 1..21: mol_type = other DNA; mol_type = other DNA
atgctcagcgatcgcaaatgg

SEQ ID NO: 26623 - DNA, 21 bp, synthetic construct
  source 1..21: mol_type = other DNA; mol_type = other DNA
ttttcaagagtgggggataac

SEQ ID NO: 26624 - DNA, 21 bp, synthetic construct
  source 1..21: mol_type = other DNA; mol_type = other DNA
tatagcaagcacaacttgaat

SEQ ID NO: 26625 - DNA, 21 bp, synthetic construct
  source 1..21: mol_type = other DNA; mol_type = other DNA
gctaggcagtgtcttcctatg

SEQ ID NO: 26626 - DNA, 21 bp, synthetic construct
  source 1..21: mol_type = other DNA; mol_type = other DNA
tttagtagagtaggttacaac

SEQ ID NO: 26627 - DNA, 21 bp, synthetic construct
  source 1..21: mol_type = other DNA; mol_type = other DNA
cgccttgaccacgtctttcca

SEQ ID NO: 26628 - DNA, 21 bp, synthetic construct
  source 1..21: mol_type = other DNA; mol_type = other DNA
cgcgacggaagtagtagttgg

SEQ ID NO: 26629 - DNA, 21 bp, synthetic construct
  source 1..21: mol_type = other DNA; mol_type = other DNA
tacgttaggtctgacaccaga

SEQ ID NO: 26630 - DNA, 21 bp, synthetic construct
  source 1..21: mol_type = other DNA; mol_type = other DNA
cttagccggattcaaacgaat

SEQ ID NO: 26631 - DNA, 21 bp, synthetic construct
  source 1..21: mol_type = other DNA; mol_type = other DNA
tatgtcaagagtggaccgatg

SEQ ID NO: 26632 - DNA, 21 bp, synthetic construct
  source 1..21: mol_type = other DNA; mol_type = other DNA
tacagtagatgcagtgataat

SEQ ID NO: 26633 - DNA, 21 bp, synthetic construct
  source 1..21: mol_type = other DNA; mol_type = other DNA
tgcaaaccgcaaagtggtgca

SEQ ID NO: 26634 - DNA, 21 bp, synthetic construct
  source 1..21: mol_type = other DNA; mol_type = other DNA
tacttttcgggaactgtcagc

SEQ ID NO: 26635 - DNA, 21 bp, synthetic construct
  source 1..21: mol_type = other DNA; mol_type = other DNA
tatagccgcttaaacatcaac

SEQ ID NO: 26636 - DNA, 21 bp, synthetic construct
  source 1..21: mol_type = other DNA; mol_type = other DNA
tattggagtggggtgatcgat

SEQ ID NO: 26637 - DNA, 21 bp, synthetic construct
  source 1..21: mol_type = other DNA; mol_type = other DNA
gtaccagattgggtcgagttc

SEQ ID NO: 26638 - DNA, 21 bp, synthetic construct
  source 1..21: mol_type = other DNA; mol_type = other DNA
ccgtatgccaaatcacgcgac

SEQ ID NO: 26639 - DNA, 21 bp, synthetic construct
  source 1..21: mol_type = other DNA; mol_type = other DNA
tatttcacgggtcagattaac

SEQ ID NO: 26640 - DNA, 21 bp, synthetic construct
  source 1..21: mol_type = other DNA; mol_type = other DNA
ggagggcccagctcaacatgg

SEQ ID NO: 26641 - DNA, 21 bp, synthetic construct
  source 1..21: mol_type = other DNA; mol_type = other DNA
agagaagaccatgtctactgg

SEQ ID NO: 26642 - DNA, 21 bp, synthetic construct
  source 1..21: mol_type = other DNA; mol_type = other DNA
aggaatgagttcaccgggtac

SEQ ID NO: 26643 - DNA, 21 bp, synthetic construct
  source 1..21: mol_type = other DNA; mol_type = other DNA
gagaacgaattcaagattttc

SEQ ID NO: 26644 - DNA, 21 bp, synthetic construct
  source 1..21: mol_type = other DNA; mol_type = other DNA
tgcactagtaagacaagtcat

SEQ ID NO: 26645 - DNA, 21 bp, synthetic construct
  source 1..21: mol_type = other DNA; mol_type = other DNA
tactggagtggtgtcccggaa

SEQ ID NO: 26646 - DNA, 21 bp, synthetic construct
  source 1..21: mol_type = other DNA; mol_type = other DNA
agggacgagtttgtctcgttt

SEQ ID NO: 26647 - DNA, 21 bp, synthetic construct
  source 1..21: mol_type = other DNA; mol_type = other DNA
gacatgggcagcagtcagtgg

SEQ ID NO: 26648 - DNA, 21 bp, synthetic construct
  source 1..21: mol_type = other DNA; mol_type = other DNA
ggatcgccgggggtcgcttgg

SEQ ID NO: 26649 - DNA, 21 bp, synthetic construct
  source 1..21: mol_type = other DNA; mol_type = other DNA
acaaaagacgggctctgcgca

SEQ ID NO: 26650 - DNA, 21 bp, synthetic construct
  source 1..21: mol_type = other DNA; mol_type = other DNA
gggtcagatcatgtccgttgg

SEQ ID NO: 26651 - DNA, 21 bp, synthetic construct
  source 1..21: mol_type = other DNA; mol_type = other DNA
tattttagcggaaagacatcc

SEQ ID NO: 26652 - DNA, 21 bp, synthetic construct
  source 1..21: mol_type = other DNA; mol_type = other DNA
agagacggatcatcactgtgg

SEQ ID NO: 26653 - DNA, 21 bp, synthetic construct
  source 1..21: mol_type = other DNA; mol_type = other DNA
tatttcaccgggcaacaatca

SEQ ID NO: 26654 - DNA, 21 bp, synthetic construct
  source 1..21: mol_type = other DNA; mol_type = other DNA
tatgcaaaaaacggctataac

SEQ ID NO: 26655 - DNA, 21 bp, synthetic construct
  source 1..21: mol_type = other DNA; mol_type = other DNA
tataccaaaagtaatcactta

SEQ ID NO: 26656 - DNA, 21 bp, synthetic construct
  source 1..21: mol_type = other DNA; mol_type = other DNA
tatgtcagaagccaaacggat

SEQ ID NO: 26657 - DNA, 21 bp, synthetic construct
  source 1..21: mol_type = other DNA; mol_type = other DNA
tatttcacaggcttcacggag

SEQ ID NO: 26658 - DNA, 21 bp, synthetic construct
  source 1..21: mol_type = other DNA; mol_type = other DNA
gttatggaagatagacgatgg

SEQ ID NO: 26659 - DNA, 21 bp, synthetic construct
  source 1..21: mol_type = other DNA; mol_type = other DNA
aaaatgagtgaccatacatgg

SEQ ID NO: 26660 - DNA, 21 bp, synthetic construct
  source 1..21: mol_type = other DNA; mol_type = other DNA
aaagatgattttagcgcgtac

SEQ ID NO: 26661 - DNA, 21 bp, synthetic construct
  source 1..21: mol_type = other DNA; mol_type = other DNA
agaggtgatagggtttatccg

SEQ ID NO: 26662 - DNA, 21 bp, synthetic construct
  source 1..21: mol_type = other DNA; mol_type = other DNA
tattttcacggcaagttagaa

SEQ ID NO: 26663 - DNA, 21 bp, synthetic construct
  source 1..21: mol_type = other DNA; mol_type = other DNA
tatagcaaacgcaatgacaat

SEQ ID NO: 26664 - DNA, 21 bp, synthetic construct
  source 1..21: mol_type = other DNA; mol_type = other DNA
tatttcagtgggcaaatcttg

SEQ ID NO: 26665 - DNA, 21 bp, synthetic construct
  source 1..21: mol_type = other DNA; mol_type = other DNA
agatcggtcgacgcctatccg

SEQ ID NO: 26666 - DNA, 21 bp, synthetic construct
  source 1..21: mol_type = other DNA; mol_type = other DNA
tacttcactgggagacaagat

SEQ ID NO: 26667 - DNA, 21 bp, synthetic construct
  source 1..21: mol_type = other DNA; mol_type = other DNA
tactttacgggggagtttgaa

SEQ ID NO: 26668 - DNA, 21 bp, synthetic construct
  source 1..21: mol_type = other DNA; mol_type = other DNA
agagatgatttttctggctgg

SEQ ID NO: 26669 - DNA, 21 bp, synthetic construct
  source 1..21: mol_type = other DNA; mol_type = other DNA
tactatacaggtgttatagag

SEQ ID NO: 26670 - DNA, 21 bp, synthetic construct
  source 1..21: mol_type = other DNA; mol_type = other DNA
tacagtaaattagatactaat

SEQ ID NO: 26671 - DNA, 21 bp, synthetic construct
  source 1..21: mol_type = other DNA; mol_type = other DNA
ttaatgtcggatcgtgagtgg

SEQ ID NO: 26672 - DNA, 21 bp, synthetic construct
  source 1..21: mol_type = other DNA; mol_type = other DNA
ctcgccagaacgggacgcgac

SEQ ID NO: 26673 - DNA, 21 bp, synthetic construct
  source 1..21: mol_type = other DNA; mol_type = other DNA
tattttcaaggcaagattgac

SEQ ID NO: 26674 - DNA, 21 bp, synthetic construct
  source 1..21: mol_type = other DNA; mol_type = other DNA
cacggaaaaggcgagtgtccg

SEQ ID NO: 26675 - DNA, 21 bp, synthetic construct
  source 1..21: mol_type = other DNA; mol_type = other DNA
tatgctaggactggtgttaat

SEQ ID NO: 26676 - DNA, 21 bp, synthetic construct
  source 1..21: mol_type = other DNA; mol_type = other DNA
tggtccagagacacatgcaac

SEQ ID NO: 26677 - DNA, 21 bp, synthetic construct
  source 1..21: mol_type = other DNA; mol_type = other DNA
ggaggcccaggtgtccgatgg

SEQ ID NO: 26678 - DNA, 21 bp, synthetic construct
  source 1..21: mol_type = other DNA; mol_type = other DNA
tgtgataaggaggcatatcag

SEQ ID NO: 26679 - DNA, 21 bp, synthetic construct
  source 1..21: mol_type = other DNA; mol_type = other DNA
tatagtagggtacagccaaat

SEQ ID NO: 26680 - DNA, 21 bp, synthetic construct
  source 1..21: mol_type = other DNA; mol_type = other DNA
tatggcaagggtacttgggac

SEQ ID NO: 26681 - DNA, 21 bp, synthetic construct
  source 1..21: mol_type = other DNA; mol_type = other DNA
ctcaaagacggcacctgtata

SEQ ID NO: 26682 - DNA, 21 bp, synthetic construct
  source 1..21: mol_type = other DNA; mol_type = other DNA
tatccctttcctcaggcggcg

SEQ ID NO: 26683 - DNA, 21 bp, synthetic construct
  source 1..21: mol_type = other DNA; mol_type = other DNA
tatagcaagcagaatactaat

SEQ ID NO: 26684 - DNA, 21 bp, synthetic construct
  source 1..21: mol_type = other DNA; mol_type = other DNA
tatttcagcggagtgcgttct

SEQ ID NO: 26685 - DNA, 21 bp, synthetic construct
  source 1..21: mol_type = other DNA; mol_type = other DNA
ggtggggagttctctaagtgg

SEQ ID NO: 26686 - DNA, 21 bp, synthetic construct
  source 1..21: mol_type = other DNA; mol_type = other DNA
tatcacaagcacagtcttaac

SEQ ID NO: 26687 - DNA, 21 bp, synthetic construct
  source 1..21: mol_type = other DNA; mol_type = other DNA
tgtcgccccaaacaggtcgat

SEQ ID NO: 26688 - DNA, 21 bp, synthetic construct
  source 1..21: mol_type = other DNA; mol_type = other DNA
tacttttcaggcactagagaa

SEQ ID NO: 26689 - DNA, 21 bp, synthetic construct
  source 1..21: mol_type = other DNA; mol_type = other DNA
tacgctaaaaatgggatgaac

SEQ ID NO: 26690 - DNA, 21 bp, synthetic construct
  source 1..21: mol_type = other DNA; mol_type = other DNA
taccatcgtttgagtgtagac

SEQ ID NO: 26691 - DNA, 21 bp, synthetic construct
  source 1..21: mol_type = other DNA; mol_type = other DNA
tatgcccgtacctcgataaat

SEQ ID NO: 26692 - DNA, 21 bp, synthetic construct
  source 1..21: mol_type = other DNA; mol_type = other DNA
atccacagattattaccgtcg

SEQ ID NO: 26693 - DNA, 21 bp, synthetic construct
  source 1..21: mol_type = other DNA; mol_type = other DNA
tatcaccgcctccaagaagac

SEQ ID NO: 26694 - DNA, 21 bp, synthetic construct
  source 1..21: mol_type = other DNA; mol_type = other DNA
ctctgggacggaacgcctagt

SEQ ID NO: 26695 - DNA, 21 bp, synthetic construct
  source 1..21: mol_type = other DNA; mol_type = other DNA
ttacataggctacaggagtat

SEQ ID NO: 26696 - DNA, 21 bp, synthetic construct
  source 1..21: mol_type = other DNA; mol_type = other DNA
cgtatggatgccgtaacttgg

SEQ ID NO: 26697 - DNA, 21 bp, synthetic construct
  source 1..21: mol_type = other DNA; mol_type = other DNA
cgaagcgagtttttgccctat

SEQ ID NO: 26698 - DNA, 21 bp, synthetic construct
  source 1..21: mol_type = other DNA; mol_type = other DNA
aacatggcatcaacgacctgg

SEQ ID NO: 26699 - DNA, 21 bp, synthetic construct
  source 1..21: mol_type = other DNA; mol_type = other DNA
cgcggggagagcagaggatgg

SEQ ID NO: 26700 - DNA, 21 bp, synthetic construct
  source 1..21: mol_type = other DNA; mol_type = other DNA
tacttctcgggtgtgcagagc

SEQ ID NO: 26701 - DNA, 21 bp, synthetic construct
  source 1..21: mol_type = other DNA; mol_type = other DNA
ttattggcctctagtagctgg

SEQ ID NO: 26702 - DNA, 21 bp, synthetic construct
  source 1..21: mol_type = other DNA; mol_type = other DNA
cacatttcgacaaatggtgtt

SEQ ID NO: 26703 - DNA, 21 bp, synthetic construct
  source 1..21: mol_type = other DNA; mol_type = other DNA
ataccgtcaagtgtacgctgg

SEQ ID NO: 26704 - DNA, 21 bp, synthetic construct
  source 1..21: mol_type = other DNA; mol_type = other DNA
tacacgcgtttagacttcaac

SEQ ID NO: 26705 - DNA, 21 bp, synthetic construct
  source 1..21: mol_type = other DNA; mol_type = other DNA
tacgtgaggagcgaccggaat

SEQ ID NO: 26706 - DNA, 21 bp, synthetic construct
  source 1..21: mol_type = other DNA; mol_type = other DNA
cgcgacgattttagcgtttac

SEQ ID NO: 26707 - DNA, 21 bp, synthetic construct
  source 1..21: mol_type = other DNA; mol_type = other DNA
tacagccgcttgcaccccatg

SEQ ID NO: 26708 - DNA, 21 bp, synthetic construct
  source 1..21: mol_type = other DNA; mol_type = other DNA
tactttagcggaaagcaggac

SEQ ID NO: 26709 - DNA, 21 bp, synthetic construct
  source 1..21: mol_type = other DNA; mol_type = other DNA
ctagcgaagaccggcttaaac

SEQ ID NO: 26710 - DNA, 21 bp, synthetic construct
  source 1..21: mol_type = other DNA; mol_type = other DNA
ctacgagacggctcacctgcg

SEQ ID NO: 26711 - DNA, 21 bp, synthetic construct
  source 1..21: mol_type = other DNA; mol_type = other DNA
agggacgactttgtttcgtat

SEQ ID NO: 26712 - DNA, 21 bp, synthetic construct
  source 1..21: mol_type = other DNA; mol_type = other DNA
ttacaccgattgatagcagac

SEQ ID NO: 26713 - DNA, 21 bp, synthetic construct
  source 1..21: mol_type = other DNA; mol_type = other DNA
ttgttcgatgcaactcctagt

SEQ ID NO: 26714 - DNA, 21 bp, synthetic construct
  source 1..21: mol_type = other DNA; mol_type = other DNA
tactgggcaggagtccgtgaa

SEQ ID NO: 26715 - DNA, 21 bp, synthetic construct
  source 1..21: mol_type = other DNA; mol_type = other DNA
tggtggagtggagtagcggaa

SEQ ID NO: 26716 - DNA, 21 bp, synthetic construct
  source 1..21: mol_type = other DNA; mol_type = other DNA
aaatatgaccacgtgacttgg

SEQ ID NO: 26717 - DNA, 21 bp, synthetic construct
  source 1..21: mol_type = other DNA; mol_type = other DNA
tattcgaaaagcaacttcaac

SEQ ID NO: 26718 - DNA, 21 bp, synthetic construct
  source 1..21: mol_type = other DNA; mol_type = other DNA
tatttttccggacaaatggag

SEQ ID NO: 26719 - DNA, 21 bp, synthetic construct
  source 1..21: mol_type = other DNA; mol_type = other DNA
taccataaactaaacctcgtg

SEQ ID NO: 26720 - DNA, 21 bp, synthetic construct
  source 1..21: mol_type = other DNA; mol_type = other DNA
tactggagcgcaataccggcc

SEQ ID NO: 26721 - DNA, 21 bp, synthetic construct
  source 1..21: mol_type = other DNA; mol_type = other DNA
tacttccatggaaagcttgag

SEQ ID NO: 26722 - DNA, 21 bp, synthetic construct
  source 1..21: mol_type = other DNA; mol_type = other DNA
tacagcagagccggtgataat

SEQ ID NO: 26723 - DNA, 21 bp, synthetic construct
  source 1..21: mol_type = other DNA; mol_type = other DNA
tacttcagcggcgttccacat

SEQ ID NO: 26724 - DNA, 21 bp, synthetic construct
  source 1..21: mol_type = other DNA; mol_type = other DNA
tacgccaaaggaaatttcaac

SEQ ID NO: 26725 - DNA, 21 bp, synthetic construct
  source 1..21: mol_type = other DNA; mol_type = other DNA
tacagccgtttgaacaaggat

SEQ ID NO: 26726 - DNA, 21 bp, synthetic construct
  source 1..21: mol_type = other DNA; mol_type = other DNA
ctttgtaggccttgcactgaa

SEQ ID NO: 26727 - DNA, 21 bp, synthetic construct
  source 1..21: mol_type = other DNA; mol_type = other DNA
agcgagagtacgaacggggtg

SEQ ID NO: 26728 - DNA, 21 bp, synthetic construct
  source 1..21: mol_type = other DNA; mol_type = other DNA
tactggagcggaaccattgcc

SEQ ID NO: 26729 - DNA, 21 bp, synthetic construct
  source 1..21: mol_type = other DNA; mol_type = other DNA
catcaatcaacaaacggggtt

SEQ ID NO: 26730 - DNA, 21 bp, synthetic construct
  source 1..21: mol_type = other DNA; mol_type = other DNA
cgagaatccacgaatggggtc

SEQ ID NO: 26731 - DNA, 21 bp, synthetic construct
  source 1..21: mol_type = other DNA; mol_type = other DNA
agggaaggaactagtaaatgg

SEQ ID NO: 26732 - DNA, 21 bp, synthetic construct
  source 1..21: mol_type = other DNA; mol_type = other DNA
tacgtgcgaagcgatgcaacc

SEQ ID NO: 26733 - DNA, 21 bp, synthetic construct
  source 1..21: mol_type = other DNA; mol_type = other DNA
tacgccaggctggggttgaat

SEQ ID NO: 26734 - DNA, 21 bp, synthetic construct
  source 1..21: mol_type = other DNA; mol_type = other DNA
ttggcgaagacaggaatgaat

SEQ ID NO: 26735 - DNA, 21 bp, synthetic construct
  source 1..21: mol_type = other DNA; mol_type = other DNA
tatagtaaacaaaacgctaac

SEQ ID NO: 26736 - DNA, 21 bp, synthetic construct
  source 1..21: mol_type = other DNA; mol_type = other DNA
agggacgagttccacgcgtgg

SEQ ID NO: 26737 - DNA, 21 bp, synthetic construct
  source 1..21: mol_type = other DNA; mol_type = other DNA
tacagccgtttgggtcttaat

SEQ ID NO: 26738 - DNA, 21 bp, synthetic construct
  source 1..21: mol_type = other DNA; mol_type = other DNA
tatttcagcggtactcaggct

SEQ ID NO: 26739 - DNA, 21 bp, synthetic construct
  source 1..21: mol_type = other DNA; mol_type = other DNA
atgttgtcggacagaaagtgg

SEQ ID NO: 26740 - DNA, 21 bp, synthetic construct
  source 1..21: mol_type = other DNA; mol_type = other DNA
tactttagcggagtagttaat

SEQ ID NO: 26741 - DNA, 21 bp, synthetic construct
  source 1..21: mol_type = other DNA; mol_type = other DNA
tactcaaaacaaaacacaaat

SEQ ID NO: 26742 - DNA, 21 bp, synthetic construct
  source 1..21: mol_type = other DNA; mol_type = other DNA
tactcgcggctaggtgttggt

SEQ ID NO: 26743 - DNA, 21 bp, synthetic construct
  source 1..21: mol_type = other DNA; mol_type = other DNA
tattttagcggtatacctcac

SEQ ID NO: 26744 - DNA, 21 bp, synthetic construct
  source 1..21: mol_type = other DNA; mol_type = other DNA
ggtagcgagatgtcgcactgg

SEQ ID NO: 26745 - DNA, 21 bp, synthetic construct
  source 1..21: mol_type = other DNA; mol_type = other DNA
tacgccagaactagtcctctg

SEQ ID NO: 26746 - DNA, 21 bp, synthetic construct
  source 1..21: mol_type = other DNA; mol_type = other DNA
gttaataatagctgcttgacc

SEQ ID NO: 26747 - DNA, 21 bp, synthetic construct
  source 1..21: mol_type = other DNA; mol_type = other DNA
tacgctcgcagcggcatcaac

SEQ ID NO: 26748 - DNA, 21 bp, synthetic construct
  source 1..21: mol_type = other DNA; mol_type = other DNA
tcgatggccagttcatcgtgg

SEQ ID NO: 26749 - DNA, 21 bp, synthetic construct
  source 1..21: mol_type = other DNA; mol_type = other DNA
gatatgggtgataggaaatgg

SEQ ID NO: 26750 - DNA, 21 bp, synthetic construct
  source 1..21: mol_type = other DNA; mol_type = other DNA
tgtaagcctgagatggtcagg

SEQ ID NO: 26751 - DNA, 21 bp, synthetic construct
  source 1..21: mol_type = other DNA; mol_type = other DNA
cgcacatatgacgcatacccg

SEQ ID NO: 26752 - DNA, 21 bp, synthetic construct
  source 1..21: mol_type = other DNA; mol_type = other DNA
cccatgggaagtcaaacgtgg

SEQ ID NO: 26753 - DNA, 21 bp, synthetic construct
  source 1..21: mol_type = other DNA; mol_type = other DNA
ttctcaaaggtcggtcacaat

SEQ ID NO: 26754 - DNA, 21 bp, synthetic construct
  source 1..21: mol_type = other DNA; mol_type = other DNA
agcgactcgacaaacggtata

SEQ ID NO: 26755 - DNA, 21 bp, synthetic construct
  source 1..21: mol_type = other DNA; mol_type = other DNA
tatttcagcgggactacagag

SEQ ID NO: 26756 - DNA, 21 bp, synthetic construct
  source 1..21: mol_type = other DNA; mol_type = other DNA
atgtgggatggcactccgtca

SEQ ID NO: 26757 - DNA, 21 bp, synthetic construct
  source 1..21: mol_type = other DNA; mol_type = other DNA
tgtagtcgtgatggcgaaaat

SEQ ID NO: 26758 - DNA, 21 bp, synthetic construct
  source 1..21: mol_type = other DNA; mol_type = other DNA
tattatacggggcgtatggag

SEQ ID NO: 26759 - DNA, 21 bp, synthetic construct
  source 1..21: mol_type = other DNA; mol_type = other DNA
gacatggaaagctccaaatgg

SEQ ID NO: 26760 - DNA, 21 bp, synthetic construct
  source 1..21: mol_type = other DNA; mol_type = other DNA
gggtccgagtatctaacatgg

SEQ ID NO: 26761 - DNA, 21 bp, synthetic construct
  source 1..21: mol_type = other DNA; mol_type = other DNA
tacacgaggttagattctcat

SEQ ID NO: 26762 - DNA, 21 bp, synthetic construct
  source 1..21: mol_type = other DNA; mol_type = other DNA
tatttcaccggctttatggaa

SEQ ID NO: 26763 - DNA, 21 bp, synthetic construct
  source 1..21: mol_type = other DNA; mol_type = other DNA
ttcttcacgggtcgcgtcgaa

SEQ ID NO: 26764 - DNA, 21 bp, synthetic construct
  source 1..21: mol_type = other DNA; mol_type = other DNA
aaggacggctattccagctgg

SEQ ID NO: 26765 - DNA, 21 bp, synthetic construct
  source 1..21: mol_type = other DNA; mol_type = other DNA
tattttacaggccaaatagta

SEQ ID NO: 26766 - DNA, 21 bp, synthetic construct
  source 1..21: mol_type = other DNA; mol_type = other DNA
tattcaaaaatagggaaaaac

SEQ ID NO: 26767 - DNA, 21 bp, synthetic construct
  source 1..21: mol_type = other DNA; mol_type = other DNA
attctaagtgaccgaagttgg

SEQ ID NO: 26768 - DNA, 21 bp, synthetic construct
  source 1..21: mol_type = other DNA; mol_type = other DNA
aggaatgactttgtttcgttc

SEQ ID NO: 26769 - DNA, 21 bp, synthetic construct
  source 1..21: mol_type = other DNA; mol_type = other DNA
tacttctcggggaaaataatg

SEQ ID NO: 26770 - DNA, 21 bp, synthetic construct
  source 1..21: mol_type = other DNA; mol_type = other DNA
cgtgaggacttctcaacttgg

SEQ ID NO: 26771 - DNA, 21 bp, synthetic construct
  source 1..21: mol_type = other DNA; mol_type = other DNA
tatttcactggaatgcgggcc

SEQ ID NO: 26772 - DNA, 21 bp, synthetic construct
  source 1..21: mol_type = other DNA; mol_type = other DNA
tacgttagaagcgattcgatg

SEQ ID NO: 26773 - DNA, 21 bp, synthetic construct
  source 1..21: mol_type = other DNA; mol_type = other DNA
tatttaaaatcacaaaccgtt

SEQ ID NO: 26774 - DNA, 21 bp, synthetic construct
  source 1..21: mol_type = other DNA; mol_type = other DNA
taccatagattgtcccctgtc

SEQ ID NO: 26775 - DNA, 21 bp, synthetic construct
  source 1..21: mol_type = other DNA; mol_type = other DNA
ggcagcggtacttcacactgg

SEQ ID NO: 26776 - DNA, 21 bp, synthetic construct
  source 1..21: mol_type = other DNA; mol_type = other DNA
ttaagtaaatcaagtgtaaac

SEQ ID NO: 26777 - DNA, 21 bp, synthetic construct
  source 1..21: mol_type = other DNA; mol_type = other DNA
agtacatacgattcgtatccg

SEQ ID NO: 26778 - DNA, 21 bp, synthetic construct
  source 1..21: mol_type = other DNA; mol_type = other DNA
cgggacgcgacaagtagctgg

SEQ ID NO: 26779 - DNA, 21 bp, synthetic construct
  source 1..21: mol_type = other DNA; mol_type = other DNA
tcggatggtacctcgaagtgg

SEQ ID NO: 26780 - DNA, 21 bp, synthetic construct
  source 1..21: mol_type = other DNA; mol_type = other DNA
tgtaaacccaggcaaggggaa

SEQ ID NO: 26781 - DNA, 21 bp, synthetic construct
  source 1..21: mol_type = other DNA; mol_type = other DNA
aggaatgaattttccacctat

SEQ ID NO: 26782 - DNA, 21 bp, synthetic construct
  source 1..21: mol_type = other DNA; mol_type = other DNA
tactcgcgtgttggtcctaat

SEQ ID NO: 26783 - DNA, 21 bp, synthetic construct
  source 1..21: mol_type = other DNA; mol_type = other DNA
tatttcagcggtcaacgggag

SEQ ID NO: 26784 - DNA, 21 bp, synthetic construct
  source 1..21: mol_type = other DNA; mol_type = other DNA
tacttctctggtaaaaccagt

SEQ ID NO: 26785 - DNA, 21 bp, synthetic construct
  source 1..21: mol_type = other DNA; mol_type = other DNA
ttttcgcgtataggggggggg

SEQ ID NO: 26786 - DNA, 21 bp, synthetic construct
  source 1..21: mol_type = other DNA; mol_type = other DNA
tattacactggcaagtgcaac

SEQ ID NO: 26787 - DNA, 21 bp, synthetic construct
  source 1..21: mol_type = other DNA; mol_type = other DNA
aaaacagattatgttacgtgg

SEQ ID NO: 26788 - DNA, 21 bp, synthetic construct
  source 1..21: mol_type = other DNA; mol_type = other DNA
tatttcgcagggaccataaac

SEQ ID NO: 26789 - DNA, 21 bp, synthetic construct
  source 1..21: mol_type = other DNA; mol_type = other DNA
tattttagtgggagattggat

SEQ ID NO: 26790 - DNA, 21 bp, synthetic construct
  source 1..21: mol_type = other DNA; mol_type = other DNA
ctctcacgacttaaccataat

SEQ ID NO: 26791 - DNA, 21 bp, synthetic construct
  source 1..21: mol_type = other DNA; mol_type = other DNA
tattctcggcccggacctaac

SEQ ID NO: 26792 - DNA, 21 bp, synthetic construct
  source 1..21: mol_type = other DNA; mol_type = other DNA
tattggtctggagtctccgcg

SEQ ID NO: 26793 - DNA, 21 bp, synthetic construct
  source 1..21: mol_type = other DNA; mol_type = other DNA
tactttacgggagtagctgac

SEQ ID NO: 26794 - DNA, 21 bp, synthetic construct
  source 1..21: mol_type = other DNA; mol_type = other DNA
cgtaacgaatttacaggttat

SEQ ID NO: 26795 - DNA, 21 bp, synthetic construct
  source 1..21: mol_type = other DNA; mol_type = other DNA
tactttgcggggataataggt

SEQ ID NO: 26796 - DNA, 21 bp, synthetic construct
  source 1..21: mol_type = other DNA; mol_type = other DNA
tacgctaagaatggcatcaat

SEQ ID NO: 26797 - DNA, 21 bp, synthetic construct
  source 1..21: mol_type = other DNA; mol_type = other DNA
tacagccgcctcaacgaattc

SEQ ID NO: 26798 - DNA, 21 bp, synthetic construct
  source 1..21: mol_type = other DNA; mol_type = other DNA
tccgagagcaccaacggaatt

SEQ ID NO: 26799 - DNA, 21 bp, synthetic construct
  source 1..21: mol_type = other DNA; mol_type = other DNA
tacagccgaattgggttcgat

SEQ ID NO: 26800 - DNA, 21 bp, synthetic construct
  source 1..21: mol_type = other DNA
cgcgacgagacatcatactgg

SEQ ID NO: 26801 - DNA, 21 bp, synthetic construct
  source 1..21: mol_type = other DNA
agggatggtacaagtagatgg

SEQ ID NO: 26802 - DNA, 21 bp, synthetic construct
  source 1..21: mol_type = other DNA; mol_type = other DNA
tacaccaaatccaaccatctt

SEQ ID NO: 26803 - DNA, 21 bp, synthetic construct
  source 1..21: mol_type = other DNA; mol_type = other DNA
tactggacaggaaaagtagaa

SEQ ID NO: 26804 - DNA, 21 bp, synthetic construct
  source 1..21: mol_type = other DNA; mol_type = other DNA
tacgcaaggagcggtccaaat

SEQ ID NO: 26805 - DNA, 21 bp, synthetic construct
  source 1..21: mol_type = other DNA; mol_type = other DNA
tattcccgagcaggaatggat

SEQ ID NO: 26806 - DNA, 21 bp, synthetic construct
  source 1..21: mol_type = other DNA; mol_type = other DNA
cgagacgggtcaagtcggtgg

SEQ ID NO: 26807 - DNA, 21 bp, synthetic construct
  source 1..21: mol_type = other DNA; mol_type = other DNA
tacgccaggaccggcatgaat

SEQ ID NO: 26808 - DNA, 21 bp, synthetic construct
  source 1..21: mol_type = other DNA; mol_type = other DNA
atgatggacggaaccccagcc

SEQ ID NO: 26809 - DNA, 21 bp, synthetic construct
  source 1..21: mol_type = other DNA; mol_type = other DNA
tatgtgaagtatgatacatct

SEQ ID NO: 26810 - DNA, 21 bp, synthetic construct
  source 1..21: mol_type = other DNA; mol_type = other DNA
ttttttagcggtgtgattgcc

SEQ ID NO: 26811 - DNA, 21 bp, synthetic construct
  source 1..21: mol_type = other DNA; mol_type = other DNA
atagccgatcacttacgctgg

SEQ ID NO: 26812 - DNA, 21 bp, synthetic construct
  source 1..21: mol_type = other DNA; mol_type = other DNA
accaactcgactaacggtata

SEQ ID NO: 26813 - DNA, 21 bp, synthetic construct
  source 1..21: mol_type = other DNA; mol_type = other DNA
tatagtaggatccaattcgat

SEQ ID NO: 26814 - DNA, 21 bp, synthetic construct
  source 1..21: mol_type = other DNA; mol_type = other DNA
tactcgagactcaatataaat

SEQ ID NO: 26815 - DNA, 21 bp, synthetic construct
  source 1..21: mol_type = other DNA; mol_type = other DNA
tgtaaatcaaataatgaacca

SEQ ID NO: 26816 - DNA, 21 bp, synthetic construct
  source 1..21: mol_type = other DNA; mol_type = other DNA
ggggtcgagacctgtaagcca

SEQ ID NO: 26817 - DNA, 21 bp, synthetic construct
  source 1..21: mol_type = other DNA; mol_type = other DNA
agggacgaggtaacctcttgg

SEQ ID NO: 26818 - DNA, 21 bp, synthetic construct
  source 1..21: mol_type = other DNA; mol_type = other DNA
aaatatgcttttagtactgag

SEQ ID NO: 26819 - DNA, 21 bp, synthetic construct
  source 1..21: mol_type = other DNA; mol_type = other DNA
aggcttgagtctacccactgg

SEQ ID NO: 26820 - DNA, 21 bp, synthetic construct
  source 1..21: mol_type = other DNA; mol_type = other DNA
tactttgctggaaaaagagag

SEQ ID NO: 26821 - DNA, 21 bp, synthetic construct
  source 1..21: mol_type = other DNA; mol_type = other DNA
tatgtcaagtcccaaccgatg

SEQ ID NO: 26822 - DNA, 21 bp, synthetic construct
  source 1..21: mol_type = other DNA; mol_type = other DNA
gatttagactcatacaaatgg

SEQ ID NO: 26823 - DNA, 21 bp, synthetic construct
  source 1..21: mol_type = other DNA; mol_type = other DNA
ttagctcgcttgggggctaat

SEQ ID NO: 26824 - DNA, 21 bp, synthetic construct
  source 1..21: mol_type = other DNA; mol_type = other DNA
tacgctaaggctgggtgtaat

SEQ ID NO: 26825 - DNA, 21 bp, synthetic construct
  source 1..21: mol_type = other DNA; mol_type = other DNA
tgtggagcaaagtgttgtcca

SEQ ID NO: 26826 - DNA, 21 bp, synthetic construct
  source 1..21: mol_type = other DNA; mol_type = other DNA
tggtcccgagattgcgacaat

SEQ ID NO: 26827 - DNA, 21 bp, synthetic construct
  source 1..21: mol_type = other DNA; mol_type = other DNA
tacagccggattcaggacgat

SEQ ID NO: 26828 - DNA, 21 bp, synthetic construct
  source 1..21: mol_type = other DNA; mol_type = other DNA
tattggacaggggttccggaa

SEQ ID NO: 26829 - DNA, 21 bp, synthetic construct
  source 1..21: mol_type = other DNA; mol_type = other DNA
cgagatgaattgacctcgtgg

SEQ ID NO: 26830 - DNA, 21 bp, synthetic construct
  source 1..21: mol_type = other DNA; mol_type = other DNA
tatttccaaggtatacgcgaa

SEQ ID NO: 26831 - DNA, 21 bp, synthetic construct
  source 1..21: mol_type = other DNA; mol_type = other DNA
agagatgactatagcacttat

SEQ ID NO: 26832 - DNA, 21 bp, synthetic construct
  source 1..21: mol_type = other DNA; mol_type = other DNA
ttccaccgcttatcgattgac

SEQ ID NO: 26833 - DNA, 21 bp, synthetic construct
  source 1..21: mol_type = other DNA; mol_type = other DNA
agagacggtattagtgcctgg

SEQ ID NO: 26834 - DNA, 21 bp, synthetic construct
  source 1..21: mol_type = other DNA; mol_type = other DNA
tatttcacgggtcgcatggat

SEQ ID NO: 26835 - DNA, 21 bp, synthetic construct
  source 1..21: mol_type = other DNA; mol_type = other DNA
agcgatggtgtgtccagatgg

SEQ ID NO: 26836 - DNA, 21 bp, synthetic construct
  source 1..21: mol_type = other DNA; mol_type = other DNA
ctggctaaaacggggctgaat

SEQ ID NO: 26837 - DNA, 21 bp, synthetic construct
  source 1..21: mol_type = other DNA; mol_type = other DNA
ttagcgcggctcggccccgac

SEQ ID NO: 26838 - DNA, 21 bp, synthetic construct
  source 1..21: mol_type = other DNA; mol_type = other DNA
cacgagagtacaaacggccgt

SEQ ID NO: 26839 - DNA, 21 bp, synthetic construct
  source 1..21: mol_type = other DNA; mol_type = other DNA
atagtttccacaaacggtgtc

SEQ ID NO: 26840 - DNA, 21 bp, synthetic construct
  source 1..21: mol_type = other DNA; mol_type = other DNA
cgactcgagtcatcaggatgg

SEQ ID NO: 26841 - DNA, 21 bp, synthetic construct
  source 1..21: mol_type = other DNA; mol_type = other DNA
tatttctcggggatccataac

SEQ ID NO: 26842 - DNA, 21 bp, synthetic construct
  source 1..21: mol_type = other DNA; mol_type = other DNA
tatagtcgtttgaatgacaat

SEQ ID NO: 26843 - DNA, 21 bp, synthetic construct
  source 1..21: mol_type = other DNA; mol_type = other DNA
ctccatcgcctgcatgtagat

SEQ ID NO: 26844 - DNA, 21 bp, synthetic construct
  source 1..21: mol_type = other DNA; mol_type = other DNA
tatgcaaaacaaggctttaat

SEQ ID NO: 26845 - DNA, 21 bp, synthetic construct
  source 1..21: mol_type = other DNA; mol_type = other DNA
tatgcacggcaaggaatcaat

SEQ ID NO: 26846 - DNA, 21 bp, synthetic construct
  source 1..21: mol_type = other DNA; mol_type = other DNA
tatagtaagaccgggcagaac

SEQ ID NO: 26847 - DNA, 21 bp, synthetic construct
  source 1..21: mol_type = other DNA; mol_type = other DNA
tattggacagggaaaatagaa

SEQ ID NO: 26848 - DNA, 21 bp, synthetic construct
  source 1..21: mol_type = other DNA; mol_type = other DNA
gacctcagtgacagacgctgg

SEQ ID NO: 26849 - DNA, 21 bp, synthetic construct
  source 1..21: mol_type = other DNA; mol_type = other DNA
aggggagattcccccaagtgg

SEQ ID NO: 26850 - DNA, 21 bp, synthetic construct
  source 1..21: mol_type = other DNA; mol_type = other DNA
tatttttctggtcaaagtgaa

SEQ ID NO: 26851 - DNA, 21 bp, synthetic construct
  source 1..21: mol_type = other DNA; mol_type = other DNA
tacttctctggcatgcgcgag

SEQ ID NO: 26852 - DNA, 21 bp, synthetic construct
  source 1..21: mol_type = other DNA; mol_type = other DNA
gatccagctagcagagcttgg

SEQ ID NO: 26853 - DNA, 21 bp, synthetic construct
  source 1..21: mol_type = other DNA; mol_type = other DNA
cgcaacgacttcgtgagtttt

SEQ ID NO: 26854 - DNA, 21 bp, synthetic construct
  source 1..21: mol_type = other DNA; mol_type = other DNA
acctcgtcatcaaatggtgtt

SEQ ID NO: 26855 - DNA, 21 bp, synthetic construct
  source 1..21: mol_type = other DNA; mol_type = other DNA
ttcagtaggataggtgtaaac

SEQ ID NO: 26856 - DNA, 21 bp, synthetic construct
  source 1..21: mol_type = other DNA; mol_type = other DNA
ttctggaccggagttaaagaa

SEQ ID NO: 26857 - DNA, 21 bp, synthetic construct
  source 1..21: mol_type = other DNA; mol_type = other DNA
aggttagagagttatgattgg

SEQ ID NO: 26858 - DNA, 21 bp, synthetic construct
  source 1..21: mol_type = other DNA; mol_type = other DNA
atagaggggagaggctgggac

SEQ ID NO: 26859 - DNA, 21 bp, synthetic construct
  source 1..21: mol_type = other DNA; mol_type = other DNA
aaggatgaatttaagacctat

SEQ ID NO: 26860 - DNA, 21 bp, synthetic construct
  source 1..21: mol_type = other DNA; mol_type = other DNA
agaatggaggatcggaagtgg

SEQ ID NO: 26861 - DNA, 21 bp, synthetic construct
  source 1..21: mol_type = other DNA; mol_type = other DNA
ttagcccggaatttgccgaat

SEQ ID NO: 26862 - DNA, 21 bp, synthetic construct
  source 1..21: mol_type = other DNA; mol_type = other DNA
ttcgcccggaacgggcctaac

SEQ ID NO: 26863 - DNA, 21 bp, synthetic construct
  source 1..21: mol_type = other DNA; mol_type = other DNA
tactggacaggcgtcccagag

SEQ ID NO: 26864 - DNA, 21 bp, synthetic construct
  source 1..21: mol_type = other DNA; mol_type = other DNA
tgcaaacctagacagggtgaa

SEQ ID NO: 26865 - DNA, 21 bp, synthetic construct
  source 1..21: mol_type = other DNA; mol_type = other DNA
cgtagtgactttgtagtctac

SEQ ID NO: 26866 - DNA, 21 bp, synthetic construct
  source 1..21: mol_type = other DNA; mol_type = other DNA
tatagcagagtccagttaaat

SEQ ID NO: 26867 - DNA, 21 bp, synthetic construct
  source 1..21: mol_type = other DNA; mol_type = other DNA
gtagtgtccaccaacggtcgc

SEQ ID NO: 26868 - DNA, 21 bp, synthetic construct
  source 1..21: mol_type = other DNA; mol_type = other DNA
tatttctcgggtagacaagaa

SEQ ID NO: 26869 - DNA, 21 bp, synthetic construct
  source 1..21: mol_type = other DNA; mol_type = other DNA
tacagccgtattcagatggat

SEQ ID NO: 26870 - DNA, 21 bp, synthetic construct
  source 1..21: mol_type = other DNA; mol_type = other DNA
tatttctcgggaatcactgtg

SEQ ID NO: 26871 - DNA, 21 bp, synthetic construct
  source 1..21: mol_type = other DNA; mol_type = other DNA
tatttttctggagtcccctcc

SEQ ID NO: 26872 - DNA, 21 bp, synthetic construct
  source 1..21: mol_type = other DNA; mol_type = other DNA
atagctgatcatctacgctgg

SEQ ID NO: 26873 - DNA, 21 bp, synthetic construct
  source 1..21: mol_type = other DNA; mol_type = other DNA
tattctcgggcaggggacaac

SEQ ID NO: 26874 - DNA, 21 bp, synthetic construct
  source 1..21: mol_type = other DNA; mol_type = other DNA
tgtcaaggccagggaaatcct

SEQ ID NO: 26875 - DNA, 21 bp, synthetic construct
  source 1..21: mol_type = other DNA; mol_type = other DNA
agcagatcaacaaacggtatc

SEQ ID NO: 26876 - DNA, 21 bp, synthetic construct
  source 1..21: mol_type = other DNA; mol_type = other DNA
cgcagtgagttcctaccgtac

SEQ ID NO: 26877 - DNA, 21 bp, synthetic construct
  source 1..21: mol_type = other DNA; mol_type = other DNA
tactcaagaatcgcccccgac

SEQ ID NO: 26878 - DNA, 21 bp, synthetic construct
  source 1..21: mol_type = other DNA; mol_type = other DNA
tactccaagcaaaaccacaac

SEQ ID NO: 26879 - DNA, 21 bp, synthetic construct
  source 1..21: mol_type = other DNA; mol_type = other DNA
tatcatagactaagcgcggat

SEQ ID NO: 26880 - DNA, 21 bp, synthetic construct
  source 1..21: mol_type = other DNA; mol_type = other DNA
tatttccacggcattcatgaa

SEQ ID NO: 26881 - DNA, 21 bp, synthetic construct
  source 1..21: mol_type = other DNA; mol_type = other DNA
aacctagagagccggggctgg

SEQ ID NO: 26882 - DNA, 21 bp, synthetic construct
  source 1..21: mol_type = other DNA; mol_type = other DNA
gtgtactccacgaatggcata

SEQ ID NO: 26883 - DNA, 21 bp, synthetic construct
  source 1..21: mol_type = other DNA; mol_type = other DNA
tgcggcaagatgtgttgtcca

SEQ ID NO: 26884 - DNA, 21 bp, synthetic construct
  source 1..21: mol_type = other DNA; mol_type = other DNA
tattttacagggaagaacgaa

SEQ ID NO: 26885 - DNA, 21 bp, synthetic construct
  source 1..21: mol_type = other DNA; mol_type = other DNA
tacagtcgtcttaatgagcaa

SEQ ID NO: 26886 - DNA, 21 bp, synthetic construct
  source 1..21: mol_type = other DNA; mol_type = other DNA
tattctaaacagaataataat

SEQ ID NO: 26887 - DNA, 21 bp, synthetic construct
  source 1..21: mol_type = other DNA; mol_type = other DNA
tattggactggtacggtagat

SEQ ID NO: 26888 - DNA, 21 bp, synthetic construct
  source 1..21: mol_type = other DNA; mol_type = other DNA
tacttccacggaaaaaaggat

SEQ ID NO: 26889 - DNA, 21 bp, synthetic construct
  source 1..21: mol_type = other DNA; mol_type = other DNA
tactcgaaaacaggtcaaaac

SEQ ID NO: 26890 - DNA, 21 bp, synthetic construct
  source 1..21: mol_type = other DNA; mol_type = other DNA
tacgctcggagcggtgtgaat

SEQ ID NO: 26891 - DNA, 21 bp, synthetic construct
  source 1..21: mol_type = other DNA; mol_type = other DNA
tactcaagactcaatgacgca

SEQ ID NO: 26892 - DNA, 21 bp, synthetic construct
  source 1..21: mol_type = other DNA; mol_type = other DNA
tacttcacgggaaaagctcag

SEQ ID NO: 26893 - DNA, 21 bp, synthetic construct
  source 1..21: mol_type = other DNA; mol_type = other DNA
tatagtcgcttatcggagaat

SEQ ID NO: 26894 - DNA, 21 bp, synthetic construct
  source 1..21: mol_type = other DNA; mol_type = other DNA
cgtgaggattttgttcaatgg

SEQ ID NO: 26895 - DNA, 21 bp, synthetic construct
  source 1..21: mol_type = other DNA; mol_type = other DNA
gtggcggatcaccttaggtgg

SEQ ID NO: 26896 - DNA, 21 bp, synthetic construct
  source 1..21: mol_type = other DNA; mol_type = other DNA
gaaaccagtaccaatggtaga

SEQ ID NO: 26897 - DNA, 21 bp, synthetic construct
  source 1..21: mol_type = other DNA; mol_type = other DNA
aagaccgactacgtgacttgg

SEQ ID NO: 26898 - DNA, 21 bp, synthetic construct
  source 1..21: mol_type = other DNA; mol_type = other DNA
tacagtaagggtaacgtcaac

SEQ ID NO: 26899 - DNA, 21 bp, synthetic construct
  source 1..21: mol_type = other DNA; mol_type = other DNA
cgctcaccagatgtgtatcct

SEQ ID NO: 26900 - DNA, 21 bp, synthetic construct
  source 1..21: mol_type = other DNA; mol_type = other DNA
ctacttactagcagcacatgg

SEQ ID NO: 26901 - DNA, 21 bp, synthetic construct
  source 1..21: mol_type = other DNA; mol_type = other DNA
gggtgctacaaaggacccccc

SEQ ID NO: 26902 - DNA, 21 bp, synthetic construct
  source 1..21: mol_type = other DNA; mol_type = other DNA
atagattcgaccaatggcagg

SEQ ID NO: 26903 - DNA, 21 bp, synthetic construct
  source 1..21: mol_type = other DNA; mol_type = other DNA
agggagagcgataatgggata

SEQ ID NO: 26904 - DNA, 21 bp, synthetic construct
  source 1..21: mol_type = other DNA; mol_type = other DNA
ctaaccagtagggaaggcata

SEQ ID NO: 26905 - DNA, 21 bp, synthetic construct
  source 1..21: mol_type = other DNA; mol_type = other DNA
caagatggcaccagcaagtgg

SEQ ID NO: 26906 - DNA, 21 bp, synthetic construct
  source 1..21: mol_type = other DNA; mol_type = other DNA
tggtgtagagaaggaacacca

SEQ ID NO: 26907 - DNA, 21 bp, synthetic construct
  source 1..21: mol_type = other DNA; mol_type = other DNA
gatatgcgctccgctaactgg

SEQ ID NO: 26908 - DNA, 21 bp, synthetic construct
  source 1..21: mol_type = other DNA; mol_type = other DNA
ttctctagggtgggtcttaat

SEQ ID NO: 26909 - DNA, 21 bp, synthetic construct
  source 1..21: mol_type = other DNA; mol_type = other DNA
tatactcatagcaataagttc

SEQ ID NO: 26910 - DNA, 21 bp, synthetic construct
  source 1..21: mol_type = other DNA; mol_type = other DNA
ttacatagactgagcaacggt

SEQ ID NO: 26911 - DNA, 21 bp, synthetic construct
  source 1..21: mol_type = other DNA; mol_type = other DNA
cttcacaaaatgatgatgaac

SEQ ID NO: 26912 - DNA, 21 bp, synthetic construct
  source 1..21: mol_type = other DNA; mol_type = other DNA
ctacccgatggggatggcccc

SEQ ID NO: 26913 - DNA, 21 bp, synthetic construct
  source 1..21: mol_type = other DNA; mol_type = other DNA
tacccgttcccacaagctgca

SEQ ID NO: 26914 - DNA, 21 bp, synthetic construct
  source 1..21: mol_type = other DNA; mol_type = other DNA
tatttctcgggaattcaacac

SEQ ID NO: 26915 - DNA, 21 bp, synthetic construct
  source 1..21: mol_type = other DNA; mol_type = other DNA
tatcatcgcttgagtaatgat

SEQ ID NO: 26916 - DNA, 21 bp, synthetic construct
  source 1..21: mol_type = other DNA; mol_type = other DNA
tatttcagtggcgttcaagat

SEQ ID NO: 26917 - DNA, 21 bp, synthetic construct
  source 1..21: mol_type = other DNA; mol_type = other DNA
tgcgatggctcccacaaggct

SEQ ID NO: 26918 - DNA, 21 bp, synthetic construct
  source 1..21: mol_type = other DNA; mol_type = other DNA
tacgctaggacaagccccatg

SEQ ID NO: 26919 - DNA, 21 bp, synthetic construct
  source 1..21: mol_type = other DNA; mol_type = other DNA
attatgtcccacgccacctgg

SEQ ID NO: 26920 - DNA, 21 bp, synthetic construct
  source 1..21: mol_type = other DNA; mol_type = other DNA
agattagaagccgttacgtgg

SEQ ID NO: 26921 - DNA, 21 bp, synthetic construct
  source 1..21: mol_type = other DNA; mol_type = other DNA
aaagaggattatactacgtgg

SEQ ID NO: 26922 - DNA, 21 bp, synthetic construct
  source 1..21: mol_type = other DNA; mol_type = other DNA
tatagtaggcttcagagcgat

SEQ ID NO: 26923 - DNA, 21 bp, synthetic construct
  source 1..21: mol_type = other DNA; mol_type = other DNA
tacttcaccggccagcaagcc

SEQ ID NO: 26924 - DNA, 21 bp, synthetic construct
  source 1..21: mol_type = other DNA; mol_type = other DNA
cgtatggaagacagaaaatgg

SEQ ID NO: 26925 - DNA, 21 bp, synthetic construct
  source 1..21: mol_type = other DNA; mol_type = other DNA
tattcgcgtttaggacaaaac

SEQ ID NO: 26926 - DNA, 21 bp, synthetic construct
  source 1..21: mol_type = other DNA; mol_type = other DNA
taccataagtcacaatcaaat

SEQ ID NO: 26927 - DNA, 21 bp, synthetic construct
  source 1..21: mol_type = other DNA; mol_type = other DNA
tacttctccggtgtttcggaa

SEQ ID NO: 26928 - DNA, 21 bp, synthetic construct
  source 1..21: mol_type = other DNA; mol_type = other DNA
tcaacctacgacagttatcca

SEQ ID NO: 26929 - DNA, 21 bp, synthetic construct
  source 1..21: mol_type = other DNA; mol_type = other DNA
aacgatggcatttcgaagtgg

SEQ ID NO: 26930 - DNA, 21 bp, synthetic construct
  source 1..21: mol_type = other DNA; mol_type = other DNA
tacagtcgtgctggacccaac

SEQ ID NO: 26931 - DNA, 21 bp, synthetic construct
  source 1..21: mol_type = other DNA; mol_type = other DNA
tacttttctggcaaaccaaac

SEQ ID NO: 26932 - DNA, 21 bp, synthetic construct
  source 1..21: mol_type = other DNA; mol_type = other DNA
tactctcgaatccagcttaat

SEQ ID NO: 26933 - DNA, 21 bp, synthetic construct
  source 1..21: mol_type = other DNA; mol_type = other DNA
taccataaacacggcccccaa

SEQ ID NO: 26934 - DNA, 21 bp, synthetic construct
  source 1..21: mol_type = other DNA; mol_type = other DNA
agattgcaggatgttacgtgg

SEQ ID NO: 26935 - DNA, 21 bp, synthetic construct
  source 1..21: mol_type = other DNA; mol_type = other DNA
tacgttaaaagtgacggcagt

SEQ ID NO: 26936 - DNA, 21 bp, synthetic construct
  source 1..21: mol_type = other DNA; mol_type = other DNA
tatctaaagagtcaacactac

SEQ ID NO: 26937 - DNA, 21 bp, synthetic construct
  source 1..21: mol_type = other DNA; mol_type = other DNA
ttcgcacgaactggagcaaac

SEQ ID NO: 26938 - DNA, 21 bp, synthetic construct
  source 1..21: mol_type = other DNA; mol_type = other DNA
ttcttcacggggacgtacgac

SEQ ID NO: 26939 - DNA, 21 bp, synthetic construct
  source 1..21: mol_type = other DNA; mol_type = other DNA
agaacttacgatgcgtatcct

SEQ ID NO: 26940 - DNA, 21 bp, synthetic construct
  source 1..21: mol_type = other DNA; mol_type = other DNA
tatttcaccgggatgaccgat

SEQ ID NO: 26941 - DNA, 21 bp, synthetic construct
  source 1..21: mol_type = other DNA; mol_type = other DNA
tcgttctcaactaatggggta

SEQ ID NO: 26942 - DNA, 21 bp, synthetic construct
  source 1..21: mol_type = other DNA; mol_type = other DNA
ttcgcgaggaccgggtataat

SEQ ID NO: 26943 - DNA, 21 bp, synthetic construct
  source 1..21: mol_type = other DNA; mol_type = other DNA
tacttcagcggagttatgcaa

SEQ ID NO: 26944 - DNA, 21 bp, synthetic construct
  source 1..21: mol_type = other DNA; mol_type = other DNA
tgcaaaccaggtatgggacca

SEQ ID NO: 26945 - DNA, 21 bp, synthetic construct
  source 1..21: mol_type = other DNA; mol_type = other DNA
agggatggggcctccacgtgg

SEQ ID NO: 26946 - DNA, 21 bp, synthetic construct
  source 1..21: mol_type = other DNA; mol_type = other DNA
tcggatagcaccaatggcatt

SEQ ID NO: 26947 - DNA, 21 bp, synthetic construct
  source 1..21: mol_type = other DNA; mol_type = other DNA
tatgtgcgtagcgataataga

SEQ ID NO: 26948 - DNA, 21 bp, synthetic construct
  source 1..21: mol_type = other DNA; mol_type = other DNA
tacgcgcgtggcgggttaaac

SEQ ID NO: 26949 - DNA, 21 bp, synthetic construct
  source 1..21: mol_type = other DNA; mol_type = other DNA
tacctcaagagtcagacggtg

SEQ ID NO: 26950 - DNA, 21 bp, synthetic construct
  source 1..21: mol_type = other DNA; mol_type = other DNA
gatatgtacgtcggaagctgt

SEQ ID NO: 26951 - DNA, 21 bp, synthetic construct
  source 1..21: mol_type = other DNA; mol_type = other DNA
aagaacgattacactgtcttt

SEQ ID NO: 26952 - DNA, 21 bp, synthetic construct
  source 1..21: mol_type = other DNA; mol_type = other DNA
tacttttcgggcgtcaccagt

SEQ ID NO: 26953 - DNA, 21 bp, synthetic construct
  source 1..21: mol_type = other DNA; mol_type = other DNA
tgtaaaatgccaatgcgtgac

SEQ ID NO: 26954 - DNA, 21 bp, synthetic construct
  source 1..21: mol_type = other DNA; mol_type = other DNA
tattctcgcaaaaacgaaaat

SEQ ID NO: 26955 - DNA, 21 bp, synthetic construct
  source 1..21: mol_type = other DNA; mol_type = other DNA
ccgtatgcgaggtcgccagca

SEQ ID NO: 26956 - DNA, 21 bp, synthetic construct
  source 1..21: mol_type = other DNA; mol_type = other DNA
tactcacggatccagatggac

SEQ ID NO: 26957 - DNA, 21 bp, synthetic construct
  source 1..21: mol_type = other DNA; mol_type = other DNA
tattttagcggcacgttaagt

SEQ ID NO: 26958 - DNA, 21 bp, synthetic construct
  source 1..21: mol_type = other DNA; mol_type = other DNA
ttgagtaaactcggctttaat

SEQ ID NO: 26959 - DNA, 21 bp, synthetic construct
  source 1..21: mol_type = other DNA
aaggatgagttcgtaagcttc

SEQ ID NO: 26960 - DNA, 21 bp, synthetic construct
  source 1..21: mol_type = other DNA
gaatctgactttaaaatttgg

SEQ ID NO: 26961 - DNA, 21 bp, synthetic construct
  source 1..21: mol_type = other DNA
aatatggccagtaccacttgg

SEQ ID NO: 26962 - DNA, 21 bp, synthetic construct
  source 1..21: mol_type = other DNA
ttatggaatggtgaggggcca

SEQ ID NO: 26963 - DNA, 21 bp, synthetic construct
  source 1..21: mol_type = other DNA
ggcagcgagtacttagcctgg

SEQ ID NO: 26964 - DNA, 21 bp, synthetic construct
  source 1..21: mol_type = other DNA
attacaagctcaaacggagtt

SEQ ID NO: 26965 - DNA, 21 bp, synthetic construct
  source 1..21: mol_type = other DNA
cgtgatgattacagcacctat

SEQ ID NO: 26966 - DNA, 21 bp, synthetic construct
  source 1..21: mol_type = other DNA; mol_type = other DNA
tatttcaccggccaacgcgac

SEQ ID NO: 26967 - DNA, 21 bp, synthetic construct
  source 1..21: mol_type = other DNA; mol_type = other DNA
tactggacgggaatgttggac

SEQ ID NO: 26968 - DNA, 21 bp, synthetic construct
  source 1..21: mol_type = other DNA; mol_type = other DNA
aaaaatgacttcgtaacgtat

SEQ ID NO: 26969 - DNA, 21 bp, synthetic construct
  source 1..21: mol_type = other DNA; mol_type = other DNA
taccataggttacaggaggat

SEQ ID NO: 26970 - DNA, 21 bp, synthetic construct
  source 1..21: mol_type = other DNA; mol_type = other DNA
aacatgagtgatagaggatgg

SEQ ID NO: 26971 - DNA, 21 bp, synthetic construct
  source 1..21: mol_type = other DNA; mol_type = other DNA
tacagtcgcctgaatttaatg

SEQ ID NO: 26972 - DNA, 21 bp, synthetic construct
  source 1..21: mol_type = other DNA; mol_type = other DNA
tactccagaattgggccgctg

SEQ ID NO: 26973 - DNA, 21 bp, synthetic construct
  source 1..21: mol_type = other DNA; mol_type = other DNA
tttgcaaaatctggctacaat

SEQ ID NO: 26974 - DNA, 21 bp, synthetic construct
  source 1..21: mol_type = other DNA; mol_type = other DNA
tactcaagaataggcgaggat

SEQ ID NO: 26975 - DNA, 21 bp, synthetic construct
  source 1..21: mol_type = other DNA; mol_type = other DNA
agaagtgaattcgtagtgtac

SEQ ID NO: 26976 - DNA, 21 bp, synthetic construct
  source 1..21: mol_type = other DNA; mol_type = other DNA
cagaatgattacgtgtcatac

SEQ ID NO: 26977 - DNA, 21 bp, synthetic construct
  source 1..21: mol_type = other DNA; mol_type = other DNA
agggaggaaaacgtcaggtgg

SEQ ID NO: 26978 - DNA, 21 bp, synthetic construct
  source 1..21: mol_type = other DNA; mol_type = other DNA
tactttacaggccaaatcaat

SEQ ID NO: 26979 - DNA, 21 bp, synthetic construct
  source 1..21: mol_type = other DNA; mol_type = other DNA
tacttcacagggacccatagt

SEQ ID NO: 26980 - DNA, 21 bp, synthetic construct
  source 1..21: mol_type = other DNA; mol_type = other DNA
tacagtcgcctgtcagaattg

SEQ ID NO: 26981 - DNA, 21 bp, synthetic construct
  source 1..21: mol_type = other DNA; mol_type = other DNA
tcagattctacaaatgggatc

SEQ ID NO: 26982 - DNA, 21 bp, synthetic construct
  source 1..21: mol_type = other DNA; mol_type = other DNA
cttcacgcaaacggtccaaat

SEQ ID NO: 26983 - DNA, 21 bp, synthetic construct
  source 1..21: mol_type = other DNA; mol_type = other DNA
tacttcagtggacagactgcc

SEQ ID NO: 26984 - DNA, 21 bp, synthetic construct
  source 1..21: mol_type = other DNA; mol_type = other DNA
tattcgaagcataactacaat

SEQ ID NO: 26985 - DNA, 21 bp, synthetic construct
  source 1..21: mol_type = other DNA; mol_type = other DNA
gatccgtctagtcatagctgg

SEQ ID NO: 26986 - DNA, 21 bp, synthetic construct
  source 1..21: mol_type = other DNA; mol_type = other DNA
cttgctaaaacgggcatgaac

SEQ ID NO: 26987 - DNA, 21 bp, synthetic construct
  source 1..21: mol_type = other DNA; mol_type = other DNA
tgcaaactccagcctccgccg

SEQ ID NO: 26988 - DNA, 21 bp, synthetic construct
  source 1..21: mol_type = other DNA; mol_type = other DNA
tatttttcagggatcatgccc

SEQ ID NO: 26989 - DNA, 21 bp, synthetic construct
  source 1..21: mol_type = other DNA; mol_type = other DNA
agggacgactattcgacttac

SEQ ID NO: 26990 - DNA, 21 bp, synthetic construct
  source 1..21: mol_type = other DNA; mol_type = other DNA
gttttttcgacaaacggccgc

SEQ ID NO: 26991 - DNA, 21 bp, synthetic construct
  source 1..21: mol_type = other DNA; mol_type = other DNA
ccatcctcgacaaacggcgtt

SEQ ID NO: 26992 - DNA, 21 bp, synthetic construct
  source 1..21: mol_type = other DNA; mol_type = other DNA
aggttagaggatagggcttgg

SEQ ID NO: 26993 - DNA, 21 bp, synthetic construct
  source 1..21: mol_type = other DNA; mol_type = other DNA
tgtttcgatgggcgtagtgcc

SEQ ID NO: 26994 - DNA, 21 bp, synthetic construct
  source 1..21: mol_type = other DNA; mol_type = other DNA
taccccagtggcgggcccggg

SEQ ID NO: 26995 - DNA, 21 bp, synthetic construct
  source 1..21: mol_type = other DNA; mol_type = other DNA
cgcgacgaattcaccaggtgg

SEQ ID NO: 26996 - DNA, 21 bp, synthetic construct
  source 1..21: mol_type = other DNA; mol_type = other DNA
atcatgtcaagccatgggtgg

SEQ ID NO: 26997 - DNA, 21 bp, synthetic construct
  source 1..21: mol_type = other DNA; mol_type = other DNA
tcagatggagtatcgttgtgg

SEQ ID NO: 26998 - DNA, 21 bp, synthetic construct
  source 1..21: mol_type = other DNA; mol_type = other DNA
tatgtacggtctcaaactttg

SEQ ID NO: 26999 - DNA, 21 bp, synthetic construct
  source 1..21: mol_type = other DNA; mol_type = other DNA
atgagtgagttcgtatcattt

SEQ ID NO: 27000 - DNA, 21 bp, synthetic construct
  source 1..21: mol_type = other DNA; mol_type = other DNA
aaagaagattcccgcacctgg

SEQ ID NO: 27001 - DNA, 21 bp, synthetic construct
  source 1..21: mol_type = other DNA
tatagcagactcggtgaggat

SEQ ID NO: 27002 - DNA, 21 bp, synthetic construct
  source 1..21: mol_type = other DNA
cgtatggccgatcgtgactgg

SEQ ID NO: 27003 - DNA, 21 bp, synthetic construct
  source 1..21: mol_type = other DNA
atagcagaccatttgcggtgg

SEQ ID NO: 27004 - DNA, 21 bp, synthetic construct
  source 1..21: mol_type = other DNA
tgcgccccatatgtacatgaa

SEQ ID NO: 27005 - DNA, 21 bp, synthetic construct
  source 1..21: mol_type = other DNA
ccatatgctaggagcccaatg

SEQ ID NO: 27006 - DNA, 21 bp, synthetic construct
  source 1..21: mol_type = other DNA
ttcactcgtctttcaatcaat

SEQ ID NO: 27007 - DNA, 21 bp, synthetic construct
  source 1..21: mol_type = other DNA
ctacataaactccaggtgtat

SEQ ID NO: 27008 - DNA, 21 bp, synthetic construct
  source 1..21: mol_type = other DNA
cctcagtctactaacggcgtt

SEQ ID NO: 27009 - DNA, 21 bp, synthetic construct
  source 1..21: mol_type = other DNA
tactctcgcgcaggagacaac

SEQ ID NO: 27010 - DNA, 21 bp, synthetic construct
  source 1..21: mol_type = other DNA
gtcagcgagttccaatcttac

SEQ ID NO: 27011 - DNA, 21 bp, synthetic construct
  source 1..21: mol_type = other DNA
tacagccgcatttctcccaat

SEQ ID NO: 27012 - DNA, 21 bp, synthetic construct
  source 1..21: mol_type = other DNA
attacaagcagcaacggaatt

SEQ ID NO: 27013 - DNA, 21 bp, synthetic construct
  source 1..21: mol_type = other DNA
agaagtgagttcgccgtctat

SEQ ID NO: 27014 - DNA, 21 bp, synthetic construct
  source 1..21: mol_type = other DNA
tattggaccggaaaggtggaa

SEQ ID NO: 27015 - DNA, 21 bp, synthetic construct
  source 1..21: mol_type = other DNA
tacttcacgggagttacgggt

SEQ ID NO: 27016 - DNA, 21 bp, synthetic construct
  source 1..21: mol_type = other DNA; mol_type = other DNA
tgcgaaaagctcagtagcaga

SEQ ID NO: 27017 - DNA, 21 bp, synthetic construct
  source 1..21: mol_type = other DNA
tattttagtggacgtctcctt

SEQ ID NO: 27018 - DNA, 21 bp, synthetic construct
  source 1..21: mol_type = other DNA
aaggatgagtatctaacgttt

SEQ ID NO: 27019 - DNA, 21 bp, synthetic construct
  source 1..21: mol_type = other DNA
tactggacaggcaccgtagcg

SEQ ID NO: 27020 - DNA, 21 bp, synthetic construct
  source 1..21: mol_type = other DNA
tattcgcgtttacagccactc

SEQ ID NO: 27021 - DNA, 21 bp, synthetic construct
  source 1..21: mol_type = other DNA
ctacataaattcgcggagaac

SEQ ID NO: 27022 - DNA, 21 bp, synthetic construct
  source 1..21: mol_type = other DNA
tactggtccggtgtaacggat

SEQ ID NO: 27023 - DNA, 21 bp, synthetic construct
  source 1..21: mol_type = other DNA
tatttcagtggaacacgcgag

SEQ ID NO: 27024 - DNA, 21 bp, synthetic construct
  source 1..21: mol_type = other DNA
tattttagcgggaccaccgac

SEQ ID NO: 27025 - DNA, 21 bp, synthetic construct
  source 1..21: mol_type = other DNA
tatttcgagggacgtgtggac

SEQ ID NO: 27026 - DNA, 21 bp, synthetic construct
  source 1..21: mol_type = other DNA
cgactggaagaccgcgcatgg

SEQ ID NO: 27027 - DNA, 21 bp, synthetic construct
  source 1..21: mol_type = other DNA
ttagcgcggactggcagagat

SEQ ID NO: 27028 - DNA, 21 bp, synthetic construct
  source 1..21: mol_type = other DNA
cgtggcgacagtccgaagtgg

SEQ ID NO: 27029 - DNA, 21 bp, synthetic construct
  source 1..21: mol_type = other DNA; mol_type = other DNA
atattagactcccgcaaatgg

SEQ ID NO: 27030 - DNA, 21 bp, synthetic construct
  source 1..21: mol_type = other DNA; mol_type = other DNA
tttagtcgattaaatatgaac

SEQ ID NO: 27031 - DNA, 21 bp, synthetic construct
  source 1..21: mol_type = other DNA; mol_type = other DNA
agggagtcggaggtgcgatgg

SEQ ID NO: 27032 - DNA, 21 bp, synthetic construct
  source 1..21: mol_type = other DNA; mol_type = other DNA
attgagagcagcaacggggtt

SEQ ID NO: 27033 - DNA, 21 bp, synthetic construct
  source 1..21: mol_type = other DNA; mol_type = other DNA
cggaatatgagtgtatatccg

SEQ ID NO: 27034 - DNA, 21 bp, synthetic construct
  source 1..21: mol_type = other DNA; mol_type = other DNA
ttctcaagagtaggcgcgaac

SEQ ID NO: 27035 - DNA, 21 bp, synthetic construct
  source 1..21: mol_type = other DNA; mol_type = other DNA
ttttccaggatcgggaccaac

SEQ ID NO: 27036 - DNA, 21 bp, synthetic construct
  source 1..21: mol_type = other DNA; mol_type = other DNA
tactttaccgggactaataac

SEQ ID NO: 27037 - DNA, 21 bp, synthetic construct
  source 1..21: mol_type = other DNA; mol_type = other DNA
tacgagccaggttgcaaggtc

SEQ ID NO: 27038 - DNA, 21 bp, synthetic construct
  source 1..21: mol_type = other DNA; mol_type = other DNA
ggatgctccggatttaagacg

SEQ ID NO: 27039 - DNA, 21 bp, synthetic construct
  source 1..21: mol_type = other DNA; mol_type = other DNA
tatttccaaggaaggattgaa

SEQ ID NO: 27040 - DNA, 21 bp, synthetic construct
  source 1..21: mol_type = other DNA; mol_type = other DNA
tgccgcacaggacaacccgcc

SEQ ID NO: 27041 - DNA, 21 bp, synthetic construct
  source 1..21: mol_type = other DNA; mol_type = other DNA
tttttctccggtataatggag

SEQ ID NO: 27042 - DNA, 21 bp, synthetic construct
  source 1..21: mol_type = other DNA; mol_type = other DNA
ttcgcaaaaaatggacctaac

SEQ ID NO: 27043 - DNA, 21 bp, synthetic construct
  source 1..21: mol_type = other DNA; mol_type = other DNA
gatctacggtcgaagacgtgg

SEQ ID NO: 27044 - DNA, 21 bp, synthetic construct
  source 1..21: mol_type = other DNA; mol_type = other DNA
tactttcatggaaagctggac

SEQ ID NO: 27045 - DNA, 21 bp, synthetic construct
  source 1..21: mol_type = other DNA; mol_type = other DNA
aatatgtctagcaggggatgg

SEQ ID NO: 27046 - DNA, 21 bp, synthetic construct
  source 1..21: mol_type = other DNA; mol_type = other DNA
tacttaaaaagccaatcttac

SEQ ID NO: 27047 - DNA, 21 bp, synthetic construct
  source 1..21: mol_type = other DNA; mol_type = other DNA
aaggatgattttactggattc

SEQ ID NO: 27048 - DNA, 21 bp, synthetic construct
  source 1..21: mol_type = other DNA; mol_type = other DNA
ttaagcaaagtagggagcaat

SEQ ID NO: 27049 - DNA, 21 bp, synthetic construct
  source 1..21: mol_type = other DNA; mol_type = other DNA
tttagtcgtgtgggaacgaat

SEQ ID NO: 27050 - DNA, 21 bp, synthetic construct
  source 1..21: mol_type = other DNA; mol_type = other DNA
tactttcagggccgcatagag

SEQ ID NO: 27051 - DNA, 21 bp, synthetic construct
  source 1..21: mol_type = other DNA; mol_type = other DNA
tattctaggatccaagatgac

SEQ ID NO: 27052 - DNA, 21 bp, synthetic construct
  source 1..21: mol_type = other DNA; mol_type = other DNA
aaggacgattatctaagttgg

SEQ ID NO: 27053 - DNA, 21 bp, synthetic construct
  source 1..21: mol_type = other DNA; mol_type = other DNA
cgagacgggacttcgcgttgg

SEQ ID NO: 27054 - DNA, 21 bp, synthetic construct
  source 1..21: mol_type = other DNA; mol_type = other DNA
atccgaagtactaacgggatt

SEQ ID NO: 27055 - DNA, 21 bp, synthetic construct
  source 1..21: mol_type = other DNA; mol_type = other DNA
cgtgatgagtatagtagctac

SEQ ID NO: 27056 - DNA, 21 bp, synthetic construct
  source 1..21: mol_type = other DNA; mol_type = other DNA
tacgcgaggagtggagataac

SEQ ID NO: 27057 - DNA, 21 bp, synthetic construct
  source 1..21: mol_type = other DNA; mol_type = other DNA
tattttagcggtaccatccag

SEQ ID NO: 27058 - DNA, 21 bp, synthetic construct
  source 1..21: mol_type = other DNA; mol_type = other DNA
agaggcgagtttgtgatgttt

SEQ ID NO: 27059 - DNA, 21 bp, synthetic construct
  source 1..21: mol_type = other DNA; mol_type = other DNA
tacttctcgggcagatcagaa

SEQ ID NO: 27060 - DNA, 21 bp, synthetic construct
  source 1..21: mol_type = other DNA; mol_type = other DNA
agagacggcagtagcgcgtgg

SEQ ID NO: 27061 - DNA, 21 bp, synthetic construct
  source 1..21: mol_type = other DNA; mol_type = other DNA
tactggtcgggcgtaaccgat

SEQ ID NO: 27062 - DNA, 21 bp, synthetic construct
  source 1..21: mol_type = other DNA; mol_type = other DNA
tatgctaagagcggatggaac

SEQ ID NO: 27063 - DNA, 21 bp, synthetic construct
  source 1..21: mol_type = other DNA; mol_type = other DNA
ttgtgggacggaactatggct

SEQ ID NO: 27064 - DNA, 21 bp, synthetic construct
  source 1..21: mol_type = other DNA; mol_type = other DNA
tttgaaagtaccaacggtgta

SEQ ID NO: 27065 - DNA, 21 bp, synthetic construct
  source 1..21: mol_type = other DNA; mol_type = other DNA
aaggacgacttcgtctcgttt

SEQ ID NO: 27066 - DNA, 21 bp, synthetic construct
  source 1..21: mol_type = other DNA; mol_type = other DNA
gtatccgaatttgaaatcttt

SEQ ID NO: 27067 - DNA, 21 bp, synthetic construct
  source 1..21: mol_type = other DNA; mol_type = other DNA
gaaaatgattttaaaatcttc

SEQ ID NO: 27068 - DNA, 21 bp, synthetic construct
  source 1..21: mol_type = other DNA; mol_type = other DNA
tacctcaaatcacagccttat

SEQ ID NO: 27069 - DNA, 21 bp, synthetic construct
  source 1..21: mol_type = other DNA; mol_type = other DNA
agttggtccacaaatggagta

SEQ ID NO: 27070 - DNA, 21 bp, synthetic construct
  source 1..21: mol_type = other DNA; mol_type = other DNA
ttgcacagattaaatcctagt

SEQ ID NO: 27071 - DNA, 21 bp, synthetic construct
  source 1..21: mol_type = other DNA; mol_type = other DNA
gttgacgaatggttacccttc

SEQ ID NO: 27072 - DNA, 21 bp, synthetic construct
  source 1..21: mol_type = other DNA; mol_type = other DNA
ttctcaagcactaatggagta

SEQ ID NO: 27073 - DNA, 21 bp, synthetic construct
  source 1..21: mol_type = other DNA; mol_type = other DNA
tactggacaggcactgttgac

SEQ ID NO: 27074 - DNA, 21 bp, synthetic construct
  source 1..21: mol_type = other DNA; mol_type = other DNA
ctttgtcgtccttgctcgatg

SEQ ID NO: 27075 - DNA, 21 bp, synthetic construct
  source 1..21: mol_type = other DNA; mol_type = other DNA
tatttttcgggcaagcagtca

SEQ ID NO: 27076 - DNA, 21 bp, synthetic construct
  source 1..21: mol_type = other DNA; mol_type = other DNA
cgtagcgaatttgcgacatat

SEQ ID NO: 27077 - DNA, 21 bp, synthetic construct
  source 1..21: mol_type = other DNA; mol_type = other DNA
ggggtggaaactgtgcgttgg

SEQ ID NO: 27078 - DNA, 21 bp, synthetic construct
  source 1..21: mol_type = other DNA; mol_type = other DNA
ctgtgtagaccgttaagtgag

SEQ ID NO: 27079 - DNA, 21 bp, synthetic construct
  source 1..21: mol_type = other DNA; mol_type = other DNA
aaagatgaatttaggacgtat

SEQ ID NO: 27080 - DNA, 21 bp, synthetic construct
  source 1..21: mol_type = other DNA; mol_type = other DNA
tatagccgcactggaattaac

SEQ ID NO: 27081 - DNA, 21 bp, synthetic construct
  source 1..21: mol_type = other DNA; mol_type = other DNA
tatttccacggcaagcaagaa

SEQ ID NO: 27082 - DNA, 21 bp, synthetic construct
  source 1..21: mol_type = other DNA; mol_type = other DNA
ctcgcgaagacagcgtgcaat

SEQ ID NO: 27083 - DNA, 21 bp, synthetic construct
  source 1..21: mol_type = other DNA; mol_type = other DNA
atcatgtcaaccaacggggta

SEQ ID NO: 27084 - DNA, 21 bp, synthetic construct
  source 1..21: mol_type = other DNA; mol_type = other DNA
tattttcatggcgtagccgcc

SEQ ID NO: 27085 - DNA, 21 bp, synthetic construct
  source 1..21: mol_type = other DNA; mol_type = other DNA
agatcagaattccatagcttc

SEQ ID NO: 27086 - DNA, 21 bp, synthetic construct
  source 1..21: mol_type = other DNA; mol_type = other DNA
tatcaccgcttgtcggccgac

SEQ ID NO: 27087 - DNA, 21 bp, synthetic construct
  source 1..21: mol_type = other DNA; mol_type = other DNA
cataactccacaaatggcgta

SEQ ID NO: 27088 - DNA, 21 bp, synthetic construct
  source 1..21: mol_type = other DNA; mol_type = other DNA
tatttcactggtaaacctgaa

SEQ ID NO: 27089 - DNA, 21 bp, synthetic construct
  source 1..21: mol_type = other DNA; mol_type = other DNA
tacttttcaggaacagtaatg

SEQ ID NO: 27090 - DNA, 21 bp, synthetic construct
  source 1..21: mol_type = other DNA; mol_type = other DNA
tatgcacggacaggggcaaat

SEQ ID NO: 27091 - DNA, 21 bp, synthetic construct
  source 1..21: mol_type = other DNA; mol_type = other DNA
aaagactcattcaccgcctgg

SEQ ID NO: 27092 - DNA, 21 bp, synthetic construct
  source 1..21: mol_type = other DNA; mol_type = other DNA
ttcttctctggcgtaagggag

SEQ ID NO: 27093 - DNA, 21 bp, synthetic construct
  source 1..21: mol_type = other DNA; mol_type = other DNA
aaagatgattgggtcaagtac

SEQ ID NO: 27094 - DNA, 21 bp, synthetic construct
  source 1..21: mol_type = other DNA; mol_type = other DNA
tattttagtggaaaaattacc

SEQ ID NO: 27095 - DNA, 21 bp, synthetic construct
  source 1..21: mol_type = other DNA; mol_type = other DNA
gagccggagtccaggaagtgg

SEQ ID NO: 27096 - DNA, 21 bp, synthetic construct
  source 1..21: mol_type = other DNA; mol_type = other DNA
tattcgaggatcaatgacaat

SEQ ID NO: 27097 - DNA, 21 bp, synthetic construct
  source 1..21: mol_type = other DNA; mol_type = other DNA
tatttttccggacaaaacgag

SEQ ID NO: 27098 - DNA, 21 bp, synthetic construct
  source 1..21: mol_type = other DNA; mol_type = other DNA
tattcatcgataggccccaac

SEQ ID NO: 27099 - DNA, 21 bp, synthetic construct
  source 1..21: mol_type = other DNA; mol_type = other DNA
acagacggctacagcagttgg

SEQ ID NO: 27100 - DNA, 21 bp, synthetic construct
  source 1..21: mol_type = other DNA; mol_type = other DNA
tgcaataaacccactactgcg

SEQ ID NO: 27101 - DNA, 21 bp, synthetic construct
  source 1..21: mol_type = other DNA; mol_type = other DNA
ccgtgcgggaagcctcctcct

SEQ ID NO: 27102 - DNA, 21 bp, synthetic construct
  source 1..21: mol_type = other DNA; mol_type = other DNA
tatgcaaaagggaattttaat

SEQ ID NO: 27103 - DNA, 21 bp, synthetic construct
  source 1..21: mol_type = other DNA; mol_type = other DNA
ctgtctcgcatgaattataac

SEQ ID NO: 27104 - DNA, 21 bp, synthetic construct
  source 1..21: mol_type = other DNA; mol_type = other DNA
tatttcagcggtatattggga

SEQ ID NO: 27105 - DNA, 21 bp, synthetic construct
  source 1..21: mol_type = other DNA; mol_type = other DNA
cagatggcggctcacgattgg

SEQ ID NO: 27106 - DNA, 21 bp, synthetic construct
  source 1..21: mol_type = other DNA; mol_type = other DNA
ggaggtgaatttagcaaatgg

SEQ ID NO: 27107 - DNA, 21 bp, synthetic construct
  source 1..21: mol_type = other DNA; mol_type = other DNA
ggaggaccaggagtaagatgg

SEQ ID NO: 27108 - DNA, 21 bp, synthetic construct
  source 1..21: mol_type = other DNA; mol_type = other DNA
gatatgacagataggaagtgg

SEQ ID NO: 27109 - DNA, 21 bp, synthetic construct
  source 1..21: mol_type = other DNA; mol_type = other DNA
ttctcaagagttgggacaaac

SEQ ID NO: 27110 - DNA, 21 bp, synthetic construct
  source 1..21: mol_type = other DNA; mol_type = other DNA
tattttacgggatggccggac

SEQ ID NO: 27111 - DNA, 21 bp, synthetic construct
  source 1..21: mol_type = other DNA; mol_type = other DNA
tgtgccccggattaccgtcca

SEQ ID NO: 27112 - DNA, 21 bp, synthetic construct
  source 1..21: mol_type = other DNA; mol_type = other DNA
tacgtcagaagccagctcaac

SEQ ID NO: 27113 - DNA, 21 bp, synthetic construct
  source 1..21: mol_type = other DNA; mol_type = other DNA
tactatactgggaagatcagt

SEQ ID NO: 27114 - DNA, 21 bp, synthetic construct
  source 1..21: mol_type = other DNA; mol_type = other DNA
tactccagacttagtgagaac

SEQ ID NO: 27115 - DNA, 21 bp, synthetic construct
  source 1..21: mol_type = other DNA; mol_type = other DNA
tacgtacgttcccaacctggc

SEQ ID NO: 27116 - DNA, 21 bp, synthetic construct
  source 1..21: mol_type = other DNA; mol_type = other DNA
tacagcaagcacaacaataat

SEQ ID NO: 27117 - DNA, 21 bp, synthetic construct
  source 1..21: mol_type = other DNA; mol_type = other DNA
aaggaagactacaccacatgg

SEQ ID NO: 27118 - DNA, 21 bp, synthetic construct
  source 1..21: mol_type = other DNA; mol_type = other DNA
tgtaaacccccgagtgactac

SEQ ID NO: 27119 - DNA, 21 bp, synthetic construct
  source 1..21: mol_type = other DNA; mol_type = other DNA
tacttcgctggggtaaaagag

SEQ ID NO: 27120 - DNA, 21 bp, synthetic construct
  source 1..21: mol_type = other DNA; mol_type = other DNA
tacagcaagggaaactataat

SEQ ID NO: 27121 - DNA, 21 bp, synthetic construct
  source 1..21: mol_type = other DNA; mol_type = other DNA
tatagtagggtgggccagaac

SEQ ID NO: 27122 - DNA, 21 bp, synthetic construct
  source 1..21: mol_type = other DNA; mol_type = other DNA
tatgcacgcacgtcgccgtta

SEQ ID NO: 27123 - DNA, 21 bp, synthetic construct
  source 1..21: mol_type = other DNA; mol_type = other DNA
gacttacgagataggacttgg

SEQ ID NO: 27124 - DNA, 21 bp, synthetic construct
  source 1..21: mol_type = other DNA; mol_type = other DNA
cgagacggaaatagtgcctgg

SEQ ID NO: 27125 - DNA, 21 bp, synthetic construct
  source 1..21: mol_type = other DNA; mol_type = other DNA
tattcgaagctggacagcaga

SEQ ID NO: 27126 - DNA, 21 bp, synthetic construct
  source 1..21: mol_type = other DNA; mol_type = other DNA
tattccaagcatggcctgaac

SEQ ID NO: 27127 - DNA, 21 bp, synthetic construct
  source 1..21: mol_type = other DNA; mol_type = other DNA
tatttttcagggcaaatcatg

SEQ ID NO: 27128 - DNA, 21 bp, synthetic construct
  source 1..21: mol_type = other DNA; mol_type = other DNA
tatcacaaaaatgggtataac

SEQ ID NO: 27129 - DNA, 21 bp, synthetic construct
  source 1..21: mol_type = other DNA; mol_type = other DNA
cggggcgacgaagtgtatccg

SEQ ID NO: 27130 - DNA, 21 bp, synthetic construct
  source 1..21: mol_type = other DNA; mol_type = other DNA
ggtcctgaccacgttcgttgg

SEQ ID NO: 27131 - DNA, 21 bp, synthetic construct
  source 1..21: mol_type = other DNA; mol_type = other DNA
cgaacgtttgatgcttacccg

SEQ ID NO: 27132 - DNA, 21 bp, synthetic construct
  source 1..21: mol_type = other DNA; mol_type = other DNA
tactccagggccggtcctaat

SEQ ID NO: 27133 - DNA, 21 bp, synthetic construct
  source 1..21: mol_type = other DNA; mol_type = other DNA
ggggacgaatatcacagctgg

SEQ ID NO: 27134 - DNA, 21 bp, synthetic construct
  source 1..21: mol_type = other DNA; mol_type = other DNA
cataatagtacgaatggccgc

SEQ ID NO: 27135 - DNA, 21 bp, synthetic construct
  source 1..21: mol_type = other DNA; mol_type = other DNA
ttctttaccggaaaaatcgag

SEQ ID NO: 27136 - DNA, 21 bp, synthetic construct
  source 1..21: mol_type = other DNA; mol_type = other DNA
ggggacggttcgagtcgatgg

SEQ ID NO: 27137 - DNA, 21 bp, synthetic construct
  source 1..21: mol_type = other DNA; mol_type = other DNA
tactttaccggttaccctgac

SEQ ID NO: 27138 - DNA, 21 bp, synthetic construct
  source 1..21: mol_type = other DNA
tactctagaataggggagaat

SEQ ID NO: 27139 - DNA, 21 bp, synthetic construct
  source 1..21: mol_type = other DNA
cgaaagagcgacgtgtaccct

SEQ ID NO: 27140 - DNA, 21 bp, synthetic construct
  source 1..21: mol_type = other DNA
tactcccggttgcagccaacc

SEQ ID NO: 27141 - DNA, 21 bp, synthetic construct
  source 1..21: mol_type = other DNA; mol_type = other DNA
ggaagtccgggggtacactgg

SEQ ID NO: 27142 - DNA, 21 bp, synthetic construct
  source 1..21: mol_type = other DNA; mol_type = other DNA
gtaatggaggacagaatctgg

SEQ ID NO: 27143 - DNA, 21 bp, synthetic construct
  source 1..21: mol_type = other DNA; mol_type = other DNA
gaccttcaaagcattaagtgg

SEQ ID NO: 27144 - DNA, 21 bp, synthetic construct
  source 1..21: mol_type = other DNA; mol_type = other DNA
cttaaagatggtactagtgca

SEQ ID NO: 27145 - DNA, 21 bp, synthetic construct
  source 1..21: mol_type = other DNA; mol_type = other DNA
tattttacagggaaggtggga

SEQ ID NO: 27146 - DNA, 21 bp, synthetic construct
  source 1..21: mol_type = other DNA; mol_type = other DNA
tacagcaaacatggtatgaac

SEQ ID NO: 27147 - DNA, 21 bp, synthetic construct
  source 1..21: mol_type = other DNA; mol_type = other DNA
ggtggagagtatagtaaatgg

SEQ ID NO: 27148 - DNA, 21 bp, synthetic construct
  source 1..21: mol_type = other DNA; mol_type = other DNA
tatagtagaatcggtccaggg

SEQ ID NO: 27149 - DNA, 21 bp, synthetic construct
  source 1..21: mol_type = other DNA; mol_type = other DNA
tattttacaggtcaaatggat

SEQ ID NO: 27150 - DNA, 21 bp, synthetic construct
  source 1..21: mol_type = other DNA; mol_type = other DNA
tatgctcgtacgggcttgaat

SEQ ID NO: 27151 - DNA, 21 bp, synthetic construct
  source 1..21: mol_type = other DNA; mol_type = other DNA
tgggtgaaaagctctcctgga

SEQ ID NO: 27152 - DNA, 21 bp, synthetic construct
  source 1..21: mol_type = other DNA; mol_type = other DNA
attatttcgactaatgggcgc

SEQ ID NO: 27153 - DNA, 21 bp, synthetic construct
  source 1..21: mol_type = other DNA; mol_type = other DNA
gtcaactcgagcaatggacgg

SEQ ID NO: 27154 - DNA, 21 bp, synthetic construct
  source 1..21: mol_type = other DNA; mol_type = other DNA
tacagctcaatcggtccgaac

SEQ ID NO: 27155 - DNA, 21 bp, synthetic construct
  source 1..21: mol_type = other DNA; mol_type = other DNA
tacttctctgggcaaactgat

SEQ ID NO: 27156 - DNA, 21 bp, synthetic construct
  source 1..21: mol_type = other DNA; mol_type = other DNA
cgtcttgaggataggagttgg

SEQ ID NO: 27157 - DNA, 21 bp, synthetic construct
  source 1..21: mol_type = other DNA; mol_type = other DNA
atgtgggacggaactatggca

SEQ ID NO: 27158 - DNA, 21 bp, synthetic construct
  source 1..21: mol_type = other DNA; mol_type = other DNA
tactacacggggattgtctcg

SEQ ID NO: 27159 - DNA, 21 bp, synthetic construct
  source 1..21: mol_type = other DNA; mol_type = other DNA
tatagcaagataggacgagat

SEQ ID NO: 27160 - DNA, 21 bp, synthetic construct
  source 1..21: mol_type = other DNA; mol_type = other DNA
tattttgcgggtaaacatgag

SEQ ID NO: 27161 - DNA, 21 bp, synthetic construct
  source 1..21: mol_type = other DNA; mol_type = other DNA
tatttttcgggacaattggca

SEQ ID NO: 27162 - DNA, 21 bp, synthetic construct
  source 1..21: mol_type = other DNA; mol_type = other DNA
tacttcagtggaacgagagac

SEQ ID NO: 27163 - DNA, 21 bp, synthetic construct
  source 1..21: mol_type = other DNA; mol_type = other DNA
tactttcacgggcaagtagct

SEQ ID NO: 27164 - DNA, 21 bp, synthetic construct
  source 1..21: mol_type = other DNA; mol_type = other DNA
tactcccggcttgggctgaat

SEQ ID NO: 27165 - DNA, 21 bp, synthetic construct
  source 1..21: mol_type = other DNA; mol_type = other DNA
atcatggcttcgcagagctgg

SEQ ID NO: 27166 - DNA, 21 bp, synthetic construct
  source 1..21: mol_type = other DNA; mol_type = other DNA
atgtgggacgggactatagcg

SEQ ID NO: 27167 - DNA, 21 bp, synthetic construct
  source 1..21: mol_type = other DNA; mol_type = other DNA
tacgcccgaatgggccccgat

SEQ ID NO: 27168 - DNA, 21 bp, synthetic construct
  source 1..21: mol_type = other DNA; mol_type = other DNA
tcaatggaatcgcgactttgg

SEQ ID NO: 27169 - DNA, 21 bp, synthetic construct
  source 1..21: mol_type = other DNA; mol_type = other DNA
tacttctcgggcacatacgac

SEQ ID NO: 27170 - DNA, 21 bp, synthetic construct
  source 1..21: mol_type = other DNA; mol_type = other DNA
tactctaaatcaggggttaat

SEQ ID NO: 27171 - DNA, 21 bp, synthetic construct
  source 1..21: mol_type = other DNA; mol_type = other DNA
ggcggcgctacgagtcactgg

SEQ ID NO: 27172 - DNA, 21 bp, synthetic construct
  source 1..21: mol_type = other DNA; mol_type = other DNA
cgtccggacacagtacgctgg

SEQ ID NO: 27173 - DNA, 21 bp, synthetic construct
  source 1..21: mol_type = other DNA; mol_type = other DNA
tatgtacggtcagattcttta

SEQ ID NO: 27174 - DNA, 21 bp, synthetic construct
  source 1..21: mol_type = other DNA; mol_type = other DNA
ttcttctcaggccaggtcgac

SEQ ID NO: 27175 - DNA, 21 bp, synthetic construct
  source 1..21: mol_type = other DNA; mol_type = other DNA
ggtagtgagttcaaggtgttc

SEQ ID NO: 27176 - DNA, 21 bp, synthetic construct
  source 1..21: mol_type = other DNA; mol_type = other DNA
tatgtacgtagccaaacgtca

SEQ ID NO: 27177 - DNA, 21 bp, synthetic construct
  source 1..21: mol_type = other DNA; mol_type = other DNA
ggctgtaggcatggtaccatc

SEQ ID NO: 27178 - DNA, 21 bp, synthetic construct
  source 1..21: mol_type = other DNA; mol_type = other DNA
ggtagcgaattcatgagctat

SEQ ID NO: 27179 - DNA, 21 bp, synthetic construct
  source 1..21: mol_type = other DNA; mol_type = other DNA
gacctccgtgcagcgaactgg

SEQ ID NO: 27180 - DNA, 21 bp, synthetic construct
  source 1..21: mol_type = other DNA; mol_type = other DNA
ttctcgaggctgggaatgaac

SEQ ID NO: 27181 - DNA, 21 bp, synthetic construct
  source 1..21: mol_type = other DNA; mol_type = other DNA
tacgcgaagaacggatggaac

SEQ ID NO: 27182 - DNA, 21 bp, synthetic construct
  source 1..21: mol_type = other DNA; mol_type = other DNA
attgacggccgcggttgggac

SEQ ID NO: 27183 - DNA, 21 bp, synthetic construct
  source 1..21: mol_type = other DNA; mol_type = other DNA
tactggtcaggcatccatgag

SEQ ID NO: 27184 - DNA, 21 bp, synthetic construct
  source 1..21: mol_type = other DNA; mol_type = other DNA
cattcacgattaaacgtgtcg

SEQ ID NO: 27185 - DNA, 21 bp, synthetic construct
  source 1..21: mol_type = other DNA; mol_type = other DNA
tacgcgaggctcggtcataac

SEQ ID NO: 27186 - DNA, 21 bp, synthetic construct
  source 1..21: mol_type = other DNA; mol_type = other DNA
aggtctgaattcctaccttac

SEQ ID NO: 27187 - DNA, 21 bp, synthetic construct
  source 1..21: mol_type = other DNA; mol_type = other DNA
gtcgcgagctccaatggggtc

SEQ ID NO: 27188 - DNA, 21 bp, synthetic construct
  source 1..21: mol_type = other DNA; mol_type = other DNA
cacagtaggttaaatgtggta

SEQ ID NO: 27189 - DNA, 21 bp, synthetic construct
  source 1..21: mol_type = other DNA; mol_type = other DNA
cgcgagtcgacaaatggtatt

SEQ ID NO: 27190 - DNA, 21 bp, synthetic construct
  source 1..21: mol_type = other DNA; mol_type = other DNA
tatgttaggagtgacacggct

SEQ ID NO: 27191 - DNA, 21 bp, synthetic construct
  source 1..21: mol_type = other DNA; mol_type = other DNA
tatttcgctggcatcattgga

SEQ ID NO: 27192 - DNA, 21 bp, synthetic construct
  source 1..21: mol_type = other DNA; mol_type = other DNA
tacttcaccgggagagccgac

SEQ ID NO: 27193 - DNA, 21 bp, synthetic construct
  source 1..21: mol_type = other DNA; mol_type = other DNA
tactcccgagtcgggcaaaat

SEQ ID NO: 27194 - DNA, 21 bp, synthetic construct
  source 1..21: mol_type = other DNA; mol_type = other DNA
tatcatagactgagtgagaat

SEQ ID NO: 27195 - DNA, 21 bp, synthetic construct
  source 1..21: mol_type = other DNA; mol_type = other DNA
tactggacagggaaagttgag

SEQ ID NO: 27196 - DNA, 21 bp, synthetic construct
  source 1..21: mol_type = other DNA; mol_type = other DNA
tatagccgattatccttcgac

SEQ ID NO: 27197 - DNA, 21 bp, synthetic construct
  source 1..21: mol_type = other DNA; mol_type = other DNA
tggtggaccgggattgccgat

SEQ ID NO: 27198 - DNA, 21 bp, synthetic construct
  source 1..21: mol_type = other DNA; mol_type = other DNA
aggaacgagttcacatcgtgg

SEQ ID NO: 27199 - DNA, 21 bp, synthetic construct
  source 1..21: mol_type = other DNA; mol_type = other DNA
tatttcacgggtcggactgac

SEQ ID NO: 27200 - DNA, 21 bp, synthetic construct
  source 1..21: mol_type = other DNA
ctttcgagggtatctcctgat

SEQ ID NO: 27201 - DNA, 21 bp, synthetic construct
  source 1..21: mol_type = other DNA
tactttgctggggtgaagggg

SEQ ID NO: 27202 - DNA, 21 bp, synthetic construct
  source 1..21: mol_type = other DNA
agggaagattttagtacgtgg

SEQ ID NO: 27203 - DNA, 21 bp, synthetic construct
  source 1..21: mol_type = other DNA
ctgcataagtttgccgaaaat

SEQ ID NO: 27204 - DNA, 21 bp, synthetic construct
  source 1..21: mol_type = other DNA
tttagccgtgtcggttttaat

SEQ ID NO: 27205 - DNA, 21 bp, synthetic construct
  source 1..21: mol_type = other DNA
tgtaaagaaggcgtgcgttgg

SEQ ID NO: 27206 - DNA, 21 bp, synthetic construct
  source 1..21: mol_type = other DNA
tattggagcggagtgacggac

SEQ ID NO: 27207 - DNA, 21 bp, synthetic construct
  source 1..21: mol_type = other DNA
ctcgcacgcagcgcaccagac

SEQ ID NO: 27208 - DNA, 21 bp, synthetic construct
  source 1..21: mol_type = other DNA
tattttagtggcaggatggaa

SEQ ID NO: 27209 - DNA, 21 bp, synthetic construct
  source 1..21: mol_type = other DNA; mol_type = other DNA
tacttctccggaaccgtcagt

SEQ ID NO: 27210 - DNA, 21 bp, synthetic construct
  source 1..21: mol_type = other DNA; mol_type = other DNA
tattcaaaaaccgggtggaac

SEQ ID NO: 27211 - DNA, 21 bp, synthetic construct
  source 1..21: mol_type = other DNA; mol_type = other DNA
tatcaccgtctttcgcaagac

SEQ ID NO: 27212 - DNA, 21 bp, synthetic construct
  source 1..21: mol_type = other DNA; mol_type = other DNA
tatagccgagtagcacctgac

SEQ ID NO: 27213 - DNA, 21 bp, synthetic construct
  source 1..21: mol_type = other DNA; mol_type = other DNA
cttgcaagattaggacctgac

SEQ ID NO: 27214 - DNA, 21 bp, synthetic construct
  source 1..21: mol_type = other DNA; mol_type = other DNA
actatcagcacaaacgggata

SEQ ID NO: 27215 - DNA, 21 bp, synthetic construct
  source 1..21: mol_type = other DNA; mol_type = other DNA
tcggcgtctacgaacggcgtc

SEQ ID NO: 27216 - DNA, 21 bp, synthetic construct
  source 1..21: mol_type = other DNA; mol_type = other DNA
ctacacagactgaatcctgat

SEQ ID NO: 27217 - DNA, 21 bp, synthetic construct
  source 1..21: mol_type = other DNA; mol_type = other DNA
agggagagtactaacggcgtg

SEQ ID NO: 27218 - DNA, 21 bp, synthetic construct
  source 1..21: mol_type = other DNA; mol_type = other DNA
tactatagcggtattgtggct

SEQ ID NO: 27219 - DNA, 21 bp, synthetic construct
  source 1..21: mol_type = other DNA; mol_type = other DNA
tggtggtccggggtggcagag

SEQ ID NO: 27220 - DNA, 21 bp, synthetic construct
  source 1..21: mol_type = other DNA; mol_type = other DNA
ctccatcgcttgagcacacat

SEQ ID NO: 27221 - DNA, 21 bp, synthetic construct
  source 1..21: mol_type = other DNA; mol_type = other DNA
gtgagcgagtttctttcgttt

SEQ ID NO: 27222 - DNA, 21 bp, synthetic construct
  source 1..21: mol_type = other DNA; mol_type = other DNA
gatgctttagagtggagggat

SEQ ID NO: 27223 - DNA, 21 bp, synthetic construct
  source 1..21: mol_type = other DNA; mol_type = other DNA
agatcggagttcgccacgtac

SEQ ID NO: 27224 - DNA, 21 bp, synthetic construct
  source 1..21: mol_type = other DNA; mol_type = other DNA
taccatgcacggggactgaac

SEQ ID NO: 27225 - DNA, 21 bp, synthetic construct
  source 1..21: mol_type = other DNA; mol_type = other DNA
cgcgagcccggagttaggtgg

SEQ ID NO: 27226 - DNA, 21 bp, synthetic construct
  source 1..21: mol_type = other DNA; mol_type = other DNA
tacgttcgtagtgacagtcgc

SEQ ID NO: 27227 - DNA, 21 bp, synthetic construct
  source 1..21: mol_type = other DNA; mol_type = other DNA
tttagtgtttacactggatca

SEQ ID NO: 27228 - DNA, 21 bp, synthetic construct
  source 1..21: mol_type = other DNA; mol_type = other DNA
tacagcagaattggagacaac

SEQ ID NO: 27229 - DNA, 21 bp, synthetic construct
  source 1..21: mol_type = other DNA; mol_type = other DNA
tatagcaagcaagggtgtaat

SEQ ID NO: 27230 - DNA, 21 bp, synthetic construct
  source 1..21: mol_type = other DNA; mol_type = other DNA
tactctaaaatgggatcaaat

SEQ ID NO: 27231 - DNA, 21 bp, synthetic construct
  source 1..21: mol_type = other DNA; mol_type = other DNA
tacgtgcgcagcgacacgcac

SEQ ID NO: 27232 - DNA, 21 bp, synthetic construct
  source 1..21: mol_type = other DNA; mol_type = other DNA
ttatgtaaaccttgttttacg

SEQ ID NO: 27233 - DNA, 21 bp, synthetic construct
  source 1..21: mol_type = other DNA; mol_type = other DNA
gttgcccctaagtgtgctgaa

SEQ ID NO: 27234 - DNA, 21 bp, synthetic construct
  source 1..21: mol_type = other DNA; mol_type = other DNA
ggggatgagtatcattcgtgg

SEQ ID NO: 27235 - DNA, 21 bp, synthetic construct
  source 1..21: mol_type = other DNA; mol_type = other DNA
tattggtcaggcacgatcgca

SEQ ID NO: 27236 - DNA, 21 bp, synthetic construct
  source 1..21: mol_type = other DNA; mol_type = other DNA
tactggacaggtgtttccgac

SEQ ID NO: 27237 - DNA, 21 bp, synthetic construct
  source 1..21: mol_type = other DNA; mol_type = other DNA
tatgcccgcactgggaccaat

SEQ ID NO: 27238 - DNA, 21 bp, synthetic construct
  source 1..21: mol_type = other DNA; mol_type = other DNA
ccttacgcaagatcggtagaa

SEQ ID NO: 27239 - DNA, 21 bp, synthetic construct
  source 1..21: mol_type = other DNA; mol_type = other DNA
agggacgacttcagcttatgg

SEQ ID NO: 27240 - DNA, 21 bp, synthetic construct
  source 1..21: mol_type = other DNA; mol_type = other DNA
agtaattcaactaatggcgtc

SEQ ID NO: 27241 - DNA, 21 bp, synthetic construct
  source 1..21: mol_type = other DNA; mol_type = other DNA
atgtcccgcataggtgtcaac

SEQ ID NO: 27242 - DNA, 21 bp, synthetic construct
  source 1..21: mol_type = other DNA; mol_type = other DNA
tacagtaagtcgaactgcaac

SEQ ID NO: 27243 - DNA, 21 bp, synthetic construct
  source 1..21: mol_type = other DNA; mol_type = other DNA
tactggtcgggcactatagat

SEQ ID NO: 27244 - DNA, 21 bp, synthetic construct
  source 1..21: mol_type = other DNA; mol_type = other DNA
tttgaatctacgaatggcaga

SEQ ID NO: 27245 - DNA, 21 bp, synthetic construct
  source 1..21: mol_type = other DNA; mol_type = other DNA
tacagtagacttaattatgac

SEQ ID NO: 27246 - DNA, 21 bp, synthetic construct
  source 1..21: mol_type = other DNA; mol_type = other DNA
ctgcatagggcttctagtaat

SEQ ID NO: 27247 - DNA, 21 bp, synthetic construct
  source 1..21: mol_type = other DNA; mol_type = other DNA
aacatgtctgccggcacgtgg

SEQ ID NO: 27248 - DNA, 21 bp, synthetic construct
  source 1..21: mol_type = other DNA; mol_type = other DNA
ttatcaaaaatgaactataat

SEQ ID NO: 27249 - DNA, 21 bp, synthetic construct
  source 1..21: mol_type = other DNA; mol_type = other DNA
tacgtccgaagccagactgat

SEQ ID NO: 27250 - DNA, 21 bp, synthetic construct
  source 1..21: mol_type = other DNA; mol_type = other DNA
tacgccaaacaaggatggaac

SEQ ID NO: 27251 - DNA, 21 bp, synthetic construct
  source 1..21: mol_type = other DNA; mol_type = other DNA
cgagacggaaactcatcatgg

SEQ ID NO: 27252 - DNA, 21 bp, synthetic construct
  source 1..21: mol_type = other DNA; mol_type = other DNA
ttagctaaaaacggattcaat

SEQ ID NO: 27253 - DNA, 21 bp, synthetic construct
  source 1..21: mol_type = other DNA; mol_type = other DNA
gttcctgatttcgttaggtat

SEQ ID NO: 27254 - DNA, 21 bp, synthetic construct
  source 1..21: mol_type = other DNA; mol_type = other DNA
tatcacaagtataatgttaac

SEQ ID NO: 27255 - DNA, 21 bp, synthetic construct
  source 1..21: mol_type = other DNA; mol_type = other DNA
tatagtagattgcacgccaac

SEQ ID NO: 27256 - DNA, 21 bp, synthetic construct
  source 1..21: mol_type = other DNA; mol_type = other DNA
tatttcaccggccgaatggac

SEQ ID NO: 27257 - DNA, 21 bp, synthetic construct
  source 1..21: mol_type = other DNA; mol_type = other DNA
tgcatcggtgaatgctgcccg

SEQ ID NO: 27258 - DNA, 21 bp, synthetic construct
  source 1..21: mol_type = other DNA; mol_type = other DNA
cacgatggagtgtcaaagtgg

SEQ ID NO: 27259 - DNA, 21 bp, synthetic construct
  source 1..21: mol_type = other DNA; mol_type = other DNA
tattttacgggtaagattggt

SEQ ID NO: 27260 - DNA, 21 bp, synthetic construct
  source 1..21: mol_type = other DNA; mol_type = other DNA
tggcccaacggcgtaaacgga

SEQ ID NO: 27261 - DNA, 21 bp, synthetic construct
  source 1..21: mol_type = other DNA; mol_type = other DNA
tattggtcaggagtgagggag

SEQ ID NO: 27262 - DNA, 21 bp, synthetic construct
  source 1..21: mol_type = other DNA; mol_type = other DNA
cgcactttcgatgtcttccct

SEQ ID NO: 27263 - DNA, 21 bp, synthetic construct
  source 1..21: mol_type = other DNA; mol_type = other DNA
tggccgccgccggtcaacagt

SEQ ID NO: 27264 - DNA, 21 bp, synthetic construct
  source 1..21: mol_type = other DNA; mol_type = other DNA
tactttagtggagtgagggta

SEQ ID NO: 27265 - DNA, 21 bp, synthetic construct
  source 1..21: mol_type = other DNA; mol_type = other DNA
ggaccaggaacttgtaaatca

SEQ ID NO: 27266 - DNA, 21 bp, synthetic construct
  source 1..21: mol_type = other DNA; mol_type = other DNA
tatagcaaacacaattataat

SEQ ID NO: 27267 - DNA, 21 bp, synthetic construct
  source 1..21: mol_type = other DNA; mol_type = other DNA
ctctgggatgggacttcgccc

SEQ ID NO: 27268 - DNA, 21 bp, synthetic construct
  source 1..21: mol_type = other DNA; mol_type = other DNA
cgggacggaacgagtcactgg

SEQ ID NO: 27269 - DNA, 21 bp, synthetic construct
  source 1..21: mol_type = other DNA; mol_type = other DNA
caactttctgacagaacttgg

SEQ ID NO: 27270 - DNA, 21 bp, synthetic construct
  source 1..21: mol_type = other DNA; mol_type = other DNA
ttcgactcaacgaatggcgtg

SEQ ID NO: 27271 - DNA, 21 bp, synthetic construct
  source 1..21: mol_type = other DNA; mol_type = other DNA
tgcacgagcgcgacgggacac

SEQ ID NO: 27272 - DNA, 21 bp, synthetic construct
  source 1..21: mol_type = other DNA; mol_type = other DNA
tgcaaggaaaaatgctgtgaa

SEQ ID NO: 27273 - DNA, 21 bp, synthetic construct
  source 1..21: mol_type = other DNA; mol_type = other DNA
ccgagtagcacgaatggggtg

SEQ ID NO: 27274 - DNA, 21 bp, synthetic construct
  source 1..21: mol_type = other DNA; mol_type = other DNA
tacttttcgggcacccaagca

SEQ ID NO: 27275 - DNA, 21 bp, synthetic construct
  source 1..21: mol_type = other DNA; mol_type = other DNA
tacgtgcgatctgatgttggg

SEQ ID NO: 27276 - DNA, 21 bp, synthetic construct
  source 1..21: mol_type = other DNA; mol_type = other DNA
tttccagggagttgcaaagaa

SEQ ID NO: 27277 - DNA, 21 bp, synthetic construct
  source 1..21: mol_type = other DNA; mol_type = other DNA
agagatgcggatgtttatcca

SEQ ID NO: 27278 - DNA, 21 bp, synthetic construct
  source 1..21: mol_type = other DNA; mol_type = other DNA
ttgagcaagagctcaattaac

SEQ ID NO: 27279 - DNA, 21 bp, synthetic construct
  source 1..21: mol_type = other DNA; mol_type = other DNA
cgcggcagcgatgtatttccg

SEQ ID NO: 27280 - DNA, 21 bp, synthetic construct
  source 1..21: mol_type = other DNA; mol_type = other DNA
ttgtgtagaccatgccgcgaa

SEQ ID NO: 27281 - DNA, 21 bp, synthetic construct
  source 1..21: mol_type = other DNA; mol_type = other DNA
cttgcgcgcaacggctggaac

SEQ ID NO: 27282 - DNA, 21 bp, synthetic construct
  source 1..21: mol_type = other DNA; mol_type = other DNA
tattccagagttggacagaat

SEQ ID NO: 27283 - DNA, 21 bp, synthetic construct
  source 1..21: mol_type = other DNA; mol_type = other DNA
ttttcgaggttaaacgacaat

SEQ ID NO: 27284 - DNA, 21 bp, synthetic construct
  source 1..21: mol_type = other DNA; mol_type = other DNA
agagaggagtacacgagctgg

SEQ ID NO: 27285 - DNA, 21 bp, synthetic construct
  source 1..21: mol_type = other DNA; mol_type = other DNA
tattttactgggcgcttagac

SEQ ID NO: 27286 - DNA, 21 bp, synthetic construct
  source 1..21: mol_type = other DNA; mol_type = other DNA
ggtggcgaagggtccagctgg

SEQ ID NO: 27287 - DNA, 21 bp, synthetic construct
  source 1..21: mol_type = other DNA; mol_type = other DNA
tgcgcttcaaagactggacat

SEQ ID NO: 27288 - DNA, 21 bp, synthetic construct
  source 1..21: mol_type = other DNA; mol_type = other DNA
tacagcaaagggaacctcaat

SEQ ID NO: 27289 - DNA, 21 bp, synthetic construct
  source 1..21: mol_type = other DNA; mol_type = other DNA
tgtcgccctaatacgcatccg

SEQ ID NO: 27290 - DNA, 21 bp, synthetic construct
  source 1..21: mol_type = other DNA; mol_type = other DNA
tacttcagcggggtgaagatc

SEQ ID NO: 27291 - DNA, 21 bp, synthetic construct
  source 1..21: mol_type = other DNA; mol_type = other DNA
tactggagcgggacagtggct

SEQ ID NO: 27292 - DNA, 21 bp, synthetic construct
  source 1..21: mol_type = other DNA; mol_type = other DNA
tatgccaaggcagggttcaac

SEQ ID NO: 27293 - DNA, 21 bp, synthetic construct
  source 1..21: mol_type = other DNA; mol_type = other DNA
aagtcggactttacatcatat

SEQ ID NO: 27294 - DNA, 21 bp, synthetic construct
  source 1..21: mol_type = other DNA; mol_type = other DNA
gtttccacccactgttatgcc

SEQ ID NO: 27295 - DNA, 21 bp, synthetic construct
  source 1..21: mol_type = other DNA; mol_type = other DNA
ctgcaccgcctttcaaatggc

SEQ ID NO: 27296 - DNA, 21 bp, synthetic construct
  source 1..21: mol_type = other DNA; mol_type = other DNA
tactattcaggagtgttggcg

SEQ ID NO: 27297 - DNA, 21 bp, synthetic construct
  source 1..21: mol_type = other DNA; mol_type = other DNA
tactttagcggtatccaatcg

SEQ ID NO: 27298 - DNA, 21 bp, synthetic construct
  source 1..21: mol_type = other DNA; mol_type = other DNA
atagcacacagaggatgggat

SEQ ID NO: 27299 - DNA, 21 bp, synthetic construct
  source 1..21: mol_type = other DNA; mol_type = other DNA
tatgccaggataggaaacaat

SEQ ID NO: 27300 - DNA, 21 bp, synthetic construct
  source 1..21: mol_type = other DNA; mol_type = other DNA
cgggatggtcaatcgagctgg

SEQ ID NO: 27301 - DNA, 21 bp, synthetic construct
  source 1..21: mol_type = other DNA; mol_type = other DNA
tacttcactggaaaaccagag

SEQ ID NO: 27302 - DNA, 21 bp, synthetic construct
  source 1..21: mol_type = other DNA; mol_type = other DNA
tattcgcgagcgggctttgac

SEQ ID NO: 27303 - DNA, 21 bp, synthetic construct
  source 1..21: mol_type = other DNA; mol_type = other DNA
tgcaagtcggagcacgtcagg

SEQ ID NO: 27304 - DNA, 21 bp, synthetic construct
  source 1..21: mol_type = other DNA; mol_type = other DNA
tactttaccggatttactgaa

SEQ ID NO: 27305 - DNA, 21 bp, synthetic construct
  source 1..21: mol_type = other DNA; mol_type = other DNA
tacgctcgtatcgggctaaat

SEQ ID NO: 27306 - DNA, 21 bp, synthetic construct
  source 1..21: mol_type = other DNA; mol_type = other DNA
gacacctacgactcatatcca

SEQ ID NO: 27307 - DNA, 21 bp, synthetic construct
  source 1..21: mol_type = other DNA; mol_type = other DNA
aaagttgatcacgtcaggtgg

SEQ ID NO: 27308 - DNA, 21 bp, synthetic construct
  source 1..21: mol_type = other DNA; mol_type = other DNA
tttgctcgcactggatacaat

SEQ ID NO: 27309 - DNA, 21 bp, synthetic construct
  source 1..21: mol_type = other DNA; mol_type = other DNA
acaatgagtgatcgaacatgg

SEQ ID NO: 27310 - DNA, 21 bp, synthetic construct
  source 1..21: mol_type = other DNA; mol_type = other DNA
tcctggagtactaatggggtt

SEQ ID NO: 27311 - DNA, 21 bp, synthetic construct
  source 1..21: mol_type = other DNA; mol_type = other DNA
tatttctcaggcatccaaagc

SEQ ID NO: 27312 - DNA, 21 bp, synthetic construct
  source 1..21: mol_type = other DNA; mol_type = other DNA
tacttcagtggggtaagggca

SEQ ID NO: 27313 - DNA, 21 bp, synthetic construct
  source 1..21: mol_type = other DNA; mol_type = other DNA
tattttaccggccagtgcgag

SEQ ID NO: 27314 - DNA, 21 bp, synthetic construct
  source 1..21: mol_type = other DNA; mol_type = other DNA
cggagcgagtttcatggctac

SEQ ID NO: 27315 - DNA, 21 bp, synthetic construct
  source 1..21: mol_type = other DNA; mol_type = other DNA
ttactcgaaagttcgaaatgg

SEQ ID NO: 27316 - DNA, 21 bp, synthetic construct
  source 1..21: mol_type = other DNA; mol_type = other DNA
tatgcgcgcgtgggtgccaac

SEQ ID NO: 27317 - DNA, 21 bp, synthetic construct
  source 1..21: mol_type = other DNA; mol_type = other DNA
ttacatcggcttagcatggga

SEQ ID NO: 27318 - DNA, 21 bp, synthetic construct
  source 1..21: mol_type = other DNA; mol_type = other DNA
tatttttcgggacaagtcatg

SEQ ID NO: 27319 - DNA, 21 bp, synthetic construct
  source 1..21: mol_type = other DNA; mol_type = other DNA
agagatgaaaccagctattgg

SEQ ID NO: 27320 - DNA, 21 bp, synthetic construct
  source 1..21: mol_type = other DNA; mol_type = other DNA
attatgccgagccgtaactgg

SEQ ID NO: 27321 - DNA, 21 bp, synthetic construct
  source 1..21: mol_type = other DNA; mol_type = other DNA
tactccaggattagcgacaat

SEQ ID NO: 27322 - DNA, 21 bp, synthetic construct
  source 1..21: mol_type = other DNA; mol_type = other DNA
tatagtcgtattaatgacaat

SEQ ID NO: 27323 - DNA, 21 bp, synthetic construct
  source 1..21: mol_type = other DNA; mol_type = other DNA
aaggaggattatacgacgtgg

SEQ ID NO: 27324 - DNA, 21 bp, synthetic construct
  source 1..21: mol_type = other DNA; mol_type = other DNA
tatcaccgcctcggcgatgat

SEQ ID NO: 27325 - DNA, 21 bp, synthetic construct
  source 1..21: mol_type = other DNA; mol_type = other DNA
ctgtgggacggaacgaacgcc

SEQ ID NO: 27326 - DNA, 21 bp, synthetic construct
  source 1..21: mol_type = other DNA; mol_type = other DNA
taccatcggttatctgacaat

SEQ ID NO: 27327 - DNA, 21 bp, synthetic construct
  source 1..21: mol_type = other DNA; mol_type = other DNA
ttcttttctggtgtcacggct

SEQ ID NO: 27328 - DNA, 21 bp, synthetic construct
  source 1..21: mol_type = other DNA; mol_type = other DNA
cgtatggaggctttagactgg

SEQ ID NO: 27329 - DNA, 21 bp, synthetic construct
  source 1..21: mol_type = other DNA; mol_type = other DNA
ctctgggatggcaccatggcc

SEQ ID NO: 27330 - DNA, 21 bp, synthetic construct
  source 1..21: mol_type = other DNA; mol_type = other DNA
agaacgccaaccacgtttccc

SEQ ID NO: 27331 - DNA, 21 bp, synthetic construct
  source 1..21: mol_type = other DNA; mol_type = other DNA
gtaatgagcagccggacgtgg

SEQ ID NO: 27332 - DNA, 21 bp, synthetic construct
  source 1..21: mol_type = other DNA; mol_type = other DNA
ttctcaaaggctggaccaaat

SEQ ID NO: 27333 - DNA, 21 bp, synthetic construct
  source 1..21: mol_type = other DNA; mol_type = other DNA
tatgttagatctcagacaagt

SEQ ID NO: 27334 - DNA, 21 bp, synthetic construct
  source 1..21: mol_type = other DNA; mol_type = other DNA
tacagcagaatagggccaaac

SEQ ID NO: 27335 - DNA, 21 bp, synthetic construct
  source 1..21: mol_type = other DNA; mol_type = other DNA
tacagtagtttgaacataaac

SEQ ID NO: 27336 - DNA, 21 bp, synthetic construct
  source 1..21: mol_type = other DNA; mol_type = other DNA
tattgggcaggcatcagagaa

SEQ ID NO: 27337 - DNA, 21 bp, synthetic construct
  source 1..21: mol_type = other DNA; mol_type = other DNA
tacgtcaagtatgaaaacccc

SEQ ID NO: 27338 - DNA, 21 bp, synthetic construct
  source 1..21: mol_type = other DNA; mol_type = other DNA
tggttgaagtcacaacccggt

SEQ ID NO: 27339 - DNA, 21 bp, synthetic construct
  source 1..21: mol_type = other DNA; mol_type = other DNA
cgtgatgaatttcatgcttgg

SEQ ID NO: 27340 - DNA, 21 bp, synthetic construct
  source 1..21: mol_type = other DNA; mol_type = other DNA
gatatgagctcagtacagtgg

SEQ ID NO: 27341 - DNA, 21 bp, synthetic construct
  source 1..21: mol_type = other DNA; mol_type = other DNA
tacagtcggttgtcgccggca

SEQ ID NO: 27342 - DNA, 21 bp, synthetic construct
  source 1..21: mol_type = other DNA; mol_type = other DNA
tattatacaggtgttatagct

SEQ ID NO: 27343 - DNA, 21 bp, synthetic construct
  source 1..21: mol_type = other DNA; mol_type = other DNA
atgcaccggttaaccatggat

SEQ ID NO: 27344 - DNA, 21 bp, synthetic construct
  source 1..21: mol_type = other DNA; mol_type = other DNA
gcacccggggacattcgctgg

SEQ ID NO: 27345 - DNA, 21 bp, synthetic construct
  source 1..21: mol_type = other DNA; mol_type = other DNA
tattggagcggaactgtggca

SEQ ID NO: 27346 - DNA, 21 bp, synthetic construct
  source 1..21: mol_type = other DNA; mol_type = other DNA
tactttgaaggcagggttgat

SEQ ID NO: 27347 - DNA, 21 bp, synthetic construct
  source 1..21: mol_type = other DNA; mol_type = other DNA
tatttcactgggcggcaagac

SEQ ID NO: 27348 - DNA, 21 bp, synthetic construct
  source 1..21: mol_type = other DNA; mol_type = other DNA
cgcgaagaatgggtcgcttac

SEQ ID NO: 27349 - DNA, 21 bp, synthetic construct
  source 1..21: mol_type = other DNA; mol_type = other DNA
tacttcactggggtcagaaat

SEQ ID NO: 27350 - DNA, 21 bp, synthetic construct
  source 1..21: mol_type = other DNA; mol_type = other DNA
gcaagaagtaccaacggtgtt

SEQ ID NO: 27351 - DNA, 21 bp, synthetic construct
  source 1..21: mol_type = other DNA; mol_type = other DNA
tattggtcaggcgttcctgag

SEQ ID NO: 27352 - DNA, 21 bp, synthetic construct
  source 1..21: mol_type = other DNA; mol_type = other DNA
tactggagtaaggttcaagcc

SEQ ID NO: 27353 - DNA, 21 bp, synthetic construct
  source 1..21: mol_type = other DNA; mol_type = other DNA
tacgtgaagagtggaccacca

SEQ ID NO: 27354 - DNA, 21 bp, synthetic construct
  source 1..21: mol_type = other DNA; mol_type = other DNA
gtaatgcaatcaaggacttgg

SEQ ID NO: 27355 - DNA, 21 bp, synthetic construct
  source 1..21: mol_type = other DNA; mol_type = other DNA
tatcaccgattgggagacaac

SEQ ID NO: 27356 - DNA, 21 bp, synthetic construct
  source 1..21: mol_type = other DNA; mol_type = other DNA
aggggcggtacttcggcgtgg

SEQ ID NO: 27357 - DNA, 21 bp, synthetic construct
  source 1..21: mol_type = other DNA; mol_type = other DNA
tactgggctgggatacgtgag

SEQ ID NO: 27358 - DNA, 21 bp, synthetic construct
  source 1..21: mol_type = other DNA; mol_type = other DNA
tttgcccgtacaggtgctaat

SEQ ID NO: 27359 - DNA, 21 bp, synthetic construct
  source 1..21: mol_type = other DNA; mol_type = other DNA
tatagccgcgctggcgaaaat

SEQ ID NO: 27360 - DNA, 21 bp, synthetic construct
  source 1..21: mol_type = other DNA; mol_type = other DNA
tatctacacagtcaaagttat

SEQ ID NO: 27361 - DNA, 21 bp, synthetic construct
  source 1..21: mol_type = other DNA; mol_type = other DNA
ggtagccctggtgttagctgg

SEQ ID NO: 27362 - DNA, 21 bp, synthetic construct
  source 1..21: mol_type = other DNA; mol_type = other DNA
tggtggacaggtatagcggac

SEQ ID NO: 27363 - DNA, 21 bp, synthetic construct
  source 1..21: mol_type = other DNA; mol_type = other DNA
gatatggggtcagctgcatgg

SEQ ID NO: 27364 - DNA, 21 bp, synthetic construct
  source 1..21: mol_type = other DNA; mol_type = other DNA
atggagagtaccaatggagtg

SEQ ID NO: 27365 - DNA, 21 bp, synthetic construct
  source 1..21: mol_type = other DNA; mol_type = other DNA
ccatcgagactggagaataga

SEQ ID NO: 27366 - DNA, 21 bp, synthetic construct
  source 1..21: mol_type = other DNA; mol_type = other DNA
cacagcagctcaaacggcgtc

SEQ ID NO: 27367 - DNA, 21 bp, synthetic construct
  source 1..21: mol_type = other DNA; mol_type = other DNA
agggacggtcagtcgtcgtgg

SEQ ID NO: 27368 - DNA, 21 bp, synthetic construct
  source 1..21: mol_type = other DNA; mol_type = other DNA
tgcaaagctactgaggtaagc

SEQ ID NO: 27369 - DNA, 21 bp, synthetic construct
  source 1..21: mol_type = other DNA; mol_type = other DNA
gatatggagtcacataaatgg

SEQ ID NO: 27370 - DNA, 21 bp, synthetic construct
  source 1..21: mol_type = other DNA; mol_type = other DNA
caaaacgaatacgttatctat

SEQ ID NO: 27371 - DNA, 21 bp, synthetic construct
  source 1..21: mol_type = other DNA; mol_type = other DNA
tattcacggcttagtccaaat

SEQ ID NO: 27372 - DNA, 21 bp, synthetic construct
  source 1..21: mol_type = other DNA; mol_type = other DNA
tatttttctggcgttcataag

SEQ ID NO: 27373 - DNA, 21 bp, synthetic construct
  source 1..21: mol_type = other DNA; mol_type = other DNA
tatttcaccggcgaggtttcg

SEQ ID NO: 27374 - DNA, 21 bp, synthetic construct
  source 1..21: mol_type = other DNA; mol_type = other DNA
tactggtccggagttaagctt

SEQ ID NO: 27375 - DNA, 21 bp, synthetic construct
  source 1..21: mol_type = other DNA; mol_type = other DNA
tatgttcgctcagatcgaaac

SEQ ID NO: 27376 - DNA, 21 bp, synthetic construct
  source 1..21: mol_type = other DNA; mol_type = other DNA
ttcgcacgtatgaactgtaac

SEQ ID NO: 27377 - DNA, 21 bp, synthetic construct
  source 1..21: mol_type = other DNA; mol_type = other DNA
aaggatggctattcgggctgg

SEQ ID NO: 27378 - DNA, 21 bp, synthetic construct
  source 1..21: mol_type = other DNA; mol_type = other DNA
cgagaagatagtagtcgttgg

SEQ ID NO: 27379 - DNA, 21 bp, synthetic construct
  source 1..21: mol_type = other DNA; mol_type = other DNA
gacttggaaagttcgtactgg

SEQ ID NO: 27380 - DNA, 21 bp, synthetic construct
  source 1..21: mol_type = other DNA; mol_type = other DNA
tatgtacggtcgggttgcggt

SEQ ID NO: 27381 - DNA, 21 bp, synthetic construct
  source 1..21: mol_type = other DNA; mol_type = other DNA
tctctggagagtagggcttgg

SEQ ID NO: 27382 - DNA, 21 bp, synthetic construct
  source 1..21: mol_type = other DNA; mol_type = other DNA
tatgcacgttcaggcgacaat

SEQ ID NO: 27383 - DNA, 21 bp, synthetic construct
  source 1..21: mol_type = other DNA; mol_type = other DNA
tgtaaaggcgataaacacggg

SEQ ID NO: 27384 - DNA, 21 bp, synthetic construct
  source 1..21: mol_type = other DNA; mol_type = other DNA
attgcagaccatctcaggtgg

SEQ ID NO: 27385 - DNA, 21 bp, synthetic construct
  source 1..21: mol_type = other DNA; mol_type = other DNA
tatgcaagaggaggtcttaat

SEQ ID NO: 27386 - DNA, 21 bp, synthetic construct
  source 1..21: mol_type = other DNA; mol_type = other DNA
tacttctcaggaatcttgccg

SEQ ID NO: 27387 - DNA, 21 bp, synthetic construct
  source 1..21: mol_type = other DNA; mol_type = other DNA
caagacgggaattctcgttgg

SEQ ID NO: 27388 - DNA, 21 bp, synthetic construct
  source 1..21: mol_type = other DNA; mol_type = other DNA
tacgttagaagtcagccgata

SEQ ID NO: 27389 - DNA, 21 bp, synthetic construct
  source 1..21: mol_type = other DNA; mol_type = other DNA
tgttacaagaagctacctgat

SEQ ID NO: 27390 - DNA, 21 bp, synthetic construct
  source 1..21: mol_type = other DNA; mol_type = other DNA
agagacgggtatagtgcctgg

SEQ ID NO: 27391 - DNA, 21 bp, synthetic construct
  source 1..21: mol_type = other DNA; mol_type = other DNA
gttttaagcagtcagggctgg

SEQ ID NO: 27392 - DNA, 21 bp, synthetic construct
  source 1..21: mol_type = other DNA; mol_type = other DNA
ctgatggggggaggaacatgg

SEQ ID NO: 27393 - DNA, 21 bp, synthetic construct
  source 1..21: mol_type = other DNA; mol_type = other DNA
aaagacgattaccacagttac

SEQ ID NO: 27394 - DNA, 21 bp, synthetic construct
  source 1..21: mol_type = other DNA; mol_type = other DNA
ttttttgacggcacctctgcc

SEQ ID NO: 27395 - DNA, 21 bp, synthetic construct
  source 1..21: mol_type = other DNA; mol_type = other DNA
cctttcgctagatcagttgaa

SEQ ID NO: 27396 - DNA, 21 bp, synthetic construct
  source 1..21: mol_type = other DNA; mol_type = other DNA
cgcgaagattgggttcagttt

SEQ ID NO: 27397 - DNA, 21 bp, synthetic construct
  source 1..21: mol_type = other DNA; mol_type = other DNA
ataattagcacaaatggtgta

SEQ ID NO: 27398 - DNA, 21 bp, synthetic construct
  source 1..21: mol_type = other DNA; mol_type = other DNA
cgcgaaaataccgtctactgg

SEQ ID NO: 27399 - DNA, 21 bp, synthetic construct
  source 1..21: mol_type = other DNA; mol_type = other DNA
gtcgctcatgctggcgccggg

SEQ ID NO: 27400 - DNA, 21 bp, synthetic construct
  source 1..21: mol_type = other DNA; mol_type = other DNA
tatcaccgcctcagcgataac

SEQ ID NO: 27401 - DNA, 21 bp, synthetic construct
  source 1..21: mol_type = other DNA; mol_type = other DNA
tattttcatggtagactggaa

SEQ ID NO: 27402 - DNA, 21 bp, synthetic construct
  source 1..21: mol_type = other DNA; mol_type = other DNA
tattataccggaataacagaa

SEQ ID NO: 27403 - DNA, 21 bp, synthetic construct
  source 1..21: mol_type = other DNA; mol_type = other DNA
cgcgatctcgacgtgtacccc

SEQ ID NO: 27404 - DNA, 21 bp, synthetic construct
  source 1..21: mol_type = other DNA; mol_type = other DNA
aaggaggacagtagaacatgg

SEQ ID NO: 27405 - DNA, 21 bp, synthetic construct
  source 1..21: mol_type = other DNA; mol_type = other DNA
tatttctccggacaaagcgaa

SEQ ID NO: 27406 - DNA, 21 bp, synthetic construct
  source 1..21: mol_type = other DNA; mol_type = other DNA
ggtgtaacggcagttaagtgg

SEQ ID NO: 27407 - DNA, 21 bp, synthetic construct
  source 1..21: mol_type = other DNA; mol_type = other DNA
agggatgtgagtgttttcccc

SEQ ID NO: 27408 - DNA, 21 bp, synthetic construct
  source 1..21: mol_type = other DNA; mol_type = other DNA
agagacgggatgagctcgtgg

SEQ ID NO: 27409 - DNA, 21 bp, synthetic construct
  source 1..21: mol_type = other DNA; mol_type = other DNA
tatttctccgggatacctcag

SEQ ID NO: 27410 - DNA, 21 bp, synthetic construct
  source 1..21: mol_type = other DNA; mol_type = other DNA
gatatggggtcatcccaatgg

SEQ ID NO: 27411 - DNA, 21 bp, synthetic construct
  source 1..21: mol_type = other DNA; mol_type = other DNA
tacttcacgggtgttaccaac

SEQ ID NO: 27412 - DNA, 21 bp, synthetic construct
  source 1..21: mol_type = other DNA; mol_type = other DNA
ctttccaaagttggtgagaat

SEQ ID NO: 27413 - DNA, 21 bp, synthetic construct
  source 1..21: mol_type = other DNA; mol_type = other DNA
tatttctctggcagacaagaa

SEQ ID NO: 27414 - DNA, 21 bp, synthetic construct
  source 1..21: mol_type = other DNA; mol_type = other DNA
tattttcatgggaagaaagac

SEQ ID NO: 27415 - DNA, 21 bp, synthetic construct
  source 1..21: mol_type = other DNA; mol_type = other DNA
tattcaagagctggtgacaac

SEQ ID NO: 27416 - DNA, 21 bp, synthetic construct
  source 1..21: mol_type = other DNA; mol_type = other DNA
ctgatgagaccatgcagtgag

SEQ ID NO: 27417 - DNA, 21 bp, synthetic construct
  source 1..21: mol_type = other DNA; mol_type = other DNA
cgcgacggaatgagcgcctgg

SEQ ID NO: 27418 - DNA, 21 bp, synthetic construct
  source 1..21: mol_type = other DNA; mol_type = other DNA
tttagtagactgagtataaac

SEQ ID NO: 27419 - DNA, 21 bp, synthetic construct
  source 1..21: mol_type = other DNA; mol_type = other DNA
tgtacctcaaaaactgggacc

SEQ ID NO: 27420 - DNA, 21 bp, synthetic construct
  source 1..21: mol_type = other DNA; mol_type = other DNA
ctatcgcgagcgcagtttaac

SEQ ID NO: 27421 - DNA, 21 bp, synthetic construct
  source 1..21: mol_type = other DNA; mol_type = other DNA
agaagcgaatacaccacattt

SEQ ID NO: 27422 - DNA, 21 bp, synthetic construct
  source 1..21: mol_type = other DNA; mol_type = other DNA
tacagcaggctcagtgaccct

SEQ ID NO: 27423 - DNA, 21 bp, synthetic construct
  source 1..21: mol_type = other DNA; mol_type = other DNA
atgtgggatggcacagccgcc

SEQ ID NO: 27424 - DNA, 21 bp, synthetic construct
  source 1..21: mol_type = other DNA; mol_type = other DNA
ccgttcgcacgcagtgtagag

SEQ ID NO: 27425 - DNA, 21 bp, synthetic construct
  source 1..21: mol_type = other DNA; mol_type = other DNA
tacgtcagatcagacacgaca

SEQ ID NO: 27426 - DNA, 21 bp, synthetic construct
  source 1..21: mol_type = other DNA; mol_type = other DNA
tattggtcgggaaccgttgcc

SEQ ID NO: 27427 - DNA, 21 bp, synthetic construct
  source 1..21: mol_type = other DNA; mol_type = other DNA
tacgccagagtcggagcaaat

SEQ ID NO: 27428 - DNA, 21 bp, synthetic construct
  source 1..21: mol_type = other DNA; mol_type = other DNA
tcgggagggggtttgtttccc

SEQ ID NO: 27429 - DNA, 21 bp, synthetic construct
  source 1..21: mol_type = other DNA; mol_type = other DNA
tactggacaggcaaggtggat

SEQ ID NO: 27430 - DNA, 21 bp, synthetic construct
  source 1..21: mol_type = other DNA; mol_type = other DNA
ttcgagagcaccaacggtcgc

SEQ ID NO: 27431 - DNA, 21 bp, synthetic construct
  source 1..21: mol_type = other DNA; mol_type = other DNA
tacagcaagggtaactttaac

SEQ ID NO: 27432 - DNA, 21 bp, synthetic construct
  source 1..21: mol_type = other DNA; mol_type = other DNA
ttctttagcggccgcgtggag

SEQ ID NO: 27433 - DNA, 21 bp, synthetic construct
  source 1..21: mol_type = other DNA; mol_type = other DNA
atggacggtaatagccgctgg

SEQ ID NO: 27434 - DNA, 21 bp, synthetic construct
  source 1..21: mol_type = other DNA; mol_type = other DNA
atctgcaggggatataccagt

SEQ ID NO: 27435 - DNA, 21 bp, synthetic construct
  source 1..21: mol_type = other DNA; mol_type = other DNA
agagatgcaatgagctcgtgg

SEQ ID NO: 27436 - DNA, 21 bp, synthetic construct
  source 1..21: mol_type = other DNA; mol_type = other DNA
tattcccgtttatctcctatc

SEQ ID NO: 27437 - DNA, 21 bp, synthetic construct
  source 1..21: mol_type = other DNA; mol_type = other DNA
tacgtgaagtcatgtccgctc

SEQ ID NO: 27438 - DNA, 21 bp, synthetic construct
  source 1..21: mol_type = other DNA; mol_type = other DNA
tattttacaggtgtcacacat

SEQ ID NO: 27439 - DNA, 21 bp, synthetic construct
  source 1..21: mol_type = other DNA; mol_type = other DNA
tttagcaaagtggggcacaat

SEQ ID NO: 27440 - DNA, 21 bp, synthetic construct
  source 1..21: mol_type = other DNA; mol_type = other DNA
tactggcagggcgtcaaagag

SEQ ID NO: 27441 - DNA, 21 bp, synthetic construct
  source 1..21: mol_type = other DNA; mol_type = other DNA
tactccaaacatgggaacaac

SEQ ID NO: 27442 - DNA, 21 bp, synthetic construct
  source 1..21: mol_type = other DNA; mol_type = other DNA
tggtggtcgggaacgcgcgag

SEQ ID NO: 27443 - DNA, 21 bp, synthetic construct
  source 1..21: mol_type = other DNA; mol_type = other DNA
agactggatcacgtctatcct

SEQ ID NO: 27444 - DNA, 21 bp, synthetic construct
  source 1..21: mol_type = other DNA; mol_type = other DNA
tattcaaagttgaattccaac

SEQ ID NO: 27445 - DNA, 21 bp, synthetic construct
  source 1..21: mol_type = other DNA; mol_type = other DNA
taccatcgtttatcagaaaac

SEQ ID NO: 27446 - DNA, 21 bp, synthetic construct
  source 1..21: mol_type = other DNA; mol_type = other DNA
ccgatggagagccttaagtgg

SEQ ID NO: 27447 - DNA, 21 bp, synthetic construct
  source 1..21: mol_type = other DNA; mol_type = other DNA
gacttgagaagcaaaacctgg

SEQ ID NO: 27448 - DNA, 21 bp, synthetic construct
  source 1..21: mol_type = other DNA; mol_type = other DNA
tacgcccgtagtggggctaac

SEQ ID NO: 27449 - DNA, 21 bp, synthetic construct
  source 1..21: mol_type = other DNA; mol_type = other DNA
tacgctaagggcaaccataac

SEQ ID NO: 27450 - DNA, 21 bp, synthetic construct
  source 1..21: mol_type = other DNA; mol_type = other DNA
tattttgcgggcgtgcgcagt

SEQ ID NO: 27451 - DNA, 21 bp, synthetic construct
  source 1..21: mol_type = other DNA; mol_type = other DNA
ctccaccgcttgcaagatgat

SEQ ID NO: 27452 - DNA, 21 bp, synthetic construct
  source 1..21: mol_type = other DNA; mol_type = other DNA
cgggaagattatgttcattgg

SEQ ID NO: 27453 - DNA, 21 bp, synthetic construct
  source 1..21: mol_type = other DNA; mol_type = other DNA
tatgcgaggtcgggtgcaaat

SEQ ID NO: 27454 - DNA, 21 bp, synthetic construct
  source 1..21: mol_type = other DNA; mol_type = other DNA
agagaaagcactaacggaatt

SEQ ID NO: 27455 - DNA, 21 bp, synthetic construct
  source 1..21: mol_type = other DNA; mol_type = other DNA
agaatggacgcagtgacgtgg

SEQ ID NO: 27456 - DNA, 21 bp, synthetic construct
  source 1..21: mol_type = other DNA; mol_type = other DNA
tgcaaaccgtatagtagggaa

SEQ ID NO: 27457 - DNA, 21 bp, synthetic construct
  source 1..21: mol_type = other DNA; mol_type = other DNA
ctagccaaaagcgggatgaac

SEQ ID NO: 27458 - DNA, 21 bp, synthetic construct
  source 1..21: mol_type = other DNA; mol_type = other DNA
ttaaggtctgaatgctgtgtc

SEQ ID NO: 27459 - DNA, 21 bp, synthetic construct
  source 1..21: mol_type = other DNA; mol_type = other DNA
tggactcccggttgtaaggct

SEQ ID NO: 27460 - DNA, 21 bp, synthetic construct
  source 1..21: mol_type = other DNA; mol_type = other DNA
aaagacgaatggaaaacctat

SEQ ID NO: 27461 - DNA, 21 bp, synthetic construct
  source 1..21: mol_type = other DNA; mol_type = other DNA
tacgctcggatgggtccgaat

SEQ ID NO: 27462 - DNA, 21 bp, synthetic construct
  source 1..21: mol_type = other DNA; mol_type = other DNA
tacgtcaaatcgcaaaagatc

SEQ ID NO: 27463 - DNA, 21 bp, synthetic construct
  source 1..21: mol_type = other DNA; mol_type = other DNA
tatgtcagaagccaaatgggt

SEQ ID NO: 27464 - DNA, 21 bp, synthetic construct
  source 1..21: mol_type = other DNA; mol_type = other DNA
tatgtcaggtccgacaaggcg

SEQ ID NO: 27465 - DNA, 21 bp, synthetic construct
  source 1..21: mol_type = other DNA; mol_type = other DNA
tatccgtccggtggcccggga

SEQ ID NO: 27466 - DNA, 21 bp, synthetic construct
  source 1..21: mol_type = other DNA; mol_type = other DNA
agaaccaataatgtctatccg

SEQ ID NO: 27467 - DNA, 21 bp, synthetic construct
  source 1..21: mol_type = other DNA; mol_type = other DNA
tattcaaagggtaaccctaac

SEQ ID NO: 27468 - DNA, 21 bp, synthetic construct
  source 1..21: mol_type = other DNA; mol_type = other DNA
tttttctcgggaaaaatcgag

SEQ ID NO: 27469 - DNA, 21 bp, synthetic construct
  source 1..21: mol_type = other DNA; mol_type = other DNA
tgtaaaccagctcctggagaa

SEQ ID NO: 27470 - DNA, 21 bp, synthetic construct
  source 1..21: mol_type = other DNA; mol_type = other DNA
gcccccgaaactattaggtgg

SEQ ID NO: 27471 - DNA, 21 bp, synthetic construct
  source 1..21: mol_type = other DNA; mol_type = other DNA
tatgtccgcagcgatgtaagg

SEQ ID NO: 27472 - DNA, 21 bp, synthetic construct
  source 1..21: mol_type = other DNA; mol_type = other DNA
tatttcatggggaagcaggac

SEQ ID NO: 27473 - DNA, 21 bp, synthetic construct
  source 1..21: mol_type = other DNA; mol_type = other DNA
ttttcgcgcgtgggcgtcaat

SEQ ID NO: 27474 - DNA, 21 bp, synthetic construct
  source 1..21: mol_type = other DNA; mol_type = other DNA
ttcttcactggaaaagtagct

SEQ ID NO: 27475 - DNA, 21 bp, synthetic construct
  source 1..21: mol_type = other DNA; mol_type = other DNA
tactggagcggcgtccccgaa

SEQ ID NO: 27476 - DNA, 21 bp, synthetic construct
  source 1..21: mol_type = other DNA; mol_type = other DNA
tctctgagcagtcgcgattgg

SEQ ID NO: 27477 - DNA, 21 bp, synthetic construct
  source 1..21: mol_type = other DNA; mol_type = other DNA
ttgagcagggcacaattcaat

SEQ ID NO: 27478 - DNA, 21 bp, synthetic construct
  source 1..21: mol_type = other DNA; mol_type = other DNA
tttatgactgggaagtgcccg

SEQ ID NO: 27479 - DNA, 21 bp, synthetic construct
  source 1..21: mol_type = other DNA; mol_type = other DNA
tttgtcaaaagccaaccgggt

SEQ ID NO: 27480 - DNA, 21 bp, synthetic construct
  source 1..21: mol_type = other DNA; mol_type = other DNA
tttagtcgtgtgggaagcaat

SEQ ID NO: 27481 - DNA, 21 bp, synthetic construct
  source 1..21: mol_type = other DNA; mol_type = other DNA
cgggaagaggctgttagttgg

SEQ ID NO: 27482 - DNA, 21 bp, synthetic construct
  source 1..21: mol_type = other DNA; mol_type = other DNA
tactcacgcgtgcaacttaac

SEQ ID NO: 27483 - DNA, 21 bp, synthetic construct
  source 1..21: mol_type = other DNA; mol_type = other DNA
gcgccacctcatattaaatgg

SEQ ID NO: 27484 - DNA, 21 bp, synthetic construct
  source 1..21: mol_type = other DNA; mol_type = other DNA
gacttgagggataggaagtgg

SEQ ID NO: 27485 - DNA, 21 bp, synthetic construct
  source 1..21: mol_type = other DNA; mol_type = other DNA
agagaggactgggtccaattc

SEQ ID NO: 27486 - DNA, 21 bp, synthetic construct
  source 1..21: mol_type = other DNA; mol_type = other DNA
tactttagtggccaattagat

SEQ ID NO: 27487 - DNA, 21 bp, synthetic construct
  source 1..21: mol_type = other DNA; mol_type = other DNA
tacagcagggccggtttcgat

SEQ ID NO: 27488 - DNA, 21 bp, synthetic construct
  source 1..21: mol_type = other DNA; mol_type = other DNA
ccctggtccacaaacggtgtc

SEQ ID NO: 27489 - DNA, 21 bp, synthetic construct
  source 1..21: mol_type = other DNA; mol_type = other DNA
tacgtgaaatcacagggctct

SEQ ID NO: 27490 - DNA, 21 bp, synthetic construct
  source 1..21: mol_type = other DNA; mol_type = other DNA
cgtcttgagtcctacgactgg

SEQ ID NO: 27491 - DNA, 21 bp, synthetic construct
  source 1..21: mol_type = other DNA; mol_type = other DNA
tacagtcgattacacgcggtc

SEQ ID NO: 27492 - DNA, 21 bp, synthetic construct
  source 1..21: mol_type = other DNA; mol_type = other DNA
cttcatcgattgagtgagtac

SEQ ID NO: 27493 - DNA, 21 bp, synthetic construct
  source 1..21: mol_type = other DNA; mol_type = other DNA
tactggaccggagttacggat

SEQ ID NO: 27494 - DNA, 21 bp, synthetic construct
  source 1..21: mol_type = other DNA; mol_type = other DNA
gtaatggctgatagggcgtgg

SEQ ID NO: 27495 - DNA, 21 bp, synthetic construct
  source 1..21: mol_type = other DNA; mol_type = other DNA
tacagtcgcttgagtgatgta

SEQ ID NO: 27496 - DNA, 21 bp, synthetic construct
  source 1..21: mol_type = other DNA; mol_type = other DNA
cgggagtctagcgttaggtgg

SEQ ID NO: 27497 - DNA, 21 bp, synthetic construct
  source 1..21: mol_type = other DNA; mol_type = other DNA
tattacacgggtaaaatatcg

SEQ ID NO: 27498 - DNA, 21 bp, synthetic construct
  source 1..21: mol_type = other DNA; mol_type = other DNA
tactggacaggcacaacggcg

SEQ ID NO: 27499 - DNA, 21 bp, synthetic construct
  source 1..21: mol_type = other DNA; mol_type = other DNA
tactttagtgggcggttggac

SEQ ID NO: 27500 - DNA, 21 bp, synthetic construct
  source 1..21: mol_type = other DNA; mol_type = other DNA
ttcagcaagatcgggtacaac

SEQ ID NO: 27501 - DNA, 21 bp, synthetic construct
  source 1..21: mol_type = other DNA; mol_type = other DNA
ttcagtagattgaacgcgaat

SEQ ID NO: 27502 - DNA, 21 bp, synthetic construct
  source 1..21: mol_type = other DNA; mol_type = other DNA
cgagaggaagaggtggcctgg

SEQ ID NO: 27503 - DNA, 21 bp, synthetic construct
  source 1..21: mol_type = other DNA; mol_type = other DNA
cgagaaagctcagtgcgttgg

SEQ ID NO: 27504 - DNA, 21 bp, synthetic construct
  source 1..21: mol_type = other DNA; mol_type = other DNA
aggggagatcttgtctatcca

SEQ ID NO: 27505 - DNA, 21 bp, synthetic construct
  source 1..21: mol_type = other DNA; mol_type = other DNA
gacctctcgtcgagtgactgg

SEQ ID NO: 27506 - DNA, 21 bp, synthetic construct
  source 1..21: mol_type = other DNA; mol_type = other DNA
tatagtaggatcggactaaac

SEQ ID NO: 27507 - DNA, 21 bp, synthetic construct
  source 1..21: mol_type = other DNA; mol_type = other DNA
tgtaaggaggggagcgcatgg

SEQ ID NO: 27508 - DNA, 21 bp, synthetic construct
  source 1..21: mol_type = other DNA; mol_type = other DNA
aggagcgagttttcaacctat

SEQ ID NO: 27509 - DNA, 21 bp, synthetic construct
  source 1..21: mol_type = other DNA; mol_type = other DNA
cgggaagagttggtgaggtgg

SEQ ID NO: 27510 - DNA, 21 bp, synthetic construct
  source 1..21: mol_type = other DNA; mol_type = other DNA
gttgccaggttggggtgggat

SEQ ID NO: 27511 - DNA, 21 bp, synthetic construct
  source 1..21: mol_type = other DNA; mol_type = other DNA
atggatggaaactcgaggtgg

SEQ ID NO: 27512 - DNA, 21 bp, synthetic construct
  source 1..21: mol_type = other DNA; mol_type = other DNA
tctatggctgacaggagttgg

SEQ ID NO: 27513 - DNA, 21 bp, synthetic construct
  source 1..21: mol_type = other DNA; mol_type = other DNA
agggatgaattccgatcgtgg

SEQ ID NO: 27514 - DNA, 21 bp, synthetic construct
  source 1..21: mol_type = other DNA; mol_type = other DNA
cgcgatgagtttaaggtctgg

SEQ ID NO: 27515 - DNA, 21 bp, synthetic construct
  source 1..21: mol_type = other DNA; mol_type = other DNA
tactcacgacttggtgacgat

SEQ ID NO: 27516 - DNA, 21 bp, synthetic construct
  source 1..21: mol_type = other DNA; mol_type = other DNA
tattttgcgggaaagcatgaa

SEQ ID NO: 27517 - DNA, 21 bp, synthetic construct
  source 1..21: mol_type = other DNA; mol_type = other DNA
taccaccgcctgagtatcaac

SEQ ID NO: 27518 - DNA, 21 bp, synthetic construct
  source 1..21: mol_type = other DNA; mol_type = other DNA
tactcaaaacataatcacaac

SEQ ID NO: 27519 - DNA, 21 bp, synthetic construct
  source 1..21: mol_type = other DNA; mol_type = other DNA
gggtctgatttcgtcaggtgg

SEQ ID NO: 27520 - DNA, 21 bp, synthetic construct
  source 1..21: mol_type = other DNA; mol_type = other DNA
caacttagtgaccgcacctgg

SEQ ID NO: 27521 - DNA, 21 bp, synthetic construct
  source 1..21: mol_type = other DNA; mol_type = other DNA
tattggacagggatgatatcg

SEQ ID NO: 27522 - DNA, 21 bp, synthetic construct
  source 1..21: mol_type = other DNA; mol_type = other DNA
ttgtgccggccgtgcaatgag

SEQ ID NO: 27523 - DNA, 21 bp, synthetic construct
  source 1..21: mol_type = other DNA; mol_type = other DNA
cgagaaagtgaggtgcgctgg

SEQ ID NO: 27524 - DNA, 21 bp, synthetic construct
  source 1..21: mol_type = other DNA; mol_type = other DNA
tgccgcccccagaccccttta

SEQ ID NO: 27525 - DNA, 21 bp, synthetic construct
  source 1..21: mol_type = other DNA; mol_type = other DNA
aacgccctcgtgggtcgggac

SEQ ID NO: 27526 - DNA, 21 bp, synthetic construct
  source 1..21: mol_type = other DNA; mol_type = other DNA
agagatgtcacagtttttccc

SEQ ID NO: 27527 - DNA, 21 bp, synthetic construct
  source 1..21: mol_type = other DNA; mol_type = other DNA
catatgccagatagaaaatgg

SEQ ID NO: 27528 - DNA, 21 bp, synthetic construct
  source 1..21: mol_type = other DNA; mol_type = other DNA
tatagtcggatccagctagac

SEQ ID NO: 27529 - DNA, 21 bp, synthetic construct
  source 1..21: mol_type = other DNA; mol_type = other DNA
tacagtagactcggtcagaac

SEQ ID NO: 27530 - DNA, 21 bp, synthetic construct
  source 1..21: mol_type = other DNA; mol_type = other DNA
tacttcagtgggagggtggca

SEQ ID NO: 27531 - DNA, 21 bp, synthetic construct
  source 1..21: mol_type = other DNA; mol_type = other DNA
agtgatggaaccagcaaatgg

SEQ ID NO: 27532 - DNA, 21 bp, synthetic construct
  source 1..21: mol_type = other DNA; mol_type = other DNA
tattctcgtctgagtccaact

SEQ ID NO: 27533 - DNA, 21 bp, synthetic construct
  source 1..21: mol_type = other DNA; mol_type = other DNA
aaagacgacttcaccggtttt

SEQ ID NO: 27534 - DNA, 21 bp, synthetic construct
  source 1..21: mol_type = other DNA; mol_type = other DNA
aggcccgagtcggtcaggtgg

SEQ ID NO: 27535 - DNA, 21 bp, synthetic construct
  source 1..21: mol_type = other DNA; mol_type = other DNA
agagatgaatacatgtcatgg

SEQ ID NO: 27536 - DNA, 21 bp, synthetic construct
  source 1..21: mol_type = other DNA; mol_type = other DNA
tacgccagggctgggcctaac

SEQ ID NO: 27537 - DNA, 21 bp, synthetic construct
  source 1..21: mol_type = other DNA; mol_type = other DNA
tatagtaagcaaaacaacaac

SEQ ID NO: 27538 - DNA, 21 bp, synthetic construct
  source 1..21: mol_type = other DNA; mol_type = other DNA
tggtggtcgggtttgaaggaa

SEQ ID NO: 27539 - DNA, 21 bp, synthetic construct
  source 1..21: mol_type = other DNA; mol_type = other DNA
cgtgatgattactcgacatac

SEQ ID NO: 27540 - DNA, 21 bp, synthetic construct
  source 1..21: mol_type = other DNA; mol_type = other DNA
tatttccacggcaaattagat

SEQ ID NO: 27541 - DNA, 21 bp, synthetic construct
  source 1..21: mol_type = other DNA; mol_type = other DNA
tatcatagactaagcgaaaac

SEQ ID NO: 27542 - DNA, 21 bp, synthetic construct
  source 1..21: mol_type = other DNA; mol_type = other DNA
tattttagtggccggattgat

SEQ ID NO: 27543 - DNA, 21 bp, synthetic construct
  source 1..21: mol_type = other DNA; mol_type = other DNA
tacgttcggtcgcagatgggc

SEQ ID NO: 27544 - DNA, 21 bp, synthetic construct
  source 1..21: mol_type = other DNA; mol_type = other DNA
cgtgacgagttcaggtcatac

SEQ ID NO: 27545 - DNA, 21 bp, synthetic construct
  source 1..21: mol_type = other DNA; mol_type = other DNA
attggcggaaggtgcccgcct

SEQ ID NO: 27546 - DNA, 21 bp, synthetic construct
  source 1..21: mol_type = other DNA; mol_type = other DNA
ggatccataaccagcacatgg

SEQ ID NO: 27547 - DNA, 21 bp, synthetic construct
  source 1..21: mol_type = other DNA; mol_type = other DNA
ttcgcaagaattggaccgaat

SEQ ID NO: 27548 - DNA, 21 bp, synthetic construct
  source 1..21: mol_type = other DNA; mol_type = other DNA
ttctcacggctaaatgagaac

SEQ ID NO: 27549 - DNA, 21 bp, synthetic construct
  source 1..21: mol_type = other DNA; mol_type = other DNA
tatgctaaatctggtggtaac

SEQ ID NO: 27550 - DNA, 21 bp, synthetic construct
  source 1..21: mol_type = other DNA; mol_type = other DNA
aggaacgagttcagtactttt

SEQ ID NO: 27551 - DNA, 21 bp, synthetic construct
  source 1..21: mol_type = other DNA; mol_type = other DNA
ttctcgcgtcttaacataaac

SEQ ID NO: 27552 - DNA, 21 bp, synthetic construct
  source 1..21: mol_type = other DNA; mol_type = other DNA
tattttacaggtcgatcggat

SEQ ID NO: 27553 - DNA, 21 bp, synthetic construct
  source 1..21: mol_type = other DNA; mol_type = other DNA
tattcccgcttgaactacgat

SEQ ID NO: 27554 - DNA, 21 bp, synthetic construct
  source 1..21: mol_type = other DNA; mol_type = other DNA
gaccctagctcagttaggtgg

SEQ ID NO: 27555 - DNA, 21 bp, synthetic construct
  source 1..21: mol_type = other DNA; mol_type = other DNA
ttaagtaaaagtgcctataat

SEQ ID NO: 27556 - DNA, 21 bp, synthetic construct
  source 1..21: mol_type = other DNA; mol_type = other DNA
tggtggtcggcggttcctgag

SEQ ID NO: 27557 - DNA, 21 bp, synthetic construct
  source 1..21: mol_type = other DNA; mol_type = other DNA
gagaacgcgagtagggcatgg

SEQ ID NO: 27558 - DNA, 21 bp, synthetic construct
  source 1..21: mol_type = other DNA; mol_type = other DNA
tatttcaccggccgccatgat

SEQ ID NO: 27559 - DNA, 21 bp, synthetic construct
  source 1..21: mol_type = other DNA
gtcagtacccactgtactgcg

SEQ ID NO: 27560 - DNA, 21 bp, synthetic construct
  source 1..21: mol_type = other DNA; mol_type = other DNA
tgcaaaccaccttcaggcgac

SEQ ID NO: 27561 - DNA, 21 bp, synthetic construct
  source 1..21: mol_type = other DNA; mol_type = other DNA
agagatggtacatcgcattgg

SEQ ID NO: 27562 - DNA, 21 bp, synthetic construct
  source 1..21: mol_type = other DNA; mol_type = other DNA
tttagccgcgtaggcaataac

SEQ ID NO: 27563 - DNA, 21 bp, synthetic construct
  source 1..21: mol_type = other DNA; mol_type = other DNA
ttcgcgaggaccggcgttaac

SEQ ID NO: 27564 - DNA, 21 bp, synthetic construct
  source 1..21: mol_type = other DNA; mol_type = other DNA
tatcacaggttatccgccaac

SEQ ID NO: 27565 - DNA, 21 bp, synthetic construct
  source 1..21: mol_type = other DNA; mol_type = other DNA
tgccctcagaaagggcaggag

SEQ ID NO: 27566 - DNA, 21 bp, synthetic construct
  source 1..21: mol_type = other DNA; mol_type = other DNA
cgtgatgattattcaacctat

SEQ ID NO: 27567 - DNA, 21 bp, synthetic construct
  source 1..21: mol_type = other DNA; mol_type = other DNA
cctctcagcgatcgtacctgg

SEQ ID NO: 27568 - DNA, 21 bp, synthetic construct
  source 1..21: mol_type = other DNA; mol_type = other DNA
tgggttaagtcgagcccaggg

SEQ ID NO: 27569 - DNA, 21 bp, synthetic construct
  source 1..21: mol_type = other DNA; mol_type = other DNA
ggtgttgagacagttagatgg

SEQ ID NO: 27570 - DNA, 21 bp, synthetic construct
  source 1..21: mol_type = other DNA; mol_type = other DNA
gacttaacagccaggaattgg

SEQ ID NO: 27571 - DNA, 21 bp, synthetic construct
  source 1..21: mol_type = other DNA; mol_type = other DNA
tacgccagaaccggtattaac

SEQ ID NO: 27572 - DNA, 21 bp, synthetic construct
  source 1..21: mol_type = other DNA; mol_type = other DNA
caccatagcacaaacggggtg

SEQ ID NO: 27573 - DNA, 21 bp, synthetic construct
  source 1..21: mol_type = other DNA; mol_type = other DNA
gacctccaaagttcaaaatgg

SEQ ID NO: 27574 - DNA, 21 bp, synthetic construct
  source 1..21: mol_type = other DNA; mol_type = other DNA
agggacgcaacatcagggtgg

SEQ ID NO: 27575 - DNA, 21 bp, synthetic construct
  source 1..21: mol_type = other DNA; mol_type = other DNA
tactttacaaagcagatcaac

SEQ ID NO: 27576 - DNA, 21 bp, synthetic construct
  source 1..21: mol_type = other DNA; mol_type = other DNA
cacactcccatgtgcaaagcg

SEQ ID NO: 27577 - DNA, 21 bp, synthetic construct
  source 1..21: mol_type = other DNA; mol_type = other DNA
tacttcacaggaagagagaac

SEQ ID NO: 27578 - DNA, 21 bp, synthetic construct
  source 1..21: mol_type = other DNA; mol_type = other DNA
attatgtcgtcagctatgtgg

SEQ ID NO: 27579 - DNA, 21 bp, synthetic construct
  source 1..21: mol_type = other DNA; mol_type = other DNA
tatttccatggacaggtggcg

SEQ ID NO: 27580 - DNA, 21 bp, synthetic construct
  source 1..21: mol_type = other DNA; mol_type = other DNA
gtagatagtgataatggtcgc

SEQ ID NO: 27581 - DNA, 21 bp, synthetic construct
  source 1..21: mol_type = other DNA; mol_type = other DNA
tatcacaagagccagaacttc

SEQ ID NO: 27582 - DNA, 21 bp, synthetic construct
  source 1..21: mol_type = other DNA; mol_type = other DNA
tgcggcagaccccaaatggaa

SEQ ID NO: 27583 - DNA, 21 bp, synthetic construct
  source 1..21: mol_type = other DNA; mol_type = other DNA
tttcaccgtttgtccccgaac

SEQ ID NO: 27584 - DNA, 21 bp, synthetic construct
  source 1..21: mol_type = other DNA; mol_type = other DNA
tatagcaggttacaggagaat

SEQ ID NO: 27585 - DNA, 21 bp, synthetic construct
  source 1..21: mol_type = other DNA; mol_type = other DNA
cgcgatggagtgagtgcgtgg

SEQ ID NO: 27586 - DNA, 21 bp, synthetic construct
  source 1..21: mol_type = other DNA; mol_type = other DNA
tatgcaaggtcaggaattaac

SEQ ID NO: 27587 - DNA, 21 bp, synthetic construct
  source 1..21: mol_type = other DNA; mol_type = other DNA
ctatctaaactcggaatcaac

SEQ ID NO: 27588 - DNA, 21 bp, synthetic construct
  source 1..21: mol_type = other DNA; mol_type = other DNA
tgcaaactaccgaaggaatta

SEQ ID NO: 27589 - DNA, 21 bp, synthetic construct
  source 1..21: mol_type = other DNA; mol_type = other DNA
gtaagtacgcattgcgccgct

SEQ ID NO: 27590 - DNA, 21 bp, synthetic construct
  source 1..21: mol_type = other DNA; mol_type = other DNA
tatttcagtggccgcatggaa

SEQ ID NO: 27591 - DNA, 21 bp, synthetic construct
  source 1..21: mol_type = other DNA; mol_type = other DNA
tactttgccggccgaacagag

SEQ ID NO: 27592 - DNA, 21 bp, synthetic construct
  source 1..21: mol_type = other DNA; mol_type = other DNA
agaatgccagatcgggggtgg

SEQ ID NO: 27593 - DNA, 21 bp, synthetic construct
  source 1..21: mol_type = other DNA; mol_type = other DNA
ctggctaagagcgggcttaac

SEQ ID NO: 27594 - DNA, 21 bp, synthetic construct
  source 1..21: mol_type = other DNA; mol_type = other DNA
ccttacgcacgcagtcccttg

SEQ ID NO: 27595 - DNA, 21 bp, synthetic construct
  source 1..21: mol_type = other DNA; mol_type = other DNA
accaggcaaggcgatccggcc

SEQ ID NO: 27596 - DNA, 21 bp, synthetic construct
  source 1..21: mol_type = other DNA; mol_type = other DNA
taccatagaatgagtccggat

SEQ ID NO: 27597 - DNA, 21 bp, synthetic construct
  source 1..21: mol_type = other DNA; mol_type = other DNA
tactcgcgcttggacgttctc

SEQ ID NO: 27598 - DNA, 21 bp, synthetic construct
  source 1..21: mol_type = other DNA; mol_type = other DNA
gacttgggtagcagtgtttgg

SEQ ID NO: 27599 - DNA, 21 bp, synthetic construct
  source 1..21: mol_type = other DNA; mol_type = other DNA
tatttcacaaacattagggaa

SEQ ID NO: 27600 - DNA, 21 bp, synthetic construct
  source 1..21: mol_type = other DNA; mol_type = other DNA
ggtgatgaatggcagcatttc

SEQ ID NO: 27601 - DNA, 21 bp, synthetic construct
  source 1..21: mol_type = other DNA; mol_type = other DNA
ggaggaccaacaatgtgctat

SEQ ID NO: 27602 - DNA, 21 bp, synthetic construct
  source 1..21: mol_type = other DNA; mol_type = other DNA
tacgtacgcagtgacaaagcc

SEQ ID NO: 27603 - DNA, 21 bp, synthetic construct
  source 1..21: mol_type = other DNA; mol_type = other DNA
gtcggccatagaggatgggat

SEQ ID NO: 27604 - DNA, 21 bp, synthetic construct
  source 1..21: mol_type = other DNA; mol_type = other DNA
tatagtaagcacaataccaat

SEQ ID NO: 27605 - DNA, 21 bp, synthetic construct
  source 1..21: mol_type = other DNA; mol_type = other DNA
tttttctcgggcaaaattgag

SEQ ID NO: 27606 - DNA, 21 bp, synthetic construct
  source 1..21: mol_type = other DNA; mol_type = other DNA
tattcgaggattcaacccgat

SEQ ID NO: 27607 - DNA, 21 bp, synthetic construct
  source 1..21: mol_type = other DNA; mol_type = other DNA
tatttcagtggtatcggtgca

SEQ ID NO: 27608 - DNA, 21 bp, synthetic construct
  source 1..21: mol_type = other DNA; mol_type = other DNA
tattctcgtctccaaaatgat

SEQ ID NO: 27609 - DNA, 21 bp, synthetic construct
  source 1..21: mol_type = other DNA; mol_type = other DNA
atcatatcgacgaacggtgtc

SEQ ID NO: 27610 - DNA, 21 bp, synthetic construct
  source 1..21: mol_type = other DNA; mol_type = other DNA
gttcctggacattgtttggtt

SEQ ID NO: 27611 - DNA, 21 bp, synthetic construct
  source 1..21: mol_type = other DNA; mol_type = other DNA
tatttcacgaaacaaataaat

SEQ ID NO: 27612 - DNA, 21 bp, synthetic construct
  source 1..21: mol_type = other DNA; mol_type = other DNA
ccgtacgcccgtagcatcgag

SEQ ID NO: 27613 - DNA, 21 bp, synthetic construct
  source 1..21: mol_type = other DNA; mol_type = other DNA
tattggaccggaaccactgcc

SEQ ID NO: 27614 - DNA, 21 bp, synthetic construct
  source 1..21: mol_type = other DNA; mol_type = other DNA
taccacagactaggggaccca

SEQ ID NO: 27615 - DNA, 21 bp, synthetic construct
  source 1..21: mol_type = other DNA; mol_type = other DNA
tactggtcaggcacagttgcg

SEQ ID NO: 27616 - DNA, 21 bp, synthetic construct
  source 1..21: mol_type = other DNA; mol_type = other DNA
cgtaacgagttcagcacgtac

SEQ ID NO: 27617 - DNA, 21 bp, synthetic construct
  source 1..21: mol_type = other DNA; mol_type = other DNA
agagattttgatgcatatcct

SEQ ID NO: 27618 - DNA, 21 bp, synthetic construct
  source 1..21: mol_type = other DNA; mol_type = other DNA
tacagtaaaatgggccaaaac

SEQ ID NO: 27619 - DNA, 21 bp, synthetic construct
  source 1..21: mol_type = other DNA; mol_type = other DNA
ttaagcaaattaggtattaat

SEQ ID NO: 27620 - DNA, 21 bp, synthetic construct
  source 1..21: mol_type = other DNA; mol_type = other DNA
cgcgaatcgacaaatgggata

SEQ ID NO: 27621 - DNA, 21 bp, synthetic construct
  source 1..21: mol_type = other DNA; mol_type = other DNA
cgggacgagttcacagtttat

SEQ ID NO: 27622 - DNA, 21 bp, synthetic construct
  source 1..21: mol_type = other DNA; mol_type = other DNA
tactccagattgcaatcgaac

SEQ ID NO: 27623 - DNA, 21 bp, synthetic construct
  source 1..21: mol_type = other DNA; mol_type = other DNA
cgtttagacgacaggggctgg

SEQ ID NO: 27624 - DNA, 21 bp, synthetic construct
  source 1..21: mol_type = other DNA
tacttcacggggcgagaagat

SEQ ID NO: 27625 - DNA, 21 bp, synthetic construct
  source 1..21: mol_type = other DNA; mol_type = other DNA
aggtcggaatttgcaacgtac

SEQ ID NO: 27626 - DNA, 21 bp, synthetic construct
  source 1..21: mol_type = other DNA; mol_type = other DNA
tattggcaaggaatcaaggat

SEQ ID NO: 27627 - DNA, 21 bp, synthetic construct
  source 1..21: mol_type = other DNA; mol_type = other DNA
tttttcaccgggcaggtagac

SEQ ID NO: 27628 - DNA, 21 bp, synthetic construct
  source 1..21: mol_type = other DNA; mol_type = other DNA
tacagccgtctgcatgctaac

SEQ ID NO: 27629 - DNA, 21 bp, synthetic construct
  source 1..21: mol_type = other DNA; mol_type = other DNA
tattttacgggagtcgcagtg

SEQ ID NO: 27630 - DNA, 21 bp, synthetic construct
  source 1..21: mol_type = other DNA; mol_type = other DNA
tactcccgagtaggactcaat

SEQ ID NO: 27631 - DNA, 21 bp, synthetic construct
  source 1..21: mol_type = other DNA; mol_type = other DNA
ggagttgaagctgtccgttgg

SEQ ID NO: 27632 - DNA, 21 bp, synthetic construct
  source 1..21: mol_type = other DNA; mol_type = other DNA
agtatgagcgatcggacgtgg

SEQ ID NO: 27633 - DNA, 21 bp, synthetic construct
  source 1..21: mol_type = other DNA; mol_type = other DNA
tactggacgggtaccgttgcc

SEQ ID NO: 27634 - DNA, 21 bp, synthetic construct
  source 1..21: mol_type = other DNA; mol_type = other DNA
atcgatgaatggcatcatttt

SEQ ID NO: 27635 - DNA, 21 bp, synthetic construct
  source 1..21: mol_type = other DNA; mol_type = other DNA
tatagccggatacaaactgat

SEQ ID NO: 27636 - DNA, 21 bp, synthetic construct
  source 1..21: mol_type = other DNA; mol_type = other DNA
ttcctcgcgagtcgagactgg

SEQ ID NO: 27637 - DNA, 21 bp, synthetic construct
  source 1..21: mol_type = other DNA; mol_type = other DNA
tactgggccggcgtacgtgaa

SEQ ID NO: 27638 - DNA, 21 bp, synthetic construct
  source 1..21: mol_type = other DNA; mol_type = other DNA
ataccccccttatttaatgtg

SEQ ID NO: 27639 - DNA, 21 bp, synthetic construct
  source 1..21: mol_type = other DNA; mol_type = other DNA
ggttccgaattctcgacgtat

SEQ ID NO: 27640 - DNA, 21 bp, synthetic construct
  source 1..21: mol_type = other DNA; mol_type = other DNA
aacatggggtcgagagactgg

SEQ ID NO: 27641 - DNA, 21 bp, synthetic construct
  source 1..21: mol_type = other DNA; mol_type = other DNA
tatgcgcgatcgggagttaac

SEQ ID NO: 27642 - DNA, 21 bp, synthetic construct
  source 1..21: mol_type = other DNA; mol_type = other DNA
tacttctcaaaaatagcagcc

SEQ ID NO: 27643 - DNA, 21 bp, synthetic construct
  source 1..21: mol_type = other DNA; mol_type = other DNA
agggacgattacgtttcttgg

SEQ ID NO: 27644 - DNA, 21 bp, synthetic construct
  source 1..21: mol_type = other DNA; mol_type = other DNA
tatagtcgattgtccccgatg

SEQ ID NO: 27645 - DNA, 21 bp, synthetic construct
  source 1..21: mol_type = other DNA; mol_type = other DNA
tattcaaaacaaaatatgaat

SEQ ID NO: 27646 - DNA, 21 bp, synthetic construct
  source 1..21: mol_type = other DNA; mol_type = other DNA
cagatgaaagaccgtacatgg

SEQ ID NO: 27647 - DNA, 21 bp, synthetic construct
  source 1..21: mol_type = other DNA; mol_type = other DNA
tattcccgcctacagccagtc

SEQ ID NO: 27648 - DNA, 21 bp, synthetic construct
  source 1..21: mol_type = other DNA; mol_type = other DNA
gcacctggaaacatttcatgg

SEQ ID NO: 27649 - DNA, 21 bp, synthetic construct
  source 1..21: mol_type = other DNA; mol_type = other DNA
tatcaccgtatgtcgccagac

SEQ ID NO: 27650 - DNA, 21 bp, synthetic construct
  source 1..21: mol_type = other DNA; mol_type = other DNA
cgcttagaaagcactcattgg

SEQ ID NO: 27651 - DNA, 21 bp, synthetic construct
  source 1..21: mol_type = other DNA; mol_type = other DNA
ttctctcgcgtttctgacaat

SEQ ID NO: 27652 - DNA, 21 bp, synthetic construct
  source 1..21: mol_type = other DNA; mol_type = other DNA
tatagtaaaacaggcgtaaac

SEQ ID NO: 27653 - DNA, 21 bp, synthetic construct
  source 1..21: mol_type = other DNA; mol_type = other DNA
atgatggacggtactaacgcc

SEQ ID NO: 27654 - DNA, 21 bp, synthetic construct
  source 1..21: mol_type = other DNA; mol_type = other DNA
gcgatggccgatcgcgaatgg

SEQ ID NO: 27655 - DNA, 21 bp, synthetic construct
  source 1..21: mol_type = other DNA; mol_type = other DNA
tatttcacaggcagggtcagc

SEQ ID NO: 27656 - DNA, 21 bp, synthetic construct
  source 1..21: mol_type = other DNA; mol_type = other DNA
ataatgagcgatcgactgtgg

SEQ ID NO: 27657 - DNA, 21 bp, synthetic construct
  source 1..21: mol_type = other DNA; mol_type = other DNA
gtcaccagtaccatggggagg

SEQ ID NO: 27658 - DNA, 21 bp, synthetic construct
  source 1..21: mol_type = other DNA; mol_type = other DNA
tgtaagcagccaaagacggag

SEQ ID NO: 27659 - DNA, 21 bp, synthetic construct
  source 1..21: mol_type = other DNA; mol_type = other DNA
tactcgagaatacagacggac

SEQ ID NO: 27660 - DNA, 21 bp, synthetic construct
  source 1..21: mol_type = other DNA; mol_type = other DNA
tatgcacgtacgggtatgaac

SEQ ID NO: 27661 - DNA, 21 bp, synthetic construct
  source 1..21: mol_type = other DNA; mol_type = other DNA
tattcccgtctaagtccagcg

SEQ ID NO: 27662 - DNA, 21 bp, synthetic construct
  source 1..21: mol_type = other DNA; mol_type = other DNA
gtaccactaaaaggctgggac

SEQ ID NO: 27663 - DNA, 21 bp, synthetic construct
  source 1..21: mol_type = other DNA; mol_type = other DNA
ttgcagagcactaacggagtg

SEQ ID NO: 27664 - DNA, 21 bp, synthetic construct
  source 1..21: mol_type = other DNA; mol_type = other DNA
cgtagaactgatgtttatcct

SEQ ID NO: 27665 - DNA, 21 bp, synthetic construct
  source 1..21: mol_type = other DNA; mol_type = other DNA
ttcttcacagggtacaaggag

SEQ ID NO: 27666 - DNA, 21 bp, synthetic construct
  source 1..21: mol_type = other DNA; mol_type = other DNA
agaatggaagaccgtcaatgg

SEQ ID NO: 27667 - DNA, 21 bp, synthetic construct
  source 1..21: mol_type = other DNA; mol_type = other DNA
ttctcgagggttggacagaac

SEQ ID NO: 27668 - DNA, 21 bp, synthetic construct
  source 1..21: mol_type = other DNA; mol_type = other DNA
cttcatcgccttggagagggc

SEQ ID NO: 27669 - DNA, 21 bp, synthetic construct
  source 1..21: mol_type = other DNA; mol_type = other DNA
tatagccgaattggattcaat

SEQ ID NO: 27670 - DNA, 21 bp, synthetic construct
  source 1..21: mol_type = other DNA; mol_type = other DNA
agaaatgaatttacagggttc

SEQ ID NO: 27671 - DNA, 21 bp, synthetic construct
  source 1..21: mol_type = other DNA; mol_type = other DNA
tacagccgtcttagctacgat

SEQ ID NO: 27672 - DNA, 21 bp, synthetic construct
  source 1..21: mol_type = other DNA; mol_type = other DNA
aggacttttgatgcgtaccct

SEQ ID NO: 27673 - DNA, 21 bp, synthetic construct
  source 1..21: mol_type = other DNA; mol_type = other DNA
gttatgcaagatagaacctgg

SEQ ID NO: 27674 - DNA, 21 bp, synthetic construct
  source 1..21: mol_type = other DNA; mol_type = other DNA
cttagcagagcgggtgaaaac

SEQ ID NO: 27675 - DNA, 21 bp, synthetic construct
  source 1..21: mol_type = other DNA; mol_type = other DNA
tttagccgtctgagcgcgaat

SEQ ID NO: 27676 - DNA, 21 bp, synthetic construct
  source 1..21: mol_type = other DNA; mol_type = other DNA
aaaaatgactatacggttttc

SEQ ID NO: 27677 - DNA, 21 bp, synthetic construct
  source 1..21: mol_type = other DNA; mol_type = other DNA
tactggaccggtgtccacgac

SEQ ID NO: 27678 - DNA, 21 bp, synthetic construct
  source 1..21: mol_type = other DNA; mol_type = other DNA
atgccaaatgaggggtggttc

SEQ ID NO: 27679 - DNA, 21 bp, synthetic construct
  source 1..21: mol_type = other DNA; mol_type = other DNA
ctgtgcgcaccttgtttaact

SEQ ID NO: 27680 - DNA, 21 bp, synthetic construct
  source 1..21: mol_type = other DNA; mol_type = other DNA
tatttttctgggcggagtgag

SEQ ID NO: 27681 - DNA, 21 bp, synthetic construct
  source 1..21: mol_type = other DNA; mol_type = other DNA
gtgagtgagttcgcgtcttat

SEQ ID NO: 27682 - DNA, 21 bp, synthetic construct
  source 1..21: mol_type = other DNA; mol_type = other DNA
tatcataggttgagcgaccac

SEQ ID NO: 27683 - DNA, 21 bp, synthetic construct
  source 1..21: mol_type = other DNA; mol_type = other DNA
aagtatgaccatgtggcgtgg

SEQ ID NO: 27684 - DNA, 21 bp, synthetic construct
  source 1..21: mol_type = other DNA; mol_type = other DNA
tacttctcaggacaacacgaa

SEQ ID NO: 27685 - DNA, 21 bp, synthetic construct
  source 1..21: mol_type = other DNA; mol_type = other DNA
gatatgacttccagtgtatgg

SEQ ID NO: 27686 - DNA, 21 bp, synthetic construct
  source 1..21: mol_type = other DNA; mol_type = other DNA
tatagtaagcacggaaataat

SEQ ID NO: 27687 - DNA, 21 bp, synthetic construct
  source 1..21: mol_type = other DNA; mol_type = other DNA
atgcacaggttgagcatggac

SEQ ID NO: 27688 - DNA, 21 bp, synthetic construct
  source 1..21: mol_type = other DNA; mol_type = other DNA
tggaccccaatgtgcaaaaac

SEQ ID NO: 27689 - DNA, 21 bp, synthetic construct
  source 1..21: mol_type = other DNA; mol_type = other DNA
tatttcagtgggaggattcag

SEQ ID NO: 27690 - DNA, 21 bp, synthetic construct
  source 1..21: mol_type = other DNA; mol_type = other DNA
tactttagcggtattcacaac

SEQ ID NO: 27691 - DNA, 21 bp, synthetic construct
  source 1..21: mol_type = other DNA; mol_type = other DNA
ctaactcgcatttcgagagat

SEQ ID NO: 27692 - DNA, 21 bp, synthetic construct
  source 1..21: mol_type = other DNA; mol_type = other DNA
tactcaaagagtggtcagaat

SEQ ID NO: 27693 - DNA, 21 bp, synthetic construct
  source 1..21: mol_type = other DNA; mol_type = other DNA
gatgacggtacaagtaagtgg

SEQ ID NO: 27694 - DNA, 21 bp, synthetic construct
  source 1..21: mol_type = other DNA; mol_type = other DNA
tatatcaaaggcgatctgttt

SEQ ID NO: 27695 - DNA, 21 bp, synthetic construct
  source 1..21: mol_type = other DNA; mol_type = other DNA
ggaggggccacatcccattgg

SEQ ID NO: 27696 - DNA, 21 bp, synthetic construct
  source 1..21: mol_type = other DNA; mol_type = other DNA
tatagcaggctgaatgtcaac

SEQ ID NO: 27697 - DNA, 21 bp, synthetic construct
  source 1..21: mol_type = other DNA; mol_type = other DNA
tattctcggataggtgataat

SEQ ID NO: 27698 - DNA, 21 bp, synthetic construct
  source 1..21: mol_type = other DNA; mol_type = other DNA
cgttccatggattcgtaccca

SEQ ID NO: 27699 - DNA, 21 bp, synthetic construct
  source 1..21: mol_type = other DNA; mol_type = other DNA
tacttttccggaatacatctc

SEQ ID NO: 27700 - DNA, 21 bp, synthetic construct
  source 1..21: mol_type = other DNA; mol_type = other DNA
tattctcgaataggcgtaaat

SEQ ID NO: 27701 - DNA, 21 bp, synthetic construct
  source 1..21: mol_type = other DNA; mol_type = other DNA
agaactcgcgaggtgtatcct

SEQ ID NO: 27702 - DNA, 21 bp, synthetic construct
  source 1..21: mol_type = other DNA; mol_type = other DNA
tactggaccgggatgttggaa

SEQ ID NO: 27703 - DNA, 21 bp, synthetic construct
  source 1..21: mol_type = other DNA; mol_type = other DNA
cgtgatgaatttaaaagtttt

SEQ ID NO: 27704 - DNA, 21 bp, synthetic construct
  source 1..21: mol_type = other DNA; mol_type = other DNA
tattttagcgggcaccatgag

SEQ ID NO: 27705 - DNA, 21 bp, synthetic construct
  source 1..21: mol_type = other DNA; mol_type = other DNA
ttgcaccgcatgacaccaaac

SEQ ID NO: 27706 - DNA, 21 bp, synthetic construct
  source 1..21: mol_type = other DNA; mol_type = other DNA
tacacacgacttgacagccac

SEQ ID NO: 27707 - DNA, 21 bp, synthetic construct
  source 1..21: mol_type = other DNA; mol_type = other DNA
tattttacaggttttctcgaa

SEQ ID NO: 27708 - DNA, 21 bp, synthetic construct
  source 1..21: mol_type = other DNA; mol_type = other DNA
ataatgccctctagaaattgg

SEQ ID NO: 27709 - DNA, 21 bp, synthetic construct
  source 1..21: mol_type = other DNA; mol_type = other DNA
ggagtggaggctgtaaggtgg

SEQ ID NO: 27710 - DNA, 21 bp, synthetic construct
  source 1..21: mol_type = other DNA; mol_type = other DNA
tgcaaaccagacgaagtaaga

SEQ ID NO: 27711 - DNA, 21 bp, synthetic construct
  source 1..21: mol_type = other DNA; mol_type = other DNA
gtgctctcccatgctacgtgg

SEQ ID NO: 27712 - DNA, 21 bp, synthetic construct
  source 1..21: mol_type = other DNA; mol_type = other DNA
ctcgcgcgtacaggttgcgac

SEQ ID NO: 27713 - DNA, 21 bp, synthetic construct
  source 1..21: mol_type = other DNA; mol_type = other DNA
tgcgctggatacttgcacgaa

SEQ ID NO: 27714 - DNA, 21 bp, synthetic construct
  source 1..21: mol_type = other DNA; mol_type = other DNA
accgaccttactgtatatagg

SEQ ID NO: 27715 - DNA, 21 bp, synthetic construct
  source 1..21: mol_type = other DNA; mol_type = other DNA
tgtggaggaggaagattacct

SEQ ID NO: 27716 - DNA, 21 bp, synthetic construct
  source 1..21: mol_type = other DNA; mol_type = other DNA
tacgcgcgttcaggtatgaac

SEQ ID NO: 27717 - DNA, 21 bp, synthetic construct
  source 1..21: mol_type = other DNA; mol_type = other DNA
tattatagtggtataacagca

SEQ ID NO: 27718 - DNA, 21 bp, synthetic construct
  source 1..21: mol_type = other DNA; mol_type = other DNA
ctcgcgaagacggggatgaac

SEQ ID NO: 27719 - DNA, 21 bp, synthetic construct
  source 1..21: mol_type = other DNA; mol_type = other DNA
tactcaaagcacaatgcaaat

SEQ ID NO: 27720 - DNA, 21 bp, synthetic construct
  source 1..21: mol_type = other DNA; mol_type = other DNA
ctgtgtaggccttgcagtgaa

SEQ ID NO: 27721 - DNA, 21 bp, synthetic construct
  source 1..21: mol_type = other DNA; mol_type = other DNA
agggcgtatgatgcgttccca

SEQ ID NO: 27722 - DNA, 21 bp, synthetic construct
  source 1..21: mol_type = other DNA
cggtctgaattcatgagtttc

SEQ ID NO: 27723 - DNA, 21 bp, synthetic construct
  source 1..21: mol_type = other DNA; mol_type = other DNA
cgtggtgagttttcaacctgg

SEQ ID NO: 27724 - DNA, 21 bp, synthetic construct
  source 1..21: mol_type = other DNA; mol_type = other DNA
tatttctcacaaattaaggaa

SEQ ID NO: 27725 - DNA, 21 bp, synthetic construct
  source 1..21: mol_type = other DNA; mol_type = other DNA
tactttacgggaactctgcag

SEQ ID NO: 27726 - DNA, 21 bp, synthetic construct
  source 1..21: mol_type = other DNA; mol_type = other DNA
gtgagtgactgggccccattc

SEQ ID NO: 27727 - DNA, 21 bp, synthetic construct
  source 1..21: mol_type = other DNA; mol_type = other DNA
tacgcacgcacaggtagcaac

SEQ ID NO: 27728 - DNA, 21 bp, synthetic construct
  source 1..21: mol_type = other DNA; mol_type = other DNA
cttgatggaaccagtcgttgg

SEQ ID NO: 27729 - DNA, 21 bp, synthetic construct
  source 1..21: mol_type = other DNA; mol_type = other DNA
tatgaatctaccaatggtcga

SEQ ID NO: 27730 - DNA, 21 bp, synthetic construct
  source 1..21: mol_type = other DNA; mol_type = other DNA
aaggatgagtggaagacatac

SEQ ID NO: 27731 - DNA, 21 bp, synthetic construct
  source 1..21: mol_type = other DNA; mol_type = other DNA
tacttgaagagccagggttat

SEQ ID NO: 27732 - DNA, 21 bp, synthetic construct
  source 1..21: mol_type = other DNA; mol_type = other DNA
tacttcaccggaaggagtgac

SEQ ID NO: 27733 - DNA, 21 bp, synthetic construct
  source 1..21: mol_type = other DNA; mol_type = other DNA
agcgacgggactagcaaatgg

SEQ ID NO: 27734 - DNA, 21 bp, synthetic construct
  source 1..21: mol_type = other DNA; mol_type = other DNA
ttttcccgaattggcgtgaat

SEQ ID NO: 27735 - DNA, 21 bp, synthetic construct
  source 1..21: mol_type = other DNA; mol_type = other DNA
tacttcgcaggtattctggct

SEQ ID NO: 27736 - DNA, 21 bp, synthetic construct
  source 1..21: mol_type = other DNA; mol_type = other DNA
tacttttcggggaagcgagag

SEQ ID NO: 27737 - DNA, 21 bp, synthetic construct
  source 1..21: mol_type = other DNA; mol_type = other DNA
tactttcacggccaaatagat

SEQ ID NO: 27738 - DNA, 21 bp, synthetic construct
  source 1..21: mol_type = other DNA; mol_type = other DNA
aaattgacggatcggacgtgg

SEQ ID NO: 27739 - DNA, 21 bp, synthetic construct
  source 1..21: mol_type = other DNA; mol_type = other DNA
ttagaaagcaccaacggtatc

SEQ ID NO: 27740 - DNA, 21 bp, synthetic construct
  source 1..21: mol_type = other DNA; mol_type = other DNA
tacgctaagaacggtcataat

SEQ ID NO: 27741 - DNA, 21 bp, synthetic construct
  source 1..21: mol_type = other DNA; mol_type = other DNA
tttttcacaggcaagatagaa

SEQ ID NO: 27742 - DNA, 21 bp, synthetic construct
  source 1..21: mol_type = other DNA; mol_type = other DNA
tgtaaacctccaagtcctatg

SEQ ID NO: 27743 - DNA, 21 bp, synthetic construct
  source 1..21: mol_type = other DNA; mol_type = other DNA
cttgccaaaatgggaccaaac

SEQ ID NO: 27744 - DNA, 21 bp, synthetic construct
  source 1..21: mol_type = other DNA; mol_type = other DNA
tactttacgggagttctcccg

SEQ ID NO: 27745 - DNA, 21 bp, synthetic construct
  source 1..21: mol_type = other DNA; mol_type = other DNA
ggaggggagtacagtacatgg

SEQ ID NO: 27746 - DNA, 21 bp, synthetic construct
  source 1..21: mol_type = other DNA; mol_type = other DNA
tatagtagaattcaaatggat

SEQ ID NO: 27747 - DNA, 21 bp, synthetic construct
  source 1..21: mol_type = other DNA; mol_type = other DNA
acctgggagggggacgcggca

SEQ ID NO: 27748 - DNA, 21 bp, synthetic construct
  source 1..21: mol_type = other DNA; mol_type = other DNA
caaaccgattgtgttaatcag

SEQ ID NO: 27749 - DNA, 21 bp, synthetic construct
  source 1..21: mol_type = other DNA; mol_type = other DNA
taccatcgcctgagtgcaaat

SEQ ID NO: 27750 - DNA, 21 bp, synthetic construct
  source 1..21: mol_type = other DNA; mol_type = other DNA
ccactctcgagtcagagctgg

SEQ ID NO: 27751 - DNA, 21 bp, synthetic construct
  source 1..21: mol_type = other DNA; mol_type = other DNA
tattcaaggctcggtcccgta

SEQ ID NO: 27752 - DNA, 21 bp, synthetic construct
  source 1..21: mol_type = other DNA; mol_type = other DNA
tatgtacattctcaaaactac

SEQ ID NO: 27753 - DNA, 21 bp, synthetic construct
  source 1..21: mol_type = other DNA; mol_type = other DNA
cttcacagaagttctaataac

SEQ ID NO: 27754 - DNA, 21 bp, synthetic construct
  source 1..21: mol_type = other DNA; mol_type = other DNA
tattttagcggtatgagagaa

SEQ ID NO: 27755 - DNA, 21 bp, synthetic construct
  source 1..21: mol_type = other DNA; mol_type = other DNA
tacagcagactgtcacctacc

SEQ ID NO: 27756 - DNA, 21 bp, synthetic construct
  source 1..21: mol_type = other DNA; mol_type = other DNA
tacttctcaggcacgactgat

SEQ ID NO: 27757 - DNA, 21 bp, synthetic construct
  source 1..21: mol_type = other DNA; mol_type = other DNA
gatccatcaagtgtgcgatgg

SEQ ID NO: 27758 - DNA, 21 bp, synthetic construct
  source 1..21: mol_type = other DNA; mol_type = other DNA
acatcagattatatgtcattt

SEQ ID NO: 27759 - DNA, 21 bp, synthetic construct
  source 1..21: mol_type = other DNA; mol_type = other DNA
ttgcatagatctggcgacaat

SEQ ID NO: 27760 - DNA, 21 bp, synthetic construct
  source 1..21: mol_type = other DNA; mol_type = other DNA
actgatggatactcttcatgg

SEQ ID NO: 27761 - DNA, 21 bp, synthetic construct
  source 1..21: mol_type = other DNA; mol_type = other DNA
tatagccggctgcaggagcgt

SEQ ID NO: 27762 - DNA, 21 bp, synthetic construct
  source 1..21: mol_type = other DNA; mol_type = other DNA
cgattagaatcgcaagtttgg

SEQ ID NO: 27763 - DNA, 21 bp, synthetic construct
  source 1..21: mol_type = other DNA; mol_type = other DNA
tgcaagccagagatgttaaga

SEQ ID NO: 27764 - DNA, 21 bp, synthetic construct
  source 1..21: mol_type = other DNA; mol_type = other DNA
tatagtaagtggaacgttaac

SEQ ID NO: 27765 - DNA, 21 bp, synthetic construct
  source 1..21: mol_type = other DNA; mol_type = other DNA
tacttcagcggcgtacctagt

SEQ ID NO: 27766 - DNA, 21 bp, synthetic construct
  source 1..21: mol_type = other DNA; mol_type = other DNA
tatttcaccggcgttagaagt

SEQ ID NO: 27767 - DNA, 21 bp, synthetic construct
  source 1..21: mol_type = other DNA; mol_type = other DNA
tgcaaacccgcgcagggatcg

SEQ ID NO: 27768 - DNA, 21 bp, synthetic construct
  source 1..21: mol_type = other DNA; mol_type = other DNA
tacggcgccaccaagtgcgac

SEQ ID NO: 27769 - DNA, 21 bp, synthetic construct
  source 1..21: mol_type = other DNA; mol_type = other DNA
tacttttcgggacaacaagat

SEQ ID NO: 27770 - DNA, 21 bp, synthetic construct
  source 1..21: mol_type = other DNA; mol_type = other DNA
tttagtcgtttgaacgagaat

SEQ ID NO: 27771 - DNA, 21 bp, synthetic construct
  source 1..21: mol_type = other DNA; mol_type = other DNA
ttttcgcgcatcggggaaaac

SEQ ID NO: 27772 - DNA, 21 bp, synthetic construct
  source 1..21: mol_type = other DNA; mol_type = other DNA
tggtgcaggtcccaggcgggg

SEQ ID NO: 27773 - DNA, 21 bp, synthetic construct
  source 1..21: mol_type = other DNA; mol_type = other DNA
ggctgccgtcatggagatatg

SEQ ID NO: 27774 - DNA, 21 bp, synthetic construct
  source 1..21: mol_type = other DNA; mol_type = other DNA
tactcgaagagtaattgtaac

SEQ ID NO: 27775 - DNA, 21 bp, synthetic construct
  source 1..21: mol_type = other DNA; mol_type = other DNA
tgtatgcccccttcgaaagaa

SEQ ID NO: 27776 - DNA, 21 bp, synthetic construct
  source 1..21: mol_type = other DNA; mol_type = other DNA
aagggtctcgaaggcatggat

SEQ ID NO: 27777 - DNA, 21 bp, synthetic construct
  source 1..21: mol_type = other DNA; mol_type = other DNA
tacttccacggagtcgtagag

SEQ ID NO: 27778 - DNA, 21 bp, synthetic construct
  source 1..21: mol_type = other DNA; mol_type = other DNA
acatgcatagccccagacaga

SEQ ID NO: 27779 - DNA, 21 bp, synthetic construct
  source 1..21: mol_type = other DNA; mol_type = other DNA
taccatcggcttagtgctaac

SEQ ID NO: 27780 - DNA, 21 bp, synthetic construct
  source 1..21: mol_type = other DNA; mol_type = other DNA
tacagtaggatccaggtagac

SEQ ID NO: 27781 - DNA, 21 bp, synthetic construct
  source 1..21: mol_type = other DNA; mol_type = other DNA
ttttctcgaattggactaaat

SEQ ID NO: 27782 - DNA, 21 bp, synthetic construct
  source 1..21: mol_type = other DNA; mol_type = other DNA
cgctccgacttcaaaatatac

SEQ ID NO: 27783 - DNA, 21 bp, synthetic construct
  source 1..21: mol_type = other DNA; mol_type = other DNA
agagacttagatgtctatcct

SEQ ID NO: 27784 - DNA, 21 bp, synthetic construct
  source 1..21: mol_type = other DNA; mol_type = other DNA
ttctcgagggttgggatgaac

SEQ ID NO: 27785 - DNA, 21 bp, synthetic construct
  source 1..21: mol_type = other DNA; mol_type = other DNA
tattttaccggcgcatgggat

SEQ ID NO: 27786 - DNA, 21 bp, synthetic construct
  source 1..21: mol_type = other DNA; mol_type = other DNA
acctcttcaaccaacggtatt

SEQ ID NO: 27787 - DNA, 21 bp, synthetic construct
  source 1..21: mol_type = other DNA; mol_type = other DNA
agaagtgatacaacttacccc

SEQ ID NO: 27788 - DNA, 21 bp, synthetic construct
  source 1..21: mol_type = other DNA; mol_type = other DNA
gacatgacggaccgaaaatgg

SEQ ID NO: 27789 - DNA, 21 bp, synthetic construct
  source 1..21: mol_type = other DNA; mol_type = other DNA
tacagtcgattaagtgccgat

SEQ ID NO: 27790 - DNA, 21 bp, synthetic construct
  source 1..21: mol_type = other DNA; mol_type = other DNA
tactggtcaaaagtgatggaa

SEQ ID NO: 27791 - DNA, 21 bp, synthetic construct
  source 1..21: mol_type = other DNA; mol_type = other DNA
tactttatgggaaagatcgcc

SEQ ID NO: 27792 - DNA, 21 bp, synthetic construct
  source 1..21: mol_type = other DNA; mol_type = other DNA
ggagatgagtggattcatttc

SEQ ID NO: 27793 - DNA, 21 bp, synthetic construct
  source 1..21: mol_type = other DNA; mol_type = other DNA
tactcaaaacggggggagaac

SEQ ID NO: 27794 - DNA, 21 bp, synthetic construct
  source 1..21: mol_type = other DNA; mol_type = other DNA
tacagccgaattaatgataac

SEQ ID NO: 27795 - DNA, 21 bp, synthetic construct
  source 1..21: mol_type = other DNA; mol_type = other DNA
ggaagtgaatacttgacctgg

SEQ ID NO: 27796 - DNA, 21 bp, synthetic construct
  source 1..21: mol_type = other DNA; mol_type = other DNA
tatttcactggggttgcggat

SEQ ID NO: 27797 - DNA, 21 bp, synthetic construct
  source 1..21: mol_type = other DNA; mol_type = other DNA
tatttcacaggcgtgtcgtca

SEQ ID NO: 27798 - DNA, 21 bp, synthetic construct
  source 1..21: mol_type = other DNA; mol_type = other DNA
tcggattttacatgcagggag

SEQ ID NO: 27799 - DNA, 21 bp, synthetic construct
  source 1..21: mol_type = other DNA; mol_type = other DNA
ggttctgatcatgttagatgg

SEQ ID NO: 27800 - DNA, 21 bp, synthetic construct
  source 1..21: mol_type = other DNA; mol_type = other DNA
tgcaaagatgagtatagagtc

SEQ ID NO: 27801 - DNA, 21 bp, synthetic construct
  source 1..21: mol_type = other DNA; mol_type = other DNA
tactttagtgggataacaggc

SEQ ID NO: 27802 - DNA, 21 bp, synthetic construct
  source 1..21: mol_type = other DNA; mol_type = other DNA
cccatggaatcaaagaagtgg

SEQ ID NO: 27803 - DNA, 21 bp, synthetic construct
  source 1..21: mol_type = other DNA; mol_type = other DNA
tacttcgctggtaaacacgag

SEQ ID NO: 27804 - DNA, 21 bp, synthetic construct
  source 1..21: mol_type = other DNA; mol_type = other DNA
caccagtcaacgaacggtatc

SEQ ID NO: 27805 - DNA, 21 bp, synthetic construct
  source 1..21: mol_type = other DNA; mol_type = other DNA
ttgagggatgggagcccagct

SEQ ID NO: 27806 - DNA, 21 bp, synthetic construct
  source 1..21: mol_type = other DNA
tatgcccgacttgggcacaat

SEQ ID NO: 27807 - DNA, 21 bp, synthetic construct
  source 1..21: mol_type = other DNA; mol_type = other DNA
tgcacttctcgtacgggccac

SEQ ID NO: 27808 - DNA, 21 bp, synthetic construct
  source 1..21: mol_type = other DNA; mol_type = other DNA
tttagtcgaatcggtggaggc

SEQ ID NO: 27809 - DNA, 21 bp, synthetic construct
  source 1..21: mol_type = other DNA; mol_type = other DNA
tacagccgcatccaaatcgat

SEQ ID NO: 27810 - DNA, 21 bp, synthetic construct
  source 1..21: mol_type = other DNA; mol_type = other DNA
gcacgttcgaccaatgggatc

SEQ ID NO: 27811 - DNA, 21 bp, synthetic construct
  source 1..21: mol_type = other DNA; mol_type = other DNA
gttatgtccgaccgcaggtgg

SEQ ID NO: 27812 - DNA, 21 bp, synthetic construct
  source 1..21: mol_type = other DNA; mol_type = other DNA
cgaggcgaatttgtgatgttc

SEQ ID NO: 27813 - DNA, 21 bp, synthetic construct
  source 1..21: mol_type = other DNA; mol_type = other DNA
tattttagcggtgttcagagc

SEQ ID NO: 27814 - DNA, 21 bp, synthetic construct
  source 1..21: mol_type = other DNA; mol_type = other DNA
tactggtcgggcgtcagagag

SEQ ID NO: 27815 - DNA, 21 bp, synthetic construct
  source 1..21: mol_type = other DNA; mol_type = other DNA
taccataagttgaatataacg

SEQ ID NO: 27816 - DNA, 21 bp, synthetic construct
  source 1..21: mol_type = other DNA; mol_type = other DNA
tacgtgcgatccgatactgcc

SEQ ID NO: 27817 - DNA, 21 bp, synthetic construct
  source 1..21: mol_type = other DNA; mol_type = other DNA
tattcacgctcggggcctaac

SEQ ID NO: 27818 - DNA, 21 bp, synthetic construct
  source 1..21: mol_type = other DNA; mol_type = other DNA
tattttagcggtcagacagac

SEQ ID NO: 27819 - DNA, 21 bp, synthetic construct
  source 1..21: mol_type = other DNA; mol_type = other DNA
taccacaagcaccaaacgaat

SEQ ID NO: 27820 - DNA, 21 bp, synthetic construct
  source 1..21: mol_type = other DNA; mol_type = other DNA
tacagtaagagtaacctcaat

SEQ ID NO: 27821 - DNA, 21 bp, synthetic construct
  source 1..21: mol_type = other DNA; mol_type = other DNA
ttggacggtacatcgaggtgg

SEQ ID NO: 27822 - DNA, 21 bp, synthetic construct
  source 1..21: mol_type = other DNA; mol_type = other DNA
ttttggagtgggataaaggag

SEQ ID NO: 27823 - DNA, 21 bp, synthetic construct
  source 1..21: mol_type = other DNA; mol_type = other DNA
tattttgccggaatattagca

SEQ ID NO: 27824 - DNA, 21 bp, synthetic construct
  source 1..21: mol_type = other DNA; mol_type = other DNA
acgattgcagatgcatatcca

SEQ ID NO: 27825 - DNA, 21 bp, synthetic construct
  source 1..21: mol_type = other DNA; mol_type = other DNA
tacagtcgtgttggccaaaac

SEQ ID NO: 27826 - DNA, 21 bp, synthetic construct
  source 1..21: mol_type = other DNA; mol_type = other DNA
tacttcagtggacgaacggcg

SEQ ID NO: 27827 - DNA, 21 bp, synthetic construct
  source 1..21: mol_type = other DNA; mol_type = other DNA
ttaagtaaagtaggggagaac

SEQ ID NO: 27828 - DNA, 21 bp, synthetic construct
  source 1..21: mol_type = other DNA; mol_type = other DNA
agacagtcaacgaatggcatc

SEQ ID NO: 27829 - DNA, 21 bp, synthetic construct
  source 1..21: mol_type = other DNA; mol_type = other DNA
tattacacagggattctagag

SEQ ID NO: 27830 - DNA, 21 bp, synthetic construct
  source 1..21: mol_type = other DNA; mol_type = other DNA
tacttcaccgggcgtttggtt

SEQ ID NO: 27831 - DNA, 21 bp, synthetic construct
  source 1..21: mol_type = other DNA; mol_type = other DNA
ttctcacgtgtgggttataat

SEQ ID NO: 27832 - DNA, 21 bp, synthetic construct
  source 1..21: mol_type = other DNA; mol_type = other DNA
tacacgaggataggtatgaac

SEQ ID NO: 27833 - DNA, 21 bp, synthetic construct
  source 1..21: mol_type = other DNA; mol_type = other DNA
cagaatgaattcagcacgtac

SEQ ID NO: 27834 - DNA, 21 bp, synthetic construct
  source 1..21: mol_type = other DNA; mol_type = other DNA
tactatacaggcaagctcgac

SEQ ID NO: 27835 - DNA, 21 bp, synthetic construct
  source 1..21: mol_type = other DNA; mol_type = other DNA
cgggatgggtactcagcgtgg

SEQ ID NO: 27836 - DNA, 21 bp, synthetic construct
  source 1..21: mol_type = other DNA; mol_type = other DNA
taccataggctcggcgataat

SEQ ID NO: 27837 - DNA, 21 bp, synthetic construct
  source 1..21: mol_type = other DNA; mol_type = other DNA
cactcctcgacaaacggtgcc

SEQ ID NO: 27838 - DNA, 21 bp, synthetic construct
  source 1..21: mol_type = other DNA; mol_type = other DNA
tattatacaggaaaggtcagt

SEQ ID NO: 27839 - DNA, 21 bp, synthetic construct
  source 1..21: mol_type = other DNA; mol_type = other DNA
cacgattcaacaaacggaaga

SEQ ID NO: 27840 - DNA, 21 bp, synthetic construct
  source 1..21: mol_type = other DNA; mol_type = other DNA
tatgccaaaggaaatcacaat

SEQ ID NO: 27841 - DNA, 21 bp, synthetic construct
  source 1..21: mol_type = other DNA; mol_type = other DNA
tacttctccggagttaccaat

SEQ ID NO: 27842 - DNA, 21 bp, synthetic construct
  source 1..21: mol_type = other DNA; mol_type = other DNA
gacatgtcttcggtggcgtgg

SEQ ID NO: 27843 - DNA, 21 bp, synthetic construct
  source 1..21: mol_type = other DNA; mol_type = other DNA
gtgatgagtgatagacgctgg

SEQ ID NO: 27844 - DNA, 21 bp, synthetic construct
  source 1..21: mol_type = other DNA; mol_type = other DNA
ttcagtagattatcacccctc

SEQ ID NO: 27845 - DNA, 21 bp, synthetic construct
  source 1..21: mol_type = other DNA; mol_type = other DNA
tactttacaggcagaaccgac

SEQ ID NO: 27846 - DNA, 21 bp, synthetic construct
  source 1..21: mol_type = other DNA; mol_type = other DNA
tgtaaacctcaatcaggttgg

SEQ ID NO: 27847 - DNA, 21 bp, synthetic construct
  source 1..21: mol_type = other DNA; mol_type = other DNA
tacagccggattcaagccgac

SEQ ID NO: 27848 - DNA, 21 bp, synthetic construct
  source 1..21: mol_type = other DNA; mol_type = other DNA
tatgtccggtccgattcgcgt

SEQ ID NO: 27849 - DNA, 21 bp, synthetic construct
  source 1..21: mol_type = other DNA; mol_type = other DNA
agagaggagtgggttgcatat

SEQ ID NO: 27850 - DNA, 21 bp, synthetic construct
  source 1..21: mol_type = other DNA; mol_type = other DNA
tacgcacgtaatggccctaac

SEQ ID NO: 27851 - DNA, 21 bp, synthetic construct
  source 1..21: mol_type = other DNA; mol_type = other DNA
gggggtgatggtaatcactat

SEQ ID NO: 27852 - DNA, 21 bp, synthetic construct
  source 1..21: mol_type = other DNA; mol_type = other DNA
taccaccgcctctcaccggag

SEQ ID NO: 27853 - DNA, 21 bp, synthetic construct
  source 1..21: mol_type = other DNA; mol_type = other DNA
caggatggctattcaaagtac

SEQ ID NO: 27854 - DNA, 21 bp, synthetic construct
  source 1..21: mol_type = other DNA; mol_type = other DNA
ctctcacgcacctcaatagat

SEQ ID NO: 27855 - DNA, 21 bp, synthetic construct
  source 1..21: mol_type = other DNA; mol_type = other DNA
ttgcaccgagcatcgtccaac

SEQ ID NO: 27856 - DNA, 21 bp, synthetic construct
  source 1..21: mol_type = other DNA; mol_type = other DNA
tacagcaagttatctgatttg

SEQ ID NO: 27857 - DNA, 21 bp, synthetic construct
  source 1..21: mol_type = other DNA; mol_type = other DNA
tacttttcaggtattcatgta

SEQ ID NO: 27858 - DNA, 21 bp, synthetic construct
  source 1..21: mol_type = other DNA; mol_type = other DNA
tattacactgggcgtgtggat

SEQ ID NO: 27859 - DNA, 21 bp, synthetic construct
  source 1..21: mol_type = other DNA; mol_type = other DNA
tactctaggatcggctttgac

SEQ ID NO: 27860 - DNA, 21 bp, synthetic construct
  source 1..21: mol_type = other DNA; mol_type = other DNA
tactttagtggccgacatgaa

SEQ ID NO: 27861 - DNA, 21 bp, synthetic construct
  source 1..21: mol_type = other DNA; mol_type = other DNA
atgcatcgactttcaatggat

SEQ ID NO: 27862 - DNA, 21 bp, synthetic construct
  source 1..21: mol_type = other DNA; mol_type = other DNA
cgtgaggagttcacaacatgg

SEQ ID NO: 27863 - DNA, 21 bp, synthetic construct
  source 1..21: mol_type = other DNA; mol_type = other DNA
tattacagtggggtccttgct

SEQ ID NO: 27864 - DNA, 21 bp, synthetic construct
  source 1..21: mol_type = other DNA; mol_type = other DNA
tacgcgcgcggaggttcaaac

SEQ ID NO: 27865 - DNA, 21 bp, synthetic construct
  source 1..21: mol_type = other DNA; mol_type = other DNA
tctaaaagtacgaatggcgtc

SEQ ID NO: 27866 - DNA, 21 bp, synthetic construct
  source 1..21: mol_type = other DNA; mol_type = other DNA
cttacgcgtctccagagcaac

SEQ ID NO: 27867 - DNA, 21 bp, synthetic construct
  source 1..21: mol_type = other DNA; mol_type = other DNA
ccatacgcacgaagtcccgcc

SEQ ID NO: 27868 - DNA, 21 bp, synthetic construct
  source 1..21: mol_type = other DNA; mol_type = other DNA
tattttagcaagatcgccgca

SEQ ID NO: 27869 - DNA, 21 bp, synthetic construct
  source 1..21: mol_type = other DNA; mol_type = other DNA
tacttctccggccagatacta

SEQ ID NO: 27870 - DNA, 21 bp, synthetic construct
  source 1..21: mol_type = other DNA; mol_type = other DNA
tactttacgggccgccaggat

SEQ ID NO: 27871 - DNA, 21 bp, synthetic construct
  source 1..21: mol_type = other DNA; mol_type = other DNA
tgtaagcgacagtcggaatgg

SEQ ID NO: 27872 - DNA, 21 bp, synthetic construct
  source 1..21: mol_type = other DNA; mol_type = other DNA
atacggtcaacgaatggcata

SEQ ID NO: 27873 - DNA, 21 bp, synthetic construct
  source 1..21: mol_type = other DNA; mol_type = other DNA
ttggcgaaatcaggctgtaat

SEQ ID NO: 27874 - DNA, 21 bp, synthetic construct
  source 1..21: mol_type = other DNA; mol_type = other DNA
gggtgcggtactaaaccgggc

SEQ ID NO: 27875 - DNA, 21 bp, synthetic construct
  source 1..21: mol_type = other DNA; mol_type = other DNA
atagtgagcaccaatgggatt

SEQ ID NO: 27876 - DNA, 21 bp, synthetic construct
  source 1..21: mol_type = other DNA; mol_type = other DNA
tattacactggtgttaaaaat

SEQ ID NO: 27877 - DNA, 21 bp, synthetic construct
  source 1..21: mol_type = other DNA; mol_type = other DNA
tatagcagagttgggagtgga

SEQ ID NO: 27878 - DNA, 21 bp, synthetic construct
  source 1..21: mol_type = other DNA; mol_type = other DNA
gtaccagactttgttaaatgg

SEQ ID NO: 27879 - DNA, 21 bp, synthetic construct
  source 1..21: mol_type = other DNA; mol_type = other DNA
tactatacaggggtcatggca

SEQ ID NO: 27880 - DNA, 21 bp, synthetic construct
  source 1..21: mol_type = other DNA; mol_type = other DNA
caccactcgacgaatggtgta

SEQ ID NO: 27881 - DNA, 21 bp, synthetic construct
  source 1..21: mol_type = other DNA; mol_type = other DNA
catagcaaaatgaattataac

SEQ ID NO: 27882 - DNA, 21 bp, synthetic construct
  source 1..21: mol_type = other DNA; mol_type = other DNA
tatagccgtttaggcaaggac

SEQ ID NO: 27883 - DNA, 21 bp, synthetic construct
  source 1..21: mol_type = other DNA; mol_type = other DNA
tactggaccggcaagatcgca

SEQ ID NO: 27884 - DNA, 21 bp, synthetic construct
  source 1..21: mol_type = other DNA; mol_type = other DNA
tacgcgcgtattggaatgaat

SEQ ID NO: 27885 - DNA, 21 bp, synthetic construct
  source 1..21: mol_type = other DNA; mol_type = other DNA
tacagcactaattgcaaatcc

SEQ ID NO: 27886 - DNA, 21 bp, synthetic construct
  source 1..21: mol_type = other DNA; mol_type = other DNA
tacacgcggctacaaactggg

SEQ ID NO: 27887 - DNA, 21 bp, synthetic construct
  source 1..21: mol_type = other DNA; mol_type = other DNA
agagagagcactaacggtatc

SEQ ID NO: 27888 - DNA, 21 bp, synthetic construct
  source 1..21: mol_type = other DNA; mol_type = other DNA
tattttagcggagtaactcgt

SEQ ID NO: 27889 - DNA, 21 bp, synthetic construct
  source 1..21: mol_type = other DNA; mol_type = other DNA
cgagacgagtccagctattgg

SEQ ID NO: 27890 - DNA, 21 bp, synthetic construct
  source 1..21: mol_type = other DNA; mol_type = other DNA
ggttccgagtttagtcggtgg

SEQ ID NO: 27891 - DNA, 21 bp, synthetic construct
  source 1..21: mol_type = other DNA; mol_type = other DNA
agggatggaaactcctcctgg

SEQ ID NO: 27892 - DNA, 21 bp, synthetic construct
  source 1..21: mol_type = other DNA; mol_type = other DNA
tatttttcaggagttgtcagg

SEQ ID NO: 27893 - DNA, 21 bp, synthetic construct
  source 1..21: mol_type = other DNA; mol_type = other DNA
ttcagccgagttggagaaaac

SEQ ID NO: 27894 - DNA, 21 bp, synthetic construct
  source 1..21: mol_type = other DNA; mol_type = other DNA
tattctaagcataatacaaat

SEQ ID NO: 27895 - DNA, 21 bp, synthetic construct
  source 1..21: mol_type = other DNA; mol_type = other DNA
atcgattcaaccaacggaatc

SEQ ID NO: 27896 - DNA, 21 bp, synthetic construct
  source 1..21: mol_type = other DNA; mol_type = other DNA
ttcgacagcacaaacgggaga

SEQ ID NO: 27897 - DNA, 21 bp, synthetic construct
  source 1..21: mol_type = other DNA; mol_type = other DNA
tatgctaggactggccaaaat

SEQ ID NO: 27898 - DNA, 21 bp, synthetic construct
  source 1..21: mol_type = other DNA; mol_type = other DNA
ggtagcgaccacgtgagatgg

SEQ ID NO: 27899 - DNA, 21 bp, synthetic construct
  source 1..21: mol_type = other DNA; mol_type = other DNA
agggggtcagacgttttcccc

SEQ ID NO: 27900 - DNA, 21 bp, synthetic construct
  source 1..21: mol_type = other DNA; mol_type = other DNA
aaagacgggtacagtggatgg

SEQ ID NO: 27901 - DNA, 21 bp, synthetic construct
  source 1..21: mol_type = other DNA; mol_type = other DNA
ctacaccgtagcggtgataac

SEQ ID NO: 27902 - DNA, 21 bp, synthetic construct
  source 1..21: mol_type = other DNA; mol_type = other DNA
tacagtcgcttaaatggactc

SEQ ID NO: 27903 - DNA, 21 bp, synthetic construct
  source 1..21: mol_type = other DNA; mol_type = other DNA
cgtaatgagttctgcacgttc

SEQ ID NO: 27904 - DNA, 21 bp, synthetic construct
  source 1..21: mol_type = other DNA; mol_type = other DNA
tactccaagcttaacgttgtc

SEQ ID NO: 27905 - DNA, 21 bp, synthetic construct
  source 1..21: mol_type = other DNA; mol_type = other DNA
gaactgagcagtataaagtgg

SEQ ID NO: 27906 - DNA, 21 bp, synthetic construct
  source 1..21: mol_type = other DNA; mol_type = other DNA
ccaatgagtgtgtctaaatgg

SEQ ID NO: 27907 - DNA, 21 bp, synthetic construct
  source 1..21: mol_type = other DNA; mol_type = other DNA
tatcaccgccttggaggcgat

SEQ ID NO: 27908 - DNA, 21 bp, synthetic construct
  source 1..21: mol_type = other DNA; mol_type = other DNA
tatttctctgggaaaagtagt

SEQ ID NO: 27909 - DNA, 21 bp, synthetic construct
  source 1..21: mol_type = other DNA; mol_type = other DNA
tatcacaggcttagtgacaat

SEQ ID NO: 27910 - DNA, 21 bp, synthetic construct
  source 1..21: mol_type = other DNA; mol_type = other DNA
tattccagacatggcccgaat

SEQ ID NO: 27911 - DNA, 21 bp, synthetic construct
  source 1..21: mol_type = other DNA; mol_type = other DNA
tgtgcgccagactatagacaa

SEQ ID NO: 27912 - DNA, 21 bp, synthetic construct
  source 1..21: mol_type = other DNA; mol_type = other DNA
cgcacagattgtgtttatcct

SEQ ID NO: 27913 - DNA, 21 bp, synthetic construct
  source 1..21: mol_type = other DNA; mol_type = other DNA
ttaagccgtatgaattacaat

SEQ ID NO: 27914 - DNA, 21 bp, synthetic construct
  source 1..21: mol_type = other DNA; mol_type = other DNA
cgggcattggatggttgggat

SEQ ID NO: 27915 - DNA, 21 bp, synthetic construct
  source 1..21: mol_type = other DNA; mol_type = other DNA
agagacgaatttgaacattgg

SEQ ID NO: 27916 - DNA, 21 bp, synthetic construct
  source 1..21: mol_type = other DNA; mol_type = other DNA
aaagacggttattctttgtat

SEQ ID NO: 27917 - DNA, 21 bp, synthetic construct
  source 1..21: mol_type = other DNA; mol_type = other DNA
cgtagcgagtttcactcattt

SEQ ID NO: 27918 - DNA, 21 bp, synthetic construct
  source 1..21: mol_type = other DNA; mol_type = other DNA
tatttcagcggtaaacgtgaa

SEQ ID NO: 27919 - DNA, 21 bp, synthetic construct
  source 1..21: mol_type = other DNA; mol_type = other DNA
atcgcgtatgacgcgtaccca

SEQ ID NO: 27920 - DNA, 21 bp, synthetic construct
  source 1..21: mol_type = other DNA; mol_type = other DNA
gatatgggggcttcctcatgg

SEQ ID NO: 27921 - DNA, 21 bp, synthetic construct
  source 1..21: mol_type = other DNA; mol_type = other DNA
atccttgagagtcgagactgg

SEQ ID NO: 27922 - DNA, 21 bp, synthetic construct
  source 1..21: mol_type = other DNA; mol_type = other DNA
tatgcccgttccggtacaaac

SEQ ID NO: 27923 - DNA, 21 bp, synthetic construct
  source 1..21: mol_type = other DNA; mol_type = other DNA
ttttcgagagtaggattcaac

SEQ ID NO: 27924 - DNA, 21 bp, synthetic construct
  source 1..21: mol_type = other DNA; mol_type = other DNA
agtatgcaggatcgtttttgg

SEQ ID NO: 27925 - DNA, 21 bp, synthetic construct
  source 1..21: mol_type = other DNA; mol_type = other DNA
tattggagcgggacgattgac

SEQ ID NO: 27926 - DNA, 21 bp, synthetic construct
  source 1..21: mol_type = other DNA; mol_type = other DNA
caagacggtacgagtgcatgg

SEQ ID NO: 27927 - DNA, 21 bp, synthetic construct
  source 1..21: mol_type = other DNA; mol_type = other DNA
atcgaaggtcgtgggtgggat

SEQ ID NO: 27928 - DNA, 21 bp, synthetic construct
  source 1..21: mol_type = other DNA; mol_type = other DNA
tatagtcgtctacagagcaat

SEQ ID NO: 27929 - DNA, 21 bp, synthetic construct
  source 1..21: mol_type = other DNA; mol_type = other DNA
tattttacagggcgtacttca

SEQ ID NO: 27930 - DNA, 21 bp, synthetic construct
  source 1..21: mol_type = other DNA; mol_type = other DNA
gttagcgagttcgagattttc

SEQ ID NO: 27931 - DNA, 21 bp, synthetic construct
  source 1..21: mol_type = other DNA; mol_type = other DNA
cgggacgaattcagaacttat

SEQ ID NO: 27932 - DNA, 21 bp, synthetic construct
  source 1..21: mol_type = other DNA; mol_type = other DNA
tatagccggataggtccccat

SEQ ID NO: 27933 - DNA, 21 bp, synthetic construct
  source 1..21: mol_type = other DNA; mol_type = other DNA
tacgcacggtctggcgagaat

SEQ ID NO: 27934 - DNA, 21 bp, synthetic construct
  source 1..21: mol_type = other DNA; mol_type = other DNA
cgcatgcctgacagaggatgg

SEQ ID NO: 27935 - DNA, 21 bp, synthetic construct
  source 1..21: mol_type = other DNA; mol_type = other DNA
tatcataagctgcaagttttc

SEQ ID NO: 27936 - DNA, 21 bp, synthetic construct
  source 1..21: mol_type = other DNA; mol_type = other DNA
tactttacggggtttgcagaa

SEQ ID NO: 27937 - DNA, 21 bp, synthetic construct
  source 1..21: mol_type = other DNA; mol_type = other DNA
ataatgagtgagcgcgtatgg

SEQ ID NO: 27938 - DNA, 21 bp, synthetic construct
  source 1..21: mol_type = other DNA; mol_type = other DNA
gatttactcagcgcgaaatgg

SEQ ID NO: 27939 - DNA, 21 bp, synthetic construct
  source 1..21: mol_type = other DNA; mol_type = other DNA
tacgccaaacagtctcgaaac

SEQ ID NO: 27940 - DNA, 21 bp, synthetic construct
  source 1..21: mol_type = other DNA; mol_type = other DNA
tgcaaacccgatgcattaagg

SEQ ID NO: 27941 - DNA, 21 bp, synthetic construct
  source 1..21: mol_type = other DNA; mol_type = other DNA
tactttgctggaaaatacgat

SEQ ID NO: 27942 - DNA, 21 bp, synthetic construct
  source 1..21: mol_type = other DNA; mol_type = other DNA
tatgttagaagtgattccagt

SEQ ID NO: 27943 - DNA, 21 bp, synthetic construct
  source 1..21: mol_type = other DNA; mol_type = other DNA
gatctcagggaccgtacgtgg

SEQ ID NO: 27944 - DNA, 21 bp, synthetic construct
  source 1..21: mol_type = other DNA; mol_type = other DNA
tactcacgattgcaatctgac

SEQ ID NO: 27945 - DNA, 21 bp, synthetic construct
  source 1..21: mol_type = other DNA; mol_type = other DNA
tactggaccggggtacaggat

SEQ ID NO: 27946 - DNA, 21 bp, synthetic construct
  source 1..21: mol_type = other DNA; mol_type = other DNA
tacagcagaattggctgcaat

SEQ ID NO: 27947 - DNA, 21 bp, synthetic construct
  source 1..21: mol_type = other DNA; mol_type = other DNA
gtaatgggctcctcaaactgg

SEQ ID NO: 27948 - DNA, 21 bp, synthetic construct
  source 1..21: mol_type = other DNA; mol_type = other DNA
ggggtcaccgcggtaaaatgg

SEQ ID NO: 27949 - DNA, 21 bp, synthetic construct
  source 1..21: mol_type = other DNA; mol_type = other DNA
gtttcggaattccagagctat

SEQ ID NO: 27950 - DNA, 21 bp, synthetic construct
  source 1..21: mol_type = other DNA; mol_type = other DNA
tatgccaagacaggatgtaac

SEQ ID NO: 27951 - DNA, 21 bp, synthetic construct
  source 1..21: mol_type = other DNA; mol_type = other DNA
gttatggaggatcgtaattgg

SEQ ID NO: 27952 - DNA, 21 bp, synthetic construct
  source 1..21: mol_type = other DNA; mol_type = other DNA
tacttcactggcaaattggtg

SEQ ID NO: 27953 - DNA, 21 bp, synthetic construct
  source 1..21: mol_type = other DNA; mol_type = other DNA
tgtaagaaagacgaggcagtt

SEQ ID NO: 27954 - DNA, 21 bp, synthetic construct
  source 1..21: mol_type = other DNA; mol_type = other DNA
tactggagtaccatcaaagag

SEQ ID NO: 27955 - DNA, 21 bp, synthetic construct
  source 1..21: mol_type = other DNA; mol_type = other DNA
agttgtatgaacgtagctcct

SEQ ID NO: 27956 - DNA, 21 bp, synthetic construct
  source 1..21: mol_type = other DNA
tactggacgggcacccatgaa

SEQ ID NO: 27957 - DNA, 21 bp, synthetic construct
  source 1..21: mol_type = other DNA; mol_type = other DNA
agggatggatctagcgcctgg

SEQ ID NO: 27958 - DNA, 21 bp, synthetic construct
  source 1..21: mol_type = other DNA; mol_type = other DNA
tgtaaggaggggaccagaggc

SEQ ID NO: 27959 - DNA, 21 bp, synthetic construct
  source 1..21: mol_type = other DNA; mol_type = other DNA
ggatgcggtacaaaggtgggg

SEQ ID NO: 27960 - DNA, 21 bp, synthetic construct
  source 1..21: mol_type = other DNA; mol_type = other DNA
cggatgagtgacgcatacgca

SEQ ID NO: 27961 - DNA, 21 bp, synthetic construct
  source 1..21: mol_type = other DNA; mol_type = other DNA
gggagtgacttctcacgttgg

SEQ ID NO: 27962 - DNA, 21 bp, synthetic construct
  source 1..21: mol_type = other DNA; mol_type = other DNA
tgtaagccgctcatgagtcct

SEQ ID NO: 27963 - DNA, 21 bp, synthetic construct
  source 1..21: mol_type = other DNA; mol_type = other DNA
tctactgattatgtctcttgg

SEQ ID NO: 27964 - DNA, 21 bp, synthetic construct
  source 1..21: mol_type = other DNA; mol_type = other DNA
tctacctatgacagttacccc

SEQ ID NO: 27965 - DNA, 21 bp, synthetic construct
  source 1..21: mol_type = other DNA; mol_type = other DNA
tattggagcgggataccagaa

SEQ ID NO: 27966 - DNA, 21 bp, synthetic construct
  source 1..21: mol_type = other DNA; mol_type = other DNA
tactccaggattcaaccaatg

SEQ ID NO: 27967 - DNA, 21 bp, synthetic construct
  source 1..21: mol_type = other DNA; mol_type = other DNA
taccataggcttggacagaac

SEQ ID NO: 27968 - DNA, 21 bp, synthetic construct
  source 1..21: mol_type = other DNA; mol_type = other DNA
tattcaaggatccaagccaat

SEQ ID NO: 27969 - DNA, 21 bp, synthetic construct
  source 1..21: mol_type = other DNA; mol_type = other DNA
aatggtattaatgggcgctgg

SEQ ID NO: 27970 - DNA, 21 bp, synthetic construct
  source 1..21: mol_type = other DNA; mol_type = other DNA
tttttcacgggacggttggaa

SEQ ID NO: 27971 - DNA, 21 bp, synthetic construct
  source 1..21: mol_type = other DNA; mol_type = other DNA
aggtacgaaccgaagtgtccg

SEQ ID NO: 27972 - DNA, 21 bp, synthetic construct
  source 1..21: mol_type = other DNA; mol_type = other DNA
tactttaccggcagaacggat

SEQ ID NO: 27973 - DNA, 21 bp, synthetic construct
  source 1..21: mol_type = other DNA; mol_type = other DNA
tattatagcggtgtgattgcg

SEQ ID NO: 27974 - DNA, 21 bp, synthetic construct
  source 1..21: mol_type = other DNA; mol_type = other DNA
tttatctcgacaaatggtgta

SEQ ID NO: 27975 - DNA, 21 bp, synthetic construct
  source 1..21: mol_type = other DNA; mol_type = other DNA
tactggacggggaaagttgag

SEQ ID NO: 27976 - DNA, 21 bp, synthetic construct
  source 1..21: mol_type = other DNA; mol_type = other DNA
tatgctagaagcggccagaat

SEQ ID NO: 27977 - DNA, 21 bp, synthetic construct
  source 1..21: mol_type = other DNA; mol_type = other DNA
tactttacaggcatggcaaat

SEQ ID NO: 27978 - DNA, 21 bp, synthetic construct
  source 1..21: mol_type = other DNA; mol_type = other DNA
aagtccgagttcaggagtttt

SEQ ID NO: 27979 - DNA, 21 bp, synthetic construct
  source 1..21: mol_type = other DNA; mol_type = other DNA
tattcaaggctaaataatctc

SEQ ID NO: 27980 - DNA, 21 bp, synthetic construct
  source 1..21: mol_type = other DNA; mol_type = other DNA
tgtagaccgggggagccatac

SEQ ID NO: 27981 - DNA, 21 bp, synthetic construct
  source 1..21: mol_type = other DNA; mol_type = other DNA
acgtggagcacgaacggagtt

SEQ ID NO: 27982 - DNA, 21 bp, synthetic construct
  source 1..21: mol_type = other DNA; mol_type = other DNA
taccttaagtcaccatgcgca

SEQ ID NO: 27983 - DNA, 21 bp, synthetic construct
  source 1..21: mol_type = other DNA; mol_type = other DNA
ggaccggaaaccgttaggtgg

SEQ ID NO: 27984 - DNA, 21 bp, synthetic construct
  source 1..21: mol_type = other DNA; mol_type = other DNA
actgactcaacgaacggaatt

SEQ ID NO: 27985 - DNA, 21 bp, synthetic construct
  source 1..21: mol_type = other DNA; mol_type = other DNA
tattgggcgggaatagtggat

SEQ ID NO: 27986 - DNA, 21 bp, synthetic construct
  source 1..21: mol_type = other DNA; mol_type = other DNA
ttcgcacggacagggctcaat

SEQ ID NO: 27987 - DNA, 21 bp, synthetic construct
  source 1..21: mol_type = other DNA; mol_type = other DNA
cgcatggatagtgccgcgtgg

SEQ ID NO: 27988 - DNA, 21 bp, synthetic construct
  source 1..21: mol_type = other DNA; mol_type = other DNA
tatttttcaggagttcgcgcg

SEQ ID NO: 27989 - DNA, 21 bp, synthetic construct
  source 1..21: mol_type = other DNA; mol_type = other DNA
aggtcggagtttatgacttac

SEQ ID NO: 27990 - DNA, 21 bp, synthetic construct
  source 1..21: mol_type = other DNA; mol_type = other DNA
tactctcgagttggggacgga

SEQ ID NO: 27991 - DNA, 21 bp, synthetic construct
  source 1..21: mol_type = other DNA; mol_type = other DNA
tttagtcggcttaacaataat

SEQ ID NO: 27992 - DNA, 21 bp, synthetic construct
  source 1..21: mol_type = other DNA; mol_type = other DNA
taccataggttaggcggggac

SEQ ID NO: 27993 - DNA, 21 bp, synthetic construct
  source 1..21: mol_type = other DNA; mol_type = other DNA
ttgtgtaagggatcattggac

SEQ ID NO: 27994 - DNA, 21 bp, synthetic construct
  source 1..21: mol_type = other DNA; mol_type = other DNA
tattgggctggtgtcagggag

SEQ ID NO: 27995 - DNA, 21 bp, synthetic construct
  source 1..21: mol_type = other DNA; mol_type = other DNA
cgctctgatttcacgacatac

SEQ ID NO: 27996 - DNA, 21 bp, synthetic construct
  source 1..21: mol_type = other DNA; mol_type = other DNA
tactcgagaataggtggtaac

SEQ ID NO: 27997 - DNA, 21 bp, synthetic construct
  source 1..21: mol_type = other DNA; mol_type = other DNA
tacttctcaggtatacattct

SEQ ID NO: 27998 - DNA, 21 bp, synthetic construct
  source 1..21: mol_type = other DNA; mol_type = other DNA
tacttttcaaggattcaggaa

SEQ ID NO: 27999 - DNA, 21 bp, synthetic construct
  source 1..21: mol_type = other DNA; mol_type = other DNA
tacttcagcggacgtcaggag

SEQ ID NO: 28000 - DNA, 21 bp, synthetic construct
  source 1..21: mol_type = other DNA; mol_type = other DNA
tatagcaaggccggatatgac

SEQ ID NO: 28001 - DNA, 21 bp, synthetic construct
  source 1..21: mol_type = other DNA; mol_type = other DNA
cgcactcccactactttccct

SEQ ID NO: 28002 - DNA, 21 bp, synthetic construct
  source 1..21: mol_type = other DNA; mol_type = other DNA
tactggagtggcgtccgtgaa

SEQ ID NO: 28003 - DNA, 21 bp, synthetic construct
  source 1..21: mol_type = other DNA; mol_type = other DNA
gggtgtcggcaccctgatatc

SEQ ID NO: 28004 - DNA, 21 bp, synthetic construct
  source 1..21: mol_type = other DNA; mol_type = other DNA
tactggagcggcacgatcgct

SEQ ID NO: 28005 - DNA, 21 bp, synthetic construct
  source 1..21: mol_type = other DNA; mol_type = other DNA
atagattccactaacggcata

SEQ ID NO: 28006 - DNA, 21 bp, synthetic construct
  source 1..21: mol_type = other DNA; mol_type = other DNA
tatagcaggataggtgctggg

SEQ ID NO: 28007 - DNA, 21 bp, synthetic construct
  source 1..21: mol_type = other DNA; mol_type = other DNA
tatgctcgcgccggagcgaat

SEQ ID NO: 28008 - DNA, 21 bp, synthetic construct
  source 1..21: mol_type = other DNA; mol_type = other DNA
tgtaggcctgacgttaaaact

SEQ ID NO: 28009 - DNA, 21 bp, synthetic construct
  source 1..21: mol_type = other DNA; mol_type = other DNA
gggtgcaggacaggagacata

SEQ ID NO: 28010 - DNA, 21 bp, synthetic construct
  source 1..21: mol_type = other DNA; mol_type = other DNA
tatgtcaaaagtcaattggtt

SEQ ID NO: 28011 - DNA, 21 bp, synthetic construct
  source 1..21: mol_type = other DNA; mol_type = other DNA
tggttcactggtagggtagac

SEQ ID NO: 28012 - DNA, 21 bp, synthetic construct
  source 1..21: mol_type = other DNA; mol_type = other DNA
gctatggcagacagggagtgg

SEQ ID NO: 28013 - DNA, 21 bp, synthetic construct
  source 1..21: mol_type = other DNA; mol_type = other DNA
tacgtaaagtcagatcgagtt

SEQ ID NO: 28014 - DNA, 21 bp, synthetic construct
  source 1..21: mol_type = other DNA; mol_type = other DNA
tattggtctggaaccattgcc

SEQ ID NO: 28015 - DNA, 21 bp, synthetic construct
  source 1..21: mol_type = other DNA; mol_type = other DNA
ttctcgcggctgaaccagaat

SEQ ID NO: 28016 - DNA, 21 bp, synthetic construct
  source 1..21: mol_type = other DNA; mol_type = other DNA
tattctaggctccacgcgaat

SEQ ID NO: 28017 - DNA, 21 bp, synthetic construct
  source 1..21: mol_type = other DNA; mol_type = other DNA
ctcagccgcacggcattcgat

SEQ ID NO: 28018 - DNA, 21 bp, synthetic construct
  source 1..21: mol_type = other DNA; mol_type = other DNA
tatagccgcatccttccgaat

SEQ ID NO: 28019 - DNA, 21 bp, synthetic construct
  source 1..21: mol_type = other DNA; mol_type = other DNA
aaggaagagtactgtaagccc

SEQ ID NO: 28020 - DNA, 21 bp, synthetic construct
  source 1..21: mol_type = other DNA; mol_type = other DNA
tatttcagcggcaaacacgac

SEQ ID NO: 28021 - DNA, 21 bp, synthetic construct
  source 1..21: mol_type = other DNA; mol_type = other DNA
tatttcgccggcattatcgaa

SEQ ID NO: 28022 - DNA, 21 bp, synthetic construct
  source 1..21: mol_type = other DNA; mol_type = other DNA
tttttcagtggcaagatcgat

SEQ ID NO: 28023 - DNA, 21 bp, synthetic construct
  source 1..21: mol_type = other DNA; mol_type = other DNA
cgtctcgagagcgtctcatgg

SEQ ID NO: 28024 - DNA, 21 bp, synthetic construct
  source 1..21: mol_type = other DNA; mol_type = other DNA
tactcgaaaattggatttgat

SEQ ID NO: 28025 - DNA, 21 bp, synthetic construct
  source 1..21: mol_type = other DNA; mol_type = other DNA
ttttttagcgggcaagtagat

SEQ ID NO: 28026 - DNA, 21 bp, synthetic construct
  source 1..21: mol_type = other DNA; mol_type = other DNA
tatgcacgtacctcgccaatg

SEQ ID NO: 28027 - DNA, 21 bp, synthetic construct
  source 1..21: mol_type = other DNA; mol_type = other DNA
cgagatgactatgtgagctgg

SEQ ID NO: 28028 - DNA, 21 bp, synthetic construct
  source 1..21: mol_type = other DNA
atgtgggacggaaccgcggcg

SEQ ID NO: 28029 - DNA, 21 bp, synthetic construct
  source 1..21: mol_type = other DNA
ttcacctcgacgaacgggata

SEQ ID NO: 28030 - DNA, 21 bp, synthetic construct
  source 1..21: mol_type = other DNA
gttaattccagtaacgggaga

SEQ ID NO: 28031 - DNA, 21 bp, synthetic construct
  source 1..21: mol_type = other DNA
tactatacaggaaagcaagac

SEQ ID NO: 28032 - DNA, 21 bp, synthetic construct
  source 1..21: mol_type = other DNA; mol_type = other DNA
atgtgggacgggactgatgcg

SEQ ID NO: 28033 - DNA, 21 bp, synthetic construct
  source 1..21: mol_type = other DNA; mol_type = other DNA
ctcctttcttcggctgattgg

SEQ ID NO: 28034 - DNA, 21 bp, synthetic construct
  source 1..21: mol_type = other DNA; mol_type = other DNA
tattttacgggcaagcccgaa

SEQ ID NO: 28035 - DNA, 21 bp, synthetic construct
  source 1..21: mol_type = other DNA; mol_type = other DNA
aaggacgattggacaccatat

SEQ ID NO: 28036 - DNA, 21 bp, synthetic construct
  source 1..21: mol_type = other DNA; mol_type = other DNA
tactttcacggggtcacagaa

SEQ ID NO: 28037 - DNA, 21 bp, synthetic construct
  source 1..21: mol_type = other DNA; mol_type = other DNA
gcccatagcacaaacggtgta

SEQ ID NO: 28038 - DNA, 21 bp, synthetic construct
  source 1..21: mol_type = other DNA; mol_type = other DNA
gtggcgtcgaagggagctggc

SEQ ID NO: 28039 - DNA, 21 bp, synthetic construct
  source 1..21: mol_type = other DNA; mol_type = other DNA
ctatgtagaccctgtatggaa

SEQ ID NO: 28040 - DNA, 21 bp, synthetic construct
  source 1..21: mol_type = other DNA; mol_type = other DNA
agggacggacagagttcgtgg

SEQ ID NO: 28041 - DNA, 21 bp, synthetic construct
  source 1..21: mol_type = other DNA; mol_type = other DNA
cgcatggaggataggcagtgg

SEQ ID NO: 28042 - DNA, 21 bp, synthetic construct
  source 1..21: mol_type = other DNA; mol_type = other DNA
ttctttagtgggaagatagaa

SEQ ID NO: 28043 - DNA, 21 bp, synthetic construct
  source 1..21: mol_type = other DNA; mol_type = other DNA
tactccaaaaagaacgtcaac

SEQ ID NO: 28044 - DNA, 21 bp, synthetic construct
  source 1..21: mol_type = other DNA; mol_type = other DNA
cttagcagaatagcgaacaat

SEQ ID NO: 28045 - DNA, 21 bp, synthetic construct
  source 1..21: mol_type = other DNA; mol_type = other DNA
cgcgaggagatggtctcctgg

SEQ ID NO: 28046 - DNA, 21 bp, synthetic construct
  source 1..21: mol_type = other DNA; mol_type = other DNA
atcccctatgaaggtataggg

SEQ ID NO: 28047 - DNA, 21 bp, synthetic construct
  source 1..21: mol_type = other DNA; mol_type = other DNA
tattccaaaaataactacaat

SEQ ID NO: 28048 - DNA, 21 bp, synthetic construct
  source 1..21: mol_type = other DNA; mol_type = other DNA
accggctctaccaacgggata

SEQ ID NO: 28049 - DNA, 21 bp, synthetic construct
  source 1..21: mol_type = other DNA; mol_type = other DNA
ctggctagaactggttgggac

SEQ ID NO: 28050 - DNA, 21 bp, synthetic construct
  source 1..21: mol_type = other DNA; mol_type = other DNA
tattttagtgggaagaacgat

SEQ ID NO: 28051 - DNA, 21 bp, synthetic construct
  source 1..21: mol_type = other DNA; mol_type = other DNA
tttgcgaggaccggcttcaac

SEQ ID NO: 28052 - DNA, 21 bp, synthetic construct
  source 1..21: mol_type = other DNA
tattacacggggattcaggct

SEQ ID NO: 28053 - DNA, 21 bp, synthetic construct
  source 1..21: mol_type = other DNA
ctccataaactcggagacgat

SEQ ID NO: 28054 - DNA, 21 bp, synthetic construct
  source 1..21: mol_type = other DNA; mol_type = other DNA
tatcataagttgcagtatgga

SEQ ID NO: 28055 - DNA, 21 bp, synthetic construct
  source 1..21: mol_type = other DNA; mol_type = other DNA
tattggcaaggtatcaaggaa

SEQ ID NO: 28056 - DNA, 21 bp, synthetic construct
  source 1..21: mol_type = other DNA; mol_type = other DNA
ttttttacgggttataaagaa

SEQ ID NO: 28057 - DNA, 21 bp, synthetic construct
  source 1..21: mol_type = other DNA; mol_type = other DNA
cgctctgactttgttacgtat

SEQ ID NO: 28058 - DNA, 21 bp, synthetic construct
  source 1..21: mol_type = other DNA; mol_type = other DNA
aatttagaatcgagagggtgg

SEQ ID NO: 28059 - DNA, 21 bp, synthetic construct
  source 1..21: mol_type = other DNA; mol_type = other DNA
tacagcaaatcaggtcaaaac

SEQ ID NO: 28060 - DNA, 21 bp, synthetic construct
  source 1..21: mol_type = other DNA; mol_type = other DNA
ctttcacgctcaggcaataac

SEQ ID NO: 28061 - DNA, 21 bp, synthetic construct
  source 1..21: mol_type = other DNA; mol_type = other DNA
tatttcactggaatggccaac

SEQ ID NO: 28062 - DNA, 21 bp, synthetic construct
  source 1..21: mol_type = other DNA; mol_type = other DNA
gggagtgcgacttcaacatgg

SEQ ID NO: 28063 - DNA, 21 bp, synthetic construct
  source 1..21: mol_type = other DNA; mol_type = other DNA
aagctaactgacagaacttgg

SEQ ID NO: 28064 - DNA, 21 bp, synthetic construct
  source 1..21: mol_type = other DNA; mol_type = other DNA
tactgggaaggagtgcgggct

SEQ ID NO: 28065 - DNA, 21 bp, synthetic construct
  source 1..21: mol_type = other DNA; mol_type = other DNA
tgtaaacccgtctgttgcgat

SEQ ID NO: 28066 - DNA, 21 bp, synthetic construct
  source 1..21: mol_type = other DNA; mol_type = other DNA
agatcggagtttttagcgttc

SEQ ID NO: 28067 - DNA, 21 bp, synthetic construct
  source 1..21: mol_type = other DNA; mol_type = other DNA
tattttcatgggaaaatggat

SEQ ID NO: 28068 - DNA, 21 bp, synthetic construct
  source 1..21: mol_type = other DNA; mol_type = other DNA
tactcgcgtctagggacgaac

SEQ ID NO: 28069 - DNA, 21 bp, synthetic construct
  source 1..21: mol_type = other DNA; mol_type = other DNA
tatttcagcggtgttatgccg

SEQ ID NO: 28070 - DNA, 21 bp, synthetic construct
  source 1..21: mol_type = other DNA; mol_type = other DNA
tacgctcgtcttaacttcaat

SEQ ID NO: 28071 - DNA, 21 bp, synthetic construct
  source 1..21: mol_type = other DNA; mol_type = other DNA
agaactggaacatcctgttta

SEQ ID NO: 28072 - DNA, 21 bp, synthetic construct
  source 1..21: mol_type = other DNA; mol_type = other DNA
ctctctcgtttgcaaatgaat

SEQ ID NO: 28073 - DNA, 21 bp, synthetic construct
  source 1..21: mol_type = other DNA; mol_type = other DNA
catagccgattaaatctccag

SEQ ID NO: 28074 - DNA, 21 bp, synthetic construct
  source 1..21: mol_type = other DNA; mol_type = other DNA
ttctggagcggcgtagtggaa

SEQ ID NO: 28075 - DNA, 21 bp, synthetic construct
  source 1..21: mol_type = other DNA; mol_type = other DNA
agggagagcacaaatggggtc

SEQ ID NO: 28076 - DNA, 21 bp, synthetic construct
  source 1..21: mol_type = other DNA; mol_type = other DNA
agcttttcaaccaatggtata

SEQ ID NO: 28077 - DNA, 21 bp, synthetic construct
  source 1..21: mol_type = other DNA; mol_type = other DNA
tttagccgcctaggagtaaat

SEQ ID NO: 28078 - DNA, 21 bp, synthetic construct
  source 1..21: mol_type = other DNA; mol_type = other DNA
acatgggaaggagatgctgct

SEQ ID NO: 28079 - DNA, 21 bp, synthetic construct
  source 1..21: mol_type = other DNA; mol_type = other DNA
tatcatagattatcagatttt

SEQ ID NO: 28080 - DNA, 21 bp, synthetic construct
  source 1..21: mol_type = other DNA; mol_type = other DNA
tattttgccggtagatacgat

SEQ ID NO: 28081 - DNA, 21 bp, synthetic construct
  source 1..21: mol_type = other DNA; mol_type = other DNA
ccttacgcgaggtcattagac

SEQ ID NO: 28082 - DNA, 21 bp, synthetic construct
  source 1..21: mol_type = other DNA; mol_type = other DNA
ctaggagggacaagcaggtat

SEQ ID NO: 28083 - DNA, 21 bp, synthetic construct
  source 1..21: mol_type = other DNA; mol_type = other DNA
tatagtcggctccagatgaac

SEQ ID NO: 28084 - DNA, 21 bp, synthetic construct
  source 1..21: mol_type = other DNA; mol_type = other DNA
tacgctagaactggcctaaac

SEQ ID NO: 28085 - DNA, 21 bp, synthetic construct
  source 1..21: mol_type = other DNA; mol_type = other DNA
tattttaccggagtacacaag

SEQ ID NO: 28086 - DNA, 21 bp, synthetic construct
  source 1..21: mol_type = other DNA; mol_type = other DNA
tatgtaaggtctgacgccaca

SEQ ID NO: 28087 - DNA, 21 bp, synthetic construct
  source 1..21: mol_type = other DNA; mol_type = other DNA
tactttactggggaagtcagc

SEQ ID NO: 28088 - DNA, 21 bp, synthetic construct
  source 1..21: mol_type = other DNA; mol_type = other DNA
tattggacgggaatgacggac

SEQ ID NO: 28089 - DNA, 21 bp, synthetic construct
  source 1..21: mol_type = other DNA; mol_type = other DNA
atgttcgacggcacagtcgca

SEQ ID NO: 28090 - DNA, 21 bp, synthetic construct
  source 1..21: mol_type = other DNA; mol_type = other DNA
ttaaaggatggcactggccca

SEQ ID NO: 28091 - DNA, 21 bp, synthetic construct
  source 1..21: mol_type = other DNA; mol_type = other DNA
ttgtgggatggtactccatcg

SEQ ID NO: 28092 - DNA, 21 bp, synthetic construct
  source 1..21: mol_type = other DNA; mol_type = other DNA
tatgctaaggctgggcacaac

SEQ ID NO: 28093 - DNA, 21 bp, synthetic construct
  source 1..21: mol_type = other DNA; mol_type = other DNA
cgtggagaatacacgtttcct

SEQ ID NO: 28094 - DNA, 21 bp, synthetic construct
  source 1..21: mol_type = other DNA; mol_type = other DNA
tacgccaaagcagggcataat

SEQ ID NO: 28095 - DNA, 21 bp, synthetic construct
  source 1..21: mol_type = other DNA; mol_type = other DNA
ttcagcaagatgaattacaac

SEQ ID NO: 28096 - DNA, 21 bp, synthetic construct
  source 1..21: mol_type = other DNA; mol_type = other DNA
tactcgagaatcagcccgaac

SEQ ID NO: 28097 - DNA, 21 bp, synthetic construct
  source 1..21: mol_type = other DNA; mol_type = other DNA
tgcaaactcagttctcccagt

SEQ ID NO: 28098 - DNA, 21 bp, synthetic construct
  source 1..21: mol_type = other DNA; mol_type = other DNA
tgcaaagcgaatacaaaagac

SEQ ID NO: 28099 - DNA, 21 bp, synthetic construct
  source 1..21: mol_type = other DNA; mol_type = other DNA
tactggtcaggcaaattagag

SEQ ID NO: 28100 - DNA, 21 bp, synthetic construct
  source 1..21: mol_type = other DNA; mol_type = other DNA
aggggtgaatcgcggggctgg

SEQ ID NO: 28101 - DNA, 21 bp, synthetic construct
  source 1..21: mol_type = other DNA; mol_type = other DNA
gatttacgtctcgctgactgg

SEQ ID NO: 28102 - DNA, 21 bp, synthetic construct
  source 1..21: mol_type = other DNA; mol_type = other DNA
tactattccggcattgttaaa

SEQ ID NO: 28103 - DNA, 21 bp, synthetic construct
  source 1..21: mol_type = other DNA; mol_type = other DNA
tacagcaaacacaatcccaac

SEQ ID NO: 28104 - DNA, 21 bp, synthetic construct
  source 1..21: mol_type = other DNA; mol_type = other DNA
tattctcggattgggactaat

SEQ ID NO: 28105 - DNA, 21 bp, synthetic construct
  source 1..21: mol_type = other DNA; mol_type = other DNA
tacgctcgtgtgggattcaac

SEQ ID NO: 28106 - DNA, 21 bp, synthetic construct
  source 1..21: mol_type = other DNA; mol_type = other DNA
tacgtgcgttcggacagtagc

SEQ ID NO: 28107 - DNA, 21 bp, synthetic construct
  source 1..21: mol_type = other DNA; mol_type = other DNA
gtagagagtgatcacgggaga

SEQ ID NO: 28108 - DNA, 21 bp, synthetic construct
  source 1..21: mol_type = other DNA; mol_type = other DNA
tattcgaagcaagggtctaat

SEQ ID NO: 28109 - DNA, 21 bp, synthetic construct
  source 1..21: mol_type = other DNA; mol_type = other DNA
aggctgccgtcagtatatcct

SEQ ID NO: 28110 - DNA, 21 bp, synthetic construct
  source 1..21: mol_type = other DNA; mol_type = other DNA
aaatgcaggccttgttcagag

SEQ ID NO: 28111 - DNA, 21 bp, synthetic construct
  source 1..21: mol_type = other DNA; mol_type = other DNA
tactctcgtcttggaatgaac

SEQ ID NO: 28112 - DNA, 21 bp, synthetic construct
  source 1..21: mol_type = other DNA; mol_type = other DNA
gggatcgagactgttaggtgg

SEQ ID NO: 28113 - DNA, 21 bp, synthetic construct
  source 1..21: mol_type = other DNA; mol_type = other DNA
tgcaaaccaccacccaagatc

SEQ ID NO: 28114 - DNA, 21 bp, synthetic construct
  source 1..21: mol_type = other DNA; mol_type = other DNA
tactttagcgggatacaaggt

SEQ ID NO: 28115 - DNA, 21 bp, synthetic construct
  source 1..21: mol_type = other DNA; mol_type = other DNA
tataggcccggatgtatagga

SEQ ID NO: 28116 - DNA, 21 bp, synthetic construct
  source 1..21: mol_type = other DNA; mol_type = other DNA
tactcaagagtcggtatgaac

SEQ ID NO: 28117 - DNA, 21 bp, synthetic construct
  source 1..21: mol_type = other DNA; mol_type = other DNA
tattttaccggagttcggaac

SEQ ID NO: 28118 - DNA, 21 bp, synthetic construct
  source 1..21: mol_type = other DNA; mol_type = other DNA
tacacgcgtctgagcgataat

SEQ ID NO: 28119 - DNA, 21 bp, synthetic construct
  source 1..21: mol_type = other DNA; mol_type = other DNA
cgtaacgagttcgttacatac

SEQ ID NO: 28120 - DNA, 21 bp, synthetic construct
  source 1..21: mol_type = other DNA; mol_type = other DNA
agagaagactttagcacgtgg

SEQ ID NO: 28121 - DNA, 21 bp, synthetic construct
  source 1..21: mol_type = other DNA; mol_type = other DNA
gacatgtcatctcggatttgg

SEQ ID NO: 28122 - DNA, 21 bp, synthetic construct
  source 1..21: mol_type = other DNA; mol_type = other DNA
tatgcaaaaggcaactgcaat

SEQ ID NO: 28123 - DNA, 21 bp, synthetic construct
  source 1..21: mol_type = other DNA; mol_type = other DNA
acgagcgagtttaaagtctac

SEQ ID NO: 28124 - DNA, 21 bp, synthetic construct
  source 1..21: mol_type = other DNA; mol_type = other DNA
gacctgaggttagcagattgg

SEQ ID NO: 28125 - DNA, 21 bp, synthetic construct
  source 1..21: mol_type = other DNA; mol_type = other DNA
gtgcctgagagcgtaaggtgg

SEQ ID NO: 28126 - DNA, 21 bp, synthetic construct
  source 1..21: mol_type = other DNA; mol_type = other DNA
tattttagcggcagaccagaa

SEQ ID NO: 28127 - DNA, 21 bp, synthetic construct
  source 1..21: mol_type = other DNA; mol_type = other DNA
tactggcagggcataaaagag

SEQ ID NO: 28128 - DNA, 21 bp, synthetic construct
  source 1..21: mol_type = other DNA; mol_type = other DNA
ttcattagcaccaacggggta

SEQ ID NO: 28129 - DNA, 21 bp, synthetic construct
  source 1..21: mol_type = other DNA; mol_type = other DNA
gtcgcgcatgcgggcattgga

SEQ ID NO: 28130 - DNA, 21 bp, synthetic construct
  source 1..21: mol_type = other DNA; mol_type = other DNA
tattggacgggtgtgactgac

SEQ ID NO: 28131 - DNA, 21 bp, synthetic construct
  source 1..21: mol_type = other DNA; mol_type = other DNA
gtaatgcaggcctctaattgg

SEQ ID NO: 28132 - DNA, 21 bp, synthetic construct
  source 1..21: mol_type = other DNA; mol_type = other DNA
tacttctcggggacactctca

SEQ ID NO: 28133 - DNA, 21 bp, synthetic construct
  source 1..21: mol_type = other DNA; mol_type = other DNA
cgtttggaggatcgtgcctgg

SEQ ID NO: 28134 - DNA, 21 bp, synthetic construct
  source 1..21: mol_type = other DNA; mol_type = other DNA
tacttcagcggtcaggttatg

SEQ ID NO: 28135 - DNA, 21 bp, synthetic construct
  source 1..21: mol_type = other DNA; mol_type = other DNA
tatagcagggtgaatgataac

SEQ ID NO: 28136 - DNA, 21 bp, synthetic construct
  source 1..21: mol_type = other DNA; mol_type = other DNA
gggagcgaccacgtacgctgg

SEQ ID NO: 28137 - DNA, 21 bp, synthetic construct
  source 1..21: mol_type = other DNA; mol_type = other DNA
agcaagtcaaccaacggagtg

SEQ ID NO: 28138 - DNA, 21 bp, synthetic construct
  source 1..21: mol_type = other DNA; mol_type = other DNA
tatgttgcgggatgcaaagaa

SEQ ID NO: 28139 - DNA, 21 bp, synthetic construct
  source 1..21: mol_type = other DNA; mol_type = other DNA
tacagccggataggcgctaat

SEQ ID NO: 28140 - DNA, 21 bp, synthetic construct
  source 1..21: mol_type = other DNA; mol_type = other DNA
tactcgcgtctacatgcgaat

SEQ ID NO: 28141 - DNA, 21 bp, synthetic construct
  source 1..21: mol_type = other DNA; mol_type = other DNA
ttcttcagcgggaggattgaa

SEQ ID NO: 28142 - DNA, 21 bp, synthetic construct
  source 1..21: mol_type = other DNA; mol_type = other DNA
tattggagtgggctcgtagag

SEQ ID NO: 28143 - DNA, 21 bp, synthetic construct
  source 1..21: mol_type = other DNA; mol_type = other DNA
gaactggattccagagaatgg

SEQ ID NO: 28144 - DNA, 21 bp, synthetic construct
  source 1..21: mol_type = other DNA; mol_type = other DNA
tattttactagggtgttagag

SEQ ID NO: 28145 - DNA, 21 bp, synthetic construct
  source 1..21: mol_type = other DNA; mol_type = other DNA
tactggagtggtgtcagtgcc

SEQ ID NO: 28146 - DNA, 21 bp, synthetic construct
  source 1..21: mol_type = other DNA; mol_type = other DNA
aaagatgactggacttcatat

SEQ ID NO: 28147 - DNA, 21 bp, synthetic construct
  source 1..21: mol_type = other DNA; mol_type = other DNA
ggtggtgagttcaaatgtttc

SEQ ID NO: 28148 - DNA, 21 bp, synthetic construct
  source 1..21: mol_type = other DNA; mol_type = other DNA
cgcgatgactggaccgtgttt

SEQ ID NO: 28149 - DNA, 21 bp, synthetic construct
  source 1..21: mol_type = other DNA; mol_type = other DNA
tattttacaggccagactatg

SEQ ID NO: 28150 - DNA, 21 bp, synthetic construct
  source 1..21: mol_type = other DNA; mol_type = other DNA
gtctggagcaccaatggaata

SEQ ID NO: 28151 - DNA, 21 bp, synthetic construct
  source 1..21: mol_type = other DNA; mol_type = other DNA
agagacggcgtatcggcatgg

SEQ ID NO: 28152 - DNA, 21 bp, synthetic construct
  source 1..21: mol_type = other DNA; mol_type = other DNA
ttttttactgggtatatagac

SEQ ID NO: 28153 - DNA, 21 bp, synthetic construct
  source 1..21: mol_type = other DNA; mol_type = other DNA
tactcgcgtaccgggggtaac

SEQ ID NO: 28154 - DNA, 21 bp, synthetic construct
  source 1..21: mol_type = other DNA; mol_type = other DNA
tattcaagaaccggagcgaat

SEQ ID NO: 28155 - DNA, 21 bp, synthetic construct
  source 1..21: mol_type = other DNA; mol_type = other DNA
tacagtcgcctcagtatcgat

SEQ ID NO: 28156 - DNA, 21 bp, synthetic construct
  source 1..21: mol_type = other DNA; mol_type = other DNA
tacttcactggggtgcagggg

SEQ ID NO: 28157 - DNA, 21 bp, synthetic construct
  source 1..21: mol_type = other DNA; mol_type = other DNA
tacttttccggtgtccaggac

SEQ ID NO: 28158 - DNA, 21 bp, synthetic construct
  source 1..21: mol_type = other DNA; mol_type = other DNA
aaattgggcggtagctgcgga

SEQ ID NO: 28159 - DNA, 21 bp, synthetic construct
  source 1..21: mol_type = other DNA; mol_type = other DNA
gatgatggattcagcaagtgg

SEQ ID NO: 28160 - DNA, 21 bp, synthetic construct
  source 1..21: mol_type = other DNA; mol_type = other DNA
tacgcccggggaggcgcgaac

SEQ ID NO: 28161 - DNA, 21 bp, synthetic construct
  source 1..21: mol_type = other DNA; mol_type = other DNA
tacgttagatccgacaaccgg

SEQ ID NO: 28162 - DNA, 21 bp, synthetic construct
  source 1..21: mol_type = other DNA; mol_type = other DNA
ttcttttccggaaaggtagaa

SEQ ID NO: 28163 - DNA, 21 bp, synthetic construct
  source 1..21: mol_type = other DNA; mol_type = other DNA
tacttccacggtaagatggac

SEQ ID NO: 28164 - DNA, 21 bp, synthetic construct
  source 1..21: mol_type = other DNA; mol_type = other DNA
tactttacaggcgcttttgac

SEQ ID NO: 28165 - DNA, 21 bp, synthetic construct
  source 1..21: mol_type = other DNA; mol_type = other DNA
tactttgctggcacccacgat

SEQ ID NO: 28166 - DNA, 21 bp, synthetic construct
  source 1..21: mol_type = other DNA; mol_type = other DNA
tggaccccgatgtgtaagcaa

SEQ ID NO: 28167 - DNA, 21 bp, synthetic construct
  source 1..21: mol_type = other DNA; mol_type = other DNA
tgcgccccttaccaccatgag

SEQ ID NO: 28168 - DNA, 21 bp, synthetic construct
  source 1..21: mol_type = other DNA; mol_type = other DNA
tacttcactggattcttagag

SEQ ID NO: 28169 - DNA, 21 bp, synthetic construct
  source 1..21: mol_type = other DNA; mol_type = other DNA
ttgcacagattagcctcaagc

SEQ ID NO: 28170 - DNA, 21 bp, synthetic construct
  source 1..21: mol_type = other DNA; mol_type = other DNA
tatcacgcagccgggccggat

SEQ ID NO: 28171 - DNA, 21 bp, synthetic construct
  source 1..21: mol_type = other DNA; mol_type = other DNA
tacagcaagagcaatcctaat

SEQ ID NO: 28172 - DNA, 21 bp, synthetic construct
  source 1..21: mol_type = other DNA; mol_type = other DNA
ttaagtaaactcggtgttaat

SEQ ID NO: 28173 - DNA, 21 bp, synthetic construct
  source 1..21: mol_type = other DNA; mol_type = other DNA
tctagcgaataccttgtctac

SEQ ID NO: 28174 - DNA, 21 bp, synthetic construct
  source 1..21: mol_type = other DNA; mol_type = other DNA
tggtggagcggcgtacaggag

SEQ ID NO: 28175 - DNA, 21 bp, synthetic construct
  source 1..21: mol_type = other DNA; mol_type = other DNA
tacttccacgggcgtttagag

SEQ ID NO: 28176 - DNA, 21 bp, synthetic construct
  source 1..21: mol_type = other DNA; mol_type = other DNA
agtatggagagtcgcctatgg

SEQ ID NO: 28177 - DNA, 21 bp, synthetic construct
  source 1..21: mol_type = other DNA; mol_type = other DNA
tatttctccggtgtccgagtc

SEQ ID NO: 28178 - DNA, 21 bp, synthetic construct
  source 1..21: mol_type = other DNA; mol_type = other DNA
tggcctaatggcgtagctgga

SEQ ID NO: 28179 - DNA, 21 bp, synthetic construct
  source 1..21: mol_type = other DNA; mol_type = other DNA
ttctcgagaatcggtcataat

SEQ ID NO: 28180 - DNA, 21 bp, synthetic construct
  source 1..21: mol_type = other DNA; mol_type = other DNA
tgcaagccgcccacagcaccc

SEQ ID NO: 28181 - DNA, 21 bp, synthetic construct
  source 1..21: mol_type = other DNA; mol_type = other DNA
tacgctaaaggtggatataat

SEQ ID NO: 28182 - DNA, 21 bp, synthetic construct
  source 1..21: mol_type = other DNA; mol_type = other DNA
tattttaccggtcgggaaaat

SEQ ID NO: 28183 - DNA, 21 bp, synthetic construct
  source 1..21: mol_type = other DNA; mol_type = other DNA
tcagacagcactaacggcgtc

SEQ ID NO: 28184 - DNA, 21 bp, synthetic construct
  source 1..21: mol_type = other DNA; mol_type = other DNA
cgtgatgaattcacaagctgg

SEQ ID NO: 28185 - DNA, 21 bp, synthetic construct
  source 1..21: mol_type = other DNA; mol_type = other DNA
aagttggattaccttggcata

SEQ ID NO: 28186 - DNA, 21 bp, synthetic construct
  source 1..21: mol_type = other DNA; mol_type = other DNA
cattcgagcactaatggaatt

SEQ ID NO: 28187 - DNA, 21 bp, synthetic construct
  source 1..21: mol_type = other DNA; mol_type = other DNA
ccgtacgcgcgatctccgatg

SEQ ID NO: 28188 - DNA, 21 bp, synthetic construct
  source 1..21: mol_type = other DNA; mol_type = other DNA
ggtagcgggttgtcccactgg

SEQ ID NO: 28189 - DNA, 21 bp, synthetic construct
  source 1..21: mol_type = other DNA; mol_type = other DNA
tattttagtggaacccataat

SEQ ID NO: 28190 - DNA, 21 bp, synthetic construct
  source 1..21: mol_type = other DNA; mol_type = other DNA
tttgctagaggggggccgaat

SEQ ID NO: 28191 - DNA, 21 bp, synthetic construct
  source 1..21: mol_type = other DNA; mol_type = other DNA
gtaatgagcagcgctggatgg

SEQ ID NO: 28192 - DNA, 21 bp, synthetic construct
  source 1..21: mol_type = other DNA; mol_type = other DNA
ctgagccgtgtatcagccgac

SEQ ID NO: 28193 - DNA, 21 bp, synthetic construct
  source 1..21: mol_type = other DNA; mol_type = other DNA
ctctccaagatcggcatgaat

SEQ ID NO: 28194 - DNA, 21 bp, synthetic construct
  source 1..21: mol_type = other DNA; mol_type = other DNA
tatgtgaaatatgaggataaa

SEQ ID NO: 28195 - DNA, 21 bp, synthetic construct
  source 1..21: mol_type = other DNA; mol_type = other DNA
agaaaagatgatgtatttcct

SEQ ID NO: 28196 - DNA, 21 bp, synthetic construct
  source 1..21: mol_type = other DNA; mol_type = other DNA
taccatcggttgggtgatccg

SEQ ID NO: 28197 - DNA, 21 bp, synthetic construct
  source 1..21: mol_type = other DNA; mol_type = other DNA
gatatggggagcgctaactgg

SEQ ID NO: 28198 - DNA, 21 bp, synthetic construct
  source 1..21: mol_type = other DNA; mol_type = other DNA
cgtgacggaaccagtatttgg

SEQ ID NO: 28199 - DNA, 21 bp, synthetic construct
  source 1..21: mol_type = other DNA; mol_type = other DNA
caaagtcctggatgcaaagat

SEQ ID NO: 28200 - DNA, 21 bp, synthetic construct
  source 1..21: mol_type = other DNA; mol_type = other DNA
tatttcagcagggtcatcgag

SEQ ID NO: 28201 - DNA, 21 bp, synthetic construct
  source 1..21: mol_type = other DNA; mol_type = other DNA
aaagacgactggacccccttt

SEQ ID NO: 28202 - DNA, 21 bp, synthetic construct
  source 1..21: mol_type = other DNA; mol_type = other DNA
aaagatgattggtctagttgg

SEQ ID NO: 28203 - DNA, 21 bp, synthetic construct
  source 1..21: mol_type = other DNA; mol_type = other DNA
tatgcaaggttggggtttaat

SEQ ID NO: 28204 - DNA, 21 bp, synthetic construct
  source 1..21: mol_type = other DNA; mol_type = other DNA
tattattcgggaatacatgcg

SEQ ID NO: 28205 - DNA, 21 bp, synthetic construct
  source 1..21: mol_type = other DNA; mol_type = other DNA
tattggacaggagtacatgat

SEQ ID NO: 28206 - DNA, 21 bp, synthetic construct
  source 1..21: mol_type = other DNA; mol_type = other DNA
ttgagcaaagctggggctaac

SEQ ID NO: 28207 - DNA, 21 bp, synthetic construct
  source 1..21: mol_type = other DNA; mol_type = other DNA
cgcaacgaattttgtcagccc

SEQ ID NO: 28208 - DNA, 21 bp, synthetic construct
  source 1..21: mol_type = other DNA; mol_type = other DNA
tatagtgcgcgaggcccgaat

SEQ ID NO: 28209 - DNA, 21 bp, synthetic construct
  source 1..21: mol_type = other DNA; mol_type = other DNA
tggttttctggcaaaattgag

SEQ ID NO: 28210 - DNA, 21 bp, synthetic construct
  source 1..21: mol_type = other DNA; mol_type = other DNA
tactcacgcgtttcggacaat

SEQ ID NO: 28211 - DNA, 21 bp, synthetic construct
  source 1..21: mol_type = other DNA; mol_type = other DNA
tattatactggtcgtatggag

SEQ ID NO: 28212 - DNA, 21 bp, synthetic construct
  source 1..21: mol_type = other DNA; mol_type = other DNA
aggatgagtgaccataattgg

SEQ ID NO: 28213 - DNA, 21 bp, synthetic construct
  source 1..21: mol_type = other DNA; mol_type = other DNA
tttagtagactcaaccaaaac

SEQ ID NO: 28214 - DNA, 21 bp, synthetic construct
  source 1..21: mol_type = other DNA; mol_type = other DNA
tactacacgggaaaatgtgac

SEQ ID NO: 28215 - DNA, 21 bp, synthetic construct
  source 1..21: mol_type = other DNA; mol_type = other DNA
ggggacgaatggatccacttt

SEQ ID NO: 28216 - DNA, 21 bp, synthetic construct
  source 1..21: mol_type = other DNA; mol_type = other DNA
tatagcagaatcaacgaaaat

SEQ ID NO: 28217 - DNA, 21 bp, synthetic construct
  source 1..21: mol_type = other DNA; mol_type = other DNA
ttttggagtggagtaaaagat

SEQ ID NO: 28218 - DNA, 21 bp, synthetic construct
  source 1..21: mol_type = other DNA; mol_type = other DNA
cgagacggtgcaagtacttgg

SEQ ID NO: 28219 - DNA, 21 bp, synthetic construct
  source 1..21: mol_type = other DNA; mol_type = other DNA
tatagcaggactggggtgaat

SEQ ID NO: 28220 - DNA, 21 bp, synthetic construct
  source 1..21: mol_type = other DNA; mol_type = other DNA
catataagtactaacggcgtg

SEQ ID NO: 28221 - DNA, 21 bp, synthetic construct
  source 1..21: mol_type = other DNA; mol_type = other DNA
tattccaaaggaaatgtaaat

SEQ ID NO: 28222 - DNA, 21 bp, synthetic construct
  source 1..21: mol_type = other DNA; mol_type = other DNA
agtgatagcacgaacggaatc

SEQ ID NO: 28223 - DNA, 21 bp, synthetic construct
  source 1..21: mol_type = other DNA; mol_type = other DNA
tactttacaggaaagcccgag

SEQ ID NO: 28224 - DNA, 21 bp, synthetic construct
  source 1..21: mol_type = other DNA; mol_type = other DNA
cacacgtcaagcaatggagtg

SEQ ID NO: 28225 - DNA, 21 bp, synthetic construct
  source 1..21: mol_type = other DNA; mol_type = other DNA
gattacgcaaagtctttactg

SEQ ID NO: 28226 - DNA, 21 bp, synthetic construct
  source 1..21: mol_type = other DNA; mol_type = other DNA
tacttcagcgggcagctagcg

SEQ ID NO: 28227 - DNA, 21 bp, synthetic construct
  source 1..21: mol_type = other DNA; mol_type = other DNA
tatgcacggactggatttaac

SEQ ID NO: 28228 - DNA, 21 bp, synthetic construct
  source 1..21: mol_type = other DNA; mol_type = other DNA
tacgcgcgccttaatccgaat

SEQ ID NO: 28229 - DNA, 21 bp, synthetic construct
  source 1..21: mol_type = other DNA; mol_type = other DNA
tattattcaggaataaccgcg

SEQ ID NO: 28230 - DNA, 21 bp, synthetic construct
  source 1..21: mol_type = other DNA; mol_type = other DNA
tacaccagattatccgacaac

SEQ ID NO: 28231 - DNA, 21 bp, synthetic construct
  source 1..21: mol_type = other DNA; mol_type = other DNA
tatgttcgttcacagatgttg

SEQ ID NO: 28232 - DNA, 21 bp, synthetic construct
  source 1..21: mol_type = other DNA; mol_type = other DNA
tactcgaggacaggcatgaat

SEQ ID NO: 28233 - DNA, 21 bp, synthetic construct
  source 1..21: mol_type = other DNA; mol_type = other DNA
tatagtaggatacaattgaac

SEQ ID NO: 28234 - DNA, 21 bp, synthetic construct
  source 1..21: mol_type = other DNA; mol_type = other DNA
tattttaccggcagggaggac

SEQ ID NO: 28235 - DNA, 21 bp, synthetic construct
  source 1..21: mol_type = other DNA; mol_type = other DNA
tatgctaggacaggtaataat

SEQ ID NO: 28236 - DNA, 21 bp, synthetic construct
  source 1..21: mol_type = other DNA; mol_type = other DNA
tactacacagggaggatggaa

SEQ ID NO: 28237 - DNA, 21 bp, synthetic construct
  source 1..21: mol_type = other DNA; mol_type = other DNA
tattcccgcgtgggagaaaat

SEQ ID NO: 28238 - DNA, 21 bp, synthetic construct
  source 1..21: mol_type = other DNA; mol_type = other DNA
tattcgaaatcgaatattaac

SEQ ID NO: 28239 - DNA, 21 bp, synthetic construct
  source 1..21: mol_type = other DNA; mol_type = other DNA
tacttctcgggacatcacgaa

SEQ ID NO: 28240 - DNA, 21 bp, synthetic construct
  source 1..21: mol_type = other DNA; mol_type = other DNA
tgcgggagagcaggtcgtgac

SEQ ID NO: 28241 - DNA, 21 bp, synthetic construct
  source 1..21: mol_type = other DNA; mol_type = other DNA
gtcatggaagctcggggctgg

SEQ ID NO: 28242 - DNA, 21 bp, synthetic construct
  source 1..21: mol_type = other DNA; mol_type = other DNA
tactggcagggcataaaagac

SEQ ID NO: 28243 - DNA, 21 bp, synthetic construct
  source 1..21: mol_type = other DNA; mol_type = other DNA
ttacatcgactccacacggat

SEQ ID NO: 28244 - DNA, 21 bp, synthetic construct
  source 1..21: mol_type = other DNA; mol_type = other DNA
taccaccggttgtcggagaac

SEQ ID NO: 28245 - DNA, 21 bp, synthetic construct
  source 1..21: mol_type = other DNA; mol_type = other DNA
gaccttcgcgaccggatttgg

SEQ ID NO: 28246 - DNA, 21 bp, synthetic construct
  source 1..21: mol_type = other DNA; mol_type = other DNA
tattttagcggggtacaggtt

SEQ ID NO: 28247 - DNA, 21 bp, synthetic construct
  source 1..21: mol_type = other DNA; mol_type = other DNA
tacagcaaaagaggcgataat

SEQ ID NO: 28248 - DNA, 21 bp, synthetic construct
  source 1..21: mol_type = other DNA; mol_type = other DNA
ctctcaagaaccgcatacgac

SEQ ID NO: 28249 - DNA, 21 bp, synthetic construct
  source 1..21: mol_type = other DNA; mol_type = other DNA
tatagcaaaagcaatcacaat

SEQ ID NO: 28250 - DNA, 21 bp, synthetic construct
  source 1..21: mol_type = other DNA
tatagtcggaggtcagacaat

SEQ ID NO: 28251 - DNA, 21 bp, synthetic construct
  source 1..21: mol_type = other DNA; mol_type = other DNA
ataatggaagatagggtttgg

SEQ ID NO: 28252 - DNA, 21 bp, synthetic construct
  source 1..21: mol_type = other DNA; mol_type = other DNA
ctctgggatggcacgaatccc

SEQ ID NO: 28253 - DNA, 21 bp, synthetic construct
  source 1..21: mol_type = other DNA; mol_type = other DNA
tacactaaattggactacaac

SEQ ID NO: 28254 - DNA, 21 bp, synthetic construct
  source 1..21: mol_type = other DNA; mol_type = other DNA
tgcgtgaggccccaaacacct

SEQ ID NO: 28255 - DNA, 21 bp, synthetic construct
  source 1..21: mol_type = other DNA; mol_type = other DNA
tgtatgtcgggtccgaggccg

SEQ ID NO: 28256 - DNA, 21 bp, synthetic construct
  source 1..21: mol_type = other DNA; mol_type = other DNA
ggagacggccagtcaaggtgg

SEQ ID NO: 28257 - DNA, 21 bp, synthetic construct
  source 1..21: mol_type = other DNA; mol_type = other DNA
tattcaaagtcaaacgcgaac

SEQ ID NO: 28258 - DNA, 21 bp, synthetic construct
  source 1..21: mol_type = other DNA; mol_type = other DNA
gtgctgtcatcgcaaggatgg

SEQ ID NO: 28259 - DNA, 21 bp, synthetic construct
  source 1..21: mol_type = other DNA; mol_type = other DNA
ttcagcagactaggactgaac

SEQ ID NO: 28260 - DNA, 21 bp, synthetic construct
  source 1..21: mol_type = other DNA; mol_type = other DNA
tactttaccggtacgtatagt

SEQ ID NO: 28261 - DNA, 21 bp, synthetic construct
  source 1..21: mol_type = other DNA; mol_type = other DNA
ggatgtaatcgctcaactgca

SEQ ID NO: 28262 - DNA, 21 bp, synthetic construct
  source 1..21: mol_type = other DNA; mol_type = other DNA
tatgctcgatccggtagtaat

SEQ ID NO: 28263 - DNA, 21 bp, synthetic construct
  source 1..21: mol_type = other DNA; mol_type = other DNA
agagatgatttcaccggttac

SEQ ID NO: 28264 - DNA, 21 bp, synthetic construct
  source 1..21: mol_type = other DNA; mol_type = other DNA
tatgctcgtaacgggattaac

SEQ ID NO: 28265 - DNA, 21 bp, synthetic construct
  source 1..21: mol_type = other DNA; mol_type = other DNA
tatcatgcaagggggctgaat

SEQ ID NO: 28266 - DNA, 21 bp, synthetic construct
  source 1..21: mol_type = other DNA; mol_type = other DNA
tattttgcaggtgtcaaagac

SEQ ID NO: 28267 - DNA, 21 bp, synthetic construct
  source 1..21: mol_type = other DNA; mol_type = other DNA
tattggactggaaaagtcgac

SEQ ID NO: 28268 - DNA, 21 bp, synthetic construct
  source 1..21: mol_type = other DNA; mol_type = other DNA
ttatgcaggccgtgctctaat

SEQ ID NO: 28269 - DNA, 21 bp, synthetic construct
  source 1..21: mol_type = other DNA; mol_type = other DNA
tatgcaaggataggagccaac

SEQ ID NO: 28270 - DNA, 21 bp, synthetic construct
  source 1..21: mol_type = other DNA; mol_type = other DNA
ggaagcatgacttccacttgg

SEQ ID NO: 28271 - DNA, 21 bp, synthetic construct
  source 1..21: mol_type = other DNA; mol_type = other DNA
tactataccggccatgtgaac

SEQ ID NO: 28272 - DNA, 21 bp, synthetic construct
  source 1..21: mol_type = other DNA; mol_type = other DNA
ccgtggagcacgaatggggtg

SEQ ID NO: 28273 - DNA, 21 bp, synthetic construct
  source 1..21: mol_type = other DNA; mol_type = other DNA
tactttgccggtacaattaat

SEQ ID NO: 28274 - DNA, 21 bp, synthetic construct
  source 1..21: mol_type = other DNA; mol_type = other DNA
catttttccactaacggggtt

SEQ ID NO: 28275 - DNA, 21 bp, synthetic construct
  source 1..21: mol_type = other DNA; mol_type = other DNA
tattccaggctgtccgccgac

SEQ ID NO: 28276 - DNA, 21 bp, synthetic construct
  source 1..21: mol_type = other DNA; mol_type = other DNA
tattattcgggcgttaagtcg

SEQ ID NO: 28277 - DNA, 21 bp, synthetic construct
  source 1..21: mol_type = other DNA; mol_type = other DNA
cgggacgattatagtacgttc

SEQ ID NO: 28278 - DNA, 21 bp, synthetic construct
  source 1..21: mol_type = other DNA; mol_type = other DNA
acattcagtactaacggagta

SEQ ID NO: 28279 - DNA, 21 bp, synthetic construct
  source 1..21: mol_type = other DNA; mol_type = other DNA
agggatggcaactccgcttgg

SEQ ID NO: 28280 - DNA, 21 bp, synthetic construct
  source 1..21: mol_type = other DNA; mol_type = other DNA
ttggccagatctgcgcccgat

SEQ ID NO: 28281 - DNA, 21 bp, synthetic construct
  source 1..21: mol_type = other DNA; mol_type = other DNA
tggctcaaaagtcagccgggc

SEQ ID NO: 28282 - DNA, 21 bp, synthetic construct
  source 1..21: mol_type = other DNA; mol_type = other DNA
tatgttaaaagtgacagggtg

SEQ ID NO: 28283 - DNA, 21 bp, synthetic construct
  source 1..21: mol_type = other DNA; mol_type = other DNA
tacttcaccggtattcctgct

SEQ ID NO: 28284 - DNA, 21 bp, synthetic construct
  source 1..21: mol_type = other DNA; mol_type = other DNA
taccatgctagagcgccaaat

SEQ ID NO: 28285 - DNA, 21 bp, synthetic construct
  source 1..21: mol_type = other DNA; mol_type = other DNA
tactggcacggcgtcgtcgat

SEQ ID NO: 28286 - DNA, 21 bp, synthetic construct
  source 1..21: mol_type = other DNA; mol_type = other DNA
tactttacgggagttcacccg

SEQ ID NO: 28287 - DNA, 21 bp, synthetic construct
  source 1..21: mol_type = other DNA; mol_type = other DNA
aacaccagtacaaatggtatt

SEQ ID NO: 28288 - DNA, 21 bp, synthetic construct
  source 1..21: mol_type = other DNA; mol_type = other DNA
cagaacgagttcacaatgtac

SEQ ID NO: 28289 - DNA, 21 bp, synthetic construct
  source 1..21: mol_type = other DNA; mol_type = other DNA
tattttagtggcataccgatg

SEQ ID NO: 28290 - DNA, 21 bp, synthetic construct
  source 1..21: mol_type = other DNA; mol_type = other DNA
atcatggcagacagggcatgg

SEQ ID NO: 28291 - DNA, 21 bp, synthetic construct
  source 1..21: mol_type = other DNA; mol_type = other DNA
tactcaagggccgggagcaat

SEQ ID NO: 28292 - DNA, 21 bp, synthetic construct
  source 1..21: mol_type = other DNA; mol_type = other DNA
cagcatccaatatgtaagcct

SEQ ID NO: 28293 - DNA, 21 bp, synthetic construct
  source 1..21: mol_type = other DNA; mol_type = other DNA
tgcacgccaaagactggacac

SEQ ID NO: 28294 - DNA, 21 bp, synthetic construct
  source 1..21: mol_type = other DNA; mol_type = other DNA
tactttagcgggcagttggcg

SEQ ID NO: 28295 - DNA, 21 bp, synthetic construct
  source 1..21: mol_type = other DNA; mol_type = other DNA
atgtgggacggtacgccaagt

SEQ ID NO: 28296 - DNA, 21 bp, synthetic construct
  source 1..21: mol_type = other DNA; mol_type = other DNA
tacagtagggtcaattttaat

SEQ ID NO: 28297 - DNA, 21 bp, synthetic construct
  source 1..21: mol_type = other DNA; mol_type = other DNA
tactcgagggtcggctcaggc

SEQ ID NO: 28298 - DNA, 21 bp, synthetic construct
  source 1..21: mol_type = other DNA; mol_type = other DNA
tatgcccgcgccggccctgat

SEQ ID NO: 28299 - DNA, 21 bp, synthetic construct
  source 1..21: mol_type = other DNA; mol_type = other DNA
ttctcgcgtacagggctaaac

SEQ ID NO: 28300 - DNA, 21 bp, synthetic construct
  source 1..21: mol_type = other DNA; mol_type = other DNA
cgcgacgaatttatgcactat

SEQ ID NO: 28301 - DNA, 21 bp, synthetic construct
  source 1..21: mol_type = other DNA; mol_type = other DNA
ctgatgagcgacagagaatgg

SEQ ID NO: 28302 - DNA, 21 bp, synthetic construct
  source 1..21: mol_type = other DNA; mol_type = other DNA
tacagtcgcgcaggcgataat

SEQ ID NO: 28303 - DNA, 21 bp, synthetic construct
  source 1..21: mol_type = other DNA; mol_type = other DNA
tattataccggagtcaagatg

SEQ ID NO: 28304 - DNA, 21 bp, synthetic construct
  source 1..21: mol_type = other DNA; mol_type = other DNA
ttctcacgcctaaatgtaaac

SEQ ID NO: 28305 - DNA, 21 bp, synthetic construct
  source 1..21: mol_type = other DNA; mol_type = other DNA
aggagcgagttcacgggctac

SEQ ID NO: 28306 - DNA, 21 bp, synthetic construct
  source 1..21: mol_type = other DNA; mol_type = other DNA
ttcttttcaggcatattggaa

SEQ ID NO: 28307 - DNA, 21 bp, synthetic construct
  source 1..21: mol_type = other DNA; mol_type = other DNA
cggtcagacacgacttatcct

SEQ ID NO: 28308 - DNA, 21 bp, synthetic construct
  source 1..21: mol_type = other DNA; mol_type = other DNA
ttacacagattgggggaaggt

SEQ ID NO: 28309 - DNA, 21 bp, synthetic construct
  source 1..21: mol_type = other DNA; mol_type = other DNA
gtgtccacacactgtatagcc

SEQ ID NO: 28310 - DNA, 21 bp, synthetic construct
  source 1..21: mol_type = other DNA; mol_type = other DNA
tattggcatggagtaccagag

SEQ ID NO: 28311 - DNA, 21 bp, synthetic construct
  source 1..21: mol_type = other DNA; mol_type = other DNA
aacatggagtctagagactgg

SEQ ID NO: 28312 - DNA, 21 bp, synthetic construct
  source 1..21: mol_type = other DNA; mol_type = other DNA
aggggagaccgcgtataccct

SEQ ID NO: 28313 - DNA, 21 bp, synthetic construct
  source 1..21: mol_type = other DNA; mol_type = other DNA
tattggagtggggttcgcgaa

SEQ ID NO: 28314 - DNA, 21 bp, synthetic construct
  source 1..21: mol_type = other DNA; mol_type = other DNA
tacagcaggcctgggccaaat

SEQ ID NO: 28315 - DNA, 21 bp, synthetic construct
  source 1..21: mol_type = other DNA; mol_type = other DNA
ggctctatgacaagtacgtgg

SEQ ID NO: 28316 - DNA, 21 bp, synthetic construct
  source 1..21: mol_type = other DNA; mol_type = other DNA
ataatctctacgaacggcatc

SEQ ID NO: 28317 - DNA, 21 bp, synthetic construct
  source 1..21: mol_type = other DNA; mol_type = other DNA
taccataagaacgggtacaat

SEQ ID NO: 28318 - DNA, 21 bp, synthetic construct
  source 1..21: mol_type = other DNA; mol_type = other DNA
ttttcgagattaaaccctaat

SEQ ID NO: 28319 - DNA, 21 bp, synthetic construct
  source 1..21: mol_type = other DNA; mol_type = other DNA
tgcatgtcgacgtcccgctcg

SEQ ID NO: 28320 - DNA, 21 bp, synthetic construct
  source 1..21: mol_type = other DNA; mol_type = other DNA
tacgtcaagtcacagatgatt

SEQ ID NO: 28321 - DNA, 21 bp, synthetic construct
  source 1..21: mol_type = other DNA; mol_type = other DNA
agaactagcacaaatggcgtt

SEQ ID NO: 28322 - DNA, 21 bp, synthetic construct
  source 1..21: mol_type = other DNA; mol_type = other DNA
tacttctcggggcgtatagat

SEQ ID NO: 28323 - DNA, 21 bp, synthetic construct
  source 1..21: mol_type = other DNA; mol_type = other DNA
caacgcccatgccagccagga

SEQ ID NO: 28324 - DNA, 21 bp, synthetic construct
  source 1..21: mol_type = other DNA; mol_type = other DNA
tatgaaccggggtgcggcgaa

SEQ ID NO: 28325 - DNA, 21 bp, synthetic construct
  source 1..21: mol_type = other DNA; mol_type = other DNA
tatgccaaacagaactataat

SEQ ID NO: 28326 - DNA, 21 bp, synthetic construct
  source 1..21: mol_type = other DNA; mol_type = other DNA
tgcaagccagatagtttccgc

SEQ ID NO: 28327 - DNA, 21 bp, synthetic construct
  source 1..21: mol_type = other DNA; mol_type = other DNA
tacttttccggaacacgagcg

SEQ ID NO: 28328 - DNA, 21 bp, synthetic construct
  source 1..21: mol_type = other DNA; mol_type = other DNA
cggatggaagaacgttcatgg

SEQ ID NO: 28329 - DNA, 21 bp, synthetic construct
  source 1..21: mol_type = other DNA; mol_type = other DNA
tacagcagggcaggagacgac

SEQ ID NO: 28330 - DNA, 21 bp, synthetic construct
  source 1..21: mol_type = other DNA; mol_type = other DNA
ttctcccggataggacagaat

SEQ ID NO: 28331 - DNA, 21 bp, synthetic construct
  source 1..21: mol_type = other DNA; mol_type = other DNA
aaggatgagtttacgatatac

SEQ ID NO: 28332 - DNA, 21 bp, synthetic construct
  source 1..21: mol_type = other DNA; mol_type = other DNA
ttcgccaaaagtggttgtggg

SEQ ID NO: 28333 - DNA, 21 bp, synthetic construct
  source 1..21: mol_type = other DNA; mol_type = other DNA
cgtaaatcagatgtttatcca

SEQ ID NO: 28334 - DNA, 21 bp, synthetic construct
  source 1..21: mol_type = other DNA; mol_type = other DNA
tactattccggaatccaggct

SEQ ID NO: 28335 - DNA, 21 bp, synthetic construct
  source 1..21: mol_type = other DNA; mol_type = other DNA
ttctcgagagtcgggcataac

SEQ ID NO: 28336 - DNA, 21 bp, synthetic construct
  source 1..21: mol_type = other DNA; mol_type = other DNA
tatcacagattgtccgcaaat

SEQ ID NO: 28337 - DNA, 21 bp, synthetic construct
  source 1..21: mol_type = other DNA; mol_type = other DNA
tattcgagactaaataaagac

SEQ ID NO: 28338 - DNA, 21 bp, synthetic construct
  source 1..21: mol_type = other DNA; mol_type = other DNA
tgtaacatacccatgactgca

SEQ ID NO: 28339 - DNA, 21 bp, synthetic construct
  source 1..21: mol_type = other DNA; mol_type = other DNA
agagaggaagcggtgagttgg

SEQ ID NO: 28340 - DNA, 21 bp, synthetic construct
  source 1..21: mol_type = other DNA; mol_type = other DNA
tactttacgggagtcttgcca

SEQ ID NO: 28341 - DNA, 21 bp, synthetic construct
  source 1..21: mol_type = other DNA; mol_type = other DNA
tatagtaaactagattggaat

SEQ ID NO: 28342 - DNA, 21 bp, synthetic construct
  source 1..21: mol_type = other DNA; mol_type = other DNA
tatagtagactgaatatgaat

SEQ ID NO: 28343 - DNA, 21 bp, synthetic construct
  source 1..21: mol_type = other DNA; mol_type = other DNA
ccctacgcaaaatctgagttg

SEQ ID NO: 28344 - DNA, 21 bp, synthetic construct
  source 1..21: mol_type = other DNA; mol_type = other DNA
tactgggacggtacgccagcg

SEQ ID NO: 28345 - DNA, 21 bp, synthetic construct
  source 1..21: mol_type = other DNA; mol_type = other DNA
gtgatggaagatcgtatatgg

SEQ ID NO: 28346 - DNA, 21 bp, synthetic construct
  source 1..21: mol_type = other DNA; mol_type = other DNA
ttagcacggatgggttataac

SEQ ID NO: 28347 - DNA, 21 bp, synthetic construct
  source 1..21: mol_type = other DNA; mol_type = other DNA
attctttcacatgctacttgg

SEQ ID NO: 28348 - DNA, 21 bp, synthetic construct
  source 1..21: mol_type = other DNA; mol_type = other DNA
attgtcagtactaatggagtt

SEQ ID NO: 28349 - DNA, 21 bp, synthetic construct
  source 1..21: mol_type = other DNA; mol_type = other DNA
cttcacagattatcgatgggt

SEQ ID NO: 28350 - DNA, 21 bp, synthetic construct
  source 1..21: mol_type = other DNA; mol_type = other DNA
tattggagtggcgtgactgac

SEQ ID NO: 28351 - DNA, 21 bp, synthetic construct
  source 1..21: mol_type = other DNA; mol_type = other DNA
tttagccgtttgaatgtcaat

SEQ ID NO: 28352 - DNA, 21 bp, synthetic construct
  source 1..21: mol_type = other DNA; mol_type = other DNA
tactcaaggttaaatgagttt

SEQ ID NO: 28353 - DNA, 21 bp, synthetic construct
  source 1..21: mol_type = other DNA; mol_type = other DNA
cggcaaagcaccaacggtata

SEQ ID NO: 28354 - DNA, 21 bp, synthetic construct
  source 1..21: mol_type = other DNA; mol_type = other DNA
tgcaagggcgagagtgctatc

SEQ ID NO: 28355 - DNA, 21 bp, synthetic construct
  source 1..21: mol_type = other DNA; mol_type = other DNA
tacttccacggacgcgtagac

SEQ ID NO: 28356 - DNA, 21 bp, synthetic construct
  source 1..21: mol_type = other DNA; mol_type = other DNA
tattggtccggaaaggtagcg

SEQ ID NO: 28357 - DNA, 21 bp, synthetic construct
  source 1..21: mol_type = other DNA; mol_type = other DNA
tactggacaggtacgattgac

SEQ ID NO: 28358 - DNA, 21 bp, synthetic construct
  source 1..21: mol_type = other DNA; mol_type = other DNA
gaccttcgagaccgtaaatgg

SEQ ID NO: 28359 - DNA, 21 bp, synthetic construct
  source 1..21: mol_type = other DNA; mol_type = other DNA
tgcaaaccggactgttgccca

SEQ ID NO: 28360 - DNA, 21 bp, synthetic construct
  source 1..21: mol_type = other DNA; mol_type = other DNA
tattttgcaggcaaacaagat

SEQ ID NO: 28361 - DNA, 21 bp, synthetic construct
  source 1..21: mol_type = other DNA; mol_type = other DNA
tattatagtggcataatttcg

SEQ ID NO: 28362 - DNA, 21 bp, synthetic construct
  source 1..21: mol_type = other DNA; mol_type = other DNA
tattccagagtcgggcagaac

SEQ ID NO: 28363 - DNA, 21 bp, synthetic construct
  source 1..21: mol_type = other DNA; mol_type = other DNA
cgctccttagatagctatcca

SEQ ID NO: 28364 - DNA, 21 bp, synthetic construct
  source 1..21: mol_type = other DNA; mol_type = other DNA
agggacgaatttcgaacatat

SEQ ID NO: 28365 - DNA, 21 bp, synthetic construct
  source 1..21: mol_type = other DNA; mol_type = other DNA
cttcatagagccacctatgat

SEQ ID NO: 28366 - DNA, 21 bp, synthetic construct
  source 1..21: mol_type = other DNA; mol_type = other DNA
tattttacaggacgtcaagac

SEQ ID NO: 28367 - DNA, 21 bp, synthetic construct
  source 1..21: mol_type = other DNA; mol_type = other DNA
tattataccggtatcgtaagc

SEQ ID NO: 28368 - DNA, 21 bp, synthetic construct
  source 1..21: mol_type = other DNA; mol_type = other DNA
tactccagattaggggacaat

SEQ ID NO: 28369 - DNA, 21 bp, synthetic construct
  source 1..21: mol_type = other DNA; mol_type = other DNA
tatcatcgcctttccgaatca

SEQ ID NO: 28370 - DNA, 21 bp, synthetic construct
  source 1..21: mol_type = other DNA; mol_type = other DNA
aggggggagttctgcggtgga

SEQ ID NO: 28371 - DNA, 21 bp, synthetic construct
  source 1..21: mol_type = other DNA; mol_type = other DNA
tatagcaaatcaaacgataat

SEQ ID NO: 28372 - DNA, 21 bp, synthetic construct
  source 1..21: mol_type = other DNA; mol_type = other DNA
tacagtgcgctgcaaaggaac

SEQ ID NO: 28373 - DNA, 21 bp, synthetic construct
  source 1..21: mol_type = other DNA; mol_type = other DNA
tatgttaggaatgatccaaac

SEQ ID NO: 28374 - DNA, 21 bp, synthetic construct
  source 1..21: mol_type = other DNA; mol_type = other DNA
tacgctagaacaaacatcaac

SEQ ID NO: 28375 - DNA, 21 bp, synthetic construct
  source 1..21: mol_type = other DNA; mol_type = other DNA
tttagccgtgttggacacaat

SEQ ID NO: 28376 - DNA, 21 bp, synthetic construct
  source 1..21: mol_type = other DNA; mol_type = other DNA
gttggcgaagcgaggtcgtgg

SEQ ID NO: 28377 - DNA, 21 bp, synthetic construct
  source 1..21: mol_type = other DNA; mol_type = other DNA
tattgggcgggtgttagagag

SEQ ID NO: 28378 - DNA, 21 bp, synthetic construct
  source 1..21: mol_type = other DNA; mol_type = other DNA
ttagccagaaccggctgtgat

SEQ ID NO: 28379 - DNA, 21 bp, synthetic construct
  source 1..21: mol_type = other DNA; mol_type = other DNA
tggccaaatggggtaaatggc

SEQ ID NO: 28380 - DNA, 21 bp, synthetic construct
  source 1..21: mol_type = other DNA; mol_type = other DNA
tatttttcaggcgtaccttcc

SEQ ID NO: 28381 - DNA, 21 bp, synthetic construct
  source 1..21: mol_type = other DNA; mol_type = other DNA
gtaagcgaattcagaacgtac

SEQ ID NO: 28382 - DNA, 21 bp, synthetic construct
  source 1..21: mol_type = other DNA; mol_type = other DNA
tgggagcctatgtgtaaggcc

SEQ ID NO: 28383 - DNA, 21 bp, synthetic construct
  source 1..21: mol_type = other DNA; mol_type = other DNA
ctgtctaaactcagttgcaat

SEQ ID NO: 28384 - DNA, 21 bp, synthetic construct
  source 1..21: mol_type = other DNA; mol_type = other DNA
tattcaaggcttaacgataac

SEQ ID NO: 28385 - DNA, 21 bp, synthetic construct
  source 1..21: mol_type = other DNA; mol_type = other DNA
agagatgacttctctgtatat

SEQ ID NO: 28386 - DNA, 21 bp, synthetic construct
  source 1..21: mol_type = other DNA; mol_type = other DNA
tacgttaaaagcaaccacggc

SEQ ID NO: 28387 - DNA, 21 bp, synthetic construct
  source 1..21: mol_type = other DNA; mol_type = other DNA
tgtaaacccccatctccgatc

SEQ ID NO: 28388 - DNA, 21 bp, synthetic construct
  source 1..21: mol_type = other DNA; mol_type = other DNA
aactatgcaagccattcctgg

SEQ ID NO: 28389 - DNA, 21 bp, synthetic construct
  source 1..21: mol_type = other DNA; mol_type = other DNA
tactcacgtgtgcaaccgaac

SEQ ID NO: 28390 - DNA, 21 bp, synthetic construct
  source 1..21: mol_type = other DNA; mol_type = other DNA
cttcacaggttacatacagac

SEQ ID NO: 28391 - DNA, 21 bp, synthetic construct
  source 1..21: mol_type = other DNA; mol_type = other DNA
cgtgaggactcgtccagatgg

SEQ ID NO: 28392 - DNA, 21 bp, synthetic construct
  source 1..21: mol_type = other DNA; mol_type = other DNA
gcctgtaagccccaaatggga

SEQ ID NO: 28393 - DNA, 21 bp, synthetic construct
  source 1..21: mol_type = other DNA; mol_type = other DNA
tattttgctgggcgaattgat

SEQ ID NO: 28394 - DNA, 21 bp, synthetic construct
  source 1..21: mol_type = other DNA; mol_type = other DNA
ggaaatggtactaaatgcggt

SEQ ID NO: 28395 - DNA, 21 bp, synthetic construct
  source 1..21: mol_type = other DNA; mol_type = other DNA
tacagccgcattaacataaat

SEQ ID NO: 28396 - DNA, 21 bp, synthetic construct
  source 1..21: mol_type = other DNA; mol_type = other DNA
tcgggctcaactaacggcatt

SEQ ID NO: 28397 - DNA, 21 bp, synthetic construct
  source 1..21: mol_type = other DNA; mol_type = other DNA
gggggcgatggatcgtcatgg

SEQ ID NO: 28398 - DNA, 21 bp, synthetic construct
  source 1..21: mol_type = other DNA; mol_type = other DNA
tgtttaggtaagtgcaaaccc

SEQ ID NO: 28399 - DNA, 21 bp, synthetic construct
  source 1..21: mol_type = other DNA; mol_type = other DNA
ctttgtcgggcttgctcggaa

SEQ ID NO: 28400 - DNA, 21 bp, synthetic construct
  source 1..21: mol_type = other DNA; mol_type = other DNA
tacgcacgatccggtcttaat

SEQ ID NO: 28401 - DNA, 21 bp, synthetic construct
  source 1..21: mol_type = other DNA; mol_type = other DNA
tacttctcaggcacaattcaa

SEQ ID NO: 28402 - DNA, 21 bp, synthetic construct
  source 1..21: mol_type = other DNA; mol_type = other DNA
cgggatgagttcgagcactgg

SEQ ID NO: 28403 - DNA, 21 bp, synthetic construct
  source 1..21: mol_type = other DNA; mol_type = other DNA
gggatcgctaacactatgtgg

SEQ ID NO: 28404 - DNA, 21 bp, synthetic construct
  source 1..21: mol_type = other DNA; mol_type = other DNA
aggggagatagagtgttcccc

SEQ ID NO: 28405 - DNA, 21 bp, synthetic construct
  source 1..21: mol_type = other DNA; mol_type = other DNA
tttttcacaggtcaaagggac

SEQ ID NO: 28406 - DNA, 21 bp, synthetic construct
  source 1..21: mol_type = other DNA; mol_type = other DNA
tactcgcgacttggtcaaaac

SEQ ID NO: 28407 - DNA, 21 bp, synthetic construct
  source 1..21: mol_type = other DNA; mol_type = other DNA
tatttttcgggccgtacagat

SEQ ID NO: 28408 - DNA, 21 bp, synthetic construct
  source 1..21: mol_type = other DNA; mol_type = other DNA
tatcataagagccagcaatac

SEQ ID NO: 28409 - DNA, 21 bp, synthetic construct
  source 1..21: mol_type = other DNA; mol_type = other DNA
ttggcacggtctggttatgac

SEQ ID NO: 28410 - DNA, 21 bp, synthetic construct
  source 1..21: mol_type = other DNA; mol_type = other DNA
ttagcgaagatgggtcccaat

SEQ ID NO: 28411 - DNA, 21 bp, synthetic construct
  source 1..21: mol_type = other DNA; mol_type = other DNA
atccctggacataaatgcgcc

SEQ ID NO: 28412 - DNA, 21 bp, synthetic construct
  source 1..21: mol_type = other DNA; mol_type = other DNA
tggtctagaattgggccaaac

SEQ ID NO: 28413 - DNA, 21 bp, synthetic construct
  source 1..21: mol_type = other DNA; mol_type = other DNA
tgggacggaagctgcaaagcc

SEQ ID NO: 28414 - DNA, 21 bp, synthetic construct
  source 1..21: mol_type = other DNA; mol_type = other DNA
tatgccaaatatggccctaat

SEQ ID NO: 28415 - DNA, 21 bp, synthetic construct
  source 1..21: mol_type = other DNA; mol_type = other DNA
cgtgaatctgacaacggcatt

SEQ ID NO: 28416 - DNA, 21 bp, synthetic construct
  source 1..21: mol_type = other DNA; mol_type = other DNA
tactcacgcgtaggtattaac

SEQ ID NO: 28417 - DNA, 21 bp, synthetic construct
  source 1..21: mol_type = other DNA; mol_type = other DNA
tactacacgggcagggtagac

(The sequence listing continues in the following parts.)
